(19) United States
(12) Patent Application Publication
(10) Pub. No.: US 2018/0127501 A1
(43) Pub. Date: May 10, 2018

(54) BISPECIFIC IMMUNOMODULATORY ANTIBODIES THAT BIND COSTIMULATORY AND CHECKPOINT RECEPTORS

(71) Applicant: Xencor, Inc., Monrovia, CA (US)

(72) Inventors: Matthew Bernett, Monrovia, CA (US); Gregory Moore, Azusa, CA (US); John Desjarlais, Pasadena, CA (US); Michael Hedvat, Encino, CA (US); Christine Bonzon, Los Angeles, CA (US)

(21) Appl. No.: 15/691,665

(22) Filed: Aug. 30, 2017

Related U.S. Application Data
(63) Continuation-in-part of application No. 15/623,314, filed on Jun. 14, 2017.
(60) Provisional application No. 62/381,239, filed on Aug. 30, 2016.
(60) Provisional application No. 62/456,033, filed on Feb. 7, 2017.
(60) Provisional application No. 62/479,723, filed on Mar. 31, 2017.

(51) Int. Cl. C07K 16/28

(52) U.S. Cl. CPC C07K 16/2818; C07K 16/2896; C07K 16/2803; A61K 2039/505; C07K 2317/31; C07K 2317/622; C07K 16/28

(57) ABSTRACT

The present invention is directed to bispecific, heterodimeric immunomodulatory antibodies.

### CROSS REFERENCE TO RELATED APPLICATIONS

[0001] This application claims priority to U.S. Provisional Patent Application No. 62/381,239, filed Aug. 30, 2016, U.S. Provisional Patent Application No. 62/456,033, filed Feb. 7, 2017, U.S. Provisional Patent Application No. 62/479,723, filed Mar. 31, 2017 and U.S. patent application Ser. No. 15/623,314, filed Jun. 14, 2017, the contents of which are expressly fully incorporated by reference in their entirety.

### SEQUENCE LISTING

[0002] The instant application contains a Sequence Listing which has been submitted electronically in ASCII format and is hereby incorporated by reference in its entirety. Said ASCII copy, created on Aug. 29, 2017, is named 067461_5198-WO_SL.txt and is 26,061,282 kilobytes in size.

### BACKGROUND OF THE INVENTION

[0003] Tumor-reactive T cells lose their cytotoxic ability over time due to up-regulation of inhibitory immune checkpoints such as PD-1 and CTLA-4. Two parallel therapeutic strategies are being pursued for de-repressing tumor-reactive T cells so that they can continue to kill tumor cells.

[0004] The first approach is immune immunomodulatory blockade by treating with antagonistic monoclonal antibodies that bind to either the immunomodulatory itself (PD-1, CTLA-4, etc.) or its ligand (PD-L1, PD-L2, CD80, CD86, etc.), thus removing the inhibitory signals holding back tumor-reactive T cells from tumor cell killing. Immunomodulatory receptors such as CTLA-1, PD-1 (programmed cell death 1), TIM-3 (T cell immunoglobulin and mucin domain 3), LAG-3 (lymphocyte-activation gene 3), TIGIT (T cell immunoreceptor with Ig and ITIM domains), and others, inhibit the activation, proliferation, and/or effector activities of T cells and other cell types. Guided by the hypothesis that immunomodulatory receptors suppress the endogenous T cell response against tumor cells, preclinical and clinical studies of anti-CTLA4 and anti-PD1 antibodies, including nivolumab, pembrolizumab, ipilimumab, and tremelimumab, have indeed demonstrated that immunomodulatory blockade results in impressive anti-tumor responses, stimulating endogenous T cells to attack tumor cells, leading to long-term cancer remissions in a fraction of patients with a variety of malignancies. Unfortunately, only a subset of patients responds these therapies, with response rates generally ranging from 10 to 30% and sometimes higher for each monotherapy, depending on the indication and other factors.

[0005] The second approach for de-repressing tumor-reactive T cells is T cell costimulation by treating with agonistic antibodies that bind to costimulatory proteins such as ICOS, thus adding a positive signal to overcome the negative signaling of the immune checkpoints.

[0006] Accordingly, the invention is directed to bispecific antibodies that bind to costimulatory receptors (e.g. ICOS, GITR, OX40, 4-1BB) as well as checkpoint receptors (e.g. PD-1, PD-L1, CTLA-4, LAG-3, TIM-3, BTLA and TIGIT.

### SUMMARY OF THE INVENTION

[0007] Accordingly, in one aspect, the invention provides bispecific antibodies that monovalently binds a human costimulatory receptor and monovalently binds a human checkpoint receptor for use in activating T cells for the treatment of cancer.

[0008] In some aspects, the costimulatory receptor is selected from the group consisting of ICOS, GITR, OX40 and 4-1BB.

[0009] In additional aspects, the checkpoint receptor is selected from the group consisting of PD-1, PD-L1, CTLA-4, LAG-3, TIGIT and TIM-3.

[0010] In further aspects, the antibody binds an antigen pair selected from: ICOS and PD-1, ICOS and CTLA-4, ICOS and LAG-3, ICOS and TIM-3, ICOS and PD-L1, ICOS and BTLA, ICOS and TIGIT, GITR and TIGIT, GITR and PD-1, GITR and CTLA-4, GITR and LAG-3, GITR and TIM-3, GITR and PD-L1, GITR and BTLA, OX40 and PD-1, OX40 and TIGIT, OX40 and CTLA-4, IC OX40 OS and LAG-3, OX40 and TIM-3, OX40 and PD-L1, OX40 and BTLA, 4-1BB and PD-1, 4-1BB and CTLA-4, 4-1BB and LAG-3, 4-1BB and TIM-3, 4-1BB and PD-L1, TIGIT and 4-1BB and 4-1BB and BTLA.

[0011] In additional aspects, the bispecific antibody has a format selected from those outlined in FIG. 2A-2N.

[0012] In further aspects, the invention provides heterodimeric antibodies comprising: a) a first heavy chain comprising a first Fc domain, an optional domain linker and a first antigen binding domain comprising an scFv that binds a first antigen; b) a second heavy chain comprising a heavy chain comprising a heavy chain constant domain comprising a second Fc domain, a hinge domain, a CH1 domain and a variable heavy domain; and c) a light chain comprising a variable light domain and a light chain constant domain; wherein said variable heavy domain and said variable light domain form a second antigen binding domain that binds a second antigen, wherein one of said first and second antigen binding domains binds human ICOS and the other binds human PD-1.

[0013] In an additional aspect, the invention provides heterodimeric bispecific antibodies comprising: a) a first heavy chain comprising: i) a first variant Fc domain; and ii) a single chain Fv region (scFv) that binds a first antigen, wherein said scFv region comprises a first variable heavy chain, a variable light chain and a charged scFv linker, wherein said charged scFv linker covalently attaches said first variable heavy chain and said variable light chain; and b) a second heavy chain comprising a VH-CH1-hinge-CH2-CH3 monomer, wherein VH is a second variable heavy chain and CH2-CH3 is a second variant Fc domain; and c) a light chain; wherein said second variant Fc domain comprises amino acid substitutions N208D/Q295E/N384D/Q418E/N241D, wherein said first and second variant Fc domains each comprise amino acid substitutions E233P/L234V/L235A/G236del/S267K; and wherein said first variant Fc domain comprises amino acid substitutions S364K/E357Q and second variant Fc domain comprises amino acid substitutions L368D/K370S, wherein one of said first and second antigen binding domains binds human ICOS and the other binds human PD-1, and wherein numbering is according to the EU index as in Kabat.

[0014] In some aspects the heterodimeric antibodies have first and second variant Fc domains that each comprise M428L/N434S.

[0015] In an additional aspect, the invention provides heterodimeric antibodies comprising: a) a first heavy chain comprising: i) a first variant Fc domain; and ii) a single chain Fv region (scFv) that binds a first antigen, wherein said scFv region comprises a first variable heavy chain, a variable light chain and a charged scFv linker, wherein said charged scFv linker covalently attaches said first variable heavy chain and said variable light chain; and b) a second heavy chain comprising a VH-CH1-hinge-CH2-CH3 monomer, wherein VH is a second variable heavy chain and CH2-CH3 is a second variant Fc domain; and c) a light chain; wherein said first and second variant Fc domains comprises a set of heterodimerization variants selected from the group consisting of L368D/K370S: S364K/E357Q; L368D/K370S:S364K; L368E/K370S:S364K; T411E/K360E/Q362E: D401K; and T366S/L368A/Y407V:T366W, and wherein one of said first and second antigen binding domains binds human ICOS and the other binds human PD-1, and wherein numbering is according to the EU index as in Kabat.

[0016] In a further aspect, the invention provides nucleic acid compositions comprising nucleic acids that encode the heterodimeric antibodies of the invention, expression vector compositions comprising the nucleic acids, and host cells comprising the expression vector compositions.

[0017] In an additional aspect, the invention provides heterodimeric antibodies for use in the activation of T cells for the treatment of cancer.

### BRIEF DESCRIPTION OF THE DRAWINGS

[0018] FIG. 1 presents expression data (RNAseq V2 RSEM) of PD-1 and T cell costimulatory receptors for bladder, breast, colon, head & neck, kidney, lung-adeno, lung squamous, ovarian, pancreatic, prostate, and melanoma cancer compiled from The Cancer Genome Atlas (TCGA). The square of the Pearson correlation coefficient was calculated for PD-1 against T cell costimulatory receptors.

[0019] FIG. 2A to 2N depict several formats for the bispecific antibodies of the present invention. The first is the “bottle opener” format, with a first and a second anti-antigen binding domain. Additionally, mAb-Fv, mAb-scFv, Central-scFv, Central-Fv, one armed central-scFv, one scFv-mAb, scFv-mAb dual scFv format are all shown. FIG. 2J depicts the “central-scFv2” format, with two Fab-scFv arms, wherein the Fabs bind a first antigen and the scFvs bind a second antigen. FIG. 2K depicts the bispecific mAb format, with a first Fab arm binding a first antigen and a second Fab arm binding a second antigen. FIG. 2L depicts the DVD-IgG format (see, e.g., U.S. Pat. No. 7,612,181, hereby expressly incorporated by reference and as discussed below). FIG. 2M depicts the Trident format (see, e.g., WO 2015/184203, hereby expressly incorporated by reference and as discussed below). For all of the scFv domains depicted, they can be either N- to C-terminus variable heavy-(optional linker)-variable light, or the opposite. In addition, for the one armed scFv-mAb, the scFv can be attached either to the N-terminus of a heavy chain monomer or to the N-terminus of the light chain.

[0020] FIG. 3A-3B depicts the sequences of XENP23104, a bottle opener format with the ICOS as the Fab side ([ICOS]_H0.66_L0) and the PD-1 as the scFv (1G6_L1.94_H1.279), and includes the M428L/434S variant to extend serum half life. The CDRs are underlined, the scFv linker is double underlined (in the sequences, the scFv linker is a positively charged scFv (GKPGS)₄ linker, although as will be appreciated by those in the art, this linker can be replaced by other linkers, including uncharged or negatively charged linkers, some of which are depicted in FIG. 8), and the slashes indicate the border(s) of the variable domains. In addition, the naming convention illustrates the orientation of the scFv from N- to C-terminus; some of the sequences herein are oriented as V_{H}-scFv linker-V_{L} (from N- to C-terminus), while some are oriented as V_{L}-scFv linker-V_{H} (from N- to C-terminus), although as will be appreciated by those in the art, these sequences may also be used in the opposition orientation from their depiction herein. As noted herein and is true for every sequence herein containing CDRs, the exact identification of the CDR locations may be slightly different depending on the numbering used as is shown in Table 1, and thus included herein are not only the CDRs that are underlined but also CDRs included within the V_{H} and V_{L} domains using other numbering systems.

[0021] FIG. 4A-4F depict useful pairs of heterodimerization variant sets (including skew and pI variants). On FIGS. 4C and F, there are variants for which there are no corresponding “monomer 2” variants; these are pI variants which can be used alone on either monomer, or included on the Fab side of a bottle opener, for example, and an appropriate charged scFv linker can be used on the second monomer that utilizes a scFv as the second antigen binding domain. Suitable charged linkers are shown in FIG. 8.

[0022] FIG. 5 depict a list of isosteric variant antibody constant regions and their respective substitutions. pI_(−) indicates lower pI variants, while pI_(+) indicates higher pI variants. These can be optionally and independently combined with other heterodimerization variants of the invention (and other variant types as well, as outlined herein).

[0023] FIG. 6 depict useful ablation variants that ablate FcγR binding (sometimes referred to as “knock outs” or “KO” variants). Generally, ablation variants are found on both monomers, although in some cases they may be on only one monomer.

[0024] FIG. 7A-7B show two particularly useful embodiments of the invention. The “non-Fv” components of this embodiment is shown in FIG. 9A, although the other formats of FIG. 9 can be used as well.

[0025] FIG. 8A-8B depict a number of charged scFv linkers that find use in increasing or decreasing the pI of heterodimeric antibodies that utilize one or more scFv as a component. The (+H) positive linker finds particular use herein. A single prior art scFv linker with single charge is references as “Whitlow”, from Whitlow et al., Protein Engineering 6(8):989-995 (1993). It should be noted that this linker was used for reducing aggregation and enhancing proteolytic stability in scFvs.

[0026] FIG. 9A-9D show the sequences of several useful bottle opener format backbones based on human IgG1, without the Fv sequences (e.g. the scFv and the vh and vl for the Fab side). Bottle opener backbone 1 is based on human IgG1 (356E/358M allotype), and includes the S364K/E357Q:L368D/K370S skew variants, the N208D/Q295E/N384D/Q418E/N421D pI variants on the Fab side and the E233P/L234V/L235A/G236del/S267K ablation variants on both chains. Bottle opener backbone 2 is based on human IgG1 (356E/358M allotype), and includes different skew variants, the N208D/Q295E/N384D/Q418E/N421D pI variants on the Fab side and the E233P/L234V/L235A/G236del/S267K ablation variants on both chains. Bottle opener backbone 3 is based on human IgG1 (356E/358M allotype), and includes different skew variants, the N208D/Q295E/N384D/Q418E/N421D pI variants on the Fab side and the E233P/L234V/L235A/G236del/S267K ablation variants on both chains. Bottle opener backbone 4 is based on human IgG1 (356E/358M allotype), and includes different skew variants, the N208D/Q295E/N384D/Q418E/N421D pI variants on the Fab side and the E233P/L234V/L235A/G236del/S267K ablation variants on both chains. Bottle opener backbone 5 is based on human IgG1 (356D/358L allotype), and includes the S364K/E357Q:L368D/K370S skew variants, the N208D/Q295E/N384D/Q418E/N421D pI variants on the Fab side and the E233P/L234V/L235A/G236del/S267K ablation variants on both chains. Bottle opener backbone 6 is based on human IgG1 (356E/358M allotype), and includes the S364K/E357Q:L368D/K370S skew variants, N208D/Q295E/N384D/Q418E/N421D pI variants on the Fab side and the E233P/L234V/L235A/G236del/S267K ablation variants on both chains, as well as an N297A variant on both chains. Bottle opener backbone 7 is identical to 6 except the mutation is N297S. Alternative formats for bottle opener backbones 6 and 7 can exclude the ablation variants E233P/L234V/L235A/G236del/S267K in both chains. Backbone 8 is based on human IgG4, and includes the S364K/E357Q:L368D/K370S skew variants, the N208D/Q295E/N384D/Q418E/N421D pI variants on the Fab side and the E233P/L234V/L235A/G236del/S267K ablation variants on both chains, as well as a S228P (EU numbering, this is S241P in Kabat) variant on both chains that ablates Fab arm exchange as is known in the art. Alternative formats for bottle opener backbone 8 can exclude the ablation variants E233P/L234V/L235A/G236del/S267K in both chains Backbone 9 is based on human IgG2, and includes the S364K/E357Q:L368D/K370S skew variants, the N208D/Q295E/N384D/Q418E/N421D pI variants on the Fab side. Backbone 10 is based on human IgG2, and includes the S364K/E357Q:L368D/K370S skew variants, the N208D/Q295E/N384D/Q418E/N421D pI variants on the Fab side as well as a S267K variant on both chains.

[0027] As will be appreciated by those in the art and outlined below, these sequences can be used with any vh and vl pairs outlined herein, with one monomer including a scFv (optionally including a charged scFv linker) and the other monomer including the Fab sequences (e.g. a vh attached to the “Fab side heavy chain” and a vl attached to the “constant light chain”). That is, any Fv sequences outlined herein for anti-CTLA-4, anti-PD-1, anti-LAG-3, anti-TIM-3, anti-TIGIT and anti-BTLA, whether as scFv (again, optionally with charged scFv linkers) or as Fabs, can be incorporated into these FIG. 37 backbones in any combination. The constant light chain depicted in FIG. 9A can be used for all of the constructs in the figure, although the kappa constant light chain can also be substituted.

[0028] It should be noted that these bottle opener backbones find use in the Central-scFv format of FIG. 1F, where an additional, second Fab (vh-CH1 and vl-constant light) with the same antigen binding as the first Fab is added to the N-terminus of the scFv on the “bottle opener side”.

[0029] Included within each of these backbones are sequences that are 90, 95, 98 and 99% identical (as defined herein) to the recited sequences, and/or contain from 1, 2, 3, 4, 5, 6, 7, 8, 9 or 10 additional amino acid substitutions (as compared to the “parent” of the Figure, which, as will be appreciated by those in the art, already contain a number of amino acid modifications as compared to the parental human IgG1 (or IgG2 or IgG4, depending on the backbone). That is, the recited backbones may contain additional amino acid modifications (generally amino acid substitutions) in addition to the skew, pI and ablation variants contained within the backbones of this figure.

[0030] FIG. 10A-10E depicts the sequences for a select number of anti-PD-1 antibodies. It is important to note that these sequences were generated based on human IgG1, with an ablation variant (E233P/L234V/L235A/G236del/S267K, “IgG1_PVA_/S267K”) which is depicted in FIG. 6A. The CDRs are underlined. As noted herein and is true for every sequence herein containing CDRs, the exact identification of the CDR locations may be slightly different depending on the numbering used as is shown in Table 1, and thus included herein are not only the CDRs that are underlined but also CDRs included within the VH and VL domains using other numbering systems.

[0031] FIG. 11A-11E depict a select number of PD-1 ABDs, with additional anti-PD-1 ABDs being listed as SEQ 1-2392, 3125-3144, 4697-7594 and 4697-21810. The CDRs are underlined, the scFv linker is double underlines (in the sequences, the scFv linker is a positively charged scFv (GKPGS)₄ linker although as will be appreciated by those in the art, this linker can be replaced by other linkers, including uncharged or negatively charged linkers, some of which are depicted in FIG. 8), and the slashes indicate the border(s) of the variable domains. In addition, the naming convention illustrates the orientation of the scFv from N- to C-terminus; some of the sequences in this Figure are oriented as VH-scFv linker-VL (from N- to C-terminus), while some are oriented as VL-scFv linker-VH (from N- to C-terminus), although as will be appreciated by those in the art, these sequences may also be used in the opposition orientation from their depiction herein. As noted herein and is true for every sequence herein containing CDRs, the exact identification of the CDR locations may be slightly different depending on the numbering used as is shown in Table 1, and thus included herein are not only the CDRs that are underlined but also CDRs included within the VH and VL domains using other numbering systems. Furthermore, as for all the sequences in the Figures, these VH and VL sequences can be used either in a scFv format or in a Fab format.

[0032] FIG. 12A-12PP depict a select number of CTLA-4 ABDs, with additional anti-CTLA-4 ABDs being listed as SEQ ID NO:2393-2414 and 3737-3816. The CDRs are underlined, the scFv linker is double underlines (in the sequences, the scFv linker is a positively charged scFv (GKPGS)₄ linker although as will be appreciated by those in the art, this linker can be replaced by other linkers, including uncharged or negatively charged linkers, some of which are depicted in FIG. 8), and the slashes indicate the border(s) of the variable domains. In addition, the naming convention illustrates the orientation of the scFv from N- to C-terminus; some of the sequences in this Figure are oriented as VH-scFv linker-VL (from N- to C-terminus), while some are oriented as VL-scFv linker-VH (from N- to C-terminus), although as will be appreciated by those in the art, these sequences may also be used in the opposition orientation from their depiction herein. As noted herein and is true for every sequence herein containing CDRs, the exact identification of the CDR locations may be slightly different depending on the numbering used as is shown in Table 1, and thus included herein are not only the CDRs that are underlined but also CDRs included within the VH and VL domains using other numbering systems. Furthermore, as for all the sequences in the Figures, these VH and VL sequences can be used either in a scFv format or in a Fab format.

[0033] FIG. 13A-13N depict a select number of LAG-3 ABDs, with additional anti-LAG-3 ABDs being listed as SEQ ID NO:2415-2604 and 3817-3960. The CDRs are underlined, the scFv linker is double underlines (in the sequences, the scFv linker is a positively charged scFv (GKPGS)₄ linker (SEQ ID NO: XXX), although as will be appreciated by those in the art, this linker can be replaced by other linkers, including uncharged or negatively charged linkers, some of which are depicted in FIG. 8), and the slashes indicate the border(s) of the variable domains> In addition, the naming convention illustrates the orientation of the scFv from N- to C-terminus; some of the sequences in this Figure are oriented as VH-scFv linker-VL (from N- to C-terminus), while some are oriented as VL-scFv linker-VH (from N- to C-terminus), although as will be appreciated by those in the art, these sequences may also be used in the opposition orientation from their depiction herein. As noted herein and is true for every sequence herein containing CDRs, the exact identification of the CDR locations may be slightly different depending on the numbering used as is shown in Table 1, and thus included herein are not only the CDRs that are underlined but also CDRs included within the VH and VL domains using other numbering systems. Furthermore, as for all the sequences in the Figures, these VH and VL sequences can be used either in a scFv format or in a Fab format.

[0034] FIG. 14A-14I depicts the sequences for a select number of anti-TIM-3 antibodies. It is important to note that these sequences were generated based on human IgG1 backbone, with an ablation variant (E233P/L234V/L235A/G236del/S267K, “IgG1_PVA_/S267K”) although other formats can be used as well. The CDRs are underlined. As noted herein and is true for every sequence herein containing CDRs, the exact identification of the CDR locations may be slightly different depending on the numbering used as is shown in Table 1, and thus included herein are not only the CDRs that are underlined but also CDRs included within the V_{H} and V_{L} domains using other numbering systems.

[0035] FIG. 15A-15C depicts the sequences for a select number of anti-PD-L1 antibodies. It is important to note that these sequences were generated based on human IgG1 backbone, with an ablation variant (E233P/L234V/L235A/G236del/S267K, “IgG1_PVA_/S267K”) as outlined herein, although other formats can be used as well. The CDRs are underlined. As noted herein and is true for every sequence herein containing CDRs, the exact identification of the CDR locations may be slightly different depending on the numbering used as is shown in Table 1, and thus included herein are not only the CDRs that are underlined but also CDRs included within the VH and VL domains using other numbering systems.

[0036] FIG. 16 depicts the sequences for a prototype anti-4-1BB antibody. It is important to note that these sequences were generated based on human IgG1 backbone, with an ablation variant (E233P/L234V/L235A/G236del/S267K, “IgG1_PVA_/S267K”), although the other formats can be used as well. The CDRs are underlined. As noted herein and is true for every sequence herein containing CDRs, the exact identification of the CDR locations may be slightly different depending on the numbering used as is shown in Table 1, and thus included herein are not only the CDRs that are underlined but also CDRs included within the VH and VL domains using other numbering systems.

[0037] FIG. 17 depicts the sequences for a prototype anti-OX40 antibody. It is important to note that these sequences were generated based on human IgG1 backbone, with an ablation variant (E233P/L234V/L235A/G236del/S267K, “IgG1_PVA_/S267K”), although other formats can be used as well. The CDRs are underlined. As noted herein and is true for every sequence herein containing CDRs, the exact identification of the CDR locations may be slightly different depending on the numbering used as is shown in Table 1, and thus included herein are not only the CDRs that are underlined but also CDRs included within the VH and VL domains using other numbering systems.

[0038] FIG. 18 depicts the sequences for a prototype anti-GITR antibody. It is important to note that these sequences were generated based on human IgG1 backbone, with an ablation variant (E233P/L234V/L235A/G236del/S267K, “IgG1_PVA_/S267K”), although other formats can be used as well. The CDRs are underlined. As noted herein and is true for every sequence herein containing CDRs, the exact identification of the CDR locations may be slightly different depending on the numbering used as is shown in Table 1, and thus included herein are not only the CDRs that are underlined but also CDRs included within the VH and VL domains using other numbering systems.

[0039] FIG. 19A-19G depicts the sequences for prototype anti-ICOS antibodies. It is important to note that these sequences were generated based on human IgG1 backbone, with an ablation variant (E233P/L234V/L235A/G236del/S267K, “IgG1_PVA_/S267K”), although other formats can be used as well. The CDRs are underlined. As noted herein and is true for every sequence herein containing CDRs, the exact identification of the CDR locations may be slightly different depending on the numbering used as is shown in Table X, and thus included herein are not only the CDRs that are underlined but also CDRs included within the VH and VL domains using other numbering systems.

[0040] FIG. 20A-20G depicts sequences for exemplary anti-ICOS Fabs. The CDRs are underlined and slashes (/) indicate the border(s) of the variable regions. As noted herein and is true for every sequence herein containing CDRs, the exact identification of the CDR locations may be slightly different depending on the numbering used as is shown in Table X, and thus included herein are not only the CDRs that are underlined but also CDRs included within the VH and VL domains using other numbering systems. Furthermore, as for all the sequences in the Figures, these VH and VL sequences can be used either in a scFv format or in a Fab format. It is important to note that these sequences were generated using six-histidine (His6 or HHHHHH) C-terminal tags at the C-terminus of the heavy chains, which have been removed.

[0041] FIG. 21A-21B depicts melting temperatures (Tₘ) and changes in melting temperature from the parental Fab (XENP22050) as determined by DSF of variant anti-ICOS Fabs engineered for stability.

[0042] FIG. 22A-22C depicts equilibrium dissociation constants (KD), association rates (ka), and dissociation rates (kd) of variant anti-ICOS Fabs for murine Fc fusions of human ICOS captured on AMC biosensors as determined by Octet.

[0043] FIG. 23 depicts equilibrium dissociation constants (KD), association rates (ka), and dissociation rates (kd) of variant anti-ICOS Fabs for biotinylated IgG1 Fc fusions of human ICOS captured on SA biosensors as determined by Octet.

[0044] FIG. 24A-24M depicts sequences for exemplary anti-ICOS scFvs. The CDRs are underlined, the scFv linker is double underline (in the sequences, the scFv linker is a positively charged scFv (GKPGS)4 linker, although as will be appreciated by those in the art, this linker can be replaced by other linkers, including uncharged or negatively charged linkers, some of which are depicted in Figure X), and slashes (/) indicate the border(s) of the variable regions. The naming convention illustrates the orientation of the scFv from N- to C-terminus; some of the sequences in this Figure are oriented as VH-scFv linker-VL (from N- to C-terminus, see FIG. 24), while some are oriented as VL-scFv linker-VH (from N- to C-terminus, see FIG. 24B), although as will be appreciated by those in the art, these sequences may also be used in the opposition orientation from their depiction herein. As noted herein and is true for every sequence herein containing CDRs, the exact identification of the CDR locations may be slightly different depending on the numbering used as is shown in Table X, and thus included herein are not only the CDRs that are underlined but also CDRs included within the VH and VL domains using other numbering systems. Furthermore, as for all the sequences in the Figures, these VH and VL sequences can be used either in a scFv format or in a Fab format. It is important to note that these sequences were generated using polyhistidine (His6 or HHHHHH) C-terminal tags at the C-terminus of the heavy chains, which have been removed.

[0045] FIG. 25 depicts melting temperatures (Tm) and changes in melting temperature from the parental scFv (XENP24352; oriented as VH-scFv linker-VL from N- to C-terminus) as determined by DSF of variant anti-ICOS scFvs engineered for stability.

[0046] FIG. 26A-26D depicts the amino acid sequences of prototype anti-costim×anti-checkpoint antibodies in the bottle-opener format (Fab-scFv-Fc). The antibodies are named using the Fab variable region first and the scFv variable region second, separated by a dash, followed by the chain designation (Fab-Fc heavy chain, scFv-Fc heavy chain or light chain). CDRs are underlined and slashes indicate the border(s) of the variable regions. The scFv domain has different orientations (N- to C-terminus) of either V_{H}-scFv linker-V_{L} or V_{L}-scFv linker-V_{H} as indicated, although this can be reversed. In addition, each sequence outlined herein can include or exclude the M428L/N434S variants in one or preferably both Fc domains, which results in longer half-life in serum.

[0047] FIG. 27 depicts induction of cytokine secretion by prototype costim/checkpoint bottle-openers in an SEB-stimulated PBMC assay.

[0048] FIG. 28 depicts induction of IL-2 secretion in naive (non-SEB stimulated) and SEB-stimulated PBMCs following treatment with the indicated test articles.

[0049] FIG. 29 depicts a schematic associated with the benefit of a costim×checkpoint blockade bispecific antibody, showing that because tumor TILs co-express immune checkpoint receptors and costimulatory receptors, a bispecific antibody increases specificity, enhancing anti-tumor activity and avoiding peripheral toxicity.

[0050] FIG. 30 depicts that double-positive cells are selectively occupied by exemplary anti-ICOS×anti-PD-1 antibody (XENP20896) as compared to one-arm anti-PD-1 antibody (XENP20111) and one-arm anti-ICOS antibody (XENP20266).

[0051] FIG. 31A-31B shows the receptor occupancy of anti-ICOS×anti-PD-1 bispecific antibody (XENP20896), one-arm anti-ICOS antibody (XENP20266) and one-arm anti-PD-1 antibody (XENP20111) on A) PD-1 and ICOS double-positive T cells and B) PD-1 and ICOS double-negative T cells after SEB stimulation of human PBMCs.

[0052] FIG. 32A-32D depicts the amino acid sequences of exemplary anti-ICOS×anti-PD-1 antibodies in the bottle-opener format (Fab-scFv-Fc). The antibodies are named using the Fab variable region first and the scFv variable region second, separated by a dash, followed by the chain designation (Fab-Fc heavy chain, scFv-Fc heavy chain or light chain). CDRs are underlined and slashes indicate the border(s) of the variable regions. The scFv domain has different orientations (N- to C-terminus) of either V_{H}-scFv linker-V_{L} or V_{L}-scFv linker-V_{H} as indicated, although this can be reversed. In addition, each sequence outlined herein can include or exclude the M428L/N434S variants in one or preferably both Fc domains, which results in longer half-life in serum.

[0053] FIG. 33A-33C depicts the amino acid sequences of exemplary anti-ICOS×anti-PD-1 antibodies in the bottle-opener format (Fab-scFv-Fc) which include the M428L/N434S variants in one or preferably both Fc domains, which results in longer half-life in serum. The antibodies are named using the Fab variable region first and the scFv variable region second, separated by a dash, followed by the chain designation (Fab-Fc heavy chain, scFv-Fc heavy chain or light chain). CDRs are underlined and slashes indicate the border(s) of the variable regions. The scFv domain has different orientations (N- to C-terminus) of either V_{H}-scFv linker-V_{L} or V_{L}-scFv linker-V_{H} as indicated, although this can be reversed.

[0054] FIG. 34A-34C depicts equilibrium dissociation constants (KD), association rates (ka), and dissociation rates (kd) of variant anti-ICOS×anti-PD-1 bispecific antibodies for murine Fc fusion of human ICOS captured on AMC biosensors as determined by Octet.

[0055] FIG. 35 depicts equilibrium dissociation constants (KD), association rates (ka), and dissociation rates (kd) of variant anti-ICOS×anti-PD-1 bispecific antibodies for biotinylated IgG1 Fc fusions of human and ICOS captured on SA/SAX biosensors as determined by Octet.

[0056] FIG. 36A-36B depicts cell surface binding of variant anti-ICOS×anti-PD-1 bispecific to human T cells in SEB-stimulated PBMC assays in two separate experiments depicted in A) and B).

[0057] FIG. 37 shows the receptor occupancy of variant anti-ICOS×anti-PD-1 bispecific antibodies, one-arm anti-ICOS antibodies and one-arm anti-PD-1 antibody (XENP20111) on PD-1 and ICOS double-positive T cells after SEB stimulation of human PBMCs.

[0058] FIG. 38A-38B show that variant anti-ICOS×anti-PD-1 bispecific antibodies promote A) IL-2 and B) IFNγ secretion from SEB stimulated PBMCs.

[0059] FIG. 39A-39B show that variant anti-ICOS×anti-PD-1 bispecific antibodies promote A) IL-2 and B) IFNγ secretion from SEB-stimulated PBMCs.

[0060] FIG. 40A-40B depicts the concentration of IFNγ in mice on Day A) 7 and B) 11 after engraftment with human PBMCs and treatment with the indicated test articles.

[0061] FIG. 41A-41B depicts CD45+ cell counts in mice as determined by flow cytometry on Day A) 11 and B)14 after engraftment with human PBMCs and treatment with the indicated test articles.

[0062] FIG. 42A-42B depicts A) CD8+ T cell and B) CD4+ T cell counts in mice as determined by flow cytometry on Day 14 after engraftment with human PBMCs and treatment with the indicated test articles (**p≤0.01).

[0063] FIG. 43 depicts the change in body weight in mice by Day 14 after engraftment with human PBMCs and treatment with the indicated test articles (**p≤0.01).

[0064] FIG. 44A-44B depicts the concentration of IFNγ in mice on Day A) 7 and B) 14 after engraftment with human PBMCs and treatment with the indicated test articles.

[0065] FIG. 45 depicts CD45+ cell counts in mice as determined by flow cytometry on Day 14 after engraftment with human PBMCs and treatment with the indicated test articles.

[0066] FIG. 46A-46C depicts A) CD8+ T cell and B) CD4+ T cell counts in mice as determined by flow cytometry on Day 14 after engraftment with human PBMCs and treatment with the indicated test articles.”

[0067] FIG. 47A-47B depicts the change in body weight in mice by Day 12 and 15 after engraftment with human PBMCs and treatment with the indicated test articles.

[0068] FIG. 48A-48D depicts the amino acid sequences of exemplary anti-ICOS×anti-PD-1 antibodies in the bottle-opener format (Fab-scFv-Fc) with alternative ICOS ABDs. The antibodies are named using the Fab variable region first and the scFv variable region second, separated by a dash, followed by the chain designation (Fab-Fc heavy chain, scFv-Fc heavy chain or light chain). CDRs are underlined and slashes indicate the border(s) of the variable regions. The scFv domain has different orientations (N- to C-terminus) of either VH-scFv linker-VL or VL-scFv linker-VH as indicated, although this can be reversed. In addition, each sequence outlined herein can include or exclude the M428L/N434S variants in one or preferably both Fc domains, which results in longer half-life in serum.

[0069] FIG. 49 depict cytokine release assay for IL-2 after SEB-stimulation of human PBMCs and treatment with alternative anti-ICOS×anti-PD-1 bispecific antibodies.

[0070] FIG. 50 depict cytokine release assay for IL-2 (as fold induction over bivalent anti-RSV mAb) after SEB-stimulation of human PBMCs and treatment with alternative anti-ICOS×anti-PD-1 bispecific antibodies.

[0071] FIG. 51 depicts AKT phosphorylation in SEB-stimulated purified CD3+ T cells after treatment with anti-ICOS×anti-PD-1 bispecific antibodies.

[0072] FIG. 52 depicts fold induction of A) IL-17A, B) IL17F, C) IL-22, D) IL-10, E) IL-9, and F) IFNγ gene expression by the indicated test articles over induction by bivalent anti-RSV as determined by NanoString.

[0073] FIG. 53A-53F depict mean fold induction in expression of selected immune response genes by indicated test articles over treatment with bivalent anti-RSV mAb as determined by NanoString. The shading intensity corresponds to the magnitude of the fold change.

[0074] FIG. 54 depicts CD45+ cell counts in mice as determined by flow cytometry on Day 14 after engraftment with human PBMCs and treatment with the indicated test articles.

[0075] FIG. 55A-55D, similar to FIG. 9 and FIG. 75, depicts the sequences of the “backbone” portion (e.g. without the Fvs) of a number of additional formats, including the Central scFv of FIG. 2F, the Central-scFv2 format of FIG. 2J, the bispecific mAb of FIG. 2K, the DVD-Ig of FIG. 2L and the Trident format of FIG. 2M. In FIG. 2L, the DVD-Ig® linkers are shown with double underlining, with other linkers found in WO2007/024715, hereby incorporated by reference in its entirety and in particular for those sequences. In the Trident format, other Trident linkers and coil-coil sequences are shown in WO 2015/184203, hereby incorporated by reference in its entirety and in particular for those sequences. As will be appreciated by those in the art, bolded domains (e.g. “VH1”, VH2-scFv linker-VL2″, etc.) are separated with slashes “/”, and may include optional domain linkers as needed. All of these backbones utilize the kappa constant region for the light chain, although the lambda chain can also be used. As for FIG. 9 and FIG. 75, these backbones can be combined with any vh and vl domains as outlined herein.

[0076] FIG. 56A-56B depicts the amino acid sequence of illustrative anti-PD-1×anti-ICOS antibodies in the bottle-opener format (Fab-scFv-Fc). The antibodies are named using the Fab variable region first and the scFv variable region second, separated by a dash, followed by the chain designation (Fab-Fc heavy chain, scFv-Fc heavy chain or light chain). CDRs are underlined and slashes indicate the border(s) of the variable regions. The scFv domain has different orientations (N- to C-terminus) of either VH-scFv linker-VL or VL-scFv linker-VH as indicated, although this can be reversed. In addition, each sequence outlined herein can include or exclude the M428L/N434S variants in one or preferably both Fc domains, which results in longer half-life in serum.

[0077] FIG. 57A-57C depicts the amino acid sequence of illustrative anti-PD-1×anti-ICOS antibodies in the central-scFv format. The antibodies are named using the first Fab-Fc variable region first and the Fab-scFv-Fc variable region second, separated by a dash, followed by the chain designation (Fab-Fc heavy chain, Fab-scFv-Fc heavy chain or light chain). CDRs are underlined and slashes indicate the border(s) of the variable regions. The scFv domain has different orientations (N- to C-terminus) of either VH-scFv linker-VL or VL-scFv linker-VH as indicated, although this can be reversed. In addition, each sequence outlined herein can include or exclude the M428L/N434S variants in one or preferably both Fc domains, which results in longer half-life in serum.

[0078] FIG. 58 depicts the amino acid sequence of illustrative anti-PD-1×anti-ICOS antibodies in the central-scFv2 format. The antibodies are named using the Fab variable region first and the scFv variable region second, followed by the chain designation (heavy chain or light chain). CDRs are underlined and slashes indicate the border(s) of the variable regions. The scFv domain has different orientations (N- to C-terminus) of either VH-scFv linker-VL or VL-scFv linker-VH as indicated, although this can be reversed. In addition, each sequence outlined herein can include or exclude the M428L/N434S variants in one or preferably both Fc domains, which results in longer half-life in serum.

[0079] FIG. 59 depicts the amino acid sequence of an illustrative anti-PD-1×anti-ICOS antibody in the bispecific mAb format. The antibodies are named using the first Fab variable region for a first antigen and the second Fab variable region for a second antigen, separated by a dash, followed by the chain designation (Heavy Chain 1 or Light Chain 1 for the first antigen and Heavy Chain 2 or Light Chain 2 for the second antigen). CDRs are underlined and slashes indicate the border(s) of the variable regions. Each sequence outlined herein can include or exclude the M428L/N434S variants in one or preferably both Fc domains, which results in longer half-life in serum.

[0080] FIG. 60 depicts the amino acid sequence of an illustrative anti-PD-1×anti-ICOS antibody in the DVD-IgG format. The antibodies are named using the first variable region for a first antigen and the second Fab variable region for a second antigen, followed by the chain designation (Heavy Chain or Light Chain). CDRs are underlined and slashes indicate the border(s) of the variable regions. Each sequence outlined herein can include or exclude the M428L/N434S variants in one or preferably both Fc domains, which results in longer half-life in serum.

[0081] FIG. 61A-61B depicts the amino acid sequence of an illustrative anti-PD-1×anti-ICOS antibody in the Trident format. The antibodies are named using the VL and VH of a first antigen which comprises a DART and the Fab variable region for a second antigen, separated by a dash, followed by the chain designation (Heavy Chain or Light Chain). CDRs are underlined and slashes indicate the border(s) of the variable regions. Each sequence outlined herein can include or exclude the M428L/N434S variants in one or preferably both Fc domains, which results in longer half-life in serum.

[0082] FIG. 62 depicts induction of cytokine secretion (IL-2) by alternative format costim x checkpoint blockade bispecific antibodies in an SEB-stimulated PBMC assay.

[0083] FIG. 63 depicts the amino acid sequences of an illustrative anti-ICOS×anti-CTLA-4 antibody in the bottle-opener format (Fab-scFv-Fc). The antibodies are named using the Fab variable region first and the scFv variable region second, separated by a dash, followed by the chain designation (Fab-Fc heavy chain, scFv-Fc heavy chain or light chain). CDRs are underlined and slashes indicate the border(s) of the variable regions. The scFv domain has different orientations (N- to C-terminus) of either VH-scFv linker-VL or VL-scFv linker-VH as indicated, although this can be reversed. In addition, each sequence outlined herein can include or exclude the M428L/N434S variants in one or preferably both Fc domains, which results in longer half-life in serum.

[0084] FIG. 64A-64B depicts the amino acid sequence of illustrative anti-LAG-3×anti-ICOS antibodies in the bispecific mAb format. The antibodies are named using the first Fab variable region for a first antigen and the second Fab variable region for a second antigen, separated by a dash, followed by the chain designation (Heavy Chain 1 or Light Chain 1 for the first antigen and Heavy Chain 2 or Light Chain 2 for the second antigen). CDRs are underlined and slashes indicate the border(s) of the variable regions. Each sequence outlined herein can include or exclude the M428L/N434S variants in one or preferably both Fc domains, which results in longer half-life in serum.

[0085] FIG. 65 depicts the amino acid sequence of an illustrative anti-TIM-3×anti-ICOS antibody in the bispecific mAb format. The antibodies are named using the first Fab variable region for a first antigen and the second Fab variable region for a second antigen, separated by a dash, followed by the chain designation (Heavy Chain 1 or Light Chain 1 for the first antigen and Heavy Chain 2 or Light Chain 2 for the second antigen). CDRs are underlined and slashes indicate the border(s) of the variable regions. Each sequence outlined herein can include or exclude the M428L/N434S variants in one or preferably both Fc domains, which results in longer half-life in serum.

[0086] FIG. 66A-66C depicts the amino acid sequences of anti-ICOS×anti-PD-L1 antibodies in the bottle-opener format (Fab-scFv-Fc) and central-scFv2 format. The bottle-openers are named using the Fab variable region first and the scFv variable region second, separated by a dash, followed by the chain designation (Fab-Fc heavy chain, scFv-Fc heavy chain or light chain). Central-scFv2s are named using the Fab variable region first and the scFv variable region second, followed by the chain designation (heavy chain or light chain). CDRs are underlined and slashes indicate the border(s) of the variable regions. CDRs are underlined and slashes indicate the border(s) of the variable regions. The scFv domain has different orientations (N- to C-terminus) of either VH-scFv linker-VL or VL-scFv linker-VH as indicated, although this can be reversed. In addition, each sequence outlined herein can include or exclude the M428L/N434S variants in one or preferably both Fc domains, which results in longer half-life in serum.

[0087] FIG. 67 depicts induction of cytokine secretion (IL-2) by additional costim x checkpoint blockade bispecific antibodies in an SEB-stimulated PBMC assay.

[0088] FIG. 68A-68G depict amino acid sequences for exemplary one-arm anti-ICOS Fab-Fc antibodies. CDRs are underlined and slashes indicate the border(s) of variable regions. These are referred to as “one-arm” or “one armed” formats as one amino acid chain is only an Fc domain, with the other side being an anti-ICOS Fab side. The Fc domain contains the S364K/E357Q skew variants, as well as the pI(−)_Isosteric_A variants depicted in Figure X. The Fab Fc domain contains the L368D/K370S skew variants as well as the pI ISO(+RR) variants depicted in Figure X. Both Fc domains include the ablation variants (E233P/L234V/L235A/G236del/S267K).

[0089] FIG. 69 depicts equilibrium dissociation constants (KD), association rates (ka), and dissociation rates (kd) of variant one-arm anti-ICOS Fab-Fc antibodies for murine Fc fusions of human ICOS captured on AMC biosensors as determined by Octet.

[0090] FIG. 70 depicts AKT phosphorylation in SEB-stimulated purified CD3+ T cells after treatment with bivalent and monovalent anti-PD-1 antibodies and anti-ICOS×anti-PD-1 bispecific antibodies.

[0091] FIG. 71 depicts AKT phosphorylation in purified CD3+ T cells after treatment with monovalent anti-ICOS Fab-Fc antibodies with alternative anti-ICOS ABDs.

[0092] FIG. 72A-72C depict some prototype bispecific antibodies (OX40 X PD-1, GITR X PD-1, 4-1BB X PD-1, CTLA-4 X ICOS).

[0093] FIG. 73A-73H depict some prototype mAbs (4-1BB, OX40, GITR, ICOS, PD-L1 and PD-1), the Fvs of which can be used in combination with the other Fvs of the invention and in any format (bottle opener, mAb-Fv, mAb-scFv, central-scFv, bispecific mAb, central-Fv, one armed central-scFv, one armed scFv-mAb, dual scFv, DVD-Ig or Trident). Some additional ICOS X PD-L1 bottle opener sequences are shown as well.

[0094] FIG. 74A-74F depict additional PD-1 X ICOS bottle openers, in some cases with the PD-1 Fv being in the Fab format and the ICOS Fv in a scFv format and in other cases reversed.

[0095] FIG. 75A-75D shows the sequences of a mAb-scFv backbone of use in the invention, to which the Fv sequences of the invention are added. mAb-scFv backbone 1 is based on human IgG1 (356E/358M allotype), and includes the S364K/E357Q:L368D/K370S skew variants, the N208D/Q295E/N384D/Q418E/N421D pI variants on the Fab side and the E233P/L234V/L235A/G236del/S267K ablation variants on both chains. Backbone 2 is based on human IgG1 (356D/358L allotype), and includes the S364K/E357Q:L368D/K370S skew variants, the N208D/Q295E/N384D/Q418E/N421D pI variants on the Fab side and the E233P/L234V/L235A/G236del/S267K ablation variants on both chains. Backbone 3 is based on human IgG1 (356E/358M allotype), and includes the S364K/E357Q:L368D/K370S skew variants, N208D/Q295E/N384D/Q418E/N421D pI variants on the Fab side and the E233P/L234V/L235A/G236del/S267K ablation variants on both chains, as well as an N297A variant on both chains. Backbone 4 is identical to 3 except the mutation is N297S. Alternative formats for mAb-scFv backbones 3 and 4 can exclude the ablation variants E233P/L234V/L235A/G236del/S267K in both chains. Backbone 5 is based on human IgG4, and includes the S364K/E357Q:L368D/K370S skew variants, the N208D/Q295E/N384D/Q418E/N421D pI variants on the Fab side and the E233P/L234V/L235A/G236del/S267K ablation variants on both chains, as well as a S228P (EU numbering, this is S241P in Kabat) variant on both chains that ablates Fab arm exchange as is known in the art Backbone 6 is based on human IgG2, and includes the S364K/E357Q:L368D/K370S skew variants, the N208D/Q295E/N384D/Q418E/N421D pI variants on the Fab side. Backbone 7 is based on human IgG2, and includes the S364K/E357Q:L368D/K370S skew variants, the N208D/Q295E/N384D/Q418E/N421D pI variants on the Fab side as well as a S267K variant on both chains.

[0096] As will be appreciated by those in the art and outlined below, these sequences can be used with any vh and vl pairs outlined herein, with one monomer including both a Fab and an scFv (optionally including a charged scFv linker) and the other monomer including the Fab sequence (e.g. a vh attached to the “Fab side heavy chain” and a vl attached to the “constant light chain”). That is, any Fv sequences outlined herein for anti-CTLA-4, anti-PD-1, anti-LAG-3, anti-TIM-3, anti-TIGIT, anti-BTLA, anti-ICOS, anti-GITR, anti-OX40 and anti-4-1BB, whether as scFv (again, optionally with charged scFv linkers) or as Fabs, can be incorporated into this FIG. 75A-75D backbone in any combination. The monomer 1 side is the Fab-scFv pI negative side, and includes the heterodimerization variants L368D/K370S, the isosteric pI variants N208D/Q295E/N384D/Q418E/N421D, the ablation variants E233P/L234V/L235A/G236del/S267K, (all relative to IgG1). The monomer 2 side is the scFv pI positive side, and includes the heterodimerization variants 364K/E357Q. However, other skew variant pairs can be substituted, particularly [S364K/E357Q:L368D/K370S]; [L368D/K370S:S364K]; [L368E/K370S:S364K]; [T411T/E360E/Q362E:D401K]; [L368D/K370S:S364K/E357L], [K370S:S364K/E357Q], [T366S/L368A/Y407V:T366W] and [T366S/L368A/Y407V/Y394C:T366W/S354C].

[0097] The constant light chain depicted in FIG. 75A can be used for all of the constructs in the figure, although the kappa constant light chain can also be substituted.

[0098] It should be noted that these mAb-scFv backbones find use in the both the mAb-Fv format of FIG. 1H (where one monomer comprises a vl at the C-terminus and the other a vh at the C-terminus) as well as the scFv-mAb format (with a scFv domain added to the C-terminus of one of the monomers).

[0099] Included within each of these backbones are sequences that are 90, 95, 98 and 99% identical (as defined herein) to the recited sequences, and/or contain from 1, 2, 3, 4, 5, 6, 7, 8, 9 or 10 additional amino acid substitutions (as compared to the “parent” of the Figure, which, as will be appreciated by those in the art, already contain a number of amino acid modifications as compared to the parental human IgG1 (or IgG2 or IgG4, depending on the backbone). That is, the recited backbones may contain additional amino acid modifications (generally amino acid substitutions) in addition to the skew, pI and ablation variants contained within the backbones of this figure.

[0100] FIG. 76A-76F depict a number of prior art sequences for Fvs that bind human PD-1 as vh and vl sequences. As will be appreciated by those in the art, any of these Fvs can be combined with an Fv that binds a costimulatory receptor (e.g. ICOS, GITR, OX40 or 4-1BB, including the Fv sequences contained herein) and in any format (bottle opener, mAb-Fv, mAb-scFv, central-scFv, bispecific mAb, central-Fv, one armed central-scFv, one armed scFv-mAb, dual scFv, DVD-Ig or Trident). In particular they can be combined with ICOS]_H0L0 and [ICOS]H0.66_L0 ABDs.

[0101] FIG. 77A-77B depict a number of prior art sequences for Fvs that bind human ICOS as vh and vl sequences. As will be appreciated by those in the art, any of these Fvs can be combined with an Fv that binds a checkpoint receptor (e.g. PD-1, PD-L1, CTLA-4, TIM-3, LAG-3, TIGIT and BTLA, including the Fv sequences contained herein) and in any format (bottle opener, mAb-Fv, mAb-scFv, central-scFv, bispecific mAb, central-Fv, one armed central-scFv, one armed scFv-mAb, dual scFv, DVD-Ig or Trident). In particular they can be combined with PD-1 ABDs having the identifiers 1G6_H1.279_L1.194; 1G6_H1.280_L1.224; 1G6_L1.194_H1.279; 1G6_L1.210_H1.288; and 2E9_H1L1.

[0102] FIG. 78A-78J depict a number of prior art sequences for Fvs that bind human PD-L1 as vh and vl sequences. As will be appreciated by those in the art, any of these Fvs can be combined with an Fv that binds a costimulatory receptor (e.g. ICOS, GITR, OX40 or 4-1BB, including the Fv sequences contained herein) and in any format (bottle opener, mAb-Fv, mAb-scFv, central-scFv, bispecific mAb, central-Fv, one armed central-scFv, one armed scFv-mAb, dual scFv, DVD-Ig or Trident). In particular they can be combined with ICOS]_H0L0 and [ICOS]H0.66_L0 ABDs.

[0103] FIG. 79A-79B depict a number of prior art sequences for Fvs that bind human CTLA-4 as vh and vl sequences. As will be appreciated by those in the art, any of these Fvs can be combined with an Fv that binds a costimulatory receptor (e.g. ICOS, GITR, OX40 or 4-1BB, including the Fv sequences contained herein) and in any format (bottle opener, mAb-Fv, mAb-scFv, central-scFv, bispecific mAb, central-Fv, one armed central-scFv, one armed scFv-mAb, dual scFv, DVD-Ig or Trident). In particular they can be combined with ICOS]_H0L0 and [ICOS]H0.66_L0 ABDs.

[0104] FIG. 80A-80C depict a number of prior art sequences for Fvs that bind human LAG-3 as vh and vl sequences. As will be appreciated by those in the art, any of these Fvs can be combined with an Fv that binds a costimulatory receptor (e.g. ICOS, GITR, OX40 or 4-1BB, including the Fv sequences contained herein) and in any format (bottle opener, mAb-Fv, mAb-scFv, central-scFv, bispecific mAb, central-Fv, one armed central-scFv, one armed scFv-mAb, dual scFv, DVD-Ig or Trident). In particular they can be combined with ICOS]_H0L0 and [ICOS]H0.66_L0 ABDs.

[0105] FIG. 81A-81C depict a number of prior art sequences for Fvs that bind human TIM-3 as vh and vl sequences. As will be appreciated by those in the art, any of these Fvs can be combined with an Fv that binds a costimulatory receptor (e.g. ICOS, GITR, OX40 or 4-1BB, including the Fv sequences contained herein) and in any format (bottle opener, mAb-Fv, mAb-scFv, central-scFv, bispecific mAb, central-Fv, one armed central-scFv, one armed scFv-mAb, dual scFv, DVD-Ig or Trident). In particular they can be combined with ICOS]_H0L0 and [ICOS]H0.66_L0 ABDs.

[0106] FIG. 82 depict a number of prior art sequences for Fvs that bind human BTLA as vh and vl sequences. As will be appreciated by those in the art, any of these Fvs can be combined with an Fv that binds a costimulatory receptor (e.g. ICOS, GITR, OX40 or 4-1BB, including the Fv sequences contained herein) and in any format (bottle opener, mAb-Fv, mAb-scFv, central-scFv, bispecific mAb, central-Fv, one armed central-scFv, one armed scFv-mAb, dual scFv, DVD-Ig or Trident). In particular they can be combined with ICOS]_H0L0 and [ICOS]H0.66_L0 ABDs.

[0107] FIG. 83A-83D depict a number of prior art sequences for Fvs that bind human TIGIT as vh and vl sequences. As will be appreciated by those in the art, any of these Fvs can be combined with an Fv that binds a costimulatory receptor (e.g. ICOS, GITR, OX40 or 4-1BB, including the Fv sequences contained herein) and in any format (bottle opener, mAb-Fv, mAb-scFv, central-scFv, bispecific mAb, central-Fv, one armed central-scFv, one armed scFv-mAb, dual scFv, DVD-Ig or Trident). In particular they can be combined with ICOS]_H0L0 and [ICOS]H0.66_L0 ABDs.

[0108] FIG. 84A-84C depict a number of BTLA ABDs, with additional anti-BTLA ABDs being listed as SEQ ID NO: 3705-3736. The CDRs are underlined, the scFv linker is double underlined (in the sequences, the scFv linker is a positively charged scFv (GKPGS)₄ linker, although as will be appreciated by those in the art, this linker can be replaced by other linkers, including uncharged or negatively charged linkers, some of which are depicted in FIG. 8A-B), and the slashes indicate the border(s) of the variable domains. As above, the naming convention illustrates the orientation of the scFv from N- to C-terminus; in the sequences listed in this figure, they are all oriented as vh-scFv linker-vl (from N- to C-terminus), although these sequences may also be used in the opposite orientation, (from N- to C-terminus) vl-linker-vh. As noted herein and is true for every sequence herein containing CDRs, the exact identification of the CDR locations may be slightly different depending on the numbering used as is shown in Table 1, and thus included herein are not only the CDRs that are underlined but also CDRs included within the vh and vl domains using other numbering systems. Furthermore, as for all the sequences in the Figures, these vh and vl sequences can be used either in a scFv format or in a Fab format.

[0109] FIG. 85 is a matrix of possible combinations of the costim and checkpoint ABDs, with all possible combinations possible. An “A” in the box means that the PD-1 ABD is 1G6_L1.194_H1.279. A “B” in the box means that the ICOS ABD is [ICOS]H.066_L0. A “C” in the box means that the PD-1 is the scFv in the pair. A “D” in the box means the CTLA-4 ABD is a Fab and is [CTLA-4]_H3_L0.22. An “E” in the box means that the CTLA-4 ABD is a scFv and is [CTLA-4]_H3.23_L0.22. An “F” in the box means that the LAG-3 ABD is 7G8_H3.30_L1.34. A “G” in the box means that the BTLA ABD is 9C6_H1.1_L1. An “H” in the box means that combination is a bottle opener. An “I” in the box means the combination is Central-scFv format.

[0110] FIG. 86 depicts two more ICOS X PD-1 bottle openers.

### DETAILED DESCRIPTION OF THE INVENTION

### I. Nomenclature

[0111] The bispecific antibodies of the invention are listed in several different formats. Each polypeptide is given a unique “XENP” number, although as will be appreciated in the art, a longer sequence might contain a shorter one. For example, the heavy chain of the scFv side monomer of a bottle opener format for a given sequence will have a first XENP number, while the scFv domain will have a different XENP number. Some molecules have three polypeptides, so the XENP number, with the components, is used as a name. Thus, the molecule XENP, which is in bottle opener format, comprises three sequences, generally referred to as “XENP23104-HC-Fab”, XENP23104 HC-scFv” and “XENP23104 LC” or equivalents, although one of skill in the art would be able to identify these easily through sequence alignment. These XENP numbers are in the sequence listing as well as identifiers, and used in the Figures. In addition, one molecule, comprising the three components, gives rise to multiple sequence identifiers. For example, the listing of the Fab monomer has the full length sequence, the variable heavy sequence and the three CDRs of the variable heavy sequence; the light chain has a full length sequence, a variable light sequence and the three CDRs of the variable light sequence; and the scFv-Fc domain has a full length sequence, an scFv sequence, a variable light sequence, 3 light CDRs, a scFv linker, a variable heavy sequence and 3 heavy CDRs; note that all molecules herein with a scFv domain use a single charged scFv linker (+H), although others can be used. In addition, the naming nomenclature of particular variable domains uses a “Hx.xx_Ly.yy” type of format, with the numbers being unique identifiers to particular variable chain sequences. Thus, the variable domain of the scFv side of XENP23104 (which binds PD-1) is “1G6_L1.194_H1.279”, which indicates that the variable heavy domain H1.279 was combined with the light domain L1.194. In the case that these sequences are used as scFvs, the designation “1G6_L1.194_H1.279”, indicates that the variable heavy domain H1.279 was combined with the light domain L1.194 and is in vl-linker-vh orientation, from N- to C-terminus. This molecule with the identical sequences of the heavy and light variable domains but in the reverse order would be named “1G6_H1.279_L1.194”. Similarly, different constructs may “mix and match” the heavy and light chains as will be evident from the sequence listing and the Figures.

### II. Incorporation of Materials

### A. Figures and Legends

[0112] Specifically incorporated by reference are the Figures, Legends and Sequences from U.S. Ser. No. 62/479,723 and the Figures, Legends and Sequences from U.S. Ser. No. 15/623,314. In addition, the claims from U.S. Ser. No. 62/479,723 are additionally specifically incorporated.

### B. Sequences

[0113] Target Antigens:

[0114] The sequence of human PD-1 (sp|Q15116) is SEQ ID NO: 26226. The sequence of human PD-1, extracellular domain (sp|Q15116|21-170) is SEQ ID NO: 26227. The sequence of macaca fascicularis PD-1 (tr|B0LAJ3) is SEQ ID NO: 26228. The sequence of macaca fascicularis PD-1, extracellular domain (predicted) (tr|B0LAJ3|21-170) is SEQ ID NO: 26229. The sequence of human CTLA-4 (sp|P16410) is SEQ ID NO: 26230. The sequence of human CTLA-4, extracellular domain (sp|P16410|36-161) is SEQ ID NO: 26231. The sequence of macaca fascicularis CTLA-4 (tr|G7PL88) is SEQ ID NO: 26232. The sequence of macaca fascicularis CTLA-4, extracellular domain (predicted) (tr|G7PL88) is SEQ ID NO: 26233. The sequence of human LAG-3 (sp|P18627) is SEQ ID NO: 26234. The sequence of human LAG-3, extracellular domain (sp|P18627|29-450) is SEQ ID NO: 26235. The sequence of macaca fascicularis LAG-3 (predicted) (gi|544467815|ref|XP_005570011.1) is SEQ ID NO: 26236. The sequence of macaca fascicularis LAG-3, extracellular domain (predicted) (gi|544467815|ref|XP_005570011.1|29-450) is SEQ ID NO: 26237. The sequence of human TIM-3 (sp|Q8TDQ0) is SEQ ID NO: 26238. The sequence of human TIM-3, extracellular domain (sp|Q8TDQ0|22-202) is SEQ ID NO: 26239. The sequence of macaca fascicularis TIM-3 (predicted) (gi|355750365|gb|EHH54703.1) is SEQ ID NO: 26240. The sequence of macaca fascicularis TIM-3, extracellular domain (predicted) (gi|355750365|gb|EHH54703.1|22-203) is SEQ ID NO: 26241. The sequence of human PD-L1 (sp|Q9NZQ7) is SEQ ID NO: 26242. The sequence of human PD-L1, extracellular domain (sp|Q9NZQ7|19-238) is SEQ ID NO: 26243. The sequence of macaca fascicularis PD-L1 (predicted) (gb|XP_005581836.1) is SEQ ID NO: 26244. The sequence of macaca fascicularis PD-L1, extracellular domain (predicted) (gb|XP_005581836.1|19-238) is SEQ ID NO: 26245. The sequence of human ICOS (sp|Q9Y6W8) is SEQ ID NO: 26246. The sequence of human ICOS, extracellular domain (sp|Q9Y6W8|21-140) is SEQ ID NO: 26247. The sequence of macaca fascicularis ICOS (gi|544477053|ref|XP_005574075.1) is SEQ ID NO: 26248. The sequence of macaca fascicularis ICOS, extracellular domain (predicted) (gi|544477053|ref|XP_005574075.1|21-140) is SEQ ID NO: 26249. The sequence of human GITR (sp|Q9Y5U5) is SEQ ID NO: 26250. The sequence of human GITR, extracellular domain (sp|Q9Y5U5|26-162) is SEQ ID NO: 26251. The sequence of macaca fascicularis GITR (predicted) (ref|XP_005545180.1) is SEQ ID NO: 26252. The sequence of macaca fascicularis GITR, extracellular domain (predicted) (ref|XP_005545180.1126-162) is SEQ ID NO: 26253. The sequence of human OX40 (sp|P43489) is SEQ ID NO: 26254. The sequence of human OX40, extracellular domain (sp|P43489|29-214) is SEQ ID NO: 26255. The sequence of macaca fascicularis OX40 (predicted) (ref|XP_005545179.1) is SEQ ID NO: 26256. The sequence of macaca fascicularis OX40, extracellular domain (predicted) (ref|XP_005545179.1|29-214) is SEQ ID NO: 26257. The sequence of human 4-1BB (sp|Q07011) is SEQ ID NO: 26258. The sequence of human 4-1BB, extracellular domain (sp|Q07011|24-186) is SEQ ID NO: 26259. The sequence of macaca fascicularis 4-1BB (predicted) (ref|XP_005544945.1) is SEQ ID NO: 26260. The sequence of macaca fascicularis 4-1BB, extracellular domain (predicted) (ref|XP_005544945.1|24-186) is SEQ ID NO: 26261.

[0115] ICOS Binding Domains:

[0116] In addition the sequences shown in FIG. 19, FIG. 20A-20G and FIG. 24, SEQ ID NO:27869-28086 contain a number of ICOS Fab sequences (heavy chain VH1-CH1 and light chain VL1-CL) as indicated in the naming nomenclature. Reference for the CDRs and for the junction between the variable junctions is shown in FIG. 40 of U.S. Ser. No. 62/479,723 (hereby incorporated by reference as well as the Legend), although from the SEQ listing one of skill in the art will be able to ascertain the CDRs (see Table 1 for numbering and/or through sequence alignment) as well as for the junctions (e.g. heavy chain CH1 generally starts with the sequence “ASTK . . . ” and light chain constant domain generally starts with “RTVA . . . ”. SEQ ID NO:28087-28269 show the three sequences for “one armed mAb” (FIG. 2N; Fab-Fc, Fc only and light chain) as shown in the naming nomenclature. Reference for the CDRs and for the junction between the variable junctions is shown in FIG. 41 of U.S. Ser. No. 62/479,723 (hereby incorporated by reference as well as the Legend), although from the SEQ listing one of skill in the art will be able to ascertain the CDRs (see Table 1 for numbering and/or through sequence alignment) as well as for the junctions (e.g. heavy chain CH1 generally starts with the sequence “ASTK . . . ” and light chain constant domain generally starts with “RTVA . . . ”. Additional one armed ICOS molecules are shown in FIG. 68A-68G. SEQ ID NO:28549-28556 show some control antibodies (HC and LC) from which the Fvs can be used as ICOS ABDs as well; reference for the CDRs and for the junction between the variable junctions is shown in FIG. 44 of U.S. Ser. No. 62/479,723 (hereby incorporated by reference as well as the Legend), although from the SEQ listing one of skill in the art will be able to ascertain the CDRs (see Table 1 for numbering and/or through sequence alignment) as well as for the junctions (e.g. heavy chain CH1 generally starts with the sequence “ASTK . . . ” and light chain constant domain generally starts with “RTVA . . . ”. SEQ ID NO:28557-28665 show some ICOS scFvs that find use in combination in the invention; reference for the CDRs and for the junction between the variable junctions is shown in FIG. 45 of U.S. Ser. No. 62/479,723 (hereby incorporated by reference as well as the Legend), although from the SEQ listing one of skill in the art will be able to ascertain the CDRs (see Table 1 for numbering and/or through sequence alignment) as well as for the junctions, as the scFvs utilize the charged linker (GKPGS)₄ between the vh and vl domains. Thus, suitable ICOS ABDs for use in combination with ABDs for checkpoint receptors are shown in FIG. 19, FIG. 20A-20G, FIG. 24, FIG. 68A-68G and FIG. 77A-77BA-77B as well as SEQ ID NO: 27869-28086, 28087-28269, 27193-27335, 28549-28556 and 28557-28665, and [ICOS]_H0.66_L0 and [ICOS]_H0_L0.

[0117] In addition, suitable ICOS X PD-1 bottle opener sequences include those in FIG. 3 as well as those in SEQ ID NO:28270-28548, which correspond to the sequences depicted in FIGS. 42 and 43 of U.S. Ser. No. 62/479,723 (both of which are hereby incorporated by reference as well as the Legends and sequences therein), again using these figures to show CDRs, junctions, etc.

### III. Overview

[0118] Therapeutic antibodies directed against immune immunomodulatory inhibitors such as PD-1 are showing great promise in limited circumstances in the clinic for the treatment of cancer. Cancer can be considered as an inability of the patient to recognize and eliminate cancerous cells. In many instances, these transformed (e.g. cancerous) cells counteract immunosurveillance. There are natural control mechanisms that limit T-cell activation in the body to prevent unrestrained T-cell activity, which can be exploited by cancerous cells to evade or suppress the immune response. Restoring the capacity of immune effector cells—especially T cells—to recognize and eliminate cancer is the goal of immunotherapy. The field of immuno-oncology, sometimes referred to as “immunotherapy” is rapidly evolving, with several recent approvals of T cell checkpoint inhibitory antibodies such as Yervoy, Keytruda and Opdivo. These antibodies are generally referred to as “checkpoint inhibitors” because they block normally negative regulators of T cell immunity. It is generally understood that a variety of immunomodulatory signals, both costimulatory and coinhibitory, can be used to orchestrate an optimal antigen-specific immune response.

[0119] Checkpoint inhibitor monoclonal antibodies bind to immunomodulatory inhibitor proteins such as PD-1, which under normal circumstances prevent or suppress activation of cytotoxic T cells (CTLs). By inhibiting the immunomodulatory protein, for example through the use of antibodies that bind these proteins, an increased T cell response against tumors can be achieved. That is, these cancer immunomodulatory proteins suppress the immune response; when the proteins are blocked, for example using antibodies to the immunomodulatory protein, the immune system is activated, leading to immune stimulation, resulting in treatment of conditions such as cancer and infectious disease. Antibodies to either the PD-1 protein or its binding partner, PD-L1, leads to T cell activation.

[0120] Another area of current interest for harnessing the patient's immune system to fight disease involves the co-stimulation of T cells using agonistic antibodies that bind to co-stimulatory proteins such as ICOS (Inducible T cell Co-Stimulator, also referred to as CD278) which adds a positive signal to overcome the negative signaling of the immune checkpoint proteins on the T-cells. ICOS is a type I transmembrane protein comprising an extracellular (Ig) V-like domain, and serves as the receptor for the B7h co-stimulatory molecule.

[0121] Recent work shows that some tumor infiltrating lymphocytes (TILs) co-express PD-1 and ICOS (see Gros, J. Clinical Invest. 124(5):2246 (2014)).

[0122] Bispecific antibodies, which can bind two different targets simultaneously, offer the potential to improve the selectivity of targeting TILs vs peripheral T cells, while also reducing cost of therapy. The bivalent interaction of an antibody with two targets on a cell surface should—in some cases—lead to a higher binding avidity relative to a monovalent interaction with one target at a time. Because of this, normal bivalent antibodies tend to have high avidity for their target on a cell surface. With bispecific antibodies, the potential exists to create higher selectivity for cells that simultaneously express two different targets, utilizing the higher avidity afforded by simultaneous binding to both targets.

[0123] Accordingly, the present invention provides bispecific immunomodulatory antibodies, that bind to cells expressing the two antigens and methods of activating T cells and/or NK cells to treat diseases such as cancer and infectious diseases, and other conditions where increased immune activity results in treatment.

[0124] Thus, the invention is directed, in some instances, to solving the issue of toxicity and expense of administering multiple antibodies by providing bispecific antibodies that bind to two different immunomodulatory molecules (one a checkpoint receptor and the other a costimulatory receptor) on a single cell and advantageously requiring administration of only one therapeutic substance.

[0125] Bispecific antibodies offer the opportunity to combine immune immunomodulatory blockade with costimulation in one molecule. However, it is not obvious what combination of immune immunomodulatory plus costimulatory protein or what binding stoichiometry (monovalent+monovalent, monovalent+bivalent, etc.) would be efficacious. Here we identify bispecific antibodies that binding monovalently to a costimulatory protein (such as ICOS) and monovalent binding to a checkpoint receptor (such as PD-1) that are capable of inducing robust T cell activation.

[0126] Surprisingly, while conventional wisdom states that monovalent antibodies do not result in agonism, the present work shows the unexpected results of agonism of the ICOS receptor with the monovalent bispecific antibodies of the invention. See Merchant et al., PNAS Jul. 23 2013 E2987-E2996, “[w]hile initial screening of bivalent antibodies produced agonists of MET, engineering them into monovalent antibodies produces antagonists instead.” This positive result with only monovalent binding to ICOS is unexpected because it is thought that at least bivalent binding to a costimulatory protein is necessary to provide the required level of receptor clustering on the cell surface for triggering signaling. As shown by Fos et al., J. Immunol. 2008:1969-1977, ICOS ligation induces AKT phosphorylation. The studies here in use AKT phosphorylation as an indicator of ICOS agonism, and this effect is seen for both “one armed ICOS” (see Example 5A(a)) and for bispecific antibodies that bind ICOS monovalently. As shown in Example 7 and in FIG. 70, the one-arm XENP20266 that only binds ICOS monovalently promotes more AKT phosphorylation than XENP16435, which binds ICOS bivalently (e.g. as a traditional mAb).

[0127] Accordingly, the present invention is directed to novel constructs to provide heterodimeric, bispecific antibodies that allow binding to a checkpoint receptor as well as human ICOS.

[0128] Note that generally these bispecific antibodies are named “anti-PD-1 X anti-ICOS”, or generally simplistically or for ease (and thus interchangeably) as “PD-1 X ICOS”, etc. for each pair.

[0129] The heterodimeric bispecific immunomodulatory antibodies of the invention are useful to treat a variety of types of cancers. As will be appreciated by those in the art, in contrast to traditional monoclonal antibodies that bind to tumor antigens, or to the newer classes of bispecific antibodies that bind, for example, CD3 and tumor antigens (such as described in U.S. Ser. No. 15/141,350, for example), immunomodulatory antibodies are used to increase the immune response but are not generally tumor specific in their action. That is, the bispecific immunomodulatory antibodies of the invention inhibit the suppression of the immune system, generally leading to T cell activation, which in turn leads to greater immune response to cancerous cells and thus treatment.

[0130] As discussed below, there are a variety of ways that T cell activation can be measured. Functional effects of the bispecific immunomodulatory antibodies on NK and T-cells can be assessed in vitro (and in some cases in vivo, as described more fully below) by measuring changes in the following parameters: proliferation, cytokine release and cell-surface makers. For NK cells, increases in cell proliferation, cytotoxicity (ability to kill target cells as measured by increases in CD107a, granzyme, and perforin expression, or by directly measuring target cells killing), cytokine production (e.g. IFN-γ and TNF), and cell surface receptor expression (e.g. CD25) is indicative of immune modulation, e.g. enhanced killing of cancer cells. For T-cells, increases in proliferation, increases in expression of cell surface markers of activation (e.g. CD25, CD69, CD137, and PD1), cytotoxicity (ability to kill target cells), and cytokine production (e.g. IL-2, IL-4, IL-6, IFN, TNF-a, IL-10, IL-17A) are indicative of immune modulation, e.g. enhanced killing of cancer cells. Accordingly, assessment of treatment can be done using assays that evaluate one or more of the following: (i) increases in immune response, (ii) increases in activation of αβ and/or γδ T cells, (iii) increases in cytotoxic T cell activity, (iv) increases in NK and/or NKT cell activity, (v) alleviation of αβ and/or γδ T-cell suppression, (vi) increases in pro-inflammatory cytokine secretion, (vii) increases in IL-2 secretion; (viii) increases in interferon-γ production, (ix) increases in Th1 response, (x) decreases in Th2 response, (xi) decreases or eliminates cell number and/or activity of at least one of regulatory T cells, (xii) increases in IL-2 secretion.

[0131] Thus, in some embodiments the invention provides the use of bispecific immunomodulatory antibodies to perform one or more of the following in a subject in need thereof: (a) upregulating pro-inflammatory cytokines; (b) increasing T-cell proliferation and/or expansion; (c) increasing interferon-γ or TNF-α production by T-cells; (d) increasing IL-2 secretion; (e) stimulating antibody responses; (f) inhibiting cancer cell growth; (g) promoting antigenic specific T cell immunity; (h) promoting CD4+ and/or CD8+ T cell activation; (i) alleviating T-cell suppression; (j) promoting NK cell activity; (k) promoting apoptosis or lysis of cancer cells; and/or (l) cytotoxic or cytostatic effect on cancer cells.

[0132] Accordingly, the present invention provides bispecific immunomodulatory antibodies. There are a number of formats that can be used in the present invention, as generally shown in FIG. 2, many of which are heterodimeric (although not all, as DVD-Ig, for example).

[0133] The heterodimeric antibodies constructs are based on the self-assembling nature of the two Fc domains of the heavy chains of antibodies, e.g. two “monomers” that assemble into a “dimer”. Heterodimeric antibodies are made by altering the amino acid sequence of each monomer as more fully discussed below. Thus, the present invention is generally directed to the creation of heterodimeric antibodies, which can co-engage two antigens in several ways, relying on amino acid variants in the constant regions that are different on each chain to promote heterodimeric formation and/or allow for ease of purification of heterodimers over the homodimers.

[0134] Thus, the present invention provides bispecific immunomodulatory antibodies. An ongoing problem in antibody technologies is the desire for “bispecific” antibodies that bind to two (or more) different antigens simultaneously, in general thus allowing the different antigens to be brought into proximity and resulting in new functionalities and new therapies. In general, these antibodies are made by including genes for each heavy and light chain into the host cells (generally, in the present invention, genes for two heavy chain monomers and a light chain as outlined herein). This generally results in the formation of the desired heterodimer (A-B), as well as the two homodimers (A-A and B-B). However, a major obstacle in the formation of bispecific antibodies is the difficulty in purifying the heterodimeric antibodies away from the homodimeric antibodies and/or biasing the formation of the heterodimer over the formation of the homodimers.

[0135] To solve this issue, there are a number of mechanisms that can be used to generate the heterodimers of the present invention. In addition, as will be appreciated by those in the art, these mechanisms can be combined to ensure high heterodimerization. Thus, amino acid variants that lead to the production of heterodimeric antibodies are referred to as “heterodimerization variants”. As discussed below, heterodimerization variants can include steric variants (e.g. the “knobs and holes” or “skew” variants described below and the “charge pairs” variants described below) as well as “pI variants”, which allows purification of homodimers away from heterodimers.

[0136] One mechanism is generally referred to in the art as “knobs and holes” (“KIH”) or sometimes herein as “skew” variants, referring to amino acid engineering that creates steric influences to favor heterodimeric formation and disfavor homodimeric formation can also optionally be used; this is sometimes referred to as “knobs and holes”; as described in Ridgway et al., Protein Engineering 9(7):617 (1996); Atwell et al., J. Mol. Biol. 1997 270:26; U.S. Pat. No. 8,216,805, US 2012/0149876, all of which are hereby incorporated by reference in their entirety. The Figures identify a number of “monomer A-monomer B” pairs that include “knobs and holes” amino acid substitutions. In addition, as described in Merchant et al., Nature Biotech. 16:677 (1998), these “knobs and hole” mutations can be combined with disulfide bonds to skew formation to heterodimerization. Of use in the present invention are T366S/L368A/Y407V paired with T366W, as well as this variant with a bridging disulfide, T366S/L368A/Y407V/Y349C paired with T366W/S354C, particularly in combination with other heterodimerization variants including pI variants as outlined below.

[0137] An additional mechanism that finds use in the generation of heterodimeric antibodies is sometimes referred to as “electrostatic steering” or “charge pairs” as described in Gunasekaran et al., J. Biol. Chem. 285(25):19637 (2010), hereby incorporated by reference in its entirety. This is sometimes referred to herein as “charge pairs”. In this embodiment, electrostatics are used to skew the formation towards heterodimerization. As those in the art will appreciate, these may also have an effect on pI, and thus on purification, and thus could in some cases also be considered pI variants. However, as these were generated to force heterodimerization and were not used as purification tools, they are classified as “steric variants”. These include, but are not limited to, D221E/P228E/L368E paired with D221R/P228R/K409R (e.g. these are “monomer corresponding sets) and C220E/P228E/368E paired with C220R/E224R/P228R/K409R and others shown in the Figures.

[0138] In the present invention, in some embodiments, pI variants are used to alter the pI of one or both of the monomers and thus allowing the isoelectric purification of A-A, A-B and B-B dimeric proteins.

[0139] In the present invention, there are several basic mechanisms that can lead to ease of purifying heterodimeric proteins; one relies on the use of pI variants, such that each monomer has a different pI, thus allowing the isoelectric purification of A-A, A-B and B-B dimeric proteins. Alternatively, some scaffold formats, such as the “triple F” or “bottle opener” format, also allows separation on the basis of size. As is further outlined below, it is also possible to “skew” the formation of heterodimers over homodimers. Thus, a combination of steric heterodimerization variants and pI or charge pair variants find particular use in the invention. Additionally, as more fully outlined below, scaffolds that utilize scFv(s) such as the Triple F format can include charged scFv linkers (either positive or negative), that give a further pI boost for purification purposes. As will be appreciated by those in the art, some Triple F formats are useful with just charged scFv linkers and no additional pI adjustments, although the invention does provide the use of skew variants with charged scFv linkers as well (and combinations of Fc, FcRn and KO variants discussed herein).

[0140] In the present invention that utilizes pI as a separation mechanism to allow the purification of heterodimeric proteins, amino acid variants can be introduced into one or both of the monomer polypeptides; that is, the pI of one of the monomers (referred to herein for simplicity as “monomer A”) can be engineered away from monomer B, or both monomer A and B change be changed, with the pI of monomer A increasing and the pI of monomer B decreasing. As is outlined more fully below, the pI changes of either or both monomers can be done by removing or adding a charged residue (e.g. a neutral amino acid is replaced by a positively or negatively charged amino acid residue, e.g. glycine to glutamic acid), changing a charged residue from positive or negative to the opposite charge (aspartic acid to lysine) or changing a charged residue to a neutral residue (e.g. loss of a charge; lysine to serine). A number of these variants are shown in the Figures. In addition, suitable pI variants for use in the creation of heterodimeric antibodies herein are those that are isotypic, e.g. importing pI variants from different IgG isotypes such that pI is changed without introducing significant immunogenicity; see FIG. 29 from US Publication No. 20140288275, hereby incorporated by reference in its entirety.

[0141] Accordingly, in this embodiment of the present invention provides for creating a sufficient change in pI in at least one of the monomers such that heterodimers can be separated from homodimers. As will be appreciated by those in the art, and as discussed further below, this can be done by using a “wild type” heavy chain constant region and a variant region that has been engineered to either increase or decrease its pI (wt A−+B or wt A−−B), or by increasing one region and decreasing the other region (A+−B− or A−B+).

[0142] Thus, in general, a component of some embodiments of the present invention are amino acid variants in the constant regions of antibodies that are directed to altering the isoelectric point (pI) of at least one, if not both, of the monomers of a dimeric protein to form “pI heterodimers” (when the protein is an antibody, these are referred to as “pI antibodies”) by incorporating amino acid substitutions (“pI variants” or “pI substitutions”) into one or both of the monomers. As shown herein, the separation of the heterodimers from the two homodimers can be accomplished if the pIs of the two monomers differ by as little as 0.1 pH unit, with 0.2, 0.3, 0.4 and 0.5 or greater all finding use in the present invention.

[0143] As will be appreciated by those in the art, the number of pI variants to be included on each or both monomer(s) to get good separation will depend in part on the starting pI of the scFv and Fab of interest. That is, to determine which monomer to engineer or in which “direction” (e.g. more positive or more negative), the Fv sequences of the two target antigens are calculated and a decision is made from there. As is known in the art, different Fvs will have different starting pIs which are exploited in the present invention. In general, as outlined herein, the pIs are engineered to result in a total pI difference of each monomer of at least about 0.1 logs, with 0.2 to 0.5 being preferred as outlined herein. Furthermore, as will be appreciated by those in the art and outlined herein, in some cases (depending on the format) heterodimers can be separated from homodimers on the basis of size (e.g. Molecular weight). For example, as shown in some embodiments of FIG. 2, some formats result in homodimers and heterodimers with different sizes (e.g. for bottle openers, one homodimer is a “dual scFv” format, one homodimer is a standard antibody, and the heterodimer has one Fab and one scFv).

[0144] In the case where pI variants are used to achieve purified heterodimers over homodimers, by using the constant region(s) of the heavy chain(s), a more modular approach to designing and purifying multispecific proteins, including antibodies, is provided. Thus, in some embodiments, heterodimerization variants (including skew and purification heterodimerization variants) are not included in the variable regions, such that each individual antibody must be engineered. In addition, in some embodiments, the possibility of immunogenicity resulting from the pI variants is significantly reduced by importing pI variants from different IgG isotypes such that pI is changed without introducing significant immunogenicity. Thus, an additional problem to be solved is the elucidation of low pI constant domains with high human sequence content, e.g. the minimization or avoidance of non-human residues at any particular position.

[0145] A side benefit that can occur with this pI engineering is also the extension of serum half-life and increased FcRn binding. That is, as described in U.S. Ser. No. 13/194,904 (incorporated by reference in its entirety), lowering the pI of antibody constant domains (including those found in antibodies and Fc fusions) can lead to longer serum retention in vivo. These pI variants for increased serum half life also facilitate pI changes for purification.

[0146] In addition, it should be noted that the pI variants of the heterodimerization variants give an additional benefit for the analytics and quality control process of bispecific antibodies, as the ability to either eliminate, minimize and distinguish when homodimers are present is significant. Similarly, the ability to reliably test the reproducibility of the heterodimeric protein production is important.

[0147] First and second antigens of the invention are herein referred to as antigen-1 and antigen-2 respectively, with one being a costimulatory receptor and one being a checkpoint receptor. One heterodimeric scaffold that finds particular use in the present invention is the “triple f” or “bottle opener” scaffold format. In this embodiment, one heavy chain of the antibody contains an single chain fv (“scfv”, as defined below) and the other heavy chain is a “regular” fab format, comprising a variable heavy chain and a light chain. This structure is sometimes referred to herein as “triple f” format (scfv-fab-fc) or the “bottle-opener” format, due to a rough visual similarity to a bottle-opener (see FIG. 2). The two chains are brought together by the use of amino acid variants in the constant regions (e.g. the Fc domain and/or the hinge region) that promote the formation of heterodimeric antibodies as is described more fully below.

[0148] There are several distinct advantages to the present “triple F” format. As is known in the art, antibody analogs relying on two scFv constructs often have stability and aggregation problems, which can be alleviated in the present invention by the addition of a “regular” heavy and light chain pairing. In addition, as opposed to formats that rely on two heavy chains and two light chains, there is no issue with the incorrect pairing of heavy and light chains (e.g. heavy 1 pairing with light 2, etc.)

[0149] Furthermore, as outlined herein, additional amino acid variants may be introduced into the bispecific antibodies of the invention, to add additional functionalities. For example, amino acid changes within the Fc region can be added (either to one monomer or both) to facilitate increased ADCC or CDC (e.g. altered binding to Fcγ receptors) as well as to increase binding to FcRn and/or increase serum half-life of the resulting molecules. As is further described herein and as will be appreciated by those in the art, any and all of the variants outlined herein can be optionally and independently combined with other variants.

[0150] Similarly, another category of functional variants are “Fcγ ablation variants” or “Fc knock out (FcKO or KO) variants. In these embodiments, for some therapeutic applications, it is desirable to reduce or remove the normal binding of the Fc domain to one or more or all of the Fcγ receptors (e.g. FcγR1, FcγRIIa, FcγRIIb, FcγRIIIa, etc.) to avoid additional mechanisms of action. That is, for example, it is generally desirable to ablate FcγRIIIa binding to eliminate or significantly reduce ADCC activity. Suitable ablation variants are shown in FIG. 6.

### IV. Definitions

[0151] In order that the application may be more completely understood, several definitions are set forth below. Such definitions are meant to encompass grammatical equivalents.

[0152] By “ablation” herein is meant a decrease or removal of activity. Thus for example, “ablating FcγR binding” means the Fc region amino acid variant has less than 50% starting binding as compared to an Fc region not containing the specific variant, with less than 70-80-90-95-98% loss of activity being preferred, and in general, with the activity being below the level of detectable binding in a Biacore assay. Of particular use in the ablation of FcγR binding are those shown in FIG. 6.

[0153] By “ADCC” or “antibody dependent cell-mediated cytotoxicity” as used herein is meant the cell-mediated reaction wherein nonspecific cytotoxic cells that express FcγRs recognize bound antibody on a target cell and subsequently cause lysis of the target cell. ADCC is correlated with binding to FcγRIIIa; increased binding to FcγRIIIa leads to an increase in ADCC activity. As is discussed herein, many embodiments of the invention ablate ADCC activity entirely.

[0154] By “ADCP” or antibody dependent cell-mediated phagocytosis as used herein is meant the cell-mediated reaction wherein nonspecific cytotoxic cells that express FcγRs recognize bound antibody on a target cell and subsequently cause phagocytosis of the target cell.

[0155] By “antigen binding domain” or “ABD” herein is meant a set of six Complementary Determining Regions (CDRs) that, when present as part of a polypeptide sequence, specifically binds a target antigen as discussed herein. Thus, a “immunomodulatoryantigen binding domain” binds a target immunomodulatoryantigen as outlined herein. As is known in the art, these CDRs are generally present as a first set of variable heavy CDRs (vhCDRs or V_{H}CDRs) and a second set of variable light CDRs (vlCDRs or V_{L}CDRs), each comprising three CDRs: vhCDR1, vhCDR2, vhCDR3 for the heavy chain and vlCDR1, vlCDR2 and vlCDR3 for the light. The CDRs are present in the variable heavy and variable light domains, respectively, and together form an Fv region. Thus, in some cases, the six CDRs of the antigen binding domain are contributed by a variable heavy and variable light chain. In a “Fab” format, the set of 6 CDRs are contributed by two different polypeptide sequences, the variable heavy domain (vh or V_{H}; containing the vhCDR1, vhCDR2 and vhCDR3) and the variable light domain (vl or V_{L}; containing the vlCDR1, vlCDR2 and vlCDR3), with the C-terminus of the vh domain being attached to the N-terminus of the CH1 domain of the heavy chain and the C-terminus of the vl domain being attached to the N-terminus of the constant light domain (and thus forming the light chain). In a scFv format, the vh and vl domains are covalently attached, generally through the use of a linker as outlined herein, into a single polypeptide sequence, which can be either (starting from the N-terminus) vh-linker-vl or vl-linker-vh, with the former being generally preferred (including optional domain linkers on each side, depending on the format used.

[0156] By “modification” herein is meant an amino acid substitution, insertion, and/or deletion in a polypeptide sequence or an alteration to a moiety chemically linked to a protein. For example, a modification may be an altered carbohydrate or PEG structure attached to a protein. By “amino acid modification” herein is meant an amino acid substitution, insertion, and/or deletion in a polypeptide sequence. For clarity, unless otherwise noted, the amino acid modification is always to an amino acid coded for by DNA, e.g. the 20 amino acids that have codons in DNA and RNA.

[0157] By “amino acid substitution” or “substitution” herein is meant the replacement of an amino acid at a particular position in a parent polypeptide sequence with a different amino acid. In particular, in some embodiments, the substitution is to an amino acid that is not naturally occurring at the particular position, either not naturally occurring within the organism or in any organism. For example, the substitution E272Y refers to a variant polypeptide, in this case an Fc variant, in which the glutamic acid at position 272 is replaced with tyrosine. For clarity, a protein which has been engineered to change the nucleic acid coding sequence but not change the starting amino acid (for example exchanging CGG (encoding arginine) to CGA (still encoding arginine) to increase host organism expression levels) is not an “amino acid substitution”; that is, despite the creation of a new gene encoding the same protein, if the protein has the same amino acid at the particular position that it started with, it is not an amino acid substitution.

[0158] By “amino acid insertion” or “insertion” as used herein is meant the addition of an amino acid sequence at a particular position in a parent polypeptide sequence. For example, −233E or 233E designates an insertion of glutamic acid after position 233 and before position 234. Additionally, −233ADE or A233ADE designates an insertion of AlaAspGlu after position 233 and before position 234.

[0159] By “amino acid deletion” or “deletion” as used herein is meant the removal of an amino acid sequence at a particular position in a parent polypeptide sequence. For example, E233- or E233#, E233( ) or E233del designates a deletion of glutamic acid at position 233. Additionally, EDA233- or EDA233# designates a deletion of the sequence GluAspAla that begins at position 233.

[0160] By “variant protein” or “protein variant”, or “variant” as used herein is meant a protein that differs from that of a parent protein by virtue of at least one amino acid modification. Protein variant may refer to the protein itself, a composition comprising the protein, or the amino sequence that encodes it. Preferably, the protein variant has at least one amino acid modification compared to the parent protein, e.g. from about one to about seventy amino acid modifications, and preferably from about one to about five amino acid modifications compared to the parent. As described below, in some embodiments the parent polypeptide, for example an Fc parent polypeptide, is a human wild type sequence, such as the Fc region from IgG1, IgG2, IgG3 or IgG4, although human sequences with variants can also serve as “parent polypeptides”, for example the IgG1/2 hybrid can be included. The protein variant sequence herein will preferably possess at least about 80% identity with a parent protein sequence, and most preferably at least about 90% identity, more preferably at least about 95-98-99% identity. Variant protein can refer to the variant protein itself, compositions comprising the protein variant, or the DNA sequence that encodes it.

[0161] Accordingly, by “antibody variant” or “variant antibody” as used herein is meant an antibody that differs from a parent antibody by virtue of at least one amino acid modification, “IgG variant” or “variant IgG” as used herein is meant an antibody that differs from a parent IgG (again, in many cases, from a human IgG sequence) by virtue of at least one amino acid modification, and “immunoglobulin variant” or “variant immunoglobulin” as used herein is meant an immunoglobulin sequence that differs from that of a parent immunoglobulin sequence by virtue of at least one amino acid modification. “Fc variant” or “variant Fc” as used herein is meant a protein comprising an amino acid modification in an Fc domain. The Fc variants of the present invention are defined according to the amino acid modifications that compose them. Thus, for example, N434S or 434S is an Fc variant with the substitution serine at position 434 relative to the parent Fc polypeptide, wherein the numbering is according to the EU index. Likewise, M428L/N434S defines an Fc variant with the substitutions M428L and N434S relative to the parent Fc polypeptide. The identity of the WT amino acid may be unspecified, in which case the aforementioned variant is referred to as 428L/434S. It is noted that the order in which substitutions are provided is arbitrary, that is to say that, for example, 428L/434S is the same Fc variant as M428L/N434S, and so on. For all positions discussed in the present invention that relate to antibodies, unless otherwise noted, amino acid position numbering is according to the EU index. The EU index or EU index as in Kabat or EU numbering scheme refers to the numbering of the EU antibody (Edelman et al., 1969, Proc Natl Acad Sci USA 63:78-85, hereby entirely incorporated by reference.) The modification can be an addition, deletion, or substitution. Substitutions can include naturally occurring amino acids and, in some cases, synthetic amino acids. Examples include U.S. Pat. No. 6,586,207; WO 98/48032; WO 03/073238; US2004-0214988A1; WO 05/35727A2; WO 05/74524A2; J. W. Chin et al., (2002), Journal of the American Chemical Society 124:9026-9027; J. W. Chin, & P. G. Schultz, (2002), ChemBioChem 11:1135-1137; J. W. Chin, et al., (2002), PICAS United States of America 99:11020-11024; and, L. Wang, & P. G. Schultz, (2002), Chem. 1-10, all entirely incorporated by reference.

[0162] As used herein, “protein” herein is meant at least two covalently attached amino acids, which includes proteins, polypeptides, oligopeptides and peptides. The peptidyl group may comprise naturally occurring amino acids and peptide bonds, or synthetic peptidomimetic structures, i.e. “analogs”, such as peptoids (see Simon et al., PNAS USA 89(20):9367 (1992), entirely incorporated by reference). The amino acids may either be naturally occurring or synthetic (e.g. not an amino acid that is coded for by DNA); as will be appreciated by those in the art. For example, homo-phenylalanine, citrulline, ornithine and noreleucine are considered synthetic amino acids for the purposes of the invention, and both D- and L-(R or S) configured amino acids may be utilized. The variants of the present invention may comprise modifications that include the use of synthetic amino acids incorporated using, for example, the technologies developed by Schultz and colleagues, including but not limited to methods described by Cropp & Shultz, 2004, Trends Genet. 20(12):625-30, Anderson et al., 2004, Proc Natl Acad Sci USA 101 (2):7566-71, Zhang et al., 2003, 303(5656):371-3, and Chin et al., 2003, Science 301(5635):964-7, all entirely incorporated by reference. In addition, polypeptides may include synthetic derivatization of one or more side chains or termini, glycosylation, PEGylation, circular permutation, cyclization, linkers to other molecules, fusion to proteins or protein domains, and addition of peptide tags or labels.

[0163] By “residue” as used herein is meant a position in a protein and its associated amino acid identity. For example, Asparagine 297 (also referred to as Asn297 or N297) is a residue at position 297 in the human antibody IgG1.

[0164] By “Fab” or “Fab region” as used herein is meant the polypeptide that comprises the VH, CH1, VL, and CL immunoglobulin domains. Fab may refer to this region in isolation, or this region in the context of a full length antibody, antibody fragment or Fab fusion protein.

[0165] By “Fv” or “Fv fragment” or “Fv region” as used herein is meant a polypeptide that comprises the VL and VH domains of a single ABD. As will be appreciated by those in the art, these generally are made up of two chains, or can be combined (generally with a linker as discussed herein) to form an scFv. In some cases, for example in the “central-Fv” and “DVD-Ig” formats, an “extra” vh and vl domain is added that serves as a scFv but where the vh and vl domains are not linked using a scFv linker between them.

[0166] By “single chain Fv” or “scFv” herein is meant a variable heavy domain covalently attached to a variable light domain, generally using a scFv linker as discussed herein, to form a scFv or scFv domain. A scFv domain can be in either orientation from N- to C-terminus (vh-linker-vl or vl-linker-vh).

[0167] By “IgG subclass modification” or “isotype modification” as used herein is meant an amino acid modification that converts one amino acid of one IgG isotype to the corresponding amino acid in a different, aligned IgG isotype. For example, because IgG1 comprises a tyrosine and IgG2 a phenylalanine at EU position 296, a F296Y substitution in IgG2 is considered an IgG subclass modification.

[0168] By “non-naturally occurring modification” as used herein is meant an amino acid modification that is not isotypic. For example, because none of the IgGs comprise a serine at position 434, the substitution 434S in IgG1, IgG2, IgG3, or IgG4 (or hybrids thereof) is considered a non-naturally occurring modification.

[0169] By “amino acid” and “amino acid identity” as used herein is meant one of the 20 naturally occurring amino acids that are coded for by DNA and RNA.

[0170] By “effector function” as used herein is meant a biochemical event that results from the interaction of an antibody Fc region with an Fc receptor or ligand. Effector functions include but are not limited to ADCC, ADCP, and CDC.

[0171] By “IgG Fc ligand” as used herein is meant a molecule, preferably a polypeptide, from any organism that binds to the Fc region of an IgG antibody to form an Fc/Fc ligand complex. Fc ligands include but are not limited to FcγRIs, FcγRIIs, FcγRIIIs, FcRn, C1q, C3, mannan binding lectin, mannose receptor, staphylococcal protein A, streptococcal protein G, and viral FcγR. Fc ligands also include Fc receptor homologs (FcRH), which are a family of Fc receptors that are homologous to the FcγRs (Davis et al., 2002, Immunological Reviews 190:123-136, entirely incorporated by reference). Fc ligands may include undiscovered molecules that bind Fc. Particular IgG Fc ligands are FcRn and Fc gamma receptors. By “Fc ligand” as used herein is meant a molecule, preferably a polypeptide, from any organism that binds to the Fc region of an antibody to form an Fc/Fc ligand complex.

[0172] By “Fc gamma receptor”, “FcγR” or “FcgammaR” as used herein is meant any member of the family of proteins that bind the IgG antibody Fc region and is encoded by an FcγR gene. In humans this family includes but is not limited to FcγRI (CD64), including isoforms FcγRIa, FcγRIb, and FcγRIc; FcγRII (CD32), including isoforms FcγRIIa (including allotypes H131 and R131), FcγRIIb (including FcγRIIb-1 and FcγRIIb-2), and FcγRIIc; and FcγRIII (CD16), including isoforms FcγRIIIa (including allotypes V158 and F158) and FcγRIIIb (including allotypes FcγRIIb-NA1 and FcγRIIb-NA2) (Jefferis et al., 2002, Immunol Lett 82:57-65, entirely incorporated by reference), as well as any undiscovered human FcγRs or FcγR isoforms or allotypes. An FcγR may be from any organism, including but not limited to humans, mice, rats, rabbits, and monkeys. Mouse FcγRs include but are not limited to FcγRI (CD64), FcγRII (CD32), FcγRIII (CD16), and FcγRIII-2 (CD16-2), as well as any undiscovered mouse FcγRs or FcγR isoforms or allotypes.

[0173] By “FcRn” or “neonatal Fc Receptor” as used herein is meant a protein that binds the IgG antibody Fc region and is encoded at least in part by an FcRn gene. The FcRn may be from any organism, including but not limited to humans, mice, rats, rabbits, and monkeys. As is known in the art, the functional FcRn protein comprises two polypeptides, often referred to as the heavy chain and light chain. The light chain is beta-2-microglobulin and the heavy chain is encoded by the FcRn gene. Unless otherwise noted herein, FcRn or an FcRn protein refers to the complex of FcRn heavy chain with beta-2-microglobulin. A variety of FcRn variants used to increase binding to the FcRn receptor, and in some cases, to increase serum half-life, are shown in the Figure Legend of FIG. 83.

[0174] By “parent polypeptide” as used herein is meant a starting polypeptide that is subsequently modified to generate a variant. The parent polypeptide may be a naturally occurring polypeptide, or a variant or engineered version of a naturally occurring polypeptide. Parent polypeptide may refer to the polypeptide itself, compositions that comprise the parent polypeptide, or the amino acid sequence that encodes it. Accordingly, by “parent immunoglobulin” as used herein is meant an unmodified immunoglobulin polypeptide that is modified to generate a variant, and by “parent antibody” as used herein is meant an unmodified antibody that is modified to generate a variant antibody. It should be noted that “parent antibody” includes known commercial, recombinantly produced antibodies as outlined below.

[0175] By “Fc” or “Fc region” or “Fc domain” as used herein is meant the polypeptide comprising the constant region of an antibody excluding the first constant region immunoglobulin domain and in some cases, part of the hinge. Thus Fc refers to the last two constant region immunoglobulin domains of IgA, IgD, and IgG, the last three constant region immunoglobulin domains of IgE and IgM, and the flexible hinge N-terminal to these domains. For IgA and IgM, Fc may include the J chain. For IgG, the Fc domain comprises immunoglobulin domains Cγ2 and Cγ3 (Cγ2 and Cγ3) and the lower hinge region between Cγ1 (Cγ1) and Cγ2 (Cγ2). Although the boundaries of the Fc region may vary, the human IgG heavy chain Fc region is usually defined to include residues C226 or P230 to its carboxyl-terminus, wherein the numbering is according to the EU index as in Kabat. In some embodiments, as is more fully described below, amino acid modifications are made to the Fc region, for example to alter binding to one or more FcγR receptors or to the FcRn receptor.

[0176] By “heavy constant region” herein is meant the CH1-hinge-CH2-CH3 portion of an antibody.

[0177] By “Fc fusion protein” or “immunoadhesin” herein is meant a protein comprising an Fc region, generally linked (optionally through a linker moiety, as described herein) to a different protein, such as a binding moiety to a target protein, as described herein. In some cases, one monomer of the heterodimeric antibody comprises an antibody heavy chain (either including an scFv or further including a light chain) and the other monomer is a Fc fusion, comprising a variant Fc domain and a ligand. In some embodiments, these “half antibody-half fusion proteins” are referred to as “Fusionbodies”.

[0178] By “position” as used herein is meant a location in the sequence of a protein. Positions may be numbered sequentially, or according to an established format, for example the EU index for antibody numbering.

[0179] By “target antigen” as used herein is meant the molecule that is bound specifically by the variable region of a given antibody. A target antigen may be a protein, carbohydrate, lipid, or other chemical compound. Suitable target antigens are described below.

[0180] By “strandedness” in the context of the monomers of the heterodimeric antibodies of the invention herein is meant that, similar to the two strands of DNA that “match”, heterodimerization variants are incorporated into each monomer so as to preserve the ability to “match” to form heterodimers. For example, if some pI variants are engineered into monomer A (e.g. making the pI higher) then steric variants that are “charge pairs” that can be utilized as well do not interfere with the pI variants, e.g. the charge variants that make a pI higher are put on the same “strand” or “monomer” to preserve both functionalities. Similarly, for “skew” variants that come in pairs of a set as more fully outlined below, the skilled artisan will consider pI in deciding into which strand or monomer that incorporates one set of the pair will go, such that pI separation is maximized using the pI of the skews as well.

[0181] By “target cell” as used herein is meant a cell that expresses a target antigen.

[0182] By “variable region” as used herein is meant the region of an immunoglobulin that comprises one or more Ig domains substantially encoded by any of the V.kappa., V.lamda., and/or VH genes that make up the kappa, lambda, and heavy chain immunoglobulin genetic loci respectively.

[0183] By “wild type or WT” herein is meant an amino acid sequence or a nucleotide sequence that is found in nature, including allelic variations. A WT protein has an amino acid sequence or a nucleotide sequence that has not been intentionally modified.

[0184] The antibodies of the present invention are generally isolated or recombinant. “Isolated,” when used to describe the various polypeptides disclosed herein, means a polypeptide that has been identified and separated and/or recovered from a cell or cell culture from which it was expressed. Ordinarily, an isolated polypeptide will be prepared by at least one purification step. An “isolated antibody,” refers to an antibody which is substantially free of other antibodies having different antigenic specificities. “Recombinant” means the antibodies are generated using recombinant nucleic acid techniques in exogeneous host cells.

[0185] “Percent (%) amino acid sequence identity” with respect to a protein sequence is defined as the percentage of amino acid residues in a candidate sequence that are identical with the amino acid residues in the specific (parental) sequence, after aligning the sequences and introducing gaps, if necessary, to achieve the maximum percent sequence identity, and not considering any conservative substitutions as part of the sequence identity. Alignment for purposes of determining percent amino acid sequence identity can be achieved in various ways that are within the skill in the art, for instance, using publicly available computer software such as BLAST, BLAST-2, ALIGN or Megalign (DNASTAR) software. Those skilled in the art can determine appropriate parameters for measuring alignment, including any algorithms needed to achieve maximal alignment over the full length of the sequences being compared. One particular program is the ALIGN-2 program outlined at paragraphs [0279] to [0280] of US Pub. No. 20160244525, hereby incorporated by reference.

[0186] The degree of identity between an amino acid sequence of the present invention (“invention sequence”) and the parental amino acid sequence is calculated as the number of exact matches in an alignment of the two sequences, divided by the length of the “invention sequence,” or the length of the parental sequence, whichever is the shortest. The result is expressed in percent identity.

[0187] In some embodiments, two or more amino acid sequences are at least 50%, 60%, 70%, 80%, or 90% identical. In some embodiments, two or more amino acid sequences are at least 95%, 97%, 98%, 99%, or even 100% identical.

[0188] “Specific binding” or “specifically binds to” or is “specific for” a particular antigen or an epitope means binding that is measurably different from a non-specific interaction. Specific binding can be measured, for example, by determining binding of a molecule compared to binding of a control molecule, which generally is a molecule of similar structure that does not have binding activity. For example, specific binding can be determined by competition with a control molecule that is similar to the target.

[0189] Specific binding for a particular antigen or an epitope can be exhibited, for example, by an antibody having a KD for an antigen or epitope of at least about 10⁻⁴ M, at least about 10⁻⁵ M, at least about 10⁻⁶ M, at least about 10⁻⁷ M, at least about 10⁻⁸ M, at least about 10⁻⁹ M, alternatively at least about 10⁻¹⁰ M, at least about 10⁻¹¹ M, at least about 10⁻¹² M, or greater, where KD refers to a dissociation rate of a particular antibody-antigen interaction. Typically, an antibody that specifically binds an antigen will have a KD that is 20-, 50-, 100-, 500-, 1000-, 5,000-, 10,000- or more times greater for a control molecule relative to the antigen or epitope.

[0190] Also, specific binding for a particular antigen or an epitope can be exhibited, for example, by an antibody having a KA or Ka for an antigen or epitope of at least 20-, 50-, 100-, 500-, 1000-, 5,000-, 10,000- or more times greater for the epitope relative to a control, where KA or Ka refers to an association rate of a particular antibody-antigen interaction. Binding affinity is generally measured using a Biacore assay.

### V. Antibodies

[0191] The present invention relates to the generation of bispecific immunomodulatory antibodies that bind two different immunomodulatory antigens as discussed herein. As is discussed below, the term “antibody” is used generally. Antibodies that find use in the present invention can take on a number of formats as described herein.

[0192] Traditional antibody structural units typically comprise a tetramer. Each tetramer is typically composed of two identical pairs of polypeptide chains, each pair having one “light” (typically having a molecular weight of about 25 kDa) and one “heavy” chain (typically having a molecular weight of about 50-70 kDa). Human light chains are classified as kappa and lambda light chains. The present invention is directed to bispecific antibodies that generally are based on the IgG class, which has several subclasses, including, but not limited to IgG1, IgG2, IgG3, and IgG4. In general, IgG1, IgG2 and IgG4 are used more frequently than IgG3. It should be noted that IgG1 has different allotypes with polymorphisms at 356 (D or E) and 358 (L or M). The sequences depicted herein use the 356D/358M allotype, however the other allotype is included herein. That is, any sequence inclusive of an IgG1 Fc domain included herein can have 356E/358L replacing the 356D/358M allotype.

[0193] In addition, many of the sequences herein have at least one of the cysteines at position 220 replaced by a serine; generally, this is the on the “scFv monomer” side for most of the sequences depicted herein, although it can also be on the “Fab monomer” side, or both, to reduce disulfide formation. Specifically included within the sequences herein are one or both of these cysteines replaced (C220S).

[0194] Thus, “isotype” as used herein is meant any of the subclasses of immunoglobulins defined by the chemical and antigenic characteristics of their constant regions. It should be understood that therapeutic antibodies can also comprise hybrids of isotypes and/or subclasses. For example, as shown in US Publication 2009/0163699, incorporated by reference, the present invention covers pI engineering of IgG1/G2 hybrids.

[0195] The amino-terminal portion of each chain includes a variable region of about 100 to 110 or more amino acids primarily responsible for antigen recognition, generally referred to in the art and herein as the “Fv domain” or “Fv region”. In the variable region, three loops are gathered for each of the V domains of the heavy chain and light chain to form an antigen-binding site. Each of the loops is referred to as a complementarity-determining region (hereinafter referred to as a “CDR”), in which the variation in the amino acid sequence is most significant. “Variable” refers to the fact that certain segments of the variable region differ extensively in sequence among antibodies. Variability within the variable region is not evenly distributed. Instead, the V regions consist of relatively invariant stretches called framework regions (FRs) of 15-30 amino acids separated by shorter regions of extreme variability called “hypervariable regions” that are each 9-15 amino acids long or longer.

[0196] Each VH and VL is composed of three hypervariable regions (“complementary determining regions,” “CDRs”) and four FRs, arranged from amino-terminus to carboxy-terminus in the following order: FR1-CDR1-FR2-CDR2-FR3-CDR3-FR4.

[0197] The hypervariable region generally encompasses amino acid residues from about amino acid residues 24-34 (LCDR1; “L” denotes light chain), 50-56 (LCDR2) and 89-97 (LCDR3) in the light chain variable region and around about 31-35B (HCDR1; “H” denotes heavy chain), 50-65 (HCDR2), and 95-102 (HCDR3) in the heavy chain variable region; Kabat et al., SEQUENCES OF PROTEINS OF IMMUNOLOGICAL INTEREST, 5th Ed. Public Health Service, National Institutes of Health, Bethesda, Md. (1991) and/or those residues forming a hypervariable loop (e.g. residues 26-32 (LCDR1), 50-52 (LCDR2) and 91-96 (LCDR3) in the light chain variable region and 26-32 (HCDR1), 53-55 (HCDR2) and 96-101 (HCDR3) in the heavy chain variable region; Chothia and Lesk (1987) J. Mol. Biol. 196:901-917. Specific CDRs of the invention are described below.

[0198] As will be appreciated by those in the art, the exact numbering and placement of the CDRs can be different among different numbering systems. However, it should be understood that the disclosure of a variable heavy and/or variable light sequence includes the disclosure of the associated (inherent) CDRs. Accordingly, the disclosure of each variable heavy region is a disclosure of the vhCDRs (e.g. vhCDR1, vhCDR2 and vhCDR3) and the disclosure of each variable light region is a disclosure of the vlCDRs (e.g. vlCDR1, vlCDR2 and vlCDR3).

[0199] A useful comparison of CDR numbering is as below, see Lafranc et al., Dev. Comp. Immunol. 27(1):55-77 (2003):

TABLE 1

| | Kabat + | | | | | | |
|---|---|---|---|---|---|---|---|
| | Chothia | IMGT | Kabat | AbM | Chothia | Contact | Xencor |
| vhCDR1 | 26-35 | 27-38 | 31-35 | 26-35 | 26-32 | 30-35 | 27-35 |
| vhCDR2 | 50-65 | 56-65 | 50-65 | 50-58 | 52-56 | 47-58 | 54-61 |
| vhCDR3 | 95-102 | 105-117 | 95-102 | 95-102 | 95-102 | 93-101 | 103-116 |
| vlCDR1 | 24-34 | 27-38 | 24-34 | 24-34 | 24-34 | 30-36 | 27-38 |
| vlCDR2 | 50-56 | 56-65 | 50-56 | 50-56 | 50-56 | 46-55 | 56-62 |
| vlCDR3 | 89-97 | 105-117 | 89-97 | 89-97 | 89-97 | 89-96 | 97-105 |

[0200] Throughout the present specification, the Kabat numbering system is generally used when referring to a residue in the variable domain (approximately, residues 1-107 of the light chain variable region and residues 1-113 of the heavy chain variable region) and the EU numbering system for Fc regions (e.g, Kabat et al., supra (1991)).

[0201] The present invention provides a large number of different CDR sets. In this case, a “full CDR set” comprises the three variable light and three variable heavy CDRs, e.g. a vlCDR1, vlCDR2, vlCDR3, vhCDR1, vhCDR2 and vhCDR3. These can be part of a larger variable light or variable heavy domain, respectfully. In addition, as more fully outlined herein, the variable heavy and variable light domains can be on separate polypeptide chains, when a heavy and light chain is used (for example when Fabs are used), or on a single polypeptide chain in the case of scFv sequences.

[0202] The CDRs contribute to the formation of the antigen-binding, or more specifically, epitope binding site of antibodies. “Epitope” refers to a determinant that interacts with a specific antigen binding site in the variable region of an antibody molecule known as a paratope. Epitopes are groupings of molecules such as amino acids or sugar side chains and usually have specific structural characteristics, as well as specific charge characteristics. A single antigen may have more than one epitope.

[0203] The epitope may comprise amino acid residues directly involved in the binding (also called immunodominant component of the epitope) and other amino acid residues, which are not directly involved in the binding, such as amino acid residues which are effectively blocked by the specifically antigen binding peptide; in other words, the amino acid residue is within the footprint of the specifically antigen binding peptide.

[0204] Epitopes may be either conformational or linear. A conformational epitope is produced by spatially juxtaposed amino acids from different segments of the linear polypeptide chain. A linear epitope is one produced by adjacent amino acid residues in a polypeptide chain. Conformational and nonconformational epitopes may be distinguished in that the binding to the former but not the latter is lost in the presence of denaturing solvents.

[0205] An epitope typically includes at least 3, and more usually, at least 5 or 8-10 amino acids in a unique spatial conformation. Antibodies that recognize the same epitope can be verified in a simple immunoassay showing the ability of one antibody to block the binding of another antibody to a target antigen, for example “binning.” As outlined below, the invention not only includes the enumerated antigen binding domains and antibodies herein, but those that compete for binding with the epitopes bound by the enumerated antigen binding domains.

[0206] The carboxy-terminal portion of each chain defines a constant region primarily responsible for effector function. Kabat et al. collected numerous primary sequences of the variable regions of heavy chains and light chains. Based on the degree of conservation of the sequences, they classified individual primary sequences into the CDR and the framework and made a list thereof (see SEQUENCES OF IMMUNOLOGICAL INTEREST, 5th edition, NIH publication, No. 91-3242, E. A. Kabat et al., entirely incorporated by reference).

[0207] In the IgG subclass of immunoglobulins, there are several immunoglobulin domains in the heavy chain. By “immunoglobulin (Ig) domain” herein is meant a region of an immunoglobulin having a distinct tertiary structure. Of interest in the present invention are the heavy chain domains, including, the constant heavy (CH) domains and the hinge domains. In the context of IgG antibodies, the IgG isotypes each have three CH regions. Accordingly, “CH” domains in the context of IgG are as follows: “CH1” refers to positions 118-220 according to the EU index as in Kabat. “CH2” refers to positions 237-340 according to the EU index as in Kabat, and “CH3” refers to positions 341-447 according to the EU index as in Kabat. As shown herein and described below, the pI variants can be in one or more of the CH regions, as well as the hinge region, discussed below.

[0208] Another type of Ig domain of the heavy chain is the hinge region. By “hinge” or “hinge region” or “antibody hinge region” or “immunoglobulin hinge region” herein is meant the flexible polypeptide comprising the amino acids between the first and second constant domains of an antibody. Structurally, the IgG CH1 domain ends at EU position 220, and the IgG CH2 domain begins at residue EU position 237. Thus for IgG the antibody hinge is herein defined to include positions 221 (D221 in IgG1) to 236 (G236 in IgG1), wherein the numbering is according to the EU index as in Kabat. In some embodiments, for example in the context of an Fc region, the lower hinge is included, with the “lower hinge” generally referring to positions 226 or 230. As noted herein, pI variants can be made in the hinge region as well.

[0209] The light chain generally comprises two domains, the variable light domain (containing the light chain CDRs and together with the variable heavy domains forming the Fv region), and a constant light chain region (often referred to as CL or Cκ.

[0210] Another region of interest for additional substitutions, outlined below, is the Fc region.

[0211] Thus, the present invention provides different antibody domains. As described herein and known in the art, the heterodimeric antibodies of the invention comprise different domains within the heavy and light chains, which can be overlapping as well. These domains include, but are not limited to, the Fc domain, the CH1 domain, the CH2 domain, the CH3 domain, the hinge domain, the heavy constant domain (CH1-hinge-Fc domain or CH1-hinge-CH2-CH3), the variable heavy domain, the variable light domain, the light constant domain, Fab domains and scFv domains.

[0212] Thus, the “Fc domain” includes the -CH2-CH3 domain, and optionally a hinge domain. In the embodiments herein, when a scFv is attached to an Fc domain, it is the C-terminus of the scFv construct that is attached to all or part of the hinge of the Fc domain; for example, it is generally attached to the sequence EPKS which is the beginning of the hinge. The heavy chain comprises a variable heavy domain and a constant domain, which includes a CH1-optional hinge-Fc domain comprising a CH2-CH3. The light chain comprises a variable light chain and the light constant domain. A scFv comprises a variable heavy chain, an scFv linker, and a variable light domain. In most of the constructs and sequences outlined herein, C-terminus of the variable light chain is attached to the N-terminus of the scFv linker, the C-terminus of which is attached to the N-terminus of a variable heavy chain (N-vh-linker-vl-C) although that can be switched (N-vl-linker-vh-C). Some embodiments of the invention comprise at least one scFv domain, which, while not naturally occurring, generally includes a variable heavy domain and a variable light domain, linked together by a scFv linker. As outlined herein, while the scFv domain is generally from N- to C-terminus oriented as vh-scFv linker-vl, this can be reversed for any of the scFv domains (or those constructed using vh and vl sequences from Fabs), to vl-scFv linker-vh, with optional linkers at one or both ends depending on the format (see generally FIG. 2).

[0213] As shown herein, there are a number of suitable scFv linkers that can be used, including traditional peptide bonds, generated by recombinant techniques. The linker peptide may predominantly include the following amino acid residues: Gly, Ser, Ala, or Thr. The linker peptide should have a length that is adequate to link two molecules in such a way that they assume the correct conformation relative to one another so that they retain the desired activity. In one embodiment, the linker is from about 1 to 50 amino acids in length, preferably about 1 to 30 amino acids in length. In one embodiment, linkers of 1 to 20 amino acids in length may be used, with from about 5 to about 10 amino acids finding use in some embodiments. Useful linkers include glycine-serine polymers, including for example (GS)n, (GSGGS)n, (GGGGS)n, and (GGGS)n, where n is an integer of at least one (and generally from 3 to 4), glycine-alanine polymers, alanine-serine polymers, and other flexible linkers. Alternatively, a variety of nonproteinaceous polymers, including but not limited to polyethylene glycol (PEG), polypropylene glycol, polyoxyalkylenes, or copolymers of polyethylene glycol and polypropylene glycol, may find use as linkers, that is may find use as linkers.

[0214] Other linker sequences may include any sequence of any length of CL/CH1 domain but not all residues of CL/CH1 domain; for example the first 5-12 amino acid residues of the CL/CH1 domains. Linkers can be derived from immunoglobulin light chain, for example Cκ or Cλ. Linkers can be derived from immunoglobulin heavy chains of any isotype, including for example Cγ1, Cγ2, Cγ3, Cγ4, Cα1, Cα2, Cδ, Cε, and Cμ. Linker sequences may also be derived from other proteins such as Ig-like proteins (e.g. TCR, FcR, KIR), hinge region-derived sequences, and other natural sequences from other proteins.

[0215] In some embodiments, the linker is a “domain linker”, used to link any two domains as outlined herein together. While any suitable linker can be used, many embodiments utilize a glycine-serine polymer, including for example (GS)n, (GSGGS)n, (GGGGS)n, and (GGGS)n, where n is an integer of at least one (and generally from 3 to 4 to 5) as well as any peptide sequence that allows for recombinant attachment of the two domains with sufficient length and flexibility to allow each domain to retain its biological function. In some cases, and with attention being paid to “strandedness”, as outlined below, charged domain linkers, as used in some embodiments of scFv linkers can be used.

[0216] In some embodiments, the scFv linker is a charged scFv linker, a number of which are shown in FIG. 8. Accordingly, the present invention further provides charged scFv linkers, to facilitate the separation in pI between a first and a second monomer. That is, by incorporating a charged scFv linker, either positive or negative (or both, in the case of scaffolds that use scFvs on different monomers), this allows the monomer comprising the charged linker to alter the pI without making further changes in the Fc domains. These charged linkers can be substituted into any scFv containing standard linkers. Again, as will be appreciated by those in the art, charged scFv linkers are used on the correct “strand” or monomer, according to the desired changes in pI. For example, as discussed herein, to make triple F format heterodimeric antibody, the original pI of the Fv region for each of the desired antigen binding domains are calculated, and one is chosen to make an scFv, and depending on the pI, either positive or negative linkers are chosen.

[0217] Charged domain linkers can also be used to increase the pI separation of the monomers of the invention as well, and thus those included in FIG. 8 can be used in any embodiment herein where a linker is utilized.

[0218] In one embodiment, the antibody is an antibody fragment, as long as it contains at least one constant domain which can be engineered to produce heterodimers, such as pI engineering. Other antibody fragments that can be used include fragments that contain one or more of the CH1, CH2, CH3, hinge and CL domains of the invention that have been pI engineered. In particular, the formats depicted in FIG. 1 are antibodies, usually referred to as “heterodimeric antibodies”, meaning that the protein has at least two associated Fc sequences self-assembled into a heterodimeric Fc domain and at least two Fv regions, whether as Fabs or as scFvs.

[0219] A. Chimeric and Humanized Antibodies

[0220] In some embodiments, the antibodies herein can be derived from a mixture from different species, e.g. a chimeric antibody and/or a humanized antibody. In general, both “chimeric antibodies” and “humanized antibodies” refer to antibodies that combine regions from more than one species. For example, “chimeric antibodies” traditionally comprise variable region(s) from a mouse (or rat, in some cases) and the constant region(s) from a human. “Humanized antibodies” generally refer to non-human antibodies that have had the variable-domain framework regions swapped for sequences found in human antibodies. Generally, in a humanized antibody, the entire antibody, except the CDRs, is encoded by a polynucleotide of human origin or is identical to such an antibody except within its CDRs. The CDRs, some or all of which are encoded by nucleic acids originating in a non-human organism, are grafted into the beta-sheet framework of a human antibody variable region to create an antibody, the specificity of which is determined by the engrafted CDRs. The creation of such antibodies is described in, e.g., WO 92/11018, Jones, 1986, Nature 321:522-525, Verhoeyen et al., 1988, Science 239:1534-1536, all entirely incorporated by reference. “Backmutation” of selected acceptor framework residues to the corresponding donor residues is often required to regain affinity that is lost in the initial grafted construct (U.S. Pat. No. 5,530,101; U.S. Pat. No. 5,585,089; U.S. Pat. No. 5,693,761; U.S. Pat. No. 5,693,762; U.S. Pat. No. 6,180,370; U.S. Pat. No. 5,859,205; U.S. Pat. No. 5,821,337; U.S. Pat. No. 6,054,297; U.S. Pat. No. 6,407,213, all entirely incorporated by reference). The humanized antibody optimally also will comprise at least a portion of an immunoglobulin constant region, typically that of a human immunoglobulin, and thus will typically comprise a human Fc region. Humanized antibodies can also be generated using mice with a genetically engineered immune system. Roque et al., 2004, Biotechnol. Prog. 20:639-654, entirely incorporated by reference. A variety of techniques and methods for humanizing and reshaping non-human antibodies are well known in the art (See Tsurushita & Vasquez, 2004, Humanization of Monoclonal Antibodies, Molecular Biology of B Cells, 533-545, Elsevier Science (USA), and references cited therein, all entirely incorporated by reference). Humanization methods include but are not limited to methods described in Jones et al., 1986, Nature 321:522-525; Riechmann et al., 1988; Nature 332:323-329; Verhoeyen et al., 1988, Science, 239:1534-1536; Queen et al., 1989, Proc Natl Acad Sci, USA 86:10029-33; He et al., 1998, J. Immunol. 160: 1029-1035; Carter et al., 1992, Proc Natl Acad Sci USA 89:4285-9, Presta et al., 1997, Cancer Res. 57(20):4593-9; Gorman et al., 1991, Proc. Natl. Acad. Sci. USA 88:4181-4185; O'Connor et al., 1998, Protein Eng 11:321-8, all entirely incorporated by reference. Humanization or other methods of reducing the immunogenicity of nonhuman antibody variable regions may include resurfacing methods, as described for example in Roguska et al., 1994, Proc. Natl. Acad. Sci. USA 91:969-973, entirely incorporated by reference.

[0221] In certain embodiments, the antibodies of the invention comprise a heavy chain variable region from a particular germline heavy chain immunoglobulin gene and/or a light chain variable region from a particular germline light chain immunoglobulin gene. For example, such antibodies may comprise or consist of a human antibody comprising heavy or light chain variable regions that are “the product of” or “derived from” a particular germline sequence. A human antibody that is “the product of” or “derived from” a human germline immunoglobulin sequence can be identified as such by comparing the amino acid sequence of the human antibody to the amino acid sequences of human germline immunoglobulins and selecting the human germline immunoglobulin sequence that is closest in sequence (i.e., greatest % identity) to the sequence of the human antibody. A human antibody that is “the product of” or “derived from” a particular human germline immunoglobulin sequence may contain amino acid differences as compared to the germline sequence, due to, for example, naturally-occurring somatic mutations or intentional introduction of site-directed mutation. However, a humanized antibody typically is at least 90% identical in amino acids sequence to an amino acid sequence encoded by a human germline immunoglobulin gene and contains amino acid residues that identify the antibody as being derived from human sequences when compared to the germline immunoglobulin amino acid sequences of other species (e.g., murine germline sequences). In certain cases, a humanized antibody may be at least 95, 96, 97, 98 or 99%, or even at least 96%, 97%, 98%, or 99% identical in amino acid sequence to the amino acid sequence encoded by the germline immunoglobulin gene. Typically, a humanized antibody derived from a particular human germline sequence will display no more than 10-20 amino acid differences from the amino acid sequence encoded by the human germline immunoglobulin gene (prior to the introduction of any skew, pI and ablation variants herein; that is, the number of variants is generally low, prior to the introduction of the variants of the invention). In certain cases, the humanized antibody may display no more than 5, or even no more than 4, 3, 2, or 1 amino acid difference from the amino acid sequence encoded by the germline immunoglobulin gene (again, prior to the introduction of any skew, pI and ablation variants herein; that is, the number of variants is generally low, prior to the introduction of the variants of the invention).

[0222] In one embodiment, the parent antibody has been affinity matured, as is known in the art. Structure-based methods may be employed for humanization and affinity maturation, for example as described in U.S. Ser. No. 11/004,590. Selection based methods may be employed to humanize and/or affinity mature antibody variable regions, including but not limited to methods described in Wu et al., 1999, J. Mol. Biol. 294:151-162; Baca et al., 1997, J. Biol. Chem. 272(16):10678-10684; Rosok et al., 1996, J. Biol. Chem. 271(37): 22611-22618; Rader et al., 1998, Proc. Natl. Acad. Sci. USA 95: 8910-8915; Krauss et al., 2003, Protein Engineering 16(10):753-759, all entirely incorporated by reference. Other humanization methods may involve the grafting of only parts of the CDRs, including but not limited to methods described in U.S. Ser. No. 09/810,510; Tan et al., 2002, J. Immunol. 169:1119-1125; De Pascalis et al., 2002, J. Immunol. 169:3076-3084, all entirely incorporated by reference.

### VI. Heterodimeric Antibodies

[0223] Accordingly, in some embodiments the present invention provides heterodimeric immunomodulatory antibodies that rely on the use of two different heavy chain variant Fc sequences, that will self-assemble to form heterodimeric Fc domains and heterodimeric antibodies.

[0224] The present invention is directed to novel constructs to provide heterodimeric antibodies that allow binding to more than one immunomodulatory antigen or ligand, e.g. to allow for bispecific binding. The heterodimeric antibody constructs are based on the self-assembling nature of the two Fc domains of the heavy chains of antibodies, e.g. two “monomers” that assemble into a “dimer”. Heterodimeric antibodies are made by altering the amino acid sequence of each monomer as more fully discussed below. Thus, the present invention is generally directed to the creation of heterodimeric immunomodulatory antibodies which can co-engage antigens in several ways, relying on amino acid variants in the constant regions that are different on each chain to promote heterodimeric formation and/or allow for ease of purification of heterodimers over the homodimers.

[0225] Thus, the present invention provides bispecific antibodies. An ongoing problem in antibody technologies is the desire for “bispecific” antibodies that bind to two different antigens simultaneously, in general thus allowing the different antigens to be brought into proximity and resulting in new functionalities and new therapies. In general, these antibodies are made by including genes for each heavy and light chain into the host cells. This generally results in the formation of the desired heterodimer (A-B), as well as the two homodimers (A-A and B-B (not including the light chain heterodimeric issues)). However, a major obstacle in the formation of bispecific antibodies is the difficulty in purifying the heterodimeric antibodies away from the homodimeric antibodies and/or biasing the formation of the heterodimer over the formation of the homodimers.

[0226] There are a number of mechanisms that can be used to generate the heterodimers of the present invention. In addition, as will be appreciated by those in the art, these mechanisms can be combined to ensure high heterodimerization. Thus, amino acid variants that lead to the production of heterodimers are referred to as “heterodimerization variants”. As discussed below, heterodimerization variants can include steric variants (e.g. the “knobs and holes” or “skew” variants described below and the “charge pairs” variants described below) as well as “pI variants”, which allows purification of homodimers away from heterodimers. As is generally described in WO2014/145806, hereby incorporated by reference in its entirety and specifically as below for the discussion of “heterodimerization variants”, useful mechanisms for heterodimerization include “knobs and holes” (“KIH”; sometimes herein as “skew” variants (see discussion in WO2014/145806), “electrostatic steering” or “charge pairs” as described in WO2014/145806, pI variants as described in WO2014/145806, and general additional Fc variants as outlined in WO2014/145806 and below.

[0227] In the present invention, there are several basic mechanisms that can lead to ease of purifying heterodimeric antibodies; one relies on the use of pI variants, such that each monomer has a different pI, thus allowing the isoelectric purification of A-A, A-B and B-B dimeric proteins. Alternatively, some scaffold formats, such as the “triple F” format, also allows separation on the basis of size. As is further outlined below, it is also possible to “skew” the formation of heterodimers over homodimers. Thus, a combination of steric heterodimerization variants and pI or charge pair variants find particular use in the invention.

[0228] In general, embodiments of particular use in the present invention rely on sets of variants that include skew variants, that encourage heterodimerization formation over homodimerization formation, coupled with pI variants, which increase the pI difference between the two monomers.

[0229] Additionally, as more fully outlined below, depending on the format of the heterodimer antibody, pI variants can be either contained within the constant and/or Fc domains of a monomer, or charged linkers, either domain linkers or scFv linkers, can be used. That is, scaffolds that utilize scFv(s) such as the Triple F format can include charged scFv linkers (either positive or negative), that give a further pI boost for purification purposes. As will be appreciated by those in the art, some Triple F formats are useful with just charged scFv linkers and no additional pI adjustments, although the invention does provide pI variants that are on one or both of the monomers, and/or charged domain linkers as well. In addition, additional amino acid engineering for alternative functionalities may also confer pI changes, such as Fc, FcRn and KO variants.

[0230] In the present invention that utilizes pI as a separation mechanism to allow the purification of heterodimeric proteins, amino acid variants can be introduced into one or both of the monomer polypeptides; that is, the pI of one of the monomers (referred to herein for simplicity as “monomer A”) can be engineered away from monomer B, or both monomer A and B change be changed, with the pI of monomer A increasing and the pI of monomer B decreasing. As discussed, the pI changes of either or both monomers can be done by removing or adding a charged residue (e.g. a neutral amino acid is replaced by a positively or negatively charged amino acid residue, e.g. glycine to glutamic acid), changing a charged residue from positive or negative to the opposite charge (e.g. aspartic acid to lysine) or changing a charged residue to a neutral residue (e.g. loss of a charge; lysine to serine.). A number of these variants are shown in the Figures.

[0231] Accordingly, this embodiment of the present invention provides for creating a sufficient change in pI in at least one of the monomers such that heterodimers can be separated from homodimers. As will be appreciated by those in the art, and as discussed further below, this can be done by using a “wild type” heavy chain constant region and a variant region that has been engineered to either increase or decrease its pI (wt A−+B or wt A−−B), or by increasing one region and decreasing the other region (A+−B− or A−B+).

[0232] Thus, in general, a component of some embodiments of the present invention are amino acid variants in the constant regions of antibodies that are directed to altering the isoelectric point (pI) of at least one, if not both, of the monomers of a dimeric protein to form “pI antibodies” by incorporating amino acid substitutions (“pI variants” or “pI substitutions”) into one or both of the monomers. As shown herein, the separation of the heterodimers from the two homodimers can be accomplished if the pIs of the two monomers differ by as little as 0.1 pH unit, with 0.2, 0.3, 0.4 and 0.5 or greater all finding use in the present invention.

As will be appreciated by those in the art, the number of pI variants to be included on each or both monomer(s) to get good separation will depend in part on the starting pI of the components, for example in the triple F format, the starting pI of the scFv and Fab of interest. That is, to determine which monomer to engineer or in which “direction” (e.g. more positive or more negative), the Fv sequences of the two target antigens are calculated and a decision is made from there. As is known in the art, different Fvs will have different starting pIs which are exploited in the present invention. In general, as outlined herein, the pIs are engineered to result in a total pI difference of each monomer of at least about 0.1 logs, with 0.2 to 0.5 being preferred as outlined herein. Furthermore, as will be appreciated by those in the art and outlined herein, in some embodiments, heterodimers can be separated from homodimers on the basis of size. As shown in FIG. 2, for example, several of the formats allow separation of heterodimers and homodimers on the basis of size.

[0233] A. Heterodimerization Variants

[0234] The present invention provides heterodimeric proteins, including heterodimeric antibodies in a variety of formats, which utilize heterodimeric variants to allow for heterodimeric formation and/or purification away from homodimers. A number of heterodimerization variants are shown in FIG. 4.

[0235] There are a number of suitable pairs of sets of heterodimerization skew variants. These variants come in “pairs” of “sets”. That is, one set of the pair is incorporated into the first monomer and the other set of the pair is incorporated into the second monomer. It should be noted that these sets do not necessarily behave as “knobs in holes” variants, with a one-to-one correspondence between a residue on one monomer and a residue on the other; that is, these pairs of sets form an interface between the two monomers that encourages heterodimer formation and discourages homodimer formation, allowing the percentage of heterodimers that spontaneously form under biological conditions to be over 90%, rather than the expected 50% (25% homodimer A/A:50% heterodimer A/B:25% homodimer B/B).

[0236] B. Steric Variants

[0237] In some embodiments, the formation of heterodimers can be facilitated by the addition of steric variants. That is, by changing amino acids in each heavy chain, different heavy chains are more likely to associate to form the heterodimeric structure than to form homodimers with the same Fc amino acid sequences. Suitable steric variants are included in in the Figures.

[0238] One mechanism is generally referred to in the art as “knobs and holes”, referring to amino acid engineering that creates steric influences to favor heterodimeric formation and disfavor homodimeric formation can also optionally be used; this is sometimes referred to as “knobs and holes”, as described in U.S. Ser. No. 61/596,846, Ridgway et al., Protein Engineering 9(7):617 (1996); Atwell et al., J. Mol. Biol. 1997 270:26; U.S. Pat. No. 8,216,805, all of which are hereby incorporated by reference in their entirety. The Figures identify a number of “monomer A-monomer B” pairs that rely on “knobs and holes”. In addition, as described in Merchant et al., Nature Biotech. 16:677 (1998), these “knobs and hole” mutations can be combined with disulfide bonds to skew formation to heterodimerization.

[0239] An additional mechanism that finds use in the generation of heterodimers is sometimes referred to as “electrostatic steering” as described in Gunasekaran et al., J. Biol. Chem. 285(25):19637 (2010), hereby incorporated by reference in its entirety. This is sometimes referred to herein as “charge pairs”. In this embodiment, electrostatics are used to skew the formation towards heterodimerization. As those in the art will appreciate, these may also have an effect on pI, and thus on purification, and thus could in some cases also be considered pI variants. However, as these were generated to force heterodimerization and were not used as purification tools, they are classified as “steric variants”. These include, but are not limited to, D221E/P228E/L368E paired with D221R/P228R/K409R (e.g. these are “monomer corresponding sets) and C220E/P228E/368E paired with C220R/E224R/P228R/K409R.

[0240] Additional monomer A and monomer B variants that can be combined with other variants, optionally and independently in any amount, such as pI variants outlined herein or other steric variants that are shown in FIG. 37 of US 2012/0149876, the figure and legend and SEQ ID NOs of which are incorporated expressly by reference herein.

[0241] In some embodiments, the steric variants outlined herein can be optionally and independently incorporated with any pI variant (or other variants such as Fc variants, FcRn variants, etc.) into one or both monomers, and can be independently and optionally included or excluded from the proteins of the invention.

[0242] A list of suitable skew variants is found in FIG. 4 showing some pairs of particular utility in many embodiments. Of particular use in many embodiments are the pairs of sets including, but not limited to, S364K/E357Q:L368D/K370S; L368D/K370S:S364K; L368E/K370S:S364K; T411T/E360E/Q362E:D401K; L368D/K370S:S364K/E357L, K370S:S364K/E357Q and T366S/L368A/Y407V:T366W (optionally including a bridging disulfide, T366S/L368A/Y407V/Y349C:T366W/S354C). In terms of nomenclature, the pair “S364K/E357Q:L368D/K370S” means that one of the monomers has the double variant set S364K/E357Q and the other has the double variant set L368D/K370S; as above, the “strandedness” of these pairs depends on the starting pI.

[0243] C. pI (Isoelectric Point) Variants for Heterodimers

[0244] In general, as will be appreciated by those in the art, there are two general categories of pI variants: those that increase the pI of the protein (basic changes) and those that decrease the pI of the protein (acidic changes). As described herein, all combinations of these variants can be done: one monomer may be wild type, or a variant that does not display a significantly different pI from wild-type, and the other can be either more basic or more acidic. Alternatively, each monomer is changed, one to more basic and one to more acidic.

[0245] Preferred combinations of pI variants are shown in FIG. 5. As outlined herein and shown in the figures, these changes are shown relative to IgG1, but all isotypes can be altered this way, as well as isotype hybrids. In the case where the heavy chain constant domain is from IgG2-4, R133E and R133Q can also be used.

[0246] In one embodiment, for example in the bottle opener format, a preferred combination of pI variants has one monomer (the negative Fab side) comprising 208D/295E/384D/418E/421D variants (N208D/Q295E/N384D/Q418E/N421D when relative to human IgG1) and a second monomer (the positive scFv side) comprising a positively charged scFv linker, including (GKPGS)₄. However, as will be appreciated by those in the art, the first monomer includes a CH1 domain, including position 208. Accordingly, in constructs that do not include a CH1 domain (for example for heterodimeric Fc fusion proteins that do not utilize a CH1 domain on one of the domains, for example in a dual scFv format), a preferred negative pI variant Fc set includes 295E/384D/418E/421D variants (Q295E/N384D/Q418E/N421D when relative to human IgG1).

[0247] Accordingly, in some embodiments, one monomer has a set of substitutions from FIG. 5 and the other monomer has a charged linker (either in the form of a charged scFv linker because that monomer comprises an scFv or a charged domain linker, as the format dictates).

[0248] 1. Isotypic Variants

[0249] In addition, many embodiments of the invention rely on the “importation” of pI amino acids at particular positions from one IgG isotype into another, thus reducing or eliminating the possibility of unwanted immunogenicity being introduced into the variants. A number of these are shown in FIG. 21 of US Publ. 2014/0370013, hereby incorporated by reference. That is, IgG1 is a common isotype for therapeutic antibodies for a variety of reasons, including high effector function. However, the heavy constant region of IgG1 has a higher pI than that of IgG2 (8.10 versus 7.31). By introducing IgG2 residues at particular positions into the IgG1 backbone, the pI of the resulting monomer is lowered (or increased) and additionally exhibits longer serum half-life. For example, IgG1 has a glycine (pI 5.97) at position 137, and IgG2 has a glutamic acid (pI 3.22); importing the glutamic acid will affect the pI of the resulting protein. As is described below, a number of amino acid substitutions are generally required to significant affect the pI of the variant antibody. However, it should be noted as discussed below that even changes in IgG2 molecules allow for increased serum half-life.

[0250] In other embodiments, non-isotypic amino acid changes are made, either to reduce the overall charge state of the resulting protein (e.g. by changing a higher pI amino acid to a lower pI amino acid), or to allow accommodations in structure for stability, etc. as is more further described below.

[0251] In addition, by pI engineering both the heavy and light constant domains, significant changes in each monomer of the heterodimer can be seen. As discussed herein, having the pIs of the two monomers differ by at least 0.5 can allow separation by ion exchange chromatography or isoelectric focusing, or other methods sensitive to isoelectric point.

[0252] D. Calculating pI

[0253] The pI of each monomer can depend on the pI of the variant heavy chain constant domain and the pI of the total monomer, including the variant heavy chain constant domain and the fusion partner. Thus, in some embodiments, the change in pI is calculated on the basis of the variant heavy chain constant domain, using the chart in the FIG. 19 of US Pub. 2014/0370013. As discussed herein, which monomer to engineer is generally decided by the inherent pI of the Fv and scaffold regions. Alternatively, the pI of each monomer can be compared.

[0254] E. pI Variants that Also Confer Better FcRn In Vivo Binding

[0255] In the case where the pI variant decreases the pI of the monomer, they can have the added benefit of improving serum retention in vivo.

[0256] Although still under examination, Fc regions are believed to have longer half-lives in vivo, because binding to FcRn at pH 6 in an endosome sequesters the Fc (Ghetie and Ward, 1997 Immunol Today. 18(12): 592-598, entirely incorporated by reference). The endosomal compartment then recycles the Fc to the cell surface. Once the compartment opens to the extracellular space, the higher pH, ˜7.4, induces the release of Fc back into the blood. In mice, Dall'Acqua et al. showed that Fc mutants with increased FcRn binding at pH 6 and pH 7.4 actually had reduced serum concentrations and the same half life as wild-type Fc (Dall'Acqua et al. 2002, J. Immunol. 169:5171-5180, entirely incorporated by reference). The increased affinity of Fc for FcRn at pH 7.4 is thought to forbid the release of the Fc back into the blood. Therefore, the Fc mutations that will increase Fc's half-life in vivo will ideally increase FcRn binding at the lower pH while still allowing release of Fc at higher pH. The amino acid histidine changes its charge state in the pH range of 6.0 to 7.4. Therefore, it is not surprising to find His residues at important positions in the Fc/FcRn complex.

[0257] Recently it has been suggested that antibodies with variable regions that have lower isoelectric points may also have longer serum half-lives (Igawa et al., 2010 PEDS. 23(5): 385-392, entirely incorporated by reference). However, the mechanism of this is still poorly understood. Moreover, variable regions differ from antibody to antibody. Constant region variants with reduced pI and extended half-life would provide a more modular approach to improving the pharmacokinetic properties of antibodies, as described herein.

[0258] F. Additional Fc Variants for Additional Functionality

[0259] In addition to pI amino acid variants, there are a number of useful Fc amino acid modification that can be made for a variety of reasons, including, but not limited to, altering binding to one or more FcγR receptors, altered binding to FcRn receptors, etc.

[0260] Accordingly, the proteins of the invention can include amino acid modifications, including the heterodimerization variants outlined herein, which includes the pI variants and steric variants. Each set of variants can be independently and optionally included or excluded from any particular heterodimeric protein.

[0261] G. FcγR Variants

[0262] Accordingly, there are a number of useful Fc substitutions that can be made to alter binding to one or more of the FcγR receptors. Substitutions that result in increased binding as well as decreased binding can be useful. For example, it is known that increased binding to FcγRIIIa results in increased ADCC (antibody dependent cell-mediated cytotoxicity; the cell-mediated reaction wherein nonspecific cytotoxic cells that express FcγRs recognize bound antibody on a target cell and subsequently cause lysis of the target cell). Similarly, decreased binding to FcγRIIb (an inhibitory receptor) can be beneficial as well in some circumstances. Amino acid substitutions that find use in the present invention include those listed in U.S. Ser. No. 11/124,620 (particularly FIG. 41), Ser. Nos. 11/174,287, 11/396,495, 11/538,406, all of which are expressly incorporated herein by reference in their entirety and specifically for the variants disclosed therein. Particular variants that find use include, but are not limited to, 236A, 239D, 239E, 332E, 332D, 239D/332E, 267D, 267E, 328F, 267E/328F, 236A/332E, 239D/332E/330Y, 239D, 332E/330L, 243A, 243L, 264A, 264V and 299T.

[0263] In addition, there are additional Fc substitutions that find use in increased binding to the FcRn receptor and increased serum half life, as specifically disclosed in U.S. Ser. No. 12/341,769, hereby incorporated by reference in its entirety, including, but not limited to, 434S, 434A, 428L, 308F, 259I, 428L/434S, 259I/308F, 436I/428L, 436I or V/434S, 436V/428L and 259I/308F/428L.

[0264] H. Ablation Variants

[0265] Similarly, another category of functional variants are “FcγR ablation variants” or “Fc knock out (FcKO or KO)” variants. In these embodiments, for some therapeutic applications, it is desirable to reduce or remove the normal binding of the Fc domain to one or more or all of the Fcγ receptors (e.g. FcγR1, FcγRIIa, FcγRIIb, FcγRIIIa, etc.) to avoid additional mechanisms of action. That is, for example, in many embodiments, particularly in the use of bispecific immunomodulatory antibodies desirable to ablate FcγRIIIa binding to eliminate or significantly reduce ADCC activity such that one of the Fc domains comprises one or more Fcγ receptor ablation variants. These ablation variants are depicted in FIG. 6, and each can be independently and optionally included or excluded, with preferred aspects utilizing ablation variants selected from the group consisting of G236R/L328R, E233P/L234V/L235A/G236del/S239K, E233P/L234V/L235A/G236del/S267K, E233P/L234V/L235A/G236del/S239K/A327G, E233P/L234V/L235A/G236del/S267K/A327G and E233P/L234V/L235A/G236del. It should be noted that the ablation variants referenced herein ablate FcγR binding but generally not FcRn binding.

[0266] I. Combination of Heterodimeric and Fc Variants

[0267] As will be appreciated by those in the art, all of the recited heterodimerization variants (including skew and/or pI variants) can be optionally and independently combined in any way, as long as they retain their “strandedness” or “monomer partition”. In addition, all of these variants can be combined into any of the heterodimerization formats.

[0268] In the case of pI variants, while embodiments finding particular use are shown in the Figures, other combinations can be generated, following the basic rule of altering the pI difference between two monomers to facilitate purification.

[0269] In addition, any of the heterodimerization variants, skew and pI, are also independently and optionally combined with Fc ablation variants, Fc variants, FcRn variants, as generally outlined herein.

### VII. Useful Formats of the Invention

[0270] As will be appreciated by those in the art and discussed more fully below, the bispecific heterodimeric antibodies of the present invention can take on a wide variety of configurations, as are generally depicted in FIG. 2. Some figures depict “single ended” configurations, where there is one type of specificity on one “arm” of the molecule and a different specificity on the other “arm”. Other figures depict “dual ended” configurations, where there is at least one type of specificity at the “top” of the molecule and one or more different specificities at the “bottom” of the molecule. Thus, the present invention is directed to novel immunoglobulin compositions that co-engage a different first and a second antigen.

[0271] As will be appreciated by those in the art, the heterodimeric formats (see FIG. 2) of the invention can have different valencies as well as be bispecific. That is, antibodies of the invention can be bivalent and bispecific, wherein a checkpoint target is bound by one ABD and the costimulatory target is bound by a second ABD (see for example the bottle opener format which is heterodimeric) or the bispecific mAb which is homodimeric). The heterodimeric antibodies can also be trivalent and bispecific, wherein the first antigen is bound by two ABDs and the second antigen by a second ABD (see for example the Central-scFv format and the trident format). The heterodimeric antibodies can also be bispecific and tetravalent (such as the Central scFv2 format and the DVD-Ig format).

[0272] Again, with the exception of the DVD-Ig format and the central-scFv2 format, the antibodies are generally formatted such that the co-stimulatory target is bound monovalently.

[0273] A. Bottle Opener Format

[0274] One heterodimeric scaffold that finds particular use in the present invention is the “triple F” or “bottle opener” scaffold format. In this embodiment, one heavy chain of the antibody contains a single chain Fv (“scFv”, as defined below) and the other heavy chain is a “regular” Fab format, comprising a variable heavy chain and a light chain. This structure is sometimes referred to herein as “triple F” format (scFv-Fab-Fc) or the “bottle-opener” format, due to a rough visual similarity to a bottle-opener. The two chains are brought together by the use of amino acid variants in the constant regions (e.g. the Fc domain, the CH1 domain and/or the hinge region) that promote the formation of heterodimeric antibodies as is described more fully below.

[0275] There are several distinct advantages to the present “triple F” format. As is known in the art, antibody analogs relying on two scFv constructs often have stability and aggregation problems, which can be alleviated in the present invention by the addition of a “regular” heavy and light chain pairing. In addition, as opposed to formats that rely on two heavy chains and two light chains, there is no issue with the incorrect pairing of heavy and light chains (e.g. heavy 1 pairing with light 2, etc.).

[0276] Many of the embodiments outlined herein rely in general on the bottle opener format that comprises a first monomer comprising an scFv, comprising a variable heavy and a variable light domain, covalently attached using an scFv linker (charged, in many but not all instances), where the scFv is covalently attached to the N-terminus of a first Fc domain usually through a domain linker (which, as outlined herein can either be un-charged or charged and can be exogeneous or endogeneous (e.g. all or part of the native hinge domain). The second monomer of the bottle opener format is a heavy chain, and the composition further comprises a light chain.

[0277] In addition, the Fc domains of the bottle opener format generally comprise skew variants (e.g. a set of amino acid substitutions as shown in FIG. 4, with particularly useful skew variants being selected from the group consisting of S364K/E357Q:L368D/K370S; L368D/K370S:S364K; L368E/K370S:S364K; T411T/E360E/Q362E:D401K; L368D/K370S:S364K/E357L, K370S:S364K/E357Q, T366S/L368A/Y407V:T 366W and T366S/L368A/Y407V/Y349C:T366W/S354C), optionally ablation variants (including those shown in FIG. 6), optionally charged scFv linkers (including those shown in FIG. 8) and the heavy chain comprises pI variants (including those shown in FIG. 5).

[0278] In some embodiments, the bottle opener format includes skew variants, pI variants, and ablation variants. Accordingly, some embodiments include bottle opener formats that comprise: a) a first monomer (the “scFv monomer”) that comprises a charged scFv linker (with the +H sequence of FIG. 8 being preferred in some embodiments), the skew variants S364K/E357Q, the ablation variants E233P/L234V/L235A/G236del/S267K, and an Fv that binds to one target as outlined herein; b) a second monomer (the “Fab monomer”) that comprises the skew variants L368D/K370S, the pI variants N208D/Q295E/N384D/Q418E/N421D, the ablation variants E233P/L234V/L235A/G236del/S267K, and a variable heavy domain that, with the variable light domain, makes up an Fv that binds to a second target as outlined herein; and c) a light chain. In this particular embodiment, suitable monomer Fv pairs include (Fabs listed first, scFvs second) ICOS X PD-1, ICOS X PD-L1, ICOS X CTLA-4, ICOS X LAG-3, ICOS X TIM-3, ICOS X BTLA, ICOS X TIGIT, TIGIT X ICOS, PD-1 X ICOS, PD-L1 X ICOS, CTLA-4 X ICOS, LAG-3 X ICOS, TIM-3 X ICOS, BTLA X ICOS, OX40 X TIGIT, OX40 X PD-1, OX40 X PD-L1, OX40 X CTLA-4, OX40 X LAG-3, OX40 X TIM-3, OX40 X BTLA, TIGIT X OX40, PD-1 X OX40, PD-L1 X OX40, CTLA-4 X OX40, LAG-3 X OX40, TIM-3 X OX40, BTLA X OX40, GITR X TIGIT, GITR X PD-1, GITR X PD-L1, GITR X CTLA-4, GITR X LAG-3, GITR X TIM-3, GITR X BTLA, TIGIT x GITR, PD-1 X GITR, PD-L1 X GITR, CTLA-4 X GITR, LAG-3 X GITR, TIM-3 X GITR, BTLA X GITR, 4-1BB X TIGIT, 4-1BB X PD-1, 4-1BB X PD-L1, 4-1BB X CTLA-4, 4-1BB X LAG-3, 4-1BB X TIM-3, 4-1BB X BTLA, TIGIT X 4-1BB, PD-1 X 4-1BB, PD-L1 X 4-1BB, CTLA-4 X 4-1BB, LAG-3 X 4-1BB, TIM-3 X 4-1BB and BTLA X 4-1BB.

[0279] Accordingly, some embodiments include bottle opener formats that comprise: a) a first monomer (the “scFv monomer”) that comprises a charged scFv linker (with the +H sequence of FIG. 8 being preferred in some embodiments), the skew variants S364K/E357Q, the ablation variants E233P/L234V/L235A/G236del/S267K, and an Fv that binds to one target as outlined herein; b) a second monomer (the “Fab monomer”) that comprises the skew variants L368D/K370S, the pI variants N208D/Q295E/N384D/Q418E/N421D, the ablation variants E233P/L234V/L235A/G236del/S267K, and a variable heavy domain that, with the variable light domain, makes up an Fv that binds to a second target as outlined herein; and c) a light chain. In some particular embodiments with these variants in this format:

[0280] (1) the format comprises a Fab ABD binds to ICOS that has the ABD of [ICOS] H0.66_L0;

[0281] (2) the format comprises an ICOS ABD of H0.66_L0 combined with the scFv ABD comprising the ABD 1G6_L1.194_H1.279 that binds to PD-1;

[0282] (3) the format comprises an ICOS ABD of H0.66_L0 combined with the scFv comprising the ABD H3.23_L0.129 that binds to CTLA-4;

[0283] (4) the format comprises an ICOS ABD of H0.66_L0 is combined with the ABD 7G8_H.303_L1.34 that binds to LAG-3;

[0284] (5) the format comprises a scFv comprising the ABD 1G6_L1.194_H1.279 that binds to PD-1 and the Fab binds to GITR;

[0285] (6) the format comprises a scFv comprising the ABD 1G6_L1.194_H1.279 that binds to PD-1 and the Fab binds to OX40;

[0286] (7) the format comprises a scFv comprising the ABD 1G6_L1.194_H1.279 that binds to PD-1 and the Fab binds to ICOS;

[0287] 8) the format comprises a scFv comprising the ABD 1G6_L1.194_H1.279 that binds to PD-1 and the Fab binds to 4-1BB; and

[0288] (9) the format comprises the ABD of H0.66_L0 that binds to ICOS and an ABD that binds to PD-L1.

[0289] In some embodiments, the bottle opener format includes skew variants, pI variants, ablation variants and FcRn variants. Accordingly, some embodiments include bottle opener formats that comprise: a) a first monomer (the “scFv monomer”) that comprises a charged scFv linker (with the +H sequence of FIG. 8 being preferred in some embodiments), the skew variants S364K/E357Q, the ablation variants E233P/L234V/L235A/G236del/S267K, the FcRn variants M428L/N434S and an Fv that binds to a first receptor (either a costimulatory or checkpoint receptor) as outlined herein; b) a second monomer (the “Fab monomer”) that comprises the skew variants L368D/K370S, the pI variants N208D/Q295E/N384D/Q418E/N421D, the ablation variants E233P/L234V/L235A/G236del/S267K, the FcRn variants M428L/N434S and a variable heavy domain that, with the variable light domain, makes up an Fv that binds to a second receptor as outlined herein (the other of the costimulatory or checkpoint receptor); and c) a light chain. In some particular embodiments with these variants in this format:

[0290] (1) the format comprises a Fab ABD binds to ICOS that has the ABD of [ICOS] H0.66_L0;

[0291] (2) the format comprises an ICOS ABD of H0.66_L0 combined with the scFv ABD comprising the ABD 1G6_L1.194_H1.279 that binds to PD-1;

[0292] (3) the format comprises an ICOS ABD of H0.66_L0 combined with the scFv comprising the ABD H3.23_L0.129 that binds to CTLA-4;

[0293] (4) the format comprises an ICOS ABD of H0.66_L0 is combined with the ABD 7G8_H.303_L1.34 that binds to LAG-3;

[0294] (5) the format comprises a scFv comprising the ABD 1G6_L1.194_H1.279 that binds to PD-1 and the Fab binds to GITR;

[0295] (6) the format comprises a scFv comprising the ABD 1G6_L1.194_H1.279 that binds to PD-1 and the Fab binds to OX40;

[0296] (7) the format comprises a scFv comprising the ABD 1G6_L1.194_H1.279 that binds to PD-1 and the Fab binds to ICOS;

[0297] 8) the format comprises a scFv comprising the ABD 1G6_L1.194_H1.279 that binds to PD-1 and the Fab binds to 4-1BB; and

[0298] (9) the format comprises the ABD of H0.66_L0 that binds to ICOS and an ABD that binds to PD-L1.

[0299] Specifically, FIG. 9 shows some bottle opener “backbone” sequences that are missing the Fv sequences that can be used in the present invention. That is, Fv sequences for the scFv portion and the Fab portion can be used from any combination of ICOS and PD-1, ICOS and CTLA-4, ICOS and LAG-3, ICOS and TIM-3, ICOS and PD-L1, ICOS and BTLA, ICOS and TIGIT, GITR and TIGIT, GITR and PD-1, GITR and CTLA-4, GITR and LAG-3, GITR and TIM-3, GITR and PD-L1, GITR and BTLA, OX40 and PD-1, OX40 and TIGIT, OX40 and CTLA-4, IC OX40 OS and LAG-3, OX40 and TIM-3, OX40 and PD-L1, OX40 and BTLA, 4-1BB and PD-1, 4-1BB and CTLA-4, 4-1BB and LAG-3, 4-1BB and TIM-3, 4-1BB and PD-L1, TIGIT and 4-1BB and 4-1BB and BTLA, in combination with any or all of backbones 1 to 10, with backbone 1 of particular use in these combinations.

[0300] For bottle opener backbone 1 from FIG. 9 (optionally including the 428L/434S variants) specific Fv combinations of use in the present invention include ICOS and PD-1, ICOS and PD-L1 and ICOS and CTLA-4.

[0301] For bottle opener backbone 1 from FIG. 9 (optionally including the 428L/434S variants) specific ABDs that bind human ICOS include, but are not limited to, [ICOS]_H0L0 and [ICOS]H0.66_L0 and those shown in FIG. 19, FIG. 20A-20G, FIG. 24, FIG. 68A-68G and FIG. 77A-77BA-77B as well as SEQ ID NO: 27869-28086, 28087-28269, 27193-27335, 28549-28556 and 28557-28665.

[0302] For bottle opener backbone 1 from FIG. 9 (optionally including the 428L/434S variants), specific ABDs that bind human GITR include, but are not limited to, those in FIG. 18, FIG. 72 and FIG. 73 and those listed in SEQ ID NO:26282-26290.

[0303] For bottle opener backbone 1 from FIG. 9 (optionally including the 428L/434S variants), specific ABDs that bind OX40 include, but are not limited to, FIG. 17, FIG. 72 and FIG. 73 and those listed in SEQ ID NO: 26272-26281.

[0304] For bottle opener backbone 1 from FIG. 9 (optionally including the 428L/434S variants), specific ABDs that bind human 4-1BB include, but are not limited to, FIG. 16, FIG. 72 and FIG. 73 and SEQ ID NO: 26262-2671.

[0305] For bottle opener backbone 1 from FIG. 9 (optionally including the 428L/434S variants), specific ABDs that bind human PD-L1 include, but are not limited to, FIG. 15A-15C, FIG. 73 and FIG. 78 and SEQ ID NO: 3961-4432.

[0306] Specific bottle opener embodiments are outlined below.

[0307] B. mAb-Fv Format

[0308] One heterodimeric scaffold that finds particular use in the present invention is the mAb-Fv format. In this embodiment, the format relies on the use of a C-terminal attachment of an “extra” variable heavy domain to one monomer and the C-terminal attachment of an “extra” variable light domain to the other monomer, thus forming a third antigen binding domain (i.e. an “extra” Fv domain), wherein the Fab portions of the two monomers bind one checkpoint target and the “extra” Fv domain binds a costimulatory target.

[0309] In this embodiment, the first monomer comprises a first heavy chain, comprising a first variable heavy domain and a first constant heavy domain comprising a first Fc domain, with a first variable light domain covalently attached to the C-terminus of the first Fc domain using a domain linker (vh1-CH1-hinge-CH2-CH3-[optional linker]-vl2). The second monomer comprises a second variable heavy domain, a second constant heavy domain comprising a second Fc domain, and a third variable heavy domain covalently attached to the C-terminus of the second Fc domain using a domain linker (vh1-CH1-hinge-CH2-CH3-[optional linker]-vh2. This embodiment further utilizes a common light chain comprising a variable light domain and a constant light domain, which associates with the heavy chains to form two identical Fabs that include two identical Fvs. The two C-terminally attached variable domains make up the “extra” third Fv. As for many of the embodiments herein, these constructs include skew variants, pI variants, ablation variants, additional Fc variants, etc. as desired and described herein. In this embodiment, suitable Fv pairs include (Fabs listed first, “extra” Fv listed second) ICOS X PD-1, ICOS X PD-L1, ICOS X CTLA-4, ICOS X LAG-3, ICOS X TIM-3, ICOS X BTLA, ICOS X TIGIT, TIGIT X ICOS, PD-1 X ICOS, PD-L1 X ICOS, CTLA-4 X ICOS, LAG-3 X ICOS, TIM-3 X ICOS, BTLA X ICOS, OX40 X TIGIT, OX40 X PD-1, OX40 X PD-L1, OX40 X CTLA-4, OX40 X LAG-3, OX40 X TIM-3, OX40 X BTLA, TIGIT X OX40, PD-1 X OX40, PD-L1 X OX40, CTLA-4 X OX40, LAG-3 X OX40, TIM-3 X OX40, BTLA X OX40, GITR X TIGIT, GITR X PD-1, GITR X PD-L1, GITR X CTLA-4, GITR X LAG-3, GITR X TIM-3, GITR X BTLA, TIGIT x GITR, PD-1 X GITR, PD-L1 X GITR, CTLA-4 X GITR, LAG-3 X GITR, TIM-3 X GITR, BTLA X GITR, 4-1BB X TIGIT, 4-1BB X PD-1, 4-1BB X PD-L1, 4-1BB X CTLA-4, 4-1BB X LAG-3, 4-1BB X TIM-3, 4-1BB X BTLA, TIGIT X 4-1BB, PD-1 X 4-1BB, PD-L1 X 4-1BB, CTLA-4 X 4-1BB, LAG-3 X 4-1BB, TIM-3 X 4-1BB and BTLA X 4-1BB.

[0310] The ABD sequences for these combinations can be as disclosed in the sequence listing or as shown in the Figures.

[0311] In addition, the Fc domains of the mAb-Fv format comprise skew variants (e.g. a set of amino acid substitutions as shown in FIG. 4, with particularly useful skew variants being selected from the group consisting of S364K/E357Q:L368D/K370S; L368D/K370S:S364K; L368E/K370S:S364K; T411T/E360E/Q362E:D401K; L368D/K370S:S364K/E357L, K370S:S364K/E357Q, T366S/L368A/Y407V:T366W and T366S/L368A/Y407V/Y349C:T366W/S354C), optionally ablation variants (including those shown in FIG. 6), optionally charged scFv linkers (including those shown in FIG. 8) and the heavy chain comprises pI variants (including those shown in FIG. 5).

[0312] In some embodiments, the mAb-Fv format includes skew variants, pI variants, and ablation variants. Accordingly, some embodiments include mAb-Fv formats that comprise: a) a first monomer that comprises the skew variants S364K/E357Q, the ablation variants E233P/L234V/L235A/G236del/S267K, and a first variable heavy domain that, with the first variable light domain of the light chain, makes up an Fv that binds to a first checkpoint inhibitor, and a second variable heavy domain; b) a second monomer that comprises the skew variants L368D/K370S, the pI variants N208D/Q295E/N384D/Q418E/N421D, the ablation variants E233P/L234V/L235A/G236del/S267K, and a first variable heavy domain that, with the first variable light domain, makes up the Fv that binds to the first receptor (either a costimulatory receptor or a checkpoint receptor) as outlined herein, and a second variable light chain, that together with the second variable heavy chain forms an Fv (ABD) that binds a second receptor (e.g. the other of the costimulatory or checkpoint receptor; and c) a light chain comprising a first variable light domain and a constant light domain. Of particular use in some embodiments in this format, are (Fab-scFv order) ICOS X PD-1, PD-1 X ICOS, PD-L1 X ICOS, ICOS x PD-L1, GITR X PD-1, OX40 X PD-1 and 4-1BB X PD-1. In some particular embodiments with these variants in this format:

[0313] (1) the format comprises a Fab ABD binds to ICOS that has the ABD of [ICOS] H0.66_L0;

[0314] (2) the format comprises an ICOS ABD of H0.66_L0 combined with the scFv ABD comprising the ABD 1G6_L1.194_H1.279 that binds to PD-1;

[0315] (3) the format comprises an ICOS ABD of H0.66_L0 combined with the scFv comprising the ABD H3.23_L0.129 that binds to CTLA-4;

[0316] (4) the format comprises an ICOS ABD of H0.66_L0 is combined with the ABD 7G8_H.303_L1.34 that binds to LAG-3;

[0317] (5) the format comprises a scFv comprising the ABD 1G6_L1.194_H1.279 that binds to PD-1 and the Fab binds to GITR;

[0318] (6) the format comprises a scFv comprising the ABD 1G6_L1.194_H1.279 that binds to PD-1 and the Fab binds to OX40;

[0319] (7) the format comprises a scFv comprising the ABD 1G6_L1.194_H1.279 that binds to PD-1 and the Fab binds to ICOS;

[0320] 8) the format comprises a scFv comprising the ABD 1G6_L1.194_H1.279 that binds to PD-1 and the Fab binds to 4-1BB; and

[0321] (9) the format comprises the ABD of H0.66_L0 that binds to ICOS and an ABD that binds to PD-L1.

[0322] In some embodiments, the mAb-Fv format includes skew variants, pI variants, ablation variants and FcRn variants. Accordingly, some embodiments include mAb-Fv formats that comprise: a) a first monomer that comprises the skew variants S364K/E357Q, the ablation variants E233P/L234V/L235A/G236del/S267K, the FcRn variants M428L/N434S and a first variable heavy domain that, with the first variable light domain of the light chain, makes up an Fv that binds to a first checkpoint inhibitor, and a second variable heavy domain; b) a second monomer that comprises the skew variants L368D/K370S, the pI variants N208D/Q295E/N384D/Q418E/N421D, the ablation variants E233P/L234V/L235A/G236del/S267K, the FcRn variants M428L/N434S and a first variable heavy domain that, with the first variable light domain, makes up the Fv that binds to the first checkpoint inhibitor as outlined herein, and a second variable light chain, that together with the second variable heavy chain forms an Fv (ABD) that binds a second checkpoint inhibitors; and c) a light chain comprising a first variable light domain and a constant light domain. Of particular use in some embodiments in this format, are (Fab-scFv order) ICOS X PD-1, ICOS x PD-L1, GITR X PD-1, OX40 X PD-1 and 4-1BB X PD-1.

[0323] For mAb-Fv sequences that are similar to the mAb-scFv backbone 1 (optionally including M428L/N434S) from FIG. 75, specific ABDs that bind human ICOS are [ICOS]_H0L0 and [ICOS]_H0.66_L0, as well as those shown in FIG. 19, FIG. 20A-20G, FIG. 24, FIG. 68A-68G and FIG. 77A-77B as well as SEQ ID NO: 27869-28086, 28087-28269, 27193-27335, 28549-28556 and 28557-28665.

[0324] For mAb-Fv sequences that are similar to the mAb-scFv backbone 1 (optionally including M428L/N434S) from FIG. 75, specific ABDs that bind human PD-L1 are shown in FIG. 15A-15C, FIG. 73 and FIG. 78 and SEQ ID NO: 3961-4432.

[0325] For mAb-Fv sequences that are similar to the mAb-scFv backbone 1 (optionally including M428L/N434S) from FIG. 75, specific ABDs that bind human GITR are those in FIG. 18, FIG. 72 and FIG. 73 and those listed in SEQ ID NO:26282-26290.

[0326] For mAb-Fv sequences that are similar to the mAb-scFv backbone 1 (optionally including M428L/N434S) from FIG. 75, specific ABDs that bind human 4-1BB are those in FIG. 16, FIG. 72 and FIG. 73 and SEQ ID NO: 26262-2671.

[0327] For mAb-Fv sequences that are similar to the mAb-scFv backbone 1 (optionally including M428L/N434S) from FIG. 75, specific ABDs that bind human OX40 are those in FIG. 17, FIG. 72 and FIG. 73 and those listed in SEQ ID NO: 26272-26281.

[0328] For mAb-Fv sequences that are similar to the mAb-scFv backbone 1 (optionally including M428L/N434S) from Figure 75, specific ABDs that bind human PD-L1 from FIG. 15A-15C, FIG. 73 and FIG. 78 and SEQ ID NO: 3961-4432.

[0329] C. mAb-scFv

[0330] One heterodimeric scaffold that finds particular use in the present invention is the mAb-scFv format. In this embodiment, the format relies on the use of a C-terminal attachment of an scFv to one of the monomers, thus forming a third antigen binding domain, wherein the Fab portions of the two monomers bind one receptor target and the “extra” scFv domain binds the other receptor target (generally the monovalently bound costimulatory receptor).

[0331] In this embodiment, the first monomer comprises a first heavy chain (comprising a variable heavy domain and a constant domain), with a C-terminally covalently attached scFv comprising a scFv variable light domain, an scFv linker and a scFv variable heavy domain in either orientation (vh1-CH1-hinge-CH2-CH3-[optional linker]-vh2-scFv linker-vl2 or vh1-CH1-hinge-CH2-CH3-[optional linker]-vl2-scFv linker-vh2). This embodiment further utilizes a common light chain comprising a variable light domain and a constant light domain, which associates with the heavy chains to form two identical Fabs that bind one of the target receptors. As for many of the embodiments herein, these constructs include skew variants, pI variants, ablation variants, additional Fc variants, etc. as desired and described herein. In this embodiment, suitable Fv pairs include (Fabs listed first, scFvs second) ICOS X PD-1, ICOS X PD-L1, ICOS X CTLA-4, ICOS X LAG-3, ICOS X TIM-3, ICOS X BTLA, ICOS X TIGIT, TIGIT X ICOS, PD-1 X ICOS, PD-L1 X ICOS, CTLA-4 X ICOS, LAG-3 X ICOS, TIM-3 X ICOS, BTLA X ICOS, OX40 X TIGIT, OX40 X PD-1, OX40 X PD-L1, OX40 X CTLA-4, OX40 X LAG-3, OX40 X TIM-3, OX40 X BTLA, TIGIT X OX40, PD-1 X OX40, PD-L1 X OX40, CTLA-4 X OX40, LAG-3 X OX40, TIM-3 X OX40, BTLA X OX40, GITR X TIGIT, GITR X PD-1, GITR X PD-L1, GITR X CTLA-4, GITR X LAG-3, GITR X TIM-3, GITR X BTLA, TIGIT x GITR, PD-1 X GITR, PD-L1 X GITR, CTLA-4 X GITR, LAG-3 X GITR, TIM-3 X GITR, BTLA X GITR, 4-1BB X TIGIT, 4-1BB X PD-1, 4-1BB X PD-L1, 4-1BB X CTLA-4, 4-1BB X LAG-3, 4-1BB X TIM-3, 4-1BB X BTLA, TIGIT X 4-1BB, PD-1 X 4-1BB, PD-L1 X 4-1BB, CTLA-4 X 4-1BB, LAG-3 X 4-1BB, TIM-3 X 4-1BB and BTLA X 4-1BB.

[0332] The ABD sequences for these combinations can be as disclosed in the sequence listing or as shown in the Figures.

[0333] In addition, the Fc domains of the mAb-scFv format generally comprise skew variants (e.g. a set of amino acid substitutions as shown in FIG. 4, with particularly useful skew variants being selected from the group consisting of S364K/E357Q:L368D/K370S; L368D/K370S:S364K; L368E/K370S:S364K; T411T/E360E/Q362E:D401K; L368D/K370S:S364K/E357L, K370S:S364K/E357Q, T366S/L368A/Y407V:T366W and T366S/L368A/Y407V/Y349C:T366W/S354C), optionally ablation variants (including those shown in FIG. 6), optionally charged scFv linkers (including those shown in FIG. 8) and the heavy chain comprises pI variants (including those shown in FIG. 5).

[0334] In some embodiments, the mAb-scFv format includes skew variants, pI variants, and ablation variants. Accordingly, some embodiments include bottle opener formats that comprise: a) a first monomer that comprises the skew variants S364K/E357Q, the ablation variants E233P/L234V/L235A/G236del/S267K, and a first variable heavy domain that, with the first variable light domain of the light chain, makes up an Fv that binds to a first receptor, and a scFv that binds to the second receptor; b) a second monomer that comprises the skew variants L368D/K370S, the pI variants N208D/Q295E/N384D/Q418E/N421D, the ablation variants E233P/L234V/L235A/G236del/S267K, and a first variable heavy domain that, with the first variable light domain, makes up the Fv that binds to the first receptor as outlined herein; and c) a light chain comprising a first variable light domain and a constant light domain. In some particular embodiments with these variants in this format:

[0335] (1) the format comprises a Fab ABD binds to ICOS that has the ABD of [ICOS] H0.66_L0;

[0336] (2) the format comprises an ICOS ABD of H0.66_L0 combined with the scFv ABD comprising the ABD 1G6_L1.194_H1.279 that binds to PD-1;

[0337] (3) the format comprises an ICOS ABD of H0.66_L0 combined with the scFv comprising the ABD H3.23_L0.129 that binds to CTLA-4;

[0338] (4) the format comprises an ICOS ABD of H0.66_L0 is combined with the ABD 7G8_H.303_L1.34 that binds to LAG-3;

[0339] (5) the format comprises a scFv comprising the ABD 1G6_L1.194_H1.279 that binds to PD-1 and the Fab binds to GITR;

[0340] (6) the format comprises a scFv comprising the ABD 1G6_L1.194_H1.279 that binds to PD-1 and the Fab binds to OX40;

[0341] (7) the format comprises a scFv comprising the ABD 1G6_L1.194_H1.279 that binds to PD-1 and the Fab binds to ICOS;

[0342] 8) the format comprises a scFv comprising the ABD 1G6_L1.194_H1.279 that binds to PD-1 and the Fab binds to 4-1BB; and

[0343] (9) the format comprises the ABD of H0.66_L0 that binds to ICOS and an ABD that binds to PD-L1.

[0344] In some embodiments, the mAb-scFv format includes skew variants, pI variants, ablation variants and FcRn variants. Accordingly, some embodiments include mAb-scFv formats that comprise: a) a first monomer that comprises the skew variants S364K/E357Q, the ablation variants E233P/L234V/L235A/G236del/S267K, the FcRn variants M428L/N434S and a first variable heavy domain that, with the first variable light domain of the light chain, makes up an Fv that binds to a first receptor, and a scFv that binds to the second receptor; b) a second monomer that comprises the skew variants L368D/K370S, the pI variants N208D/Q295E/N384D/Q418E/N421D, the ablation variants E233P/L234V/L235A/G236del/S267K, the FcRn variants M428L/N434S and a first variable heavy domain that, with the first variable light domain, makes up the Fv that binds to the first checkpoint inhibitor as outlined herein, and c) a light chain comprising a first variable light domain and a constant light domain.

[0345] In mAb-scFv backbone 1 (optionally including M428L/N434S) from FIG. 75, specific ABDs that bind human ICOS are shown in FIG. 19, FIG. 20A-20G, FIG. 24, FIG. 68

[0346] A-68G and FIG. 77A-77B as well as SEQ ID NO: 27869-28086, 28087-28269, 27193-27335, 28549-28556 and 28557-28665.

[0347] In mAb-scFv backbone 1 (optionally including M428L/N434S) from FIG. 75, specific ABDs that bind human GITR are those in FIG. 18, FIG. 72 and FIG. 73 and those listed in SEQ ID NO:26282-26290.

[0348] In mAb-scFv backbone 1 (optionally including M428L/N434S) from FIG. 75, specific ABDs that bind human 4-1BB include those in FIG. 16, FIG. 72 and FIG. 73 and SEQ ID NO: 26262-2671.

[0349] In mAb-scFv backbone 1 (optionally including M428L/N434S) from FIG. 75, specific ABDs that bind human OX-40 FIG. 17, FIG. 72 and FIG. 73 and those listed in SEQ ID NO: 26272-26281.

[0350] In mAb-scFv backbone 1 (optionally including M428L/N434S) from FIG. 75, specific ABDs that bind human PD-L1 include FIG. 15A-15C, FIG. 73 and FIG. 78 and SEQ ID NO: 3961-4432.

[0351] D. Central scFv

[0352] One heterodimeric scaffold that finds particular use in the present invention is the Central-scFv format. In this embodiment, the format relies on the use of an inserted scFv domain thus forming a third antigen binding domain, wherein the Fab portions of the two monomers bind one receptor target and the “extra” scFv domain binds another (again, generally the costimulatory receptor is bound monovalently). The scFv domain is inserted between the Fc domain and the CH1-Fv region of one of the monomers, thus providing a third antigen binding domain.

[0353] In this embodiment, one monomer comprises a first heavy chain comprising a first variable heavy domain, a CH1 domain (and optional hinge) and Fc domain, with a scFv comprising a scFv variable light domain, an scFv linker and a scFv variable heavy domain. The scFv is covalently attached between the C-terminus of the CH1 domain of the heavy constant domain and the N-terminus of the first Fc domain using optional domain linkers (vh1-CH1-[optional linker]-vh2-scFv linker-vl2-[optional linker including the hinge]-CH2-CH3, or the opposite orientation for the scFv, vh1-CH1-[optional linker]-vl2-scFv linker-vh2-[optional linker including the hinge]-CH2-CH3). In some embodiments, the optional linker is a hinge or fragment thereof. The other monomer is a standard Fab side (e.g. vh1-CH1-hinge-CH2-CH3). This embodiment further utilizes a common light chain comprising a variable light domain and a constant light domain, which associates with the heavy chains to form two identical Fabs that bind a checkpoint inhibitor. As for many of the embodiments herein, these constructs include skew variants, pI variants, ablation variants, additional Fc variants, etc. as desired and described herein. In this embodiment, suitable Fv pairs include (Fabs listed first, scFvs second) ICOS X PD-1, ICOS X PD-L1, ICOS X CTLA-4, ICOS X LAG-3, ICOS X TIM-3, ICOS X BTLA, ICOS X TIGIT, TIGIT X ICOS, PD-1 X ICOS, PD-L1 X ICOS, CTLA-4 X ICOS, LAG-3 X ICOS, TIM-3 X ICOS, BTLA X ICOS, OX40 X TIGIT, OX40 X PD-1, OX40 X PD-L1, OX40 X CTLA-4, OX40 X LAG-3, OX40 X TIM-3, OX40 X BTLA, TIGIT X OX40, PD-1 X OX40, PD-L1 X OX40, CTLA-4 X OX40, LAG-3 X OX40, TIM-3 X OX40, BTLA X OX40, GITR X TIGIT, GITR X PD-1, GITR X PD-L1, GITR X CTLA-4, GITR X LAG-3, GITR X TIM-3, GITR X BTLA, TIGIT x GITR, PD-1 X GITR, PD-L1 X GITR, CTLA-4 X GITR, LAG-3 X GITR, TIM-3 X GITR, BTLA X GITR, 4-1BB X TIGIT, 4-1BB X PD-1, 4-1BB X PD-L1, 4-1BB X CTLA-4, 4-1BB X LAG-3, 4-1BB X TIM-3, 4-1BB X BTLA, TIGIT X 4-1BB, PD-1 X 4-1BB, PD-L1 X 4-1BB, CTLA-4 X 4-1BB, LAG-3 X 4-1BB, TIM-3 X 4-1BB and BTLA X 4-1BB.

[0354] The ABD sequences for these combinations can be as disclosed in the sequence listing or as shown in the Figures.

[0355] In addition, the Fc domains of the central scFv format generally comprise skew variants (e.g. a set of amino acid substitutions as shown in FIG. 4, with particularly useful skew variants being selected from the group consisting of S364K/E357Q:L368D/K370S; L368D/K370S:S364K; L368E/K370S:S364K; T411T/E360E/Q362E:D401K; L368D/K370S:S364K/E357L, K370S:S364K/E357Q, T366S/L368A/Y407V:T366W and T366S/L368A/Y407V/Y349C:T366W/S354C), optionally ablation variants (including those shown in FIG. 6), optionally charged scFv linkers (including those shown in FIG. 8) and the heavy chain comprises pI variants (including those shown in FIG. 5).

[0356] In some embodiments, the central scFv format includes skew variants, pI variants, and ablation variants. Accordingly, some embodiments include central scFv formats that comprise: a) a first monomer that comprises the skew variants S364K/E357Q, the ablation variants E233P/L234V/L235A/G236del/S267K, and a first variable heavy domain that, with the first variable light domain of the light chain, makes up an Fv that binds to a first receptor; b) a second monomer that comprises the skew variants L368D/K370S, the pI variants N208D/Q295E/N384D/Q418E/N421D, the ablation variants E233P/L234V/L235A/G236del/S267K, and a first variable heavy domain that, with the first variable light domain, makes up the Fv that binds to the second receptor as outlined herein; and c) a light chain comprising a first variable light domain and a constant light domain. In some particular embodiments with these variants in this format:

[0357] (1) the format comprises a Fab ABD binds to ICOS that has the ABD of [ICOS] H0.66_L0;

[0358] (2) the format comprises an ICOS ABD of H0.66_L0 combined with the scFv ABD comprising the ABD 1G6_L1.194_H1.279 that binds to PD-1;

[0359] (3) the format comprises an ICOS ABD of H0.66_L0 combined with the scFv comprising the ABD H3.23_L0.129 that binds to CTLA-4;

[0360] (4) the format comprises an ICOS ABD of H0.66_L0 is combined with the ABD 7G8_H.303_L1.34 that binds to LAG-3;

[0361] (5) the format comprises a scFv comprising the ABD 1G6_L1.194_H1.279 that binds to PD-1 and the Fab binds to GITR;

[0362] (6) the format comprises a scFv comprising the ABD 1G6_L1.194_H1.279 that binds to PD-1 and the Fab binds to OX40;

[0363] (7) the format comprises a scFv comprising the ABD 1G6_L1.194_H1.279 that binds to PD-1 and the Fab binds to ICOS;

[0364] 8) the format comprises a scFv comprising the ABD 1G6_L1.194_H1.279 that binds to PD-1 and the Fab binds to 4-1BB; and

[0365] (9) the format comprises the ABD of H0.66_L0 that binds to ICOS and an ABD that binds to PD-L1.

[0366] In some embodiments, the central scFv format includes skew variants, pI variants, ablation variants and FcRn variants. Accordingly, some embodiments include central-scFv formats that comprise: a) a first monomer that comprises the skew variants S364K/E357Q, the ablation variants E233P/L234V/L235A/G236del/S267K, the FcRn variants M428L/N434S and a first variable heavy domain that, with the first variable light domain of the light chain, makes up an Fv that binds to a first receptor and an scFv domain that binds to a second receptor; b) a second monomer that comprises the skew variants L368D/K370S, the pI variants N208D/Q295E/N384D/Q418E/N421D, the ablation variants E233P/L234V/L235A/G236del/S267K, the FcRn variants M428L/N434S and a first variable heavy domain that, with the first variable light domain, makes up the Fv that binds to the first checkpoint inhibitor as outlined herein; and c) a light chain comprising a first variable light domain and a constant light domain. In this embodiment, suitable Fv pairs include (Fabs listed first, scFvs second) ICOS X PD-1, PD-1 X ICOS, ICOS X PD-L1, PD-L1 X ICOS, ICOS X CTLA-4 and CTLA-4 X ICOS.

[0367] For central-scFv sequences that utilize the central-scFv sequences of FIG. 55 suitable Fvs that bind ICOS include, but are not limited to, shown in FIG. 19, FIG. 20A-20G, FIG. 24, FIG. 68A-68G and FIG. 77A-77B as well as SEQ ID NO: 27869-28086, 28087-28269, 27193-27335, 28549-28556 and 28557-28665.

[0368] For central-scFv sequences that utilize the central-scFv sequences of FIG. 55 suitable Fvs that bind PD-L1 include, but are not limited to, those shown in FIG. 15A-15C, FIG. 73 and FIG. 78 and SEQ ID NO: 3961-4432.

[0369] For central-scFv sequences that utilize the central-scFv sequences of FIG. 55 suitable Fvs that bind GITR include, but are not limited to, those in FIG. 18, FIG. 72 and FIG. 73 and those listed in SEQ ID NO:26282-26290.

[0370] For central-scFv sequences that utilize the central-scFv sequences of FIG. 55 suitable Fvs that bind OX40 include, but are not limited to, FIG. 17, FIG. 72 and FIG. 73 and those listed in SEQ ID NO: 26272-26281.

[0371] For central-scFv sequences that utilize the central-scFv sequences of FIG. 55 suitable Fvs that bind 4-1BB include, but are not limited to, FIG. 16, FIG. 72 and FIG. 73 and SEQ ID NO: 26262-2671.

[0372] E. Central-scFv2

[0373] One heterodimeric scaffold that finds particular use in the present invention is the Central-scFv2 format, which is bispecific and tetravalent. In this embodiment, the format relies on the use of two inserted scFv domains thus forming third and fourth antigen binding domains, wherein the Fab portions of the two monomers bind one receptor target and the “extra” scFv domains bind another. The scFv domain is inserted between the Fc domain and the CH1-Fv region of the monomers.

[0374] In this embodiment, both monomers comprise a first heavy chain comprising a first variable heavy domain, a CH1 domain (and optional hinge) and Fc domain, with a scFv comprising a scFv variable light domain, an scFv linker and a scFv variable heavy domain. The scFv is covalently attached between the C-terminus of the CH1 domain of the heavy constant domain and the N-terminus of the first Fc domain using optional domain linkers (vh1-CH1-[optional linker]-vh2-scFv linker-vl2-[optional linker including the hinge]-CH2-CH3, or the opposite orientation for the scFv, vh1-CH1-[optional linker]-vl2-scFv linker-vh2-[optional linker including the hinge]-CH2-CH3). In some embodiments, the optional linker is a hinge or fragment thereof. This embodiment further utilizes a common light chain comprising a variable light domain and a constant light domain, which associates with the heavy chains to form two identical Fabs that bind a receptor. As for many of the embodiments herein, these constructs include skew variants, pI variants, ablation variants, additional Fc variants, etc. as desired and described herein. In this embodiment, suitable Fv pairs include (Fabs listed first, scFvs second) ICOS X PD-1, ICOS X PD-L1, ICOS X CTLA-4, ICOS X LAG-3, ICOS X TIM-3, ICOS X BTLA, ICOS X TIGIT, TIGIT X ICOS, PD-1 X ICOS, PD-L1 X ICOS, CTLA-4 X ICOS, LAG-3 X ICOS, TIM-3 X ICOS, BTLA X ICOS, OX40 X TIGIT, OX40 X PD-1, OX40 X PD-L1, OX40 X CTLA-4, OX40 X LAG-3, OX40 X TIM-3, OX40 X BTLA, TIGIT X OX40, PD-1 X OX40, PD-L1 X OX40, CTLA-4 X OX40, LAG-3 X OX40, TIM-3 X OX40, BTLA X OX40, GITR X TIGIT, GITR X PD-1, GITR X PD-L1, GITR X CTLA-4, GITR X LAG-3, GITR X TIM-3, GITR X BTLA, TIGIT x GITR, PD-1 X GITR, PD-L1 X GITR, CTLA-4 X GITR, LAG-3 X GITR, TIM-3 X GITR, BTLA X GITR, 4-1BB X TIGIT, 4-1BB X PD-1, 4-1BB X PD-L1, 4-1BB X CTLA-4, 4-1BB X LAG-3, 4-1BB X TIM-3, 4-1BB X BTLA, TIGIT X 4-1BB, PD-1 X 4-1BB, PD-L1 X 4-1BB, CTLA-4 X 4-1BB, LAG-3 X 4-1BB, TIM-3 X 4-1BB and BTLA X 4-1BB.

[0375] The ABD sequences for these combinations can be as disclosed in the sequence listing or as shown in the Figures.

[0376] In addition, the Fc domains of the central scFv2 format generally comprise skew variants (e.g. a set of amino acid substitutions as shown in FIG. 4, with particularly useful skew variants being selected from the group consisting of S364K/E357Q:L368D/K370S; L368D/K370S:S364K; L368E/K370S:S364K; T411T/E360E/Q362E:D401K; L368D/K370S:S364K/E357L, K370S:S364K/E357Q, T366S/L368A/Y407V:T366W and T366S/L368A/Y407V/Y349C:T366W/S354C), optionally ablation variants (including those shown in FIG. 6), optionally charged scFv linkers (including those shown in FIG. 8) and the heavy chain comprises pI variants (including those shown in FIG. 5).

[0377] In some embodiments, the central scFv2 format includes skew variants, pI variants, and ablation variants. Accordingly, some embodiments include central scFv formats that comprise: a) a first monomer that comprises the skew variants S364K/E357Q, the ablation variants E233P/L234V/L235A/G236del/S267K, and a first variable heavy domain that, with the first variable light domain of the light chain, makes up an Fv that binds to a first receptor; b) a second monomer that comprises the skew variants L368D/K370S, the pI variants N208D/Q295E/N384D/Q418E/N421D, the ablation variants E233P/L234V/L235A/G236del/S267K, and a first variable heavy domain that, with the first variable light domain, makes up the Fv that binds to the second receptor as outlined herein; and c) a light chain comprising a first variable light domain and a constant light domain. In some particular embodiments with these variants in this format:

[0378] (1) the format comprises a Fab ABD binds to ICOS that has the ABD of [ICOS] H0.66_L0;

[0379] (2) the format comprises an ICOS ABD of H0.66_L0 combined with the scFv ABD comprising the ABD 1G6_L1.194_H1.279 that binds to PD-1;

[0380] (3) the format comprises an ICOS ABD of H0.66_L0 combined with the scFv comprising the ABD H3.23_L0.129 that binds to CTLA-4;

[0381] (4) the format comprises an ICOS ABD of H0.66_L0 is combined with the ABD 7G8_H.303_L1.34 that binds to LAG-3;

[0382] (5) the format comprises a scFv comprising the ABD 1G6_L1.194_H1.279 that binds to PD-1 and the Fab binds to GITR;

[0383] (6) the format comprises a scFv comprising the ABD 1G6_L1.194_H1.279 that binds to PD-1 and the Fab binds to OX40;

[0384] (7) the format comprises a scFv comprising the ABD 1G6_L1.194_H1.279 that binds to PD-1 and the Fab binds to ICOS;

[0385] 8) the format comprises a scFv comprising the ABD 1G6_L1.194_H1.279 that binds to PD-1 and the Fab binds to 4-1BB; and

[0386] (9) the format comprises the ABD of H0.66_L0 that binds to ICOS and an ABD that binds to PD-L1.

[0387] In some embodiments, the central scFv2 format includes skew variants, pI variants, ablation variants and FcRn variants. Accordingly, some embodiments include central-scFv formats that comprise: a) a first monomer that comprises the skew variants S364K/E357Q, the ablation variants E233P/L234V/L235A/G236del/S267K, the FcRn variants M428L/N434S and a first variable heavy domain that, with the first variable light domain of the light chain, makes up an Fv that binds to a first receptor and an scFv domain that binds to a second receptor; b) a second monomer that comprises the skew variants L368D/K370S, the pI variants N208D/Q295E/N384D/Q418E/N421D, the ablation variants E233P/L234V/L235A/G236del/S267K, the FcRn variants M428L/N434S and a first variable heavy domain that, with the first variable light domain, makes up the Fv that binds to the first checkpoint inhibitor as outlined herein; and c) a light chain comprising a first variable light domain and a constant light domain. In this embodiment, suitable Fv pairs include (Fabs listed first, scFvs second) ICOS X PD-1, PD-1 X ICOS, ICOS X PD-L1, PD-L1 X ICOS, ICOS X CTLA-4 and CTLA-4 X ICOS.

[0388] For central-scFv2 sequences that utilize the central-scFv2 sequences of FIG. 55 suitable Fvs that bind ICOS include, but are not limited to, shown in FIG. 19, FIG. 20A-20G, FIG. 24, FIG. 68A-68G and FIG. 77A-77B as well as SEQ ID NO: 27869-28086, 28087-28269, 27193-27335, 28549-28556 and 28557-28665.

[0389] For central-scFv2 sequences that utilize the central-scFv2 sequences of FIG. 55 suitable Fvs that bind PD-L1 include, but are not limited to, those shown in FIG. 15A-15C, FIG. 73 and FIG. 78 and SEQ ID NO: 3961-4432.

[0390] For central-scFv2 sequences that utilize the central-scFv sequences of FIG. 55 suitable Fvs that bind GITR include, but are not limited to, those in FIG. 18, FIG. 72 and FIG. 73 and those listed in SEQ ID NO:26282-26290.

[0391] For central-scFv2 sequences that utilize the central-scFv sequences of FIG. 55 suitable Fvs that bind OX40 include, but are not limited to, FIG. 17, FIG. 72 and FIG. 73 and those listed in SEQ ID NO: 26272-26281.

[0392] For central-scFv2 sequences that utilize the central-scFv sequences of FIG. 55 suitable Fvs that bind 4-1BB include, but are not limited to, FIG. 16, FIG. 72 and FIG. 73 and SEQ ID NO: 26262-2671.

[0393] F. One Armed mAb

[0394] As noted above, surprisingly and unexpectedly, monovalent costimulatory antibodies comprising a single ABD to the target show efficacy in activating T cells.

[0395] Accordingly, in some embodiments, the invention provides monovalent, monospecific antibodies as shown in Figure FIG. 2N that comprise a heterodimeric Fc domain (for stability). In this embodiment, in this embodiment, one monomer comprises just an Fc domain, while the other monomer is a HC (VH1-CH1-hinge-CH2-CH3). This embodiment further utilizes a light chain comprising a variable light domain and a constant light domain, that associates with the heavy chain to form a Fab. As for many of the embodiments herein, these constructs include skew variants, pI variants, ablation variants, additional Fc variants, etc. as desired and described herein. In this embodiment, suitable ABDs bind a costimulatory receptor such as ICOS, GITR, OX40 or 4-1BB.

[0396] The ABD sequences for these combinations can be as disclosed in the sequence listing or as shown in the Figures.

[0397] In addition, the Fc domains of the comprise skew variants (e.g. a set of amino acid substitutions as shown in FIG. 4, with particularly useful skew variants being selected from the group consisting of S364K/E357Q:L368D/K370S; L368D/K370S:S364K; L368E/K370S:S364K; T411T/E360E/Q362E:D401K; L368D/K370S:S364K/E357L, K370S:S364K/E357Q, T366S/L368A/Y407V:T366W and T366S/L368A/Y407V/Y349C:T366W/S354C), optionally ablation variants (including those shown in FIG. 6), and the heavy chain comprises pI variants (including those shown in FIG. 5).

[0398] In some embodiments, the one armed scFv-mAb format includes skew variants, pI variants, and ablation variants. Accordingly, some embodiments include formats that comprise: a) a first (Fc) monomer that comprises the skew variants S364K/E357Q, the ablation variants E233P/L234V/L235A/G236del/S267K b) a second monomer that comprises the skew variants L368D/K370S, the pI variants Q295E/N384D/Q418E/N421D, the ablation variants E233P/L234V/L235A/G236del/S267K, and a first variable heavy domain that, with the first variable light domain, makes up the Fv that binds to the costimulatory receptor as outlined herein

[0399] In this format, specific ABDs that bind human ICOS include, but are not limited to, [ICOS]_H0L0 and [ICOS]H0.66_L0 and those shown in FIG. 19, FIG. 20A-20G, FIG. 24, FIG. 68A-68G and FIG. 77A-77B as well as SEQ ID NO: 27869-28086, 28087-28269, 27193-27335, 28549-28556 and 28557-28665.

[0400] In this format, specific ABDs that bind human GITR include, but are not limited to, those in FIG. 18, FIG. 72 and FIG. 73 and those listed in SEQ ID NO:26282-26290.

[0401] In this format, specific ABDs that bind OX40 include, but are not limited to, FIG. 17, FIG. 72 and FIG. 73 and those listed in SEQ ID NO: 26272-26281.

[0402] In this format, specific ABDs that bind human 4-1BB include, but are not limited to, FIG. 16, FIG. 72 and FIG. 73 and SEQ ID NO: 26262-2671.

[0403] In this format, specific ABDs that bind human PD-L1 include, but are not limited to, FIG. 15A-15C, FIG. 73 and FIG. 78 and SEQ ID NO: 3961-4432.

[0404] Specific “one armed mAbs” are shown in the Figures and sequence listing.

[0405] G. Bispecific mAb

[0406] One heterodimeric scaffold that finds particular use in the present invention is the bispecific mAb format, which is bispecific and tetravalent. In this embodiment, the format relies on the generation of separate homodimeric antibodies which are then recombined. In this format, there is one HC-LC pair (VH1-CH1-hinge-CH2-CH3 and VL1-LC) and a second Hc-LC pair (VH2-CH1-hinge-CH2-CH3 and VL2-LC), e.g. two different heavy chains and two different light chains. Reference is made to Example 5I(d).

[0407] In this format, suitable pairs include ICOS and PD-1, ICOS and CTLA-4, ICOS and LAG-3, ICOS and TIM-3, ICOS and PD-L1, ICOS and BTLA, ICOS and TIGIT, GITR and TIGIT, GITR and PD-1, GITR and CTLA-4, GITR and LAG-3, GITR and TIM-3, GITR and PD-L1, GITR and BTLA, OX40 and PD-1, OX40 and TIGIT, OX40 and CTLA-4, IC OX40 OS and LAG-3, OX40 and TIM-3, OX40 and PD-L1, OX40 and BTLA, 4-1BB and PD-1, 4-1BB and CTLA-4, 4-1BB and LAG-3, 4-1BB and TIM-3, 4-1BB and PD-L1, TIGIT and 4-1BB and 4-1BB and BTLA.

[0408] In some particular embodiments with these variants in this format:

[0409] (1) the format comprises a Fab ABD binds to ICOS that has the ABD of [ICOS] H0.66_L0;

[0410] (2) the format comprises an ICOS ABD of H0.66_L0 combined with the ABD comprising the ABD 1G6_L1.194_H1.279 that binds to PD-1;

[0411] (3) the format comprises an ICOS ABD of H0.66_L0 combined with the ABD H3.23_L0.129 that binds to CTLA-4;

[0412] (4) the format comprises an ICOS ABD of H0.66_L0 is combined with the ABD 7G8_H.303_L1.34 that binds to LAG-3;

[0413] (5) the format comprises a scFv comprising the ABD 1G6_L1.194_H1.279 that binds to PD-1 and the Fab binds to GITR;

[0414] (6) the format comprises a scFv comprising the ABD 1G6_L1.194_H1.279 that binds to PD-1 and the Fab binds to OX40;

[0415] (7) the format comprises a scFv comprising the ABD 1G6_L1.194_H1.279 that binds to PD-1 and the Fab binds to ICOS;

[0416] 8) the format comprises a scFv comprising the ABD 1G6_L1.194_H1.279 that binds to PD-1 and the Fab binds to 4-1BB; and

[0417] (9) the format comprises the ABD of H0.66_L0 that binds to ICOS and an ABD that binds to PD-L1.

[0418] In this format, specific ABDs that bind human ICOS include, but are not limited to, [ICOS]_H0L0 and [ICOS]H0.66_L0 and those shown in FIG. 19, FIG. 20A-20G, FIG. 24, FIG. 68A-68G and FIG. 77A-77B as well as SEQ ID NO: 27869-28086, 28087-28269, 27193-27335, 28549-28556 and 28557-28665.

[0419] In this format, specific ABDs that bind human GITR include, but are not limited to, those in FIG. 18, FIG. 72 and FIG. 73 and those listed in SEQ ID NO:26282-26290.

[0420] In this format, specific ABDs that bind OX40 include, but are not limited to, FIG. 17, FIG. 72 and FIG. 73 and those listed in SEQ ID NO: 26272-26281.

[0421] In this format, specific ABDs that bind human 4-1BB include, but are not limited to, FIG. 16, FIG. 72 and FIG. 73 and SEQ ID NO: 26262-2671.

[0422] In this format, specific ABDs that bind human PD-L1 include, but are not limited to, FIG. 15A-15C, FIG. 73 and FIG. 78 and SEQ ID NO: 3961-4432.

[0423] H. Central-Fv Format

[0424] One heterodimeric scaffold that finds particular use in the present invention is the Central-Fv format shown in FIG. 2. In this embodiment, the format relies on the use of an inserted Fv domain thus forming an “extra” third antigen binding domain, wherein the Fab portions of the two monomers bind one receptor and the “extra” central-Fv domain binds another (generally the costimulatory receptor). The Fv domain is inserted between the Fc domain and the CH1-Fv region of the monomers, thus providing a third antigen binding domain, wherein each monomer contains a component of the Fv (e.g. one monomer comprises a variable heavy domain and the other a variable light domain of the “extra” central Fv domain).

[0425] In this embodiment, one monomer comprises a first heavy chain comprising a first variable heavy domain, a CH1 domain, and Fc domain and an additional variable light domain. The additional variable light domain is covalently attached between the C-terminus of the CH1 domain of the heavy constant domain and the N-terminus of the first Fc domain using domain linkers (vh1-CH1-[optional linker]-vl2-hinge-CH2-CH3). The other monomer comprises a first heavy chain comprising a first variable heavy domain, a CH1 domain and Fc domain and an additional variable heavy domain (vh1-CH1-[optional linker]-vh2-hinge-CH2-CH3). The additional variable heavy domain domain is covalently attached between the C-terminus of the CH1 domain of the heavy constant domain and the N-terminus of the first Fc domain using domain linkers. This embodiment utilizes a common light chain comprising a variable light domain and a constant light domain, that associates with the heavy chains to form two identical Fabs that each bind a receptor. The additional variable heavy domain and additional variable light domain form an “extra” central Fv that binds a second receptor. As for many of the embodiments herein, these constructs include skew variants, pI variants, ablation variants, additional Fc variants, etc. as desired and described herein. In this embodiment, suitable Fv pairs include (Fabs listed first, “extra” central Fv second) ICOS X PD-1, ICOS X PD-L1, ICOS X CTLA-4, ICOS X LAG-3, ICOS X TIM-3, ICOS X BTLA, ICOS X TIGIT, TIGIT X ICOS, PD-1 X ICOS, PD-L1 X ICOS, CTLA-4 X ICOS, LAG-3 X ICOS, TIM-3 X ICOS, BTLA X ICOS, OX40 X TIGIT, OX40 X PD-1, OX40 X PD-L1, OX40 X CTLA-4, OX40 X LAG-3, OX40 X TIM-3, OX40 X BTLA, TIGIT X OX40, PD-1 X OX40, PD-L1 X OX40, CTLA-4 X OX40, LAG-3 X OX40, TIM-3 X OX40, BTLA X OX40, GITR X TIGIT, GITR X PD-1, GITR X PD-L1, GITR X CTLA-4, GITR X LAG-3, GITR X TIM-3, GITR X BTLA, TIGIT x GITR, PD-1 X GITR, PD-L1 X GITR, CTLA-4 X GITR, LAG-3 X GITR, TIM-3 X GITR, BTLA X GITR, 4-1BB X TIGIT, 4-1BB X PD-1, 4-1BB X PD-L1, 4-1BB X CTLA-4, 4-1BB X LAG-3, 4-1BB X TIM-3, 4-1BB X BTLA, TIGIT X 4-1BB, PD-1 X 4-1BB, PD-L1 X 4-1BB, CTLA-4 X 4-1BB, LAG-3 X 4-1BB, TIM-3 X 4-1BB and BTLA X 4-1BB.

[0426] The ABD sequences for these combinations can be as disclosed in the sequence listing or as shown in the Figures.

[0427] In addition, the Fc domains of the central-Fv format generally comprise skew variants (e.g. a set of amino acid substitutions as shown in FIG. 4, with particularly useful skew variants being selected from the group consisting of S364K/E357Q:L368D/K370S; L368D/K370S:S364K; L368E/K370S:S364K; T411T/E360E/Q362E:D401K; L368D/K370S:S364K/E357L, K370S:S364K/E357Q, T366S/L368A/Y407V:T366W and T366S/L368A/Y407V/Y349C:T366W/S354C), optionally ablation variants (including those shown in FIG. 6), optionally charged scFv linkers (including those shown in FIG. 8) and the heavy chain comprises pI variants (including those shown in FIG. 5).

[0428] In some embodiments, the central-Fv format includes skew variants, pI variants, and ablation variants. Accordingly, some embodiments include central scFv formats that comprise: a) a first monomer that comprises the skew variants S364K/E357Q, the ablation variants E233P/L234V/L235A/G236del/S267K, and a first variable heavy domain that, with the first variable light domain of the light chain, makes up an Fv that binds to a first receptor; b) a second monomer that comprises the skew variants L368D/K370S, the pI variants N208D/Q295E/N384D/Q418E/N421D, the ablation variants E233P/L234V/L235A/G236del/S267K, and a first variable heavy domain that, with the first variable light domain, makes up the Fv that binds to the second receptor as outlined herein; and c) a light chain comprising a first variable light domain and a constant light domain. In some particular embodiments with these variants in this format:

[0429] (1) the format comprises a Fab ABD binds to ICOS that has the ABD of [ICOS] H0.66_L0;

[0430] (2) the format comprises an ICOS ABD of H0.66_L0 combined with the scFv ABD comprising the ABD 1G6_L1.194_H1.279 that binds to PD-1;

[0431] (3) the format comprises an ICOS ABD of H0.66_L0 combined with the scFv comprising the ABD H3.23_L0.129 that binds to CTLA-4;

[0432] (4) the format comprises an ICOS ABD of H0.66_L0 is combined with the ABD 7G8_H.303_L1.34 that binds to LAG-3;

[0433] (5) the format comprises a scFv comprising the ABD 1G6_L1.194_H1.279 that binds to PD-1 and the Fab binds to GITR;

[0434] (6) the format comprises a scFv comprising the ABD 1G6_L1.194_H1.279 that binds to PD-1 and the Fab binds to OX40;

[0435] (7) the format comprises a scFv comprising the ABD 1G6_L1.194_H1.279 that binds to PD-1 and the Fab binds to ICOS;

[0436] 8) the format comprises a scFv comprising the ABD 1G6_L1.194_H1.279 that binds to PD-1 and the Fab binds to 4-1BB; and

[0437] (9) the format comprises the ABD of H0.66_L0 that binds to ICOS and an ABD that binds to PD-L1.

[0438] In some embodiments, the central-Fv format includes skew variants, pI variants, ablation variants and FcRn variants. Accordingly, some embodiments include central-scFv formats that comprise: a) a first monomer that comprises the skew variants S364K/E357Q, the ablation variants E233P/L234V/L235A/G236del/S267K, the FcRn variants M428L/N434S and a first variable heavy domain that, with the first variable light domain of the light chain, makes up an Fv that binds to a first receptor and an scFv domain that binds to a second receptor; b) a second monomer that comprises the skew variants L368D/K370S, the pI variants N208D/Q295E/N384D/Q418E/N421D, the ablation variants E233P/L234V/L235A/G236del/S267K, the FcRn variants M428L/N434S and a first variable heavy domain that, with the first variable light domain, makes up the Fv that binds to the first checkpoint inhibitor as outlined herein; and c) a light chain comprising a first variable light domain and a constant light domain. In this embodiment, suitable Fv pairs include (Fabs listed first, scFvs second) ICOS X PD-1, PD-1 X ICOS, ICOS X PD-L1, PD-L1 X ICOS, ICOS X CTLA-4 and CTLA-4 X ICOS.

[0439] For central-Fv formats suitable Fvs that bind ICOS include, but are not limited to, shown in FIG. 19, FIG. 20A-20G, FIG. 24, FIG. 68A-68G and FIG. 77A-77B as well as SEQ ID NO: 27869-28086, 28087-28269, 27193-27335, 28549-28556 and 28557-28665.

[0440] For central-Fv formats suitable Fvs that bind PD-L1 include, but are not limited to, those shown in FIG. 15A-15C, FIG. 73 and FIG. 78 and SEQ ID NO: 3961-4432.

[0441] For central-Fv formats suitable Fvs that bind GITR include, but are not limited to, those in FIG. 18, FIG. 72 and FIG. 73 and those listed in SEQ ID NO:26282-26290.

[0442] For central-Fv formats suitable Fvs that bind OX40 include, but are not limited to, FIG. 17, FIG. 72 and FIG. 73 and those listed in SEQ ID NO: 26272-26281.

[0443] For central-Fv formats suitable Fvs that bind 4-1BB include, but are not limited to, FIG. 16, FIG. 72 and FIG. 73 and SEQ ID NO: 26262-2671.

[0444] For central-FV formats suitable Fvs that bind PD-L1 include, but are not limited to, those of FIG. 15A-15C, FIG. 73 and FIG. 78 and SEQ ID NO: 3961-4432.

[0445] I. One Armed Central-scFv

[0446] One heterodimeric scaffold that finds particular use in the present invention is the one armed central-scFv format shown in FIG. 1C. In this embodiment, one monomer comprises just an Fc domain, while the other monomer includes a Fab domain (a first antigen binding domain), a scFv domain (a second antigen binding domain) and an Fc domain, where the scFv domain is inserted between the Fc domain and the Fc domain. In this format, the Fab portion binds one receptor target and the scFv binds another.

[0447] In this embodiment, one monomer comprises a first heavy chain comprising a first variable heavy domain, a CH1 domain and Fc domain, with a scFv comprising a scFv variable light domain, an scFv linker and a scFv variable heavy domain. The scFv is covalently attached between the C-terminus of the CH1 domain of the heavy constant domain and the N-terminus of the first Fc domain using domain linkers, in either orientation, VH1-CH1-[optional domain linker]-VH2-scFv linker-VL2-[optional domain linker]-CH2-CH3 or VH1-CH1-[optional domain linker]-VL2-scFv linker-VH2-[optional domain linker]-CH2-CH3. The second monomer comprises an Fc domain (CH2-CH3). This embodiment further utilizes a light chain comprising a variable light domain and a constant light domain, that associates with the heavy chain to form a Fab. As for many of the embodiments herein, these constructs include skew variants, pI variants, ablation variants, additional Fc variants, etc. as desired and described herein. In this embodiment, suitable Fv pairs include (Fabs listed first, scFvs second) ICOS X PD-1, ICOS X PD-L1, ICOS X CTLA-4, ICOS X LAG-3, ICOS X TIM-3, ICOS X BTLA, ICOS X TIGIT, TIGIT X ICOS, PD-1 X ICOS, PD-L1 X ICOS, CTLA-4 X ICOS, LAG-3 X ICOS, TIM-3 X ICOS, BTLA X ICOS, OX40 X TIGIT, OX40 X PD-1, OX40 X PD-L1, OX40 X CTLA-4, OX40 X LAG-3, OX40 X TIM-3, OX40 X BTLA, TIGIT X OX40, PD-1 X OX40, PD-L1 X OX40, CTLA-4 X OX40, LAG-3 X OX40, TIM-3 X OX40, BTLA X OX40, GITR X TIGIT, GITR X PD-1, GITR X PD-L1, GITR X CTLA-4, GITR X LAG-3, GITR X TIM-3, GITR X BTLA, TIGIT x GITR, PD-1 X GITR, PD-L1 X GITR, CTLA-4 X GITR, LAG-3 X GITR, TIM-3 X GITR, BTLA X GITR, 4-1BB X TIGIT, 4-1BB X PD-1, 4-1BB X PD-L1, 4-1BB X CTLA-4, 4-1BB X LAG-3, 4-1BB X TIM-3, 4-1BB X BTLA, TIGIT X 4-1BB, PD-1 X 4-1BB, PD-L1 X 4-1BB, CTLA-4 X 4-1BB, LAG-3 X 4-1BB, TIM-3 X 4-1BB and BTLA X 4-1BB.

[0448] The ABD sequences for these combinations can be as disclosed in the sequence listing or as shown in the Figure.

[0449] In addition, the Fc domains of the one armed central-scFv format generally comprise skew variants (e.g. a set of amino acid substitutions as shown in FIG. 4, with particularly useful skew variants being selected from the group consisting of S364K/E357Q:L368D/K370S; L368D/K370S:S364K; L368E/K370S:S364K; T411T/E360E/Q362E:D401K; L368D/K370S:S364K/E357L, K370S:S364K/E357Q, T366S/L368A/Y407V:T366W and T366S/L368A/Y407V/Y349C:T366W/S354C), optionally ablation variants (including those shown in FIG. 6), optionally charged scFv linkers (including those shown in FIG. 8) and the heavy chain comprises pI variants (including those shown in FIG. 5).

[0450] In some embodiments, the one armed central-scFv format includes skew variants, pI variants, and ablation variants. Accordingly, some embodiments include formats that comprise: a) a first monomer that comprises the skew variants S364K/E357Q, the ablation variants E233P/L234V/L235A/G236del/S267K, and a variable heavy domain that, with the variable light domain of the light chain, makes up an Fv that binds to a first receptor, and a scFv that binds to the other receptor; b) a second monomer that comprises the skew variants L368D/K370S, the pI variants Q295E/N384D/Q418E/N421D, the ablation variants E233P/L234V/L235A/G236del/S267K, and c) a light chain comprising a first variable light domain and a constant light domain. In some particular embodiments with these variants in this format:

[0451] (1) the format comprises a Fab ABD binds to ICOS that has the ABD of [ICOS] H0.66_L0;

[0452] (2) the format comprises an ICOS ABD of H0.66_L0 combined with the scFv ABD comprising the ABD 1G6_L1.194_H1.279 that binds to PD-1;

[0453] (3) the format comprises an ICOS ABD of H0.66_L0 combined with the scFv comprising the ABD H3.23_L0.129 that binds to CTLA-4;

[0454] (4) the format comprises an ICOS ABD of H0.66_L0 is combined with the ABD 7G8_H.303_L1.34 that binds to LAG-3;

[0455] (5) the format comprises a scFv comprising the ABD 1G6_L1.194_H1.279 that binds to PD-1 and the Fab binds to GITR;

[0456] (6) the format comprises a scFv comprising the ABD 1G6_L1.194_H1.279 that binds to PD-1 and the Fab binds to OX40;

[0457] (7) the format comprises a scFv comprising the ABD 1G6_L1.194_H1.279 that binds to PD-1 and the Fab binds to ICOS;

[0458] 8) the format comprises a scFv comprising the ABD 1G6_L1.194_H1.279 that binds to PD-1 and the Fab binds to 4-1BB; and

[0459] (9) the format comprises the ABD of H0.66_L0 that binds to ICOS and an ABD that binds to PD-L1.

[0460] In some embodiments, the one armed central-scFv format includes skew variants, pI variants, ablation variants and FcRn variants. Accordingly, some embodiments include formats that comprise: a) a first monomer that comprises the skew variants S364K/E357Q, the ablation variants E233P/L234V/L235A/G236del/S267K, the FcRn variants M428L/N434S and a first variable heavy domain that, with the first variable light domain of the light chain, makes up an Fv that binds to a first receptor and a scFv domain that binds to a second receptor; b) a second monomer that comprises the skew variants L368D/K370S, the pI variants Q295E/N384D/Q418E/N421D, the ablation variants E233P/L234V/L235A/G236del/S267K, the FcRn variants M428L/N434S. and c) a light chain comprising a first variable light domain and a constant light domain.

[0461] In this format, specific ABDs that bind human ICOS include, but are not limited to, [ICOS]_H0L0 and [ICOS]H0.66_L0 and those shown in FIG. 19, FIG. 20A-20G, FIG. 24, FIG. 68A-68G and FIG. 77A-77B as well as SEQ ID NO: 27869-28086, 28087-28269, 27193-27335, 28549-28556 and 28557-28665.

[0462] In this format, specific ABDs that bind human GITR include, but are not limited to, those in FIG. 18, FIG. 72 and FIG. 73 and those listed in SEQ ID NO:26282-26290.

[0463] In this format, specific ABDs that bind OX40 include, but are not limited to, FIG. 17, FIG. 72 and FIG. 73 and those listed in SEQ ID NO: 26272-26281.

[0464] In this format, specific ABDs that bind human 4-1BB include, but are not limited to, FIG. 16, FIG. 72 and FIG. 73 and SEQ ID NO: 26262-2671.

[0465] In this format, specific ABDs that bind human PD-L1 include, but are not limited to, FIG. 15A-15C, FIG. 73 and FIG. 78 and SEQ ID NO: 3961-4432.

[0466] J. One Armed scFv-mAb

[0467] One heterodimeric scaffold that finds particular use in the present invention is the one armed scFv-mAb format shown in FIG. 2D. In this embodiment, one monomer comprises just an Fc domain, while the other monomer uses a scFv domain attached at the N-terminus of the heavy chain, generally through the use of a linker: vh1-scFv linker-vl1-[optional domain linker]-VH2-CH1-hinge-CH2-CH3 or (in the opposite orientation) vl1-scFv linker-vhf-[optional domain linker]-VH2-CH1-hinge-CH2-CH3. In this format, either the Fab portion binds one receptor target and the scFv binds another. This embodiment further utilizes a light chain comprising a variable light domain and a constant light domain, that associates with the heavy chain to form a Fab. As for many of the embodiments herein, these constructs include skew variants, pI variants, ablation variants, additional Fc variants, etc. as desired and described herein. In this embodiment, suitable Fv pairs include (Fabs listed first, scFvs second) ICOS X PD-1, ICOS X PD-L1, ICOS X CTLA-4, ICOS X LAG-3, ICOS X TIM-3, ICOS X BTLA, ICOS X TIGIT, TIGIT X ICOS, PD-1 X ICOS, PD-L1 X ICOS, CTLA-4 X ICOS, LAG-3 X ICOS, TIM-3 X ICOS, BTLA X ICOS, OX40 X TIGIT, OX40 X PD-1, OX40 X PD-L1, OX40 X CTLA-4, OX40 X LAG-3, OX40 X TIM-3, OX40 X BTLA, TIGIT X OX40, PD-1 X OX40, PD-L1 X OX40, CTLA-4 X OX40, LAG-3 X OX40, TIM-3 X OX40, BTLA X OX40, GITR X TIGIT, GITR X PD-1, GITR X PD-L1, GITR X CTLA-4, GITR X LAG-3, GITR X TIM-3, GITR X BTLA, TIGIT x GITR, PD-1 X GITR, PD-L1 X GITR, CTLA-4 X GITR, LAG-3 X GITR, TIM-3 X GITR, BTLA X GITR, 4-1BB X TIGIT, 4-1BB X PD-1, 4-1BB X PD-L1, 4-1BB X CTLA-4, 4-1BB X LAG-3, 4-1BB X TIM-3, 4-1BB X BTLA, TIGIT X 4-1BB, PD-1 X 4-1BB, PD-L1 X 4-1BB, CTLA-4 X 4-1BB, LAG-3 X 4-1BB, TIM-3 X 4-1BB and BTLA X 4-1BB.

[0468] The ABD sequences for these combinations can be as disclosed in the sequence listing or as shown in the Figures.

[0469] In addition, the Fc domains of the comprise skew variants (e.g. a set of amino acid substitutions as shown in FIG. 4, with particularly useful skew variants being selected from the group consisting of S364K/E357Q:L368D/K370S; L368D/K370S:S364K; L368E/K370S:S364K; T411T/E360E/Q362E:D401K; L368D/K370S:S364K/E357L, K370S:S364K/E357Q, T366S/L368A/Y407V:T366W and T366S/L368A/Y407V/Y349C:T366W/S354C), optionally ablation variants (including those shown in FIG. 6), optionally charged scFv linkers (including those shown in FIG. 8) and the heavy chain comprises pI variants (including those shown in FIG. 5).

[0470] In some embodiments, the one armed scFv-mAb format includes skew variants, pI variants, and ablation variants. Accordingly, some embodiments include formats that comprise: a) a first monomer that comprises the skew variants S364K/E357Q, the ablation variants E233P/L234V/L235A/G236del/S267K, and a first variable heavy domain that, with the first variable light domain of the light chain, makes up an Fv that binds to a first checkpoint inhibitor, and a second variable heavy domain; b) a second monomer that comprises the skew variants L368D/K370S, the pI variants N208D/Q295E/N384D/Q418E/N421D, the ablation variants E233P/L234V/L235A/G236del/S267K, and a first variable heavy domain that, with the first variable light domain, makes up the Fv that binds to the first checkpoint inhibitor as outlined herein, and a second variable light chain, that together with the second variable heavy chain forms an Fv (ABD) that binds a second checkpoint inhibitors; and c) a light chain comprising a first variable light domain and a constant light domain. In some particular embodiments with these variants in this format:

[0471] (1) the format comprises a Fab ABD binds to ICOS that has the ABD of [ICOS] H0.66_L0;

[0472] (2) the format comprises an ICOS ABD of H0.66_L0 combined with the scFv ABD comprising the ABD 1G6_L1.194_H1.279 that binds to PD-1;

[0473] (3) the format comprises an ICOS ABD of H0.66_L0 combined with the scFv comprising the ABD H3.23_L0.129 that binds to CTLA-4;

[0474] (4) the format comprises an ICOS ABD of H0.66_L0 is combined with the ABD 7G8_H.303_L1.34 that binds to LAG-3;

[0475] (5) the format comprises a scFv comprising the ABD 1G6_L1.194_H1.279 that binds to PD-1 and the Fab binds to GITR;

[0476] (6) the format comprises a scFv comprising the ABD 1G6_L1.194_H1.279 that binds to PD-1 and the Fab binds to OX40;

[0477] (7) the format comprises a scFv comprising the ABD 1G6_L1.194_H1.279 that binds to PD-1 and the Fab binds to ICOS;

[0478] 8) the format comprises a scFv comprising the ABD 1G6_L1.194_H1.279 that binds to PD-1 and the Fab binds to 4-1BB; and

[0479] (9) the format comprises the ABD of H0.66_L0 that binds to ICOS and an ABD that binds to PD-L1.

[0480] In some embodiments, the one armed scFv-mAb format includes skew variants, pI variants, ablation variants and FcRn variants. Accordingly, some embodiments include bottle opener formats that comprise: a) a first monomer that comprises the skew variants S364K/E357Q, the ablation variants E233P/L234V/L235A/G236del/S267K, the FcRn variants M428L/N434S and a first variable heavy domain that, with the first variable light domain of the light chain, makes up an Fv that binds to a first checkpoint inhibitor, and a second variable heavy domain; b) a second monomer that comprises the skew variants L368D/K370S, the pI variants N208D/Q295E/N384D/Q418E/N421D, the ablation variants E233P/L234V/L235A/G236del/S267K, the FcRn variants M428L/N434S and a first variable heavy domain that, with the first variable light domain, makes up the Fv that binds to the first checkpoint inhibitor as outlined herein, and a second variable light chain, that together with the second variable heavy chain forms an Fv (ABD) that binds a second checkpoint inhibitors; and c) a light chain comprising a first variable light domain and a constant light domain.

[0481] In this format, specific ABDs that bind human ICOS include, but are not limited to, [ICOS]_H0L0 and [ICOS]H0.66_L0 and those shown in FIG. 19, FIG. 20A-20G, FIG. 24, FIG. 68A-68G and FIG. 77A-77B as well as SEQ ID NO: 27869-28086, 28087-28269, 27193-27335, 28549-28556 and 28557-28665.

[0482] In this format, specific ABDs that bind human GITR include, but are not limited to, those in FIG. 18, FIG. 72 and FIG. 73 and those listed in SEQ ID NO:26282-26290.

[0483] In this format, specific ABDs that bind OX40 include, but are not limited to, FIG. 17, FIG. 72 and FIG. 73 and those listed in SEQ ID NO: 26272-26281.

[0484] In this format, specific ABDs that bind human 4-1BB include, but are not limited to, FIG. 16, FIG. 72 and FIG. 73 and SEQ ID NO: 26262-2671.

[0485] In this format, specific ABDs that bind human PD-L1 include, but are not limited to, FIG. 15A-15C, FIG. 73 and FIG. 78 and SEQ ID NO: 3961-4432.

[0486] K. scFv-mAb Format

[0487] One heterodimeric scaffold that finds particular use in the present invention is the mAb-scFv format shown in FIG. 2E. In this embodiment, the format relies on the use of a N-terminal attachment of a scFv to one of the monomers, thus forming a third antigen binding domain, wherein the Fab portions of the two monomers each bind one target and the “extra” scFv domain binds a different target.

[0488] In this embodiment, the first monomer comprises a first heavy chain (comprising a variable heavy domain and a constant domain), with a N-terminally covalently attached scFv comprising a scFv variable light domain, an scFv linker and a scFv variable heavy domain in either orientation ((vh1-scFv linker-vl1-[optional domain linker]-vh2-CH1-hinge-CH2-CH3) or (with the scFv in the opposite orientation) ((vl1-scFv linker-vh1-[optional domain linker]-vh2-CH1-hinge-CH2-CH3)). The second monomer comprises a heavy chain VH20CH1-hinge-CH2-CH3. This embodiment further utilizes a common light chain comprising a variable light domain and a constant light domain, that associates with the heavy chains to form two identical Fabs that bind one of the target antigens. As for many of the embodiments herein, these constructs include skew variants, pI variants, ablation variants, additional Fc variants, etc. as desired and described herein. In this embodiment, suitable Fv pairs include (Fabs listed first, scFvs second) ICOS X PD-1, ICOS X PD-L1, ICOS X CTLA-4, ICOS X LAG-3, ICOS X TIM-3, ICOS X BTLA, ICOS X TIGIT, TIGIT X ICOS, PD-1 X ICOS, PD-L1 X ICOS, CTLA-4 X ICOS, LAG-3 X ICOS, TIM-3 X ICOS, BTLA X ICOS, OX40 X TIGIT, OX40 X PD-1, OX40 X PD-L1, OX40 X CTLA-4, OX40 X LAG-3, OX40 X TIM-3, OX40 X BTLA, TIGIT X OX40, PD-1 X OX40, PD-L1 X OX40, CTLA-4 X OX40, LAG-3 X OX40, TIM-3 X OX40, BTLA X OX40, GITR X TIGIT, GITR X PD-1, GITR X PD-L1, GITR X CTLA-4, GITR X LAG-3, GITR X TIM-3, GITR X BTLA, TIGIT x GITR, PD-1 X GITR, PD-L1 X GITR, CTLA-4 X GITR, LAG-3 X GITR, TIM-3 X GITR, BTLA X GITR, 4-1BB X TIGIT, 4-1BB X PD-1, 4-1BB X PD-L1, 4-1BB X CTLA-4, 4-1BB X LAG-3, 4-1BB X TIM-3, 4-1BB X BTLA, TIGIT X 4-1BB, PD-1 X 4-1BB, PD-L1 X 4-1BB, CTLA-4 X 4-1BB, LAG-3 X 4-1BB, TIM-3 X 4-1BB and BTLA X 4-1BB.

[0489] The ABD sequences for these combinations can be as disclosed in the sequence listing or in the Figures.

[0490] In addition, the Fc domains of the scFv-mAb format comprise skew variants (e.g. a set of amino acid substitutions as shown in FIG. 4, with particularly useful skew variants being selected from the group consisting of S364K/E357Q:L368D/K370S; L368D/K370S:S364K; L368E/K370S:S364K; T411T/E360E/Q362E:D401K; L368D/K370S:S364K/E357L, K370S:S364K/E357Q, T366S/L368A/Y407V:T366W and T366S/L368A/Y407V/Y349C:T366W/S354C), optionally ablation variants (including those shown in FIG. 6), optionally charged scFv linkers (including those shown in FIG. 8) and the heavy chain comprises pI variants (including those shown in FIG. 5).

[0491] In some embodiments, the mAb-scFv format includes skew variants, pI variants, and ablation variants. Accordingly, some embodiments include bottle opener formats that comprise: a) a first monomer that comprises the skew variants S364K/E357Q, the ablation variants E233P/L234V/L235A/G236del/S267K, and a first variable heavy domain that, with the first variable light domain of the light chain, makes up an Fv that binds to a first checkpoint inhibitor, and a second variable heavy domain; b) a second monomer that comprises the skew variants L368D/K370S, the pI variants N208D/Q295E/N384D/Q418E/N421D, the ablation variants E233P/L234V/L235A/G236del/S267K, and a first variable heavy domain that, with the first variable light domain, makes up the Fv that binds to the first checkpoint inhibitor as outlined herein, and a second variable light chain, that together with the second variable heavy chain forms an Fv (ABD) that binds a second checkpoint inhibitors; and c) a light chain comprising a first variable light domain and a constant light domain. In some particular embodiments with these variants in this format:

[0492] (1) the format comprises a Fab ABD binds to ICOS that has the ABD of [ICOS] H0.66_L0;

[0493] (2) the format comprises an ICOS ABD of H0.66_L0 combined with the scFv ABD comprising the ABD 1G6_L1.194_H1.279 that binds to PD-1;

[0494] (3) the format comprises an ICOS ABD of H0.66_L0 combined with the scFv comprising the ABD H3.23_L0.129 that binds to CTLA-4;

[0495] (4) the format comprises an ICOS ABD of H0.66_L0 is combined with the ABD 7G8_H.303_L1.34 that binds to LAG-3;

[0496] (5) the format comprises a scFv comprising the ABD 1G6_L1.194_H1.279 that binds to PD-1 and the Fab binds to GITR;

[0497] (6) the format comprises a scFv comprising the ABD 1G6_L1.194_H1.279 that binds to PD-1 and the Fab binds to OX40;

[0498] (7) the format comprises a scFv comprising the ABD 1G6_L1.194_H1.279 that binds to PD-1 and the Fab binds to ICOS;

[0499] 8) the format comprises a scFv comprising the ABD 1G6_L1.194_H1.279 that binds to PD-1 and the Fab binds to 4-1BB; and

[0500] (9) the format comprises the ABD of H0.66_L0 that binds to ICOS and an ABD that binds to PD-L1.

[0501] In some embodiments, the mAb-scFv format includes skew variants, pI variants, ablation variants and FcRn variants. Accordingly, some embodiments include bottle opener formats that comprise: a) a first monomer that comprises the skew variants S364K/E357Q, the ablation variants E233P/L234V/L235A/G236del/S267K, the FcRn variants M428L/N434S and a first variable heavy domain that, with the first variable light domain of the light chain, makes up an Fv that binds to a first checkpoint inhibitor, and a second variable heavy domain; b) a second monomer that comprises the skew variants L368D/K370S, the pI variants N208D/Q295E/N384D/Q418E/N421D, the ablation variants E233P/L234V/L235A/G236del/S267K, the FcRn variants M428L/N434S and a first variable heavy domain that, with the first variable light domain, makes up the Fv that binds to the first checkpoint inhibitor as outlined herein, and a second variable light chain, that together with the second variable heavy chain forms an Fv (ABD) that binds a second checkpoint inhibitors; and c) a light chain comprising a first variable light domain and a constant light domain.

[0502] In this format, specific ABDs that bind human ICOS include, but are not limited to, [ICOS]_H0L0 and [ICOS]H0.66_L0 and those shown in FIG. 19, FIG. 20A-20G, FIG. 24, FIG. 68A-68G and FIG. 77A-77B as well as SEQ ID NO: 27869-28086, 28087-28269, 27193-27335, 28549-28556 and 28557-28665.

[0503] In this format, specific ABDs that bind human GITR include, but are not limited to, those in FIG. 18, FIG. 72 and FIG. 73 and those listed in SEQ ID NO:26282-26290.

[0504] In this format, specific ABDs that bind OX40 include, but are not limited to, FIG. 17, FIG. 72 and FIG. 73 and those listed in SEQ ID NO: 26272-26281.

[0505] In this format, specific ABDs that bind human 4-1BB include, but are not limited to, FIG. 16, FIG. 72 and FIG. 73 and SEQ ID NO: 26262-2671.

[0506] In this format, specific ABDs that bind human PD-L1 include, but are not limited to, FIG. 15A-15C, FIG. 73 and FIG. 78 and SEQ ID NO: 3961-4432.

[0507] L. Dual scFv Formats

[0508] The present invention also provides dual scFv formats as are known in the art and shown in FIG. 2B. In this embodiment, the heterodimeric bispecific antibody is made up of two scFv-Fc monomers (both in either (vh-scFv linker-vl-[optional domain linker]-CH2-CH3) format or (vl-scFv linker-vh-[optional domain linker]-CH2-CH3) format, or with one monomer in one orientation and the other in the other orientation.

[0509] In this case, all ABDs are in the scFv format, with any combination of ICOS and PD-1, ICOS and CTLA-4, ICOS and LAG-3, ICOS and TIM-3, ICOS and PD-L1, ICOS and BTLA, GITR and PD-1, GITR and CTLA-4, GITR and LAG-3, GITR and TIM-3, GITR and PD-L1, GITR and BTLA, OX40 and PD-1, OX40 and CTLA-4, OX40 and LAG-3, OX40 and TIM-3, OX40 and PD-L1, OX40 and BTLA, 4-1BB and PD-1, 4-1BB and CTLA-4, 4-1BB and LAG-3, 4-1BB and TIM-3, 4-1BB and PD-L1 and 4-1BB and BTLA being useful. The ABD sequences for these combinations can be as disclosed in the sequence listing or as shown in the Figures.

[0510] In addition, the Fc domains of the dual scFv format comprise skew variants (e.g. a set of amino acid substitutions as shown in FIG. 4, with particularly useful skew variants being selected from the group consisting of S364K/E357Q:L368D/K370S; L368D/K370S:S364K; L368E/K370S:S364K; T411T/E360E/Q362E:D401K; L368D/K370S:S364K/E357L, K370S:S364K/E357Q, T366S/L368A/Y407V:T366W and T366S/L368A/Y407V/Y349C:T366W/S354C), optionally ablation variants (including those shown in FIG. 6), optionally charged scFv linkers (including those shown in FIG. 8) and the heavy chain comprises pI variants (including those shown in FIG. 5).

[0511] In some embodiments, the dual scFv format includes skew variants, pI variants, and ablation variants. Accordingly, some embodiments include formats that comprise: a) a first monomer that comprises the skew variants S364K/E357Q, the ablation variants E233P/L234V/L235A/G236del/S267K, and a scFv that binds a first receptor (VH1-scFv linker-VL1-[optional domain linker]-CH2-CH3 or VL1-scFv linker-VH1-[optional domain linker]-CH2-CH3) and b) a first monomer that comprises the skew variants L368D/K370S, the ablation variants E233P/L234V/L235A/G236del/S267K, and a scFv that binds a first receptor (VH1-scFv linker-VL1-[optional domain linker]-CH2-CH3 or VL1-scFv linker-VH1-[optional domain linker]-CH2-CH3). pI variants can be as outlined herein, but most common will be charged scFv linkers of opposite charge for each monomer. FcRn variants, particularly 428L/434S, can optionally be included. In some particular embodiments with these variants in this format:

[0512] (1) the format comprises a ABD binds to ICOS that has the ABD of [ICOS] H0.66_L0;

[0513] (2) the format comprises an ICOS ABD of H0.66_L0 combined with the ABD comprising the ABD 1G6_L1.194_H1.279 that binds to PD-1;

[0514] (3) the format comprises an ICOS ABD of H0.66_L0 combined with the ABD H3.23_L0.129 that binds to CTLA-4;

[0515] (4) the format comprises an ICOS ABD of H0.66_L0 is combined with the ABD 7G8_H.303_L1.34 that binds to LAG-3;

[0516] (5) the format comprises the ABD 1G6_L1.194_H1.279 that binds to PD-1 and an Fv binds to GITR;

[0517] (6) the format comprises the ABD 1G6_L1.194_H1.279 that binds to PD-1 and the Fv binds to OX40;

[0518] (7) the format comprises the ABD 1G6_L1.194_H1.279 that binds to PD-1 and the ABD binds to ICOS;

[0519] 8) the format comprises the ABD 1G6_L1.194_H1.279 that binds to PD-1 and an ABD binds to 4-1BB; and

[0520] (9) the format comprises the ABD of H0.66_L0 that binds to ICOS and an ABD that binds to PD-L1.

[0521] In this format, specific ABDs that bind human ICOS include, but are not limited to, [ICOS]_H0L0 and [ICOS]H0.66_L0 and those shown in FIG. 19, FIG. 20A-20G, FIG. 24, FIG. 68A-68G and FIG. 77A-77B as well as SEQ ID NO: 27869-28086, 28087-28269, 27193-27335, 28549-28556 and 28557-28665.

[0522] In this format, specific ABDs that bind human GITR include, but are not limited to, those in FIG. 18, FIG. 72 and FIG. 73 and those listed in SEQ ID NO:26282-26290.

[0523] In this format, specific ABDs that bind OX40 include, but are not limited to, FIG. 17, FIG. 72 and FIG. 73 and those listed in SEQ ID NO: 26272-26281.

[0524] In this format, specific ABDs that bind human 4-1BB include, but are not limited to, FIG. 16, FIG. 72 and FIG. 73 and SEQ ID NO: 26262-2671.

[0525] In this format, specific ABDs that bind human PD-L1 include, but are not limited to, FIG. 15A-15C, FIG. 73 and FIG. 78 and SEQ ID NO: 3961-4432.

[0526] M. Non-Heterodimeric Bispecific Antibodies

[0527] As will be appreciated by those in the art, the Fv sequences outlined herein can also be used in both monospecific antibodies (e.g. “traditional monoclonal antibodies”) or non-heterodimeric bispecific formats (see FIGS. 2J, K and L).

[0528] In this format, specific ABDs that bind human ICOS include, but are not limited to, [ICOS]_H0L0 and [ICOS]H0.66_L0 and those shown in FIG. 19, FIG. 20A-20G, FIG. 24, FIG. 68A-68G and FIG. 77A-77B as well as SEQ ID NO: 27869-28086, 28087-28269, 27193-27335, 28549-28556 and 28557-28665.

[0529] In this format, specific ABDs that bind human GITR include, but are not limited to, those in FIG. 18, FIG. 72 and FIG. 73 and those listed in SEQ ID NO:26282-26290.

[0530] In this format, specific ABDs that bind OX40 include, but are not limited to, FIG. 17, FIG. 72 and FIG. 73 and those listed in SEQ ID NO: 26272-26281.

[0531] In this format, specific ABDs that bind human 4-1BB include, but are not limited to, FIG. 16, FIG. 72 and FIG. 73 and SEQ ID NO: 26262-2671.

[0532] In this format, specific ABDs that bind human PD-L1 include, but are not limited to, FIG. 15A-15C, FIG. 73 and FIG. 78 and SEQ ID NO: 3961-4432.

[0533] Suitable non-heterodimeric bispecific formats are known in the art, and include a number of different formats as generally depicted in Spiess et al., Molecular Immunology (67):95-106 (2015) and Kontermann, mAbs 4:2, 182-197 (2012), both of which are expressly incorporated by reference and in particular for the figures, legends and citations to the formats therein.

[0534] N. DVD-Ig Format

[0535] In some embodiments, the bispecific antibody is in a “Dual Variable Domain-Ig” or “DVD-Ig™” format (see FIG. 2L) such as is generally described in U.S. Pat. No. 7,612,181, hereby expressly incorporated by reference in its entirety, and in particular for the Figures and Legends therein. In the DVD-Ig format, the antibody is tetravalent and bispecific, and comprises 4 chains: two homodimeric heavy chains and two identical light chains. The heavy chains each have a VH1-(optional linker)-VH2-CH1-hinge-CH2-CH3 structure and the two light chains each have a VL1-optional linker-VL2-CL structure, with VH1 and VL1 forming a first ABD and the VH2 and VL2 forming a second ABD, where the first and second ABDs bind a costimulatory and a checkpoint receptor. In this embodiment, suitable combinations include ICOS and PD-1, ICOS and CTLA-4, ICOS and LAG-3, ICOS and TIM-3, ICOS and PD-L1, ICOS and BTLA, GITR and PD-1, GITR and CTLA-4, GITR and LAG-3, GITR and TIM-3, GITR and PD-L1, GITR and BTLA, OX40 and PD-1, OX40 and CTLA-4, OX40 and LAG-3, OX40 and TIM-3, OX40 and PD-L1, OX40 and BTLA, 4-1BB and PD-1, 4-1BB and CTLA-4, 4-1BB and LAG-3, 4-1BB and TIM-3, 4-1BB and PD-L1 and 4-1BB and BTLA.

[0536] The DVD-Ig™ and Central-scFv2 are two formats that are bispecific and tetravalent, and thus do not bind a costimulatory receptor in a monovalent fashion. Exemplary DVD-Ig™ constructs are shown in FIG. 61A-61B.

[0537] In some particular embodiments with these variants in this format:

[0538] (1) the format comprises the ABD of [ICOS] H0.66_L0;

[0539] (2) the format comprises an ICOS ABD of H0.66_L0 combined with the ABD comprising the ABD 1G6_L1.194_H1.279 that binds to PD-1;

[0540] (3) the format comprises an ICOS ABD of H0.66_L0 combined with the ABD H3.23_L0.129 that binds to CTLA-4;

[0541] (4) the format comprises an ICOS ABD of H0.66_L0 is combined with the ABD 7G8_H.303_L1.34 that binds to LAG-3;

[0542] (5) the format comprises the ABD 1G6_L1.194_H1.279 that binds to PD-1 and an ABD that binds to GITR;

[0543] (6) the format comprises the ABD 1G6_L1.194_H1.279 that binds to PD-1 and ABD that binds to OX40;

[0544] (7) the format comprises the ABD 1G6_L1.194_H1.279 that binds to PD-1 and an ABD that binds to ICOS;

[0545] 8) the format comprises the ABD 1G6_L1.194_H1.279 that binds to PD-1 and an ABD that binds to 4-1BB; and

[0546] (9) the format comprises the ABD of H0.66_L0 that binds to ICOS and an ABD that binds to PD-L1.

[0547] In this format, specific ABDs that bind human ICOS include, but are not limited to, [ICOS]_H0L0 and [ICOS]H0.66_L0 and those shown in FIG. 19, FIG. 20A-20G, FIG. 24, FIG. 68A-68G and FIG. 77A-77B as well as SEQ ID NO: 27869-28086, 28087-28269, 27193-27335, 28549-28556 and 28557-28665.

[0548] In this format, specific ABDs that bind human GITR include, but are not limited to, those in FIG. 18, FIG. 72 and FIG. 73 and those listed in SEQ ID NO:26282-26290.

[0549] In this format, specific ABDs that bind OX40 include, but are not limited to, FIG. 17, FIG. 72 and FIG. 73 and those listed in SEQ ID NO: 26272-26281.

[0550] In this format, specific ABDs that bind human 4-1BB include, but are not limited to, FIG. 16, FIG. 72 and FIG. 73 and SEQ ID NO: 26262-2671.

[0551] In this format, specific ABDs that bind human PD-L1 include, but are not limited to, FIG. 15A-15C, FIG. 73 and FIG. 78 and SEQ ID NO: 3961-4432.

[0552] O. Trident Format

[0553] In some embodiments, the bispecific antibodies of the invention are in the “Trident” format as generally described in WO2015/184203, hereby expressly incorporated by reference in its entirety and in particular for the Figures, Legends, definitions and sequences of “Heterodimer-Promoting Domains” or “HPDs”, including “K-coil” and “E-coil” sequences. Tridents rely on using two different HPDs that associate to form a heterodimeric structure as a component of the structure, see FIG. 2M. In this embodiment, the Trident format include a “traditional” heavy and light chain (e.g. VH1-CH1-hinge-CH2-CH3 and VL1-CL), a third chain comprising a first “diabody-type binding domain” or “DART®”, VH2-(linker)-VL3-HPD1 and a fourth chain comprising a second DART®, VH3-(linker)-(linker)-VL2-HPD2. The VH1 and VL1 form a first ABD, the VH2 and VL2 form a second ABD, and the VH3 and VL3 form a third ABD. IN some cases, as is shown in FIG. 2M, the second and third ABDs bind the same antigen, in this instance generally the checkpoint receptor, e.g. bivalently, with the first ABD binding a costimulatory receptor monovalently. In this embodiment, suitable combinations include ICOS and PD-1, ICOS and CTLA-4, ICOS and LAG-3, ICOS and TIM-3, ICOS and PD-L1, ICOS and BTLA, GITR and PD-1, GITR and CTLA-4, GITR and LAG-3, GITR and TIM-3, GITR and PD-L1, GITR and BTLA, OX40 and PD-1, OX40 and CTLA-4, OX40 and LAG-3, OX40 and TIM-3, OX40 and PD-L1, OX40 and BTLA, 4-1BB and PD-1, 4-1BB and CTLA-4, 4-1BB and LAG-3, 4-1BB and TIM-3, 4-1BB and PD-L1 and 4-1BB and BTLA.

[0554] In some particular embodiments with these variants in this format:

[0555] (1) the format comprises a Fab ABD binds to ICOS that has the ABD of [ICOS] H0.66_L0;

[0556] (2) the format comprises an ICOS ABD of H0.66_L0 combined with the scFv ABD comprising the ABD 1G6_L1.194_H1.279 that binds to PD-1;

[0557] (3) the format comprises an ICOS ABD of H0.66_L0 combined with the scFv comprising the ABD H3.23_L0.129 that binds to CTLA-4;

[0558] (4) the format comprises an ICOS ABD of H0.66_L0 is combined with the ABD 7G8_H.303_L1.34 that binds to LAG-3;

[0559] (5) the format comprises a scFv comprising the ABD 1G6_L1.194_H1.279 that binds to PD-1 and the Fab binds to GITR;

[0560] (6) the format comprises a scFv comprising the ABD 1G6_L1.194_H1.279 that binds to PD-1 and the Fab binds to OX40;

[0561] (7) the format comprises a scFv comprising the ABD 1G6_L1.194_H1.279 that binds to PD-1 and the Fab binds to ICOS;

[0562] 8) the format comprises a scFv comprising the ABD 1G6_L1.194_H1.279 that binds to PD-1 and the Fab binds to 4-1BB; and

[0563] (9) the format comprises the ABD of H0.66_L0 that binds to ICOS and an ABD that binds to PD-L1.

[0564] In this format, specific ABDs that bind human ICOS include, but are not limited to, [ICOS]_H0L0 and [ICOS]H0.66_L0 and those shown in FIG. 19, FIG. 20A-20G, FIG. 24, FIG. 68A-68G and FIG. 77A-77B as well as SEQ ID NO: 27869-28086, 28087-28269, 27193-27335, 28549-28556 and 28557-28665.

[0565] In this format, specific ABDs that bind human GITR include, but are not limited to, those in FIG. 18, FIG. 72 and FIG. 73 and those listed in SEQ ID NO:26282-26290.

[0566] In this format, specific ABDs that bind OX40 include, but are not limited to, FIG. 17, FIG. 72 and FIG. 73 and those listed in SEQ ID NO: 26272-26281.

[0567] In this format, specific ABDs that bind human 4-1BB include, but are not limited to, FIG. 16, FIG. 72 and FIG. 73 and SEQ ID NO: 26262-2671.

[0568] In this format, specific ABDs that bind human PD-L1 include, but are not limited to, FIG. 15A-15C, FIG. 73 and FIG. 78 and SEQ ID NO: 3961-4432.

[0569] P. Monospecific, Monoclonal Antibodies

[0570] As will be appreciated by those in the art, the novel Fv sequences outlined herein can also be used in both monospecific antibodies (e.g. “traditional monoclonal antibodies”) or non-heterodimeric bispecific formats. Accordingly, the present invention provides monoclonal (monospecific) antibodies comprising the 6 CDRs and/or the vh and vl sequences from the figures, generally with IgG1, IgG2, IgG3 or IgG4 constant regions, with IgG1, IgG2 and IgG4 (including IgG4 constant regions comprising a S228P amino acid substitution) finding particular use in some embodiments. That is, any sequence herein with a “H_L” designation can be linked to the constant region of a human IgG1 antibody.

### VIII. Antigen Binding Domains (ABDs) to Target Antigens

[0571] The bispecific antibodies of the invention have two different antigen binding domains (ABDs) that bind to two different target receptor antigens (“target pairs”), in either bivalent, bispecific formats or trivalent, bispecific formats as generally shown in FIG. 2.

[0572] The bispecific antibodies bind to a first target antigen comprising a checkpoint receptor and a second target antigen comprising a costimulatory receptor. Suitable checkpoint receptors as outlined herein include PD-1, PD-L1, LAG-3, TIM-3, CTLA-4, BTLA and TIGIT. Suitable costimulatory receptors as outlined herein include ICOS, GITR, OX40 and 4-1BB. As outlined

[0573] Suitable target checkpoint antigens include human (and sometimes cyno) PD-1, CTLA-4, TIM-3, LAG-3, TIGIT and BTLA (sequences in the sequence listing). Accordingly, suitable bispecific antibodies bind ICOS and PD-1, ICOS and CTLA-4, ICOS and LAG-3, ICOS and TIM-3, ICOS and PD-L1, ICOS and BTLA, ICOS and TIGIT, GITR and TIGIT, GITR and PD-1, GITR and CTLA-4, GITR and LAG-3, GITR and TIM-3, GITR and PD-L1, GITR and BTLA, OX40 and PD-1, OX40 and TIGIT, OX40 and CTLA-4, IC OX40 OS and LAG-3, OX40 and TIM-3, OX40 and PD-L1, OX40 and BTLA, 4-1BB and PD-1, 4-1BB and CTLA-4, 4-1BB and LAG-3, 4-1BB and TIM-3, 4-1BB and PD-L1, TIGIT and 4-1BB and 4-1BB and BTLA.

[0574] Note that generally these bispecific antibodies are named “anti-PD-1 X anti-CTLA-4”, or generally simplistically or for ease (and thus interchangeably) as “PD-1 X CTLA-4”, etc. for each pair. Note that unless specified herein, the order of the antigen list in the name does not confer structure; that is a PD-1 X CTLA-4 bottle opener antibody can have the scFv bind to PD-1 or CTLA-4, although in some cases, the order specifies structure as indicated.

[0575] As is more fully outlined herein, these combinations of ABDs can be in a variety of formats, as outlined below, generally in combinations where one ABD is in a Fab format and the other is in an scFv format. As discussed herein and shown in FIG. 2, some formats use a single Fab and a single scFv (A, C and D), and some formats use two Fabs and a single scFv (E, F, G, H and I).

[0576] A. Antigen Binding Domains

[0577] As discussed herein, the bispecific checkpoint heterodimeric antibodies of the invention include two antigen binding domains (ABDs), each of which bind to a different checkpoint protein. As outlined herein, these heterodimeric antibodies can be bispecific and bivalent (each antigen is bound by a single ABD, for example, in the format depicted in FIG. 2 A), bispecific and trivalent (one antigen is bound by a single ABD and the other is bound by two ABDs, for example as depicted in FIG. 2F, G, H, I or M), or bispecific and tetravalent (both antigens are bound by two ABDs, for example as depicted in FIGS. 2J and L).

[0578] In addition, in general, one of the ABDs comprises a scFv as outlined herein, in an orientation from N- to C-terminus of vh-scFv linker-vl or vl-scFv linker-vh. One or both of the other ABDs, according to the format, generally is a Fab, comprising a vh domain on one protein chain (generally as a component of a heavy chain) and a vl on another protein chain (generally as a component of a light chain). Note that the “trident” format uses DART®s, which are similar to scFvs except the orientation is different and in general the linkers can be slightly longer.

[0579] The invention provides a number of ABDs that bind to a number of different receptor proteins, as outlined below. As will be appreciated by those in the art, any set of 6 CDRs or vh and vl domains can be in the scFv format or in the Fab format, which is then added to the heavy and light constant domains, where the heavy constant domains comprise variants (including within the CH1 domain as well as the Fc domain). The scFv sequences contained in the sequence listing utilize a particular charged linker, but as outlined herein, uncharged or other charged linkers can be used, including those depicted in FIG. 8.

[0580] In addition, as discussed above, the numbering used in the Sequence Listing for the identification of the CDRs is Kabat, however, different numbering can be used, which will change the amino acid sequences of the CDRs as shown in Table 1.

[0581] For all of the variable heavy and light domains listed herein, further variants can be made. As outlined herein, in some embodiments the set of 6 CDRs can have from 0, 1, 2, 3, 4 or 5 amino acid modifications (with amino acid substitutions finding particular use), as well as changes in the framework regions of the variable heavy and light domains, as long as the frameworks (excluding the CDRs) retain at least about 80, 85 or 90% identity to a human germline sequence selected from those listed in FIG. 1 of U.S. Pat. No. 7,657,380, which Figure and Legend is incorporated by reference in its entirety herein. Thus, for example, the identical CDRs as described herein can be combined with different framework sequences from human germline sequences, as long as the framework regions retain at least 80, 85 or 90% identity to a human germline sequence selected from those listed in FIG. 1 of U.S. Pat. No. 7,657,380. Alternatively, the CDRs can have amino acid modifications (e.g. from 1, 2, 3, 4 or 5 amino acid modifications in the set of CDRs (that is, the CDRs can be modified as long as the total number of changes in the set of 6 CDRs is less than 6 amino acid modifications, with any combination of CDRs being changed; e.g. there may be one change in vlCDR1, two in vhCDR2, none in vhCDR3, etc.)), as well as having framework region changes, as long as the framework regions retain at least 80, 85 or 90% identity to a human germline sequence selected from those listed in FIG. 1 of U.S. Pat. No. 7,657,380.

[0582] B. PD-1 Antigen Binding Domains

[0583] In some embodiments, one of the ABDs binds PD-1. Suitable sets of 6 CDRs and/or vh and vl domains, as well as scFv sequences, are depicted in FIG. 3, FIG. 10, FIG. 11, FIG. 72, FIG. 73, FIG. 74, FIG. 76 and SEQ ID NO:1-2392, 3125-3144, 4697-7594 and 4697-21810, and include those sequences in the sequence listing with the identifiers 1G6_H1.279_L1.194; 1G6_H1.280_L1.224; 1G6_L1.194_H1.279; 1G6_L1.210_H1.288; and 2E9_H1L1.

[0584] As will be appreciated by those in the art, suitable anti-PD-1 ABDs can comprise a set of 6 CDRs as depicted in these sequences and Figures, either as they are underlined or, in the case where a different numbering scheme is used as described herein and as shown in Table 1, as the CDRs that are identified using other alignments within the vh and vl sequences of these sequences. Suitable ABDs can also include the entire vh and vl sequences as depicted in these sequences and Figures, used as scFvs or as Fabs. In many of the embodiments herein that contain an Fv to PD-1, it is the scFv monomer that binds PD-1. As discussed herein, the other of the target pair when PD-1 is one of the antigens is selected from ICOS (suitable sequences are shown in FIG. 19, FIG. 20A-20G, FIG. 24, FIG. 68A-68G and FIG. 77A-77B as well as SEQ ID NO: 27869-28086, 28087-28269, 27193-27335, 28549-28556 and 28557-28665 (which can be scFv sequences, CDR sequence sets or vh and vl sequences)), GITR, OX40 and 4-1BB.

[0585] Particularly useful ABDs that bind human PD-1 include, but are not limited to, 1G6_H1.279_L1.194, 1G6_H1.280_L1.224; 1G6_L1.194_H1.279, 1G6_L1.210_H1.288 and 2E9_H1L1.

[0586] Additionally useful vh and vl sequences that bind human PD-1 are shown in FIG. 76.

[0587] In addition to the parental CDR sets disclosed in the sequence listing that form an ABD to PD-1, the invention provides variant CDR sets. In one embodiment, a set of 6 CDRs can have 1, 2, 3, 4 or 5 amino acid changes from the parental CDRs, as long as the ABD is still able to bind to the target antigen, as measured by at least one of a Biacore, surface plasmon resonance (SPR) and/or BLI (biolayer interferometry, e.g. Octet assay) assay, with the latter finding particular use in many embodiments.

[0588] In addition to the parental variable heavy and variable light domains disclosed herein that form an ABD to PD-1, the invention provides variant vh and vl domains. In one embodiment, the variant vh and vl domains each can have from 1, 2, 3, 4, 5, 6, 7, 8, 9 or 10 amino acid changes from the parental vh and vl domain, as long as the ABD is still able to bind to the target antigen, as measured at least one of a Biacore, surface plasmon resonance (SPR) and/or BLI (biolayer interferometry, e.g. Octet assay) assay, with the latter finding particular use in many embodiments. In another embodiment, the variant vh and vl are at least 90, 95, 97, 98 or 99% identical to the respective parental vh or vl, as long as the ABD is still able to bind to the target antigen, as measured by at least one of a Biacore, surface plasmon resonance (SPR) and/or BLI (biolayer interferometry, e.g. Octet assay) assay, with the latter finding particular use in many embodiments.

[0589] Specific preferred embodiments include the 1G6_L1.194_H1.279 anti-PD-1 Fv, in a scFv format, included within any of the bottle opener format backbones of FIG. 9.

[0590] Specific preferred embodiments include the 1G6_L1.194_H1.279 anti-PD-1 Fv, in a scFv format, included within any of the format backbones of FIG. 55.

[0591] Specific preferred embodiments include the 1G6_L1.194_H1.279 anti-PD-1 Fv, in a scFv format, included within any of the mAb-scFv format backbones of FIG. 75.

[0592] Other embodiments utilize any of the anti-PD-1 vh and vl domain pairs (either as scFvs or Fabs) as shown in FIG. 76 in any format shown in FIG. 2.

[0593] C. CTLA-4 Antigen Binding Domains

[0594] In some embodiments, one of the ABDs binds CTLA-4. Suitable sets of 6 CDRs and/or vh and vl domains, as well as scFv sequences, are depicted in SEQ ID NOs: 2393-2414 and 3737-3816, as well as sequences of particular interest in some embodiments are shown in FIG. 12 and FIG. 79 and also include those sequences in the sequence listing with the identifiers [CTLA-4]_H0.25_L0; [CTLA-4]_H0.26_L0; [CTLA-4]_H0.27_L0; [CTLA-4]_H0.29_L0; [CTLA-4]_H0.38_L0; [CTLA-4]_H0.39_L0; 0[CTLA-4]_H0.40_L0; [CTLA-4]_H0.70_L0; [CTLA-4]_H0_L0.22; [CTLA-4]_H2_L0; [CTLA-4]_H3.21_L0.124; [CTLA-4]_H3.21_L0.129; [CTLA-4]_H3.21_L0.132; [CTLA-4]_H3.23_L0.124; [CTLA-4]_H3.23_L0.129; [CTLA-4]_H3.23_L0.132; [CTLA-4]_H3.25_L0.124; [CTLA-4]_H3.25_L0.129; [CTLA-4]_H3.25_L0.132; [CTLA-4]_H3.4_L0.118; [CTLA-4]_H3.4_L0.119; [CTLA-4]_H3.4_L0.12; [CTLA-4]_H3.4_L0.121; [CTLA-4]_H3.4_L0.122; [CTLA-4]_H3.4_L0.123; [CTLA-4]_H3.4_L0.124; [CTLA-4]_H3.4_L0.125; [CTLA-4]_H3.4_L0.126; [CTLA-4]_H3.4_L0.127; [CTLA-4]_H3.4_L0.128; [CTLA-4]_H3.4_L0.129; [CTLA-4]_H3.4_L0.130; [CTLA-4]_H3.4_L0.131; [CTLA-4]_H3.4_L0.132; [CTLA-4]_H3.5_L2.1; [CTLA-4]_H3.5_L2.2; [CTLA-4]_H3.5_L2.3; [CTLA-4]_H3_L0; [CTLA-4]_H3_L0.22; [CTLA-4]_H3_L0.44; [CTLA-4]_H3_L0.67; and [CTLA-4]_H3_L0.74.

[0595] As will be appreciated by those in the art, suitable anti-CTLA-4 ABDs can comprise a set of 6 CDRs as depicted in these sequences and Figures, either as they are underlined or, in the case where a different numbering scheme is used as described herein and as shown in Table 1, as the CDRs that are identified using other alignments within the vh and vl sequences outlined herein. Suitable ABDs can also include the entire vh and vl sequences as depicted in these sequences and Figures, used as scFvs or as Fabs. In many of the embodiments herein that contain an Fv to CTLA-4, it is the scFv monomer that binds CTLA-4.

As discussed herein, the other of the target pair when CTLA-4 is one of the antigens is selected from ICOS (suitable sequences are shown in FIG. 19, FIG. 20A-20G, FIG. 24, FIG. 68 and FIG. 77A-77B as well as SEQ ID NO: 27869-28086, 28087-28269, 27193-27335, 28549-28556 and 28557-28665, and those with the identifiers [ICOS]_H0.66_L0 and [ICOS]_H0L0), GITR, OX40 and 4-1BB.

[0596] In addition to the parental CDR sets disclosed in the sequence listing that form an ABD to CTLA-4, the invention provides variant CDR sets. In one embodiment, a set of 6 CDRs can have 1, 2, 3, 4 or 5 amino acid changes from the parental CDRs, as long as the ABD is still able to bind to the target antigen, as measured by at least one of a Biacore, surface plasmon resonance (SPR) and/or BLI (biolayer interferometry, e.g. Octet assay) assay, with the latter finding particular use in many embodiments.

[0597] In addition to the parental variable heavy and variable light domains disclosed herein that form an ABD to CTLA-4, the invention provides variant vh and vl domains. In one embodiment, the variant vh and vl domains each can have from 1, 2, 3, 4, 5, 6, 7, 8, 9 or 10 amino acid changes from the parental vh and vl domain, as long as the ABD is still able to bind to the target antigen, as measured by at least one of a Biacore, surface plasmon resonance (SPR) and/or BLI (biolayer interferometry, e.g. Octet assay) assay, with the latter finding particular use in many embodiments. In another embodiment, the variant vh and vl are at least 90, 95, 97, 98 or 99% identical to the respective parental vh or vl, as long as the ABD is still able to bind to the target antigen, as measured by at least one of a Biacore, surface plasmon resonance (SPR) and/or BLI (biolayer interferometry, e.g. Octet assay) assay, with the latter finding particular use in many embodiments.

[0598] D. TIM-3 Antigen Binding Domains

[0599] In some embodiments, one of the ABDs binds TIM-3. Suitable sets of 6 CDRs and/or vh and vl domains, as well as scFv sequences, are depicted in FIG. 14 and FIG. 81A-81C and SEQ ID NO: 3345-3704, 4585-4696. ABD sequences of particular interest in some embodiments include those sequences in the sequence listing with the identifiers 1D10_H0L0; 1D12_H0L0; 3H3_H1_L2.1; 6C8_H0L0; 6D9_H0_1D12_L0; 7A9_H0L0; 7B11_H0L0; 7B11var_H0L0; and 7C2_H0L0.

[0600] As will be appreciated by those in the art, suitable anti-TIM-3 ABDs can comprise a set of 6 CDRs as depicted in these sequences and Figures, either as they are underlined or, in the case where a different numbering scheme is used as described herein and as shown in Table 1, as the CDRs that are identified using other alignments within the vh and vl sequences of those depicted herein. Suitable ABDs can also include the entire vh and vl sequences as depicted in these sequences and Figures, used as scFvs or as Fabs. In many of the embodiments herein that contain an Fv to TIM-3, it is the Fab monomer that binds TIM-3. As discussed herein, the other of the target pair when TIM-3 is one of the antigens is selected ICOS (suitable sequences are shown in FIG. 19, FIG. 20A-20G, FIG. 24, FIG. 68A-68G and FIG. 77A-77B as well as SEQ ID NO: 27869-28086, 28087-28269, 27193-27335, 28549-28556 and 28557-28665, and those with the identifiers [ICOS]_H0.66_L0 and [ICOS]_H0L0), GITR, OX40 and 4-1BB.

[0601] In addition to the parental CDR sets disclosed in the sequence listing that form an ABD to TIM-3, the invention provides variant CDR sets. In one embodiment, a set of 6 CDRs can have 1, 2, 3, 4 or 5 amino acid changes from the parental CDRs, as long as the ABD is still able to bind to the target antigen, as measured by at least one of a Biacore, surface plasmon resonance (SPR) and/or BLI (biolayer interferometry, e.g. Octet assay) assay, with the latter finding particular use in many embodiments.

[0602] In addition to the parental variable heavy and variable light domains disclosed herein that form an ABD to TIM-3, the invention provides variant vh and vl domains. In one embodiment, the variant vh and vl domains each can have from 1, 2, 3, 4, 5, 6, 7, 8, 9 or 10 amino acid changes from the parental vh and vl domain, as long as the ABD is still able to bind to the target antigen, as measured at least one of a Biacore, surface plasmon resonance (SPR) and/or BLI (biolayer interferometry, e.g. Octet assay) assay, with the latter finding particular use in many embodiments. In another embodiment, the variant vh and vl are at least 90, 95, 97, 98 or 99% identical to the respective parental vh or vl, as long as the ABD is still able to bind to the target antigen, as measured by at least one of a Biacore, surface plasmon resonance (SPR) and/or BLI (biolayer interferometry, e.g. Octet assay) assay, with the latter finding particular use in many embodiments.

[0603] LAG-3 Antigen Binding Domains

[0604] In some embodiments, one of the ABDs binds LAG-3. Suitable sets of 6 CDRs and/or vh and vl domains, as well as scFv sequences, are depicted in FIG. 13, FIG. 80 and in SEQ ID NO: 2415-2604, 3817-3960 also include those sequences in the sequence listing with the identifiers 2A11_H0L0; 2A11_H1.125_L2.113; 2A11_H1.144_L2.142; 2A11_H1_L2.122; 2A11_H1_L2.123; 2A11_H1_L2.124; 2A11_H1_L2.25; 2A11_H1_L2.47; 2A11_H1_L2.50; 2A11_H1_L2.91; 2A11_H1_L2.93; 2A11_H1_L2.97; 2A11_H1L1; 2A11_H1L2; 2A11_H2L2; 2A11_H3L1; 2A11_H3L2; 2A11_H4L1; 2A11_H4L2; 7G8_H0L0; 7G8_H1L1; 7G8_H3.18_L1.11; 7G8_H3.23_L1.11; 7G8_H3.28 L1; 7G8_H3.28_L1.11; 7G8_H3.28_L1.13; 7G8_H3.30_L1.34; 7G8_H3.30_L1.34; and 7G8_H3L1.

[0605] As will be appreciated by those in the art, suitable anti-LAG-3 ABDs can comprise a set of 6 CDRs as depicted in these sequences and Figures, either as they are underlined or, in the case where a different numbering scheme is used as described herein and as shown in Table 1, as the CDRs that are identified using other alignments within the vh and vl sequences of the sequences herein. Suitable ABDs can also include the entire vh and vl sequences as depicted in these sequences and Figures, used as scFvs or as Fabs. In many of the embodiments herein that contain an Fv to LAG-3, it is the Fab monomer that binds LAG-3. As discussed herein, the other of the target pair when LAG-3 is one of the antigens is selected from ICOS (suitable sequences are shown in FIG. 19, FIG. 20A-20G, FIG. 24, FIG. 68A-68G and FIG. 77A-77B as well as SEQ ID NO: 27869-28086, 28087-28269, 27193-27335, 28549-28556 and 28557-28665, and those with the identifiers [ICOS]_H0.66_L0 and [ICOS]_H0L0), GITR, OX40 and 4-1BB.

[0606] In addition to the parental CDR sets disclosed in the sequence listing that form an ABD to LAG-3, the invention provides variant CDR sets. In one embodiment, a set of 6 CDRs can have 1, 2, 3, 4 or 5 amino acid changes from the parental CDRs, as long as the ABD is still able to bind to the target antigen, as measured by at least one of a Biacore, surface plasmon resonance (SPR) and/or BLI (biolayer interferometry, e.g. Octet assay) assay, with the latter finding particular use in many embodiments.

[0607] In addition to the parental variable heavy and variable light domains disclosed herein that form an ABD to LAG-3, the invention provides variant vh and vl domains. In one embodiment, the variant vh and vl domains each can have from 1, 2, 3, 4, 5, 6, 7, 8, 9 or 10 amino acid changes from the parental vh and vl domain, as long as the ABD is still able to bind to the target antigen, as measured by at least one of a Biacore, surface plasmon resonance (SPR) and/or BLI (biolayer interferometry, e.g. Octet assay) assay, with the latter finding particular use in many embodiments. In another embodiment, the variant vh and vl are at least 90, 95, 97, 98 or 99% identical to the respective parental vh or vl, as long as the ABD is still able to bind to the target antigen, as measured by at least one of a Biacore, surface plasmon resonance (SPR) and/or BLI (biolayer interferometry, e.g. Octet assay) assay, with the latter finding particular use in many embodiments.

[0608] E. BTLA Antigen Binding Domains

[0609] In some embodiments, one of the ABDs binds BTLA. Suitable sets of 6 CDRs and/or vh and vl domains, as well as scFv sequences, are depicted in FIG. 82, FIG. 84A-84C and SEQ ID NO:3705-3736, and also include those sequences in the sequence listing with the identifiers 9C6_H0L0; 9C6_H1.1_L1; and 9C6_H1.11_L1.

[0610] As will be appreciated by those in the art, suitable anti-BTLA ABDs can comprise a set of 6 CDRs as depicted in these sequences and Figures, either as they are underlined or, in the case where a different numbering scheme is used as described herein and as shown in Table 1, as the CDRs that are identified using other alignments within the vh and vl sequences depicted herein. Suitable ABDs can also include the entire vh and vl sequences as depicted in these sequences and Figures, used as scFvs or as Fabs. In many of the embodiments herein that contain an Fv to BTLA, it is the Fab monomer that binds BTLA. As discussed herein, the other of the target pair when BTLA is one of the antigens is selected from ICOS (suitable sequences are shown in FIG. 19, FIG. 20A-20G, FIG. 24, FIG. 68A-68G and FIG. 77A-77B as well as SEQ ID NO: 27869-28086, 28087-28269, 27193-27335, 28549-28556 and 28557-28665, and those with the identifiers [ICOS]_H0.66_L0 and [ICOS]_H0L0), GITR, OX40 and 4-1BB.

[0611] In addition to the parental CDR sets disclosed in the sequence listing that form an ABD to BTLA, the invention provides variant CDR sets. In one embodiment, a set of 6 CDRs can have 1, 2, 3, 4 or 5 amino acid changes from the parental CDRs, as long as the ABD is still able to bind to the target antigen, as measured at least one of a Biacore, surface plasmon resonance (SPR) and/or BLI (biolayer interferometry, e.g. Octet assay) assay, with the latter finding particular use in many embodiments.

[0612] In addition to the parental variable heavy and variable light domains disclosed herein that form an ABD to BTLA, the invention provides variant vh and vl domains. In one embodiment, the variant vh and vl domains each can have from 1, 2, 3, 4, 5, 6, 7, 8, 9 or 10 amino acid changes from the parental vh and vl domain, as long as the ABD is still able to bind to the target antigen, as measured by at least one of a Biacore, surface plasmon resonance (SPR) and/or BLI (biolayer interferometry, e.g. Octet assay) assay, with the latter finding particular use in many embodiments. In another embodiment, the variant vh and vl are at least 90, 95, 97, 98 or 99% identical to the respective parental vh or vl, as long as the ABD is still able to bind to the target antigen, as measured by at least one of a Biacore, surface plasmon resonance (SPR) and/or BLI (biolayer interferometry, e.g. Octet assay) assay, with the latter finding particular use in many embodiments.

[0613] F. TIGIT Antigen Binding Domains

[0614] In some embodiments, one of the ABDs binds TIGIT. Suitable sets of 6 CDRs and/or vh and vl domains, as well as scFv sequences, are depicted in FIG. 8? And in SEQ ID NO:4433-4585.

[0615] As will be appreciated by those in the art, suitable anti-TIGIT ABDs can comprise a set of 6 CDRs as depicted in these sequences and Figures, either as they are underlined or, in the case where a different numbering scheme is used as described herein and as shown in Table 1, as the CDRs that are identified using other alignments within the vh and vl sequences depicted herein. Suitable ABDs can also include the entire vh and vl sequences as depicted in these sequences and Figures, used as scFvs or as Fabs. In many of the embodiments herein that contain an Fv to TIGIT, it is the Fab monomer that binds TIGIT. As discussed herein, the other of the target pair when TIGIT is one of the antigens is selected ICOS (suitable sequences are shown in FIG. 19, FIG. 20A-20G, FIG. 24, FIG. 68A-68G and FIG. 77A-77B as well as SEQ ID NO: 27869-28086, 28087-28269, 27193-27335, 28549-28556 and 28557-28665, and those with the identifiers [ICOS]_H0.66_L0 and [ICOS]_H0L0), GITR, OX40 and 4-1BB.

[0616] G. PD-L1 Antigen Binding Domains

[0617] In some embodiments, one of the ABDs binds PD-L1. Suitable sets of 6 CDRs and/or vh and vl domains, as well as scFv sequences, are depicted in FIG. 15A-15C, FIG. 73 and FIG. 78, and in SEQ ID NO:3961-4432.

[0618] As will be appreciated by those in the art, suitable anti-TIGIT ABDs can comprise a set of 6 CDRs as depicted in these sequences and Figures, either as they are underlined or, in the case where a different numbering scheme is used as described herein and as shown in Table 1, as the CDRs that are identified using other alignments within the vh and vl sequences depicted herein. Suitable ABDs can also include the entire vh and vl sequences as depicted in these sequences and Figures, used as scFvs or as Fabs. In many of the embodiments herein that contain an Fv to TIGIT, it is the Fab monomer that binds TIGIT. As discussed herein, the other of the target pair when TIGIT is one of the antigens is selected ICOS (suitable sequences are shown in FIG. 19, FIG. 20A-20G, FIG. 24, FIG. 68A-68G and FIG. 77A-77B as well as SEQ ID NO: 27869-28086, 28087-28269, 27193-27335, 28549-28556 and 28557-28665, and those with the identifiers [ICOS]_H0.66_L0 and [ICOS]_H0L0), GITR, OX40 and 4-1BB.

[0619] H. ICOS Antigen Binding Domains

[0620] In some embodiments, one of the ABDs binds ICOS. Suitable sets of 6 CDRs and/or vh and vl domains, as well as scFv sequences ICOS (suitable sequences are shown in FIG. 19, FIG. 20A-20G, FIG. 24, FIG. 68A-68G and FIG. 77A-77B as well as SEQ ID NO: 27869-28086, 28087-28269, 27193-27335, 28549-28556 and 28557-28665, and those with the identifiers [ICOS]_H0.66_L0 and [ICOS]_H0L0.

[0621] As will be appreciated by those in the art, suitable anti-ICOS ABDs can comprise a set of 6 CDRs as depicted in these sequences and Figures, either as they are underlined or, in the case where a different numbering scheme is used as described herein and as shown in Table 1, as the CDRs that are identified using other alignments within the sequences disclosed herein. Suitable ABDs can also include the entire vh and vl sequences as depicted in these sequences and Figures, used as scFvs or as Fabs. In many of the embodiments herein that contain an Fv to ICOS, it is the Fab monomer that binds ICOS. As discussed herein, the other of the target pair when ICOS is one of the antigens is selected from PD-1 are depicted in FIG. 3, FIG. 10, FIG. 11, FIG. 72, FIG. 73, FIG. 74, FIG. 76 and SEQ ID NO:1-2392, 3125-3144, 4697-7594 and 4697-21810, and include those sequences in the sequence listing with the identifiers 1G6_H1.279_L1.194; 1G6_H1.280_L1.224; 1G6_L1.194_H1.279; 1G6_L1.210_H1.288; and 2E9_H1L1 (which can be scFv sequences, CDR sequence sets or vh and vl sequences)), CTLA-4 (suitable sequences are depicted in FIGS. 12, 72 and 79, as well as SEQ ID NO:2393-2414 and 3737-3816 (which can be scFv sequences, CDR sequence sets or vh and vl sequences)), TIM-3 (suitable sequences are depicted in FIG. 14, FIG. 81A-81C and SEQ ID NO: 3345-3704, 4585-4696 (which can be scFv sequences, CDR sequence sets or vh and vl sequences)), LAG-3 (suitable sequences are depicted in FIG. 13, FIG. 80 and SEQ ID NO:2415-2604, 3817-3960 (which can be scFv sequences, CDR sequence sets or vh and vl sequences)), BTLA (suitable sequences are depicted in FIGS. 82 and 84 and SEQ ID NO?3705-3736 (which can be scFv sequences, CDR sequence sets or vh and vl sequences)), and TIGIT (suitable sequences are depicted in Figure XX and SEQ ID NO:4433-4585 (which can be scFv sequences, CDR sequence sets or vh and vl sequences)).

[0622] In addition to the parental CDR sets disclosed in the sequence listing that form an ABD to ICOS, the invention provides variant CDR sets. In one embodiment, a set of 6 CDRs can have 1, 2, 3, 4 or 5 amino acid changes from the parental CDRs, as long as the ABD is still able to bind to the target antigen, as measured at least one of a Biacore, surface plasmon resonance (SPR) and/or BLI (biolayer interferometry, e.g. Octet assay) assay, with the latter finding particular use in many embodiments.

[0623] In addition to the parental variable heavy and variable light domains disclosed herein that form an ABD to ICOS, the invention provides variant vh and vl domains. In one embodiment, the variant vh and vl domains each can have from 1, 2, 3, 4, 5, 6, 7, 8, 9 or 10 amino acid changes from the parental vh and vl domain, as long as the ABD is still able to bind to the target antigen, as measured by at least one of a Biacore, surface plasmon resonance (SPR) and/or BLI (biolayer interferometry, e.g. Octet assay) assay, with the latter finding particular use in many embodiments. In another embodiment, the variant vh and vl are at least 90, 95, 97, 98 or 99% identical to the respective parental vh or vl, as long as the ABD is still able to bind to the target antigen, as measured by at least one of a Biacore, surface plasmon resonance (SPR) and/or BLI (biolayer interferometry, e.g. Octet assay) assay, with the latter finding particular use in many embodiments.

[0624] Specific preferred embodiments include the [ICOS]_H0.66_L0 anti-ICOS Fv, in a Fab format, included within any of the bottle opener format backbones of FIG. 9.

[0625] Specific preferred embodiments include the [ICOS]_H0_L0 anti-ICOS Fv, in a scFv format, included within any of the bottle opener format backbones of FIG. 9.

[0626] Specific preferred embodiments include the [ICOS]_H0.66_L0 anti-ICOS Fv, in a scFv format, included within any of the mAb-scFv format backbones of FIG. 75.

[0627] Specific preferred embodiments include the [ICOS]_H0.66_L0 anti-ICOS Fv, in a Fab format, included within any of the mAb-scFv format backbones of FIG. 75.

[0628] Specific preferred embodiments include the [ICOS]_H0.66_L0 anti-ICOS Fv, in a Fab format, included within any of the format backbones of FIG. 55.

[0629] I. GITR Antigen Binding Domains

[0630] In some embodiments, one of the ABDs binds GITR. Suitable sets of 6 CDRs and/or vh and vl domains, as well as scFv sequences FITR (suitable sequences are shown in FIG. 18, FIG. 72 and FIG. 73, and in SEQ ID NO: 26282-26290.

[0631] As will be appreciated by those in the art, suitable anti-GITR ABDs can comprise a set of 6 CDRs as depicted in these sequences and Figures, either as they are underlined or, in the case where a different numbering scheme is used as described herein and as shown in Table 1, as the CDRs that are identified using other alignments within the sequences disclosed herein. Suitable ABDs can also include the entire vh and vl sequences as depicted in these sequences and Figures, used as scFvs or as Fabs. In many of the embodiments herein that contain an Fv to GITR, it is the Fab monomer that binds GITR. As discussed herein, the other of the target pair when GITR is one of the antigens is selected from PD-1 are depicted in FIG. 3, FIG. 10, FIG. 11, FIG. 72, FIG. 73, FIG. 74, FIG. 76 and SEQ ID NO:1-2392, 3125-3144, 4697-7594 and 4697-21810, and include those sequences in the sequence listing with the identifiers 1G6_H1.279_L1.194; 1G6_H1.280_L1.224; 1G6_L1.194_H1.279; 1G6_L1.210_H1.288; and 2E9_H1L1 (which can be scFv sequences, CDR sequence sets or vh and vl sequences)), CTLA-4 (suitable sequences are depicted in FIGS. 12, 72 and 79, as well as SEQ ID NO:2393-2414 and 3737-3816 (which can be scFv sequences, CDR sequence sets or vh and vl sequences)), TIM-3 (suitable sequences are depicted in FIG. 14, FIG. 81A-81C and SEQ ID NO: 3345-3704, 4585-4696 (which can be scFv sequences, CDR sequence sets or vh and vl sequences)), LAG-3 (suitable sequences are depicted in FIG. 13, FIG. 80 and SEQ ID NO:2415-2604, 3817-3960 (which can be scFv sequences, CDR sequence sets or vh and vl sequences)), BTLA (suitable sequences are depicted in FIGS. 82 and 84 and SEQ ID NO?3705-3736 (which can be scFv sequences, CDR sequence sets or vh and vl sequences)), and TIGIT (suitable sequences are depicted in Figure XX and SEQ ID NO:4433-4585 (which can be scFv sequences, CDR sequence sets or vh and vl sequences)).

[0632] In addition to the parental CDR sets disclosed in the sequence listing that form an ABD to GITR, the invention provides variant CDR sets. In one embodiment, a set of 6 CDRs can have 1, 2, 3, 4 or 5 amino acid changes from the parental CDRs, as long as the ABD is still able to bind to the target antigen, as measured at least one of a Biacore, surface plasmon resonance (SPR) and/or BLI (biolayer interferometry, e.g. Octet assay) assay, with the latter finding particular use in many embodiments.

[0633] In addition to the parental variable heavy and variable light domains disclosed herein that form an ABD to GITR, the invention provides variant vh and vl domains. In one embodiment, the variant vh and vl domains each can have from 1, 2, 3, 4, 5, 6, 7, 8, 9 or 10 amino acid changes from the parental vh and vl domain, as long as the ABD is still able to bind to the target antigen, as measured by at least one of a Biacore, surface plasmon resonance (SPR) and/or BLI (biolayer interferometry, e.g. Octet assay) assay, with the latter finding particular use in many embodiments. In another embodiment, the variant vh and vl are at least 90, 95, 97, 98 or 99% identical to the respective parental vh or vl, as long as the ABD is still able to bind to the target antigen, as measured by at least one of a Biacore, surface plasmon resonance (SPR) and/or BLI (biolayer interferometry, e.g. Octet assay) assay, with the latter finding particular use in many embodiments.

[0634] J. OX40 Antigen Binding Domains

[0635] In some embodiments, one of the ABDs binds OX40. Suitable sets of 6 CDRs and/or vh and vl domains, as well as scFv sequences for OX40 are provided (suitable sequences are shown in FIG. 17, FIG. 72 and FIG. 73, and in SEQ ID NO: 26272-26281.

[0636] As will be appreciated by those in the art, suitable anti-OX40 ABDs can comprise a set of 6 CDRs as depicted in these sequences and Figures, either as they are underlined or, in the case where a different numbering scheme is used as described herein and as shown in Table 1, as the CDRs that are identified using other alignments within the sequences disclosed herein. Suitable ABDs can also include the entire vh and vl sequences as depicted in these sequences and Figures, used as scFvs or as Fabs. In many of the embodiments herein that contain an Fv to OX40, it is the Fab monomer that binds GITR. As discussed herein, the other of the target pair when OX40 is one of the antigens is selected from PD-1 are depicted in FIG. 3, FIG. 10, FIG. 11, FIG. 72, FIG. 73, FIG. 74, FIG. 76 and SEQ ID NO:1-2392, 3125-3144, 4697-7594 and 4697-21810, and include those sequences in the sequence listing with the identifiers 1G6_H1.279_L1.194; 1G6_H1.280_L1.224; 1G6_L1.194_H1.279; 1G6_L1.210_H1.288; and 2E9_H1L1 (which can be scFv sequences, CDR sequence sets or vh and vl sequences)), CTLA-4 (suitable sequences are depicted in FIGS. 12, 72 and 79, as well as SEQ ID NO:2393-2414 and 3737-3816 (which can be scFv sequences, CDR sequence sets or vh and vl sequences)), TIM-3 (suitable sequences are depicted in FIG. 14, FIG. 81A-81C and SEQ ID NO: 3345-3704, 4585-4696 (which can be scFv sequences, CDR sequence sets or vh and vl sequences)), LAG-3 (suitable sequences are depicted in FIG. 13, FIG. 80 and SEQ ID NO:2415-2604, 3817-3960 (which can be scFv sequences, CDR sequence sets or vh and vl sequences)), BTLA (suitable sequences are depicted in FIGS. 82 and 84 and SEQ ID NO?3705-3736 (which can be scFv sequences, CDR sequence sets or vh and vl sequences)), and TIGIT (suitable sequences are depicted in Figure XX and SEQ ID NO:4433-4585 (which can be scFv sequences, CDR sequence sets or vh and vl sequences)).

[0637] In addition to the parental CDR sets disclosed in the sequence listing that form an ABD to OX40, the invention provides variant CDR sets. In one embodiment, a set of 6 CDRs can have 1, 2, 3, 4 or 5 amino acid changes from the parental CDRs, as long as the ABD is still able to bind to the target antigen, as measured at least one of a Biacore, surface plasmon resonance (SPR) and/or BLI (biolayer interferometry, e.g. Octet assay) assay, with the latter finding particular use in many embodiments.

[0638] In addition to the parental variable heavy and variable light domains disclosed herein that form an ABD to OX40, the invention provides variant vh and vl domains. In one embodiment, the variant vh and vl domains each can have from 1, 2, 3, 4, 5, 6, 7, 8, 9 or 10 amino acid changes from the parental vh and vl domain, as long as the ABD is still able to bind to the target antigen, as measured by at least one of a Biacore, surface plasmon resonance (SPR) and/or BLI (biolayer interferometry, e.g. Octet assay) assay, with the latter finding particular use in many embodiments. In another embodiment, the variant vh and vl are at least 90, 95, 97, 98 or 99% identical to the respective parental vh or vl, as long as the ABD is still able to bind to the target antigen, as measured by at least one of a Biacore, surface plasmon resonance (SPR) and/or BLI (biolayer interferometry, e.g. Octet assay) assay, with the latter finding particular use in many embodiments.

[0639] K. 4-1BB Antigen Binding Domains

[0640] In some embodiments, one of the ABDs binds 4-1BB. Suitable sets of 6 CDRs and/or vh and vl domains, as well as scFv sequences 4-1BB (suitable sequences are shown in FIG. 16, FIG. 72 and FIG. 73, and in SEQ ID NO:26262-2671.

[0641] As will be appreciated by those in the art, suitable anti-4-1BB ABDs can comprise a set of 6 CDRs as depicted in these sequences and Figures, either as they are underlined or, in the case where a different numbering scheme is used as described herein and as shown in Table 1, as the CDRs that are identified using other alignments within the sequences disclosed herein. Suitable ABDs can also include the entire vh and vl sequences as depicted in these sequences and Figures, used as scFvs or as Fabs. In many of the embodiments herein that contain an Fv to 4-1BB, it is the Fab monomer that binds 4-1BB. As discussed herein, the other of the target pair when ICOS is one of the antigens is selected from PD-1 are depicted in FIG. 3, FIG. 10, FIG. 11, FIG. 72, FIG. 73, FIG. 74, FIG. 76 and SEQ ID NO:1-2392, 3125-3144, 4697-7594 and 4697-21810, and include those sequences in the sequence listing with the identifiers 1G6_H1.279_L1.194; 1G6_H1.280_L1.224; 1G6_L1.194_H1.279; 1G6_L1.210_H1.288; and 2E9_H1L1 (which can be scFv sequences, CDR sequence sets or vh and vl sequences)), CTLA-4 (suitable sequences are depicted in FIGS. 12, 72 and 79, as well as SEQ ID NO:2393-2414 and 3737-3816 (which can be scFv sequences, CDR sequence sets or vh and vl sequences)), TIM-3 (suitable sequences are depicted in FIG. 14, FIG. 81A-81C and SEQ ID NO: 3345-3704, 4585-4696 (which can be scFv sequences, CDR sequence sets or vh and vl sequences)), LAG-3 (suitable sequences are depicted in FIG. 13, FIG. 80 and SEQ ID NO:2415-2604, 3817-3960 (which can be scFv sequences, CDR sequence sets or vh and vl sequences)), BTLA (suitable sequences are depicted in FIGS. 82 and 84 and SEQ ID NO?3705-3736 (which can be scFv sequences, CDR sequence sets or vh and vl sequences)), and TIGIT (suitable sequences are depicted in Figure XX and SEQ ID NO:4433-4585 (which can be scFv sequences, CDR sequence sets or vh and vl sequences)).

[0642] In addition to the parental CDR sets disclosed in the sequence listing that form an ABD to 4-1BB, the invention provides variant CDR sets. In one embodiment, a set of 6 CDRs can have 1, 2, 3, 4 or 5 amino acid changes from the parental CDRs, as long as the ABD is still able to bind to the target antigen, as measured at least one of a Biacore, surface plasmon resonance (SPR) and/or BLI (biolayer interferometry, e.g. Octet assay) assay, with the latter finding particular use in many embodiments.

[0643] In addition to the parental variable heavy and variable light domains disclosed herein that form an ABD to 4-1BB, the invention provides variant vh and vl domains. In one embodiment, the variant vh and vl domains each can have from 1, 2, 3, 4, 5, 6, 7, 8, 9 or 10 amino acid changes from the parental vh and vl domain, as long as the ABD is still able to bind to the target antigen, as measured by at least one of a Biacore, surface plasmon resonance (SPR) and/or BLI (biolayer interferometry, e.g. Octet assay) assay, with the latter finding particular use in many embodiments. In another embodiment, the variant vh and vl are at least 90, 95, 97, 98 or 99% identical to the respective parental vh or vl, as long as the ABD is still able to bind to the target antigen, as measured by at least one of a Biacore, surface plasmon resonance (SPR) and/or BLI (biolayer interferometry, e.g. Octet assay) assay, with the latter finding particular use in many embodiments.

[0644] L. Specific Bispecific Embodiments

[0645] The invention provides a number of particular bispecific antibodies as outlined below.

[0646] 1. ICOS X PD-1

[0647] The invention provides bispecific heterodimeric antibodies that bind ICOS and PD-1 each monovalently, and in some cases as outlined herein, both bivalently.

[0648] In one embodiment, the PD-1 ABD is 1G6_L1.194_H1.279 and the ICOS ABD is selected from sequences shown in FIG. 19, FIG. 20A-20G, FIG. 24, FIG. 68A-68G and FIG. 77A-77B as well as SEQ ID NO: 27869-28086, 28087-28269, 27193-27335, 28549-28556 and 28557-28665, and those with the identifiers [ICOS]_H0.66_L0 and [ICOS]_H0L0.

[0649] In one embodiment, the ICOS X PD-1 bispecific antibody is selected from XENP numbers 20261, 20730, 20896, 22432-22438, 22731-22748, 22878-22894, 22931-22932, 22950-22961, 23090-23093, 23295-23296, 23301, 23405, 23408, 23410 (all without 428L/434S, although they can have those substitutions); XENP numbers 22730, 22917-22928, 22935-22937, 22974-22979, 22995-22996, 23001, 23103, 23104 (all with 428L/434S, although they can not have those); XENP numbers 23411, 21828, 21829, 21830, 21831, 22348, 23059 (using prior art ICOS sequences); XENP numbers 18920, 24125, 24130 (additional bottle openers); XENP 23406, 23407, 24128 (ICOS x PD-1 central-scFv), XENP24123 (ICOS x PD-1 central-scFv2); XENP24134 (ICOS x PD-1 bispecific mAb) 24122 (ICOS x PD-1 DVD-Ig), XENP 24132, 24133 (ICOS x PD-1 Trident).

[0650] 2. ICOS X PD-L1

[0651] In this embodiment, the ICOS ABD is selected from sequences shown in FIG. 19, FIG. 20A-20G, FIG. 24, FIG. 68A-68G and FIG. 77A-77B as well as SEQ ID NO: 27869-28086, 28087-28269, 27193-27335, 28549-28556 and 28557-28665, and those with the identifiers [ICOS]_H0.66_L0 and [ICOS]_H0L0.

[0652] 3. ICOS X CTLA-4

[0653] In this embodiment, the ICOS ABD is selected from sequences shown in FIG. 19, FIG. 20A-20G, FIG. 24, FIG. 68A-68G and FIG. 77A-77B as well as SEQ ID NO: 27869-28086, 28087-28269, 27193-27335, 28549-28556 and 28557-28665, and those with the identifiers [ICOS]_H0.66_L0 and [ICOS]_H0L0.

[0654] In one embodiment, a bottle opener format with a Fab ICOS ABD of [ICOS]H0.66_L0 is paired with a scFv CTLA-4 ABD of [CTLA-4]_H3.32_L0.129, particularly in bottle opener backbone 1 from FIG. 9.

[0655] 4. ICOS X LAG-3

[0656] In this embodiment, the ICOS ABD is selected from sequences shown in FIG. 19, FIG. 20A-20G, FIG. 24, FIG. 68A-68G and FIG. 77A-77B as well as SEQ ID NO: 27869-28086, 28087-28269, 27193-27335, 28549-28556 and 28557-28665, and those with the identifiers [ICOS]_H0.66_L0 and [ICOS]_H0L0.

[0657] 5. ICOS X TIM-3

[0658] I this embodiment, the ICOS ABD is selected from sequences shown in FIG. 19, FIG. 20A-20G, FIG. 24, FIG. 68A-68G and FIG. 77A-77B as well as SEQ ID NO: 27869-28086, 28087-28269, 27193-27335, 28549-28556 and 28557-28665, and those with the identifiers [ICOS]_H0.66_L0 and [ICOS]_H0L0.

[0659] M. Homologous Antibodies

[0660] The invention further provides antibodies that share amino acid sequence identity with the antibodies outlined herein.

[0661] In one embodiment, bispecific antibodies are made that have amino acid variants in one or more of the CDRs of the Vh and V1 sequences outlined herein and in the Figures. In one embodiment, antibodies are provided that have 1, 2, 3, 4 or 5 amino acid differences in one or more of the CDRs of the vh and vl chains outlined herein. These amino acid variants can be in one CDR or spread out between more than one CDR. These amino acid variants can also be in one or both of the Fvs of the bispecific antibody; e.g. there can be 2 amino acid variants in CDRs on the ICOS Fv side (generally a Fab but can be a scFv as outlined herein) and one on the PD-1 side, etc.

[0662] Similarly, the invention provides for antibodies that have at least 95, 96, 97 98 or 99% amino acid identity to the sequences outlined herein, and particularly in the variable heavy and/or variable light domains. This sequence identity can also be on one Fv or both Fv of the bispecific antibodies. That is, bispecific antibodies are provided that are 95-99% identical to the variable heavy and/or variable light domains outlined in the figures.

### IX. Nucleic Acids of the Invention

[0663] The invention further provides nucleic acid compositions encoding the bispecific antibodies of the invention (or, in the case of “monospecific” antibodies, nucleic acids encoding those as well).

[0664] As will be appreciated by those in the art, the nucleic acid compositions will depend on the format and scaffold of the heterodimeric protein. Thus, for example, when the format requires three amino acid sequences, three nucleic acid sequences can be incorporated into one or more expression vectors for expression. Similarly, some formats (e.g. dual scFv formats such as disclosed in FIG. 2) only two nucleic acids are needed; again, they can be put into one or two expression vectors. Some formats need 4 amino acids (bispecific mAbs).

[0665] As is known in the art, the nucleic acids encoding the components of the invention can be incorporated into expression vectors as is known in the art, and depending on the host cells used to produce the heterodimeric antibodies of the invention. Generally, the nucleic acids are operably linked to any number of regulatory elements (promoters, origin of replication, selectable markers, ribosomal binding sites, inducers, etc.). The expression vectors can be extra-chromosomal or integrating vectors.

[0666] The nucleic acids and/or expression vectors of the invention are then transformed into any number of different types of host cells as is well known in the art, including mammalian, bacterial, yeast, insect and/or fungal cells, with mammalian cells (e.g. CHO cells), finding use in many embodiments.

[0667] In some embodiments, nucleic acids encoding each monomer and the optional nucleic acid encoding a light chain, as applicable depending on the format, are each contained within a single expression vector, generally under different or the same promoter controls. In embodiments of particular use in the present invention, each of these two or three nucleic acids are contained on a different expression vector. As shown herein and in 62/025,931, hereby incorporated by reference, different vector ratios can be used to drive heterodimer formation. That is, surprisingly, while the proteins comprise first monomer:second monomer:light chains (in the case of many of the embodiments herein that have three polypeptides comprising the heterodimeric antibody) in a 1:1:2 ratio, these are not the ratios that give the best results.

[0668] The heterodimeric antibodies of the invention are made by culturing host cells comprising the expression vector(s) as is well known in the art. Once produced, traditional antibody purification steps are done, including an ion exchange chromotography step. As discussed herein, having the pIs of the two monomers differ by at least 0.5 can allow separation by ion exchange chromatography or isoelectric focusing, or other methods sensitive to isoelectric point. That is, the inclusion of pI substitutions that alter the isoelectric point (pI) of each monomer so that such that each monomer has a different pI and the heterodimer also has a distinct pI, thus facilitating isoelectric purification of the “triple F” heterodimer (e.g., anionic exchange columns, cationic exchange columns). These substitutions also aid in the determination and monitoring of any contaminating dual scFv-Fc and mAb homodimers post-purification (e.g., IEF gels, cIEF, and analytical IEX columns).

### X. Biological and Biochemical Functionality of the Heterodimeric Immunomodulatory Antibodies

[0669] Generally the bispecific immunomodulatory antibodies of the invention are administered to patients with cancer, and efficacy is assessed, in a number of ways as described herein. Thus, while standard assays of efficacy can be run, such as cancer load, size of tumor, evaluation of presence or extent of metastasis, etc., immuno-oncology treatments can be assessed on the basis of immune status evaluations as well. This can be done in a number of ways, including both in vitro and in vivo assays. For example, evaluation of changes in immune status (e.g. presence of ICOS+CD4+ T cells following ipi treatment) along with “old fashioned” measurements such as tumor burden, size, invasiveness, LN involvement, metastasis, etc. can be done. Thus, any or all of the following can be evaluated: the inhibitory effects of PVRIG on CD4⁺ T cell activation or proliferation, CD8⁺ T (CTL) cell activation or proliferation, CD8⁺ T cell-mediated cytotoxic activity and/or CTL mediated cell depletion, NK cell activity and NK mediated cell depletion, the potentiating effects of PVRIG on Treg cell differentiation and proliferation and Treg- or myeloid derived suppressor cell (MDSC)-mediated immunosuppression or immune tolerance, and/or the effects of PVRIG on proinflammatory cytokine production by immune cells, e.g., IL-2, IFN-γ or TNF-α production by T or other immune cells.

[0670] In some embodiments, assessment of treatment is done by evaluating immune cell proliferation, using for example, CFSE dilution method, Ki67 intracellular staining of immune effector cells, and 3H-Thymidine incorporation method,

[0671] In some embodiments, assessment of treatment is done by evaluating the increase in gene expression or increased protein levels of activation-associated markers, including one or more of: CD25, CD69, CD137, ICOS, PD1, GITR, OX40, and cell degranulation measured by surface expression of CD107A.

[0672] In general, gene expression assays are done as is known in the art.

[0673] In general, protein expression measurements are also similarly done as is known in the art.

[0674] In some embodiments, assessment of treatment is done by assessing cytotoxic activity measured by target cell viability detection via estimating numerous cell parameters such as enzyme activity (including protease activity), cell membrane permeability, cell adherence, ATP production, co-enzyme production, and nucleotide uptake activity. Specific examples of these assays include, but are not limited to, Trypan Blue or PI staining, ⁵¹Cr or ³⁵S release method, LDH activity, MTT and/or WST assays, Calcein-AM assay, Luminescent based assay, and others.

[0675] In some embodiments, assessment of treatment is done by assessing T cell activity measured by cytokine production, measure either intracellularly in culture supernatant using cytokines including, but not limited to, IFNγ, TNFα, GM-CSF, IL2, IL6, IL4, IL5, IL10, IL13 using well known techniques.

[0676] Accordingly, assessment of treatment can be done using assays that evaluate one or more of the following: (i) increases in immune response, (ii) increases in activation of αβ and/or γδ T cells, (iii) increases in cytotoxic T cell activity, (iv) increases in NK and/or NKT cell activity, (v) alleviation of αβ and/or γδ τ-cell suppression, (vi) increases in pro-inflammatory cytokine secretion, (vii) increases in IL-2 secretion; (viii) increases in interferon-γ production, (ix) increases in Th1 response, (x) decreases in Th2 response, (xi) decreases or eliminates cell number and/or activity of at least one of regulatory T cells (Tregs.

[0677] Assays to Measure Efficacy

[0678] In some embodiments, T cell activation is assessed using a Mixed Lymphocyte Reaction (MLR) assay as is known in the art. An increase in activity indicates immunostimulatory activity. Appropriate increases in activity are outlined below.

[0679] In one embodiment, the signaling pathway assay measures increases or decreases in immune response as measured for an example by phosphorylation or de-phosphorylation of different factors, or by measuring other post translational modifications. An increase in activity indicates immunostimulatory activity. Appropriate increases in activity are outlined below.

[0680] In one embodiment, the signaling pathway assay measures increases or decreases in activation of αβ and/or γδ T cells as measured for an example by cytokine secretion or by proliferation or by changes in expression of activation markers like for an example CD137, CD107a, PD1, etc. An increase in activity indicates immunostimulatory activity. Appropriate increases in activity are outlined below.

[0681] In one embodiment, the signaling pathway assay measures increases or decreases in cytotoxic T cell activity as measured for an example by direct killing of target cells like for an example cancer cells or by cytokine secretion or by proliferation or by changes in expression of activation markers like for an example CD137, CD107a, PD1, etc. An increase in activity indicates immunostimulatory activity. Appropriate increases in activity are outlined below.

[0682] In one embodiment, the signaling pathway assay measures increases or decreases in NK and/or NKT cell activity as measured for an example by direct killing of target cells like for an example cancer cells or by cytokine secretion or by changes in expression of activation markers like for an example CD107a, etc. An increase in activity indicates immunostimulatory activity. Appropriate increases in activity are outlined below.

[0683] In one embodiment, the signaling pathway assay measures increases or decreases in αβ and/or γδ T-cell suppression, as measured for an example by cytokine secretion or by proliferation or by changes in expression of activation markers like for an example CD137, CD107a, PD1, etc. An increase in activity indicates immunostimulatory activity. Appropriate increases in activity are outlined below.

[0684] In one embodiment, the signaling pathway assay measures increases or decreases in pro-inflammatory cytokine secretion as measured for example by ELISA or by Luminex or by Multiplex bead based methods or by intracellular staining and FACS analysis or by Alispot etc. An increase in activity indicates immunostimulatory activity. Appropriate increases in activity are outlined below.

[0685] In one embodiment, the signaling pathway assay measures increases or decreases in IL-2 secretion as measured for example by ELISA or by Luminex or by Multiplex bead based methods or by intracellular staining and FACS analysis or by Alispot etc. An increase in activity indicates immunostimulatory activity. Appropriate increases in activity are outlined below.

[0686] In one embodiment, the signaling pathway assay measures increases or decreases in interferon-γ production as measured for example by ELISA or by Luminex or by Multiplex bead based methods or by intracellular staining and FACS analysis or by Alispot etc. An increase in activity indicates immunostimulatory activity. Appropriate increases in activity are outlined below.

[0687] In one embodiment, the signaling pathway assay measures increases or decreases in Th1 response as measured for an example by cytokine secretion or by changes in expression of activation markers. An increase in activity indicates immunostimulatory activity. Appropriate increases in activity are outlined below.

[0688] In one embodiment, the signaling pathway assay measures increases or decreases in Th2 response as measured for an example by cytokine secretion or by changes in expression of activation markers. An increase in activity indicates immunostimulatory activity. Appropriate increases in activity are outlined below.

[0689] In one embodiment, the signaling pathway assay measures increases or decreases cell number and/or activity of at least one of regulatory T cells (Tregs), as measured for example by flow cytometry or by IHC. A decrease in response indicates immunostimulatory activity. Appropriate decreases are the same as for increases, outlined below.

[0690] In one embodiment, the signaling pathway assay measures increases or decreases in M2 macrophages cell numbers, as measured for example by flow cytometry or by IHC. A decrease in response indicates immunostimulatory activity. Appropriate decreases are the same as for increases, outlined below.

[0691] In one embodiment, the signaling pathway assay measures increases or decreases in M2 macrophage pro-tumorigenic activity, as measured for an example by cytokine secretion or by changes in expression of activation markers. A decrease in response indicates immunostimulatory activity. Appropriate decreases are the same as for increases, outlined below.

[0692] In one embodiment, the signaling pathway assay measures increases or decreases in N2 neutrophils increase, as measured for example by flow cytometry or by IHC. A decrease in response indicates immunostimulatory activity. Appropriate decreases are the same as for increases, outlined below.

[0693] In one embodiment, the signaling pathway assay measures increases or decreases in N2 neutrophils pro-tumorigenic activity, as measured for an example by cytokine secretion or by changes in expression of activation markers. A decrease in response indicates immunostimulatory activity. Appropriate decreases are the same as for increases, outlined below.

[0694] In one embodiment, the signaling pathway assay measures increases or decreases in inhibition of T cell activation, as measured for an example by cytokine secretion or by proliferation or by changes in expression of activation markers like for an example CD137, CD107a, PD1, etc. An increase in activity indicates immunostimulatory activity. Appropriate increases in activity are outlined below.

[0695] In one embodiment, the signaling pathway assay measures increases or decreases in inhibition of CTL activation as measured for an example by direct killing of target cells like for an example cancer cells or by cytokine secretion or by proliferation or by changes in expression of activation markers like for an example CD137, CD107a, PD1, etc. An increase in activity indicates immunostimulatory activity. Appropriate increases in activity are outlined below.

[0696] In one embodiment, the signaling pathway assay measures increases or decreases in αβ and/or γδ T cell exhaustion as measured for an example by changes in expression of activation markers. A decrease in response indicates immunostimulatory activity. Appropriate decreases are the same as for increases, outlined below.

[0697] In one embodiment, the signaling pathway assay measures increases or decreases αβ and/or γδ T cell response as measured for an example by cytokine secretion or by proliferation or by changes in expression of activation markers like for an example CD137, CD107a, PD1, etc. An increase in activity indicates immunostimulatory activity. Appropriate increases in activity are outlined below.

[0698] In one embodiment, the signaling pathway assay measures increases or decreases in stimulation of antigen-specific memory responses as measured for an example by cytokine secretion or by proliferation or by changes in expression of activation markers like for an example CD45RA, CCR7 etc. An increase in activity indicates immunostimulatory activity. Appropriate increases in activity are outlined below.

[0699] In one embodiment, the signaling pathway assay measures increases or decreases in apoptosis or lysis of cancer cells as measured for an example by cytotoxicity assays such as for an example MTT, Cr release, Calcine AM, or by flow cytometry based assays like for an example CFSE dilution or propidium iodide staining etc. An increase in activity indicates immunostimulatory activity. Appropriate increases in activity are outlined below.

[0700] In one embodiment, the signaling pathway assay measures increases or decreases in stimulation of cytotoxic or cytostatic effect on cancer cells. as measured for an example by cytotoxicity assays such as for an example MTT, Cr release, Calcine AM, or by flow cytometry based assays like for an example CFSE dilution or propidium iodide staining etc. An increase in activity indicates immunostimulatory activity. Appropriate increases in activity are outlined below.

[0701] In one embodiment, the signaling pathway assay measures increases or decreases direct killing of cancer cells as measured for an example by cytotoxicity assays such as for an example MTT, Cr release, Calcine AM, or by flow cytometry based assays like for an example CFSE dilution or propidium iodide staining etc. An increase in activity indicates immunostimulatory activity. Appropriate increases in activity are outlined below.

[0702] In one embodiment, the signaling pathway assay measures increases or decreases Th17 activity as measured for an example by cytokine secretion or by proliferation or by changes in expression of activation markers. An increase in activity indicates immunostimulatory activity. Appropriate increases in activity are outlined below.

[0703] In one embodiment, the signaling pathway assay measures increases or decreases in induction of complement dependent cytotoxicity and/or antibody dependent cell-mediated cytotoxicity, as measured for an example by cytotoxicity assays such as for an example MTT, Cr release, Calcine AM, or by flow cytometry based assays like for an example CFSE dilution or propidium iodide staining etc. An increase in activity indicates immunostimulatory activity. Appropriate increases in activity are outlined below.

[0704] In one embodiment, T cell activation is measured for an example by direct killing of target cells like for an example cancer cells or by cytokine secretion or by proliferation or by changes in expression of activation markers like for an example CD137, CD107a, PD1, etc. For T-cells, increases in proliferation, cell surface markers of activation (e.g. CD25, CD69, CD137, PD1), cytotoxicity (ability to kill target cells), and cytokine production (e.g. IL-2, IL-4, IL-6, IFNγ, TNF-a, IL-10, IL-17A) would be indicative of immune modulation that would be consistent with enhanced killing of cancer cells.

[0705] In one embodiment, NK cell activation is measured for example by direct killing of target cells like for an example cancer cells or by cytokine secretion or by changes in expression of activation markers like for an example CD107a, etc. For NK cells, increases in proliferation, cytotoxicity (ability to kill target cells and increases CD107a, granzyme, and perforin expression), cytokine production (e.g. IFNγ and TNF), and cell surface receptor expression (e.g. CD25) would be indicative of immune modulation that would be consistent with enhanced killing of cancer cells.

[0706] In one embodiment, γδ T cell activation is measured for example by cytokine secretion or by proliferation or by changes in expression of activation markers.

[0707] In one embodiment, Th1 cell activation is measured for example by cytokine secretion or by changes in expression of activation markers.

[0708] Appropriate increases in activity or response (or decreases, as appropriate as outlined above), are increases of 10%, 20%, 30%, 40%, 50%, 60%, 70%, 80%, 90%, 95% or 98 to 99% percent over the signal in either a reference sample or in control samples, for example test samples that do not contain an anti-PVRIG antibody of the invention. Similarly, increases of at least one-, two-, three-, four- or five-fold as compared to reference or control samples show efficacy.

### XI. Treatments

[0709] Once made, the compositions of the invention find use in a number of oncology applications, by treating cancer, generally by inhibiting the suppression of T cell activation (e.g. T cells are no longer suppressed) with the binding of the bispecific immunomodulatory antibodies of the invention.

[0710] Accordingly, the heterodimeric compositions of the invention find use in the treatment of these cancers.

### XII. Antibody Compositions for In Vivo Administration

[0711] Formulations of the antibodies used in accordance with the present invention are prepared for storage by mixing an antibody having the desired degree of purity with optional pharmaceutically acceptable carriers, excipients or stabilizers (as generally outlined in Remington's Pharmaceutical Sciences 16th edition, Osol, A. Ed. [1980]), in the form of lyophilized formulations or aqueous solutions. Acceptable carriers, buffers, excipients, or stabilizers are nontoxic to recipients at the dosages and concentrations employed, and include buffers such as phosphate, citrate, and other organic acids; antioxidants including ascorbic acid and methionine; preservatives (such as octadecyldimethylbenzyl ammonium chloride; hexamethonium chloride; benzalkonium chloride, benzethonium chloride; phenol, butyl or benzyl alcohol; alkyl parabens such as methyl or propyl paraben; catechol; resorcinol; cyclohexanol; 3-pentanol; and m-cresol); low molecular weight (less than about 10 residues) polypeptides; proteins, such as serum albumin, gelatin, or immunoglobulins; hydrophilic polymers such as polyvinylpyrrolidone; amino acids such as glycine, glutamine, asparagine, histidine, arginine, or lysine; monosaccharides, disaccharides, and other carbohydrates including glucose, mannose, or dextrins; chelating agents such as EDTA; sugars such as sucrose, mannitol, trehalose or sorbitol; salt-forming counter-ions such as sodium; metal complexes (e.g. Zn-protein complexes); and/or non-ionic surfactants such as TWEEN™, PLURONICS™ or polyethylene glycol (PEG).

### Administrative Modalities

[0712] The antibodies and chemotherapeutic agents of the invention are administered to a subject, in accord with known methods, such as intravenous administration as a bolus or by continuous infusion over a period of time.

### Treatment Modalities

[0713] In the methods of the invention, therapy is used to provide a positive therapeutic response with respect to a disease or condition. By “positive therapeutic response” is intended an improvement in the disease or condition, and/or an improvement in the symptoms associated with the disease or condition. For example, a positive therapeutic response would refer to one or more of the following improvements in the disease: (1) a reduction in the number of neoplastic cells; (2) an increase in neoplastic cell death; (3) inhibition of neoplastic cell survival; (5) inhibition (i.e., slowing to some extent, preferably halting) of tumor growth; (6) an increased patient survival rate; and (7) some relief from one or more symptoms associated with the disease or condition.

[0714] Positive therapeutic responses in any given disease or condition can be determined by standardized response criteria specific to that disease or condition. Tumor response can be assessed for changes in tumor morphology (i.e., overall tumor burden, tumor size, and the like) using screening techniques such as magnetic resonance imaging (MRI) scan, x-radiographic imaging, computed tomographic (CT) scan, bone scan imaging, endoscopy, and tumor biopsy sampling including bone marrow aspiration (BMA) and counting of tumor cells in the circulation.

[0715] In addition to these positive therapeutic responses, the subject undergoing therapy may experience the beneficial effect of an improvement in the symptoms associated with the disease.

[0716] Treatment according to the present invention includes a “therapeutically effective amount” of the medicaments used. A “therapeutically effective amount” refers to an amount effective, at dosages and for periods of time necessary, to achieve a desired therapeutic result.

[0717] A therapeutically effective amount may vary according to factors such as the disease state, age, sex, and weight of the individual, and the ability of the medicaments to elicit a desired response in the individual. A therapeutically effective amount is also one in which any toxic or detrimental effects of the antibody or antibody portion are outweighed by the therapeutically beneficial effects.

[0718] A “therapeutically effective amount” for tumor therapy may also be measured by its ability to stabilize the progression of disease. The ability of a compound to inhibit cancer may be evaluated in an animal model system predictive of efficacy in human tumors.

[0719] Alternatively, this property of a composition may be evaluated by examining the ability of the compound to inhibit cell growth or to induce apoptosis by in vitro assays known to the skilled practitioner. A therapeutically effective amount of a therapeutic compound may decrease tumor size, or otherwise ameliorate symptoms in a subject. One of ordinary skill in the art would be able to determine such amounts based on such factors as the subject's size, the severity of the subject's symptoms, and the particular composition or route of administration selected.

[0720] Dosage regimens are adjusted to provide the optimum desired response (e.g., a therapeutic response). For example, a single bolus may be administered, several divided doses may be administered over time or the dose may be proportionally reduced or increased as indicated by the exigencies of the therapeutic situation. Parenteral compositions may be formulated in dosage unit form for ease of administration and uniformity of dosage. Dosage unit form as used herein refers to physically discrete units suited as unitary dosages for the subjects to be treated; each unit contains a predetermined quantity of active compound calculated to produce the desired therapeutic effect in association with the required pharmaceutical carrier.

[0721] The specification for the dosage unit forms of the present invention are dictated by and directly dependent on (a) the unique characteristics of the active compound and the particular therapeutic effect to be achieved, and (b) the limitations inherent in the art of compounding such an active compound for the treatment of sensitivity in individuals.

[0722] The efficient dosages and the dosage regimens for the bispecific antibodies used in the present invention depend on the disease or condition to be treated and may be determined by the persons skilled in the art.

[0723] An exemplary, non-limiting range for a therapeutically effective amount of an bispecific antibody used in the present invention is about 0.1-100 mg/kg.

[0724] All cited references are herein expressly incorporated by reference in their entirety.

[0725] Whereas particular embodiments of the invention have been described above for purposes of illustration, it will be appreciated by those skilled in the art that numerous variations of the details may be made without departing from the invention as described in the appended claims.

### XIII. Examples

[0726] Examples are provided below to illustrate the present invention. These examples are not meant to constrain the present invention to any particular application or theory of operation. For all constant region positions discussed in the present invention, numbering is according to the EU index as in Kabat (Kabat et al., 1991, Sequences of Proteins of Immunological Interest, 5th Ed., United States Public Health Service, National Institutes of Health, Bethesda, entirely incorporated by reference). Those skilled in the art of antibodies will appreciate that this convention consists of nonsequential numbering in specific regions of an immunoglobulin sequence, enabling a normalized reference to conserved positions in immunoglobulin families. Accordingly, the positions of any given immunoglobulin as defined by the EU index will not necessarily correspond to its sequential sequence.

[0727] General and specific scientific techniques are outlined in US Publications 2015/0307629, 2014/0288275 and WO2014/145806, all of which are expressly incorporated by reference in their entirety and particularly for the techniques outlined therein.

### A. Example 1: TILs from Multiple Cancer Types Co-Express PD-1 and T Cell Costimulatory Receptors

[0728] To investigate potential associations between PD-1 and various T cell costimulatory receptors, RNA sequencing data from The Cancer Genome Atlas project (TCGA) were used for analysis. V2 RSEM data were downloaded from FireBrowse (http://firebrowse.org/). Analysis was performed using R with custom routines. The correlation between the expression of PD-1 and eight costimulatory receptors is depicted in FIG. 1, along with calculated R2 values (square of the Pearson correlation coefficient). The data show that PD-1 and several costimulatory receptors were co-expressed in cancers including bladder, breast, colon, head & neck, kidney, lung-adeno, lung squamous, ovarian, pancreatic, prostate, and melanoma cancer. Notably, expression of ICOS on TILs correlates better with that of PD-1 than several other costims.

### B. Example 2: Immune Checkpoint Antigen Binding Domains

[0729] 1. 2A: Anti-PD-1 ABDs

[0730] Examples of antibodies which bind PD-1 were generated in bivalent IgG1 format with E233P/L234V/L235A/G236del/S267K substitutions, illustrative sequences for which are depicted in FIG. 10. DNA encoding the variable regions was generated by gene synthesis and was inserted into the mammalian expression vector pTT5 by the Gibson Assembly method. Heavy chain VH genes were inserted via Gibson Assembly into pTT5 encoding the human IgG1 constant region with the substitutions mentioned above. Light chains VL genes were inserted into pTT5 encoding the human C? constant region. DNA was transfected into HEK293E cells for expression. Additional PD-1 ABDs (including those derived from the above antibodies) were formatted as Fabs and scFvs for use in costim/checkpoint bispecific antibodies, illustrative sequences for which are depicted respectively in FIG. 11 and in the sequence listing.

[0731] 2. 2B: Anti-CTLA-4 ABDs

[0732] Antibodies which bind CTLA-4 were generated in bivalent IgG1 format with E233P/L234V/L235A/G236del/S267K substitutions. DNA encoding the variable regions was generated by gene synthesis and was inserted into the mammalian expression vector pTT5 by the Gibson Assembly method. Heavy chain VH genes were inserted via Gibson Assembly into pTT5 encoding the human IgG1 constant region with the substitutions mentioned above. Light chains VL genes were inserted into pTT5 encoding the human C? constant region. DNA was transfected into HEK293E cells for expression. Additional CTLA-4 ABDs (including those derived from the above antibodies) were formatted as scFvs for use in costim/checkpoint bispecific antibodies, illustrative sequences for which are depicted in FIG. 12 and in the sequence listing.

[0733] 3. 2C: Anti-LAG-3 ABDs

[0734] Examples of antibodies which bind LAG-3 were generated in bivalent IgG1 format with E233P/L234V/L235A/G236del/S267K substitutions. DNA encoding the variable regions was generated by gene synthesis and was inserted into the mammalian expression vector pTT5 by the Gibson Assembly method. Heavy chain VH genes were inserted via Gibson Assembly into pTT5 encoding the human IgG1 constant region with the substitutions mentioned above. Light chains VL genes were inserted into pTT5 encoding the human C? constant region. DNA was transfected into HEK293E cells for expression. Additional LAG-3 ABDs (including those derived from the above antibodies) were formatted as Fabs for use in costim/checkpoint bispecific antibodies, illustrative sequences for which are depicted in FIG. 13 and in the sequence listing.

[0735] 4. 2D: Anti-TIM-3 ABDs

[0736] Examples of antibodies which bind TIM-3 were generated in bivalent IgG1 format with E233P/L234V/L235A/G236del/S267K substitutions, exemplary sequences for which are depicted in FIG. 14. DNA encoding the variable regions was generated by gene synthesis and was inserted into the mammalian expression vector pTT5 by the Gibson Assembly method. Heavy chain VH genes were inserted via Gibson Assembly into pTT5 encoding the human IgG1 constant region with the substitutions mentioned above. Light chains VL genes were inserted into pTT5 encoding the human C? constant region. DNA was transfected into HEK293E cells for expression. The above antibodies were formatted as Fabs for use in costim/checkpoint bispecific antibodies.

[0737] 5. 2E: Anti-PD-L1 ABDs

[0738] Prototype antibodies which bind PD-L1 were generated in bivalent IgG1 format with E233P/L234V/L235A/G236del/S267K substitutions, exemplary sequences for which are depicted in FIG. 15A-15C. DNA encoding the variable regions was generated by gene synthesis and was inserted into the mammalian expression vector pTT5 by the Gibson Assembly method. Heavy chain VH genes were inserted via Gibson Assembly into pTT5 encoding the human IgG1 constant region with the substitutions mentioned above. Light chains VL genes were inserted into pTT5 encoding the human C? constant region. DNA was transfected into HEK293E cells for expression. The above antibodies were formatted as Fabs and scFvs for use in costim/checkpoint bispecific antibodies.

### C. Example 3: Costimulatory Receptor Antigen Binding Domains

[0739] Prototype costimulatory receptor antibodies which bind ICOS, GITR, OX40, and 4-1BB were generated in bivalent IgG1 format with E233P/L234V/L235A/G236del/S267K substitutions, sequences for which are depicted in FIGS. 16-19. DNA encoding the variable regions was generated by gene synthesis and was inserted into the mammalian expression vector pTT5 by the Gibson Assembly method. Heavy chain VH genes were inserted via Gibson Assembly into pTT5 encoding the human IgG1 constant region with the substitutions mentioned above. Light chains VL genes were inserted into pTT5 encoding the human C? constant region. DNA was transfected into HEK293E cells for expression. The above antibodies were formatted as Fabs or scFvs for use in costim/checkpoint bispecific antibodies.

### D. Example 4: Engineering Anti-ICOS ABD for Stability and Affinity

[0740] The parental variable region of an anti-ICOS antibody (XENP16435; depicted in FIG. 19) was engineered for use as a component in an ICOS x checkpoint bispecific antibody. A library of Fv variants engineered to have optimal affinity and stability was constructed by site-directed mutagenesis (QuikChange, Stratagene, Cedar Creek, Tx.) or additional gene synthesis and subcloning in Fab-His and scFv-His formats and produced as described below.

[0741] 1. 4A: Anti-ICOS Fabs

[0742] Amino acid sequences for variant anti-ICOS Fabs are listed in FIG. 20A-20G (the polyhistidine (His6) tags have been removed from the C-terminal of the Fab heavy chains). DNA encoding the two chains needed for Fab expression were generated by gene synthesis and were subcloned using standard molecular biology techniques into the expression vector pTT5. The Fab heavy chain included a C-terminal polyhistidine tag. DNA was transfected into HEK293E cells for expression and resulting proteins were purified from the supernatant using Ni-NTA chromatography. The resultant anti-ICOS Fabs were characterized for stability and affinity.

[0743] Differential Scanning Fluorimetry (DSF) experiments were performed using a Bio-Rad CFX Connect Real-Time PCR Detection System. Proteins were mixed with SYPRO Orange fluorescent dye and diluted to 0.2 mg/mL in PBS. The final concentration of SYPRO Orange was 10×. After an initial 10 minute incubation period at 25° C., proteins were heated from 25 to 95° C. using a heating rate of 1° C./min. A fluorescence measurement was taken every 30 seconds. Melting temperatures (Tm) were calculated using the instrument software. The results are shown in FIG. 21.

[0744] A series of affinity screens of the anti-ICOS Fabs to human ICOS were performed using Octet, a BioLayer Interferometry (BLI)-based method. Experimental steps for Octet generally included the following: Immobilization (capture of ligand or test article onto a biosensor); Association (dipping of ligand- or test article-coated biosensors into wells containing serial dilutions of the corresponding test article or ligand); and Dissociation (returning of biosensors to well containing buffer) in order to determine the monovalent affinity of the test articles. Specifically, anti-mouse Fc (AMC) biosensors were used to capture mouse IgG2a Fc fusion of ICOS and dipped into multiple concentrations of the test articles. The resulting equilibrium dissociation constants (KD), association rates (ka), and dissociation rates (kd) are presented in FIGS. 22-23. Binding affinities and kinetic rate constants were obtained by analyzing the processed data using a 1:1 binding model using ForteBio Octet Data Analysis software (ForteBio). The data from a two separate experiments are depicted in FIG. 22A-22C. In a further experiment, streptavidin (SA) biosensors were used to capture ICOS-TEV-Fc-Avi and dipped into the test articles. The data are depicted in FIG. 23. A number of variant anti-ICOS Fabs including XENP22780, XENP22782, XENP22783, and XENP22784 had improved stability while maintaining affinity characteristics similar to a Fab comprising the parental variable regions (XENP22050).

[0745] 2. 4B: Anti-ICOS scFvs

[0746] Amino acid sequences for anti-ICOS scFvs are listed in FIG. 24 (the polyhistidine (His6) tags have been removed from the C-terminal of the scFvs). DNA encoding the scFv was generated by gene synthesis and were subcloned using standard molecular biology techniques into the expression vector pTT5. The scFv included a C-terminal polyhistidine tag. DNA was transfected into HEK293E cells for expression and resulting proteins were purified from the supernatant using Ni-NTA chromatography. The resultant anti-ICOS scFvs were characterized for stability in DSF experiments as described above. The data is depicted in FIG. 25.

### E. Example 5: Anti-ICOS×Anti-PD-1 Bispecific Antibodies

[0747] 1. 5A: Prototype Costim/Checkpoint Bottle-Openers

[0748] Schematics for costim/checkpoint bispecific antibody in the bottle-opener format are depicted as FIG. 2A. Prototype bottle-openers with costimulatory receptor binding Fab arms based on prototype anti-GITR mAb (XENP16438), anti-OX40 mAb (XENP16437), anti-4-1BB mAb (XENP14410) and anti-ICOS mAb (XENP16435) and exemplary anti-PD-1 scFv (XENP19692) arm were produced to investigate their effect on cytokine secretion in an SEB-stimulated PBMC assay. Sequences are depicted in FIG. 26A-26D. DNA encoding the three chains needed for bottle-opener expression were generated by gene synthesis and were subcloned using standard molecular biology techniques into the expression vector pTT5. DNA transfected into HEK293E cells for expression and resulting proteins were purified using standard techniques.

[0749] a. 5A(a): Prototype Anti-ICOS×Anti-PD-1 Bottle-Opener Enhances Cytokine Secretion

[0750] Staphylococcal Enterotoxin B (SEB) is a superantigen that causes T cell activation and proliferation in a manner similar to that achieved by activation via the T cell receptor (TCR). Stimulating human PBMC with SEB is a common method for assaying T cell activation and proliferation. PBMCs were simulated with 100 ng/mL SEB for 2 days. Cells were washed twice and restimulated with 100 ng/mL SEB in combination with 20 μg/mL of the indicated test articles. A first bivalent anti-PD-1 antibody based on nivolumab (XENP16432), a second bivalent anti-PD-1 mAb (XENP19686), and a bivalent anti-RSV mAb (XENP15074) were used as controls. 24 hours after treatment, supernatants were assayed for IL-2. The data depicted in FIG. 27 show that each of the costim/checkpoint bottle-openers enhanced cytokine secretion in comparison to the bivalent anti-RSV antibody. Surprisingly, induction of cytokine secretion by XENP22730 is vastly superior to cytokine secretion by bivalent anti-PD-1 antibody alone as well as the other prototype costim/checkpoint bottle-openers, indicating that addition of ICOS binding enhances cytokine production and that ICOS is a better PD-1 partner than other costimulatory receptors for a bispecific antibody.

[0751] In another experiment, PBMCs were stimulated with 0.01 μg/mL SEB for 3 days with 20 μg/mL of indicated test articles. As control, test articles were also incubated with naive (non-SEB stimulated) PBMCs. 3 days after treatment, supernatant was assessed for IL-2 secretion as an indicator of T cell activation (depicted in FIG. 28). The data show that neither the anti-PD-1 bivalent antibody nor the anti-ICOS×anti-PD-1 bottle-opener stimulate IL-2 secretion in naive cells. Further, the data show again that XENP20896 enhances IL-2 secretion more than the bivalent anti-PD-1 antibody alone does and that XENP20896 enhances IL-2 secretion more than combination of bivalents (XENP16432 and XENP16435) as well as combination of one-arms (XENP20111 and XENP20266) do.

[0752] Costimulatory receptors such as ICOS have previously been found to induce cytokine production only following crosslinking by bivalent antibodies or multimerized ligands (Viera et al. 2004; Sanmamed et al. 2015). In view of the crosslinking mechanisms, it is surprising that monovalent ICOS binding by a single arm in a costim x checkpoint blockade bispecific antibody was able to enhance cytokine production. Further, it is notable that the bispecific antibody was able to enhance cytokine secretion more than bivalent anti-PD-1 mAb in combination with bivalent anti-ICOS mAb (XENP16432+XENP16435).

[0753] b. 5A(b): PD-1 and ICOS Double-Positive Cells are Selectively Occupied by Prototype Anti-ICOS×Anti-PD-1 Bottle-Opener

[0754] Selective targeting of tumor-reactive TILs co-expressing immune checkpoint receptors (e.g. PD-1) and costimulatory receptors as shown in Example 1 over non-tumor reactive T cells expressing immune checkpoint receptors or costimulatory receptors alone could enhance anti-tumor activity while avoiding peripheral toxicity (as depicted in FIG. 29).

[0755] An SEB-stimulated PBMC assay was used to investigate binding of anti-ICOS x anti-PD-1 bottle-opener to T cells. PBMCs were stimulated with 100 ng/mL SEB (staphylococcal enterotoxin B) for 3 days, after which the PBMCs were treated with the indicated test articles for 30 minutes at 4° C. PBMCs were then incubated with APC-labeled one-arm anti-ICOS antibody and FITC-labeled one-arm anti-PD-1 antibody for 30 minutes at 4° C. FIGS. 30 and 31 shows receptor occupancy of a prototype anti-ICOS×anti-PD-1 bottle-opener (XENP20896), one-arm anti-ICOS antibody (XENP20266) and one-arm anti-PD-1 antibody (XENP20111).

[0756] The data show that double-positive cells (expressing both PD-1 and ICOS) are selectively occupied by the anti-ICOS×anti-PD-1 bottle-opener (XENP20896) as depicted in FIG. 30, indicating that monovalent ICOS and PD-1 binding is useful for selective targeting. Further, anti-ICOS×anti-PD-1 bottle-opener (e.g. XENP20896) binds more potently to double-positive cells than monovalent, monospecific one-arm anti-PD-1 and anti-ICOS as shown in FIG. 31A.

[0757] c. 5A(c): Prototype Anti-ICOS×Anti-PD-1 Bottle-Opener Enhance Engraftment in a GVHD Mouse Study

[0758] The prototype anti-ICOS×anti-PD-1 bottle-opener was evaluated in a Graft-versus-Host Disease (GVHD) model conducted in NSG (NOD-SCID-gamma) immunodeficient mice. The mice were engrafted with human PBMCs. When NSG mice are injected with human PBMCs, they develop an autoimmune response against the human PBMCs. Treatment of NSG mice injected with human PBMCs with immune checkpoint antibodies (e.g. anti-PD-1) enhance engraftment. Thus, increased engraftment shows efficacy of the antibodies.

[0759] 10 million human PBMCs were engrafted into NSG mice via IV-OSP on Day 0 followed by dosing with the indicated test articles on Day 1, 8, 15, and 22. Human CD45+ cell counts were measured on Day 14 as an indicator of disease.

[0760] The data depicted in Figure A show that the anti-ICOS×anti-PD-1 bottle-opener enhance proliferation of CD45+ cells in human PBMC-engrafted NSG mice as compared to controls (PBS and PBS+PBMC). Further, enhancement is greater using antibodies of the invention than that seen with bivalent anti-PD-1 antibody.

[0761] 2. 5B: Production of Variant Anti-ICOS×Anti-PD-1 Bottle-Openers with Optimized Anti-ICOS Fab Arms

[0762] Variant anti-ICOS×anti-PD-1 bottle-openers comprising anti-ICOS Fabs engineered as described in Example 4A were produced as generally described above. Amino acid sequences for variant anti-ICOS×anti-PD-1 bottle-openers are listed in FIG. 32. Amino acid sequences for variant anti-ICOS×anti-PD-1 with FcRn pH 6.0 affinity enhancing substitutions are listed in FIG. 33.

[0763] The resultant anti-ICOS×anti-PD-1 bispecific antibodies were characterized for affinity to human and cynomolgus ICOS using Octet as generally described above. In a first set of experiments, AMC biosensors were used to capture mouse IgG2a Fc fusion of ICOS and dipped into multiple concentrations of the test articles (data depicted in FIG. 34A-3). In further experiments, streptavidin (SA or SAX) biosensors were used to capture biotinylated human and cynomolgus IgG1 Fc fusions of human and cynomolgus ICOS and dipped into multiple concentrations of the test articles (data depicted in FIG. 35).

[0764] 3. 5C: T Cell Surface Binding of Variant Anti-ICOS×Anti-PD-1 Bottle-Openers

[0765] Binding of anti-ICOS×anti-PD-1 bispecifics to T cells was measured in an SEB-stimulated PBMC assay. Human PBMCs were stimulated with 100 ng/mL SEB for 3 days. PBMCs were then treated with the indicated test articles and incubated at 4° C. for 30 minutes. After treatment, cells were incubated with FITC-labeled anti-CD3 antibody and APC-labeled anti-human IgG Fc secondary antibody. MFI on CD3+ cells are depicted in FIG. 36A-36B.

[0766] 4. 5D: Receptor Occupancy of Variant Anti-ICOS×Anti-PD-1 Bottle-Openers on T Cells

[0767] Receptor occupancy of variant anti-ICOS×anti-PD-1 bottle-openers on T cells was measured in an SEB-stimulated PBMC assay. PBMCs were stimulated with 100 ng/mL SEB (staphylococcal enterotoxin B) for 3 days, after which the PBMCs were treated with the indicated test articles for 30 minutes at 4° C. PBMCs were then incubated with APC-labeled one-arm anti-ICOS antibody and FITC-labeled one-arm anti-PD-1 antibody for 30 minutes at 4° C. FIG. 37 depicts the receptor occupancy of variant anti-ICOS×anti-PD-1 bispecific antibodies, corresponding one-arm anti-ICOS antibodies and one-arm anti-PD-1 antibody (XENP20111) on PD-1 and ICOS double-positive T cells. Consistent with the prototype antibodies investigated in Example 1A, each of the bottle-openers binds more potently to double-positive cells than monovalent, monospecific one-arm anti-PD-1 and one-arm anti-ICOS antibodies.

[0768] 5. 5E: In Vitro Activity of Variant Anti-ICOS×Anti-PD-1 Bottle-Openers in a Cytokine Release Assay

[0769] Human PBMCs were stimulated with 100 ng/mL SEB for 2 days. Cells were washed and stimulated again with 100 ng/mL SEB in combination with 20 μg/mL of indicated test articles. 24 hours after treatment, cells were assayed for IL-2 (FIG. 38A) and IFN? (FIG. 38B). The data show that anti-ICOS×anti-PD-1 bottle-openers stimulated significantly more cytokine release than bivalent anti-PD-1 antibody (XENP16432) alone, bivalent anti-ICOS antibody (XENP16435) alone, or bivalent anti-PD-1 antibody plus bivalent anti-ICOS antibody in combination.

[0770] In a further experiment, human PBMCs were stimulated with 100 ng/mL SEB for 2 days. Cells were washed and stimulated again with 100 ng/mL SEB in combination with 20 μg/mL of indicated test articles. 24 hours after treatment, cells were assayed for IL-2 (FIG. 39A) and IFN? (FIG. 39B).

[0771] 6. 5F: In Vivo Activity of Variant Anti-ICOS×Anti-PD-1 Bottle Openers in a GVHD Mouse Study

[0772] In a first study, 10 million human PBMCs were engrafted into NSG mice via IV-OSP on Day 0 followed by dosing with the indicated test articles on Day 1. IFN? levels and human CD45+, CD8+ T cell and CD4+ T cell counts were measured on Day 7, 11 and 14. FIGS. 40A-B respectively depicts IFN? levels on Day 7 and 11. FIGS. 41A-B respectively depict CD45+ cell counts on Day 11 and 14. FIGS. 42A-B respectively depict CD8+ T cell and CD4+ T cell counts on Day 14. FIG. 43 depicts the change in body weight in the mice by Day 14 resulting from exacerbation of GVHD due to T cell expansion and IFN? production.

[0773] In a further study with additional variant anti-ICOS×anti-PD-1 bottle-openers, 10 million human PBMCs were engrafted into NSG mice via IV-OSP on Day 0 followed by dosing with the indicated test articles at indicated concentrations on Day 1. IFNγ levels and human CD45+, CD8+ T cell and CD4+ T cell counts were measured on Day 7 and 14. FIG. 44A-44B respectively depicts IFN? levels on Day 7 and 14. FIG. 45 depicts CD45+ cell count on Day 14. FIG. 46A-C respectively depict CD8+ T cell count, CD4+ T cell counts and CD8+/CD4+ ratio on Day 14. Body weight of mice were also measured on Day 12 and 15 and depicted respectively in FIG. 47A-B as percentage of initial body weight.

[0774] The Figures show that the anti-ICOS×anti-PD-1 bottle-openers enhance engraftment (as indicated by the proliferation of CD45+ cells, CD8+ T cells and CD4+T cells and decrease in body weight of mice). The observed activity is correlated to the in vitro potency of each variant. Further, a number of the bottle-openers including XENP20896, XENP22744, XENP23092, XENP22730, XENP23104, XENP22974, and XENP23411 enhance engraftment much more than the control bivalent anti-PD-1 antibody (XENP16432) does.

[0775] 7. 5G: Additional Anti-ICOS ABDs Work in Anti-ICOS×Anti-PD-1 Bottle Opener

[0776] Additional anti-ICOS×anti-PD-1 bottle-openers were produced comprising anti-ICOS Fabs based on other anti-ICOS ABDs described in Example 3 as generally described above. Sequences for the additional bottle-openers are depicted in FIG. 48A-48D.

[0777] In a first experiment, PBMCs were stimulated with 100 ng/mL SEB for 2 days. Cells were washed twice and restimulated with 100 ng/mL SEB in combination with 20 μg/mL of indicated test articles (PBS as control). 24 hours after treatment, supernatants were assayed for IL-2 concentration as depicted in FIG. 49. In a second experiment, PBMCs were stimulated with 10 ng/mL SEB and treated with 20 μg/mL of indicated test articles for 3 days (bivalent anti-PD-1 XENP16432 as control). Supernatants were collected and assays for IL-2. FIG. 50 depicts the fold induction in IL-2 over bivalent anti-RSV mAb.

[0778] Consistent with the data in Example 5A(a), XENP20896 stimulated secretion of IL-2. Notably, the additional bottle-openers comprising alternative anti-ICOS ABDs were also able to stimulate secretion of IL-2 demonstrating that the enhancement of cytokine secretion by an anti-ICOS×anti-PD-1 bottle-opener is not unique to ABDs derived from the parental anti-ICOS ABD described in Example 4.

[0779] 8. 5H: Clear ICOS Signature is Exhibited by Anti-ICOS×Anti-PD-1 Bottle-Openers

[0780] a. 5H(a): Anti-ICOS×Anti-PD-1 Bispecific Antibodies Induce AKT Phosphorylation

[0781] ICOS ligation induces AKT phosphorylation in activated T cells (Fos, C et al. 2008), and as such, AKT phosphorylation would be an indicator of ICOS agonism by anti-ICOS x anti-PD-1 bispecific antibodies of the invention.

[0782] Human PBMCs were stimulated with 100 ng/mL SEB for 2 days. Following stimulation, CD3+ cells were isolated by negative selection using EasySep™ Human T Cell Enrichment Kit (STEMCELL Technologies, Vancouver, Canada) and then treated with indicated test articles in combination with plate bound anti-CD3 antibody (OKT3; 500 ng/mL). Cells were lysed 30 minutes after treatment and assayed for total AKT and phosphorylated AKT (Ser473) by a multiplexed phosphoprotein assay on MULTI-SPOT 384-Well Spot plates (Meso Scale Discovery, Rockville, Md.). The data are depicted in FIG. 51 as percentage of AKT phosphorylated following treatment.

[0783] The data shows no increase in AKT phosphorylation following treatment with negative control bivalent anti-PD-1 mAb (XENP16432). Both bivalent anti-ICOS mAb alone (XENP16435) and XENP16435 in combination with XENP16432 increase AKT phosphorylation demonstrating ICOS ligation and agonism by XENP16435. Surprisingly, despite only monovalent engagement of ICOS, treatment with the anti-ICOS×anti-PD-1 bispecific antibodies induces more AKT phosphorylation than treatment with XENP16435 alone and XENP16435 in combination with XENP16432. The positive AKT phosphorylation data demonstrate a clear signature of ICOS activity with the bispecific antibodies despite monovalent engagement of ICOS.

[0784] b. 5H(b): Activated T Helper Cell-Associated Genes Upregulated by Anti-ICOS×Anti-PD-1 Bottle-Openers

[0785] Guedan et al. (2014) describes gene expression profiles for activated T helper cells (i.e. Th1, Th2, and Th17) and regulatory T cells (Tregs) following activation of ICOS signaling domain-based CAR-Ts. They found that genes related to activated T helper cells such as IL-17A, IL22, IFN?, TNF, and IL-13 were upregulated, while Treg-related genes such as TGFβ1, SMAD3 and FOXP3 were either unchanged or downregulated.

[0786] To investigate if engagement of T cells with anti-ICOS×anti-PD-1 bispecific antibodies of the invention led to a similar signature, we used Nanostring technology. PBMCs were stimulated with 100 ng/mL SEB for 2 days. Cells were washed 2 times and restimulated with 100 ng/mL SEB and treated with indicated test articles for 24 hours. RNA was extracted from cells and assayed by nCounter® PanCancer Immune Profiling Panel (NanoString Technologies, Seattle, Wash.) which assays 770 target genes covering immune response. FIG. 52 depicts mean fold induction in expression of a number of Th-related and Treg-related genes over bivalent anti-RSV antibody. FIGS. 53A-53F respectively depict fold induction of IL-17A, IL-17F, IL-22, IL-10, IL-9 and IFN? gene expression by the indicated test articles over induction by bivalent anti-RSV mAb.

[0787] As depicted in FIGS. 52-53 and consistent with the observation by Gueden et al., Th-related genes associated with ICOS signaling such as IL-17A, IL-17F, IL-22, IL-9, and IFN? are upregulated following treatment with bivalent anti-ICOS mAb and combination of anti-ICOS and anti-PD-1 mAbs. Notably, expression of Th-related genes associated with ICOS signaling are further upregulated following treatment with an anti-ICOS×anti-PD-1 antibody, again indicating a clear ICOS costimulatory signature and dramatic synergy of anti-ICOS and anti-PD-1 engagement by a bispecific antibody.

[0788] 9. 5I: Alternative Format Anti-ICOS×Anti-PD-1 Bispecific Antibodies

[0789] Alternative format costim/checkpoint bispecific antibodies were produced to investigate whether the effect of anti-ICOS×anti-PD-1 bottle-openers was unique to the bottle-opener format or broadly applicable to anti-ICOS×anti-PD-1 bispecific antibodies.

[0790] a. 5I(a): Anti-PD-1×Anti-ICOS Bottle-Opener

[0791] Anti-PD-1×anti-ICOS bottle-openers with an anti-PD-1 Fab generated using DNA encoding anti-PD-1 mAbs (e.g. XENP16432 and XENP29120) as described in Example 2A and anti-ICOS scFvs as described in Example 4B. Bottle-openers were produced as generally described in Example 5A. Sequences for exemplary anti-PD-1×anti-ICOS bottle-openers are depicted in FIG. 56.

[0792] b. 5I(b): Central-scFv

[0793] Schematics for the central-scFv format are depicted as FIG. 55A-B. DNA encoding anti-ICOS Fab-Fc heavy chains was generated using DNA encoding anti-ICOS Fabs described in Example 4A by standard subcloning into the expression vector pTT5. DNA encoding anti-ICOS-anti-PD-1 Fab-scFv-Fc heavy chains was generated using DNA encoding anti-ICOS Fabs described in Example 4A and anti-PD-1 scFv described in Example 2A by a combination of gene synthesis and standard subcloning into the expression vector pTT5. DNA was transfected into HEK293E cells for expression. Sequences for exemplary anti-ICOS×anti-PD-1 central-scFv antibodies are depicted in FIG. 57A-57C.

[0794] c. 5I(c): Central-scFv2

[0795] A schematic for the central-scFv2 format is depicted as FIG. 55C. DNA encoding anti-ICOS-anti-PD-1 Fab-scFv-Fc heavy chains was generated using DNA encoding anti-ICOS Fabs described in Example 4A and anti-PD-1 scFv described in Example 2A by a combination of gene synthesis and standard subcloning into the expression vector pTT5. DNA was transfected into HEK293E cells for expression. Sequences for exemplary anti-ICOS×anti-PD-1 central-scFv2 antibodies are depicted in FIG. 58.

[0796] d. 5I(d): Bispecific mAb

[0797] A schematic for the bispecific mAb format is depicted as FIG. 2K. DNA encoding the anti-ICOS heavy and light chains were generated based on the DNA encoding the anti-ICOS Fabs described in Example, and DNA encoding anti-PD-1 heavy and light chains were generated based on the DNA encoding the anti-PD-1 mAbs described in Example 2A. Heavy chain VH genes were inserted via Gibson assembly into pTT5 encoding the human IgG1 constant region with E233P/L234V/L235A/G236del/S267K substitutions. Light chain VL genes were inserted into pTT5 encoding the human C? constant region.

[0798] DNA was transfected into HEK293E cells for expression as 2 separate antibodies which are separately expressed and purified by Protein A affinity (GE Healthcare). These antibodies contain heterodimerization-skewing substitutions in the CH3:CH3 interface. 2-Mercaptoethylamine-HCl (2-MEA) was used to induce controlled reduction of interchain disulfide bonds in the two parental IgGs. 2-MEA was then removed allowing the reoxidation of interchain disulfide bonds to occur enabling recombination of the HC-LC pairs (driven by the heterodimerization mutations). Finally, the trispecific antibodies were purified by cation exchange chromatography. Such methods are common in the art (see, for instance, Labrijn (2013) PNAS 110(13):5145-50 or Strop et al. (2012) J Mol Biol 420(3):204-19). Other methods of design and purification known in the art may be used facilitate bispecific mAb production, for instance, common light chain antibodies (Merchant (1998) Nat Biotechnol 16(7):677-81) or heterodimeric Fab domains (Lewis et al. (2014) Nat Biotechnol 32(2):191-8). Sequence for an exemplary anti-PD-1×anti-ICOS bispecific mAb is depicted in FIG. 59.

[0799] e. 5I(e): DVD-IgG

[0800] A schematic for the DVD-IgG format is depicted as FIG. 55E. DNA encoding anti-PD-1-anti-ICOS VH-VH-CH1-Fc heavy chains and VL-VL-C? light chains was generated using DNA encoding anti-ICOS Fabs described in Example 4A and anti-PD-1 scFv described in Example 2A by a combination of gene synthesis and standard subcloning into the expression vector pTT5. DNA was transfected into HEK293E cells for expression. Sequences for exemplary anti-ICOS×anti-PD-1 DVD-IgGs are depicted in FIG. 60.

[0801] f. 5I(f): Trident

[0802] A schematic for the Trident format is depicted as FIG. 55F. DNA encoding anti-PD-1 VL-VH-Fc heavy chains and VL-VH light chains was generated using DNA encoding anti-ICOS Fabs described in Example 4A and anti-PD-1 scFv described in Example 2A by a combination of gene synthesis and standard subcloning into the expression vector pTT5. DNA was transfected into HEK293E cells for expression. Sequences for exemplary anti-ICOS×anti-PD-1 Tridents are depicted in FIG. 61A-61B.

[0803] g. 5I(g): Alternative Format Anti-ICOS×Anti-PD-1 Bispecific Antibodies Enhance Cytokine Secretion

[0804] Human PBMCs were stimulated with 200 ng/mL SEB for 2 days. Cells were washed twice then re-stimulated with 100 ng/mL SEB and treated with the indicated concentrations of the indicated test articles. 24 hours after treatment, supernatants were assayed for IL-2. The data are depicted in FIG. 62 and show that each of the alternative format bispecific antibodies enhances IL-2 secretion in comparison to bivalent anti-RSV (XENP15074) control. Notably, the majority of these alternative format antibodies enhance IL-2 secretion in comparison to a bivalent anti-PD-1 antibody.

### F. Example 6: Costim/Checkpoint Bispecific Antibodies Targeting Different Immune Checkpoint Antigens

[0805] 1. 6A: Anti-CTLA-4×Anti-ICOS

[0806] Anti-CTLA-4×anti-ICOS bottle-openers were generated with an anti-ICOS Fab derived from XENP16435 and anti-CTLA-4 scFvs derived from ABDs described in Example 2B. Sequence for an exemplary anti-ICOS×anti-CTLA-4 bottle-opener is depicted in FIG. 63. Bispecific mAbs were produced as generally described in Example 5I(c).

[0807] 2. 6B: Anti-LAG-3×Anti-ICOS

[0808] Anti-LAG-3×anti-ICOS bispecific antibodies were generated with anti-LAG-3 Fabs derived from ABDs described in Example 2C and an anti-ICOS Fab derived from XENP16435. Sequences for exemplary anti-LAG-3×anti-ICOS bispecific antibodies are depicted in FIG. 64A-64B. Bispecific mAbs were produced as generally described in Example 5I(c).

[0809] 3. 6C: Anti-TIM-3×Anti-ICOS

[0810] Anti-TIM-3×anti-ICOS bispecific antibodies were generated with anti-TIM-3 Fabs derived from ABDs described in Example 2D and an anti-ICOS Fab derived from XENP16435. Sequence for an exemplary anti-TIM-3×anti-ICOS bispecific antibody is depicted in FIG. 65. Bispecific mAbs were produced as generally described in Example 5I(c).

[0811] 4. 6D: Anti-PD-L1×Anti-ICOS

[0812] Anti-PD-L1×anti-ICOS bottle-openers were generated with anti-PD-L1 Fabs derived from ABDs described in Example 2E and anti-ICOS scFvs as described in Example 4B. Sequences for exemplary anti-PD-L1×anti-ICOS bispecific antibodies are depicted in FIG. 66A-66C. The bottle-openers were produced as generally described in Example 5A.

[0813] 5. 6E: Additional Costim x Checkpoint Blockade Bispecific Antibodies Function to Enhance Cytokine Secretion

[0814] Human PBMCs were stimulated with 200 ng/mL SEB for 2 days. Cells were washed twice then restimulated with 100 ng/mL SEB and treated with the indicated concentrations of the indicated test articles (as described above). 24 hours after treatment, supernatants were assayed for IL-2. The data are depicted in FIG. 67 and show that each of the additional costim x checkpoint blockade bispecific antibodies enhance IL-2 secretion in comparison to bivalent anti-RSV (XENP15074) control. Notably, the majority of these alternative checkpoint blockade antibodies (but not all, e.g. TIM-3 blockade) enhance IL-2 secretion in comparison to a bivalent anti-PD-1 antibody (XENP16432).

### G. Example 7: Monovalent Ligation of ICOS is Superior to Bivalent Crosslinking

[0815] In Example 5A(a), it was surprisingly found that anti-ICOS×anti-PD-1 antibody worked to enhance cytokine secretion despite monovalent binding of ICOS which is contrary to the crosslinking of costimulatory receptors such as ICOS which was thought to be necessary for stimulation of cytokine production. In Example 5H(a), it was surprisingly found that anti-ICOS×anti-PD-1 antibodies enhanced AKT phosphorylation (a signature of ICOS agonism) over bivalent anti-ICOS mAbs. In this section, we further examine this trend in which monovalent binding of ICOS appears to be superior to bivalent binding of ICOS.

[0816] 1. 7A: Production of One-Arm Anti-ICOS Fab-Fc Antibodies

[0817] Amino acid sequences for illustrative one-arm anti-ICOS Fab-Fc antibodies are listed in FIG. 68A-68G. DNA encoding the three chains needed for antibody expression were generated by gene synthesis and were subcloned using standard molecular biology techniques into the expression vector pTT5. DNA was transfected into HEK293E cells for expression and resulting proteins were purified using standard techniques.

[0818] The resultant one-arm anti-ICOS Fab-Fc antibodies were characterized for affinity to human ICOS using Octet. Anti-mouse Fc (AMC) biosensors were used to capture mouse IgG2a Fc fusion of ICOS and dipped into multiple concentrations of the test articles. The resulting equilibrium dissociation constants (KD), association rates (ka), and dissociation rates (kd) are presented in FIG. 69. Binding affinities and kinetic rate constants were obtained by analyzing the processed data using a 1:1 binding model using ForteBio Octet Data Analysis software (ForteBio).

[0819] 2. 7B: Monovalent One-Arm Anti-ICOS Fab-Fc Antibodies Promote Greater AKT Activation in PBMCs than Bivalent Anti-ICOS Antibody

[0820] PBMCs were stimulated with 100 ng/mL SEB for 2 days. Following stimulation, CD3+ T cells were isolated by negative selection using EasySep™ Human T Cell Enrichment Kit (STEMCELL Technologies, Vancouver, Canada) and then treated with indicated test articles in combination with plate bound anti-CD3 antibody (OKT3; 500 ng/mL). Cells were lysed 30 minutes after treatment and assayed for total AKT and phosphorylated AKT (Ser473) by a multiplexed phosphoprotein assay on MULTI-SPOT 384-Well Spot plates (Meso Scale Discovery, Rockville, Md.). The data are depicted in FIG. 70 as percentage of AKT phosphorylated following treatment.

[0821] Consistent with Example X, the anti-ICOS×anti-PD-1 bispecific antibodies promoted significantly greater AKT activation than bivalent anti-ICOS antibody. Surprisingly, monovalent one-arm anti-ICOS Fab-Fc antibodies enhanced also promoted significantly greater AKT activation than bivalent anti-ICOS antibody to a level comparable to the bispecific antibodies.

[0822] 3. 7C: Monovalent Agonism of ICOS Works with Multiple Anti-ICOS ABDs

[0823] CD3+ T cells were isolated by negative selection using EasySep™ Human T Cell Enrichment Kit (STEMCELL Technologies, Vancouver, Canada) and then treated with indicated test articles in combination with plate bound anti-CD3 antibody (OKT3; 500 ng/mL). Cells were lysed 30 minutes after treatment and assayed for total AKT and phosphorylated AKT (Ser473) by a multiplexed phosphoprotein assay on MULTI-SPOT 384-Well Spot plates (Meso Scale Discovery, Rockville, Md.). The data is depicted in FIG. 74 and show that monovalent anti-ICOS Fab-Fc antibodies comprising various anti-ICOS ABDs were able to induce AKT phosphorylation.

The application's sequence listing, which the Patent Office published only in electronic form, follows.

SEQUENCE LISTING (28668 sequences)

SEQ ID NO: 1 - protein, 222 aa, Artificial Sequence
  Description of Artificial Sequence: Synthetic polypeptide
  XENP022721 1C11_H1L3_Fab Heavy Chain
QIQLVQSGAEVKKPGASVKVSCKASGYTFTHYGMNWVRQAPGQGLEWMGWINTYTGEPTYADKFQGRVTMTLDTSTSTAYMELSSLRSEDTAVYFCARDYYGSSPYWGQGTLVTVSSASTKGPSVFPLAPSSKSTSGGTAALGCLVKDYFPEPVTVSWNSGALTSGVHTFPAVLQSSGLYSLSSVVTVPSSSLGTQTYICNVNHKPSNTKVDKKVEPKSCGS

SEQ ID NO: 2 - protein, 117 aa, Artificial Sequence
  Description of Artificial Sequence: Synthetic polypeptide
  VH of XENP022721
QIQLVQSGAEVKKPGASVKVSCKASGYTFTHYGMNWVRQAPGQGLEWMGWINTYTGEPTYADKFQGRVTMTLDTSTSTAYMELSSLRSEDTAVYFCARDYYGSSPYWGQGTLVTVSS

SEQ ID NO: 3 - protein, 5 aa, Artificial Sequence
  Description of Artificial Sequence: Synthetic peptide
  XENP022721 vhCDR1
HYGMN

SEQ ID NO: 4 - protein, 17 aa, Artificial Sequence
  Description of Artificial Sequence: Synthetic peptide
  XENP022721 vhCDR2
WINTYTGEPTYADKFQG

SEQ ID NO: 5 - protein, 8 aa, Artificial Sequence
  Description of Artificial Sequence: Synthetic peptide
  XENP022721 vhCDR3
DYYGSSPY

SEQ ID NO: 6 - protein, 219 aa, Artificial Sequence
  Description of Artificial Sequence: Synthetic polypeptide
  XENP022721 1C11_H1L3_Fab Light Chain
DVLMTQSPDSLAVSLGERATINCKSSQSIVHSNGNTYLEWYQQKPGQSPKLLIYKVSNRFSGVPDRFSGSGSGTDFTLTISSLQAEDVAVYYCFQGSHVPNTFGGGTKVEIKRTVAAPSVFIFPPSDEQLKSGTASVVCLLNNFYPREAKVQWKVDNALQSGNSQESVTEQDSKDSTYSLSSTLTLSKADYEKHKVYACEVTHQGLSSPVTKSFNRGEC

SEQ ID NO: 7 - protein, 112 aa, Artificial Sequence
  Description of Artificial Sequence: Synthetic polypeptide
  VL of XENP022721
DVLMTQSPDSLAVSLGERATINCKSSQSIVHSNGNTYLEWYQQKPGQSPKLLIYKVSNRFSGVPDRFSGSGSGTDFTLTISSLQAEDVAVYYCFQGSHVPNTFGGGTKVEIK

SEQ ID NO: 8 - protein, 16 aa, Artificial Sequence
  Description of Artificial Sequence: Synthetic peptide
  XENP022721 vlCDR1
KSSQSIVHSNGNTYLE

SEQ ID NO: 9 - protein, 7 aa, Artificial Sequence
  Description of Artificial Sequence: Synthetic peptide
  XENP022721 vlCDR2
KVSNRFS

SEQ ID NO: 10 - protein, 9 aa, Artificial Sequence
  Description of Artificial Sequence: Synthetic peptide
  XENP022721 vlCDR3
FQGSHVPNT

SEQ ID NO: 11 - protein, 222 aa, Artificial Sequence
  Description of Artificial Sequence: Synthetic polypeptide
  XENP022722 1C11_H2L1_Fab Heavy Chain
EIQLLESGGGLVQPGGSLRLSCAASGYTFTHYGMNWVRQAPGKGLEWVSWINTYTGEPTYADSVKGRFTISLDTSKSTAYLQMNSLRAEDTAVYFCARDYYGSSPYWGQGTLVTVSSASTKGPSVFPLAPSSKSTSGGTAALGCLVKDYFPEPVTVSWNSGALTSGVHTFPAVLQSSGLYSLSSVVTVPSSSLGTQTYICNVNHKPSNTKVDKKVEPKSCGS

SEQ ID NO: 12 - protein, 117 aa, Artificial Sequence
  Description of Artificial Sequence: Synthetic polypeptide
  VH of XENP022722
EIQLLESGGGLVQPGGSLRLSCAASGYTFTHYGMNWVRQAPGKGLEWVSWINTYTGEPTYADSVKGRFTISLDTSKSTAYLQMNSLRAEDTAVYFCARDYYGSSPYWGQGTLVTVSS

SEQ ID NO: 13 - protein, 5 aa, Artificial Sequence
  Description of Artificial Sequence: Synthetic peptide
  XENP022722 vhCDR1
HYGMN

SEQ ID NO: 14 - protein, 17 aa, Artificial Sequence
  Description of Artificial Sequence: Synthetic peptide
  XENP022722 vhCDR2
WINTYTGEPTYADSVKG

SEQ ID NO: 15 - protein, 8 aa, Artificial Sequence
  Description of Artificial Sequence: Synthetic peptide
  XENP022722 vhCDR3
DYYGSSPY

SEQ ID NO: 16 - protein, 219 aa, Artificial Sequence
  Description of Artificial Sequence: Synthetic polypeptide
  XENP022722 1C11_H2L1_Fab Light Chain
DVLMTQSPLSLPVTPGEPASISCRSSQSIVHSNGNTYLEWYLQKPGQSPQLLIYKVSNRFSGVPDRFSGSGSGTDFTLKISRVEAEDVGVYYCFQGSHVPNTFGGGTKVEIKRTVAAPSVFIFPPSDEQLKSGTASVVCLLNNFYPREAKVQWKVDNALQSGNSQESVTEQDSKDSTYSLSSTLTLSKADYEKHKVYACEVTHQGLSSPVTKSFNRGEC

SEQ ID NO: 17 - protein, 112 aa, Artificial Sequence
  Description of Artificial Sequence: Synthetic polypeptide
  VL of XENP022722
DVLMTQSPLSLPVTPGEPASISCRSSQSIVHSNGNTYLEWYLQKPGQSPQLLIYKVSNRFSGVPDRFSGSGSGTDFTLKISRVEAEDVGVYYCFQGSHVPNTFGGGTKVEIK

SEQ ID NO: 18 - protein, 16 aa, Artificial Sequence
  Description of Artificial Sequence: Synthetic peptide
  XENP022722 vlCDR1
RSSQSIVHSNGNTYLE

SEQ ID NO: 19 - protein, 7 aa, Artificial Sequence
  Description of Artificial Sequence: Synthetic peptide
  XENP022722 vlCDR2
KVSNRFS

SEQ ID NO: 20 - protein, 9 aa, Artificial Sequence
  Description of Artificial Sequence: Synthetic peptide
  XENP022722 vlCDR3
FQGSHVPNT

SEQ ID NO: 21 - protein, 222 aa, Artificial Sequence; identical to SEQ ID NO: 11
  Description of Artificial Sequence: Synthetic polypeptide
  XENP022723 1C11_H2L2_Fab Heavy Chain

SEQ ID NO: 22 - protein, 117 aa, Artificial Sequence; identical to SEQ ID NO: 12
  Description of Artificial Sequence: Synthetic polypeptide
  VH of XENP022723

SEQ ID NO: 23 - protein, 5 aa, Artificial Sequence
  Description of Artificial Sequence: Synthetic peptide
  XENP022723 vhCDR1
HYGMN

SEQ ID NO: 24 - protein, 17 aa, Artificial Sequence
  Description of Artificial Sequence: Synthetic peptide
  XENP022723 vhCDR2
WINTYTGEPTYADSVKG

SEQ ID NO: 25 - protein, 8 aa, Artificial Sequence
  Description of Artificial Sequence: Synthetic peptide
  XENP022723 vhCDR3
DYYGSSPY

SEQ ID NO: 26 - protein, 219 aa, Artificial Sequence
  Description of Artificial Sequence: Synthetic polypeptide
  XENP022723 1C11_H2L2_Fab Light Chain
DVLMTQSPLSLPVTLGQPASISCRSSQSIVHSNGNTYLEWYQQRPGQSPRLLIYKVSNRFSGVPDRFSGSGSGTDFTLKISRVEAEDVGVYYCFQGSHVPNTFGGGTKVEIKRTVAAPSVFIFPPSDEQLKSGTASVVCLLNNFYPREAKVQWKVDNALQSGNSQESVTEQDSKDSTYSLSSTLTLSKADYEKHKVYACEVTHQGLSSPVTKSFNRGEC

SEQ ID NO: 27 - protein, 112 aa, Artificial Sequence
  Description of Artificial Sequence: Synthetic polypeptide
  VL of XENP022723
DVLMTQSPLSLPVTLGQPASISCRSSQSIVHSNGNTYLEWYQQRPGQSPRLLIYKVSNRFSGVPDRFSGSGSGTDFTLKISRVEAEDVGVYYCFQGSHVPNTFGGGTKVEIK

SEQ ID NO: 28 - protein, 16 aa, Artificial Sequence
  Description of Artificial Sequence: Synthetic peptide
  XENP022723 vlCDR1
RSSQSIVHSNGNTYLE

SEQ ID NO: 29 - protein, 7 aa, Artificial Sequence
  Description of Artificial Sequence: Synthetic peptide
  XENP022723 vlCDR2
KVSNRFS

SEQ ID NO: 30 - protein, 9 aa, Artificial Sequence
  Description of Artificial Sequence: Synthetic peptide
  XENP022723 vlCDR3
FQGSHVPNT

SEQ ID NO: 31 - protein, 222 aa, Artificial Sequence
  Description of Artificial Sequence: Synthetic polypeptide
  XENP022724 1C11_H3L3_Fab Heavy Chain
QIQLVQSGSELKKPGASVKVSCKASGYTFTHYGMNWVRQAPGQGLEWMGWINTYTGEPTYADGFTGRFVFSLDTSVSTAYLQISSLKAEDTAVYFCARDYYGSSPYWGQGTLVTVSSASTKGPSVFPLAPSSKSTSGGTAALGCLVKDYFPEPVTVSWNSGALTSGVHTFPAVLQSSGLYSLSSVVTVPSSSLGTQTYICNVNHKPSNTKVDKKVEPKSCGS

SEQ ID NO: 32 - protein, 117 aa, Artificial Sequence
  Description of Artificial Sequence: Synthetic polypeptide
  VH of XENP022724
QIQLVQSGSELKKPGASVKVSCKASGYTFTHYGMNWVRQAPGQGLEWMGWINTYTGEPTYADGFTGRFVFSLDTSVSTAYLQISSLKAEDTAVYFCARDYYGSSPYWGQGTLVTVSS

SEQ ID NO: 33 - protein, 5 aa, Artificial Sequence
  Description of Artificial Sequence: Synthetic peptide
  XENP022724 vhCDR1
HYGMN

SEQ ID NO: 34 - protein, 17 aa, Artificial Sequence
  Description of Artificial Sequence: Synthetic peptide
  XENP022724 vhCDR2
WINTYTGEPTYADGFTG

SEQ ID NO: 35 - protein, 8 aa, Artificial Sequence
  Description of Artificial Sequence: Synthetic peptide
  XENP022724 vhCDR3
DYYGSSPY

SEQ ID NO: 36 - protein, 219 aa, Artificial Sequence; identical to SEQ ID NO: 6
  Description of Artificial Sequence: Synthetic polypeptide
  XENP022724 1C11_H3L3_Fab Light Chain

SEQ ID NO: 37 - protein, 112 aa, Artificial Sequence; identical to SEQ ID NO: 7
  Description of Artificial Sequence: Synthetic polypeptide
  VL of XENP022724

SEQ ID NO: 38 - protein, 16 aa, Artificial Sequence
  Description of Artificial Sequence: Synthetic peptide
  XENP022724 vlCDR1
KSSQSIVHSNGNTYLE

SEQ ID NO: 39 - protein, 7 aa, Artificial Sequence
  Description of Artificial Sequence: Synthetic peptide
  XENP022724 vlCDR2
KVSNRFS

SEQ ID NO: 40 - protein, 9 aa, Artificial Sequence
  Description of Artificial Sequence: Synthetic peptide
  XENP022724 vlCDR3
FQGSHVPNT

SEQ ID NO: 41 - protein, 222 aa, Artificial Sequence
  Description of Artificial Sequence: Synthetic polypeptide
  XENP022725 1C11_H0L0_Fab Heavy Chain
QIQLVQSGPELKKPGETVKISCRASGYTFTHYGMNWVKQAPGKGLKWMGWINTYTGEPTYADDFKGRFAFSLETSASTAYLQINNLKNEDTATYFCARDYYGSSPYWGQGTTLTVSSASTKGPSVFPLAPSSKSTSGGTAALGCLVKDYFPEPVTVSWNSGALTSGVHTFPAVLQSSGLYSLSSVVTVPSSSLGTQTYICNVNHKPSNTKVDKKVEPKSCGS

SEQ ID NO: 42 - protein, 117 aa, Artificial Sequence
  Description of Artificial Sequence: Synthetic polypeptide
  VH of XENP022725
QIQLVQSGPELKKPGETVKISCRASGYTFTHYGMNWVKQAPGKGLKWMGWINTYTGEPTYADDFKGRFAFSLETSASTAYLQINNLKNEDTATYFCARDYYGSSPYWGQGTTLTVSS

SEQ ID NO: 43 - protein, 5 aa, Artificial Sequence
  Description of Artificial Sequence: Synthetic peptide
  XENP022725 vhCDR1
HYGMN

SEQ ID NO: 44 - protein, 17 aa, Artificial Sequence
  Description of Artificial Sequence: Synthetic peptide
  XENP022725 vhCDR2
WINTYTGEPTYADDFKG

SEQ ID NO: 45 - protein, 8 aa, Artificial Sequence
  Description of Artificial Sequence: Synthetic peptide
  XENP022725 vhCDR3
DYYGSSPY

SEQ ID NO: 46 - protein, 219 aa, Artificial Sequence
  Description of Artificial Sequence: Synthetic polypeptide
  XENP022725 1C11_H0L0_Fab Light Chain
DVLMTQTPLSLPVSLGDQASISCRSSQSIVHSNGNTYLEWYLQKPGQSPKLLIYKVSNRFSGVPDRFSGSGSGTDFTLKISRVEAEDLGVYYCFQGSHVPNTFGGGTKLEIKRTVAAPSVFIFPPSDEQLKSGTASVVCLLNNFYPREAKVQWKVDNALQSGNSQESVTEQDSKDSTYSLSSTLTLSKADYEKHKVYACEVTHQGLSSPVTKSFNRGEC

SEQ ID NO: 47 - protein, 112 aa, Artificial Sequence
  Description of Artificial Sequence: Synthetic polypeptide
  VL of XENP022725
DVLMTQTPLSLPVSLGDQASISCRSSQSIVHSNGNTYLEWYLQKPGQSPKLLIYKVSNRFSGVPDRFSGSGSGTDFTLKISRVEAEDLGVYYCFQGSHVPNTFGGGTKLEIK

SEQ ID NO: 48 - protein, 16 aa, Artificial Sequence
  Description of Artificial Sequence: Synthetic peptide
  XENP022725 vlCDR1
RSSQSIVHSNGNTYLE

SEQ ID NO: 49 - protein, 7 aa, Artificial Sequence
  Description of Artificial Sequence: Synthetic peptide
  XENP022725 vlCDR2
KVSNRFS

SEQ ID NO: 50 - protein, 9 aa, Artificial Sequence
  Description of Artificial Sequence: Synthetic peptide
  XENP022725 vlCDR3
FQGSHVPNT

SEQ ID NO: 51 - protein, 222 aa, Artificial Sequence; identical to SEQ ID NO: 31
  Description of Artificial Sequence: Synthetic polypeptide
  XENP022991 1C11_H3L1_Fab Heavy Chain

SEQ ID NO: 52 - protein, 117 aa, Artificial Sequence; identical to SEQ ID NO: 32
  Description of Artificial Sequence: Synthetic polypeptide
  VH of XENP022991

SEQ ID NO: 53 - protein, 5 aa, Artificial Sequence
  Description of Artificial Sequence: Synthetic peptide
  XENP022991 vhCDR1
HYGMN

SEQ ID NO: 54 - protein, 17 aa, Artificial Sequence
  Description of Artificial Sequence: Synthetic peptide
  XENP022991 vhCDR2
WINTYTGEPTYADGFTG

SEQ ID NO: 55 - protein, 8 aa, Artificial Sequence
  Description of Artificial Sequence: Synthetic peptide
  XENP022991 vhCDR3
DYYGSSPY

SEQ ID NO: 56 - protein, 219 aa, Artificial Sequence; identical to SEQ ID NO: 16
  Description of Artificial Sequence: Synthetic polypeptide
  XENP022991 1C11_H3L1_Fab Light Chain

SEQ ID NO: 57 - protein, 112 aa, Artificial Sequence; identical to SEQ ID NO: 17
  Description of Artificial Sequence: Synthetic polypeptide
  VL of XENP022991

SEQ ID NO: 58 - protein, 16 aa, Artificial Sequence
  Description of Artificial Sequence: Synthetic peptide
  XENP022991 vlCDR1
RSSQSIVHSNGNTYLE

SEQ ID NO: 59 - protein, 7 aa, Artificial Sequence
  Description of Artificial Sequence: Synthetic peptide
  XENP022991 vlCDR2
KVSNRFS

SEQ ID NO: 60 - protein, 9 aa, Artificial Sequence
  Description of Artificial Sequence: Synthetic peptide
  XENP022991 vlCDR3
FQGSHVPNT

SEQ ID NO: 61 - protein, 222 aa, Artificial Sequence; identical to SEQ ID NO: 31
  Description of Artificial Sequence: Synthetic polypeptide
  XENP022992 1C11_H3L2_Fab Heavy Chain

SEQ ID NO: 62 - protein, 117 aa, Artificial Sequence; identical to SEQ ID NO: 32
  Description of Artificial Sequence: Synthetic polypeptide
  VH of XENP022992

SEQ ID NO: 63 - protein, 5 aa, Artificial Sequence
  Description of Artificial Sequence: Synthetic peptide
  XENP022992 vhCDR1
HYGMN

SEQ ID NO: 64 - protein, 17 aa, Artificial Sequence
  Description of Artificial Sequence: Synthetic peptide
  XENP022992 vhCDR2
WINTYTGEPTYADGFTG

SEQ ID NO: 65 - protein, 8 aa, Artificial Sequence
  Description of Artificial Sequence: Synthetic peptide
  XENP022992 vhCDR3
DYYGSSPY

SEQ ID NO: 66 - protein, 219 aa, Artificial Sequence; identical to SEQ ID NO: 26
  Description of Artificial Sequence: Synthetic polypeptide
  XENP022992 1C11_H3L2_Fab Light Chain

SEQ ID NO: 67 - protein, 112 aa, Artificial Sequence; identical to SEQ ID NO: 27
  Description of Artificial Sequence: Synthetic polypeptide
  VL of XENP022992

SEQ ID NO: 68 - protein, 16 aa, Artificial Sequence
  Description of Artificial Sequence: Synthetic peptide
  XENP022992 vlCDR1
RSSQSIVHSNGNTYLE

SEQ ID NO: 69 - protein, 7 aa, Artificial Sequence
  Description of Artificial Sequence: Synthetic peptide
  XENP022992 vlCDR2
KVSNRFS

SEQ ID NO: 70 - protein, 9 aa, Artificial Sequence
  Description of Artificial Sequence: Synthetic peptide
  XENP022992 vlCDR3
FQGSHVPNT

SEQ ID NO: 71 - protein, 251 aa, Artificial Sequence
  Description of Artificial Sequence: Synthetic polypeptide
  XENP023574 1C11_L1H3_scFv
DVLMTQSPLSLPVTPGEPASISCRSSQSIVHSNGNTYLEWYLQKPGQSPQLLIYKVSNRFSGVPDRFSGSGSGTDFTLKISRVEAEDVGVYYCFQGSHVPNTFGGGTKVEIKGKPGSGKPGSGKPGSGKPGSQIQLVQSGSELKKPGASVKVSCKASGYTFTHYGMNWVRQAPGQGLEWMGWINTYTGEPTYADGFTGRFVFSLDTSVSTAYLQISSLKAEDTAVYFCARDYYGSSPYWGQGTLVTVSSGS

SEQ ID NO: 72 - protein, 112 aa, Artificial Sequence; identical to SEQ ID NO: 17
  Description of Artificial Sequence: Synthetic polypeptide
  VH of XENP023574

SEQ ID NO: 73 - protein, 119 aa, Artificial Sequence
  Description of Artificial Sequence: Synthetic polypeptide
  VL of XENP023574
QIQLVQSGSELKKPGASVKVSCKASGYTFTHYGMNWVRQAPGQGLEWMGWINTYTGEPTYADGFTGRFVFSLDTSVSTAYLQISSLKAEDTAVYFCARDYYGSSPYWGQGTLVTVSSGS

SEQ ID NO: 74 - protein, 16 aa, Artificial Sequence
  Description of Artificial Sequence: Synthetic peptide
  XENP023574 vhCDR1
RSSQSIVHSNGNTYLE

SEQ ID NO: 75 - protein, 7 aa, Artificial Sequence
  Description of Artificial Sequence: Synthetic peptide
  XENP023574 vhCDR2
KVSNRFS

SEQ ID NO: 76 - protein, 9 aa, Artificial Sequence
  Description of Artificial Sequence: Synthetic peptide
  XENP023574 vhCDR3
FQGSHVPNT

SEQ ID NO: 77 - protein, 5 aa, Artificial Sequence
  Description of Artificial Sequence: Synthetic peptide
  XENP023574 vlCDR1
HYGMN

SEQ ID NO: 78 - protein, 17 aa, Artificial Sequence
  Description of Artificial Sequence: Synthetic peptide
  XENP023574 vlCDR2
WINTYTGEPTYADGFTG

SEQ ID NO: 79 - protein, 8 aa, Artificial Sequence
  Description of Artificial Sequence: Synthetic peptide
  XENP023574 vlCDR3
DYYGSSPY

SEQ ID NO: 80 - protein, 251 aa, Artificial Sequence
  Description of Artificial Sequence: Synthetic polypeptide
  XENP023575 1C11_L2H3_scFv
DVLMTQSPLSLPVTLGQPASISCRSSQSIVHSNGNTYLEWYQQRPGQSPRLLIYKVSNRFSGVPDRFSGSGSGTDFTLKISRVEAEDVGVYYCFQGSHVPNTFGGGTKVEIKGKPGSGKPGSGKPGSGKPGSQIQLVQSGSELKKPGASVKVSCKASGYTFTHYGMNWVRQAPGQGLEWMGWINTYTGEPTYADGFTGRFVFSLDTSVSTAYLQISSLKAEDTAVYFCARDYYGSSPYWGQGTLVTVSSGS

SEQ ID NO: 81 - protein, 112 aa, Artificial Sequence; identical to SEQ ID NO: 27
  Description of Artificial Sequence: Synthetic polypeptide
  VH of XENP023575

SEQ ID NO: 82 - protein, 119 aa, Artificial Sequence; identical to SEQ ID NO: 73
  Description of Artificial Sequence: Synthetic polypeptide
  VL of XENP023575

SEQ ID NO: 83 - protein, 16 aa, Artificial Sequence
  Description of Artificial Sequence: Synthetic peptide
  XENP023575 vhCDR1
RSSQSIVHSNGNTYLE

SEQ ID NO: 84 - protein, 7 aa, Artificial Sequence
  Description of Artificial Sequence: Synthetic peptide
  XENP023575 vhCDR2
KVSNRFS

SEQ ID NO: 85 - protein, 9 aa, Artificial Sequence
  Description of Artificial Sequence: Synthetic peptide
  XENP023575 vhCDR3
FQGSHVPNT

SEQ ID NO: 86 - protein, 5 aa, Artificial Sequence
  Description of Artificial Sequence: Synthetic peptide
  XENP023575 vlCDR1
HYGMN

SEQ ID NO: 87 - protein, 17 aa, Artificial Sequence
  Description of Artificial Sequence: Synthetic peptide
  XENP023575 vlCDR2
WINTYTGEPTYADGFTG

SEQ ID NO: 88 - protein, 8 aa, Artificial Sequence
  Description of Artificial Sequence: Synthetic peptide
  XENP023575 vlCDR3
DYYGSSPY

SEQ ID NO: 89 - protein, 251 aa, Artificial Sequence
  Description of Artificial Sequence: Synthetic polypeptide
  XENP023576 1C11_L3H3_scFv
DVLMTQSPDSLAVSLGERATINCKSSQSIVHSNGNTYLEWYQQKPGQSPKLLIYKVSNRFSGVPDRFSGSGSGTDFTLTISSLQAEDVAVYYCFQGSHVPNTFGGGTKVEIKGKPGSGKPGSGKPGSGKPGSQIQLVQSGSELKKPGASVKVSCKASGYTFTHYGMNWVRQAPGQGLEWMGWINTYTGEPTYADGFTGRFVFSLDTSVSTAYLQISSLKAEDTAVYFCARDYYGSSPYWGQGTLVTVSSGS

SEQ ID NO: 90 - protein, 112 aa, Artificial Sequence; identical to SEQ ID NO: 7
  Description of Artificial Sequence: Synthetic polypeptide
  VH of XENP023576

SEQ ID NO: 91 - protein, 119 aa, Artificial Sequence; identical to SEQ ID NO: 73
  Description of Artificial Sequence: Synthetic polypeptide
  VL of XENP023576

SEQ ID NO: 92 - protein, 16 aa, Artificial Sequence
  Description of Artificial Sequence: Synthetic peptide
  XENP023576 vhCDR1
KSSQSIVHSNGNTYLE

SEQ ID NO: 93 - protein, 7 aa, Artificial Sequence
  Description of Artificial Sequence: Synthetic peptide
  XENP023576 vhCDR2
KVSNRFS

SEQ ID NO: 94 - protein, 9 aa, Artificial Sequence
  Description of Artificial Sequence: Synthetic peptide
  XENP023576 vhCDR3
FQGSHVPNT

SEQ ID NO: 95 - protein, 5 aa, Artificial Sequence
  Description of Artificial Sequence: Synthetic peptide
  XENP023576 vlCDR1
HYGMN

SEQ ID NO: 96 - protein, 17 aa, Artificial Sequence
  Description of Artificial Sequence: Synthetic peptide
  XENP023576 vlCDR2
WINTYTGEPTYADGFTG

SEQ ID NO: 97 - protein, 8 aa, Artificial Sequence
  Description of Artificial Sequence: Synthetic peptide
  XENP023576 vlCDR3
DYYGSSPY

SEQ ID NO: 98 - protein, 251 aa, Artificial Sequence
  Description of Artificial Sequence: Synthetic polypeptide
  XENP023577 1C11_H3_L3.1_scFv
QIQLVQSGSELKKPGASVKVSCKASGYTFTHYGMNWVRQAPGQGLEWMGWINTYTGEPTYADGFTGRFVFSLDTSVSTAYLQISSLKAEDTAVYFCARDYYGSSPYWGQGTLVTVSSGKPGSGKPGSGKPGSGKPGSDILMTQSPDSLAVSLGERATINCKSSQSIVHSNGNTYLEWYQQKPGQSPKLLIYKVSNRFSGVPDRFSGSGSGTDFTLTISSLQAEDVAVYYCFQGSHVPNTFGGGTKVEIKGS

SEQ ID NO: 99 - protein, 117 aa, Artificial Sequence; identical to SEQ ID NO: 32
  Description of Artificial Sequence: Synthetic polypeptide
  VH of XENP023577

SEQ ID NO: 100 - protein, 114 aa, Artificial Sequence
  Description of Artificial Sequence: Synthetic polypeptide
  VL of XENP023577
DILMTQSPDSLAVSLGERATINCKSSQSIVHSNGNTYLEWYQQKPGQSPKLLIYKVSNRFSGVPDRFSGSGSGTDFTLTISSLQAEDVAVYYCFQGSHVPNTFGGGTKVEIKGS

SEQ ID NO: 101 - protein, 5 aa, Artificial Sequence
  Description of Artificial Sequence: Synthetic peptide
  XENP023577 vhCDR1
HYGMN

SEQ ID NO: 102 - protein, 17 aa, Artificial Sequence
  Description of Artificial Sequence: Synthetic peptide
  XENP023577 vhCDR2
WINTYTGEPTYADGFTG

SEQ ID NO: 103 - protein, 8 aa, Artificial Sequence
  Description of Artificial Sequence: Synthetic peptide
  XENP023577 vhCDR3
DYYGSSPY

SEQ ID NO: 104 - protein, 16 aa, Artificial Sequence
  Description of Artificial Sequence: Synthetic peptide
  XENP023577 vlCDR1
KSSQSIVHSNGNTYLE

SEQ ID NO: 105 - protein, 7 aa, Artificial Sequence
  Description of Artificial Sequence: Synthetic peptide
  XENP023577 vlCDR2
KVSNRFS

SEQ ID NO: 106 - protein, 9 aa, Artificial Sequence
  Description of Artificial Sequence: Synthetic peptide
  XENP023577 vlCDR3
FQGSHVPNT

SEQ ID NO: 107 - protein, 251 aa, Artificial Sequence
  Description of Artificial Sequence: Synthetic polypeptide
  XENP023578 1C11_H3_L3.2_scFv
QIQLVQSGSELKKPGASVKVSCKASGYTFTHYGMNWVRQAPGQGLEWMGWINTYTGEPTYADGFTGRFVFSLDTSVSTAYLQISSLKAEDTAVYFCARDYYGSSPYWGQGTLVTVSSGKPGSGKPGSGKPGSGKPGSDLLMTQSPDSLAVSLGERATINCKSSQSIVHSNGNTYLEWYQQKPGQSPKLLIYKVSNRFSGVPDRFSGSGSGTDFTLTISSLQAEDVAVYYCFQGSHVPNTFGGGTKVEIKGS

SEQ ID NO: 108 - protein, 117 aa, Artificial Sequence; identical to SEQ ID NO: 32
  Description of Artificial Sequence: Synthetic polypeptide
  VH of XENP023578

SEQ ID NO: 109 - protein, 114 aa, Artificial Sequence
  Description of Artificial Sequence: Synthetic polypeptide
  VL of XENP023578
DLLMTQSPDSLAVSLGERATINCKSSQSIVHSNGNTYLEWYQQKPGQSPKLLIYKVSNRFSGVPDRFSGSGSGTDFTLTISSLQAEDVAVYYCFQGSHVPNTFGGGTKVEIKGS

SEQ ID NO: 110 - protein, 5 aa, Artificial Sequence
  Description of Artificial Sequence: Synthetic peptide
  XENP023578 vhCDR1
HYGMN

SEQ ID NO: 111 - protein, 17 aa, Artificial Sequence
  Description of Artificial Sequence: Synthetic peptide
  XENP023578 vhCDR2
WINTYTGEPTYADGFTG

SEQ ID NO: 112 - protein, 8 aa, Artificial Sequence
  Description of Artificial Sequence: Synthetic peptide
  XENP023578 vhCDR3
DYYGSSPY

SEQ ID NO: 113 - protein, 16 aa, Artificial Sequence
  Description of Artificial Sequence: Synthetic peptide
  XENP023578 vlCDR1
KSSQSIVHSNGNTYLE

SEQ ID NO: 114 - protein, 7 aa, Artificial Sequence
  Description of Artificial Sequence: Synthetic peptide
  XENP023578 vlCDR2
KVSNRFS

SEQ ID NO: 115 - protein, 9 aa, Artificial Sequence
  Description of Artificial Sequence: Synthetic peptide
  XENP023578 vlCDR3
FQGSHVPNT

SEQ ID NO: 116 - protein, 251 aa, Artificial Sequence
  Description of Artificial Sequence: Synthetic polypeptide
  XENP023579 1C11_H3_L3.3_scFv
QIQLVQSGSELKKPGASVKVSCKASGYTFTHYGMNWVRQAPGQGLEWMGWINTYTGEPTYADGFTGRFVFSLDTSVSTAYLQISSLKAEDTAVYFCARDYYGSSPYWGQGTLVTVSSGKPGSGKPGSGKPGSGKPGSDVVMTQSPDSLAVSLGERATINCKSSQSIVHSNGNTYLEWYQQKPGQSPKLLIYKVSNRFSGVPDRFSGSGSGTDFTLTISSLQAEDVAVYYCFQGSHVPNTFGGGTKVEIKGS

SEQ ID NO: 117 - protein, 117 aa, Artificial Sequence; identical to SEQ ID NO: 32
  Description of Artificial Sequence: Synthetic polypeptide
  VH of XENP023579

SEQ ID NO: 118 - protein, 114 aa, Artificial Sequence
  Description of Artificial Sequence: Synthetic polypeptide
  VL of XENP023579
DVVMTQSPDSLAVSLGERATINCKSSQSIVHSNGNTYLEWYQQKPGQSPKLLIYKVSNRFSGVPDRFSGSGSGTDFTLTISSLQAEDVAVYYCFQGSHVPNTFGGGTKVEIKGS

SEQ ID NO: 119 - protein, 5 aa, Artificial Sequence
  Description of Artificial Sequence: Synthetic peptide
  XENP023579 vhCDR1
HYGMN

SEQ ID NO: 120 - protein, 17 aa, Artificial Sequence
  Description of Artificial Sequence: Synthetic peptide
  XENP023579 vhCDR2
WINTYTGEPTYADGFTG

SEQ ID NO: 121 - protein, 8 aa, Artificial Sequence
  Description of Artificial Sequence: Synthetic peptide
  XENP023579 vhCDR3
DYYGSSPY

SEQ ID NO: 122 - protein, 16 aa, Artificial Sequence
  Description of Artificial Sequence: Synthetic peptide
  XENP023579 vlCDR1
KSSQSIVHSNGNTYLE

SEQ ID NO: 123 - protein, 7 aa, Artificial Sequence
  Description of Artificial Sequence: Synthetic peptide
  XENP023579 vlCDR2
KVSNRFS

SEQ ID NO: 124 - protein, 9 aa, Artificial Sequence
  Description of Artificial Sequence: Synthetic peptide
  XENP023579 vlCDR3
FQGSHVPNT

SEQ ID NO: 125 - protein, 251 aa, Artificial Sequence
  Description of Artificial Sequence: Synthetic polypeptide
  XENP023580 1C11_H3_L3.4_scFv
QIQLVQSGSELKKPGASVKVSCKASGYTFTHYGMNWVRQAPGQGLEWMGWINTYTGEPTYADGFTGRFVFSLDTSVSTAYLQISSLKAEDTAVYFCARDYYGSSPYWGQGTLVTVSSGKPGSGKPGSGKPGSGKPGSDVEMTQSPDSLAVSLGERATINCKSSQSIVHSNGNTYLEWYQQKPGQSPKLLIYKVSNRFSGVPDRFSGSGSGTDFTLTISSLQAEDVAVYYCFQGSHVPNTFGGGTKVEIKGS

SEQ ID NO: 126 - protein, 117 aa, Artificial Sequence; identical to SEQ ID NO: 32
  Description of Artificial Sequence: Synthetic polypeptide
  VH of XENP023580

SEQ ID NO: 127 - protein, 114 aa, Artificial Sequence
  Description of Artificial Sequence: Synthetic polypeptide
  VL of XENP023580
DVEMTQSPDSLAVSLGERATINCKSSQSIVHSNGNTYLEWYQQKPGQSPKLLIYKVSNRFSGVPDRFSGSGSGTDFTLTISSLQAEDVAVYYCFQGSHVPNTFGGGTKVEIKGS

SEQ ID NO: 128 - protein, 5 aa, Artificial Sequence
  Description of Artificial Sequence: Synthetic peptide
  XENP023580 vhCDR1
HYGMN

SEQ ID NO: 129 - protein, 17 aa, Artificial Sequence
  Description of Artificial Sequence: Synthetic peptide
  XENP023580 vhCDR2
WINTYTGEPTYADGFTG

SEQ ID NO: 130 - protein, 8 aa, Artificial Sequence
  Description of Artificial Sequence: Synthetic peptide
  XENP023580 vhCDR3
DYYGSSPY

SEQ ID NO: 131 - protein, 16 aa, Artificial Sequence
  Description of Artificial Sequence: Synthetic peptide
  XENP023580 vlCDR1
KSSQSIVHSNGNTYLE

SEQ ID NO: 132 - protein, 7 aa, Artificial Sequence
  Description of Artificial Sequence: Synthetic peptide
  XENP023580 vlCDR2
KVSNRFS

SEQ ID NO: 133 - protein, 9 aa, Artificial Sequence
  Description of Artificial Sequence: Synthetic peptide
  XENP023580 vlCDR3
FQGSHVPNT

SEQ ID NO: 134 - protein, 251 aa, Artificial Sequence
  Description of Artificial Sequence: Synthetic polypeptide
  XENP023581 1C11_H3_L3.5_scFv
QIQLVQSGSELKKPGASVKVSCKASGYTFTHYGMNWVRQAPGQGLEWMGWINTYTGEPTYADGFTGRFVFSLDTSVSTAYLQISSLKAEDTAVYFCARDYYGSSPYWGQGTLVTVSSGKPGSGKPGSGKPGSGKPGSDVQMTQSPDSLAVSLGERATINCKSSQSIVHSNGNTYLEWYQQKPGQSPKLLIYKVSNRFSGVPDRFSGSGSGTDFTLTISSLQAEDVAVYYCFQGSHVPNTFGGGTKVEIKGS

SEQ ID NO: 135 - protein, 117 aa, Artificial Sequence; identical to SEQ ID NO: 32
  Description of Artificial Sequence: Synthetic polypeptide
  VH of XENP023581

SEQ ID NO: 136 - protein, 114 aa, Artificial Sequence
  Description of Artificial Sequence: Synthetic polypeptide
  VL of XENP023581
DVQMTQSPDSLAVSLGERATINCKSSQSIVHSNGNTYLEWYQQKPGQSPKLLIYKVSNRFSGVPDRFSGSGSGTDFTLTISSLQAEDVAVYYCFQGSHVPNTFGGGTKVEIKGS

SEQ ID NO: 137 - protein, 5 aa, Artificial Sequence
  Description of Artificial Sequence: Synthetic peptide
  XENP023581 vhCDR1
HYGMN

SEQ ID NO: 138 - protein, 17 aa, Artificial Sequence
  Description of Artificial Sequence: Synthetic peptide
  XENP023581 vhCDR2
WINTYTGEPTYADGFTG

SEQ ID NO: 139 - protein, 8 aa, Artificial Sequence
  Description of Artificial Sequence: Synthetic peptide
  XENP023581 vhCDR3
DYYGSSPY

SEQ ID NO: 140 - protein, 16 aa, Artificial Sequence
  Description of Artificial Sequence: Synthetic peptide
  XENP023581 vlCDR1
KSSQSIVHSNGNTYLE

SEQ ID NO: 141 - protein, 7 aa, Artificial Sequence
  Description of Artificial Sequence: Synthetic peptide
  XENP023581 vlCDR2
KVSNRFS

SEQ ID NO: 142 - protein, 9 aa, Artificial Sequence
  Description of Artificial Sequence: Synthetic peptide
  XENP023581 vlCDR3
FQGSHVPNT

SEQ ID NO: 143 - protein, 251 aa, Artificial Sequence
  Description of Artificial Sequence: Synthetic polypeptide
  XENP023582 1C11_H3_L3.6_scFv
QIQLVQSGSELKKPGASVKVSCKASGYTFTHYGMNWVRQAPGQGLEWMGWINTYTGEPTYADGFTGRFVFSLDTSVSTAYLQISSLKAEDTAVYFCARDYYGSSPYWGQGTLVTVSSGKPGSGKPGSGKPGSGKPGSDVDMTQSPDSLAVSLGERATINCKSSQSIVHSNGNTYLEWYQQKPGQSPKLLIYKVSNRFSGVPDRFSGSGSGTDFTLTISSLQAEDVAVYYCFQGSHVPNTFGGGTKVEIKGS

SEQ ID NO: 144 - protein, 117 aa, Artificial Sequence; identical to SEQ ID NO: 32
  Description of Artificial Sequence: Synthetic polypeptide
  VH of XENP023582

SEQ ID NO: 145 - protein, 114 aa, Artificial Sequence
  Description of Artificial Sequence: Synthetic polypeptide
  VL of XENP023582
DVDMTQSPDSLAVSLGERATINCKSSQSIVHSNGNTYLEWYQQKPGQSPKLLIYKVSNRFSGVPDRFSGSGSGTDFTLTISSLQAEDVAVYYCFQGSHVPNTFGGGTKVEIKGS

SEQ ID NO: 146 - protein, 5 aa, Artificial Sequence
  Description of Artificial Sequence: Synthetic peptide
  XENP023582 vhCDR1
HYGMN

SEQ ID NO: 147 - protein, 17 aa, Artificial Sequence
  Description of Artificial Sequence: Synthetic peptide
  XENP023582 vhCDR2
WINTYTGEPTYADGFTG

SEQ ID NO: 148 - protein, 8 aa, Artificial Sequence
  Description of Artificial Sequence: Synthetic peptide
  XENP023582 vhCDR3
DYYGSSPY

SEQ ID NO: 149 - protein, 16 aa, Artificial Sequence
  Description of Artificial Sequence: Synthetic peptide
  XENP023582 vlCDR1
KSSQSIVHSNGNTYLE

SEQ ID NO: 150 - protein, 7 aa, Artificial Sequence
  Description of Artificial Sequence: Synthetic peptide
  XENP023582 vlCDR2
KVSNRFS

SEQ ID NO: 151 - protein, 9 aa, Artificial Sequence
  Description of Artificial Sequence: Synthetic peptide
  XENP023582 vlCDR3
FQGSHVPNT

SEQ ID NO: 152 - protein, 251 aa, Artificial Sequence
  Description of Artificial Sequence: Synthetic polypeptide
  XENP023583 1C11_H3_L3.7_scFv
QIQLVQSGSELKKPGASVKVSCKASGYTFTHYGMNWVRQAPGQGLEWMGWINTYTGEPTYADGFTGRFVFSLDTSVSTAYLQISSLKAEDTAVYFCARDYYGSSPYWGQGTLVTVSSGKPGSGKPGSGKPGSGKPGSDIQMTQSPDSLAVSLGERATINCKSSQSIVHSNGNTYLEWYQQKPGQSPKLLIYKVSNRFSGVPDRFSGSGSGTDFTLTISSLQAEDVAVYYCFQGSHVPNTFGGGTKVEIKGS

SEQ ID NO: 153 - protein, 117 aa, Artificial Sequence; identical to SEQ ID NO: 32
  Description of Artificial Sequence: Synthetic polypeptide
  VH of XENP023583

SEQ ID NO: 154 - protein, 114 aa, Artificial Sequence
  Description of Artificial Sequence: Synthetic polypeptide
  VL of XENP023583
DIQMTQSPDSLAVSLGERATINCKSSQSIVHSNGNTYLEWYQQKPGQSPKLLIYKVSNRFSGVPDRFSGSGSGTDFTLTISSLQAEDVAVYYCFQGSHVPNTFGGGTKVEIKGS

SEQ ID NO: 155 - protein, 5 aa, Artificial Sequence
  Description of Artificial Sequence: Synthetic peptide
  XENP023583 vhCDR1
HYGMN

SEQ ID NO: 156 - protein, 17 aa, Artificial Sequence
  Description of Artificial Sequence: Synthetic peptide
  XENP023583 vhCDR2
WINTYTGEPTYADGFTG

SEQ ID NO: 157 - protein, 8 aa, Artificial Sequence
  Description of Artificial Sequence: Synthetic peptide
  XENP023583 vhCDR3
DYYGSSPY

SEQ ID NO: 158 - protein, 16 aa, Artificial Sequence
  Description of Artificial Sequence: Synthetic peptide
  XENP023583 vlCDR1
KSSQSIVHSNGNTYLE

SEQ ID NO: 159 - protein, 7 aa, Artificial Sequence
  Description of Artificial Sequence: Synthetic peptide
  XENP023583 vlCDR2
KVSNRFS

SEQ ID NO: 160 - protein, 9 aa, Artificial Sequence
  Description of Artificial Sequence: Synthetic peptide
  XENP023583 vlCDR3
FQGSHVPNT

SEQ ID NO: 161 - protein, 251 aa, Artificial Sequence
  Description of Artificial Sequence: Synthetic polypeptide
  XENP023584 1C11_H3_L3.9_scFv
QIQLVQSGSELKKPGASVKVSCKASGYTFTHYGMNWVRQAPGQGLEWMGWINTYTGEPTYADGFTGRFVFSLDTSVSTAYLQISSLKAEDTAVYFCARDYYGSSPYWGQGTLVTVSSGKPGSGKPGSGKPGSGKPGSDVLMTQSPKSLAVSLGERATINCKSSQSIVHSNGNTYLEWYQQKPGQSPKLLIYKVSNRFSGVPDRFSGSGSGTDFTLTISSLQAEDVAVYYCFQGSHVPNTFGGGTKVEIKGS

SEQ ID NO: 162 - protein, 117 aa, Artificial Sequence; identical to SEQ ID NO: 32
  Description of Artificial Sequence: Synthetic polypeptide
  VH of XENP023584

SEQ ID NO: 163 - protein, 114 aa, Artificial Sequence
  Description of Artificial Sequence: Synthetic polypeptide
  VL of XENP023584
DVLMTQSPKSLAVSLGERATINCKSSQSIVHSNGNTYLEWYQQKPGQSPKLLIYKVSNRFSGVPDRFSGSGSGTDFTLTISSLQAEDVAVYYCFQGSHVPNTFGGGTKVEIKGS

SEQ ID NO: 164 - protein, 5 aa, Artificial Sequence
  Description of Artificial Sequence: Synthetic peptide
  XENP023584 vhCDR1
HYGMN

SEQ ID NO: 165 - protein, 17 aa, Artificial Sequence
  Description of Artificial Sequence: Synthetic peptide
  XENP023584 vhCDR2
WINTYTGEPTYADGFTG

SEQ ID NO: 166 - protein, 8 aa, Artificial Sequence
  Description of Artificial Sequence: Synthetic peptide
  XENP023584 vhCDR3
DYYGSSPY

SEQ ID NO: 167 - protein, 16 aa, Artificial Sequence
  Description of Artificial Sequence: Synthetic peptide
  XENP023584 vlCDR1
KSSQSIVHSNGNTYLE

SEQ ID NO: 168 - protein, 7 aa, Artificial Sequence
  Description of Artificial Sequence: Synthetic peptide
  XENP023584 vlCDR2
KVSNRFS

SEQ ID NO: 169 - protein, 9 aa, Artificial Sequence
  Description of Artificial Sequence: Synthetic peptide
  XENP023584 vlCDR3
FQGSHVPNT

SEQ ID NO: 170 - protein, 251 aa, Artificial Sequence
  Description of Artificial Sequence: Synthetic polypeptide
  XENP023585 1C11_H3_L3.10_scFv
QIQLVQSGSELKKPGASVKVSCKASGYTFTHYGMNWVRQAPGQGLEWMGWINTYTGEPTYADGFTGRFVFSLDTSVSTAYLQISSLKAEDTAVYFCARDYYGSSPYWGQGTLVTVSSGKPGSGKPGSGKPGSGKPGSDVLMTQSPLSLAVSLGERATINCKSSQSIVHSNGNTYLEWYQQKPGQSPKLLIYKVSNRFSGVPDRFSGSGSGTDFTLTISSLQAEDVAVYYCFQGSHVPNTFGGGTKVEIKGS

SEQ ID NO: 171 - protein, 117 aa, Artificial Sequence; identical to SEQ ID NO: 32
  Description of Artificial Sequence: Synthetic polypeptide
  VH of XENP023585

SEQ ID NO: 172 - protein, 114 aa, Artificial Sequence
  Description of Artificial Sequence: Synthetic polypeptide
  VL of XENP023585
DVLMTQSPLSLAVSLGERATINCKSSQSIVHSNGNTYLEWYQQKPGQSPKLLIYKVSNRFSGVPDRFSGSGSGTDFTLTISSLQAEDVAVYYCFQGSHVPNTFGGGTKVEIKGS

SEQ ID NO: 173 - protein, 5 aa, Artificial Sequence
  Description of Artificial Sequence: Synthetic peptide
  XENP023585 vhCDR1
HYGMN

SEQ ID NO: 174 - protein, 17 aa, Artificial Sequence
  Description of Artificial Sequence: Synthetic peptide
  XENP023585 vhCDR2
WINTYTGEPTYADGFTG

SEQ ID NO: 175 - protein, 8 aa, Artificial Sequence
  Description of Artificial Sequence: Synthetic peptide
  XENP023585 vhCDR3
DYYGSSPY

SEQ ID NO: 176 - protein, 16 aa, Artificial Sequence
  Description of Artificial Sequence: Synthetic peptide
  XENP023585 vlCDR1
KSSQSIVHSNGNTYLE

SEQ ID NO: 177 - protein, 7 aa, Artificial Sequence
  Description of Artificial Sequence: Synthetic peptide
  XENP023585 vlCDR2
KVSNRFS

SEQ ID NO: 178 - protein, 9 aa, Artificial Sequence
  Description of Artificial Sequence: Synthetic peptide
  XENP023585 vlCDR3
FQGSHVPNT

SEQ ID NO: 179 - protein, 251 aa, Artificial Sequence
  Description of Artificial Sequence: Synthetic polypeptide
  XENP023586 1C11_H3_L3.11_scFv
QIQLVQSGSELKKPGASVKVSCKASGYTFTHYGMNWVRQAPGQGLEWMGWINTYTGEPTYADGFTGRFVFSLDTSVSTAYLQISSLKAEDTAVYFCARDYYGSSPYWGQGTLVTVSSGKPGSGKPGSGKPGSGKPGSDVLMTQSPSSLAVSLGERATINCKSSQSIVHSNGNTYLEWYQQKPGQSPKLLIYKVSNRFSGVPDRFSGSGSGTDFTLTISSLQAEDVAVYYCFQGSHVPNTFGGGTKVEIKGS

SEQ ID NO: 180 - protein, 117 aa, Artificial Sequence; identical to SEQ ID NO: 32
  Description of Artificial Sequence: Synthetic polypeptide
  VH of XENP023586

SEQ ID NO: 181 - protein, 114 aa, Artificial Sequence
  Description of Artificial Sequence: Synthetic polypeptide
  VL of XENP023586
DVLMTQSPSSLAVSLGERATINCKSSQSIVHSNGNTYLEWYQQKPGQSPKLLIYKVSNRFSGVPDRFSGSGSGTDFTLTISSLQAEDVAVYYCFQGSHVPNTFGGGTKVEIKGS

SEQ ID NO: 182 - protein, 5 aa, Artificial Sequence
  Description of Artificial Sequence: Synthetic peptide
  XENP023586 vhCDR1
HYGMN

SEQ ID NO: 183 - protein, 17 aa, Artificial Sequence
  Description of Artificial Sequence: Synthetic peptide
  XENP023586 vhCDR2
WINTYTGEPTYADGFTG

SEQ ID NO: 184 - protein, 8 aa, Artificial Sequence
  Description of Artificial Sequence: Synthetic peptide
  XENP023586 vhCDR3
DYYGSSPY

SEQ ID NO: 185 - protein, 16 aa, Artificial Sequence
  Description of Artificial Sequence: Synthetic peptide
  XENP023586 vlCDR1
KSSQSIVHSNGNTYLE

SEQ ID NO: 186 - protein, 7 aa, Artificial Sequence
  Description of Artificial Sequence: Synthetic peptide
  XENP023586 vlCDR2
KVSNRFS

SEQ ID NO: 187 - protein, 9 aa, Artificial Sequence
  Description of Artificial Sequence: Synthetic peptide
  XENP023586 vlCDR3
FQGSHVPNT

SEQ ID NO: 188 - protein, 251 aa, Artificial Sequence
  Description of Artificial Sequence: Synthetic polypeptide
  XENP023587 1C11_H3_L3.12_scFv
QIQLVQSGSELKKPGASVKVSCKASGYTFTHYGMNWVRQAPGQGLEWMGWINTYTGEPTYADGFTGRFVFSLDTSVSTAYLQISSLKAEDTAVYFCARDYYGSSPYWGQGTLVTVSSGKPGSGKPGSGKPGSGKPGSDVLMTQSPGSLAVSLGERATINCKSSQSIVHSNGNTYLEWYQQKPGQSPKLLIYKVSNRFSGVPDRFSGSGSGTDFTLTISSLQAEDVAVYYCFQGSHVPNTFGGGTKVEIKGS

SEQ ID NO: 189 - protein, 117 aa, Artificial Sequence; identical to SEQ ID NO: 32
  Description of Artificial Sequence: Synthetic polypeptide
  VH of XENP023587

SEQ ID NO: 190 - protein, 114 aa, Artificial Sequence
  Description of Artificial Sequence: Synthetic polypeptide
  VL of XENP023587
DVLMTQSPGSLAVSLGERATINCKSSQSIVHSNGNTYLEWYQQKPGQSPKLLIYKVSNRFSGVPDRFSGSGSGTDFTLTISSLQAEDVAVYYCFQGSHVPNTFGGGTKVEIKGS

SEQ ID NO: 191 - protein, 5 aa, Artificial Sequence
  Description of Artificial Sequence: Synthetic peptide
  XENP023587 vhCDR1
HYGMN

SEQ ID NO: 192 - protein, 17 aa, Artificial Sequence
  Description of Artificial Sequence: Synthetic peptide
  XENP023587 vhCDR2
WINTYTGEPTYADGFTG

SEQ ID NO: 193 - protein, 8 aa, Artificial Sequence
  Description of Artificial Sequence: Synthetic peptide
  XENP023587 vhCDR3
DYYGSSPY

SEQ ID NO: 194 - protein, 16 aa, Artificial Sequence
  Description of Artificial Sequence: Synthetic peptide
  XENP023587 vlCDR1
KSSQSIVHSNGNTYLE

SEQ ID NO: 195 - protein, 7 aa, Artificial Sequence
  Description of Artificial Sequence: Synthetic peptide
  XENP023587 vlCDR2
KVSNRFS

SEQ ID NO: 196 - protein, 9 aa, Artificial Sequence
  Description of Artificial Sequence: Synthetic peptide
  XENP023587 vlCDR3
FQGSHVPNT

SEQ ID NO: 197 - protein, 251 aa, Artificial Sequence
  Description of Artificial Sequence: Synthetic polypeptide
  XENP023588 1C11_H3_L3.14_scFv
QIQLVQSGSELKKPGASVKVSCKASGYTFTHYGMNWVRQAPGQGLEWMGWINTYTGEPTYADGFTGRFVFSLDTSVSTAYLQISSLKAEDTAVYFCARDYYGSSPYWGQGTLVTVSSGKPGSGKPGSGKPGSGKPGSDVLMTQSPDSLPVSLGERATINCKSSQSIVHSNGNTYLEWYQQKPGQSPKLLIYKVSNRFSGVPDRFSGSGSGTDFTLTISSLQAEDVAVYYCFQGSHVPNTFGGGTKVEIKGS

SEQ ID NO: 198 - protein, 117 aa, Artificial Sequence; identical to SEQ ID NO: 32
  Description of Artificial Sequence: Synthetic polypeptide
  VH of XENP023588

SEQ ID NO: 199 - protein, 114 aa, Artificial Sequence
  Description of Artificial Sequence: Synthetic polypeptide
  VL of XENP023588
DVLMTQSPDSLPVSLGERATINCKSSQSIVHSNGNTYLEWYQQKPGQSPKLLIYKVSNRFSGVPDRFSGSGSGTDFTLTISSLQAEDVAVYYCFQGSHVPNTFGGGTKVEIKGS

SEQ ID NO: 200 - protein, 5 aa, Artificial Sequence
  Description of Artificial Sequence: Synthetic peptide
  XENP023588 vhCDR1
HYGMN

SEQ ID NO: 201 - protein, 17 aa, Artificial Sequence
  Description of Artificial Sequence: Synthetic peptide
  XENP023588 vhCDR2
WINTYTGEPTYADGFTG

SEQ ID NO: 202 - protein, 8 aa, Artificial Sequence
  Description of Artificial Sequence: Synthetic peptide
  XENP023588 vhCDR3
DYYGSSPY

SEQ ID NO: 203 - protein, 16 aa, Artificial Sequence
  Description of Artificial Sequence: Synthetic peptide
  XENP023588 vlCDR1
KSSQSIVHSNGNTYLE

SEQ ID NO: 204 - protein, 7 aa, Artificial Sequence
  Description of Artificial Sequence: Synthetic peptide
  XENP023588 vlCDR2
KVSNRFS

SEQ ID NO: 205 - protein, 9 aa, Artificial Sequence
  Description of Artificial Sequence: Synthetic peptide
  XENP023588 vlCDR3
FQGSHVPNT

SEQ ID NO: 206 - protein, 251 aa, Artificial Sequence
  Description of Artificial Sequence: Synthetic polypeptide
  XENP023589 1C11_H3_L3.15_scFv
QIQLVQSGSELKKPGASVKVSCKASGYTFTHYGMNWVRQAPGQGLEWMGWINTYTGEPTYADGFTGRFVFSLDTSVSTAYLQISSLKAEDTAVYFCARDYYGSSPYWGQGTLVTVSSGKPGSGKPGSGKPGSGKPGSDVLMTQSPDSLSVSLGERATINCKSSQSIVHSNGNTYLEWYQQKPGQSPKLLIYKVSNRFSGVPDRFSGSGSGTDFTLTISSLQAEDVAVYYCFQGSHVPNTFGGGTKVEIKGS

SEQ ID NO: 207 - protein, 117 aa, Artificial Sequence; identical to SEQ ID NO: 32
  Description of Artificial Sequence: Synthetic polypeptide
  VH of XENP023589

SEQ ID NO: 208 - protein, 114 aa, Artificial Sequence
  Description of Artificial Sequence: Synthetic polypeptide
  VL of XENP023589
DVLMTQSPDSLSVSLGERATINCKSSQSIVHSNGNTYLEWYQQKPGQSPKLLIYKVSNRFSGVPDRFSGSGSGTDFTLTISSLQAEDVAVYYCFQGSHVPNTFGGGTKVEIKGS

SEQ ID NO: 209 - protein, 5 aa, Artificial Sequence
  Description of Artificial Sequence: Synthetic peptide
  XENP023589 vhCDR1
HYGMN

SEQ ID NO: 210 - protein, 17 aa, Artificial Sequence
  Description of Artificial Sequence: Synthetic peptide
  XENP023589 vhCDR2
WINTYTGEPTYADGFTG

SEQ ID NO: 211 - protein, 8 aa, Artificial Sequence
  Description of Artificial Sequence: Synthetic peptide
  XENP023589 vhCDR3
DYYGSSPY

SEQ ID NO: 212 - protein, 16 aa, Artificial Sequence
  Description of Artificial Sequence: Synthetic peptide
  XENP023589 vlCDR1
KSSQSIVHSNGNTYLE

SEQ ID NO: 213 - protein, 7 aa, Artificial Sequence
  Description of Artificial Sequence: Synthetic peptide
  XENP023589 vlCDR2
KVSNRFS

SEQ ID NO: 214 - protein, 9 aa, Artificial Sequence
  Description of Artificial Sequence: Synthetic peptide
  XENP023589 vlCDR3
FQGSHVPNT

SEQ ID NO: 215 - protein, 251 aa, Artificial Sequence
  Description of Artificial Sequence: Synthetic polypeptide
  XENP023590 1C11_H3_L3.16_scFv
QIQLVQSGSELKKPGASVKVSCKASGYTFTHYGMNWVRQAPGQGLEWMGWINTYTGEPTYADGFTGRFVFSLDTSVSTAYLQISSLKAEDTAVYFCARDYYGSSPYWGQGTLVTVSSGKPGSGKPGSGKPGSGKPGSDVLMTQSPDSLTVSLGERATINCKSSQSIVHSNGNTYLEWYQQKPGQSPKLLIYKVSNRFSGVPDRFSGSGSGTDFTLTISSLQAEDVAVYYCFQGSHVPNTFGGGTKVEIKGS

SEQ ID NO: 216 - protein, 117 aa, Artificial Sequence; identical to SEQ ID NO: 32
  Description of Artificial Sequence: Synthetic polypeptide
  VH of XENP023590

SEQ ID NO: 217 - protein, 114 aa, Artificial Sequence
  Description of Artificial Sequence: Synthetic polypeptide
  VL of XENP023590
DVLMTQSPDSLTVSLGERATINCKSSQSIVHSNGNTYLEWYQQKPGQSPKLLIYKVSNRFSGVPDRFSGSGSGTDFTLTISSLQAEDVAVYYCFQGSHVPNTFGGGTKVEIKGS

SEQ ID NO: 218 - protein, 5 aa, Artificial Sequence
  Description of Artificial Sequence: Synthetic peptide
  XENP023590 vhCDR1
HYGMN

SEQ ID NO: 219 - protein, 17 aa, Artificial Sequence
  Description of Artificial Sequence: Synthetic peptide
  XENP023590 vhCDR2
WINTYTGEPTYADGFTG

SEQ ID NO: 220 - protein, 8 aa, Artificial Sequence
  Description of Artificial Sequence: Synthetic peptide
  XENP023590 vhCDR3
DYYGSSPY

SEQ ID NO: 221 - protein, 16 aa, Artificial Sequence
  Description of Artificial Sequence: Synthetic peptide
  XENP023590 vlCDR1
KSSQSIVHSNGNTYLE

SEQ ID NO: 222 - protein, 7 aa, Artificial Sequence
  Description of Artificial Sequence: Synthetic peptide
  XENP023590 vlCDR2
KVSNRFS

SEQ ID NO: 223 - protein, 9 aa, Artificial Sequence
  Description of Artificial Sequence: Synthetic peptide
  XENP023590 vlCDR3
FQGSHVPNT

SEQ ID NO: 224 - protein, 251 aa, Artificial Sequence
  Description of Artificial Sequence: Synthetic polypeptide
  XENP023591 1C11_H3_L3.17_scFv
QIQLVQSGSELKKPGASVKVSCKASGYTFTHYGMNWVRQAPGQGLEWMGWINTYTGEPTYADGFTGRFVFSLDTSVSTAYLQISSLKAEDTAVYFCARDYYGSSPYWGQGTLVTVSSGKPGSGKPGSGKPGSGKPGSDVLMTQSPDSLSASVGERATINCKSSQSIVHSNGNTYLEWYQQKPGQSPKLLIYKVSNRFSGVPDRFSGSGSGTDFTLTISSLQAEDVAVYYCFQGSHVPNTFGGGTKVEIKGS

SEQ ID NO: 225 - protein, 117 aa, Artificial Sequence; identical to SEQ ID NO: 32
  Description of Artificial Sequence: Synthetic polypeptide
  VH of XENP023591

SEQ ID NO: 226 - protein, 114 aa, Artificial Sequence
  Description of Artificial Sequence: Synthetic polypeptide
  VL of XENP023591
DVLMTQSPDSLSASVGERATINCKSSQSIVHSNGNTYLEWYQQKPGQSPKLLIYKVSNRFSGVPDRFSGSGSGTDFTLTISSLQAEDVAVYYCFQGSHVPNTFGGGTKVEIKGS

SEQ ID NO: 227 - protein, 5 aa, Artificial Sequence
  Description of Artificial Sequence: Synthetic peptide
  XENP023591 vhCDR1
HYGMN

SEQ ID NO: 228 - protein, 17 aa, Artificial Sequence
  Description of Artificial Sequence: Synthetic peptide
  XENP023591 vhCDR2
WINTYTGEPTYADGFTG

SEQ ID NO: 229 - protein, 8 aa, Artificial Sequence
  Description of Artificial Sequence: Synthetic peptide
  XENP023591 vhCDR3
DYYGSSPY

SEQ ID NO: 230 - protein, 16 aa, Artificial Sequence
  Description of Artificial Sequence: Synthetic peptide
  XENP023591 vlCDR1
KSSQSIVHSNGNTYLE

SEQ ID NO: 231 - protein, 7 aa, Artificial Sequence
  Description of Artificial Sequence: Synthetic peptide
  XENP023591 vlCDR2
KVSNRFS

SEQ ID NO: 232 - protein, 9 aa, Artificial Sequence
  Description of Artificial Sequence: Synthetic peptide
  XENP023591 vlCDR3
FQGSHVPNT

SEQ ID NO: 233 - protein, 251 aa, Artificial Sequence
  Description of Artificial Sequence: Synthetic polypeptide
  XENP023592 1C11_H3_L3.18_scFv
QIQLVQSGSELKKPGASVKVSCKASGYTFTHYGMNWVRQAPGQGLEWMGWINTYTGEPTYADGFTGRFVFSLDTSVSTAYLQISSLKAEDTAVYFCARDYYGSSPYWGQGTLVTVSSGKPGSGKPGSGKPGSGKPGSDVLMTQSPDSLSVSPGERATINCKSSQSIVHSNGNTYLEWYQQKPGQSPKLLIYKVSNRFSGVPDRFSGSGSGTDFTLTISSLQAEDVAVYYCFQGSHVPNTFGGGTKVEIKGS

SEQ ID NO: 234 - protein, 117 aa, Artificial Sequence; identical to SEQ ID NO: 32
  Description of Artificial Sequence: Synthetic polypeptide
  VH of XENP023592

SEQ ID NO: 235 - protein, 114 aa, Artificial Sequence
  Description of Artificial Sequence: Synthetic polypeptide
  VL of XENP023592
DVLMTQSPDSLSVSPGERATINCKSSQSIVHSNGNTYLEWYQQKPGQSPKLLIYKVSNRFSGVPDRFSGSGSGTDFTLTISSLQAEDVAVYYCFQGSHVPNTFGGGTKVEIKGS

SEQ ID NO: 236 - protein, 5 aa, Artificial Sequence
  Description of Artificial Sequence: Synthetic peptide
  XENP023592 vhCDR1
HYGMN

SEQ ID NO: 237 - protein, 17 aa, Artificial Sequence
  Description of Artificial Sequence: Synthetic peptide
  XENP023592 vhCDR2
WINTYTGEPTYADGFTG

SEQ ID NO: 238 - protein, 8 aa, Artificial Sequence
  Description of Artificial Sequence: Synthetic peptide
  XENP023592 vhCDR3
DYYGSSPY

SEQ ID NO: 239 - protein, 16 aa, Artificial Sequence
  Description of Artificial Sequence: Synthetic peptide
  XENP023592 vlCDR1
KSSQSIVHSNGNTYLE

SEQ ID NO: 240 - protein, 7 aa, Artificial Sequence
  Description of Artificial Sequence: Synthetic peptide
  XENP023592 vlCDR2
KVSNRFS

SEQ ID NO: 241 - protein, 9 aa, Artificial Sequence
  Description of Artificial Sequence: Synthetic peptide
  XENP023592 vlCDR3
FQGSHVPNT

SEQ ID NO: 242 - protein, 251 aa, Artificial Sequence
  Description of Artificial Sequence: Synthetic polypeptide
  XENP023593 1C11_H3_L3.19_scFv
QIQLVQSGSELKKPGASVKVSCKASGYTFTHYGMNWVRQAPGQGLEWMGWINTYTGEPTYADGFTGRFVFSLDTSVSTAYLQISSLKAEDTAVYFCARDYYGSSPYWGQGTLVTVSSGKPGSGKPGSGKPGSGKPGSDVLMTQSPDSLSLSPGERATINCKSSQSIVHSNGNTYLEWYQQKPGQSPKLLIYKVSNRFSGVPDRFSGSGSGTDFTLTISSLQAEDVAVYYCFQGSHVPNTFGGGTKVEIKGS

SEQ ID NO: 243 - protein, 117 aa, Artificial Sequence; identical to SEQ ID NO: 32
  Description of Artificial Sequence: Synthetic polypeptide
  VH of XENP023593

SEQ ID NO: 244 - protein, 114 aa, Artificial Sequence
  Description of Artificial Sequence: Synthetic polypeptide
  VL of XENP023593
DVLMTQSPDSLSLSPGERATINCKSSQSIVHSNGNTYLEWYQQKPGQSPKLLIYKVSNRFSGVPDRFSGSGSGTDFTLTISSLQAEDVAVYYCFQGSHVPNTFGGGTKVEIKGS

SEQ ID NO: 245 - protein, 5 aa, Artificial Sequence
  Description of Artificial Sequence: Synthetic peptide
  XENP023593 vhCDR1
HYGMN

SEQ ID NO: 246 - protein, 17 aa, Artificial Sequence
  Description of Artificial Sequence: Synthetic peptide
  XENP023593 vhCDR2
WINTYTGEPTYADGFTG

SEQ ID NO: 247 - protein, 8 aa, Artificial Sequence
  Description of Artificial Sequence: Synthetic peptide
  XENP023593 vhCDR3
DYYGSSPY

SEQ ID NO: 248 - protein, 16 aa, Artificial Sequence
  Description of Artificial Sequence: Synthetic peptide
  XENP023593 vlCDR1
KSSQSIVHSNGNTYLE

SEQ ID NO: 249 - protein, 7 aa, Artificial Sequence
  Description of Artificial Sequence: Synthetic peptide
  XENP023593 vlCDR2
KVSNRFS

SEQ ID NO: 250 - protein, 9 aa, Artificial Sequence
  Description of Artificial Sequence: Synthetic peptide
  XENP023593 vlCDR3
FQGSHVPNT

SEQ ID NO: 251 - protein, 251 aa, Artificial Sequence
  Description of Artificial Sequence: Synthetic polypeptide
  XENP023594 1C11_H3_L3.20_scFv
QIQLVQSGSELKKPGASVKVSCKASGYTFTHYGMNWVRQAPGQGLEWMGWINTYTGEPTYADGFTGRFVFSLDTSVSTAYLQISSLKAEDTAVYFCARDYYGSSPYWGQGTLVTVSSGKPGSGKPGSGKPGSGKPGSDVLMTQSPDSLAVSSGERATINCKSSQSIVHSNGNTYLEWYQQKPGQSPKLLIYKVSNRFSGVPDRFSGSGSGTDFTLTISSLQAEDVAVYYCFQGSHVPNTFGGGTKVEIKGS

SEQ ID NO: 252 - protein, 117 aa, Artificial Sequence; identical to SEQ ID NO: 32
  Description of Artificial Sequence: Synthetic polypeptide
  VH of XENP023594

SEQ ID NO: 253 - protein, 114 aa, Artificial Sequence
  Description of Artificial Sequence: Synthetic polypeptide
  VL of XENP023594
DVLMTQSPDSLAVSSGERATINCKSSQSIVHSNGNTYLEWYQQKPGQSPKLLIYKVSNRFSGVPDRFSGSGSGTDFTLTISSLQAEDVAVYYCFQGSHVPNTFGGGTKVEIKGS

SEQ ID NO: 254 - protein, 5 aa, Artificial Sequence
  Description of Artificial Sequence: Synthetic peptide
  XENP023594 vhCDR1
HYGMN

SEQ ID NO: 255 - protein, 17 aa, Artificial Sequence
  Description of Artificial Sequence: Synthetic peptide
  XENP023594 vhCDR2
WINTYTGEPTYADGFTG

SEQ ID NO: 256 - protein, 8 aa, Artificial Sequence
  Description of Artificial Sequence: Synthetic peptide
  XENP023594 vhCDR3
DYYGSSPY

SEQ ID NO: 257 - protein, 16 aa, Artificial Sequence
  Description of Artificial Sequence: Synthetic peptide
  XENP023594 vlCDR1
KSSQSIVHSNGNTYLE

SEQ ID NO: 258 - protein, 7 aa, Artificial Sequence
  Description of Artificial Sequence: Synthetic peptide
  XENP023594 vlCDR2
KVSNRFS

SEQ ID NO: 259 - protein, 9 aa, Artificial Sequence
  Description of Artificial Sequence: Synthetic peptide
  XENP023594 vlCDR3
FQGSHVPNT

SEQ ID NO: 260 - protein, 251 aa, Artificial Sequence
  Description of Artificial Sequence: Synthetic polypeptide
  XENP023595 1C11_H3_L3.21_scFv
QIQLVQSGSELKKPGASVKVSCKASGYTFTHYGMNWVRQAPGQGLEWMGWINTYTGEPTYADGFTGRFVFSLDTSVSTAYLQISSLKAEDTAVYFCARDYYGSSPYWGQGTLVTVSSGKPGSGKPGSGKPGSGKPGSDVLMTQSPDSLAVSTGERATINCKSSQSIVHSNGNTYLEWYQQKPGQSPKLLIYKVSNRFSGVPDRFSGSGSGTDFTLTISSLQAEDVAVYYCFQGSHVPNTFGGGTKVEIKGS

SEQ ID NO: 261 - protein, 117 aa, Artificial Sequence; identical to SEQ ID NO: 32
  Description of Artificial Sequence: Synthetic polypeptide
  VH of XENP023595

SEQ ID NO: 262 - protein, 114 aa, Artificial Sequence
  Description of Artificial Sequence: Synthetic polypeptide
  VL of XENP023595
DVLMTQSPDSLAVSTGERATINCKSSQSIVHSNGNTYLEWYQQKPGQSPKLLIYKVSNRFSGVPDRFSGSGSGTDFTLTISSLQAEDVAVYYCFQGSHVPNTFGGGTKVEIKGS

SEQ ID NO: 263 - protein, 5 aa, Artificial Sequence
  Description of Artificial Sequence: Synthetic peptide
  XENP023595 vhCDR1
HYGMN

SEQ ID NO: 264 - protein, 17 aa, Artificial Sequence
  Description of Artificial Sequence: Synthetic peptide
  XENP023595 vhCDR2
WINTYTGEPTYADGFTG

SEQ ID NO: 265 - protein, 8 aa, Artificial Sequence
  Description of Artificial Sequence: Synthetic peptide
  XENP023595 vhCDR3
DYYGSSPY

SEQ ID NO: 266 - protein, 16 aa, Artificial Sequence
  Description of Artificial Sequence: Synthetic peptide
  XENP023595 vlCDR1
KSSQSIVHSNGNTYLE

SEQ ID NO: 267 - protein, 7 aa, Artificial Sequence
  Description of Artificial Sequence: Synthetic peptide
  XENP023595 vlCDR2
KVSNRFS

SEQ ID NO: 268 - protein, 9 aa, Artificial Sequence
  Description of Artificial Sequence: Synthetic peptide
  XENP023595 vlCDR3
FQGSHVPNT

SEQ ID NO: 269 - protein, 251 aa, Artificial Sequence
  Description of Artificial Sequence: Synthetic polypeptide
  XENP023596 1C11_H3_L3.22_scFv
QIQLVQSGSELKKPGASVKVSCKASGYTFTHYGMNWVRQAPGQGLEWMGWINTYTGEPTYADGFTGRFVFSLDTSVSTAYLQISSLKAEDTAVYFCARDYYGSSPYWGQGTLVTVSSGKPGSGKPGSGKPGSGKPGSDVLMTQSPDSLAVSLGERITINCKSSQSIVHSNGNTYLEWYQQKPGQSPKLLIYKVSNRFSGVPDRFSGSGSGTDFTLTISSLQAEDVAVYYCFQGSHVPNTFGGGTKVEIKGS

SEQ ID NO: 270 - protein, 117 aa, Artificial Sequence; identical to SEQ ID NO: 32
  Description of Artificial Sequence: Synthetic polypeptide
  VH of XENP023596

SEQ ID NO: 271 - protein, 114 aa, Artificial Sequence
  Description of Artificial Sequence: Synthetic polypeptide
  VL of XENP023596
DVLMTQSPDSLAVSLGERITINCKSSQSIVHSNGNTYLEWYQQKPGQSPKLLIYKVSNRFSGVPDRFSGSGSGTDFTLTISSLQAEDVAVYYCFQGSHVPNTFGGGTKVEIKGS

SEQ ID NO: 272 - protein, 5 aa, Artificial Sequence
  Description of Artificial Sequence: Synthetic peptide
  XENP023596 vhCDR1
HYGMN

SEQ ID NO: 273 - protein, 17 aa, Artificial Sequence
  Description of Artificial Sequence: Synthetic peptide
  XENP023596 vhCDR2
WINTYTGEPTYADGFTG

SEQ ID NO: 274 - protein, 8 aa, Artificial Sequence
  Description of Artificial Sequence: Synthetic peptide
  XENP023596 vhCDR3
DYYGSSPY

SEQ ID NO: 275 - protein, 16 aa, Artificial Sequence
  Description of Artificial Sequence: Synthetic peptide
  XENP023596 vlCDR1
KSSQSIVHSNGNTYLE

SEQ ID NO: 276 - protein, 7 aa, Artificial Sequence
  Description of Artificial Sequence: Synthetic peptide
  XENP023596 vlCDR2
KVSNRFS

SEQ ID NO: 277 - protein, 9 aa, Artificial Sequence
  Description of Artificial Sequence: Synthetic peptide
  XENP023596 vlCDR3
FQGSHVPNT

SEQ ID NO: 278 - protein, 251 aa, Artificial Sequence
  Description of Artificial Sequence: Synthetic polypeptide
  XENP023601 1C11_H3_L3.23_scFv
QIQLVQSGSELKKPGASVKVSCKASGYTFTHYGMNWVRQAPGQGLEWMGWINTYTGEPTYADGFTGRFVFSLDTSVSTAYLQISSLKAEDTAVYFCARDYYGSSPYWGQGTLVTVSSGKPGSGKPGSGKPGSGKPGSDVLMTQSPDSLAVSLGERVTINCKSSQSIVHSNGNTYLEWYQQKPGQSPKLLIYKVSNRFSGVPDRFSGSGSGTDFTLTISSLQAEDVAVYYCFQGSHVPNTFGGGTKVEIKGS

SEQ ID NO: 279 - protein, 117 aa, Artificial Sequence; identical to SEQ ID NO: 32
  Description of Artificial Sequence: Synthetic polypeptide
  VH of XENP023601

SEQ ID NO: 280 - protein, 114 aa, Artificial Sequence
  Description of Artificial Sequence: Synthetic polypeptide
  VL of XENP023601
DVLMTQSPDSLAVSLGERVTINCKSSQSIVHSNGNTYLEWYQQKPGQSPKLLIYKVSNRFSGVPDRFSGSGSGTDFTLTISSLQAEDVAVYYCFQGSHVPNTFGGGTKVEIKGS

SEQ ID NO: 281 - protein, 5 aa, Artificial Sequence
  Description of Artificial Sequence: Synthetic peptide
  XENP023601 vhCDR1
HYGMN

SEQ ID NO: 282 - protein, 17 aa, Artificial Sequence
  Description of Artificial Sequence: Synthetic peptide
  XENP023601 vhCDR2
WINTYTGEPTYADGFTG

SEQ ID NO: 283 - protein, 8 aa, Artificial Sequence
  Description of Artificial Sequence: Synthetic peptide
  XENP023601 vhCDR3
DYYGSSPY

SEQ ID NO: 284 - protein, 16 aa, Artificial Sequence
  Description of Artificial Sequence: Synthetic peptide
  XENP023601 vlCDR1
KSSQSIVHSNGNTYLE

SEQ ID NO: 285 - protein, 7 aa, Artificial Sequence
  Description of Artificial Sequence: Synthetic peptide
  XENP023601 vlCDR2
KVSNRFS

SEQ ID NO: 286 - protein, 9 aa, Artificial Sequence
  Description of Artificial Sequence: Synthetic peptide
  XENP023601 vlCDR3
FQGSHVPNT

SEQ ID NO: 287 - protein, 251 aa, Artificial Sequence
  Description of Artificial Sequence: Synthetic polypeptide
  XENP023602 1C11_H3_L3.25_scFv
QIQLVQSGSELKKPGASVKVSCKASGYTFTHYGMNWVRQAPGQGLEWMGWINTYTGEPTYADGFTGRFVFSLDTSVSTAYLQISSLKAEDTAVYFCARDYYGSSPYWGQGTLVTVSSGKPGSGKPGSGKPGSGKPGSDVLMTQSPDSLAVSLGERATISCKSSQSIVHSNGNTYLEWYQQKPGQSPKLLIYKVSNRFSGVPDRFSGSGSGTDFTLTISSLQAEDVAVYYCFQGSHVPNTFGGGTKVEIKGS

SEQ ID NO: 288 - protein, 117 aa, Artificial Sequence; identical to SEQ ID NO: 32
  Description of Artificial Sequence: Synthetic polypeptide
  VH of XENP023602

SEQ ID NO: 289 - protein, 114 aa, Artificial Sequence
  Description of Artificial Sequence: Synthetic polypeptide
  VL of XENP023602
DVLMTQSPDSLAVSLGERATISCKSSQSIVHSNGNTYLEWYQQKPGQSPKLLIYKVSNRFSGVPDRFSGSGSGTDFTLTISSLQAEDVAVYYCFQGSHVPNTFGGGTKVEIKGS

SEQ ID NO: 290 - protein, 5 aa, Artificial Sequence
  Description of Artificial Sequence: Synthetic peptide
  XENP023602 vhCDR1
HYGMN

SEQ ID NO: 291 - protein, 17 aa, Artificial Sequence
  Description of Artificial Sequence: Synthetic peptide
  XENP023602 vhCDR2
WINTYTGEPTYADGFTG

SEQ ID NO: 292 - protein, 8 aa, Artificial Sequence
  Description of Artificial Sequence: Synthetic peptide
  XENP023602 vhCDR3
DYYGSSPY

SEQ ID NO: 293 - protein, 16 aa, Artificial Sequence
  Description of Artificial Sequence: Synthetic peptide
  XENP023602 vlCDR1
KSSQSIVHSNGNTYLE

SEQ ID NO: 294 - protein, 7 aa, Artificial Sequence
  Description of Artificial Sequence: Synthetic peptide
  XENP023602 vlCDR2
KVSNRFS

SEQ ID NO: 295 - protein, 9 aa, Artificial Sequence
  Description of Artificial Sequence: Synthetic peptide
  XENP023602 vlCDR3
FQGSHVPNT

SEQ ID NO: 296 - protein, 251 aa, Artificial Sequence
  Description of Artificial Sequence: Synthetic polypeptide
  XENP023603 1C11_H3_L3.26_scFv
QIQLVQSGSELKKPGASVKVSCKASGYTFTHYGMNWVRQAPGQGLEWMGWINTYTGEPTYADGFTGRFVFSLDTSVSTAYLQISSLKAEDTAVYFCARDYYGSSPYWGQGTLVTVSSGKPGSGKPGSGKPGSGKPGSDVLMTQSPDSLAVSLGERATITCKSSQSIVHSNGNTYLEWYQQKPGQSPKLLIYKVSNRFSGVPDRFSGSGSGTDFTLTISSLQAEDVAVYYCFQGSHVPNTFGGGTKVEIKGS

SEQ ID NO: 297 - protein, 117 aa, Artificial Sequence; identical to SEQ ID NO: 32
  Description of Artificial Sequence: Synthetic polypeptide
  VH of XENP023603

SEQ ID NO: 298 - protein, 114 aa, Artificial Sequence
  Description of Artificial Sequence: Synthetic polypeptide
  VL of XENP023603
DVLMTQSPDSLAVSLGERATITCKSSQSIVHSNGNTYLEWYQQKPGQSPKLLIYKVSNRFSGVPDRFSGSGSGTDFTLTISSLQAEDVAVYYCFQGSHVPNTFGGGTKVEIKGS

SEQ ID NO: 299 - protein, 5 aa, Artificial Sequence
  Description of Artificial Sequence: Synthetic peptide
  XENP023603 vhCDR1
HYGMN

SEQ ID NO: 300 - protein, 17 aa, Artificial Sequence
  Description of Artificial Sequence: Synthetic peptide
  XENP023603 vhCDR2
WINTYTGEPTYADGFTG

SEQ ID NO: 301 - protein, 8 aa, Artificial Sequence
  Description of Artificial Sequence: Synthetic peptide
  XENP023603 vhCDR3
DYYGSSPY

SEQ ID NO: 302 - protein, 16 aa, Artificial Sequence
  Description of Artificial Sequence: Synthetic peptide
  XENP023603 vlCDR1
KSSQSIVHSNGNTYLE

SEQ ID NO: 303 - protein, 7 aa, Artificial Sequence
  Description of Artificial Sequence: Synthetic peptide
  XENP023603 vlCDR2
KVSNRFS

SEQ ID NO: 304 - protein, 9 aa, Artificial Sequence
  Description of Artificial Sequence: Synthetic peptide
  XENP023603 vlCDR3
FQGSHVPNT

SEQ ID NO: 305 - protein, 251 aa, Artificial Sequence
  Description of Artificial Sequence: Synthetic polypeptide
  XENP023604 1C11_H3_L3.27_scFv
QIQLVQSGSELKKPGASVKVSCKASGYTFTHYGMNWVRQAPGQGLEWMGWINTYTGEPTYADGFTGRFVFSLDTSVSTAYLQISSLKAEDTAVYFCARDYYGSSPYWGQGTLVTVSSGKPGSGKPGSGKPGSGKPGSDVLMTQSPDSLAVSLGERATINCQSSQSIVHSNGNTYLEWYQQKPGQSPKLLIYKVSNRFSGVPDRFSGSGSGTDFTLTISSLQAEDVAVYYCFQGSHVPNTFGGGTKVEIKGS

SEQ ID NO: 306 - protein, 117 aa, Artificial Sequence; identical to SEQ ID NO: 32
  Description of Artificial Sequence: Synthetic polypeptide
  VH of XENP023604

SEQ ID NO: 307 - protein, 114 aa, Artificial Sequence
  Description of Artificial Sequence: Synthetic polypeptide
  VL of XENP023604
DVLMTQSPDSLAVSLGERATINCQSSQSIVHSNGNTYLEWYQQKPGQSPKLLIYKVSNRFSGVPDRFSGSGSGTDFTLTISSLQAEDVAVYYCFQGSHVPNTFGGGTKVEIKGS

SEQ ID NO: 308 - protein, 5 aa, Artificial Sequence
  Description of Artificial Sequence: Synthetic peptide
  XENP023604 vhCDR1
HYGMN

SEQ ID NO: 309 - protein, 17 aa, Artificial Sequence
  Description of Artificial Sequence: Synthetic peptide
  XENP023604 vhCDR2
WINTYTGEPTYADGFTG

SEQ ID NO: 310 - protein, 8 aa, Artificial Sequence
  Description of Artificial Sequence: Synthetic peptide
  XENP023604 vhCDR3
DYYGSSPY

SEQ ID NO: 311 - protein, 16 aa, Artificial Sequence
  Description of Artificial Sequence: Synthetic peptide
  XENP023604 vlCDR1
QSSQSIVHSNGNTYLE

SEQ ID NO: 312 - protein, 7 aa, Artificial Sequence
  Description of Artificial Sequence: Synthetic peptide
  XENP023604 vlCDR2
KVSNRFS

SEQ ID NO: 313 - protein, 9 aa, Artificial Sequence
  Description of Artificial Sequence: Synthetic peptide
  XENP023604 vlCDR3
FQGSHVPNT

SEQ ID NO: 314 - protein, 251 aa, Artificial Sequence
  Description of Artificial Sequence: Synthetic polypeptide
  XENP023605 1C11_H3_L3.28_scFv
QIQLVQSGSELKKPGASVKVSCKASGYTFTHYGMNWVRQAPGQGLEWMGWINTYTGEPTYADGFTGRFVFSLDTSVSTAYLQISSLKAEDTAVYFCARDYYGSSPYWGQGTLVTVSSGKPGSGKPGSGKPGSGKPGSDVLMTQSPDSLAVSLGERATINCRSSQSIVHSNGNTYLEWYQQKPGQSPKLLIYKVSNRFSGVPDRFSGSGSGTDFTLTISSLQAEDVAVYYCFQGSHVPNTFGGGTKVEIKGS

SEQ ID NO: 315 - protein, 117 aa, Artificial Sequence; identical to SEQ ID NO: 32
  Description of Artificial Sequence: Synthetic polypeptide
  VH of XENP023605

SEQ ID NO: 316 - protein, 114 aa, Artificial Sequence
  Description of Artificial Sequence: Synthetic polypeptide
  VL of XENP023605
DVLMTQSPDSLAVSLGERATINCRSSQSIVHSNGNTYLEWYQQKPGQSPKLLIYKVSNRFSGVPDRFSGSGSGTDFTLTISSLQAEDVAVYYCFQGSHVPNTFGGGTKVEIKGS

SEQ ID NO: 317 - protein, 5 aa, Artificial Sequence
  Description of Artificial Sequence: Synthetic peptide
  XENP023605 vhCDR1
HYGMN

SEQ ID NO: 318 - protein, 17 aa, Artificial Sequence
  Description of Artificial Sequence: Synthetic peptide
  XENP023605 vhCDR2
WINTYTGEPTYADGFTG

SEQ ID NO: 319 - protein, 8 aa, Artificial Sequence
  Description of Artificial Sequence: Synthetic peptide
  XENP023605 vhCDR3
DYYGSSPY

SEQ ID NO: 320 - protein, 16 aa, Artificial Sequence
  Description of Artificial Sequence: Synthetic peptide
  XENP023605 vlCDR1
RSSQSIVHSNGNTYLE

SEQ ID NO: 321 - protein, 7 aa, Artificial Sequence
  Description of Artificial Sequence: Synthetic peptide
  XENP023605 vlCDR2
KVSNRFS

SEQ ID NO: 322 - protein, 9 aa, Artificial Sequence
  Description of Artificial Sequence: Synthetic peptide
  XENP023605 vlCDR3
FQGSHVPNT

SEQ ID NO: 323 - protein, 251 aa, Artificial Sequence
  Description of Artificial Sequence: Synthetic polypeptide
  XENP023606 1C11_H3_L3.29_scFv
QIQLVQSGSELKKPGASVKVSCKASGYTFTHYGMNWVRQAPGQGLEWMGWINTYTGEPTYADGFTGRFVFSLDTSVSTAYLQISSLKAEDTAVYFCARDYYGSSPYWGQGTLVTVSSGKPGSGKPGSGKPGSGKPGSDVLMTQSPDSLAVSLGERATINCSSSQSIVHSNGNTYLEWYQQKPGQSPKLLIYKVSNRFSGVPDRFSGSGSGTDFTLTISSLQAEDVAVYYCFQGSHVPNTFGGGTKVEIKGS

SEQ ID NO: 324 - protein, 117 aa, Artificial Sequence; identical to SEQ ID NO: 32
  Description of Artificial Sequence: Synthetic polypeptide
  VH of XENP023606

SEQ ID NO: 325 - protein, 114 aa, Artificial Sequence
  Description of Artificial Sequence: Synthetic polypeptide
  VL of XENP023606
DVLMTQSPDSLAVSLGERATINCSSSQSIVHSNGNTYLEWYQQKPGQSPKLLIYKVSNRFSGVPDRFSGSGSGTDFTLTISSLQAEDVAVYYCFQGSHVPNTFGGGTKVEIKGS

SEQ ID NO: 326 - protein, 5 aa, Artificial Sequence
  Description of Artificial Sequence: Synthetic peptide
  XENP023606 vhCDR1
HYGMN

SEQ ID NO: 327 - protein, 17 aa, Artificial Sequence
  Description of Artificial Sequence: Synthetic peptide
  XENP023606 vhCDR2
WINTYTGEPTYADGFTG

SEQ ID NO: 328 - protein, 8 aa, Artificial Sequence
  Description of Artificial Sequence: Synthetic peptide
  XENP023606 vhCDR3
DYYGSSPY

SEQ ID NO: 329 - protein, 16 aa, Artificial Sequence
  Description of Artificial Sequence: Synthetic peptide
  XENP023606 vlCDR1
SSSQSIVHSNGNTYLE

SEQ ID NO: 330 - protein, 7 aa, Artificial Sequence
  Description of Artificial Sequence: Synthetic peptide
  XENP023606 vlCDR2
KVSNRFS

SEQ ID NO: 331 - protein, 9 aa, Artificial Sequence
  Description of Artificial Sequence: Synthetic peptide
  XENP023606 vlCDR3
FQGSHVPNT

SEQ ID NO: 332 - protein, 251 aa, Artificial Sequence
  Description of Artificial Sequence: Synthetic polypeptide
  XENP023607 1C11_H3_L3.30_scFv
QIQLVQSGSELKKPGASVKVSCKASGYTFTHYGMNWVRQAPGQGLEWMGWINTYTGEPTYADGFTGRFVFSLDTSVSTAYLQISSLKAEDTAVYFCARDYYGSSPYWGQGTLVTVSSGKPGSGKPGSGKPGSGKPGSDVLMTQSPDSLAVSLGERATINCTSSQSIVHSNGNTYLEWYQQKPGQSPKLLIYKVSNRFSGVPDRFSGSGSGTDFTLTISSLQAEDVAVYYCFQGSHVPNTFGGGTKVEIKGS

SEQ ID NO: 333 - protein, 117 aa, Artificial Sequence; identical to SEQ ID NO: 32
  Description of Artificial Sequence: Synthetic polypeptide
  VH of XENP023607

SEQ ID NO: 334 - protein, 114 aa, Artificial Sequence
  Description of Artificial Sequence: Synthetic polypeptide
  VL of XENP023607
DVLMTQSPDSLAVSLGERATINCTSSQSIVHSNGNTYLEWYQQKPGQSPKLLIYKVSNRFSGVPDRFSGSGSGTDFTLTISSLQAEDVAVYYCFQGSHVPNTFGGGTKVEIKGS

SEQ ID NO: 335 - protein, 5 aa, Artificial Sequence
  Description of Artificial Sequence: Synthetic peptide
  XENP023607 vhCDR1
HYGMN

SEQ ID NO: 336 - protein, 17 aa, Artificial Sequence
  Description of Artificial Sequence: Synthetic peptide
  XENP023607 vhCDR2
WINTYTGEPTYADGFTG

SEQ ID NO: 337 - protein, 8 aa, Artificial Sequence
  Description of Artificial Sequence: Synthetic peptide
  XENP023607 vhCDR3
DYYGSSPY

SEQ ID NO: 338 - protein, 16 aa, Artificial Sequence
  Description of Artificial Sequence: Synthetic peptide
  XENP023607 vlCDR1
TSSQSIVHSNGNTYLE

SEQ ID NO: 339 - protein, 7 aa, Artificial Sequence
  Description of Artificial Sequence: Synthetic peptide
  XENP023607 vlCDR2
KVSNRFS

SEQ ID NO: 340 - protein, 9 aa, Artificial Sequence
  Description of Artificial Sequence: Synthetic peptide
  XENP023607 vlCDR3
FQGSHVPNT

SEQ ID NO: 341 - protein, 251 aa, Artificial Sequence
  Description of Artificial Sequence: Synthetic polypeptide
  XENP023608 1C11_H3_L3.31_scFv
QIQLVQSGSELKKPGASVKVSCKASGYTFTHYGMNWVRQAPGQGLEWMGWINTYTGEPTYADGFTGRFVFSLDTSVSTAYLQISSLKAEDTAVYFCARDYYGSSPYWGQGTLVTVSSGKPGSGKPGSGKPGSGKPGSDVLMTQSPDSLAVSLGERATINCKTSQSIVHSNGNTYLEWYQQKPGQSPKLLIYKVSNRFSGVPDRFSGSGSGTDFTLTISSLQAEDVAVYYCFQGSHVPNTFGGGTKVEIKGS

SEQ ID NO: 342 - protein, 117 aa, Artificial Sequence; identical to SEQ ID NO: 32
  Description of Artificial Sequence: Synthetic polypeptide
  VH of XENP023608

SEQ ID NO: 343 - protein, 114 aa, Artificial Sequence
  Description of Artificial Sequence: Synthetic polypeptide
  VL of XENP023608
DVLMTQSPDSLAVSLGERATINCKTSQSIVHSNGNTYLEWYQQKPGQSPKLLIYKVSNRFSGVPDRFSGSGSGTDFTLTISSLQAEDVAVYYCFQGSHVPNTFGGGTKVEIKGS

SEQ ID NO: 344 - protein, 5 aa, Artificial Sequence
  Description of Artificial Sequence: Synthetic peptide
  XENP023608 vhCDR1
HYGMN

SEQ ID NO: 345 - protein, 17 aa, Artificial Sequence
  Description of Artificial Sequence: Synthetic peptide
  XENP023608 vhCDR2
WINTYTGEPTYADGFTG

SEQ ID NO: 346 - protein, 8 aa, Artificial Sequence
  Description of Artificial Sequence: Synthetic peptide
  XENP023608 vhCDR3
DYYGSSPY

SEQ ID NO: 347 - protein, 16 aa, Artificial Sequence
  Description of Artificial Sequence: Synthetic peptide
  XENP023608 vlCDR1
KTSQSIVHSNGNTYLE

SEQ ID NO: 348 - protein, 7 aa, Artificial Sequence
  Description of Artificial Sequence: Synthetic peptide
  XENP023608 vlCDR2
KVSNRFS

SEQ ID NO: 349 - protein, 9 aa, Artificial Sequence
  Description of Artificial Sequence: Synthetic peptide
  XENP023608 vlCDR3
FQGSHVPNT

SEQ ID NO: 350 - protein, 251 aa, Artificial Sequence
  Description of Artificial Sequence: Synthetic polypeptide
  XENP023609 1C11_H3_L3.32_scFv
QIQLVQSGSELKKPGASVKVSCKASGYTFTHYGMNWVRQAPGQGLEWMGWINTYTGEPTYADGFTGRFVFSLDTSVSTAYLQISSLKAEDTAVYFCARDYYGSSPYWGQGTLVTVSSGKPGSGKPGSGKPGSGKPGSDVLMTQSPDSLAVSLGERATINCKASQSIVHSNGNTYLEWYQQKPGQSPKLLIYKVSNRFSGVPDRFSGSGSGTDFTLTISSLQAEDVAVYYCFQGSHVPNTFGGGTKVEIKGS

SEQ ID NO: 351 - protein, 117 aa, Artificial Sequence; identical to SEQ ID NO: 32
  Description of Artificial Sequence: Synthetic polypeptide
  VH of XENP023609

SEQ ID NO: 352 - protein, 114 aa, Artificial Sequence
  Description of Artificial Sequence: Synthetic polypeptide
  VL of XENP023609
DVLMTQSPDSLAVSLGERATINCKASQSIVHSNGNTYLEWYQQKPGQSPKLLIYKVSNRFSGVPDRFSGSGSGTDFTLTISSLQAEDVAVYYCFQGSHVPNTFGGGTKVEIKGS

SEQ ID NO: 353 - protein, 5 aa, Artificial Sequence
  Description of Artificial Sequence: Synthetic peptide
  XENP023609 vhCDR1
HYGMN

SEQ ID NO: 354 - protein, 17 aa, Artificial Sequence
  Description of Artificial Sequence: Synthetic peptide
  XENP023609 vhCDR2
WINTYTGEPTYADGFTG

SEQ ID NO: 355 - protein, 8 aa, Artificial Sequence
  Description of Artificial Sequence: Synthetic peptide
  XENP023609 vhCDR3
DYYGSSPY

SEQ ID NO: 356 - protein, 16 aa, Artificial Sequence
  Description of Artificial Sequence: Synthetic peptide
  XENP023609 vlCDR1
KASQSIVHSNGNTYLE

SEQ ID NO: 357 - protein, 7 aa, Artificial Sequence
  Description of Artificial Sequence: Synthetic peptide
  XENP023609 vlCDR2
KVSNRFS

SEQ ID NO: 358 - protein, 9 aa, Artificial Sequence
  Description of Artificial Sequence: Synthetic peptide
  XENP023609 vlCDR3
FQGSHVPNT

SEQ ID NO: 359 - protein, 251 aa, Artificial Sequence
  Description of Artificial Sequence: Synthetic polypeptide
  XENP023610 1C11_H3_L3.34_scFv
QIQLVQSGSELKKPGASVKVSCKASGYTFTHYGMNWVRQAPGQGLEWMGWINTYTGEPTYADGFTGRFVFSLDTSVSTAYLQISSLKAEDTAVYFCARDYYGSSPYWGQGTLVTVSSGKPGSGKPGSGKPGSGKPGSDVLMTQSPDSLAVSLGERATINCKSSQSVVHSNGNTYLEWYQQKPGQSPKLLIYKVSNRFSGVPDRFSGSGSGTDFTLTISSLQAEDVAVYYCFQGSHVPNTFGGGTKVEIKGS

SEQ ID NO: 360 - protein, 117 aa, Artificial Sequence; identical to SEQ ID NO: 32
  Description of Artificial Sequence: Synthetic polypeptide
  VH of XENP023610

SEQ ID NO: 361 - protein, 114 aa, Artificial Sequence
  Description of Artificial Sequence: Synthetic polypeptide
  VL of XENP023610
DVLMTQSPDSLAVSLGERATINCKSSQSVVHSNGNTYLEWYQQKPGQSPKLLIYKVSNRFSGVPDRFSGSGSGTDFTLTISSLQAEDVAVYYCFQGSHVPNTFGGGTKVEIKGS

SEQ ID NO: 362 - protein, 5 aa, Artificial Sequence
  Description of Artificial Sequence: Synthetic peptide
  XENP023610 vhCDR1
HYGMN

SEQ ID NO: 363 - protein, 17 aa, Artificial Sequence
  Description of Artificial Sequence: Synthetic peptide
  XENP023610 vhCDR2
WINTYTGEPTYADGFTG

SEQ ID NO: 364 - protein, 8 aa, Artificial Sequence
  Description of Artificial Sequence: Synthetic peptide
  XENP023610 vhCDR3
DYYGSSPY

SEQ ID NO: 365 - protein, 16 aa, Artificial Sequence
  Description of Artificial Sequence: Synthetic peptide
  XENP023610 vlCDR1
KSSQSVVHSNGNTYLE

SEQ ID NO: 366 - protein, 7 aa, Artificial Sequence
  Description of Artificial Sequence: Synthetic peptide
  XENP023610 vlCDR2
KVSNRFS

SEQ ID NO: 367 - protein, 9 aa, Artificial Sequence
  Description of Artificial Sequence: Synthetic peptide
  XENP023610 vlCDR3
FQGSHVPNT

SEQ ID NO: 368 - protein, 251 aa, Artificial Sequence
  Description of Artificial Sequence: Synthetic polypeptide
  XENP023611 1C11_H3_L3.35_scFv
QIQLVQSGSELKKPGASVKVSCKASGYTFTHYGMNWVRQAPGQGLEWMGWINTYTGEPTYADGFTGRFVFSLDTSVSTAYLQISSLKAEDTAVYFCARDYYGSSPYWGQGTLVTVSSGKPGSGKPGSGKPGSGKPGSDVLMTQSPDSLAVSLGERATINCKSSQSAVHSNGNTYLEWYQQKPGQSPKLLIYKVSNRFSGVPDRFSGSGSGTDFTLTISSLQAEDVAVYYCFQGSHVPNTFGGGTKVEIKGS

SEQ ID NO: 369 - protein, 117 aa, Artificial Sequence; identical to SEQ ID NO: 32
  Description of Artificial Sequence: Synthetic polypeptide
  VH of XENP023611

SEQ ID NO: 370 - protein, 114 aa, Artificial Sequence
  Description of Artificial Sequence: Synthetic polypeptide
  VL of XENP023611
DVLMTQSPDSLAVSLGERATINCKSSQSAVHSNGNTYLEWYQQKPGQSPKLLIYKVSNRFSGVPDRFSGSGSGTDFTLTISSLQAEDVAVYYCFQGSHVPNTFGGGTKVEIKGS

SEQ ID NO: 371 - protein, 5 aa, Artificial Sequence
  Description of Artificial Sequence: Synthetic peptide
  XENP023611 vhCDR1
HYGMN

SEQ ID NO: 372 - protein, 17 aa, Artificial Sequence
  Description of Artificial Sequence: Synthetic peptide
  XENP023611 vhCDR2
WINTYTGEPTYADGFTG

SEQ ID NO: 373 - protein, 8 aa, Artificial Sequence
  Description of Artificial Sequence: Synthetic peptide
  XENP023611 vhCDR3
DYYGSSPY

SEQ ID NO: 374 - protein, 16 aa, Artificial Sequence
  Description of Artificial Sequence: Synthetic peptide
  XENP023611 vlCDR1
KSSQSAVHSNGNTYLE

SEQ ID NO: 375 - protein, 7 aa, Artificial Sequence
  Description of Artificial Sequence: Synthetic peptide
  XENP023611 vlCDR2
KVSNRFS

SEQ ID NO: 376 - protein, 9 aa, Artificial Sequence
  Description of Artificial Sequence: Synthetic peptide
  XENP023611 vlCDR3
FQGSHVPNT

SEQ ID NO: 377 - protein, 251 aa, Artificial Sequence
  Description of Artificial Sequence: Synthetic polypeptide
  XENP023612 1C11_H3_L3.36_scFv
QIQLVQSGSELKKPGASVKVSCKASGYTFTHYGMNWVRQAPGQGLEWMGWINTYTGEPTYADGFTGRFVFSLDTSVSTAYLQISSLKAEDTAVYFCARDYYGSSPYWGQGTLVTVSSGKPGSGKPGSGKPGSGKPGSDVLMTQSPDSLAVSLGERATINCKSSQSIVHSSNNTYLEWYQQKPGQSPKLLIYKVSNRFSGVPDRFSGSGSGTDFTLTISSLQAEDVAVYYCFQGSHVPNTFGGGTKVEIKGS

SEQ ID NO: 378 - protein, 117 aa, Artificial Sequence; identical to SEQ ID NO: 32
  Description of Artificial Sequence: Synthetic polypeptide
  VH of XENP023612

SEQ ID NO: 379 - protein, 114 aa, Artificial Sequence
  Description of Artificial Sequence: Synthetic polypeptide
  VL of XENP023612
DVLMTQSPDSLAVSLGERATINCKSSQSIVHSSNNTYLEWYQQKPGQSPKLLIYKVSNRFSGVPDRFSGSGSGTDFTLTISSLQAEDVAVYYCFQGSHVPNTFGGGTKVEIKGS

SEQ ID NO: 380 - protein, 5 aa, Artificial Sequence
  Description of Artificial Sequence: Synthetic peptide
  XENP023612 vhCDR1
HYGMN

SEQ ID NO: 381 - protein, 17 aa, Artificial Sequence
  Description of Artificial Sequence: Synthetic peptide
  XENP023612 vhCDR2
WINTYTGEPTYADGFTG

SEQ ID NO: 382 - protein, 8 aa, Artificial Sequence
  Description of Artificial Sequence: Synthetic peptide
  XENP023612 vhCDR3
DYYGSSPY

SEQ ID NO: 383 - protein, 16 aa, Artificial Sequence
  Description of Artificial Sequence: Synthetic peptide
  XENP023612 vlCDR1
KSSQSIVHSSNNTYLE

SEQ ID NO: 384 - protein, 7 aa, Artificial Sequence
  Description of Artificial Sequence: Synthetic peptide
  XENP023612 vlCDR2
KVSNRFS

SEQ ID NO: 385 - protein, 9 aa, Artificial Sequence
  Description of Artificial Sequence: Synthetic peptide
  XENP023612 vlCDR3
FQGSHVPNT

SEQ ID NO: 386 - protein, 251 aa, Artificial Sequence
  Description of Artificial Sequence: Synthetic polypeptide
  XENP023613 1C11_H3_L3.37_scFv
QIQLVQSGSELKKPGASVKVSCKASGYTFTHYGMNWVRQAPGQGLEWMGWINTYTGEPTYADGFTGRFVFSLDTSVSTAYLQISSLKAEDTAVYFCARDYYGSSPYWGQGTLVTVSSGKPGSGKPGSGKPGSGKPGSDVLMTQSPDSLAVSLGERATINCKSSQSIVHSNGNSYLEWYQQKPGQSPKLLIYKVSNRFSGVPDRFSGSGSGTDFTLTISSLQAEDVAVYYCFQGSHVPNTFGGGTKVEIKGS

SEQ ID NO: 387 - protein, 117 aa, Artificial Sequence; identical to SEQ ID NO: 32
  Description of Artificial Sequence: Synthetic polypeptide
  VH of XENP023613

SEQ ID NO: 388 - protein, 114 aa, Artificial Sequence
  Description of Artificial Sequence: Synthetic polypeptide
  VL of XENP023613
DVLMTQSPDSLAVSLGERATINCKSSQSIVHSNGNSYLEWYQQKPGQSPKLLIYKVSNRFSGVPDRFSGSGSGTDFTLTISSLQAEDVAVYYCFQGSHVPNTFGGGTKVEIKGS

SEQ ID NO: 389 - protein, 5 aa, Artificial Sequence
  Description of Artificial Sequence: Synthetic peptide
  XENP023613 vhCDR1
HYGMN

SEQ ID NO: 390 - protein, 17 aa, Artificial Sequence
  Description of Artificial Sequence: Synthetic peptide
  XENP023613 vhCDR2
WINTYTGEPTYADGFTG

SEQ ID NO: 391 - protein, 8 aa, Artificial Sequence
  Description of Artificial Sequence: Synthetic peptide
  XENP023613 vhCDR3
DYYGSSPY

SEQ ID NO: 392 - protein, 16 aa, Artificial Sequence
  Description of Artificial Sequence: Synthetic peptide
  XENP023613 vlCDR1
KSSQSIVHSNGNSYLE

SEQ ID NO: 393 - protein, 7 aa, Artificial Sequence
  Description of Artificial Sequence: Synthetic peptide
  XENP023613 vlCDR2
KVSNRFS

SEQ ID NO: 394 - protein, 9 aa, Artificial Sequence
  Description of Artificial Sequence: Synthetic peptide
  XENP023613 vlCDR3
FQGSHVPNT

SEQ ID NO: 395 - protein, 251 aa, Artificial Sequence
  Description of Artificial Sequence: Synthetic polypeptide
  XENP023614 1C11_H3_L3.38_scFv
QIQLVQSGSELKKPGASVKVSCKASGYTFTHYGMNWVRQAPGQGLEWMGWINTYTGEPTYADGFTGRFVFSLDTSVSTAYLQISSLKAEDTAVYFCARDYYGSSPYWGQGTLVTVSSGKPGSGKPGSGKPGSGKPGSDVLMTQSPDSLAVSLGERATINCKSSQSIVHSNGNNYLEWYQQKPGQSPKLLIYKVSNRFSGVPDRFSGSGSGTDFTLTISSLQAEDVAVYYCFQGSHVPNTFGGGTKVEIKGS

SEQ ID NO: 396 - protein, 117 aa, Artificial Sequence; identical to SEQ ID NO: 32
  Description of Artificial Sequence: Synthetic polypeptide
  VH of XENP023614

SEQ ID NO: 397 - protein, 114 aa, Artificial Sequence
  Description of Artificial Sequence: Synthetic polypeptide
  VL of XENP023614
DVLMTQSPDSLAVSLGERATINCKSSQSIVHSNGNNYLEWYQQKPGQSPKLLIYKVSNRFSGVPDRFSGSGSGTDFTLTISSLQAEDVAVYYCFQGSHVPNTFGGGTKVEIKGS

SEQ ID NO: 398 - protein, 5 aa, Artificial Sequence
  Description of Artificial Sequence: Synthetic peptide
  XENP023614 vhCDR1
HYGMN

SEQ ID NO: 399 - protein, 17 aa, Artificial Sequence
  Description of Artificial Sequence: Synthetic peptide
  XENP023614 vhCDR2
WINTYTGEPTYADGFTG

SEQ ID NO: 400 - protein, 8 aa, Artificial Sequence
  Description of Artificial Sequence: Synthetic peptide
  XENP023614 vhCDR3
DYYGSSPY

SEQ ID NO: 401 - protein, 16 aa, Artificial Sequence
  Description of Artificial Sequence: Synthetic peptide
  XENP023614 vlCDR1
KSSQSIVHSNGNNYLE

SEQ ID NO: 402 - protein, 7 aa, Artificial Sequence
  Description of Artificial Sequence: Synthetic peptide
  XENP023614 vlCDR2
KVSNRFS

SEQ ID NO: 403 - protein, 9 aa, Artificial Sequence
  Description of Artificial Sequence: Synthetic peptide
  XENP023614 vlCDR3
FQGSHVPNT

SEQ ID NO: 404 - protein, 251 aa, Artificial Sequence
  Description of Artificial Sequence: Synthetic polypeptide
  XENP023615 1C11_H3_L3.46_scFv
QIQLVQSGSELKKPGASVKVSCKASGYTFTHYGMNWVRQAPGQGLEWMGWINTYTGEPTYADGFTGRFVFSLDTSVSTAYLQISSLKAEDTAVYFCARDYYGSSPYWGQGTLVTVSSGKPGSGKPGSGKPGSGKPGSDVLMTQSPDSLAVSLGERATINCKSSQSIVHSNGNTYLEWYQQKPGQPPKLLIYKVSNRFSGVPDRFSGSGSGTDFTLTISSLQAEDVAVYYCFQGSHVPNTFGGGTKVEIKGS

SEQ ID NO: 405 - protein, 117 aa, Artificial Sequence; identical to SEQ ID NO: 32
  Description of Artificial Sequence: Synthetic polypeptide
  VH of XENP023615

SEQ ID NO: 406 - protein, 114 aa, Artificial Sequence
  Description of Artificial Sequence: Synthetic polypeptide
  VL of XENP023615
DVLMTQSPDSLAVSLGERATINCKSSQSIVHSNGNTYLEWYQQKPGQPPKLLIYKVSNRFSGVPDRFSGSGSGTDFTLTISSLQAEDVAVYYCFQGSHVPNTFGGGTKVEIKGS

SEQ ID NO: 407 - protein, 5 aa, Artificial Sequence
  Description of Artificial Sequence: Synthetic peptide
  XENP023615 vhCDR1
HYGMN

SEQ ID NO: 408 - protein, 17 aa, Artificial Sequence
  Description of Artificial Sequence: Synthetic peptide
  XENP023615 vhCDR2
WINTYTGEPTYADGFTG

SEQ ID NO: 409 - protein, 8 aa, Artificial Sequence
  Description of Artificial Sequence: Synthetic peptide
  XENP023615 vhCDR3
DYYGSSPY

SEQ ID NO: 410 - protein, 16 aa, Artificial Sequence
  Description of Artificial Sequence: Synthetic peptide
  XENP023615 vlCDR1
KSSQSIVHSNGNTYLE

SEQ ID NO: 411 - protein, 7 aa, Artificial Sequence
  Description of Artificial Sequence: Synthetic peptide
  XENP023615 vlCDR2
KVSNRFS

SEQ ID NO: 412 - protein, 9 aa, Artificial Sequence
  Description of Artificial Sequence: Synthetic peptide
  XENP023615 vlCDR3
FQGSHVPNT

SEQ ID NO: 413 - protein, 251 aa, Artificial Sequence
  Description of Artificial Sequence: Synthetic polypeptide
  XENP023616 1C11_H3_L3.47_scFv
QIQLVQSGSELKKPGASVKVSCKASGYTFTHYGMNWVRQAPGQGLEWMGWINTYTGEPTYADGFTGRFVFSLDTSVSTAYLQISSLKAEDTAVYFCARDYYGSSPYWGQGTLVTVSSGKPGSGKPGSGKPGSGKPGSDVLMTQSPDSLAVSLGERATINCKSSQSIVHSNGNTYLEWYQQKPGQAPKLLIYKVSNRFSGVPDRFSGSGSGTDFTLTISSLQAEDVAVYYCFQGSHVPNTFGGGTKVEIKGS

SEQ ID NO: 414 - protein, 117 aa, Artificial Sequence; identical to SEQ ID NO: 32
  Description of Artificial Sequence: Synthetic polypeptide
  VH of XENP023616

SEQ ID NO: 415 - protein, 114 aa, Artificial Sequence
  Description of Artificial Sequence: Synthetic polypeptide
  VL of XENP023616
DVLMTQSPDSLAVSLGERATINCKSSQSIVHSNGNTYLEWYQQKPGQAPKLLIYKVSNRFSGVPDRFSGSGSGTDFTLTISSLQAEDVAVYYCFQGSHVPNTFGGGTKVEIKGS

SEQ ID NO: 416 - protein, 5 aa, Artificial Sequence
  Description of Artificial Sequence: Synthetic peptide
  XENP023616 vhCDR1
HYGMN

SEQ ID NO: 417 - protein, 17 aa, Artificial Sequence
  Description of Artificial Sequence: Synthetic peptide
  XENP023616 vhCDR2
WINTYTGEPTYADGFTG

SEQ ID NO: 418 - protein, 8 aa, Artificial Sequence
  Description of Artificial Sequence: Synthetic peptide
  XENP023616 vhCDR3
DYYGSSPY

SEQ ID NO: 419 - protein, 16 aa, Artificial Sequence
  Description of Artificial Sequence: Synthetic peptide
  XENP023616 vlCDR1
KSSQSIVHSNGNTYLE

SEQ ID NO: 420 - protein, 7 aa, Artificial Sequence
  Description of Artificial Sequence: Synthetic peptide
  XENP023616 vlCDR2
KVSNRFS

SEQ ID NO: 421 - protein, 9 aa, Artificial Sequence
  Description of Artificial Sequence: Synthetic peptide
  XENP023616 vlCDR3
FQGSHVPNT

SEQ ID NO: 422 - protein, 251 aa, Artificial Sequence
  Description of Artificial Sequence: Synthetic polypeptide
  XENP023617 1C11_H3_L3.49_scFv
QIQLVQSGSELKKPGASVKVSCKASGYTFTHYGMNWVRQAPGQGLEWMGWINTYTGEPTYADGFTGRFVFSLDTSVSTAYLQISSLKAEDTAVYFCARDYYGSSPYWGQGTLVTVSSGKPGSGKPGSGKPGSGKPGSDVLMTQSPDSLAVSLGERATINCKSSQSIVHSNGNTYLEWYQQKPGQSPKLLIYGVSNRFSGVPDRFSGSGSGTDFTLTISSLQAEDVAVYYCFQGSHVPNTFGGGTKVEIKGS

SEQ ID NO: 423 - protein, 117 aa, Artificial Sequence; identical to SEQ ID NO: 32
  Description of Artificial Sequence: Synthetic polypeptide
  VH of XENP023617

SEQ ID NO: 424 - protein, 114 aa, Artificial Sequence
  Description of Artificial Sequence: Synthetic polypeptide
  VL of XENP023617
DVLMTQSPDSLAVSLGERATINCKSSQSIVHSNGNTYLEWYQQKPGQSPKLLIYGVSNRFSGVPDRFSGSGSGTDFTLTISSLQAEDVAVYYCFQGSHVPNTFGGGTKVEIKGS

SEQ ID NO: 425 - protein, 5 aa, Artificial Sequence
  Description of Artificial Sequence: Synthetic peptide
  XENP023617 vhCDR1
HYGMN

SEQ ID NO: 426 - protein, 17 aa, Artificial Sequence
  Description of Artificial Sequence: Synthetic peptide
  XENP023617 vhCDR2
WINTYTGEPTYADGFTG

SEQ ID NO: 427 - protein, 8 aa, Artificial Sequence
  Description of Artificial Sequence: Synthetic peptide
  XENP023617 vhCDR3
DYYGSSPY

SEQ ID NO: 428 - protein, 16 aa, Artificial Sequence
  Description of Artificial Sequence: Synthetic peptide
  XENP023617 vlCDR1
KSSQSIVHSNGNTYLE

SEQ ID NO: 429 - protein, 7 aa, Artificial Sequence
  Description of Artificial Sequence: Synthetic peptide
  XENP023617 vlCDR2
GVSNRFS

SEQ ID NO: 430 - protein, 9 aa, Artificial Sequence
  Description of Artificial Sequence: Synthetic peptide
  XENP023617 vlCDR3
FQGSHVPNT

SEQ ID NO: 431 - protein, 251 aa, Artificial Sequence
  Description of Artificial Sequence: Synthetic polypeptide
  XENP023618 1C11_H3_L3.50_scFv
QIQLVQSGSELKKPGASVKVSCKASGYTFTHYGMNWVRQAPGQGLEWMGWINTYTGEPTYADGFTGRFVFSLDTSVSTAYLQISSLKAEDTAVYFCARDYYGSSPYWGQGTLVTVSSGKPGSGKPGSGKPGSGKPGSDVLMTQSPDSLAVSLGERATINCKSSQSIVHSNGNTYLEWYQQKPGQSPKLLIYSVSNRFSGVPDRFSGSGSGTDFTLTISSLQAEDVAVYYCFQGSHVPNTFGGGTKVEIKGS

SEQ ID NO: 432 - protein, 117 aa, Artificial Sequence; identical to SEQ ID NO: 32
  Description of Artificial Sequence: Synthetic polypeptide
  VH of XENP023618

SEQ ID NO: 433 - protein, 114 aa, Artificial Sequence
  Description of Artificial Sequence: Synthetic polypeptide
  VL of XENP023618
DVLMTQSPDSLAVSLGERATINCKSSQSIVHSNGNTYLEWYQQKPGQSPKLLIYSVSNRFSGVPDRFSGSGSGTDFTLTISSLQAEDVAVYYCFQGSHVPNTFGGGTKVEIKGS

SEQ ID NO: 434 - protein, 5 aa, Artificial Sequence
  Description of Artificial Sequence: Synthetic peptide
  XENP023618 vhCDR1
HYGMN

SEQ ID NO: 435 - protein, 17 aa, Artificial Sequence
  Description of Artificial Sequence: Synthetic peptide
  XENP023618 vhCDR2
WINTYTGEPTYADGFTG

SEQ ID NO: 436 - protein, 8 aa, Artificial Sequence
  Description of Artificial Sequence: Synthetic peptide
  XENP023618 vhCDR3
DYYGSSPY

SEQ ID NO: 437 - protein, 16 aa, Artificial Sequence
  Description of Artificial Sequence: Synthetic peptide
  XENP023618 vlCDR1
KSSQSIVHSNGNTYLE

SEQ ID NO: 438 - protein, 7 aa, Artificial Sequence
  Description of Artificial Sequence: Synthetic peptide
  XENP023618 vlCDR2
SVSNRFS

SEQ ID NO: 439 - protein, 9 aa, Artificial Sequence
  Description of Artificial Sequence: Synthetic peptide
  XENP023618 vlCDR3
FQGSHVPNT

SEQ ID NO: 440 - protein, 251 aa, Artificial Sequence
  Description of Artificial Sequence: Synthetic polypeptide
  XENP023619 1C11_H3_L3.51_scFv
QIQLVQSGSELKKPGASVKVSCKASGYTFTHYGMNWVRQAPGQGLEWMGWINTYTGEPTYADGFTGRFVFSLDTSVSTAYLQISSLKAEDTAVYFCARDYYGSSPYWGQGTLVTVSSGKPGSGKPGSGKPGSGKPGSDVLMTQSPDSLAVSLGERATINCKSSQSIVHSNGNTYLEWYQQKPGQSPKLLIYKASNRFSGVPDRFSGSGSGTDFTLTISSLQAEDVAVYYCFQGSHVPNTFGGGTKVEIKGS

SEQ ID NO: 441 - protein, 117 aa, Artificial Sequence; identical to SEQ ID NO: 32
  Description of Artificial Sequence: Synthetic polypeptide
  VH of XENP023619

SEQ ID NO: 442 - protein, 114 aa, Artificial Sequence
  Description of Artificial Sequence: Synthetic polypeptide
  VL of XENP023619
DVLMTQSPDSLAVSLGERATINCKSSQSIVHSNGNTYLEWYQQKPGQSPKLLIYKASNRFSGVPDRFSGSGSGTDFTLTISSLQAEDVAVYYCFQGSHVPNTFGGGTKVEIKGS

SEQ ID NO: 443 - protein, 5 aa, Artificial Sequence
  Description of Artificial Sequence: Synthetic peptide
  XENP023619 vhCDR1
HYGMN

SEQ ID NO: 444 - protein, 17 aa, Artificial Sequence
  Description of Artificial Sequence: Synthetic peptide
  XENP023619 vhCDR2
WINTYTGEPTYADGFTG

SEQ ID NO: 445 - protein, 8 aa, Artificial Sequence
  Description of Artificial Sequence: Synthetic peptide
  XENP023619 vhCDR3
DYYGSSPY

SEQ ID NO: 446 - protein, 16 aa, Artificial Sequence
  Description of Artificial Sequence: Synthetic peptide
  XENP023619 vlCDR1
KSSQSIVHSNGNTYLE

SEQ ID NO: 447 - protein, 7 aa, Artificial Sequence
  Description of Artificial Sequence: Synthetic peptide
  XENP023619 vlCDR2
KASNRFS

SEQ ID NO: 448 - protein, 9 aa, Artificial Sequence
  Description of Artificial Sequence: Synthetic peptide
  XENP023619 vlCDR3
FQGSHVPNT

SEQ ID NO: 449 - protein, 251 aa, Artificial Sequence
  Description of Artificial Sequence: Synthetic polypeptide
  XENP023620 1C11_H3_L3.52_scFv
QIQLVQSGSELKKPGASVKVSCKASGYTFTHYGMNWVRQAPGQGLEWMGWINTYTGEPTYADGFTGRFVFSLDTSVSTAYLQISSLKAEDTAVYFCARDYYGSSPYWGQGTLVTVSSGKPGSGKPGSGKPGSGKPGSDVLMTQSPDSLAVSLGERATINCKSSQSIVHSNGNTYLEWYQQKPGQSPKLLIYKTSNRFSGVPDRFSGSGSGTDFTLTISSLQAEDVAVYYCFQGSHVPNTFGGGTKVEIKGS

SEQ ID NO: 450 - protein, 117 aa, Artificial Sequence; identical to SEQ ID NO: 32
  Description of Artificial Sequence: Synthetic polypeptide
  VH of XENP023620

SEQ ID NO: 451 - protein, 114 aa, Artificial Sequence
  Description of Artificial Sequence: Synthetic polypeptide
  VL of XENP023620
DVLMTQSPDSLAVSLGERATINCKSSQSIVHSNGNTYLEWYQQKPGQSPKLLIYKTSNRFSGVPDRFSGSGSGTDFTLTISSLQAEDVAVYYCFQGSHVPNTFGGGTKVEIKGS

SEQ ID NO: 452 - protein, 5 aa, Artificial Sequence
  Description of Artificial Sequence: Synthetic peptide
  XENP023620 vhCDR1
HYGMN

SEQ ID NO: 453 - protein, 17 aa, Artificial Sequence
  Description of Artificial Sequence: Synthetic peptide
  XENP023620 vhCDR2
WINTYTGEPTYADGFTG

SEQ ID NO: 454 - protein, 8 aa, Artificial Sequence
  Description of Artificial Sequence: Synthetic peptide
  XENP023620 vhCDR3
DYYGSSPY

SEQ ID NO: 455 - protein, 16 aa, Artificial Sequence
  Description of Artificial Sequence: Synthetic peptide
  XENP023620 vlCDR1
KSSQSIVHSNGNTYLE

SEQ ID NO: 456 - protein, 7 aa, Artificial Sequence
  Description of Artificial Sequence: Synthetic peptide
  XENP023620 vlCDR2
KTSNRFS

SEQ ID NO: 457 - protein, 9 aa, Artificial Sequence
  Description of Artificial Sequence: Synthetic peptide
  XENP023620 vlCDR3
FQGSHVPNT

SEQ ID NO: 458 - protein, 251 aa, Artificial Sequence
  Description of Artificial Sequence: Synthetic polypeptide
  XENP023621 1C11_H3_L3.53_scFv
QIQLVQSGSELKKPGASVKVSCKASGYTFTHYGMNWVRQAPGQGLEWMGWINTYTGEPTYADGFTGRFVFSLDTSVSTAYLQISSLKAEDTAVYFCARDYYGSSPYWGQGTLVTVSSGKPGSGKPGSGKPGSGKPGSDVLMTQSPDSLAVSLGERATINCKSSQSIVHSNGNTYLEWYQQKPGQSPKLLIYKGSNRFSGVPDRFSGSGSGTDFTLTISSLQAEDVAVYYCFQGSHVPNTFGGGTKVEIKGS

SEQ ID NO: 459 - protein, 117 aa, Artificial Sequence; identical to SEQ ID NO: 32
  Description of Artificial Sequence: Synthetic polypeptide
  VH of XENP023621

SEQ ID NO: 460 - protein, 114 aa, Artificial Sequence
  Description of Artificial Sequence: Synthetic polypeptide
  VL of XENP023621
DVLMTQSPDSLAVSLGERATINCKSSQSIVHSNGNTYLEWYQQKPGQSPKLLIYKGSNRFSGVPDRFSGSGSGTDFTLTISSLQAEDVAVYYCFQGSHVPNTFGGGTKVEIKGS

SEQ ID NO: 461 - protein, 5 aa, Artificial Sequence
  Description of Artificial Sequence: Synthetic peptide
  XENP023621 vhCDR1
HYGMN

SEQ ID NO: 462 - protein, 17 aa, Artificial Sequence
  Description of Artificial Sequence: Synthetic peptide
  XENP023621 vhCDR2
WINTYTGEPTYADGFTG

SEQ ID NO: 463 - protein, 8 aa, Artificial Sequence
  Description of Artificial Sequence: Synthetic peptide
  XENP023621 vhCDR3
DYYGSSPY

SEQ ID NO: 464 - protein, 16 aa, Artificial Sequence
  Description of Artificial Sequence: Synthetic peptide
  XENP023621 vlCDR1
KSSQSIVHSNGNTYLE

SEQ ID NO: 465 - protein, 7 aa, Artificial Sequence
  Description of Artificial Sequence: Synthetic peptide
  XENP023621 vlCDR2
KGSNRFS

SEQ ID NO: 466 - protein, 9 aa, Artificial Sequence
  Description of Artificial Sequence: Synthetic peptide
  XENP023621 vlCDR3
FQGSHVPNT

SEQ ID NO: 467 - protein, 251 aa, Artificial Sequence
  Description of Artificial Sequence: Synthetic polypeptide
  XENP023622 1C11_H3_L3.54_scFv
QIQLVQSGSELKKPGASVKVSCKASGYTFTHYGMNWVRQAPGQGLEWMGWINTYTGEPTYADGFTGRFVFSLDTSVSTAYLQISSLKAEDTAVYFCARDYYGSSPYWGQGTLVTVSSGKPGSGKPGSGKPGSGKPGSDVLMTQSPDSLAVSLGERATINCKSSQSIVHSNGNTYLEWYQQKPGQSPKLLIYKMSNRFSGVPDRFSGSGSGTDFTLTISSLQAEDVAVYYCFQGSHVPNTFGGGTKVEIKGS

SEQ ID NO: 468 - protein, 117 aa, Artificial Sequence; identical to SEQ ID NO: 32
  Description of Artificial Sequence: Synthetic polypeptide
  VH of XENP023622

SEQ ID NO: 469 - protein, 114 aa, Artificial Sequence
  Description of Artificial Sequence: Synthetic polypeptide
  VL of XENP023622
DVLMTQSPDSLAVSLGERATINCKSSQSIVHSNGNTYLEWYQQKPGQSPKLLIYKMSNRFSGVPDRFSGSGSGTDFTLTISSLQAEDVAVYYCFQGSHVPNTFGGGTKVEIKGS

SEQ ID NO: 470 - protein, 5 aa, Artificial Sequence
  Description of Artificial Sequence: Synthetic peptide
  XENP023622 vhCDR1
HYGMN

SEQ ID NO: 471 - protein, 17 aa, Artificial Sequence
  Description of Artificial Sequence: Synthetic peptide
  XENP023622 vhCDR2
WINTYTGEPTYADGFTG

SEQ ID NO: 472 - protein, 8 aa, Artificial Sequence
  Description of Artificial Sequence: Synthetic peptide
  XENP023622 vhCDR3
DYYGSSPY

SEQ ID NO: 473 - protein, 16 aa, Artificial Sequence
  Description of Artificial Sequence: Synthetic peptide
  XENP023622 vlCDR1
KSSQSIVHSNGNTYLE

SEQ ID NO: 474 - protein, 7 aa, Artificial Sequence
  Description of Artificial Sequence: Synthetic peptide
  XENP023622 vlCDR2
KMSNRFS

SEQ ID NO: 475 - protein, 9 aa, Artificial Sequence
  Description of Artificial Sequence: Synthetic peptide
  XENP023622 vlCDR3
FQGSHVPNT

SEQ ID NO: 476 - protein, 251 aa, Artificial Sequence
  Description of Artificial Sequence: Synthetic polypeptide
  XENP023623 1C11_H3_L3.56_scFv
QIQLVQSGSELKKPGASVKVSCKASGYTFTHYGMNWVRQAPGQGLEWMGWINTYTGEPTYADGFTGRFVFSLDTSVSTAYLQISSLKAEDTAVYFCARDYYGSSPYWGQGTLVTVSSGKPGSGKPGSGKPGSGKPGSDVLMTQSPDSLAVSLGERATINCKSSQSIVHSNGNTYLEWYQQKPGQSPKLLIYKVSNRASGVPDRFSGSGSGTDFTLTISSLQAEDVAVYYCFQGSHVPNTFGGGTKVEIKGS

SEQ ID NO: 477 - protein, 117 aa, Artificial Sequence; identical to SEQ ID NO: 32
  Description of Artificial Sequence: Synthetic polypeptide
  VH of XENP023623

SEQ ID NO: 478 - protein, 114 aa, Artificial Sequence
  Description of Artificial Sequence: Synthetic polypeptide
  VL of XENP023623
DVLMTQSPDSLAVSLGERATINCKSSQSIVHSNGNTYLEWYQQKPGQSPKLLIYKVSNRASGVPDRFSGSGSGTDFTLTISSLQAEDVAVYYCFQGSHVPNTFGGGTKVEIKGS

SEQ ID NO: 479 - protein, 5 aa, Artificial Sequence
  Description of Artificial Sequence: Synthetic peptide
  XENP023623 vhCDR1
HYGMN

SEQ ID NO: 480 - protein, 17 aa, Artificial Sequence
  Description of Artificial Sequence: Synthetic peptide
  XENP023623 vhCDR2
WINTYTGEPTYADGFTG

SEQ ID NO: 481 - protein, 8 aa, Artificial Sequence
  Description of Artificial Sequence: Synthetic peptide
  XENP023623 vhCDR3
DYYGSSPY

SEQ ID NO: 482 - protein, 16 aa, Artificial Sequence
  Description of Artificial Sequence: Synthetic peptide
  XENP023623 vlCDR1
KSSQSIVHSNGNTYLE

SEQ ID NO: 483 - protein, 7 aa, Artificial Sequence
  Description of Artificial Sequence: Synthetic peptide
  XENP023623 vlCDR2
KVSNRAS

SEQ ID NO: 484 - protein, 9 aa, Artificial Sequence
  Description of Artificial Sequence: Synthetic peptide
  XENP023623 vlCDR3
FQGSHVPNT

SEQ ID NO: 485 - protein, 251 aa, Artificial Sequence
  Description of Artificial Sequence: Synthetic polypeptide
  XENP023624 1C11_H3_L3.57_scFv
QIQLVQSGSELKKPGASVKVSCKASGYTFTHYGMNWVRQAPGQGLEWMGWINTYTGEPTYADGFTGRFVFSLDTSVSTAYLQISSLKAEDTAVYFCARDYYGSSPYWGQGTLVTVSSGKPGSGKPGSGKPGSGKPGSDVLMTQSPDSLAVSLGERATINCKSSQSIVHSNGNTYLEWYQQKPGQSPKLLIYKVSNRFTGVPDRFSGSGSGTDFTLTISSLQAEDVAVYYCFQGSHVPNTFGGGTKVEIKGS

SEQ ID NO: 486 - protein, 117 aa, Artificial Sequence; identical to SEQ ID NO: 32
  Description of Artificial Sequence: Synthetic polypeptide
  VH of XENP023624

SEQ ID NO: 487 - protein, 114 aa, Artificial Sequence
  Description of Artificial Sequence: Synthetic polypeptide
  VL of XENP023624
DVLMTQSPDSLAVSLGERATINCKSSQSIVHSNGNTYLEWYQQKPGQSPKLLIYKVSNRFTGVPDRFSGSGSGTDFTLTISSLQAEDVAVYYCFQGSHVPNTFGGGTKVEIKGS

SEQ ID NO: 488 - protein, 5 aa, Artificial Sequence
  Description of Artificial Sequence: Synthetic peptide
  XENP023624 vhCDR1
HYGMN

SEQ ID NO: 489 - protein, 17 aa, Artificial Sequence
  Description of Artificial Sequence: Synthetic peptide
  XENP023624 vhCDR2
WINTYTGEPTYADGFTG

SEQ ID NO: 490 - protein, 8 aa, Artificial Sequence
  Description of Artificial Sequence: Synthetic peptide
  XENP023624 vhCDR3
DYYGSSPY

SEQ ID NO: 491 - protein, 16 aa, Artificial Sequence
  Description of Artificial Sequence: Synthetic peptide
  XENP023624 vlCDR1
KSSQSIVHSNGNTYLE

SEQ ID NO: 492 - protein, 7 aa, Artificial Sequence
  Description of Artificial Sequence: Synthetic peptide
  XENP023624 vlCDR2
KVSNRFT

SEQ ID NO: 493 - protein, 9 aa, Artificial Sequence
  Description of Artificial Sequence: Synthetic peptide
  XENP023624 vlCDR3
FQGSHVPNT

SEQ ID NO: 494 - protein, 251 aa, Artificial Sequence
  Description of Artificial Sequence: Synthetic polypeptide
  XENP023625 1C11_H3_L3.58_scFv
QIQLVQSGSELKKPGASVKVSCKASGYTFTHYGMNWVRQAPGQGLEWMGWINTYTGEPTYADGFTGRFVFSLDTSVSTAYLQISSLKAEDTAVYFCARDYYGSSPYWGQGTLVTVSSGKPGSGKPGSGKPGSGKPGSDVLMTQSPDSLAVSLGERATINCKSSQSIVHSNGNTYLEWYQQKPGQSPKLLIYKVSNRFSGVPDRFSGSGSGTDFTLTISGLQAEDVAVYYCFQGSHVPNTFGGGTKVEIKGS

SEQ ID NO: 495 - protein, 117 aa, Artificial Sequence; identical to SEQ ID NO: 32
  Description of Artificial Sequence: Synthetic polypeptide
  VH of XENP023625

SEQ ID NO: 496 - protein, 114 aa, Artificial Sequence
  Description of Artificial Sequence: Synthetic polypeptide
  VL of XENP023625
DVLMTQSPDSLAVSLGERATINCKSSQSIVHSNGNTYLEWYQQKPGQSPKLLIYKVSNRFSGVPDRFSGSGSGTDFTLTISGLQAEDVAVYYCFQGSHVPNTFGGGTKVEIKGS

SEQ ID NO: 497 - protein, 5 aa, Artificial Sequence
  Description of Artificial Sequence: Synthetic peptide
  XENP023625 vhCDR1
HYGMN

SEQ ID NO: 498 - protein, 17 aa, Artificial Sequence
  Description of Artificial Sequence: Synthetic peptide
  XENP023625 vhCDR2
WINTYTGEPTYADGFTG

SEQ ID NO: 499 - protein, 8 aa, Artificial Sequence
  Description of Artificial Sequence: Synthetic peptide
  XENP023625 vhCDR3
DYYGSSPY

SEQ ID NO: 500 - protein, 16 aa, Artificial Sequence
  Description of Artificial Sequence: Synthetic peptide
  XENP023625 vlCDR1
KSSQSIVHSNGNTYLE

SEQ ID NO: 501 - protein, 7 aa, Artificial Sequence
  Description of Artificial Sequence: Synthetic peptide
  XENP023625 vlCDR2
KVSNRFS

SEQ ID NO: 502 - protein, 9 aa, Artificial Sequence
  Description of Artificial Sequence: Synthetic peptide
  XENP023625 vlCDR3
FQGSHVPNT

SEQ ID NO: 503 - protein, 251 aa, Artificial Sequence
  Description of Artificial Sequence: Synthetic polypeptide
  XENP023626 1C11_H3_L3.59_scFv
QIQLVQSGSELKKPGASVKVSCKASGYTFTHYGMNWVRQAPGQGLEWMGWINTYTGEPTYADGFTGRFVFSLDTSVSTAYLQISSLKAEDTAVYFCARDYYGSSPYWGQGTLVTVSSGKPGSGKPGSGKPGSGKPGSDVLMTQSPDSLAVSLGERATINCKSSQSIVHSNGNTYLEWYQQKPGQSPKLLIYKVSNRFSGVPDRFSGSGSGTDFTLTISRLQAEDVAVYYCFQGSHVPNTFGGGTKVEIKGS

SEQ ID NO: 504 - protein, 117 aa, Artificial Sequence; identical to SEQ ID NO: 32
  Description of Artificial Sequence: Synthetic polypeptide
  VH of XENP023626

SEQ ID NO: 505 - protein, 114 aa, Artificial Sequence
  Description of Artificial Sequence: Synthetic polypeptide
  VL of XENP023626
DVLMTQSPDSLAVSLGERATINCKSSQSIVHSNGNTYLEWYQQKPGQSPKLLIYKVSNRFSGVPDRFSGSGSGTDFTLTISRLQAEDVAVYYCFQGSHVPNTFGGGTKVEIKGS

SEQ ID NO: 506 - protein, 5 aa, Artificial Sequence
  Description of Artificial Sequence: Synthetic peptide
  XENP023626 vhCDR1
HYGMN

SEQ ID NO: 507 - protein, 17 aa, Artificial Sequence
  Description of Artificial Sequence: Synthetic peptide
  XENP023626 vhCDR2
WINTYTGEPTYADGFTG

SEQ ID NO: 508 - protein, 8 aa, Artificial Sequence
  Description of Artificial Sequence: Synthetic peptide
  XENP023626 vhCDR3
DYYGSSPY

SEQ ID NO: 509 - protein, 16 aa, Artificial Sequence
  Description of Artificial Sequence: Synthetic peptide
  XENP023626 vlCDR1
KSSQSIVHSNGNTYLE

SEQ ID NO: 510 - protein, 7 aa, Artificial Sequence
  Description of Artificial Sequence: Synthetic peptide
  XENP023626 vlCDR2
KVSNRFS

SEQ ID NO: 511 - protein, 9 aa, Artificial Sequence
  Description of Artificial Sequence: Synthetic peptide
  XENP023626 vlCDR3
FQGSHVPNT

SEQ ID NO: 512 - protein, 251 aa, Artificial Sequence
  Description of Artificial Sequence: Synthetic polypeptide
  XENP023627 1C11_H3_L3.60_scFv
QIQLVQSGSELKKPGASVKVSCKASGYTFTHYGMNWVRQAPGQGLEWMGWINTYTGEPTYADGFTGRFVFSLDTSVSTAYLQISSLKAEDTAVYFCARDYYGSSPYWGQGTLVTVSSGKPGSGKPGSGKPGSGKPGSDVLMTQSPDSLAVSLGERATINCKSSQSIVHSNGNTYLEWYQQKPGQSPKLLIYKVSNRFSGVPDRFSGSGSGTDFTLTISNLQAEDVAVYYCFQGSHVPNTFGGGTKVEIKGS

SEQ ID NO: 513 - protein, 117 aa, Artificial Sequence; identical to SEQ ID NO: 32
  Description of Artificial Sequence: Synthetic polypeptide
  VH of XENP023627

SEQ ID NO: 514 - protein, 114 aa, Artificial Sequence
  Description of Artificial Sequence: Synthetic polypeptide
  VL of XENP023627
DVLMTQSPDSLAVSLGERATINCKSSQSIVHSNGNTYLEWYQQKPGQSPKLLIYKVSNRFSGVPDRFSGSGSGTDFTLTISNLQAEDVAVYYCFQGSHVPNTFGGGTKVEIKGS

SEQ ID NO: 515 - protein, 5 aa, Artificial Sequence
  Description of Artificial Sequence: Synthetic peptide
  XENP023627 vhCDR1
HYGMN

SEQ ID NO: 516 - protein, 17 aa, Artificial Sequence
  Description of Artificial Sequence: Synthetic peptide
  XENP023627 vhCDR2
WINTYTGEPTYADGFTG

SEQ ID NO: 517 - protein, 8 aa, Artificial Sequence
  Description of Artificial Sequence: Synthetic peptide
  XENP023627 vhCDR3
DYYGSSPY

SEQ ID NO: 518 - protein, 16 aa, Artificial Sequence
  Description of Artificial Sequence: Synthetic peptide
  XENP023627 vlCDR1
KSSQSIVHSNGNTYLE

SEQ ID NO: 519 - protein, 7 aa, Artificial Sequence
  Description of Artificial Sequence: Synthetic peptide
  XENP023627 vlCDR2
KVSNRFS

SEQ ID NO: 520 - protein, 9 aa, Artificial Sequence
  Description of Artificial Sequence: Synthetic peptide
  XENP023627 vlCDR3
FQGSHVPNT

SEQ ID NO: 521 - protein, 251 aa, Artificial Sequence
  Description of Artificial Sequence: Synthetic polypeptide
  XENP023628 1C11_H3_L3.62_scFv
QIQLVQSGSELKKPGASVKVSCKASGYTFTHYGMNWVRQAPGQGLEWMGWINTYTGEPTYADGFTGRFVFSLDTSVSTAYLQISSLKAEDTAVYFCARDYYGSSPYWGQGTLVTVSSGKPGSGKPGSGKPGSGKPGSDVLMTQSPDSLAVSLGERATINCKSSQSIVHSNGNTYLEWYQQKPGQSPKLLIYKVSNRFSGVPDRFSGSGSGTDFTLTISSMQAEDVAVYYCFQGSHVPNTFGGGTKVEIKGS

SEQ ID NO: 522 - protein, 117 aa, Artificial Sequence; identical to SEQ ID NO: 32
  Description of Artificial Sequence: Synthetic polypeptide
  VH of XENP023628

SEQ ID NO: 523 - protein, 114 aa, Artificial Sequence
  Description of Artificial Sequence: Synthetic polypeptide
  VL of XENP023628
DVLMTQSPDSLAVSLGERATINCKSSQSIVHSNGNTYLEWYQQKPGQSPKLLIYKVSNRFSGVPDRFSGSGSGTDFTLTISSMQAEDVAVYYCFQGSHVPNTFGGGTKVEIKGS

SEQ ID NO: 524 - protein, 5 aa, Artificial Sequence
  Description of Artificial Sequence: Synthetic peptide
  XENP023628 vhCDR1
HYGMN

SEQ ID NO: 525 - protein, 17 aa, Artificial Sequence
  Description of Artificial Sequence: Synthetic peptide
  XENP023628 vhCDR2
WINTYTGEPTYADGFTG

SEQ ID NO: 526 - protein, 8 aa, Artificial Sequence
  Description of Artificial Sequence: Synthetic peptide
  XENP023628 vhCDR3
DYYGSSPY

SEQ ID NO: 527 - protein, 16 aa, Artificial Sequence
  Description of Artificial Sequence: Synthetic peptide
  XENP023628 vlCDR1
KSSQSIVHSNGNTYLE

SEQ ID NO: 528 - protein, 7 aa, Artificial Sequence
  Description of Artificial Sequence: Synthetic peptide
  XENP023628 vlCDR2
KVSNRFS

SEQ ID NO: 529 - protein, 9 aa, Artificial Sequence
  Description of Artificial Sequence: Synthetic peptide
  XENP023628 vlCDR3
FQGSHVPNT

SEQ ID NO: 530 - protein, 251 aa, Artificial Sequence
  Description of Artificial Sequence: Synthetic polypeptide
  XENP023629 1C11_H3_L3.63_scFv
QIQLVQSGSELKKPGASVKVSCKASGYTFTHYGMNWVRQAPGQGLEWMGWINTYTGEPTYADGFTGRFVFSLDTSVSTAYLQISSLKAEDTAVYFCARDYYGSSPYWGQGTLVTVSSGKPGSGKPGSGKPGSGKPGSDVLMTQSPDSLAVSLGERATINCKSSQSIVHSNGNTYLEWYQQKPGQSPKLLIYKVSNRFSGVPDRFSGSGSGTDFTLTISSVQAEDVAVYYCFQGSHVPNTFGGGTKVEIKGS

SEQ ID NO: 531 - protein, 117 aa, Artificial Sequence; identical to SEQ ID NO: 32
  Description of Artificial Sequence: Synthetic polypeptide
  VH of XENP023629

SEQ ID NO: 532 - protein, 114 aa, Artificial Sequence
  Description of Artificial Sequence: Synthetic polypeptide
  VL of XENP023629
DVLMTQSPDSLAVSLGERATINCKSSQSIVHSNGNTYLEWYQQKPGQSPKLLIYKVSNRFSGVPDRFSGSGSGTDFTLTISSVQAEDVAVYYCFQGSHVPNTFGGGTKVEIKGS

SEQ ID NO: 533 - protein, 5 aa, Artificial Sequence
  Description of Artificial Sequence: Synthetic peptide
  XENP023629 vhCDR1
HYGMN

SEQ ID NO: 534 - protein, 17 aa, Artificial Sequence
  Description of Artificial Sequence: Synthetic peptide
  XENP023629 vhCDR2
WINTYTGEPTYADGFTG

SEQ ID NO: 535 - protein, 8 aa, Artificial Sequence
  Description of Artificial Sequence: Synthetic peptide
  XENP023629 vhCDR3
DYYGSSPY

SEQ ID NO: 536 - protein, 16 aa, Artificial Sequence
  Description of Artificial Sequence: Synthetic peptide
  XENP023629 vlCDR1
KSSQSIVHSNGNTYLE

SEQ ID NO: 537 - protein, 7 aa, Artificial Sequence
  Description of Artificial Sequence: Synthetic peptide
  XENP023629 vlCDR2
KVSNRFS

SEQ ID NO: 538 - protein, 9 aa, Artificial Sequence
  Description of Artificial Sequence: Synthetic peptide
  XENP023629 vlCDR3
FQGSHVPNT

SEQ ID NO: 539 - protein, 251 aa, Artificial Sequence
  Description of Artificial Sequence: Synthetic polypeptide
  XENP023630 1C11_H3_L3.64_scFv
QIQLVQSGSELKKPGASVKVSCKASGYTFTHYGMNWVRQAPGQGLEWMGWINTYTGEPTYADGFTGRFVFSLDTSVSTAYLQISSLKAEDTAVYFCARDYYGSSPYWGQGTLVTVSSGKPGSGKPGSGKPGSGKPGSDVLMTQSPDSLAVSLGERATINCKSSQSIVHSNGNTYLEWYQQKPGQSPKLLIYKVSNRFSGVPDRFSGSGSGTDFTLTISSAQAEDVAVYYCFQGSHVPNTFGGGTKVEIKGS

SEQ ID NO: 540 - protein, 117 aa, Artificial Sequence; identical to SEQ ID NO: 32
  Description of Artificial Sequence: Synthetic polypeptide
  VH of XENP023630

SEQ ID NO: 541 - protein, 114 aa, Artificial Sequence
  Description of Artificial Sequence: Synthetic polypeptide
  VL of XENP023630
DVLMTQSPDSLAVSLGERATINCKSSQSIVHSNGNTYLEWYQQKPGQSPKLLIYKVSNRFSGVPDRFSGSGSGTDFTLTISSAQAEDVAVYYCFQGSHVPNTFGGGTKVEIKGS

SEQ ID NO: 542 - protein, 5 aa, Artificial Sequence
  Description of Artificial Sequence: Synthetic peptide
  XENP023630 vhCDR1
HYGMN

SEQ ID NO: 543 - protein, 17 aa, Artificial Sequence
  Description of Artificial Sequence: Synthetic peptide
  XENP023630 vhCDR2
WINTYTGEPTYADGFTG

SEQ ID NO: 544 - protein, 8 aa, Artificial Sequence
  Description of Artificial Sequence: Synthetic peptide
  XENP023630 vhCDR3
DYYGSSPY

SEQ ID NO: 545 - protein, 16 aa, Artificial Sequence
  Description of Artificial Sequence: Synthetic peptide
  XENP023630 vlCDR1
KSSQSIVHSNGNTYLE

SEQ ID NO: 546 - protein, 7 aa, Artificial Sequence
  Description of Artificial Sequence: Synthetic peptide
  XENP023630 vlCDR2
KVSNRFS

SEQ ID NO: 547 - protein, 9 aa, Artificial Sequence
  Description of Artificial Sequence: Synthetic peptide
  XENP023630 vlCDR3
FQGSHVPNT

SEQ ID NO: 548 - protein, 251 aa, Artificial Sequence
  Description of Artificial Sequence: Synthetic polypeptide
  XENP023631 1C11_H3_L3.65_scFv
QIQLVQSGSELKKPGASVKVSCKASGYTFTHYGMNWVRQAPGQGLEWMGWINTYTGEPTYADGFTGRFVFSLDTSVSTAYLQISSLKAEDTAVYFCARDYYGSSPYWGQGTLVTVSSGKPGSGKPGSGKPGSGKPGSDVLMTQSPDSLAVSLGERATINCKSSQSIVHSNGNTYLEWYQQKPGQSPKLLIYKVSNRFSGVPDRFSGSGSGTDFTLTISSLEAEDVAVYYCFQGSHVPNTFGGGTKVEIKGS

SEQ ID NO: 549 - protein, 117 aa, Artificial Sequence; identical to SEQ ID NO: 32
  Description of Artificial Sequence: Synthetic polypeptide
  VH of XENP023631

SEQ ID NO: 550 - protein, 114 aa, Artificial Sequence
  Description of Artificial Sequence: Synthetic polypeptide
  VL of XENP023631
DVLMTQSPDSLAVSLGERATINCKSSQSIVHSNGNTYLEWYQQKPGQSPKLLIYKVSNRFSGVPDRFSGSGSGTDFTLTISSLEAEDVAVYYCFQGSHVPNTFGGGTKVEIKGS

SEQ ID NO: 551 - protein, 5 aa, Artificial Sequence
  Description of Artificial Sequence: Synthetic peptide
  XENP023631 vhCDR1
HYGMN

SEQ ID NO: 552 - protein, 17 aa, Artificial Sequence
  Description of Artificial Sequence: Synthetic peptide
  XENP023631 vhCDR2
WINTYTGEPTYADGFTG

SEQ ID NO: 553 - protein, 8 aa, Artificial Sequence
  Description of Artificial Sequence: Synthetic peptide
  XENP023631 vhCDR3
DYYGSSPY

SEQ ID NO: 554 - protein, 16 aa, Artificial Sequence
  Description of Artificial Sequence: Synthetic peptide
  XENP023631 vlCDR1
KSSQSIVHSNGNTYLE

SEQ ID NO: 555 - protein, 7 aa, Artificial Sequence
  Description of Artificial Sequence: Synthetic peptide
  XENP023631 vlCDR2
KVSNRFS

SEQ ID NO: 556 - protein, 9 aa, Artificial Sequence
  Description of Artificial Sequence: Synthetic peptide
  XENP023631 vlCDR3
FQGSHVPNT

SEQ ID NO: 557 - protein, 251 aa, Artificial Sequence
  Description of Artificial Sequence: Synthetic polypeptide
  XENP023632 1C11_H3_L3.66_scFv
QIQLVQSGSELKKPGASVKVSCKASGYTFTHYGMNWVRQAPGQGLEWMGWINTYTGEPTYADGFTGRFVFSLDTSVSTAYLQISSLKAEDTAVYFCARDYYGSSPYWGQGTLVTVSSGKPGSGKPGSGKPGSGKPGSDVLMTQSPDSLAVSLGERATINCKSSQSIVHSNGNTYLEWYQQKPGQSPKLLIYKVSNRFSGVPDRFSGSGSGTDFTLTISSLQPEDVAVYYCFQGSHVPNTFGGGTKVEIKGS

SEQ ID NO: 558 - protein, 117 aa, Artificial Sequence; identical to SEQ ID NO: 32
  Description of Artificial Sequence: Synthetic polypeptide
  VH of XENP023632

SEQ ID NO: 559 - protein, 114 aa, Artificial Sequence
  Description of Artificial Sequence: Synthetic polypeptide
  VL of XENP023632
DVLMTQSPDSLAVSLGERATINCKSSQSIVHSNGNTYLEWYQQKPGQSPKLLIYKVSNRFSGVPDRFSGSGSGTDFTLTISSLQPEDVAVYYCFQGSHVPNTFGGGTKVEIKGS

SEQ ID NO: 560 - protein, 5 aa, Artificial Sequence
  Description of Artificial Sequence: Synthetic peptide
  XENP023632 vhCDR1
HYGMN

SEQ ID NO: 561 - protein, 17 aa, Artificial Sequence
  Description of Artificial Sequence: Synthetic peptide
  XENP023632 vhCDR2
WINTYTGEPTYADGFTG

SEQ ID NO: 562 - protein, 8 aa, Artificial Sequence
  Description of Artificial Sequence: Synthetic peptide
  XENP023632 vhCDR3
DYYGSSPY

SEQ ID NO: 563 - protein, 16 aa, Artificial Sequence
  Description of Artificial Sequence: Synthetic peptide
  XENP023632 vlCDR1
KSSQSIVHSNGNTYLE

SEQ ID NO: 564 - protein, 7 aa, Artificial Sequence
  Description of Artificial Sequence: Synthetic peptide
  XENP023632 vlCDR2
KVSNRFS

SEQ ID NO: 565 - protein, 9 aa, Artificial Sequence
  Description of Artificial Sequence: Synthetic peptide
  XENP023632 vlCDR3
FQGSHVPNT

SEQ ID NO: 566 - protein, 251 aa, Artificial Sequence
  Description of Artificial Sequence: Synthetic polypeptide
  XENP023633 1C11_H3_L3.69_scFv
QIQLVQSGSELKKPGASVKVSCKASGYTFTHYGMNWVRQAPGQGLEWMGWINTYTGEPTYADGFTGRFVFSLDTSVSTAYLQISSLKAEDTAVYFCARDYYGSSPYWGQGTLVTVSSGKPGSGKPGSGKPGSGKPGSDVLMTQSPDSLAVSLGERATINCKSSQSIVHSNGNTYLEWYQQKPGQSPKLLIYKVSNRFSGVPDRFSGSGSGTDFTLTISSLQAEDAAVYYCFQGSHVPNTFGGGTKVEIKGS

SEQ ID NO: 567 - protein, 117 aa, Artificial Sequence; identical to SEQ ID NO: 32
  Description of Artificial Sequence: Synthetic polypeptide
  VH of XENP023633

SEQ ID NO: 568 - protein, 114 aa, Artificial Sequence
  Description of Artificial Sequence: Synthetic polypeptide
  VL of XENP023633
DVLMTQSPDSLAVSLGERATINCKSSQSIVHSNGNTYLEWYQQKPGQSPKLLIYKVSNRFSGVPDRFSGSGSGTDFTLTISSLQAEDAAVYYCFQGSHVPNTFGGGTKVEIKGS

SEQ ID NO: 569 - protein, 5 aa, Artificial Sequence
  Description of Artificial Sequence: Synthetic peptide
  XENP023633 vhCDR1
HYGMN

SEQ ID NO: 570 - protein, 17 aa, Artificial Sequence
  Description of Artificial Sequence: Synthetic peptide
  XENP023633 vhCDR2
WINTYTGEPTYADGFTG

SEQ ID NO: 571 - protein, 8 aa, Artificial Sequence
  Description of Artificial Sequence: Synthetic peptide
  XENP023633 vhCDR3
DYYGSSPY

SEQ ID NO: 572 - protein, 16 aa, Artificial Sequence
  Description of Artificial Sequence: Synthetic peptide
  XENP023633 vlCDR1
KSSQSIVHSNGNTYLE

SEQ ID NO: 573 - protein, 7 aa, Artificial Sequence
  Description of Artificial Sequence: Synthetic peptide
  XENP023633 vlCDR2
KVSNRFS

SEQ ID NO: 574 - protein, 9 aa, Artificial Sequence
  Description of Artificial Sequence: Synthetic peptide
  XENP023633 vlCDR3
FQGSHVPNT

SEQ ID NO: 575 - protein, 251 aa, Artificial Sequence
  Description of Artificial Sequence: Synthetic polypeptide
  XENP023634 1C11_H3_L3.70_scFv
QIQLVQSGSELKKPGASVKVSCKASGYTFTHYGMNWVRQAPGQGLEWMGWINTYTGEPTYADGFTGRFVFSLDTSVSTAYLQISSLKAEDTAVYFCARDYYGSSPYWGQGTLVTVSSGKPGSGKPGSGKPGSGKPGSDVLMTQSPDSLAVSLGERATINCKSSQSIVHSNGNTYLEWYQQKPGQSPKLLIYKVSNRFSGVPDRFSGSGSGTDFTLTISSLQAEDFAVYYCFQGSHVPNTFGGGTKVEIKGS

SEQ ID NO: 576 - protein, 117 aa, Artificial Sequence; identical to SEQ ID NO: 32
  Description of Artificial Sequence: Synthetic polypeptide
  VH of XENP023634

SEQ ID NO: 577 - protein, 114 aa, Artificial Sequence
  Description of Artificial Sequence: Synthetic polypeptide
  VL of XENP023634
DVLMTQSPDSLAVSLGERATINCKSSQSIVHSNGNTYLEWYQQKPGQSPKLLIYKVSNRFSGVPDRFSGSGSGTDFTLTISSLQAEDFAVYYCFQGSHVPNTFGGGTKVEIKGS

SEQ ID NO: 578 - protein, 5 aa, Artificial Sequence
  Description of Artificial Sequence: Synthetic peptide
  XENP023634 vhCDR1
HYGMN

SEQ ID NO: 579 - protein, 17 aa, Artificial Sequence
  Description of Artificial Sequence: Synthetic peptide
  XENP023634 vhCDR2
WINTYTGEPTYADGFTG

SEQ ID NO: 580 - protein, 8 aa, Artificial Sequence
  Description of Artificial Sequence: Synthetic peptide
  XENP023634 vhCDR3
DYYGSSPY

SEQ ID NO: 581 - protein, 16 aa, Artificial Sequence
  Description of Artificial Sequence: Synthetic peptide
  XENP023634 vlCDR1
KSSQSIVHSNGNTYLE

SEQ ID NO: 582 - protein, 7 aa, Artificial Sequence
  Description of Artificial Sequence: Synthetic peptide
  XENP023634 vlCDR2
KVSNRFS

SEQ ID NO: 583 - protein, 9 aa, Artificial Sequence
  Description of Artificial Sequence: Synthetic peptide
  XENP023634 vlCDR3
FQGSHVPNT

SEQ ID NO: 584 - protein, 251 aa, Artificial Sequence
  Description of Artificial Sequence: Synthetic polypeptide
  XENP023635 1C11_H3_L3.72_scFv
QIQLVQSGSELKKPGASVKVSCKASGYTFTHYGMNWVRQAPGQGLEWMGWINTYTGEPTYADGFTGRFVFSLDTSVSTAYLQISSLKAEDTAVYFCARDYYGSSPYWGQGTLVTVSSGKPGSGKPGSGKPGSGKPGSDVLMTQSPDSLAVSLGERATINCKSSQSIVHSNGNTYLEWYQQKPGQSPKLLIYKVSNRFSGVPDRFSGSGSGTDFTLTISSLQAEDVADYYCFQGSHVPNTFGGGTKVEIKGS

SEQ ID NO: 585 - protein, 117 aa, Artificial Sequence; identical to SEQ ID NO: 32
  Description of Artificial Sequence: Synthetic polypeptide
  VH of XENP023635

SEQ ID NO: 586 - protein, 114 aa, Artificial Sequence
  Description of Artificial Sequence: Synthetic polypeptide
  VL of XENP023635
DVLMTQSPDSLAVSLGERATINCKSSQSIVHSNGNTYLEWYQQKPGQSPKLLIYKVSNRFSGVPDRFSGSGSGTDFTLTISSLQAEDVADYYCFQGSHVPNTFGGGTKVEIKGS

SEQ ID NO: 587 - protein, 5 aa, Artificial Sequence
  Description of Artificial Sequence: Synthetic peptide
  XENP023635 vhCDR1
HYGMN

SEQ ID NO: 588 - protein, 17 aa, Artificial Sequence
  Description of Artificial Sequence: Synthetic peptide
  XENP023635 vhCDR2
WINTYTGEPTYADGFTG

SEQ ID NO: 589 - protein, 8 aa, Artificial Sequence
  Description of Artificial Sequence: Synthetic peptide
  XENP023635 vhCDR3
DYYGSSPY

SEQ ID NO: 590 - protein, 16 aa, Artificial Sequence
  Description of Artificial Sequence: Synthetic peptide
  XENP023635 vlCDR1
KSSQSIVHSNGNTYLE

SEQ ID NO: 591 - protein, 7 aa, Artificial Sequence
  Description of Artificial Sequence: Synthetic peptide
  XENP023635 vlCDR2
KVSNRFS

SEQ ID NO: 592 - protein, 9 aa, Artificial Sequence
  Description of Artificial Sequence: Synthetic peptide
  XENP023635 vlCDR3
FQGSHVPNT

SEQ ID NO: 593 - protein, 251 aa, Artificial Sequence
  Description of Artificial Sequence: Synthetic polypeptide
  XENP023636 1C11_H3_L3.73_scFv
QIQLVQSGSELKKPGASVKVSCKASGYTFTHYGMNWVRQAPGQGLEWMGWINTYTGEPTYADGFTGRFVFSLDTSVSTAYLQISSLKAEDTAVYFCARDYYGSSPYWGQGTLVTVSSGKPGSGKPGSGKPGSGKPGSDVLMTQSPDSLAVSLGERATINCKSSQSIVHSNGNTYLEWYQQKPGQSPKLLIYKVSNRFSGVPDRFSGSGSGTDFTLTISSLQAEDVATYYCFQGSHVPNTFGGGTKVEIKGS

SEQ ID NO: 594 - protein, 117 aa, Artificial Sequence; identical to SEQ ID NO: 32
  Description of Artificial Sequence: Synthetic polypeptide
  VH of XENP023636

SEQ ID NO: 595 - protein, 114 aa, Artificial Sequence
  Description of Artificial Sequence: Synthetic polypeptide
  VL of XENP023636
DVLMTQSPDSLAVSLGERATINCKSSQSIVHSNGNTYLEWYQQKPGQSPKLLIYKVSNRFSGVPDRFSGSGSGTDFTLTISSLQAEDVATYYCFQGSHVPNTFGGGTKVEIKGS

SEQ ID NO: 596 - protein, 5 aa, Artificial Sequence
  Description of Artificial Sequence: Synthetic peptide
  XENP023636 vhCDR1
HYGMN

SEQ ID NO: 597 - protein, 17 aa, Artificial Sequence
  Description of Artificial Sequence: Synthetic peptide
  XENP023636 vhCDR2
WINTYTGEPTYADGFTG

SEQ ID NO: 598 - protein, 8 aa, Artificial Sequence
  Description of Artificial Sequence: Synthetic peptide
  XENP023636 vhCDR3
DYYGSSPY

SEQ ID NO: 599 - protein, 16 aa, Artificial Sequence
  Description of Artificial Sequence: Synthetic peptide
  XENP023636 vlCDR1
KSSQSIVHSNGNTYLE

SEQ ID NO: 600 - protein, 7 aa, Artificial Sequence
  Description of Artificial Sequence: Synthetic peptide
  XENP023636 vlCDR2
KVSNRFS

SEQ ID NO: 601 - protein, 9 aa, Artificial Sequence
  Description of Artificial Sequence: Synthetic peptide
  XENP023636 vlCDR3
FQGSHVPNT

SEQ ID NO: 602 - protein, 251 aa, Artificial Sequence
  Description of Artificial Sequence: Synthetic polypeptide
  XENP023637 1C11_H3_L3.75_scFv
QIQLVQSGSELKKPGASVKVSCKASGYTFTHYGMNWVRQAPGQGLEWMGWINTYTGEPTYADGFTGRFVFSLDTSVSTAYLQISSLKAEDTAVYFCARDYYGSSPYWGQGTLVTVSSGKPGSGKPGSGKPGSGKPGSDVLMTQSPDSLAVSLGERATINCKSSQSIVHSNGNTYLEWYQQKPGQSPKLLIYKVSNRFSGVPDRFSGSGSGTDFTLTISSLQAEDVAVYYCLQGSHVPNTFGGGTKVEIKGS

SEQ ID NO: 603 - protein, 117 aa, Artificial Sequence; identical to SEQ ID NO: 32
  Description of Artificial Sequence: Synthetic polypeptide
  VH of XENP023637

SEQ ID NO: 604 - protein, 114 aa, Artificial Sequence
  Description of Artificial Sequence: Synthetic polypeptide
  VL of XENP023637
DVLMTQSPDSLAVSLGERATINCKSSQSIVHSNGNTYLEWYQQKPGQSPKLLIYKVSNRFSGVPDRFSGSGSGTDFTLTISSLQAEDVAVYYCLQGSHVPNTFGGGTKVEIKGS

SEQ ID NO: 605 - protein, 5 aa, Artificial Sequence
  Description of Artificial Sequence: Synthetic peptide
  XENP023637 vhCDR1
HYGMN

SEQ ID NO: 606 - protein, 17 aa, Artificial Sequence
  Description of Artificial Sequence: Synthetic peptide
  XENP023637 vhCDR2
WINTYTGEPTYADGFTG

SEQ ID NO: 607 - protein, 8 aa, Artificial Sequence
  Description of Artificial Sequence: Synthetic peptide
  XENP023637 vhCDR3
DYYGSSPY

SEQ ID NO: 608 - protein, 16 aa, Artificial Sequence
  Description of Artificial Sequence: Synthetic peptide
  XENP023637 vlCDR1
KSSQSIVHSNGNTYLE

SEQ ID NO: 609 - protein, 7 aa, Artificial Sequence
  Description of Artificial Sequence: Synthetic peptide
  XENP023637 vlCDR2
KVSNRFS

SEQ ID NO: 610 - protein, 9 aa, Artificial Sequence
  Description of Artificial Sequence: Synthetic peptide
  XENP023637 vlCDR3
LQGSHVPNT

SEQ ID NO: 611 - protein, 251 aa, Artificial Sequence
  Description of Artificial Sequence: Synthetic polypeptide
  XENP023638 1C11_H3_L3.78_scFv
QIQLVQSGSELKKPGASVKVSCKASGYTFTHYGMNWVRQAPGQGLEWMGWINTYTGEPTYADGFTGRFVFSLDTSVSTAYLQISSLKAEDTAVYFCARDYYGSSPYWGQGTLVTVSSGKPGSGKPGSGKPGSGKPGSDVLMTQSPDSLAVSLGERATINCKSSQSIVHSNGNTYLEWYQQKPGQSPKLLIYKVSNRFSGVPDRFSGSGSGTDFTLTISSLQAEDVAVYYCFQGSHVGNTFGGGTKVEIKGS

SEQ ID NO: 612 - protein, 117 aa, Artificial Sequence; identical to SEQ ID NO: 32
  Description of Artificial Sequence: Synthetic polypeptide
  VH of XENP023638

SEQ ID NO: 613 - protein, 114 aa, Artificial Sequence
  Description of Artificial Sequence: Synthetic polypeptide
  VL of XENP023638
DVLMTQSPDSLAVSLGERATINCKSSQSIVHSNGNTYLEWYQQKPGQSPKLLIYKVSNRFSGVPDRFSGSGSGTDFTLTISSLQAEDVAVYYCFQGSHVGNTFGGGTKVEIKGS

SEQ ID NO: 614 - protein, 5 aa, Artificial Sequence
  Description of Artificial Sequence: Synthetic peptide
  XENP023638 vhCDR1
HYGMN

SEQ ID NO: 615 - protein, 17 aa, Artificial Sequence
  Description of Artificial Sequence: Synthetic peptide
  XENP023638 vhCDR2
WINTYTGEPTYADGFTG

SEQ ID NO: 616 - protein, 8 aa, Artificial Sequence
  Description of Artificial Sequence: Synthetic peptide
  XENP023638 vhCDR3
DYYGSSPY

SEQ ID NO: 617 - protein, 16 aa, Artificial Sequence
  Description of Artificial Sequence: Synthetic peptide
  XENP023638 vlCDR1
KSSQSIVHSNGNTYLE

SEQ ID NO: 618 - protein, 7 aa, Artificial Sequence
  Description of Artificial Sequence: Synthetic peptide
  XENP023638 vlCDR2
KVSNRFS

SEQ ID NO: 619 - protein, 9 aa, Artificial Sequence
  Description of Artificial Sequence: Synthetic peptide
  XENP023638 vlCDR3
FQGSHVGNT

SEQ ID NO: 620 - protein, 251 aa, Artificial Sequence
  Description of Artificial Sequence: Synthetic polypeptide
  XENP023639 1C11_H3_L3.79_scFv
QIQLVQSGSELKKPGASVKVSCKASGYTFTHYGMNWVRQAPGQGLEWMGWINTYTGEPTYADGFTGRFVFSLDTSVSTAYLQISSLKAEDTAVYFCARDYYGSSPYWGQGTLVTVSSGKPGSGKPGSGKPGSGKPGSDVLMTQSPDSLAVSLGERATINCKSSQSIVHSNGNTYLEWYQQKPGQSPKLLIYKVSNRFSGVPDRFSGSGSGTDFTLTISSLQAEDVAVYYCFQGSHVHNTFGGGTKVEIKGS

SEQ ID NO: 621 - protein, 117 aa, Artificial Sequence; identical to SEQ ID NO: 32
  Description of Artificial Sequence: Synthetic polypeptide
  VH of XENP023639

SEQ ID NO: 622 - protein, 114 aa, Artificial Sequence
  Description of Artificial Sequence: Synthetic polypeptide
  VL of XENP023639
DVLMTQSPDSLAVSLGERATINCKSSQSIVHSNGNTYLEWYQQKPGQSPKLLIYKVSNRFSGVPDRFSGSGSGTDFTLTISSLQAEDVAVYYCFQGSHVHNTFGGGTKVEIKGS

SEQ ID NO: 623 - protein, 5 aa, Artificial Sequence
  Description of Artificial Sequence: Synthetic peptide
  XENP023639 vhCDR1
HYGMN

SEQ ID NO: 624 - protein, 17 aa, Artificial Sequence
  Description of Artificial Sequence: Synthetic peptide
  XENP023639 vhCDR2
WINTYTGEPTYADGFTG

SEQ ID NO: 625 - protein, 8 aa, Artificial Sequence
  Description of Artificial Sequence: Synthetic peptide
  XENP023639 vhCDR3
DYYGSSPY

SEQ ID NO: 626 - protein, 16 aa, Artificial Sequence
  Description of Artificial Sequence: Synthetic peptide
  XENP023639 vlCDR1
KSSQSIVHSNGNTYLE

SEQ ID NO: 627 - protein, 7 aa, Artificial Sequence
  Description of Artificial Sequence: Synthetic peptide
  XENP023639 vlCDR2
KVSNRFS

SEQ ID NO: 628 - protein, 9 aa, Artificial Sequence
  Description of Artificial Sequence: Synthetic peptide
  XENP023639 vlCDR3
FQGSHVHNT

SEQ ID NO: 629 - protein, 251 aa, Artificial Sequence
  Description of Artificial Sequence: Synthetic polypeptide
  XENP023640 1C11_H3_L3.81_scFv
QIQLVQSGSELKKPGASVKVSCKASGYTFTHYGMNWVRQAPGQGLEWMGWINTYTGEPTYADGFTGRFVFSLDTSVSTAYLQISSLKAEDTAVYFCARDYYGSSPYWGQGTLVTVSSGKPGSGKPGSGKPGSGKPGSDVLMTQSPDSLAVSLGERATINCKSSQSIVHSNGNTYLEWYQQKPGQSPKLLIYKVSNRFSGVPDRFSGSGSGTDFTLTISSLQAEDVAVYYCFQGSHVPNTFGQGTKVEIKGS

SEQ ID NO: 630 - protein, 117 aa, Artificial Sequence; identical to SEQ ID NO: 32
  Description of Artificial Sequence: Synthetic polypeptide
  VH of XENP023640

SEQ ID NO: 631 - protein, 114 aa, Artificial Sequence
  Description of Artificial Sequence: Synthetic polypeptide
  VL of XENP023640
DVLMTQSPDSLAVSLGERATINCKSSQSIVHSNGNTYLEWYQQKPGQSPKLLIYKVSNRFSGVPDRFSGSGSGTDFTLTISSLQAEDVAVYYCFQGSHVPNTFGQGTKVEIKGS

SEQ ID NO: 632 - protein, 5 aa, Artificial Sequence
  Description of Artificial Sequence: Synthetic peptide
  XENP023640 vhCDR1
HYGMN

SEQ ID NO: 633 - protein, 17 aa, Artificial Sequence
  Description of Artificial Sequence: Synthetic peptide
  XENP023640 vhCDR2
WINTYTGEPTYADGFTG

SEQ ID NO: 634 - protein, 8 aa, Artificial Sequence
  Description of Artificial Sequence: Synthetic peptide
  XENP023640 vhCDR3
DYYGSSPY

SEQ ID NO: 635 - protein, 16 aa, Artificial Sequence
  Description of Artificial Sequence: Synthetic peptide
  XENP023640 vlCDR1
KSSQSIVHSNGNTYLE

SEQ ID NO: 636 - protein, 7 aa, Artificial Sequence
  Description of Artificial Sequence: Synthetic peptide
  XENP023640 vlCDR2
KVSNRFS

SEQ ID NO: 637 - protein, 9 aa, Artificial Sequence
  Description of Artificial Sequence: Synthetic peptide
  XENP023640 vlCDR3
FQGSHVPNT

SEQ ID NO: 638 - protein, 251 aa, Artificial Sequence
  Description of Artificial Sequence: Synthetic polypeptide
  XENP023641 1C11_H3_L3.82_scFv
QIQLVQSGSELKKPGASVKVSCKASGYTFTHYGMNWVRQAPGQGLEWMGWINTYTGEPTYADGFTGRFVFSLDTSVSTAYLQISSLKAEDTAVYFCARDYYGSSPYWGQGTLVTVSSGKPGSGKPGSGKPGSGKPGSDVLMTQSPDSLAVSLGERATINCKSSQSIVHSNGNTYLEWYQQKPGQSPKLLIYKVSNRFSGVPDRFSGSGSGTDFTLTISSLQAEDVAVYYCFQGSHVPNTFGGGTKLEIKGS

SEQ ID NO: 639 - protein, 117 aa, Artificial Sequence; identical to SEQ ID NO: 32
  Description of Artificial Sequence: Synthetic polypeptide
  VH of XENP023641

SEQ ID NO: 640 - protein, 114 aa, Artificial Sequence
  Description of Artificial Sequence: Synthetic polypeptide
  VL of XENP023641
DVLMTQSPDSLAVSLGERATINCKSSQSIVHSNGNTYLEWYQQKPGQSPKLLIYKVSNRFSGVPDRFSGSGSGTDFTLTISSLQAEDVAVYYCFQGSHVPNTFGGGTKLEIKGS

SEQ ID NO: 641 - protein, 5 aa, Artificial Sequence
  Description of Artificial Sequence: Synthetic peptide
  XENP023641 vhCDR1
HYGMN

SEQ ID NO: 642 - protein, 17 aa, Artificial Sequence
  Description of Artificial Sequence: Synthetic peptide
  XENP023641 vhCDR2
WINTYTGEPTYADGFTG

SEQ ID NO: 643 - protein, 8 aa, Artificial Sequence
  Description of Artificial Sequence: Synthetic peptide
  XENP023641 vhCDR3
DYYGSSPY

SEQ ID NO: 644 - protein, 16 aa, Artificial Sequence
  Description of Artificial Sequence: Synthetic peptide
  XENP023641 vlCDR1
KSSQSIVHSNGNTYLE

SEQ ID NO: 645 - protein, 7 aa, Artificial Sequence
  Description of Artificial Sequence: Synthetic peptide
  XENP023641 vlCDR2
KVSNRFS

SEQ ID NO: 646 - protein, 9 aa, Artificial Sequence
  Description of Artificial Sequence: Synthetic peptide
  XENP023641 vlCDR3
FQGSHVPNT

SEQ ID NO: 647 - protein, 251 aa, Artificial Sequence
  Description of Artificial Sequence: Synthetic polypeptide
  XENP023755 1C11_H3.1_L3_scFv
QVQLVQSGSELKKPGASVKVSCKASGYTFTHYGMNWVRQAPGQGLEWMGWINTYTGEPTYADGFTGRFVFSLDTSVSTAYLQISSLKAEDTAVYFCARDYYGSSPYWGQGTLVTVSSGKPGSGKPGSGKPGSGKPGSDVLMTQSPDSLAVSLGERATINCKSSQSIVHSNGNTYLEWYQQKPGQSPKLLIYKVSNRFSGVPDRFSGSGSGTDFTLTISSLQAEDVAVYYCFQGSHVPNTFGGGTKVEIKGS

SEQ ID NO: 648 - protein, 117 aa, Artificial Sequence
  Description of Artificial Sequence: Synthetic polypeptide
  VH of XENP023755
QVQLVQSGSELKKPGASVKVSCKASGYTFTHYGMNWVRQAPGQGLEWMGWINTYTGEPTYADGFTGRFVFSLDTSVSTAYLQISSLKAEDTAVYFCARDYYGSSPYWGQGTLVTVSS

SEQ ID NO: 649 - protein, 114 aa, Artificial Sequence
  Description of Artificial Sequence: Synthetic polypeptide
  VL of XENP023755
DVLMTQSPDSLAVSLGERATINCKSSQSIVHSNGNTYLEWYQQKPGQSPKLLIYKVSNRFSGVPDRFSGSGSGTDFTLTISSLQAEDVAVYYCFQGSHVPNTFGGGTKVEIKGS

SEQ ID NO: 650 - protein, 5 aa, Artificial Sequence
  Description of Artificial Sequence: Synthetic peptide
  XENP023755 vhCDR1
HYGMN

SEQ ID NO: 651 - protein, 17 aa, Artificial Sequence
  Description of Artificial Sequence: Synthetic peptide
  XENP023755 vhCDR2
WINTYTGEPTYADGFTG

SEQ ID NO: 652 - protein, 8 aa, Artificial Sequence
  Description of Artificial Sequence: Synthetic peptide
  XENP023755 vhCDR3
DYYGSSPY

SEQ ID NO: 653 - protein, 16 aa, Artificial Sequence
  Description of Artificial Sequence: Synthetic peptide
  XENP023755 vlCDR1
KSSQSIVHSNGNTYLE

SEQ ID NO: 654 - protein, 7 aa, Artificial Sequence
  Description of Artificial Sequence: Synthetic peptide
  XENP023755 vlCDR2
KVSNRFS

SEQ ID NO: 655 - protein, 9 aa, Artificial Sequence
  Description of Artificial Sequence: Synthetic peptide
  XENP023755 vlCDR3
FQGSHVPNT

SEQ ID NO: 656 - protein, 251 aa, Artificial Sequence
  Description of Artificial Sequence: Synthetic polypeptide
  XENP023756 1C11_H3.2_L3_scFv
QMQLVQSGSELKKPGASVKVSCKASGYTFTHYGMNWVRQAPGQGLEWMGWINTYTGEPTYADGFTGRFVFSLDTSVSTAYLQISSLKAEDTAVYFCARDYYGSSPYWGQGTLVTVSSGKPGSGKPGSGKPGSGKPGSDVLMTQSPDSLAVSLGERATINCKSSQSIVHSNGNTYLEWYQQKPGQSPKLLIYKVSNRFSGVPDRFSGSGSGTDFTLTISSLQAEDVAVYYCFQGSHVPNTFGGGTKVEIKGS

SEQ ID NO: 657 - protein, 117 aa, Artificial Sequence
  Description of Artificial Sequence: Synthetic polypeptide
  VH of XENP023756
QMQLVQSGSELKKPGASVKVSCKASGYTFTHYGMNWVRQAPGQGLEWMGWINTYTGEPTYADGFTGRFVFSLDTSVSTAYLQISSLKAEDTAVYFCARDYYGSSPYWGQGTLVTVSS

SEQ ID NO: 658 - protein, 114 aa, Artificial Sequence; identical to SEQ ID NO: 649
  Description of Artificial Sequence: Synthetic polypeptide
  VL of XENP023756

SEQ ID NO: 659 - protein, 5 aa, Artificial Sequence
  Description of Artificial Sequence: Synthetic peptide
  XENP023756 vhCDR1
HYGMN

SEQ ID NO: 660 - protein, 17 aa, Artificial Sequence
  Description of Artificial Sequence: Synthetic peptide
  XENP023756 vhCDR2
WINTYTGEPTYADGFTG

SEQ ID NO: 661 - protein, 8 aa, Artificial Sequence
  Description of Artificial Sequence: Synthetic peptide
  XENP023756 vhCDR3
DYYGSSPY

SEQ ID NO: 662 - protein, 16 aa, Artificial Sequence
  Description of Artificial Sequence: Synthetic peptide
  XENP023756 vlCDR1
KSSQSIVHSNGNTYLE

SEQ ID NO: 663 - protein, 7 aa, Artificial Sequence
  Description of Artificial Sequence: Synthetic peptide
  XENP023756 vlCDR2
KVSNRFS

SEQ ID NO: 664 - protein, 9 aa, Artificial Sequence
  Description of Artificial Sequence: Synthetic peptide
  XENP023756 vlCDR3
FQGSHVPNT

SEQ ID NO: 665 - protein, 251 aa, Artificial Sequence
  Description of Artificial Sequence: Synthetic polypeptide
  XENP023757 1C11_H3.4_L3_scFv
QIQLQQSGSELKKPGASVKVSCKASGYTFTHYGMNWVRQAPGQGLEWMGWINTYTGEPTYADGFTGRFVFSLDTSVSTAYLQISSLKAEDTAVYFCARDYYGSSPYWGQGTLVTVSSGKPGSGKPGSGKPGSGKPGSDVLMTQSPDSLAVSLGERATINCKSSQSIVHSNGNTYLEWYQQKPGQSPKLLIYKVSNRFSGVPDRFSGSGSGTDFTLTISSLQAEDVAVYYCFQGSHVPNTFGGGTKVEIKGS

SEQ ID NO: 666 - protein, 117 aa, Artificial Sequence
  Description of Artificial Sequence: Synthetic polypeptide
  VH of XENP023757
QIQLQQSGSELKKPGASVKVSCKASGYTFTHYGMNWVRQAPGQGLEWMGWINTYTGEPTYADGFTGRFVFSLDTSVSTAYLQISSLKAEDTAVYFCARDYYGSSPYWGQGTLVTVSS

SEQ ID NO: 667 - protein, 114 aa, Artificial Sequence; identical to SEQ ID NO: 649
  Description of Artificial Sequence: Synthetic polypeptide
  VL of XENP023757

SEQ ID NO: 668 - protein, 5 aa, Artificial Sequence
  Description of Artificial Sequence: Synthetic peptide
  XENP023757 vhCDR1
HYGMN

SEQ ID NO: 669 - protein, 17 aa, Artificial Sequence
  Description of Artificial Sequence: Synthetic peptide
  XENP023757 vhCDR2
WINTYTGEPTYADGFTG

SEQ ID NO: 670 - protein, 8 aa, Artificial Sequence
  Description of Artificial Sequence: Synthetic peptide
  XENP023757 vhCDR3
DYYGSSPY

SEQ ID NO: 671 - protein, 16 aa, Artificial Sequence
  Description of Artificial Sequence: Synthetic peptide
  XENP023757 vlCDR1
KSSQSIVHSNGNTYLE

SEQ ID NO: 672 - protein, 7 aa, Artificial Sequence
  Description of Artificial Sequence: Synthetic peptide
  XENP023757 vlCDR2
KVSNRFS

SEQ ID NO: 673 - protein, 9 aa, Artificial Sequence
  Description of Artificial Sequence: Synthetic peptide
  XENP023757 vlCDR3
FQGSHVPNT

SEQ ID NO: 674 - protein, 251 aa, Artificial Sequence
  Description of Artificial Sequence: Synthetic polypeptide
  XENP023758 1C11_H3.5_L3_scFv
QIQLVQSGAELKKPGASVKVSCKASGYTFTHYGMNWVRQAPGQGLEWMGWINTYTGEPTYADGFTGRFVFSLDTSVSTAYLQISSLKAEDTAVYFCARDYYGSSPYWGQGTLVTVSSGKPGSGKPGSGKPGSGKPGSDVLMTQSPDSLAVSLGERATINCKSSQSIVHSNGNTYLEWYQQKPGQSPKLLIYKVSNRFSGVPDRFSGSGSGTDFTLTISSLQAEDVAVYYCFQGSHVPNTFGGGTKVEIKGS

SEQ ID NO: 675 - protein, 117 aa, Artificial Sequence
  Description of Artificial Sequence: Synthetic polypeptide
  VH of XENP023758
QIQLVQSGAELKKPGASVKVSCKASGYTFTHYGMNWVRQAPGQGLEWMGWINTYTGEPTYADGFTGRFVFSLDTSVSTAYLQISSLKAEDTAVYFCARDYYGSSPYWGQGTLVTVSS

SEQ ID NO: 676 - protein, 114 aa, Artificial Sequence; identical to SEQ ID NO: 649
  Description of Artificial Sequence: Synthetic polypeptide
  VL of XENP023758

SEQ ID NO: 677 - protein, 5 aa, Artificial Sequence
  Description of Artificial Sequence: Synthetic peptide
  XENP023758 vhCDR1
HYGMN

SEQ ID NO: 678 - protein, 17 aa, Artificial Sequence
  Description of Artificial Sequence: Synthetic peptide
  XENP023758 vhCDR2
WINTYTGEPTYADGFTG

SEQ ID NO: 679 - protein, 8 aa, Artificial Sequence
  Description of Artificial Sequence: Synthetic peptide
  XENP023758 vhCDR3
DYYGSSPY

SEQ ID NO: 680 - protein, 16 aa, Artificial Sequence
  Description of Artificial Sequence: Synthetic peptide
  XENP023758 vlCDR1
KSSQSIVHSNGNTYLE

SEQ ID NO: 681 - protein, 7 aa, Artificial Sequence
  Description of Artificial Sequence: Synthetic peptide
  XENP023758 vlCDR2
KVSNRFS

SEQ ID NO: 682 - protein, 9 aa, Artificial Sequence
  Description of Artificial Sequence: Synthetic peptide
  XENP023758 vlCDR3
FQGSHVPNT

SEQ ID NO: 683 - protein, 251 aa, Artificial Sequence
  Description of Artificial Sequence: Synthetic polypeptide
  XENP023759 1C11_H3.6_L3_scFv
QIQLVQSGGELKKPGASVKVSCKASGYTFTHYGMNWVRQAPGQGLEWMGWINTYTGEPTYADGFTGRFVFSLDTSVSTAYLQISSLKAEDTAVYFCARDYYGSSPYWGQGTLVTVSSGKPGSGKPGSGKPGSGKPGSDVLMTQSPDSLAVSLGERATINCKSSQSIVHSNGNTYLEWYQQKPGQSPKLLIYKVSNRFSGVPDRFSGSGSGTDFTLTISSLQAEDVAVYYCFQGSHVPNTFGGGTKVEIKGS

SEQ ID NO: 684 - protein, 117 aa, Artificial Sequence
  Description of Artificial Sequence: Synthetic polypeptide
  VH of XENP023759
QIQLVQSGGELKKPGASVKVSCKASGYTFTHYGMNWVRQAPGQGLEWMGWINTYTGEPTYADGFTGRFVFSLDTSVSTAYLQISSLKAEDTAVYFCARDYYGSSPYWGQGTLVTVSS

SEQ ID NO: 685 - protein, 114 aa, Artificial Sequence; identical to SEQ ID NO: 649
  Description of Artificial Sequence: Synthetic polypeptide
  VL of XENP023759

SEQ ID NO: 686 - protein, 5 aa, Artificial Sequence
  Description of Artificial Sequence: Synthetic peptide
  XENP023759 vhCDR1
HYGMN

SEQ ID NO: 687 - protein, 17 aa, Artificial Sequence
  Description of Artificial Sequence: Synthetic peptide
  XENP023759 vhCDR2
WINTYTGEPTYADGFTG

SEQ ID NO: 688 - protein, 8 aa, Artificial Sequence
  Description of Artificial Sequence: Synthetic peptide
  XENP023759 vhCDR3
DYYGSSPY

SEQ ID NO: 689 - protein, 16 aa, Artificial Sequence
  Description of Artificial Sequence: Synthetic peptide
  XENP023759 vlCDR1
KSSQSIVHSNGNTYLE

SEQ ID NO: 690 - protein, 7 aa, Artificial Sequence
  Description of Artificial Sequence: Synthetic peptide
  XENP023759 vlCDR2
KVSNRFS

SEQ ID NO: 691 - protein, 9 aa, Artificial Sequence
  Description of Artificial Sequence: Synthetic peptide
  XENP023759 vlCDR3
FQGSHVPNT

SEQ ID NO: 692 - protein, 251 aa, Artificial Sequence
  Description of Artificial Sequence: Synthetic polypeptide
  XENP023760 1C11_H3.7_L3_scFv
QIQLVQSGPELKKPGASVKVSCKASGYTFTHYGMNWVRQAPGQGLEWMGWINTYTGEPTYADGFTGRFVFSLDTSVSTAYLQISSLKAEDTAVYFCARDYYGSSPYWGQGTLVTVSSGKPGSGKPGSGKPGSGKPGSDVLMTQSPDSLAVSLGERATINCKSSQSIVHSNGNTYLEWYQQKPGQSPKLLIYKVSNRFSGVPDRFSGSGSGTDFTLTISSLQAEDVAVYYCFQGSHVPNTFGGGTKVEIKGS

SEQ ID NO: 693 - protein, 117 aa, Artificial Sequence
  Description of Artificial Sequence: Synthetic polypeptide
  VH of XENP023760
QIQLVQSGPELKKPGASVKVSCKASGYTFTHYGMNWVRQAPGQGLEWMGWINTYTGEPTYADGFTGRFVFSLDTSVSTAYLQISSLKAEDTAVYFCARDYYGSSPYWGQGTLVTVSS

SEQ ID NO: 694 - protein, 114 aa, Artificial Sequence; identical to SEQ ID NO: 649
  Description of Artificial Sequence: Synthetic polypeptide
  VL of XENP023760

SEQ ID NO: 695 - protein, 5 aa, Artificial Sequence
  Description of Artificial Sequence: Synthetic peptide
  XENP023760 vhCDR1
HYGMN

SEQ ID NO: 696 - protein, 17 aa, Artificial Sequence
  Description of Artificial Sequence: Synthetic peptide
  XENP023760 vhCDR2
WINTYTGEPTYADGFTG

SEQ ID NO: 697 - protein, 8 aa, Artificial Sequence
  Description of Artificial Sequence: Synthetic peptide
  XENP023760 vhCDR3
DYYGSSPY

SEQ ID NO: 698 - protein, 16 aa, Artificial Sequence
  Description of Artificial Sequence: Synthetic peptide
  XENP023760 vlCDR1
KSSQSIVHSNGNTYLE

SEQ ID NO: 699 - protein, 7 aa, Artificial Sequence
  Description of Artificial Sequence: Synthetic peptide
  XENP023760 vlCDR2
KVSNRFS

SEQ ID NO: 700 - protein, 9 aa, Artificial Sequence
  Description of Artificial Sequence: Synthetic peptide
  XENP023760 vlCDR3
FQGSHVPNT

SEQ ID NO: 701 - protein, 251 aa, Artificial Sequence
  Description of Artificial Sequence: Synthetic polypeptide
  XENP023761 1C11_H3.8_L3_scFv
QIQLVQSGHELKKPGASVKVSCKASGYTFTHYGMNWVRQAPGQGLEWMGWINTYTGEPTYADGFTGRFVFSLDTSVSTAYLQISSLKAEDTAVYFCARDYYGSSPYWGQGTLVTVSSGKPGSGKPGSGKPGSGKPGSDVLMTQSPDSLAVSLGERATINCKSSQSIVHSNGNTYLEWYQQKPGQSPKLLIYKVSNRFSGVPDRFSGSGSGTDFTLTISSLQAEDVAVYYCFQGSHVPNTFGGGTKVEIKGS

SEQ ID NO: 702 - protein, 117 aa, Artificial Sequence
  Description of Artificial Sequence: Synthetic polypeptide
  VH of XENP023761
QIQLVQSGHELKKPGASVKVSCKASGYTFTHYGMNWVRQAPGQGLEWMGWINTYTGEPTYADGFTGRFVFSLDTSVSTAYLQISSLKAEDTAVYFCARDYYGSSPYWGQGTLVTVSS

SEQ ID NO: 703 - protein, 114 aa, Artificial Sequence; identical to SEQ ID NO: 649
  Description of Artificial Sequence: Synthetic polypeptide
  VL of XENP023761

SEQ ID NO: 704 - protein, 5 aa, Artificial Sequence
  Description of Artificial Sequence: Synthetic peptide
  XENP023761 vhCDR1
HYGMN

SEQ ID NO: 705 - protein, 17 aa, Artificial Sequence
  Description of Artificial Sequence: Synthetic peptide
  XENP023761 vhCDR2
WINTYTGEPTYADGFTG

SEQ ID NO: 706 - protein, 8 aa, Artificial Sequence
  Description of Artificial Sequence: Synthetic peptide
  XENP023761 vhCDR3
DYYGSSPY

SEQ ID NO: 707 - protein, 16 aa, Artificial Sequence
  Description of Artificial Sequence: Synthetic peptide
  XENP023761 vlCDR1
KSSQSIVHSNGNTYLE

SEQ ID NO: 708 - protein, 7 aa, Artificial Sequence
  Description of Artificial Sequence: Synthetic peptide
  XENP023761 vlCDR2
KVSNRFS

SEQ ID NO: 709 - protein, 9 aa, Artificial Sequence
  Description of Artificial Sequence: Synthetic peptide
  XENP023761 vlCDR3
FQGSHVPNT

SEQ ID NO: 710 - protein, 251 aa, Artificial Sequence
  Description of Artificial Sequence: Synthetic polypeptide
  XENP023762 1C11_H3.11_L3_scFv
QIQLVQSGSELKKPGASVKLSCKASGYTFTHYGMNWVRQAPGQGLEWMGWINTYTGEPTYADGFTGRFVFSLDTSVSTAYLQISSLKAEDTAVYFCARDYYGSSPYWGQGTLVTVSSGKPGSGKPGSGKPGSGKPGSDVLMTQSPDSLAVSLGERATINCKSSQSIVHSNGNTYLEWYQQKPGQSPKLLIYKVSNRFSGVPDRFSGSGSGTDFTLTISSLQAEDVAVYYCFQGSHVPNTFGGGTKVEIKGS

SEQ ID NO: 711 - protein, 117 aa, Artificial Sequence
  Description of Artificial Sequence: Synthetic polypeptide
  VH of XENP023762
QIQLVQSGSELKKPGASVKLSCKASGYTFTHYGMNWVRQAPGQGLEWMGWINTYTGEPTYADGFTGRFVFSLDTSVSTAYLQISSLKAEDTAVYFCARDYYGSSPYWGQGTLVTVSS

SEQ ID NO: 712 - protein, 114 aa, Artificial Sequence; identical to SEQ ID NO: 649
  Description of Artificial Sequence: Synthetic polypeptide
  VL of XENP023762

SEQ ID NO: 713 - protein, 5 aa, Artificial Sequence
  Description of Artificial Sequence: Synthetic peptide
  XENP023762 vhCDR1
HYGMN

SEQ ID NO: 714 - protein, 17 aa, Artificial Sequence
  Description of Artificial Sequence: Synthetic peptide
  XENP023762 vhCDR2
WINTYTGEPTYADGFTG

SEQ ID NO: 715 - protein, 8 aa, Artificial Sequence
  Description of Artificial Sequence: Synthetic peptide
  XENP023762 vhCDR3
DYYGSSPY

SEQ ID NO: 716 - protein, 16 aa, Artificial Sequence
  Description of Artificial Sequence: Synthetic peptide
  XENP023762 vlCDR1
KSSQSIVHSNGNTYLE

SEQ ID NO: 717 - protein, 7 aa, Artificial Sequence
  Description of Artificial Sequence: Synthetic peptide
  XENP023762 vlCDR2
KVSNRFS

SEQ ID NO: 718 - protein, 9 aa, Artificial Sequence
  Description of Artificial Sequence: Synthetic peptide
  XENP023762 vlCDR3
FQGSHVPNT

SEQ ID NO: 719 - protein, 251 aa, Artificial Sequence
  Description of Artificial Sequence: Synthetic polypeptide
  XENP023763 1C11_H3.12_L3_scFv
QIQLVQSGSELKKPGASVKMSCKASGYTFTHYGMNWVRQAPGQGLEWMGWINTYTGEPTYADGFTGRFVFSLDTSVSTAYLQISSLKAEDTAVYFCARDYYGSSPYWGQGTLVTVSSGKPGSGKPGSGKPGSGKPGSDVLMTQSPDSLAVSLGERATINCKSSQSIVHSNGNTYLEWYQQKPGQSPKLLIYKVSNRFSGVPDRFSGSGSGTDFTLTISSLQAEDVAVYYCFQGSHVPNTFGGGTKVEIKGS

SEQ ID NO: 720 - protein, 117 aa, Artificial Sequence
  Description of Artificial Sequence: Synthetic polypeptide
  VH of XENP023763
QIQLVQSGSELKKPGASVKMSCKASGYTFTHYGMNWVRQAPGQGLEWMGWINTYTGEPTYADGFTGRFVFSLDTSVSTAYLQISSLKAEDTAVYFCARDYYGSSPYWGQGTLVTVSS

SEQ ID NO: 721 - protein, 114 aa, Artificial Sequence; identical to SEQ ID NO: 649
  Description of Artificial Sequence: Synthetic polypeptide
  VL of XENP023763

SEQ ID NO: 722 - protein, 5 aa, Artificial Sequence
  Description of Artificial Sequence: Synthetic peptide
  XENP023763 vhCDR1
HYGMN

SEQ ID NO: 723 - protein, 17 aa, Artificial Sequence
  Description of Artificial Sequence: Synthetic peptide
  XENP023763 vhCDR2
WINTYTGEPTYADGFTG

SEQ ID NO: 724 - protein, 8 aa, Artificial Sequence
  Description of Artificial Sequence: Synthetic peptide
  XENP023763 vhCDR3
DYYGSSPY

SEQ ID NO: 725 - protein, 16 aa, Artificial Sequence
  Description of Artificial Sequence: Synthetic peptide
  XENP023763 vlCDR1
KSSQSIVHSNGNTYLE

SEQ ID NO: 726 - protein, 7 aa, Artificial Sequence
  Description of Artificial Sequence: Synthetic peptide
  XENP023763 vlCDR2
KVSNRFS

SEQ ID NO: 727 - protein, 9 aa, Artificial Sequence
  Description of Artificial Sequence: Synthetic peptide
  XENP023763 vlCDR3
FQGSHVPNT

SEQ ID NO: 728 - protein, 251 aa, Artificial Sequence
  Description of Artificial Sequence: Synthetic polypeptide
  XENP023764 1C11_H3.16_L3_scFv
QIQLVQSGSELKKPGASVKVSCKASGYTFTHYAMNWVRQAPGQGLEWMGWINTYTGEPTYADGFTGRFVFSLDTSVSTAYLQISSLKAEDTAVYFCARDYYGSSPYWGQGTLVTVSSGKPGSGKPGSGKPGSGKPGSDVLMTQSPDSLAVSLGERATINCKSSQSIVHSNGNTYLEWYQQKPGQSPKLLIYKVSNRFSGVPDRFSGSGSGTDFTLTISSLQAEDVAVYYCFQGSHVPNTFGGGTKVEIKGS

SEQ ID NO: 729 - protein, 117 aa, Artificial Sequence
  Description of Artificial Sequence: Synthetic polypeptide
  VH of XENP023764
QIQLVQSGSELKKPGASVKVSCKASGYTFTHYAMNWVRQAPGQGLEWMGWINTYTGEPTYADGFTGRFVFSLDTSVSTAYLQISSLKAEDTAVYFCARDYYGSSPYWGQGTLVTVSS

SEQ ID NO: 730 - protein, 114 aa, Artificial Sequence; identical to SEQ ID NO: 649
  Description of Artificial Sequence: Synthetic polypeptide
  VL of XENP023764

SEQ ID NO: 731 - protein, 5 aa, Artificial Sequence
  Description of Artificial Sequence: Synthetic peptide
  XENP023764 vhCDR1
HYAMN

SEQ ID NO: 732 - protein, 17 aa, Artificial Sequence
  Description of Artificial Sequence: Synthetic peptide
  XENP023764 vhCDR2
WINTYTGEPTYADGFTG

SEQ ID NO: 733 - protein, 8 aa, Artificial Sequence
  Description of Artificial Sequence: Synthetic peptide
  XENP023764 vhCDR3
DYYGSSPY

SEQ ID NO: 734 - protein, 16 aa, Artificial Sequence
  Description of Artificial Sequence: Synthetic peptide
  XENP023764 vlCDR1
KSSQSIVHSNGNTYLE

SEQ ID NO: 735 - protein, 7 aa, Artificial Sequence
  Description of Artificial Sequence: Synthetic peptide
  XENP023764 vlCDR2
KVSNRFS

SEQ ID NO: 736 - protein, 9 aa, Artificial Sequence
  Description of Artificial Sequence: Synthetic peptide
  XENP023764 vlCDR3
FQGSHVPNT

SEQ ID NO: 737 - protein, 251 aa, Artificial Sequence
  Description of Artificial Sequence: Synthetic polypeptide
  XENP023765 1C11_H3.18_L3_scFv
QIQLVQSGSELKKPGASVKVSCKASGYTFTHYGMNWVKQAPGQGLEWMGWINTYTGEPTYADGFTGRFVFSLDTSVSTAYLQISSLKAEDTAVYFCARDYYGSSPYWGQGTLVTVSSGKPGSGKPGSGKPGSGKPGSDVLMTQSPDSLAVSLGERATINCKSSQSIVHSNGNTYLEWYQQKPGQSPKLLIYKVSNRFSGVPDRFSGSGSGTDFTLTISSLQAEDVAVYYCFQGSHVPNTFGGGTKVEIKGS

SEQ ID NO: 738 - protein, 117 aa, Artificial Sequence
  Description of Artificial Sequence: Synthetic polypeptide
  VH of XENP023765
QIQLVQSGSELKKPGASVKVSCKASGYTFTHYGMNWVKQAPGQGLEWMGWINTYTGEPTYADGFTGRFVFSLDTSVSTAYLQISSLKAEDTAVYFCARDYYGSSPYWGQGTLVTVSS

SEQ ID NO: 739 - protein, 114 aa, Artificial Sequence; identical to SEQ ID NO: 649
  Description of Artificial Sequence: Synthetic polypeptide
  VL of XENP023765

SEQ ID NO: 740 - protein, 5 aa, Artificial Sequence
  Description of Artificial Sequence: Synthetic peptide
  XENP023765 vhCDR1
HYGMN

SEQ ID NO: 741 - protein, 17 aa, Artificial Sequence
  Description of Artificial Sequence: Synthetic peptide
  XENP023765 vhCDR2
WINTYTGEPTYADGFTG

SEQ ID NO: 742 - protein, 8 aa, Artificial Sequence
  Description of Artificial Sequence: Synthetic peptide
  XENP023765 vhCDR3
DYYGSSPY

SEQ ID NO: 743 - protein, 16 aa, Artificial Sequence
  Description of Artificial Sequence: Synthetic peptide
  XENP023765 vlCDR1
KSSQSIVHSNGNTYLE

SEQ ID NO: 744 - protein, 7 aa, Artificial Sequence
  Description of Artificial Sequence: Synthetic peptide
  XENP023765 vlCDR2
KVSNRFS

SEQ ID NO: 745 - protein, 9 aa, Artificial Sequence
  Description of Artificial Sequence: Synthetic peptide
  XENP023765 vlCDR3
FQGSHVPNT

SEQ ID NO: 746 - protein, 251 aa, Artificial Sequence
  Description of Artificial Sequence: Synthetic polypeptide
  XENP023766 1C11_H3.19_L3_scFv
QIQLVQSGSELKKPGASVKVSCKASGYTFTHYGMNWVRQAPGKGLEWMGWINTYTGEPTYADGFTGRFVFSLDTSVSTAYLQISSLKAEDTAVYFCARDYYGSSPYWGQGTLVTVSSGKPGSGKPGSGKPGSGKPGSDVLMTQSPDSLAVSLGERATINCKSSQSIVHSNGNTYLEWYQQKPGQSPKLLIYKVSNRFSGVPDRFSGSGSGTDFTLTISSLQAEDVAVYYCFQGSHVPNTFGGGTKVEIKGS

SEQ ID NO: 747 - protein, 117 aa, Artificial Sequence
  Description of Artificial Sequence: Synthetic polypeptide
  VH of XENP023766
QIQLVQSGSELKKPGASVKVSCKASGYTFTHYGMNWVRQAPGKGLEWMGWINTYTGEPTYADGFTGRFVFSLDTSVSTAYLQISSLKAEDTAVYFCARDYYGSSPYWGQGTLVTVSS

SEQ ID NO: 748 - protein, 114 aa, Artificial Sequence; identical to SEQ ID NO: 649
  Description of Artificial Sequence: Synthetic polypeptide
  VL of XENP023766

SEQ ID NO: 749 - protein, 5 aa, Artificial Sequence
  Description of Artificial Sequence: Synthetic peptide
  XENP023766 vhCDR1
HYGMN

SEQ ID NO: 750 - protein, 17 aa, Artificial Sequence
  Description of Artificial Sequence: Synthetic peptide
  XENP023766 vhCDR2
WINTYTGEPTYADGFTG

SEQ ID NO: 751 - protein, 8 aa, Artificial Sequence
  Description of Artificial Sequence: Synthetic peptide
  XENP023766 vhCDR3
DYYGSSPY

SEQ ID NO: 752 - protein, 16 aa, Artificial Sequence
  Description of Artificial Sequence: Synthetic peptide
  XENP023766 vlCDR1
KSSQSIVHSNGNTYLE

SEQ ID NO: 753 - protein, 7 aa, Artificial Sequence
  Description of Artificial Sequence: Synthetic peptide
  XENP023766 vlCDR2
KVSNRFS

SEQ ID NO: 754 - protein, 9 aa, Artificial Sequence
  Description of Artificial Sequence: Synthetic peptide
  XENP023766 vlCDR3
FQGSHVPNT

SEQ ID NO: 755 - protein, 251 aa, Artificial Sequence
  Description of Artificial Sequence: Synthetic polypeptide
  XENP023767 1C11_H3.20_L3_scFv
QIQLVQSGSELKKPGASVKVSCKASGYTFTHYGMNWVRQAPGRGLEWMGWINTYTGEPTYADGFTGRFVFSLDTSVSTAYLQISSLKAEDTAVYFCARDYYGSSPYWGQGTLVTVSSGKPGSGKPGSGKPGSGKPGSDVLMTQSPDSLAVSLGERATINCKSSQSIVHSNGNTYLEWYQQKPGQSPKLLIYKVSNRFSGVPDRFSGSGSGTDFTLTISSLQAEDVAVYYCFQGSHVPNTFGGGTKVEIKGS

SEQ ID NO: 756 - protein, 117 aa, Artificial Sequence
  Description of Artificial Sequence: Synthetic polypeptide
  VH of XENP023767
QIQLVQSGSELKKPGASVKVSCKASGYTFTHYGMNWVRQAPGRGLEWMGWINTYTGEPTYADGFTGRFVFSLDTSVSTAYLQISSLKAEDTAVYFCARDYYGSSPYWGQGTLVTVSS

SEQ ID NO: 757 - protein, 114 aa, Artificial Sequence; identical to SEQ ID NO: 649
  Description of Artificial Sequence: Synthetic polypeptide
  VL of XENP023767

SEQ ID NO: 758 - protein, 5 aa, Artificial Sequence
  Description of Artificial Sequence: Synthetic peptide
  XENP023767 vhCDR1
HYGMN

SEQ ID NO: 759 - protein, 17 aa, Artificial Sequence
  Description of Artificial Sequence: Synthetic peptide
  XENP023767 vhCDR2
WINTYTGEPTYADGFTG

SEQ ID NO: 760 - protein, 8 aa, Artificial Sequence
  Description of Artificial Sequence: Synthetic peptide
  XENP023767 vhCDR3
DYYGSSPY

SEQ ID NO: 761 - protein, 16 aa, Artificial Sequence
  Description of Artificial Sequence: Synthetic peptide
  XENP023767 vlCDR1
KSSQSIVHSNGNTYLE

SEQ ID NO: 762 - protein, 7 aa, Artificial Sequence
  Description of Artificial Sequence: Synthetic peptide
  XENP023767 vlCDR2
KVSNRFS

SEQ ID NO: 763 - protein, 9 aa, Artificial Sequence
  Description of Artificial Sequence: Synthetic peptide
  XENP023767 vlCDR3
FQGSHVPNT

SEQ ID NO: 764 - protein, 251 aa, Artificial Sequence
  Description of Artificial Sequence: Synthetic polypeptide
  XENP023768 1C11_H3.21_L3_scFv
QIQLVQSGSELKKPGASVKVSCKASGYTFTHYGMNWVRQAPGHGLEWMGWINTYTGEPTYADGFTGRFVFSLDTSVSTAYLQISSLKAEDTAVYFCARDYYGSSPYWGQGTLVTVSSGKPGSGKPGSGKPGSGKPGSDVLMTQSPDSLAVSLGERATINCKSSQSIVHSNGNTYLEWYQQKPGQSPKLLIYKVSNRFSGVPDRFSGSGSGTDFTLTISSLQAEDVAVYYCFQGSHVPNTFGGGTKVEIKGS

SEQ ID NO: 765 - protein, 117 aa, Artificial Sequence
  Description of Artificial Sequence: Synthetic polypeptide
  VH of XENP023768
QIQLVQSGSELKKPGASVKVSCKASGYTFTHYGMNWVRQAPGHGLEWMGWINTYTGEPTYADGFTGRFVFSLDTSVSTAYLQISSLKAEDTAVYFCARDYYGSSPYWGQGTLVTVSS

SEQ ID NO: 766 - protein, 114 aa, Artificial Sequence; identical to SEQ ID NO: 649
  Description of Artificial Sequence: Synthetic polypeptide
  VL of XENP023768

SEQ ID NO: 767 - protein, 5 aa, Artificial Sequence
  Description of Artificial Sequence: Synthetic peptide
  XENP023768 vhCDR1
HYGMN

SEQ ID NO: 768 - protein, 17 aa, Artificial Sequence
  Description of Artificial Sequence: Synthetic peptide
  XENP023768 vhCDR2
WINTYTGEPTYADGFTG

SEQ ID NO: 769 - protein, 8 aa, Artificial Sequence
  Description of Artificial Sequence: Synthetic peptide
  XENP023768 vhCDR3
DYYGSSPY

SEQ ID NO: 770 - protein, 16 aa, Artificial Sequence
  Description of Artificial Sequence: Synthetic peptide
  XENP023768 vlCDR1
KSSQSIVHSNGNTYLE

SEQ ID NO: 771 - protein, 7 aa, Artificial Sequence
  Description of Artificial Sequence: Synthetic peptide
  XENP023768 vlCDR2
KVSNRFS

SEQ ID NO: 772 - protein, 9 aa, Artificial Sequence
  Description of Artificial Sequence: Synthetic peptide
  XENP023768 vlCDR3
FQGSHVPNT

SEQ ID NO: 773 - protein, 251 aa, Artificial Sequence
  Description of Artificial Sequence: Synthetic polypeptide
  XENP023769 1C11_H3.22_L3_scFv
QIQLVQSGSELKKPGASVKVSCKASGYTFTHYGMNWVRQAPGEGLEWMGWINTYTGEPTYADGFTGRFVFSLDTSVSTAYLQISSLKAEDTAVYFCARDYYGSSPYWGQGTLVTVSSGKPGSGKPGSGKPGSGKPGSDVLMTQSPDSLAVSLGERATINCKSSQSIVHSNGNTYLEWYQQKPGQSPKLLIYKVSNRFSGVPDRFSGSGSGTDFTLTISSLQAEDVAVYYCFQGSHVPNTFGGGTKVEIKGS

SEQ ID NO: 774 - protein, 117 aa, Artificial Sequence
  Description of Artificial Sequence: Synthetic polypeptide
  VH of XENP023769
QIQLVQSGSELKKPGASVKVSCKASGYTFTHYGMNWVRQAPGEGLEWMGWINTYTGEPTYADGFTGRFVFSLDTSVSTAYLQISSLKAEDTAVYFCARDYYGSSPYWGQGTLVTVSS

SEQ ID NO: 775 - protein, 114 aa, Artificial Sequence; identical to SEQ ID NO: 649
  Description of Artificial Sequence: Synthetic polypeptide
  VL of XENP023769

SEQ ID NO: 776 - protein, 5 aa, Artificial Sequence
  Description of Artificial Sequence: Synthetic peptide
  XENP023769 vhCDR1
HYGMN

SEQ ID NO: 777 - protein, 17 aa, Artificial Sequence
  Description of Artificial Sequence: Synthetic peptide
  XENP023769 vhCDR2
WINTYTGEPTYADGFTG

SEQ ID NO: 778 - protein, 8 aa, Artificial Sequence
  Description of Artificial Sequence: Synthetic peptide
  XENP023769 vhCDR3
DYYGSSPY

SEQ ID NO: 779 - protein, 16 aa, Artificial Sequence
  Description of Artificial Sequence: Synthetic peptide
  XENP023769 vlCDR1
KSSQSIVHSNGNTYLE

SEQ ID NO: 780 - protein, 7 aa, Artificial Sequence
  Description of Artificial Sequence: Synthetic peptide
  XENP023769 vlCDR2
KVSNRFS

SEQ ID NO: 781 - protein, 9 aa, Artificial Sequence
  Description of Artificial Sequence: Synthetic peptide
  XENP023769 vlCDR3
FQGSHVPNT

SEQ ID NO: 782 - protein, 251 aa, Artificial Sequence
  Description of Artificial Sequence: Synthetic polypeptide
  XENP023770 1C11_H3.25_L3_scFv
QIQLVQSGSELKKPGASVKVSCKASGYTFTHYGMNWVRQAPGQGLEWMGWINTNTGEPTYADGFTGRFVFSLDTSVSTAYLQISSLKAEDTAVYFCARDYYGSSPYWGQGTLVTVSSGKPGSGKPGSGKPGSGKPGSDVLMTQSPDSLAVSLGERATINCKSSQSIVHSNGNTYLEWYQQKPGQSPKLLIYKVSNRFSGVPDRFSGSGSGTDFTLTISSLQAEDVAVYYCFQGSHVPNTFGGGTKVEIKGS

SEQ ID NO: 783 - protein, 117 aa, Artificial Sequence
  Description of Artificial Sequence: Synthetic polypeptide
  VH of XENP023770
QIQLVQSGSELKKPGASVKVSCKASGYTFTHYGMNWVRQAPGQGLEWMGWINTNTGEPTYADGFTGRFVFSLDTSVSTAYLQISSLKAEDTAVYFCARDYYGSSPYWGQGTLVTVSS

SEQ ID NO: 784 - protein, 114 aa, Artificial Sequence; identical to SEQ ID NO: 649
  Description of Artificial Sequence: Synthetic polypeptide
  VL of XENP023770

SEQ ID NO: 785 - protein, 5 aa, Artificial Sequence
  Description of Artificial Sequence: Synthetic peptide
  XENP023770 vhCDR1
HYGMN

SEQ ID NO: 786 - protein, 17 aa, Artificial Sequence
  Description of Artificial Sequence: Synthetic peptide
  XENP023770 vhCDR2
WINTNTGEPTYADGFTG

SEQ ID NO: 787 - protein, 8 aa, Artificial Sequence
  Description of Artificial Sequence: Synthetic peptide
  XENP023770 vhCDR3
DYYGSSPY

SEQ ID NO: 788 - protein, 16 aa, Artificial Sequence
  Description of Artificial Sequence: Synthetic peptide
  XENP023770 vlCDR1
KSSQSIVHSNGNTYLE

SEQ ID NO: 789 - protein, 7 aa, Artificial Sequence
  Description of Artificial Sequence: Synthetic peptide
  XENP023770 vlCDR2
KVSNRFS

SEQ ID NO: 790 - protein, 9 aa, Artificial Sequence
  Description of Artificial Sequence: Synthetic peptide
  XENP023770 vlCDR3
FQGSHVPNT

SEQ ID NO: 791 - protein, 251 aa, Artificial Sequence
  Description of Artificial Sequence: Synthetic polypeptide
  XENP023771 1C11_H3.26_L3_scFv
QIQLVQSGSELKKPGASVKVSCKASGYTFTHYGMNWVRQAPGQGLEWMGWINTYTGHPTYADGFTGRFVFSLDTSVSTAYLQISSLKAEDTAVYFCARDYYGSSPYWGQGTLVTVSSGKPGSGKPGSGKPGSGKPGSDVLMTQSPDSLAVSLGERATINCKSSQSIVHSNGNTYLEWYQQKPGQSPKLLIYKVSNRFSGVPDRFSGSGSGTDFTLTISSLQAEDVAVYYCFQGSHVPNTFGGGTKVEIKGS

SEQ ID NO: 792 - protein, 117 aa, Artificial Sequence
  Description of Artificial Sequence: Synthetic polypeptide
  VH of XENP023771
QIQLVQSGSELKKPGASVKVSCKASGYTFTHYGMNWVRQAPGQGLEWMGWINTYTGHPTYADGFTGRFVFSLDTSVSTAYLQISSLKAEDTAVYFCARDYYGSSPYWGQGTLVTVSS

SEQ ID NO: 793 - protein, 114 aa, Artificial Sequence; identical to SEQ ID NO: 649
  Description of Artificial Sequence: Synthetic polypeptide
  VL of XENP023771

SEQ ID NO: 794 - protein, 5 aa, Artificial Sequence
  Description of Artificial Sequence: Synthetic peptide
  XENP023771 vhCDR1
HYGMN

SEQ ID NO: 795 - protein, 17 aa, Artificial Sequence
  Description of Artificial Sequence: Synthetic peptide
  XENP023771 vhCDR2
WINTYTGHPTYADGFTG

SEQ ID NO: 796 - protein, 8 aa, Artificial Sequence
  Description of Artificial Sequence: Synthetic peptide
  XENP023771 vhCDR3
DYYGSSPY

SEQ ID NO: 797 - protein, 16 aa, Artificial Sequence
  Description of Artificial Sequence: Synthetic peptide
  XENP023771 vlCDR1
KSSQSIVHSNGNTYLE

SEQ ID NO: 798 - protein, 7 aa, Artificial Sequence
  Description of Artificial Sequence: Synthetic peptide
  XENP023771 vlCDR2
KVSNRFS

SEQ ID NO: 799 - protein, 9 aa, Artificial Sequence
  Description of Artificial Sequence: Synthetic peptide
  XENP023771 vlCDR3
FQGSHVPNT

SEQ ID NO: 800 - protein, 251 aa, Artificial Sequence
  Description of Artificial Sequence: Synthetic polypeptide
  XENP023772 1C11_H3.30_L3_scFv
QIQLVQSGSELKKPGASVKVSCKASGYTFTHYGMNWVRQAPGQGLEWMGWINTYTGEPEYADGFTGRFVFSLDTSVSTAYLQISSLKAEDTAVYFCARDYYGSSPYWGQGTLVTVSSGKPGSGKPGSGKPGSGKPGSDVLMTQSPDSLAVSLGERATINCKSSQSIVHSNGNTYLEWYQQKPGQSPKLLIYKVSNRFSGVPDRFSGSGSGTDFTLTISSLQAEDVAVYYCFQGSHVPNTFGGGTKVEIKGS

SEQ ID NO: 801 - protein, 117 aa, Artificial Sequence
  Description of Artificial Sequence: Synthetic polypeptide
  VH of XENP023772
QIQLVQSGSELKKPGASVKVSCKASGYTFTHYGMNWVRQAPGQGLEWMGWINTYTGEPEYADGFTGRFVFSLDTSVSTAYLQISSLKAEDTAVYFCARDYYGSSPYWGQGTLVTVSS

SEQ ID NO: 802 - protein, 114 aa, Artificial Sequence; identical to SEQ ID NO: 649
  Description of Artificial Sequence: Synthetic polypeptide
  VL of XENP023772

SEQ ID NO: 803 - protein, 5 aa, Artificial Sequence
  Description of Artificial Sequence: Synthetic peptide
  XENP023772 vhCDR1
HYGMN

SEQ ID NO: 804 - protein, 17 aa, Artificial Sequence
  Description of Artificial Sequence: Synthetic peptide
  XENP023772 vhCDR2
WINTYTGEPEYADGFTG

SEQ ID NO: 805 - protein, 8 aa, Artificial Sequence
  Description of Artificial Sequence: Synthetic peptide
  XENP023772 vhCDR3
DYYGSSPY

SEQ ID NO: 806 - protein, 16 aa, Artificial Sequence
  Description of Artificial Sequence: Synthetic peptide
  XENP023772 vlCDR1
KSSQSIVHSNGNTYLE

SEQ ID NO: 807 - protein, 7 aa, Artificial Sequence
  Description of Artificial Sequence: Synthetic peptide
  XENP023772 vlCDR2
KVSNRFS

SEQ ID NO: 808 - protein, 9 aa, Artificial Sequence
  Description of Artificial Sequence: Synthetic peptide
  XENP023772 vlCDR3
FQGSHVPNT

SEQ ID NO: 809 - protein, 251 aa, Artificial Sequence
  Description of Artificial Sequence: Synthetic polypeptide
  XENP023773 1C11_H3.32_L3_scFv
QIQLVQSGSELKKPGASVKVSCKASGYTFTHYGMNWVRQAPGQGLEWMGWINTYTGEPTYNDGFTGRFVFSLDTSVSTAYLQISSLKAEDTAVYFCARDYYGSSPYWGQGTLVTVSSGKPGSGKPGSGKPGSGKPGSDVLMTQSPDSLAVSLGERATINCKSSQSIVHSNGNTYLEWYQQKPGQSPKLLIYKVSNRFSGVPDRFSGSGSGTDFTLTISSLQAEDVAVYYCFQGSHVPNTFGGGTKVEIKGS

SEQ ID NO: 810 - protein, 117 aa, Artificial Sequence
  Description of Artificial Sequence: Synthetic polypeptide
  VH of XENP023773
QIQLVQSGSELKKPGASVKVSCKASGYTFTHYGMNWVRQAPGQGLEWMGWINTYTGEPTYNDGFTGRFVFSLDTSVSTAYLQISSLKAEDTAVYFCARDYYGSSPYWGQGTLVTVSS

SEQ ID NO: 811 - protein, 114 aa, Artificial Sequence; identical to SEQ ID NO: 649
  Description of Artificial Sequence: Synthetic polypeptide
  VL of XENP023773

SEQ ID NO: 812 - protein, 5 aa, Artificial Sequence
  Description of Artificial Sequence: Synthetic peptide
  XENP023773 vhCDR1
HYGMN

SEQ ID NO: 813 - protein, 17 aa, Artificial Sequence
  Description of Artificial Sequence: Synthetic peptide
  XENP023773 vhCDR2
WINTYTGEPTYNDGFTG

SEQ ID NO: 814 - protein, 8 aa, Artificial Sequence
  Description of Artificial Sequence: Synthetic peptide
  XENP023773 vhCDR3
DYYGSSPY

SEQ ID NO: 815 - protein, 16 aa, Artificial Sequence
  Description of Artificial Sequence: Synthetic peptide
  XENP023773 vlCDR1
KSSQSIVHSNGNTYLE

SEQ ID NO: 816 - protein, 7 aa, Artificial Sequence
  Description of Artificial Sequence: Synthetic peptide
  XENP023773 vlCDR2
KVSNRFS

SEQ ID NO: 817 - protein, 9 aa, Artificial Sequence
  Description of Artificial Sequence: Synthetic peptide
  XENP023773 vlCDR3
FQGSHVPNT

SEQ ID NO: 818 - protein, 251 aa, Artificial Sequence
  Description of Artificial Sequence: Synthetic polypeptide
  XENP023774 1C11_H3.33_L3_scFv
QIQLVQSGSELKKPGASVKVSCKASGYTFTHYGMNWVRQAPGQGLEWMGWINTYTGEPTYAQGFTGRFVFSLDTSVSTAYLQISSLKAEDTAVYFCARDYYGSSPYWGQGTLVTVSSGKPGSGKPGSGKPGSGKPGSDVLMTQSPDSLAVSLGERATINCKSSQSIVHSNGNTYLEWYQQKPGQSPKLLIYKVSNRFSGVPDRFSGSGSGTDFTLTISSLQAEDVAVYYCFQGSHVPNTFGGGTKVEIKGS

SEQ ID NO: 819 - protein, 117 aa, Artificial Sequence
  Description of Artificial Sequence: Synthetic polypeptide
  VH of XENP023774
QIQLVQSGSELKKPGASVKVSCKASGYTFTHYGMNWVRQAPGQGLEWMGWINTYTGEPTYAQGFTGRFVFSLDTSVSTAYLQISSLKAEDTAVYFCARDYYGSSPYWGQGTLVTVSS

SEQ ID NO: 820 - protein, 114 aa, Artificial Sequence; identical to SEQ ID NO: 649
  Description of Artificial Sequence: Synthetic polypeptide
  VL of XENP023774

SEQ ID NO: 821 - protein, 5 aa, Artificial Sequence
  Description of Artificial Sequence: Synthetic peptide
  XENP023774 vhCDR1
HYGMN

SEQ ID NO: 822 - protein, 17 aa, Artificial Sequence
  Description of Artificial Sequence: Synthetic peptide
  XENP023774 vhCDR2
WINTYTGEPTYAQGFTG

SEQ ID NO: 823 - protein, 8 aa, Artificial Sequence
  Description of Artificial Sequence: Synthetic peptide
  XENP023774 vhCDR3
DYYGSSPY

SEQ ID NO: 824 - protein, 16 aa, Artificial Sequence
  Description of Artificial Sequence: Synthetic peptide
  XENP023774 vlCDR1
KSSQSIVHSNGNTYLE

SEQ ID NO: 825 - protein, 7 aa, Artificial Sequence
  Description of Artificial Sequence: Synthetic peptide
  XENP023774 vlCDR2
KVSNRFS

SEQ ID NO: 826 - protein, 9 aa, Artificial Sequence
  Description of Artificial Sequence: Synthetic peptide
  XENP023774 vlCDR3
FQGSHVPNT

SEQ ID NO: 827 - protein, 251 aa, Artificial Sequence
  Description of Artificial Sequence: Synthetic polypeptide
  XENP023775 1C11_H3.34_L3_scFv
QIQLVQSGSELKKPGASVKVSCKASGYTFTHYGMNWVRQAPGQGLEWMGWINTYTGEPTYAEGFTGRFVFSLDTSVSTAYLQISSLKAEDTAVYFCARDYYGSSPYWGQGTLVTVSSGKPGSGKPGSGKPGSGKPGSDVLMTQSPDSLAVSLGERATINCKSSQSIVHSNGNTYLEWYQQKPGQSPKLLIYKVSNRFSGVPDRFSGSGSGTDFTLTISSLQAEDVAVYYCFQGSHVPNTFGGGTKVEIKGS

SEQ ID NO: 828 - protein, 117 aa, Artificial Sequence
  Description of Artificial Sequence: Synthetic polypeptide
  VH of XENP023775
QIQLVQSGSELKKPGASVKVSCKASGYTFTHYGMNWVRQAPGQGLEWMGWINTYTGEPTYAEGFTGRFVFSLDTSVSTAYLQISSLKAEDTAVYFCARDYYGSSPYWGQGTLVTVSS

SEQ ID NO: 829 - protein, 114 aa, Artificial Sequence; identical to SEQ ID NO: 649
  Description of Artificial Sequence: Synthetic polypeptide
  VL of XENP023775

SEQ ID NO: 830 - protein, 5 aa, Artificial Sequence
  Description of Artificial Sequence: Synthetic peptide
  XENP023775 vhCDR1
HYGMN

SEQ ID NO: 831 - protein, 17 aa, Artificial Sequence
  Description of Artificial Sequence: Synthetic peptide
  XENP023775 vhCDR2
WINTYTGEPTYAEGFTG

SEQ ID NO: 832 - protein, 8 aa, Artificial Sequence
  Description of Artificial Sequence: Synthetic peptide
  XENP023775 vhCDR3
DYYGSSPY

SEQ ID NO: 833 - protein, 16 aa, Artificial Sequence
  Description of Artificial Sequence: Synthetic peptide
  XENP023775 vlCDR1
KSSQSIVHSNGNTYLE

SEQ ID NO: 834 - protein, 7 aa, Artificial Sequence
  Description of Artificial Sequence: Synthetic peptide
  XENP023775 vlCDR2
KVSNRFS

SEQ ID NO: 835 - protein, 9 aa, Artificial Sequence
  Description of Artificial Sequence: Synthetic peptide
  XENP023775 vlCDR3
FQGSHVPNT

SEQ ID NO: 836 - protein, 251 aa, Artificial Sequence
  Description of Artificial Sequence: Synthetic polypeptide
  XENP023776 1C11_H3.35_L3_scFv
QIQLVQSGSELKKPGASVKVSCKASGYTFTHYGMNWVRQAPGQGLEWMGWINTYTGEPTYADKFTGRFVFSLDTSVSTAYLQISSLKAEDTAVYFCARDYYGSSPYWGQGTLVTVSSGKPGSGKPGSGKPGSGKPGSDVLMTQSPDSLAVSLGERATINCKSSQSIVHSNGNTYLEWYQQKPGQSPKLLIYKVSNRFSGVPDRFSGSGSGTDFTLTISSLQAEDVAVYYCFQGSHVPNTFGGGTKVEIKGS

SEQ ID NO: 837 - protein, 117 aa, Artificial Sequence
  Description of Artificial Sequence: Synthetic polypeptide
  VH of XENP023776
QIQLVQSGSELKKPGASVKVSCKASGYTFTHYGMNWVRQAPGQGLEWMGWINTYTGEPTYADKFTGRFVFSLDTSVSTAYLQISSLKAEDTAVYFCARDYYGSSPYWGQGTLVTVSS

SEQ ID NO: 838 - protein, 114 aa, Artificial Sequence; identical to SEQ ID NO: 649
  Description of Artificial Sequence: Synthetic polypeptide
  VL of XENP023776

SEQ ID NO: 839 - protein, 5 aa, Artificial Sequence
  Description of Artificial Sequence: Synthetic peptide
  XENP023776 vhCDR1
HYGMN

SEQ ID NO: 840 - protein, 17 aa, Artificial Sequence
  Description of Artificial Sequence: Synthetic peptide
  XENP023776 vhCDR2
WINTYTGEPTYADKFTG

SEQ ID NO: 841 - protein, 8 aa, Artificial Sequence
  Description of Artificial Sequence: Synthetic peptide
  XENP023776 vhCDR3
DYYGSSPY

SEQ ID NO: 842 - protein, 16 aa, Artificial Sequence
  Description of Artificial Sequence: Synthetic peptide
  XENP023776 vlCDR1
KSSQSIVHSNGNTYLE

SEQ ID NO: 843 - protein, 7 aa, Artificial Sequence
  Description of Artificial Sequence: Synthetic peptide
  XENP023776 vlCDR2
KVSNRFS

SEQ ID NO: 844 - protein, 9 aa, Artificial Sequence
  Description of Artificial Sequence: Synthetic peptide
  XENP023776 vlCDR3
FQGSHVPNT

SEQ ID NO: 845 - protein, 251 aa, Artificial Sequence
  Description of Artificial Sequence: Synthetic polypeptide
  XENP023777 1C11_H3.38_L3_scFv
QIQLVQSGSELKKPGASVKVSCKASGYTFTHYGMNWVRQAPGQGLEWMGWINTYTGEPTYADGITGRFVFSLDTSVSTAYLQISSLKAEDTAVYFCARDYYGSSPYWGQGTLVTVSSGKPGSGKPGSGKPGSGKPGSDVLMTQSPDSLAVSLGERATINCKSSQSIVHSNGNTYLEWYQQKPGQSPKLLIYKVSNRFSGVPDRFSGSGSGTDFTLTISSLQAEDVAVYYCFQGSHVPNTFGGGTKVEIKGS

SEQ ID NO: 846 - protein, 117 aa, Artificial Sequence
  Description of Artificial Sequence: Synthetic polypeptide
  VH of XENP023777
QIQLVQSGSELKKPGASVKVSCKASGYTFTHYGMNWVRQAPGQGLEWMGWINTYTGEPTYADGITGRFVFSLDTSVSTAYLQISSLKAEDTAVYFCARDYYGSSPYWGQGTLVTVSS

SEQ ID NO: 847 - protein, 114 aa, Artificial Sequence; identical to SEQ ID NO: 649
  Description of Artificial Sequence: Synthetic polypeptide
  VL of XENP023777

SEQ ID NO: 848 - protein, 5 aa, Artificial Sequence
  Description of Artificial Sequence: Synthetic peptide
  XENP023777 vhCDR1
HYGMN

SEQ ID NO: 849 - protein, 17 aa, Artificial Sequence
  Description of Artificial Sequence: Synthetic peptide
  XENP023777 vhCDR2
WINTYTGEPTYADGITG

SEQ ID NO: 850 - protein, 8 aa, Artificial Sequence
  Description of Artificial Sequence: Synthetic peptide
  XENP023777 vhCDR3
DYYGSSPY

SEQ ID NO: 851 - protein, 16 aa, Artificial Sequence
  Description of Artificial Sequence: Synthetic peptide
  XENP023777 vlCDR1
KSSQSIVHSNGNTYLE

SEQ ID NO: 852 - protein, 7 aa, Artificial Sequence
  Description of Artificial Sequence: Synthetic peptide
  XENP023777 vlCDR2
KVSNRFS

SEQ ID NO: 853 - protein, 9 aa, Artificial Sequence
  Description of Artificial Sequence: Synthetic peptide
  XENP023777 vlCDR3
FQGSHVPNT

SEQ ID NO: 854 - protein, 251 aa, Artificial Sequence
  Description of Artificial Sequence: Synthetic polypeptide
  XENP023778 1C11_H3.39_L3_scFv
QIQLVQSGSELKKPGASVKVSCKASGYTFTHYGMNWVRQAPGQGLEWMGWINTYTGEPTYADGLTGRFVFSLDTSVSTAYLQISSLKAEDTAVYFCARDYYGSSPYWGQGTLVTVSSGKPGSGKPGSGKPGSGKPGSDVLMTQSPDSLAVSLGERATINCKSSQSIVHSNGNTYLEWYQQKPGQSPKLLIYKVSNRFSGVPDRFSGSGSGTDFTLTISSLQAEDVAVYYCFQGSHVPNTFGGGTKVEIKGS

SEQ ID NO: 855 - protein, 117 aa, Artificial Sequence
  Description of Artificial Sequence: Synthetic polypeptide
  VH of XENP023778
QIQLVQSGSELKKPGASVKVSCKASGYTFTHYGMNWVRQAPGQGLEWMGWINTYTGEPTYADGLTGRFVFSLDTSVSTAYLQISSLKAEDTAVYFCARDYYGSSPYWGQGTLVTVSS

SEQ ID NO: 856 - protein, 114 aa, Artificial Sequence; identical to SEQ ID NO: 649
  Description of Artificial Sequence: Synthetic polypeptide
  VL of XENP023778

SEQ ID NO: 857 - protein, 5 aa, Artificial Sequence
  Description of Artificial Sequence: Synthetic peptide
  XENP023778 vhCDR1
HYGMN

SEQ ID NO: 858 - protein, 17 aa, Artificial Sequence
  Description of Artificial Sequence: Synthetic peptide
  XENP023778 vhCDR2
WINTYTGEPTYADGLTG

SEQ ID NO: 859 - protein, 8 aa, Artificial Sequence
  Description of Artificial Sequence: Synthetic peptide
  XENP023778 vhCDR3
DYYGSSPY

SEQ ID NO: 860 - protein, 16 aa, Artificial Sequence
  Description of Artificial Sequence: Synthetic peptide
  XENP023778 vlCDR1
KSSQSIVHSNGNTYLE

SEQ ID NO: 861 - protein, 7 aa, Artificial Sequence
  Description of Artificial Sequence: Synthetic peptide
  XENP023778 vlCDR2
KVSNRFS

SEQ ID NO: 862 - protein, 9 aa, Artificial Sequence
  Description of Artificial Sequence: Synthetic peptide
  XENP023778 vlCDR3
FQGSHVPNT

SEQ ID NO: 863 - protein, 251 aa, Artificial Sequence
  Description of Artificial Sequence: Synthetic polypeptide
  XENP023779 1C11_H3.41_L3_scFv
QIQLVQSGSELKKPGASVKVSCKASGYTFTHYGMNWVRQAPGQGLEWMGWINTYTGEPTYADGFKGRFVFSLDTSVSTAYLQISSLKAEDTAVYFCARDYYGSSPYWGQGTLVTVSSGKPGSGKPGSGKPGSGKPGSDVLMTQSPDSLAVSLGERATINCKSSQSIVHSNGNTYLEWYQQKPGQSPKLLIYKVSNRFSGVPDRFSGSGSGTDFTLTISSLQAEDVAVYYCFQGSHVPNTFGGGTKVEIKGS

SEQ ID NO: 864 - protein, 117 aa, Artificial Sequence
  Description of Artificial Sequence: Synthetic polypeptide
  VH of XENP023779
QIQLVQSGSELKKPGASVKVSCKASGYTFTHYGMNWVRQAPGQGLEWMGWINTYTGEPTYADGFKGRFVFSLDTSVSTAYLQISSLKAEDTAVYFCARDYYGSSPYWGQGTLVTVSS

SEQ ID NO: 865 - protein, 114 aa, Artificial Sequence; identical to SEQ ID NO: 649
  Description of Artificial Sequence: Synthetic polypeptide
  VL of XENP023779

SEQ ID NO: 866 - protein, 5 aa, Artificial Sequence
  Description of Artificial Sequence: Synthetic peptide
  XENP023779 vhCDR1
HYGMN

SEQ ID NO: 867 - protein, 17 aa, Artificial Sequence
  Description of Artificial Sequence: Synthetic peptide
  XENP023779 vhCDR2
WINTYTGEPTYADGFKG

SEQ ID NO: 868 - protein, 8 aa, Artificial Sequence
  Description of Artificial Sequence: Synthetic peptide
  XENP023779 vhCDR3
DYYGSSPY

SEQ ID NO: 869 - protein, 16 aa, Artificial Sequence
  Description of Artificial Sequence: Synthetic peptide
  XENP023779 vlCDR1
KSSQSIVHSNGNTYLE

SEQ ID NO: 870 - protein, 7 aa, Artificial Sequence
  Description of Artificial Sequence: Synthetic peptide
  XENP023779 vlCDR2
KVSNRFS

SEQ ID NO: 871 - protein, 9 aa, Artificial Sequence
  Description of Artificial Sequence: Synthetic peptide
  XENP023779 vlCDR3
FQGSHVPNT

SEQ ID NO: 872 - protein, 251 aa, Artificial Sequence
  Description of Artificial Sequence: Synthetic polypeptide
  XENP023780 1C11_H3.42_L3_scFv
QIQLVQSGSELKKPGASVKVSCKASGYTFTHYGMNWVRQAPGQGLEWMGWINTYTGEPTYADGFQGRFVFSLDTSVSTAYLQISSLKAEDTAVYFCARDYYGSSPYWGQGTLVTVSSGKPGSGKPGSGKPGSGKPGSDVLMTQSPDSLAVSLGERATINCKSSQSIVHSNGNTYLEWYQQKPGQSPKLLIYKVSNRFSGVPDRFSGSGSGTDFTLTISSLQAEDVAVYYCFQGSHVPNTFGGGTKVEIKGS

SEQ ID NO: 873 - protein, 117 aa, Artificial Sequence
  Description of Artificial Sequence: Synthetic polypeptide
  VH of XENP023780
QIQLVQSGSELKKPGASVKVSCKASGYTFTHYGMNWVRQAPGQGLEWMGWINTYTGEPTYADGFQGRFVFSLDTSVSTAYLQISSLKAEDTAVYFCARDYYGSSPYWGQGTLVTVSS

SEQ ID NO: 874 - protein, 114 aa, Artificial Sequence; identical to SEQ ID NO: 649
  Description of Artificial Sequence: Synthetic polypeptide
  VL of XENP023780

SEQ ID NO: 875 - protein, 5 aa, Artificial Sequence
  Description of Artificial Sequence: Synthetic peptide
  XENP023780 vhCDR1
HYGMN

SEQ ID NO: 876 - protein, 17 aa, Artificial Sequence
  Description of Artificial Sequence: Synthetic peptide
  XENP023780 vhCDR2
WINTYTGEPTYADGFQG

SEQ ID NO: 877 - protein, 8 aa, Artificial Sequence
  Description of Artificial Sequence: Synthetic peptide
  XENP023780 vhCDR3
DYYGSSPY

SEQ ID NO: 878 - protein, 16 aa, Artificial Sequence
  Description of Artificial Sequence: Synthetic peptide
  XENP023780 vlCDR1
KSSQSIVHSNGNTYLE

SEQ ID NO: 879 - protein, 7 aa, Artificial Sequence
  Description of Artificial Sequence: Synthetic peptide
  XENP023780 vlCDR2
KVSNRFS

SEQ ID NO: 880 - protein, 9 aa, Artificial Sequence
  Description of Artificial Sequence: Synthetic peptide
  XENP023780 vlCDR3
FQGSHVPNT

SEQ ID NO: 881 - protein, 251 aa, Artificial Sequence
  Description of Artificial Sequence: Synthetic polypeptide
  XENP023781 1C11_H3.43_L3_scFv
QIQLVQSGSELKKPGASVKVSCKASGYTFTHYGMNWVRQAPGQGLEWMGWINTYTGEPTYADGFTGRVVFSLDTSVSTAYLQISSLKAEDTAVYFCARDYYGSSPYWGQGTLVTVSSGKPGSGKPGSGKPGSGKPGSDVLMTQSPDSLAVSLGERATINCKSSQSIVHSNGNTYLEWYQQKPGQSPKLLIYKVSNRFSGVPDRFSGSGSGTDFTLTISSLQAEDVAVYYCFQGSHVPNTFGGGTKVEIKGS

SEQ ID NO: 882 - protein, 117 aa, Artificial Sequence
  Description of Artificial Sequence: Synthetic polypeptide
  VH of XENP023781
QIQLVQSGSELKKPGASVKVSCKASGYTFTHYGMNWVRQAPGQGLEWMGWINTYTGEPTYADGFTGRVVFSLDTSVSTAYLQISSLKAEDTAVYFCARDYYGSSPYWGQGTLVTVSS

SEQ ID NO: 883 - protein, 114 aa, Artificial Sequence; identical to SEQ ID NO: 649
  Description of Artificial Sequence: Synthetic polypeptide
  VL of XENP023781

SEQ ID NO: 884 - protein, 5 aa, Artificial Sequence
  Description of Artificial Sequence: Synthetic peptide
  XENP023781 vhCDR1
HYGMN

SEQ ID NO: 885 - protein, 17 aa, Artificial Sequence
  Description of Artificial Sequence: Synthetic peptide
  XENP023781 vhCDR2
WINTYTGEPTYADGFTG

SEQ ID NO: 886 - protein, 8 aa, Artificial Sequence
  Description of Artificial Sequence: Synthetic peptide
  XENP023781 vhCDR3
DYYGSSPY

SEQ ID NO: 887 - protein, 16 aa, Artificial Sequence
  Description of Artificial Sequence: Synthetic peptide
  XENP023781 vlCDR1
KSSQSIVHSNGNTYLE

SEQ ID NO: 888 - protein, 7 aa, Artificial Sequence
  Description of Artificial Sequence: Synthetic peptide
  XENP023781 vlCDR2
KVSNRFS

SEQ ID NO: 889 - protein, 9 aa, Artificial Sequence
  Description of Artificial Sequence: Synthetic peptide
  XENP023781 vlCDR3
FQGSHVPNT

SEQ ID NO: 890 - protein, 251 aa, Artificial Sequence
  Description of Artificial Sequence: Synthetic polypeptide
  XENP023782 1C11_H3.44_L3_scFv
QIQLVQSGSELKKPGASVKVSCKASGYTFTHYGMNWVRQAPGQGLEWMGWINTYTGEPTYADGFTGRFIFSLDTSVSTAYLQISSLKAEDTAVYFCARDYYGSSPYWGQGTLVTVSSGKPGSGKPGSGKPGSGKPGSDVLMTQSPDSLAVSLGERATINCKSSQSIVHSNGNTYLEWYQQKPGQSPKLLIYKVSNRFSGVPDRFSGSGSGTDFTLTISSLQAEDVAVYYCFQGSHVPNTFGGGTKVEIKGS

SEQ ID NO: 891 - protein, 117 aa, Artificial Sequence
  Description of Artificial Sequence: Synthetic polypeptide
  VH of XENP023782
QIQLVQSGSELKKPGASVKVSCKASGYTFTHYGMNWVRQAPGQGLEWMGWINTYTGEPTYADGFTGRFIFSLDTSVSTAYLQISSLKAEDTAVYFCARDYYGSSPYWGQGTLVTVSS

SEQ ID NO: 892 - protein, 114 aa, Artificial Sequence; identical to SEQ ID NO: 649
  Description of Artificial Sequence: Synthetic polypeptide
  VL of XENP023782

SEQ ID NO: 893 - protein, 5 aa, Artificial Sequence
  Description of Artificial Sequence: Synthetic peptide
  XENP023782 vhCDR1
HYGMN

SEQ ID NO: 894 - protein, 17 aa, Artificial Sequence
  Description of Artificial Sequence: Synthetic peptide
  XENP023782 vhCDR2
WINTYTGEPTYADGFTG

SEQ ID NO: 895 - protein, 8 aa, Artificial Sequence
  Description of Artificial Sequence: Synthetic peptide
  XENP023782 vhCDR3
DYYGSSPY

SEQ ID NO: 896 - protein, 16 aa, Artificial Sequence
  Description of Artificial Sequence: Synthetic peptide
  XENP023782 vlCDR1
KSSQSIVHSNGNTYLE

SEQ ID NO: 897 - protein, 7 aa, Artificial Sequence
  Description of Artificial Sequence: Synthetic peptide
  XENP023782 vlCDR2
KVSNRFS

SEQ ID NO: 898 - protein, 9 aa, Artificial Sequence
  Description of Artificial Sequence: Synthetic peptide
  XENP023782 vlCDR3
FQGSHVPNT

SEQ ID NO: 899 - protein, 251 aa, Artificial Sequence
  Description of Artificial Sequence: Synthetic polypeptide
  XENP023783 1C11_H3.45_L3_scFv
QIQLVQSGSELKKPGASVKVSCKASGYTFTHYGMNWVRQAPGQGLEWMGWINTYTGEPTYADGFTGRFSFSLDTSVSTAYLQISSLKAEDTAVYFCARDYYGSSPYWGQGTLVTVSSGKPGSGKPGSGKPGSGKPGSDVLMTQSPDSLAVSLGERATINCKSSQSIVHSNGNTYLEWYQQKPGQSPKLLIYKVSNRFSGVPDRFSGSGSGTDFTLTISSLQAEDVAVYYCFQGSHVPNTFGGGTKVEIKGS

SEQ ID NO: 900 - protein, 117 aa, Artificial Sequence
  Description of Artificial Sequence: Synthetic polypeptide
  VH of XENP023783
QIQLVQSGSELKKPGASVKVSCKASGYTFTHYGMNWVRQAPGQGLEWMGWINTYTGEPTYADGFTGRFSFSLDTSVSTAYLQISSLKAEDTAVYFCARDYYGSSPYWGQGTLVTVSS

SEQ ID NO: 901 - protein, 114 aa, Artificial Sequence; identical to SEQ ID NO: 649
  Description of Artificial Sequence: Synthetic polypeptide
  VL of XENP023783

SEQ ID NO: 902 - protein, 5 aa, Artificial Sequence
  Description of Artificial Sequence: Synthetic peptide
  XENP023783 vhCDR1
HYGMN

SEQ ID NO: 903 - protein, 17 aa, Artificial Sequence
  Description of Artificial Sequence: Synthetic peptide
  XENP023783 vhCDR2
WINTYTGEPTYADGFTG

SEQ ID NO: 904 - protein, 8 aa, Artificial Sequence
  Description of Artificial Sequence: Synthetic peptide
  XENP023783 vhCDR3
DYYGSSPY

SEQ ID NO: 905 - protein, 16 aa, Artificial Sequence
  Description of Artificial Sequence: Synthetic peptide
  XENP023783 vlCDR1
KSSQSIVHSNGNTYLE

SEQ ID NO: 906 - protein, 7 aa, Artificial Sequence
  Description of Artificial Sequence: Synthetic peptide
  XENP023783 vlCDR2
KVSNRFS

SEQ ID NO: 907 - protein, 9 aa, Artificial Sequence
  Description of Artificial Sequence: Synthetic peptide
  XENP023783 vlCDR3
FQGSHVPNT

SEQ ID NO: 908 - protein, 251 aa, Artificial Sequence
  Description of Artificial Sequence: Synthetic polypeptide
  XENP023784 1C11_H3.46_L3_scFv
QIQLVQSGSELKKPGASVKVSCKASGYTFTHYGMNWVRQAPGQGLEWMGWINTYTGEPTYADGFTGRFTFSLDTSVSTAYLQISSLKAEDTAVYFCARDYYGSSPYWGQGTLVTVSSGKPGSGKPGSGKPGSGKPGSDVLMTQSPDSLAVSLGERATINCKSSQSIVHSNGNTYLEWYQQKPGQSPKLLIYKVSNRFSGVPDRFSGSGSGTDFTLTISSLQAEDVAVYYCFQGSHVPNTFGGGTKVEIKGS

SEQ ID NO: 909 - protein, 117 aa, Artificial Sequence
  Description of Artificial Sequence: Synthetic polypeptide
  VH of XENP023784
QIQLVQSGSELKKPGASVKVSCKASGYTFTHYGMNWVRQAPGQGLEWMGWINTYTGEPTYADGFTGRFTFSLDTSVSTAYLQISSLKAEDTAVYFCARDYYGSSPYWGQGTLVTVSS

SEQ ID NO: 910 - protein, 114 aa, Artificial Sequence; identical to SEQ ID NO: 649
  Description of Artificial Sequence: Synthetic polypeptide
  VL of XENP023784

SEQ ID NO: 911 - protein, 5 aa, Artificial Sequence
  Description of Artificial Sequence: Synthetic peptide
  XENP023784 vhCDR1
HYGMN

SEQ ID NO: 912 - protein, 17 aa, Artificial Sequence
  Description of Artificial Sequence: Synthetic peptide
  XENP023784 vhCDR2
WINTYTGEPTYADGFTG

SEQ ID NO: 913 - protein, 8 aa, Artificial Sequence
  Description of Artificial Sequence: Synthetic peptide
  XENP023784 vhCDR3
DYYGSSPY

SEQ ID NO: 914 - protein, 16 aa, Artificial Sequence
  Description of Artificial Sequence: Synthetic peptide
  XENP023784 vlCDR1
KSSQSIVHSNGNTYLE

SEQ ID NO: 915 - protein, 7 aa, Artificial Sequence
  Description of Artificial Sequence: Synthetic peptide
  XENP023784 vlCDR2
KVSNRFS

SEQ ID NO: 916 - protein, 9 aa, Artificial Sequence
  Description of Artificial Sequence: Synthetic peptide
  XENP023784 vlCDR3
FQGSHVPNT

SEQ ID NO: 917 - protein, 251 aa, Artificial Sequence
  Description of Artificial Sequence: Synthetic polypeptide
  XENP023785 1C11_H3.49_L3_scFv
QIQLVQSGSELKKPGASVKVSCKASGYTFTHYGMNWVRQAPGQGLEWMGWINTYTGEPTYADGFTGRFVMSLDTSVSTAYLQISSLKAEDTAVYFCARDYYGSSPYWGQGTLVTVSSGKPGSGKPGSGKPGSGKPGSDVLMTQSPDSLAVSLGERATINCKSSQSIVHSNGNTYLEWYQQKPGQSPKLLIYKVSNRFSGVPDRFSGSGSGTDFTLTISSLQAEDVAVYYCFQGSHVPNTFGGGTKVEIKGS

SEQ ID NO: 918 - protein, 117 aa, Artificial Sequence
  Description of Artificial Sequence: Synthetic polypeptide
  VH of XENP023785
QIQLVQSGSELKKPGASVKVSCKASGYTFTHYGMNWVRQAPGQGLEWMGWINTYTGEPTYADGFTGRFVMSLDTSVSTAYLQISSLKAEDTAVYFCARDYYGSSPYWGQGTLVTVSS

SEQ ID NO: 919 - protein, 114 aa, Artificial Sequence; identical to SEQ ID NO: 649
  Description of Artificial Sequence: Synthetic polypeptide
  VL of XENP023785

SEQ ID NO: 920 - protein, 5 aa, Artificial Sequence
  Description of Artificial Sequence: Synthetic peptide
  XENP023785 vhCDR1
HYGMN

SEQ ID NO: 921 - protein, 17 aa, Artificial Sequence
  Description of Artificial Sequence: Synthetic peptide
  XENP023785 vhCDR2
WINTYTGEPTYADGFTG

SEQ ID NO: 922 - protein, 8 aa, Artificial Sequence
  Description of Artificial Sequence: Synthetic peptide
  XENP023785 vhCDR3
DYYGSSPY

SEQ ID NO: 923 - protein, 16 aa, Artificial Sequence
  Description of Artificial Sequence: Synthetic peptide
  XENP023785 vlCDR1
KSSQSIVHSNGNTYLE

SEQ ID NO: 924 - protein, 7 aa, Artificial Sequence
  Description of Artificial Sequence: Synthetic peptide
  XENP023785 vlCDR2
KVSNRFS

SEQ ID NO: 925 - protein, 9 aa, Artificial Sequence
  Description of Artificial Sequence: Synthetic peptide
  XENP023785 vlCDR3
FQGSHVPNT

SEQ ID NO: 926 - protein, 251 aa, Artificial Sequence
  Description of Artificial Sequence: Synthetic polypeptide
  XENP023786 1C11_H3.50_L3_scFv
QIQLVQSGSELKKPGASVKVSCKASGYTFTHYGMNWVRQAPGQGLEWMGWINTYTGEPTYADGFTGRFVFSADTSVSTAYLQISSLKAEDTAVYFCARDYYGSSPYWGQGTLVTVSSGKPGSGKPGSGKPGSGKPGSDVLMTQSPDSLAVSLGERATINCKSSQSIVHSNGNTYLEWYQQKPGQSPKLLIYKVSNRFSGVPDRFSGSGSGTDFTLTISSLQAEDVAVYYCFQGSHVPNTFGGGTKVEIKGS

SEQ ID NO: 927 - protein, 117 aa, Artificial Sequence
  Description of Artificial Sequence: Synthetic polypeptide
  VH of XENP023786
QIQLVQSGSELKKPGASVKVSCKASGYTFTHYGMNWVRQAPGQGLEWMGWINTYTGEPTYADGFTGRFVFSADTSVSTAYLQISSLKAEDTAVYFCARDYYGSSPYWGQGTLVTVSS

SEQ ID NO: 928 - protein, 114 aa, Artificial Sequence; identical to SEQ ID NO: 649
  Description of Artificial Sequence: Synthetic polypeptide
  VL of XENP023786

SEQ ID NO: 929 - protein, 5 aa, Artificial Sequence
  Description of Artificial Sequence: Synthetic peptide
  XENP023786 vhCDR1
HYGMN

SEQ ID NO: 930 - protein, 17 aa, Artificial Sequence
  Description of Artificial Sequence: Synthetic peptide
  XENP023786 vhCDR2
WINTYTGEPTYADGFTG

SEQ ID NO: 931 - protein, 8 aa, Artificial Sequence
  Description of Artificial Sequence: Synthetic peptide
  XENP023786 vhCDR3
DYYGSSPY

SEQ ID NO: 932 - protein, 16 aa, Artificial Sequence
  Description of Artificial Sequence: Synthetic peptide
  XENP023786 vlCDR1
KSSQSIVHSNGNTYLE

SEQ ID NO: 933 - protein, 7 aa, Artificial Sequence
  Description of Artificial Sequence: Synthetic peptide
  XENP023786 vlCDR2
KVSNRFS

SEQ ID NO: 934 - protein, 9 aa, Artificial Sequence
  Description of Artificial Sequence: Synthetic peptide
  XENP023786 vlCDR3
FQGSHVPNT

SEQ ID NO: 935 - protein, 251 aa, Artificial Sequence
  Description of Artificial Sequence: Synthetic polypeptide
  XENP023787 1C11_H3.51_L3_scFv
QIQLVQSGSELKKPGASVKVSCKASGYTFTHYGMNWVRQAPGQGLEWMGWINTYTGEPTYADGFTGRFVFSVDTSVSTAYLQISSLKAEDTAVYFCARDYYGSSPYWGQGTLVTVSSGKPGSGKPGSGKPGSGKPGSDVLMTQSPDSLAVSLGERATINCKSSQSIVHSNGNTYLEWYQQKPGQSPKLLIYKVSNRFSGVPDRFSGSGSGTDFTLTISSLQAEDVAVYYCFQGSHVPNTFGGGTKVEIKGS

SEQ ID NO: 936 - protein, 117 aa, Artificial Sequence
  Description of Artificial Sequence: Synthetic polypeptide
  VH of XENP023787
QIQLVQSGSELKKPGASVKVSCKASGYTFTHYGMNWVRQAPGQGLEWMGWINTYTGEPTYADGFTGRFVFSVDTSVSTAYLQISSLKAEDTAVYFCARDYYGSSPYWGQGTLVTVSS

SEQ ID NO: 937 - protein, 114 aa, Artificial Sequence; identical to SEQ ID NO: 649
  Description of Artificial Sequence: Synthetic polypeptide
  VL of XENP023787

SEQ ID NO: 938 - protein, 5 aa, Artificial Sequence
  Description of Artificial Sequence: Synthetic peptide
  XENP023787 vhCDR1
HYGMN

SEQ ID NO: 939 - protein, 17 aa, Artificial Sequence
  Description of Artificial Sequence: Synthetic peptide
  XENP023787 vhCDR2
WINTYTGEPTYADGFTG

SEQ ID NO: 940 - protein, 8 aa, Artificial Sequence
  Description of Artificial Sequence: Synthetic peptide
  XENP023787 vhCDR3
DYYGSSPY

SEQ ID NO: 941 - protein, 16 aa, Artificial Sequence
  Description of Artificial Sequence: Synthetic peptide
  XENP023787 vlCDR1
KSSQSIVHSNGNTYLE

SEQ ID NO: 942 - protein, 7 aa, Artificial Sequence
  Description of Artificial Sequence: Synthetic peptide
  XENP023787 vlCDR2
KVSNRFS

SEQ ID NO: 943 - protein, 9 aa, Artificial Sequence
  Description of Artificial Sequence: Synthetic peptide
  XENP023787 vlCDR3
FQGSHVPNT

SEQ ID NO: 944 - protein, 251 aa, Artificial Sequence
  Description of Artificial Sequence: Synthetic polypeptide
  XENP023788 1C11_H3.54_L3_scFv
QIQLVQSGSELKKPGASVKVSCKASGYTFTHYGMNWVRQAPGQGLEWMGWINTYTGEPTYADGFTGRVTMTADTSVSTAYLQISSLKAEDTAVYFCARDYYGSSPYWGQGTLVTVSSGKPGSGKPGSGKPGSGKPGSDVLMTQSPDSLAVSLGERATINCKSSQSIVHSNGNTYLEWYQQKPGQSPKLLIYKVSNRFSGVPDRFSGSGSGTDFTLTISSLQAEDVAVYYCFQGSHVPNTFGGGTKVEIKGS

SEQ ID NO: 945 - protein, 117 aa, Artificial Sequence
  Description of Artificial Sequence: Synthetic polypeptide
  VH of XENP023788
QIQLVQSGSELKKPGASVKVSCKASGYTFTHYGMNWVRQAPGQGLEWMGWINTYTGEPTYADGFTGRVTMTADTSVSTAYLQISSLKAEDTAVYFCARDYYGSSPYWGQGTLVTVSS

SEQ ID NO: 946 - protein, 114 aa, Artificial Sequence; identical to SEQ ID NO: 649
  Description of Artificial Sequence: Synthetic polypeptide
  VL of XENP023788

SEQ ID NO: 947 - protein, 5 aa, Artificial Sequence
  Description of Artificial Sequence: Synthetic peptide
  XENP023788 vhCDR1
HYGMN

SEQ ID NO: 948 - protein, 17 aa, Artificial Sequence
  Description of Artificial Sequence: Synthetic peptide
  XENP023788 vhCDR2
WINTYTGEPTYADGFTG

SEQ ID NO: 949 - protein, 8 aa, Artificial Sequence
  Description of Artificial Sequence: Synthetic peptide
  XENP023788 vhCDR3
DYYGSSPY

SEQ ID NO: 950 - protein, 16 aa, Artificial Sequence
  Description of Artificial Sequence: Synthetic peptide
  XENP023788 vlCDR1
KSSQSIVHSNGNTYLE

SEQ ID NO: 951 - protein, 7 aa, Artificial Sequence
  Description of Artificial Sequence: Synthetic peptide
  XENP023788 vlCDR2
KVSNRFS

SEQ ID NO: 952 - protein, 9 aa, Artificial Sequence
  Description of Artificial Sequence: Synthetic peptide
  XENP023788 vlCDR3
FQGSHVPNT

SEQ ID NO: 953 - protein, 251 aa, Artificial Sequence
  Description of Artificial Sequence: Synthetic polypeptide
  XENP023789 1C11_H3.55_L3_scFv
QIQLVQSGSELKKPGASVKVSCKASGYTFTHYGMNWVRQAPGQGLEWMGWINTYTGEPTYADGFTGRFVFSLDKSVSTAYLQISSLKAEDTAVYFCARDYYGSSPYWGQGTLVTVSSGKPGSGKPGSGKPGSGKPGSDVLMTQSPDSLAVSLGERATINCKSSQSIVHSNGNTYLEWYQQKPGQSPKLLIYKVSNRFSGVPDRFSGSGSGTDFTLTISSLQAEDVAVYYCFQGSHVPNTFGGGTKVEIKGS

SEQ ID NO: 954 - protein, 117 aa, Artificial Sequence
  Description of Artificial Sequence: Synthetic polypeptide
  VH of XENP023789
QIQLVQSGSELKKPGASVKVSCKASGYTFTHYGMNWVRQAPGQGLEWMGWINTYTGEPTYADGFTGRFVFSLDKSVSTAYLQISSLKAEDTAVYFCARDYYGSSPYWGQGTLVTVSS

SEQ ID NO: 955 - protein, 114 aa, Artificial Sequence; identical to SEQ ID NO: 649
  Description of Artificial Sequence: Synthetic polypeptide
  VL of XENP023789

SEQ ID NO: 956 - protein, 5 aa, Artificial Sequence
  Description of Artificial Sequence: Synthetic peptide
  XENP023789 vhCDR1
HYGMN

SEQ ID NO: 957 - protein, 17 aa, Artificial Sequence
  Description of Artificial Sequence: Synthetic peptide
  XENP023789 vhCDR2
WINTYTGEPTYADGFTG

SEQ ID NO: 958 - protein, 8 aa, Artificial Sequence
  Description of Artificial Sequence: Synthetic peptide
  XENP023789 vhCDR3
DYYGSSPY

SEQ ID NO: 959 - protein, 16 aa, Artificial Sequence
  Description of Artificial Sequence: Synthetic peptide
  XENP023789 vlCDR1
KSSQSIVHSNGNTYLE

SEQ ID NO: 960 - protein, 7 aa, Artificial Sequence
  Description of Artificial Sequence: Synthetic peptide
  XENP023789 vlCDR2
KVSNRFS

SEQ ID NO: 961 - protein, 9 aa, Artificial Sequence
  Description of Artificial Sequence: Synthetic peptide
  XENP023789 vlCDR3
FQGSHVPNT

SEQ ID NO: 962 - protein, 251 aa, Artificial Sequence
  Description of Artificial Sequence: Synthetic polypeptide
  XENP023790 1C11_H3.56_L3_scFv
QIQLVQSGSELKKPGASVKVSCKASGYTFTHYGMNWVRQAPGQGLEWMGWINTYTGEPTYADGFTGRFVFSLDTSASTAYLQISSLKAEDTAVYFCARDYYGSSPYWGQGTLVTVSSGKPGSGKPGSGKPGSGKPGSDVLMTQSPDSLAVSLGERATINCKSSQSIVHSNGNTYLEWYQQKPGQSPKLLIYKVSNRFSGVPDRFSGSGSGTDFTLTISSLQAEDVAVYYCFQGSHVPNTFGGGTKVEIKGS

SEQ ID NO: 963 - protein, 117 aa, Artificial Sequence
  Description of Artificial Sequence: Synthetic polypeptide
  VH of XENP023790
QIQLVQSGSELKKPGASVKVSCKASGYTFTHYGMNWVRQAPGQGLEWMGWINTYTGEPTYADGFTGRFVFSLDTSASTAYLQISSLKAEDTAVYFCARDYYGSSPYWGQGTLVTVSS

SEQ ID NO: 964 - protein, 114 aa, Artificial Sequence; identical to SEQ ID NO: 649
  Description of Artificial Sequence: Synthetic polypeptide
  VL of XENP023790

SEQ ID NO: 965 - protein, 5 aa, Artificial Sequence
  Description of Artificial Sequence: Synthetic peptide
  XENP023790 vhCDR1
HYGMN

SEQ ID NO: 966 - protein, 17 aa, Artificial Sequence
  Description of Artificial Sequence: Synthetic peptide
  XENP023790 vhCDR2
WINTYTGEPTYADGFTG

SEQ ID NO: 967 - protein, 8 aa, Artificial Sequence
  Description of Artificial Sequence: Synthetic peptide
  XENP023790 vhCDR3
DYYGSSPY

SEQ ID NO: 968 - protein, 16 aa, Artificial Sequence
  Description of Artificial Sequence: Synthetic peptide
  XENP023790 vlCDR1
KSSQSIVHSNGNTYLE

SEQ ID NO: 969 - protein, 7 aa, Artificial Sequence
  Description of Artificial Sequence: Synthetic peptide
  XENP023790 vlCDR2
KVSNRFS

SEQ ID NO: 970 - protein, 9 aa, Artificial Sequence
  Description of Artificial Sequence: Synthetic peptide
  XENP023790 vlCDR3
FQGSHVPNT

SEQ ID NO: 971 - protein, 251 aa, Artificial Sequence
  Description of Artificial Sequence: Synthetic polypeptide
  XENP023791 1C11_H3.57_L3_scFv
QIQLVQSGSELKKPGASVKVSCKASGYTFTHYGMNWVRQAPGQGLEWMGWINTYTGEPTYADGFTGRFVFSLDTSISTAYLQISSLKAEDTAVYFCARDYYGSSPYWGQGTLVTVSSGKPGSGKPGSGKPGSGKPGSDVLMTQSPDSLAVSLGERATINCKSSQSIVHSNGNTYLEWYQQKPGQSPKLLIYKVSNRFSGVPDRFSGSGSGTDFTLTISSLQAEDVAVYYCFQGSHVPNTFGGGTKVEIKGS

SEQ ID NO: 972 - protein, 117 aa, Artificial Sequence
  Description of Artificial Sequence: Synthetic polypeptide
  VH of XENP023791
QIQLVQSGSELKKPGASVKVSCKASGYTFTHYGMNWVRQAPGQGLEWMGWINTYTGEPTYADGFTGRFVFSLDTSISTAYLQISSLKAEDTAVYFCARDYYGSSPYWGQGTLVTVSS

SEQ ID NO: 973 - protein, 114 aa, Artificial Sequence; identical to SEQ ID NO: 649
  Description of Artificial Sequence: Synthetic polypeptide
  VL of XENP023791

SEQ ID NO: 974 - protein, 5 aa, Artificial Sequence
  Description of Artificial Sequence: Synthetic peptide
  XENP023791 vhCDR1
HYGMN

SEQ ID NO: 975 - protein, 17 aa, Artificial Sequence
  Description of Artificial Sequence: Synthetic peptide
  XENP023791 vhCDR2
WINTYTGEPTYADGFTG

SEQ ID NO: 976 - protein, 8 aa, Artificial Sequence
  Description of Artificial Sequence: Synthetic peptide
  XENP023791 vhCDR3
DYYGSSPY

SEQ ID NO: 977 - protein, 16 aa, Artificial Sequence
  Description of Artificial Sequence: Synthetic peptide
  XENP023791 vlCDR1
KSSQSIVHSNGNTYLE

SEQ ID NO: 978 - protein, 7 aa, Artificial Sequence
  Description of Artificial Sequence: Synthetic peptide
  XENP023791 vlCDR2
KVSNRFS

SEQ ID NO: 979 - protein, 9 aa, Artificial Sequence
  Description of Artificial Sequence: Synthetic peptide
  XENP023791 vlCDR3
FQGSHVPNT

SEQ ID NO: 980 - protein, 251 aa, Artificial Sequence
  Description of Artificial Sequence: Synthetic polypeptide
  XENP023792 1C11_H3.58_L3_scFv
QIQLVQSGSELKKPGASVKVSCKASGYTFTHYGMNWVRQAPGQGLEWMGWINTYTGEPTYADGFTGRFVFSLDTSKSTAYLQISSLKAEDTAVYFCARDYYGSSPYWGQGTLVTVSSGKPGSGKPGSGKPGSGKPGSDVLMTQSPDSLAVSLGERATINCKSSQSIVHSNGNTYLEWYQQKPGQSPKLLIYKVSNRFSGVPDRFSGSGSGTDFTLTISSLQAEDVAVYYCFQGSHVPNTFGGGTKVEIKGS

SEQ ID NO: 981 - protein, 117 aa, Artificial Sequence
  Description of Artificial Sequence: Synthetic polypeptide
  VH of XENP023792
QIQLVQSGSELKKPGASVKVSCKASGYTFTHYGMNWVRQAPGQGLEWMGWINTYTGEPTYADGFTGRFVFSLDTSKSTAYLQISSLKAEDTAVYFCARDYYGSSPYWGQGTLVTVSS

SEQ ID NO: 982 - protein, 114 aa, Artificial Sequence; identical to SEQ ID NO: 649
  Description of Artificial Sequence: Synthetic polypeptide
  VL of XENP023792

SEQ ID NO: 983 - protein, 5 aa, Artificial Sequence
  Description of Artificial Sequence: Synthetic peptide
  XENP023792 vhCDR1
HYGMN

SEQ ID NO: 984 - protein, 17 aa, Artificial Sequence
  Description of Artificial Sequence: Synthetic peptide
  XENP023792 vhCDR2
WINTYTGEPTYADGFTG

SEQ ID NO: 985 - protein, 8 aa, Artificial Sequence
  Description of Artificial Sequence: Synthetic peptide
  XENP023792 vhCDR3
DYYGSSPY

SEQ ID NO: 986 - protein, 16 aa, Artificial Sequence
  Description of Artificial Sequence: Synthetic peptide
  XENP023792 vlCDR1
KSSQSIVHSNGNTYLE

SEQ ID NO: 987 - protein, 7 aa, Artificial Sequence
  Description of Artificial Sequence: Synthetic peptide
  XENP023792 vlCDR2
KVSNRFS

SEQ ID NO: 988 - protein, 9 aa, Artificial Sequence
  Description of Artificial Sequence: Synthetic peptide
  XENP023792 vlCDR3
FQGSHVPNT

SEQ ID NO: 989 - protein, 251 aa, Artificial Sequence
  Description of Artificial Sequence: Synthetic polypeptide
  XENP023793 1C11_H3.59_L3_scFv
QIQLVQSGSELKKPGASVKVSCKASGYTFTHYGMNWVRQAPGQGLEWMGWINTYTGEPTYADGFTGRFVFSLDTSQSTAYLQISSLKAEDTAVYFCARDYYGSSPYWGQGTLVTVSSGKPGSGKPGSGKPGSGKPGSDVLMTQSPDSLAVSLGERATINCKSSQSIVHSNGNTYLEWYQQKPGQSPKLLIYKVSNRFSGVPDRFSGSGSGTDFTLTISSLQAEDVAVYYCFQGSHVPNTFGGGTKVEIKGS

SEQ ID NO: 990 - protein, 117 aa, Artificial Sequence
  Description of Artificial Sequence: Synthetic polypeptide
  VH of XENP023793
QIQLVQSGSELKKPGASVKVSCKASGYTFTHYGMNWVRQAPGQGLEWMGWINTYTGEPTYADGFTGRFVFSLDTSQSTAYLQISSLKAEDTAVYFCARDYYGSSPYWGQGTLVTVSS

SEQ ID NO: 991 - protein, 114 aa, Artificial Sequence; identical to SEQ ID NO: 649
  Description of Artificial Sequence: Synthetic polypeptide
  VL of XENP023793

SEQ ID NO: 992 - protein, 5 aa, Artificial Sequence
  Description of Artificial Sequence: Synthetic peptide
  XENP023793 vhCDR1
HYGMN

SEQ ID NO: 993 - protein, 17 aa, Artificial Sequence
  Description of Artificial Sequence: Synthetic peptide
  XENP023793 vhCDR2
WINTYTGEPTYADGFTG

SEQ ID NO: 994 - protein, 8 aa, Artificial Sequence
  Description of Artificial Sequence: Synthetic peptide
  XENP023793 vhCDR3
DYYGSSPY

SEQ ID NO: 995 - protein, 16 aa, Artificial Sequence
  Description of Artificial Sequence: Synthetic peptide
  XENP023793 vlCDR1
KSSQSIVHSNGNTYLE

SEQ ID NO: 996 - protein, 7 aa, Artificial Sequence
  Description of Artificial Sequence: Synthetic peptide
  XENP023793 vlCDR2
KVSNRFS

SEQ ID NO: 997 - protein, 9 aa, Artificial Sequence
  Description of Artificial Sequence: Synthetic peptide
  XENP023793 vlCDR3
FQGSHVPNT

SEQ ID NO: 998 - protein, 251 aa, Artificial Sequence
  Description of Artificial Sequence: Synthetic polypeptide
  XENP023794 1C11_H3.60_L3_scFv
QIQLVQSGSELKKPGASVKVSCKASGYTFTHYGMNWVRQAPGQGLEWMGWINTYTGEPTYADGFTGRFVFSLDTSTSTAYLQISSLKAEDTAVYFCARDYYGSSPYWGQGTLVTVSSGKPGSGKPGSGKPGSGKPGSDVLMTQSPDSLAVSLGERATINCKSSQSIVHSNGNTYLEWYQQKPGQSPKLLIYKVSNRFSGVPDRFSGSGSGTDFTLTISSLQAEDVAVYYCFQGSHVPNTFGGGTKVEIKGS

SEQ ID NO: 999 - protein, 117 aa, Artificial Sequence
  Description of Artificial Sequence: Synthetic polypeptide
  VH of XENP023794
QIQLVQSGSELKKPGASVKVSCKASGYTFTHYGMNWVRQAPGQGLEWMGWINTYTGEPTYADGFTGRFVFSLDTSTSTAYLQISSLKAEDTAVYFCARDYYGSSPYWGQGTLVTVSS

SEQ ID NO: 1000 - protein, 114 aa, Artificial Sequence; identical to SEQ ID NO: 649
  Description of Artificial Sequence: Synthetic polypeptide
  VL of XENP023794

SEQ ID NO: 1001 - protein, 5 aa, Artificial Sequence
  Description of Artificial Sequence: Synthetic peptide
  XENP023794 vhCDR1
HYGMN

SEQ ID NO: 1002 - protein, 17 aa, Artificial Sequence
  Description of Artificial Sequence: Synthetic peptide
  XENP023794 vhCDR2
WINTYTGEPTYADGFTG

SEQ ID NO: 1003 - protein, 8 aa, Artificial Sequence
  Description of Artificial Sequence: Synthetic peptide
  XENP023794 vhCDR3
DYYGSSPY

SEQ ID NO: 1004 - protein, 16 aa, Artificial Sequence
  Description of Artificial Sequence: Synthetic peptide
  XENP023794 vlCDR1
KSSQSIVHSNGNTYLE

SEQ ID NO: 1005 - protein, 7 aa, Artificial Sequence
  Description of Artificial Sequence: Synthetic peptide
  XENP023794 vlCDR2
KVSNRFS

SEQ ID NO: 1006 - protein, 9 aa, Artificial Sequence
  Description of Artificial Sequence: Synthetic peptide
  XENP023794 vlCDR3
FQGSHVPNT

SEQ ID NO: 1007 - protein, 251 aa, Artificial Sequence
  Description of Artificial Sequence: Synthetic polypeptide
  XENP023795 1C11_H3.61_L3_scFv
QIQLVQSGSELKKPGASVKVSCKASGYTFTHYGMNWVRQAPGQGLEWMGWINTYTGEPTYADGFTGRFVFSLDTSSSTAYLQISSLKAEDTAVYFCARDYYGSSPYWGQGTLVTVSSGKPGSGKPGSGKPGSGKPGSDVLMTQSPDSLAVSLGERATINCKSSQSIVHSNGNTYLEWYQQKPGQSPKLLIYKVSNRFSGVPDRFSGSGSGTDFTLTISSLQAEDVAVYYCFQGSHVPNTFGGGTKVEIKGS

SEQ ID NO: 1008 - protein, 117 aa, Artificial Sequence
  Description of Artificial Sequence: Synthetic polypeptide
  VH of XENP023795
QIQLVQSGSELKKPGASVKVSCKASGYTFTHYGMNWVRQAPGQGLEWMGWINTYTGEPTYADGFTGRFVFSLDTSSSTAYLQISSLKAEDTAVYFCARDYYGSSPYWGQGTLVTVSS

SEQ ID NO: 1009 - protein, 114 aa, Artificial Sequence; identical to SEQ ID NO: 649
  Description of Artificial Sequence: Synthetic polypeptide
  VL of XENP023795

SEQ ID NO: 1010 - protein, 5 aa, Artificial Sequence
  Description of Artificial Sequence: Synthetic peptide
  XENP023795 vhCDR1
HYGMN

SEQ ID NO: 1011 - protein, 17 aa, Artificial Sequence
  Description of Artificial Sequence: Synthetic peptide
  XENP023795 vhCDR2
WINTYTGEPTYADGFTG

SEQ ID NO: 1012 - protein, 8 aa, Artificial Sequence
  Description of Artificial Sequence: Synthetic peptide
  XENP023795 vhCDR3
DYYGSSPY

SEQ ID NO: 1013 - protein, 16 aa, Artificial Sequence
  Description of Artificial Sequence: Synthetic peptide
  XENP023795 vlCDR1
KSSQSIVHSNGNTYLE

SEQ ID NO: 1014 - protein, 7 aa, Artificial Sequence
  Description of Artificial Sequence: Synthetic peptide
  XENP023795 vlCDR2
KVSNRFS

SEQ ID NO: 1015 - protein, 9 aa, Artificial Sequence
  Description of Artificial Sequence: Synthetic peptide
  XENP023795 vlCDR3
FQGSHVPNT

SEQ ID NO: 1016 - protein, 251 aa, Artificial Sequence
  Description of Artificial Sequence: Synthetic polypeptide
  XENP023796 1C11_H3.62_L3_scFv
QIQLVQSGSELKKPGASVKVSCKASGYTFTHYGMNWVRQAPGQGLEWMGWINTYTGEPTYADGFTGRFVFSLDTSVSTIYLQISSLKAEDTAVYFCARDYYGSSPYWGQGTLVTVSSGKPGSGKPGSGKPGSGKPGSDVLMTQSPDSLAVSLGERATINCKSSQSIVHSNGNTYLEWYQQKPGQSPKLLIYKVSNRFSGVPDRFSGSGSGTDFTLTISSLQAEDVAVYYCFQGSHVPNTFGGGTKVEIKGS

SEQ ID NO: 1017 - protein, 117 aa, Artificial Sequence
  Description of Artificial Sequence: Synthetic polypeptide
  VH of XENP023796
QIQLVQSGSELKKPGASVKVSCKASGYTFTHYGMNWVRQAPGQGLEWMGWINTYTGEPTYADGFTGRFVFSLDTSVSTIYLQISSLKAEDTAVYFCARDYYGSSPYWGQGTLVTVSS

SEQ ID NO: 1018 - protein, 114 aa, Artificial Sequence; identical to SEQ ID NO: 649
  Description of Artificial Sequence: Synthetic polypeptide
  VL of XENP023796

SEQ ID NO: 1019 - protein, 5 aa, Artificial Sequence
  Description of Artificial Sequence: Synthetic peptide
  XENP023796 vhCDR1
HYGMN

SEQ ID NO: 1020 - protein, 17 aa, Artificial Sequence
  Description of Artificial Sequence: Synthetic peptide
  XENP023796 vhCDR2
WINTYTGEPTYADGFTG

SEQ ID NO: 1021 - protein, 8 aa, Artificial Sequence
  Description of Artificial Sequence: Synthetic peptide
  XENP023796 vhCDR3
DYYGSSPY

SEQ ID NO: 1022 - protein, 16 aa, Artificial Sequence
  Description of Artificial Sequence: Synthetic peptide
  XENP023796 vlCDR1
KSSQSIVHSNGNTYLE

SEQ ID NO: 1023 - protein, 7 aa, Artificial Sequence
  Description of Artificial Sequence: Synthetic peptide
  XENP023796 vlCDR2
KVSNRFS

SEQ ID NO: 1024 - protein, 9 aa, Artificial Sequence
  Description of Artificial Sequence: Synthetic peptide
  XENP023796 vlCDR3
FQGSHVPNT

SEQ ID NO: 1025 - protein, 251 aa, Artificial Sequence
  Description of Artificial Sequence: Synthetic polypeptide
  XENP023801 1C11_H3.64_L3_scFv
QIQLVQSGSELKKPGASVKVSCKASGYTFTHYGMNWVRQAPGQGLEWMGWINTYTGEPTYADGFTGRFVFSLDTSVSTVYLQISSLKAEDTAVYFCARDYYGSSPYWGQGTLVTVSSGKPGSGKPGSGKPGSGKPGSDVLMTQSPDSLAVSLGERATINCKSSQSIVHSNGNTYLEWYQQKPGQSPKLLIYKVSNRFSGVPDRFSGSGSGTDFTLTISSLQAEDVAVYYCFQGSHVPNTFGGGTKVEIKGS

SEQ ID NO: 1026 - protein, 117 aa, Artificial Sequence
  Description of Artificial Sequence: Synthetic polypeptide
  VH of XENP023801
QIQLVQSGSELKKPGASVKVSCKASGYTFTHYGMNWVRQAPGQGLEWMGWINTYTGEPTYADGFTGRFVFSLDTSVSTVYLQISSLKAEDTAVYFCARDYYGSSPYWGQGTLVTVSS

SEQ ID NO: 1027 - protein, 114 aa, Artificial Sequence; identical to SEQ ID NO: 649
  Description of Artificial Sequence: Synthetic polypeptide
  VL of XENP023801

SEQ ID NO: 1028 - protein, 5 aa, Artificial Sequence
  Description of Artificial Sequence: Synthetic peptide
  XENP023801 vhCDR1
HYGMN

SEQ ID NO: 1029 - protein, 17 aa, Artificial Sequence
  Description of Artificial Sequence: Synthetic peptide
  XENP023801 vhCDR2
WINTYTGEPTYADGFTG

SEQ ID NO: 1030 - protein, 8 aa, Artificial Sequence
  Description of Artificial Sequence: Synthetic peptide
  XENP023801 vhCDR3
DYYGSSPY

SEQ ID NO: 1031 - protein, 16 aa, Artificial Sequence
  Description of Artificial Sequence: Synthetic peptide
  XENP023801 vlCDR1
KSSQSIVHSNGNTYLE

SEQ ID NO: 1032 - protein, 7 aa, Artificial Sequence
  Description of Artificial Sequence: Synthetic peptide
  XENP023801 vlCDR2
KVSNRFS

SEQ ID NO: 1033 - protein, 9 aa, Artificial Sequence
  Description of Artificial Sequence: Synthetic peptide
  XENP023801 vlCDR3
FQGSHVPNT

SEQ ID NO: 1034 - protein, 251 aa, Artificial Sequence
  Description of Artificial Sequence: Synthetic polypeptide
  XENP023802 1C11_H3.65_L3_scFv
QIQLVQSGSELKKPGASVKVSCKASGYTFTHYGMNWVRQAPGQGLEWMGWINTYTGEPTYADGFTGRFVFSLDTSVSTAYMQISSLKAEDTAVYFCARDYYGSSPYWGQGTLVTVSSGKPGSGKPGSGKPGSGKPGSDVLMTQSPDSLAVSLGERATINCKSSQSIVHSNGNTYLEWYQQKPGQSPKLLIYKVSNRFSGVPDRFSGSGSGTDFTLTISSLQAEDVAVYYCFQGSHVPNTFGGGTKVEIKGS

SEQ ID NO: 1035 - protein, 117 aa, Artificial Sequence
  Description of Artificial Sequence: Synthetic polypeptide
  VH of XENP023802
QIQLVQSGSELKKPGASVKVSCKASGYTFTHYGMNWVRQAPGQGLEWMGWINTYTGEPTYADGFTGRFVFSLDTSVSTAYMQISSLKAEDTAVYFCARDYYGSSPYWGQGTLVTVSS

SEQ ID NO: 1036 - protein, 114 aa, Artificial Sequence; identical to SEQ ID NO: 649
  Description of Artificial Sequence: Synthetic polypeptide
  VL of XENP023802

SEQ ID NO: 1037 - protein, 5 aa, Artificial Sequence
  Description of Artificial Sequence: Synthetic peptide
  XENP023802 vhCDR1
HYGMN

SEQ ID NO: 1038 - protein, 17 aa, Artificial Sequence
  Description of Artificial Sequence: Synthetic peptide
  XENP023802 vhCDR2
WINTYTGEPTYADGFTG

SEQ ID NO: 1039 - protein, 8 aa, Artificial Sequence
  Description of Artificial Sequence: Synthetic peptide
  XENP023802 vhCDR3
DYYGSSPY

SEQ ID NO: 1040 - protein, 16 aa, Artificial Sequence
  Description of Artificial Sequence: Synthetic peptide
  XENP023802 vlCDR1
KSSQSIVHSNGNTYLE

SEQ ID NO: 1041 - protein, 7 aa, Artificial Sequence
  Description of Artificial Sequence: Synthetic peptide
  XENP023802 vlCDR2
KVSNRFS

SEQ ID NO: 1042 - protein, 9 aa, Artificial Sequence
  Description of Artificial Sequence: Synthetic peptide
  XENP023802 vlCDR3
FQGSHVPNT

SEQ ID NO: 1043 - protein, 251 aa, Artificial Sequence
  Description of Artificial Sequence: Synthetic polypeptide
  XENP023803 1C11_H3.66_L3_scFv
QIQLVQSGSELKKPGASVKVSCKASGYTFTHYGMNWVRQAPGQGLEWMGWINTYTGEPTYADGFTGRFVFSLDTSVSTAYMELSSLKAEDTAVYFCARDYYGSSPYWGQGTLVTVSSGKPGSGKPGSGKPGSGKPGSDVLMTQSPDSLAVSLGERATINCKSSQSIVHSNGNTYLEWYQQKPGQSPKLLIYKVSNRFSGVPDRFSGSGSGTDFTLTISSLQAEDVAVYYCFQGSHVPNTFGGGTKVEIKGS

SEQ ID NO: 1044 - protein, 117 aa, Artificial Sequence
  Description of Artificial Sequence: Synthetic polypeptide
  VH of XENP023803
QIQLVQSGSELKKPGASVKVSCKASGYTFTHYGMNWVRQAPGQGLEWMGWINTYTGEPTYADGFTGRFVFSLDTSVSTAYMELSSLKAEDTAVYFCARDYYGSSPYWGQGTLVTVSS

SEQ ID NO: 1045 - protein, 114 aa, Artificial Sequence; identical to SEQ ID NO: 649
  Description of Artificial Sequence: Synthetic polypeptide
  VL of XENP023803

SEQ ID NO: 1046 - protein, 5 aa, Artificial Sequence
  Description of Artificial Sequence: Synthetic peptide
  XENP023803 vhCDR1
HYGMN

SEQ ID NO: 1047 - protein, 17 aa, Artificial Sequence
  Description of Artificial Sequence: Synthetic peptide
  XENP023803 vhCDR2
WINTYTGEPTYADGFTG

SEQ ID NO: 1048 - protein, 8 aa, Artificial Sequence
  Description of Artificial Sequence: Synthetic peptide
  XENP023803 vhCDR3
DYYGSSPY

SEQ ID NO: 1049 - protein, 16 aa, Artificial Sequence
  Description of Artificial Sequence: Synthetic peptide
  XENP023803 vlCDR1
KSSQSIVHSNGNTYLE

SEQ ID NO: 1050 - protein, 7 aa, Artificial Sequence
  Description of Artificial Sequence: Synthetic peptide
  XENP023803 vlCDR2
KVSNRFS

SEQ ID NO: 1051 - protein, 9 aa, Artificial Sequence
  Description of Artificial Sequence: Synthetic peptide
  XENP023803 vlCDR3
FQGSHVPNT

SEQ ID NO: 1052 - protein, 251 aa, Artificial Sequence
  Description of Artificial Sequence: Synthetic polypeptide
  XENP023804 1C11_H3.67_L3_scFv
QIQLVQSGSELKKPGASVKVSCKASGYTFTHYGMNWVRQAPGQGLEWMGWINTYTGEPTYADGFTGRFVFSLDTSVSTAYLQLSSLKAEDTAVYFCARDYYGSSPYWGQGTLVTVSSGKPGSGKPGSGKPGSGKPGSDVLMTQSPDSLAVSLGERATINCKSSQSIVHSNGNTYLEWYQQKPGQSPKLLIYKVSNRFSGVPDRFSGSGSGTDFTLTISSLQAEDVAVYYCFQGSHVPNTFGGGTKVEIKGS

SEQ ID NO: 1053 - protein, 117 aa, Artificial Sequence
  Description of Artificial Sequence: Synthetic polypeptide
  VH of XENP023804
QIQLVQSGSELKKPGASVKVSCKASGYTFTHYGMNWVRQAPGQGLEWMGWINTYTGEPTYADGFTGRFVFSLDTSVSTAYLQLSSLKAEDTAVYFCARDYYGSSPYWGQGTLVTVSS

SEQ ID NO: 1054 - protein, 114 aa, Artificial Sequence; identical to SEQ ID NO: 649
  Description of Artificial Sequence: Synthetic polypeptide
  VL of XENP023804

SEQ ID NO: 1055 - protein, 5 aa, Artificial Sequence
  Description of Artificial Sequence: Synthetic peptide
  XENP023804 vhCDR1
HYGMN

SEQ ID NO: 1056 - protein, 17 aa, Artificial Sequence
  Description of Artificial Sequence: Synthetic peptide
  XENP023804 vhCDR2
WINTYTGEPTYADGFTG

SEQ ID NO: 1057 - protein, 8 aa, Artificial Sequence
  Description of Artificial Sequence: Synthetic peptide
  XENP023804 vhCDR3
DYYGSSPY

SEQ ID NO: 1058 - protein, 16 aa, Artificial Sequence
  Description of Artificial Sequence: Synthetic peptide
  XENP023804 vlCDR1
KSSQSIVHSNGNTYLE

SEQ ID NO: 1059 - protein, 7 aa, Artificial Sequence
  Description of Artificial Sequence: Synthetic peptide
  XENP023804 vlCDR2
KVSNRFS

SEQ ID NO: 1060 - protein, 9 aa, Artificial Sequence
  Description of Artificial Sequence: Synthetic peptide
  XENP023804 vlCDR3
FQGSHVPNT

SEQ ID NO: 1061 - protein, 251 aa, Artificial Sequence
  Description of Artificial Sequence: Synthetic polypeptide
  XENP023805 1C11_H3.68_L3_scFv
QIQLVQSGSELKKPGASVKVSCKASGYTFTHYGMNWVRQAPGQGLEWMGWINTYTGEPTYADGFTGRFVFSLDTSVSTAYLQMSSLKAEDTAVYFCARDYYGSSPYWGQGTLVTVSSGKPGSGKPGSGKPGSGKPGSDVLMTQSPDSLAVSLGERATINCKSSQSIVHSNGNTYLEWYQQKPGQSPKLLIYKVSNRFSGVPDRFSGSGSGTDFTLTISSLQAEDVAVYYCFQGSHVPNTFGGGTKVEIKGS

SEQ ID NO: 1062 - protein, 117 aa, Artificial Sequence
  Description of Artificial Sequence: Synthetic polypeptide
  VH of XENP023805
QIQLVQSGSELKKPGASVKVSCKASGYTFTHYGMNWVRQAPGQGLEWMGWINTYTGEPTYADGFTGRFVFSLDTSVSTAYLQMSSLKAEDTAVYFCARDYYGSSPYWGQGTLVTVSS

SEQ ID NO: 1063 - protein, 114 aa, Artificial Sequence; identical to SEQ ID NO: 649
  Description of Artificial Sequence: Synthetic polypeptide
  VL of XENP023805

SEQ ID NO: 1064 - protein, 5 aa, Artificial Sequence
  Description of Artificial Sequence: Synthetic peptide
  XENP023805 vhCDR1
HYGMN

SEQ ID NO: 1065 - protein, 17 aa, Artificial Sequence
  Description of Artificial Sequence: Synthetic peptide
  XENP023805 vhCDR2
WINTYTGEPTYADGFTG

SEQ ID NO: 1066 - protein, 8 aa, Artificial Sequence
  Description of Artificial Sequence: Synthetic peptide
  XENP023805 vhCDR3
DYYGSSPY

SEQ ID NO: 1067 - protein, 16 aa, Artificial Sequence
  Description of Artificial Sequence: Synthetic peptide
  XENP023805 vlCDR1
KSSQSIVHSNGNTYLE

SEQ ID NO: 1068 - protein, 7 aa, Artificial Sequence
  Description of Artificial Sequence: Synthetic peptide
  XENP023805 vlCDR2
KVSNRFS

SEQ ID NO: 1069 - protein, 9 aa, Artificial Sequence
  Description of Artificial Sequence: Synthetic peptide
  XENP023805 vlCDR3
FQGSHVPNT

SEQ ID NO: 1070 - protein, 251 aa, Artificial Sequence
  Description of Artificial Sequence: Synthetic polypeptide
  XENP023806 1C11_H3.69_L3_scFv
QIQLVQSGSELKKPGASVKVSCKASGYTFTHYGMNWVRQAPGQGLEWMGWINTYTGEPTYADGFTGRFVFSLDTSVSTAYLQWSSLKAEDTAVYFCARDYYGSSPYWGQGTLVTVSSGKPGSGKPGSGKPGSGKPGSDVLMTQSPDSLAVSLGERATINCKSSQSIVHSNGNTYLEWYQQKPGQSPKLLIYKVSNRFSGVPDRFSGSGSGTDFTLTISSLQAEDVAVYYCFQGSHVPNTFGGGTKVEIKGS

SEQ ID NO: 1071 - protein, 117 aa, Artificial Sequence
  Description of Artificial Sequence: Synthetic polypeptide
  VH of XENP023806
QIQLVQSGSELKKPGASVKVSCKASGYTFTHYGMNWVRQAPGQGLEWMGWINTYTGEPTYADGFTGRFVFSLDTSVSTAYLQWSSLKAEDTAVYFCARDYYGSSPYWGQGTLVTVSS

SEQ ID NO: 1072 - protein, 114 aa, Artificial Sequence; identical to SEQ ID NO: 649
  Description of Artificial Sequence: Synthetic polypeptide
  VL of XENP023806

SEQ ID NO: 1073 - protein, 5 aa, Artificial Sequence
  Description of Artificial Sequence: Synthetic peptide
  XENP023806 vhCDR1
HYGMN

SEQ ID NO: 1074 - protein, 17 aa, Artificial Sequence
  Description of Artificial Sequence: Synthetic peptide
  XENP023806 vhCDR2
WINTYTGEPTYADGFTG

SEQ ID NO: 1075 - protein, 8 aa, Artificial Sequence
  Description of Artificial Sequence: Synthetic peptide
  XENP023806 vhCDR3
DYYGSSPY

SEQ ID NO: 1076 - protein, 16 aa, Artificial Sequence
  Description of Artificial Sequence: Synthetic peptide
  XENP023806 vlCDR1
KSSQSIVHSNGNTYLE

SEQ ID NO: 1077 - protein, 7 aa, Artificial Sequence
  Description of Artificial Sequence: Synthetic peptide
  XENP023806 vlCDR2
KVSNRFS

SEQ ID NO: 1078 - protein, 9 aa, Artificial Sequence
  Description of Artificial Sequence: Synthetic peptide
  XENP023806 vlCDR3
FQGSHVPNT

SEQ ID NO: 1079 - protein, 251 aa, Artificial Sequence
  Description of Artificial Sequence: Synthetic polypeptide
  XENP023807 1C11_H3.70_L3_scFv
QIQLVQSGSELKKPGASVKVSCKASGYTFTHYGMNWVRQAPGQGLEWMGWINTYTGEPTYADGFTGRFVFSLDTSVSTAYLQVSSLKAEDTAVYFCARDYYGSSPYWGQGTLVTVSSGKPGSGKPGSGKPGSGKPGSDVLMTQSPDSLAVSLGERATINCKSSQSIVHSNGNTYLEWYQQKPGQSPKLLIYKVSNRFSGVPDRFSGSGSGTDFTLTISSLQAEDVAVYYCFQGSHVPNTFGGGTKVEIKGS

SEQ ID NO: 1080 - protein, 117 aa, Artificial Sequence
  Description of Artificial Sequence: Synthetic polypeptide
  VH of XENP023807
QIQLVQSGSELKKPGASVKVSCKASGYTFTHYGMNWVRQAPGQGLEWMGWINTYTGEPTYADGFTGRFVFSLDTSVSTAYLQVSSLKAEDTAVYFCARDYYGSSPYWGQGTLVTVSS

SEQ ID NO: 1081 - protein, 114 aa, Artificial Sequence; identical to SEQ ID NO: 649
  Description of Artificial Sequence: Synthetic polypeptide
  VL of XENP023807

SEQ ID NO: 1082 - protein, 5 aa, Artificial Sequence
  Description of Artificial Sequence: Synthetic peptide
  XENP023807 vhCDR1
HYGMN

SEQ ID NO: 1083 - protein, 17 aa, Artificial Sequence
  Description of Artificial Sequence: Synthetic peptide
  XENP023807 vhCDR2
WINTYTGEPTYADGFTG

SEQ ID NO: 1084 - protein, 8 aa, Artificial Sequence
  Description of Artificial Sequence: Synthetic peptide
  XENP023807 vhCDR3
DYYGSSPY

SEQ ID NO: 1085 - protein, 16 aa, Artificial Sequence
  Description of Artificial Sequence: Synthetic peptide
  XENP023807 vlCDR1
KSSQSIVHSNGNTYLE

SEQ ID NO: 1086 - protein, 7 aa, Artificial Sequence
  Description of Artificial Sequence: Synthetic peptide
  XENP023807 vlCDR2
KVSNRFS

SEQ ID NO: 1087 - protein, 9 aa, Artificial Sequence
  Description of Artificial Sequence: Synthetic peptide
  XENP023807 vlCDR3
FQGSHVPNT

SEQ ID NO: 1088 - protein, 251 aa, Artificial Sequence
  Description of Artificial Sequence: Synthetic polypeptide
  XENP023808 1C11_H3.71_L3_scFv
QIQLVQSGSELKKPGASVKVSCKASGYTFTHYGMNWVRQAPGQGLEWMGWINTYTGEPTYADGFTGRFVFSLDTSVSTAYLQISSLRAEDTAVYFCARDYYGSSPYWGQGTLVTVSSGKPGSGKPGSGKPGSGKPGSDVLMTQSPDSLAVSLGERATINCKSSQSIVHSNGNTYLEWYQQKPGQSPKLLIYKVSNRFSGVPDRFSGSGSGTDFTLTISSLQAEDVAVYYCFQGSHVPNTFGGGTKVEIKGS

SEQ ID NO: 1089 - protein, 117 aa, Artificial Sequence
  Description of Artificial Sequence: Synthetic polypeptide
  VH of XENP023808
QIQLVQSGSELKKPGASVKVSCKASGYTFTHYGMNWVRQAPGQGLEWMGWINTYTGEPTYADGFTGRFVFSLDTSVSTAYLQISSLRAEDTAVYFCARDYYGSSPYWGQGTLVTVSS

SEQ ID NO: 1090 - protein, 114 aa, Artificial Sequence; identical to SEQ ID NO: 649
  Description of Artificial Sequence: Synthetic polypeptide
  VL of XENP023808

SEQ ID NO: 1091 - protein, 5 aa, Artificial Sequence
  Description of Artificial Sequence: Synthetic peptide
  XENP023808 vhCDR1
HYGMN

SEQ ID NO: 1092 - protein, 17 aa, Artificial Sequence
  Description of Artificial Sequence: Synthetic peptide
  XENP023808 vhCDR2
WINTYTGEPTYADGFTG

SEQ ID NO: 1093 - protein, 8 aa, Artificial Sequence
  Description of Artificial Sequence: Synthetic peptide
  XENP023808 vhCDR3
DYYGSSPY

SEQ ID NO: 1094 - protein, 16 aa, Artificial Sequence
  Description of Artificial Sequence: Synthetic peptide
  XENP023808 vlCDR1
KSSQSIVHSNGNTYLE

SEQ ID NO: 1095 - protein, 7 aa, Artificial Sequence
  Description of Artificial Sequence: Synthetic peptide
  XENP023808 vlCDR2
KVSNRFS

SEQ ID NO: 1096 - protein, 9 aa, Artificial Sequence
  Description of Artificial Sequence: Synthetic peptide
  XENP023808 vlCDR3
FQGSHVPNT

SEQ ID NO: 1097 - protein, 251 aa, Artificial Sequence
  Description of Artificial Sequence: Synthetic polypeptide
  XENP023809 1C11_H3.72_L3_scFv
QIQLVQSGSELKKPGASVKVSCKASGYTFTHYGMNWVRQAPGQGLEWMGWINTYTGEPTYADGFTGRFVFSLDTSVSTAYLQISSLTAEDTAVYFCARDYYGSSPYWGQGTLVTVSSGKPGSGKPGSGKPGSGKPGSDVLMTQSPDSLAVSLGERATINCKSSQSIVHSNGNTYLEWYQQKPGQSPKLLIYKVSNRFSGVPDRFSGSGSGTDFTLTISSLQAEDVAVYYCFQGSHVPNTFGGGTKVEIKGS

SEQ ID NO: 1098 - protein, 117 aa, Artificial Sequence
  Description of Artificial Sequence: Synthetic polypeptide
  VH of XENP023809
QIQLVQSGSELKKPGASVKVSCKASGYTFTHYGMNWVRQAPGQGLEWMGWINTYTGEPTYADGFTGRFVFSLDTSVSTAYLQISSLTAEDTAVYFCARDYYGSSPYWGQGTLVTVSS

SEQ ID NO: 1099 - protein, 114 aa, Artificial Sequence; identical to SEQ ID NO: 649
  Description of Artificial Sequence: Synthetic polypeptide
  VL of XENP023809

SEQ ID NO: 1100 - protein, 5 aa, Artificial Sequence
  Description of Artificial Sequence: Synthetic peptide
  XENP023809 vhCDR1
HYGMN

SEQ ID NO: 1101 - protein, 17 aa, Artificial Sequence
  Description of Artificial Sequence: Synthetic peptide
  XENP023809 vhCDR2
WINTYTGEPTYADGFTG

SEQ ID NO: 1102 - protein, 8 aa, Artificial Sequence
  Description of Artificial Sequence: Synthetic peptide
  XENP023809 vhCDR3
DYYGSSPY

SEQ ID NO: 1103 - protein, 16 aa, Artificial Sequence
  Description of Artificial Sequence: Synthetic peptide
  XENP023809 vlCDR1
KSSQSIVHSNGNTYLE

SEQ ID NO: 1104 - protein, 7 aa, Artificial Sequence
  Description of Artificial Sequence: Synthetic peptide
  XENP023809 vlCDR2
KVSNRFS

SEQ ID NO: 1105 - protein, 9 aa, Artificial Sequence
  Description of Artificial Sequence: Synthetic peptide
  XENP023809 vlCDR3
FQGSHVPNT

SEQ ID NO: 1106 - protein, 251 aa, Artificial Sequence
  Description of Artificial Sequence: Synthetic polypeptide
  XENP023810 1C11_H3.73_L3_scFv
QIQLVQSGSELKKPGASVKVSCKASGYTFTHYGMNWVRQAPGQGLEWMGWINTYTGEPTYADGFTGRFVFSLDTSVSTAYLQISSLRSEDTAVYFCARDYYGSSPYWGQGTLVTVSSGKPGSGKPGSGKPGSGKPGSDVLMTQSPDSLAVSLGERATINCKSSQSIVHSNGNTYLEWYQQKPGQSPKLLIYKVSNRFSGVPDRFSGSGSGTDFTLTISSLQAEDVAVYYCFQGSHVPNTFGGGTKVEIKGS

SEQ ID NO: 1107 - protein, 117 aa, Artificial Sequence
  Description of Artificial Sequence: Synthetic polypeptide
  VH of XENP023810
QIQLVQSGSELKKPGASVKVSCKASGYTFTHYGMNWVRQAPGQGLEWMGWINTYTGEPTYADGFTGRFVFSLDTSVSTAYLQISSLRSEDTAVYFCARDYYGSSPYWGQGTLVTVSS

SEQ ID NO: 1108 - protein, 114 aa, Artificial Sequence; identical to SEQ ID NO: 649
  Description of Artificial Sequence: Synthetic polypeptide
  VL of XENP023810

SEQ ID NO: 1109 - protein, 5 aa, Artificial Sequence
  Description of Artificial Sequence: Synthetic peptide
  XENP023810 vhCDR1
HYGMN

SEQ ID NO: 1110 - protein, 17 aa, Artificial Sequence
  Description of Artificial Sequence: Synthetic peptide
  XENP023810 vhCDR2
WINTYTGEPTYADGFTG

SEQ ID NO: 1111 - protein, 8 aa, Artificial Sequence
  Description of Artificial Sequence: Synthetic peptide
  XENP023810 vhCDR3
DYYGSSPY

SEQ ID NO: 1112 - protein, 16 aa, Artificial Sequence
  Description of Artificial Sequence: Synthetic peptide
  XENP023810 vlCDR1
KSSQSIVHSNGNTYLE

SEQ ID NO: 1113 - protein, 7 aa, Artificial Sequence
  Description of Artificial Sequence: Synthetic peptide
  XENP023810 vlCDR2
KVSNRFS

SEQ ID NO: 1114 - protein, 9 aa, Artificial Sequence
  Description of Artificial Sequence: Synthetic peptide
  XENP023810 vlCDR3
FQGSHVPNT

SEQ ID NO: 1115 - protein, 251 aa, Artificial Sequence
  Description of Artificial Sequence: Synthetic polypeptide
  XENP023811 1C11_H3.74_L3_scFv
QIQLVQSGSELKKPGASVKVSCKASGYTFTHYGMNWVRQAPGQGLEWMGWINTYTGEPTYADGFTGRFVFSLDTSVSTAYLQISSLKAEDTAVYYCARDYYGSSPYWGQGTLVTVSSGKPGSGKPGSGKPGSGKPGSDVLMTQSPDSLAVSLGERATINCKSSQSIVHSNGNTYLEWYQQKPGQSPKLLIYKVSNRFSGVPDRFSGSGSGTDFTLTISSLQAEDVAVYYCFQGSHVPNTFGGGTKVEIKGS

SEQ ID NO: 1116 - protein, 117 aa, Artificial Sequence
  Description of Artificial Sequence: Synthetic polypeptide
  VH of XENP023811
QIQLVQSGSELKKPGASVKVSCKASGYTFTHYGMNWVRQAPGQGLEWMGWINTYTGEPTYADGFTGRFVFSLDTSVSTAYLQISSLKAEDTAVYYCARDYYGSSPYWGQGTLVTVSS

SEQ ID NO: 1117 - protein, 114 aa, Artificial Sequence; identical to SEQ ID NO: 649
  Description of Artificial Sequence: Synthetic polypeptide
  VL of XENP023811

SEQ ID NO: 1118 - protein, 5 aa, Artificial Sequence
  Description of Artificial Sequence: Synthetic peptide
  XENP023811 vhCDR1
HYGMN

SEQ ID NO: 1119 - protein, 17 aa, Artificial Sequence
  Description of Artificial Sequence: Synthetic peptide
  XENP023811 vhCDR2
WINTYTGEPTYADGFTG

SEQ ID NO: 1120 - protein, 8 aa, Artificial Sequence
  Description of Artificial Sequence: Synthetic peptide
  XENP023811 vhCDR3
DYYGSSPY

SEQ ID NO: 1121 - protein, 16 aa, Artificial Sequence
  Description of Artificial Sequence: Synthetic peptide
  XENP023811 vlCDR1
KSSQSIVHSNGNTYLE

SEQ ID NO: 1122 - protein, 7 aa, Artificial Sequence
  Description of Artificial Sequence: Synthetic peptide
  XENP023811 vlCDR2
KVSNRFS

SEQ ID NO: 1123 - protein, 9 aa, Artificial Sequence
  Description of Artificial Sequence: Synthetic peptide
  XENP023811 vlCDR3
FQGSHVPNT

SEQ ID NO: 1124 - protein, 251 aa, Artificial Sequence
  Description of Artificial Sequence: Synthetic polypeptide
  XENP023812 1C11_H3.75_L3_scFv
QIQLVQSGSELKKPGASVKVSCKASGYTFTHYGMNWVRQAPGQGLEWMGWINTYTGEPTYADGFTGRFVFSLDTSVSTAYLQISSLKAEDTAVYFCTRDYYGSSPYWGQGTLVTVSSGKPGSGKPGSGKPGSGKPGSDVLMTQSPDSLAVSLGERATINCKSSQSIVHSNGNTYLEWYQQKPGQSPKLLIYKVSNRFSGVPDRFSGSGSGTDFTLTISSLQAEDVAVYYCFQGSHVPNTFGGGTKVEIKGS

SEQ ID NO: 1125 - protein, 117 aa, Artificial Sequence
  Description of Artificial Sequence: Synthetic polypeptide
  VH of XENP023812
QIQLVQSGSELKKPGASVKVSCKASGYTFTHYGMNWVRQAPGQGLEWMGWINTYTGEPTYADGFTGRFVFSLDTSVSTAYLQISSLKAEDTAVYFCTRDYYGSSPYWGQGTLVTVSS

SEQ ID NO: 1126 - protein, 114 aa, Artificial Sequence; identical to SEQ ID NO: 649
  Description of Artificial Sequence: Synthetic polypeptide
  VL of XENP023812

SEQ ID NO: 1127 - protein, 5 aa, Artificial Sequence
  Description of Artificial Sequence: Synthetic peptide
  XENP023812 vhCDR1
HYGMN

SEQ ID NO: 1128 - protein, 17 aa, Artificial Sequence
  Description of Artificial Sequence: Synthetic peptide
  XENP023812 vhCDR2
WINTYTGEPTYADGFTG

SEQ ID NO: 1129 - protein, 8 aa, Artificial Sequence
  Description of Artificial Sequence: Synthetic peptide
  XENP023812 vhCDR3
DYYGSSPY

SEQ ID NO: 1130 - protein, 16 aa, Artificial Sequence
  Description of Artificial Sequence: Synthetic peptide
  XENP023812 vlCDR1
KSSQSIVHSNGNTYLE

SEQ ID NO: 1131 - protein, 7 aa, Artificial Sequence
  Description of Artificial Sequence: Synthetic peptide
  XENP023812 vlCDR2
KVSNRFS

SEQ ID NO: 1132 - protein, 9 aa, Artificial Sequence
  Description of Artificial Sequence: Synthetic peptide
  XENP023812 vlCDR3
FQGSHVPNT

SEQ ID NO: 1133 - protein, 251 aa, Artificial Sequence
  Description of Artificial Sequence: Synthetic polypeptide
  XENP024191 1C11_H3_L3.84_scFv
QIQLVQSGSELKKPGASVKVSCKASGYTFTHYGMNWVRQAPGQGLEWMGWINTYTGEPTYADGFTGRFVFSLDTSVSTAYLQISSLKAEDTAVYFCARDYYGSSPYWGQGTLVTVSSGKPGSGKPGSGKPGSGKPGSDVVMTQSPDSLAVSLGERATINCKASQSIVHSNGNTYLEWYQQKPGQPPKLLIYKVSNRFSGVPDRFSGSGSGTDFTLTISSLQAEDVAVYYCFQGSHVPNTFGGGTKVEIKGS

SEQ ID NO: 1134 - protein, 117 aa, Artificial Sequence; identical to SEQ ID NO: 32
  Description of Artificial Sequence: Synthetic polypeptide
  VH of XENP024191

SEQ ID NO: 1135 - protein, 114 aa, Artificial Sequence
  Description of Artificial Sequence: Synthetic polypeptide
  VL of XENP024191
DVVMTQSPDSLAVSLGERATINCKASQSIVHSNGNTYLEWYQQKPGQPPKLLIYKVSNRFSGVPDRFSGSGSGTDFTLTISSLQAEDVAVYYCFQGSHVPNTFGGGTKVEIKGS

SEQ ID NO: 1136 - protein, 5 aa, Artificial Sequence
  Description of Artificial Sequence: Synthetic peptide
  XENP024191 vhCDR1
HYGMN

SEQ ID NO: 1137 - protein, 17 aa, Artificial Sequence
  Description of Artificial Sequence: Synthetic peptide
  XENP024191 vhCDR2
WINTYTGEPTYADGFTG

SEQ ID NO: 1138 - protein, 8 aa, Artificial Sequence
  Description of Artificial Sequence: Synthetic peptide
  XENP024191 vhCDR3
DYYGSSPY

SEQ ID NO: 1139 - protein, 16 aa, Artificial Sequence
  Description of Artificial Sequence: Synthetic peptide
  XENP024191 vlCDR1
KASQSIVHSNGNTYLE

SEQ ID NO: 1140 - protein, 7 aa, Artificial Sequence
  Description of Artificial Sequence: Synthetic peptide
  XENP024191 vlCDR2
KVSNRFS

SEQ ID NO: 1141 - protein, 9 aa, Artificial Sequence
  Description of Artificial Sequence: Synthetic peptide
  XENP024191 vlCDR3
FQGSHVPNT

SEQ ID NO: 1142 - protein, 251 aa, Artificial Sequence
  Description of Artificial Sequence: Synthetic polypeptide
  XENP024192 1C11_H3_L3.102_scFv
QIQLVQSGSELKKPGASVKVSCKASGYTFTHYGMNWVRQAPGQGLEWMGWINTYTGEPTYADGFTGRFVFSLDTSVSTAYLQISSLKAEDTAVYFCARDYYGSSPYWGQGTLVTVSSGKPGSGKPGSGKPGSGKPGSDVLMTQSPDSLAVSVGERATINCKSSQSIVHSNGNTYLEWYQQKPGQSPKLLIYKVSNRFSGVPDRFSGSGSGTDFTLTISSLQAEDVAVYYCFQGSHVPNTFGGGTKVEIKGS

SEQ ID NO: 1143 - protein, 117 aa, Artificial Sequence; identical to SEQ ID NO: 32
  Description of Artificial Sequence: Synthetic polypeptide
  VH of XENP024192

SEQ ID NO: 1144 - protein, 114 aa, Artificial Sequence
  Description of Artificial Sequence: Synthetic polypeptide
  VL of XENP024192
DVLMTQSPDSLAVSVGERATINCKSSQSIVHSNGNTYLEWYQQKPGQSPKLLIYKVSNRFSGVPDRFSGSGSGTDFTLTISSLQAEDVAVYYCFQGSHVPNTFGGGTKVEIKGS

SEQ ID NO: 1145 - protein, 5 aa, Artificial Sequence
  Description of Artificial Sequence: Synthetic peptide
  XENP024192 vhCDR1
HYGMN

SEQ ID NO: 1146 - protein, 17 aa, Artificial Sequence
  Description of Artificial Sequence: Synthetic peptide
  XENP024192 vhCDR2
WINTYTGEPTYADGFTG

SEQ ID NO: 1147 - protein, 8 aa, Artificial Sequence
  Description of Artificial Sequence: Synthetic peptide
  XENP024192 vhCDR3
DYYGSSPY

SEQ ID NO: 1148 - protein, 16 aa, Artificial Sequence
  Description of Artificial Sequence: Synthetic peptide
  XENP024192 vlCDR1
KSSQSIVHSNGNTYLE

SEQ ID NO: 1149 - protein, 7 aa, Artificial Sequence
  Description of Artificial Sequence: Synthetic peptide
  XENP024192 vlCDR2
KVSNRFS

SEQ ID NO: 1150 - protein, 9 aa, Artificial Sequence
  Description of Artificial Sequence: Synthetic peptide
  XENP024192 vlCDR3
FQGSHVPNT

SEQ ID NO: 1151 - protein, 251 aa, Artificial Sequence
  Description of Artificial Sequence: Synthetic polypeptide
  XENP024193 1C11_H3_L3.103_scFv
QIQLVQSGSELKKPGASVKVSCKASGYTFTHYGMNWVRQAPGQGLEWMGWINTYTGEPTYADGFTGRFVFSLDTSVSTAYLQISSLKAEDTAVYFCARDYYGSSPYWGQGTLVTVSSGKPGSGKPGSGKPGSGKPGSDVLMTQSPDSLAVSPGERATINCKSSQSIVHSNGNTYLEWYQQKPGQSPKLLIYKVSNRFSGVPDRFSGSGSGTDFTLTISSLQAEDVAVYYCFQGSHVPNTFGGGTKVEIKGS

SEQ ID NO: 1152 - protein, 117 aa, Artificial Sequence; identical to SEQ ID NO: 32
  Description of Artificial Sequence: Synthetic polypeptide
  VH of XENP024193

SEQ ID NO: 1153 - protein, 114 aa, Artificial Sequence
  Description of Artificial Sequence: Synthetic polypeptide
  VL of XENP024193
DVLMTQSPDSLAVSPGERATINCKSSQSIVHSNGNTYLEWYQQKPGQSPKLLIYKVSNRFSGVPDRFSGSGSGTDFTLTISSLQAEDVAVYYCFQGSHVPNTFGGGTKVEIKGS

SEQ ID NO: 1154 - protein, 5 aa, Artificial Sequence
  Description of Artificial Sequence: Synthetic peptide
  XENP024193 vhCDR1
HYGMN

SEQ ID NO: 1155 - protein, 17 aa, Artificial Sequence
  Description of Artificial Sequence: Synthetic peptide
  XENP024193 vhCDR2
WINTYTGEPTYADGFTG

SEQ ID NO: 1156 - protein, 8 aa, Artificial Sequence
  Description of Artificial Sequence: Synthetic peptide
  XENP024193 vhCDR3
DYYGSSPY

SEQ ID NO: 1157 - protein, 16 aa, Artificial Sequence
  Description of Artificial Sequence: Synthetic peptide
  XENP024193 vlCDR1
KSSQSIVHSNGNTYLE

SEQ ID NO: 1158 - protein, 7 aa, Artificial Sequence
  Description of Artificial Sequence: Synthetic peptide
  XENP024193 vlCDR2
KVSNRFS

SEQ ID NO: 1159 - protein, 9 aa, Artificial Sequence
  Description of Artificial Sequence: Synthetic peptide
  XENP024193 vlCDR3
FQGSHVPNT

SEQ ID NO: 1160 - protein, 251 aa, Artificial Sequence; identical to SEQ ID NO: 233
  Description of Artificial Sequence: Synthetic polypeptide
  XENP024194 1C11_H3_L3.104_scFv

SEQ ID NO: 1161 - protein, 117 aa, Artificial Sequence; identical to SEQ ID NO: 32
  Description of Artificial Sequence: Synthetic polypeptide
  VH of XENP024194

SEQ ID NO: 1162 - protein, 114 aa, Artificial Sequence; identical to SEQ ID NO: 235
  Description of Artificial Sequence: Synthetic polypeptide
  VL of XENP024194

SEQ ID NO: 1163 - protein, 5 aa, Artificial Sequence
  Description of Artificial Sequence: Synthetic peptide
  XENP024194 vhCDR1
HYGMN

SEQ ID NO: 1164 - protein, 17 aa, Artificial Sequence
  Description of Artificial Sequence: Synthetic peptide
  XENP024194 vhCDR2
WINTYTGEPTYADGFTG

SEQ ID NO: 1165 - protein, 8 aa, Artificial Sequence
  Description of Artificial Sequence: Synthetic peptide
  XENP024194 vhCDR3
DYYGSSPY

SEQ ID NO: 1166 - protein, 16 aa, Artificial Sequence
  Description of Artificial Sequence: Synthetic peptide
  XENP024194 vlCDR1
KSSQSIVHSNGNTYLE

SEQ ID NO: 1167 - protein, 7 aa, Artificial Sequence
  Description of Artificial Sequence: Synthetic peptide
  XENP024194 vlCDR2
KVSNRFS

SEQ ID NO: 1168 - protein, 9 aa, Artificial Sequence
  Description of Artificial Sequence: Synthetic peptide
  XENP024194 vlCDR3
FQGSHVPNT

SEQ ID NO: 1169 - protein, 251 aa, Artificial Sequence
  Description of Artificial Sequence: Synthetic polypeptide
  XENP024195 1C11_H3_L3.111_scFv
QIQLVQSGSELKKPGASVKVSCKASGYTFTHYGMNWVRQAPGQGLEWMGWINTYTGEPTYADGFTGRFVFSLDTSVSTAYLQISSLKAEDTAVYFCARDYYGSSPYWGQGTLVTVSSGKPGSGKPGSGKPGSGKPGSDVLMTQSPDSLAVSLGERATINCKSSQGIVHSNGNTYLEWYQQKPGQSPKLLIYKVSNRFSGVPDRFSGSGSGTDFTLTISSLQAEDVAVYYCFQGSHVPNTFGGGTKVEIKGS

SEQ ID NO: 1170 - protein, 117 aa, Artificial Sequence; identical to SEQ ID NO: 32
  Description of Artificial Sequence: Synthetic polypeptide
  VH of XENP024195

SEQ ID NO: 1171 - protein, 114 aa, Artificial Sequence
  Description of Artificial Sequence: Synthetic polypeptide
  VL of XENP024195
DVLMTQSPDSLAVSLGERATINCKSSQGIVHSNGNTYLEWYQQKPGQSPKLLIYKVSNRFSGVPDRFSGSGSGTDFTLTISSLQAEDVAVYYCFQGSHVPNTFGGGTKVEIKGS

SEQ ID NO: 1172 - protein, 5 aa, Artificial Sequence
  Description of Artificial Sequence: Synthetic peptide
  XENP024195 vhCDR1
HYGMN

SEQ ID NO: 1173 - protein, 17 aa, Artificial Sequence
  Description of Artificial Sequence: Synthetic peptide
  XENP024195 vhCDR2
WINTYTGEPTYADGFTG

SEQ ID NO: 1174 - protein, 8 aa, Artificial Sequence
  Description of Artificial Sequence: Synthetic peptide
  XENP024195 vhCDR3
DYYGSSPY

SEQ ID NO: 1175 - protein, 16 aa, Artificial Sequence
  Description of Artificial Sequence: Synthetic peptide
  XENP024195 vlCDR1
KSSQGIVHSNGNTYLE

SEQ ID NO: 1176 - protein, 7 aa, Artificial Sequence
  Description of Artificial Sequence: Synthetic peptide
  XENP024195 vlCDR2
KVSNRFS

SEQ ID NO: 1177 - protein, 9 aa, Artificial Sequence
  Description of Artificial Sequence: Synthetic peptide
  XENP024195 vlCDR3
FQGSHVPNT

SEQ ID NO: 1178 - protein, 251 aa, Artificial Sequence
  Description of Artificial Sequence: Synthetic polypeptide
  XENP024196 1C11_H3_L3.112_scFv
QIQLVQSGSELKKPGASVKVSCKASGYTFTHYGMNWVRQAPGQGLEWMGWINTYTGEPTYADGFTGRFVFSLDTSVSTAYLQISSLKAEDTAVYFCARDYYGSSPYWGQGTLVTVSSGKPGSGKPGSGKPGSGKPGSDVLMTQSPDSLAVSLGERATINCKSSQSVLHSNGNTYLEWYQQKPGQSPKLLIYKVSNRFSGVPDRFSGSGSGTDFTLTISSLQAEDVAVYYCFQGSHVPNTFGGGTKVEIKGS

SEQ ID NO: 1179 - protein, 117 aa, Artificial Sequence; identical to SEQ ID NO: 32
  Description of Artificial Sequence: Synthetic polypeptide
  VH of XENP024196

SEQ ID NO: 1180 - protein, 114 aa, Artificial Sequence
  Description of Artificial Sequence: Synthetic polypeptide
  VL of XENP024196
DVLMTQSPDSLAVSLGERATINCKSSQSVLHSNGNTYLEWYQQKPGQSPKLLIYKVSNRFSGVPDRFSGSGSGTDFTLTISSLQAEDVAVYYCFQGSHVPNTFGGGTKVEIKGS

SEQ ID NO: 1181 - protein, 5 aa, Artificial Sequence
  Description of Artificial Sequence: Synthetic peptide
  XENP024196 vhCDR1
HYGMN

SEQ ID NO: 1182 - protein, 17 aa, Artificial Sequence
  Description of Artificial Sequence: Synthetic peptide
  XENP024196 vhCDR2
WINTYTGEPTYADGFTG

SEQ ID NO: 1183 - protein, 8 aa, Artificial Sequence
  Description of Artificial Sequence: Synthetic peptide
  XENP024196 vhCDR3
DYYGSSPY

SEQ ID NO: 1184 - protein, 16 aa, Artificial Sequence
  Description of Artificial Sequence: Synthetic peptide
  XENP024196 vlCDR1
KSSQSVLHSNGNTYLE

SEQ ID NO: 1185 - protein, 7 aa, Artificial Sequence
  Description of Artificial Sequence: Synthetic peptide
  XENP024196 vlCDR2
KVSNRFS

SEQ ID NO: 1186 - protein, 9 aa, Artificial Sequence
  Description of Artificial Sequence: Synthetic peptide
  XENP024196 vlCDR3
FQGSHVPNT

SEQ ID NO: 1187 - protein, 251 aa, Artificial Sequence
  Description of Artificial Sequence: Synthetic polypeptide
  XENP024201 1C11_H3_L3.113_scFv
QIQLVQSGSELKKPGASVKVSCKASGYTFTHYGMNWVRQAPGQGLEWMGWINTYTGEPTYADGFTGRFVFSLDTSVSTAYLQISSLKAEDTAVYFCARDYYGSSPYWGQGTLVTVSSGKPGSGKPGSGKPGSGKPGSDVLMTQSPDSLAVSLGERATINCKSSQSIVHSNGNTYLEWYQQKPGKSPKLLIYKVSNRFSGVPDRFSGSGSGTDFTLTISSLQAEDVAVYYCFQGSHVPNTFGGGTKVEIKGS

SEQ ID NO: 1188 - protein, 117 aa, Artificial Sequence; identical to SEQ ID NO: 32
  Description of Artificial Sequence: Synthetic polypeptide
  VH of XENP024201

SEQ ID NO: 1189 - protein, 114 aa, Artificial Sequence
  Description of Artificial Sequence: Synthetic polypeptide
  VL of XENP024201
DVLMTQSPDSLAVSLGERATINCKSSQSIVHSNGNTYLEWYQQKPGKSPKLLIYKVSNRFSGVPDRFSGSGSGTDFTLTISSLQAEDVAVYYCFQGSHVPNTFGGGTKVEIKGS

SEQ ID NO: 1190 - protein, 5 aa, Artificial Sequence
  Description of Artificial Sequence: Synthetic peptide
  XENP024201 vhCDR1
HYGMN

SEQ ID NO: 1191 - protein, 17 aa, Artificial Sequence
  Description of Artificial Sequence: Synthetic peptide
  XENP024201 vhCDR2
WINTYTGEPTYADGFTG

SEQ ID NO: 1192 - protein, 8 aa, Artificial Sequence
  Description of Artificial Sequence: Synthetic peptide
  XENP024201 vhCDR3
DYYGSSPY

SEQ ID NO: 1193 - protein, 16 aa, Artificial Sequence
  Description of Artificial Sequence: Synthetic peptide
  XENP024201 vlCDR1
KSSQSIVHSNGNTYLE

SEQ ID NO: 1194 - protein, 7 aa, Artificial Sequence
  Description of Artificial Sequence: Synthetic peptide
  XENP024201 vlCDR2
KVSNRFS

SEQ ID NO: 1195 - protein, 9 aa, Artificial Sequence
  Description of Artificial Sequence: Synthetic peptide
  XENP024201 vlCDR3
FQGSHVPNT

SEQ ID NO: 1196 - protein, 251 aa, Artificial Sequence
  Description of Artificial Sequence: Synthetic polypeptide
  XENP024202 1C11_H3_L3.115_scFv
QIQLVQSGSELKKPGASVKVSCKASGYTFTHYGMNWVRQAPGQGLEWMGWINTYTGEPTYADGFTGRFVFSLDTSVSTAYLQISSLKAEDTAVYFCARDYYGSSPYWGQGTLVTVSSGKPGSGKPGSGKPGSGKPGSDVLMTQSPDSLAVSLGERATINCKSSQSIVHSNGNTYLEWYQQKPGKVPKLLIYKVSNRFSGVPDRFSGSGSGTDFTLTISSLQAEDVAVYYCFQGSHVPNTFGGGTKVEIKGS

SEQ ID NO: 1197 - protein, 117 aa, Artificial Sequence; identical to SEQ ID NO: 32
  Description of Artificial Sequence: Synthetic polypeptide
  VH of XENP024202

SEQ ID NO: 1198 - protein, 114 aa, Artificial Sequence
  Description of Artificial Sequence: Synthetic polypeptide
  VL of XENP024202
DVLMTQSPDSLAVSLGERATINCKSSQSIVHSNGNTYLEWYQQKPGKVPKLLIYKVSNRFSGVPDRFSGSGSGTDFTLTISSLQAEDVAVYYCFQGSHVPNTFGGGTKVEIKGS

SEQ ID NO: 1199 - protein, 5 aa, Artificial Sequence
  Description of Artificial Sequence: Synthetic peptide
  XENP024202 vhCDR1
HYGMN

SEQ ID NO: 1200 - protein, 17 aa, Artificial Sequence
  Description of Artificial Sequence: Synthetic peptide
  XENP024202 vhCDR2
WINTYTGEPTYADGFTG

SEQ ID NO: 1201 - protein, 8 aa, Artificial Sequence
  Description of Artificial Sequence: Synthetic peptide
  XENP024202 vhCDR3
DYYGSSPY

SEQ ID NO: 1202 - protein, 16 aa, Artificial Sequence
  Description of Artificial Sequence: Synthetic peptide
  XENP024202 vlCDR1
KSSQSIVHSNGNTYLE

SEQ ID NO: 1203 - protein, 7 aa, Artificial Sequence
  Description of Artificial Sequence: Synthetic peptide
  XENP024202 vlCDR2
KVSNRFS

SEQ ID NO: 1204 - protein, 9 aa, Artificial Sequence
  Description of Artificial Sequence: Synthetic peptide
  XENP024202 vlCDR3
FQGSHVPNT

SEQ ID NO: 1205 - protein, 251 aa, Artificial Sequence
  Description of Artificial Sequence: Synthetic polypeptide
  XENP024203 1C11_H3_L3.118_scFv
QIQLVQSGSELKKPGASVKVSCKASGYTFTHYGMNWVRQAPGQGLEWMGWINTYTGEPTYADGFTGRFVFSLDTSVSTAYLQISSLKAEDTAVYFCARDYYGSSPYWGQGTLVTVSSGKPGSGKPGSGKPGSGKPGSDVLMTQSPDSLAVSLGERATINCKSSQSIVHSNGNTYLEWYQQKPGQSPKLLIYKVSSRFSGVPDRFSGSGSGTDFTLTISSLQAEDVAVYYCFQGSHVPNTFGGGTKVEIKGS

SEQ ID NO: 1206 - protein, 117 aa, Artificial Sequence; identical to SEQ ID NO: 32
  Description of Artificial Sequence: Synthetic polypeptide
  VH of XENP024203

SEQ ID NO: 1207 - protein, 114 aa, Artificial Sequence
  Description of Artificial Sequence: Synthetic polypeptide
  VL of XENP024203
DVLMTQSPDSLAVSLGERATINCKSSQSIVHSNGNTYLEWYQQKPGQSPKLLIYKVSSRFSGVPDRFSGSGSGTDFTLTISSLQAEDVAVYYCFQGSHVPNTFGGGTKVEIKGS

SEQ ID NO: 1208 - protein, 5 aa, Artificial Sequence
  Description of Artificial Sequence: Synthetic peptide
  XENP024203 vhCDR1
HYGMN

SEQ ID NO: 1209 - protein, 17 aa, Artificial Sequence
  Description of Artificial Sequence: Synthetic peptide
  XENP024203 vhCDR2
WINTYTGEPTYADGFTG

SEQ ID NO: 1210 - protein, 8 aa, Artificial Sequence
  Description of Artificial Sequence: Synthetic peptide
  XENP024203 vhCDR3
DYYGSSPY

SEQ ID NO: 1211 - protein, 16 aa, Artificial Sequence
  Description of Artificial Sequence: Synthetic peptide
  XENP024203 vlCDR1
KSSQSIVHSNGNTYLE

SEQ ID NO: 1212 - protein, 7 aa, Artificial Sequence
  Description of Artificial Sequence: Synthetic peptide
  XENP024203 vlCDR2
KVSSRFS

SEQ ID NO: 1213 - protein, 9 aa, Artificial Sequence
  Description of Artificial Sequence: Synthetic peptide
  XENP024203 vlCDR3
FQGSHVPNT

SEQ ID NO: 1214 - protein, 251 aa, Artificial Sequence
  Description of Artificial Sequence: Synthetic polypeptide
  XENP024204 1C11_H3_L3.119_scFv
QIQLVQSGSELKKPGASVKVSCKASGYTFTHYGMNWVRQAPGQGLEWMGWINTYTGEPTYADGFTGRFVFSLDTSVSTAYLQISSLKAEDTAVYFCARDYYGSSPYWGQGTLVTVSSGKPGSGKPGSGKPGSGKPGSDVLMTQSPDSLAVSLGERATINCKSSQSIVHSNGNTYLEWYQQKPGQSPKLLIYKVSNLFSGVPDRFSGSGSGTDFTLTISSLQAEDVAVYYCFQGSHVPNTFGGGTKVEIKGS

SEQ ID NO: 1215 - protein, 117 aa, Artificial Sequence; identical to SEQ ID NO: 32
  Description of Artificial Sequence: Synthetic polypeptide
  VH of XENP024204

SEQ ID NO: 1216 - protein, 114 aa, Artificial Sequence
  Description of Artificial Sequence: Synthetic polypeptide
  VL of XENP024204
DVLMTQSPDSLAVSLGERATINCKSSQSIVHSNGNTYLEWYQQKPGQSPKLLIYKVSNLFSGVPDRFSGSGSGTDFTLTISSLQAEDVAVYYCFQGSHVPNTFGGGTKVEIKGS

SEQ ID NO: 1217 - protein, 5 aa, Artificial Sequence
  Description of Artificial Sequence: Synthetic peptide
  XENP024204 vhCDR1
HYGMN

SEQ ID NO: 1218 - protein, 17 aa, Artificial Sequence
  Description of Artificial Sequence: Synthetic peptide
  XENP024204 vhCDR2
WINTYTGEPTYADGFTG

SEQ ID NO: 1219 - protein, 8 aa, Artificial Sequence
  Description of Artificial Sequence: Synthetic peptide
  XENP024204 vhCDR3
DYYGSSPY

SEQ ID NO: 1220 - protein, 16 aa, Artificial Sequence
  Description of Artificial Sequence: Synthetic peptide
  XENP024204 vlCDR1
KSSQSIVHSNGNTYLE

SEQ ID NO: 1221 - protein, 7 aa, Artificial Sequence
  Description of Artificial Sequence: Synthetic peptide
  XENP024204 vlCDR2
KVSNLFS

SEQ ID NO: 1222 - protein, 9 aa, Artificial Sequence
  Description of Artificial Sequence: Synthetic peptide
  XENP024204 vlCDR3
FQGSHVPNT

SEQ ID NO: 1223 - protein, 251 aa, Artificial Sequence
  Description of Artificial Sequence: Synthetic polypeptide
  XENP024205 1C11_H3_L3.120_scFv
QIQLVQSGSELKKPGASVKVSCKASGYTFTHYGMNWVRQAPGQGLEWMGWINTYTGEPTYADGFTGRFVFSLDTSVSTAYLQISSLKAEDTAVYFCARDYYGSSPYWGQGTLVTVSSGKPGSGKPGSGKPGSGKPGSDVLMTQSPDSLAVSLGERATINCKSSQSIVHSNGNTYLEWYQQKPGQSPKLLIYKVSNRESGVPDRFSGSGSGTDFTLTISSLQAEDVAVYYCFQGSHVPNTFGGGTKVEIKGS

SEQ ID NO: 1224 - protein, 117 aa, Artificial Sequence; identical to SEQ ID NO: 32
  Description of Artificial Sequence: Synthetic polypeptide
  VH of XENP024205

SEQ ID NO: 1225 - protein, 114 aa, Artificial Sequence
  Description of Artificial Sequence: Synthetic polypeptide
  VL of XENP024205
DVLMTQSPDSLAVSLGERATINCKSSQSIVHSNGNTYLEWYQQKPGQSPKLLIYKVSNRESGVPDRFSGSGSGTDFTLTISSLQAEDVAVYYCFQGSHVPNTFGGGTKVEIKGS

SEQ ID NO: 1226 - protein, 5 aa, Artificial Sequence
  Description of Artificial Sequence: Synthetic peptide
  XENP024205 vhCDR1
HYGMN

SEQ ID NO: 1227 - protein, 17 aa, Artificial Sequence
  Description of Artificial Sequence: Synthetic peptide
  XENP024205 vhCDR2
WINTYTGEPTYADGFTG

SEQ ID NO: 1228 - protein, 8 aa, Artificial Sequence
  Description of Artificial Sequence: Synthetic peptide
  XENP024205 vhCDR3
DYYGSSPY

SEQ ID NO: 1229 - protein, 16 aa, Artificial Sequence
  Description of Artificial Sequence: Synthetic peptide
  XENP024205 vlCDR1
KSSQSIVHSNGNTYLE

SEQ ID NO: 1230 - protein, 7 aa, Artificial Sequence
  Description of Artificial Sequence: Synthetic peptide
  XENP024205 vlCDR2
KVSNRES

SEQ ID NO: 1231 - protein, 9 aa, Artificial Sequence
  Description of Artificial Sequence: Synthetic peptide
  XENP024205 vlCDR3
FQGSHVPNT

SEQ ID NO: 1232 - protein, 251 aa, Artificial Sequence
  Description of Artificial Sequence: Synthetic polypeptide
  XENP024206 1C11_H3_L3.121_scFv
QIQLVQSGSELKKPGASVKVSCKASGYTFTHYGMNWVRQAPGQGLEWMGWINTYTGEPTYADGFTGRFVFSLDTSVSTAYLQISSLKAEDTAVYFCARDYYGSSPYWGQGTLVTVSSGKPGSGKPGSGKPGSGKPGSDVLMTQSPDSLAVSLGERATINCKSSQSIVHSNGNTYLEWYQQKPGQSPKLLIYKVSNRQSGVPDRFSGSGSGTDFTLTISSLQAEDVAVYYCFQGSHVPNTFGGGTKVEIKGS

SEQ ID NO: 1233 - protein, 117 aa, Artificial Sequence; identical to SEQ ID NO: 32
  Description of Artificial Sequence: Synthetic polypeptide
  VH of XENP024206

SEQ ID NO: 1234 - protein, 114 aa, Artificial Sequence
  Description of Artificial Sequence: Synthetic polypeptide
  VL of XENP024206
DVLMTQSPDSLAVSLGERATINCKSSQSIVHSNGNTYLEWYQQKPGQSPKLLIYKVSNRQSGVPDRFSGSGSGTDFTLTISSLQAEDVAVYYCFQGSHVPNTFGGGTKVEIKGS

SEQ ID NO: 1235 - protein, 5 aa, Artificial Sequence
  Description of Artificial Sequence: Synthetic peptide
  XENP024206 vhCDR1
HYGMN

SEQ ID NO: 1236 - protein, 17 aa, Artificial Sequence
  Description of Artificial Sequence: Synthetic peptide
  XENP024206 vhCDR2
WINTYTGEPTYADGFTG

SEQ ID NO: 1237 - protein, 8 aa, Artificial Sequence
  Description of Artificial Sequence: Synthetic peptide
  XENP024206 vhCDR3
DYYGSSPY

SEQ ID NO: 1238 - protein, 16 aa, Artificial Sequence
  Description of Artificial Sequence: Synthetic peptide
  XENP024206 vlCDR1
KSSQSIVHSNGNTYLE

SEQ ID NO: 1239 - protein, 7 aa, Artificial Sequence
  Description of Artificial Sequence: Synthetic peptide
  XENP024206 vlCDR2
KVSNRQS

SEQ ID NO: 1240 - protein, 9 aa, Artificial Sequence
  Description of Artificial Sequence: Synthetic peptide
  XENP024206 vlCDR3
FQGSHVPNT

SEQ ID NO: 1241 - protein, 251 aa, Artificial Sequence
  Description of Artificial Sequence: Synthetic polypeptide
  XENP024207 1C11_H3_L3.122_scFv
QIQLVQSGSELKKPGASVKVSCKASGYTFTHYGMNWVRQAPGQGLEWMGWINTYTGEPTYADGFTGRFVFSLDTSVSTAYLQISSLKAEDTAVYFCARDYYGSSPYWGQGTLVTVSSGKPGSGKPGSGKPGSGKPGSDVLMTQSPDSLAVSLGERATINCKSSQSIVHSNGNTYLEWYQQKPGQSPKLLIYKVSNRFSGIPDRFSGSGSGTDFTLTISSLQAEDVAVYYCFQGSHVPNTFGGGTKVEIKGS

SEQ ID NO: 1242 - protein, 117 aa, Artificial Sequence; identical to SEQ ID NO: 32
  Description of Artificial Sequence: Synthetic polypeptide
  VH of XENP024207

SEQ ID NO: 1243 - protein, 114 aa, Artificial Sequence
  Description of Artificial Sequence: Synthetic polypeptide
  VL of XENP024207
DVLMTQSPDSLAVSLGERATINCKSSQSIVHSNGNTYLEWYQQKPGQSPKLLIYKVSNRFSGIPDRFSGSGSGTDFTLTISSLQAEDVAVYYCFQGSHVPNTFGGGTKVEIKGS

SEQ ID NO: 1244 - protein, 5 aa, Artificial Sequence
  Description of Artificial Sequence: Synthetic peptide
  XENP024207 vhCDR1
HYGMN

SEQ ID NO: 1245 - protein, 17 aa, Artificial Sequence
  Description of Artificial Sequence: Synthetic peptide
  XENP024207 vhCDR2
WINTYTGEPTYADGFTG

SEQ ID NO: 1246 - protein, 8 aa, Artificial Sequence
  Description of Artificial Sequence: Synthetic peptide
  XENP024207 vhCDR3
DYYGSSPY

SEQ ID NO: 1247 - protein, 16 aa, Artificial Sequence
  Description of Artificial Sequence: Synthetic peptide
  XENP024207 vlCDR1
KSSQSIVHSNGNTYLE

SEQ ID NO: 1248 - protein, 7 aa, Artificial Sequence
  Description of Artificial Sequence: Synthetic peptide
  XENP024207 vlCDR2
KVSNRFS

SEQ ID NO: 1249 - protein, 9 aa, Artificial Sequence
  Description of Artificial Sequence: Synthetic peptide
  XENP024207 vlCDR3
FQGSHVPNT

SEQ ID NO: 1250 - protein, 251 aa, Artificial Sequence
  Description of Artificial Sequence: Synthetic polypeptide
  XENP024208 1C11_H3_L3.124_scFv
QIQLVQSGSELKKPGASVKVSCKASGYTFTHYGMNWVRQAPGQGLEWMGWINTYTGEPTYADGFTGRFVFSLDTSVSTAYLQISSLKAEDTAVYFCARDYYGSSPYWGQGTLVTVSSGKPGSGKPGSGKPGSGKPGSDVLMTQSPDSLAVSLGERATINCKSSQSIVHSNGNTYLEWYQQKPGQSPKLLIYKVSNRFSGVPARFSGSGSGTDFTLTISSLQAEDVAVYYCFQGSHVPNTFGGGTKVEIKGS

SEQ ID NO: 1251 - protein, 117 aa, Artificial Sequence; identical to SEQ ID NO: 32
  Description of Artificial Sequence: Synthetic polypeptide
  VH of XENP024208

SEQ ID NO: 1252 - protein, 114 aa, Artificial Sequence
  Description of Artificial Sequence: Synthetic polypeptide
  VL of XENP024208
DVLMTQSPDSLAVSLGERATINCKSSQSIVHSNGNTYLEWYQQKPGQSPKLLIYKVSNRFSGVPARFSGSGSGTDFTLTISSLQAEDVAVYYCFQGSHVPNTFGGGTKVEIKGS

SEQ ID NO: 1253 - protein, 5 aa, Artificial Sequence
  Description of Artificial Sequence: Synthetic peptide
  XENP024208 vhCDR1
HYGMN

SEQ ID NO: 1254 - protein, 17 aa, Artificial Sequence
  Description of Artificial Sequence: Synthetic peptide
  XENP024208 vhCDR2
WINTYTGEPTYADGFTG

SEQ ID NO: 1255 - protein, 8 aa, Artificial Sequence
  Description of Artificial Sequence: Synthetic peptide
  XENP024208 vhCDR3
DYYGSSPY

SEQ ID NO: 1256 - protein, 16 aa, Artificial Sequence
  Description of Artificial Sequence: Synthetic peptide
  XENP024208 vlCDR1
KSSQSIVHSNGNTYLE

SEQ ID NO: 1257 - protein, 7 aa, Artificial Sequence
  Description of Artificial Sequence: Synthetic peptide
  XENP024208 vlCDR2
KVSNRFS

SEQ ID NO: 1258 - protein, 9 aa, Artificial Sequence
  Description of Artificial Sequence: Synthetic peptide
  XENP024208 vlCDR3
FQGSHVPNT

SEQ ID NO: 1259 - protein, 251 aa, Artificial Sequence
  Description of Artificial Sequence: Synthetic polypeptide
  XENP024209 1C11_H3_L3.125_scFv
QIQLVQSGSELKKPGASVKVSCKASGYTFTHYGMNWVRQAPGQGLEWMGWINTYTGEPTYADGFTGRFVFSLDTSVSTAYLQISSLKAEDTAVYFCARDYYGSSPYWGQGTLVTVSSGKPGSGKPGSGKPGSGKPGSDVLMTQSPDSLAVSLGERATINCKSSQSIVHSNGNTYLEWYQQKPGQSPKLLIYKVSNRFSGVPDRFSGSGSGTDFTLTISSVEAEDVAVYYCFQGSHVPNTFGGGTKVEIKGS

SEQ ID NO: 1260 - protein, 117 aa, Artificial Sequence; identical to SEQ ID NO: 32
  Description of Artificial Sequence: Synthetic polypeptide
  VH of XENP024209

SEQ ID NO: 1261 - protein, 114 aa, Artificial Sequence
  Description of Artificial Sequence: Synthetic polypeptide
  VL of XENP024209
DVLMTQSPDSLAVSLGERATINCKSSQSIVHSNGNTYLEWYQQKPGQSPKLLIYKVSNRFSGVPDRFSGSGSGTDFTLTISSVEAEDVAVYYCFQGSHVPNTFGGGTKVEIKGS

SEQ ID NO: 1262 - protein, 5 aa, Artificial Sequence
  Description of Artificial Sequence: Synthetic peptide
  XENP024209 vhCDR1
HYGMN

SEQ ID NO: 1263 - protein, 17 aa, Artificial Sequence
  Description of Artificial Sequence: Synthetic peptide
  XENP024209 vhCDR2
WINTYTGEPTYADGFTG

SEQ ID NO: 1264 - protein, 8 aa, Artificial Sequence
  Description of Artificial Sequence: Synthetic peptide
  XENP024209 vhCDR3
DYYGSSPY

SEQ ID NO: 1265 - protein, 16 aa, Artificial Sequence
  Description of Artificial Sequence: Synthetic peptide
  XENP024209 vlCDR1
KSSQSIVHSNGNTYLE

SEQ ID NO: 1266 - protein, 7 aa, Artificial Sequence
  Description of Artificial Sequence: Synthetic peptide
  XENP024209 vlCDR2
KVSNRFS

SEQ ID NO: 1267 - protein, 9 aa, Artificial Sequence
  Description of Artificial Sequence: Synthetic peptide
  XENP024209 vlCDR3
FQGSHVPNT

SEQ ID NO: 1268 - protein, 251 aa, Artificial Sequence
  Description of Artificial Sequence: Synthetic polypeptide
  XENP024210 1C11_H3_L3.132_scFv
QIQLVQSGSELKKPGASVKVSCKASGYTFTHYGMNWVRQAPGQGLEWMGWINTYTGEPTYADGFTGRFVFSLDTSVSTAYLQISSLKAEDTAVYFCARDYYGSSPYWGQGTLVTVSSGKPGSGKPGSGKPGSGKPGSDVLMTQSPDSLAVSLGERATINCKSSQSIVHSNGNTYLEWYQQKPGQSPKLLIYKVSNRFSGVPDRFSGSGSGTDFTLTISSLQAEDVAVYYCFQGSHVPNTFGPGTKVEIKGS

SEQ ID NO: 1269 - protein, 117 aa, Artificial Sequence; identical to SEQ ID NO: 32
  Description of Artificial Sequence: Synthetic polypeptide
  VH of XENP024210

SEQ ID NO: 1270 - protein, 114 aa, Artificial Sequence
  Description of Artificial Sequence: Synthetic polypeptide
  VL of XENP024210
DVLMTQSPDSLAVSLGERATINCKSSQSIVHSNGNTYLEWYQQKPGQSPKLLIYKVSNRFSGVPDRFSGSGSGTDFTLTISSLQAEDVAVYYCFQGSHVPNTFGPGTKVEIKGS

SEQ ID NO: 1271 - protein, 5 aa, Artificial Sequence
  Description of Artificial Sequence: Synthetic peptide
  XENP024210 vhCDR1
HYGMN

SEQ ID NO: 1272 - protein, 17 aa, Artificial Sequence
  Description of Artificial Sequence: Synthetic peptide
  XENP024210 vhCDR2
WINTYTGEPTYADGFTG

SEQ ID NO: 1273 - protein, 8 aa, Artificial Sequence
  Description of Artificial Sequence: Synthetic peptide
  XENP024210 vhCDR3
DYYGSSPY

SEQ ID NO: 1274 - protein, 16 aa, Artificial Sequence
  Description of Artificial Sequence: Synthetic peptide
  XENP024210 vlCDR1
KSSQSIVHSNGNTYLE

SEQ ID NO: 1275 - protein, 7 aa, Artificial Sequence
  Description of Artificial Sequence: Synthetic peptide
  XENP024210 vlCDR2
KVSNRFS

SEQ ID NO: 1276 - protein, 9 aa, Artificial Sequence
  Description of Artificial Sequence: Synthetic peptide
  XENP024210 vlCDR3
FQGSHVPNT

SEQ ID NO: 1277 - protein, 251 aa, Artificial Sequence
  Description of Artificial Sequence: Synthetic polypeptide
  XENP024211 1C11_H3.78_L3_scFv
QIQLVQSGPELKKPGASVKVSCKASGYTFTHYGMNWVRQAPGQGLEWMGWINTNTGEPTYADGFTGRFVFSVDTSQSTAYLQISSLKAEDTAVYFCARDYYGSSPYWGQGTLVTVSSGKPGSGKPGSGKPGSGKPGSDVLMTQSPDSLAVSLGERATINCKSSQSIVHSNGNTYLEWYQQKPGQSPKLLIYKVSNRFSGVPDRFSGSGSGTDFTLTISSLQAEDVAVYYCFQGSHVPNTFGGGTKVEIKGS

SEQ ID NO: 1278 - protein, 117 aa, Artificial Sequence
  Description of Artificial Sequence: Synthetic polypeptide
  VH of XENP024211
QIQLVQSGPELKKPGASVKVSCKASGYTFTHYGMNWVRQAPGQGLEWMGWINTNTGEPTYADGFTGRFVFSVDTSQSTAYLQISSLKAEDTAVYFCARDYYGSSPYWGQGTLVTVSS

SEQ ID NO: 1279 - protein, 114 aa, Artificial Sequence; identical to SEQ ID NO: 649
  Description of Artificial Sequence: Synthetic polypeptide
  VL of XENP024211

SEQ ID NO: 1280 - protein, 5 aa, Artificial Sequence
  Description of Artificial Sequence: Synthetic peptide
  XENP024211 vhCDR1
HYGMN

SEQ ID NO: 1281 - protein, 17 aa, Artificial Sequence
  Description of Artificial Sequence: Synthetic peptide
  XENP024211 vhCDR2
WINTNTGEPTYADGFTG

SEQ ID NO: 1282 - protein, 8 aa, Artificial Sequence
  Description of Artificial Sequence: Synthetic peptide
  XENP024211 vhCDR3
DYYGSSPY

SEQ ID NO: 1283 - protein, 16 aa, Artificial Sequence
  Description of Artificial Sequence: Synthetic peptide
  XENP024211 vlCDR1
KSSQSIVHSNGNTYLE

SEQ ID NO: 1284 - protein, 7 aa, Artificial Sequence
  Description of Artificial Sequence: Synthetic peptide
  XENP024211 vlCDR2
KVSNRFS

SEQ ID NO: 1285 - protein, 9 aa, Artificial Sequence
  Description of Artificial Sequence: Synthetic peptide
  XENP024211 vlCDR3
FQGSHVPNT

SEQ ID NO: 1286 - protein, 251 aa, Artificial Sequence
  Description of Artificial Sequence: Synthetic polypeptide
  XENP024212 1C11_H3.80_L3_scFv
QIQLVQSGSELKKPGASVKVSCKASGYTFTHYGMNWVRQAPGQGLEWMGWINTNTGEPTYADGFTGRFVFSVDTSQSTAYLQISSLKAEDTAVYYCARDYYGSSPYWGQGTLVTVSSGKPGSGKPGSGKPGSGKPGSDVLMTQSPDSLAVSLGERATINCKSSQSIVHSNGNTYLEWYQQKPGQSPKLLIYKVSNRFSGVPDRFSGSGSGTDFTLTISSLQAEDVAVYYCFQGSHVPNTFGGGTKVEIKGS

SEQ ID NO: 1287 - protein, 117 aa, Artificial Sequence
  Description of Artificial Sequence: Synthetic polypeptide
  VH of XENP024212
QIQLVQSGSELKKPGASVKVSCKASGYTFTHYGMNWVRQAPGQGLEWMGWINTNTGEPTYADGFTGRFVFSVDTSQSTAYLQISSLKAEDTAVYYCARDYYGSSPYWGQGTLVTVSS

SEQ ID NO: 1288 - protein, 114 aa, Artificial Sequence; identical to SEQ ID NO: 649
  Description of Artificial Sequence: Synthetic polypeptide
  VL of XENP024212

SEQ ID NO: 1289 - protein, 5 aa, Artificial Sequence
  Description of Artificial Sequence: Synthetic peptide
  XENP024212 vhCDR1
HYGMN

SEQ ID NO: 1290 - protein, 17 aa, Artificial Sequence
  Description of Artificial Sequence: Synthetic peptide
  XENP024212 vhCDR2
WINTNTGEPTYADGFTG

SEQ ID NO: 1291 - protein, 8 aa, Artificial Sequence
  Description of Artificial Sequence: Synthetic peptide
  XENP024212 vhCDR3
DYYGSSPY

SEQ ID NO: 1292 - protein, 16 aa, Artificial Sequence
  Description of Artificial Sequence: Synthetic peptide
  XENP024212 vlCDR1
KSSQSIVHSNGNTYLE

SEQ ID NO: 1293 - protein, 7 aa, Artificial Sequence
  Description of Artificial Sequence: Synthetic peptide
  XENP024212 vlCDR2
KVSNRFS

SEQ ID NO: 1294 - protein, 9 aa, Artificial Sequence
  Description of Artificial Sequence: Synthetic peptide
  XENP024212 vlCDR3
FQGSHVPNT

SEQ ID NO: 1295 - protein, 251 aa, Artificial Sequence
  Description of Artificial Sequence: Synthetic polypeptide
  XENP024213 1C11_H3.81_L3_scFv
QIQLVQSGSELKKPGASVKVSCKASGYTFTHYGMNWVRQAPGQGLEWMGWINTYTGEPTYADKFKGRFVFSLDTSVSTAYLQISSLKAEDTAVYFCARDYYGSSPYWGQGTLVTVSSGKPGSGKPGSGKPGSGKPGSDVLMTQSPDSLAVSLGERATINCKSSQSIVHSNGNTYLEWYQQKPGQSPKLLIYKVSNRFSGVPDRFSGSGSGTDFTLTISSLQAEDVAVYYCFQGSHVPNTFGGGTKVEIKGS

SEQ ID NO: 1296 - protein, 117 aa, Artificial Sequence
  Description of Artificial Sequence: Synthetic polypeptide
  VH of XENP024213
QIQLVQSGSELKKPGASVKVSCKASGYTFTHYGMNWVRQAPGQGLEWMGWINTYTGEPTYADKFKGRFVFSLDTSVSTAYLQISSLKAEDTAVYFCARDYYGSSPYWGQGTLVTVSS

SEQ ID NO: 1297 - protein, 114 aa, Artificial Sequence; identical to SEQ ID NO: 649
  Description of Artificial Sequence: Synthetic polypeptide
  VL of XENP024213

SEQ ID NO: 1298 - protein, 5 aa, Artificial Sequence
  Description of Artificial Sequence: Synthetic peptide
  XENP024213 vhCDR1
HYGMN

SEQ ID NO: 1299 - protein, 17 aa, Artificial Sequence
  Description of Artificial Sequence: Synthetic peptide
  XENP024213 vhCDR2
WINTYTGEPTYADKFKG

SEQ ID NO: 1300 - protein, 8 aa, Artificial Sequence
  Description of Artificial Sequence: Synthetic peptide
  XENP024213 vhCDR3
DYYGSSPY

SEQ ID NO: 1301 - protein, 16 aa, Artificial Sequence
  Description of Artificial Sequence: Synthetic peptide
  XENP024213 vlCDR1
KSSQSIVHSNGNTYLE

SEQ ID NO: 1302 - protein, 7 aa, Artificial Sequence
  Description of Artificial Sequence: Synthetic peptide
  XENP024213 vlCDR2
KVSNRFS

SEQ ID NO: 1303 - protein, 9 aa, Artificial Sequence
  Description of Artificial Sequence: Synthetic peptide
  XENP024213 vlCDR3
FQGSHVPNT

SEQ ID NO: 1304 - protein, 251 aa, Artificial Sequence
  Description of Artificial Sequence: Synthetic polypeptide
  XENP024214 1C11_H3.82_L3_scFv
QIQLVQSGSELKKPGASVKVSCKASGYTFTHYGMNWVRQAPGQGLEWMGWINTYTGEPTYADKFQGRFVFSLDTSVSTAYLQISSLKAEDTAVYFCARDYYGSSPYWGQGTLVTVSSGKPGSGKPGSGKPGSGKPGSDVLMTQSPDSLAVSLGERATINCKSSQSIVHSNGNTYLEWYQQKPGQSPKLLIYKVSNRFSGVPDRFSGSGSGTDFTLTISSLQAEDVAVYYCFQGSHVPNTFGGGTKVEIKGS

SEQ ID NO: 1305 - protein, 117 aa, Artificial Sequence
  Description of Artificial Sequence: Synthetic polypeptide
  VH of XENP024214
QIQLVQSGSELKKPGASVKVSCKASGYTFTHYGMNWVRQAPGQGLEWMGWINTYTGEPTYADKFQGRFVFSLDTSVSTAYLQISSLKAEDTAVYFCARDYYGSSPYWGQGTLVTVSS

SEQ ID NO: 1306 - protein, 114 aa, Artificial Sequence; identical to SEQ ID NO: 649
  Description of Artificial Sequence: Synthetic polypeptide
  VL of XENP024214

SEQ ID NO: 1307 - protein, 5 aa, Artificial Sequence
  Description of Artificial Sequence: Synthetic peptide
  XENP024214 vhCDR1
HYGMN

SEQ ID NO: 1308 - protein, 17 aa, Artificial Sequence
  Description of Artificial Sequence: Synthetic peptide
  XENP024214 vhCDR2
WINTYTGEPTYADKFQG

SEQ ID NO: 1309 - protein, 8 aa, Artificial Sequence
  Description of Artificial Sequence: Synthetic peptide
  XENP024214 vhCDR3
DYYGSSPY

SEQ ID NO: 1310 - protein, 16 aa, Artificial Sequence
  Description of Artificial Sequence: Synthetic peptide
  XENP024214 vlCDR1
KSSQSIVHSNGNTYLE

SEQ ID NO: 1311 - protein, 7 aa, Artificial Sequence
  Description of Artificial Sequence: Synthetic peptide
  XENP024214 vlCDR2
KVSNRFS

SEQ ID NO: 1312 - protein, 9 aa, Artificial Sequence
  Description of Artificial Sequence: Synthetic peptide
  XENP024214 vlCDR3
FQGSHVPNT

SEQ ID NO: 1313 - protein, 251 aa, Artificial Sequence
  Description of Artificial Sequence: Synthetic polypeptide
  XENP024215 1C11_H3.83_L3_scFv
QIQLVQSGSELKKPGASVKVSCKASGYTFTHYGMNWVRQAPGQGLEWMGWINTNTGEPTYADGFTGRFVFSVDTSQSTAYLQISSLKAEDTAVYFCARDYYGSSPYWGQGTLVTVSSGKPGSGKPGSGKPGSGKPGSDVLMTQSPDSLAVSLGERATINCKSSQSIVHSNGNTYLEWYQQKPGQSPKLLIYKVSNRFSGVPDRFSGSGSGTDFTLTISSLQAEDVAVYYCFQGSHVPNTFGGGTKVEIKGS

SEQ ID NO: 1314 - protein, 117 aa, Artificial Sequence
  Description of Artificial Sequence: Synthetic polypeptide
  VH of XENP024215
QIQLVQSGSELKKPGASVKVSCKASGYTFTHYGMNWVRQAPGQGLEWMGWINTNTGEPTYADGFTGRFVFSVDTSQSTAYLQISSLKAEDTAVYFCARDYYGSSPYWGQGTLVTVSS

SEQ ID NO: 1315 - protein, 114 aa, Artificial Sequence; identical to SEQ ID NO: 649
  Description of Artificial Sequence: Synthetic polypeptide
  VL of XENP024215

SEQ ID NO: 1316 - protein, 5 aa, Artificial Sequence
  Description of Artificial Sequence: Synthetic peptide
  XENP024215 vhCDR1
HYGMN

SEQ ID NO: 1317 - protein, 17 aa, Artificial Sequence
  Description of Artificial Sequence: Synthetic peptide
  XENP024215 vhCDR2
WINTNTGEPTYADGFTG

SEQ ID NO: 1318 - protein, 8 aa, Artificial Sequence
  Description of Artificial Sequence: Synthetic peptide
  XENP024215 vhCDR3
DYYGSSPY

SEQ ID NO: 1319 - protein, 16 aa, Artificial Sequence
  Description of Artificial Sequence: Synthetic peptide
  XENP024215 vlCDR1
KSSQSIVHSNGNTYLE

SEQ ID NO: 1320 - protein, 7 aa, Artificial Sequence
  Description of Artificial Sequence: Synthetic peptide
  XENP024215 vlCDR2
KVSNRFS

SEQ ID NO: 1321 - protein, 9 aa, Artificial Sequence
  Description of Artificial Sequence: Synthetic peptide
  XENP024215 vlCDR3
FQGSHVPNT

SEQ ID NO: 1322 - protein, 251 aa, Artificial Sequence
  Description of Artificial Sequence: Synthetic polypeptide
  XENP024216 1C11_H3.84_L3_scFv
QIQLVQSGSELKKPGASVKVSCKASGYTFTHYGMNWVRQAPGQGLEWMGWINTYTGEPTYADKFKGRFVFSLDTSQSTAYLQISSLKAEDTAVYFCARDYYGSSPYWGQGTLVTVSSGKPGSGKPGSGKPGSGKPGSDVLMTQSPDSLAVSLGERATINCKSSQSIVHSNGNTYLEWYQQKPGQSPKLLIYKVSNRFSGVPDRFSGSGSGTDFTLTISSLQAEDVAVYYCFQGSHVPNTFGGGTKVEIKGS

SEQ ID NO: 1323 - protein, 117 aa, Artificial Sequence
  Description of Artificial Sequence: Synthetic polypeptide
  VH of XENP024216
QIQLVQSGSELKKPGASVKVSCKASGYTFTHYGMNWVRQAPGQGLEWMGWINTYTGEPTYADKFKGRFVFSLDTSQSTAYLQISSLKAEDTAVYFCARDYYGSSPYWGQGTLVTVSS

SEQ ID NO: 1324 - protein, 114 aa, Artificial Sequence; identical to SEQ ID NO: 649
  Description of Artificial Sequence: Synthetic polypeptide
  VL of XENP024216

SEQ ID NO: 1325 - protein, 5 aa, Artificial Sequence
  Description of Artificial Sequence: Synthetic peptide
  XENP024216 vhCDR1
HYGMN

SEQ ID NO: 1326 - protein, 17 aa, Artificial Sequence
  Description of Artificial Sequence: Synthetic peptide
  XENP024216 vhCDR2
WINTYTGEPTYADKFKG

SEQ ID NO: 1327 - protein, 8 aa, Artificial Sequence
  Description of Artificial Sequence: Synthetic peptide
  XENP024216 vhCDR3
DYYGSSPY

SEQ ID NO: 1328 - protein, 16 aa, Artificial Sequence
  Description of Artificial Sequence: Synthetic peptide
  XENP024216 vlCDR1
KSSQSIVHSNGNTYLE

SEQ ID NO: 1329 - protein, 7 aa, Artificial Sequence
  Description of Artificial Sequence: Synthetic peptide
  XENP024216 vlCDR2
KVSNRFS

SEQ ID NO: 1330 - protein, 9 aa, Artificial Sequence
  Description of Artificial Sequence: Synthetic peptide
  XENP024216 vlCDR3
FQGSHVPNT

SEQ ID NO: 1331 - protein, 251 aa, Artificial Sequence
  Description of Artificial Sequence: Synthetic polypeptide
  XENP024217 1C11_H3.85_L3_scFv
QIQLVQSGSELKKPGASVKVSCKASGYTFTHYGMNWVRQAPGQGLEWMGWINTYTGEPTYADKFQGRFVFSLDTSQSTAYLQISSLKAEDTAVYFCARDYYGSSPYWGQGTLVTVSSGKPGSGKPGSGKPGSGKPGSDVLMTQSPDSLAVSLGERATINCKSSQSIVHSNGNTYLEWYQQKPGQSPKLLIYKVSNRFSGVPDRFSGSGSGTDFTLTISSLQAEDVAVYYCFQGSHVPNTFGGGTKVEIKGS

SEQ ID NO: 1332 - protein, 117 aa, Artificial Sequence
  Description of Artificial Sequence: Synthetic polypeptide
  VH of XENP024217
QIQLVQSGSELKKPGASVKVSCKASGYTFTHYGMNWVRQAPGQGLEWMGWINTYTGEPTYADKFQGRFVFSLDTSQSTAYLQISSLKAEDTAVYFCARDYYGSSPYWGQGTLVTVSS

SEQ ID NO: 1333 - protein, 114 aa, Artificial Sequence; identical to SEQ ID NO: 649
  Description of Artificial Sequence: Synthetic polypeptide
  VL of XENP024217

SEQ ID NO: 1334 - protein, 5 aa, Artificial Sequence
  Description of Artificial Sequence: Synthetic peptide
  XENP024217 vhCDR1
HYGMN

SEQ ID NO: 1335 - protein, 17 aa, Artificial Sequence
  Description of Artificial Sequence: Synthetic peptide
  XENP024217 vhCDR2
WINTYTGEPTYADKFQG

SEQ ID NO: 1336 - protein, 8 aa, Artificial Sequence
  Description of Artificial Sequence: Synthetic peptide
  XENP024217 vhCDR3
DYYGSSPY

SEQ ID NO: 1337 - protein, 16 aa, Artificial Sequence
  Description of Artificial Sequence: Synthetic peptide
  XENP024217 vlCDR1
KSSQSIVHSNGNTYLE

SEQ ID NO: 1338 - protein, 7 aa, Artificial Sequence
  Description of Artificial Sequence: Synthetic peptide
  XENP024217 vlCDR2
KVSNRFS

SEQ ID NO: 1339 - protein, 9 aa, Artificial Sequence
  Description of Artificial Sequence: Synthetic peptide
  XENP024217 vlCDR3
FQGSHVPNT

SEQ ID NO: 1340 - protein, 251 aa, Artificial Sequence
  Description of Artificial Sequence: Synthetic polypeptide
  XENP024218 1C11_H3.86_L3_scFv
EIQLVQSGSELKKPGASVKVSCKASGYTFTHYGMNWVRQAPGQGLEWMGWINTYTGEPTYADGFTGRFVFSLDTSVSTAYLQISSLKAEDTAVYFCARDYYGSSPYWGQGTLVTVSSGKPGSGKPGSGKPGSGKPGSDVLMTQSPDSLAVSLGERATINCKSSQSIVHSNGNTYLEWYQQKPGQSPKLLIYKVSNRFSGVPDRFSGSGSGTDFTLTISSLQAEDVAVYYCFQGSHVPNTFGGGTKVEIKGS

SEQ ID NO: 1341 - protein, 117 aa, Artificial Sequence
  Description of Artificial Sequence: Synthetic polypeptide
  VH of XENP024218
EIQLVQSGSELKKPGASVKVSCKASGYTFTHYGMNWVRQAPGQGLEWMGWINTYTGEPTYADGFTGRFVFSLDTSVSTAYLQISSLKAEDTAVYFCARDYYGSSPYWGQGTLVTVSS

SEQ ID NO: 1342 - protein, 114 aa, Artificial Sequence; identical to SEQ ID NO: 649
  Description of Artificial Sequence: Synthetic polypeptide
  VL of XENP024218

SEQ ID NO: 1343 - protein, 5 aa, Artificial Sequence
  Description of Artificial Sequence: Synthetic peptide
  XENP024218 vhCDR1
HYGMN

SEQ ID NO: 1344 - protein, 17 aa, Artificial Sequence
  Description of Artificial Sequence: Synthetic peptide
  XENP024218 vhCDR2
WINTYTGEPTYADGFTG

SEQ ID NO: 1345 - protein, 8 aa, Artificial Sequence
  Description of Artificial Sequence: Synthetic peptide
  XENP024218 vhCDR3
DYYGSSPY

SEQ ID NO: 1346 - protein, 16 aa, Artificial Sequence
  Description of Artificial Sequence: Synthetic peptide
  XENP024218 vlCDR1
KSSQSIVHSNGNTYLE

SEQ ID NO: 1347 - protein, 7 aa, Artificial Sequence
  Description of Artificial Sequence: Synthetic peptide
  XENP024218 vlCDR2
KVSNRFS

SEQ ID NO: 1348 - protein, 9 aa, Artificial Sequence
  Description of Artificial Sequence: Synthetic peptide
  XENP024218 vlCDR3
FQGSHVPNT

SEQ ID NO: 1349 - protein, 251 aa, Artificial Sequence
  Description of Artificial Sequence: Synthetic polypeptide
  XENP024219 1C11_H3.88_L3_scFv
QIQLVESGSELKKPGASVKVSCKASGYTFTHYGMNWVRQAPGQGLEWMGWINTYTGEPTYADGFTGRFVFSLDTSVSTAYLQISSLKAEDTAVYFCARDYYGSSPYWGQGTLVTVSSGKPGSGKPGSGKPGSGKPGSDVLMTQSPDSLAVSLGERATINCKSSQSIVHSNGNTYLEWYQQKPGQSPKLLIYKVSNRFSGVPDRFSGSGSGTDFTLTISSLQAEDVAVYYCFQGSHVPNTFGGGTKVEIKGS

SEQ ID NO: 1350 - protein, 117 aa, Artificial Sequence
  Description of Artificial Sequence: Synthetic polypeptide
  VH of XENP024219
QIQLVESGSELKKPGASVKVSCKASGYTFTHYGMNWVRQAPGQGLEWMGWINTYTGEPTYADGFTGRFVFSLDTSVSTAYLQISSLKAEDTAVYFCARDYYGSSPYWGQGTLVTVSS

SEQ ID NO: 1351 - protein, 114 aa, Artificial Sequence; identical to SEQ ID NO: 649
  Description of Artificial Sequence: Synthetic polypeptide
  VL of XENP024219

SEQ ID NO: 1352 - protein, 5 aa, Artificial Sequence
  Description of Artificial Sequence: Synthetic peptide
  XENP024219 vhCDR1
HYGMN

SEQ ID NO: 1353 - protein, 17 aa, Artificial Sequence
  Description of Artificial Sequence: Synthetic peptide
  XENP024219 vhCDR2
WINTYTGEPTYADGFTG

SEQ ID NO: 1354 - protein, 8 aa, Artificial Sequence
  Description of Artificial Sequence: Synthetic peptide
  XENP024219 vhCDR3
DYYGSSPY

SEQ ID NO: 1355 - protein, 16 aa, Artificial Sequence
  Description of Artificial Sequence: Synthetic peptide
  XENP024219 vlCDR1
KSSQSIVHSNGNTYLE

SEQ ID NO: 1356 - protein, 7 aa, Artificial Sequence
  Description of Artificial Sequence: Synthetic peptide
  XENP024219 vlCDR2
KVSNRFS

SEQ ID NO: 1357 - protein, 9 aa, Artificial Sequence
  Description of Artificial Sequence: Synthetic peptide
  XENP024219 vlCDR3
FQGSHVPNT

SEQ ID NO: 1358 - protein, 251 aa, Artificial Sequence
  Description of Artificial Sequence: Synthetic polypeptide
  XENP024220 1C11_H3.89_L3_scFv
QIQLVQSGSGLKKPGASVKVSCKASGYTFTHYGMNWVRQAPGQGLEWMGWINTYTGEPTYADGFTGRFVFSLDTSVSTAYLQISSLKAEDTAVYFCARDYYGSSPYWGQGTLVTVSSGKPGSGKPGSGKPGSGKPGSDVLMTQSPDSLAVSLGERATINCKSSQSIVHSNGNTYLEWYQQKPGQSPKLLIYKVSNRFSGVPDRFSGSGSGTDFTLTISSLQAEDVAVYYCFQGSHVPNTFGGGTKVEIKGS

SEQ ID NO: 1359 - protein, 117 aa, Artificial Sequence
  Description of Artificial Sequence: Synthetic polypeptide
  VH of XENP024220
QIQLVQSGSGLKKPGASVKVSCKASGYTFTHYGMNWVRQAPGQGLEWMGWINTYTGEPTYADGFTGRFVFSLDTSVSTAYLQISSLKAEDTAVYFCARDYYGSSPYWGQGTLVTVSS

SEQ ID NO: 1360 - protein, 114 aa, Artificial Sequence; identical to SEQ ID NO: 649
  Description of Artificial Sequence: Synthetic polypeptide
  VL of XENP024220

SEQ ID NO: 1361 - protein, 5 aa, Artificial Sequence
  Description of Artificial Sequence: Synthetic peptide
  XENP024220 vhCDR1
HYGMN

SEQ ID NO: 1362 - protein, 17 aa, Artificial Sequence
  Description of Artificial Sequence: Synthetic peptide
  XENP024220 vhCDR2
WINTYTGEPTYADGFTG

SEQ ID NO: 1363 - protein, 8 aa, Artificial Sequence
  Description of Artificial Sequence: Synthetic peptide
  XENP024220 vhCDR3
DYYGSSPY

SEQ ID NO: 1364 - protein, 16 aa, Artificial Sequence
  Description of Artificial Sequence: Synthetic peptide
  XENP024220 vlCDR1
KSSQSIVHSNGNTYLE

SEQ ID NO: 1365 - protein, 7 aa, Artificial Sequence
  Description of Artificial Sequence: Synthetic peptide
  XENP024220 vlCDR2
KVSNRFS

SEQ ID NO: 1366 - protein, 9 aa, Artificial Sequence
  Description of Artificial Sequence: Synthetic peptide
  XENP024220 vlCDR3
FQGSHVPNT

SEQ ID NO: 1367 - protein, 251 aa, Artificial Sequence
  Description of Artificial Sequence: Synthetic polypeptide
  XENP024221 1C11_H3.90_L3_scFv
QIQLVQSGSVLKKPGASVKVSCKASGYTFTHYGMNWVRQAPGQGLEWMGWINTYTGEPTYADGFTGRFVFSLDTSVSTAYLQISSLKAEDTAVYFCARDYYGSSPYWGQGTLVTVSSGKPGSGKPGSGKPGSGKPGSDVLMTQSPDSLAVSLGERATINCKSSQSIVHSNGNTYLEWYQQKPGQSPKLLIYKVSNRFSGVPDRFSGSGSGTDFTLTISSLQAEDVAVYYCFQGSHVPNTFGGGTKVEIKGS

SEQ ID NO: 1368 - protein, 117 aa, Artificial Sequence
  Description of Artificial Sequence: Synthetic polypeptide
  VH of XENP024221
QIQLVQSGSVLKKPGASVKVSCKASGYTFTHYGMNWVRQAPGQGLEWMGWINTYTGEPTYADGFTGRFVFSLDTSVSTAYLQISSLKAEDTAVYFCARDYYGSSPYWGQGTLVTVSS

SEQ ID NO: 1369 - protein, 114 aa, Artificial Sequence; identical to SEQ ID NO: 649
  Description of Artificial Sequence: Synthetic polypeptide
  VL of XENP024221

SEQ ID NO: 1370 - protein, 5 aa, Artificial Sequence
  Description of Artificial Sequence: Synthetic peptide
  XENP024221 vhCDR1
HYGMN

SEQ ID NO: 1371 - protein, 17 aa, Artificial Sequence
  Description of Artificial Sequence: Synthetic peptide
  XENP024221 vhCDR2
WINTYTGEPTYADGFTG

SEQ ID NO: 1372 - protein, 8 aa, Artificial Sequence
  Description of Artificial Sequence: Synthetic peptide
  XENP024221 vhCDR3
DYYGSSPY

SEQ ID NO: 1373 - protein, 16 aa, Artificial Sequence
  Description of Artificial Sequence: Synthetic peptide
  XENP024221 vlCDR1
KSSQSIVHSNGNTYLE

SEQ ID NO: 1374 - protein, 7 aa, Artificial Sequence
  Description of Artificial Sequence: Synthetic peptide
  XENP024221 vlCDR2
KVSNRFS

SEQ ID NO: 1375 - protein, 9 aa, Artificial Sequence
  Description of Artificial Sequence: Synthetic peptide
  XENP024221 vlCDR3
FQGSHVPNT

SEQ ID NO: 1376 - protein, 251 aa, Artificial Sequence
  Description of Artificial Sequence: Synthetic polypeptide
  XENP024222 1C11_H3.91_L3_scFv
QIQLVQSGSELVKPGASVKVSCKASGYTFTHYGMNWVRQAPGQGLEWMGWINTYTGEPTYADGFTGRFVFSLDTSVSTAYLQISSLKAEDTAVYFCARDYYGSSPYWGQGTLVTVSSGKPGSGKPGSGKPGSGKPGSDVLMTQSPDSLAVSLGERATINCKSSQSIVHSNGNTYLEWYQQKPGQSPKLLIYKVSNRFSGVPDRFSGSGSGTDFTLTISSLQAEDVAVYYCFQGSHVPNTFGGGTKVEIKGS

SEQ ID NO: 1377 - protein, 117 aa, Artificial Sequence
  Description of Artificial Sequence: Synthetic polypeptide
  VH of XENP024222
QIQLVQSGSELVKPGASVKVSCKASGYTFTHYGMNWVRQAPGQGLEWMGWINTYTGEPTYADGFTGRFVFSLDTSVSTAYLQISSLKAEDTAVYFCARDYYGSSPYWGQGTLVTVSS

SEQ ID NO: 1378 - protein, 114 aa, Artificial Sequence; identical to SEQ ID NO: 649
  Description of Artificial Sequence: Synthetic polypeptide
  VL of XENP024222

SEQ ID NO: 1379 - protein, 5 aa, Artificial Sequence
  Description of Artificial Sequence: Synthetic peptide
  XENP024222 vhCDR1
HYGMN

SEQ ID NO: 1380 - protein, 17 aa, Artificial Sequence
  Description of Artificial Sequence: Synthetic peptide
  XENP024222 vhCDR2
WINTYTGEPTYADGFTG

SEQ ID NO: 1381 - protein, 8 aa, Artificial Sequence
  Description of Artificial Sequence: Synthetic peptide
  XENP024222 vhCDR3
DYYGSSPY

SEQ ID NO: 1382 - protein, 16 aa, Artificial Sequence
  Description of Artificial Sequence: Synthetic peptide
  XENP024222 vlCDR1
KSSQSIVHSNGNTYLE

SEQ ID NO: 1383 - protein, 7 aa, Artificial Sequence
  Description of Artificial Sequence: Synthetic peptide
  XENP024222 vlCDR2
KVSNRFS

SEQ ID NO: 1384 - protein, 9 aa, Artificial Sequence
  Description of Artificial Sequence: Synthetic peptide
  XENP024222 vlCDR3
FQGSHVPNT

SEQ ID NO: 1385 - protein, 251 aa, Artificial Sequence
  Description of Artificial Sequence: Synthetic polypeptide
  XENP024223 1C11_H3.92_L3_scFv
QIQLVQSGSELKQPGASVKVSCKASGYTFTHYGMNWVRQAPGQGLEWMGWINTYTGEPTYADGFTGRFVFSLDTSVSTAYLQISSLKAEDTAVYFCARDYYGSSPYWGQGTLVTVSSGKPGSGKPGSGKPGSGKPGSDVLMTQSPDSLAVSLGERATINCKSSQSIVHSNGNTYLEWYQQKPGQSPKLLIYKVSNRFSGVPDRFSGSGSGTDFTLTISSLQAEDVAVYYCFQGSHVPNTFGGGTKVEIKGS

SEQ ID NO: 1386 - protein, 117 aa, Artificial Sequence
  Description of Artificial Sequence: Synthetic polypeptide
  VH of XENP024223
QIQLVQSGSELKQPGASVKVSCKASGYTFTHYGMNWVRQAPGQGLEWMGWINTYTGEPTYADGFTGRFVFSLDTSVSTAYLQISSLKAEDTAVYFCARDYYGSSPYWGQGTLVTVSS

SEQ ID NO: 1387 - protein, 114 aa, Artificial Sequence; identical to SEQ ID NO: 649
  Description of Artificial Sequence: Synthetic polypeptide
  VL of XENP024223

SEQ ID NO: 1388 - protein, 5 aa, Artificial Sequence
  Description of Artificial Sequence: Synthetic peptide
  XENP024223 vhCDR1
HYGMN

SEQ ID NO: 1389 - protein, 17 aa, Artificial Sequence
  Description of Artificial Sequence: Synthetic peptide
  XENP024223 vhCDR2
WINTYTGEPTYADGFTG

SEQ ID NO: 1390 - protein, 8 aa, Artificial Sequence
  Description of Artificial Sequence: Synthetic peptide
  XENP024223 vhCDR3
DYYGSSPY

SEQ ID NO: 1391 - protein, 16 aa, Artificial Sequence
  Description of Artificial Sequence: Synthetic peptide
  XENP024223 vlCDR1
KSSQSIVHSNGNTYLE

SEQ ID NO: 1392 - protein, 7 aa, Artificial Sequence
  Description of Artificial Sequence: Synthetic peptide
  XENP024223 vlCDR2
KVSNRFS

SEQ ID NO: 1393 - protein, 9 aa, Artificial Sequence
  Description of Artificial Sequence: Synthetic peptide
  XENP024223 vlCDR3
FQGSHVPNT

SEQ ID NO: 1394 - protein, 251 aa, Artificial Sequence
  Description of Artificial Sequence: Synthetic polypeptide
  XENP024224 1C11_H3.93_L3_scFv
QIQLVQSGSELKKPSASVKVSCKASGYTFTHYGMNWVRQAPGQGLEWMGWINTYTGEPTYADGFTGRFVFSLDTSVSTAYLQISSLKAEDTAVYFCARDYYGSSPYWGQGTLVTVSSGKPGSGKPGSGKPGSGKPGSDVLMTQSPDSLAVSLGERATINCKSSQSIVHSNGNTYLEWYQQKPGQSPKLLIYKVSNRFSGVPDRFSGSGSGTDFTLTISSLQAEDVAVYYCFQGSHVPNTFGGGTKVEIKGS

SEQ ID NO: 1395 - protein, 117 aa, Artificial Sequence
  Description of Artificial Sequence: Synthetic polypeptide
  VH of XENP024224
QIQLVQSGSELKKPSASVKVSCKASGYTFTHYGMNWVRQAPGQGLEWMGWINTYTGEPTYADGFTGRFVFSLDTSVSTAYLQISSLKAEDTAVYFCARDYYGSSPYWGQGTLVTVSS

SEQ ID NO: 1396 - protein, 114 aa, Artificial Sequence; identical to SEQ ID NO: 649
  Description of Artificial Sequence: Synthetic polypeptide
  VL of XENP024224

SEQ ID NO: 1397 - protein, 5 aa, Artificial Sequence
  Description of Artificial Sequence: Synthetic peptide
  XENP024224 vhCDR1
HYGMN

SEQ ID NO: 1398 - protein, 17 aa, Artificial Sequence
  Description of Artificial Sequence: Synthetic peptide
  XENP024224 vhCDR2
WINTYTGEPTYADGFTG

SEQ ID NO: 1399 - protein, 8 aa, Artificial Sequence
  Description of Artificial Sequence: Synthetic peptide
  XENP024224 vhCDR3
DYYGSSPY

SEQ ID NO: 1400 - protein, 16 aa, Artificial Sequence
  Description of Artificial Sequence: Synthetic peptide
  XENP024224 vlCDR1
KSSQSIVHSNGNTYLE

SEQ ID NO: 1401 - protein, 7 aa, Artificial Sequence
  Description of Artificial Sequence: Synthetic peptide
  XENP024224 vlCDR2
KVSNRFS

SEQ ID NO: 1402 - protein, 9 aa, Artificial Sequence
  Description of Artificial Sequence: Synthetic peptide
  XENP024224 vlCDR3
FQGSHVPNT

SEQ ID NO: 1403 - protein, 251 aa, Artificial Sequence
  Description of Artificial Sequence: Synthetic polypeptide
  XENP024225 1C11_H3.94_L3_scFv
QIQLVQSGSELKKPTASVKVSCKASGYTFTHYGMNWVRQAPGQGLEWMGWINTYTGEPTYADGFTGRFVFSLDTSVSTAYLQISSLKAEDTAVYFCARDYYGSSPYWGQGTLVTVSSGKPGSGKPGSGKPGSGKPGSDVLMTQSPDSLAVSLGERATINCKSSQSIVHSNGNTYLEWYQQKPGQSPKLLIYKVSNRFSGVPDRFSGSGSGTDFTLTISSLQAEDVAVYYCFQGSHVPNTFGGGTKVEIKGS

SEQ ID NO: 1404 - protein, 117 aa, Artificial Sequence
  Description of Artificial Sequence: Synthetic polypeptide
  VH of XENP024225
QIQLVQSGSELKKPTASVKVSCKASGYTFTHYGMNWVRQAPGQGLEWMGWINTYTGEPTYADGFTGRFVFSLDTSVSTAYLQISSLKAEDTAVYFCARDYYGSSPYWGQGTLVTVSS

SEQ ID NO: 1405 - protein, 114 aa, Artificial Sequence; identical to SEQ ID NO: 649
  Description of Artificial Sequence: Synthetic polypeptide
  VL of XENP024225

SEQ ID NO: 1406 - protein, 5 aa, Artificial Sequence
  Description of Artificial Sequence: Synthetic peptide
  XENP024225 vhCDR1
HYGMN

SEQ ID NO: 1407 - protein, 17 aa, Artificial Sequence
  Description of Artificial Sequence: Synthetic peptide
  XENP024225 vhCDR2
WINTYTGEPTYADGFTG

SEQ ID NO: 1408 - protein, 8 aa, Artificial Sequence
  Description of Artificial Sequence: Synthetic peptide
  XENP024225 vhCDR3
DYYGSSPY

SEQ ID NO: 1409 - protein, 16 aa, Artificial Sequence
  Description of Artificial Sequence: Synthetic peptide
  XENP024225 vlCDR1
KSSQSIVHSNGNTYLE

SEQ ID NO: 1410 - protein, 7 aa, Artificial Sequence
  Description of Artificial Sequence: Synthetic peptide
  XENP024225 vlCDR2
KVSNRFS

SEQ ID NO: 1411 - protein, 9 aa, Artificial Sequence
  Description of Artificial Sequence: Synthetic peptide
  XENP024225 vlCDR3
FQGSHVPNT

SEQ ID NO: 1412 - protein, 251 aa, Artificial Sequence
  Description of Artificial Sequence: Synthetic polypeptide
  XENP024226 1C11_H3.95_L3_scFv
QIQLVQSGSELKKPGGSVKVSCKASGYTFTHYGMNWVRQAPGQGLEWMGWINTYTGEPTYADGFTGRFVFSLDTSVSTAYLQISSLKAEDTAVYFCARDYYGSSPYWGQGTLVTVSSGKPGSGKPGSGKPGSGKPGSDVLMTQSPDSLAVSLGERATINCKSSQSIVHSNGNTYLEWYQQKPGQSPKLLIYKVSNRFSGVPDRFSGSGSGTDFTLTISSLQAEDVAVYYCFQGSHVPNTFGGGTKVEIKGS

SEQ ID NO: 1413 - protein, 117 aa, Artificial Sequence
  Description of Artificial Sequence: Synthetic polypeptide
  VH of XENP024226
QIQLVQSGSELKKPGGSVKVSCKASGYTFTHYGMNWVRQAPGQGLEWMGWINTYTGEPTYADGFTGRFVFSLDTSVSTAYLQISSLKAEDTAVYFCARDYYGSSPYWGQGTLVTVSS

SEQ ID NO: 1414 - protein, 114 aa, Artificial Sequence; identical to SEQ ID NO: 649
  Description of Artificial Sequence: Synthetic polypeptide
  VL of XENP024226

SEQ ID NO: 1415 - protein, 5 aa, Artificial Sequence
  Description of Artificial Sequence: Synthetic peptide
  XENP024226 vhCDR1
HYGMN

SEQ ID NO: 1416 - protein, 17 aa, Artificial Sequence
  Description of Artificial Sequence: Synthetic peptide
  XENP024226 vhCDR2
WINTYTGEPTYADGFTG

SEQ ID NO: 1417 - protein, 8 aa, Artificial Sequence
  Description of Artificial Sequence: Synthetic peptide
  XENP024226 vhCDR3
DYYGSSPY

SEQ ID NO: 1418 - protein, 16 aa, Artificial Sequence
  Description of Artificial Sequence: Synthetic peptide
  XENP024226 vlCDR1
KSSQSIVHSNGNTYLE

SEQ ID NO: 1419 - protein, 7 aa, Artificial Sequence
  Description of Artificial Sequence: Synthetic peptide
  XENP024226 vlCDR2
KVSNRFS

SEQ ID NO: 1420 - protein, 9 aa, Artificial Sequence
  Description of Artificial Sequence: Synthetic peptide
  XENP024226 vlCDR3
FQGSHVPNT

SEQ ID NO: 1421 - protein, 251 aa, Artificial Sequence
  Description of Artificial Sequence: Synthetic polypeptide
  XENP024227 1C11_H3.96_L3_scFv
QIQLVQSGSELKKPGQSVKVSCKASGYTFTHYGMNWVRQAPGQGLEWMGWINTYTGEPTYADGFTGRFVFSLDTSVSTAYLQISSLKAEDTAVYFCARDYYGSSPYWGQGTLVTVSSGKPGSGKPGSGKPGSGKPGSDVLMTQSPDSLAVSLGERATINCKSSQSIVHSNGNTYLEWYQQKPGQSPKLLIYKVSNRFSGVPDRFSGSGSGTDFTLTISSLQAEDVAVYYCFQGSHVPNTFGGGTKVEIKGS

SEQ ID NO: 1422 - protein, 117 aa, Artificial Sequence
  Description of Artificial Sequence: Synthetic polypeptide
  VH of XENP024227
QIQLVQSGSELKKPGQSVKVSCKASGYTFTHYGMNWVRQAPGQGLEWMGWINTYTGEPTYADGFTGRFVFSLDTSVSTAYLQISSLKAEDTAVYFCARDYYGSSPYWGQGTLVTVSS

SEQ ID NO: 1423 - protein, 114 aa, Artificial Sequence; identical to SEQ ID NO: 649
  Description of Artificial Sequence: Synthetic polypeptide
  VL of XENP024227

SEQ ID NO: 1424 - protein, 5 aa, Artificial Sequence
  Description of Artificial Sequence: Synthetic peptide
  XENP024227 vhCDR1
HYGMN

SEQ ID NO: 1425 - protein, 17 aa, Artificial Sequence
  Description of Artificial Sequence: Synthetic peptide
  XENP024227 vhCDR2
WINTYTGEPTYADGFTG

SEQ ID NO: 1426 - protein, 8 aa, Artificial Sequence
  Description of Artificial Sequence: Synthetic peptide
  XENP024227 vhCDR3
DYYGSSPY

SEQ ID NO: 1427 - protein, 16 aa, Artificial Sequence
  Description of Artificial Sequence: Synthetic peptide
  XENP024227 vlCDR1
KSSQSIVHSNGNTYLE

SEQ ID NO: 1428 - protein, 7 aa, Artificial Sequence
  Description of Artificial Sequence: Synthetic peptide
  XENP024227 vlCDR2
KVSNRFS

SEQ ID NO: 1429 - protein, 9 aa, Artificial Sequence
  Description of Artificial Sequence: Synthetic peptide
  XENP024227 vlCDR3
FQGSHVPNT

SEQ ID NO: 1430 - protein, 251 aa, Artificial Sequence
  Description of Artificial Sequence: Synthetic polypeptide
  XENP024228 1C11_H3.97_L3_scFv
QIQLVQSGSELKKPGESVKVSCKASGYTFTHYGMNWVRQAPGQGLEWMGWINTYTGEPTYADGFTGRFVFSLDTSVSTAYLQISSLKAEDTAVYFCARDYYGSSPYWGQGTLVTVSSGKPGSGKPGSGKPGSGKPGSDVLMTQSPDSLAVSLGERATINCKSSQSIVHSNGNTYLEWYQQKPGQSPKLLIYKVSNRFSGVPDRFSGSGSGTDFTLTISSLQAEDVAVYYCFQGSHVPNTFGGGTKVEIKGS

SEQ ID NO: 1431 - protein, 117 aa, Artificial Sequence
  Description of Artificial Sequence: Synthetic polypeptide
  VH of XENP024228
QIQLVQSGSELKKPGESVKVSCKASGYTFTHYGMNWVRQAPGQGLEWMGWINTYTGEPTYADGFTGRFVFSLDTSVSTAYLQISSLKAEDTAVYFCARDYYGSSPYWGQGTLVTVSS

SEQ ID NO: 1432 - protein, 114 aa, Artificial Sequence; identical to SEQ ID NO: 649
  Description of Artificial Sequence: Synthetic polypeptide
  VL of XENP024228

SEQ ID NO: 1433 - protein, 5 aa, Artificial Sequence
  Description of Artificial Sequence: Synthetic peptide
  XENP024228 vhCDR1
HYGMN

SEQ ID NO: 1434 - protein, 17 aa, Artificial Sequence
  Description of Artificial Sequence: Synthetic peptide
  XENP024228 vhCDR2
WINTYTGEPTYADGFTG

SEQ ID NO: 1435 - protein, 8 aa, Artificial Sequence
  Description of Artificial Sequence: Synthetic peptide
  XENP024228 vhCDR3
DYYGSSPY

SEQ ID NO: 1436 - protein, 16 aa, Artificial Sequence
  Description of Artificial Sequence: Synthetic peptide
  XENP024228 vlCDR1
KSSQSIVHSNGNTYLE

SEQ ID NO: 1437 - protein, 7 aa, Artificial Sequence
  Description of Artificial Sequence: Synthetic peptide
  XENP024228 vlCDR2
KVSNRFS

SEQ ID NO: 1438 - protein, 9 aa, Artificial Sequence
  Description of Artificial Sequence: Synthetic peptide
  XENP024228 vlCDR3
FQGSHVPNT

SEQ ID NO: 1439 - protein, 251 aa, Artificial Sequence
  Description of Artificial Sequence: Synthetic polypeptide
  XENP024229 1C11_H3.98_L3_scFv
QIQLVQSGSELKKPGRSVKVSCKASGYTFTHYGMNWVRQAPGQGLEWMGWINTYTGEPTYADGFTGRFVFSLDTSVSTAYLQISSLKAEDTAVYFCARDYYGSSPYWGQGTLVTVSSGKPGSGKPGSGKPGSGKPGSDVLMTQSPDSLAVSLGERATINCKSSQSIVHSNGNTYLEWYQQKPGQSPKLLIYKVSNRFSGVPDRFSGSGSGTDFTLTISSLQAEDVAVYYCFQGSHVPNTFGGGTKVEIKGS

SEQ ID NO: 1440 - protein, 117 aa, Artificial Sequence
  Description of Artificial Sequence: Synthetic polypeptide
  VH of XENP024229
QIQLVQSGSELKKPGRSVKVSCKASGYTFTHYGMNWVRQAPGQGLEWMGWINTYTGEPTYADGFTGRFVFSLDTSVSTAYLQISSLKAEDTAVYFCARDYYGSSPYWGQGTLVTVSS

SEQ ID NO: 1441 - protein, 114 aa, Artificial Sequence; identical to SEQ ID NO: 649
  Description of Artificial Sequence: Synthetic polypeptide
  VL of XENP024229

SEQ ID NO: 1442 - protein, 5 aa, Artificial Sequence
  Description of Artificial Sequence: Synthetic peptide
  XENP024229 vhCDR1
HYGMN

SEQ ID NO: 1443 - protein, 17 aa, Artificial Sequence
  Description of Artificial Sequence: Synthetic peptide
  XENP024229 vhCDR2
WINTYTGEPTYADGFTG

SEQ ID NO: 1444 - protein, 8 aa, Artificial Sequence
  Description of Artificial Sequence: Synthetic peptide
  XENP024229 vhCDR3
DYYGSSPY

SEQ ID NO: 1445 - protein, 16 aa, Artificial Sequence
  Description of Artificial Sequence: Synthetic peptide
  XENP024229 vlCDR1
KSSQSIVHSNGNTYLE

SEQ ID NO: 1446 - protein, 7 aa, Artificial Sequence
  Description of Artificial Sequence: Synthetic peptide
  XENP024229 vlCDR2
KVSNRFS

SEQ ID NO: 1447 - protein, 9 aa, Artificial Sequence
  Description of Artificial Sequence: Synthetic peptide
  XENP024229 vlCDR3
FQGSHVPNT

SEQ ID NO: 1448 - protein, 251 aa, Artificial Sequence
  Description of Artificial Sequence: Synthetic polypeptide
  XENP024230 1C11_H3.99_L3_scFv
QIQLVQSGSELKKPGATVKVSCKASGYTFTHYGMNWVRQAPGQGLEWMGWINTYTGEPTYADGFTGRFVFSLDTSVSTAYLQISSLKAEDTAVYFCARDYYGSSPYWGQGTLVTVSSGKPGSGKPGSGKPGSGKPGSDVLMTQSPDSLAVSLGERATINCKSSQSIVHSNGNTYLEWYQQKPGQSPKLLIYKVSNRFSGVPDRFSGSGSGTDFTLTISSLQAEDVAVYYCFQGSHVPNTFGGGTKVEIKGS

SEQ ID NO: 1449 - protein, 117 aa, Artificial Sequence
  Description of Artificial Sequence: Synthetic polypeptide
  VH of XENP024230
QIQLVQSGSELKKPGATVKVSCKASGYTFTHYGMNWVRQAPGQGLEWMGWINTYTGEPTYADGFTGRFVFSLDTSVSTAYLQISSLKAEDTAVYFCARDYYGSSPYWGQGTLVTVSS

SEQ ID NO: 1450 - protein, 114 aa, Artificial Sequence; identical to SEQ ID NO: 649
  Description of Artificial Sequence: Synthetic polypeptide
  VL of XENP024230

SEQ ID NO: 1451 - protein, 5 aa, Artificial Sequence
  Description of Artificial Sequence: Synthetic peptide
  XENP024230 vhCDR1
HYGMN

SEQ ID NO: 1452 - protein, 17 aa, Artificial Sequence
  Description of Artificial Sequence: Synthetic peptide
  XENP024230 vhCDR2
WINTYTGEPTYADGFTG

SEQ ID NO: 1453 - protein, 8 aa, Artificial Sequence
  Description of Artificial Sequence: Synthetic peptide
  XENP024230 vhCDR3
DYYGSSPY

SEQ ID NO: 1454 - protein, 16 aa, Artificial Sequence
  Description of Artificial Sequence: Synthetic peptide
  XENP024230 vlCDR1
KSSQSIVHSNGNTYLE

SEQ ID NO: 1455 - protein, 7 aa, Artificial Sequence
  Description of Artificial Sequence: Synthetic peptide
  XENP024230 vlCDR2
KVSNRFS

SEQ ID NO: 1456 - protein, 9 aa, Artificial Sequence
  Description of Artificial Sequence: Synthetic peptide
  XENP024230 vlCDR3
FQGSHVPNT

SEQ ID NO: 1457 - protein, 251 aa, Artificial Sequence
  Description of Artificial Sequence: Synthetic polypeptide
  XENP024231 1C11_H3.100_L3_scFv
QIQLVQSGSELKKPGASLKVSCKASGYTFTHYGMNWVRQAPGQGLEWMGWINTYTGEPTYADGFTGRFVFSLDTSVSTAYLQISSLKAEDTAVYFCARDYYGSSPYWGQGTLVTVSSGKPGSGKPGSGKPGSGKPGSDVLMTQSPDSLAVSLGERATINCKSSQSIVHSNGNTYLEWYQQKPGQSPKLLIYKVSNRFSGVPDRFSGSGSGTDFTLTISSLQAEDVAVYYCFQGSHVPNTFGGGTKVEIKGS

SEQ ID NO: 1458 - protein, 117 aa, Artificial Sequence
  Description of Artificial Sequence: Synthetic polypeptide
  VH of XENP024231
QIQLVQSGSELKKPGASLKVSCKASGYTFTHYGMNWVRQAPGQGLEWMGWINTYTGEPTYADGFTGRFVFSLDTSVSTAYLQISSLKAEDTAVYFCARDYYGSSPYWGQGTLVTVSS

SEQ ID NO: 1459 - protein, 114 aa, Artificial Sequence; identical to SEQ ID NO: 649
  Description of Artificial Sequence: Synthetic polypeptide
  VL of XENP024231

SEQ ID NO: 1460 - protein, 5 aa, Artificial Sequence
  Description of Artificial Sequence: Synthetic peptide
  XENP024231 vhCDR1
HYGMN

SEQ ID NO: 1461 - protein, 17 aa, Artificial Sequence
  Description of Artificial Sequence: Synthetic peptide
  XENP024231 vhCDR2
WINTYTGEPTYADGFTG

SEQ ID NO: 1462 - protein, 8 aa, Artificial Sequence
  Description of Artificial Sequence: Synthetic peptide
  XENP024231 vhCDR3
DYYGSSPY

SEQ ID NO: 1463 - protein, 16 aa, Artificial Sequence
  Description of Artificial Sequence: Synthetic peptide
  XENP024231 vlCDR1
KSSQSIVHSNGNTYLE

SEQ ID NO: 1464 - protein, 7 aa, Artificial Sequence
  Description of Artificial Sequence: Synthetic peptide
  XENP024231 vlCDR2
KVSNRFS

SEQ ID NO: 1465 - protein, 9 aa, Artificial Sequence
  Description of Artificial Sequence: Synthetic peptide
  XENP024231 vlCDR3
FQGSHVPNT

SEQ ID NO: 1466 - protein, 251 aa, Artificial Sequence
  Description of Artificial Sequence: Synthetic polypeptide
  XENP024232 1C11_H3.101_L3_scFv
QIQLVQSGSELKKPGASVRVSCKASGYTFTHYGMNWVRQAPGQGLEWMGWINTYTGEPTYADGFTGRFVFSLDTSVSTAYLQISSLKAEDTAVYFCARDYYGSSPYWGQGTLVTVSSGKPGSGKPGSGKPGSGKPGSDVLMTQSPDSLAVSLGERATINCKSSQSIVHSNGNTYLEWYQQKPGQSPKLLIYKVSNRFSGVPDRFSGSGSGTDFTLTISSLQAEDVAVYYCFQGSHVPNTFGGGTKVEIKGS

SEQ ID NO: 1467 - protein, 117 aa, Artificial Sequence
  Description of Artificial Sequence: Synthetic polypeptide
  VH of XENP024232
QIQLVQSGSELKKPGASVRVSCKASGYTFTHYGMNWVRQAPGQGLEWMGWINTYTGEPTYADGFTGRFVFSLDTSVSTAYLQISSLKAEDTAVYFCARDYYGSSPYWGQGTLVTVSS

SEQ ID NO: 1468 - protein, 114 aa, Artificial Sequence; identical to SEQ ID NO: 649
  Description of Artificial Sequence: Synthetic polypeptide
  VL of XENP024232

SEQ ID NO: 1469 - protein, 5 aa, Artificial Sequence
  Description of Artificial Sequence: Synthetic peptide
  XENP024232 vhCDR1
HYGMN

SEQ ID NO: 1470 - protein, 17 aa, Artificial Sequence
  Description of Artificial Sequence: Synthetic peptide
  XENP024232 vhCDR2
WINTYTGEPTYADGFTG

SEQ ID NO: 1471 - protein, 8 aa, Artificial Sequence
  Description of Artificial Sequence: Synthetic peptide
  XENP024232 vhCDR3
DYYGSSPY

SEQ ID NO: 1472 - protein, 16 aa, Artificial Sequence
  Description of Artificial Sequence: Synthetic peptide
  XENP024232 vlCDR1
KSSQSIVHSNGNTYLE

SEQ ID NO: 1473 - protein, 7 aa, Artificial Sequence
  Description of Artificial Sequence: Synthetic peptide
  XENP024232 vlCDR2
KVSNRFS

SEQ ID NO: 1474 - protein, 9 aa, Artificial Sequence
  Description of Artificial Sequence: Synthetic peptide
  XENP024232 vlCDR3
FQGSHVPNT

SEQ ID NO: 1475 - protein, 251 aa, Artificial Sequence
  Description of Artificial Sequence: Synthetic polypeptide
  XENP024233 1C11_H3.102_L3_scFv
QIQLVQSGSELKKPGASVSVSCKASGYTFTHYGMNWVRQAPGQGLEWMGWINTYTGEPTYADGFTGRFVFSLDTSVSTAYLQISSLKAEDTAVYFCARDYYGSSPYWGQGTLVTVSSGKPGSGKPGSGKPGSGKPGSDVLMTQSPDSLAVSLGERATINCKSSQSIVHSNGNTYLEWYQQKPGQSPKLLIYKVSNRFSGVPDRFSGSGSGTDFTLTISSLQAEDVAVYYCFQGSHVPNTFGGGTKVEIKGS

SEQ ID NO: 1476 - protein, 117 aa, Artificial Sequence
  Description of Artificial Sequence: Synthetic polypeptide
  VH of XENP024233
QIQLVQSGSELKKPGASVSVSCKASGYTFTHYGMNWVRQAPGQGLEWMGWINTYTGEPTYADGFTGRFVFSLDTSVSTAYLQISSLKAEDTAVYFCARDYYGSSPYWGQGTLVTVSS

SEQ ID NO: 1477 - protein, 114 aa, Artificial Sequence; identical to SEQ ID NO: 649
  Description of Artificial Sequence: Synthetic polypeptide
  VL of XENP024233

SEQ ID NO: 1478 - protein, 5 aa, Artificial Sequence
  Description of Artificial Sequence: Synthetic peptide
  XENP024233 vhCDR1
HYGMN

SEQ ID NO: 1479 - protein, 17 aa, Artificial Sequence
  Description of Artificial Sequence: Synthetic peptide
  XENP024233 vhCDR2
WINTYTGEPTYADGFTG

SEQ ID NO: 1480 - protein, 8 aa, Artificial Sequence
  Description of Artificial Sequence: Synthetic peptide
  XENP024233 vhCDR3
DYYGSSPY

SEQ ID NO: 1481 - protein, 16 aa, Artificial Sequence
  Description of Artificial Sequence: Synthetic peptide
  XENP024233 vlCDR1
KSSQSIVHSNGNTYLE

SEQ ID NO: 1482 - protein, 7 aa, Artificial Sequence
  Description of Artificial Sequence: Synthetic peptide
  XENP024233 vlCDR2
KVSNRFS

SEQ ID NO: 1483 - protein, 9 aa, Artificial Sequence
  Description of Artificial Sequence: Synthetic peptide
  XENP024233 vlCDR3
FQGSHVPNT

SEQ ID NO: 1484 - protein, 251 aa, Artificial Sequence
  Description of Artificial Sequence: Synthetic polypeptide
  XENP024234 1C11_H3.103_L3_scFv
QIQLVQSGSELKKPGASVKVTCKASGYTFTHYGMNWVRQAPGQGLEWMGWINTYTGEPTYADGFTGRFVFSLDTSVSTAYLQISSLKAEDTAVYFCARDYYGSSPYWGQGTLVTVSSGKPGSGKPGSGKPGSGKPGSDVLMTQSPDSLAVSLGERATINCKSSQSIVHSNGNTYLEWYQQKPGQSPKLLIYKVSNRFSGVPDRFSGSGSGTDFTLTISSLQAEDVAVYYCFQGSHVPNTFGGGTKVEIKGS

SEQ ID NO: 1485 - protein, 117 aa, Artificial Sequence
  Description of Artificial Sequence: Synthetic polypeptide
  VH of XENP024234
QIQLVQSGSELKKPGASVKVTCKASGYTFTHYGMNWVRQAPGQGLEWMGWINTYTGEPTYADGFTGRFVFSLDTSVSTAYLQISSLKAEDTAVYFCARDYYGSSPYWGQGTLVTVSS

SEQ ID NO: 1486 - protein, 114 aa, Artificial Sequence; identical to SEQ ID NO: 649
  Description of Artificial Sequence: Synthetic polypeptide
  VL of XENP024234

SEQ ID NO: 1487 - protein, 5 aa, Artificial Sequence
  Description of Artificial Sequence: Synthetic peptide
  XENP024234 vhCDR1
HYGMN

SEQ ID NO: 1488 - protein, 17 aa, Artificial Sequence
  Description of Artificial Sequence: Synthetic peptide
  XENP024234 vhCDR2
WINTYTGEPTYADGFTG

SEQ ID NO: 1489 - protein, 8 aa, Artificial Sequence
  Description of Artificial Sequence: Synthetic peptide
  XENP024234 vhCDR3
DYYGSSPY

SEQ ID NO: 1490 - protein, 16 aa, Artificial Sequence
  Description of Artificial Sequence: Synthetic peptide
  XENP024234 vlCDR1
KSSQSIVHSNGNTYLE

SEQ ID NO: 1491 - protein, 7 aa, Artificial Sequence
  Description of Artificial Sequence: Synthetic peptide
  XENP024234 vlCDR2
KVSNRFS

SEQ ID NO: 1492 - protein, 9 aa, Artificial Sequence
  Description of Artificial Sequence: Synthetic peptide
  XENP024234 vlCDR3
FQGSHVPNT

SEQ ID NO: 1493 - protein, 251 aa, Artificial Sequence
  Description of Artificial Sequence: Synthetic polypeptide
  XENP024235 1C11_H3.104_L3_scFv
QIQLVQSGSELKKPGASVKVSCAASGYTFTHYGMNWVRQAPGQGLEWMGWINTYTGEPTYADGFTGRFVFSLDTSVSTAYLQISSLKAEDTAVYFCARDYYGSSPYWGQGTLVTVSSGKPGSGKPGSGKPGSGKPGSDVLMTQSPDSLAVSLGERATINCKSSQSIVHSNGNTYLEWYQQKPGQSPKLLIYKVSNRFSGVPDRFSGSGSGTDFTLTISSLQAEDVAVYYCFQGSHVPNTFGGGTKVEIKGS

SEQ ID NO: 1494 - protein, 117 aa, Artificial Sequence
  Description of Artificial Sequence: Synthetic polypeptide
  VH of XENP024235
QIQLVQSGSELKKPGASVKVSCAASGYTFTHYGMNWVRQAPGQGLEWMGWINTYTGEPTYADGFTGRFVFSLDTSVSTAYLQISSLKAEDTAVYFCARDYYGSSPYWGQGTLVTVSS

SEQ ID NO: 1495 - protein, 114 aa, Artificial Sequence; identical to SEQ ID NO: 649
  Description of Artificial Sequence: Synthetic polypeptide
  VL of XENP024235

SEQ ID NO: 1496 - protein, 5 aa, Artificial Sequence
  Description of Artificial Sequence: Synthetic peptide
  XENP024235 vhCDR1
HYGMN

SEQ ID NO: 1497 - protein, 17 aa, Artificial Sequence
  Description of Artificial Sequence: Synthetic peptide
  XENP024235 vhCDR2
WINTYTGEPTYADGFTG

SEQ ID NO: 1498 - protein, 8 aa, Artificial Sequence
  Description of Artificial Sequence: Synthetic peptide
  XENP024235 vhCDR3
DYYGSSPY

SEQ ID NO: 1499 - protein, 16 aa, Artificial Sequence
  Description of Artificial Sequence: Synthetic peptide
  XENP024235 vlCDR1
KSSQSIVHSNGNTYLE

SEQ ID NO: 1500 - protein, 7 aa, Artificial Sequence
  Description of Artificial Sequence: Synthetic peptide
  XENP024235 vlCDR2
KVSNRFS

SEQ ID NO: 1501 - protein, 9 aa, Artificial Sequence
  Description of Artificial Sequence: Synthetic peptide
  XENP024235 vlCDR3
FQGSHVPNT

SEQ ID NO: 1502 - protein, 251 aa, Artificial Sequence
  Description of Artificial Sequence: Synthetic polypeptide
  XENP024236 1C11_H3.105_L3_scFv
QIQLVQSGSELKKPGASVKVSCTASGYTFTHYGMNWVRQAPGQGLEWMGWINTYTGEPTYADGFTGRFVFSLDTSVSTAYLQISSLKAEDTAVYFCARDYYGSSPYWGQGTLVTVSSGKPGSGKPGSGKPGSGKPGSDVLMTQSPDSLAVSLGERATINCKSSQSIVHSNGNTYLEWYQQKPGQSPKLLIYKVSNRFSGVPDRFSGSGSGTDFTLTISSLQAEDVAVYYCFQGSHVPNTFGGGTKVEIKGS

SEQ ID NO: 1503 - protein, 117 aa, Artificial Sequence
  Description of Artificial Sequence: Synthetic polypeptide
  VH of XENP024236
QIQLVQSGSELKKPGASVKVSCTASGYTFTHYGMNWVRQAPGQGLEWMGWINTYTGEPTYADGFTGRFVFSLDTSVSTAYLQISSLKAEDTAVYFCARDYYGSSPYWGQGTLVTVSS

SEQ ID NO: 1504 - protein, 114 aa, Artificial Sequence; identical to SEQ ID NO: 649
  Description of Artificial Sequence: Synthetic polypeptide
  VL of XENP024236

SEQ ID NO: 1505 - protein, 5 aa, Artificial Sequence
  Description of Artificial Sequence: Synthetic peptide
  XENP024236 vhCDR1
HYGMN

SEQ ID NO: 1506 - protein, 17 aa, Artificial Sequence
  Description of Artificial Sequence: Synthetic peptide
  XENP024236 vhCDR2
WINTYTGEPTYADGFTG

SEQ ID NO: 1507 - protein, 8 aa, Artificial Sequence
  Description of Artificial Sequence: Synthetic peptide
  XENP024236 vhCDR3
DYYGSSPY

SEQ ID NO: 1508 - protein, 16 aa, Artificial Sequence
  Description of Artificial Sequence: Synthetic peptide
  XENP024236 vlCDR1
KSSQSIVHSNGNTYLE

SEQ ID NO: 1509 - protein, 7 aa, Artificial Sequence
  Description of Artificial Sequence: Synthetic peptide
  XENP024236 vlCDR2
KVSNRFS

SEQ ID NO: 1510 - protein, 9 aa, Artificial Sequence
  Description of Artificial Sequence: Synthetic peptide
  XENP024236 vlCDR3
FQGSHVPNT

SEQ ID NO: 1511 - protein, 251 aa, Artificial Sequence
  Description of Artificial Sequence: Synthetic polypeptide
  XENP024237 1C11_H3.106_L3_scFv
QIQLVQSGSELKKPGASVKVSCKVSGYTFTHYGMNWVRQAPGQGLEWMGWINTYTGEPTYADGFTGRFVFSLDTSVSTAYLQISSLKAEDTAVYFCARDYYGSSPYWGQGTLVTVSSGKPGSGKPGSGKPGSGKPGSDVLMTQSPDSLAVSLGERATINCKSSQSIVHSNGNTYLEWYQQKPGQSPKLLIYKVSNRFSGVPDRFSGSGSGTDFTLTISSLQAEDVAVYYCFQGSHVPNTFGGGTKVEIKGS

SEQ ID NO: 1512 - protein, 117 aa, Artificial Sequence
  Description of Artificial Sequence: Synthetic polypeptide
  VH of XENP024237
QIQLVQSGSELKKPGASVKVSCKVSGYTFTHYGMNWVRQAPGQGLEWMGWINTYTGEPTYADGFTGRFVFSLDTSVSTAYLQISSLKAEDTAVYFCARDYYGSSPYWGQGTLVTVSS

SEQ ID NO: 1513 - protein, 114 aa, Artificial Sequence; identical to SEQ ID NO: 649
  Description of Artificial Sequence: Synthetic polypeptide
  VL of XENP024237

SEQ ID NO: 1514 - protein, 5 aa, Artificial Sequence
  Description of Artificial Sequence: Synthetic peptide
  XENP024237 vhCDR1
HYGMN

SEQ ID NO: 1515 - protein, 17 aa, Artificial Sequence
  Description of Artificial Sequence: Synthetic peptide
  XENP024237 vhCDR2
WINTYTGEPTYADGFTG

SEQ ID NO: 1516 - protein, 8 aa, Artificial Sequence
  Description of Artificial Sequence: Synthetic peptide
  XENP024237 vhCDR3
DYYGSSPY

SEQ ID NO: 1517 - protein, 16 aa, Artificial Sequence
  Description of Artificial Sequence: Synthetic peptide
  XENP024237 vlCDR1
KSSQSIVHSNGNTYLE

SEQ ID NO: 1518 - protein, 7 aa, Artificial Sequence
  Description of Artificial Sequence: Synthetic peptide
  XENP024237 vlCDR2
KVSNRFS

SEQ ID NO: 1519 - protein, 9 aa, Artificial Sequence
  Description of Artificial Sequence: Synthetic peptide
  XENP024237 vlCDR3
FQGSHVPNT

SEQ ID NO: 1520 - protein, 251 aa, Artificial Sequence
  Description of Artificial Sequence: Synthetic polypeptide
  XENP024238 1C11_H3.107_L3_scFv
QIQLVQSGSELKKPGASVKVSCKGSGYTFTHYGMNWVRQAPGQGLEWMGWINTYTGEPTYADGFTGRFVFSLDTSVSTAYLQISSLKAEDTAVYFCARDYYGSSPYWGQGTLVTVSSGKPGSGKPGSGKPGSGKPGSDVLMTQSPDSLAVSLGERATINCKSSQSIVHSNGNTYLEWYQQKPGQSPKLLIYKVSNRFSGVPDRFSGSGSGTDFTLTISSLQAEDVAVYYCFQGSHVPNTFGGGTKVEIKGS

SEQ ID NO: 1521 - protein, 117 aa, Artificial Sequence
  Description of Artificial Sequence: Synthetic polypeptide
  VH of XENP024238
QIQLVQSGSELKKPGASVKVSCKGSGYTFTHYGMNWVRQAPGQGLEWMGWINTYTGEPTYADGFTGRFVFSLDTSVSTAYLQISSLKAEDTAVYFCARDYYGSSPYWGQGTLVTVSS

SEQ ID NO: 1522 - protein, 114 aa, Artificial Sequence; identical to SEQ ID NO: 649
  Description of Artificial Sequence: Synthetic polypeptide
  VL of XENP024238

SEQ ID NO: 1523 - protein, 5 aa, Artificial Sequence
  Description of Artificial Sequence: Synthetic peptide
  XENP024238 vhCDR1
HYGMN

SEQ ID NO: 1524 - protein, 17 aa, Artificial Sequence
  Description of Artificial Sequence: Synthetic peptide
  XENP024238 vhCDR2
WINTYTGEPTYADGFTG

SEQ ID NO: 1525 - protein, 8 aa, Artificial Sequence
  Description of Artificial Sequence: Synthetic peptide
  XENP024238 vhCDR3
DYYGSSPY

SEQ ID NO: 1526 - protein, 16 aa, Artificial Sequence
  Description of Artificial Sequence: Synthetic peptide
  XENP024238 vlCDR1
KSSQSIVHSNGNTYLE

SEQ ID NO: 1527 - protein, 7 aa, Artificial Sequence
  Description of Artificial Sequence: Synthetic peptide
  XENP024238 vlCDR2
KVSNRFS

SEQ ID NO: 1528 - protein, 9 aa, Artificial Sequence
  Description of Artificial Sequence: Synthetic peptide
  XENP024238 vlCDR3
FQGSHVPNT

SEQ ID NO: 1529 - protein, 251 aa, Artificial Sequence
  Description of Artificial Sequence: Synthetic polypeptide
  XENP024239 1C11_H3.109_L3_scFv
QIQLVQSGSELKKPGASVKVSCKASGFTFTHYGMNWVRQAPGQGLEWMGWINTYTGEPTYADGFTGRFVFSLDTSVSTAYLQISSLKAEDTAVYFCARDYYGSSPYWGQGTLVTVSSGKPGSGKPGSGKPGSGKPGSDVLMTQSPDSLAVSLGERATINCKSSQSIVHSNGNTYLEWYQQKPGQSPKLLIYKVSNRFSGVPDRFSGSGSGTDFTLTISSLQAEDVAVYYCFQGSHVPNTFGGGTKVEIKGS

SEQ ID NO: 1530 - protein, 117 aa, Artificial Sequence
  Description of Artificial Sequence: Synthetic polypeptide
  VH of XENP024239
QIQLVQSGSELKKPGASVKVSCKASGFTFTHYGMNWVRQAPGQGLEWMGWINTYTGEPTYADGFTGRFVFSLDTSVSTAYLQISSLKAEDTAVYFCARDYYGSSPYWGQGTLVTVSS

SEQ ID NO: 1531 - protein, 114 aa, Artificial Sequence; identical to SEQ ID NO: 649
  Description of Artificial Sequence: Synthetic polypeptide
  VL of XENP024239

SEQ ID NO: 1532 - protein, 5 aa, Artificial Sequence
  Description of Artificial Sequence: Synthetic peptide
  XENP024239 vhCDR1
HYGMN

SEQ ID NO: 1533 - protein, 17 aa, Artificial Sequence
  Description of Artificial Sequence: Synthetic peptide
  XENP024239 vhCDR2
WINTYTGEPTYADGFTG

SEQ ID NO: 1534 - protein, 8 aa, Artificial Sequence
  Description of Artificial Sequence: Synthetic peptide
  XENP024239 vhCDR3
DYYGSSPY

SEQ ID NO: 1535 - protein, 16 aa, Artificial Sequence
  Description of Artificial Sequence: Synthetic peptide
  XENP024239 vlCDR1
KSSQSIVHSNGNTYLE

SEQ ID NO: 1536 - protein, 7 aa, Artificial Sequence
  Description of Artificial Sequence: Synthetic peptide
  XENP024239 vlCDR2
KVSNRFS

SEQ ID NO: 1537 - protein, 9 aa, Artificial Sequence
  Description of Artificial Sequence: Synthetic peptide
  XENP024239 vlCDR3
FQGSHVPNT

SEQ ID NO: 1538 - protein, 251 aa, Artificial Sequence
  Description of Artificial Sequence: Synthetic polypeptide
  XENP024240 1C11_H3.110_L3_scFv
QIQLVQSGSELKKPGASVKVSCKASGGTFTHYGMNWVRQAPGQGLEWMGWINTYTGEPTYADGFTGRFVFSLDTSVSTAYLQISSLKAEDTAVYFCARDYYGSSPYWGQGTLVTVSSGKPGSGKPGSGKPGSGKPGSDVLMTQSPDSLAVSLGERATINCKSSQSIVHSNGNTYLEWYQQKPGQSPKLLIYKVSNRFSGVPDRFSGSGSGTDFTLTISSLQAEDVAVYYCFQGSHVPNTFGGGTKVEIKGS

SEQ ID NO: 1539 - protein, 117 aa, Artificial Sequence
  Description of Artificial Sequence: Synthetic polypeptide
  VH of XENP024240
QIQLVQSGSELKKPGASVKVSCKASGGTFTHYGMNWVRQAPGQGLEWMGWINTYTGEPTYADGFTGRFVFSLDTSVSTAYLQISSLKAEDTAVYFCARDYYGSSPYWGQGTLVTVSS

SEQ ID NO: 1540 - protein, 114 aa, Artificial Sequence; identical to SEQ ID NO: 649
  Description of Artificial Sequence: Synthetic polypeptide
  VL of XENP024240

SEQ ID NO: 1541 - protein, 5 aa, Artificial Sequence
  Description of Artificial Sequence: Synthetic peptide
  XENP024240 vhCDR1
HYGMN

SEQ ID NO: 1542 - protein, 17 aa, Artificial Sequence
  Description of Artificial Sequence: Synthetic peptide
  XENP024240 vhCDR2
WINTYTGEPTYADGFTG

SEQ ID NO: 1543 - protein, 8 aa, Artificial Sequence
  Description of Artificial Sequence: Synthetic peptide
  XENP024240 vhCDR3
DYYGSSPY

SEQ ID NO: 1544 - protein, 16 aa, Artificial Sequence
  Description of Artificial Sequence: Synthetic peptide
  XENP024240 vlCDR1
KSSQSIVHSNGNTYLE

SEQ ID NO: 1545 - protein, 7 aa, Artificial Sequence
  Description of Artificial Sequence: Synthetic peptide
  XENP024240 vlCDR2
KVSNRFS

SEQ ID NO: 1546 - protein, 9 aa, Artificial Sequence
  Description of Artificial Sequence: Synthetic peptide
  XENP024240 vlCDR3
FQGSHVPNT

SEQ ID NO: 1547 - protein, 251 aa, Artificial Sequence
  Description of Artificial Sequence: Synthetic polypeptide
  XENP024241 1C11_H3.111_L3_scFv
QIQLVQSGSELKKPGASVKVSCKASGYSFTHYGMNWVRQAPGQGLEWMGWINTYTGEPTYADGFTGRFVFSLDTSVSTAYLQISSLKAEDTAVYFCARDYYGSSPYWGQGTLVTVSSGKPGSGKPGSGKPGSGKPGSDVLMTQSPDSLAVSLGERATINCKSSQSIVHSNGNTYLEWYQQKPGQSPKLLIYKVSNRFSGVPDRFSGSGSGTDFTLTISSLQAEDVAVYYCFQGSHVPNTFGGGTKVEIKGS

SEQ ID NO: 1548 - protein, 117 aa, Artificial Sequence
  Description of Artificial Sequence: Synthetic polypeptide
  VH of XENP024241
QIQLVQSGSELKKPGASVKVSCKASGYSFTHYGMNWVRQAPGQGLEWMGWINTYTGEPTYADGFTGRFVFSLDTSVSTAYLQISSLKAEDTAVYFCARDYYGSSPYWGQGTLVTVSS

SEQ ID NO: 1549 - protein, 114 aa, Artificial Sequence; identical to SEQ ID NO: 649
  Description of Artificial Sequence: Synthetic polypeptide
  VL of XENP024241

SEQ ID NO: 1550 - protein, 5 aa, Artificial Sequence
  Description of Artificial Sequence: Synthetic peptide
  XENP024241 vhCDR1
HYGMN

SEQ ID NO: 1551 - protein, 17 aa, Artificial Sequence
  Description of Artificial Sequence: Synthetic peptide
  XENP024241 vhCDR2
WINTYTGEPTYADGFTG

SEQ ID NO: 1552 - protein, 8 aa, Artificial Sequence
  Description of Artificial Sequence: Synthetic peptide
  XENP024241 vhCDR3
DYYGSSPY

SEQ ID NO: 1553 - protein, 16 aa, Artificial Sequence
  Description of Artificial Sequence: Synthetic peptide
  XENP024241 vlCDR1
KSSQSIVHSNGNTYLE

SEQ ID NO: 1554 - protein, 7 aa, Artificial Sequence
  Description of Artificial Sequence: Synthetic peptide
  XENP024241 vlCDR2
KVSNRFS

SEQ ID NO: 1555 - protein, 9 aa, Artificial Sequence
  Description of Artificial Sequence: Synthetic peptide
  XENP024241 vlCDR3
FQGSHVPNT

SEQ ID NO: 1556 - protein, 251 aa, Artificial Sequence
  Description of Artificial Sequence: Synthetic polypeptide
  XENP024242 1C11_H3.113_L3_scFv
QIQLVQSGSELKKPGASVKVSCKASGYTITHYGMNWVRQAPGQGLEWMGWINTYTGEPTYADGFTGRFVFSLDTSVSTAYLQISSLKAEDTAVYFCARDYYGSSPYWGQGTLVTVSSGKPGSGKPGSGKPGSGKPGSDVLMTQSPDSLAVSLGERATINCKSSQSIVHSNGNTYLEWYQQKPGQSPKLLIYKVSNRFSGVPDRFSGSGSGTDFTLTISSLQAEDVAVYYCFQGSHVPNTFGGGTKVEIKGS

SEQ ID NO: 1557 - protein, 117 aa, Artificial Sequence
  Description of Artificial Sequence: Synthetic polypeptide
  VH of XENP024242
QIQLVQSGSELKKPGASVKVSCKASGYTITHYGMNWVRQAPGQGLEWMGWINTYTGEPTYADGFTGRFVFSLDTSVSTAYLQISSLKAEDTAVYFCARDYYGSSPYWGQGTLVTVSS

SEQ ID NO: 1558 - protein, 114 aa, Artificial Sequence; identical to SEQ ID NO: 649
  Description of Artificial Sequence: Synthetic polypeptide
  VL of XENP024242

SEQ ID NO: 1559 - protein, 5 aa, Artificial Sequence
  Description of Artificial Sequence: Synthetic peptide
  XENP024242 vhCDR1
HYGMN

SEQ ID NO: 1560 - protein, 17 aa, Artificial Sequence
  Description of Artificial Sequence: Synthetic peptide
  XENP024242 vhCDR2
WINTYTGEPTYADGFTG

SEQ ID NO: 1561 - protein, 8 aa, Artificial Sequence
  Description of Artificial Sequence: Synthetic peptide
  XENP024242 vhCDR3
DYYGSSPY

SEQ ID NO: 1562 - protein, 16 aa, Artificial Sequence
  Description of Artificial Sequence: Synthetic peptide
  XENP024242 vlCDR1
KSSQSIVHSNGNTYLE

SEQ ID NO: 1563 - protein, 7 aa, Artificial Sequence
  Description of Artificial Sequence: Synthetic peptide
  XENP024242 vlCDR2
KVSNRFS

SEQ ID NO: 1564 - protein, 9 aa, Artificial Sequence
  Description of Artificial Sequence: Synthetic peptide
  XENP024242 vlCDR3
FQGSHVPNT

SEQ ID NO: 1565 - protein, 251 aa, Artificial Sequence
  Description of Artificial Sequence: Synthetic polypeptide
  XENP024243 1C11_H3.114_L3_scFv
QIQLVQSGSELKKPGASVKVSCKASGYTVTHYGMNWVRQAPGQGLEWMGWINTYTGEPTYADGFTGRFVFSLDTSVSTAYLQISSLKAEDTAVYFCARDYYGSSPYWGQGTLVTVSSGKPGSGKPGSGKPGSGKPGSDVLMTQSPDSLAVSLGERATINCKSSQSIVHSNGNTYLEWYQQKPGQSPKLLIYKVSNRFSGVPDRFSGSGSGTDFTLTISSLQAEDVAVYYCFQGSHVPNTFGGGTKVEIKGS

SEQ ID NO: 1566 - protein, 117 aa, Artificial Sequence
  Description of Artificial Sequence: Synthetic polypeptide
  VH of XENP024243
QIQLVQSGSELKKPGASVKVSCKASGYTVTHYGMNWVRQAPGQGLEWMGWINTYTGEPTYADGFTGRFVFSLDTSVSTAYLQISSLKAEDTAVYFCARDYYGSSPYWGQGTLVTVSS

SEQ ID NO: 1567 - protein, 114 aa, Artificial Sequence; identical to SEQ ID NO: 649
  Description of Artificial Sequence: Synthetic polypeptide
  VL of XENP024243

SEQ ID NO: 1568 - protein, 5 aa, Artificial Sequence
  Description of Artificial Sequence: Synthetic peptide
  XENP024243 vhCDR1
HYGMN

SEQ ID NO: 1569 - protein, 17 aa, Artificial Sequence
  Description of Artificial Sequence: Synthetic peptide
  XENP024243 vhCDR2
WINTYTGEPTYADGFTG

SEQ ID NO: 1570 - protein, 8 aa, Artificial Sequence
  Description of Artificial Sequence: Synthetic peptide
  XENP024243 vhCDR3
DYYGSSPY

SEQ ID NO: 1571 - protein, 16 aa, Artificial Sequence
  Description of Artificial Sequence: Synthetic peptide
  XENP024243 vlCDR1
KSSQSIVHSNGNTYLE

SEQ ID NO: 1572 - protein, 7 aa, Artificial Sequence
  Description of Artificial Sequence: Synthetic peptide
  XENP024243 vlCDR2
KVSNRFS

SEQ ID NO: 1573 - protein, 9 aa, Artificial Sequence
  Description of Artificial Sequence: Synthetic peptide
  XENP024243 vlCDR3
FQGSHVPNT

SEQ ID NO: 1574 - protein, 251 aa, Artificial Sequence
  Description of Artificial Sequence: Synthetic polypeptide
  XENP024244 1C11_H3.115_L3_scFv
QIQLVQSGSELKKPGASVKVSCKASGYTFSHYGMNWVRQAPGQGLEWMGWINTYTGEPTYADGFTGRFVFSLDTSVSTAYLQISSLKAEDTAVYFCARDYYGSSPYWGQGTLVTVSSGKPGSGKPGSGKPGSGKPGSDVLMTQSPDSLAVSLGERATINCKSSQSIVHSNGNTYLEWYQQKPGQSPKLLIYKVSNRFSGVPDRFSGSGSGTDFTLTISSLQAEDVAVYYCFQGSHVPNTFGGGTKVEIKGS

SEQ ID NO: 1575 - protein, 117 aa, Artificial Sequence
  Description of Artificial Sequence: Synthetic polypeptide
  VH of XENP024244
QIQLVQSGSELKKPGASVKVSCKASGYTFSHYGMNWVRQAPGQGLEWMGWINTYTGEPTYADGFTGRFVFSLDTSVSTAYLQISSLKAEDTAVYFCARDYYGSSPYWGQGTLVTVSS

SEQ ID NO: 1576 - protein, 114 aa, Artificial Sequence; identical to SEQ ID NO: 649
  Description of Artificial Sequence: Synthetic polypeptide
  VL of XENP024244

SEQ ID NO: 1577 - protein, 5 aa, Artificial Sequence
  Description of Artificial Sequence: Synthetic peptide
  XENP024244 vhCDR1
HYGMN

SEQ ID NO: 1578 - protein, 17 aa, Artificial Sequence
  Description of Artificial Sequence: Synthetic peptide
  XENP024244 vhCDR2
WINTYTGEPTYADGFTG

SEQ ID NO: 1579 - protein, 8 aa, Artificial Sequence
  Description of Artificial Sequence: Synthetic peptide
  XENP024244 vhCDR3
DYYGSSPY

SEQ ID NO: 1580 - protein, 16 aa, Artificial Sequence
  Description of Artificial Sequence: Synthetic peptide
  XENP024244 vlCDR1
KSSQSIVHSNGNTYLE

SEQ ID NO: 1581 - protein, 7 aa, Artificial Sequence
  Description of Artificial Sequence: Synthetic peptide
  XENP024244 vlCDR2
KVSNRFS

SEQ ID NO: 1582 - protein, 9 aa, Artificial Sequence
  Description of Artificial Sequence: Synthetic peptide
  XENP024244 vlCDR3
FQGSHVPNT

SEQ ID NO: 1583 - protein, 251 aa, Artificial Sequence
  Description of Artificial Sequence: Synthetic polypeptide
  XENP024245 1C11_H3.116_L3_scFv
QIQLVQSGSELKKPGASVKVSCKASGYTFDHYGMNWVRQAPGQGLEWMGWINTYTGEPTYADGFTGRFVFSLDTSVSTAYLQISSLKAEDTAVYFCARDYYGSSPYWGQGTLVTVSSGKPGSGKPGSGKPGSGKPGSDVLMTQSPDSLAVSLGERATINCKSSQSIVHSNGNTYLEWYQQKPGQSPKLLIYKVSNRFSGVPDRFSGSGSGTDFTLTISSLQAEDVAVYYCFQGSHVPNTFGGGTKVEIKGS

SEQ ID NO: 1584 - protein, 117 aa, Artificial Sequence
  Description of Artificial Sequence: Synthetic polypeptide
  VH of XENP024245
QIQLVQSGSELKKPGASVKVSCKASGYTFDHYGMNWVRQAPGQGLEWMGWINTYTGEPTYADGFTGRFVFSLDTSVSTAYLQISSLKAEDTAVYFCARDYYGSSPYWGQGTLVTVSS

SEQ ID NO: 1585 - protein, 114 aa, Artificial Sequence; identical to SEQ ID NO: 649
  Description of Artificial Sequence: Synthetic polypeptide
  VL of XENP024245

SEQ ID NO: 1586 - protein, 5 aa, Artificial Sequence
  Description of Artificial Sequence: Synthetic peptide
  XENP024245 vhCDR1
HYGMN

SEQ ID NO: 1587 - protein, 17 aa, Artificial Sequence
  Description of Artificial Sequence: Synthetic peptide
  XENP024245 vhCDR2
WINTYTGEPTYADGFTG

SEQ ID NO: 1588 - protein, 8 aa, Artificial Sequence
  Description of Artificial Sequence: Synthetic peptide
  XENP024245 vhCDR3
DYYGSSPY

SEQ ID NO: 1589 - protein, 16 aa, Artificial Sequence
  Description of Artificial Sequence: Synthetic peptide
  XENP024245 vlCDR1
KSSQSIVHSNGNTYLE

SEQ ID NO: 1590 - protein, 7 aa, Artificial Sequence
  Description of Artificial Sequence: Synthetic peptide
  XENP024245 vlCDR2
KVSNRFS

SEQ ID NO: 1591 - protein, 9 aa, Artificial Sequence
  Description of Artificial Sequence: Synthetic peptide
  XENP024245 vlCDR3
FQGSHVPNT

SEQ ID NO: 1592 - protein, 251 aa, Artificial Sequence
  Description of Artificial Sequence: Synthetic polypeptide
  XENP024246 1C11_H3.117_L3_scFv
QIQLVQSGSELKKPGASVKVSCKASGYTFGHYGMNWVRQAPGQGLEWMGWINTYTGEPTYADGFTGRFVFSLDTSVSTAYLQISSLKAEDTAVYFCARDYYGSSPYWGQGTLVTVSSGKPGSGKPGSGKPGSGKPGSDVLMTQSPDSLAVSLGERATINCKSSQSIVHSNGNTYLEWYQQKPGQSPKLLIYKVSNRFSGVPDRFSGSGSGTDFTLTISSLQAEDVAVYYCFQGSHVPNTFGGGTKVEIKGS

SEQ ID NO: 1593 - protein, 117 aa, Artificial Sequence
  Description of Artificial Sequence: Synthetic polypeptide
  VH of XENP024246
QIQLVQSGSELKKPGASVKVSCKASGYTFGHYGMNWVRQAPGQGLEWMGWINTYTGEPTYADGFTGRFVFSLDTSVSTAYLQISSLKAEDTAVYFCARDYYGSSPYWGQGTLVTVSS

SEQ ID NO: 1594 - protein, 114 aa, Artificial Sequence; identical to SEQ ID NO: 649
  Description of Artificial Sequence: Synthetic polypeptide
  VL of XENP024246

SEQ ID NO: 1595 - protein, 5 aa, Artificial Sequence
  Description of Artificial Sequence: Synthetic peptide
  XENP024246 vhCDR1
HYGMN

SEQ ID NO: 1596 - protein, 17 aa, Artificial Sequence
  Description of Artificial Sequence: Synthetic peptide
  XENP024246 vhCDR2
WINTYTGEPTYADGFTG

SEQ ID NO: 1597 - protein, 8 aa, Artificial Sequence
  Description of Artificial Sequence: Synthetic peptide
  XENP024246 vhCDR3
DYYGSSPY

SEQ ID NO: 1598 - protein, 16 aa, Artificial Sequence
  Description of Artificial Sequence: Synthetic peptide
  XENP024246 vlCDR1
KSSQSIVHSNGNTYLE

SEQ ID NO: 1599 - protein, 7 aa, Artificial Sequence
  Description of Artificial Sequence: Synthetic peptide
  XENP024246 vlCDR2
KVSNRFS

SEQ ID NO: 1600 - protein, 9 aa, Artificial Sequence
  Description of Artificial Sequence: Synthetic peptide
  XENP024246 vlCDR3
FQGSHVPNT

SEQ ID NO: 1601 - protein, 251 aa, Artificial Sequence
  Description of Artificial Sequence: Synthetic polypeptide
  XENP024247 1C11_H3.120_L3_scFv
QIQLVQSGSELKKPGASVKVSCKASGYTFTHYGINWVRQAPGQGLEWMGWINTYTGEPTYADGFTGRFVFSLDTSVSTAYLQISSLKAEDTAVYFCARDYYGSSPYWGQGTLVTVSSGKPGSGKPGSGKPGSGKPGSDVLMTQSPDSLAVSLGERATINCKSSQSIVHSNGNTYLEWYQQKPGQSPKLLIYKVSNRFSGVPDRFSGSGSGTDFTLTISSLQAEDVAVYYCFQGSHVPNTFGGGTKVEIKGS

SEQ ID NO: 1602 - protein, 117 aa, Artificial Sequence
  Description of Artificial Sequence: Synthetic polypeptide
  VH of XENP024247
QIQLVQSGSELKKPGASVKVSCKASGYTFTHYGINWVRQAPGQGLEWMGWINTYTGEPTYADGFTGRFVFSLDTSVSTAYLQISSLKAEDTAVYFCARDYYGSSPYWGQGTLVTVSS

SEQ ID NO: 1603 - protein, 114 aa, Artificial Sequence; identical to SEQ ID NO: 649
  Description of Artificial Sequence: Synthetic polypeptide
  VL of XENP024247

SEQ ID NO: 1604 - protein, 5 aa, Artificial Sequence
  Description of Artificial Sequence: Synthetic peptide
  XENP024247 vhCDR1
HYGIN

SEQ ID NO: 1605 - protein, 17 aa, Artificial Sequence
  Description of Artificial Sequence: Synthetic peptide
  XENP024247 vhCDR2
WINTYTGEPTYADGFTG

SEQ ID NO: 1606 - protein, 8 aa, Artificial Sequence
  Description of Artificial Sequence: Synthetic peptide
  XENP024247 vhCDR3
DYYGSSPY

SEQ ID NO: 1607 - protein, 16 aa, Artificial Sequence
  Description of Artificial Sequence: Synthetic peptide
  XENP024247 vlCDR1
KSSQSIVHSNGNTYLE

SEQ ID NO: 1608 - protein, 7 aa, Artificial Sequence
  Description of Artificial Sequence: Synthetic peptide
  XENP024247 vlCDR2
KVSNRFS

SEQ ID NO: 1609 - protein, 9 aa, Artificial Sequence
  Description of Artificial Sequence: Synthetic peptide
  XENP024247 vlCDR3
FQGSHVPNT

SEQ ID NO: 1610 - protein, 251 aa, Artificial Sequence
  Description of Artificial Sequence: Synthetic polypeptide
  XENP024248 1C11_H3.121_L3_scFv
QIQLVQSGSELKKPGASVKVSCKASGYTFTHYGVNWVRQAPGQGLEWMGWINTYTGEPTYADGFTGRFVFSLDTSVSTAYLQISSLKAEDTAVYFCARDYYGSSPYWGQGTLVTVSSGKPGSGKPGSGKPGSGKPGSDVLMTQSPDSLAVSLGERATINCKSSQSIVHSNGNTYLEWYQQKPGQSPKLLIYKVSNRFSGVPDRFSGSGSGTDFTLTISSLQAEDVAVYYCFQGSHVPNTFGGGTKVEIKGS

SEQ ID NO: 1611 - protein, 117 aa, Artificial Sequence
  Description of Artificial Sequence: Synthetic polypeptide
  VH of XENP024248
QIQLVQSGSELKKPGASVKVSCKASGYTFTHYGVNWVRQAPGQGLEWMGWINTYTGEPTYADGFTGRFVFSLDTSVSTAYLQISSLKAEDTAVYFCARDYYGSSPYWGQGTLVTVSS

SEQ ID NO: 1612 - protein, 114 aa, Artificial Sequence; identical to SEQ ID NO: 649
  Description of Artificial Sequence: Synthetic polypeptide
  VL of XENP024248

SEQ ID NO: 1613 - protein, 5 aa, Artificial Sequence
  Description of Artificial Sequence: Synthetic peptide
  XENP024248 vhCDR1
HYGVN

SEQ ID NO: 1614 - protein, 17 aa, Artificial Sequence
  Description of Artificial Sequence: Synthetic peptide
  XENP024248 vhCDR2
WINTYTGEPTYADGFTG

SEQ ID NO: 1615 - protein, 8 aa, Artificial Sequence
  Description of Artificial Sequence: Synthetic peptide
  XENP024248 vhCDR3
DYYGSSPY

SEQ ID NO: 1616 - protein, 16 aa, Artificial Sequence
  Description of Artificial Sequence: Synthetic peptide
  XENP024248 vlCDR1
KSSQSIVHSNGNTYLE

SEQ ID NO: 1617 - protein, 7 aa, Artificial Sequence
  Description of Artificial Sequence: Synthetic peptide
  XENP024248 vlCDR2
KVSNRFS

SEQ ID NO: 1618 - protein, 9 aa, Artificial Sequence
  Description of Artificial Sequence: Synthetic peptide
  XENP024248 vlCDR3
FQGSHVPNT

SEQ ID NO: 1619 - protein, 251 aa, Artificial Sequence
  Description of Artificial Sequence: Synthetic polypeptide
  XENP024249 1C11_H3.123_L3_scFv
QIQLVQSGSELKKPGASVKVSCKASGYTFTHYGMNWIRQAPGQGLEWMGWINTYTGEPTYADGFTGRFVFSLDTSVSTAYLQISSLKAEDTAVYFCARDYYGSSPYWGQGTLVTVSSGKPGSGKPGSGKPGSGKPGSDVLMTQSPDSLAVSLGERATINCKSSQSIVHSNGNTYLEWYQQKPGQSPKLLIYKVSNRFSGVPDRFSGSGSGTDFTLTISSLQAEDVAVYYCFQGSHVPNTFGGGTKVEIKGS

SEQ ID NO: 1620 - protein, 117 aa, Artificial Sequence
  Description of Artificial Sequence: Synthetic polypeptide
  VH of XENP024249
QIQLVQSGSELKKPGASVKVSCKASGYTFTHYGMNWIRQAPGQGLEWMGWINTYTGEPTYADGFTGRFVFSLDTSVSTAYLQISSLKAEDTAVYFCARDYYGSSPYWGQGTLVTVSS

SEQ ID NO: 1621 - protein, 114 aa, Artificial Sequence; identical to SEQ ID NO: 649
  Description of Artificial Sequence: Synthetic polypeptide
  VL of XENP024249

SEQ ID NO: 1622 - protein, 5 aa, Artificial Sequence
  Description of Artificial Sequence: Synthetic peptide
  XENP024249 vhCDR1
HYGMN

SEQ ID NO: 1623 - protein, 17 aa, Artificial Sequence
  Description of Artificial Sequence: Synthetic peptide
  XENP024249 vhCDR2
WINTYTGEPTYADGFTG

SEQ ID NO: 1624 - protein, 8 aa, Artificial Sequence
  Description of Artificial Sequence: Synthetic peptide
  XENP024249 vhCDR3
DYYGSSPY

SEQ ID NO: 1625 - protein, 16 aa, Artificial Sequence
  Description of Artificial Sequence: Synthetic peptide
  XENP024249 vlCDR1
KSSQSIVHSNGNTYLE

SEQ ID NO: 1626 - protein, 7 aa, Artificial Sequence
  Description of Artificial Sequence: Synthetic peptide
  XENP024249 vlCDR2
KVSNRFS

SEQ ID NO: 1627 - protein, 9 aa, Artificial Sequence
  Description of Artificial Sequence: Synthetic peptide
  XENP024249 vlCDR3
FQGSHVPNT

SEQ ID NO: 1628 - protein, 251 aa, Artificial Sequence
  Description of Artificial Sequence: Synthetic polypeptide
  XENP024250 1C11_H3.125_L3_scFv
QIQLVQSGSELKKPGASVKVSCKASGYTFTHYGMNWVRQPPGQGLEWMGWINTYTGEPTYADGFTGRFVFSLDTSVSTAYLQISSLKAEDTAVYFCARDYYGSSPYWGQGTLVTVSSGKPGSGKPGSGKPGSGKPGSDVLMTQSPDSLAVSLGERATINCKSSQSIVHSNGNTYLEWYQQKPGQSPKLLIYKVSNRFSGVPDRFSGSGSGTDFTLTISSLQAEDVAVYYCFQGSHVPNTFGGGTKVEIKGS

SEQ ID NO: 1629 - protein, 117 aa, Artificial Sequence
  Description of Artificial Sequence: Synthetic polypeptide
  VH of XENP024250
QIQLVQSGSELKKPGASVKVSCKASGYTFTHYGMNWVRQPPGQGLEWMGWINTYTGEPTYADGFTGRFVFSLDTSVSTAYLQISSLKAEDTAVYFCARDYYGSSPYWGQGTLVTVSS

SEQ ID NO: 1630 - protein, 114 aa, Artificial Sequence; identical to SEQ ID NO: 649
  Description of Artificial Sequence: Synthetic polypeptide
  VL of XENP024250

SEQ ID NO: 1631 - protein, 5 aa, Artificial Sequence
  Description of Artificial Sequence: Synthetic peptide
  XENP024250 vhCDR1
HYGMN

SEQ ID NO: 1632 - protein, 17 aa, Artificial Sequence
  Description of Artificial Sequence: Synthetic peptide
  XENP024250 vhCDR2
WINTYTGEPTYADGFTG

SEQ ID NO: 1633 - protein, 8 aa, Artificial Sequence
  Description of Artificial Sequence: Synthetic peptide
  XENP024250 vhCDR3
DYYGSSPY

SEQ ID NO: 1634 - protein, 16 aa, Artificial Sequence
  Description of Artificial Sequence: Synthetic peptide
  XENP024250 vlCDR1
KSSQSIVHSNGNTYLE

SEQ ID NO: 1635 - protein, 7 aa, Artificial Sequence
  Description of Artificial Sequence: Synthetic peptide
  XENP024250 vlCDR2
KVSNRFS

SEQ ID NO: 1636 - protein, 9 aa, Artificial Sequence
  Description of Artificial Sequence: Synthetic peptide
  XENP024250 vlCDR3
FQGSHVPNT

SEQ ID NO: 1637 - protein, 251 aa, Artificial Sequence
  Description of Artificial Sequence: Synthetic polypeptide
  XENP024251 1C11_H3.126_L3_scFv
QIQLVQSGSELKKPGASVKVSCKASGYTFTHYGMNWVRQATGQGLEWMGWINTYTGEPTYADGFTGRFVFSLDTSVSTAYLQISSLKAEDTAVYFCARDYYGSSPYWGQGTLVTVSSGKPGSGKPGSGKPGSGKPGSDVLMTQSPDSLAVSLGERATINCKSSQSIVHSNGNTYLEWYQQKPGQSPKLLIYKVSNRFSGVPDRFSGSGSGTDFTLTISSLQAEDVAVYYCFQGSHVPNTFGGGTKVEIKGS

SEQ ID NO: 1638 - protein, 117 aa, Artificial Sequence
  Description of Artificial Sequence: Synthetic polypeptide
  VH of XENP024251
QIQLVQSGSELKKPGASVKVSCKASGYTFTHYGMNWVRQATGQGLEWMGWINTYTGEPTYADGFTGRFVFSLDTSVSTAYLQISSLKAEDTAVYFCARDYYGSSPYWGQGTLVTVSS

SEQ ID NO: 1639 - protein, 114 aa, Artificial Sequence; identical to SEQ ID NO: 649
  Description of Artificial Sequence: Synthetic polypeptide
  VL of XENP024251

SEQ ID NO: 1640 - protein, 5 aa, Artificial Sequence
  Description of Artificial Sequence: Synthetic peptide
  XENP024251 vhCDR1
HYGMN

SEQ ID NO: 1641 - protein, 17 aa, Artificial Sequence
  Description of Artificial Sequence: Synthetic peptide
  XENP024251 vhCDR2
WINTYTGEPTYADGFTG

SEQ ID NO: 1642 - protein, 8 aa, Artificial Sequence
  Description of Artificial Sequence: Synthetic peptide
  XENP024251 vhCDR3
DYYGSSPY

SEQ ID NO: 1643 - protein, 16 aa, Artificial Sequence
  Description of Artificial Sequence: Synthetic peptide
  XENP024251 vlCDR1
KSSQSIVHSNGNTYLE

SEQ ID NO: 1644 - protein, 7 aa, Artificial Sequence
  Description of Artificial Sequence: Synthetic peptide
  XENP024251 vlCDR2
KVSNRFS

SEQ ID NO: 1645 - protein, 9 aa, Artificial Sequence
  Description of Artificial Sequence: Synthetic peptide
  XENP024251 vlCDR3
FQGSHVPNT

SEQ ID NO: 1646 - protein, 251 aa, Artificial Sequence
  Description of Artificial Sequence: Synthetic polypeptide
  XENP024252 1C11_H3.127_L3_scFv
QIQLVQSGSELKKPGASVKVSCKASGYTFTHYGMNWVRQAPGQALEWMGWINTYTGEPTYADGFTGRFVFSLDTSVSTAYLQISSLKAEDTAVYFCARDYYGSSPYWGQGTLVTVSSGKPGSGKPGSGKPGSGKPGSDVLMTQSPDSLAVSLGERATINCKSSQSIVHSNGNTYLEWYQQKPGQSPKLLIYKVSNRFSGVPDRFSGSGSGTDFTLTISSLQAEDVAVYYCFQGSHVPNTFGGGTKVEIKGS

SEQ ID NO: 1647 - protein, 117 aa, Artificial Sequence
  Description of Artificial Sequence: Synthetic polypeptide
  VH of XENP024252
QIQLVQSGSELKKPGASVKVSCKASGYTFTHYGMNWVRQAPGQALEWMGWINTYTGEPTYADGFTGRFVFSLDTSVSTAYLQISSLKAEDTAVYFCARDYYGSSPYWGQGTLVTVSS

SEQ ID NO: 1648 - protein, 114 aa, Artificial Sequence; identical to SEQ ID NO: 649
  Description of Artificial Sequence: Synthetic polypeptide
  VL of XENP024252

SEQ ID NO: 1649 - protein, 5 aa, Artificial Sequence
  Description of Artificial Sequence: Synthetic peptide
  XENP024252 vhCDR1
HYGMN

SEQ ID NO: 1650 - protein, 17 aa, Artificial Sequence
  Description of Artificial Sequence: Synthetic peptide
  XENP024252 vhCDR2
WINTYTGEPTYADGFTG

SEQ ID NO: 1651 - protein, 8 aa, Artificial Sequence
  Description of Artificial Sequence: Synthetic peptide
  XENP024252 vhCDR3
DYYGSSPY

SEQ ID NO: 1652 - protein, 16 aa, Artificial Sequence
  Description of Artificial Sequence: Synthetic peptide
  XENP024252 vlCDR1
KSSQSIVHSNGNTYLE

SEQ ID NO: 1653 - protein, 7 aa, Artificial Sequence
  Description of Artificial Sequence: Synthetic peptide
  XENP024252 vlCDR2
KVSNRFS

SEQ ID NO: 1654 - protein, 9 aa, Artificial Sequence
  Description of Artificial Sequence: Synthetic peptide
  XENP024252 vlCDR3
FQGSHVPNT

SEQ ID NO: 1655 - protein, 251 aa, Artificial Sequence
  Description of Artificial Sequence: Synthetic polypeptide
  XENP024253 1C11_H3.128_L3_scFv
QIQLVQSGSELKKPGASVKVSCKASGYTFTHYGMNWVRQAPGQGLEWVGWINTYTGEPTYADGFTGRFVFSLDTSVSTAYLQISSLKAEDTAVYFCARDYYGSSPYWGQGTLVTVSSGKPGSGKPGSGKPGSGKPGSDVLMTQSPDSLAVSLGERATINCKSSQSIVHSNGNTYLEWYQQKPGQSPKLLIYKVSNRFSGVPDRFSGSGSGTDFTLTISSLQAEDVAVYYCFQGSHVPNTFGGGTKVEIKGS

SEQ ID NO: 1656 - protein, 117 aa, Artificial Sequence
  Description of Artificial Sequence: Synthetic polypeptide
  VH of XENP024253
QIQLVQSGSELKKPGASVKVSCKASGYTFTHYGMNWVRQAPGQGLEWVGWINTYTGEPTYADGFTGRFVFSLDTSVSTAYLQISSLKAEDTAVYFCARDYYGSSPYWGQGTLVTVSS

SEQ ID NO: 1657 - protein, 114 aa, Artificial Sequence; identical to SEQ ID NO: 649
  Description of Artificial Sequence: Synthetic polypeptide
  VL of XENP024253

SEQ ID NO: 1658 - protein, 5 aa, Artificial Sequence
  Description of Artificial Sequence: Synthetic peptide
  XENP024253 vhCDR1
HYGMN

SEQ ID NO: 1659 - protein, 17 aa, Artificial Sequence
  Description of Artificial Sequence: Synthetic peptide
  XENP024253 vhCDR2
WINTYTGEPTYADGFTG

SEQ ID NO: 1660 - protein, 8 aa, Artificial Sequence
  Description of Artificial Sequence: Synthetic peptide
  XENP024253 vhCDR3
DYYGSSPY

SEQ ID NO: 1661 - protein, 16 aa, Artificial Sequence
  Description of Artificial Sequence: Synthetic peptide
  XENP024253 vlCDR1
KSSQSIVHSNGNTYLE

SEQ ID NO: 1662 - protein, 7 aa, Artificial Sequence
  Description of Artificial Sequence: Synthetic peptide
  XENP024253 vlCDR2
KVSNRFS

SEQ ID NO: 1663 - protein, 9 aa, Artificial Sequence
  Description of Artificial Sequence: Synthetic peptide
  XENP024253 vlCDR3
FQGSHVPNT

SEQ ID NO: 1664 - protein, 251 aa, Artificial Sequence
  Description of Artificial Sequence: Synthetic polypeptide
  XENP024254 1C11_H3.129_L3_scFv
QIQLVQSGSELKKPGASVKVSCKASGYTFTHYGMNWVRQAPGQGLEWIGWINTYTGEPTYADGFTGRFVFSLDTSVSTAYLQISSLKAEDTAVYFCARDYYGSSPYWGQGTLVTVSSGKPGSGKPGSGKPGSGKPGSDVLMTQSPDSLAVSLGERATINCKSSQSIVHSNGNTYLEWYQQKPGQSPKLLIYKVSNRFSGVPDRFSGSGSGTDFTLTISSLQAEDVAVYYCFQGSHVPNTFGGGTKVEIKGS

SEQ ID NO: 1665 - protein, 117 aa, Artificial Sequence
  Description of Artificial Sequence: Synthetic polypeptide
  VH of XENP024254
QIQLVQSGSELKKPGASVKVSCKASGYTFTHYGMNWVRQAPGQGLEWIGWINTYTGEPTYADGFTGRFVFSLDTSVSTAYLQISSLKAEDTAVYFCARDYYGSSPYWGQGTLVTVSS

SEQ ID NO: 1666 - protein, 114 aa, Artificial Sequence; identical to SEQ ID NO: 649
  Description of Artificial Sequence: Synthetic polypeptide
  VL of XENP024254

SEQ ID NO: 1667 - protein, 5 aa, Artificial Sequence
  Description of Artificial Sequence: Synthetic peptide
  XENP024254 vhCDR1
HYGMN

SEQ ID NO: 1668 - protein, 17 aa, Artificial Sequence
  Description of Artificial Sequence: Synthetic peptide
  XENP024254 vhCDR2
WINTYTGEPTYADGFTG

SEQ ID NO: 1669 - protein, 8 aa, Artificial Sequence
  Description of Artificial Sequence: Synthetic peptide
  XENP024254 vhCDR3
DYYGSSPY

SEQ ID NO: 1670 - protein, 16 aa, Artificial Sequence
  Description of Artificial Sequence: Synthetic peptide
  XENP024254 vlCDR1
KSSQSIVHSNGNTYLE

SEQ ID NO: 1671 - protein, 7 aa, Artificial Sequence
  Description of Artificial Sequence: Synthetic peptide
  XENP024254 vlCDR2
KVSNRFS

SEQ ID NO: 1672 - protein, 9 aa, Artificial Sequence
  Description of Artificial Sequence: Synthetic peptide
  XENP024254 vlCDR3
FQGSHVPNT

SEQ ID NO: 1673 - protein, 251 aa, Artificial Sequence
  Description of Artificial Sequence: Synthetic polypeptide
  XENP024255 1C11_H3.130_L3_scFv
QIQLVQSGSELKKPGASVKVSCKASGYTFTHYGMNWVRQAPGQGLEWMSWINTYTGEPTYADGFTGRFVFSLDTSVSTAYLQISSLKAEDTAVYFCARDYYGSSPYWGQGTLVTVSSGKPGSGKPGSGKPGSGKPGSDVLMTQSPDSLAVSLGERATINCKSSQSIVHSNGNTYLEWYQQKPGQSPKLLIYKVSNRFSGVPDRFSGSGSGTDFTLTISSLQAEDVAVYYCFQGSHVPNTFGGGTKVEIKGS

SEQ ID NO: 1674 - protein, 117 aa, Artificial Sequence
  Description of Artificial Sequence: Synthetic polypeptide
  VH of XENP024255
QIQLVQSGSELKKPGASVKVSCKASGYTFTHYGMNWVRQAPGQGLEWMSWINTYTGEPTYADGFTGRFVFSLDTSVSTAYLQISSLKAEDTAVYFCARDYYGSSPYWGQGTLVTVSS

SEQ ID NO: 1675 - protein, 114 aa, Artificial Sequence; identical to SEQ ID NO: 649
  Description of Artificial Sequence: Synthetic polypeptide
  VL of XENP024255

SEQ ID NO: 1676 - protein, 5 aa, Artificial Sequence
  Description of Artificial Sequence: Synthetic peptide
  XENP024255 vhCDR1
HYGMN

SEQ ID NO: 1677 - protein, 17 aa, Artificial Sequence
  Description of Artificial Sequence: Synthetic peptide
  XENP024255 vhCDR2
WINTYTGEPTYADGFTG

SEQ ID NO: 1678 - protein, 8 aa, Artificial Sequence
  Description of Artificial Sequence: Synthetic peptide
  XENP024255 vhCDR3
DYYGSSPY

SEQ ID NO: 1679 - protein, 16 aa, Artificial Sequence
  Description of Artificial Sequence: Synthetic peptide
  XENP024255 vlCDR1
KSSQSIVHSNGNTYLE

SEQ ID NO: 1680 - protein, 7 aa, Artificial Sequence
  Description of Artificial Sequence: Synthetic peptide
  XENP024255 vlCDR2
KVSNRFS

SEQ ID NO: 1681 - protein, 9 aa, Artificial Sequence
  Description of Artificial Sequence: Synthetic peptide
  XENP024255 vlCDR3
FQGSHVPNT

SEQ ID NO: 1682 - protein, 251 aa, Artificial Sequence
  Description of Artificial Sequence: Synthetic polypeptide
  XENP024256 1C11_H3.134_L3_scFv
QIQLVQSGSELKKPGASVKVSCKASGYTFTHYGMNWVRQAPGQGLEWMGWINTKTGEPTYADGFTGRFVFSLDTSVSTAYLQISSLKAEDTAVYFCARDYYGSSPYWGQGTLVTVSSGKPGSGKPGSGKPGSGKPGSDVLMTQSPDSLAVSLGERATINCKSSQSIVHSNGNTYLEWYQQKPGQSPKLLIYKVSNRFSGVPDRFSGSGSGTDFTLTISSLQAEDVAVYYCFQGSHVPNTFGGGTKVEIKGS

SEQ ID NO: 1683 - protein, 117 aa, Artificial Sequence
  Description of Artificial Sequence: Synthetic polypeptide
  VH of XENP024256
QIQLVQSGSELKKPGASVKVSCKASGYTFTHYGMNWVRQAPGQGLEWMGWINTKTGEPTYADGFTGRFVFSLDTSVSTAYLQISSLKAEDTAVYFCARDYYGSSPYWGQGTLVTVSS

SEQ ID NO: 1684 - protein, 114 aa, Artificial Sequence; identical to SEQ ID NO: 649
  Description of Artificial Sequence: Synthetic polypeptide
  VL of XENP024256

SEQ ID NO: 1685 - protein, 5 aa, Artificial Sequence
  Description of Artificial Sequence: Synthetic peptide
  XENP024256 vhCDR1
HYGMN

SEQ ID NO: 1686 - protein, 17 aa, Artificial Sequence
  Description of Artificial Sequence: Synthetic peptide
  XENP024256 vhCDR2
WINTKTGEPTYADGFTG

SEQ ID NO: 1687 - protein, 8 aa, Artificial Sequence
  Description of Artificial Sequence: Synthetic peptide
  XENP024256 vhCDR3
DYYGSSPY

SEQ ID NO: 1688 - protein, 16 aa, Artificial Sequence
  Description of Artificial Sequence: Synthetic peptide
  XENP024256 vlCDR1
KSSQSIVHSNGNTYLE

SEQ ID NO: 1689 - protein, 7 aa, Artificial Sequence
  Description of Artificial Sequence: Synthetic peptide
  XENP024256 vlCDR2
KVSNRFS

SEQ ID NO: 1690 - protein, 9 aa, Artificial Sequence
  Description of Artificial Sequence: Synthetic peptide
  XENP024256 vlCDR3
FQGSHVPNT

SEQ ID NO: 1691 - protein, 251 aa, Artificial Sequence
  Description of Artificial Sequence: Synthetic polypeptide
  XENP024257 1C11_H3.135_L3_scFv
QIQLVQSGSELKKPGASVKVSCKASGYTFTHYGMNWVRQAPGQGLEWMGWINTYTSEPTYADGFTGRFVFSLDTSVSTAYLQISSLKAEDTAVYFCARDYYGSSPYWGQGTLVTVSSGKPGSGKPGSGKPGSGKPGSDVLMTQSPDSLAVSLGERATINCKSSQSIVHSNGNTYLEWYQQKPGQSPKLLIYKVSNRFSGVPDRFSGSGSGTDFTLTISSLQAEDVAVYYCFQGSHVPNTFGGGTKVEIKGS

SEQ ID NO: 1692 - protein, 117 aa, Artificial Sequence
  Description of Artificial Sequence: Synthetic polypeptide
  VH of XENP024257
QIQLVQSGSELKKPGASVKVSCKASGYTFTHYGMNWVRQAPGQGLEWMGWINTYTSEPTYADGFTGRFVFSLDTSVSTAYLQISSLKAEDTAVYFCARDYYGSSPYWGQGTLVTVSS

SEQ ID NO: 1693 - protein, 114 aa, Artificial Sequence; identical to SEQ ID NO: 649
  Description of Artificial Sequence: Synthetic polypeptide
  VL of XENP024257

SEQ ID NO: 1694 - protein, 5 aa, Artificial Sequence
  Description of Artificial Sequence: Synthetic peptide
  XENP024257 vhCDR1
HYGMN

SEQ ID NO: 1695 - protein, 17 aa, Artificial Sequence
  Description of Artificial Sequence: Synthetic peptide
  XENP024257 vhCDR2
WINTYTSEPTYADGFTG

SEQ ID NO: 1696 - protein, 8 aa, Artificial Sequence
  Description of Artificial Sequence: Synthetic peptide
  XENP024257 vhCDR3
DYYGSSPY

SEQ ID NO: 1697 - protein, 16 aa, Artificial Sequence
  Description of Artificial Sequence: Synthetic peptide
  XENP024257 vlCDR1
KSSQSIVHSNGNTYLE

SEQ ID NO: 1698 - protein, 7 aa, Artificial Sequence
  Description of Artificial Sequence: Synthetic peptide
  XENP024257 vlCDR2
KVSNRFS

SEQ ID NO: 1699 - protein, 9 aa, Artificial Sequence
  Description of Artificial Sequence: Synthetic peptide
  XENP024257 vlCDR3
FQGSHVPNT

SEQ ID NO: 1700 - protein, 251 aa, Artificial Sequence
  Description of Artificial Sequence: Synthetic polypeptide
  XENP024258 1C11_H3.136_L3_scFv
QIQLVQSGSELKKPGASVKVSCKASGYTFTHYGMNWVRQAPGQGLEWMGWINTYTGSPTYADGFTGRFVFSLDTSVSTAYLQISSLKAEDTAVYFCARDYYGSSPYWGQGTLVTVSSGKPGSGKPGSGKPGSGKPGSDVLMTQSPDSLAVSLGERATINCKSSQSIVHSNGNTYLEWYQQKPGQSPKLLIYKVSNRFSGVPDRFSGSGSGTDFTLTISSLQAEDVAVYYCFQGSHVPNTFGGGTKVEIKGS

SEQ ID NO: 1701 - protein, 117 aa, Artificial Sequence
  Description of Artificial Sequence: Synthetic polypeptide
  VH of XENP024258
QIQLVQSGSELKKPGASVKVSCKASGYTFTHYGMNWVRQAPGQGLEWMGWINTYTGSPTYADGFTGRFVFSLDTSVSTAYLQISSLKAEDTAVYFCARDYYGSSPYWGQGTLVTVSS

SEQ ID NO: 1702 - protein, 114 aa, Artificial Sequence; identical to SEQ ID NO: 649
  Description of Artificial Sequence: Synthetic polypeptide
  VL of XENP024258

SEQ ID NO: 1703 - protein, 5 aa, Artificial Sequence
  Description of Artificial Sequence: Synthetic peptide
  XENP024258 vhCDR1
HYGMN

SEQ ID NO: 1704 - protein, 17 aa, Artificial Sequence
  Description of Artificial Sequence: Synthetic peptide
  XENP024258 vhCDR2
WINTYTGSPTYADGFTG

SEQ ID NO: 1705 - protein, 8 aa, Artificial Sequence
  Description of Artificial Sequence: Synthetic peptide
  XENP024258 vhCDR3
DYYGSSPY

SEQ ID NO: 1706 - protein, 16 aa, Artificial Sequence
  Description of Artificial Sequence: Synthetic peptide
  XENP024258 vlCDR1
KSSQSIVHSNGNTYLE

SEQ ID NO: 1707 - protein, 7 aa, Artificial Sequence
  Description of Artificial Sequence: Synthetic peptide
  XENP024258 vlCDR2
KVSNRFS

SEQ ID NO: 1708 - protein, 9 aa, Artificial Sequence
  Description of Artificial Sequence: Synthetic peptide
  XENP024258 vlCDR3
FQGSHVPNT

SEQ ID NO: 1709 - protein, 251 aa, Artificial Sequence
  Description of Artificial Sequence: Synthetic polypeptide
  XENP024259 1C11_H3.137_L3_scFv
QIQLVQSGSELKKPGASVKVSCKASGYTFTHYGMNWVRQAPGQGLEWMGWINTYTGNPTYADGFTGRFVFSLDTSVSTAYLQISSLKAEDTAVYFCARDYYGSSPYWGQGTLVTVSSGKPGSGKPGSGKPGSGKPGSDVLMTQSPDSLAVSLGERATINCKSSQSIVHSNGNTYLEWYQQKPGQSPKLLIYKVSNRFSGVPDRFSGSGSGTDFTLTISSLQAEDVAVYYCFQGSHVPNTFGGGTKVEIKGS

SEQ ID NO: 1710 - protein, 117 aa, Artificial Sequence
  Description of Artificial Sequence: Synthetic polypeptide
  VH of XENP024259
QIQLVQSGSELKKPGASVKVSCKASGYTFTHYGMNWVRQAPGQGLEWMGWINTYTGNPTYADGFTGRFVFSLDTSVSTAYLQISSLKAEDTAVYFCARDYYGSSPYWGQGTLVTVSS

SEQ ID NO: 1711 - protein, 114 aa, Artificial Sequence; identical to SEQ ID NO: 649
  Description of Artificial Sequence: Synthetic polypeptide
  VL of XENP024259

SEQ ID NO: 1712 - protein, 5 aa, Artificial Sequence
  Description of Artificial Sequence: Synthetic peptide
  XENP024259 vhCDR1
HYGMN

SEQ ID NO: 1713 - protein, 17 aa, Artificial Sequence
  Description of Artificial Sequence: Synthetic peptide
  XENP024259 vhCDR2
WINTYTGNPTYADGFTG

SEQ ID NO: 1714 - protein, 8 aa, Artificial Sequence
  Description of Artificial Sequence: Synthetic peptide
  XENP024259 vhCDR3
DYYGSSPY

SEQ ID NO: 1715 - protein, 16 aa, Artificial Sequence
  Description of Artificial Sequence: Synthetic peptide
  XENP024259 vlCDR1
KSSQSIVHSNGNTYLE

SEQ ID NO: 1716 - protein, 7 aa, Artificial Sequence
  Description of Artificial Sequence: Synthetic peptide
  XENP024259 vlCDR2
KVSNRFS

SEQ ID NO: 1717 - protein, 9 aa, Artificial Sequence
  Description of Artificial Sequence: Synthetic peptide
  XENP024259 vlCDR3
FQGSHVPNT

SEQ ID NO: 1718 - protein, 251 aa, Artificial Sequence
  Description of Artificial Sequence: Synthetic polypeptide
  XENP024260 1C11_H3.138_L3_scFv
QIQLVQSGSELKKPGASVKVSCKASGYTFTHYGMNWVRQAPGQGLEWMGWINTYTGDPTYADGFTGRFVFSLDTSVSTAYLQISSLKAEDTAVYFCARDYYGSSPYWGQGTLVTVSSGKPGSGKPGSGKPGSGKPGSDVLMTQSPDSLAVSLGERATINCKSSQSIVHSNGNTYLEWYQQKPGQSPKLLIYKVSNRFSGVPDRFSGSGSGTDFTLTISSLQAEDVAVYYCFQGSHVPNTFGGGTKVEIKGS

SEQ ID NO: 1719 - protein, 117 aa, Artificial Sequence
  Description of Artificial Sequence: Synthetic polypeptide
  VH of XENP024260
QIQLVQSGSELKKPGASVKVSCKASGYTFTHYGMNWVRQAPGQGLEWMGWINTYTGDPTYADGFTGRFVFSLDTSVSTAYLQISSLKAEDTAVYFCARDYYGSSPYWGQGTLVTVSS

SEQ ID NO: 1720 - protein, 114 aa, Artificial Sequence; identical to SEQ ID NO: 649
  Description of Artificial Sequence: Synthetic polypeptide
  VL of XENP024260

SEQ ID NO: 1721 - protein, 5 aa, Artificial Sequence
  Description of Artificial Sequence: Synthetic peptide
  XENP024260 vhCDR1
HYGMN

SEQ ID NO: 1722 - protein, 17 aa, Artificial Sequence
  Description of Artificial Sequence: Synthetic peptide
  XENP024260 vhCDR2
WINTYTGDPTYADGFTG

SEQ ID NO: 1723 - protein, 8 aa, Artificial Sequence
  Description of Artificial Sequence: Synthetic peptide
  XENP024260 vhCDR3
DYYGSSPY

SEQ ID NO: 1724 - protein, 16 aa, Artificial Sequence
  Description of Artificial Sequence: Synthetic peptide
  XENP024260 vlCDR1
KSSQSIVHSNGNTYLE

SEQ ID NO: 1725 - protein, 7 aa, Artificial Sequence
  Description of Artificial Sequence: Synthetic peptide
  XENP024260 vlCDR2
KVSNRFS

SEQ ID NO: 1726 - protein, 9 aa, Artificial Sequence
  Description of Artificial Sequence: Synthetic peptide
  XENP024260 vlCDR3
FQGSHVPNT

SEQ ID NO: 1727 - protein, 251 aa, Artificial Sequence
  Description of Artificial Sequence: Synthetic polypeptide
  XENP024261 1C11_H3.139_L3_scFv
QIQLVQSGSELKKPGASVKVSCKASGYTFTHYGMNWVRQAPGQGLEWMGWINTYTGTPTYADGFTGRFVFSLDTSVSTAYLQISSLKAEDTAVYFCARDYYGSSPYWGQGTLVTVSSGKPGSGKPGSGKPGSGKPGSDVLMTQSPDSLAVSLGERATINCKSSQSIVHSNGNTYLEWYQQKPGQSPKLLIYKVSNRFSGVPDRFSGSGSGTDFTLTISSLQAEDVAVYYCFQGSHVPNTFGGGTKVEIKGS

SEQ ID NO: 1728 - protein, 117 aa, Artificial Sequence
  Description of Artificial Sequence: Synthetic polypeptide
  VH of XENP024261
QIQLVQSGSELKKPGASVKVSCKASGYTFTHYGMNWVRQAPGQGLEWMGWINTYTGTPTYADGFTGRFVFSLDTSVSTAYLQISSLKAEDTAVYFCARDYYGSSPYWGQGTLVTVSS

SEQ ID NO: 1729 - protein, 114 aa, Artificial Sequence; identical to SEQ ID NO: 649
  Description of Artificial Sequence: Synthetic polypeptide
  VL of XENP024261

SEQ ID NO: 1730 - protein, 5 aa, Artificial Sequence
  Description of Artificial Sequence: Synthetic peptide
  XENP024261 vhCDR1
HYGMN

SEQ ID NO: 1731 - protein, 17 aa, Artificial Sequence
  Description of Artificial Sequence: Synthetic peptide
  XENP024261 vhCDR2
WINTYTGTPTYADGFTG

SEQ ID NO: 1732 - protein, 8 aa, Artificial Sequence
  Description of Artificial Sequence: Synthetic peptide
  XENP024261 vhCDR3
DYYGSSPY

SEQ ID NO: 1733 - protein, 16 aa, Artificial Sequence
  Description of Artificial Sequence: Synthetic peptide
  XENP024261 vlCDR1
KSSQSIVHSNGNTYLE

SEQ ID NO: 1734 - protein, 7 aa, Artificial Sequence
  Description of Artificial Sequence: Synthetic peptide
  XENP024261 vlCDR2
KVSNRFS

SEQ ID NO: 1735 - protein, 9 aa, Artificial Sequence
  Description of Artificial Sequence: Synthetic peptide
  XENP024261 vlCDR3
FQGSHVPNT

SEQ ID NO: 1736 - protein, 251 aa, Artificial Sequence
  Description of Artificial Sequence: Synthetic polypeptide
  XENP024262 1C11_H3.140_L3_scFv
QIQLVQSGSELKKPGASVKVSCKASGYTFTHYGMNWVRQAPGQGLEWMGWINTYTGYPTYADGFTGRFVFSLDTSVSTAYLQISSLKAEDTAVYFCARDYYGSSPYWGQGTLVTVSSGKPGSGKPGSGKPGSGKPGSDVLMTQSPDSLAVSLGERATINCKSSQSIVHSNGNTYLEWYQQKPGQSPKLLIYKVSNRFSGVPDRFSGSGSGTDFTLTISSLQAEDVAVYYCFQGSHVPNTFGGGTKVEIKGS

SEQ ID NO: 1737 - protein, 117 aa, Artificial Sequence
  Description of Artificial Sequence: Synthetic polypeptide
  VH of XENP024262
QIQLVQSGSELKKPGASVKVSCKASGYTFTHYGMNWVRQAPGQGLEWMGWINTYTGYPTYADGFTGRFVFSLDTSVSTAYLQISSLKAEDTAVYFCARDYYGSSPYWGQGTLVTVSS

SEQ ID NO: 1738 - protein, 114 aa, Artificial Sequence; identical to SEQ ID NO: 649
  Description of Artificial Sequence: Synthetic polypeptide
  VL of XENP024262

SEQ ID NO: 1739 - protein, 5 aa, Artificial Sequence
  Description of Artificial Sequence: Synthetic peptide
  XENP024262 vhCDR1
HYGMN

SEQ ID NO: 1740 - protein, 17 aa, Artificial Sequence
  Description of Artificial Sequence: Synthetic peptide
  XENP024262 vhCDR2
WINTYTGYPTYADGFTG

SEQ ID NO: 1741 - protein, 8 aa, Artificial Sequence
  Description of Artificial Sequence: Synthetic peptide
  XENP024262 vhCDR3
DYYGSSPY

SEQ ID NO: 1742 - protein, 16 aa, Artificial Sequence
  Description of Artificial Sequence: Synthetic peptide
  XENP024262 vlCDR1
KSSQSIVHSNGNTYLE

SEQ ID NO: 1743 - protein, 7 aa, Artificial Sequence
  Description of Artificial Sequence: Synthetic peptide
  XENP024262 vlCDR2
KVSNRFS

SEQ ID NO: 1744 - protein, 9 aa, Artificial Sequence
  Description of Artificial Sequence: Synthetic peptide
  XENP024262 vlCDR3
FQGSHVPNT

SEQ ID NO: 1745 - protein, 251 aa, Artificial Sequence
  Description of Artificial Sequence: Synthetic polypeptide
  XENP024263 1C11_H3.143_L3_scFv
QIQLVQSGSELKKPGASVKVSCKASGYTFTHYGMNWVRQAPGQGLEWMGWINTYTGEPYYADGFTGRFVFSLDTSVSTAYLQISSLKAEDTAVYFCARDYYGSSPYWGQGTLVTVSSGKPGSGKPGSGKPGSGKPGSDVLMTQSPDSLAVSLGERATINCKSSQSIVHSNGNTYLEWYQQKPGQSPKLLIYKVSNRFSGVPDRFSGSGSGTDFTLTISSLQAEDVAVYYCFQGSHVPNTFGGGTKVEIKGS

SEQ ID NO: 1746 - protein, 117 aa, Artificial Sequence
  Description of Artificial Sequence: Synthetic polypeptide
  VH of XENP024263
QIQLVQSGSELKKPGASVKVSCKASGYTFTHYGMNWVRQAPGQGLEWMGWINTYTGEPYYADGFTGRFVFSLDTSVSTAYLQISSLKAEDTAVYFCARDYYGSSPYWGQGTLVTVSS

SEQ ID NO: 1747 - protein, 114 aa, Artificial Sequence; identical to SEQ ID NO: 649
  Description of Artificial Sequence: Synthetic polypeptide
  VL of XENP024263

SEQ ID NO: 1748 - protein, 5 aa, Artificial Sequence
  Description of Artificial Sequence: Synthetic peptide
  XENP024263 vhCDR1
HYGMN

SEQ ID NO: 1749 - protein, 17 aa, Artificial Sequence
  Description of Artificial Sequence: Synthetic peptide
  XENP024263 vhCDR2
WINTYTGEPYYADGFTG

SEQ ID NO: 1750 - protein, 8 aa, Artificial Sequence
  Description of Artificial Sequence: Synthetic peptide
  XENP024263 vhCDR3
DYYGSSPY

SEQ ID NO: 1751 - protein, 16 aa, Artificial Sequence
  Description of Artificial Sequence: Synthetic peptide
  XENP024263 vlCDR1
KSSQSIVHSNGNTYLE

SEQ ID NO: 1752 - protein, 7 aa, Artificial Sequence
  Description of Artificial Sequence: Synthetic peptide
  XENP024263 vlCDR2
KVSNRFS

SEQ ID NO: 1753 - protein, 9 aa, Artificial Sequence
  Description of Artificial Sequence: Synthetic peptide
  XENP024263 vlCDR3
FQGSHVPNT

SEQ ID NO: 1754 - protein, 251 aa, Artificial Sequence
  Description of Artificial Sequence: Synthetic polypeptide
  XENP024264 1C11_H3.144_L3_scFv
QIQLVQSGSELKKPGASVKVSCKASGYTFTHYGMNWVRQAPGQGLEWMGWINTYTGEPNYADGFTGRFVFSLDTSVSTAYLQISSLKAEDTAVYFCARDYYGSSPYWGQGTLVTVSSGKPGSGKPGSGKPGSGKPGSDVLMTQSPDSLAVSLGERATINCKSSQSIVHSNGNTYLEWYQQKPGQSPKLLIYKVSNRFSGVPDRFSGSGSGTDFTLTISSLQAEDVAVYYCFQGSHVPNTFGGGTKVEIKGS

SEQ ID NO: 1755 - protein, 117 aa, Artificial Sequence
  Description of Artificial Sequence: Synthetic polypeptide
  VH of XENP024264
QIQLVQSGSELKKPGASVKVSCKASGYTFTHYGMNWVRQAPGQGLEWMGWINTYTGEPNYADGFTGRFVFSLDTSVSTAYLQISSLKAEDTAVYFCARDYYGSSPYWGQGTLVTVSS

SEQ ID NO: 1756 - protein, 114 aa, Artificial Sequence; identical to SEQ ID NO: 649
  Description of Artificial Sequence: Synthetic polypeptide
  VL of XENP024264

SEQ ID NO: 1757 - protein, 5 aa, Artificial Sequence
  Description of Artificial Sequence: Synthetic peptide
  XENP024264 vhCDR1
HYGMN

SEQ ID NO: 1758 - protein, 17 aa, Artificial Sequence
  Description of Artificial Sequence: Synthetic peptide
  XENP024264 vhCDR2
WINTYTGEPNYADGFTG

SEQ ID NO: 1759 - protein, 8 aa, Artificial Sequence
  Description of Artificial Sequence: Synthetic peptide
  XENP024264 vhCDR3
DYYGSSPY

SEQ ID NO: 1760 - protein, 16 aa, Artificial Sequence
  Description of Artificial Sequence: Synthetic peptide
  XENP024264 vlCDR1
KSSQSIVHSNGNTYLE

SEQ ID NO: 1761 - protein, 7 aa, Artificial Sequence
  Description of Artificial Sequence: Synthetic peptide
  XENP024264 vlCDR2
KVSNRFS

SEQ ID NO: 1762 - protein, 9 aa, Artificial Sequence
  Description of Artificial Sequence: Synthetic peptide
  XENP024264 vlCDR3
FQGSHVPNT

SEQ ID NO: 1763 - protein, 251 aa, Artificial Sequence
  Description of Artificial Sequence: Synthetic polypeptide
  XENP024265 1C11_H3.145_L3_scFv
QIQLVQSGSELKKPGASVKVSCKASGYTFTHYGMNWVRQAPGQGLEWMGWINTYTGEPTYSDGFTGRFVFSLDTSVSTAYLQISSLKAEDTAVYFCARDYYGSSPYWGQGTLVTVSSGKPGSGKPGSGKPGSGKPGSDVLMTQSPDSLAVSLGERATINCKSSQSIVHSNGNTYLEWYQQKPGQSPKLLIYKVSNRFSGVPDRFSGSGSGTDFTLTISSLQAEDVAVYYCFQGSHVPNTFGGGTKVEIKGS

SEQ ID NO: 1764 - protein, 117 aa, Artificial Sequence
  Description of Artificial Sequence: Synthetic polypeptide
  VH of XENP024265
QIQLVQSGSELKKPGASVKVSCKASGYTFTHYGMNWVRQAPGQGLEWMGWINTYTGEPTYSDGFTGRFVFSLDTSVSTAYLQISSLKAEDTAVYFCARDYYGSSPYWGQGTLVTVSS

SEQ ID NO: 1765 - protein, 114 aa, Artificial Sequence; identical to SEQ ID NO: 649
  Description of Artificial Sequence: Synthetic polypeptide
  VL of XENP024265

SEQ ID NO: 1766 - protein, 5 aa, Artificial Sequence
  Description of Artificial Sequence: Synthetic peptide
  XENP024265 vhCDR1
HYGMN

SEQ ID NO: 1767 - protein, 17 aa, Artificial Sequence
  Description of Artificial Sequence: Synthetic peptide
  XENP024265 vhCDR2
WINTYTGEPTYSDGFTG

SEQ ID NO: 1768 - protein, 8 aa, Artificial Sequence
  Description of Artificial Sequence: Synthetic peptide
  XENP024265 vhCDR3
DYYGSSPY

SEQ ID NO: 1769 - protein, 16 aa, Artificial Sequence
  Description of Artificial Sequence: Synthetic peptide
  XENP024265 vlCDR1
KSSQSIVHSNGNTYLE

SEQ ID NO: 1770 - protein, 7 aa, Artificial Sequence
  Description of Artificial Sequence: Synthetic peptide
  XENP024265 vlCDR2
KVSNRFS

SEQ ID NO: 1771 - protein, 9 aa, Artificial Sequence
  Description of Artificial Sequence: Synthetic peptide
  XENP024265 vlCDR3
FQGSHVPNT

SEQ ID NO: 1772 - protein, 251 aa, Artificial Sequence
  Description of Artificial Sequence: Synthetic polypeptide
  XENP024266 1C11_H3.146_L3_scFv
QIQLVQSGSELKKPGASVKVSCKASGYTFTHYGMNWVRQAPGQGLEWMGWINTYTGEPTYAPGFTGRFVFSLDTSVSTAYLQISSLKAEDTAVYFCARDYYGSSPYWGQGTLVTVSSGKPGSGKPGSGKPGSGKPGSDVLMTQSPDSLAVSLGERATINCKSSQSIVHSNGNTYLEWYQQKPGQSPKLLIYKVSNRFSGVPDRFSGSGSGTDFTLTISSLQAEDVAVYYCFQGSHVPNTFGGGTKVEIKGS

SEQ ID NO: 1773 - protein, 117 aa, Artificial Sequence
  Description of Artificial Sequence: Synthetic polypeptide
  VH of XENP024266
QIQLVQSGSELKKPGASVKVSCKASGYTFTHYGMNWVRQAPGQGLEWMGWINTYTGEPTYAPGFTGRFVFSLDTSVSTAYLQISSLKAEDTAVYFCARDYYGSSPYWGQGTLVTVSS

SEQ ID NO: 1774 - protein, 114 aa, Artificial Sequence; identical to SEQ ID NO: 649
  Description of Artificial Sequence: Synthetic polypeptide
  VL of XENP024266

SEQ ID NO: 1775 - protein, 5 aa, Artificial Sequence
  Description of Artificial Sequence: Synthetic peptide
  XENP024266 vhCDR1
HYGMN

SEQ ID NO: 1776 - protein, 17 aa, Artificial Sequence
  Description of Artificial Sequence: Synthetic peptide
  XENP024266 vhCDR2
WINTYTGEPTYAPGFTG

SEQ ID NO: 1777 - protein, 8 aa, Artificial Sequence
  Description of Artificial Sequence: Synthetic peptide
  XENP024266 vhCDR3
DYYGSSPY

SEQ ID NO: 1778 - protein, 16 aa, Artificial Sequence
  Description of Artificial Sequence: Synthetic peptide
  XENP024266 vlCDR1
KSSQSIVHSNGNTYLE

SEQ ID NO: 1779 - protein, 7 aa, Artificial Sequence
  Description of Artificial Sequence: Synthetic peptide
  XENP024266 vlCDR2
KVSNRFS

SEQ ID NO: 1780 - protein, 9 aa, Artificial Sequence
  Description of Artificial Sequence: Synthetic peptide
  XENP024266 vlCDR3
FQGSHVPNT

SEQ ID NO: 1781 - protein, 251 aa, Artificial Sequence
  Description of Artificial Sequence: Synthetic polypeptide
  XENP024267 1C11_H3.147_L3_scFv
QIQLVQSGSELKKPGASVKVSCKASGYTFTHYGMNWVRQAPGQGLEWMGWINTYTGEPTYATGFTGRFVFSLDTSVSTAYLQISSLKAEDTAVYFCARDYYGSSPYWGQGTLVTVSSGKPGSGKPGSGKPGSGKPGSDVLMTQSPDSLAVSLGERATINCKSSQSIVHSNGNTYLEWYQQKPGQSPKLLIYKVSNRFSGVPDRFSGSGSGTDFTLTISSLQAEDVAVYYCFQGSHVPNTFGGGTKVEIKGS

SEQ ID NO: 1782 - protein, 117 aa, Artificial Sequence
  Description of Artificial Sequence: Synthetic polypeptide
  VH of XENP024267
QIQLVQSGSELKKPGASVKVSCKASGYTFTHYGMNWVRQAPGQGLEWMGWINTYTGEPTYATGFTGRFVFSLDTSVSTAYLQISSLKAEDTAVYFCARDYYGSSPYWGQGTLVTVSS

SEQ ID NO: 1783 - protein, 114 aa, Artificial Sequence; identical to SEQ ID NO: 649
  Description of Artificial Sequence: Synthetic polypeptide
  VL of XENP024267

SEQ ID NO: 1784 - protein, 5 aa, Artificial Sequence
  Description of Artificial Sequence: Synthetic peptide
  XENP024267 vhCDR1
HYGMN

SEQ ID NO: 1785 - protein, 17 aa, Artificial Sequence
  Description of Artificial Sequence: Synthetic peptide
  XENP024267 vhCDR2
WINTYTGEPTYATGFTG

SEQ ID NO: 1786 - protein, 8 aa, Artificial Sequence
  Description of Artificial Sequence: Synthetic peptide
  XENP024267 vhCDR3
DYYGSSPY

SEQ ID NO: 1787 - protein, 16 aa, Artificial Sequence
  Description of Artificial Sequence: Synthetic peptide
  XENP024267 vlCDR1
KSSQSIVHSNGNTYLE

SEQ ID NO: 1788 - protein, 7 aa, Artificial Sequence
  Description of Artificial Sequence: Synthetic peptide
  XENP024267 vlCDR2
KVSNRFS

SEQ ID NO: 1789 - protein, 9 aa, Artificial Sequence
  Description of Artificial Sequence: Synthetic peptide
  XENP024267 vlCDR3
FQGSHVPNT

SEQ ID NO: 1790 - protein, 251 aa, Artificial Sequence
  Description of Artificial Sequence: Synthetic polypeptide
  XENP024268 1C11_H3.148_L3_scFv
QIQLVQSGSELKKPGASVKVSCKASGYTFTHYGMNWVRQAPGQGLEWMGWINTYTGEPTYAQKFTGRFVFSLDTSVSTAYLQISSLKAEDTAVYFCARDYYGSSPYWGQGTLVTVSSGKPGSGKPGSGKPGSGKPGSDVLMTQSPDSLAVSLGERATINCKSSQSIVHSNGNTYLEWYQQKPGQSPKLLIYKVSNRFSGVPDRFSGSGSGTDFTLTISSLQAEDVAVYYCFQGSHVPNTFGGGTKVEIKGS

SEQ ID NO: 1791 - protein, 117 aa, Artificial Sequence
  Description of Artificial Sequence: Synthetic polypeptide
  VH of XENP024268
QIQLVQSGSELKKPGASVKVSCKASGYTFTHYGMNWVRQAPGQGLEWMGWINTYTGEPTYAQKFTGRFVFSLDTSVSTAYLQISSLKAEDTAVYFCARDYYGSSPYWGQGTLVTVSS

SEQ ID NO: 1792 - protein, 114 aa, Artificial Sequence; identical to SEQ ID NO: 649
  Description of Artificial Sequence: Synthetic polypeptide
  VL of XENP024268

SEQ ID NO: 1793 - protein, 5 aa, Artificial Sequence
  Description of Artificial Sequence: Synthetic peptide
  XENP024268 vhCDR1
HYGMN

SEQ ID NO: 1794 - protein, 17 aa, Artificial Sequence
  Description of Artificial Sequence: Synthetic peptide
  XENP024268 vhCDR2
WINTYTGEPTYAQKFTG

SEQ ID NO: 1795 - protein, 8 aa, Artificial Sequence
  Description of Artificial Sequence: Synthetic peptide
  XENP024268 vhCDR3
DYYGSSPY

SEQ ID NO: 1796 - protein, 16 aa, Artificial Sequence
  Description of Artificial Sequence: Synthetic peptide
  XENP024268 vlCDR1
KSSQSIVHSNGNTYLE

SEQ ID NO: 1797 - protein, 7 aa, Artificial Sequence
  Description of Artificial Sequence: Synthetic peptide
  XENP024268 vlCDR2
KVSNRFS

SEQ ID NO: 1798 - protein, 9 aa, Artificial Sequence
  Description of Artificial Sequence: Synthetic peptide
  XENP024268 vlCDR3
FQGSHVPNT

SEQ ID NO: 1799 - protein, 251 aa, Artificial Sequence
  Description of Artificial Sequence: Synthetic polypeptide
  XENP024269 1C11_H3.149_L3_scFv
QIQLVQSGSELKKPGASVKVSCKASGYTFTHYGMNWVRQAPGQGLEWMGWINTYTGEPTYADGFTDRFVFSLDTSVSTAYLQISSLKAEDTAVYFCARDYYGSSPYWGQGTLVTVSSGKPGSGKPGSGKPGSGKPGSDVLMTQSPDSLAVSLGERATINCKSSQSIVHSNGNTYLEWYQQKPGQSPKLLIYKVSNRFSGVPDRFSGSGSGTDFTLTISSLQAEDVAVYYCFQGSHVPNTFGGGTKVEIKGS

SEQ ID NO: 1800 - protein, 117 aa, Artificial Sequence
  Description of Artificial Sequence: Synthetic polypeptide
  VH of XENP024269
QIQLVQSGSELKKPGASVKVSCKASGYTFTHYGMNWVRQAPGQGLEWMGWINTYTGEPTYADGFTDRFVFSLDTSVSTAYLQISSLKAEDTAVYFCARDYYGSSPYWGQGTLVTVSS

SEQ ID NO: 1801 - protein, 114 aa, Artificial Sequence; identical to SEQ ID NO: 649
  Description of Artificial Sequence: Synthetic polypeptide
  VL of XENP024269

SEQ ID NO: 1802 - protein, 5 aa, Artificial Sequence
  Description of Artificial Sequence: Synthetic peptide
  XENP024269 vhCDR1
HYGMN

SEQ ID NO: 1803 - protein, 17 aa, Artificial Sequence
  Description of Artificial Sequence: Synthetic peptide
  XENP024269 vhCDR2
WINTYTGEPTYADGFTD

SEQ ID NO: 1804 - protein, 8 aa, Artificial Sequence
  Description of Artificial Sequence: Synthetic peptide
  XENP024269 vhCDR3
DYYGSSPY

SEQ ID NO: 1805 - protein, 16 aa, Artificial Sequence
  Description of Artificial Sequence: Synthetic peptide
  XENP024269 vlCDR1
KSSQSIVHSNGNTYLE

SEQ ID NO: 1806 - protein, 7 aa, Artificial Sequence
  Description of Artificial Sequence: Synthetic peptide
  XENP024269 vlCDR2
KVSNRFS

SEQ ID NO: 1807 - protein, 9 aa, Artificial Sequence
  Description of Artificial Sequence: Synthetic peptide
  XENP024269 vlCDR3
FQGSHVPNT

SEQ ID NO: 1808 - protein, 251 aa, Artificial Sequence
  Description of Artificial Sequence: Synthetic polypeptide
  XENP024270 1C11_H3.150_L3_scFv
QIQLVQSGSELKKPGASVKVSCKASGYTFTHYGMNWVRQAPGQGLEWMGWINTYTGEPTYADGFTERFVFSLDTSVSTAYLQISSLKAEDTAVYFCARDYYGSSPYWGQGTLVTVSSGKPGSGKPGSGKPGSGKPGSDVLMTQSPDSLAVSLGERATINCKSSQSIVHSNGNTYLEWYQQKPGQSPKLLIYKVSNRFSGVPDRFSGSGSGTDFTLTISSLQAEDVAVYYCFQGSHVPNTFGGGTKVEIKGS

SEQ ID NO: 1809 - protein, 117 aa, Artificial Sequence
  Description of Artificial Sequence: Synthetic polypeptide
  VH of XENP024270
QIQLVQSGSELKKPGASVKVSCKASGYTFTHYGMNWVRQAPGQGLEWMGWINTYTGEPTYADGFTERFVFSLDTSVSTAYLQISSLKAEDTAVYFCARDYYGSSPYWGQGTLVTVSS

SEQ ID NO: 1810 - protein, 114 aa, Artificial Sequence; identical to SEQ ID NO: 649
  Description of Artificial Sequence: Synthetic polypeptide
  VL of XENP024270

SEQ ID NO: 1811 - protein, 5 aa, Artificial Sequence
  Description of Artificial Sequence: Synthetic peptide
  XENP024270 vhCDR1
HYGMN

SEQ ID NO: 1812 - protein, 17 aa, Artificial Sequence
  Description of Artificial Sequence: Synthetic peptide
  XENP024270 vhCDR2
WINTYTGEPTYADGFTE

SEQ ID NO: 1813 - protein, 8 aa, Artificial Sequence
  Description of Artificial Sequence: Synthetic peptide
  XENP024270 vhCDR3
DYYGSSPY

SEQ ID NO: 1814 - protein, 16 aa, Artificial Sequence
  Description of Artificial Sequence: Synthetic peptide
  XENP024270 vlCDR1
KSSQSIVHSNGNTYLE

SEQ ID NO: 1815 - protein, 7 aa, Artificial Sequence
  Description of Artificial Sequence: Synthetic peptide
  XENP024270 vlCDR2
KVSNRFS

SEQ ID NO: 1816 - protein, 9 aa, Artificial Sequence
  Description of Artificial Sequence: Synthetic peptide
  XENP024270 vlCDR3
FQGSHVPNT

SEQ ID NO: 1817 - protein, 251 aa, Artificial Sequence
  Description of Artificial Sequence: Synthetic polypeptide
  XENP024271 1C11_H3.151_L3_scFv
QIQLVQSGSELKKPGASVKVSCKASGYTFTHYGMNWVRQAPGQGLEWMGWINTYTGEPTYADGFTSRFVFSLDTSVSTAYLQISSLKAEDTAVYFCARDYYGSSPYWGQGTLVTVSSGKPGSGKPGSGKPGSGKPGSDVLMTQSPDSLAVSLGERATINCKSSQSIVHSNGNTYLEWYQQKPGQSPKLLIYKVSNRFSGVPDRFSGSGSGTDFTLTISSLQAEDVAVYYCFQGSHVPNTFGGGTKVEIKGS

SEQ ID NO: 1818 - protein, 117 aa, Artificial Sequence
  Description of Artificial Sequence: Synthetic polypeptide
  VH of XENP024271
QIQLVQSGSELKKPGASVKVSCKASGYTFTHYGMNWVRQAPGQGLEWMGWINTYTGEPTYADGFTSRFVFSLDTSVSTAYLQISSLKAEDTAVYFCARDYYGSSPYWGQGTLVTVSS

SEQ ID NO: 1819 - protein, 114 aa, Artificial Sequence; identical to SEQ ID NO: 649
  Description of Artificial Sequence: Synthetic polypeptide
  VL of XENP024271

SEQ ID NO: 1820 - protein, 5 aa, Artificial Sequence
  Description of Artificial Sequence: Synthetic peptide
  XENP024271 vhCDR1
HYGMN

SEQ ID NO: 1821 - protein, 17 aa, Artificial Sequence
  Description of Artificial Sequence: Synthetic peptide
  XENP024271 vhCDR2
WINTYTGEPTYADGFTS

SEQ ID NO: 1822 - protein, 8 aa, Artificial Sequence
  Description of Artificial Sequence: Synthetic peptide
  XENP024271 vhCDR3
DYYGSSPY

SEQ ID NO: 1823 - protein, 16 aa, Artificial Sequence
  Description of Artificial Sequence: Synthetic peptide
  XENP024271 vlCDR1
KSSQSIVHSNGNTYLE

SEQ ID NO: 1824 - protein, 7 aa, Artificial Sequence
  Description of Artificial Sequence: Synthetic peptide
  XENP024271 vlCDR2
KVSNRFS

SEQ ID NO: 1825 - protein, 9 aa, Artificial Sequence
  Description of Artificial Sequence: Synthetic peptide
  XENP024271 vlCDR3
FQGSHVPNT

SEQ ID NO: 1826 - protein, 251 aa, Artificial Sequence
  Description of Artificial Sequence: Synthetic polypeptide
  XENP024272 1C11_H3.152_L3_scFv
QIQLVQSGSELKKPGASVKVSCKASGYTFTHYGMNWVRQAPGQGLEWMGWINTYTGEPTYADGFTGRFVFTLDTSVSTAYLQISSLKAEDTAVYFCARDYYGSSPYWGQGTLVTVSSGKPGSGKPGSGKPGSGKPGSDVLMTQSPDSLAVSLGERATINCKSSQSIVHSNGNTYLEWYQQKPGQSPKLLIYKVSNRFSGVPDRFSGSGSGTDFTLTISSLQAEDVAVYYCFQGSHVPNTFGGGTKVEIKGS

SEQ ID NO: 1827 - protein, 117 aa, Artificial Sequence
  Description of Artificial Sequence: Synthetic polypeptide
  VH of XENP024272
QIQLVQSGSELKKPGASVKVSCKASGYTFTHYGMNWVRQAPGQGLEWMGWINTYTGEPTYADGFTGRFVFTLDTSVSTAYLQISSLKAEDTAVYFCARDYYGSSPYWGQGTLVTVSS

SEQ ID NO: 1828 - protein, 114 aa, Artificial Sequence; identical to SEQ ID NO: 649
  Description of Artificial Sequence: Synthetic polypeptide
  VL of XENP024272

SEQ ID NO: 1829 - protein, 5 aa, Artificial Sequence
  Description of Artificial Sequence: Synthetic peptide
  XENP024272 vhCDR1
HYGMN

SEQ ID NO: 1830 - protein, 17 aa, Artificial Sequence
  Description of Artificial Sequence: Synthetic peptide
  XENP024272 vhCDR2
WINTYTGEPTYADGFTG

SEQ ID NO: 1831 - protein, 8 aa, Artificial Sequence
  Description of Artificial Sequence: Synthetic peptide
  XENP024272 vhCDR3
DYYGSSPY

SEQ ID NO: 1832 - protein, 16 aa, Artificial Sequence
  Description of Artificial Sequence: Synthetic peptide
  XENP024272 vlCDR1
KSSQSIVHSNGNTYLE

SEQ ID NO: 1833 - protein, 7 aa, Artificial Sequence
  Description of Artificial Sequence: Synthetic peptide
  XENP024272 vlCDR2
KVSNRFS

SEQ ID NO: 1834 - protein, 9 aa, Artificial Sequence
  Description of Artificial Sequence: Synthetic peptide
  XENP024272 vlCDR3
FQGSHVPNT

SEQ ID NO: 1835 - protein, 251 aa, Artificial Sequence
  Description of Artificial Sequence: Synthetic polypeptide
  XENP024273 1C11_H3.153_L3_scFv
QIQLVQSGSELKKPGASVKVSCKASGYTFTHYGMNWVRQAPGQGLEWMGWINTYTGEPTYADGFTGRFVFSTDTSVSTAYLQISSLKAEDTAVYFCARDYYGSSPYWGQGTLVTVSSGKPGSGKPGSGKPGSGKPGSDVLMTQSPDSLAVSLGERATINCKSSQSIVHSNGNTYLEWYQQKPGQSPKLLIYKVSNRFSGVPDRFSGSGSGTDFTLTISSLQAEDVAVYYCFQGSHVPNTFGGGTKVEIKGS

SEQ ID NO: 1836 - protein, 117 aa, Artificial Sequence
  Description of Artificial Sequence: Synthetic polypeptide
  VH of XENP024273
QIQLVQSGSELKKPGASVKVSCKASGYTFTHYGMNWVRQAPGQGLEWMGWINTYTGEPTYADGFTGRFVFSTDTSVSTAYLQISSLKAEDTAVYFCARDYYGSSPYWGQGTLVTVSS

SEQ ID NO: 1837 - protein, 114 aa, Artificial Sequence; identical to SEQ ID NO: 649
  Description of Artificial Sequence: Synthetic polypeptide
  VL of XENP024273

SEQ ID NO: 1838 - protein, 5 aa, Artificial Sequence
  Description of Artificial Sequence: Synthetic peptide
  XENP024273 vhCDR1
HYGMN

SEQ ID NO: 1839 - protein, 17 aa, Artificial Sequence
  Description of Artificial Sequence: Synthetic peptide
  XENP024273 vhCDR2
WINTYTGEPTYADGFTG

SEQ ID NO: 1840 - protein, 8 aa, Artificial Sequence
  Description of Artificial Sequence: Synthetic peptide
  XENP024273 vhCDR3
DYYGSSPY

SEQ ID NO: 1841 - protein, 16 aa, Artificial Sequence
  Description of Artificial Sequence: Synthetic peptide
  XENP024273 vlCDR1
KSSQSIVHSNGNTYLE

SEQ ID NO: 1842 - protein, 7 aa, Artificial Sequence
  Description of Artificial Sequence: Synthetic peptide
  XENP024273 vlCDR2
KVSNRFS

SEQ ID NO: 1843 - protein, 9 aa, Artificial Sequence
  Description of Artificial Sequence: Synthetic peptide
  XENP024273 vlCDR3
FQGSHVPNT

SEQ ID NO: 1844 - protein, 251 aa, Artificial Sequence
  Description of Artificial Sequence: Synthetic polypeptide
  XENP024274 1C11_H3.154_L3_scFv
QIQLVQSGSELKKPGASVKVSCKASGYTFTHYGMNWVRQAPGQGLEWMGWINTYTGEPTYADGFTGRFVFSIDTSVSTAYLQISSLKAEDTAVYFCARDYYGSSPYWGQGTLVTVSSGKPGSGKPGSGKPGSGKPGSDVLMTQSPDSLAVSLGERATINCKSSQSIVHSNGNTYLEWYQQKPGQSPKLLIYKVSNRFSGVPDRFSGSGSGTDFTLTISSLQAEDVAVYYCFQGSHVPNTFGGGTKVEIKGS

SEQ ID NO: 1845 - protein, 117 aa, Artificial Sequence
  Description of Artificial Sequence: Synthetic polypeptide
  VH of XENP024274
QIQLVQSGSELKKPGASVKVSCKASGYTFTHYGMNWVRQAPGQGLEWMGWINTYTGEPTYADGFTGRFVFSIDTSVSTAYLQISSLKAEDTAVYFCARDYYGSSPYWGQGTLVTVSS

SEQ ID NO: 1846 - protein, 114 aa, Artificial Sequence; identical to SEQ ID NO: 649
  Description of Artificial Sequence: Synthetic polypeptide
  VL of XENP024274

SEQ ID NO: 1847 - protein, 5 aa, Artificial Sequence
  Description of Artificial Sequence: Synthetic peptide
  XENP024274 vhCDR1
HYGMN

SEQ ID NO: 1848 - protein, 17 aa, Artificial Sequence
  Description of Artificial Sequence: Synthetic peptide
  XENP024274 vhCDR2
WINTYTGEPTYADGFTG

SEQ ID NO: 1849 - protein, 8 aa, Artificial Sequence
  Description of Artificial Sequence: Synthetic peptide
  XENP024274 vhCDR3
DYYGSSPY

SEQ ID NO: 1850 - protein, 16 aa, Artificial Sequence
  Description of Artificial Sequence: Synthetic peptide
  XENP024274 vlCDR1
KSSQSIVHSNGNTYLE

SEQ ID NO: 1851 - protein, 7 aa, Artificial Sequence
  Description of Artificial Sequence: Synthetic peptide
  XENP024274 vlCDR2
KVSNRFS

SEQ ID NO: 1852 - protein, 9 aa, Artificial Sequence
  Description of Artificial Sequence: Synthetic peptide
  XENP024274 vlCDR3
FQGSHVPNT

SEQ ID NO: 1853 - protein, 251 aa, Artificial Sequence
  Description of Artificial Sequence: Synthetic polypeptide
  XENP024275 1C11_H3.155_L3_scFv
QIQLVQSGSELKKPGASVKVSCKASGYTFTHYGMNWVRQAPGQGLEWMGWINTYTGEPTYADGFTGRFVFSLDNSVSTAYLQISSLKAEDTAVYFCARDYYGSSPYWGQGTLVTVSSGKPGSGKPGSGKPGSGKPGSDVLMTQSPDSLAVSLGERATINCKSSQSIVHSNGNTYLEWYQQKPGQSPKLLIYKVSNRFSGVPDRFSGSGSGTDFTLTISSLQAEDVAVYYCFQGSHVPNTFGGGTKVEIKGS

SEQ ID NO: 1854 - protein, 117 aa, Artificial Sequence
  Description of Artificial Sequence: Synthetic polypeptide
  VH of XENP024275
QIQLVQSGSELKKPGASVKVSCKASGYTFTHYGMNWVRQAPGQGLEWMGWINTYTGEPTYADGFTGRFVFSLDNSVSTAYLQISSLKAEDTAVYFCARDYYGSSPYWGQGTLVTVSS

SEQ ID NO: 1855 - protein, 114 aa, Artificial Sequence; identical to SEQ ID NO: 649
  Description of Artificial Sequence: Synthetic polypeptide
  VL of XENP024275

SEQ ID NO: 1856 - protein, 5 aa, Artificial Sequence
  Description of Artificial Sequence: Synthetic peptide
  XENP024275 vhCDR1
HYGMN

SEQ ID NO: 1857 - protein, 17 aa, Artificial Sequence
  Description of Artificial Sequence: Synthetic peptide
  XENP024275 vhCDR2
WINTYTGEPTYADGFTG

SEQ ID NO: 1858 - protein, 8 aa, Artificial Sequence
  Description of Artificial Sequence: Synthetic peptide
  XENP024275 vhCDR3
DYYGSSPY

SEQ ID NO: 1859 - protein, 16 aa, Artificial Sequence
  Description of Artificial Sequence: Synthetic peptide
  XENP024275 vlCDR1
KSSQSIVHSNGNTYLE

SEQ ID NO: 1860 - protein, 7 aa, Artificial Sequence
  Description of Artificial Sequence: Synthetic peptide
  XENP024275 vlCDR2
KVSNRFS

SEQ ID NO: 1861 - protein, 9 aa, Artificial Sequence
  Description of Artificial Sequence: Synthetic peptide
  XENP024275 vlCDR3
FQGSHVPNT

SEQ ID NO: 1862 - protein, 251 aa, Artificial Sequence
  Description of Artificial Sequence: Synthetic polypeptide
  XENP024276 1C11_H3.156_L3_scFv
QIQLVQSGSELKKPGASVKVSCKASGYTFTHYGMNWVRQAPGQGLEWMGWINTYTGEPTYADGFTGRFVFSLDRSVSTAYLQISSLKAEDTAVYFCARDYYGSSPYWGQGTLVTVSSGKPGSGKPGSGKPGSGKPGSDVLMTQSPDSLAVSLGERATINCKSSQSIVHSNGNTYLEWYQQKPGQSPKLLIYKVSNRFSGVPDRFSGSGSGTDFTLTISSLQAEDVAVYYCFQGSHVPNTFGGGTKVEIKGS

SEQ ID NO: 1863 - protein, 117 aa, Artificial Sequence
  Description of Artificial Sequence: Synthetic polypeptide
  VH of XENP024276
QIQLVQSGSELKKPGASVKVSCKASGYTFTHYGMNWVRQAPGQGLEWMGWINTYTGEPTYADGFTGRFVFSLDRSVSTAYLQISSLKAEDTAVYFCARDYYGSSPYWGQGTLVTVSS

SEQ ID NO: 1864 - protein, 114 aa, Artificial Sequence; identical to SEQ ID NO: 649
  Description of Artificial Sequence: Synthetic polypeptide
  VL of XENP024276

SEQ ID NO: 1865 - protein, 5 aa, Artificial Sequence
  Description of Artificial Sequence: Synthetic peptide
  XENP024276 vhCDR1
HYGMN

SEQ ID NO: 1866 - protein, 17 aa, Artificial Sequence
  Description of Artificial Sequence: Synthetic peptide
  XENP024276 vhCDR2
WINTYTGEPTYADGFTG

SEQ ID NO: 1867 - protein, 8 aa, Artificial Sequence
  Description of Artificial Sequence: Synthetic peptide
  XENP024276 vhCDR3
DYYGSSPY

SEQ ID NO: 1868 - protein, 16 aa, Artificial Sequence
  Description of Artificial Sequence: Synthetic peptide
  XENP024276 vlCDR1
KSSQSIVHSNGNTYLE

SEQ ID NO: 1869 - protein, 7 aa, Artificial Sequence
  Description of Artificial Sequence: Synthetic peptide
  XENP024276 vlCDR2
KVSNRFS

SEQ ID NO: 1870 - protein, 9 aa, Artificial Sequence
  Description of Artificial Sequence: Synthetic peptide
  XENP024276 vlCDR3
FQGSHVPNT

SEQ ID NO: 1871 - protein, 251 aa, Artificial Sequence
  Description of Artificial Sequence: Synthetic polypeptide
  XENP024277 1C11_H3.157_L3_scFv
QIQLVQSGSELKKPGASVKVSCKASGYTFTHYGMNWVRQAPGQGLEWMGWINTYTGEPTYADGFTGRFVFSLDTAVSTAYLQISSLKAEDTAVYFCARDYYGSSPYWGQGTLVTVSSGKPGSGKPGSGKPGSGKPGSDVLMTQSPDSLAVSLGERATINCKSSQSIVHSNGNTYLEWYQQKPGQSPKLLIYKVSNRFSGVPDRFSGSGSGTDFTLTISSLQAEDVAVYYCFQGSHVPNTFGGGTKVEIKGS

SEQ ID NO: 1872 - protein, 117 aa, Artificial Sequence
  Description of Artificial Sequence: Synthetic polypeptide
  VH of XENP024277
QIQLVQSGSELKKPGASVKVSCKASGYTFTHYGMNWVRQAPGQGLEWMGWINTYTGEPTYADGFTGRFVFSLDTAVSTAYLQISSLKAEDTAVYFCARDYYGSSPYWGQGTLVTVSS

SEQ ID NO: 1873 - protein, 114 aa, Artificial Sequence; identical to SEQ ID NO: 649
  Description of Artificial Sequence: Synthetic polypeptide
  VL of XENP024277

SEQ ID NO: 1874 - protein, 5 aa, Artificial Sequence
  Description of Artificial Sequence: Synthetic peptide
  XENP024277 vhCDR1
HYGMN

SEQ ID NO: 1875 - protein, 17 aa, Artificial Sequence
  Description of Artificial Sequence: Synthetic peptide
  XENP024277 vhCDR2
WINTYTGEPTYADGFTG

SEQ ID NO: 1876 - protein, 8 aa, Artificial Sequence
  Description of Artificial Sequence: Synthetic peptide
  XENP024277 vhCDR3
DYYGSSPY

SEQ ID NO: 1877 - protein, 16 aa, Artificial Sequence
  Description of Artificial Sequence: Synthetic peptide
  XENP024277 vlCDR1
KSSQSIVHSNGNTYLE

SEQ ID NO: 1878 - protein, 7 aa, Artificial Sequence
  Description of Artificial Sequence: Synthetic peptide
  XENP024277 vlCDR2
KVSNRFS

SEQ ID NO: 1879 - protein, 9 aa, Artificial Sequence
  Description of Artificial Sequence: Synthetic peptide
  XENP024277 vlCDR3
FQGSHVPNT

SEQ ID NO: 1880 - protein, 251 aa, Artificial Sequence
  Description of Artificial Sequence: Synthetic polypeptide
  XENP024278 1C11_H3.158_L3_scFv
QIQLVQSGSELKKPGASVKVSCKASGYTFTHYGMNWVRQAPGQGLEWMGWINTYTGEPTYADGFTGRFVFSLDTSVNTAYLQISSLKAEDTAVYFCARDYYGSSPYWGQGTLVTVSSGKPGSGKPGSGKPGSGKPGSDVLMTQSPDSLAVSLGERATINCKSSQSIVHSNGNTYLEWYQQKPGQSPKLLIYKVSNRFSGVPDRFSGSGSGTDFTLTISSLQAEDVAVYYCFQGSHVPNTFGGGTKVEIKGS

SEQ ID NO: 1881 - protein, 117 aa, Artificial Sequence
  Description of Artificial Sequence: Synthetic polypeptide
  VH of XENP024278
QIQLVQSGSELKKPGASVKVSCKASGYTFTHYGMNWVRQAPGQGLEWMGWINTYTGEPTYADGFTGRFVFSLDTSVNTAYLQISSLKAEDTAVYFCARDYYGSSPYWGQGTLVTVSS

SEQ ID NO: 1882 - protein, 114 aa, Artificial Sequence; identical to SEQ ID NO: 649
  Description of Artificial Sequence: Synthetic polypeptide
  VL of XENP024278

SEQ ID NO: 1883 - protein, 5 aa, Artificial Sequence
  Description of Artificial Sequence: Synthetic peptide
  XENP024278 vhCDR1
HYGMN

SEQ ID NO: 1884 - protein, 17 aa, Artificial Sequence
  Description of Artificial Sequence: Synthetic peptide
  XENP024278 vhCDR2
WINTYTGEPTYADGFTG

SEQ ID NO: 1885 - protein, 8 aa, Artificial Sequence
  Description of Artificial Sequence: Synthetic peptide
  XENP024278 vhCDR3
DYYGSSPY

SEQ ID NO: 1886 - protein, 16 aa, Artificial Sequence
  Description of Artificial Sequence: Synthetic peptide
  XENP024278 vlCDR1
KSSQSIVHSNGNTYLE

SEQ ID NO: 1887 - protein, 7 aa, Artificial Sequence
  Description of Artificial Sequence: Synthetic peptide
  XENP024278 vlCDR2
KVSNRFS

SEQ ID NO: 1888 - protein, 9 aa, Artificial Sequence
  Description of Artificial Sequence: Synthetic peptide
  XENP024278 vlCDR3
FQGSHVPNT

SEQ ID NO: 1889 - protein, 251 aa, Artificial Sequence
  Description of Artificial Sequence: Synthetic polypeptide
  XENP024279 1C11_H3.159_L3_scFv
QIQLVQSGSELKKPGASVKVSCKASGYTFTHYGMNWVRQAPGQGLEWMGWINTYTGEPTYADGFTGRFVFSLDTSVDTAYLQISSLKAEDTAVYFCARDYYGSSPYWGQGTLVTVSSGKPGSGKPGSGKPGSGKPGSDVLMTQSPDSLAVSLGERATINCKSSQSIVHSNGNTYLEWYQQKPGQSPKLLIYKVSNRFSGVPDRFSGSGSGTDFTLTISSLQAEDVAVYYCFQGSHVPNTFGGGTKVEIKGS

SEQ ID NO: 1890 - protein, 117 aa, Artificial Sequence
  Description of Artificial Sequence: Synthetic polypeptide
  VH of XENP024279
QIQLVQSGSELKKPGASVKVSCKASGYTFTHYGMNWVRQAPGQGLEWMGWINTYTGEPTYADGFTGRFVFSLDTSVDTAYLQISSLKAEDTAVYFCARDYYGSSPYWGQGTLVTVSS

SEQ ID NO: 1891 - protein, 114 aa, Artificial Sequence; identical to SEQ ID NO: 649
  Description of Artificial Sequence: Synthetic polypeptide
  VL of XENP024279

SEQ ID NO: 1892 - protein, 5 aa, Artificial Sequence
  Description of Artificial Sequence: Synthetic peptide
  XENP024279 vhCDR1
HYGMN

SEQ ID NO: 1893 - protein, 17 aa, Artificial Sequence
  Description of Artificial Sequence: Synthetic peptide
  XENP024279 vhCDR2
WINTYTGEPTYADGFTG

SEQ ID NO: 1894 - protein, 8 aa, Artificial Sequence
  Description of Artificial Sequence: Synthetic peptide
  XENP024279 vhCDR3
DYYGSSPY

SEQ ID NO: 1895 - protein, 16 aa, Artificial Sequence
  Description of Artificial Sequence: Synthetic peptide
  XENP024279 vlCDR1
KSSQSIVHSNGNTYLE

SEQ ID NO: 1896 - protein, 7 aa, Artificial Sequence
  Description of Artificial Sequence: Synthetic peptide
  XENP024279 vlCDR2
KVSNRFS

SEQ ID NO: 1897 - protein, 9 aa, Artificial Sequence
  Description of Artificial Sequence: Synthetic peptide
  XENP024279 vlCDR3
FQGSHVPNT

SEQ ID NO: 1898 - protein, 251 aa, Artificial Sequence
  Description of Artificial Sequence: Synthetic polypeptide
  XENP024280 1C11_H3.160_L3_scFv
QIQLVQSGSELKKPGASVKVSCKASGYTFTHYGMNWVRQAPGQGLEWMGWINTYTGEPTYADGFTGRFVFSLDTSVSQAYLQISSLKAEDTAVYFCARDYYGSSPYWGQGTLVTVSSGKPGSGKPGSGKPGSGKPGSDVLMTQSPDSLAVSLGERATINCKSSQSIVHSNGNTYLEWYQQKPGQSPKLLIYKVSNRFSGVPDRFSGSGSGTDFTLTISSLQAEDVAVYYCFQGSHVPNTFGGGTKVEIKGS

SEQ ID NO: 1899 - protein, 117 aa, Artificial Sequence
  Description of Artificial Sequence: Synthetic polypeptide
  VH of XENP024280
QIQLVQSGSELKKPGASVKVSCKASGYTFTHYGMNWVRQAPGQGLEWMGWINTYTGEPTYADGFTGRFVFSLDTSVSQAYLQISSLKAEDTAVYFCARDYYGSSPYWGQGTLVTVSS

SEQ ID NO: 1900 - protein, 114 aa, Artificial Sequence; identical to SEQ ID NO: 649
  Description of Artificial Sequence: Synthetic polypeptide
  VL of XENP024280

SEQ ID NO: 1901 - protein, 5 aa, Artificial Sequence
  Description of Artificial Sequence: Synthetic peptide
  XENP024280 vhCDR1
HYGMN

SEQ ID NO: 1902 - protein, 17 aa, Artificial Sequence
  Description of Artificial Sequence: Synthetic peptide
  XENP024280 vhCDR2
WINTYTGEPTYADGFTG

SEQ ID NO: 1903 - protein, 8 aa, Artificial Sequence
  Description of Artificial Sequence: Synthetic peptide
  XENP024280 vhCDR3
DYYGSSPY

SEQ ID NO: 1904 - protein, 16 aa, Artificial Sequence
  Description of Artificial Sequence: Synthetic peptide
  XENP024280 vlCDR1
KSSQSIVHSNGNTYLE

SEQ ID NO: 1905 - protein, 7 aa, Artificial Sequence
  Description of Artificial Sequence: Synthetic peptide
  XENP024280 vlCDR2
KVSNRFS

SEQ ID NO: 1906 - protein, 9 aa, Artificial Sequence
  Description of Artificial Sequence: Synthetic peptide
  XENP024280 vlCDR3
FQGSHVPNT

SEQ ID NO: 1907 - protein, 251 aa, Artificial Sequence
  Description of Artificial Sequence: Synthetic polypeptide
  XENP024281 1C11_H3.161_L3_scFv
QIQLVQSGSELKKPGASVKVSCKASGYTFTHYGMNWVRQAPGQGLEWMGWINTYTGEPTYADGFTGRFVFSLDTSVSSAYLQISSLKAEDTAVYFCARDYYGSSPYWGQGTLVTVSSGKPGSGKPGSGKPGSGKPGSDVLMTQSPDSLAVSLGERATINCKSSQSIVHSNGNTYLEWYQQKPGQSPKLLIYKVSNRFSGVPDRFSGSGSGTDFTLTISSLQAEDVAVYYCFQGSHVPNTFGGGTKVEIKGS

SEQ ID NO: 1908 - protein, 117 aa, Artificial Sequence
  Description of Artificial Sequence: Synthetic polypeptide
  VH of XENP024281
QIQLVQSGSELKKPGASVKVSCKASGYTFTHYGMNWVRQAPGQGLEWMGWINTYTGEPTYADGFTGRFVFSLDTSVSSAYLQISSLKAEDTAVYFCARDYYGSSPYWGQGTLVTVSS

SEQ ID NO: 1909 - protein, 114 aa, Artificial Sequence; identical to SEQ ID NO: 649
  Description of Artificial Sequence: Synthetic polypeptide
  VL of XENP024281

SEQ ID NO: 1910 - protein, 5 aa, Artificial Sequence
  Description of Artificial Sequence: Synthetic peptide
  XENP024281 vhCDR1
HYGMN

SEQ ID NO: 1911 - protein, 17 aa, Artificial Sequence
  Description of Artificial Sequence: Synthetic peptide
  XENP024281 vhCDR2
WINTYTGEPTYADGFTG

SEQ ID NO: 1912 - protein, 8 aa, Artificial Sequence
  Description of Artificial Sequence: Synthetic peptide
  XENP024281 vhCDR3
DYYGSSPY

SEQ ID NO: 1913 - protein, 16 aa, Artificial Sequence
  Description of Artificial Sequence: Synthetic peptide
  XENP024281 vlCDR1
KSSQSIVHSNGNTYLE

SEQ ID NO: 1914 - protein, 7 aa, Artificial Sequence
  Description of Artificial Sequence: Synthetic peptide
  XENP024281 vlCDR2
KVSNRFS

SEQ ID NO: 1915 - protein, 9 aa, Artificial Sequence
  Description of Artificial Sequence: Synthetic peptide
  XENP024281 vlCDR3
FQGSHVPNT

SEQ ID NO: 1916 - protein, 251 aa, Artificial Sequence
  Description of Artificial Sequence: Synthetic polypeptide
  XENP024282 1C11_H3.162_L3_scFv
QIQLVQSGSELKKPGASVKVSCKASGYTFTHYGMNWVRQAPGQGLEWMGWINTYTGEPTYADGFTGRFVFSLDTSVSTLYLQISSLKAEDTAVYFCARDYYGSSPYWGQGTLVTVSSGKPGSGKPGSGKPGSGKPGSDVLMTQSPDSLAVSLGERATINCKSSQSIVHSNGNTYLEWYQQKPGQSPKLLIYKVSNRFSGVPDRFSGSGSGTDFTLTISSLQAEDVAVYYCFQGSHVPNTFGGGTKVEIKGS

SEQ ID NO: 1917 - protein, 117 aa, Artificial Sequence
  Description of Artificial Sequence: Synthetic polypeptide
  VH of XENP024282
QIQLVQSGSELKKPGASVKVSCKASGYTFTHYGMNWVRQAPGQGLEWMGWINTYTGEPTYADGFTGRFVFSLDTSVSTLYLQISSLKAEDTAVYFCARDYYGSSPYWGQGTLVTVSS

SEQ ID NO: 1918 - protein, 114 aa, Artificial Sequence; identical to SEQ ID NO: 649
  Description of Artificial Sequence: Synthetic polypeptide
  VL of XENP024282

SEQ ID NO: 1919 - protein, 5 aa, Artificial Sequence
  Description of Artificial Sequence: Synthetic peptide
  XENP024282 vhCDR1
HYGMN

SEQ ID NO: 1920 - protein, 17 aa, Artificial Sequence
  Description of Artificial Sequence: Synthetic peptide
  XENP024282 vhCDR2
WINTYTGEPTYADGFTG

SEQ ID NO: 1921 - protein, 8 aa, Artificial Sequence
  Description of Artificial Sequence: Synthetic peptide
  XENP024282 vhCDR3
DYYGSSPY

SEQ ID NO: 1922 - protein, 16 aa, Artificial Sequence
  Description of Artificial Sequence: Synthetic peptide
  XENP024282 vlCDR1
KSSQSIVHSNGNTYLE

SEQ ID NO: 1923 - protein, 7 aa, Artificial Sequence
  Description of Artificial Sequence: Synthetic peptide
  XENP024282 vlCDR2
KVSNRFS

SEQ ID NO: 1924 - protein, 9 aa, Artificial Sequence
  Description of Artificial Sequence: Synthetic peptide
  XENP024282 vlCDR3
FQGSHVPNT

SEQ ID NO: 1925 - protein, 251 aa, Artificial Sequence
  Description of Artificial Sequence: Synthetic polypeptide
  XENP024283 1C11_H3.164_L3_scFv
QIQLVQSGSELKKPGASVKVSCKASGYTFTHYGMNWVRQAPGQGLEWMGWINTYTGEPTYADGFTGRFVFSLDTSVSTAVLQISSLKAEDTAVYFCARDYYGSSPYWGQGTLVTVSSGKPGSGKPGSGKPGSGKPGSDVLMTQSPDSLAVSLGERATINCKSSQSIVHSNGNTYLEWYQQKPGQSPKLLIYKVSNRFSGVPDRFSGSGSGTDFTLTISSLQAEDVAVYYCFQGSHVPNTFGGGTKVEIKGS

SEQ ID NO: 1926 - protein, 117 aa, Artificial Sequence
  Description of Artificial Sequence: Synthetic polypeptide
  VH of XENP024283
QIQLVQSGSELKKPGASVKVSCKASGYTFTHYGMNWVRQAPGQGLEWMGWINTYTGEPTYADGFTGRFVFSLDTSVSTAVLQISSLKAEDTAVYFCARDYYGSSPYWGQGTLVTVSS

SEQ ID NO: 1927 - protein, 114 aa, Artificial Sequence; identical to SEQ ID NO: 649
  Description of Artificial Sequence: Synthetic polypeptide
  VL of XENP024283

SEQ ID NO: 1928 - protein, 5 aa, Artificial Sequence
  Description of Artificial Sequence: Synthetic peptide
  XENP024283 vhCDR1
HYGMN

SEQ ID NO: 1929 - protein, 17 aa, Artificial Sequence
  Description of Artificial Sequence: Synthetic peptide
  XENP024283 vhCDR2
WINTYTGEPTYADGFTG

SEQ ID NO: 1930 - protein, 8 aa, Artificial Sequence
  Description of Artificial Sequence: Synthetic peptide
  XENP024283 vhCDR3
DYYGSSPY

SEQ ID NO: 1931 - protein, 16 aa, Artificial Sequence
  Description of Artificial Sequence: Synthetic peptide
  XENP024283 vlCDR1
KSSQSIVHSNGNTYLE

SEQ ID NO: 1932 - protein, 7 aa, Artificial Sequence
  Description of Artificial Sequence: Synthetic peptide
  XENP024283 vlCDR2
KVSNRFS

SEQ ID NO: 1933 - protein, 9 aa, Artificial Sequence
  Description of Artificial Sequence: Synthetic peptide
  XENP024283 vlCDR3
FQGSHVPNT

SEQ ID NO: 1934 - protein, 251 aa, Artificial Sequence
  Description of Artificial Sequence: Synthetic polypeptide
  XENP024284 1C11_H3.165_L3_scFv
QIQLVQSGSELKKPGASVKVSCKASGYTFTHYGMNWVRQAPGQGLEWMGWINTYTGEPTYADGFTGRFVFSLDTSVSTASLQISSLKAEDTAVYFCARDYYGSSPYWGQGTLVTVSSGKPGSGKPGSGKPGSGKPGSDVLMTQSPDSLAVSLGERATINCKSSQSIVHSNGNTYLEWYQQKPGQSPKLLIYKVSNRFSGVPDRFSGSGSGTDFTLTISSLQAEDVAVYYCFQGSHVPNTFGGGTKVEIKGS

SEQ ID NO: 1935 - protein, 117 aa, Artificial Sequence
  Description of Artificial Sequence: Synthetic polypeptide
  VH of XENP024284
QIQLVQSGSELKKPGASVKVSCKASGYTFTHYGMNWVRQAPGQGLEWMGWINTYTGEPTYADGFTGRFVFSLDTSVSTASLQISSLKAEDTAVYFCARDYYGSSPYWGQGTLVTVSS

SEQ ID NO: 1936 - protein, 114 aa, Artificial Sequence; identical to SEQ ID NO: 649
  Description of Artificial Sequence: Synthetic polypeptide
  VL of XENP024284

SEQ ID NO: 1937 - protein, 5 aa, Artificial Sequence
  Description of Artificial Sequence: Synthetic peptide
  XENP024284 vhCDR1
HYGMN

SEQ ID NO: 1938 - protein, 17 aa, Artificial Sequence
  Description of Artificial Sequence: Synthetic peptide
  XENP024284 vhCDR2
WINTYTGEPTYADGFTG

SEQ ID NO: 1939 - protein, 8 aa, Artificial Sequence
  Description of Artificial Sequence: Synthetic peptide
  XENP024284 vhCDR3
DYYGSSPY

SEQ ID NO: 1940 - protein, 16 aa, Artificial Sequence
  Description of Artificial Sequence: Synthetic peptide
  XENP024284 vlCDR1
KSSQSIVHSNGNTYLE

SEQ ID NO: 1941 - protein, 7 aa, Artificial Sequence
  Description of Artificial Sequence: Synthetic peptide
  XENP024284 vlCDR2
KVSNRFS

SEQ ID NO: 1942 - protein, 9 aa, Artificial Sequence
  Description of Artificial Sequence: Synthetic peptide
  XENP024284 vlCDR3
FQGSHVPNT

SEQ ID NO: 1943 - protein, 251 aa, Artificial Sequence
  Description of Artificial Sequence: Synthetic polypeptide
  XENP024285 1C11_H3.166_L3_scFv
QIQLVQSGSELKKPGASVKVSCKASGYTFTHYGMNWVRQAPGQGLEWMGWINTYTGEPTYADGFTGRFVFSLDTSVSTAYLEISSLKAEDTAVYFCARDYYGSSPYWGQGTLVTVSSGKPGSGKPGSGKPGSGKPGSDVLMTQSPDSLAVSLGERATINCKSSQSIVHSNGNTYLEWYQQKPGQSPKLLIYKVSNRFSGVPDRFSGSGSGTDFTLTISSLQAEDVAVYYCFQGSHVPNTFGGGTKVEIKGS

SEQ ID NO: 1944 - protein, 117 aa, Artificial Sequence
  Description of Artificial Sequence: Synthetic polypeptide
  VH of XENP024285
QIQLVQSGSELKKPGASVKVSCKASGYTFTHYGMNWVRQAPGQGLEWMGWINTYTGEPTYADGFTGRFVFSLDTSVSTAYLEISSLKAEDTAVYFCARDYYGSSPYWGQGTLVTVSS

SEQ ID NO: 1945 - protein, 114 aa, Artificial Sequence; identical to SEQ ID NO: 649
  Description of Artificial Sequence: Synthetic polypeptide
  VL of XENP024285

SEQ ID NO: 1946 - protein, 5 aa, Artificial Sequence
  Description of Artificial Sequence: Synthetic peptide
  XENP024285 vhCDR1
HYGMN

SEQ ID NO: 1947 - protein, 17 aa, Artificial Sequence
  Description of Artificial Sequence: Synthetic peptide
  XENP024285 vhCDR2
WINTYTGEPTYADGFTG

SEQ ID NO: 1948 - protein, 8 aa, Artificial Sequence
  Description of Artificial Sequence: Synthetic peptide
  XENP024285 vhCDR3
DYYGSSPY

SEQ ID NO: 1949 - protein, 16 aa, Artificial Sequence
  Description of Artificial Sequence: Synthetic peptide
  XENP024285 vlCDR1
KSSQSIVHSNGNTYLE

SEQ ID NO: 1950 - protein, 7 aa, Artificial Sequence
  Description of Artificial Sequence: Synthetic peptide
  XENP024285 vlCDR2
KVSNRFS

SEQ ID NO: 1951 - protein, 9 aa, Artificial Sequence
  Description of Artificial Sequence: Synthetic peptide
  XENP024285 vlCDR3
FQGSHVPNT

SEQ ID NO: 1952 - protein, 251 aa, Artificial Sequence
  Description of Artificial Sequence: Synthetic polypeptide
  XENP024286 1C11_H3.167_L3_scFv
QIQLVQSGSELKKPGASVKVSCKASGYTFTHYGMNWVRQAPGQGLEWMGWINTYTGEPTYADGFTGRFVFSLDTSVSTAYLKISSLKAEDTAVYFCARDYYGSSPYWGQGTLVTVSSGKPGSGKPGSGKPGSGKPGSDVLMTQSPDSLAVSLGERATINCKSSQSIVHSNGNTYLEWYQQKPGQSPKLLIYKVSNRFSGVPDRFSGSGSGTDFTLTISSLQAEDVAVYYCFQGSHVPNTFGGGTKVEIKGS

SEQ ID NO: 1953 - protein, 117 aa, Artificial Sequence
  Description of Artificial Sequence: Synthetic polypeptide
  VH of XENP024286
QIQLVQSGSELKKPGASVKVSCKASGYTFTHYGMNWVRQAPGQGLEWMGWINTYTGEPTYADGFTGRFVFSLDTSVSTAYLKISSLKAEDTAVYFCARDYYGSSPYWGQGTLVTVSS

SEQ ID NO: 1954 - protein, 114 aa, Artificial Sequence; identical to SEQ ID NO: 649
  Description of Artificial Sequence: Synthetic polypeptide
  VL of XENP024286

SEQ ID NO: 1955 - protein, 5 aa, Artificial Sequence
  Description of Artificial Sequence: Synthetic peptide
  XENP024286 vhCDR1
HYGMN

SEQ ID NO: 1956 - protein, 17 aa, Artificial Sequence
  Description of Artificial Sequence: Synthetic peptide
  XENP024286 vhCDR2
WINTYTGEPTYADGFTG

SEQ ID NO: 1957 - protein, 8 aa, Artificial Sequence
  Description of Artificial Sequence: Synthetic peptide
  XENP024286 vhCDR3
DYYGSSPY

SEQ ID NO: 1958 - protein, 16 aa, Artificial Sequence
  Description of Artificial Sequence: Synthetic peptide
  XENP024286 vlCDR1
KSSQSIVHSNGNTYLE

SEQ ID NO: 1959 - protein, 7 aa, Artificial Sequence
  Description of Artificial Sequence: Synthetic peptide
  XENP024286 vlCDR2
KVSNRFS

SEQ ID NO: 1960 - protein, 9 aa, Artificial Sequence
  Description of Artificial Sequence: Synthetic peptide
  XENP024286 vlCDR3
FQGSHVPNT

SEQ ID NO: 1961 - protein, 251 aa, Artificial Sequence
  Description of Artificial Sequence: Synthetic polypeptide
  XENP024287 1C11_H3.168_L3_scFv
QIQLVQSGSELKKPGASVKVSCKASGYTFTHYGMNWVRQAPGQGLEWMGWINTYTGEPTYADGFTGRFVFSLDTSVSTAYLQINSLKAEDTAVYFCARDYYGSSPYWGQGTLVTVSSGKPGSGKPGSGKPGSGKPGSDVLMTQSPDSLAVSLGERATINCKSSQSIVHSNGNTYLEWYQQKPGQSPKLLIYKVSNRFSGVPDRFSGSGSGTDFTLTISSLQAEDVAVYYCFQGSHVPNTFGGGTKVEIKGS

SEQ ID NO: 1962 - protein, 117 aa, Artificial Sequence
  Description of Artificial Sequence: Synthetic polypeptide
  VH of XENP024287
QIQLVQSGSELKKPGASVKVSCKASGYTFTHYGMNWVRQAPGQGLEWMGWINTYTGEPTYADGFTGRFVFSLDTSVSTAYLQINSLKAEDTAVYFCARDYYGSSPYWGQGTLVTVSS

SEQ ID NO: 1963 - protein, 114 aa, Artificial Sequence; identical to SEQ ID NO: 649
  Description of Artificial Sequence: Synthetic polypeptide
  VL of XENP024287

SEQ ID NO: 1964 - protein, 5 aa, Artificial Sequence
  Description of Artificial Sequence: Synthetic peptide
  XENP024287 vhCDR1
HYGMN

SEQ ID NO: 1965 - protein, 17 aa, Artificial Sequence
  Description of Artificial Sequence: Synthetic peptide
  XENP024287 vhCDR2
WINTYTGEPTYADGFTG

SEQ ID NO: 1966 - protein, 8 aa, Artificial Sequence
  Description of Artificial Sequence: Synthetic peptide
  XENP024287 vhCDR3
DYYGSSPY

SEQ ID NO: 1967 - protein, 16 aa, Artificial Sequence
  Description of Artificial Sequence: Synthetic peptide
  XENP024287 vlCDR1
KSSQSIVHSNGNTYLE

SEQ ID NO: 1968 - protein, 7 aa, Artificial Sequence
  Description of Artificial Sequence: Synthetic peptide
  XENP024287 vlCDR2
KVSNRFS

SEQ ID NO: 1969 - protein, 9 aa, Artificial Sequence
  Description of Artificial Sequence: Synthetic peptide
  XENP024287 vlCDR3
FQGSHVPNT

SEQ ID NO: 1970 - protein, 251 aa, Artificial Sequence
  Description of Artificial Sequence: Synthetic polypeptide
  XENP024288 1C11_H3.169_L3_scFv
QIQLVQSGSELKKPGASVKVSCKASGYTFTHYGMNWVRQAPGQGLEWMGWINTYTGEPTYADGFTGRFVFSLDTSVSTAYLQISSVKAEDTAVYFCARDYYGSSPYWGQGTLVTVSSGKPGSGKPGSGKPGSGKPGSDVLMTQSPDSLAVSLGERATINCKSSQSIVHSNGNTYLEWYQQKPGQSPKLLIYKVSNRFSGVPDRFSGSGSGTDFTLTISSLQAEDVAVYYCFQGSHVPNTFGGGTKVEIKGS

SEQ ID NO: 1971 - protein, 117 aa, Artificial Sequence
  Description of Artificial Sequence: Synthetic polypeptide
  VH of XENP024288
QIQLVQSGSELKKPGASVKVSCKASGYTFTHYGMNWVRQAPGQGLEWMGWINTYTGEPTYADGFTGRFVFSLDTSVSTAYLQISSVKAEDTAVYFCARDYYGSSPYWGQGTLVTVSS

SEQ ID NO: 1972 - protein, 114 aa, Artificial Sequence; identical to SEQ ID NO: 649
  Description of Artificial Sequence: Synthetic polypeptide
  VL of XENP024288

SEQ ID NO: 1973 - protein, 5 aa, Artificial Sequence
  Description of Artificial Sequence: Synthetic peptide
  XENP024288 vhCDR1
HYGMN

SEQ ID NO: 1974 - protein, 17 aa, Artificial Sequence
  Description of Artificial Sequence: Synthetic peptide
  XENP024288 vhCDR2
WINTYTGEPTYADGFTG

SEQ ID NO: 1975 - protein, 8 aa, Artificial Sequence
  Description of Artificial Sequence: Synthetic peptide
  XENP024288 vhCDR3
DYYGSSPY

SEQ ID NO: 1976 - protein, 16 aa, Artificial Sequence
  Description of Artificial Sequence: Synthetic peptide
  XENP024288 vlCDR1
KSSQSIVHSNGNTYLE

SEQ ID NO: 1977 - protein, 7 aa, Artificial Sequence
  Description of Artificial Sequence: Synthetic peptide
  XENP024288 vlCDR2
KVSNRFS

SEQ ID NO: 1978 - protein, 9 aa, Artificial Sequence
  Description of Artificial Sequence: Synthetic peptide
  XENP024288 vlCDR3
FQGSHVPNT

SEQ ID NO: 1979 - protein, 251 aa, Artificial Sequence
  Description of Artificial Sequence: Synthetic polypeptide
  XENP024289 1C11_H3.170_L3_scFv
QIQLVQSGSELKKPGASVKVSCKASGYTFTHYGMNWVRQAPGQGLEWMGWINTYTGEPTYADGFTGRFVFSLDTSVSTAYLQISSMKAEDTAVYFCARDYYGSSPYWGQGTLVTVSSGKPGSGKPGSGKPGSGKPGSDVLMTQSPDSLAVSLGERATINCKSSQSIVHSNGNTYLEWYQQKPGQSPKLLIYKVSNRFSGVPDRFSGSGSGTDFTLTISSLQAEDVAVYYCFQGSHVPNTFGGGTKVEIKGS

SEQ ID NO: 1980 - protein, 117 aa, Artificial Sequence
  Description of Artificial Sequence: Synthetic polypeptide
  VH of XENP024289
QIQLVQSGSELKKPGASVKVSCKASGYTFTHYGMNWVRQAPGQGLEWMGWINTYTGEPTYADGFTGRFVFSLDTSVSTAYLQISSMKAEDTAVYFCARDYYGSSPYWGQGTLVTVSS

SEQ ID NO: 1981 - protein, 114 aa, Artificial Sequence; identical to SEQ ID NO: 649
  Description of Artificial Sequence: Synthetic polypeptide
  VL of XENP024289

SEQ ID NO: 1982 - protein, 5 aa, Artificial Sequence
  Description of Artificial Sequence: Synthetic peptide
  XENP024289 vhCDR1
HYGMN

SEQ ID NO: 1983 - protein, 17 aa, Artificial Sequence
  Description of Artificial Sequence: Synthetic peptide
  XENP024289 vhCDR2
WINTYTGEPTYADGFTG

SEQ ID NO: 1984 - protein, 8 aa, Artificial Sequence
  Description of Artificial Sequence: Synthetic peptide
  XENP024289 vhCDR3
DYYGSSPY

SEQ ID NO: 1985 - protein, 16 aa, Artificial Sequence
  Description of Artificial Sequence: Synthetic peptide
  XENP024289 vlCDR1
KSSQSIVHSNGNTYLE

SEQ ID NO: 1986 - protein, 7 aa, Artificial Sequence
  Description of Artificial Sequence: Synthetic peptide
  XENP024289 vlCDR2
KVSNRFS

SEQ ID NO: 1987 - protein, 9 aa, Artificial Sequence
  Description of Artificial Sequence: Synthetic peptide
  XENP024289 vlCDR3
FQGSHVPNT

SEQ ID NO: 1988 - protein, 251 aa, Artificial Sequence
  Description of Artificial Sequence: Synthetic polypeptide
  XENP024290 1C11_H3.171_L3_scFv
QIQLVQSGSELKKPGASVKVSCKASGYTFTHYGMNWVRQAPGQGLEWMGWINTYTGEPTYADGFTGRFVFSLDTSVSTAYLQISSLKSEDTAVYFCARDYYGSSPYWGQGTLVTVSSGKPGSGKPGSGKPGSGKPGSDVLMTQSPDSLAVSLGERATINCKSSQSIVHSNGNTYLEWYQQKPGQSPKLLIYKVSNRFSGVPDRFSGSGSGTDFTLTISSLQAEDVAVYYCFQGSHVPNTFGGGTKVEIKGS

SEQ ID NO: 1989 - protein, 117 aa, Artificial Sequence
  Description of Artificial Sequence: Synthetic polypeptide
  VH of XENP024290
QIQLVQSGSELKKPGASVKVSCKASGYTFTHYGMNWVRQAPGQGLEWMGWINTYTGEPTYADGFTGRFVFSLDTSVSTAYLQISSLKSEDTAVYFCARDYYGSSPYWGQGTLVTVSS

SEQ ID NO: 1990 - protein, 114 aa, Artificial Sequence; identical to SEQ ID NO: 649
  Description of Artificial Sequence: Synthetic polypeptide
  VL of XENP024290

SEQ ID NO: 1991 - protein, 5 aa, Artificial Sequence
  Description of Artificial Sequence: Synthetic peptide
  XENP024290 vhCDR1
HYGMN

SEQ ID NO: 1992 - protein, 17 aa, Artificial Sequence
  Description of Artificial Sequence: Synthetic peptide
  XENP024290 vhCDR2
WINTYTGEPTYADGFTG

SEQ ID NO: 1993 - protein, 8 aa, Artificial Sequence
  Description of Artificial Sequence: Synthetic peptide
  XENP024290 vhCDR3
DYYGSSPY

SEQ ID NO: 1994 - protein, 16 aa, Artificial Sequence
  Description of Artificial Sequence: Synthetic peptide
  XENP024290 vlCDR1
KSSQSIVHSNGNTYLE

SEQ ID NO: 1995 - protein, 7 aa, Artificial Sequence
  Description of Artificial Sequence: Synthetic peptide
  XENP024290 vlCDR2
KVSNRFS

SEQ ID NO: 1996 - protein, 9 aa, Artificial Sequence
  Description of Artificial Sequence: Synthetic peptide
  XENP024290 vlCDR3
FQGSHVPNT

SEQ ID NO: 1997 - protein, 251 aa, Artificial Sequence
  Description of Artificial Sequence: Synthetic polypeptide
  XENP024291 1C11_H3.172_L3_scFv
QIQLVQSGSELKKPGASVKVSCKASGYTFTHYGMNWVRQAPGQGLEWMGWINTYTGEPTYADGFTGRFVFSLDTSVSTAYLQISSLKPEDTAVYFCARDYYGSSPYWGQGTLVTVSSGKPGSGKPGSGKPGSGKPGSDVLMTQSPDSLAVSLGERATINCKSSQSIVHSNGNTYLEWYQQKPGQSPKLLIYKVSNRFSGVPDRFSGSGSGTDFTLTISSLQAEDVAVYYCFQGSHVPNTFGGGTKVEIKGS

SEQ ID NO: 1998 - protein, 117 aa, Artificial Sequence
  Description of Artificial Sequence: Synthetic polypeptide
  VH of XENP024291
QIQLVQSGSELKKPGASVKVSCKASGYTFTHYGMNWVRQAPGQGLEWMGWINTYTGEPTYADGFTGRFVFSLDTSVSTAYLQISSLKPEDTAVYFCARDYYGSSPYWGQGTLVTVSS

SEQ ID NO: 1999 - protein, 114 aa, Artificial Sequence; identical to SEQ ID NO: 649
  Description of Artificial Sequence: Synthetic polypeptide
  VL of XENP024291

SEQ ID NO: 2000 - protein, 5 aa, Artificial Sequence
  Description of Artificial Sequence: Synthetic peptide
  XENP024291 vhCDR1
HYGMN

SEQ ID NO: 2001 - protein, 17 aa, Artificial Sequence
  Description of Artificial Sequence: Synthetic peptide
  XENP024291 vhCDR2
WINTYTGEPTYADGFTG

SEQ ID NO: 2002 - protein, 8 aa, Artificial Sequence
  Description of Artificial Sequence: Synthetic peptide
  XENP024291 vhCDR3
DYYGSSPY

SEQ ID NO: 2003 - protein, 16 aa, Artificial Sequence
  Description of Artificial Sequence: Synthetic peptide
  XENP024291 vlCDR1
KSSQSIVHSNGNTYLE

SEQ ID NO: 2004 - protein, 7 aa, Artificial Sequence
  Description of Artificial Sequence: Synthetic peptide
  XENP024291 vlCDR2
KVSNRFS

SEQ ID NO: 2005 - protein, 9 aa, Artificial Sequence
  Description of Artificial Sequence: Synthetic peptide
  XENP024291 vlCDR3
FQGSHVPNT

SEQ ID NO: 2006 - protein, 251 aa, Artificial Sequence
  Description of Artificial Sequence: Synthetic polypeptide
  XENP024292 1C11_H3.173_L3_scFv
QIQLVQSGSELKKPGASVKVSCKASGYTFTHYGMNWVRQAPGQGLEWMGWINTYTGEPTYADGFTGRFVFSLDTSVSTAYLQISSLKADDTAVYFCARDYYGSSPYWGQGTLVTVSSGKPGSGKPGSGKPGSGKPGSDVLMTQSPDSLAVSLGERATINCKSSQSIVHSNGNTYLEWYQQKPGQSPKLLIYKVSNRFSGVPDRFSGSGSGTDFTLTISSLQAEDVAVYYCFQGSHVPNTFGGGTKVEIKGS

SEQ ID NO: 2007 - protein, 117 aa, Artificial Sequence
  Description of Artificial Sequence: Synthetic polypeptide
  VH of XENP024292
QIQLVQSGSELKKPGASVKVSCKASGYTFTHYGMNWVRQAPGQGLEWMGWINTYTGEPTYADGFTGRFVFSLDTSVSTAYLQISSLKADDTAVYFCARDYYGSSPYWGQGTLVTVSS

SEQ ID NO: 2008 - protein, 114 aa, Artificial Sequence; identical to SEQ ID NO: 649
  Description of Artificial Sequence: Synthetic polypeptide
  VL of XENP024292

SEQ ID NO: 2009 - protein, 5 aa, Artificial Sequence
  Description of Artificial Sequence: Synthetic peptide
  XENP024292 vhCDR1
HYGMN

SEQ ID NO: 2010 - protein, 17 aa, Artificial Sequence
  Description of Artificial Sequence: Synthetic peptide
  XENP024292 vhCDR2
WINTYTGEPTYADGFTG

SEQ ID NO: 2011 - protein, 8 aa, Artificial Sequence
  Description of Artificial Sequence: Synthetic peptide
  XENP024292 vhCDR3
DYYGSSPY

SEQ ID NO: 2012 - protein, 16 aa, Artificial Sequence
  Description of Artificial Sequence: Synthetic peptide
  XENP024292 vlCDR1
KSSQSIVHSNGNTYLE

SEQ ID NO: 2013 - protein, 7 aa, Artificial Sequence
  Description of Artificial Sequence: Synthetic peptide
  XENP024292 vlCDR2
KVSNRFS

SEQ ID NO: 2014 - protein, 9 aa, Artificial Sequence
  Description of Artificial Sequence: Synthetic peptide
  XENP024292 vlCDR3
FQGSHVPNT

SEQ ID NO: 2015 - protein, 251 aa, Artificial Sequence
  Description of Artificial Sequence: Synthetic polypeptide
  XENP024293 1C11_H3.174_L3_scFv
QIQLVQSGSELKKPGASVKVSCKASGYTFTHYGMNWVRQAPGQGLEWMGWINTYTGEPTYADGFTGRFVFSLDTSVSTAYLQISSLKAADTAVYFCARDYYGSSPYWGQGTLVTVSSGKPGSGKPGSGKPGSGKPGSDVLMTQSPDSLAVSLGERATINCKSSQSIVHSNGNTYLEWYQQKPGQSPKLLIYKVSNRFSGVPDRFSGSGSGTDFTLTISSLQAEDVAVYYCFQGSHVPNTFGGGTKVEIKGS

SEQ ID NO: 2016 - protein, 117 aa, Artificial Sequence
  Description of Artificial Sequence: Synthetic polypeptide
  VH of XENP024293
QIQLVQSGSELKKPGASVKVSCKASGYTFTHYGMNWVRQAPGQGLEWMGWINTYTGEPTYADGFTGRFVFSLDTSVSTAYLQISSLKAADTAVYFCARDYYGSSPYWGQGTLVTVSS

SEQ ID NO: 2017 - protein, 114 aa, Artificial Sequence; identical to SEQ ID NO: 649
  Description of Artificial Sequence: Synthetic polypeptide
  VL of XENP024293

SEQ ID NO: 2018 - protein, 5 aa, Artificial Sequence
  Description of Artificial Sequence: Synthetic peptide
  XENP024293 vhCDR1
HYGMN

SEQ ID NO: 2019 - protein, 17 aa, Artificial Sequence
  Description of Artificial Sequence: Synthetic peptide
  XENP024293 vhCDR2
WINTYTGEPTYADGFTG

SEQ ID NO: 2020 - protein, 8 aa, Artificial Sequence
  Description of Artificial Sequence: Synthetic peptide
  XENP024293 vhCDR3
DYYGSSPY

SEQ ID NO: 2021 - protein, 16 aa, Artificial Sequence
  Description of Artificial Sequence: Synthetic peptide
  XENP024293 vlCDR1
KSSQSIVHSNGNTYLE

SEQ ID NO: 2022 - protein, 7 aa, Artificial Sequence
  Description of Artificial Sequence: Synthetic peptide
  XENP024293 vlCDR2
KVSNRFS

SEQ ID NO: 2023 - protein, 9 aa, Artificial Sequence
  Description of Artificial Sequence: Synthetic peptide
  XENP024293 vlCDR3
FQGSHVPNT

SEQ ID NO: 2024 - protein, 251 aa, Artificial Sequence
  Description of Artificial Sequence: Synthetic polypeptide
  XENP024372 1C11_H3_L3.86_scFv
QIQLVQSGSELKKPGASVKVSCKASGYTFTHYGMNWVRQAPGQGLEWMGWINTYTGEPTYADGFTGRFVFSLDTSVSTAYLQISSLKAEDTAVYFCARDYYGSSPYWGQGTLVTVSSGKPGSGKPGSGKPGSGKPGSDVLMTQSPDSLAVSLGERATINCKSSQSIVHSNGNTYLEWYQQKPGQSPKLLIYKVSNRFTGVPDRFSGSGSGTDFTLTISSVQAEDVATYYCFQGSHVPNTFGQGTKVEIKGS

SEQ ID NO: 2025 - protein, 117 aa, Artificial Sequence; identical to SEQ ID NO: 32
  Description of Artificial Sequence: Synthetic polypeptide
  VH of XENP024372

SEQ ID NO: 2026 - protein, 114 aa, Artificial Sequence
  Description of Artificial Sequence: Synthetic polypeptide
  VL of XENP024372
DVLMTQSPDSLAVSLGERATINCKSSQSIVHSNGNTYLEWYQQKPGQSPKLLIYKVSNRFTGVPDRFSGSGSGTDFTLTISSVQAEDVATYYCFQGSHVPNTFGQGTKVEIKGS

SEQ ID NO: 2027 - protein, 5 aa, Artificial Sequence
  Description of Artificial Sequence: Synthetic peptide
  XENP024372 vhCDR1
HYGMN

SEQ ID NO: 2028 - protein, 17 aa, Artificial Sequence
  Description of Artificial Sequence: Synthetic peptide
  XENP024372 vhCDR2
WINTYTGEPTYADGFTG

SEQ ID NO: 2029 - protein, 8 aa, Artificial Sequence
  Description of Artificial Sequence: Synthetic peptide
  XENP024372 vhCDR3
DYYGSSPY

SEQ ID NO: 2030 - protein, 16 aa, Artificial Sequence
  Description of Artificial Sequence: Synthetic peptide
  XENP024372 vlCDR1
KSSQSIVHSNGNTYLE

SEQ ID NO: 2031 - protein, 7 aa, Artificial Sequence
  Description of Artificial Sequence: Synthetic peptide
  XENP024372 vlCDR2
KVSNRFT

SEQ ID NO: 2032 - protein, 9 aa, Artificial Sequence
  Description of Artificial Sequence: Synthetic peptide
  XENP024372 vlCDR3
FQGSHVPNT

SEQ ID NO: 2033 - protein, 251 aa, Artificial Sequence
  Description of Artificial Sequence: Synthetic polypeptide
  XENP024373 1C11_H3_L3.87_scFv
QIQLVQSGSELKKPGASVKVSCKASGYTFTHYGMNWVRQAPGQGLEWMGWINTYTGEPTYADGFTGRFVFSLDTSVSTAYLQISSLKAEDTAVYFCARDYYGSSPYWGQGTLVTVSSGKPGSGKPGSGKPGSGKPGSDVVMTQSPDSLAVSLGERVTINCKASQSIVHSNGNTYLEWYQQKPGQPPKLLIYKVSNRFSGVPDRFSGSGSGTDFTLTISSLQAEDVAVYYCFQGSHVPNTFGGGTKVEIKGS

SEQ ID NO: 2034 - protein, 117 aa, Artificial Sequence; identical to SEQ ID NO: 32
  Description of Artificial Sequence: Synthetic polypeptide
  VH of XENP024373

SEQ ID NO: 2035 - protein, 114 aa, Artificial Sequence
  Description of Artificial Sequence: Synthetic polypeptide
  VL of XENP024373
DVVMTQSPDSLAVSLGERVTINCKASQSIVHSNGNTYLEWYQQKPGQPPKLLIYKVSNRFSGVPDRFSGSGSGTDFTLTISSLQAEDVAVYYCFQGSHVPNTFGGGTKVEIKGS

SEQ ID NO: 2036 - protein, 5 aa, Artificial Sequence
  Description of Artificial Sequence: Synthetic peptide
  XENP024373 vhCDR1
HYGMN

SEQ ID NO: 2037 - protein, 17 aa, Artificial Sequence
  Description of Artificial Sequence: Synthetic peptide
  XENP024373 vhCDR2
WINTYTGEPTYADGFTG

SEQ ID NO: 2038 - protein, 8 aa, Artificial Sequence
  Description of Artificial Sequence: Synthetic peptide
  XENP024373 vhCDR3
DYYGSSPY

SEQ ID NO: 2039 - protein, 16 aa, Artificial Sequence
  Description of Artificial Sequence: Synthetic peptide
  XENP024373 vlCDR1
KASQSIVHSNGNTYLE

SEQ ID NO: 2040 - protein, 7 aa, Artificial Sequence
  Description of Artificial Sequence: Synthetic peptide
  XENP024373 vlCDR2
KVSNRFS

SEQ ID NO: 2041 - protein, 9 aa, Artificial Sequence
  Description of Artificial Sequence: Synthetic peptide
  XENP024373 vlCDR3
FQGSHVPNT

SEQ ID NO: 2042 - protein, 251 aa, Artificial Sequence
  Description of Artificial Sequence: Synthetic polypeptide
  XENP024374 1C11_H3_L3.90_scFv
QIQLVQSGSELKKPGASVKVSCKASGYTFTHYGMNWVRQAPGQGLEWMGWINTYTGEPTYADGFTGRFVFSLDTSVSTAYLQISSLKAEDTAVYFCARDYYGSSPYWGQGTLVTVSSGKPGSGKPGSGKPGSGKPGSDVVMTQSPDSLAVSLGERATINCKASQSIVHSNGNTYLEWYQQKPGQPPKLLIYKVSNRFSGVPDRFSGSGSGTDFTLTISSVQAEDAATYYCFQGSHVPNTFGQGTKVEIKGS

SEQ ID NO: 2043 - protein, 117 aa, Artificial Sequence; identical to SEQ ID NO: 32
  Description of Artificial Sequence: Synthetic polypeptide
  VH of XENP024374

SEQ ID NO: 2044 - protein, 114 aa, Artificial Sequence
  Description of Artificial Sequence: Synthetic polypeptide
  VL of XENP024374
DVVMTQSPDSLAVSLGERATINCKASQSIVHSNGNTYLEWYQQKPGQPPKLLIYKVSNRFSGVPDRFSGSGSGTDFTLTISSVQAEDAATYYCFQGSHVPNTFGQGTKVEIKGS

SEQ ID NO: 2045 - protein, 5 aa, Artificial Sequence
  Description of Artificial Sequence: Synthetic peptide
  XENP024374 vhCDR1
HYGMN

SEQ ID NO: 2046 - protein, 17 aa, Artificial Sequence
  Description of Artificial Sequence: Synthetic peptide
  XENP024374 vhCDR2
WINTYTGEPTYADGFTG

SEQ ID NO: 2047 - protein, 8 aa, Artificial Sequence
  Description of Artificial Sequence: Synthetic peptide
  XENP024374 vhCDR3
DYYGSSPY

SEQ ID NO: 2048 - protein, 16 aa, Artificial Sequence
  Description of Artificial Sequence: Synthetic peptide
  XENP024374 vlCDR1
KASQSIVHSNGNTYLE

SEQ ID NO: 2049 - protein, 7 aa, Artificial Sequence
  Description of Artificial Sequence: Synthetic peptide
  XENP024374 vlCDR2
KVSNRFS

SEQ ID NO: 2050 - protein, 9 aa, Artificial Sequence
  Description of Artificial Sequence: Synthetic peptide
  XENP024374 vlCDR3
FQGSHVPNT

SEQ ID NO: 2051 - protein, 251 aa, Artificial Sequence
  Description of Artificial Sequence: Synthetic polypeptide
  XENP024375 1C11_H3_L3.92_scFv
QIQLVQSGSELKKPGASVKVSCKASGYTFTHYGMNWVRQAPGQGLEWMGWINTYTGEPTYADGFTGRFVFSLDTSVSTAYLQISSLKAEDTAVYFCARDYYGSSPYWGQGTLVTVSSGKPGSGKPGSGKPGSGKPGSDIVMTQSPDSLAVSLGERVTINCKASQSIVHSNGNTYLEWYQQKPGQPPKLLIYKVSNRFTGVPDRFSGSGSGTDFTLTISSLQAEDVAVYYCFQGSHVPNTFGGGTKVEIKGS

SEQ ID NO: 2052 - protein, 117 aa, Artificial Sequence; identical to SEQ ID NO: 32
  Description of Artificial Sequence: Synthetic polypeptide
  VH of XENP024375

SEQ ID NO: 2053 - protein, 114 aa, Artificial Sequence
  Description of Artificial Sequence: Synthetic polypeptide
  VL of XENP024375
DIVMTQSPDSLAVSLGERVTINCKASQSIVHSNGNTYLEWYQQKPGQPPKLLIYKVSNRFTGVPDRFSGSGSGTDFTLTISSLQAEDVAVYYCFQGSHVPNTFGGGTKVEIKGS

SEQ ID NO: 2054 - protein, 5 aa, Artificial Sequence
  Description of Artificial Sequence: Synthetic peptide
  XENP024375 vhCDR1
HYGMN

SEQ ID NO: 2055 - protein, 17 aa, Artificial Sequence
  Description of Artificial Sequence: Synthetic peptide
  XENP024375 vhCDR2
WINTYTGEPTYADGFTG

SEQ ID NO: 2056 - protein, 8 aa, Artificial Sequence
  Description of Artificial Sequence: Synthetic peptide
  XENP024375 vhCDR3
DYYGSSPY

SEQ ID NO: 2057 - protein, 16 aa, Artificial Sequence
  Description of Artificial Sequence: Synthetic peptide
  XENP024375 vlCDR1
KASQSIVHSNGNTYLE

SEQ ID NO: 2058 - protein, 7 aa, Artificial Sequence
  Description of Artificial Sequence: Synthetic peptide
  XENP024375 vlCDR2
KVSNRFT

SEQ ID NO: 2059 - protein, 9 aa, Artificial Sequence
  Description of Artificial Sequence: Synthetic peptide
  XENP024375 vlCDR3
FQGSHVPNT

SEQ ID NO: 2060 - protein, 251 aa, Artificial Sequence
  Description of Artificial Sequence: Synthetic polypeptide
  XENP024376 1C11_H3_L3.94_scFv
QIQLVQSGSELKKPGASVKVSCKASGYTFTHYGMNWVRQAPGQGLEWMGWINTYTGEPTYADGFTGRFVFSLDTSVSTAYLQISSLKAEDTAVYFCARDYYGSSPYWGQGTLVTVSSGKPGSGKPGSGKPGSGKPGSDILMTQSPDSLAVSLGERATINCKSSQSIVHSNGNTYLEWYQQKPGQSPKLLIYKVSNRFTGVPDRFSGSGSGTDFTLTISSVQAEDAATYYCFQGSHVPNTFGQGTKVEIKGS

SEQ ID NO: 2061 - protein, 117 aa, Artificial Sequence; identical to SEQ ID NO: 32
  Description of Artificial Sequence: Synthetic polypeptide
  VH of XENP024376

SEQ ID NO: 2062 - protein, 114 aa, Artificial Sequence
  Description of Artificial Sequence: Synthetic polypeptide
  VL of XENP024376
DILMTQSPDSLAVSLGERATINCKSSQSIVHSNGNTYLEWYQQKPGQSPKLLIYKVSNRFTGVPDRFSGSGSGTDFTLTISSVQAEDAATYYCFQGSHVPNTFGQGTKVEIKGS

SEQ ID NO: 2063 - protein, 5 aa, Artificial Sequence
  Description of Artificial Sequence: Synthetic peptide
  XENP024376 vhCDR1
HYGMN

SEQ ID NO: 2064 - protein, 17 aa, Artificial Sequence
  Description of Artificial Sequence: Synthetic peptide
  XENP024376 vhCDR2
WINTYTGEPTYADGFTG

SEQ ID NO: 2065 - protein, 8 aa, Artificial Sequence
  Description of Artificial Sequence: Synthetic peptide
  XENP024376 vhCDR3
DYYGSSPY

SEQ ID NO: 2066 - protein, 16 aa, Artificial Sequence
  Description of Artificial Sequence: Synthetic peptide
  XENP024376 vlCDR1
KSSQSIVHSNGNTYLE

SEQ ID NO: 2067 - protein, 7 aa, Artificial Sequence
  Description of Artificial Sequence: Synthetic peptide
  XENP024376 vlCDR2
KVSNRFT

SEQ ID NO: 2068 - protein, 9 aa, Artificial Sequence
  Description of Artificial Sequence: Synthetic peptide
  XENP024376 vlCDR3
FQGSHVPNT

SEQ ID NO: 2069 - protein, 251 aa, Artificial Sequence
  Description of Artificial Sequence: Synthetic polypeptide
  XENP024377 1C11_H3_L3.96_scFv
QIQLVQSGSELKKPGASVKVSCKASGYTFTHYGMNWVRQAPGQGLEWMGWINTYTGEPTYADGFTGRFVFSLDTSVSTAYLQISSLKAEDTAVYFCARDYYGSSPYWGQGTLVTVSSGKPGSGKPGSGKPGSGKPGSDIVMTQSPDSLAVSLGERATINCKASQSIVHSNGNTYLEWYQQKPGQPPKLLIYKVSNRFTGVPDRFSGSGSGTDFTLTISSVQAEDAATYYCFQGSHVPNTFGQGTKVEIKGS

SEQ ID NO: 2070 - protein, 117 aa, Artificial Sequence; identical to SEQ ID NO: 32
  Description of Artificial Sequence: Synthetic polypeptide
  VH of XENP024377

SEQ ID NO: 2071 - protein, 114 aa, Artificial Sequence
  Description of Artificial Sequence: Synthetic polypeptide
  VL of XENP024377
DIVMTQSPDSLAVSLGERATINCKASQSIVHSNGNTYLEWYQQKPGQPPKLLIYKVSNRFTGVPDRFSGSGSGTDFTLTISSVQAEDAATYYCFQGSHVPNTFGQGTKVEIKGS

SEQ ID NO: 2072 - protein, 5 aa, Artificial Sequence
  Description of Artificial Sequence: Synthetic peptide
  XENP024377 vhCDR1
HYGMN

SEQ ID NO: 2073 - protein, 17 aa, Artificial Sequence
  Description of Artificial Sequence: Synthetic peptide
  XENP024377 vhCDR2
WINTYTGEPTYADGFTG

SEQ ID NO: 2074 - protein, 8 aa, Artificial Sequence
  Description of Artificial Sequence: Synthetic peptide
  XENP024377 vhCDR3
DYYGSSPY

SEQ ID NO: 2075 - protein, 16 aa, Artificial Sequence
  Description of Artificial Sequence: Synthetic peptide
  XENP024377 vlCDR1
KASQSIVHSNGNTYLE

SEQ ID NO: 2076 - protein, 7 aa, Artificial Sequence
  Description of Artificial Sequence: Synthetic peptide
  XENP024377 vlCDR2
KVSNRFT

SEQ ID NO: 2077 - protein, 9 aa, Artificial Sequence
  Description of Artificial Sequence: Synthetic peptide
  XENP024377 vlCDR3
FQGSHVPNT

SEQ ID NO: 2078 - protein, 251 aa, Artificial Sequence
  Description of Artificial Sequence: Synthetic polypeptide
  XENP024378 1C11_H3_L3.105_scFv
QIQLVQSGSELKKPGASVKVSCKASGYTFTHYGMNWVRQAPGQGLEWMGWINTYTGEPTYADGFTGRFVFSLDTSVSTAYLQISSLKAEDTAVYFCARDYYGSSPYWGQGTLVTVSSGKPGSGKPGSGKPGSGKPGSDVLMTQSPDSLPVTPGEPATINCKSSQSIVHSNGNTYLEWYQQKPGQSPKLLIYKVSNRFSGVPDRFSGSGSGTDFTLTISSLQAEDVAVYYCFQGSHVPNTFGGGTKVEIKGS

SEQ ID NO: 2079 - protein, 117 aa, Artificial Sequence; identical to SEQ ID NO: 32
  Description of Artificial Sequence: Synthetic polypeptide
  VH of XENP024378

SEQ ID NO: 2080 - protein, 114 aa, Artificial Sequence
  Description of Artificial Sequence: Synthetic polypeptide
  VL of XENP024378
DVLMTQSPDSLPVTPGEPATINCKSSQSIVHSNGNTYLEWYQQKPGQSPKLLIYKVSNRFSGVPDRFSGSGSGTDFTLTISSLQAEDVAVYYCFQGSHVPNTFGGGTKVEIKGS

SEQ ID NO: 2081 - protein, 5 aa, Artificial Sequence
  Description of Artificial Sequence: Synthetic peptide
  XENP024378 vhCDR1
HYGMN

SEQ ID NO: 2082 - protein, 17 aa, Artificial Sequence
  Description of Artificial Sequence: Synthetic peptide
  XENP024378 vhCDR2
WINTYTGEPTYADGFTG

SEQ ID NO: 2083 - protein, 8 aa, Artificial Sequence
  Description of Artificial Sequence: Synthetic peptide
  XENP024378 vhCDR3
DYYGSSPY

SEQ ID NO: 2084 - protein, 16 aa, Artificial Sequence
  Description of Artificial Sequence: Synthetic peptide
  XENP024378 vlCDR1
KSSQSIVHSNGNTYLE

SEQ ID NO: 2085 - protein, 7 aa, Artificial Sequence
  Description of Artificial Sequence: Synthetic peptide
  XENP024378 vlCDR2
KVSNRFS

SEQ ID NO: 2086 - protein, 9 aa, Artificial Sequence
  Description of Artificial Sequence: Synthetic peptide
  XENP024378 vlCDR3
FQGSHVPNT

SEQ ID NO: 2087 - protein, 251 aa, Artificial Sequence
  Description of Artificial Sequence: Synthetic polypeptide
  XENP024379 1C11_H3_L3.129_scFv
QIQLVQSGSELKKPGASVKVSCKASGYTFTHYGMNWVRQAPGQGLEWMGWINTYTGEPTYADGFTGRFVFSLDTSVSTAYLQISSLKAEDTAVYFCARDYYGSSPYWGQGTLVTVSSGKPGSGKPGSGKPGSGKPGSDVLMTQSPDSLAVSLGERATINCKSSQSIVHSNGNTYLEWYQQKPGQSPKLLIYKVSNRFSGVPDRFSGSGSGTDFTLTINSLQAEDAATYYCHQGSHVPNTFGGGTKVEIKGS

SEQ ID NO: 2088 - protein, 117 aa, Artificial Sequence; identical to SEQ ID NO: 32
  Description of Artificial Sequence: Synthetic polypeptide
  VH of XENP024379

SEQ ID NO: 2089 - protein, 114 aa, Artificial Sequence
  Description of Artificial Sequence: Synthetic polypeptide
  VL of XENP024379
DVLMTQSPDSLAVSLGERATINCKSSQSIVHSNGNTYLEWYQQKPGQSPKLLIYKVSNRFSGVPDRFSGSGSGTDFTLTINSLQAEDAATYYCHQGSHVPNTFGGGTKVEIKGS

SEQ ID NO: 2090 - protein, 5 aa, Artificial Sequence
  Description of Artificial Sequence: Synthetic peptide
  XENP024379 vhCDR1
HYGMN

SEQ ID NO: 2091 - protein, 17 aa, Artificial Sequence
  Description of Artificial Sequence: Synthetic peptide
  XENP024379 vhCDR2
WINTYTGEPTYADGFTG

SEQ ID NO: 2092 - protein, 8 aa, Artificial Sequence
  Description of Artificial Sequence: Synthetic peptide
  XENP024379 vhCDR3
DYYGSSPY

SEQ ID NO: 2093 - protein, 16 aa, Artificial Sequence
  Description of Artificial Sequence: Synthetic peptide
  XENP024379 vlCDR1
KSSQSIVHSNGNTYLE

SEQ ID NO: 2094 - protein, 7 aa, Artificial Sequence
  Description of Artificial Sequence: Synthetic peptide
  XENP024379 vlCDR2
KVSNRFS

SEQ ID NO: 2095 - protein, 9 aa, Artificial Sequence
  Description of Artificial Sequence: Synthetic peptide
  XENP024379 vlCDR3
HQGSHVPNT

SEQ ID NO: 2096 - protein, 251 aa, Artificial Sequence
  Description of Artificial Sequence: Synthetic polypeptide
  XENP024380 1C11_H3.176_L3.92_scFv
QIQLVQSGPELKKPGASVKVSCKASGYTFTHYGMNWVKQAPGQGLEWMGWINTNTGEPTYADKFTGRVVFSLDTSQSTIYLQISSLKAEDTAVYYCARDYYGSSPYWGQGTLVTVSSGKPGSGKPGSGKPGSGKPGSDIVMTQSPDSLAVSLGERVTINCKASQSIVHSNGNTYLEWYQQKPGQPPKLLIYKVSNRFTGVPDRFSGSGSGTDFTLTISSLQAEDVAVYYCFQGSHVPNTFGGGTKVEIKGS

SEQ ID NO: 2097 - protein, 117 aa, Artificial Sequence
  Description of Artificial Sequence: Synthetic polypeptide
  VH of XENP024380
QIQLVQSGPELKKPGASVKVSCKASGYTFTHYGMNWVKQAPGQGLEWMGWINTNTGEPTYADKFTGRVVFSLDTSQSTIYLQISSLKAEDTAVYYCARDYYGSSPYWGQGTLVTVSS

SEQ ID NO: 2098 - protein, 114 aa, Artificial Sequence; identical to SEQ ID NO: 2053
  Description of Artificial Sequence: Synthetic polypeptide
  VL of XENP024380

SEQ ID NO: 2099 - protein, 5 aa, Artificial Sequence
  Description of Artificial Sequence: Synthetic peptide
  XENP024380 vhCDR1
HYGMN

SEQ ID NO: 2100 - protein, 17 aa, Artificial Sequence
  Description of Artificial Sequence: Synthetic peptide
  XENP024380 vhCDR2
WINTNTGEPTYADKFTG

SEQ ID NO: 2101 - protein, 8 aa, Artificial Sequence
  Description of Artificial Sequence: Synthetic peptide
  XENP024380 vhCDR3
DYYGSSPY

SEQ ID NO: 2102 - protein, 16 aa, Artificial Sequence
  Description of Artificial Sequence: Synthetic peptide
  XENP024380 vlCDR1
KASQSIVHSNGNTYLE

SEQ ID NO: 2103 - protein, 7 aa, Artificial Sequence
  Description of Artificial Sequence: Synthetic peptide
  XENP024380 vlCDR2
KVSNRFT

SEQ ID NO: 2104 - protein, 9 aa, Artificial Sequence
  Description of Artificial Sequence: Synthetic peptide
  XENP024380 vlCDR3
FQGSHVPNT

SEQ ID NO: 2105 - protein, 251 aa, Artificial Sequence
  Description of Artificial Sequence: Synthetic polypeptide
  XENP024381 1C11_H3.176_L3.94_scFv
QIQLVQSGPELKKPGASVKVSCKASGYTFTHYGMNWVKQAPGQGLEWMGWINTNTGEPTYADKFTGRVVFSLDTSQSTIYLQISSLKAEDTAVYYCARDYYGSSPYWGQGTLVTVSSGKPGSGKPGSGKPGSGKPGSDILMTQSPDSLAVSLGERATINCKSSQSIVHSNGNTYLEWYQQKPGQSPKLLIYKVSNRFTGVPDRFSGSGSGTDFTLTISSVQAEDAATYYCFQGSHVPNTFGQGTKVEIKGS

SEQ ID NO: 2106 - protein, 117 aa, Artificial Sequence; identical to SEQ ID NO: 2097
  Description of Artificial Sequence: Synthetic polypeptide
  VH of XENP024381

SEQ ID NO: 2107 - protein, 114 aa, Artificial Sequence; identical to SEQ ID NO: 2062
  Description of Artificial Sequence: Synthetic polypeptide
  VL of XENP024381

SEQ ID NO: 2108 - protein, 5 aa, Artificial Sequence
  Description of Artificial Sequence: Synthetic peptide
  XENP024381 vhCDR1
HYGMN

SEQ ID NO: 2109 - protein, 17 aa, Artificial Sequence
  Description of Artificial Sequence: Synthetic peptide
  XENP024381 vhCDR2
WINTNTGEPTYADKFTG

SEQ ID NO: 2110 - protein, 8 aa, Artificial Sequence
  Description of Artificial Sequence: Synthetic peptide
  XENP024381 vhCDR3
DYYGSSPY

SEQ ID NO: 2111 - protein, 16 aa, Artificial Sequence
  Description of Artificial Sequence: Synthetic peptide
  XENP024381 vlCDR1
KSSQSIVHSNGNTYLE

SEQ ID NO: 2112 - protein, 7 aa, Artificial Sequence
  Description of Artificial Sequence: Synthetic peptide
  XENP024381 vlCDR2
KVSNRFT

SEQ ID NO: 2113 - protein, 9 aa, Artificial Sequence
  Description of Artificial Sequence: Synthetic peptide
  XENP024381 vlCDR3
FQGSHVPNT

SEQ ID NO: 2114 - protein, 251 aa, Artificial Sequence
  Description of Artificial Sequence: Synthetic polypeptide
  XENP024382 1C11_H3.176_L3.96_scFv
QIQLVQSGPELKKPGASVKVSCKASGYTFTHYGMNWVKQAPGQGLEWMGWINTNTGEPTYADKFTGRVVFSLDTSQSTIYLQISSLKAEDTAVYYCARDYYGSSPYWGQGTLVTVSSGKPGSGKPGSGKPGSGKPGSDIVMTQSPDSLAVSLGERATINCKASQSIVHSNGNTYLEWYQQKPGQPPKLLIYKVSNRFTGVPDRFSGSGSGTDFTLTISSVQAEDAATYYCFQGSHVPNTFGQGTKVEIKGS

SEQ ID NO: 2115 - protein, 117 aa, Artificial Sequence; identical to SEQ ID NO: 2097
  Description of Artificial Sequence: Synthetic polypeptide
  VH of XENP024382

SEQ ID NO: 2116 - protein, 114 aa, Artificial Sequence; identical to SEQ ID NO: 2071
  Description of Artificial Sequence: Synthetic polypeptide
  VL of XENP024382

SEQ ID NO: 2117 - protein, 5 aa, Artificial Sequence
  Description of Artificial Sequence: Synthetic peptide
  XENP024382 vhCDR1
HYGMN

SEQ ID NO: 2118 - protein, 17 aa, Artificial Sequence
  Description of Artificial Sequence: Synthetic peptide
  XENP024382 vhCDR2
WINTNTGEPTYADKFTG

SEQ ID NO: 2119 - protein, 8 aa, Artificial Sequence
  Description of Artificial Sequence: Synthetic peptide
  XENP024382 vhCDR3
DYYGSSPY

SEQ ID NO: 2120 - protein, 16 aa, Artificial Sequence
  Description of Artificial Sequence: Synthetic peptide
  XENP024382 vlCDR1
KASQSIVHSNGNTYLE

SEQ ID NO: 2121 - protein, 7 aa, Artificial Sequence
  Description of Artificial Sequence: Synthetic peptide
  XENP024382 vlCDR2
KVSNRFT

SEQ ID NO: 2122 - protein, 9 aa, Artificial Sequence
  Description of Artificial Sequence: Synthetic peptide
  XENP024382 vlCDR3
FQGSHVPNT

SEQ ID NO: 2123 - protein, 251 aa, Artificial Sequence
  Description of Artificial Sequence: Synthetic polypeptide
  XENP024414 1C11_H3_L3.133_scFv
QIQLVQSGSELKKPGASVKVSCKASGYTFTHYGMNWVRQAPGQGLEWMGWINTYTGEPTYADGFTGRFVFSLDTSVSTAYLQISSLKAEDTAVYFCARDYYGSSPYWGQGTLVTVSSGKPGSGKPGSGKPGSGKPGSDVVMTQSPDSLAVSLGERVTINCKASQSIVHSNGNTYLEWYQQKPGQPPKLLIYKVSNRFSGVPDRFSGSGSGTDFTLTISSVQAEDAATYYCFQGSHVPNTFGQGTKVEIKGS

SEQ ID NO: 2124 - protein, 117 aa, Artificial Sequence; identical to SEQ ID NO: 32
  Description of Artificial Sequence: Synthetic polypeptide
  VH of XENP024414

SEQ ID NO: 2125 - protein, 114 aa, Artificial Sequence
  Description of Artificial Sequence: Synthetic polypeptide
  VL of XENP024414
DVVMTQSPDSLAVSLGERVTINCKASQSIVHSNGNTYLEWYQQKPGQPPKLLIYKVSNRFSGVPDRFSGSGSGTDFTLTISSVQAEDAATYYCFQGSHVPNTFGQGTKVEIKGS

SEQ ID NO: 2126 - protein, 5 aa, Artificial Sequence
  Description of Artificial Sequence: Synthetic peptide
  XENP024414 vhCDR1
HYGMN

SEQ ID NO: 2127 - protein, 17 aa, Artificial Sequence
  Description of Artificial Sequence: Synthetic peptide
  XENP024414 vhCDR2
WINTYTGEPTYADGFTG

SEQ ID NO: 2128 - protein, 8 aa, Artificial Sequence
  Description of Artificial Sequence: Synthetic peptide
  XENP024414 vhCDR3
DYYGSSPY

SEQ ID NO: 2129 - protein, 16 aa, Artificial Sequence
  Description of Artificial Sequence: Synthetic peptide
  XENP024414 vlCDR1
KASQSIVHSNGNTYLE

SEQ ID NO: 2130 - protein, 7 aa, Artificial Sequence
  Description of Artificial Sequence: Synthetic peptide
  XENP024414 vlCDR2
KVSNRFS

SEQ ID NO: 2131 - protein, 9 aa, Artificial Sequence
  Description of Artificial Sequence: Synthetic peptide
  XENP024414 vlCDR3
FQGSHVPNT

SEQ ID NO: 2132 - protein, 251 aa, Artificial Sequence
  Description of Artificial Sequence: Synthetic polypeptide
  XENP024415 1C11_H3_L3.134_scFv
QIQLVQSGSELKKPGASVKVSCKASGYTFTHYGMNWVRQAPGQGLEWMGWINTYTGEPTYADGFTGRFVFSLDTSVSTAYLQISSLKAEDTAVYFCARDYYGSSPYWGQGTLVTVSSGKPGSGKPGSGKPGSGKPGSDVVMTQSPDSLAVSLGERVTINCKASQSIVHSNGNTYLEWYQQKPGQPPKLLIYKVSNRFSGVPDRFSGSGSGTDFTLTISSVEAEDAATYYCFQGSHVPNTFGQGTKVEIKGS

SEQ ID NO: 2133 - protein, 117 aa, Artificial Sequence; identical to SEQ ID NO: 32
  Description of Artificial Sequence: Synthetic polypeptide
  VH of XENP024415

SEQ ID NO: 2134 - protein, 114 aa, Artificial Sequence
  Description of Artificial Sequence: Synthetic polypeptide
  VL of XENP024415
DVVMTQSPDSLAVSLGERVTINCKASQSIVHSNGNTYLEWYQQKPGQPPKLLIYKVSNRFSGVPDRFSGSGSGTDFTLTISSVEAEDAATYYCFQGSHVPNTFGQGTKVEIKGS

SEQ ID NO: 2135 - protein, 5 aa, Artificial Sequence
  Description of Artificial Sequence: Synthetic peptide
  XENP024415 vhCDR1
HYGMN

SEQ ID NO: 2136 - protein, 17 aa, Artificial Sequence
  Description of Artificial Sequence: Synthetic peptide
  XENP024415 vhCDR2
WINTYTGEPTYADGFTG

SEQ ID NO: 2137 - protein, 8 aa, Artificial Sequence
  Description of Artificial Sequence: Synthetic peptide
  XENP024415 vhCDR3
DYYGSSPY

SEQ ID NO: 2138 - protein, 16 aa, Artificial Sequence
  Description of Artificial Sequence: Synthetic peptide
  XENP024415 vlCDR1
KASQSIVHSNGNTYLE

SEQ ID NO: 2139 - protein, 7 aa, Artificial Sequence
  Description of Artificial Sequence: Synthetic peptide
  XENP024415 vlCDR2
KVSNRFS

SEQ ID NO: 2140 - protein, 9 aa, Artificial Sequence
  Description of Artificial Sequence: Synthetic peptide
  XENP024415 vlCDR3
FQGSHVPNT

SEQ ID NO: 2141 - protein, 251 aa, Artificial Sequence
  Description of Artificial Sequence: Synthetic polypeptide
  XENP024416 1C11_H3_L3.135_scFv
QIQLVQSGSELKKPGASVKVSCKASGYTFTHYGMNWVRQAPGQGLEWMGWINTYTGEPTYADGFTGRFVFSLDTSVSTAYLQISSLKAEDTAVYFCARDYYGSSPYWGQGTLVTVSSGKPGSGKPGSGKPGSGKPGSDVVMTQSPDSLAVSLGERVTINCKASQSIVHSNGNTYLEWYQQKPGQPPKLLIYKVSNRFSGVPDRFSGSGSGTDFTLTISSMQAEDAATYYCFQGSHVPNTFGQGTKVEIKGS

SEQ ID NO: 2142 - protein, 117 aa, Artificial Sequence; identical to SEQ ID NO: 32
  Description of Artificial Sequence: Synthetic polypeptide
  VH of XENP024416

SEQ ID NO: 2143 - protein, 114 aa, Artificial Sequence
  Description of Artificial Sequence: Synthetic polypeptide
  VL of XENP024416
DVVMTQSPDSLAVSLGERVTINCKASQSIVHSNGNTYLEWYQQKPGQPPKLLIYKVSNRFSGVPDRFSGSGSGTDFTLTISSMQAEDAATYYCFQGSHVPNTFGQGTKVEIKGS

SEQ ID NO: 2144 - protein, 5 aa, Artificial Sequence
  Description of Artificial Sequence: Synthetic peptide
  XENP024416 vhCDR1
HYGMN

SEQ ID NO: 2145 - protein, 17 aa, Artificial Sequence
  Description of Artificial Sequence: Synthetic peptide
  XENP024416 vhCDR2
WINTYTGEPTYADGFTG

SEQ ID NO: 2146 - protein, 8 aa, Artificial Sequence
  Description of Artificial Sequence: Synthetic peptide
  XENP024416 vhCDR3
DYYGSSPY

SEQ ID NO: 2147 - protein, 16 aa, Artificial Sequence
  Description of Artificial Sequence: Synthetic peptide
  XENP024416 vlCDR1
KASQSIVHSNGNTYLE

SEQ ID NO: 2148 - protein, 7 aa, Artificial Sequence
  Description of Artificial Sequence: Synthetic peptide
  XENP024416 vlCDR2
KVSNRFS

SEQ ID NO: 2149 - protein, 9 aa, Artificial Sequence
  Description of Artificial Sequence: Synthetic peptide
  XENP024416 vlCDR3
FQGSHVPNT

SEQ ID NO: 2150 - protein, 251 aa, Artificial Sequence
  Description of Artificial Sequence: Synthetic polypeptide
  XENP024417 1C11_H3_L3.136_scFv
QIQLVQSGSELKKPGASVKVSCKASGYTFTHYGMNWVRQAPGQGLEWMGWINTYTGEPTYADGFTGRFVFSLDTSVSTAYLQISSLKAEDTAVYFCARDYYGSSPYWGQGTLVTVSSGKPGSGKPGSGKPGSGKPGSDVVMTQSPDSLAVSLGERITINCKASQSIVHSNGNTYLEWYQQKPGQPPKLLIYKVSNRFSGVPDRFSGSGSGTDFTLTISSMQAEDAATYYCFQGSHVPNTFGQGTKVEIKGS

SEQ ID NO: 2151 - protein, 117 aa, Artificial Sequence; identical to SEQ ID NO: 32
  Description of Artificial Sequence: Synthetic polypeptide
  VH of XENP024417

SEQ ID NO: 2152 - protein, 114 aa, Artificial Sequence
  Description of Artificial Sequence: Synthetic polypeptide
  VL of XENP024417
DVVMTQSPDSLAVSLGERITINCKASQSIVHSNGNTYLEWYQQKPGQPPKLLIYKVSNRFSGVPDRFSGSGSGTDFTLTISSMQAEDAATYYCFQGSHVPNTFGQGTKVEIKGS

SEQ ID NO: 2153 - protein, 5 aa, Artificial Sequence
  Description of Artificial Sequence: Synthetic peptide
  XENP024417 vhCDR1
HYGMN

SEQ ID NO: 2154 - protein, 17 aa, Artificial Sequence
  Description of Artificial Sequence: Synthetic peptide
  XENP024417 vhCDR2
WINTYTGEPTYADGFTG

SEQ ID NO: 2155 - protein, 8 aa, Artificial Sequence
  Description of Artificial Sequence: Synthetic peptide
  XENP024417 vhCDR3
DYYGSSPY

SEQ ID NO: 2156 - protein, 16 aa, Artificial Sequence
  Description of Artificial Sequence: Synthetic peptide
  XENP024417 vlCDR1
KASQSIVHSNGNTYLE

SEQ ID NO: 2157 - protein, 7 aa, Artificial Sequence
  Description of Artificial Sequence: Synthetic peptide
  XENP024417 vlCDR2
KVSNRFS

SEQ ID NO: 2158 - protein, 9 aa, Artificial Sequence
  Description of Artificial Sequence: Synthetic peptide
  XENP024417 vlCDR3
FQGSHVPNT

SEQ ID NO: 2159 - protein, 251 aa, Artificial Sequence
  Description of Artificial Sequence: Synthetic polypeptide
  XENP024418 1C11_H3_L3.137_scFv
QIQLVQSGSELKKPGASVKVSCKASGYTFTHYGMNWVRQAPGQGLEWMGWINTYTGEPTYADGFTGRFVFSLDTSVSTAYLQISSLKAEDTAVYFCARDYYGSSPYWGQGTLVTVSSGKPGSGKPGSGKPGSGKPGSDVVMTQSPDSLAVSLGERITINCKASQSIVHSNGNTYLEWYQQKPGQPPKLLIYKVSNRFSGVPDRFSGSGSGTDFTLTISSVQAEDAATYYCFQGSHVPNTFGQGTKVEIKGS

SEQ ID NO: 2160 - protein, 117 aa, Artificial Sequence; identical to SEQ ID NO: 32
  Description of Artificial Sequence: Synthetic polypeptide
  VH of XENP024418

SEQ ID NO: 2161 - protein, 114 aa, Artificial Sequence
  Description of Artificial Sequence: Synthetic polypeptide
  VL of XENP024418
DVVMTQSPDSLAVSLGERITINCKASQSIVHSNGNTYLEWYQQKPGQPPKLLIYKVSNRFSGVPDRFSGSGSGTDFTLTISSVQAEDAATYYCFQGSHVPNTFGQGTKVEIKGS

SEQ ID NO: 2162 - protein, 5 aa, Artificial Sequence
  Description of Artificial Sequence: Synthetic peptide
  XENP024418 vhCDR1
HYGMN

SEQ ID NO: 2163 - protein, 17 aa, Artificial Sequence
  Description of Artificial Sequence: Synthetic peptide
  XENP024418 vhCDR2
WINTYTGEPTYADGFTG

SEQ ID NO: 2164 - protein, 8 aa, Artificial Sequence
  Description of Artificial Sequence: Synthetic peptide
  XENP024418 vhCDR3
DYYGSSPY

SEQ ID NO: 2165 - protein, 16 aa, Artificial Sequence
  Description of Artificial Sequence: Synthetic peptide
  XENP024418 vlCDR1
KASQSIVHSNGNTYLE

SEQ ID NO: 2166 - protein, 7 aa, Artificial Sequence
  Description of Artificial Sequence: Synthetic peptide
  XENP024418 vlCDR2
KVSNRFS

SEQ ID NO: 2167 - protein, 9 aa, Artificial Sequence
  Description of Artificial Sequence: Synthetic peptide
  XENP024418 vlCDR3
FQGSHVPNT

SEQ ID NO: 2168 - protein, 251 aa, Artificial Sequence
  Description of Artificial Sequence: Synthetic polypeptide
  XENP024419 1C11_H3_L3.138_scFv
QIQLVQSGSELKKPGASVKVSCKASGYTFTHYGMNWVRQAPGQGLEWMGWINTYTGEPTYADGFTGRFVFSLDTSVSTAYLQISSLKAEDTAVYFCARDYYGSSPYWGQGTLVTVSSGKPGSGKPGSGKPGSGKPGSDVVMTQSPDSLAVSLGERITINCKASQSIVHSNGNTYLEWYQQKPGQPPKLLIYKVSNRFSGVPDRFSGSGSGTDFTLTISSVEAEDAATYYCFQGSHVPNTFGQGTKVEIKGS

SEQ ID NO: 2169 - protein, 117 aa, Artificial Sequence; identical to SEQ ID NO: 32
  Description of Artificial Sequence: Synthetic polypeptide
  VH of XENP024419

SEQ ID NO: 2170 - protein, 114 aa, Artificial Sequence
  Description of Artificial Sequence: Synthetic polypeptide
  VL of XENP024419
DVVMTQSPDSLAVSLGERITINCKASQSIVHSNGNTYLEWYQQKPGQPPKLLIYKVSNRFSGVPDRFSGSGSGTDFTLTISSVEAEDAATYYCFQGSHVPNTFGQGTKVEIKGS

SEQ ID NO: 2171 - protein, 5 aa, Artificial Sequence
  Description of Artificial Sequence: Synthetic peptide
  XENP024419 vhCDR1
HYGMN

SEQ ID NO: 2172 - protein, 17 aa, Artificial Sequence
  Description of Artificial Sequence: Synthetic peptide
  XENP024419 vhCDR2
WINTYTGEPTYADGFTG

SEQ ID NO: 2173 - protein, 8 aa, Artificial Sequence
  Description of Artificial Sequence: Synthetic peptide
  XENP024419 vhCDR3
DYYGSSPY

SEQ ID NO: 2174 - protein, 16 aa, Artificial Sequence
  Description of Artificial Sequence: Synthetic peptide
  XENP024419 vlCDR1
KASQSIVHSNGNTYLE

SEQ ID NO: 2175 - protein, 7 aa, Artificial Sequence
  Description of Artificial Sequence: Synthetic peptide
  XENP024419 vlCDR2
KVSNRFS

SEQ ID NO: 2176 - protein, 9 aa, Artificial Sequence
  Description of Artificial Sequence: Synthetic peptide
  XENP024419 vlCDR3
FQGSHVPNT

SEQ ID NO: 2177 - protein, 251 aa, Artificial Sequence
  Description of Artificial Sequence: Synthetic polypeptide
  XENP024420 1C11_H3_L3.139_scFv
QIQLVQSGSELKKPGASVKVSCKASGYTFTHYGMNWVRQAPGQGLEWMGWINTYTGEPTYADGFTGRFVFSLDTSVSTAYLQISSLKAEDTAVYFCARDYYGSSPYWGQGTLVTVSSGKPGSGKPGSGKPGSGKPGSDVVMTQSPDSLAVSLGERATINCKASQSIVHSNGNTYLEWYQQKPGQPPKLLIYKVSNRFSGIPDRFSGSGSGTDFTLTISSVQAEDAATYYCFQGSHVPNTFGQGTKVEIKGS

SEQ ID NO: 2178 - protein, 117 aa, Artificial Sequence; identical to SEQ ID NO: 32
  Description of Artificial Sequence: Synthetic polypeptide
  VH of XENP024420

SEQ ID NO: 2179 - protein, 114 aa, Artificial Sequence
  Description of Artificial Sequence: Synthetic polypeptide
  VL of XENP024420
DVVMTQSPDSLAVSLGERATINCKASQSIVHSNGNTYLEWYQQKPGQPPKLLIYKVSNRFSGIPDRFSGSGSGTDFTLTISSVQAEDAATYYCFQGSHVPNTFGQGTKVEIKGS

SEQ ID NO: 2180 - protein, 5 aa, Artificial Sequence
  Description of Artificial Sequence: Synthetic peptide
  XENP024420 vhCDR1
HYGMN

SEQ ID NO: 2181 - protein, 17 aa, Artificial Sequence
  Description of Artificial Sequence: Synthetic peptide
  XENP024420 vhCDR2
WINTYTGEPTYADGFTG

SEQ ID NO: 2182 - protein, 8 aa, Artificial Sequence
  Description of Artificial Sequence: Synthetic peptide
  XENP024420 vhCDR3
DYYGSSPY

SEQ ID NO: 2183 - protein, 16 aa, Artificial Sequence
  Description of Artificial Sequence: Synthetic peptide
  XENP024420 vlCDR1
KASQSIVHSNGNTYLE

SEQ ID NO: 2184 - protein, 7 aa, Artificial Sequence
  Description of Artificial Sequence: Synthetic peptide
  XENP024420 vlCDR2
KVSNRFS

SEQ ID NO: 2185 - protein, 9 aa, Artificial Sequence
  Description of Artificial Sequence: Synthetic peptide
  XENP024420 vlCDR3
FQGSHVPNT

SEQ ID NO: 2186 - protein, 251 aa, Artificial Sequence
  Description of Artificial Sequence: Synthetic polypeptide
  XENP024421 1C11_H3_L3.140_scFv
QIQLVQSGSELKKPGASVKVSCKASGYTFTHYGMNWVRQAPGQGLEWMGWINTYTGEPTYADGFTGRFVFSLDTSVSTAYLQISSLKAEDTAVYFCARDYYGSSPYWGQGTLVTVSSGKPGSGKPGSGKPGSGKPGSDIVMTQSPDSLAVSLGERATINCKASQSIVHSNGNTYLEWYQQKPGQSPKLLIYKVSNRFSGVPDRFSGSGSGTDFTLTISSVEAEDVATYYCFQGSHVPNTFGQGTKVEIKGS

SEQ ID NO: 2187 - protein, 117 aa, Artificial Sequence; identical to SEQ ID NO: 32
  Description of Artificial Sequence: Synthetic polypeptide
  VH of XENP024421

SEQ ID NO: 2188 - protein, 114 aa, Artificial Sequence
  Description of Artificial Sequence: Synthetic polypeptide
  VL of XENP024421
DIVMTQSPDSLAVSLGERATINCKASQSIVHSNGNTYLEWYQQKPGQSPKLLIYKVSNRFSGVPDRFSGSGSGTDFTLTISSVEAEDVATYYCFQGSHVPNTFGQGTKVEIKGS

SEQ ID NO: 2189 - protein, 5 aa, Artificial Sequence
  Description of Artificial Sequence: Synthetic peptide
  XENP024421 vhCDR1
HYGMN

SEQ ID NO: 2190 - protein, 17 aa, Artificial Sequence
  Description of Artificial Sequence: Synthetic peptide
  XENP024421 vhCDR2
WINTYTGEPTYADGFTG

SEQ ID NO: 2191 - protein, 8 aa, Artificial Sequence
  Description of Artificial Sequence: Synthetic peptide
  XENP024421 vhCDR3
DYYGSSPY

SEQ ID NO: 2192 - protein, 16 aa, Artificial Sequence
  Description of Artificial Sequence: Synthetic peptide
  XENP024421 vlCDR1
KASQSIVHSNGNTYLE

SEQ ID NO: 2193 - protein, 7 aa, Artificial Sequence
  Description of Artificial Sequence: Synthetic peptide
  XENP024421 vlCDR2
KVSNRFS

SEQ ID NO: 2194 - protein, 9 aa, Artificial Sequence
  Description of Artificial Sequence: Synthetic peptide
  XENP024421 vlCDR3
FQGSHVPNT

SEQ ID NO: 2195 - protein, 251 aa, Artificial Sequence
  Description of Artificial Sequence: Synthetic polypeptide
  XENP024422 1C11_H3_L3.141_scFv
QIQLVQSGSELKKPGASVKVSCKASGYTFTHYGMNWVRQAPGQGLEWMGWINTYTGEPTYADGFTGRFVFSLDTSVSTAYLQISSLKAEDTAVYFCARDYYGSSPYWGQGTLVTVSSGKPGSGKPGSGKPGSGKPGSDIVMTQSPDSLAVSLGERATINCKASQSIVHSNGNTYLEWYQQKPGQPPKLLIYKVSNRFSGVPDRFSGSGSGTDFTLTISSVEAEDVATYYCFQGSHVPNTFGQGTKVEIKGS

SEQ ID NO: 2196 - protein, 117 aa, Artificial Sequence; identical to SEQ ID NO: 32
  Description of Artificial Sequence: Synthetic polypeptide
  VH of XENP024422

SEQ ID NO: 2197 - protein, 114 aa, Artificial Sequence
  Description of Artificial Sequence: Synthetic polypeptide
  VL of XENP024422
DIVMTQSPDSLAVSLGERATINCKASQSIVHSNGNTYLEWYQQKPGQPPKLLIYKVSNRFSGVPDRFSGSGSGTDFTLTISSVEAEDVATYYCFQGSHVPNTFGQGTKVEIKGS

SEQ ID NO: 2198 - protein, 5 aa, Artificial Sequence
  Description of Artificial Sequence: Synthetic peptide
  XENP024422 vhCDR1
HYGMN

SEQ ID NO: 2199 - protein, 17 aa, Artificial Sequence
  Description of Artificial Sequence: Synthetic peptide
  XENP024422 vhCDR2
WINTYTGEPTYADGFTG

SEQ ID NO: 2200 - protein, 8 aa, Artificial Sequence
  Description of Artificial Sequence: Synthetic peptide
  XENP024422 vhCDR3
DYYGSSPY

SEQ ID NO: 2201 - protein, 16 aa, Artificial Sequence
  Description of Artificial Sequence: Synthetic peptide
  XENP024422 vlCDR1
KASQSIVHSNGNTYLE

SEQ ID NO: 2202 - protein, 7 aa, Artificial Sequence
  Description of Artificial Sequence: Synthetic peptide
  XENP024422 vlCDR2
KVSNRFS

SEQ ID NO: 2203 - protein, 9 aa, Artificial Sequence
  Description of Artificial Sequence: Synthetic peptide
  XENP024422 vlCDR3
FQGSHVPNT

SEQ ID NO: 2204 - protein, 251 aa, Artificial Sequence
  Description of Artificial Sequence: Synthetic polypeptide
  XENP024423 1C11_H3_L3.142_scFv
QIQLVQSGSELKKPGASVKVSCKASGYTFTHYGMNWVRQAPGQGLEWMGWINTYTGEPTYADGFTGRFVFSLDTSVSTAYLQISSLKAEDTAVYFCARDYYGSSPYWGQGTLVTVSSGKPGSGKPGSGKPGSGKPGSDIVMTQSPDSLAVSLGERATINCKASQSIVHSNGNTYLEWYQQKPGQAPKLLIYKVSNRFSGVPDRFSGSGSGTDFTLTISSVEAEDVATYYCFQGSHVPNTFGQGTKVEIKGS

SEQ ID NO: 2205 - protein, 117 aa, Artificial Sequence; identical to SEQ ID NO: 32
  Description of Artificial Sequence: Synthetic polypeptide
  VH of XENP024423

SEQ ID NO: 2206 - protein, 114 aa, Artificial Sequence
  Description of Artificial Sequence: Synthetic polypeptide
  VL of XENP024423
DIVMTQSPDSLAVSLGERATINCKASQSIVHSNGNTYLEWYQQKPGQAPKLLIYKVSNRFSGVPDRFSGSGSGTDFTLTISSVEAEDVATYYCFQGSHVPNTFGQGTKVEIKGS

SEQ ID NO: 2207 - protein, 5 aa, Artificial Sequence
  Description of Artificial Sequence: Synthetic peptide
  XENP024423 vhCDR1
HYGMN

SEQ ID NO: 2208 - protein, 17 aa, Artificial Sequence
  Description of Artificial Sequence: Synthetic peptide
  XENP024423 vhCDR2
WINTYTGEPTYADGFTG

SEQ ID NO: 2209 - protein, 8 aa, Artificial Sequence
  Description of Artificial Sequence: Synthetic peptide
  XENP024423 vhCDR3
DYYGSSPY

SEQ ID NO: 2210 - protein, 16 aa, Artificial Sequence
  Description of Artificial Sequence: Synthetic peptide
  XENP024423 vlCDR1
KASQSIVHSNGNTYLE

SEQ ID NO: 2211 - protein, 7 aa, Artificial Sequence
  Description of Artificial Sequence: Synthetic peptide
  XENP024423 vlCDR2
KVSNRFS

SEQ ID NO: 2212 - protein, 9 aa, Artificial Sequence
  Description of Artificial Sequence: Synthetic peptide
  XENP024423 vlCDR3
FQGSHVPNT

SEQ ID NO: 2213 - protein, 251 aa, Artificial Sequence
  Description of Artificial Sequence: Synthetic polypeptide
  XENP024424 1C11_H3.176_L3_scFv
QIQLVQSGSELKKPGASVKVSCKASGYTFTHYGMNWVRQAPGQGLEWMGWINTYTGEPTYAPGFKGRFVFSLDTSVSTAYLQISSLKAEDTAVYFCARDYYGSSPYWGQGTLVTVSSGKPGSGKPGSGKPGSGKPGSDVLMTQSPDSLAVSLGERATINCKSSQSIVHSNGNTYLEWYQQKPGQSPKLLIYKVSNRFSGVPDRFSGSGSGTDFTLTISSLQAEDVAVYYCFQGSHVPNTFGGGTKVEIKGS

SEQ ID NO: 2214 - protein, 117 aa, Artificial Sequence
  Description of Artificial Sequence: Synthetic polypeptide
  VH of XENP024424
QIQLVQSGSELKKPGASVKVSCKASGYTFTHYGMNWVRQAPGQGLEWMGWINTYTGEPTYAPGFKGRFVFSLDTSVSTAYLQISSLKAEDTAVYFCARDYYGSSPYWGQGTLVTVSS

SEQ ID NO: 2215 - protein, 114 aa, Artificial Sequence; identical to SEQ ID NO: 649
  Description of Artificial Sequence: Synthetic polypeptide
  VL of XENP024424

SEQ ID NO: 2216 - protein, 5 aa, Artificial Sequence
  Description of Artificial Sequence: Synthetic peptide
  XENP024424 vhCDR1
HYGMN

SEQ ID NO: 2217 - protein, 17 aa, Artificial Sequence
  Description of Artificial Sequence: Synthetic peptide
  XENP024424 vhCDR2
WINTYTGEPTYAPGFKG

SEQ ID NO: 2218 - protein, 8 aa, Artificial Sequence
  Description of Artificial Sequence: Synthetic peptide
  XENP024424 vhCDR3
DYYGSSPY

SEQ ID NO: 2219 - protein, 16 aa, Artificial Sequence
  Description of Artificial Sequence: Synthetic peptide
  XENP024424 vlCDR1
KSSQSIVHSNGNTYLE

SEQ ID NO: 2220 - protein, 7 aa, Artificial Sequence
  Description of Artificial Sequence: Synthetic peptide
  XENP024424 vlCDR2
KVSNRFS

SEQ ID NO: 2221 - protein, 9 aa, Artificial Sequence
  Description of Artificial Sequence: Synthetic peptide
  XENP024424 vlCDR3
FQGSHVPNT

SEQ ID NO: 2222 - protein, 251 aa, Artificial Sequence
  Description of Artificial Sequence: Synthetic polypeptide
  XENP024425 1C11_H3.177_L3_scFv
QIQLVQSGSELKKPGASVKVSCKASGYTFTHYGMNWVRQAPGQGLEWMGWINTYTGEPTYAPKFTGRFVFSLDTSVSTAYLQISSLKAEDTAVYFCARDYYGSSPYWGQGTLVTVSSGKPGSGKPGSGKPGSGKPGSDVLMTQSPDSLAVSLGERATINCKSSQSIVHSNGNTYLEWYQQKPGQSPKLLIYKVSNRFSGVPDRFSGSGSGTDFTLTISSLQAEDVAVYYCFQGSHVPNTFGGGTKVEIKGS

SEQ ID NO: 2223 - protein, 117 aa, Artificial Sequence
  Description of Artificial Sequence: Synthetic polypeptide
  VH of XENP024425
QIQLVQSGSELKKPGASVKVSCKASGYTFTHYGMNWVRQAPGQGLEWMGWINTYTGEPTYAPKFTGRFVFSLDTSVSTAYLQISSLKAEDTAVYFCARDYYGSSPYWGQGTLVTVSS

SEQ ID NO: 2224 - protein, 114 aa, Artificial Sequence; identical to SEQ ID NO: 649
  Description of Artificial Sequence: Synthetic polypeptide
  VL of XENP024425

SEQ ID NO: 2225 - protein, 5 aa, Artificial Sequence
  Description of Artificial Sequence: Synthetic peptide
  XENP024425 vhCDR1
HYGMN

SEQ ID NO: 2226 - protein, 17 aa, Artificial Sequence
  Description of Artificial Sequence: Synthetic peptide
  XENP024425 vhCDR2
WINTYTGEPTYAPKFTG

SEQ ID NO: 2227 - protein, 8 aa, Artificial Sequence
  Description of Artificial Sequence: Synthetic peptide
  XENP024425 vhCDR3
DYYGSSPY

SEQ ID NO: 2228 - protein, 16 aa, Artificial Sequence
  Description of Artificial Sequence: Synthetic peptide
  XENP024425 vlCDR1
KSSQSIVHSNGNTYLE

SEQ ID NO: 2229 - protein, 7 aa, Artificial Sequence
  Description of Artificial Sequence: Synthetic peptide
  XENP024425 vlCDR2
KVSNRFS

SEQ ID NO: 2230 - protein, 9 aa, Artificial Sequence
  Description of Artificial Sequence: Synthetic peptide
  XENP024425 vlCDR3
FQGSHVPNT

SEQ ID NO: 2231 - protein, 251 aa, Artificial Sequence
  Description of Artificial Sequence: Synthetic polypeptide
  XENP024426 1C11_H3.178_L3_scFv
QIQLVQSGSELKKPGASVKVSCKASGYTFTHYGMNWVRQAPGQGLEWMGWINTYTGEPTYAPGFKERFVFSLDTSVSTAYLQISSLKAEDTAVYFCARDYYGSSPYWGQGTLVTVSSGKPGSGKPGSGKPGSGKPGSDVLMTQSPDSLAVSLGERATINCKSSQSIVHSNGNTYLEWYQQKPGQSPKLLIYKVSNRFSGVPDRFSGSGSGTDFTLTISSLQAEDVAVYYCFQGSHVPNTFGGGTKVEIKGS

SEQ ID NO: 2232 - protein, 117 aa, Artificial Sequence
  Description of Artificial Sequence: Synthetic polypeptide
  VH of XENP024426
QIQLVQSGSELKKPGASVKVSCKASGYTFTHYGMNWVRQAPGQGLEWMGWINTYTGEPTYAPGFKERFVFSLDTSVSTAYLQISSLKAEDTAVYFCARDYYGSSPYWGQGTLVTVSS

SEQ ID NO: 2233 - protein, 114 aa, Artificial Sequence; identical to SEQ ID NO: 649
  Description of Artificial Sequence: Synthetic polypeptide
  VL of XENP024426

SEQ ID NO: 2234 - protein, 5 aa, Artificial Sequence
  Description of Artificial Sequence: Synthetic peptide
  XENP024426 vhCDR1
HYGMN

SEQ ID NO: 2235 - protein, 17 aa, Artificial Sequence
  Description of Artificial Sequence: Synthetic peptide
  XENP024426 vhCDR2
WINTYTGEPTYAPGFKE

SEQ ID NO: 2236 - protein, 8 aa, Artificial Sequence
  Description of Artificial Sequence: Synthetic peptide
  XENP024426 vhCDR3
DYYGSSPY

SEQ ID NO: 2237 - protein, 16 aa, Artificial Sequence
  Description of Artificial Sequence: Synthetic peptide
  XENP024426 vlCDR1
KSSQSIVHSNGNTYLE

SEQ ID NO: 2238 - protein, 7 aa, Artificial Sequence
  Description of Artificial Sequence: Synthetic peptide
  XENP024426 vlCDR2
KVSNRFS

SEQ ID NO: 2239 - protein, 9 aa, Artificial Sequence
  Description of Artificial Sequence: Synthetic peptide
  XENP024426 vlCDR3
FQGSHVPNT

SEQ ID NO: 2240 - protein, 251 aa, Artificial Sequence
  Description of Artificial Sequence: Synthetic polypeptide
  XENP024427 1C11_H3.179_L3_scFv
QIQLVQSGSELKKPGASVKVSCKASGYTFTHYGMNWVRQAPGQGLEWMGWINTYTGEPTYAPKFTERFVFSLDTSVSTAYLQISSLKAEDTAVYFCARDYYGSSPYWGQGTLVTVSSGKPGSGKPGSGKPGSGKPGSDVLMTQSPDSLAVSLGERATINCKSSQSIVHSNGNTYLEWYQQKPGQSPKLLIYKVSNRFSGVPDRFSGSGSGTDFTLTISSLQAEDVAVYYCFQGSHVPNTFGGGTKVEIKGS

SEQ ID NO: 2241 - protein, 117 aa, Artificial Sequence
  Description of Artificial Sequence: Synthetic polypeptide
  VH of XENP024427
QIQLVQSGSELKKPGASVKVSCKASGYTFTHYGMNWVRQAPGQGLEWMGWINTYTGEPTYAPKFTERFVFSLDTSVSTAYLQISSLKAEDTAVYFCARDYYGSSPYWGQGTLVTVSS

SEQ ID NO: 2242 - protein, 114 aa, Artificial Sequence; identical to SEQ ID NO: 649
  Description of Artificial Sequence: Synthetic polypeptide
  VL of XENP024427

SEQ ID NO: 2243 - protein, 5 aa, Artificial Sequence
  Description of Artificial Sequence: Synthetic peptide
  XENP024427 vhCDR1
HYGMN

SEQ ID NO: 2244 - protein, 17 aa, Artificial Sequence
  Description of Artificial Sequence: Synthetic peptide
  XENP024427 vhCDR2
WINTYTGEPTYAPKFTE

SEQ ID NO: 2245 - protein, 8 aa, Artificial Sequence
  Description of Artificial Sequence: Synthetic peptide
  XENP024427 vhCDR3
DYYGSSPY

SEQ ID NO: 2246 - protein, 16 aa, Artificial Sequence
  Description of Artificial Sequence: Synthetic peptide
  XENP024427 vlCDR1
KSSQSIVHSNGNTYLE

SEQ ID NO: 2247 - protein, 7 aa, Artificial Sequence
  Description of Artificial Sequence: Synthetic peptide
  XENP024427 vlCDR2
KVSNRFS

SEQ ID NO: 2248 - protein, 9 aa, Artificial Sequence
  Description of Artificial Sequence: Synthetic peptide
  XENP024427 vlCDR3
FQGSHVPNT

SEQ ID NO: 2249 - protein, 251 aa, Artificial Sequence
  Description of Artificial Sequence: Synthetic polypeptide
  XENP024428 1C11_H3.180_L3_scFv
QIQLVQSGSELKKPGASVKVSCKASGYTFTHYGINWVRQAPGQGLEWMGWINTYTGEPTYADGFTGRFVFSVDTSVSTAYLQISSLKAEDTAVYFCARDYYGSSPYWGQGTLVTVSSGKPGSGKPGSGKPGSGKPGSDVLMTQSPDSLAVSLGERATINCKSSQSIVHSNGNTYLEWYQQKPGQSPKLLIYKVSNRFSGVPDRFSGSGSGTDFTLTISSLQAEDVAVYYCFQGSHVPNTFGGGTKVEIKGS

SEQ ID NO: 2250 - protein, 117 aa, Artificial Sequence
  Description of Artificial Sequence: Synthetic polypeptide
  VH of XENP024428
QIQLVQSGSELKKPGASVKVSCKASGYTFTHYGINWVRQAPGQGLEWMGWINTYTGEPTYADGFTGRFVFSVDTSVSTAYLQISSLKAEDTAVYFCARDYYGSSPYWGQGTLVTVSS

SEQ ID NO: 2251 - protein, 114 aa, Artificial Sequence; identical to SEQ ID NO: 649
  Description of Artificial Sequence: Synthetic polypeptide
  VL of XENP024428

SEQ ID NO: 2252 - protein, 5 aa, Artificial Sequence
  Description of Artificial Sequence: Synthetic peptide
  XENP024428 vhCDR1
HYGIN

SEQ ID NO: 2253 - protein, 17 aa, Artificial Sequence
  Description of Artificial Sequence: Synthetic peptide
  XENP024428 vhCDR2
WINTYTGEPTYADGFTG

SEQ ID NO: 2254 - protein, 8 aa, Artificial Sequence
  Description of Artificial Sequence: Synthetic peptide
  XENP024428 vhCDR3
DYYGSSPY

SEQ ID NO: 2255 - protein, 16 aa, Artificial Sequence
  Description of Artificial Sequence: Synthetic peptide
  XENP024428 vlCDR1
KSSQSIVHSNGNTYLE

SEQ ID NO: 2256 - protein, 7 aa, Artificial Sequence
  Description of Artificial Sequence: Synthetic peptide
  XENP024428 vlCDR2
KVSNRFS

SEQ ID NO: 2257 - protein, 9 aa, Artificial Sequence
  Description of Artificial Sequence: Synthetic peptide
  XENP024428 vlCDR3
FQGSHVPNT

SEQ ID NO: 2258 - protein, 251 aa, Artificial Sequence
  Description of Artificial Sequence: Synthetic polypeptide
  XENP024429 1C11_H3.181_L3_scFv
QIQLVQSGSELKKPGASVKVSCKASGYTFTHYGINWVRQAPGQGLEWMGWINTYTGEPTYADGFTGRFVFSIDTSVSTAYLQISSLKAEDTAVYFCARDYYGSSPYWGQGTLVTVSSGKPGSGKPGSGKPGSGKPGSDVLMTQSPDSLAVSLGERATINCKSSQSIVHSNGNTYLEWYQQKPGQSPKLLIYKVSNRFSGVPDRFSGSGSGTDFTLTISSLQAEDVAVYYCFQGSHVPNTFGGGTKVEIKGS

SEQ ID NO: 2259 - protein, 117 aa, Artificial Sequence
  Description of Artificial Sequence: Synthetic polypeptide
  VH of XENP024429
QIQLVQSGSELKKPGASVKVSCKASGYTFTHYGINWVRQAPGQGLEWMGWINTYTGEPTYADGFTGRFVFSIDTSVSTAYLQISSLKAEDTAVYFCARDYYGSSPYWGQGTLVTVSS

SEQ ID NO: 2260 - protein, 114 aa, Artificial Sequence; identical to SEQ ID NO: 649
  Description of Artificial Sequence: Synthetic polypeptide
  VL of XENP024429

SEQ ID NO: 2261 - protein, 5 aa, Artificial Sequence
  Description of Artificial Sequence: Synthetic peptide
  XENP024429 vhCDR1
HYGIN

SEQ ID NO: 2262 - protein, 17 aa, Artificial Sequence
  Description of Artificial Sequence: Synthetic peptide
  XENP024429 vhCDR2
WINTYTGEPTYADGFTG

SEQ ID NO: 2263 - protein, 8 aa, Artificial Sequence
  Description of Artificial Sequence: Synthetic peptide
  XENP024429 vhCDR3
DYYGSSPY

SEQ ID NO: 2264 - protein, 16 aa, Artificial Sequence
  Description of Artificial Sequence: Synthetic peptide
  XENP024429 vlCDR1
KSSQSIVHSNGNTYLE

SEQ ID NO: 2265 - protein, 7 aa, Artificial Sequence
  Description of Artificial Sequence: Synthetic peptide
  XENP024429 vlCDR2
KVSNRFS

SEQ ID NO: 2266 - protein, 9 aa, Artificial Sequence
  Description of Artificial Sequence: Synthetic peptide
  XENP024429 vlCDR3
FQGSHVPNT

SEQ ID NO: 2267 - protein, 251 aa, Artificial Sequence
  Description of Artificial Sequence: Synthetic polypeptide
  XENP024430 1C11_H3.182_L3_scFv
QIQLVQSGSELVKPGESVKVSCKASGYTFTHYGMNWVRQAPGQGLEWMGWINTYTGEPTYADGFTGRFVFSLDTSVSTAYLQISSLKAEDTAVYFCARDYYGSSPYWGQGTLVTVSSGKPGSGKPGSGKPGSGKPGSDVLMTQSPDSLAVSLGERATINCKSSQSIVHSNGNTYLEWYQQKPGQSPKLLIYKVSNRFSGVPDRFSGSGSGTDFTLTISSLQAEDVAVYYCFQGSHVPNTFGGGTKVEIKGS

SEQ ID NO: 2268 - protein, 117 aa, Artificial Sequence
  Description of Artificial Sequence: Synthetic polypeptide
  VH of XENP024430
QIQLVQSGSELVKPGESVKVSCKASGYTFTHYGMNWVRQAPGQGLEWMGWINTYTGEPTYADGFTGRFVFSLDTSVSTAYLQISSLKAEDTAVYFCARDYYGSSPYWGQGTLVTVSS

SEQ ID NO: 2269 - protein, 114 aa, Artificial Sequence; identical to SEQ ID NO: 649
  Description of Artificial Sequence: Synthetic polypeptide
  VL of XENP024430

SEQ ID NO: 2270 - protein, 5 aa, Artificial Sequence
  Description of Artificial Sequence: Synthetic peptide
  XENP024430 vhCDR1
HYGMN

SEQ ID NO: 2271 - protein, 17 aa, Artificial Sequence
  Description of Artificial Sequence: Synthetic peptide
  XENP024430 vhCDR2
WINTYTGEPTYADGFTG

SEQ ID NO: 2272 - protein, 8 aa, Artificial Sequence
  Description of Artificial Sequence: Synthetic peptide
  XENP024430 vhCDR3
DYYGSSPY

SEQ ID NO: 2273 - protein, 16 aa, Artificial Sequence
  Description of Artificial Sequence: Synthetic peptide
  XENP024430 vlCDR1
KSSQSIVHSNGNTYLE

SEQ ID NO: 2274 - protein, 7 aa, Artificial Sequence
  Description of Artificial Sequence: Synthetic peptide
  XENP024430 vlCDR2
KVSNRFS

SEQ ID NO: 2275 - protein, 9 aa, Artificial Sequence
  Description of Artificial Sequence: Synthetic peptide
  XENP024430 vlCDR3
FQGSHVPNT

SEQ ID NO: 2276 - protein, 251 aa, Artificial Sequence
  Description of Artificial Sequence: Synthetic polypeptide
  XENP024431 1C11_H3.183_L3_scFv
QIQLVQSGSVLKKPGESVKVSCKASGYTFTHYGMNWVRQAPGQGLEWMGWINTYTGEPTYADGFTGRFVFSLDTSVSTAYLQISSLKAEDTAVYFCARDYYGSSPYWGQGTLVTVSSGKPGSGKPGSGKPGSGKPGSDVLMTQSPDSLAVSLGERATINCKSSQSIVHSNGNTYLEWYQQKPGQSPKLLIYKVSNRFSGVPDRFSGSGSGTDFTLTISSLQAEDVAVYYCFQGSHVPNTFGGGTKVEIKGS

SEQ ID NO: 2277 - protein, 117 aa, Artificial Sequence
  Description of Artificial Sequence: Synthetic polypeptide
  VH of XENP024431
QIQLVQSGSVLKKPGESVKVSCKASGYTFTHYGMNWVRQAPGQGLEWMGWINTYTGEPTYADGFTGRFVFSLDTSVSTAYLQISSLKAEDTAVYFCARDYYGSSPYWGQGTLVTVSS

SEQ ID NO: 2278 - protein, 114 aa, Artificial Sequence; identical to SEQ ID NO: 649
  Description of Artificial Sequence: Synthetic polypeptide
  VL of XENP024431

SEQ ID NO: 2279 - protein, 5 aa, Artificial Sequence
  Description of Artificial Sequence: Synthetic peptide
  XENP024431 vhCDR1
HYGMN

SEQ ID NO: 2280 - protein, 17 aa, Artificial Sequence
  Description of Artificial Sequence: Synthetic peptide
  XENP024431 vhCDR2
WINTYTGEPTYADGFTG

SEQ ID NO: 2281 - protein, 8 aa, Artificial Sequence
  Description of Artificial Sequence: Synthetic peptide
  XENP024431 vhCDR3
DYYGSSPY

SEQ ID NO: 2282 - protein, 16 aa, Artificial Sequence
  Description of Artificial Sequence: Synthetic peptide
  XENP024431 vlCDR1
KSSQSIVHSNGNTYLE

SEQ ID NO: 2283 - protein, 7 aa, Artificial Sequence
  Description of Artificial Sequence: Synthetic peptide
  XENP024431 vlCDR2
KVSNRFS

SEQ ID NO: 2284 - protein, 9 aa, Artificial Sequence
  Description of Artificial Sequence: Synthetic peptide
  XENP024431 vlCDR3
FQGSHVPNT

SEQ ID NO: 2285 - protein, 251 aa, Artificial Sequence
  Description of Artificial Sequence: Synthetic polypeptide
  XENP024432 1C11_H3.184_L3_scFv
QIQLVQSGSVLVKPGESVKVSCKASGYTFTHYGMNWVRQAPGQGLEWMGWINTYTGEPTYADGFTGRFVFSLDTSVSTAYLQISSLKAEDTAVYFCARDYYGSSPYWGQGTLVTVSSGKPGSGKPGSGKPGSGKPGSDVLMTQSPDSLAVSLGERATINCKSSQSIVHSNGNTYLEWYQQKPGQSPKLLIYKVSNRFSGVPDRFSGSGSGTDFTLTISSLQAEDVAVYYCFQGSHVPNTFGGGTKVEIKGS

SEQ ID NO: 2286 - protein, 117 aa, Artificial Sequence
  Description of Artificial Sequence: Synthetic polypeptide
  VH of XENP024432
QIQLVQSGSVLVKPGESVKVSCKASGYTFTHYGMNWVRQAPGQGLEWMGWINTYTGEPTYADGFTGRFVFSLDTSVSTAYLQISSLKAEDTAVYFCARDYYGSSPYWGQGTLVTVSS

SEQ ID NO: 2287 - protein, 114 aa, Artificial Sequence; identical to SEQ ID NO: 649
  Description of Artificial Sequence: Synthetic polypeptide
  VL of XENP024432

SEQ ID NO: 2288 - protein, 5 aa, Artificial Sequence
  Description of Artificial Sequence: Synthetic peptide
  XENP024432 vhCDR1
HYGMN

SEQ ID NO: 2289 - protein, 17 aa, Artificial Sequence
  Description of Artificial Sequence: Synthetic peptide
  XENP024432 vhCDR2
WINTYTGEPTYADGFTG

SEQ ID NO: 2290 - protein, 8 aa, Artificial Sequence
  Description of Artificial Sequence: Synthetic peptide
  XENP024432 vhCDR3
DYYGSSPY

SEQ ID NO: 2291 - protein, 16 aa, Artificial Sequence
  Description of Artificial Sequence: Synthetic peptide
  XENP024432 vlCDR1
KSSQSIVHSNGNTYLE

SEQ ID NO: 2292 - protein, 7 aa, Artificial Sequence
  Description of Artificial Sequence: Synthetic peptide
  XENP024432 vlCDR2
KVSNRFS

SEQ ID NO: 2293 - protein, 9 aa, Artificial Sequence
  Description of Artificial Sequence: Synthetic peptide
  XENP024432 vlCDR3
FQGSHVPNT

SEQ ID NO: 2294 - protein, 251 aa, Artificial Sequence
  Description of Artificial Sequence: Synthetic polypeptide
  XENP024433 1C11_H3.185_L3_scFv
EVQLVQSGSELVKPGESVKVSCKASGYTFTHYGINWVRQPPGQGLEWIGWINTYTGEPYYAPKFTERFVFSLDTSQDTAYLQINSLKAEDTAVYYCARDYYGSSPYWGQGTLVTVSSGKPGSGKPGSGKPGSGKPGSDVLMTQSPDSLAVSLGERATINCKSSQSIVHSNGNTYLEWYQQKPGQSPKLLIYKVSNRFSGVPDRFSGSGSGTDFTLTISSLQAEDVAVYYCFQGSHVPNTFGGGTKVEIKGS

SEQ ID NO: 2295 - protein, 117 aa, Artificial Sequence
  Description of Artificial Sequence: Synthetic polypeptide
  VH of XENP024433
EVQLVQSGSELVKPGESVKVSCKASGYTFTHYGINWVRQPPGQGLEWIGWINTYTGEPYYAPKFTERFVFSLDTSQDTAYLQINSLKAEDTAVYYCARDYYGSSPYWGQGTLVTVSS

SEQ ID NO: 2296 - protein, 114 aa, Artificial Sequence; identical to SEQ ID NO: 649
  Description of Artificial Sequence: Synthetic polypeptide
  VL of XENP024433

SEQ ID NO: 2297 - protein, 5 aa, Artificial Sequence
  Description of Artificial Sequence: Synthetic peptide
  XENP024433 vhCDR1
HYGIN

SEQ ID NO: 2298 - protein, 17 aa, Artificial Sequence
  Description of Artificial Sequence: Synthetic peptide
  XENP024433 vhCDR2
WINTYTGEPYYAPKFTE

SEQ ID NO: 2299 - protein, 8 aa, Artificial Sequence
  Description of Artificial Sequence: Synthetic peptide
  XENP024433 vhCDR3
DYYGSSPY

SEQ ID NO: 2300 - protein, 16 aa, Artificial Sequence
  Description of Artificial Sequence: Synthetic peptide
  XENP024433 vlCDR1
KSSQSIVHSNGNTYLE

SEQ ID NO: 2301 - protein, 7 aa, Artificial Sequence
  Description of Artificial Sequence: Synthetic peptide
  XENP024433 vlCDR2
KVSNRFS

SEQ ID NO: 2302 - protein, 9 aa, Artificial Sequence
  Description of Artificial Sequence: Synthetic peptide
  XENP024433 vlCDR3
FQGSHVPNT

SEQ ID NO: 2303 - protein, 251 aa, Artificial Sequence
  Description of Artificial Sequence: Synthetic polypeptide
  XENP024434 1C11_H3.186_L3_scFv
EVQLVQSGSELVKPGESVKVSCKASGYTFTHYGINWVRQPPGQGLEWMGWINTYTGEPYYAPGFTERFVFSLDTSVDTAYLQINSLKAEDTAVYYCARDYYGSSPYWGQGTLVTVSSGKPGSGKPGSGKPGSGKPGSDVLMTQSPDSLAVSLGERATINCKSSQSIVHSNGNTYLEWYQQKPGQSPKLLIYKVSNRFSGVPDRFSGSGSGTDFTLTISSLQAEDVAVYYCFQGSHVPNTFGGGTKVEIKGS

SEQ ID NO: 2304 - protein, 117 aa, Artificial Sequence
  Description of Artificial Sequence: Synthetic polypeptide
  VH of XENP024434
EVQLVQSGSELVKPGESVKVSCKASGYTFTHYGINWVRQPPGQGLEWMGWINTYTGEPYYAPGFTERFVFSLDTSVDTAYLQINSLKAEDTAVYYCARDYYGSSPYWGQGTLVTVSS

SEQ ID NO: 2305 - protein, 114 aa, Artificial Sequence; identical to SEQ ID NO: 649
  Description of Artificial Sequence: Synthetic polypeptide
  VL of XENP024434

SEQ ID NO: 2306 - protein, 5 aa, Artificial Sequence
  Description of Artificial Sequence: Synthetic peptide
  XENP024434 vhCDR1
HYGIN

SEQ ID NO: 2307 - protein, 17 aa, Artificial Sequence
  Description of Artificial Sequence: Synthetic peptide
  XENP024434 vhCDR2
WINTYTGEPYYAPGFTE

SEQ ID NO: 2308 - protein, 8 aa, Artificial Sequence
  Description of Artificial Sequence: Synthetic peptide
  XENP024434 vhCDR3
DYYGSSPY

SEQ ID NO: 2309 - protein, 16 aa, Artificial Sequence
  Description of Artificial Sequence: Synthetic peptide
  XENP024434 vlCDR1
KSSQSIVHSNGNTYLE

SEQ ID NO: 2310 - protein, 7 aa, Artificial Sequence
  Description of Artificial Sequence: Synthetic peptide
  XENP024434 vlCDR2
KVSNRFS

SEQ ID NO: 2311 - protein, 9 aa, Artificial Sequence
  Description of Artificial Sequence: Synthetic peptide
  XENP024434 vlCDR3
FQGSHVPNT

SEQ ID NO: 2312 - protein, 251 aa, Artificial Sequence
  Description of Artificial Sequence: Synthetic polypeptide
  XENP024435 1C11_H3.187_L3_scFv
QVQLVQSGSELVKPGESVKVSCKASGYTFTHYGINWVRQPPGQGLEWMGWINTYTGEPYYAPGFTERFVFSLDTSQSTAYLQINSLKAEDTAVYYCARDYYGSSPYWGQGTLVTVSSGKPGSGKPGSGKPGSGKPGSDVLMTQSPDSLAVSLGERATINCKSSQSIVHSNGNTYLEWYQQKPGQSPKLLIYKVSNRFSGVPDRFSGSGSGTDFTLTISSLQAEDVAVYYCFQGSHVPNTFGGGTKVEIKGS

SEQ ID NO: 2313 - protein, 117 aa, Artificial Sequence
  Description of Artificial Sequence: Synthetic polypeptide
  VH of XENP024435
QVQLVQSGSELVKPGESVKVSCKASGYTFTHYGINWVRQPPGQGLEWMGWINTYTGEPYYAPGFTERFVFSLDTSQSTAYLQINSLKAEDTAVYYCARDYYGSSPYWGQGTLVTVSS

SEQ ID NO: 2314 - protein, 114 aa, Artificial Sequence; identical to SEQ ID NO: 649
  Description of Artificial Sequence: Synthetic polypeptide
  VL of XENP024435

SEQ ID NO: 2315 - protein, 5 aa, Artificial Sequence
  Description of Artificial Sequence: Synthetic peptide
  XENP024435 vhCDR1
HYGIN

SEQ ID NO: 2316 - protein, 17 aa, Artificial Sequence
  Description of Artificial Sequence: Synthetic peptide
  XENP024435 vhCDR2
WINTYTGEPYYAPGFTE

SEQ ID NO: 2317 - protein, 8 aa, Artificial Sequence
  Description of Artificial Sequence: Synthetic peptide
  XENP024435 vhCDR3
DYYGSSPY

SEQ ID NO: 2318 - protein, 16 aa, Artificial Sequence
  Description of Artificial Sequence: Synthetic peptide
  XENP024435 vlCDR1
KSSQSIVHSNGNTYLE

SEQ ID NO: 2319 - protein, 7 aa, Artificial Sequence
  Description of Artificial Sequence: Synthetic peptide
  XENP024435 vlCDR2
KVSNRFS

SEQ ID NO: 2320 - protein, 9 aa, Artificial Sequence
  Description of Artificial Sequence: Synthetic peptide
  XENP024435 vlCDR3
FQGSHVPNT

SEQ ID NO: 2321 - protein, 251 aa, Artificial Sequence
  Description of Artificial Sequence: Synthetic polypeptide
  XENP024436 1C11_H3.188_L3_scFv
QVQLVQSGSELKKPGESVKVSCKASGYTFTHYGINWVRQPPGQGLEWIGWINTYTGEPYYAPGFTGRFVFSLDTSQSTAYLQINSLKAEDTAVYYCARDYYGSSPYWGQGTLVTVSSGKPGSGKPGSGKPGSGKPGSDVLMTQSPDSLAVSLGERATINCKSSQSIVHSNGNTYLEWYQQKPGQSPKLLIYKVSNRFSGVPDRFSGSGSGTDFTLTISSLQAEDVAVYYCFQGSHVPNTFGGGTKVEIKGS

SEQ ID NO: 2322 - protein, 117 aa, Artificial Sequence
  Description of Artificial Sequence: Synthetic polypeptide
  VH of XENP024436
QVQLVQSGSELKKPGESVKVSCKASGYTFTHYGINWVRQPPGQGLEWIGWINTYTGEPYYAPGFTGRFVFSLDTSQSTAYLQINSLKAEDTAVYYCARDYYGSSPYWGQGTLVTVSS

SEQ ID NO: 2323 - protein, 114 aa, Artificial Sequence; identical to SEQ ID NO: 649
  Description of Artificial Sequence: Synthetic polypeptide
  VL of XENP024436

SEQ ID NO: 2324 - protein, 5 aa, Artificial Sequence
  Description of Artificial Sequence: Synthetic peptide
  XENP024436 vhCDR1
HYGIN

SEQ ID NO: 2325 - protein, 17 aa, Artificial Sequence
  Description of Artificial Sequence: Synthetic peptide
  XENP024436 vhCDR2
WINTYTGEPYYAPGFTG

SEQ ID NO: 2326 - protein, 8 aa, Artificial Sequence
  Description of Artificial Sequence: Synthetic peptide
  XENP024436 vhCDR3
DYYGSSPY

SEQ ID NO: 2327 - protein, 16 aa, Artificial Sequence
  Description of Artificial Sequence: Synthetic peptide
  XENP024436 vlCDR1
KSSQSIVHSNGNTYLE

SEQ ID NO: 2328 - protein, 7 aa, Artificial Sequence
  Description of Artificial Sequence: Synthetic peptide
  XENP024436 vlCDR2
KVSNRFS

SEQ ID NO: 2329 - protein, 9 aa, Artificial Sequence
  Description of Artificial Sequence: Synthetic peptide
  XENP024436 vlCDR3
FQGSHVPNT

SEQ ID NO: 2330 - protein, 251 aa, Artificial Sequence
  Description of Artificial Sequence: Synthetic polypeptide
  XENP024437 1C11_H3.189_L3_scFv
QVQLVQSGSELKKPGASVKVSCKASGYTFTHYGINWVRQPPGQGLEWIGWINTYTGEPYYAPKFTGRFVFSLDTSVSTAYLQINSLKAEDTAVYYCARDYYGSSPYWGQGTLVTVSSGKPGSGKPGSGKPGSGKPGSDVLMTQSPDSLAVSLGERATINCKSSQSIVHSNGNTYLEWYQQKPGQSPKLLIYKVSNRFSGVPDRFSGSGSGTDFTLTISSLQAEDVAVYYCFQGSHVPNTFGGGTKVEIKGS

SEQ ID NO: 2331 - protein, 117 aa, Artificial Sequence
  Description of Artificial Sequence: Synthetic polypeptide
  VH of XENP024437
QVQLVQSGSELKKPGASVKVSCKASGYTFTHYGINWVRQPPGQGLEWIGWINTYTGEPYYAPKFTGRFVFSLDTSVSTAYLQINSLKAEDTAVYYCARDYYGSSPYWGQGTLVTVSS

SEQ ID NO: 2332 - protein, 114 aa, Artificial Sequence; identical to SEQ ID NO: 649
  Description of Artificial Sequence: Synthetic polypeptide
  VL of XENP024437

SEQ ID NO: 2333 - protein, 5 aa, Artificial Sequence
  Description of Artificial Sequence: Synthetic peptide
  XENP024437 vhCDR1
HYGIN

SEQ ID NO: 2334 - protein, 17 aa, Artificial Sequence
  Description of Artificial Sequence: Synthetic peptide
  XENP024437 vhCDR2
WINTYTGEPYYAPKFTG

SEQ ID NO: 2335 - protein, 8 aa, Artificial Sequence
  Description of Artificial Sequence: Synthetic peptide
  XENP024437 vhCDR3
DYYGSSPY

SEQ ID NO: 2336 - protein, 16 aa, Artificial Sequence
  Description of Artificial Sequence: Synthetic peptide
  XENP024437 vlCDR1
KSSQSIVHSNGNTYLE

SEQ ID NO: 2337 - protein, 7 aa, Artificial Sequence
  Description of Artificial Sequence: Synthetic peptide
  XENP024437 vlCDR2
KVSNRFS

SEQ ID NO: 2338 - protein, 9 aa, Artificial Sequence
  Description of Artificial Sequence: Synthetic peptide
  XENP024437 vlCDR3
FQGSHVPNT

SEQ ID NO: 2339 - protein, 251 aa, Artificial Sequence
  Description of Artificial Sequence: Synthetic polypeptide
  XENP024438 1C11_H3.190_L3_scFv
QVQLVQSGSVLKKPGGSVKVSCKASGYTFTHYGINWVRQPPGQGLEWIGWINTYTGEPYYAPGFTGRFVFSLDTSQSTAYLQINSLKAEDTAVYYCARDYYGSSPYWGQGTLVTVSSGKPGSGKPGSGKPGSGKPGSDVLMTQSPDSLAVSLGERATINCKSSQSIVHSNGNTYLEWYQQKPGQSPKLLIYKVSNRFSGVPDRFSGSGSGTDFTLTISSLQAEDVAVYYCFQGSHVPNTFGGGTKVEIKGS

SEQ ID NO: 2340 - protein, 117 aa, Artificial Sequence
  Description of Artificial Sequence: Synthetic polypeptide
  VH of XENP024438
QVQLVQSGSVLKKPGGSVKVSCKASGYTFTHYGINWVRQPPGQGLEWIGWINTYTGEPYYAPGFTGRFVFSLDTSQSTAYLQINSLKAEDTAVYYCARDYYGSSPYWGQGTLVTVSS

SEQ ID NO: 2341 - protein, 114 aa, Artificial Sequence; identical to SEQ ID NO: 649
  Description of Artificial Sequence: Synthetic polypeptide
  VL of XENP024438

SEQ ID NO: 2342 - protein, 5 aa, Artificial Sequence
  Description of Artificial Sequence: Synthetic peptide
  XENP024438 vhCDR1
HYGIN

SEQ ID NO: 2343 - protein, 17 aa, Artificial Sequence
  Description of Artificial Sequence: Synthetic peptide
  XENP024438 vhCDR2
WINTYTGEPYYAPGFTG

SEQ ID NO: 2344 - protein, 8 aa, Artificial Sequence
  Description of Artificial Sequence: Synthetic peptide
  XENP024438 vhCDR3
DYYGSSPY

SEQ ID NO: 2345 - protein, 16 aa, Artificial Sequence
  Description of Artificial Sequence: Synthetic peptide
  XENP024438 vlCDR1
KSSQSIVHSNGNTYLE

SEQ ID NO: 2346 - protein, 7 aa, Artificial Sequence
  Description of Artificial Sequence: Synthetic peptide
  XENP024438 vlCDR2
KVSNRFS

SEQ ID NO: 2347 - protein, 9 aa, Artificial Sequence
  Description of Artificial Sequence: Synthetic peptide
  XENP024438 vlCDR3
FQGSHVPNT

SEQ ID NO: 2348 - protein, 251 aa, Artificial Sequence
  Description of Artificial Sequence: Synthetic polypeptide
  XENP024439 1C11_H3.191_L3_scFv
QVQLVQSGSELVKPGESVKVSCKASGYTFTHYGMNWVRQAPGQGLEWMGWINTYTGEPTYAPGFTGRFVFSLDTSQSTAYLQINSLKAEDTAVYFCARDYYGSSPYWGQGTLVTVSSGKPGSGKPGSGKPGSGKPGSDVLMTQSPDSLAVSLGERATINCKSSQSIVHSNGNTYLEWYQQKPGQSPKLLIYKVSNRFSGVPDRFSGSGSGTDFTLTISSLQAEDVAVYYCFQGSHVPNTFGGGTKVEIKGS

SEQ ID NO: 2349 - protein, 117 aa, Artificial Sequence
  Description of Artificial Sequence: Synthetic polypeptide
  VH of XENP024439
QVQLVQSGSELVKPGESVKVSCKASGYTFTHYGMNWVRQAPGQGLEWMGWINTYTGEPTYAPGFTGRFVFSLDTSQSTAYLQINSLKAEDTAVYFCARDYYGSSPYWGQGTLVTVSS

SEQ ID NO: 2350 - protein, 114 aa, Artificial Sequence; identical to SEQ ID NO: 649
  Description of Artificial Sequence: Synthetic polypeptide
  VL of XENP024439

SEQ ID NO: 2351 - protein, 5 aa, Artificial Sequence
  Description of Artificial Sequence: Synthetic peptide
  XENP024439 vhCDR1
HYGMN

SEQ ID NO: 2352 - protein, 17 aa, Artificial Sequence
  Description of Artificial Sequence: Synthetic peptide
  XENP024439 vhCDR2
WINTYTGEPTYAPGFTG

SEQ ID NO: 2353 - protein, 8 aa, Artificial Sequence
  Description of Artificial Sequence: Synthetic peptide
  XENP024439 vhCDR3
DYYGSSPY

SEQ ID NO: 2354 - protein, 16 aa, Artificial Sequence
  Description of Artificial Sequence: Synthetic peptide
  XENP024439 vlCDR1
KSSQSIVHSNGNTYLE

SEQ ID NO: 2355 - protein, 7 aa, Artificial Sequence
  Description of Artificial Sequence: Synthetic peptide
  XENP024439 vlCDR2
KVSNRFS

SEQ ID NO: 2356 - protein, 9 aa, Artificial Sequence
  Description of Artificial Sequence: Synthetic peptide
  XENP024439 vlCDR3
FQGSHVPNT

SEQ ID NO: 2357 - protein, 251 aa, Artificial Sequence
  Description of Artificial Sequence: Synthetic polypeptide
  XENP024440 1C11_H3.192_L3_scFv
EVQLVQSGSVLKKPGESVKVSCKASGYTFTHYGINWVRQAPGQGLEWMGWINTYTGEPTYADGFTERFVFSLDTSVSTAYLQISSLKAEDTAVYFCARDYYGSSPYWGQGTLVTVSSGKPGSGKPGSGKPGSGKPGSDVLMTQSPDSLAVSLGERATINCKSSQSIVHSNGNTYLEWYQQKPGQSPKLLIYKVSNRFSGVPDRFSGSGSGTDFTLTISSLQAEDVAVYYCFQGSHVPNTFGGGTKVEIKGS

SEQ ID NO: 2358 - protein, 117 aa, Artificial Sequence
  Description of Artificial Sequence: Synthetic polypeptide
  VH of XENP024440
EVQLVQSGSVLKKPGESVKVSCKASGYTFTHYGINWVRQAPGQGLEWMGWINTYTGEPTYADGFTERFVFSLDTSVSTAYLQISSLKAEDTAVYFCARDYYGSSPYWGQGTLVTVSS

SEQ ID NO: 2359 - protein, 114 aa, Artificial Sequence; identical to SEQ ID NO: 649
  Description of Artificial Sequence: Synthetic polypeptide
  VL of XENP024440

SEQ ID NO: 2360 - protein, 5 aa, Artificial Sequence
  Description of Artificial Sequence: Synthetic peptide
  XENP024440 vhCDR1
HYGIN

SEQ ID NO: 2361 - protein, 17 aa, Artificial Sequence
  Description of Artificial Sequence: Synthetic peptide
  XENP024440 vhCDR2
WINTYTGEPTYADGFTE

SEQ ID NO: 2362 - protein, 8 aa, Artificial Sequence
  Description of Artificial Sequence: Synthetic peptide
  XENP024440 vhCDR3
DYYGSSPY

SEQ ID NO: 2363 - protein, 16 aa, Artificial Sequence
  Description of Artificial Sequence: Synthetic peptide
  XENP024440 vlCDR1
KSSQSIVHSNGNTYLE

SEQ ID NO: 2364 - protein, 7 aa, Artificial Sequence
  Description of Artificial Sequence: Synthetic peptide
  XENP024440 vlCDR2
KVSNRFS

SEQ ID NO: 2365 - protein, 9 aa, Artificial Sequence
  Description of Artificial Sequence: Synthetic peptide
  XENP024440 vlCDR3
FQGSHVPNT

SEQ ID NO: 2366 - protein, 251 aa, Artificial Sequence
  Description of Artificial Sequence: Synthetic polypeptide
  XENP024441 1C11_H3.193_L3_scFv
QIQLVQSGSELKKPGASVKVSCKASGYTFTHYGMNWVRQPPGQGLEWIGWINTYTGEPTYAPGFTERFVFSLDTSQSTAYLQINSLKAEDTAVYYCARDYYGSSPYWGQGTLVTVSSGKPGSGKPGSGKPGSGKPGSDVLMTQSPDSLAVSLGERATINCKSSQSIVHSNGNTYLEWYQQKPGQSPKLLIYKVSNRFSGVPDRFSGSGSGTDFTLTISSLQAEDVAVYYCFQGSHVPNTFGGGTKVEIKGS

SEQ ID NO: 2367 - protein, 117 aa, Artificial Sequence
  Description of Artificial Sequence: Synthetic polypeptide
  VH of XENP024441
QIQLVQSGSELKKPGASVKVSCKASGYTFTHYGMNWVRQPPGQGLEWIGWINTYTGEPTYAPGFTERFVFSLDTSQSTAYLQINSLKAEDTAVYYCARDYYGSSPYWGQGTLVTVSS

SEQ ID NO: 2368 - protein, 114 aa, Artificial Sequence; identical to SEQ ID NO: 649
  Description of Artificial Sequence: Synthetic polypeptide
  VL of XENP024441

SEQ ID NO: 2369 - protein, 5 aa, Artificial Sequence
  Description of Artificial Sequence: Synthetic peptide
  XENP024441 vhCDR1
HYGMN

SEQ ID NO: 2370 - protein, 17 aa, Artificial Sequence
  Description of Artificial Sequence: Synthetic peptide
  XENP024441 vhCDR2
WINTYTGEPTYAPGFTE

SEQ ID NO: 2371 - protein, 8 aa, Artificial Sequence
  Description of Artificial Sequence: Synthetic peptide
  XENP024441 vhCDR3
DYYGSSPY

SEQ ID NO: 2372 - protein, 16 aa, Artificial Sequence
  Description of Artificial Sequence: Synthetic peptide
  XENP024441 vlCDR1
KSSQSIVHSNGNTYLE

SEQ ID NO: 2373 - protein, 7 aa, Artificial Sequence
  Description of Artificial Sequence: Synthetic peptide
  XENP024441 vlCDR2
KVSNRFS

SEQ ID NO: 2374 - protein, 9 aa, Artificial Sequence
  Description of Artificial Sequence: Synthetic peptide
  XENP024441 vlCDR3
FQGSHVPNT

SEQ ID NO: 2375 - protein, 251 aa, Artificial Sequence
  Description of Artificial Sequence: Synthetic polypeptide
  XENP024442 1C11_H3.194_L3_scFv
EIQLVQSGSVLKKPGASVKVSCKASGYTFTHYGINWVRQAPGQGLEWIGWINTYTGEPTYADGFTGRFVFSLDTSVSTAYLQISSLKAEDTAVYFCARDYYGSSPYWGQGTLVTVSSGKPGSGKPGSGKPGSGKPGSDVLMTQSPDSLAVSLGERATINCKSSQSIVHSNGNTYLEWYQQKPGQSPKLLIYKVSNRFSGVPDRFSGSGSGTDFTLTISSLQAEDVAVYYCFQGSHVPNTFGGGTKVEIKGS

SEQ ID NO: 2376 - protein, 117 aa, Artificial Sequence
  Description of Artificial Sequence: Synthetic polypeptide
  VH of XENP024442
EIQLVQSGSVLKKPGASVKVSCKASGYTFTHYGINWVRQAPGQGLEWIGWINTYTGEPTYADGFTGRFVFSLDTSVSTAYLQISSLKAEDTAVYFCARDYYGSSPYWGQGTLVTVSS

SEQ ID NO: 2377 - protein, 114 aa, Artificial Sequence; identical to SEQ ID NO: 649
  Description of Artificial Sequence: Synthetic polypeptide
  VL of XENP024442

SEQ ID NO: 2378 - protein, 5 aa, Artificial Sequence
  Description of Artificial Sequence: Synthetic peptide
  XENP024442 vhCDR1
HYGIN

SEQ ID NO: 2379 - protein, 17 aa, Artificial Sequence
  Description of Artificial Sequence: Synthetic peptide
  XENP024442 vhCDR2
WINTYTGEPTYADGFTG

SEQ ID NO: 2380 - protein, 8 aa, Artificial Sequence
  Description of Artificial Sequence: Synthetic peptide
  XENP024442 vhCDR3
DYYGSSPY

SEQ ID NO: 2381 - protein, 16 aa, Artificial Sequence
  Description of Artificial Sequence: Synthetic peptide
  XENP024442 vlCDR1
KSSQSIVHSNGNTYLE

SEQ ID NO: 2382 - protein, 7 aa, Artificial Sequence
  Description of Artificial Sequence: Synthetic peptide
  XENP024442 vlCDR2
KVSNRFS

SEQ ID NO: 2383 - protein, 9 aa, Artificial Sequence
  Description of Artificial Sequence: Synthetic peptide
  XENP024442 vlCDR3
FQGSHVPNT

SEQ ID NO: 2384 - protein, 251 aa, Artificial Sequence
  Description of Artificial Sequence: Synthetic polypeptide
  XENP024443 1C11_H3.195_L3_scFv
QIQLVQSGSELKKPGASVKVSCKASGYTFTHYGMNWVRQPPGQGLEWMGWINTYTGEPYYADGFTGRFVFSLDTSVDTAYLQINSLKAEDTAVYFCARDYYGSSPYWGQGTLVTVSSGKPGSGKPGSGKPGSGKPGSDVLMTQSPDSLAVSLGERATINCKSSQSIVHSNGNTYLEWYQQKPGQSPKLLIYKVSNRFSGVPDRFSGSGSGTDFTLTISSLQAEDVAVYYCFQGSHVPNTFGGGTKVEIKGS

SEQ ID NO: 2385 - protein, 117 aa, Artificial Sequence
  Description of Artificial Sequence: Synthetic polypeptide
  VH of XENP024443
QIQLVQSGSELKKPGASVKVSCKASGYTFTHYGMNWVRQPPGQGLEWMGWINTYTGEPYYADGFTGRFVFSLDTSVDTAYLQINSLKAEDTAVYFCARDYYGSSPYWGQGTLVTVSS

SEQ ID NO: 2386 - protein, 114 aa, Artificial Sequence; identical to SEQ ID NO: 649
  Description of Artificial Sequence: Synthetic polypeptide
  VL of XENP024443

SEQ ID NO: 2387 - protein, 5 aa, Artificial Sequence
  Description of Artificial Sequence: Synthetic peptide
  XENP024443 vhCDR1
HYGMN

SEQ ID NO: 2388 - protein, 17 aa, Artificial Sequence
  Description of Artificial Sequence: Synthetic peptide
  XENP024443 vhCDR2
WINTYTGEPYYADGFTG

SEQ ID NO: 2389 - protein, 8 aa, Artificial Sequence
  Description of Artificial Sequence: Synthetic peptide
  XENP024443 vhCDR3
DYYGSSPY

SEQ ID NO: 2390 - protein, 16 aa, Artificial Sequence
  Description of Artificial Sequence: Synthetic peptide
  XENP024443 vlCDR1
KSSQSIVHSNGNTYLE

SEQ ID NO: 2391 - protein, 7 aa, Artificial Sequence
  Description of Artificial Sequence: Synthetic peptide
  XENP024443 vlCDR2
KVSNRFS

SEQ ID NO: 2392 - protein, 9 aa, Artificial Sequence
  Description of Artificial Sequence: Synthetic peptide
  XENP024443 vlCDR3
FQGSHVPNT

SEQ ID NO: 2393 - protein, 231 aa, Artificial Sequence
  Description of Artificial Sequence: Synthetic polypeptide
  XENP022835 empty-[CTLA-4]_H3.23_L0.129_scFv Empty-Fc Heavy Chain
EPKSSDKTHTCPPCPAPPVAGPSVFLFPPKPKDTLMISRTPEVTCVVVDVKHEDPEVKFNWYVDGVEVHNAKTKPREEEYNSTYRVVSVLTVLHQDWLNGKEYKCKVSNKALPAPIEKTISKAKGQPREPQVYTLPPSREEMTKNQVSLTCDVSGFYPSDIAVEWESDGQPENNYKTTPPVLDSDGSFFLYSKLTVDKSRWEQGDVFSCSVMHEALHNHYTQKSLSLSPGK

SEQ ID NO: 2394 - protein, 477 aa, Artificial Sequence
  Description of Artificial Sequence: Synthetic polypeptide
  XENP022835 empty-[CTLA-4]_H3.23_L0.129_scFv scFv-Fc Heavy Chain
EVQLVESGGGLVKPGGSLRLSCAASGFTFSSYTMHWVRQAPGKGLEWVSFISYDGNYKYYADSVKGRFTISRDNAKNSLYLQMNSLRAEDTAVYYCARGGHLGPFDLWGQGTMVTVSSGKPGSGKPGSGKPGSGKPGSEIVLTQSPATLSLSPGERATLSCRASQSVGSSYLAWYQQKPGQAPRLLIYGASSRATGIPDRFSGSGSGTDFTLTISRLEPEDFAVYYCQQYGSSPWTFGQGTKVEIKEPKSSDKTHTCPPCPAPPVAGPSVFLFPPKPKDTLMISRTPEVTCVVVDVKHEDPEVKFNWYVDGVEVHNAKTKPREEQYNSTYRVVSVLTVLHQDWLNGKEYKCKVSNKALPAPIEKTISKAKGQPREPQVYTLPPSREQMTKNQVKLTCLVKGFYPSDIAVEWESNGQPENNYKTTPPVLDSDGSFFLYSKLTVDKSRWQQGNVFSCSVMHEALHNHYTQKSLSLSPGK

SEQ ID NO: 2395 - protein, 118 aa, Artificial Sequence
  Description of Artificial Sequence: Synthetic polypeptide
  VH of XENP022835
EVQLVESGGGLVKPGGSLRLSCAASGFTFSSYTMHWVRQAPGKGLEWVSFISYDGNYKYYADSVKGRFTISRDNAKNSLYLQMNSLRAEDTAVYYCARGGHLGPFDLWGQGTMVTVSS

SEQ ID NO: 2396 - protein, 108 aa, Artificial Sequence
  Description of Artificial Sequence: Synthetic polypeptide
  VL of XENP022835
EIVLTQSPATLSLSPGERATLSCRASQSVGSSYLAWYQQKPGQAPRLLIYGASSRATGIPDRFSGSGSGTDFTLTISRLEPEDFAVYYCQQYGSSPWTFGQGTKVEIK

SEQ ID NO: 2397 - protein, 231 aa, Artificial Sequence
  Description of Artificial Sequence: Synthetic polypeptide
  Fc chain of XENP022835
EPKSSDKTHTCPPCPAPPVAGPSVFLFPPKPKDTLMISRTPEVTCVVVDVKHEDPEVKFNWYVDGVEVHNAKTKPREEQYNSTYRVVSVLTVLHQDWLNGKEYKCKVSNKALPAPIEKTISKAKGQPREPQVYTLPPSREQMTKNQVKLTCLVKGFYPSDIAVEWESNGQPENNYKTTPPVLDSDGSFFLYSKLTVDKSRWQQGNVFSCSVMHEALHNHYTQKSLSLSPGK

SEQ ID NO: 2398 - protein, 5 aa, Artificial Sequence
  Description of Artificial Sequence: Synthetic peptide
  XENP022835 vhCDR1
SYTMH

SEQ ID NO: 2399 - protein, 17 aa, Artificial Sequence
  Description of Artificial Sequence: Synthetic peptide
  XENP022835 vhCDR2
FISYDGNYKYYADSVKG

SEQ ID NO: 2400 - protein, 9 aa, Artificial Sequence
  Description of Artificial Sequence: Synthetic peptide
  XENP022835 vhCDR3
GGHLGPFDL

SEQ ID NO: 2401 - protein, 12 aa, Artificial Sequence
  Description of Artificial Sequence: Synthetic peptide
  XENP022835 vlCDR1
RASQSVGSSYLA

SEQ ID NO: 2402 - protein, 7 aa, Artificial Sequence
  Description of Artificial Sequence: Synthetic peptide
  XENP022835 vlCDR2
GASSRAT

SEQ ID NO: 2403 - protein, 9 aa, Artificial Sequence
  Description of Artificial Sequence: Synthetic peptide
  XENP022835 vlCDR3
QQYGSSPWT

SEQ ID NO: 2404 - protein, 447 aa, Artificial Sequence
  Description of Artificial Sequence: Synthetic polypeptide
  XENP023552 [CTLA-4]_H3_L0.22_Fab-empty_Fc(216)_IgG1 Fab-Fc Heavy Chain
EVQLVESGGGLVKPGGSLRLSCAASGFTFSSYTMHWVRQAPGKGLEWVSFISYDGNNKYYADSVKGRFTISRDNAKNSLYLQMNSLRAEDTAVYYCARTGWLGPFDYWGQGTLVTVSSASTKGPSVFPLAPSSKSTSGGTAALGCLVKDYFPEPVTVSWNSGALTSGVHTFPAVLQSSGLYSLSSVVTVPSSSLGTQTYICNVNHKPSDTKVDKKVEPKSCDKTHTCPPCPAPPVAGPSVFLFPPKPKDTLMISRTPEVTCVVVDVKHEDPEVKFNWYVDGVEVHNAKTKPREEEYNSTYRVVSVLTVLHQDWLNGKEYKCKVSNKALPAPIEKTISKAKGQPREPQVYTLPPSREEMTKNQVSLTCDVSGFYPSDIAVEWESDGQPENNYKTTPPVLDSDGSFFLYSKLTVDKSRWEQGDVFSCSVLHEALHSHYTQKSLSLSPGK

SEQ ID NO: 2405 - protein, 118 aa, Artificial Sequence
  Description of Artificial Sequence: Synthetic polypeptide
  VH of XENP023552
EVQLVESGGGLVKPGGSLRLSCAASGFTFSSYTMHWVRQAPGKGLEWVSFISYDGNNKYYADSVKGRFTISRDNAKNSLYLQMNSLRAEDTAVYYCARTGWLGPFDYWGQGTLVTVSS

SEQ ID NO: 2406 - protein, 5 aa, Artificial Sequence
  Description of Artificial Sequence: Synthetic peptide
  XENP023552 vhCDR1
SYTMH

SEQ ID NO: 2407 - protein, 17 aa, Artificial Sequence
  Description of Artificial Sequence: Synthetic peptide
  XENP023552 vhCDR2
FISYDGNNKYYADSVKG

SEQ ID NO: 2408 - protein, 9 aa, Artificial Sequence
  Description of Artificial Sequence: Synthetic peptide
  XENP023552 vhCDR3
TGWLGPFDY

SEQ ID NO: 2409 - protein, 231 aa, Artificial Sequence
  Description of Artificial Sequence: Synthetic polypeptide
  XENP023552 [CTLA-4]_H3_L0.22_Fab-empty_Fc(216)_IgG1 Empty-Fc Heavy Chain
EPKSSDKTHTCPPCPAPPVAGPSVFLFPPKPKDTLMISRTPEVTCVVVDVKHEDPEVKFNWYVDGVEVHNAKTKPREEQYNSTYRVVSVLTVLHQDWLNGKEYKCKVSNKALPAPIEKTISKAKGQPREPQVYTLPPSREQMTKNQVKLTCLVKGFYPSDIAVEWESNGQPENNYKTTPPVLDSDGSFFLYSKLTVDKSRWQQGNVFSCSVLHEALHSHYTQKSLSLSPGK

SEQ ID NO: 2410 - protein, 215 aa, Artificial Sequence
  Description of Artificial Sequence: Synthetic polypeptide
  XENP023552 [CTLA-4]_H3_L0.22_Fab-empty_Fc(216)_IgG1 Light Chain
EIVLTQSPGTLSLSPGERATLSCRASQSVSSSYLAWYQQKPGQAPRLLIYGAFSRATGIPDRFSGSGSGTDFTLTISRLEPEDFAVYYCQQYGSSPWTFGQGTKVEIKRTVAAPSVFIFPPSDEQLKSGTASVVCLLNNFYPREAKVQWKVDNALQSGNSQESVTEQDSKDSTYSLSSTLTLSKADYEKHKVYACEVTHQGLSSPVTKSFNRGEC

SEQ ID NO: 2411 - protein, 108 aa, Artificial Sequence
  Description of Artificial Sequence: Synthetic polypeptide
  VL of XENP023552
EIVLTQSPGTLSLSPGERATLSCRASQSVSSSYLAWYQQKPGQAPRLLIYGAFSRATGIPDRFSGSGSGTDFTLTISRLEPEDFAVYYCQQYGSSPWTFGQGTKVEIK

SEQ ID NO: 2412 - protein, 12 aa, Artificial Sequence
  Description of Artificial Sequence: Synthetic peptide
  XENP023552 vlCDR1
RASQSVSSSYLA

SEQ ID NO: 2413 - protein, 7 aa, Artificial Sequence
  Description of Artificial Sequence: Synthetic peptide
  XENP023552 vlCDR2
GAFSRAT

SEQ ID NO: 2414 - protein, 9 aa, Artificial Sequence
  Description of Artificial Sequence: Synthetic peptide
  XENP023552 vlCDR3
QQYGSSPWT

SEQ ID NO: 2415 - protein, 226 aa, Artificial Sequence
  Description of Artificial Sequence: Synthetic polypeptide
  XENP023041 7G8_H3.66_L1.34_Fab Heavy Chain
EVQLVESGGGLVQPGGSLRLSCAASGFTFDEAWMSWVRQAPGKGLEWVAEISTKANNHATYYAESVKGRFTISRDDSKSSVYLQMNSLRAEDTAVYYCTRLATWDWYFDVWGQGTTVTVSSASTKGPSVFPLAPSSKSTSGGTAALGCLVKDYFPEPVTVSWNSGALTSGVHTFPAVLQSSGLYSLSSVVTVPSSSLGTQTYICNVNHKPSNTKVDKKVEPKSCGS

SEQ ID NO: 2416 - protein, 121 aa, Artificial Sequence
  Description of Artificial Sequence: Synthetic polypeptide
  VH of XENP023041
EVQLVESGGGLVQPGGSLRLSCAASGFTFDEAWMSWVRQAPGKGLEWVAEISTKANNHATYYAESVKGRFTISRDDSKSSVYLQMNSLRAEDTAVYYCTRLATWDWYFDVWGQGTTVTVSS

SEQ ID NO: 2417 - protein, 5 aa, Artificial Sequence
  Description of Artificial Sequence: Synthetic peptide
  XENP023041 vhCDR1
EAWMS

SEQ ID NO: 2418 - protein, 19 aa, Artificial Sequence
  Description of Artificial Sequence: Synthetic peptide
  XENP023041 vhCDR2
EISTKANNHATYYAESVKG

SEQ ID NO: 2419 - protein, 10 aa, Artificial Sequence
  Description of Artificial Sequence: Synthetic peptide
  XENP023041 vhCDR3
LATWDWYFDV

SEQ ID NO: 2420 - protein, 218 aa, Artificial Sequence
  Description of Artificial Sequence: Synthetic polypeptide
  XENP023041 7G8_H3.66_L1.34_Fab Light Chain
DIVLTQSPSSLSASVGDRVTITCRASQSVDYDGDSYMNWYQQKPGKPPKLLIYAASELESGIPARFSGSGSGTDFTLTISSLQPEDFATYYCQQSNEDPFTFGSGTKLEIKRTVAAPSVFIFPPSDEQLKSGTASVVCLLNNFYPREAKVQWKVDNALQSGNSQESVTEQDSKDSTYSLSSTLTLSKADYEKHKVYACEVTHQGLSSPVTKSFNRGEC

SEQ ID NO: 2421 - protein, 111 aa, Artificial Sequence
  Description of Artificial Sequence: Synthetic polypeptide
  VL of XENP023041
DIVLTQSPSSLSASVGDRVTITCRASQSVDYDGDSYMNWYQQKPGKPPKLLIYAASELESGIPARFSGSGSGTDFTLTISSLQPEDFATYYCQQSNEDPFTFGSGTKLEIK

SEQ ID NO: 2422 - protein, 15 aa, Artificial Sequence
  Description of Artificial Sequence: Synthetic peptide
  XENP023041 vlCDR1
RASQSVDYDGDSYMN

SEQ ID NO: 2423 - protein, 7 aa, Artificial Sequence
  Description of Artificial Sequence: Synthetic peptide
  XENP023041 vlCDR2
AASELES

SEQ ID NO: 2424 - protein, 9 aa, Artificial Sequence
  Description of Artificial Sequence: Synthetic peptide
  XENP023041 vlCDR3
QQSNEDPFT

SEQ ID NO: 2425 - protein, 226 aa, Artificial Sequence
  Description of Artificial Sequence: Synthetic polypeptide
  XENP023042 7G8_H3.67_L1.34_Fab Heavy Chain
EVQLVESGGGLVQPGGSLRLSCAASGFTFDDTWMSWVRQAPGKGLEWVAEISTKANNHATYYAESVKGRFTISRDDSKSSVYLQMNSLRAEDTAVYYCTRLATWDWYFDVWGQGTTVTVSSASTKGPSVFPLAPSSKSTSGGTAALGCLVKDYFPEPVTVSWNSGALTSGVHTFPAVLQSSGLYSLSSVVTVPSSSLGTQTYICNVNHKPSNTKVDKKVEPKSCGS

SEQ ID NO: 2426 - protein, 121 aa, Artificial Sequence
  Description of Artificial Sequence: Synthetic polypeptide
  VH of XENP023042
EVQLVESGGGLVQPGGSLRLSCAASGFTFDDTWMSWVRQAPGKGLEWVAEISTKANNHATYYAESVKGRFTISRDDSKSSVYLQMNSLRAEDTAVYYCTRLATWDWYFDVWGQGTTVTVSS

SEQ ID NO: 2427 - protein, 5 aa, Artificial Sequence
  Description of Artificial Sequence: Synthetic peptide
  XENP023042 vhCDR1
DTWMS

SEQ ID NO: 2428 - protein, 19 aa, Artificial Sequence
  Description of Artificial Sequence: Synthetic peptide
  XENP023042 vhCDR2
EISTKANNHATYYAESVKG

SEQ ID NO: 2429 - protein, 10 aa, Artificial Sequence
  Description of Artificial Sequence: Synthetic peptide
  XENP023042 vhCDR3
LATWDWYFDV

SEQ ID NO: 2430 - protein, 218 aa, Artificial Sequence; identical to SEQ ID NO: 2420
  Description of Artificial Sequence: Synthetic polypeptide
  XENP023042 7G8_H3.67_L1.34_Fab Light Chain

SEQ ID NO: 2431 - protein, 111 aa, Artificial Sequence; identical to SEQ ID NO: 2421
  Description of Artificial Sequence: Synthetic polypeptide
  VL of XENP023042

SEQ ID NO: 2432 - protein, 15 aa, Artificial Sequence
  Description of Artificial Sequence: Synthetic peptide
  XENP023042 vlCDR1
RASQSVDYDGDSYMN

SEQ ID NO: 2433 - protein, 7 aa, Artificial Sequence
  Description of Artificial Sequence: Synthetic peptide
  XENP023042 vlCDR2
AASELES

SEQ ID NO: 2434 - protein, 9 aa, Artificial Sequence
  Description of Artificial Sequence: Synthetic peptide
  XENP023042 vlCDR3
QQSNEDPFT

SEQ ID NO: 2435 - protein, 226 aa, Artificial Sequence
  Description of Artificial Sequence: Synthetic polypeptide
  XENP023043 7G8_H3.68_L1.34_Fab Heavy Chain
EVQLVESGGGLVQPGGSLRLSCAASGFTFDDKWMSWVRQAPGKGLEWVAEISTKANNHATYYAESVKGRFTISRDDSKSSVYLQMNSLRAEDTAVYYCTRLATWDWYFDVWGQGTTVTVSSASTKGPSVFPLAPSSKSTSGGTAALGCLVKDYFPEPVTVSWNSGALTSGVHTFPAVLQSSGLYSLSSVVTVPSSSLGTQTYICNVNHKPSNTKVDKKVEPKSCGS

SEQ ID NO: 2436 - protein, 121 aa, Artificial Sequence
  Description of Artificial Sequence: Synthetic polypeptide
  VH of XENP023043
EVQLVESGGGLVQPGGSLRLSCAASGFTFDDKWMSWVRQAPGKGLEWVAEISTKANNHATYYAESVKGRFTISRDDSKSSVYLQMNSLRAEDTAVYYCTRLATWDWYFDVWGQGTTVTVSS

SEQ ID NO: 2437 - protein, 5 aa, Artificial Sequence
  Description of Artificial Sequence: Synthetic peptide
  XENP023043 vhCDR1
DKWMS

SEQ ID NO: 2438 - protein, 19 aa, Artificial Sequence
  Description of Artificial Sequence: Synthetic peptide
  XENP023043 vhCDR2
EISTKANNHATYYAESVKG

SEQ ID NO: 2439 - protein, 10 aa, Artificial Sequence
  Description of Artificial Sequence: Synthetic peptide
  XENP023043 vhCDR3
LATWDWYFDV

SEQ ID NO: 2440 - protein, 218 aa, Artificial Sequence; identical to SEQ ID NO: 2420
  Description of Artificial Sequence: Synthetic polypeptide
  XENP023043 7G8_H3.68_L1.34_Fab Light Chain

SEQ ID NO: 2441 - protein, 111 aa, Artificial Sequence; identical to SEQ ID NO: 2421
  Description of Artificial Sequence: Synthetic polypeptide
  VL of XENP023043

SEQ ID NO: 2442 - protein, 15 aa, Artificial Sequence
  Description of Artificial Sequence: Synthetic peptide
  XENP023043 vlCDR1
RASQSVDYDGDSYMN

SEQ ID NO: 2443 - protein, 7 aa, Artificial Sequence
  Description of Artificial Sequence: Synthetic peptide
  XENP023043 vlCDR2
AASELES

SEQ ID NO: 2444 - protein, 9 aa, Artificial Sequence
  Description of Artificial Sequence: Synthetic peptide
  XENP023043 vlCDR3
QQSNEDPFT

SEQ ID NO: 2445 - protein, 226 aa, Artificial Sequence
  Description of Artificial Sequence: Synthetic polypeptide
  XENP023044 7G8_H3.69_L1.34_Fab Heavy Chain
EVQLVESGGGLVQPGGSLRLSCAASGFTFDDAFMSWVRQAPGKGLEWVAEISTKANNHATYYAESVKGRFTISRDDSKSSVYLQMNSLRAEDTAVYYCTRLATWDWYFDVWGQGTTVTVSSASTKGPSVFPLAPSSKSTSGGTAALGCLVKDYFPEPVTVSWNSGALTSGVHTFPAVLQSSGLYSLSSVVTVPSSSLGTQTYICNVNHKPSNTKVDKKVEPKSCGS

SEQ ID NO: 2446 - protein, 121 aa, Artificial Sequence
  Description of Artificial Sequence: Synthetic polypeptide
  VH of XENP023044
EVQLVESGGGLVQPGGSLRLSCAASGFTFDDAFMSWVRQAPGKGLEWVAEISTKANNHATYYAESVKGRFTISRDDSKSSVYLQMNSLRAEDTAVYYCTRLATWDWYFDVWGQGTTVTVSS

SEQ ID NO: 2447 - protein, 5 aa, Artificial Sequence
  Description of Artificial Sequence: Synthetic peptide
  XENP023044 vhCDR1
DAFMS

SEQ ID NO: 2448 - protein, 19 aa, Artificial Sequence
  Description of Artificial Sequence: Synthetic peptide
  XENP023044 vhCDR2
EISTKANNHATYYAESVKG

SEQ ID NO: 2449 - protein, 10 aa, Artificial Sequence
  Description of Artificial Sequence: Synthetic peptide
  XENP023044 vhCDR3
LATWDWYFDV

SEQ ID NO: 2450 - protein, 218 aa, Artificial Sequence; identical to SEQ ID NO: 2420
  Description of Artificial Sequence: Synthetic polypeptide
  XENP023044 7G8_H3.69_L1.34_Fab Light Chain

SEQ ID NO: 2451 - protein, 111 aa, Artificial Sequence; identical to SEQ ID NO: 2421
  Description of Artificial Sequence: Synthetic polypeptide
  VL of XENP023044

SEQ ID NO: 2452 - protein, 15 aa, Artificial Sequence
  Description of Artificial Sequence: Synthetic peptide
  XENP023044 vlCDR1
RASQSVDYDGDSYMN

SEQ ID NO: 2453 - protein, 7 aa, Artificial Sequence
  Description of Artificial Sequence: Synthetic peptide
  XENP023044 vlCDR2
AASELES

SEQ ID NO: 2454 - protein, 9 aa, Artificial Sequence
  Description of Artificial Sequence: Synthetic peptide
  XENP023044 vlCDR3
QQSNEDPFT

SEQ ID NO: 2455 - protein, 226 aa, Artificial Sequence
  Description of Artificial Sequence: Synthetic polypeptide
  XENP023045 7G8_H3.70_L1.34_Fab Heavy Chain
EVQLVESGGGLVQPGGSLRLSCAASGFTFDDAYMSWVRQAPGKGLEWVAEISTKANNHATYYAESVKGRFTISRDDSKSSVYLQMNSLRAEDTAVYYCTRLATWDWYFDVWGQGTTVTVSSASTKGPSVFPLAPSSKSTSGGTAALGCLVKDYFPEPVTVSWNSGALTSGVHTFPAVLQSSGLYSLSSVVTVPSSSLGTQTYICNVNHKPSNTKVDKKVEPKSCGS

SEQ ID NO: 2456 - protein, 121 aa, Artificial Sequence
  Description of Artificial Sequence: Synthetic polypeptide
  VH of XENP023045
EVQLVESGGGLVQPGGSLRLSCAASGFTFDDAYMSWVRQAPGKGLEWVAEISTKANNHATYYAESVKGRFTISRDDSKSSVYLQMNSLRAEDTAVYYCTRLATWDWYFDVWGQGTTVTVSS

SEQ ID NO: 2457 - protein, 5 aa, Artificial Sequence
  Description of Artificial Sequence: Synthetic peptide
  XENP023045 vhCDR1
DAYMS

SEQ ID NO: 2458 - protein, 19 aa, Artificial Sequence
  Description of Artificial Sequence: Synthetic peptide
  XENP023045 vhCDR2
EISTKANNHATYYAESVKG

SEQ ID NO: 2459 - protein, 10 aa, Artificial Sequence
  Description of Artificial Sequence: Synthetic peptide
  XENP023045 vhCDR3
LATWDWYFDV

SEQ ID NO: 2460 - protein, 218 aa, Artificial Sequence; identical to SEQ ID NO: 2420
  Description of Artificial Sequence: Synthetic polypeptide
  XENP023045 7G8_H3.70_L1.34_Fab Light Chain

SEQ ID NO: 2461 - protein, 111 aa, Artificial Sequence; identical to SEQ ID NO: 2421
  Description of Artificial Sequence: Synthetic polypeptide
  VL of XENP023045

SEQ ID NO: 2462 - protein, 15 aa, Artificial Sequence
  Description of Artificial Sequence: Synthetic peptide
  XENP023045 vlCDR1
RASQSVDYDGDSYMN

SEQ ID NO: 2463 - protein, 7 aa, Artificial Sequence
  Description of Artificial Sequence: Synthetic peptide
  XENP023045 vlCDR2
AASELES

SEQ ID NO: 2464 - protein, 9 aa, Artificial Sequence
  Description of Artificial Sequence: Synthetic peptide
  XENP023045 vlCDR3
QQSNEDPFT

SEQ ID NO: 2465 - protein, 226 aa, Artificial Sequence
  Description of Artificial Sequence: Synthetic polypeptide
  XENP023046 7G8_H3.71_L1.34_Fab Heavy Chain
EVQLVESGGGLVQPGGSLRLSCAASGFTFDDAWMSWVRQAPGKGLEWVAEISTKAYNHATYYAESVKGRFTISRDDSKSSVYLQMNSLRAEDTAVYYCTRLATWDWYFDVWGQGTTVTVSSASTKGPSVFPLAPSSKSTSGGTAALGCLVKDYFPEPVTVSWNSGALTSGVHTFPAVLQSSGLYSLSSVVTVPSSSLGTQTYICNVNHKPSNTKVDKKVEPKSCGS

SEQ ID NO: 2466 - protein, 121 aa, Artificial Sequence
  Description of Artificial Sequence: Synthetic polypeptide
  VH of XENP023046
EVQLVESGGGLVQPGGSLRLSCAASGFTFDDAWMSWVRQAPGKGLEWVAEISTKAYNHATYYAESVKGRFTISRDDSKSSVYLQMNSLRAEDTAVYYCTRLATWDWYFDVWGQGTTVTVSS

SEQ ID NO: 2467 - protein, 5 aa, Artificial Sequence
  Description of Artificial Sequence: Synthetic peptide
  XENP023046 vhCDR1
DAWMS

SEQ ID NO: 2468 - protein, 19 aa, Artificial Sequence
  Description of Artificial Sequence: Synthetic peptide
  XENP023046 vhCDR2
EISTKAYNHATYYAESVKG

SEQ ID NO: 2469 - protein, 10 aa, Artificial Sequence
  Description of Artificial Sequence: Synthetic peptide
  XENP023046 vhCDR3
LATWDWYFDV

SEQ ID NO: 2470 - protein, 218 aa, Artificial Sequence; identical to SEQ ID NO: 2420
  Description of Artificial Sequence: Synthetic polypeptide
  XENP023046 7G8_H3.71_L1.34_Fab Light Chain

SEQ ID NO: 2471 - protein, 111 aa, Artificial Sequence; identical to SEQ ID NO: 2421
  Description of Artificial Sequence: Synthetic polypeptide
  VL of XENP023046

SEQ ID NO: 2472 - protein, 15 aa, Artificial Sequence
  Description of Artificial Sequence: Synthetic peptide
  XENP023046 vlCDR1
RASQSVDYDGDSYMN

SEQ ID NO: 2473 - protein, 7 aa, Artificial Sequence
  Description of Artificial Sequence: Synthetic peptide
  XENP023046 vlCDR2
AASELES

SEQ ID NO: 2474 - protein, 9 aa, Artificial Sequence
  Description of Artificial Sequence: Synthetic peptide
  XENP023046 vlCDR3
QQSNEDPFT

SEQ ID NO: 2475 - protein, 226 aa, Artificial Sequence
  Description of Artificial Sequence: Synthetic polypeptide
  XENP023047 7G8_H3.72_L1.34_Fab Heavy Chain
EVQLVESGGGLVQPGGSLRLSCAASGFTFDDAWMSWVRQAPGKGLEWVAEISTKANNHATYYAESVKGRFTISRDDSKSSVYLQMNSLRAEDTAVYYCTRLATFDWYFDVWGQGTTVTVSSASTKGPSVFPLAPSSKSTSGGTAALGCLVKDYFPEPVTVSWNSGALTSGVHTFPAVLQSSGLYSLSSVVTVPSSSLGTQTYICNVNHKPSNTKVDKKVEPKSCGS

SEQ ID NO: 2476 - protein, 121 aa, Artificial Sequence
  Description of Artificial Sequence: Synthetic polypeptide
  VH of XENP023047
EVQLVESGGGLVQPGGSLRLSCAASGFTFDDAWMSWVRQAPGKGLEWVAEISTKANNHATYYAESVKGRFTISRDDSKSSVYLQMNSLRAEDTAVYYCTRLATFDWYFDVWGQGTTVTVSS

SEQ ID NO: 2477 - protein, 5 aa, Artificial Sequence
  Description of Artificial Sequence: Synthetic peptide
  XENP023047 vhCDR1
DAWMS

SEQ ID NO: 2478 - protein, 19 aa, Artificial Sequence
  Description of Artificial Sequence: Synthetic peptide
  XENP023047 vhCDR2
EISTKANNHATYYAESVKG

SEQ ID NO: 2479 - protein, 10 aa, Artificial Sequence
  Description of Artificial Sequence: Synthetic peptide
  XENP023047 vhCDR3
LATFDWYFDV

SEQ ID NO: 2480 - protein, 218 aa, Artificial Sequence; identical to SEQ ID NO: 2420
  Description of Artificial Sequence: Synthetic polypeptide
  XENP023047 7G8_H3.72_L1.34_Fab Light Chain

SEQ ID NO: 2481 - protein, 111 aa, Artificial Sequence; identical to SEQ ID NO: 2421
  Description of Artificial Sequence: Synthetic polypeptide
  VL of XENP023047

SEQ ID NO: 2482 - protein, 15 aa, Artificial Sequence
  Description of Artificial Sequence: Synthetic peptide
  XENP023047 vlCDR1
RASQSVDYDGDSYMN

SEQ ID NO: 2483 - protein, 7 aa, Artificial Sequence
  Description of Artificial Sequence: Synthetic peptide
  XENP023047 vlCDR2
AASELES

SEQ ID NO: 2484 - protein, 9 aa, Artificial Sequence
  Description of Artificial Sequence: Synthetic peptide
  XENP023047 vlCDR3
QQSNEDPFT

SEQ ID NO: 2485 - protein, 226 aa, Artificial Sequence
  Description of Artificial Sequence: Synthetic polypeptide
  XENP023048 7G8_H3.73_L1.34_Fab Heavy Chain
EVQLVESGGGLVQPGGSLRLSCAASGFTFDDAWMSWVRQAPGKGLEWVAEISTKANNHATYYAESVKGRFTISRDDSKSSVYLQMNSLRAEDTAVYYCTRLATYDWYFDVWGQGTTVTVSSASTKGPSVFPLAPSSKSTSGGTAALGCLVKDYFPEPVTVSWNSGALTSGVHTFPAVLQSSGLYSLSSVVTVPSSSLGTQTYICNVNHKPSNTKVDKKVEPKSCGS

SEQ ID NO: 2486 - protein, 121 aa, Artificial Sequence
  Description of Artificial Sequence: Synthetic polypeptide
  VH of XENP023048
EVQLVESGGGLVQPGGSLRLSCAASGFTFDDAWMSWVRQAPGKGLEWVAEISTKANNHATYYAESVKGRFTISRDDSKSSVYLQMNSLRAEDTAVYYCTRLATYDWYFDVWGQGTTVTVSS

SEQ ID NO: 2487 - protein, 5 aa, Artificial Sequence
  Description of Artificial Sequence: Synthetic peptide
  XENP023048 vhCDR1
DAWMS

SEQ ID NO: 2488 - protein, 19 aa, Artificial Sequence
  Description of Artificial Sequence: Synthetic peptide
  XENP023048 vhCDR2
EISTKANNHATYYAESVKG

SEQ ID NO: 2489 - protein, 10 aa, Artificial Sequence
  Description of Artificial Sequence: Synthetic peptide
  XENP023048 vhCDR3
LATYDWYFDV

SEQ ID NO: 2490 - protein, 218 aa, Artificial Sequence; identical to SEQ ID NO: 2420
  Description of Artificial Sequence: Synthetic polypeptide
  XENP023048 7G8_H3.73_L1.34_Fab Light Chain

SEQ ID NO: 2491 - protein, 111 aa, Artificial Sequence; identical to SEQ ID NO: 2421
  Description of Artificial Sequence: Synthetic polypeptide
  VL of XENP023048

SEQ ID NO: 2492 - protein, 15 aa, Artificial Sequence
  Description of Artificial Sequence: Synthetic peptide
  XENP023048 vlCDR1
RASQSVDYDGDSYMN

SEQ ID NO: 2493 - protein, 7 aa, Artificial Sequence
  Description of Artificial Sequence: Synthetic peptide
  XENP023048 vlCDR2
AASELES

SEQ ID NO: 2494 - protein, 9 aa, Artificial Sequence
  Description of Artificial Sequence: Synthetic peptide
  XENP023048 vlCDR3
QQSNEDPFT

SEQ ID NO: 2495 - protein, 226 aa, Artificial Sequence
  Description of Artificial Sequence: Synthetic polypeptide
  XENP023049 7G8_H3.74_L1.34_Fab Heavy Chain
EVQLVESGGGLVQPGGSLRLSCAASGFTFDDAWMSWVRQAPGKGLEWVAEISTKANNHATYYAESVKGRFTISRDDSKSSVYLQMNSLRAEDTAVYYCTRLATWDFYFDVWGQGTTVTVSSASTKGPSVFPLAPSSKSTSGGTAALGCLVKDYFPEPVTVSWNSGALTSGVHTFPAVLQSSGLYSLSSVVTVPSSSLGTQTYICNVNHKPSNTKVDKKVEPKSCGS

SEQ ID NO: 2496 - protein, 121 aa, Artificial Sequence
  Description of Artificial Sequence: Synthetic polypeptide
  VH of XENP023049
EVQLVESGGGLVQPGGSLRLSCAASGFTFDDAWMSWVRQAPGKGLEWVAEISTKANNHATYYAESVKGRFTISRDDSKSSVYLQMNSLRAEDTAVYYCTRLATWDFYFDVWGQGTTVTVSS

SEQ ID NO: 2497 - protein, 5 aa, Artificial Sequence
  Description of Artificial Sequence: Synthetic peptide
  XENP023049 vhCDR1
DAWMS

SEQ ID NO: 2498 - protein, 19 aa, Artificial Sequence
  Description of Artificial Sequence: Synthetic peptide
  XENP023049 vhCDR2
EISTKANNHATYYAESVKG

SEQ ID NO: 2499 - protein, 10 aa, Artificial Sequence
  Description of Artificial Sequence: Synthetic peptide
  XENP023049 vhCDR3
LATWDFYFDV

SEQ ID NO: 2500 - protein, 218 aa, Artificial Sequence; identical to SEQ ID NO: 2420
  Description of Artificial Sequence: Synthetic polypeptide
  XENP023049 7G8_H3.74_L1.34_Fab Light Chain

SEQ ID NO: 2501 - protein, 111 aa, Artificial Sequence; identical to SEQ ID NO: 2421
  Description of Artificial Sequence: Synthetic polypeptide
  VL of XENP023049

SEQ ID NO: 2502 - protein, 15 aa, Artificial Sequence
  Description of Artificial Sequence: Synthetic peptide
  XENP023049 vlCDR1
RASQSVDYDGDSYMN

SEQ ID NO: 2503 - protein, 7 aa, Artificial Sequence
  Description of Artificial Sequence: Synthetic peptide
  XENP023049 vlCDR2
AASELES

SEQ ID NO: 2504 - protein, 9 aa, Artificial Sequence
  Description of Artificial Sequence: Synthetic peptide
  XENP023049 vlCDR3
QQSNEDPFT

SEQ ID NO: 2505 - protein, 226 aa, Artificial Sequence
  Description of Artificial Sequence: Synthetic polypeptide
  XENP023050 7G8_H3.75_L1.34_Fab Heavy Chain
EVQLVESGGGLVQPGGSLRLSCAASGFTFDDAWMSWVRQAPGKGLEWVAEISTKANNHATYYAESVKGRFTISRDDSKSSVYLQMNSLRAEDTAVYYCTRLATWDYYFDVWGQGTTVTVSSASTKGPSVFPLAPSSKSTSGGTAALGCLVKDYFPEPVTVSWNSGALTSGVHTFPAVLQSSGLYSLSSVVTVPSSSLGTQTYICNVNHKPSNTKVDKKVEPKSCGS

SEQ ID NO: 2506 - protein, 121 aa, Artificial Sequence
  Description of Artificial Sequence: Synthetic polypeptide
  VH of XENP023050
EVQLVESGGGLVQPGGSLRLSCAASGFTFDDAWMSWVRQAPGKGLEWVAEISTKANNHATYYAESVKGRFTISRDDSKSSVYLQMNSLRAEDTAVYYCTRLATWDYYFDVWGQGTTVTVSS

SEQ ID NO: 2507 - protein, 5 aa, Artificial Sequence
  Description of Artificial Sequence: Synthetic peptide
  XENP023050 vhCDR1
DAWMS

SEQ ID NO: 2508 - protein, 19 aa, Artificial Sequence
  Description of Artificial Sequence: Synthetic peptide
  XENP023050 vhCDR2
EISTKANNHATYYAESVKG

SEQ ID NO: 2509 - protein, 10 aa, Artificial Sequence
  Description of Artificial Sequence: Synthetic peptide
  XENP023050 vhCDR3
LATWDYYFDV

SEQ ID NO: 2510 - protein, 218 aa, Artificial Sequence; identical to SEQ ID NO: 2420
  Description of Artificial Sequence: Synthetic polypeptide
  XENP023050 7G8_H3.75_L1.34_Fab Light Chain

SEQ ID NO: 2511 - protein, 111 aa, Artificial Sequence; identical to SEQ ID NO: 2421
  Description of Artificial Sequence: Synthetic polypeptide
  VL of XENP023050

SEQ ID NO: 2512 - protein, 15 aa, Artificial Sequence
  Description of Artificial Sequence: Synthetic peptide
  XENP023050 vlCDR1
RASQSVDYDGDSYMN

SEQ ID NO: 2513 - protein, 7 aa, Artificial Sequence
  Description of Artificial Sequence: Synthetic peptide
  XENP023050 vlCDR2
AASELES

SEQ ID NO: 2514 - protein, 9 aa, Artificial Sequence
  Description of Artificial Sequence: Synthetic peptide
  XENP023050 vlCDR3
QQSNEDPFT

SEQ ID NO: 2515 - protein, 226 aa, Artificial Sequence
  Description of Artificial Sequence: Synthetic polypeptide
  XENP023051 7G8_H3.30_L1.38_Fab Heavy Chain
EVQLVESGGGLVQPGGSLRLSCAASGFTFDDAWMSWVRQAPGKGLEWVAEISTKANNHATYYAESVKGRFTISRDDSKSSVYLQMNSLRAEDTAVYYCTRLATWDWYFDVWGQGTTVTVSSASTKGPSVFPLAPSSKSTSGGTAALGCLVKDYFPEPVTVSWNSGALTSGVHTFPAVLQSSGLYSLSSVVTVPSSSLGTQTYICNVNHKPSNTKVDKKVEPKSCGS

SEQ ID NO: 2516 - protein, 121 aa, Artificial Sequence
  Description of Artificial Sequence: Synthetic polypeptide
  VH of XENP023051
EVQLVESGGGLVQPGGSLRLSCAASGFTFDDAWMSWVRQAPGKGLEWVAEISTKANNHATYYAESVKGRFTISRDDSKSSVYLQMNSLRAEDTAVYYCTRLATWDWYFDVWGQGTTVTVSS

SEQ ID NO: 2517 - protein, 5 aa, Artificial Sequence
  Description of Artificial Sequence: Synthetic peptide
  XENP023051 vhCDR1
DAWMS

SEQ ID NO: 2518 - protein, 19 aa, Artificial Sequence
  Description of Artificial Sequence: Synthetic peptide
  XENP023051 vhCDR2
EISTKANNHATYYAESVKG

SEQ ID NO: 2519 - protein, 10 aa, Artificial Sequence
  Description of Artificial Sequence: Synthetic peptide
  XENP023051 vhCDR3
LATWDWYFDV

SEQ ID NO: 2520 - protein, 218 aa, Artificial Sequence
  Description of Artificial Sequence: Synthetic polypeptide
  XENP023051 7G8_H3.30_L1.38_Fab Light Chain
DIVLTQSPSSLSASVGDRVTITCRASQSVDYEGDSYMNWYQQKPGKPPKLLIYAASELESGIPARFSGSGSGTDFTLTISSLQPEDFATYYCQQSNEDPFTFGSGTKLEIKRTVAAPSVFIFPPSDEQLKSGTASVVCLLNNFYPREAKVQWKVDNALQSGNSQESVTEQDSKDSTYSLSSTLTLSKADYEKHKVYACEVTHQGLSSPVTKSFNRGEC

SEQ ID NO: 2521 - protein, 111 aa, Artificial Sequence
  Description of Artificial Sequence: Synthetic polypeptide
  VL of XENP023051
DIVLTQSPSSLSASVGDRVTITCRASQSVDYEGDSYMNWYQQKPGKPPKLLIYAASELESGIPARFSGSGSGTDFTLTISSLQPEDFATYYCQQSNEDPFTFGSGTKLEIK

SEQ ID NO: 2522 - protein, 15 aa, Artificial Sequence
  Description of Artificial Sequence: Synthetic peptide
  XENP023051 vlCDR1
RASQSVDYEGDSYMN

SEQ ID NO: 2523 - protein, 7 aa, Artificial Sequence
  Description of Artificial Sequence: Synthetic peptide
  XENP023051 vlCDR2
AASELES

SEQ ID NO: 2524 - protein, 9 aa, Artificial Sequence
  Description of Artificial Sequence: Synthetic peptide
  XENP023051 vlCDR3
QQSNEDPFT

SEQ ID NO: 2525 - protein, 226 aa, Artificial Sequence; identical to SEQ ID NO: 2515
  Description of Artificial Sequence: Synthetic polypeptide
  XENP023052 7G8_H3.30_L1.39_Fab Heavy Chain

SEQ ID NO: 2526 - protein, 121 aa, Artificial Sequence; identical to SEQ ID NO: 2516
  Description of Artificial Sequence: Synthetic polypeptide
  VH of XENP023052

SEQ ID NO: 2527 - protein, 5 aa, Artificial Sequence
  Description of Artificial Sequence: Synthetic peptide
  XENP023052 vhCDR1
DAWMS

SEQ ID NO: 2528 - protein, 19 aa, Artificial Sequence
  Description of Artificial Sequence: Synthetic peptide
  XENP023052 vhCDR2
EISTKANNHATYYAESVKG

SEQ ID NO: 2529 - protein, 10 aa, Artificial Sequence
  Description of Artificial Sequence: Synthetic peptide
  XENP023052 vhCDR3
LATWDWYFDV

SEQ ID NO: 2530 - protein, 218 aa, Artificial Sequence
  Description of Artificial Sequence: Synthetic polypeptide
  XENP023052 7G8_H3.30_L1.39_Fab Light Chain
DIVLTQSPSSLSASVGDRVTITCRASQSVDYYGDSYMNWYQQKPGKPPKLLIYAASELESGIPARFSGSGSGTDFTLTISSLQPEDFATYYCQQSNEDPFTFGSGTKLEIKRTVAAPSVFIFPPSDEQLKSGTASVVCLLNNFYPREAKVQWKVDNALQSGNSQESVTEQDSKDSTYSLSSTLTLSKADYEKHKVYACEVTHQGLSSPVTKSFNRGEC

SEQ ID NO: 2531 - protein, 111 aa, Artificial Sequence
  Description of Artificial Sequence: Synthetic polypeptide
  VL of XENP023052
DIVLTQSPSSLSASVGDRVTITCRASQSVDYYGDSYMNWYQQKPGKPPKLLIYAASELESGIPARFSGSGSGTDFTLTISSLQPEDFATYYCQQSNEDPFTFGSGTKLEIK

SEQ ID NO: 2532 - protein, 15 aa, Artificial Sequence
  Description of Artificial Sequence: Synthetic peptide
  XENP023052 vlCDR1
RASQSVDYYGDSYMN

SEQ ID NO: 2533 - protein, 7 aa, Artificial Sequence
  Description of Artificial Sequence: Synthetic peptide
  XENP023052 vlCDR2
AASELES

SEQ ID NO: 2534 - protein, 9 aa, Artificial Sequence
  Description of Artificial Sequence: Synthetic peptide
  XENP023052 vlCDR3
QQSNEDPFT

SEQ ID NO: 2535 - protein, 226 aa, Artificial Sequence; identical to SEQ ID NO: 2515
  Description of Artificial Sequence: Synthetic polypeptide
  XENP023053 7G8_H3.30_L1.40_Fab Heavy Chain

SEQ ID NO: 2536 - protein, 121 aa, Artificial Sequence; identical to SEQ ID NO: 2516
  Description of Artificial Sequence: Synthetic polypeptide
  VH of XENP023053

SEQ ID NO: 2537 - protein, 5 aa, Artificial Sequence
  Description of Artificial Sequence: Synthetic peptide
  XENP023053 vhCDR1
DAWMS

SEQ ID NO: 2538 - protein, 19 aa, Artificial Sequence
  Description of Artificial Sequence: Synthetic peptide
  XENP023053 vhCDR2
EISTKANNHATYYAESVKG

SEQ ID NO: 2539 - protein, 10 aa, Artificial Sequence
  Description of Artificial Sequence: Synthetic peptide
  XENP023053 vhCDR3
LATWDWYFDV

SEQ ID NO: 2540 - protein, 218 aa, Artificial Sequence
  Description of Artificial Sequence: Synthetic polypeptide
  XENP023053 7G8_H3.30_L1.40_Fab Light Chain
DIVLTQSPSSLSASVGDRVTITCRASQSVDYDADSYMNWYQQKPGKPPKLLIYAASELESGIPARFSGSGSGTDFTLTISSLQPEDFATYYCQQSNEDPFTFGSGTKLEIKRTVAAPSVFIFPPSDEQLKSGTASVVCLLNNFYPREAKVQWKVDNALQSGNSQESVTEQDSKDSTYSLSSTLTLSKADYEKHKVYACEVTHQGLSSPVTKSFNRGEC

SEQ ID NO: 2541 - protein, 111 aa, Artificial Sequence
  Description of Artificial Sequence: Synthetic polypeptide
  VL of XENP023053
DIVLTQSPSSLSASVGDRVTITCRASQSVDYDADSYMNWYQQKPGKPPKLLIYAASELESGIPARFSGSGSGTDFTLTISSLQPEDFATYYCQQSNEDPFTFGSGTKLEIK

SEQ ID NO: 2542 - protein, 15 aa, Artificial Sequence
  Description of Artificial Sequence: Synthetic peptide
  XENP023053 vlCDR1
RASQSVDYDADSYMN

SEQ ID NO: 2543 - protein, 7 aa, Artificial Sequence
  Description of Artificial Sequence: Synthetic peptide
  XENP023053 vlCDR2
AASELES

SEQ ID NO: 2544 - protein, 9 aa, Artificial Sequence
  Description of Artificial Sequence: Synthetic peptide
  XENP023053 vlCDR3
QQSNEDPFT

SEQ ID NO: 2545 - protein, 226 aa, Artificial Sequence; identical to SEQ ID NO: 2515
  Description of Artificial Sequence: Synthetic polypeptide
  XENP023054 7G8_H3.30_L1.41_Fab Heavy Chain

SEQ ID NO: 2546 - protein, 121 aa, Artificial Sequence; identical to SEQ ID NO: 2516
  Description of Artificial Sequence: Synthetic polypeptide
  VH of XENP023054

SEQ ID NO: 2547 - protein, 5 aa, Artificial Sequence
  Description of Artificial Sequence: Synthetic peptide
  XENP023054 vhCDR1
DAWMS

SEQ ID NO: 2548 - protein, 19 aa, Artificial Sequence
  Description of Artificial Sequence: Synthetic peptide
  XENP023054 vhCDR2
EISTKANNHATYYAESVKG

SEQ ID NO: 2549 - protein, 10 aa, Artificial Sequence
  Description of Artificial Sequence: Synthetic peptide
  XENP023054 vhCDR3
LATWDWYFDV

SEQ ID NO: 2550 - protein, 218 aa, Artificial Sequence
  Description of Artificial Sequence: Synthetic polypeptide
  XENP023054 7G8_H3.30_L1.41_Fab Light Chain
DIVLTQSPSSLSASVGDRVTITCRASQSVDYDQDSYMNWYQQKPGKPPKLLIYAASELESGIPARFSGSGSGTDFTLTISSLQPEDFATYYCQQSNEDPFTFGSGTKLEIKRTVAAPSVFIFPPSDEQLKSGTASVVCLLNNFYPREAKVQWKVDNALQSGNSQESVTEQDSKDSTYSLSSTLTLSKADYEKHKVYACEVTHQGLSSPVTKSFNRGEC

SEQ ID NO: 2551 - protein, 111 aa, Artificial Sequence
  Description of Artificial Sequence: Synthetic polypeptide
  VL of XENP023054
DIVLTQSPSSLSASVGDRVTITCRASQSVDYDQDSYMNWYQQKPGKPPKLLIYAASELESGIPARFSGSGSGTDFTLTISSLQPEDFATYYCQQSNEDPFTFGSGTKLEIK

SEQ ID NO: 2552 - protein, 15 aa, Artificial Sequence
  Description of Artificial Sequence: Synthetic peptide
  XENP023054 vlCDR1
RASQSVDYDQDSYMN

SEQ ID NO: 2553 - protein, 7 aa, Artificial Sequence
  Description of Artificial Sequence: Synthetic peptide
  XENP023054 vlCDR2
AASELES

SEQ ID NO: 2554 - protein, 9 aa, Artificial Sequence
  Description of Artificial Sequence: Synthetic peptide
  XENP023054 vlCDR3
QQSNEDPFT

SEQ ID NO: 2555 - protein, 226 aa, Artificial Sequence; identical to SEQ ID NO: 2515
  Description of Artificial Sequence: Synthetic polypeptide
  XENP023055 7G8_H3.30_L1.42_Fab Heavy Chain

SEQ ID NO: 2556 - protein, 121 aa, Artificial Sequence; identical to SEQ ID NO: 2516
  Description of Artificial Sequence: Synthetic polypeptide
  VH of XENP023055

SEQ ID NO: 2557 - protein, 5 aa, Artificial Sequence
  Description of Artificial Sequence: Synthetic peptide
  XENP023055 vhCDR1
DAWMS

SEQ ID NO: 2558 - protein, 19 aa, Artificial Sequence
  Description of Artificial Sequence: Synthetic peptide
  XENP023055 vhCDR2
EISTKANNHATYYAESVKG

SEQ ID NO: 2559 - protein, 10 aa, Artificial Sequence
  Description of Artificial Sequence: Synthetic peptide
  XENP023055 vhCDR3
LATWDWYFDV

SEQ ID NO: 2560 - protein, 218 aa, Artificial Sequence
  Description of Artificial Sequence: Synthetic polypeptide
  XENP023055 7G8_H3.30_L1.42_Fab Light Chain
DIVLTQSPSSLSASVGDRVTITCRASQSVDYDDDSYMNWYQQKPGKPPKLLIYAASELESGIPARFSGSGSGTDFTLTISSLQPEDFATYYCQQSNEDPFTFGSGTKLEIKRTVAAPSVFIFPPSDEQLKSGTASVVCLLNNFYPREAKVQWKVDNALQSGNSQESVTEQDSKDSTYSLSSTLTLSKADYEKHKVYACEVTHQGLSSPVTKSFNRGEC

SEQ ID NO: 2561 - protein, 111 aa, Artificial Sequence
  Description of Artificial Sequence: Synthetic polypeptide
  VL of XENP023055
DIVLTQSPSSLSASVGDRVTITCRASQSVDYDDDSYMNWYQQKPGKPPKLLIYAASELESGIPARFSGSGSGTDFTLTISSLQPEDFATYYCQQSNEDPFTFGSGTKLEIK

SEQ ID NO: 2562 - protein, 15 aa, Artificial Sequence
  Description of Artificial Sequence: Synthetic peptide
  XENP023055 vlCDR1
RASQSVDYDDDSYMN

SEQ ID NO: 2563 - protein, 7 aa, Artificial Sequence
  Description of Artificial Sequence: Synthetic peptide
  XENP023055 vlCDR2
AASELES

SEQ ID NO: 2564 - protein, 9 aa, Artificial Sequence
  Description of Artificial Sequence: Synthetic peptide
  XENP023055 vlCDR3
QQSNEDPFT

SEQ ID NO: 2565 - protein, 226 aa, Artificial Sequence; identical to SEQ ID NO: 2515
  Description of Artificial Sequence: Synthetic polypeptide
  XENP023056 7G8_H3.30_L1.43_Fab Heavy Chain

SEQ ID NO: 2566 - protein, 121 aa, Artificial Sequence; identical to SEQ ID NO: 2516
  Description of Artificial Sequence: Synthetic polypeptide
  VH of XENP023056

SEQ ID NO: 2567 - protein, 5 aa, Artificial Sequence
  Description of Artificial Sequence: Synthetic peptide
  XENP023056 vhCDR1
DAWMS

SEQ ID NO: 2568 - protein, 19 aa, Artificial Sequence
  Description of Artificial Sequence: Synthetic peptide
  XENP023056 vhCDR2
EISTKANNHATYYAESVKG

SEQ ID NO: 2569 - protein, 10 aa, Artificial Sequence
  Description of Artificial Sequence: Synthetic peptide
  XENP023056 vhCDR3
LATWDWYFDV

SEQ ID NO: 2570 - protein, 218 aa, Artificial Sequence
  Description of Artificial Sequence: Synthetic polypeptide
  XENP023056 7G8_H3.30_L1.43_Fab Light Chain
DIVLTQSPSSLSASVGDRVTITCRASQSVDYDYDSYMNWYQQKPGKPPKLLIYAASELESGIPARFSGSGSGTDFTLTISSLQPEDFATYYCQQSNEDPFTFGSGTKLEIKRTVAAPSVFIFPPSDEQLKSGTASVVCLLNNFYPREAKVQWKVDNALQSGNSQESVTEQDSKDSTYSLSSTLTLSKADYEKHKVYACEVTHQGLSSPVTKSFNRGEC

SEQ ID NO: 2571 - protein, 111 aa, Artificial Sequence
  Description of Artificial Sequence: Synthetic polypeptide
  VL of XENP023056
DIVLTQSPSSLSASVGDRVTITCRASQSVDYDYDSYMNWYQQKPGKPPKLLIYAASELESGIPARFSGSGSGTDFTLTISSLQPEDFATYYCQQSNEDPFTFGSGTKLEIK

SEQ ID NO: 2572 - protein, 15 aa, Artificial Sequence
  Description of Artificial Sequence: Synthetic peptide
  XENP023056 vlCDR1
RASQSVDYDYDSYMN

SEQ ID NO: 2573 - protein, 7 aa, Artificial Sequence
  Description of Artificial Sequence: Synthetic peptide
  XENP023056 vlCDR2
AASELES

SEQ ID NO: 2574 - protein, 9 aa, Artificial Sequence
  Description of Artificial Sequence: Synthetic peptide
  XENP023056 vlCDR3
QQSNEDPFT

SEQ ID NO: 2575 - protein, 226 aa, Artificial Sequence; identical to SEQ ID NO: 2415
  Description of Artificial Sequence: Synthetic polypeptide
  XENP023220 7G8_H3.66_L1.39_Fab Heavy Chain

SEQ ID NO: 2576 - protein, 121 aa, Artificial Sequence; identical to SEQ ID NO: 2416
  Description of Artificial Sequence: Synthetic polypeptide
  VH of XENP023220

SEQ ID NO: 2577 - protein, 5 aa, Artificial Sequence
  Description of Artificial Sequence: Synthetic peptide
  XENP023220 vhCDR1
EAWMS

SEQ ID NO: 2578 - protein, 19 aa, Artificial Sequence
  Description of Artificial Sequence: Synthetic peptide
  XENP023220 vhCDR2
EISTKANNHATYYAESVKG

SEQ ID NO: 2579 - protein, 10 aa, Artificial Sequence
  Description of Artificial Sequence: Synthetic peptide
  XENP023220 vhCDR3
LATWDWYFDV

SEQ ID NO: 2580 - protein, 218 aa, Artificial Sequence; identical to SEQ ID NO: 2530
  Description of Artificial Sequence: Synthetic polypeptide
  XENP023220 7G8_H3.66_L1.39_Fab Light Chain

SEQ ID NO: 2581 - protein, 111 aa, Artificial Sequence; identical to SEQ ID NO: 2531
  Description of Artificial Sequence: Synthetic polypeptide
  VL of XENP023220

SEQ ID NO: 2582 - protein, 15 aa, Artificial Sequence
  Description of Artificial Sequence: Synthetic peptide
  XENP023220 vlCDR1
RASQSVDYYGDSYMN

SEQ ID NO: 2583 - protein, 7 aa, Artificial Sequence
  Description of Artificial Sequence: Synthetic peptide
  XENP023220 vlCDR2
AASELES

SEQ ID NO: 2584 - protein, 9 aa, Artificial Sequence
  Description of Artificial Sequence: Synthetic peptide
  XENP023220 vlCDR3
QQSNEDPFT

SEQ ID NO: 2585 - protein, 226 aa, Artificial Sequence; identical to SEQ ID NO: 2425
  Description of Artificial Sequence: Synthetic polypeptide
  XENP023221 7G8_H3.67_L1.39_Fab Heavy Chain

SEQ ID NO: 2586 - protein, 121 aa, Artificial Sequence; identical to SEQ ID NO: 2426
  Description of Artificial Sequence: Synthetic polypeptide
  VH of XENP023221

SEQ ID NO: 2587 - protein, 5 aa, Artificial Sequence
  Description of Artificial Sequence: Synthetic peptide
  XENP023221 vhCDR1
DTWMS

SEQ ID NO: 2588 - protein, 19 aa, Artificial Sequence
  Description of Artificial Sequence: Synthetic peptide
  XENP023221 vhCDR2
EISTKANNHATYYAESVKG

SEQ ID NO: 2589 - protein, 10 aa, Artificial Sequence
  Description of Artificial Sequence: Synthetic peptide
  XENP023221 vhCDR3
LATWDWYFDV

SEQ ID NO: 2590 - protein, 218 aa, Artificial Sequence; identical to SEQ ID NO: 2530
  Description of Artificial Sequence: Synthetic polypeptide
  XENP023221 7G8_H3.67_L1.39_Fab Light Chain

SEQ ID NO: 2591 - protein, 111 aa, Artificial Sequence; identical to SEQ ID NO: 2531
  Description of Artificial Sequence: Synthetic polypeptide
  VL of XENP023221

SEQ ID NO: 2592 - protein, 15 aa, Artificial Sequence
  Description of Artificial Sequence: Synthetic peptide
  XENP023221 vlCDR1
RASQSVDYYGDSYMN

SEQ ID NO: 2593 - protein, 7 aa, Artificial Sequence
  Description of Artificial Sequence: Synthetic peptide
  XENP023221 vlCDR2
AASELES

SEQ ID NO: 2594 - protein, 9 aa, Artificial Sequence
  Description of Artificial Sequence: Synthetic peptide
  XENP023221 vlCDR3
QQSNEDPFT

SEQ ID NO: 2595 - protein, 226 aa, Artificial Sequence; identical to SEQ ID NO: 2465
  Description of Artificial Sequence: Synthetic polypeptide
  XENP023222 7G8_H3.71_L1.39_Fab Heavy Chain

SEQ ID NO: 2596 - protein, 121 aa, Artificial Sequence; identical to SEQ ID NO: 2466
  Description of Artificial Sequence: Synthetic polypeptide
  VH of XENP023222

SEQ ID NO: 2597 - protein, 5 aa, Artificial Sequence
  Description of Artificial Sequence: Synthetic peptide
  XENP023222 vhCDR1
DAWMS

SEQ ID NO: 2598 - protein, 19 aa, Artificial Sequence
  Description of Artificial Sequence: Synthetic peptide
  XENP023222 vhCDR2
EISTKAYNHATYYAESVKG

SEQ ID NO: 2599 - protein, 10 aa, Artificial Sequence
  Description of Artificial Sequence: Synthetic peptide
  XENP023222 vhCDR3
LATWDWYFDV

SEQ ID NO: 2600 - protein, 218 aa, Artificial Sequence; identical to SEQ ID NO: 2530
  Description of Artificial Sequence: Synthetic polypeptide
  XENP023222 7G8_H3.71_L1.39_Fab Light Chain

SEQ ID NO: 2601 - protein, 111 aa, Artificial Sequence; identical to SEQ ID NO: 2531
  Description of Artificial Sequence: Synthetic polypeptide
  VL of XENP023222

SEQ ID NO: 2602 - protein, 15 aa, Artificial Sequence
  Description of Artificial Sequence: Synthetic peptide
  XENP023222 vlCDR1
RASQSVDYYGDSYMN

SEQ ID NO: 2603 - protein, 7 aa, Artificial Sequence
  Description of Artificial Sequence: Synthetic peptide
  XENP023222 vlCDR2
AASELES

SEQ ID NO: 2604 - protein, 9 aa, Artificial Sequence
  Description of Artificial Sequence: Synthetic peptide
  XENP023222 vlCDR3
QQSNEDPFT

SEQ ID NO: 2605 - protein, 450 aa, Artificial Sequence
  Description of Artificial Sequence: Synthetic polypeptide
  XENP022841 7G8_H3.30_L1.34_Fab-[CTLA-4]_H3.23_L0.129_scFv Fab -Fc Heavy Chain
EVQLVESGGGLVQPGGSLRLSCAASGFTFDDAWMSWVRQAPGKGLEWVAEISTKANNHATYYAESVKGRFTISRDDSKSSVYLQMNSLRAEDTAVYYCTRLATWDWYFDVWGQGTTVTVSSASTKGPSVFPLAPSSKSTSGGTAALGCLVKDYFPEPVTVSWNSGALTSGVHTFPAVLQSSGLYSLSSVVTVPSSSLGTQTYICNVNHKPSDTKVDKKVEPKSCDKTHTCPPCPAPPVAGPSVFLFPPKPKDTLMISRTPEVTCVVVDVKHEDPEVKFNWYVDGVEVHNAKTKPREEEYNSTYRVVSVLTVLHQDWLNGKEYKCKVSNKALPAPIEKTISKAKGQPREPQVYTLPPSREEMTKNQVSLTCDVSGFYPSDIAVEWESDGQPENNYKTTPPVLDSDGSFFLYSKLTVDKSRWEQGDVFSCSVLHEALHSHYTQKSLSLSPGK

SEQ ID NO: 2606 - protein, 121 aa, Artificial Sequence; identical to SEQ ID NO: 2516
  Description of Artificial Sequence: Synthetic polypeptide
  VH of XENP022841

SEQ ID NO: 2607 - protein, 5 aa, Artificial Sequence
  Description of Artificial Sequence: Synthetic peptide
  XENP022841 vhCDR1
DAWMS

SEQ ID NO: 2608 - protein, 19 aa, Artificial Sequence
  Description of Artificial Sequence: Synthetic peptide
  XENP022841 vhCDR2
EISTKANNHATYYAESVKG

SEQ ID NO: 2609 - protein, 10 aa, Artificial Sequence
  Description of Artificial Sequence: Synthetic peptide
  XENP022841 vhCDR3
LATWDWYFDV

SEQ ID NO: 2610 - protein, 477 aa, Artificial Sequence
  Description of Artificial Sequence: Synthetic polypeptide
  XENP022841 7G8_H3.30_L1.34_Fab-[CTLA-4]_H3.23_L0.129_scFv scFv-Fc Heavy Chain
EVQLVESGGGLVKPGGSLRLSCAASGFTFSSYTMHWVRQAPGKGLEWVSFISYDGNYKYYADSVKGRFTISRDNAKNSLYLQMNSLRAEDTAVYYCARGGHLGPFDLWGQGTMVTVSSGKPGSGKPGSGKPGSGKPGSEIVLTQSPATLSLSPGERATLSCRASQSVGSSYLAWYQQKPGQAPRLLIYGASSRATGIPDRFSGSGSGTDFTLTISRLEPEDFAVYYCQQYGSSPWTFGQGTKVEIKEPKSSDKTHTCPPCPAPPVAGPSVFLFPPKPKDTLMISRTPEVTCVVVDVKHEDPEVKFNWYVDGVEVHNAKTKPREEQYNSTYRVVSVLTVLHQDWLNGKEYKCKVSNKALPAPIEKTISKAKGQPREPQVYTLPPSREQMTKNQVKLTCLVKGFYPSDIAVEWESNGQPENNYKTTPPVLDSDGSFFLYSKLTVDKSRWQQGNVFSCSVLHEALHSHYTQKSLSLSPGK

SEQ ID NO: 2611 - protein, 118 aa, Artificial Sequence; identical to SEQ ID NO: 2395
  Description of Artificial Sequence: Synthetic polypeptide
  VH of XENP022841

SEQ ID NO: 2612 - protein, 108 aa, Artificial Sequence; identical to SEQ ID NO: 2396
  Description of Artificial Sequence: Synthetic polypeptide
  VL of XENP022841

SEQ ID NO: 2613 - protein, 231 aa, Artificial Sequence; identical to SEQ ID NO: 2409
  Description of Artificial Sequence: Synthetic polypeptide
  Fc chain of XENP022841

SEQ ID NO: 2614 - protein, 5 aa, Artificial Sequence
  Description of Artificial Sequence: Synthetic peptide
  XENP022841 vhCDR1
SYTMH

SEQ ID NO: 2615 - protein, 17 aa, Artificial Sequence
  Description of Artificial Sequence: Synthetic peptide
  XENP022841 vhCDR2
FISYDGNYKYYADSVKG

SEQ ID NO: 2616 - protein, 9 aa, Artificial Sequence
  Description of Artificial Sequence: Synthetic peptide
  XENP022841 vhCDR3
GGHLGPFDL

SEQ ID NO: 2617 - protein, 12 aa, Artificial Sequence
  Description of Artificial Sequence: Synthetic peptide
  XENP022841 vlCDR1
RASQSVGSSYLA

SEQ ID NO: 2618 - protein, 7 aa, Artificial Sequence
  Description of Artificial Sequence: Synthetic peptide
  XENP022841 vlCDR2
GASSRAT

SEQ ID NO: 2619 - protein, 9 aa, Artificial Sequence
  Description of Artificial Sequence: Synthetic peptide
  XENP022841 vlCDR3
QQYGSSPWT

SEQ ID NO: 2620 - protein, 218 aa, Artificial Sequence; identical to SEQ ID NO: 2420
  Description of Artificial Sequence: Synthetic polypeptide
  XENP022841 7G8_H3.30_L1.34_Fab-[CTLA-4]_H3.23_L0.129_scFv Light Chain

SEQ ID NO: 2621 - protein, 111 aa, Artificial Sequence; identical to SEQ ID NO: 2421
  Description of Artificial Sequence: Synthetic polypeptide
  VL of XENP022841

SEQ ID NO: 2622 - protein, 15 aa, Artificial Sequence
  Description of Artificial Sequence: Synthetic peptide
  XENP022841 vlCDR1
RASQSVDYDGDSYMN

SEQ ID NO: 2623 - protein, 7 aa, Artificial Sequence
  Description of Artificial Sequence: Synthetic peptide
  XENP022841 vlCDR2
AASELES

SEQ ID NO: 2624 - protein, 9 aa, Artificial Sequence
  Description of Artificial Sequence: Synthetic peptide
  XENP022841 vlCDR3
QQSNEDPFT

SEQ ID NO: 2625 - protein, 450 aa, Artificial Sequence; identical to SEQ ID NO: 2605
  Description of Artificial Sequence: Synthetic polypeptide
  XENP022842 7G8_H3.30_L1.36_Fab-[CTLA-4]_H3.23_L0.129_scFv Fab-Fc Heavy Chain

SEQ ID NO: 2626 - protein, 121 aa, Artificial Sequence; identical to SEQ ID NO: 2516
  Description of Artificial Sequence: Synthetic polypeptide
  VH of XENP022842

SEQ ID NO: 2627 - protein, 5 aa, Artificial Sequence
  Description of Artificial Sequence: Synthetic peptide
  XENP022842 vhCDR1
DAWMS

SEQ ID NO: 2628 - protein, 19 aa, Artificial Sequence
  Description of Artificial Sequence: Synthetic peptide
  XENP022842 vhCDR2
EISTKANNHATYYAESVKG

SEQ ID NO: 2629 - protein, 10 aa, Artificial Sequence
  Description of Artificial Sequence: Synthetic peptide
  XENP022842 vhCDR3
LATWDWYFDV

SEQ ID NO: 2630 - protein, 477 aa, Artificial Sequence; identical to SEQ ID NO: 2610
  Description of Artificial Sequence: Synthetic polypeptide
  XENP022842 7G8_H3.30_L1.36_Fab-[CTLA-4]_H3.23_L0.129_scFv sc Fv-Fc Heavy Chain

SEQ ID NO: 2631 - protein, 118 aa, Artificial Sequence; identical to SEQ ID NO: 2395
  Description of Artificial Sequence: Synthetic polypeptide
  VH of XENP022842

SEQ ID NO: 2632 - protein, 108 aa, Artificial Sequence; identical to SEQ ID NO: 2396
  Description of Artificial Sequence: Synthetic polypeptide
  VL of XENP022842

SEQ ID NO: 2633 - protein, 231 aa, Artificial Sequence; identical to SEQ ID NO: 2409
  Description of Artificial Sequence: Synthetic polypeptide
  Fc chain of XENP022842

SEQ ID NO: 2634 - protein, 5 aa, Artificial Sequence
  Description of Artificial Sequence: Synthetic peptide
  XENP022842 vhCDR1
SYTMH

SEQ ID NO: 2635 - protein, 17 aa, Artificial Sequence
  Description of Artificial Sequence: Synthetic peptide
  XENP022842 vhCDR2
FISYDGNYKYYADSVKG

SEQ ID NO: 2636 - protein, 9 aa, Artificial Sequence
  Description of Artificial Sequence: Synthetic peptide
  XENP022842 vhCDR3
GGHLGPFDL

SEQ ID NO: 2637 - protein, 12 aa, Artificial Sequence
  Description of Artificial Sequence: Synthetic peptide
  XENP022842 vlCDR1
RASQSVGSSYLA

SEQ ID NO: 2638 - protein, 7 aa, Artificial Sequence
  Description of Artificial Sequence: Synthetic peptide
  XENP022842 vlCDR2
GASSRAT

SEQ ID NO: 2639 - protein, 9 aa, Artificial Sequence
  Description of Artificial Sequence: Synthetic peptide
  XENP022842 vlCDR3
QQYGSSPWT

SEQ ID NO: 2640 - protein, 218 aa, Artificial Sequence
  Description of Artificial Sequence: Synthetic polypeptide
  XENP022842 7G8_H3.30_L1.36_Fab-[CTLA-4]_H3.23_L0.129_scFv Light Chain
DIVLTQSPSSLSASVGDRVTITCRASQSVDHDGDSYMNWYQQKPGKPPKLLIYAASELESGIPARFSGSGSGTDFTLTISSLQPEDFATYYCQQSNEDPFTFGSGTKLEIKRTVAAPSVFIFPPSDEQLKSGTASVVCLLNNFYPREAKVQWKVDNALQSGNSQESVTEQDSKDSTYSLSSTLTLSKADYEKHKVYACEVTHQGLSSPVTKSFNRGEC

SEQ ID NO: 2641 - protein, 111 aa, Artificial Sequence
  Description of Artificial Sequence: Synthetic polypeptide
  VL of XENP022842
DIVLTQSPSSLSASVGDRVTITCRASQSVDHDGDSYMNWYQQKPGKPPKLLIYAASELESGIPARFSGSGSGTDFTLTISSLQPEDFATYYCQQSNEDPFTFGSGTKLEIK

SEQ ID NO: 2642 - protein, 15 aa, Artificial Sequence
  Description of Artificial Sequence: Synthetic peptide
  XENP022842 vlCDR1
RASQSVDHDGDSYMN

SEQ ID NO: 2643 - protein, 7 aa, Artificial Sequence
  Description of Artificial Sequence: Synthetic peptide
  XENP022842 vlCDR2
AASELES

SEQ ID NO: 2644 - protein, 9 aa, Artificial Sequence
  Description of Artificial Sequence: Synthetic peptide
  XENP022842 vlCDR3
QQSNEDPFT

SEQ ID NO: 2645 - protein, 447 aa, Artificial Sequence
  Description of Artificial Sequence: Synthetic polypeptide
  XENP022843 2A11_H1.144_L2.142_Fab-[CTLA-4]_H3.23_L0.129_scFv Fab-Fc Heavy Chain
EVQLVQSGAEVKKPGATVKISCKASGFNIKDYFMHWVQQAPGKGLEWMGWIDPELGDTEYAPKFQGRVTITADTSTNTAYMELSSLRSEDTAVYYCYARGVYQALDYWGQGTLVTVSSASTKGPSVFPLAPSSKSTSGGTAALGCLVKDYFPEPVTVSWNSGALTSGVHTFPAVLQSSGLYSLSSVVTVPSSSLGTQTYICNVNHKPSDTKVDKKVEPKSCDKTHTCPPCPAPPVAGPSVFLFPPKPKDTLMISRTPEVTCVVVDVKHEDPEVKFNWYVDGVEVHNAKTKPREEEYNSTYRVVSVLTVLHQDWLNGKEYKCKVSNKALPAPIEKTISKAKGQPREPQVYTLPPSREEMTKNQVSLTCDVSGFYPSDIAVEWESDGQPENNYKTTPPVLDSDGSFFLYSKLTVDKSRWEQGDVFSCSVLHEALHSHYTQKSLSLSPGK

SEQ ID NO: 2646 - protein, 118 aa, Artificial Sequence
  Description of Artificial Sequence: Synthetic polypeptide
  VH of XENP022843
EVQLVQSGAEVKKPGATVKISCKASGFNIKDYFMHWVQQAPGKGLEWMGWIDPELGDTEYAPKFQGRVTITADTSTNTAYMELSSLRSEDTAVYYCYARGVYQALDYWGQGTLVTVSS

SEQ ID NO: 2647 - protein, 5 aa, Artificial Sequence
  Description of Artificial Sequence: Synthetic peptide
  XENP022843 vhCDR1
DYFMH

SEQ ID NO: 2648 - protein, 17 aa, Artificial Sequence
  Description of Artificial Sequence: Synthetic peptide
  XENP022843 vhCDR2
WIDPELGDTEYAPKFQG

SEQ ID NO: 2649 - protein, 9 aa, Artificial Sequence
  Description of Artificial Sequence: Synthetic peptide
  XENP022843 vhCDR3
RGVYQALDY

SEQ ID NO: 2650 - protein, 477 aa, Artificial Sequence; identical to SEQ ID NO: 2610
  Description of Artificial Sequence: Synthetic polypeptide
  XENP022843 2A11_H1.144_L2.142_Fab-[CTLA-4]_H3.23_L0.129_scFv scFv-Fc Heavy Chain

SEQ ID NO: 2651 - protein, 118 aa, Artificial Sequence; identical to SEQ ID NO: 2395
  Description of Artificial Sequence: Synthetic polypeptide
  VH of XENP022843

SEQ ID NO: 2652 - protein, 108 aa, Artificial Sequence; identical to SEQ ID NO: 2396
  Description of Artificial Sequence: Synthetic polypeptide
  VL of XENP022843

SEQ ID NO: 2653 - protein, 231 aa, Artificial Sequence; identical to SEQ ID NO: 2409
  Description of Artificial Sequence: Synthetic polypeptide
  Fc chain of XENP022843

SEQ ID NO: 2654 - protein, 5 aa, Artificial Sequence
  Description of Artificial Sequence: Synthetic peptide
  XENP022843 vhCDR1
SYTMH

SEQ ID NO: 2655 - protein, 17 aa, Artificial Sequence
  Description of Artificial Sequence: Synthetic peptide
  XENP022843 vhCDR2
FISYDGNYKYYADSVKG

SEQ ID NO: 2656 - protein, 9 aa, Artificial Sequence
  Description of Artificial Sequence: Synthetic peptide
  XENP022843 vhCDR3
GGHLGPFDL

SEQ ID NO: 2657 - protein, 12 aa, Artificial Sequence
  Description of Artificial Sequence: Synthetic peptide
  XENP022843 vlCDR1
RASQSVGSSYLA

SEQ ID NO: 2658 - protein, 7 aa, Artificial Sequence
  Description of Artificial Sequence: Synthetic peptide
  XENP022843 vlCDR2
GASSRAT

SEQ ID NO: 2659 - protein, 9 aa, Artificial Sequence
  Description of Artificial Sequence: Synthetic peptide
  XENP022843 vlCDR3
QQYGSSPWT

SEQ ID NO: 2660 - protein, 214 aa, Artificial Sequence
  Description of Artificial Sequence: Synthetic polypeptide
  XENP022843 2A11_H1.144_L2.142_Fab-[CTLA-4]_H3.23_L0.129_scFv Light Chain
DIQMTQSPAFLSVTPGEKVTITCQASQDIGNYLNWFQQKPGQTVKLLIYFTSYLHSGVPSRFSGSGSGTDYTFTISSLEAEDAATYFCQQGNTLPYTFGGGTKVEIKRTVAAPSVFIFPPSDEQLKSGTASVVCLLNNFYPREAKVQWKVDNALQSGNSQESVTEQDSKDSTYSLSSTLTLSKADYEKHKVYACEVTHQGLSSPVTKSFNRGEC

SEQ ID NO: 2661 - protein, 107 aa, Artificial Sequence
  Description of Artificial Sequence: Synthetic polypeptide
  VL of XENP022843
DIQMTQSPAFLSVTPGEKVTITCQASQDIGNYLNWFQQKPGQTVKLLIYFTSYLHSGVPSRFSGSGSGTDYTFTISSLEAEDAATYFCQQGNTLPYTFGGGTKVEIK

SEQ ID NO: 2662 - protein, 11 aa, Artificial Sequence
  Description of Artificial Sequence: Synthetic peptide
  XENP022843 vlCDR1
QASQDIGNYLN

SEQ ID NO: 2663 - protein, 7 aa, Artificial Sequence
  Description of Artificial Sequence: Synthetic peptide
  XENP022843 vlCDR2
FTSYLHS

SEQ ID NO: 2664 - protein, 9 aa, Artificial Sequence
  Description of Artificial Sequence: Synthetic peptide
  XENP022843 vlCDR3
QQGNTLPYT

SEQ ID NO: 2665 - protein, 447 aa, Artificial Sequence; identical to SEQ ID NO: 2645
  Description of Artificial Sequence: Synthetic polypeptide
  XENP022844 2A11_H1.144_L2.113_Fab-[CTLA-4]_H3.23_L0.129_scFv Fab-Fc Heavy Chain

SEQ ID NO: 2666 - protein, 118 aa, Artificial Sequence; identical to SEQ ID NO: 2646
  Description of Artificial Sequence: Synthetic polypeptide
  VH of XENP022844

SEQ ID NO: 2667 - protein, 5 aa, Artificial Sequence
  Description of Artificial Sequence: Synthetic peptide
  XENP022844 vhCDR1
DYFMH

SEQ ID NO: 2668 - protein, 17 aa, Artificial Sequence
  Description of Artificial Sequence: Synthetic peptide
  XENP022844 vhCDR2
WIDPELGDTEYAPKFQG

SEQ ID NO: 2669 - protein, 9 aa, Artificial Sequence
  Description of Artificial Sequence: Synthetic peptide
  XENP022844 vhCDR3
RGVYQALDY

SEQ ID NO: 2670 - protein, 477 aa, Artificial Sequence; identical to SEQ ID NO: 2610
  Description of Artificial Sequence: Synthetic polypeptide
  XENP022844 2A11_H1.144_L2.113_Fab-[CTLA-4]_H3.23_L0.129_scFv scFv-Fc Heavy Chain

SEQ ID NO: 2671 - protein, 118 aa, Artificial Sequence; identical to SEQ ID NO: 2395
  Description of Artificial Sequence: Synthetic polypeptide
  VH of XENP022844

SEQ ID NO: 2672 - protein, 108 aa, Artificial Sequence; identical to SEQ ID NO: 2396
  Description of Artificial Sequence: Synthetic polypeptide
  VL of XENP022844

SEQ ID NO: 2673 - protein, 231 aa, Artificial Sequence; identical to SEQ ID NO: 2409
  Description of Artificial Sequence: Synthetic polypeptide
  Fc chain of XENP022844

SEQ ID NO: 2674 - protein, 5 aa, Artificial Sequence
  Description of Artificial Sequence: Synthetic peptide
  XENP022844 vhCDR1
SYTMH

SEQ ID NO: 2675 - protein, 17 aa, Artificial Sequence
  Description of Artificial Sequence: Synthetic peptide
  XENP022844 vhCDR2
FISYDGNYKYYADSVKG

SEQ ID NO: 2676 - protein, 9 aa, Artificial Sequence
  Description of Artificial Sequence: Synthetic peptide
  XENP022844 vhCDR3
GGHLGPFDL

SEQ ID NO: 2677 - protein, 12 aa, Artificial Sequence
  Description of Artificial Sequence: Synthetic peptide
  XENP022844 vlCDR1
RASQSVGSSYLA

SEQ ID NO: 2678 - protein, 7 aa, Artificial Sequence
  Description of Artificial Sequence: Synthetic peptide
  XENP022844 vlCDR2
GASSRAT

SEQ ID NO: 2679 - protein, 9 aa, Artificial Sequence
  Description of Artificial Sequence: Synthetic peptide
  XENP022844 vlCDR3
QQYGSSPWT

SEQ ID NO: 2680 - protein, 214 aa, Artificial Sequence
  Description of Artificial Sequence: Synthetic polypeptide
  XENP022844 2A11_H1.144_L2.113_Fab-[CTLA-4]_H3.23_L0.129_scFv Light Chain
DIQMTQSPAFLSVTPGEKVTITCQASQDIGNYLNWFQQKPDQTVKLLIYFTSYLHSGVPSRFSGSGSGTDYTFTISSLEAEDAATYFCQQGNTLPYTFGGGTKVEIKRTVAAPSVFIFPPSDEQLKSGTASVVCLLNNFYPREAKVQWKVDNALQSGNSQESVTEQDSKDSTYSLSSTLTLSKADYEKHKVYACEVTHQGLSSPVTKSFNRGEC

SEQ ID NO: 2681 - protein, 107 aa, Artificial Sequence
  Description of Artificial Sequence: Synthetic polypeptide
  VL of XENP022844
DIQMTQSPAFLSVTPGEKVTITCQASQDIGNYLNWFQQKPDQTVKLLIYFTSYLHSGVPSRFSGSGSGTDYTFTISSLEAEDAATYFCQQGNTLPYTFGGGTKVEIK

SEQ ID NO: 2682 - protein, 11 aa, Artificial Sequence
  Description of Artificial Sequence: Synthetic peptide
  XENP022844 vlCDR1
QASQDIGNYLN

SEQ ID NO: 2683 - protein, 7 aa, Artificial Sequence
  Description of Artificial Sequence: Synthetic peptide
  XENP022844 vlCDR2
FTSYLHS

SEQ ID NO: 2684 - protein, 9 aa, Artificial Sequence
  Description of Artificial Sequence: Synthetic peptide
  XENP022844 vlCDR3
QQGNTLPYT

SEQ ID NO: 2685 - protein, 447 aa, Artificial Sequence
  Description of Artificial Sequence: Synthetic polypeptide
  XENP022845 2A11_H1_L2.113_Fab-[CTLA-4]_H3.23_L0.129_scFv Fab -Fc Heavy Chain
EVQLVQSGAEVKKPGATVKISCKASGFNIKDYYMHWVQQAPGKGLEWMGWIDPENGDTEYAPKFQGRVTITADTSTNTAYMELSSLRSEDTAVYYCYARGVRQALDYWGQGTLVTVSSASTKGPSVFPLAPSSKSTSGGTAALGCLVKDYFPEPVTVSWNSGALTSGVHTFPAVLQSSGLYSLSSVVTVPSSSLGTQTYICNVNHKPSDTKVDKKVEPKSCDKTHTCPPCPAPPVAGPSVFLFPPKPKDTLMISRTPEVTCVVVDVKHEDPEVKFNWYVDGVEVHNAKTKPREEEYNSTYRVVSVLTVLHQDWLNGKEYKCKVSNKALPAPIEKTISKAKGQPREPQVYTLPPSREEMTKNQVSLTCDVSGFYPSDIAVEWESDGQPENNYKTTPPVLDSDGSFFLYSKLTVDKSRWEQGDVFSCSVLHEALHSHYTQKSLSLSPGK

SEQ ID NO: 2686 - protein, 118 aa, Artificial Sequence
  Description of Artificial Sequence: Synthetic polypeptide
  VH of XENP022845
EVQLVQSGAEVKKPGATVKISCKASGFNIKDYYMHWVQQAPGKGLEWMGWIDPENGDTEYAPKFQGRVTITADTSTNTAYMELSSLRSEDTAVYYCYARGVRQALDYWGQGTLVTVSS

SEQ ID NO: 2687 - protein, 5 aa, Artificial Sequence
  Description of Artificial Sequence: Synthetic peptide
  XENP022845 vhCDR1
DYYMH

SEQ ID NO: 2688 - protein, 17 aa, Artificial Sequence
  Description of Artificial Sequence: Synthetic peptide
  XENP022845 vhCDR2
WIDPENGDTEYAPKFQG

SEQ ID NO: 2689 - protein, 9 aa, Artificial Sequence
  Description of Artificial Sequence: Synthetic peptide
  XENP022845 vhCDR3
RGVRQALDY

SEQ ID NO: 2690 - protein, 477 aa, Artificial Sequence; identical to SEQ ID NO: 2610
  Description of Artificial Sequence: Synthetic polypeptide
  XENP022845 2A11_H1_L2.113_Fab-[CTLA-4]_H3.23_L0.129_scFv scFv -Fc Heavy Chain

SEQ ID NO: 2691 - protein, 118 aa, Artificial Sequence; identical to SEQ ID NO: 2395
  Description of Artificial Sequence: Synthetic polypeptide
  VH of XENP022845

SEQ ID NO: 2692 - protein, 108 aa, Artificial Sequence; identical to SEQ ID NO: 2396
  Description of Artificial Sequence: Synthetic polypeptide
  VL of XENP022845

SEQ ID NO: 2693 - protein, 231 aa, Artificial Sequence; identical to SEQ ID NO: 2409
  Description of Artificial Sequence: Synthetic polypeptide
  Fc chain of XENP022845

SEQ ID NO: 2694 - protein, 5 aa, Artificial Sequence
  Description of Artificial Sequence: Synthetic peptide
  XENP022845 vhCDR1
SYTMH

SEQ ID NO: 2695 - protein, 17 aa, Artificial Sequence
  Description of Artificial Sequence: Synthetic peptide
  XENP022845 vhCDR2
FISYDGNYKYYADSVKG

SEQ ID NO: 2696 - protein, 9 aa, Artificial Sequence
  Description of Artificial Sequence: Synthetic peptide
  XENP022845 vhCDR3
GGHLGPFDL

SEQ ID NO: 2697 - protein, 12 aa, Artificial Sequence
  Description of Artificial Sequence: Synthetic peptide
  XENP022845 vlCDR1
RASQSVGSSYLA

SEQ ID NO: 2698 - protein, 7 aa, Artificial Sequence
  Description of Artificial Sequence: Synthetic peptide
  XENP022845 vlCDR2
GASSRAT

SEQ ID NO: 2699 - protein, 9 aa, Artificial Sequence
  Description of Artificial Sequence: Synthetic peptide
  XENP022845 vlCDR3
QQYGSSPWT

SEQ ID NO: 2700 - protein, 214 aa, Artificial Sequence; identical to SEQ ID NO: 2680
  Description of Artificial Sequence: Synthetic polypeptide
  XENP022845 2A11_H1_L2.113_Fab-[CTLA-4]_H3.23_L0.129_scFv Light Chain

SEQ ID NO: 2701 - protein, 107 aa, Artificial Sequence; identical to SEQ ID NO: 2681
  Description of Artificial Sequence: Synthetic polypeptide
  VL of XENP022845

SEQ ID NO: 2702 - protein, 11 aa, Artificial Sequence
  Description of Artificial Sequence: Synthetic peptide
  XENP022845 vlCDR1
QASQDIGNYLN

SEQ ID NO: 2703 - protein, 7 aa, Artificial Sequence
  Description of Artificial Sequence: Synthetic peptide
  XENP022845 vlCDR2
FTSYLHS

SEQ ID NO: 2704 - protein, 9 aa, Artificial Sequence
  Description of Artificial Sequence: Synthetic peptide
  XENP022845 vlCDR3
QQGNTLPYT

SEQ ID NO: 2705 - protein, 447 aa, Artificial Sequence
  Description of Artificial Sequence: Synthetic polypeptide
  XENP022846 2A11_H1.125_L2.126_Fab-[CTLA-4]_H3.23_L0.129_scFv Fab-Fc Heavy Chain
EVQLVQSGAEVKKPGATVKISCKASGFNIKHYFMHWVQQAPGKGLEWMGWIDPYLGDTEYAPKFQGRVTITADTSTNTAYMELSSLRSEDTAVYYCYARGVYQALDYWGQGTLVTVSSASTKGPSVFPLAPSSKSTSGGTAALGCLVKDYFPEPVTVSWNSGALTSGVHTFPAVLQSSGLYSLSSVVTVPSSSLGTQTYICNVNHKPSDTKVDKKVEPKSCDKTHTCPPCPAPPVAGPSVFLFPPKPKDTLMISRTPEVTCVVVDVKHEDPEVKFNWYVDGVEVHNAKTKPREEEYNSTYRVVSVLTVLHQDWLNGKEYKCKVSNKALPAPIEKTISKAKGQPREPQVYTLPPSREEMTKNQVSLTCDVSGFYPSDIAVEWESDGQPENNYKTTPPVLDSDGSFFLYSKLTVDKSRWEQGDVFSCSVLHEALHSHYTQKSLSLSPGK

SEQ ID NO: 2706 - protein, 118 aa, Artificial Sequence
  Description of Artificial Sequence: Synthetic polypeptide
  VH of XENP022846
EVQLVQSGAEVKKPGATVKISCKASGFNIKHYFMHWVQQAPGKGLEWMGWIDPYLGDTEYAPKFQGRVTITADTSTNTAYMELSSLRSEDTAVYYCYARGVYQALDYWGQGTLVTVSS

SEQ ID NO: 2707 - protein, 5 aa, Artificial Sequence
  Description of Artificial Sequence: Synthetic peptide
  XENP022846 vhCDR1
HYFMH

SEQ ID NO: 2708 - protein, 17 aa, Artificial Sequence
  Description of Artificial Sequence: Synthetic peptide
  XENP022846 vhCDR2
WIDPYLGDTEYAPKFQG

SEQ ID NO: 2709 - protein, 9 aa, Artificial Sequence
  Description of Artificial Sequence: Synthetic peptide
  XENP022846 vhCDR3
RGVYQALDY

SEQ ID NO: 2710 - protein, 477 aa, Artificial Sequence; identical to SEQ ID NO: 2610
  Description of Artificial Sequence: Synthetic polypeptide
  XENP022846 2A11_H1.125_L2.126_Fab-[CTLA-4]_H3.23_L0.129_scFv scFv-Fc Heavy Chain

SEQ ID NO: 2711 - protein, 118 aa, Artificial Sequence; identical to SEQ ID NO: 2395
  Description of Artificial Sequence: Synthetic polypeptide
  VH of XENP022846

SEQ ID NO: 2712 - protein, 108 aa, Artificial Sequence; identical to SEQ ID NO: 2396
  Description of Artificial Sequence: Synthetic polypeptide
  VL of XENP022846

SEQ ID NO: 2713 - protein, 231 aa, Artificial Sequence; identical to SEQ ID NO: 2409
  Description of Artificial Sequence: Synthetic polypeptide
  Fc chain of XENP022846

SEQ ID NO: 2714 - protein, 5 aa, Artificial Sequence
  Description of Artificial Sequence: Synthetic peptide
  XENP022846 vhCDR1
SYTMH

SEQ ID NO: 2715 - protein, 17 aa, Artificial Sequence
  Description of Artificial Sequence: Synthetic peptide
  XENP022846 vhCDR2
FISYDGNYKYYADSVKG

SEQ ID NO: 2716 - protein, 9 aa, Artificial Sequence
  Description of Artificial Sequence: Synthetic peptide
  XENP022846 vhCDR3
GGHLGPFDL

SEQ ID NO: 2717 - protein, 12 aa, Artificial Sequence
  Description of Artificial Sequence: Synthetic peptide
  XENP022846 vlCDR1
RASQSVGSSYLA

SEQ ID NO: 2718 - protein, 7 aa, Artificial Sequence
  Description of Artificial Sequence: Synthetic peptide
  XENP022846 vlCDR2
GASSRAT

SEQ ID NO: 2719 - protein, 9 aa, Artificial Sequence
  Description of Artificial Sequence: Synthetic peptide
  XENP022846 vlCDR3
QQYGSSPWT

SEQ ID NO: 2720 - protein, 214 aa, Artificial Sequence
  Description of Artificial Sequence: Synthetic polypeptide
  XENP022846 2A11_H1.125_L2.126_Fab-[CTLA-4]_H3.23_L0.129_scFv Light Chain
DIQMTQSPAFLSVTPGEKVTITCQASQDIGNYLNWFQQKPDQTVKLLIYFTSYLHSGVPSRFSGSGSGTDYTFTISSLEAEDAATYFCQEGNTLPYTFGGGTKVEIKRTVAAPSVFIFPPSDEQLKSGTASVVCLLNNFYPREAKVQWKVDNALQSGNSQESVTEQDSKDSTYSLSSTLTLSKADYEKHKVYACEVTHQGLSSPVTKSFNRGEC

SEQ ID NO: 2721 - protein, 107 aa, Artificial Sequence
  Description of Artificial Sequence: Synthetic polypeptide
  VL of XENP022846
DIQMTQSPAFLSVTPGEKVTITCQASQDIGNYLNWFQQKPDQTVKLLIYFTSYLHSGVPSRFSGSGSGTDYTFTISSLEAEDAATYFCQEGNTLPYTFGGGTKVEIK

SEQ ID NO: 2722 - protein, 11 aa, Artificial Sequence
  Description of Artificial Sequence: Synthetic peptide
  XENP022846 vlCDR1
QASQDIGNYLN

SEQ ID NO: 2723 - protein, 7 aa, Artificial Sequence
  Description of Artificial Sequence: Synthetic peptide
  XENP022846 vlCDR2
FTSYLHS

SEQ ID NO: 2724 - protein, 9 aa, Artificial Sequence
  Description of Artificial Sequence: Synthetic peptide
  XENP022846 vlCDR3
QEGNTLPYT

SEQ ID NO: 2725 - protein, 450 aa, Artificial Sequence
  Description of Artificial Sequence: Synthetic polypeptide
  XENP023223 7G8_H3.66_L1.34_Fab-[CTLA-4]_H3.23_L0.129_scFv Fab -Fc Heavy Chain
EVQLVESGGGLVQPGGSLRLSCAASGFTFDEAWMSWVRQAPGKGLEWVAEISTKANNHATYYAESVKGRFTISRDDSKSSVYLQMNSLRAEDTAVYYCTRLATWDWYFDVWGQGTTVTVSSASTKGPSVFPLAPSSKSTSGGTAALGCLVKDYFPEPVTVSWNSGALTSGVHTFPAVLQSSGLYSLSSVVTVPSSSLGTQTYICNVNHKPSDTKVDKKVEPKSCDKTHTCPPCPAPPVAGPSVFLFPPKPKDTLMISRTPEVTCVVVDVKHEDPEVKFNWYVDGVEVHNAKTKPREEEYNSTYRVVSVLTVLHQDWLNGKEYKCKVSNKALPAPIEKTISKAKGQPREPQVYTLPPSREEMTKNQVSLTCDVSGFYPSDIAVEWESDGQPENNYKTTPPVLDSDGSFFLYSKLTVDKSRWEQGDVFSCSVMHEALHNHYTQKSLSLSPGK

SEQ ID NO: 2726 - protein, 121 aa, Artificial Sequence; identical to SEQ ID NO: 2416
  Description of Artificial Sequence: Synthetic polypeptide
  VH of XENP023223

SEQ ID NO: 2727 - protein, 5 aa, Artificial Sequence
  Description of Artificial Sequence: Synthetic peptide
  XENP023223 vhCDR1
EAWMS

SEQ ID NO: 2728 - protein, 19 aa, Artificial Sequence
  Description of Artificial Sequence: Synthetic peptide
  XENP023223 vhCDR2
EISTKANNHATYYAESVKG

SEQ ID NO: 2729 - protein, 10 aa, Artificial Sequence
  Description of Artificial Sequence: Synthetic peptide
  XENP023223 vhCDR3
LATWDWYFDV

SEQ ID NO: 2730 - protein, 477 aa, Artificial Sequence; identical to SEQ ID NO: 2394
  Description of Artificial Sequence: Synthetic polypeptide
  XENP023223 7G8_H3.66_L1.34_Fab-[CTLA-4]_H3.23_L0.129_scFv scFv -Fc Heavy Chain

SEQ ID NO: 2731 - protein, 118 aa, Artificial Sequence; identical to SEQ ID NO: 2395
  Description of Artificial Sequence: Synthetic polypeptide
  VH of XENP023223

SEQ ID NO: 2732 - protein, 108 aa, Artificial Sequence; identical to SEQ ID NO: 2396
  Description of Artificial Sequence: Synthetic polypeptide
  VL of XENP023223

SEQ ID NO: 2733 - protein, 231 aa, Artificial Sequence; identical to SEQ ID NO: 2397
  Description of Artificial Sequence: Synthetic polypeptide
  Fc chain of XENP023223

SEQ ID NO: 2734 - protein, 5 aa, Artificial Sequence
  Description of Artificial Sequence: Synthetic peptide
  XENP023223 vhCDR1
SYTMH

SEQ ID NO: 2735 - protein, 17 aa, Artificial Sequence
  Description of Artificial Sequence: Synthetic peptide
  XENP023223 vhCDR2
FISYDGNYKYYADSVKG

SEQ ID NO: 2736 - protein, 9 aa, Artificial Sequence
  Description of Artificial Sequence: Synthetic peptide
  XENP023223 vhCDR3
GGHLGPFDL

SEQ ID NO: 2737 - protein, 12 aa, Artificial Sequence
  Description of Artificial Sequence: Synthetic peptide
  XENP023223 vlCDR1
RASQSVGSSYLA

SEQ ID NO: 2738 - protein, 7 aa, Artificial Sequence
  Description of Artificial Sequence: Synthetic peptide
  XENP023223 vlCDR2
GASSRAT

SEQ ID NO: 2739 - protein, 9 aa, Artificial Sequence
  Description of Artificial Sequence: Synthetic peptide
  XENP023223 vlCDR3
QQYGSSPWT

SEQ ID NO: 2740 - protein, 218 aa, Artificial Sequence; identical to SEQ ID NO: 2420
  Description of Artificial Sequence: Synthetic polypeptide
  XENP023223 7G8_H3.66_L1.34_Fab-[CTLA-4]_H3.23_L0.129_scFv Light Chain

SEQ ID NO: 2741 - protein, 111 aa, Artificial Sequence; identical to SEQ ID NO: 2421
  Description of Artificial Sequence: Synthetic polypeptide
  VL of XENP023223

SEQ ID NO: 2742 - protein, 15 aa, Artificial Sequence
  Description of Artificial Sequence: Synthetic peptide
  XENP023223 vlCDR1
RASQSVDYDGDSYMN

SEQ ID NO: 2743 - protein, 7 aa, Artificial Sequence
  Description of Artificial Sequence: Synthetic peptide
  XENP023223 vlCDR2
AASELES

SEQ ID NO: 2744 - protein, 9 aa, Artificial Sequence
  Description of Artificial Sequence: Synthetic peptide
  XENP023223 vlCDR3
QQSNEDPFT

SEQ ID NO: 2745 - protein, 450 aa, Artificial Sequence
  Description of Artificial Sequence: Synthetic polypeptide
  XENP023224 7G8_H3.67_L1.34_Fab-[CTLA-4]_H3.23_L0.129_scFv Fab -Fc Heavy Chain
EVQLVESGGGLVQPGGSLRLSCAASGFTFDDTWMSWVRQAPGKGLEWVAEISTKANNHATYYAESVKGRFTISRDDSKSSVYLQMNSLRAEDTAVYYCTRLATWDWYFDVWGQGTTVTVSSASTKGPSVFPLAPSSKSTSGGTAALGCLVKDYFPEPVTVSWNSGALTSGVHTFPAVLQSSGLYSLSSVVTVPSSSLGTQTYICNVNHKPSDTKVDKKVEPKSCDKTHTCPPCPAPPVAGPSVFLFPPKPKDTLMISRTPEVTCVVVDVKHEDPEVKFNWYVDGVEVHNAKTKPREEEYNSTYRVVSVLTVLHQDWLNGKEYKCKVSNKALPAPIEKTISKAKGQPREPQVYTLPPSREEMTKNQVSLTCDVSGFYPSDIAVEWESDGQPENNYKTTPPVLDSDGSFFLYSKLTVDKSRWEQGDVFSCSVMHEALHNHYTQKSLSLSPGK

SEQ ID NO: 2746 - protein, 121 aa, Artificial Sequence; identical to SEQ ID NO: 2426
  Description of Artificial Sequence: Synthetic polypeptide
  VH of XENP023224

SEQ ID NO: 2747 - protein, 5 aa, Artificial Sequence
  Description of Artificial Sequence: Synthetic peptide
  XENP023224 vhCDR1
DTWMS

SEQ ID NO: 2748 - protein, 19 aa, Artificial Sequence
  Description of Artificial Sequence: Synthetic peptide
  XENP023224 vhCDR2
EISTKANNHATYYAESVKG

SEQ ID NO: 2749 - protein, 10 aa, Artificial Sequence
  Description of Artificial Sequence: Synthetic peptide
  XENP023224 vhCDR3
LATWDWYFDV

SEQ ID NO: 2750 - protein, 477 aa, Artificial Sequence; identical to SEQ ID NO: 2394
  Description of Artificial Sequence: Synthetic polypeptide
  XENP023224 7G8_H3.67_L1.34_Fab-[CTLA-4]_H3.23_L0.129_scFv scFv -Fc Heavy Chain

SEQ ID NO: 2751 - protein, 118 aa, Artificial Sequence; identical to SEQ ID NO: 2395
  Description of Artificial Sequence: Synthetic polypeptide
  VH of XENP023224

SEQ ID NO: 2752 - protein, 108 aa, Artificial Sequence; identical to SEQ ID NO: 2396
  Description of Artificial Sequence: Synthetic polypeptide
  VL of XENP023224

SEQ ID NO: 2753 - protein, 231 aa, Artificial Sequence; identical to SEQ ID NO: 2397
  Description of Artificial Sequence: Synthetic polypeptide
  Fc chain of XENP023224

SEQ ID NO: 2754 - protein, 5 aa, Artificial Sequence
  Description of Artificial Sequence: Synthetic peptide
  XENP023224 vhCDR1
SYTMH

SEQ ID NO: 2755 - protein, 17 aa, Artificial Sequence
  Description of Artificial Sequence: Synthetic peptide
  XENP023224 vhCDR2
FISYDGNYKYYADSVKG

SEQ ID NO: 2756 - protein, 9 aa, Artificial Sequence
  Description of Artificial Sequence: Synthetic peptide
  XENP023224 vhCDR3
GGHLGPFDL

SEQ ID NO: 2757 - protein, 12 aa, Artificial Sequence
  Description of Artificial Sequence: Synthetic peptide
  XENP023224 vlCDR1
RASQSVGSSYLA

SEQ ID NO: 2758 - protein, 7 aa, Artificial Sequence
  Description of Artificial Sequence: Synthetic peptide
  XENP023224 vlCDR2
GASSRAT

SEQ ID NO: 2759 - protein, 9 aa, Artificial Sequence
  Description of Artificial Sequence: Synthetic peptide
  XENP023224 vlCDR3
QQYGSSPWT

SEQ ID NO: 2760 - protein, 218 aa, Artificial Sequence; identical to SEQ ID NO: 2420
  Description of Artificial Sequence: Synthetic polypeptide
  XENP023224 7G8_H3.67_L1.34_Fab-[CTLA-4]_H3.23_L0.129_scFv Light Chain

SEQ ID NO: 2761 - protein, 111 aa, Artificial Sequence; identical to SEQ ID NO: 2421
  Description of Artificial Sequence: Synthetic polypeptide
  VL of XENP023224

SEQ ID NO: 2762 - protein, 15 aa, Artificial Sequence
  Description of Artificial Sequence: Synthetic peptide
  XENP023224 vlCDR1
RASQSVDYDGDSYMN

SEQ ID NO: 2763 - protein, 7 aa, Artificial Sequence
  Description of Artificial Sequence: Synthetic peptide
  XENP023224 vlCDR2
AASELES

SEQ ID NO: 2764 - protein, 9 aa, Artificial Sequence
  Description of Artificial Sequence: Synthetic peptide
  XENP023224 vlCDR3
QQSNEDPFT

SEQ ID NO: 2765 - protein, 450 aa, Artificial Sequence
  Description of Artificial Sequence: Synthetic polypeptide
  XENP023225 7G8_H3.71_L1.34_Fab-[CTLA-4]_H3.23_L0.129_scFv Fab-Fc Heavy Chain
EVQLVESGGGLVQPGGSLRLSCAASGFTFDDAWMSWVRQAPGKGLEWVAEISTKAYNHATYYAESVKGRFTISRDDSKSSVYLQMNSLRAEDTAVYYCTRLATWDWYFDVWGQGTTVTVSSASTKGPSVFPLAPSSKSTSGGTAALGCLVKDYFPEPVTVSWNSGALTSGVHTFPAVLQSSGLYSLSSVVTVPSSSLGTQTYICNVNHKPSDTKVDKKVEPKSCDKTHTCPPCPAPPVAGPSVFLFPPKPKDTLMISRTPEVTCVVVDVKHEDPEVKFNWYVDGVEVHNAKTKPREEEYNSTYRVVSVLTVLHQDWLNGKEYKCKVSNKALPAPIEKTISKAKGQPREPQVYTLPPSREEMTKNQVSLTCDVSGFYPSDIAVEWESDGQPENNYKTTPPVLDSDGSFFLYSKLTVDKSRWEQGDVFSCSVMHEALHNHYTQKSLSLSPGK

SEQ ID NO: 2766 - protein, 121 aa, Artificial Sequence; identical to SEQ ID NO: 2466
  Description of Artificial Sequence: Synthetic polypeptide
  VH of XENP023225

SEQ ID NO: 2767 - protein, 5 aa, Artificial Sequence
  Description of Artificial Sequence: Synthetic peptide
  XENP023225 vhCDR1
DAWMS

SEQ ID NO: 2768 - protein, 19 aa, Artificial Sequence
  Description of Artificial Sequence: Synthetic peptide
  XENP023225 vhCDR2
EISTKAYNHATYYAESVKG

SEQ ID NO: 2769 - protein, 10 aa, Artificial Sequence
  Description of Artificial Sequence: Synthetic peptide
  XENP023225 vhCDR3
LATWDWYFDV

SEQ ID NO: 2770 - protein, 477 aa, Artificial Sequence; identical to SEQ ID NO: 2394
  Description of Artificial Sequence: Synthetic polypeptide
  XENP023225 7G8_H3.71_L1.34_Fab-[CTLA-4]_H3.23_L0.129_scFv scFv -Fc Heavy Chain

SEQ ID NO: 2771 - protein, 118 aa, Artificial Sequence; identical to SEQ ID NO: 2395
  Description of Artificial Sequence: Synthetic polypeptide
  VH of XENP023225

SEQ ID NO: 2772 - protein, 108 aa, Artificial Sequence; identical to SEQ ID NO: 2396
  Description of Artificial Sequence: Synthetic polypeptide
  VL of XENP023225

SEQ ID NO: 2773 - protein, 231 aa, Artificial Sequence; identical to SEQ ID NO: 2397
  Description of Artificial Sequence: Synthetic polypeptide
  Fc chain of XENP023225

SEQ ID NO: 2774 - protein, 5 aa, Artificial Sequence
  Description of Artificial Sequence: Synthetic peptide
  XENP023225 vhCDR1
SYTMH

SEQ ID NO: 2775 - protein, 17 aa, Artificial Sequence
  Description of Artificial Sequence: Synthetic peptide
  XENP023225 vhCDR2
FISYDGNYKYYADSVKG

SEQ ID NO: 2776 - protein, 9 aa, Artificial Sequence
  Description of Artificial Sequence: Synthetic peptide
  XENP023225 vhCDR3
GGHLGPFDL

SEQ ID NO: 2777 - protein, 12 aa, Artificial Sequence
  Description of Artificial Sequence: Synthetic peptide
  XENP023225 vlCDR1
RASQSVGSSYLA

SEQ ID NO: 2778 - protein, 7 aa, Artificial Sequence
  Description of Artificial Sequence: Synthetic peptide
  XENP023225 vlCDR2
GASSRAT

SEQ ID NO: 2779 - protein, 9 aa, Artificial Sequence
  Description of Artificial Sequence: Synthetic peptide
  XENP023225 vlCDR3
QQYGSSPWT

SEQ ID NO: 2780 - protein, 218 aa, Artificial Sequence; identical to SEQ ID NO: 2420
  Description of Artificial Sequence: Synthetic polypeptide
  XENP023225 7G8_H3.71_L1.34_Fab-[CTLA-4]_H3.23_L0.129_scFv Light Chain

SEQ ID NO: 2781 - protein, 111 aa, Artificial Sequence; identical to SEQ ID NO: 2421
  Description of Artificial Sequence: Synthetic polypeptide
  VL of XENP023225

SEQ ID NO: 2782 - protein, 15 aa, Artificial Sequence
  Description of Artificial Sequence: Synthetic peptide
  XENP023225 vlCDR1
RASQSVDYDGDSYMN

SEQ ID NO: 2783 - protein, 7 aa, Artificial Sequence
  Description of Artificial Sequence: Synthetic peptide
  XENP023225 vlCDR2
AASELES

SEQ ID NO: 2784 - protein, 9 aa, Artificial Sequence
  Description of Artificial Sequence: Synthetic peptide
  XENP023225 vlCDR3
QQSNEDPFT

SEQ ID NO: 2785 - protein, 450 aa, Artificial Sequence
  Description of Artificial Sequence: Synthetic polypeptide
  XENP023226 7G8_H3.30_L1.39_Fab-[CTLA-4]_H3.23_L0.129_scFv Fab- Fc Heavy Chain
EVQLVESGGGLVQPGGSLRLSCAASGFTFDDAWMSWVRQAPGKGLEWVAEISTKANNHATYYAESVKGRFTISRDDSKSSVYLQMNSLRAEDTAVYYCTRLATWDWYFDVWGQGTTVTVSSASTKGPSVFPLAPSSKSTSGGTAALGCLVKDYFPEPVTVSWNSGALTSGVHTFPAVLQSSGLYSLSSVVTVPSSSLGTQTYICNVNHKPSDTKVDKKVEPKSCDKTHTCPPCPAPPVAGPSVFLFPPKPKDTLMISRTPEVTCVVVDVKHEDPEVKFNWYVDGVEVHNAKTKPREEEYNSTYRVVSVLTVLHQDWLNGKEYKCKVSNKALPAPIEKTISKAKGQPREPQVYTLPPSREEMTKNQVSLTCDVSGFYPSDIAVEWESDGQPENNYKTTPPVLDSDGSFFLYSKLTVDKSRWEQGDVFSCSVMHEALHNHYTQKSLSLSPGK

SEQ ID NO: 2786 - protein, 121 aa, Artificial Sequence; identical to SEQ ID NO: 2516
  Description of Artificial Sequence: Synthetic polypeptide
  VH of XENP023226

SEQ ID NO: 2787 - protein, 5 aa, Artificial Sequence
  Description of Artificial Sequence: Synthetic peptide
  XENP023226 vhCDR1
DAWMS

SEQ ID NO: 2788 - protein, 19 aa, Artificial Sequence
  Description of Artificial Sequence: Synthetic peptide
  XENP023226 vhCDR2
EISTKANNHATYYAESVKG

SEQ ID NO: 2789 - protein, 10 aa, Artificial Sequence
  Description of Artificial Sequence: Synthetic peptide
  XENP023226 vhCDR3
LATWDWYFDV

SEQ ID NO: 2790 - protein, 477 aa, Artificial Sequence; identical to SEQ ID NO: 2394
  Description of Artificial Sequence: Synthetic polypeptide
  XENP023226 7G8_H3.30_L1.39_Fab-[CTLA-4]_H3.23_L0.129_scFv scFv -Fc Heavy Chain

SEQ ID NO: 2791 - protein, 118 aa, Artificial Sequence; identical to SEQ ID NO: 2395
  Description of Artificial Sequence: Synthetic polypeptide
  VH of XENP023226

SEQ ID NO: 2792 - protein, 108 aa, Artificial Sequence; identical to SEQ ID NO: 2396
  Description of Artificial Sequence: Synthetic polypeptide
  VL of XENP023226

SEQ ID NO: 2793 - protein, 231 aa, Artificial Sequence; identical to SEQ ID NO: 2397
  Description of Artificial Sequence: Synthetic polypeptide
  Fc chain of XENP023226

SEQ ID NO: 2794 - protein, 5 aa, Artificial Sequence
  Description of Artificial Sequence: Synthetic peptide
  XENP023226 vhCDR1
SYTMH

SEQ ID NO: 2795 - protein, 17 aa, Artificial Sequence
  Description of Artificial Sequence: Synthetic peptide
  XENP023226 vhCDR2
FISYDGNYKYYADSVKG

SEQ ID NO: 2796 - protein, 9 aa, Artificial Sequence
  Description of Artificial Sequence: Synthetic peptide
  XENP023226 vhCDR3
GGHLGPFDL

SEQ ID NO: 2797 - protein, 12 aa, Artificial Sequence
  Description of Artificial Sequence: Synthetic peptide
  XENP023226 vlCDR1
RASQSVGSSYLA

SEQ ID NO: 2798 - protein, 7 aa, Artificial Sequence
  Description of Artificial Sequence: Synthetic peptide
  XENP023226 vlCDR2
GASSRAT

SEQ ID NO: 2799 - protein, 9 aa, Artificial Sequence
  Description of Artificial Sequence: Synthetic peptide
  XENP023226 vlCDR3
QQYGSSPWT

SEQ ID NO: 2800 - protein, 218 aa, Artificial Sequence; identical to SEQ ID NO: 2530
  Description of Artificial Sequence: Synthetic polypeptide
  XENP023226 7G8_H3.30_L1.39_Fab-[CTLA-4]_H3.23_L0.129_scFv Light Chain

SEQ ID NO: 2801 - protein, 111 aa, Artificial Sequence; identical to SEQ ID NO: 2531
  Description of Artificial Sequence: Synthetic polypeptide
  VL of XENP023226

SEQ ID NO: 2802 - protein, 15 aa, Artificial Sequence
  Description of Artificial Sequence: Synthetic peptide
  XENP023226 vlCDR1
RASQSVDYYGDSYMN

SEQ ID NO: 2803 - protein, 7 aa, Artificial Sequence
  Description of Artificial Sequence: Synthetic peptide
  XENP023226 vlCDR2
AASELES

SEQ ID NO: 2804 - protein, 9 aa, Artificial Sequence
  Description of Artificial Sequence: Synthetic peptide
  XENP023226 vlCDR3
QQSNEDPFT

SEQ ID NO: 2805 - protein, 450 aa, Artificial Sequence; identical to SEQ ID NO: 2725
  Description of Artificial Sequence: Synthetic polypeptide
  XENP023227 7G8_H3.66_L1.39_Fab-[CTLA-4]_H3.23_L0.129_scFv Fab -Fc Heavy Chain

SEQ ID NO: 2806 - protein, 121 aa, Artificial Sequence; identical to SEQ ID NO: 2416
  Description of Artificial Sequence: Synthetic polypeptide
  VH of XENP023227

SEQ ID NO: 2807 - protein, 5 aa, Artificial Sequence
  Description of Artificial Sequence: Synthetic peptide
  XENP023227 vhCDR1
EAWMS

SEQ ID NO: 2808 - protein, 19 aa, Artificial Sequence
  Description of Artificial Sequence: Synthetic peptide
  XENP023227 vhCDR2
EISTKANNHATYYAESVKG

SEQ ID NO: 2809 - protein, 10 aa, Artificial Sequence
  Description of Artificial Sequence: Synthetic peptide
  XENP023227 vhCDR3
LATWDWYFDV

SEQ ID NO: 2810 - protein, 477 aa, Artificial Sequence; identical to SEQ ID NO: 2394
  Description of Artificial Sequence: Synthetic polypeptide
  XENP023227 7G8_H3.66_L1.39_Fab-[CTLA-4]_H3.23_L0.129_scFv scFv -Fc Heavy Chain

SEQ ID NO: 2811 - protein, 118 aa, Artificial Sequence; identical to SEQ ID NO: 2395
  Description of Artificial Sequence: Synthetic polypeptide
  VH of XENP023227

SEQ ID NO: 2812 - protein, 108 aa, Artificial Sequence; identical to SEQ ID NO: 2396
  Description of Artificial Sequence: Synthetic polypeptide
  VL of XENP023227

SEQ ID NO: 2813 - protein, 231 aa, Artificial Sequence; identical to SEQ ID NO: 2397
  Description of Artificial Sequence: Synthetic polypeptide
  Fc chain of XENP023227

SEQ ID NO: 2814 - protein, 5 aa, Artificial Sequence
  Description of Artificial Sequence: Synthetic peptide
  XENP023227 vhCDR1
SYTMH

SEQ ID NO: 2815 - protein, 17 aa, Artificial Sequence
  Description of Artificial Sequence: Synthetic peptide
  XENP023227 vhCDR2
FISYDGNYKYYADSVKG

SEQ ID NO: 2816 - protein, 9 aa, Artificial Sequence
  Description of Artificial Sequence: Synthetic peptide
  XENP023227 vhCDR3
GGHLGPFDL

SEQ ID NO: 2817 - protein, 12 aa, Artificial Sequence
  Description of Artificial Sequence: Synthetic peptide
  XENP023227 vlCDR1
RASQSVGSSYLA

SEQ ID NO: 2818 - protein, 7 aa, Artificial Sequence
  Description of Artificial Sequence: Synthetic peptide
  XENP023227 vlCDR2
GASSRAT

SEQ ID NO: 2819 - protein, 9 aa, Artificial Sequence
  Description of Artificial Sequence: Synthetic peptide
  XENP023227 vlCDR3
QQYGSSPWT

SEQ ID NO: 2820 - protein, 218 aa, Artificial Sequence; identical to SEQ ID NO: 2530
  Description of Artificial Sequence: Synthetic polypeptide
  XENP023227 7G8_H3.66_L1.39_Fab-[CTLA-4]_H3.23_L0.129_scFv Light Chain

SEQ ID NO: 2821 - protein, 111 aa, Artificial Sequence; identical to SEQ ID NO: 2531
  Description of Artificial Sequence: Synthetic polypeptide
  VL of XENP023227

SEQ ID NO: 2822 - protein, 15 aa, Artificial Sequence
  Description of Artificial Sequence: Synthetic peptide
  XENP023227 vlCDR1
RASQSVDYYGDSYMN

SEQ ID NO: 2823 - protein, 7 aa, Artificial Sequence
  Description of Artificial Sequence: Synthetic peptide
  XENP023227 vlCDR2
AASELES

SEQ ID NO: 2824 - protein, 9 aa, Artificial Sequence
  Description of Artificial Sequence: Synthetic peptide
  XENP023227 vlCDR3
QQSNEDPFT

SEQ ID NO: 2825 - protein, 450 aa, Artificial Sequence; identical to SEQ ID NO: 2745
  Description of Artificial Sequence: Synthetic polypeptide
  XENP023228 7G8_H3.67_L1.39_Fab-[CTLA-4]_H3.23_L0.129_scFv Fab- Fc Heavy Chain

SEQ ID NO: 2826 - protein, 121 aa, Artificial Sequence; identical to SEQ ID NO: 2426
  Description of Artificial Sequence: Synthetic polypeptide
  VH of XENP023228

SEQ ID NO: 2827 - protein, 5 aa, Artificial Sequence
  Description of Artificial Sequence: Synthetic peptide
  XENP023228 vhCDR1
DTWMS

SEQ ID NO: 2828 - protein, 19 aa, Artificial Sequence
  Description of Artificial Sequence: Synthetic peptide
  XENP023228 vhCDR2
EISTKANNHATYYAESVKG

SEQ ID NO: 2829 - protein, 10 aa, Artificial Sequence
  Description of Artificial Sequence: Synthetic peptide
  XENP023228 vhCDR3
LATWDWYFDV

SEQ ID NO: 2830 - protein, 477 aa, Artificial Sequence; identical to SEQ ID NO: 2394
  Description of Artificial Sequence: Synthetic polypeptide
  XENP023228 7G8_H3.67_L1.39_Fab-[CTLA-4]_H3.23_L0.129_scFv scFv -Fc Heavy Chain

SEQ ID NO: 2831 - protein, 118 aa, Artificial Sequence; identical to SEQ ID NO: 2395
  Description of Artificial Sequence: Synthetic polypeptide
  VH of XENP023228

SEQ ID NO: 2832 - protein, 108 aa, Artificial Sequence; identical to SEQ ID NO: 2396
  Description of Artificial Sequence: Synthetic polypeptide
  VL of XENP023228

SEQ ID NO: 2833 - protein, 231 aa, Artificial Sequence; identical to SEQ ID NO: 2397
  Description of Artificial Sequence: Synthetic polypeptide
  Fc chain of XENP023228

SEQ ID NO: 2834 - protein, 5 aa, Artificial Sequence
  Description of Artificial Sequence: Synthetic peptide
  XENP023228 vhCDR1
SYTMH

SEQ ID NO: 2835 - protein, 17 aa, Artificial Sequence
  Description of Artificial Sequence: Synthetic peptide
  XENP023228 vhCDR2
FISYDGNYKYYADSVKG

SEQ ID NO: 2836 - protein, 9 aa, Artificial Sequence
  Description of Artificial Sequence: Synthetic peptide
  XENP023228 vhCDR3
GGHLGPFDL

SEQ ID NO: 2837 - protein, 12 aa, Artificial Sequence
  Description of Artificial Sequence: Synthetic peptide
  XENP023228 vlCDR1
RASQSVGSSYLA

SEQ ID NO: 2838 - protein, 7 aa, Artificial Sequence
  Description of Artificial Sequence: Synthetic peptide
  XENP023228 vlCDR2
GASSRAT

SEQ ID NO: 2839 - protein, 9 aa, Artificial Sequence
  Description of Artificial Sequence: Synthetic peptide
  XENP023228 vlCDR3
QQYGSSPWT

SEQ ID NO: 2840 - protein, 218 aa, Artificial Sequence; identical to SEQ ID NO: 2530
  Description of Artificial Sequence: Synthetic polypeptide
  XENP023228 7G8_H3.67_L1.39_Fab-[CTLA-4]_H3.23_L0.129_scFv Light Chain

SEQ ID NO: 2841 - protein, 111 aa, Artificial Sequence; identical to SEQ ID NO: 2531
  Description of Artificial Sequence: Synthetic polypeptide
  VL of XENP023228

SEQ ID NO: 2842 - protein, 15 aa, Artificial Sequence
  Description of Artificial Sequence: Synthetic peptide
  XENP023228 vlCDR1
RASQSVDYYGDSYMN

SEQ ID NO: 2843 - protein, 7 aa, Artificial Sequence
  Description of Artificial Sequence: Synthetic peptide
  XENP023228 vlCDR2
AASELES

SEQ ID NO: 2844 - protein, 9 aa, Artificial Sequence
  Description of Artificial Sequence: Synthetic peptide
  XENP023228 vlCDR3
QQSNEDPFT

SEQ ID NO: 2845 - protein, 450 aa, Artificial Sequence; identical to SEQ ID NO: 2765
  Description of Artificial Sequence: Synthetic polypeptide
  XENP023229 7G8_H3.71_L1.39_Fab-[CTLA-4]_H3.23_L0.129_scFv Fab -Fc Heavy Chain

SEQ ID NO: 2846 - protein, 121 aa, Artificial Sequence; identical to SEQ ID NO: 2466
  Description of Artificial Sequence: Synthetic polypeptide
  VH of XENP023229

SEQ ID NO: 2847 - protein, 5 aa, Artificial Sequence
  Description of Artificial Sequence: Synthetic peptide
  XENP023229 vhCDR1
DAWMS

SEQ ID NO: 2848 - protein, 19 aa, Artificial Sequence
  Description of Artificial Sequence: Synthetic peptide
  XENP023229 vhCDR2
EISTKAYNHATYYAESVKG

SEQ ID NO: 2849 - protein, 10 aa, Artificial Sequence
  Description of Artificial Sequence: Synthetic peptide
  XENP023229 vhCDR3
LATWDWYFDV

SEQ ID NO: 2850 - protein, 477 aa, Artificial Sequence; identical to SEQ ID NO: 2394
  Description of Artificial Sequence: Synthetic polypeptide
  XENP023229 7G8_H3.71_L1.39_Fab-[CTLA-4]_H3.23_L0.129_scFv scFv -Fc Heavy Chain

SEQ ID NO: 2851 - protein, 118 aa, Artificial Sequence; identical to SEQ ID NO: 2395
  Description of Artificial Sequence: Synthetic polypeptide
  VH of XENP023229

SEQ ID NO: 2852 - protein, 108 aa, Artificial Sequence; identical to SEQ ID NO: 2396
  Description of Artificial Sequence: Synthetic polypeptide
  VL of XENP023229

SEQ ID NO: 2853 - protein, 231 aa, Artificial Sequence; identical to SEQ ID NO: 2397
  Description of Artificial Sequence: Synthetic polypeptide
  Fc chain of XENP023229

SEQ ID NO: 2854 - protein, 5 aa, Artificial Sequence
  Description of Artificial Sequence: Synthetic peptide
  XENP023229 vhCDR1
SYTMH

SEQ ID NO: 2855 - protein, 17 aa, Artificial Sequence
  Description of Artificial Sequence: Synthetic peptide
  XENP023229 vhCDR2
FISYDGNYKYYADSVKG

SEQ ID NO: 2856 - protein, 9 aa, Artificial Sequence
  Description of Artificial Sequence: Synthetic peptide
  XENP023229 vhCDR3
GGHLGPFDL

SEQ ID NO: 2857 - protein, 12 aa, Artificial Sequence
  Description of Artificial Sequence: Synthetic peptide
  XENP023229 vlCDR1
RASQSVGSSYLA

SEQ ID NO: 2858 - protein, 7 aa, Artificial Sequence
  Description of Artificial Sequence: Synthetic peptide
  XENP023229 vlCDR2
GASSRAT

SEQ ID NO: 2859 - protein, 9 aa, Artificial Sequence
  Description of Artificial Sequence: Synthetic peptide
  XENP023229 vlCDR3
QQYGSSPWT

SEQ ID NO: 2860 - protein, 218 aa, Artificial Sequence; identical to SEQ ID NO: 2530
  Description of Artificial Sequence: Synthetic polypeptide
  XENP023229 7G8_H3.71_L1.39_Fab-[CTLA-4]_H3.23_L0.129_scFv Light Chain

SEQ ID NO: 2861 - protein, 111 aa, Artificial Sequence; identical to SEQ ID NO: 2531
  Description of Artificial Sequence: Synthetic polypeptide
  VL of XENP023229

SEQ ID NO: 2862 - protein, 15 aa, Artificial Sequence
  Description of Artificial Sequence: Synthetic peptide
  XENP023229 vlCDR1
RASQSVDYYGDSYMN

SEQ ID NO: 2863 - protein, 7 aa, Artificial Sequence
  Description of Artificial Sequence: Synthetic peptide
  XENP023229 vlCDR2
AASELES

SEQ ID NO: 2864 - protein, 9 aa, Artificial Sequence
  Description of Artificial Sequence: Synthetic peptide
  XENP023229 vlCDR3
QQSNEDPFT

SEQ ID NO: 2865 - protein, 447 aa, Artificial Sequence
  Description of Artificial Sequence: Synthetic polypeptide
  XENP022718 2A11_H1.144_L2_Fab-1G6_L1.194_H1.279_scFv Fab-Fc Heavy Chain
EVQLVQSGAEVKKPGATVKISCKASGFNIKDYFMHWVQQAPGKGLEWMGWIDPELGDTEYAPKFQGRVTITADTSTNTAYMELSSLRSEDTAVYYCYARGVYQALDYWGQGTLVTVSSASTKGPSVFPLAPSSKSTSGGTAALGCLVKDYFPEPVTVSWNSGALTSGVHTFPAVLQSSGLYSLSSVVTVPSSSLGTQTYICNVNHKPSDTKVDKKVEPKSCDKTHTCPPCPAPPVAGPSVFLFPPKPKDTLMISRTPEVTCVVVDVKHEDPEVKFNWYVDGVEVHNAKTKPREEEYNSTYRVVSVLTVLHQDWLNGKEYKCKVSNKALPAPIEKTISKAKGQPREPQVYTLPPSREEMTKNQVSLTCDVSGFYPSDIAVEWESDGQPENNYKTTPPVLDSDGSFFLYSKLTVDKSRWEQGDVFSCSVMHEALHNHYTQKSLSLSPGK

SEQ ID NO: 2866 - protein, 118 aa, Artificial Sequence; identical to SEQ ID NO: 2646
  Description of Artificial Sequence: Synthetic polypeptide
  VH of XENP022718

SEQ ID NO: 2867 - protein, 5 aa, Artificial Sequence
  Description of Artificial Sequence: Synthetic peptide
  XENP022718 vhCDR1
DYFMH

SEQ ID NO: 2868 - protein, 17 aa, Artificial Sequence
  Description of Artificial Sequence: Synthetic peptide
  XENP022718 vhCDR2
WIDPELGDTEYAPKFQG

SEQ ID NO: 2869 - protein, 9 aa, Artificial Sequence
  Description of Artificial Sequence: Synthetic peptide
  XENP022718 vhCDR3
RGVYQALDY

SEQ ID NO: 2870 - protein, 480 aa, Artificial Sequence
  Description of Artificial Sequence: Synthetic polypeptide
  XENP022718 2A11_H1.144_L2_Fab-1G6_L1.194_H1.279_scFv scFv-Fc Heavy Chain
EIVLTQSPATLSASPGERVTLTCRASQSVGNDVAWYQQKPGQAPRLLINYASHRYTGVPDRFTGSGYGTEFTLTISSVQSEDFGVYYCQQDFSSPRTFGGGTKVEIKGKPGSGKPGSGKPGSGKPGSEVQLVESGGGLVKPGGSLRLSCVASGFTFSNYWMNWVRQAPGKGLEWVAEIRLYSNNYATHYAESVKGRFTISRDDSKSTLYLQMNNLKTEDTGVYYCTRYYGNYGGYFDVWGRGTLVTVSSEPKSSDKTHTCPPCPAPPVAGPSVFLFPPKPKDTLMISRTPEVTCVVVDVKHEDPEVKFNWYVDGVEVHNAKTKPREEQYNSTYRVVSVLTVLHQDWLNGKEYKCKVSNKALPAPIEKTISKAKGQPREPQVYTLPPSREQMTKNQVKLTCLVKGFYPSDIAVEWESNGQPENNYKTTPPVLDSDGSFFLYSKLTVDKSRWQQGNVFSCSVMHEALHNHYTQKSLSLSPGK

SEQ ID NO: 2871 - protein, 107 aa, Artificial Sequence
  Description of Artificial Sequence: Synthetic polypeptide
  VH of XENP022718
EIVLTQSPATLSASPGERVTLTCRASQSVGNDVAWYQQKPGQAPRLLINYASHRYTGVPDRFTGSGYGTEFTLTISSVQSEDFGVYYCQQDFSSPRTFGGGTKVEIK

SEQ ID NO: 2872 - protein, 122 aa, Artificial Sequence
  Description of Artificial Sequence: Synthetic polypeptide
  VL of XENP022718
EVQLVESGGGLVKPGGSLRLSCVASGFTFSNYWMNWVRQAPGKGLEWVAEIRLYSNNYATHYAESVKGRFTISRDDSKSTLYLQMNNLKTEDTGVYYCTRYYGNYGGYFDVWGRGTLVTVSS

SEQ ID NO: 2873 - protein, 231 aa, Artificial Sequence; identical to SEQ ID NO: 2397
  Description of Artificial Sequence: Synthetic polypeptide
  Fc chain of XENP022718

SEQ ID NO: 2874 - protein, 11 aa, Artificial Sequence
  Description of Artificial Sequence: Synthetic peptide
  XENP022718 vhCDR1
RASQSVGNDVA

SEQ ID NO: 2875 - protein, 7 aa, Artificial Sequence
  Description of Artificial Sequence: Synthetic peptide
  XENP022718 vhCDR2
YASHRYT

SEQ ID NO: 2876 - protein, 9 aa, Artificial Sequence
  Description of Artificial Sequence: Synthetic peptide
  XENP022718 vhCDR3
QQDFSSPRT

SEQ ID NO: 2877 - protein, 5 aa, Artificial Sequence
  Description of Artificial Sequence: Synthetic peptide
  XENP022718 vlCDR1
NYWMN

SEQ ID NO: 2878 - protein, 19 aa, Artificial Sequence
  Description of Artificial Sequence: Synthetic peptide
  XENP022718 vlCDR2
EIRLYSNNYATHYAESVKG

SEQ ID NO: 2879 - protein, 11 aa, Artificial Sequence
  Description of Artificial Sequence: Synthetic peptide
  XENP022718 vlCDR3
YYGNYGGYFDV

SEQ ID NO: 2880 - protein, 214 aa, Artificial Sequence
  Description of Artificial Sequence: Synthetic polypeptide
  XENP022718 2A11_H1.144_L2_Fab-1G6_L1.194_H1.279_scFv Light Chain
DIQMTQSPAFLSVTPGEKVTITCQASQDIGNYLNWFQQKPDQTVKLLIYYTSRLHSGVPSRFSGSGSGTDYTFTISSLEAEDAATYFCQQGNTLPYTFGGGTKVEIKRTVAAPSVFIFPPSDEQLKSGTASVVCLLNNFYPREAKVQWKVDNALQSGNSQESVTEQDSKDSTYSLSSTLTLSKADYEKHKVYACEVTHQGLSSPVTKSFNRGEC

SEQ ID NO: 2881 - protein, 107 aa, Artificial Sequence
  Description of Artificial Sequence: Synthetic polypeptide
  VL of XENP022718
DIQMTQSPAFLSVTPGEKVTITCQASQDIGNYLNWFQQKPDQTVKLLIYYTSRLHSGVPSRFSGSGSGTDYTFTISSLEAEDAATYFCQQGNTLPYTFGGGTKVEIK

SEQ ID NO: 2882 - protein, 11 aa, Artificial Sequence
  Description of Artificial Sequence: Synthetic peptide
  XENP022718 vlCDR1
QASQDIGNYLN

SEQ ID NO: 2883 - protein, 7 aa, Artificial Sequence
  Description of Artificial Sequence: Synthetic peptide
  XENP022718 vlCDR2
YTSRLHS

SEQ ID NO: 2884 - protein, 9 aa, Artificial Sequence
  Description of Artificial Sequence: Synthetic peptide
  XENP022718 vlCDR3
QQGNTLPYT

SEQ ID NO: 2885 - protein, 447 aa, Artificial Sequence
  Description of Artificial Sequence: Synthetic polypeptide
  XENP022719 2A11_H1_L2.50_Fab-1G6_L1.194_H1.279_scFv Fab-Fc Heavy Chain
EVQLVQSGAEVKKPGATVKISCKASGFNIKDYYMHWVQQAPGKGLEWMGWIDPENGDTEYAPKFQGRVTITADTSTNTAYMELSSLRSEDTAVYYCYARGVRQALDYWGQGTLVTVSSASTKGPSVFPLAPSSKSTSGGTAALGCLVKDYFPEPVTVSWNSGALTSGVHTFPAVLQSSGLYSLSSVVTVPSSSLGTQTYICNVNHKPSDTKVDKKVEPKSCDKTHTCPPCPAPPVAGPSVFLFPPKPKDTLMISRTPEVTCVVVDVKHEDPEVKFNWYVDGVEVHNAKTKPREEEYNSTYRVVSVLTVLHQDWLNGKEYKCKVSNKALPAPIEKTISKAKGQPREPQVYTLPPSREEMTKNQVSLTCDVSGFYPSDIAVEWESDGQPENNYKTTPPVLDSDGSFFLYSKLTVDKSRWEQGDVFSCSVMHEALHNHYTQKSLSLSPGK

SEQ ID NO: 2886 - protein, 118 aa, Artificial Sequence; identical to SEQ ID NO: 2686
  Description of Artificial Sequence: Synthetic polypeptide
  VH of XENP022719

SEQ ID NO: 2887 - protein, 5 aa, Artificial Sequence
  Description of Artificial Sequence: Synthetic peptide
  XENP022719 vhCDR1
DYYMH

SEQ ID NO: 2888 - protein, 17 aa, Artificial Sequence
  Description of Artificial Sequence: Synthetic peptide
  XENP022719 vhCDR2
WIDPENGDTEYAPKFQG

SEQ ID NO: 2889 - protein, 9 aa, Artificial Sequence
  Description of Artificial Sequence: Synthetic peptide
  XENP022719 vhCDR3
RGVRQALDY

SEQ ID NO: 2890 - protein, 480 aa, Artificial Sequence; identical to SEQ ID NO: 2870
  Description of Artificial Sequence: Synthetic polypeptide
  XENP022719 2A11_H1_L2.50_Fab-1G6_L1.194_H1.279_scFv scFv-Fc Heavy Chain

SEQ ID NO: 2891 - protein, 107 aa, Artificial Sequence; identical to SEQ ID NO: 2871
  Description of Artificial Sequence: Synthetic polypeptide
  VH of XENP022719

SEQ ID NO: 2892 - protein, 122 aa, Artificial Sequence; identical to SEQ ID NO: 2872
  Description of Artificial Sequence: Synthetic polypeptide
  VL of XENP022719

SEQ ID NO: 2893 - protein, 231 aa, Artificial Sequence; identical to SEQ ID NO: 2397
  Description of Artificial Sequence: Synthetic polypeptide
  Fc chain of XENP022719

SEQ ID NO: 2894 - protein, 11 aa, Artificial Sequence
  Description of Artificial Sequence: Synthetic peptide
  XENP022719 vhCDR1
RASQSVGNDVA

SEQ ID NO: 2895 - protein, 7 aa, Artificial Sequence
  Description of Artificial Sequence: Synthetic peptide
  XENP022719 vhCDR2
YASHRYT

SEQ ID NO: 2896 - protein, 9 aa, Artificial Sequence
  Description of Artificial Sequence: Synthetic peptide
  XENP022719 vhCDR3
QQDFSSPRT

SEQ ID NO: 2897 - protein, 5 aa, Artificial Sequence
  Description of Artificial Sequence: Synthetic peptide
  XENP022719 vlCDR1
NYWMN

SEQ ID NO: 2898 - protein, 19 aa, Artificial Sequence
  Description of Artificial Sequence: Synthetic peptide
  XENP022719 vlCDR2
EIRLYSNNYATHYAESVKG

SEQ ID NO: 2899 - protein, 11 aa, Artificial Sequence
  Description of Artificial Sequence: Synthetic peptide
  XENP022719 vlCDR3
YYGNYGGYFDV

SEQ ID NO: 2900 - protein, 214 aa, Artificial Sequence
  Description of Artificial Sequence: Synthetic polypeptide
  XENP022719 2A11_H1_L2.50_Fab-1G6_L1.194_H1.279_scFv Light Chain
DIQMTQSPAFLSVTPGEKVTITCQASQDIGNYLNWFQQKPDQTVKLLIYYTSYLHSGVPSRFSGSGSGTDYTFTISSLEAEDAATYFCQQGNTLPYTFGGGTKVEIKRTVAAPSVFIFPPSDEQLKSGTASVVCLLNNFYPREAKVQWKVDNALQSGNSQESVTEQDSKDSTYSLSSTLTLSKADYEKHKVYACEVTHQGLSSPVTKSFNRGEC

SEQ ID NO: 2901 - protein, 107 aa, Artificial Sequence
  Description of Artificial Sequence: Synthetic polypeptide
  VL of XENP022719
DIQMTQSPAFLSVTPGEKVTITCQASQDIGNYLNWFQQKPDQTVKLLIYYTSYLHSGVPSRFSGSGSGTDYTFTISSLEAEDAATYFCQQGNTLPYTFGGGTKVEIK

SEQ ID NO: 2902 - protein, 11 aa, Artificial Sequence
  Description of Artificial Sequence: Synthetic peptide
  XENP022719 vlCDR1
QASQDIGNYLN

SEQ ID NO: 2903 - protein, 7 aa, Artificial Sequence
  Description of Artificial Sequence: Synthetic peptide
  XENP022719 vlCDR2
YTSYLHS

SEQ ID NO: 2904 - protein, 9 aa, Artificial Sequence
  Description of Artificial Sequence: Synthetic peptide
  XENP022719 vlCDR3
QQGNTLPYT

SEQ ID NO: 2905 - protein, 447 aa, Artificial Sequence; identical to SEQ ID NO: 2885
  Description of Artificial Sequence: Synthetic polypeptide
  XENP022720 2A11_H1_L2.113_Fab-1G6_L1.194_H1.279_scFv Fab-Fc Heavy Chain

SEQ ID NO: 2906 - protein, 118 aa, Artificial Sequence; identical to SEQ ID NO: 2686
  Description of Artificial Sequence: Synthetic polypeptide
  VH of XENP022720

SEQ ID NO: 2907 - protein, 5 aa, Artificial Sequence
  Description of Artificial Sequence: Synthetic peptide
  XENP022720 vhCDR1
DYYMH

SEQ ID NO: 2908 - protein, 17 aa, Artificial Sequence
  Description of Artificial Sequence: Synthetic peptide
  XENP022720 vhCDR2
WIDPENGDTEYAPKFQG

SEQ ID NO: 2909 - protein, 9 aa, Artificial Sequence
  Description of Artificial Sequence: Synthetic peptide
  XENP022720 vhCDR3
RGVRQALDY

SEQ ID NO: 2910 - protein, 480 aa, Artificial Sequence; identical to SEQ ID NO: 2870
  Description of Artificial Sequence: Synthetic polypeptide
  XENP022720 2A11_H1_L2.113_Fab-1G6_L1.194_H1.279_scFv scFv-Fc Heavy Chain

SEQ ID NO: 2911 - protein, 107 aa, Artificial Sequence; identical to SEQ ID NO: 2871
  Description of Artificial Sequence: Synthetic polypeptide
  VH of XENP022720

SEQ ID NO: 2912 - protein, 122 aa, Artificial Sequence; identical to SEQ ID NO: 2872
  Description of Artificial Sequence: Synthetic polypeptide
  VL of XENP022720

SEQ ID NO: 2913 - protein, 231 aa, Artificial Sequence; identical to SEQ ID NO: 2397
  Description of Artificial Sequence: Synthetic polypeptide
  Fc chain of XENP022720

SEQ ID NO: 2914 - protein, 11 aa, Artificial Sequence
  Description of Artificial Sequence: Synthetic peptide
  XENP022720 vhCDR1
RASQSVGNDVA

SEQ ID NO: 2915 - protein, 7 aa, Artificial Sequence
  Description of Artificial Sequence: Synthetic peptide
  XENP022720 vhCDR2
YASHRYT

SEQ ID NO: 2916 - protein, 9 aa, Artificial Sequence
  Description of Artificial Sequence: Synthetic peptide
  XENP022720 vhCDR3
QQDFSSPRT

SEQ ID NO: 2917 - protein, 5 aa, Artificial Sequence
  Description of Artificial Sequence: Synthetic peptide
  XENP022720 vlCDR1
NYWMN

SEQ ID NO: 2918 - protein, 19 aa, Artificial Sequence
  Description of Artificial Sequence: Synthetic peptide
  XENP022720 vlCDR2
EIRLYSNNYATHYAESVKG

SEQ ID NO: 2919 - protein, 11 aa, Artificial Sequence
  Description of Artificial Sequence: Synthetic peptide
  XENP022720 vlCDR3
YYGNYGGYFDV

SEQ ID NO: 2920 - protein, 214 aa, Artificial Sequence; identical to SEQ ID NO: 2680
  Description of Artificial Sequence: Synthetic polypeptide
  XENP022720 2A11_H1_L2.113_Fab-1G6_L1.194_H1.279_scFv Light Chain

SEQ ID NO: 2921 - protein, 107 aa, Artificial Sequence; identical to SEQ ID NO: 2681
  Description of Artificial Sequence: Synthetic polypeptide
  VL of XENP022720

SEQ ID NO: 2922 - protein, 11 aa, Artificial Sequence
  Description of Artificial Sequence: Synthetic peptide
  XENP022720 vlCDR1
QASQDIGNYLN

SEQ ID NO: 2923 - protein, 7 aa, Artificial Sequence
  Description of Artificial Sequence: Synthetic peptide
  XENP022720 vlCDR2
FTSYLHS

SEQ ID NO: 2924 - protein, 9 aa, Artificial Sequence
  Description of Artificial Sequence: Synthetic peptide
  XENP022720 vlCDR3
QQGNTLPYT

SEQ ID NO: 2925 - protein, 450 aa, Artificial Sequence; identical to SEQ ID NO: 2605
  Description of Artificial Sequence: Synthetic polypeptide
  XENP022847 7G8_H3.30_L1.34_Fab-1G6_L1.194_H1.279_scFv Fab-Fc Heavy Chain

SEQ ID NO: 2926 - protein, 121 aa, Artificial Sequence; identical to SEQ ID NO: 2516
  Description of Artificial Sequence: Synthetic polypeptide
  VH of XENP022847

SEQ ID NO: 2927 - protein, 5 aa, Artificial Sequence
  Description of Artificial Sequence: Synthetic peptide
  XENP022847 vhCDR1
DAWMS

SEQ ID NO: 2928 - protein, 19 aa, Artificial Sequence
  Description of Artificial Sequence: Synthetic peptide
  XENP022847 vhCDR2
EISTKANNHATYYAESVKG

SEQ ID NO: 2929 - protein, 10 aa, Artificial Sequence
  Description of Artificial Sequence: Synthetic peptide
  XENP022847 vhCDR3
LATWDWYFDV

SEQ ID NO: 2930 - protein, 480 aa, Artificial Sequence
  Description of Artificial Sequence: Synthetic polypeptide
  XENP022847 7G8_H3.30_L1.34_Fab-1G6_L1.194_H1.279_scFv scFv-Fc Heavy Chain
EIVLTQSPATLSASPGERVTLTCRASQSVGNDVAWYQQKPGQAPRLLINYASHRYTGVPDRFTGSGYGTEFTLTISSVQSEDFGVYYCQQDFSSPRTFGGGTKVEIKGKPGSGKPGSGKPGSGKPGSEVQLVESGGGLVKPGGSLRLSCVASGFTFSNYWMNWVRQAPGKGLEWVAEIRLYSNNYATHYAESVKGRFTISRDDSKSTLYLQMNNLKTEDTGVYYCTRYYGNYGGYFDVWGRGTLVTVSSEPKSSDKTHTCPPCPAPPVAGPSVFLFPPKPKDTLMISRTPEVTCVVVDVKHEDPEVKFNWYVDGVEVHNAKTKPREEQYNSTYRVVSVLTVLHQDWLNGKEYKCKVSNKALPAPIEKTISKAKGQPREPQVYTLPPSREQMTKNQVKLTCLVKGFYPSDIAVEWESNGQPENNYKTTPPVLDSDGSFFLYSKLTVDKSRWQQGNVFSCSVLHEALHSHYTQKSLSLSPGK

SEQ ID NO: 2931 - protein, 107 aa, Artificial Sequence; identical to SEQ ID NO: 2871
  Description of Artificial Sequence: Synthetic polypeptide
  VH of XENP022847

SEQ ID NO: 2932 - protein, 122 aa, Artificial Sequence; identical to SEQ ID NO: 2872
  Description of Artificial Sequence: Synthetic polypeptide
  VL of XENP022847

SEQ ID NO: 2933 - protein, 231 aa, Artificial Sequence; identical to SEQ ID NO: 2409
  Description of Artificial Sequence: Synthetic polypeptide
  Fc chain of XENP022847

SEQ ID NO: 2934 - protein, 11 aa, Artificial Sequence
  Description of Artificial Sequence: Synthetic peptide
  XENP022847 vhCDR1
RASQSVGNDVA

SEQ ID NO: 2935 - protein, 7 aa, Artificial Sequence
  Description of Artificial Sequence: Synthetic peptide
  XENP022847 vhCDR2
YASHRYT

SEQ ID NO: 2936 - protein, 9 aa, Artificial Sequence
  Description of Artificial Sequence: Synthetic peptide
  XENP022847 vhCDR3
QQDFSSPRT

SEQ ID NO: 2937 - protein, 5 aa, Artificial Sequence
  Description of Artificial Sequence: Synthetic peptide
  XENP022847 vlCDR1
NYWMN

SEQ ID NO: 2938 - protein, 19 aa, Artificial Sequence
  Description of Artificial Sequence: Synthetic peptide
  XENP022847 vlCDR2
EIRLYSNNYATHYAESVKG

SEQ ID NO: 2939 - protein, 11 aa, Artificial Sequence
  Description of Artificial Sequence: Synthetic peptide
  XENP022847 vlCDR3
YYGNYGGYFDV

SEQ ID NO: 2940 - protein, 218 aa, Artificial Sequence; identical to SEQ ID NO: 2420
  Description of Artificial Sequence: Synthetic polypeptide
  XENP022847 7G8_H3.30_L1.34_Fab-1G6_L1.194_H1.279_scFv Light Chain

SEQ ID NO: 2941 - protein, 111 aa, Artificial Sequence; identical to SEQ ID NO: 2421
  Description of Artificial Sequence: Synthetic polypeptide
  VL of XENP022847

SEQ ID NO: 2942 - protein, 15 aa, Artificial Sequence
  Description of Artificial Sequence: Synthetic peptide
  XENP022847 vlCDR1
RASQSVDYDGDSYMN

SEQ ID NO: 2943 - protein, 7 aa, Artificial Sequence
  Description of Artificial Sequence: Synthetic peptide
  XENP022847 vlCDR2
AASELES

SEQ ID NO: 2944 - protein, 9 aa, Artificial Sequence
  Description of Artificial Sequence: Synthetic peptide
  XENP022847 vlCDR3
QQSNEDPFT

SEQ ID NO: 2945 - protein, 450 aa, Artificial Sequence; identical to SEQ ID NO: 2605
  Description of Artificial Sequence: Synthetic polypeptide
  XENP022848 7G8_H3.30_L1.36_Fab-1G6_L1.194_H1.279_scFv Fab-Fc Heavy Chain

SEQ ID NO: 2946 - protein, 121 aa, Artificial Sequence; identical to SEQ ID NO: 2516
  Description of Artificial Sequence: Synthetic polypeptide
  VH of XENP022848

SEQ ID NO: 2947 - protein, 5 aa, Artificial Sequence
  Description of Artificial Sequence: Synthetic peptide
  XENP022848 vhCDR1
DAWMS

SEQ ID NO: 2948 - protein, 19 aa, Artificial Sequence
  Description of Artificial Sequence: Synthetic peptide
  XENP022848 vhCDR2
EISTKANNHATYYAESVKG

SEQ ID NO: 2949 - protein, 10 aa, Artificial Sequence
  Description of Artificial Sequence: Synthetic peptide
  XENP022848 vhCDR3
LATWDWYFDV

SEQ ID NO: 2950 - protein, 480 aa, Artificial Sequence; identical to SEQ ID NO: 2930
  Description of Artificial Sequence: Synthetic polypeptide
  XENP022848 7G8_H3.30_L1.36_Fab-1G6_L1.194_H1.279_scFv scFv-Fc Heavy Chain

SEQ ID NO: 2951 - protein, 107 aa, Artificial Sequence; identical to SEQ ID NO: 2871
  Description of Artificial Sequence: Synthetic polypeptide
  VH of XENP022848

SEQ ID NO: 2952 - protein, 122 aa, Artificial Sequence; identical to SEQ ID NO: 2872
  Description of Artificial Sequence: Synthetic polypeptide
  VL of XENP022848

SEQ ID NO: 2953 - protein, 231 aa, Artificial Sequence; identical to SEQ ID NO: 2409
  Description of Artificial Sequence: Synthetic polypeptide
  Fc chain of XENP022848

SEQ ID NO: 2954 - protein, 11 aa, Artificial Sequence
  Description of Artificial Sequence: Synthetic peptide
  XENP022848 vhCDR1
RASQSVGNDVA

SEQ ID NO: 2955 - protein, 7 aa, Artificial Sequence
  Description of Artificial Sequence: Synthetic peptide
  XENP022848 vhCDR2
YASHRYT

SEQ ID NO: 2956 - protein, 9 aa, Artificial Sequence
  Description of Artificial Sequence: Synthetic peptide
  XENP022848 vhCDR3
QQDFSSPRT

SEQ ID NO: 2957 - protein, 5 aa, Artificial Sequence
  Description of Artificial Sequence: Synthetic peptide
  XENP022848 vlCDR1
NYWMN

SEQ ID NO: 2958 - protein, 19 aa, Artificial Sequence
  Description of Artificial Sequence: Synthetic peptide
  XENP022848 vlCDR2
EIRLYSNNYATHYAESVKG

SEQ ID NO: 2959 - protein, 11 aa, Artificial Sequence
  Description of Artificial Sequence: Synthetic peptide
  XENP022848 vlCDR3
YYGNYGGYFDV

SEQ ID NO: 2960 - protein, 218 aa, Artificial Sequence; identical to SEQ ID NO: 2640
  Description of Artificial Sequence: Synthetic polypeptide
  XENP022848 7G8_H3.30_L1.36_Fab-1G6_L1.194_H1.279_scFv Light Chain

SEQ ID NO: 2961 - protein, 111 aa, Artificial Sequence; identical to SEQ ID NO: 2641
  Description of Artificial Sequence: Synthetic polypeptide
  VL of XENP022848

SEQ ID NO: 2962 - protein, 15 aa, Artificial Sequence
  Description of Artificial Sequence: Synthetic peptide
  XENP022848 vlCDR1
RASQSVDHDGDSYMN

SEQ ID NO: 2963 - protein, 7 aa, Artificial Sequence
  Description of Artificial Sequence: Synthetic peptide
  XENP022848 vlCDR2
AASELES

SEQ ID NO: 2964 - protein, 9 aa, Artificial Sequence
  Description of Artificial Sequence: Synthetic peptide
  XENP022848 vlCDR3
QQSNEDPFT

SEQ ID NO: 2965 - protein, 447 aa, Artificial Sequence; identical to SEQ ID NO: 2645
  Description of Artificial Sequence: Synthetic polypeptide
  XENP022849 2A11_H1.144_L2.142_Fab-1G6_L1.194_H1.279_scFv Fab-Fc Heavy Chain

SEQ ID NO: 2966 - protein, 118 aa, Artificial Sequence; identical to SEQ ID NO: 2646
  Description of Artificial Sequence: Synthetic polypeptide
  VH of XENP022849

SEQ ID NO: 2967 - protein, 5 aa, Artificial Sequence
  Description of Artificial Sequence: Synthetic peptide
  XENP022849 vhCDR1
DYFMH

SEQ ID NO: 2968 - protein, 17 aa, Artificial Sequence
  Description of Artificial Sequence: Synthetic peptide
  XENP022849 vhCDR2
WIDPELGDTEYAPKFQG

SEQ ID NO: 2969 - protein, 9 aa, Artificial Sequence
  Description of Artificial Sequence: Synthetic peptide
  XENP022849 vhCDR3
RGVYQALDY

SEQ ID NO: 2970 - protein, 480 aa, Artificial Sequence; identical to SEQ ID NO: 2930
  Description of Artificial Sequence: Synthetic polypeptide
  XENP022849 2A11_H1.144_L2.142_Fab-1G6_L1.194_H1.279_scFv scFv-Fc Heavy Chain

SEQ ID NO: 2971 - protein, 107 aa, Artificial Sequence; identical to SEQ ID NO: 2871
  Description of Artificial Sequence: Synthetic polypeptide
  VH of XENP022849

SEQ ID NO: 2972 - protein, 122 aa, Artificial Sequence; identical to SEQ ID NO: 2872
  Description of Artificial Sequence: Synthetic polypeptide
  VL of XENP022849

SEQ ID NO: 2973 - protein, 231 aa, Artificial Sequence; identical to SEQ ID NO: 2409
  Description of Artificial Sequence: Synthetic polypeptide
  Fc chain of XENP022849

SEQ ID NO: 2974 - protein, 11 aa, Artificial Sequence
  Description of Artificial Sequence: Synthetic peptide
  XENP022849 vhCDR1
RASQSVGNDVA

SEQ ID NO: 2975 - protein, 7 aa, Artificial Sequence
  Description of Artificial Sequence: Synthetic peptide
  XENP022849 vhCDR2
YASHRYT

SEQ ID NO: 2976 - protein, 9 aa, Artificial Sequence
  Description of Artificial Sequence: Synthetic peptide
  XENP022849 vhCDR3
QQDFSSPRT

SEQ ID NO: 2977 - protein, 5 aa, Artificial Sequence
  Description of Artificial Sequence: Synthetic peptide
  XENP022849 vlCDR1
NYWMN

SEQ ID NO: 2978 - protein, 19 aa, Artificial Sequence
  Description of Artificial Sequence: Synthetic peptide
  XENP022849 vlCDR2
EIRLYSNNYATHYAESVKG

SEQ ID NO: 2979 - protein, 11 aa, Artificial Sequence
  Description of Artificial Sequence: Synthetic peptide
  XENP022849 vlCDR3
YYGNYGGYFDV

SEQ ID NO: 2980 - protein, 214 aa, Artificial Sequence; identical to SEQ ID NO: 2660
  Description of Artificial Sequence: Synthetic polypeptide
  XENP022849 2A11_H1.144_L2.142_Fab-1G6_L1.194_H1.279_scFv Light Chain

SEQ ID NO: 2981 - protein, 107 aa, Artificial Sequence; identical to SEQ ID NO: 2661
  Description of Artificial Sequence: Synthetic polypeptide
  VL of XENP022849

SEQ ID NO: 2982 - protein, 11 aa, Artificial Sequence
  Description of Artificial Sequence: Synthetic peptide
  XENP022849 vlCDR1
QASQDIGNYLN

SEQ ID NO: 2983 - protein, 7 aa, Artificial Sequence
  Description of Artificial Sequence: Synthetic peptide
  XENP022849 vlCDR2
FTSYLHS

SEQ ID NO: 2984 - protein, 9 aa, Artificial Sequence
  Description of Artificial Sequence: Synthetic peptide
  XENP022849 vlCDR3
QQGNTLPYT

SEQ ID NO: 2985 - protein, 447 aa, Artificial Sequence; identical to SEQ ID NO: 2645
  Description of Artificial Sequence: Synthetic polypeptide
  XENP022850 2A11_H1.144_L2.113_Fab-1G6_L1.194_H1.279_scFv Fab -Fc Heavy Chain

SEQ ID NO: 2986 - protein, 118 aa, Artificial Sequence; identical to SEQ ID NO: 2646
  Description of Artificial Sequence: Synthetic polypeptide
  VH of XENP022850

SEQ ID NO: 2987 - protein, 5 aa, Artificial Sequence
  Description of Artificial Sequence: Synthetic peptide
  XENP022850 vhCDR1
DYFMH

SEQ ID NO: 2988 - protein, 17 aa, Artificial Sequence
  Description of Artificial Sequence: Synthetic peptide
  XENP022850 vhCDR2
WIDPELGDTEYAPKFQG

SEQ ID NO: 2989 - protein, 9 aa, Artificial Sequence
  Description of Artificial Sequence: Synthetic peptide
  XENP022850 vhCDR3
RGVYQALDY

SEQ ID NO: 2990 - protein, 480 aa, Artificial Sequence; identical to SEQ ID NO: 2930
  Description of Artificial Sequence: Synthetic polypeptide
  XENP022850 2A11_H1.144_L2.113_Fab-1G6_L1.194_H1.279_scFv scFv -Fc Heavy Chain

SEQ ID NO: 2991 - protein, 107 aa, Artificial Sequence; identical to SEQ ID NO: 2871
  Description of Artificial Sequence: Synthetic polypeptide
  VH of XENP022850

SEQ ID NO: 2992 - protein, 122 aa, Artificial Sequence; identical to SEQ ID NO: 2872
  Description of Artificial Sequence: Synthetic polypeptide
  VL of XENP022850

SEQ ID NO: 2993 - protein, 231 aa, Artificial Sequence; identical to SEQ ID NO: 2409
  Description of Artificial Sequence: Synthetic polypeptide
  Fc chain of XENP022850

SEQ ID NO: 2994 - protein, 11 aa, Artificial Sequence
  Description of Artificial Sequence: Synthetic peptide
  XENP022850 vhCDR1
RASQSVGNDVA

SEQ ID NO: 2995 - protein, 7 aa, Artificial Sequence
  Description of Artificial Sequence: Synthetic peptide
  XENP022850 vhCDR2
YASHRYT

SEQ ID NO: 2996 - protein, 9 aa, Artificial Sequence
  Description of Artificial Sequence: Synthetic peptide
  XENP022850 vhCDR3
QQDFSSPRT

SEQ ID NO: 2997 - protein, 5 aa, Artificial Sequence
  Description of Artificial Sequence: Synthetic peptide
  XENP022850 vlCDR1
NYWMN

SEQ ID NO: 2998 - protein, 19 aa, Artificial Sequence
  Description of Artificial Sequence: Synthetic peptide
  XENP022850 vlCDR2
EIRLYSNNYATHYAESVKG

SEQ ID NO: 2999 - protein, 11 aa, Artificial Sequence
  Description of Artificial Sequence: Synthetic peptide
  XENP022850 vlCDR3
YYGNYGGYFDV

SEQ ID NO: 3000 - protein, 214 aa, Artificial Sequence; identical to SEQ ID NO: 2680
  Description of Artificial Sequence: Synthetic polypeptide
  XENP022850 2A11_H1.144_L2.113_Fab-1G6_L1.194_H1.279_scFv Light Chain

SEQ ID NO: 3001 - protein, 107 aa, Artificial Sequence; identical to SEQ ID NO: 2681
  Description of Artificial Sequence: Synthetic polypeptide
  VL of XENP022850

SEQ ID NO: 3002 - protein, 11 aa, Artificial Sequence
  Description of Artificial Sequence: Synthetic peptide
  XENP022850 vlCDR1
QASQDIGNYLN

SEQ ID NO: 3003 - protein, 7 aa, Artificial Sequence
  Description of Artificial Sequence: Synthetic peptide
  XENP022850 vlCDR2
FTSYLHS

SEQ ID NO: 3004 - protein, 9 aa, Artificial Sequence
  Description of Artificial Sequence: Synthetic peptide
  XENP022850 vlCDR3
QQGNTLPYT

SEQ ID NO: 3005 - protein, 447 aa, Artificial Sequence; identical to SEQ ID NO: 2705
  Description of Artificial Sequence: Synthetic polypeptide
  XENP022851 2A11_H1.125_L2.126_Fab-1G6_L1.194_H1.279_scFv Fab-Fc Heavy Chain

SEQ ID NO: 3006 - protein, 118 aa, Artificial Sequence; identical to SEQ ID NO: 2706
  Description of Artificial Sequence: Synthetic polypeptide
  VH of XENP022851

SEQ ID NO: 3007 - protein, 5 aa, Artificial Sequence
  Description of Artificial Sequence: Synthetic peptide
  XENP022851 vhCDR1
HYFMH

SEQ ID NO: 3008 - protein, 17 aa, Artificial Sequence
  Description of Artificial Sequence: Synthetic peptide
  XENP022851 vhCDR2
WIDPYLGDTEYAPKFQG

SEQ ID NO: 3009 - protein, 9 aa, Artificial Sequence
  Description of Artificial Sequence: Synthetic peptide
  XENP022851 vhCDR3
RGVYQALDY

SEQ ID NO: 3010 - protein, 480 aa, Artificial Sequence; identical to SEQ ID NO: 2930
  Description of Artificial Sequence: Synthetic polypeptide
  XENP022851 2A11_H1.125_L2.126_Fab-1G6_L1.194_H1.279_scFv scFv-Fc Heavy Chain

SEQ ID NO: 3011 - protein, 107 aa, Artificial Sequence; identical to SEQ ID NO: 2871
  Description of Artificial Sequence: Synthetic polypeptide
  VH of XENP022851

SEQ ID NO: 3012 - protein, 122 aa, Artificial Sequence; identical to SEQ ID NO: 2872
  Description of Artificial Sequence: Synthetic polypeptide
  VL of XENP022851

SEQ ID NO: 3013 - protein, 231 aa, Artificial Sequence; identical to SEQ ID NO: 2409
  Description of Artificial Sequence: Synthetic polypeptide
  Fc chain of XENP022851

SEQ ID NO: 3014 - protein, 11 aa, Artificial Sequence
  Description of Artificial Sequence: Synthetic peptide
  XENP022851 vhCDR1
RASQSVGNDVA

SEQ ID NO: 3015 - protein, 7 aa, Artificial Sequence
  Description of Artificial Sequence: Synthetic peptide
  XENP022851 vhCDR2
YASHRYT

SEQ ID NO: 3016 - protein, 9 aa, Artificial Sequence
  Description of Artificial Sequence: Synthetic peptide
  XENP022851 vhCDR3
QQDFSSPRT

SEQ ID NO: 3017 - protein, 5 aa, Artificial Sequence
  Description of Artificial Sequence: Synthetic peptide
  XENP022851 vlCDR1
NYWMN

SEQ ID NO: 3018 - protein, 19 aa, Artificial Sequence
  Description of Artificial Sequence: Synthetic peptide
  XENP022851 vlCDR2
EIRLYSNNYATHYAESVKG

SEQ ID NO: 3019 - protein, 11 aa, Artificial Sequence
  Description of Artificial Sequence: Synthetic peptide
  XENP022851 vlCDR3
YYGNYGGYFDV

SEQ ID NO: 3020 - protein, 214 aa, Artificial Sequence; identical to SEQ ID NO: 2720
  Description of Artificial Sequence: Synthetic polypeptide
  XENP022851 2A11_H1.125_L2.126_Fab-1G6_L1.194_H1.279_scFv Light Chain

SEQ ID NO: 3021 - protein, 107 aa, Artificial Sequence; identical to SEQ ID NO: 2721
  Description of Artificial Sequence: Synthetic polypeptide
  VL of XENP022851

SEQ ID NO: 3022 - protein, 11 aa, Artificial Sequence
  Description of Artificial Sequence: Synthetic peptide
  XENP022851 vlCDR1
QASQDIGNYLN

SEQ ID NO: 3023 - protein, 7 aa, Artificial Sequence
  Description of Artificial Sequence: Synthetic peptide
  XENP022851 vlCDR2
FTSYLHS

SEQ ID NO: 3024 - protein, 9 aa, Artificial Sequence
  Description of Artificial Sequence: Synthetic peptide
  XENP022851 vlCDR3
QEGNTLPYT

SEQ ID NO: 3025 - protein, 447 aa, Artificial Sequence; identical to SEQ ID NO: 2685
  Description of Artificial Sequence: Synthetic polypeptide
  XENP022852 2A11_H1_L2.113_Fab-1G6_L1.194_H1.279_scFv Fab-Fc Heavy Chain

SEQ ID NO: 3026 - protein, 118 aa, Artificial Sequence; identical to SEQ ID NO: 2686
  Description of Artificial Sequence: Synthetic polypeptide
  VH of XENP022852

SEQ ID NO: 3027 - protein, 5 aa, Artificial Sequence
  Description of Artificial Sequence: Synthetic peptide
  XENP022852 vhCDR1
DYYMH

SEQ ID NO: 3028 - protein, 17 aa, Artificial Sequence
  Description of Artificial Sequence: Synthetic peptide
  XENP022852 vhCDR2
WIDPENGDTEYAPKFQG

SEQ ID NO: 3029 - protein, 9 aa, Artificial Sequence
  Description of Artificial Sequence: Synthetic peptide
  XENP022852 vhCDR3
RGVRQALDY

SEQ ID NO: 3030 - protein, 480 aa, Artificial Sequence; identical to SEQ ID NO: 2930
  Description of Artificial Sequence: Synthetic polypeptide
  XENP022852 2A11_H1_L2.113_Fab-1G6_L1.194_H1.279_scFv scFv-Fc Heavy Chain

SEQ ID NO: 3031 - protein, 107 aa, Artificial Sequence; identical to SEQ ID NO: 2871
  Description of Artificial Sequence: Synthetic polypeptide
  VH of XENP022852

SEQ ID NO: 3032 - protein, 122 aa, Artificial Sequence; identical to SEQ ID NO: 2872
  Description of Artificial Sequence: Synthetic polypeptide
  VL of XENP022852

SEQ ID NO: 3033 - protein, 231 aa, Artificial Sequence; identical to SEQ ID NO: 2409
  Description of Artificial Sequence: Synthetic polypeptide
  Fc chain of XENP022852

SEQ ID NO: 3034 - protein, 11 aa, Artificial Sequence
  Description of Artificial Sequence: Synthetic peptide
  XENP022852 vhCDR1
RASQSVGNDVA

SEQ ID NO: 3035 - protein, 7 aa, Artificial Sequence
  Description of Artificial Sequence: Synthetic peptide
  XENP022852 vhCDR2
YASHRYT

SEQ ID NO: 3036 - protein, 9 aa, Artificial Sequence
  Description of Artificial Sequence: Synthetic peptide
  XENP022852 vhCDR3
QQDFSSPRT

SEQ ID NO: 3037 - protein, 5 aa, Artificial Sequence
  Description of Artificial Sequence: Synthetic peptide
  XENP022852 vlCDR1
NYWMN

SEQ ID NO: 3038 - protein, 19 aa, Artificial Sequence
  Description of Artificial Sequence: Synthetic peptide
  XENP022852 vlCDR2
EIRLYSNNYATHYAESVKG

SEQ ID NO: 3039 - protein, 11 aa, Artificial Sequence
  Description of Artificial Sequence: Synthetic peptide
  XENP022852 vlCDR3
YYGNYGGYFDV

SEQ ID NO: 3040 - protein, 214 aa, Artificial Sequence; identical to SEQ ID NO: 2680
  Description of Artificial Sequence: Synthetic polypeptide
  XENP022852 2A11_H1_L2.113_Fab-1G6_L1.194_H1.279_scFv Light Chain

SEQ ID NO: 3041 - protein, 107 aa, Artificial Sequence; identical to SEQ ID NO: 2681
  Description of Artificial Sequence: Synthetic polypeptide
  VL of XENP022852

SEQ ID NO: 3042 - protein, 11 aa, Artificial Sequence
  Description of Artificial Sequence: Synthetic peptide
  XENP022852 vlCDR1
QASQDIGNYLN

SEQ ID NO: 3043 - protein, 7 aa, Artificial Sequence
  Description of Artificial Sequence: Synthetic peptide
  XENP022852 vlCDR2
FTSYLHS

SEQ ID NO: 3044 - protein, 9 aa, Artificial Sequence
  Description of Artificial Sequence: Synthetic peptide
  XENP022852 vlCDR3
QQGNTLPYT

SEQ ID NO: 3045 - protein, 447 aa, Artificial Sequence; identical to SEQ ID NO: 2885
  Description of Artificial Sequence: Synthetic polypeptide
  XENP023349 2A11_H1L2_Fab-1C11_H3L3_scFv Fab-Fc Heavy Chain

SEQ ID NO: 3046 - protein, 118 aa, Artificial Sequence; identical to SEQ ID NO: 2686
  Description of Artificial Sequence: Synthetic polypeptide
  VH of XENP023349

SEQ ID NO: 3047 - protein, 5 aa, Artificial Sequence
  Description of Artificial Sequence: Synthetic peptide
  XENP023349 vhCDR1
DYYMH

SEQ ID NO: 3048 - protein, 17 aa, Artificial Sequence
  Description of Artificial Sequence: Synthetic peptide
  XENP023349 vhCDR2
WIDPENGDTEYAPKFQG

SEQ ID NO: 3049 - protein, 9 aa, Artificial Sequence
  Description of Artificial Sequence: Synthetic peptide
  XENP023349 vhCDR3
RGVRQALDY

SEQ ID NO: 3050 - protein, 480 aa, Artificial Sequence
  Description of Artificial Sequence: Synthetic polypeptide
  XENP023349 2A11_H1L2_Fab-1C11_H3L3_scFv scFv-Fc Heavy Chain
QIQLVQSGSELKKPGASVKVSCKASGYTFTHYGMNWVRQAPGQGLEWMGWINTYTGEPTYADGFTGRFVFSLDTSVSTAYLQISSLKAEDTAVYFCARDYYGSSPYWGQGTLVTVSSGKPGSGKPGSGKPGSGKPGSDVLMTQSPDSLAVSLGERATINCKSSQSIVHSNGNTYLEWYQQKPGQSPKLLIYKVSNRFSGVPDRFSGSGSGTDFTLTISSLQAEDVAVYYCFQGSHVPNTFGGGTKVEIKEPKSSDKTHTCPPCPAPPVAGPSVFLFPPKPKDTLMISRTPEVTCVVVDVKHEDPEVKFNWYVDGVEVHNAKTKPREEQYNSTYRVVSVLTVLHQDWLNGKEYKCKVSNKALPAPIEKTISKAKGQPREPQVYTLPPSREQMTKNQVKLTCLVKGFYPSDIAVEWESNGQPENNYKTTPPVLDSDGSFFLYSKLTVDKSRWQQGNVFSCSVMHEALHNHYTQKSLSLSPGK

SEQ ID NO: 3051 - protein, 117 aa, Artificial Sequence; identical to SEQ ID NO: 32
  Description of Artificial Sequence: Synthetic polypeptide
  VH of XENP023349

SEQ ID NO: 3052 - protein, 112 aa, Artificial Sequence; identical to SEQ ID NO: 7
  Description of Artificial Sequence: Synthetic polypeptide
  VL of XENP023349

SEQ ID NO: 3053 - protein, 231 aa, Artificial Sequence; identical to SEQ ID NO: 2397
  Description of Artificial Sequence: Synthetic polypeptide
  Fc chain of XENP023349

SEQ ID NO: 3054 - protein, 5 aa, Artificial Sequence
  Description of Artificial Sequence: Synthetic peptide
  XENP023349 vhCDR1
HYGMN

SEQ ID NO: 3055 - protein, 17 aa, Artificial Sequence
  Description of Artificial Sequence: Synthetic peptide
  XENP023349 vhCDR2
WINTYTGEPTYADGFTG

SEQ ID NO: 3056 - protein, 8 aa, Artificial Sequence
  Description of Artificial Sequence: Synthetic peptide
  XENP023349 vhCDR3
DYYGSSPY

SEQ ID NO: 3057 - protein, 16 aa, Artificial Sequence
  Description of Artificial Sequence: Synthetic peptide
  XENP023349 vlCDR1
KSSQSIVHSNGNTYLE

SEQ ID NO: 3058 - protein, 7 aa, Artificial Sequence
  Description of Artificial Sequence: Synthetic peptide
  XENP023349 vlCDR2
KVSNRFS

SEQ ID NO: 3059 - protein, 9 aa, Artificial Sequence
  Description of Artificial Sequence: Synthetic peptide
  XENP023349 vlCDR3
FQGSHVPNT

SEQ ID NO: 3060 - protein, 214 aa, Artificial Sequence; identical to SEQ ID NO: 2880
  Description of Artificial Sequence: Synthetic polypeptide
  XENP023349 2A11_H1L2_Fab-1C11_H3L3_scFv Light Chain

SEQ ID NO: 3061 - protein, 107 aa, Artificial Sequence; identical to SEQ ID NO: 2881
  Description of Artificial Sequence: Synthetic polypeptide
  VL of XENP023349

SEQ ID NO: 3062 - protein, 11 aa, Artificial Sequence
  Description of Artificial Sequence: Synthetic peptide
  XENP023349 vlCDR1
QASQDIGNYLN

SEQ ID NO: 3063 - protein, 7 aa, Artificial Sequence
  Description of Artificial Sequence: Synthetic peptide
  XENP023349 vlCDR2
YTSRLHS

SEQ ID NO: 3064 - protein, 9 aa, Artificial Sequence
  Description of Artificial Sequence: Synthetic peptide
  XENP023349 vlCDR3
QQGNTLPYT

SEQ ID NO: 3065 - protein, 447 aa, Artificial Sequence; identical to SEQ ID NO: 2865
  Description of Artificial Sequence: Synthetic polypeptide
  XENP023350 2A11_H1.144_L2.142_Fab-1C11_H3L3_scFv Fab-Fc Heavy Chain

SEQ ID NO: 3066 - protein, 118 aa, Artificial Sequence; identical to SEQ ID NO: 2646
  Description of Artificial Sequence: Synthetic polypeptide
  VH of XENP023350

SEQ ID NO: 3067 - protein, 5 aa, Artificial Sequence
  Description of Artificial Sequence: Synthetic peptide
  XENP023350 vhCDR1
DYFMH

SEQ ID NO: 3068 - protein, 17 aa, Artificial Sequence
  Description of Artificial Sequence: Synthetic peptide
  XENP023350 vhCDR2
WIDPELGDTEYAPKFQG

SEQ ID NO: 3069 - protein, 9 aa, Artificial Sequence
  Description of Artificial Sequence: Synthetic peptide
  XENP023350 vhCDR3
RGVYQALDY

SEQ ID NO: 3070 - protein, 480 aa, Artificial Sequence; identical to SEQ ID NO: 3050
  Description of Artificial Sequence: Synthetic polypeptide
  XENP023350 2A11_H1.144_L2.142_Fab-1C11_H3L3_scFv scFv-Fc Heavy Chain

SEQ ID NO: 3071 - protein, 117 aa, Artificial Sequence; identical to SEQ ID NO: 32
  Description of Artificial Sequence: Synthetic polypeptide
  VH of XENP023350

SEQ ID NO: 3072 - protein, 112 aa, Artificial Sequence; identical to SEQ ID NO: 7
  Description of Artificial Sequence: Synthetic polypeptide
  VL of XENP023350

SEQ ID NO: 3073 - protein, 231 aa, Artificial Sequence; identical to SEQ ID NO: 2397
  Description of Artificial Sequence: Synthetic polypeptide
  Fc chain of XENP023350

SEQ ID NO: 3074 - protein, 5 aa, Artificial Sequence
  Description of Artificial Sequence: Synthetic peptide
  XENP023350 vhCDR1
HYGMN

SEQ ID NO: 3075 - protein, 17 aa, Artificial Sequence
  Description of Artificial Sequence: Synthetic peptide
  XENP023350 vhCDR2
WINTYTGEPTYADGFTG

SEQ ID NO: 3076 - protein, 8 aa, Artificial Sequence
  Description of Artificial Sequence: Synthetic peptide
  XENP023350 vhCDR3
DYYGSSPY

SEQ ID NO: 3077 - protein, 16 aa, Artificial Sequence
  Description of Artificial Sequence: Synthetic peptide
  XENP023350 vlCDR1
KSSQSIVHSNGNTYLE

SEQ ID NO: 3078 - protein, 7 aa, Artificial Sequence
  Description of Artificial Sequence: Synthetic peptide
  XENP023350 vlCDR2
KVSNRFS

SEQ ID NO: 3079 - protein, 9 aa, Artificial Sequence
  Description of Artificial Sequence: Synthetic peptide
  XENP023350 vlCDR3
FQGSHVPNT

SEQ ID NO: 3080 - protein, 214 aa, Artificial Sequence; identical to SEQ ID NO: 2660
  Description of Artificial Sequence: Synthetic polypeptide
  XENP023350 2A11_H1.144_L2.142_Fab-1C11_H3L3_scFv Light Chain

SEQ ID NO: 3081 - protein, 107 aa, Artificial Sequence; identical to SEQ ID NO: 2661
  Description of Artificial Sequence: Synthetic polypeptide
  VL of XENP023350

SEQ ID NO: 3082 - protein, 11 aa, Artificial Sequence
  Description of Artificial Sequence: Synthetic peptide
  XENP023350 vlCDR1
QASQDIGNYLN

SEQ ID NO: 3083 - protein, 7 aa, Artificial Sequence
  Description of Artificial Sequence: Synthetic peptide
  XENP023350 vlCDR2
FTSYLHS

SEQ ID NO: 3084 - protein, 9 aa, Artificial Sequence
  Description of Artificial Sequence: Synthetic peptide
  XENP023350 vlCDR3
QQGNTLPYT

SEQ ID NO: 3085 - protein, 447 aa, Artificial Sequence; identical to SEQ ID NO: 2885
  Description of Artificial Sequence: Synthetic polypeptide
  XENP023351 2A11_H1L2_Fab-2E9_H1L1_scFv Fab-Fc Heavy Chain

SEQ ID NO: 3086 - protein, 118 aa, Artificial Sequence; identical to SEQ ID NO: 2686
  Description of Artificial Sequence: Synthetic polypeptide
  VH of XENP023351

SEQ ID NO: 3087 - protein, 5 aa, Artificial Sequence
  Description of Artificial Sequence: Synthetic peptide
  XENP023351 vhCDR1
DYYMH

SEQ ID NO: 3088 - protein, 17 aa, Artificial Sequence
  Description of Artificial Sequence: Synthetic peptide
  XENP023351 vhCDR2
WIDPENGDTEYAPKFQG

SEQ ID NO: 3089 - protein, 9 aa, Artificial Sequence
  Description of Artificial Sequence: Synthetic peptide
  XENP023351 vhCDR3
RGVRQALDY

SEQ ID NO: 3090 - protein, 478 aa, Artificial Sequence
  Description of Artificial Sequence: Synthetic polypeptide
  XENP023351 2A11_H1L2_Fab-2E9_H1L1_scFv scFv-Fc Heavy Chain
QVQLVQSGAEVKKPGASVKVSCKASGYAFTNYWLGWVRQAPGQGLEWMGNFYPGSSNTYYNEKFQGRVTMTADKSISTAYMELSRLRSDDTAVYFCARHYGTNYRYFDVWGAGTLVTVSSGKPGSGKPGSGKPGSGKPGSDIVLTQSPGTLSLSPGERATLSCRASQSVSNDVAWYQQKPGQSPRLLIYYASNRYTGVPDRFTGSGYGTDFTLTISRLEPEDFAVYFCQQDYSSPYTFGGGTKVEIKEPKSSDKTHTCPPCPAPPVAGPSVFLFPPKPKDTLMISRTPEVTCVVVDVKHEDPEVKFNWYVDGVEVHNAKTKPREEQYNSTYRVVSVLTVLHQDWLNGKEYKCKVSNKALPAPIEKTISKAKGQPREPQVYTLPPSREQMTKNQVKLTCLVKGFYPSDIAVEWESNGQPENNYKTTPPVLDSDGSFFLYSKLTVDKSRWQQGNVFSCSVMHEALHNHYTQKSLSLSPGK

SEQ ID NO: 3091 - protein, 120 aa, Artificial Sequence
  Description of Artificial Sequence: Synthetic polypeptide
  VH of XENP023351
QVQLVQSGAEVKKPGASVKVSCKASGYAFTNYWLGWVRQAPGQGLEWMGNFYPGSSNTYYNEKFQGRVTMTADKSISTAYMELSRLRSDDTAVYFCARHYGTNYRYFDVWGAGTLVTVSS

SEQ ID NO: 3092 - protein, 107 aa, Artificial Sequence
  Description of Artificial Sequence: Synthetic polypeptide
  VL of XENP023351
DIVLTQSPGTLSLSPGERATLSCRASQSVSNDVAWYQQKPGQSPRLLIYYASNRYTGVPDRFTGSGYGTDFTLTISRLEPEDFAVYFCQQDYSSPYTFGGGTKVEIK

SEQ ID NO: 3093 - protein, 231 aa, Artificial Sequence; identical to SEQ ID NO: 2397
  Description of Artificial Sequence: Synthetic polypeptide
  Fc chain of XENP023351

SEQ ID NO: 3094 - protein, 5 aa, Artificial Sequence
  Description of Artificial Sequence: Synthetic peptide
  XENP023351 vhCDR1
NYWLG

SEQ ID NO: 3095 - protein, 17 aa, Artificial Sequence
  Description of Artificial Sequence: Synthetic peptide
  XENP023351 vhCDR2
NFYPGSSNTYYNEKFQG

SEQ ID NO: 3096 - protein, 11 aa, Artificial Sequence
  Description of Artificial Sequence: Synthetic peptide
  XENP023351 vhCDR3
HYGTNYRYFDV

SEQ ID NO: 3097 - protein, 11 aa, Artificial Sequence
  Description of Artificial Sequence: Synthetic peptide
  XENP023351 vlCDR1
RASQSVSNDVA

SEQ ID NO: 3098 - protein, 7 aa, Artificial Sequence
  Description of Artificial Sequence: Synthetic peptide
  XENP023351 vlCDR2
YASNRYT

SEQ ID NO: 3099 - protein, 9 aa, Artificial Sequence
  Description of Artificial Sequence: Synthetic peptide
  XENP023351 vlCDR3
QQDYSSPYT

SEQ ID NO: 3100 - protein, 214 aa, Artificial Sequence; identical to SEQ ID NO: 2880
  Description of Artificial Sequence: Synthetic polypeptide
  XENP023351 2A11_H1L2_Fab-2E9_H1L1_scFv Light Chain

SEQ ID NO: 3101 - protein, 107 aa, Artificial Sequence; identical to SEQ ID NO: 2881
  Description of Artificial Sequence: Synthetic polypeptide
  VL of XENP023351

SEQ ID NO: 3102 - protein, 11 aa, Artificial Sequence
  Description of Artificial Sequence: Synthetic peptide
  XENP023351 vlCDR1
QASQDIGNYLN

SEQ ID NO: 3103 - protein, 7 aa, Artificial Sequence
  Description of Artificial Sequence: Synthetic peptide
  XENP023351 vlCDR2
YTSRLHS

SEQ ID NO: 3104 - protein, 9 aa, Artificial Sequence
  Description of Artificial Sequence: Synthetic peptide
  XENP023351 vlCDR3
QQGNTLPYT

SEQ ID NO: 3105 - protein, 447 aa, Artificial Sequence; identical to SEQ ID NO: 2865
  Description of Artificial Sequence: Synthetic polypeptide
  XENP023352 2A11_H1.144_L2.142_Fab-2E9_H1L1_scFv Fab-Fc Heavy Chain

SEQ ID NO: 3106 - protein, 118 aa, Artificial Sequence; identical to SEQ ID NO: 2646
  Description of Artificial Sequence: Synthetic polypeptide
  VH of XENP023352

SEQ ID NO: 3107 - protein, 5 aa, Artificial Sequence
  Description of Artificial Sequence: Synthetic peptide
  XENP023352 vhCDR1
DYFMH

SEQ ID NO: 3108 - protein, 17 aa, Artificial Sequence
  Description of Artificial Sequence: Synthetic peptide
  XENP023352 vhCDR2
WIDPELGDTEYAPKFQG

SEQ ID NO: 3109 - protein, 9 aa, Artificial Sequence
  Description of Artificial Sequence: Synthetic peptide
  XENP023352 vhCDR3
RGVYQALDY

SEQ ID NO: 3110 - protein, 458 aa, Artificial Sequence
  Description of Artificial Sequence: Synthetic polypeptide
  XENP023352 2A11_H1.144_L2.142_Fab-2E9_H1L1_scFv scFv-Fc Heavy Chain
QVQLVQSGAEVKKPGASVKVSCKASGYAFTNYWLGWVRQAPGQGLEWMGNFYPGSSNTYYNEKFQGRVTMTADKSISTAYMELSRLRSDDTAVYFCARHYGTNYRYFDVWGAGTLVTVSSDIVLTQSPGTLSLSPGERATLSCRASQSVSNDVAWYQQKPGQSPRLLIYYASNRYTGVPDRFTGSGYGTDFTLTISRLEPEDFAVYFCQQDYSSPYTFGGGTKVEIKEPKSSDKTHTCPPCPAPPVAGPSVFLFPPKPKDTLMISRTPEVTCVVVDVKHEDPEVKFNWYVDGVEVHNAKTKPREEQYNSTYRVVSVLTVLHQDWLNGKEYKCKVSNKALPAPIEKTISKAKGQPREPQVYTLPPSREQMTKNQVKLTCLVKGFYPSDIAVEWESNGQPENNYKTTPPVLDSDGSFFLYSKLTVDKSRWQQGNVFSCSVMHEALHNHYTQKSLSLSPGK

SEQ ID NO: 3111 - protein, 120 aa, Artificial Sequence; identical to SEQ ID NO: 3091
  Description of Artificial Sequence: Synthetic polypeptide
  VH of XENP023352

SEQ ID NO: 3112 - protein, 107 aa, Artificial Sequence; identical to SEQ ID NO: 3092
  Description of Artificial Sequence: Synthetic polypeptide
  VL of XENP023352

SEQ ID NO: 3113 - protein, 231 aa, Artificial Sequence; identical to SEQ ID NO: 2397
  Description of Artificial Sequence: Synthetic polypeptide
  Fc chain of XENP023352

SEQ ID NO: 3114 - protein, 5 aa, Artificial Sequence
  Description of Artificial Sequence: Synthetic peptide
  XENP023352 vhCDR1
NYWLG

SEQ ID NO: 3115 - protein, 17 aa, Artificial Sequence
  Description of Artificial Sequence: Synthetic peptide
  XENP023352 vhCDR2
NFYPGSSNTYYNEKFQG

SEQ ID NO: 3116 - protein, 11 aa, Artificial Sequence
  Description of Artificial Sequence: Synthetic peptide
  XENP023352 vhCDR3
HYGTNYRYFDV

SEQ ID NO: 3117 - protein, 11 aa, Artificial Sequence
  Description of Artificial Sequence: Synthetic peptide
  XENP023352 vlCDR1
RASQSVSNDVA

SEQ ID NO: 3118 - protein, 7 aa, Artificial Sequence
  Description of Artificial Sequence: Synthetic peptide
  XENP023352 vlCDR2
YASNRYT

SEQ ID NO: 3119 - protein, 9 aa, Artificial Sequence
  Description of Artificial Sequence: Synthetic peptide
  XENP023352 vlCDR3
QQDYSSPYT

SEQ ID NO: 3120 - protein, 214 aa, Artificial Sequence; identical to SEQ ID NO: 2660
  Description of Artificial Sequence: Synthetic polypeptide
  XENP023352 2A11_H1.144_L2.142_Fab-2E9_H1L1_scFv Light Chain

SEQ ID NO: 3121 - protein, 107 aa, Artificial Sequence; identical to SEQ ID NO: 2661
  Description of Artificial Sequence: Synthetic polypeptide
  VL of XENP023352

SEQ ID NO: 3122 - protein, 11 aa, Artificial Sequence
  Description of Artificial Sequence: Synthetic peptide
  XENP023352 vlCDR1
QASQDIGNYLN

SEQ ID NO: 3123 - protein, 7 aa, Artificial Sequence
  Description of Artificial Sequence: Synthetic peptide
  XENP023352 vlCDR2
FTSYLHS

SEQ ID NO: 3124 - protein, 9 aa, Artificial Sequence
  Description of Artificial Sequence: Synthetic peptide
  XENP023352 vlCDR3
QQGNTLPYT

SEQ ID NO: 3125 - protein, 446 aa, Artificial Sequence
  Description of Artificial Sequence: Synthetic polypeptide
  XENP022856 1C11_H3L3_IgG1_PVA_/S267K/M428L/N434S Heavy Chain
QIQLVQSGSELKKPGASVKVSCKASGYTFTHYGMNWVRQAPGQGLEWMGWINTYTGEPTYADGFTGRFVFSLDTSVSTAYLQISSLKAEDTAVYFCARDYYGSSPYWGQGTLVTVSSASTKGPSVFPLAPSSKSTSGGTAALGCLVKDYFPEPVTVSWNSGALTSGVHTFPAVLQSSGLYSLSSVVTVPSSSLGTQTYICNVNHKPSNTKVDKKVEPKSCDKTHTCPPCPAPPVAGPSVFLFPPKPKDTLMISRTPEVTCVVVDVKHEDPEVKFNWYVDGVEVHNAKTKPREEQYNSTYRVVSVLTVLHQDWLNGKEYKCKVSNKALPAPIEKTISKAKGQPREPQVYTLPPSREEMTKNQVSLTCLVKGFYPSDIAVEWESNGQPENNYKTTPPVLDSDGSFFLYSKLTVDKSRWQQGNVFSCSVLHEALHSHYTQKSLSLSPGK

SEQ ID NO: 3126 - protein, 117 aa, Artificial Sequence; identical to SEQ ID NO: 32
  Description of Artificial Sequence: Synthetic polypeptide
  VH of XENP022856

SEQ ID NO: 3127 - protein, 5 aa, Artificial Sequence
  Description of Artificial Sequence: Synthetic peptide
  XENP022856 vhCDR1
HYGMN

SEQ ID NO: 3128 - protein, 17 aa, Artificial Sequence
  Description of Artificial Sequence: Synthetic peptide
  XENP022856 vhCDR2
WINTYTGEPTYADGFTG

SEQ ID NO: 3129 - protein, 8 aa, Artificial Sequence
  Description of Artificial Sequence: Synthetic peptide
  XENP022856 vhCDR3
DYYGSSPY

SEQ ID NO: 3130 - protein, 219 aa, Artificial Sequence; identical to SEQ ID NO: 6
  Description of Artificial Sequence: Synthetic polypeptide
  XENP022856 1C11_H3L3_IgG1_PVA_/S267K/M428L/N434S Light Chain

SEQ ID NO: 3131 - protein, 112 aa, Artificial Sequence; identical to SEQ ID NO: 7
  Description of Artificial Sequence: Synthetic polypeptide
  VL of XENP022856

SEQ ID NO: 3132 - protein, 16 aa, Artificial Sequence
  Description of Artificial Sequence: Synthetic peptide
  XENP022856 vlCDR1
KSSQSIVHSNGNTYLE

SEQ ID NO: 3133 - protein, 7 aa, Artificial Sequence
  Description of Artificial Sequence: Synthetic peptide
  XENP022856 vlCDR2
KVSNRFS

SEQ ID NO: 3134 - protein, 9 aa, Artificial Sequence
  Description of Artificial Sequence: Synthetic peptide
  XENP022856 vlCDR3
FQGSHVPNT

SEQ ID NO: 3135 - protein, 449 aa, Artificial Sequence
  Description of Artificial Sequence: Synthetic polypeptide
  XENP022857 2E9_H1L1_IgG1_PVA_/S267K/M428L/N434S Heavy Chain
QVQLVQSGAEVKKPGASVKVSCKASGYAFTNYWLGWVRQAPGQGLEWMGNFYPGSSNTYYNEKFQGRVTMTADKSISTAYMELSRLRSDDTAVYFCARHYGTNYRYFDVWGAGTLVTVSSASTKGPSVFPLAPSSKSTSGGTAALGCLVKDYFPEPVTVSWNSGALTSGVHTFPAVLQSSGLYSLSSVVTVPSSSLGTQTYICNVNHKPSNTKVDKKVEPKSCDKTHTCPPCPAPPVAGPSVFLFPPKPKDTLMISRTPEVTCVVVDVKHEDPEVKFNWYVDGVEVHNAKTKPREEQYNSTYRVVSVLTVLHQDWLNGKEYKCKVSNKALPAPIEKTISKAKGQPREPQVYTLPPSREEMTKNQVSLTCLVKGFYPSDIAVEWESNGQPENNYKTTPPVLDSDGSFFLYSKLTVDKSRWQQGNVFSCSVLHEALHSHYTQKSLSLSPGK

SEQ ID NO: 3136 - protein, 120 aa, Artificial Sequence; identical to SEQ ID NO: 3091
  Description of Artificial Sequence: Synthetic polypeptide
  VH of XENP022857

SEQ ID NO: 3137 - protein, 5 aa, Artificial Sequence
  Description of Artificial Sequence: Synthetic peptide
  XENP022857 vhCDR1
NYWLG

SEQ ID NO: 3138 - protein, 17 aa, Artificial Sequence
  Description of Artificial Sequence: Synthetic peptide
  XENP022857 vhCDR2
NFYPGSSNTYYNEKFQG

SEQ ID NO: 3139 - protein, 11 aa, Artificial Sequence
  Description of Artificial Sequence: Synthetic peptide
  XENP022857 vhCDR3
HYGTNYRYFDV

SEQ ID NO: 3140 - protein, 214 aa, Artificial Sequence
  Description of Artificial Sequence: Synthetic polypeptide
  XENP022857 2E9_H1L1_IgG1_PVA_/S267K/M428L/N434S Light Chain
DIVLTQSPGTLSLSPGERATLSCRASQSVSNDVAWYQQKPGQSPRLLIYYASNRYTGVPDRFTGSGYGTDFTLTISRLEPEDFAVYFCQQDYSSPYTFGGGTKVEIKRTVAAPSVFIFPPSDEQLKSGTASVVCLLNNFYPREAKVQWKVDNALQSGNSQESVTEQDSKDSTYSLSSTLTLSKADYEKHKVYACEVTHQGLSSPVTKSFNRGEC

SEQ ID NO: 3141 - protein, 107 aa, Artificial Sequence; identical to SEQ ID NO: 3092
  Description of Artificial Sequence: Synthetic polypeptide
  VL of XENP022857

SEQ ID NO: 3142 - protein, 11 aa, Artificial Sequence
  Description of Artificial Sequence: Synthetic peptide
  XENP022857 vlCDR1
RASQSVSNDVA

SEQ ID NO: 3143 - protein, 7 aa, Artificial Sequence
  Description of Artificial Sequence: Synthetic peptide
  XENP022857 vlCDR2
YASNRYT

SEQ ID NO: 3144 - protein, 9 aa, Artificial Sequence
  Description of Artificial Sequence: Synthetic peptide
  XENP022857 vlCDR3
QQDYSSPYT

SEQ ID NO: 3145 - protein, 447 aa, Artificial Sequence
  Description of Artificial Sequence: Synthetic polypeptide
  XENP022858 9C6_H1.1_L1_Fab-1G6_L1.194_H1.279_scFv Fab-Fc Heavy Chain
QVQLKESGAEVKKPGASVKVSCKVSGFSLTGYGVNWVRQAPGQGLEWMGMIWIDGSTDYNSKFQGRVTMTKDNSKSTVYMELSSLRSEDTAVYYCARDRPDGRAMDYWGQGTMVTVSSASTKGPSVFPLAPSSKSTSGGTAALGCLVKDYFPEPVTVSWNSGALTSGVHTFPAVLQSSGLYSLSSVVTVPSSSLGTQTYICNVNHKPSDTKVDKKVEPKSCDKTHTCPPCPAPPVAGPSVFLFPPKPKDTLMISRTPEVTCVVVDVKHEDPEVKFNWYVDGVEVHNAKTKPREEEYNSTYRVVSVLTVLHQDWLNGKEYKCKVSNKALPAPIEKTISKAKGQPREPQVYTLPPSREEMTKNQVSLTCDVSGFYPSDIAVEWESDGQPENNYKTTPPVLDSDGSFFLYSKLTVDKSRWEQGDVFSCSVLHEALHSHYTQKSLSLSPGK

SEQ ID NO: 3146 - protein, 118 aa, Artificial Sequence
  Description of Artificial Sequence: Synthetic polypeptide
  VH of XENP022858
QVQLKESGAEVKKPGASVKVSCKVSGFSLTGYGVNWVRQAPGQGLEWMGMIWIDGSTDYNSKFQGRVTMTKDNSKSTVYMELSSLRSEDTAVYYCARDRPDGRAMDYWGQGTMVTVSS

SEQ ID NO: 3147 - protein, 5 aa, Artificial Sequence
  Description of Artificial Sequence: Synthetic peptide
  XENP022858 vhCDR1
GYGVN

SEQ ID NO: 3148 - protein, 16 aa, Artificial Sequence
  Description of Artificial Sequence: Synthetic peptide
  XENP022858 vhCDR2
MIWIDGSTDYNSKFQG

SEQ ID NO: 3149 - protein, 10 aa, Artificial Sequence
  Description of Artificial Sequence: Synthetic peptide
  XENP022858 vhCDR3
DRPDGRAMDY

SEQ ID NO: 3150 - protein, 480 aa, Artificial Sequence; identical to SEQ ID NO: 2930
  Description of Artificial Sequence: Synthetic polypeptide
  XENP022858 9C6_H1.1_L1_Fab-1G6_L1.194_H1.279_scFv scFv-Fc Heavy Chain

SEQ ID NO: 3151 - protein, 107 aa, Artificial Sequence; identical to SEQ ID NO: 2871
  Description of Artificial Sequence: Synthetic polypeptide
  VH of XENP022858

SEQ ID NO: 3152 - protein, 122 aa, Artificial Sequence; identical to SEQ ID NO: 2872
  Description of Artificial Sequence: Synthetic polypeptide
  VL of XENP022858

SEQ ID NO: 3153 - protein, 231 aa, Artificial Sequence; identical to SEQ ID NO: 2409
  Description of Artificial Sequence: Synthetic polypeptide
  Fc chain of XENP022858

SEQ ID NO: 3154 - protein, 11 aa, Artificial Sequence
  Description of Artificial Sequence: Synthetic peptide
  XENP022858 vhCDR1
RASQSVGNDVA

SEQ ID NO: 3155 - protein, 7 aa, Artificial Sequence
  Description of Artificial Sequence: Synthetic peptide
  XENP022858 vhCDR2
YASHRYT

SEQ ID NO: 3156 - protein, 9 aa, Artificial Sequence
  Description of Artificial Sequence: Synthetic peptide
  XENP022858 vhCDR3
QQDFSSPRT

SEQ ID NO: 3157 - protein, 5 aa, Artificial Sequence
  Description of Artificial Sequence: Synthetic peptide
  XENP022858 vlCDR1
NYWMN

SEQ ID NO: 3158 - protein, 19 aa, Artificial Sequence
  Description of Artificial Sequence: Synthetic peptide
  XENP022858 vlCDR2
EIRLYSNNYATHYAESVKG

SEQ ID NO: 3159 - protein, 11 aa, Artificial Sequence
  Description of Artificial Sequence: Synthetic peptide
  XENP022858 vlCDR3
YYGNYGGYFDV

SEQ ID NO: 3160 - protein, 213 aa, Artificial Sequence
  Description of Artificial Sequence: Synthetic polypeptide
  XENP022858 9C6_H1.1_L1_Fab-1G6_L1.194_H1.279_scFv Light Chain
SIVMTQSPDSLAVSLGERATINCKASQSVSNDVAWYQQKPGQSPKLLIYYASNRYTGVPDRFTGSGYGTDFTLTISSLQAEDVAVYFCQQDYSSPTFGGGTKLEIKRTVAAPSVFIFPPSDEQLKSGTASVVCLLNNFYPREAKVQWKVDNALQSGNSQESVTEQDSKDSTYSLSSTLTLSKADYEKHKVYACEVTHQGLSSPVTKSFNRGEC

SEQ ID NO: 3161 - protein, 106 aa, Artificial Sequence
  Description of Artificial Sequence: Synthetic polypeptide
  VL of XENP022858
SIVMTQSPDSLAVSLGERATINCKASQSVSNDVAWYQQKPGQSPKLLIYYASNRYTGVPDRFTGSGYGTDFTLTISSLQAEDVAVYFCQQDYSSPTFGGGTKLEIK

SEQ ID NO: 3162 - protein, 11 aa, Artificial Sequence
  Description of Artificial Sequence: Synthetic peptide
  XENP022858 vlCDR1
KASQSVSNDVA

SEQ ID NO: 3163 - protein, 7 aa, Artificial Sequence
  Description of Artificial Sequence: Synthetic peptide
  XENP022858 vlCDR2
YASNRYT

SEQ ID NO: 3164 - protein, 8 aa, Artificial Sequence
  Description of Artificial Sequence: Synthetic peptide
  XENP022858 vlCDR3
QQDYSSPT

SEQ ID NO: 3165 - protein, 446 aa, Artificial Sequence
  Description of Artificial Sequence: Synthetic polypeptide
  XENP022726 1C11_H1L3_Fab-[CTLA-4]_H3.23_L0.129_scFv Fab-Fc Heavy Chain
QIQLVQSGAEVKKPGASVKVSCKASGYTFTHYGMNWVRQAPGQGLEWMGWINTYTGEPTYADKFQGRVTMTLDTSTSTAYMELSSLRSEDTAVYFCARDYYGSSPYWGQGTLVTVSSASTKGPSVFPLAPSSKSTSGGTAALGCLVKDYFPEPVTVSWNSGALTSGVHTFPAVLQSSGLYSLSSVVTVPSSSLGTQTYICNVNHKPSDTKVDKKVEPKSCDKTHTCPPCPAPPVAGPSVFLFPPKPKDTLMISRTPEVTCVVVDVKHEDPEVKFNWYVDGVEVHNAKTKPREEEYNSTYRVVSVLTVLHQDWLNGKEYKCKVSNKALPAPIEKTISKAKGQPREPQVYTLPPSREEMTKNQVSLTCDVSGFYPSDIAVEWESDGQPENNYKTTPPVLDSDGSFFLYSKLTVDKSRWEQGDVFSCSVMHEALHNHYTQKSLSLSPGK

SEQ ID NO: 3166 - protein, 117 aa, Artificial Sequence; identical to SEQ ID NO: 2
  Description of Artificial Sequence: Synthetic polypeptide
  VH of XENP022726

SEQ ID NO: 3167 - protein, 5 aa, Artificial Sequence
  Description of Artificial Sequence: Synthetic peptide
  XENP022726 vhCDR1
HYGMN

SEQ ID NO: 3168 - protein, 17 aa, Artificial Sequence
  Description of Artificial Sequence: Synthetic peptide
  XENP022726 vhCDR2
WINTYTGEPTYADKFQG

SEQ ID NO: 3169 - protein, 8 aa, Artificial Sequence
  Description of Artificial Sequence: Synthetic peptide
  XENP022726 vhCDR3
DYYGSSPY

SEQ ID NO: 3170 - protein, 477 aa, Artificial Sequence; identical to SEQ ID NO: 2394
  Description of Artificial Sequence: Synthetic polypeptide
  XENP022726 1C11_H1L3_Fab-[CTLA-4]_H3.23_L0.129_scFv scFv-Fc Heavy Chain

SEQ ID NO: 3171 - protein, 118 aa, Artificial Sequence; identical to SEQ ID NO: 2395
  Description of Artificial Sequence: Synthetic polypeptide
  VH of XENP022726

SEQ ID NO: 3172 - protein, 108 aa, Artificial Sequence; identical to SEQ ID NO: 2396
  Description of Artificial Sequence: Synthetic polypeptide
  VL of XENP022726

SEQ ID NO: 3173 - protein, 231 aa, Artificial Sequence; identical to SEQ ID NO: 2397
  Description of Artificial Sequence: Synthetic polypeptide
  Fc chain of XENP022726

SEQ ID NO: 3174 - protein, 5 aa, Artificial Sequence
  Description of Artificial Sequence: Synthetic peptide
  XENP022726 vhCDR1
SYTMH

SEQ ID NO: 3175 - protein, 17 aa, Artificial Sequence
  Description of Artificial Sequence: Synthetic peptide
  XENP022726 vhCDR2
FISYDGNYKYYADSVKG

SEQ ID NO: 3176 - protein, 9 aa, Artificial Sequence
  Description of Artificial Sequence: Synthetic peptide
  XENP022726 vhCDR3
GGHLGPFDL

SEQ ID NO: 3177 - protein, 12 aa, Artificial Sequence
  Description of Artificial Sequence: Synthetic peptide
  XENP022726 vlCDR1
RASQSVGSSYLA

SEQ ID NO: 3178 - protein, 7 aa, Artificial Sequence
  Description of Artificial Sequence: Synthetic peptide
  XENP022726 vlCDR2
GASSRAT

SEQ ID NO: 3179 - protein, 9 aa, Artificial Sequence
  Description of Artificial Sequence: Synthetic peptide
  XENP022726 vlCDR3
QQYGSSPWT

SEQ ID NO: 3180 - protein, 219 aa, Artificial Sequence; identical to SEQ ID NO: 6
  Description of Artificial Sequence: Synthetic polypeptide
  XENP022726 1C11_H1L3_Fab-[CTLA-4]_H3.23_L0.129_scFv Light Chain

SEQ ID NO: 3181 - protein, 112 aa, Artificial Sequence; identical to SEQ ID NO: 7
  Description of Artificial Sequence: Synthetic polypeptide
  VL of XENP022726

SEQ ID NO: 3182 - protein, 16 aa, Artificial Sequence
  Description of Artificial Sequence: Synthetic peptide
  XENP022726 vlCDR1
KSSQSIVHSNGNTYLE

SEQ ID NO: 3183 - protein, 7 aa, Artificial Sequence
  Description of Artificial Sequence: Synthetic peptide
  XENP022726 vlCDR2
KVSNRFS

SEQ ID NO: 3184 - protein, 9 aa, Artificial Sequence
  Description of Artificial Sequence: Synthetic peptide
  XENP022726 vlCDR3
FQGSHVPNT

SEQ ID NO: 3185 - protein, 446 aa, Artificial Sequence
  Description of Artificial Sequence: Synthetic polypeptide
  XENP022727 1C11_H2L1_Fab-[CTLA-4]_H3.23_L0.129_scFv Fab-Fc Heavy Chain
EIQLLESGGGLVQPGGSLRLSCAASGYTFTHYGMNWVRQAPGKGLEWVSWINTYTGEPTYADSVKGRFTISLDTSKSTAYLQMNSLRAEDTAVYFCARDYYGSSPYWGQGTLVTVSSASTKGPSVFPLAPSSKSTSGGTAALGCLVKDYFPEPVTVSWNSGALTSGVHTFPAVLQSSGLYSLSSVVTVPSSSLGTQTYICNVNHKPSDTKVDKKVEPKSCDKTHTCPPCPAPPVAGPSVFLFPPKPKDTLMISRTPEVTCVVVDVKHEDPEVKFNWYVDGVEVHNAKTKPREEEYNSTYRVVSVLTVLHQDWLNGKEYKCKVSNKALPAPIEKTISKAKGQPREPQVYTLPPSREEMTKNQVSLTCDVSGFYPSDIAVEWESDGQPENNYKTTPPVLDSDGSFFLYSKLTVDKSRWEQGDVFSCSVMHEALHNHYTQKSLSLSPGK

SEQ ID NO: 3186 - protein, 117 aa, Artificial Sequence; identical to SEQ ID NO: 12
  Description of Artificial Sequence: Synthetic polypeptide
  VH of XENP022727

SEQ ID NO: 3187 - protein, 5 aa, Artificial Sequence
  Description of Artificial Sequence: Synthetic peptide
  XENP022727 vhCDR1
HYGMN

SEQ ID NO: 3188 - protein, 17 aa, Artificial Sequence
  Description of Artificial Sequence: Synthetic peptide
  XENP022727 vhCDR2
WINTYTGEPTYADSVKG

SEQ ID NO: 3189 - protein, 8 aa, Artificial Sequence
  Description of Artificial Sequence: Synthetic peptide
  XENP022727 vhCDR3
DYYGSSPY

SEQ ID NO: 3190 - protein, 477 aa, Artificial Sequence; identical to SEQ ID NO: 2394
  Description of Artificial Sequence: Synthetic polypeptide
  XENP022727 1C11_H2L1_Fab-[CTLA-4]_H3.23_L0.129_scFv scFv-Fc Heavy Chain

SEQ ID NO: 3191 - protein, 118 aa, Artificial Sequence; identical to SEQ ID NO: 2395
  Description of Artificial Sequence: Synthetic polypeptide
  VH of XENP022727

SEQ ID NO: 3192 - protein, 108 aa, Artificial Sequence; identical to SEQ ID NO: 2396
  Description of Artificial Sequence: Synthetic polypeptide
  VL of XENP022727

SEQ ID NO: 3193 - protein, 231 aa, Artificial Sequence; identical to SEQ ID NO: 2397
  Description of Artificial Sequence: Synthetic polypeptide
  Fc chain of XENP022727

SEQ ID NO: 3194 - protein, 5 aa, Artificial Sequence
  Description of Artificial Sequence: Synthetic peptide
  XENP022727 vhCDR1
SYTMH

SEQ ID NO: 3195 - protein, 17 aa, Artificial Sequence
  Description of Artificial Sequence: Synthetic peptide
  XENP022727 vhCDR2
FISYDGNYKYYADSVKG

SEQ ID NO: 3196 - protein, 9 aa, Artificial Sequence
  Description of Artificial Sequence: Synthetic peptide
  XENP022727 vhCDR3
GGHLGPFDL

SEQ ID NO: 3197 - protein, 12 aa, Artificial Sequence
  Description of Artificial Sequence: Synthetic peptide
  XENP022727 vlCDR1
RASQSVGSSYLA

SEQ ID NO: 3198 - protein, 7 aa, Artificial Sequence
  Description of Artificial Sequence: Synthetic peptide
  XENP022727 vlCDR2
GASSRAT

SEQ ID NO: 3199 - protein, 9 aa, Artificial Sequence
  Description of Artificial Sequence: Synthetic peptide
  XENP022727 vlCDR3
QQYGSSPWT

SEQ ID NO: 3200 - protein, 219 aa, Artificial Sequence; identical to SEQ ID NO: 16
  Description of Artificial Sequence: Synthetic polypeptide
  XENP022727 1C11_H2L1_Fab-[CTLA-4]_H3.23_L0.129_scFv Light Chain

SEQ ID NO: 3201 - protein, 112 aa, Artificial Sequence; identical to SEQ ID NO: 17
  Description of Artificial Sequence: Synthetic polypeptide
  VL of XENP022727

SEQ ID NO: 3202 - protein, 16 aa, Artificial Sequence
  Description of Artificial Sequence: Synthetic peptide
  XENP022727 vlCDR1
RSSQSIVHSNGNTYLE

SEQ ID NO: 3203 - protein, 7 aa, Artificial Sequence
  Description of Artificial Sequence: Synthetic peptide
  XENP022727 vlCDR2
KVSNRFS

SEQ ID NO: 3204 - protein, 9 aa, Artificial Sequence
  Description of Artificial Sequence: Synthetic peptide
  XENP022727 vlCDR3
FQGSHVPNT

SEQ ID NO: 3205 - protein, 446 aa, Artificial Sequence; identical to SEQ ID NO: 3185
  Description of Artificial Sequence: Synthetic polypeptide
  XENP022728 1C11_H2L2_Fab-[CTLA-4]_H3.23_L0.129_scFv Fab-Fc Heavy Chain

SEQ ID NO: 3206 - protein, 117 aa, Artificial Sequence; identical to SEQ ID NO: 12
  Description of Artificial Sequence: Synthetic polypeptide
  VH of XENP022728

SEQ ID NO: 3207 - protein, 5 aa, Artificial Sequence
  Description of Artificial Sequence: Synthetic peptide
  XENP022728 vhCDR1
HYGMN

SEQ ID NO: 3208 - protein, 17 aa, Artificial Sequence
  Description of Artificial Sequence: Synthetic peptide
  XENP022728 vhCDR2
WINTYTGEPTYADSVKG

SEQ ID NO: 3209 - protein, 8 aa, Artificial Sequence
  Description of Artificial Sequence: Synthetic peptide
  XENP022728 vhCDR3
DYYGSSPY

SEQ ID NO: 3210 - protein, 477 aa, Artificial Sequence; identical to SEQ ID NO: 2394
  Description of Artificial Sequence: Synthetic polypeptide
  XENP022728 1C11_H2L2_Fab-[CTLA-4]_H3.23_L0.129_scFv scFv-Fc Heavy Chain

SEQ ID NO: 3211 - protein, 118 aa, Artificial Sequence; identical to SEQ ID NO: 2395
  Description of Artificial Sequence: Synthetic polypeptide
  VH of XENP022728

SEQ ID NO: 3212 - protein, 108 aa, Artificial Sequence; identical to SEQ ID NO: 2396
  Description of Artificial Sequence: Synthetic polypeptide
  VL of XENP022728

SEQ ID NO: 3213 - protein, 231 aa, Artificial Sequence; identical to SEQ ID NO: 2397
  Description of Artificial Sequence: Synthetic polypeptide
  Fc chain of XENP022728

SEQ ID NO: 3214 - protein, 5 aa, Artificial Sequence
  Description of Artificial Sequence: Synthetic peptide
  XENP022728 vhCDR1
SYTMH

SEQ ID NO: 3215 - protein, 17 aa, Artificial Sequence
  Description of Artificial Sequence: Synthetic peptide
  XENP022728 vhCDR2
FISYDGNYKYYADSVKG

SEQ ID NO: 3216 - protein, 9 aa, Artificial Sequence
  Description of Artificial Sequence: Synthetic peptide
  XENP022728 vhCDR3
GGHLGPFDL

SEQ ID NO: 3217 - protein, 12 aa, Artificial Sequence
  Description of Artificial Sequence: Synthetic peptide
  XENP022728 vlCDR1
RASQSVGSSYLA

SEQ ID NO: 3218 - protein, 7 aa, Artificial Sequence
  Description of Artificial Sequence: Synthetic peptide
  XENP022728 vlCDR2
GASSRAT

SEQ ID NO: 3219 - protein, 9 aa, Artificial Sequence
  Description of Artificial Sequence: Synthetic peptide
  XENP022728 vlCDR3
QQYGSSPWT

SEQ ID NO: 3220 - protein, 219 aa, Artificial Sequence; identical to SEQ ID NO: 26
  Description of Artificial Sequence: Synthetic polypeptide
  XENP022728 1C11_H2L2_Fab-[CTLA-4]_H3.23_L0.129_scFv Light Chain

SEQ ID NO: 3221 - protein, 112 aa, Artificial Sequence; identical to SEQ ID NO: 27
  Description of Artificial Sequence: Synthetic polypeptide
  VL of XENP022728

SEQ ID NO: 3222 - protein, 16 aa, Artificial Sequence
  Description of Artificial Sequence: Synthetic peptide
  XENP022728 vlCDR1
RSSQSIVHSNGNTYLE

SEQ ID NO: 3223 - protein, 7 aa, Artificial Sequence
  Description of Artificial Sequence: Synthetic peptide
  XENP022728 vlCDR2
KVSNRFS

SEQ ID NO: 3224 - protein, 9 aa, Artificial Sequence
  Description of Artificial Sequence: Synthetic peptide
  XENP022728 vlCDR3
FQGSHVPNT

SEQ ID NO: 3225 - protein, 446 aa, Artificial Sequence
  Description of Artificial Sequence: Synthetic polypeptide
  XENP022729 1C11_H3L3_Fab-[CTLA-4]_H3.23_L0.129_scFv Fab-Fc Heavy Chain
QIQLVQSGSELKKPGASVKVSCKASGYTFTHYGMNWVRQAPGQGLEWMGWINTYTGEPTYADGFTGRFVFSLDTSVSTAYLQISSLKAEDTAVYFCARDYYGSSPYWGQGTLVTVSSASTKGPSVFPLAPSSKSTSGGTAALGCLVKDYFPEPVTVSWNSGALTSGVHTFPAVLQSSGLYSLSSVVTVPSSSLGTQTYICNVNHKPSDTKVDKKVEPKSCDKTHTCPPCPAPPVAGPSVFLFPPKPKDTLMISRTPEVTCVVVDVKHEDPEVKFNWYVDGVEVHNAKTKPREEEYNSTYRVVSVLTVLHQDWLNGKEYKCKVSNKALPAPIEKTISKAKGQPREPQVYTLPPSREEMTKNQVSLTCDVSGFYPSDIAVEWESDGQPENNYKTTPPVLDSDGSFFLYSKLTVDKSRWEQGDVFSCSVMHEALHNHYTQKSLSLSPGK

SEQ ID NO: 3226 - protein, 117 aa, Artificial Sequence; identical to SEQ ID NO: 32
  Description of Artificial Sequence: Synthetic polypeptide
  VH of XENP022729

SEQ ID NO: 3227 - protein, 5 aa, Artificial Sequence
  Description of Artificial Sequence: Synthetic peptide
  XENP022729 vhCDR1
HYGMN

SEQ ID NO: 3228 - protein, 17 aa, Artificial Sequence
  Description of Artificial Sequence: Synthetic peptide
  XENP022729 vhCDR2
WINTYTGEPTYADGFTG

SEQ ID NO: 3229 - protein, 8 aa, Artificial Sequence
  Description of Artificial Sequence: Synthetic peptide
  XENP022729 vhCDR3
DYYGSSPY

SEQ ID NO: 3230 - protein, 477 aa, Artificial Sequence; identical to SEQ ID NO: 2394
  Description of Artificial Sequence: Synthetic polypeptide
  XENP022729 1C11_H3L3_Fab-[CTLA-4]_H3.23_L0.129_scFv scFv-Fc Heavy Chain

SEQ ID NO: 3231 - protein, 118 aa, Artificial Sequence; identical to SEQ ID NO: 2395
  Description of Artificial Sequence: Synthetic polypeptide
  VH of XENP022729

SEQ ID NO: 3232 - protein, 108 aa, Artificial Sequence; identical to SEQ ID NO: 2396
  Description of Artificial Sequence: Synthetic polypeptide
  VL of XENP022729

SEQ ID NO: 3233 - protein, 231 aa, Artificial Sequence; identical to SEQ ID NO: 2397
  Description of Artificial Sequence: Synthetic polypeptide
  Fc chain of XENP022729

SEQ ID NO: 3234 - protein, 5 aa, Artificial Sequence
  Description of Artificial Sequence: Synthetic peptide
  XENP022729 vhCDR1
SYTMH

SEQ ID NO: 3235 - protein, 17 aa, Artificial Sequence
  Description of Artificial Sequence: Synthetic peptide
  XENP022729 vhCDR2
FISYDGNYKYYADSVKG

SEQ ID NO: 3236 - protein, 9 aa, Artificial Sequence
  Description of Artificial Sequence: Synthetic peptide
  XENP022729 vhCDR3
GGHLGPFDL

SEQ ID NO: 3237 - protein, 12 aa, Artificial Sequence
  Description of Artificial Sequence: Synthetic peptide
  XENP022729 vlCDR1
RASQSVGSSYLA

SEQ ID NO: 3238 - protein, 7 aa, Artificial Sequence
  Description of Artificial Sequence: Synthetic peptide
  XENP022729 vlCDR2
GASSRAT

SEQ ID NO: 3239 - protein, 9 aa, Artificial Sequence
  Description of Artificial Sequence: Synthetic peptide
  XENP022729 vlCDR3
QQYGSSPWT

SEQ ID NO: 3240 - protein, 219 aa, Artificial Sequence; identical to SEQ ID NO: 6
  Description of Artificial Sequence: Synthetic polypeptide
  XENP022729 1C11_H3L3_Fab-[CTLA-4]_H3.23_L0.129_scFv Light Chain

SEQ ID NO: 3241 - protein, 112 aa, Artificial Sequence; identical to SEQ ID NO: 7
  Description of Artificial Sequence: Synthetic polypeptide
  VL of XENP022729

SEQ ID NO: 3242 - protein, 16 aa, Artificial Sequence
  Description of Artificial Sequence: Synthetic peptide
  XENP022729 vlCDR1
KSSQSIVHSNGNTYLE

SEQ ID NO: 3243 - protein, 7 aa, Artificial Sequence
  Description of Artificial Sequence: Synthetic peptide
  XENP022729 vlCDR2
KVSNRFS

SEQ ID NO: 3244 - protein, 9 aa, Artificial Sequence
  Description of Artificial Sequence: Synthetic peptide
  XENP022729 vlCDR3
FQGSHVPNT

SEQ ID NO: 3245 - protein, 449 aa, Artificial Sequence
  Description of Artificial Sequence: Synthetic polypeptide
  XENP022836 2E9_H1L1_Fab-[CTLA-4]_H3.23_L0.129_scFv HC-Fab
QVQLVQSGAEVKKPGASVKVSCKASGYAFTNYWLGWVRQAPGQGLEWMGNFYPGSSNTYYNEKFQGRVTMTADKSISTAYMELSRLRSDDTAVYFCARHYGTNYRYFDVWGAGTLVTVSSASTKGPSVFPLAPSSKSTSGGTAALGCLVKDYFPEPVTVSWNSGALTSGVHTFPAVLQSSGLYSLSSVVTVPSSSLGTQTYICNVNHKPSDTKVDKKVEPKSCDKTHTCPPCPAPPVAGPSVFLFPPKPKDTLMISRTPEVTCVVVDVKHEDPEVKFNWYVDGVEVHNAKTKPREEEYNSTYRVVSVLTVLHQDWLNGKEYKCKVSNKALPAPIEKTISKAKGQPREPQVYTLPPSREEMTKNQVSLTCDVSGFYPSDIAVEWESDGQPENNYKTTPPVLDSDGSFFLYSKLTVDKSRWEQGDVFSCSVMHEALHNHYTQKSLSLSPGK

SEQ ID NO: 3246 - protein, 120 aa, Artificial Sequence; identical to SEQ ID NO: 3091
  Description of Artificial Sequence: Synthetic polypeptide
  VH of XENP022836

SEQ ID NO: 3247 - protein, 5 aa, Artificial Sequence
  Description of Artificial Sequence: Synthetic peptide
  XENP022836 vhCDR1
NYWLG

SEQ ID NO: 3248 - protein, 17 aa, Artificial Sequence
  Description of Artificial Sequence: Synthetic peptide
  XENP022836 vhCDR2
NFYPGSSNTYYNEKFQG

SEQ ID NO: 3249 - protein, 11 aa, Artificial Sequence
  Description of Artificial Sequence: Synthetic peptide
  XENP022836 vhCDR3
HYGTNYRYFDV

SEQ ID NO: 3250 - protein, 477 aa, Artificial Sequence; identical to SEQ ID NO: 2394
  Description of Artificial Sequence: Synthetic polypeptide
  XENP022836 2E9_H1L1_Fab-[CTLA-4]_H3.23_L0.129_scFv HC-scFV

SEQ ID NO: 3251 - protein, 118 aa, Artificial Sequence; identical to SEQ ID NO: 2395
  Description of Artificial Sequence: Synthetic polypeptide
  VH of XENP022836

SEQ ID NO: 3252 - protein, 108 aa, Artificial Sequence; identical to SEQ ID NO: 2396
  Description of Artificial Sequence: Synthetic polypeptide
  VL of XENP022836

SEQ ID NO: 3253 - protein, 231 aa, Artificial Sequence; identical to SEQ ID NO: 2397
  Description of Artificial Sequence: Synthetic polypeptide
  Fc chain of XENP022836

SEQ ID NO: 3254 - protein, 5 aa, Artificial Sequence
  Description of Artificial Sequence: Synthetic peptide
  XENP022836 vhCDR1
SYTMH

SEQ ID NO: 3255 - protein, 17 aa, Artificial Sequence
  Description of Artificial Sequence: Synthetic peptide
  XENP022836 vhCDR2
FISYDGNYKYYADSVKG

SEQ ID NO: 3256 - protein, 9 aa, Artificial Sequence
  Description of Artificial Sequence: Synthetic peptide
  XENP022836 vhCDR3
GGHLGPFDL

SEQ ID NO: 3257 - protein, 12 aa, Artificial Sequence
  Description of Artificial Sequence: Synthetic peptide
  XENP022836 vlCDR1
RASQSVGSSYLA

SEQ ID NO: 3258 - protein, 7 aa, Artificial Sequence
  Description of Artificial Sequence: Synthetic peptide
  XENP022836 vlCDR2
GASSRAT

SEQ ID NO: 3259 - protein, 9 aa, Artificial Sequence
  Description of Artificial Sequence: Synthetic peptide
  XENP022836 vlCDR3
QQYGSSPWT

SEQ ID NO: 3260 - protein, 214 aa, Artificial Sequence; identical to SEQ ID NO: 3140
  Description of Artificial Sequence: Synthetic polypeptide
  XENP022836 2E9_H1L1_Fab-[CTLA-4]_H3.23_L0.129_scFv Light Chain

SEQ ID NO: 3261 - protein, 107 aa, Artificial Sequence; identical to SEQ ID NO: 3092
  Description of Artificial Sequence: Synthetic polypeptide
  VL of XENP022836

SEQ ID NO: 3262 - protein, 11 aa, Artificial Sequence
  Description of Artificial Sequence: Synthetic peptide
  XENP022836 vlCDR1
RASQSVSNDVA

SEQ ID NO: 3263 - protein, 7 aa, Artificial Sequence
  Description of Artificial Sequence: Synthetic peptide
  XENP022836 vlCDR2
YASNRYT

SEQ ID NO: 3264 - protein, 9 aa, Artificial Sequence
  Description of Artificial Sequence: Synthetic peptide
  XENP022836 vlCDR3
QQDYSSPYT

SEQ ID NO: 3265 - protein, 446 aa, Artificial Sequence
  Description of Artificial Sequence: Synthetic polypeptide
  XENP022854 1C11_H3L3_Fab-[CTLA-4]_H3.23_L0.129_[CTLA-4]_scFv Fab-Fc Heavy Chain
QIQLVQSGSELKKPGASVKVSCKASGYTFTHYGMNWVRQAPGQGLEWMGWINTYTGEPTYADGFTGRFVFSLDTSVSTAYLQISSLKAEDTAVYFCARDYYGSSPYWGQGTLVTVSSASTKGPSVFPLAPSSKSTSGGTAALGCLVKDYFPEPVTVSWNSGALTSGVHTFPAVLQSSGLYSLSSVVTVPSSSLGTQTYICNVNHKPSDTKVDKKVEPKSCDKTHTCPPCPAPPVAGPSVFLFPPKPKDTLMISRTPEVTCVVVDVKHEDPEVKFNWYVDGVEVHNAKTKPREEEYNSTYRVVSVLTVLHQDWLNGKEYKCKVSNKALPAPIEKTISKAKGQPREPQVYTLPPSREEMTKNQVSLTCDVSGFYPSDIAVEWESDGQPENNYKTTPPVLDSDGSFFLYSKLTVDKSRWEQGDVFSCSVLHEALHSHYTQKSLSLSPGK

SEQ ID NO: 3266 - protein, 117 aa, Artificial Sequence; identical to SEQ ID NO: 32
  Description of Artificial Sequence: Synthetic polypeptide
  VH of XENP022854

SEQ ID NO: 3267 - protein, 5 aa, Artificial Sequence
  Description of Artificial Sequence: Synthetic peptide
  XENP022854 vhCDR1
HYGMN

SEQ ID NO: 3268 - protein, 17 aa, Artificial Sequence
  Description of Artificial Sequence: Synthetic peptide
  XENP022854 vhCDR2
WINTYTGEPTYADGFTG

SEQ ID NO: 3269 - protein, 8 aa, Artificial Sequence
  Description of Artificial Sequence: Synthetic peptide
  XENP022854 vhCDR3
DYYGSSPY

SEQ ID NO: 3270 - protein, 477 aa, Artificial Sequence; identical to SEQ ID NO: 2610
  Description of Artificial Sequence: Synthetic polypeptide
  XENP022854 1C11_H3L3_Fab-[CTLA-4]_H3.23_L0.129_[CTLA-4]_scFv scFv-Fc Heavy Chain

SEQ ID NO: 3271 - protein, 118 aa, Artificial Sequence; identical to SEQ ID NO: 2395
  Description of Artificial Sequence: Synthetic polypeptide
  VH of XENP022854

SEQ ID NO: 3272 - protein, 108 aa, Artificial Sequence; identical to SEQ ID NO: 2396
  Description of Artificial Sequence: Synthetic polypeptide
  VL of XENP022854

SEQ ID NO: 3273 - protein, 231 aa, Artificial Sequence; identical to SEQ ID NO: 2409
  Description of Artificial Sequence: Synthetic polypeptide
  Fc chain of XENP022854

SEQ ID NO: 3274 - protein, 5 aa, Artificial Sequence
  Description of Artificial Sequence: Synthetic peptide
  XENP022854 vhCDR1
SYTMH

SEQ ID NO: 3275 - protein, 17 aa, Artificial Sequence
  Description of Artificial Sequence: Synthetic peptide
  XENP022854 vhCDR2
FISYDGNYKYYADSVKG

SEQ ID NO: 3276 - protein, 9 aa, Artificial Sequence
  Description of Artificial Sequence: Synthetic peptide
  XENP022854 vhCDR3
GGHLGPFDL

SEQ ID NO: 3277 - protein, 12 aa, Artificial Sequence
  Description of Artificial Sequence: Synthetic peptide
  XENP022854 vlCDR1
RASQSVGSSYLA

SEQ ID NO: 3278 - protein, 7 aa, Artificial Sequence
  Description of Artificial Sequence: Synthetic peptide
  XENP022854 vlCDR2
GASSRAT

SEQ ID NO: 3279 - protein, 9 aa, Artificial Sequence
  Description of Artificial Sequence: Synthetic peptide
  XENP022854 vlCDR3
QQYGSSPWT

SEQ ID NO: 3280 - protein, 219 aa, Artificial Sequence; identical to SEQ ID NO: 6
  Description of Artificial Sequence: Synthetic polypeptide
  XENP022854 1C11_H3L3_Fab-[CTLA-4]_H3.23_L0.129_[CTLA-4]_scFv Light Chain

SEQ ID NO: 3281 - protein, 112 aa, Artificial Sequence; identical to SEQ ID NO: 7
  Description of Artificial Sequence: Synthetic polypeptide
  VL of XENP022854

SEQ ID NO: 3282 - protein, 16 aa, Artificial Sequence
  Description of Artificial Sequence: Synthetic peptide
  XENP022854 vlCDR1
KSSQSIVHSNGNTYLE

SEQ ID NO: 3283 - protein, 7 aa, Artificial Sequence
  Description of Artificial Sequence: Synthetic peptide
  XENP022854 vlCDR2
KVSNRFS

SEQ ID NO: 3284 - protein, 9 aa, Artificial Sequence
  Description of Artificial Sequence: Synthetic peptide
  XENP022854 vlCDR3
FQGSHVPNT

SEQ ID NO: 3285 - protein, 449 aa, Artificial Sequence
  Description of Artificial Sequence: Synthetic polypeptide
  XENP022855 2E9_H1L1_Fab-[CTLA-4]_H3.23_L0.129_[CTLA-4]_scFv Fab-Fc Heavy Chain
QVQLVQSGAEVKKPGASVKVSCKASGYAFTNYWLGWVRQAPGQGLEWMGNFYPGSSNTYYNEKFQGRVTMTADKSISTAYMELSRLRSDDTAVYFCARHYGTNYRYFDVWGAGTLVTVSSASTKGPSVFPLAPSSKSTSGGTAALGCLVKDYFPEPVTVSWNSGALTSGVHTFPAVLQSSGLYSLSSVVTVPSSSLGTQTYICNVNHKPSDTKVDKKVEPKSCDKTHTCPPCPAPPVAGPSVFLFPPKPKDTLMISRTPEVTCVVVDVKHEDPEVKFNWYVDGVEVHNAKTKPREEEYNSTYRVVSVLTVLHQDWLNGKEYKCKVSNKALPAPIEKTISKAKGQPREPQVYTLPPSREEMTKNQVSLTCDVSGFYPSDIAVEWESDGQPENNYKTTPPVLDSDGSFFLYSKLTVDKSRWEQGDVFSCSVLHEALHSHYTQKSLSLSPGK

SEQ ID NO: 3286 - protein, 120 aa, Artificial Sequence; identical to SEQ ID NO: 3091
  Description of Artificial Sequence: Synthetic polypeptide
  VH of XENP022855

SEQ ID NO: 3287 - protein, 5 aa, Artificial Sequence
  Description of Artificial Sequence: Synthetic peptide
  XENP022855 vhCDR1
NYWLG

SEQ ID NO: 3288 - protein, 17 aa, Artificial Sequence
  Description of Artificial Sequence: Synthetic peptide
  XENP022855 vhCDR2
NFYPGSSNTYYNEKFQG

SEQ ID NO: 3289 - protein, 11 aa, Artificial Sequence
  Description of Artificial Sequence: Synthetic peptide
  XENP022855 vhCDR3
HYGTNYRYFDV

SEQ ID NO: 3290 - protein, 477 aa, Artificial Sequence; identical to SEQ ID NO: 2610
  Description of Artificial Sequence: Synthetic polypeptide
  XENP022855 2E9_H1L1_Fab-[CTLA-4]_H3.23_L0.129_[CTLA-4]_scFv scFv-Fc Heavy Chain

SEQ ID NO: 3291 - protein, 118 aa, Artificial Sequence; identical to SEQ ID NO: 2395
  Description of Artificial Sequence: Synthetic polypeptide
  VH of XENP022855

SEQ ID NO: 3292 - protein, 108 aa, Artificial Sequence; identical to SEQ ID NO: 2396
  Description of Artificial Sequence: Synthetic polypeptide
  VL of XENP022855

SEQ ID NO: 3293 - protein, 231 aa, Artificial Sequence; identical to SEQ ID NO: 2409
  Description of Artificial Sequence: Synthetic polypeptide
  Fc chain of XENP022855

SEQ ID NO: 3294 - protein, 5 aa, Artificial Sequence
  Description of Artificial Sequence: Synthetic peptide
  XENP022855 vhCDR1
SYTMH

SEQ ID NO: 3295 - protein, 17 aa, Artificial Sequence
  Description of Artificial Sequence: Synthetic peptide
  XENP022855 vhCDR2
FISYDGNYKYYADSVKG

SEQ ID NO: 3296 - protein, 9 aa, Artificial Sequence
  Description of Artificial Sequence: Synthetic peptide
  XENP022855 vhCDR3
GGHLGPFDL

SEQ ID NO: 3297 - protein, 12 aa, Artificial Sequence
  Description of Artificial Sequence: Synthetic peptide
  XENP022855 vlCDR1
RASQSVGSSYLA

SEQ ID NO: 3298 - protein, 7 aa, Artificial Sequence
  Description of Artificial Sequence: Synthetic peptide
  XENP022855 vlCDR2
GASSRAT

SEQ ID NO: 3299 - protein, 9 aa, Artificial Sequence
  Description of Artificial Sequence: Synthetic peptide
  XENP022855 vlCDR3
QQYGSSPWT

SEQ ID NO: 3300 - protein, 214 aa, Artificial Sequence; identical to SEQ ID NO: 3140
  Description of Artificial Sequence: Synthetic polypeptide
  XENP022855 2E9_H1L1_Fab-[CTLA-4]_H3.23_L0.129_[CTLA-4]_scFv Light Chain

SEQ ID NO: 3301 - protein, 107 aa, Artificial Sequence; identical to SEQ ID NO: 3092
  Description of Artificial Sequence: Synthetic polypeptide
  VL of XENP022855

SEQ ID NO: 3302 - protein, 11 aa, Artificial Sequence
  Description of Artificial Sequence: Synthetic peptide
  XENP022855 vlCDR1
RASQSVSNDVA

SEQ ID NO: 3303 - protein, 7 aa, Artificial Sequence
  Description of Artificial Sequence: Synthetic peptide
  XENP022855 vlCDR2
YASNRYT

SEQ ID NO: 3304 - protein, 9 aa, Artificial Sequence
  Description of Artificial Sequence: Synthetic peptide
  XENP022855 vlCDR3
QQDYSSPYT

SEQ ID NO: 3305 - protein, 446 aa, Artificial Sequence; identical to SEQ ID NO: 3225
  Description of Artificial Sequence: Synthetic polypeptide
  XENP022993 1C11_H3L1_Fab-[CTLA-4]_H3.23_L0.129_scFv Fab-Fc Heavy Chain

SEQ ID NO: 3306 - protein, 117 aa, Artificial Sequence; identical to SEQ ID NO: 32
  Description of Artificial Sequence: Synthetic polypeptide
  VH of XENP022993

SEQ ID NO: 3307 - protein, 5 aa, Artificial Sequence
  Description of Artificial Sequence: Synthetic peptide
  XENP022993 vhCDR1
HYGMN

SEQ ID NO: 3308 - protein, 17 aa, Artificial Sequence
  Description of Artificial Sequence: Synthetic peptide
  XENP022993 vhCDR2
WINTYTGEPTYADGFTG

SEQ ID NO: 3309 - protein, 8 aa, Artificial Sequence
  Description of Artificial Sequence: Synthetic peptide
  XENP022993 vhCDR3
DYYGSSPY

SEQ ID NO: 3310 - protein, 477 aa, Artificial Sequence; identical to SEQ ID NO: 2394
  Description of Artificial Sequence: Synthetic polypeptide
  XENP022993 1C11_H3L1_Fab-[CTLA-4]_H3.23_L0.129_scFv scFv-Fc Heavy Chain

SEQ ID NO: 3311 - protein, 118 aa, Artificial Sequence; identical to SEQ ID NO: 2395
  Description of Artificial Sequence: Synthetic polypeptide
  VH of XENP022993

SEQ ID NO: 3312 - protein, 108 aa, Artificial Sequence; identical to SEQ ID NO: 2396
  Description of Artificial Sequence: Synthetic polypeptide
  VL of XENP022993

SEQ ID NO: 3313 - protein, 231 aa, Artificial Sequence; identical to SEQ ID NO: 2397
  Description of Artificial Sequence: Synthetic polypeptide
  Fc chain of XENP022993

SEQ ID NO: 3314 - protein, 5 aa, Artificial Sequence
  Description of Artificial Sequence: Synthetic peptide
  XENP022993 vhCDR1
SYTMH

SEQ ID NO: 3315 - protein, 17 aa, Artificial Sequence
  Description of Artificial Sequence: Synthetic peptide
  XENP022993 vhCDR2
FISYDGNYKYYADSVKG

SEQ ID NO: 3316 - protein, 9 aa, Artificial Sequence
  Description of Artificial Sequence: Synthetic peptide
  XENP022993 vhCDR3
GGHLGPFDL

SEQ ID NO: 3317 - protein, 12 aa, Artificial Sequence
  Description of Artificial Sequence: Synthetic peptide
  XENP022993 vlCDR1
RASQSVGSSYLA

SEQ ID NO: 3318 - protein, 7 aa, Artificial Sequence
  Description of Artificial Sequence: Synthetic peptide
  XENP022993 vlCDR2
GASSRAT

SEQ ID NO: 3319 - protein, 9 aa, Artificial Sequence
  Description of Artificial Sequence: Synthetic peptide
  XENP022993 vlCDR3
QQYGSSPWT

SEQ ID NO: 3320 - protein, 219 aa, Artificial Sequence; identical to SEQ ID NO: 16
  Description of Artificial Sequence: Synthetic polypeptide
  XENP022993 1C11_H3L1_Fab-[CTLA-4]_H3.23_L0.129_scFv Light Chain

SEQ ID NO: 3321 - protein, 112 aa, Artificial Sequence; identical to SEQ ID NO: 17
  Description of Artificial Sequence: Synthetic polypeptide
  VL of XENP022993

SEQ ID NO: 3322 - protein, 16 aa, Artificial Sequence
  Description of Artificial Sequence: Synthetic peptide
  XENP022993 vlCDR1
RSSQSIVHSNGNTYLE

SEQ ID NO: 3323 - protein, 7 aa, Artificial Sequence
  Description of Artificial Sequence: Synthetic peptide
  XENP022993 vlCDR2
KVSNRFS

SEQ ID NO: 3324 - protein, 9 aa, Artificial Sequence
  Description of Artificial Sequence: Synthetic peptide
  XENP022993 vlCDR3
FQGSHVPNT

SEQ ID NO: 3325 - protein, 446 aa, Artificial Sequence; identical to SEQ ID NO: 3225
  Description of Artificial Sequence: Synthetic polypeptide
  XENP022994 1C11_H3L2_Fab-[CTLA-4]_H3.23_L0.129_scFv Fab-Fc Heavy Chain

SEQ ID NO: 3326 - protein, 117 aa, Artificial Sequence; identical to SEQ ID NO: 32
  Description of Artificial Sequence: Synthetic polypeptide
  VH of XENP022994

SEQ ID NO: 3327 - protein, 5 aa, Artificial Sequence
  Description of Artificial Sequence: Synthetic peptide
  XENP022994 vhCDR1
HYGMN

SEQ ID NO: 3328 - protein, 17 aa, Artificial Sequence
  Description of Artificial Sequence: Synthetic peptide
  XENP022994 vhCDR2
WINTYTGEPTYADGFTG

SEQ ID NO: 3329 - protein, 8 aa, Artificial Sequence
  Description of Artificial Sequence: Synthetic peptide
  XENP022994 vhCDR3
DYYGSSPY

SEQ ID NO: 3330 - protein, 477 aa, Artificial Sequence; identical to SEQ ID NO: 2394
  Description of Artificial Sequence: Synthetic polypeptide
  XENP022994 1C11_H3L2_Fab-[CTLA-4]_H3.23_L0.129_scFv scFv-Fc Heavy Chain

SEQ ID NO: 3331 - protein, 118 aa, Artificial Sequence; identical to SEQ ID NO: 2395
  Description of Artificial Sequence: Synthetic polypeptide
  VH of XENP022994

SEQ ID NO: 3332 - protein, 108 aa, Artificial Sequence; identical to SEQ ID NO: 2396
  Description of Artificial Sequence: Synthetic polypeptide
  VL of XENP022994

SEQ ID NO: 3333 - protein, 231 aa, Artificial Sequence; identical to SEQ ID NO: 2397
  Description of Artificial Sequence: Synthetic polypeptide
  Fc chain of XENP022994

SEQ ID NO: 3334 - protein, 5 aa, Artificial Sequence
  Description of Artificial Sequence: Synthetic peptide
  XENP022994 vhCDR1
SYTMH

SEQ ID NO: 3335 - protein, 17 aa, Artificial Sequence
  Description of Artificial Sequence: Synthetic peptide
  XENP022994 vhCDR2
FISYDGNYKYYADSVKG

SEQ ID NO: 3336 - protein, 9 aa, Artificial Sequence
  Description of Artificial Sequence: Synthetic peptide
  XENP022994 vhCDR3
GGHLGPFDL

SEQ ID NO: 3337 - protein, 12 aa, Artificial Sequence
  Description of Artificial Sequence: Synthetic peptide
  XENP022994 vlCDR1
RASQSVGSSYLA

SEQ ID NO: 3338 - protein, 7 aa, Artificial Sequence
  Description of Artificial Sequence: Synthetic peptide
  XENP022994 vlCDR2
GASSRAT

SEQ ID NO: 3339 - protein, 9 aa, Artificial Sequence
  Description of Artificial Sequence: Synthetic peptide
  XENP022994 vlCDR3
QQYGSSPWT

SEQ ID NO: 3340 - protein, 219 aa, Artificial Sequence; identical to SEQ ID NO: 26
  Description of Artificial Sequence: Synthetic polypeptide
  XENP022994 1C11_H3L2_Fab-[CTLA-4]_H3.23_L0.129_scFv Light Chain

SEQ ID NO: 3341 - protein, 112 aa, Artificial Sequence; identical to SEQ ID NO: 27
  Description of Artificial Sequence: Synthetic polypeptide
  VL of XENP022994

SEQ ID NO: 3342 - protein, 16 aa, Artificial Sequence
  Description of Artificial Sequence: Synthetic peptide
  XENP022994 vlCDR1
RSSQSIVHSNGNTYLE

SEQ ID NO: 3343 - protein, 7 aa, Artificial Sequence
  Description of Artificial Sequence: Synthetic peptide
  XENP022994 vlCDR2
KVSNRFS

SEQ ID NO: 3344 - protein, 9 aa, Artificial Sequence
  Description of Artificial Sequence: Synthetic peptide
  XENP022994 vlCDR3
FQGSHVPNT

SEQ ID NO: 3345 - protein, 446 aa, Artificial Sequence
  Description of Artificial Sequence: Synthetic polypeptide
  XENP020850 1D12_H1L1_IgG1_PVA_/S267K Heavy Chain
QVQLVQSGAEVKKPGASVKVSCKASGYTFTSYTMHWVRQAPGQGLEWMGYLIPSSGYTDYNQKFQGRVTMTADKSTSTAYMELSSLRSEDTAVYYCARGDSVYFDYWGQGTLVTVSSASTKGPSVFPLAPSSKSTSGGTAALGCLVKDYFPEPVTVSWNSGALTSGVHTFPAVLQSSGLYSLSSVVTVPSSSLGTQTYICNVNHKPSNTKVDKKVEPKSCDKTHTCPPCPAPPVAGPSVFLFPPKPKDTLMISRTPEVTCVVVDVKHEDPEVKFNWYVDGVEVHNAKTKPREEQYNSTYRVVSVLTVLHQDWLNGKEYKCKVSNKALPAPIEKTISKAKGQPREPQVYTLPPSREEMTKNQVSLTCLVKGFYPSDIAVEWESNGQPENNYKTTPPVLDSDGSFFLYSKLTVDKSRWQQGNVFSCSVMHEALHNHYTQKSLSLSPGK

SEQ ID NO: 3346 - protein, 117 aa, Artificial Sequence
  Description of Artificial Sequence: Synthetic polypeptide
  VH of XENP020850
QVQLVQSGAEVKKPGASVKVSCKASGYTFTSYTMHWVRQAPGQGLEWMGYLIPSSGYTDYNQKFQGRVTMTADKSTSTAYMELSSLRSEDTAVYYCARGDSVYFDYWGQGTLVTVSS

SEQ ID NO: 3347 - protein, 5 aa, Artificial Sequence
  Description of Artificial Sequence: Synthetic peptide
  XENP020850 vhCDR1
SYTMH

SEQ ID NO: 3348 - protein, 17 aa, Artificial Sequence
  Description of Artificial Sequence: Synthetic peptide
  XENP020850 vhCDR2
YLIPSSGYTDYNQKFQG

SEQ ID NO: 3349 - protein, 8 aa, Artificial Sequence
  Description of Artificial Sequence: Synthetic peptide
  XENP020850 vhCDR3
GDSVYFDY

SEQ ID NO: 3350 - protein, 218 aa, Artificial Sequence
  Description of Artificial Sequence: Synthetic polypeptide
  XENP020850 1D12_H1L1_IgG1_PVA_/S267K Light Chain
DIVLTQSPATLSLSPGERATLSCRASESVEYYGTSLMQWYQQKPGQPPRLLIYAASNVESGVPARFSGSGSGTDFTLTISSLEPEDFAVYFCQQSRKVPWTFGGGTKVEIKRTVAAPSVFIFPPSDEQLKSGTASVVCLLNNFYPREAKVQWKVDNALQSGNSQESVTEQDSKDSTYSLSSTLTLSKADYEKHKVYACEVTHQGLSSPVTKSFNRGEC

SEQ ID NO: 3351 - protein, 111 aa, Artificial Sequence
  Description of Artificial Sequence: Synthetic polypeptide
  VL of XENP020850
DIVLTQSPATLSLSPGERATLSCRASESVEYYGTSLMQWYQQKPGQPPRLLIYAASNVESGVPARFSGSGSGTDFTLTISSLEPEDFAVYFCQQSRKVPWTFGGGTKVEIK

SEQ ID NO: 3352 - protein, 15 aa, Artificial Sequence
  Description of Artificial Sequence: Synthetic peptide
  XENP020850 vlCDR1
RASESVEYYGTSLMQ

SEQ ID NO: 3353 - protein, 7 aa, Artificial Sequence
  Description of Artificial Sequence: Synthetic peptide
  XENP020850 vlCDR2
AASNVES

SEQ ID NO: 3354 - protein, 9 aa, Artificial Sequence
  Description of Artificial Sequence: Synthetic peptide
  XENP020850 vlCDR3
QQSRKVPWT

SEQ ID NO: 3355 - protein, 446 aa, Artificial Sequence; identical to SEQ ID NO: 3345
  Description of Artificial Sequence: Synthetic polypeptide
  XENP020851 1D12_H1L2_IgG1_PVA_/S267K Heavy Chain

SEQ ID NO: 3356 - protein, 117 aa, Artificial Sequence; identical to SEQ ID NO: 3346
  Description of Artificial Sequence: Synthetic polypeptide
  VH of XENP020851

SEQ ID NO: 3357 - protein, 5 aa, Artificial Sequence
  Description of Artificial Sequence: Synthetic peptide
  XENP020851 vhCDR1
SYTMH

SEQ ID NO: 3358 - protein, 17 aa, Artificial Sequence
  Description of Artificial Sequence: Synthetic peptide
  XENP020851 vhCDR2
YLIPSSGYTDYNQKFQG

SEQ ID NO: 3359 - protein, 8 aa, Artificial Sequence
  Description of Artificial Sequence: Synthetic peptide
  XENP020851 vhCDR3
GDSVYFDY

SEQ ID NO: 3360 - protein, 218 aa, Artificial Sequence
  Description of Artificial Sequence: Synthetic polypeptide
  XENP020851 1D12_H1L2_IgG1_PVA_/S267K Light Chain
DIVLTQSPDSLAVSLGERATINCKASESVEYYGTSLMQWYQQKPGQPPKLLIYAASNVESGVPARFSGSGSGTDFTLTISSLQAEDVAVYFCQQSRKVPWTFGGGTKVEIKRTVAAPSVFIFPPSDEQLKSGTASVVCLLNNFYPREAKVQWKVDNALQSGNSQESVTEQDSKDSTYSLSSTLTLSKADYEKHKVYACEVTHQGLSSPVTKSFNRGEC

SEQ ID NO: 3361 - protein, 111 aa, Artificial Sequence
  Description of Artificial Sequence: Synthetic polypeptide
  VL of XENP020851
DIVLTQSPDSLAVSLGERATINCKASESVEYYGTSLMQWYQQKPGQPPKLLIYAASNVESGVPARFSGSGSGTDFTLTISSLQAEDVAVYFCQQSRKVPWTFGGGTKVEIK

SEQ ID NO: 3362 - protein, 15 aa, Artificial Sequence
  Description of Artificial Sequence: Synthetic peptide
  XENP020851 vlCDR1
KASESVEYYGTSLMQ

SEQ ID NO: 3363 - protein, 7 aa, Artificial Sequence
  Description of Artificial Sequence: Synthetic peptide
  XENP020851 vlCDR2
AASNVES

SEQ ID NO: 3364 - protein, 9 aa, Artificial Sequence
  Description of Artificial Sequence: Synthetic peptide
  XENP020851 vlCDR3
QQSRKVPWT

SEQ ID NO: 3365 - protein, 446 aa, Artificial Sequence
  Description of Artificial Sequence: Synthetic polypeptide
  XENP020853 3H3_H1L1_IgG1_PVA_/S267K Heavy Chain
QVTLKESGPVLVKPTETLTLTCTVSGFSLNGYGVNWVRQPPGKGLEWLAMIWGDGSTDYNSALKSRLTISKDNSKSQVVLTMTNMDPVDTATYYCARSYYTSDEDYWGQGTLVTVSSASTKGPSVFPLAPSSKSTSGGTAALGCLVKDYFPEPVTVSWNSGALTSGVHTFPAVLQSSGLYSLSSVVTVPSSSLGTQTYICNVNHKPSNTKVDKKVEPKSCDKTHTCPPCPAPPVAGPSVFLFPPKPKDTLMISRTPEVTCVVVDVKHEDPEVKFNWYVDGVEVHNAKTKPREEQYNSTYRVVSVLTVLHQDWLNGKEYKCKVSNKALPAPIEKTISKAKGQPREPQVYTLPPSREEMTKNQVSLTCLVKGFYPSDIAVEWESNGQPENNYKTTPPVLDSDGSFFLYSKLTVDKSRWQQGNVFSCSVMHEALHNHYTQKSLSLSPGK

SEQ ID NO: 3366 - protein, 117 aa, Artificial Sequence
  Description of Artificial Sequence: Synthetic polypeptide
  VH of XENP020853
QVTLKESGPVLVKPTETLTLTCTVSGFSLNGYGVNWVRQPPGKGLEWLAMIWGDGSTDYNSALKSRLTISKDNSKSQVVLTMTNMDPVDTATYYCARSYYTSDEDYWGQGTLVTVSS

SEQ ID NO: 3367 - protein, 5 aa, Artificial Sequence
  Description of Artificial Sequence: Synthetic peptide
  XENP020853 vhCDR1
GYGVN

SEQ ID NO: 3368 - protein, 16 aa, Artificial Sequence
  Description of Artificial Sequence: Synthetic peptide
  XENP020853 vhCDR2
MIWGDGSTDYNSALKS

SEQ ID NO: 3369 - protein, 9 aa, Artificial Sequence
  Description of Artificial Sequence: Synthetic peptide
  XENP020853 vhCDR3
SYYTSDEDY

SEQ ID NO: 3370 - protein, 219 aa, Artificial Sequence
  Description of Artificial Sequence: Synthetic polypeptide
  XENP020853 3H3_H1L1_IgG1_PVA_/S267K Light Chain
DIVLTQTPLSLPVTPGEPASISCRSSQSLLNSRTRKNYLAWYLQKPGQSPQLLIYWASTRESGVPDRFTGSGSGTDFTLKISRVEAEDVGVYYCKQSYSLRTFGGGTKVEIKRTVAAPSVFIFPPSDEQLKSGTASVVCLLNNFYPREAKVQWKVDNALQSGNSQESVTEQDSKDSTYSLSSTLTLSKADYEKHKVYACEVTHQGLSSPVTKSFNRGEC

SEQ ID NO: 3371 - protein, 112 aa, Artificial Sequence
  Description of Artificial Sequence: Synthetic polypeptide
  VL of XENP020853
DIVLTQTPLSLPVTPGEPASISCRSSQSLLNSRTRKNYLAWYLQKPGQSPQLLIYWASTRESGVPDRFTGSGSGTDFTLKISRVEAEDVGVYYCKQSYSLRTFGGGTKVEIK

SEQ ID NO: 3372 - protein, 17 aa, Artificial Sequence
  Description of Artificial Sequence: Synthetic peptide
  XENP020853 vlCDR1
RSSQSLLNSRTRKNYLA

SEQ ID NO: 3373 - protein, 7 aa, Artificial Sequence
  Description of Artificial Sequence: Synthetic peptide
  XENP020853 vlCDR2
WASTRES

SEQ ID NO: 3374 - protein, 8 aa, Artificial Sequence
  Description of Artificial Sequence: Synthetic peptide
  XENP020853 vlCDR3
KQSYSLRT

SEQ ID NO: 3375 - protein, 446 aa, Artificial Sequence; identical to SEQ ID NO: 3365
  Description of Artificial Sequence: Synthetic polypeptide
  XENP020854 3H3_H1L2_IgG1_PVA_/S267K Heavy Chain

SEQ ID NO: 3376 - protein, 117 aa, Artificial Sequence; identical to SEQ ID NO: 3366
  Description of Artificial Sequence: Synthetic polypeptide
  VH of XENP020854

SEQ ID NO: 3377 - protein, 5 aa, Artificial Sequence
  Description of Artificial Sequence: Synthetic peptide
  XENP020854 vhCDR1
GYGVN

SEQ ID NO: 3378 - protein, 16 aa, Artificial Sequence
  Description of Artificial Sequence: Synthetic peptide
  XENP020854 vhCDR2
MIWGDGSTDYNSALKS

SEQ ID NO: 3379 - protein, 9 aa, Artificial Sequence
  Description of Artificial Sequence: Synthetic peptide
  XENP020854 vhCDR3
SYYTSDEDY

SEQ ID NO: 3380 - protein, 219 aa, Artificial Sequence
  Description of Artificial Sequence: Synthetic polypeptide
  XENP020854 3H3_H1L2_IgG1_PVA_/S267K Light Chain
DIVLTQSPDSLAVSLGERATINCKSSQSLLNSRTRKNYLAWYQQKPGQSPKLLIYWASTRESGVPDRFTGSGSGTDFTLTISSLQAEDVAVYYCKQSYSLRTFGGGTKVEIKRTVAAPSVFIFPPSDEQLKSGTASVVCLLNNFYPREAKVQWKVDNALQSGNSQESVTEQDSKDSTYSLSSTLTLSKADYEKHKVYACEVTHQGLSSPVTKSFNRGEC

SEQ ID NO: 3381 - protein, 112 aa, Artificial Sequence
  Description of Artificial Sequence: Synthetic polypeptide
  VL of XENP020854
DIVLTQSPDSLAVSLGERATINCKSSQSLLNSRTRKNYLAWYQQKPGQSPKLLIYWASTRESGVPDRFTGSGSGTDFTLTISSLQAEDVAVYYCKQSYSLRTFGGGTKVEIK

SEQ ID NO: 3382 - protein, 17 aa, Artificial Sequence
  Description of Artificial Sequence: Synthetic peptide
  XENP020854 vlCDR1
KSSQSLLNSRTRKNYLA

SEQ ID NO: 3383 - protein, 7 aa, Artificial Sequence
  Description of Artificial Sequence: Synthetic peptide
  XENP020854 vlCDR2
WASTRES

SEQ ID NO: 3384 - protein, 8 aa, Artificial Sequence
  Description of Artificial Sequence: Synthetic peptide
  XENP020854 vlCDR3
KQSYSLRT

SEQ ID NO: 3385 - protein, 446 aa, Artificial Sequence
  Description of Artificial Sequence: Synthetic polypeptide
  XENP020855 3H3_H2L1_IgG1_PVA_/S267K Heavy Chain
QVTLKESGPVLVKPTETLTLTCTVSGFSLNGYGVNWVRQPPGKGLEWLAMIWGDGSTDYNSALKSRLTISKDNSKSQVVLTMTNMDPVDTATYYCARSYYTSDFDYWGQGTLVTVSSASTKGPSVFPLAPSSKSTSGGTAALGCLVKDYFPEPVTVSWNSGALTSGVHTFPAVLQSSGLYSLSSVVTVPSSSLGTQTYICNVNHKPSNTKVDKKVEPKSCDKTHTCPPCPAPPVAGPSVFLFPPKPKDTLMISRTPEVTCVVVDVKHEDPEVKFNWYVDGVEVHNAKTKPREEQYNSTYRVVSVLTVLHQDWLNGKEYKCKVSNKALPAPIEKTISKAKGQPREPQVYTLPPSREEMTKNQVSLTCLVKGFYPSDIAVEWESNGQPENNYKTTPPVLDSDGSFFLYSKLTVDKSRWQQGNVFSCSVMHEALHNHYTQKSLSLSPGK

SEQ ID NO: 3386 - protein, 117 aa, Artificial Sequence
  Description of Artificial Sequence: Synthetic polypeptide
  VH of XENP020855
QVTLKESGPVLVKPTETLTLTCTVSGFSLNGYGVNWVRQPPGKGLEWLAMIWGDGSTDYNSALKSRLTISKDNSKSQVVLTMTNMDPVDTATYYCARSYYTSDFDYWGQGTLVTVSS

SEQ ID NO: 3387 - protein, 5 aa, Artificial Sequence
  Description of Artificial Sequence: Synthetic peptide
  XENP020855 vhCDR1
GYGVN

SEQ ID NO: 3388 - protein, 16 aa, Artificial Sequence
  Description of Artificial Sequence: Synthetic peptide
  XENP020855 vhCDR2
MIWGDGSTDYNSALKS

SEQ ID NO: 3389 - protein, 9 aa, Artificial Sequence
  Description of Artificial Sequence: Synthetic peptide
  XENP020855 vhCDR3
SYYTSDFDY

SEQ ID NO: 3390 - protein, 219 aa, Artificial Sequence; identical to SEQ ID NO: 3370
  Description of Artificial Sequence: Synthetic polypeptide
  XENP020855 3H3_H2L1_IgG1_PVA_/S267K Light Chain

SEQ ID NO: 3391 - protein, 112 aa, Artificial Sequence; identical to SEQ ID NO: 3371
  Description of Artificial Sequence: Synthetic polypeptide
  VL of XENP020855

SEQ ID NO: 3392 - protein, 17 aa, Artificial Sequence
  Description of Artificial Sequence: Synthetic peptide
  XENP020855 vlCDR1
RSSQSLLNSRTRKNYLA

SEQ ID NO: 3393 - protein, 7 aa, Artificial Sequence
  Description of Artificial Sequence: Synthetic peptide
  XENP020855 vlCDR2
WASTRES

SEQ ID NO: 3394 - protein, 8 aa, Artificial Sequence
  Description of Artificial Sequence: Synthetic peptide
  XENP020855 vlCDR3
KQSYSLRT

SEQ ID NO: 3395 - protein, 446 aa, Artificial Sequence; identical to SEQ ID NO: 3385
  Description of Artificial Sequence: Synthetic polypeptide
  XENP020856 3H3_H2L2_IgG1_PVA_/S267K Heavy Chain

SEQ ID NO: 3396 - protein, 117 aa, Artificial Sequence; identical to SEQ ID NO: 3386
  Description of Artificial Sequence: Synthetic polypeptide
  VH of XENP020856

SEQ ID NO: 3397 - protein, 5 aa, Artificial Sequence
  Description of Artificial Sequence: Synthetic peptide
  XENP020856 vhCDR1
GYGVN

SEQ ID NO: 3398 - protein, 16 aa, Artificial Sequence
  Description of Artificial Sequence: Synthetic peptide
  XENP020856 vhCDR2
MIWGDGSTDYNSALKS

SEQ ID NO: 3399 - protein, 9 aa, Artificial Sequence
  Description of Artificial Sequence: Synthetic peptide
  XENP020856 vhCDR3
SYYTSDFDY

SEQ ID NO: 3400 - protein, 219 aa, Artificial Sequence; identical to SEQ ID NO: 3380
  Description of Artificial Sequence: Synthetic polypeptide
  XENP020856 3H3_H2L2_IgG1_PVA_/S267K Light Chain

SEQ ID NO: 3401 - protein, 112 aa, Artificial Sequence; identical to SEQ ID NO: 3381
  Description of Artificial Sequence: Synthetic polypeptide
  VL of XENP020856

SEQ ID NO: 3402 - protein, 17 aa, Artificial Sequence
  Description of Artificial Sequence: Synthetic peptide
  XENP020856 vlCDR1
KSSQSLLNSRTRKNYLA

SEQ ID NO: 3403 - protein, 7 aa, Artificial Sequence
  Description of Artificial Sequence: Synthetic peptide
  XENP020856 vlCDR2
WASTRES

SEQ ID NO: 3404 - protein, 8 aa, Artificial Sequence
  Description of Artificial Sequence: Synthetic peptide
  XENP020856 vlCDR3
KQSYSLRT

SEQ ID NO: 3405 - protein, 446 aa, Artificial Sequence
  Description of Artificial Sequence: Synthetic polypeptide
  XENP020857 3H3_H3L1_IgG1_PVA_/S267K Heavy Chain
EVQLLESGGGLVQPGGSLRLSCAVSGFSLNGYGVNWVRQAPGKGLEWVSMIWGDGSTDYNSAVKGRFTISKDNSKSTVYLQMNSLRAEDTAVYYCARSYYTSDEDYWGQGTLVTVSSASTKGPSVFPLAPSSKSTSGGTAALGCLVKDYFPEPVTVSWNSGALTSGVHTFPAVLQSSGLYSLSSVVTVPSSSLGTQTYICNVNHKPSNTKVDKKVEPKSCDKTHTCPPCPAPPVAGPSVFLFPPKPKDTLMISRTPEVTCVVVDVKHEDPEVKFNWYVDGVEVHNAKTKPREEQYNSTYRVVSVLTVLHQDWLNGKEYKCKVSNKALPAPIEKTISKAKGQPREPQVYTLPPSREEMTKNQVSLTCLVKGFYPSDIAVEWESNGQPENNYKTTPPVLDSDGSFFLYSKLTVDKSRWQQGNVFSCSVMHEALHNHYTQKSLSLSPGK

SEQ ID NO: 3406 - protein, 117 aa, Artificial Sequence
  Description of Artificial Sequence: Synthetic polypeptide
  VH of XENP020857
EVQLLESGGGLVQPGGSLRLSCAVSGFSLNGYGVNWVRQAPGKGLEWVSMIWGDGSTDYNSAVKGRFTISKDNSKSTVYLQMNSLRAEDTAVYYCARSYYTSDEDYWGQGTLVTVSS

SEQ ID NO: 3407 - protein, 5 aa, Artificial Sequence
  Description of Artificial Sequence: Synthetic peptide
  XENP020857 vhCDR1
GYGVN

SEQ ID NO: 3408 - protein, 16 aa, Artificial Sequence
  Description of Artificial Sequence: Synthetic peptide
  XENP020857 vhCDR2
MIWGDGSTDYNSAVKG

SEQ ID NO: 3409 - protein, 9 aa, Artificial Sequence
  Description of Artificial Sequence: Synthetic peptide
  XENP020857 vhCDR3
SYYTSDEDY

SEQ ID NO: 3410 - protein, 219 aa, Artificial Sequence; identical to SEQ ID NO: 3370
  Description of Artificial Sequence: Synthetic polypeptide
  XENP020857 3H3_H3L1_IgG1_PVA_/S267K Light Chain

SEQ ID NO: 3411 - protein, 112 aa, Artificial Sequence; identical to SEQ ID NO: 3371
  Description of Artificial Sequence: Synthetic polypeptide
  VL of XENP020857

SEQ ID NO: 3412 - protein, 17 aa, Artificial Sequence
  Description of Artificial Sequence: Synthetic peptide
  XENP020857 vlCDR1
RSSQSLLNSRTRKNYLA

SEQ ID NO: 3413 - protein, 7 aa, Artificial Sequence
  Description of Artificial Sequence: Synthetic peptide
  XENP020857 vlCDR2
WASTRES

SEQ ID NO: 3414 - protein, 8 aa, Artificial Sequence
  Description of Artificial Sequence: Synthetic peptide
  XENP020857 vlCDR3
KQSYSLRT

SEQ ID NO: 3415 - protein, 446 aa, Artificial Sequence; identical to SEQ ID NO: 3405
  Description of Artificial Sequence: Synthetic polypeptide
  XENP020858 3H3_H3L2_IgG1_PVA_/S267K Heavy Chain

SEQ ID NO: 3416 - protein, 117 aa, Artificial Sequence; identical to SEQ ID NO: 3406
  Description of Artificial Sequence: Synthetic polypeptide
  VH of XENP020858

SEQ ID NO: 3417 - protein, 5 aa, Artificial Sequence
  Description of Artificial Sequence: Synthetic peptide
  XENP020858 vhCDR1
GYGVN

SEQ ID NO: 3418 - protein, 16 aa, Artificial Sequence
  Description of Artificial Sequence: Synthetic peptide
  XENP020858 vhCDR2
MIWGDGSTDYNSAVKG

SEQ ID NO: 3419 - protein, 9 aa, Artificial Sequence
  Description of Artificial Sequence: Synthetic peptide
  XENP020858 vhCDR3
SYYTSDEDY

SEQ ID NO: 3420 - protein, 219 aa, Artificial Sequence; identical to SEQ ID NO: 3380
  Description of Artificial Sequence: Synthetic polypeptide
  XENP020858 3H3_H3L2_IgG1_PVA_/S267K Light Chain

SEQ ID NO: 3421 - protein, 112 aa, Artificial Sequence; identical to SEQ ID NO: 3381
  Description of Artificial Sequence: Synthetic polypeptide
  VL of XENP020858

SEQ ID NO: 3422 - protein, 17 aa, Artificial Sequence
  Description of Artificial Sequence: Synthetic peptide
  XENP020858 vlCDR1
KSSQSLLNSRTRKNYLA

SEQ ID NO: 3423 - protein, 7 aa, Artificial Sequence
  Description of Artificial Sequence: Synthetic peptide
  XENP020858 vlCDR2
WASTRES

SEQ ID NO: 3424 - protein, 8 aa, Artificial Sequence
  Description of Artificial Sequence: Synthetic peptide
  XENP020858 vlCDR3
KQSYSLRT

SEQ ID NO: 3425 - protein, 446 aa, Artificial Sequence
  Description of Artificial Sequence: Synthetic polypeptide
  XENP020859 3H3_H4L1_IgG1_PVA_/S267K Heavy Chain
QVQLQESGPGLVKPSETLSLTCTVSGFSLNGYGVNWVRQPPGKGLEWIGMIWGDGSTDYNPSLKSRVTISKDNSKSQVSLKLSSVTAADTAVYYCARSYYTSDEDYWGQGTLVTVSSASTKGPSVFPLAPSSKSTSGGTAALGCLVKDYFPEPVTVSWNSGALTSGVHTFPAVLQSSGLYSLSSVVTVPSSSLGTQTYICNVNHKPSNTKVDKKVEPKSCDKTHTCPPCPAPPVAGPSVFLFPPKPKDTLMISRTPEVTCVVVDVKHEDPEVKFNWYVDGVEVHNAKTKPREEQYNSTYRVVSVLTVLHQDWLNGKEYKCKVSNKALPAPIEKTISKAKGQPREPQVYTLPPSREEMTKNQVSLTCLVKGFYPSDIAVEWESNGQPENNYKTTPPVLDSDGSFFLYSKLTVDKSRWQQGNVFSCSVMHEALHNHYTQKSLSLSPGK

SEQ ID NO: 3426 - protein, 117 aa, Artificial Sequence
  Description of Artificial Sequence: Synthetic polypeptide
  VH of XENP020859
QVQLQESGPGLVKPSETLSLTCTVSGFSLNGYGVNWVRQPPGKGLEWIGMIWGDGSTDYNPSLKSRVTISKDNSKSQVSLKLSSVTAADTAVYYCARSYYTSDEDYWGQGTLVTVSS

SEQ ID NO: 3427 - protein, 5 aa, Artificial Sequence
  Description of Artificial Sequence: Synthetic peptide
  XENP020859 vhCDR1
GYGVN

SEQ ID NO: 3428 - protein, 16 aa, Artificial Sequence
  Description of Artificial Sequence: Synthetic peptide
  XENP020859 vhCDR2
MIWGDGSTDYNPSLKS

SEQ ID NO: 3429 - protein, 9 aa, Artificial Sequence
  Description of Artificial Sequence: Synthetic peptide
  XENP020859 vhCDR3
SYYTSDEDY

SEQ ID NO: 3430 - protein, 219 aa, Artificial Sequence; identical to SEQ ID NO: 3370
  Description of Artificial Sequence: Synthetic polypeptide
  XENP020859 3H3_H4L1_IgG1_PVA_/S267K Light Chain

SEQ ID NO: 3431 - protein, 112 aa, Artificial Sequence; identical to SEQ ID NO: 3371
  Description of Artificial Sequence: Synthetic polypeptide
  VL of XENP020859

SEQ ID NO: 3432 - protein, 17 aa, Artificial Sequence
  Description of Artificial Sequence: Synthetic peptide
  XENP020859 vlCDR1
RSSQSLLNSRTRKNYLA

SEQ ID NO: 3433 - protein, 7 aa, Artificial Sequence
  Description of Artificial Sequence: Synthetic peptide
  XENP020859 vlCDR2
WASTRES

SEQ ID NO: 3434 - protein, 8 aa, Artificial Sequence
  Description of Artificial Sequence: Synthetic peptide
  XENP020859 vlCDR3
KQSYSLRT

SEQ ID NO: 3435 - protein, 446 aa, Artificial Sequence; identical to SEQ ID NO: 3425
  Description of Artificial Sequence: Synthetic polypeptide
  XENP020860 3H3_H4L2_IgG1_PVA_/S267K Heavy Chain

SEQ ID NO: 3436 - protein, 117 aa, Artificial Sequence; identical to SEQ ID NO: 3426
  Description of Artificial Sequence: Synthetic polypeptide
  VH of XENP020860

SEQ ID NO: 3437 - protein, 5 aa, Artificial Sequence
  Description of Artificial Sequence: Synthetic peptide
  XENP020860 vhCDR1
GYGVN

SEQ ID NO: 3438 - protein, 16 aa, Artificial Sequence
  Description of Artificial Sequence: Synthetic peptide
  XENP020860 vhCDR2
MIWGDGSTDYNPSLKS

SEQ ID NO: 3439 - protein, 9 aa, Artificial Sequence
  Description of Artificial Sequence: Synthetic peptide
  XENP020860 vhCDR3
SYYTSDEDY

SEQ ID NO: 3440 - protein, 219 aa, Artificial Sequence; identical to SEQ ID NO: 3380
  Description of Artificial Sequence: Synthetic polypeptide
  XENP020860 3H3_H4L2_IgG1_PVA_/S267K Light Chain

SEQ ID NO: 3441 - protein, 112 aa, Artificial Sequence; identical to SEQ ID NO: 3381
  Description of Artificial Sequence: Synthetic polypeptide
  VL of XENP020860

SEQ ID NO: 3442 - protein, 17 aa, Artificial Sequence
  Description of Artificial Sequence: Synthetic peptide
  XENP020860 vlCDR1
KSSQSLLNSRTRKNYLA

SEQ ID NO: 3443 - protein, 7 aa, Artificial Sequence
  Description of Artificial Sequence: Synthetic peptide
  XENP020860 vlCDR2
WASTRES

SEQ ID NO: 3444 - protein, 8 aa, Artificial Sequence
  Description of Artificial Sequence: Synthetic peptide
  XENP020860 vlCDR3
KQSYSLRT

SEQ ID NO: 3445 - protein, 447 aa, Artificial Sequence
  Description of Artificial Sequence: Synthetic polypeptide
  XENP020861 7B11_H1L1_IgG1_PVA_/S267K Heavy Chain
QVQLVQSGAEVKKPGASVKVSCKVSGFSLTSYAVNWVRQAPGQGLEWMGVIWSGGSTDYNAKFQGRVTMTKDNSKSTVYMELSSLRSEDTAVYYCVSLYYRYDGFDYWGQGTLVTVSSASTKGPSVFPLAPSSKSTSGGTAALGCLVKDYFPEPVTVSWNSGALTSGVHTFPAVLQSSGLYSLSSVVTVPSSSLGTQTYICNVNHKPSNTKVDKKVEPKSCDKTHTCPPCPAPPVAGPSVFLFPPKPKDTLMISRTPEVTCVVVDVKHEDPEVKFNWYVDGVEVHNAKTKPREEQYNSTYRVVSVLTVLHQDWLNGKEYKCKVSNKALPAPIEKTISKAKGQPREPQVYTLPPSREEMTKNQVSLTCLVKGFYPSDIAVEWESNGQPENNYKTTPPVLDSDGSFFLYSKLTVDKSRWQQGNVFSCSVMHEALHNHYTQKSLSLSPGK

SEQ ID NO: 3446 - protein, 118 aa, Artificial Sequence
  Description of Artificial Sequence: Synthetic polypeptide
  VH of XENP020861
QVQLVQSGAEVKKPGASVKVSCKVSGFSLTSYAVNWVRQAPGQGLEWMGVIWSGGSTDYNAKFQGRVTMTKDNSKSTVYMELSSLRSEDTAVYYCVSLYYRYDGFDYWGQGTLVTVSS

SEQ ID NO: 3447 - protein, 5 aa, Artificial Sequence
  Description of Artificial Sequence: Synthetic peptide
  XENP020861 vhCDR1
SYAVN

SEQ ID NO: 3448 - protein, 16 aa, Artificial Sequence
  Description of Artificial Sequence: Synthetic peptide
  XENP020861 vhCDR2
VIWSGGSTDYNAKFQG

SEQ ID NO: 3449 - protein, 10 aa, Artificial Sequence
  Description of Artificial Sequence: Synthetic peptide
  XENP020861 vhCDR3
LYYRYDGFDY

SEQ ID NO: 3450 - protein, 214 aa, Artificial Sequence
  Description of Artificial Sequence: Synthetic polypeptide
  XENP020861 7B11_H1L1_IgG1_PVA_/S267K Light Chain
DIVLTQSPSSLSASVGDRVTITCRASQNVGTHVARYQQKPGKSPKALVYSASYRYSGVPDRFTGSGSGTDFTLTISSLQPEDFATYFCQQYNSYPLTFGGGTKVEIKRTVAAPSVFIFPPSDEQLKSGTASVVCLLNNFYPREAKVQWKVDNALQSGNSQESVTEQDSKDSTYSLSSTLTLSKADYEKHKVYACEVTHQGLSSPVTKSFNRGEC

SEQ ID NO: 3451 - protein, 107 aa, Artificial Sequence
  Description of Artificial Sequence: Synthetic polypeptide
  VL of XENP020861
DIVLTQSPSSLSASVGDRVTITCRASQNVGTHVARYQQKPGKSPKALVYSASYRYSGVPDRFTGSGSGTDFTLTISSLQPEDFATYFCQQYNSYPLTFGGGTKVEIK

SEQ ID NO: 3452 - protein, 11 aa, Artificial Sequence
  Description of Artificial Sequence: Synthetic peptide
  XENP020861 vlCDR1
RASQNVGTHVA

SEQ ID NO: 3453 - protein, 7 aa, Artificial Sequence
  Description of Artificial Sequence: Synthetic peptide
  XENP020861 vlCDR2
SASYRYS

SEQ ID NO: 3454 - protein, 9 aa, Artificial Sequence
  Description of Artificial Sequence: Synthetic peptide
  XENP020861 vlCDR3
QQYNSYPLT

SEQ ID NO: 3455 - protein, 447 aa, Artificial Sequence; identical to SEQ ID NO: 3445
  Description of Artificial Sequence: Synthetic polypeptide
  XENP020862 7B11_H1L2_IgG1_PVA_/S267K Heavy Chain

SEQ ID NO: 3456 - protein, 118 aa, Artificial Sequence; identical to SEQ ID NO: 3446
  Description of Artificial Sequence: Synthetic polypeptide
  VH of XENP020862

SEQ ID NO: 3457 - protein, 5 aa, Artificial Sequence
  Description of Artificial Sequence: Synthetic peptide
  XENP020862 vhCDR1
SYAVN

SEQ ID NO: 3458 - protein, 16 aa, Artificial Sequence
  Description of Artificial Sequence: Synthetic peptide
  XENP020862 vhCDR2
VIWSGGSTDYNAKFQG

SEQ ID NO: 3459 - protein, 10 aa, Artificial Sequence
  Description of Artificial Sequence: Synthetic peptide
  XENP020862 vhCDR3
LYYRYDGFDY

SEQ ID NO: 3460 - protein, 214 aa, Artificial Sequence
  Description of Artificial Sequence: Synthetic polypeptide
  XENP020862 7B11_H1L2_IgG1_PVA_/S267K Light Chain
DIVLTQSPDSLAVSLGERATINCKASQNVGTHVARYQQKPGQSPKALVYSASYRYSGVPDRFTGSGSGTDFTLTISSLQAEDVAVYFCQQYNSYPLTFGGGTKVEIKRTVAAPSVFIFPPSDEQLKSGTASVVCLLNNFYPREAKVQWKVDNALQSGNSQESVTEQDSKDSTYSLSSTLTLSKADYEKHKVYACEVTHQGLSSPVTKSFNRGEC

SEQ ID NO: 3461 - protein, 107 aa, Artificial Sequence
  Description of Artificial Sequence: Synthetic polypeptide
  VL of XENP020862
DIVLTQSPDSLAVSLGERATINCKASQNVGTHVARYQQKPGQSPKALVYSASYRYSGVPDRFTGSGSGTDFTLTISSLQAEDVAVYFCQQYNSYPLTFGGGTKVEIK

SEQ ID NO: 3462 - protein, 11 aa, Artificial Sequence
  Description of Artificial Sequence: Synthetic peptide
  XENP020862 vlCDR1
KASQNVGTHVA

SEQ ID NO: 3463 - protein, 7 aa, Artificial Sequence
  Description of Artificial Sequence: Synthetic peptide
  XENP020862 vlCDR2
SASYRYS

SEQ ID NO: 3464 - protein, 9 aa, Artificial Sequence
  Description of Artificial Sequence: Synthetic peptide
  XENP020862 vlCDR3
QQYNSYPLT

SEQ ID NO: 3465 - protein, 447 aa, Artificial Sequence
  Description of Artificial Sequence: Synthetic polypeptide
  XENP020863 7B11_H2L1_IgG1_PVA_/S267K Heavy Chain
EVQLVESGGGLVQPGGSLRLSCAVSGFSLTSYAVNWVRQAPGKGLEWVSVIWSGGSTDYNPSVKGRFTISKDNSKSTVYLQLNSLRAEDTAVYYCVSLYYRYDGFDYWGQGTLVTVSSASTKGPSVFPLAPSSKSTSGGTAALGCLVKDYFPEPVTVSWNSGALTSGVHTFPAVLQSSGLYSLSSVVTVPSSSLGTQTYICNVNHKPSNTKVDKKVEPKSCDKTHTCPPCPAPPVAGPSVFLFPPKPKDTLMISRTPEVTCVVVDVKHEDPEVKFNWYVDGVEVHNAKTKPREEQYNSTYRVVSVLTVLHQDWLNGKEYKCKVSNKALPAPIEKTISKAKGQPREPQVYTLPPSREEMTKNQVSLTCLVKGFYPSDIAVEWESNGQPENNYKTTPPVLDSDGSFFLYSKLTVDKSRWQQGNVFSCSVMHEALHNHYTQKSLSLSPGK

SEQ ID NO: 3466 - protein, 118 aa, Artificial Sequence
  Description of Artificial Sequence: Synthetic polypeptide
  VH of XENP020863
EVQLVESGGGLVQPGGSLRLSCAVSGFSLTSYAVNWVRQAPGKGLEWVSVIWSGGSTDYNPSVKGRFTISKDNSKSTVYLQLNSLRAEDTAVYYCVSLYYRYDGFDYWGQGTLVTVSS

SEQ ID NO: 3467 - protein, 5 aa, Artificial Sequence
  Description of Artificial Sequence: Synthetic peptide
  XENP020863 vhCDR1
SYAVN

SEQ ID NO: 3468 - protein, 16 aa, Artificial Sequence
  Description of Artificial Sequence: Synthetic peptide
  XENP020863 vhCDR2
VIWSGGSTDYNPSVKG

SEQ ID NO: 3469 - protein, 10 aa, Artificial Sequence
  Description of Artificial Sequence: Synthetic peptide
  XENP020863 vhCDR3
LYYRYDGFDY

SEQ ID NO: 3470 - protein, 214 aa, Artificial Sequence; identical to SEQ ID NO: 3450
  Description of Artificial Sequence: Synthetic polypeptide
  XENP020863 7B11_H2L1_IgG1_PVA_/S267K Light Chain

SEQ ID NO: 3471 - protein, 107 aa, Artificial Sequence; identical to SEQ ID NO: 3451
  Description of Artificial Sequence: Synthetic polypeptide
  VL of XENP020863

SEQ ID NO: 3472 - protein, 11 aa, Artificial Sequence
  Description of Artificial Sequence: Synthetic peptide
  XENP020863 vlCDR1
RASQNVGTHVA

SEQ ID NO: 3473 - protein, 7 aa, Artificial Sequence
  Description of Artificial Sequence: Synthetic peptide
  XENP020863 vlCDR2
SASYRYS

SEQ ID NO: 3474 - protein, 9 aa, Artificial Sequence
  Description of Artificial Sequence: Synthetic peptide
  XENP020863 vlCDR3
QQYNSYPLT

SEQ ID NO: 3475 - protein, 447 aa, Artificial Sequence; identical to SEQ ID NO: 3465
  Description of Artificial Sequence: Synthetic polypeptide
  XENP020864 7B11_H2L2_IgG1_PVA_/S267K Heavy Chain

SEQ ID NO: 3476 - protein, 118 aa, Artificial Sequence; identical to SEQ ID NO: 3466
  Description of Artificial Sequence: Synthetic polypeptide
  VH of XENP020864

SEQ ID NO: 3477 - protein, 5 aa, Artificial Sequence
  Description of Artificial Sequence: Synthetic peptide
  XENP020864 vhCDR1
SYAVN

SEQ ID NO: 3478 - protein, 16 aa, Artificial Sequence
  Description of Artificial Sequence: Synthetic peptide
  XENP020864 vhCDR2
VIWSGGSTDYNPSVKG

SEQ ID NO: 3479 - protein, 10 aa, Artificial Sequence
  Description of Artificial Sequence: Synthetic peptide
  XENP020864 vhCDR3
LYYRYDGFDY

SEQ ID NO: 3480 - protein, 214 aa, Artificial Sequence; identical to SEQ ID NO: 3460
  Description of Artificial Sequence: Synthetic polypeptide
  XENP020864 7B11_H2L2_IgG1_PVA_/S267K Light Chain

SEQ ID NO: 3481 - protein, 107 aa, Artificial Sequence; identical to SEQ ID NO: 3461
  Description of Artificial Sequence: Synthetic polypeptide
  VL of XENP020864

SEQ ID NO: 3482 - protein, 11 aa, Artificial Sequence
  Description of Artificial Sequence: Synthetic peptide
  XENP020864 vlCDR1
KASQNVGTHVA

SEQ ID NO: 3483 - protein, 7 aa, Artificial Sequence
  Description of Artificial Sequence: Synthetic peptide
  XENP020864 vlCDR2
SASYRYS

SEQ ID NO: 3484 - protein, 9 aa, Artificial Sequence
  Description of Artificial Sequence: Synthetic peptide
  XENP020864 vlCDR3
QQYNSYPLT

SEQ ID NO: 3485 - protein, 446 aa, Artificial Sequence
  Description of Artificial Sequence: Synthetic polypeptide
  XENP020865 7C2_H1L1_IgG1_PVA_/S267K Heavy Chain
EVQVLESGGGLVQPGGSLRLSCAASGFTFSRYAVSWVRQAPGKRLEWVSSISSGGSTYYPDSVKGRFTISRDNSKNTLYLQLNSLRAEDTAVYYCARGDYEGYFDYWGQGTLVTVSSASTKGPSVFPLAPSSKSTSGGTAALGCLVKDYFPEPVTVSWNSGALTSGVHTFPAVLQSSGLYSLSSVVTVPSSSLGTQTYICNVNHKPSNTKVDKKVEPKSCDKTHTCPPCPAPPVAGPSVFLFPPKPKDTLMISRTPEVTCVVVDVKHEDPEVKFNWYVDGVEVHNAKTKPREEQYNSTYRVVSVLTVLHQDWLNGKEYKCKVSNKALPAPIEKTISKAKGQPREPQVYTLPPSREEMTKNQVSLTCLVKGFYPSDIAVEWESNGQPENNYKTTPPVLDSDGSFFLYSKLTVDKSRWQQGNVFSCSVMHEALHNHYTQKSLSLSPGK

SEQ ID NO: 3486 - protein, 117 aa, Artificial Sequence
  Description of Artificial Sequence: Synthetic polypeptide
  VH of XENP020865
EVQVLESGGGLVQPGGSLRLSCAASGFTFSRYAVSWVRQAPGKRLEWVSSISSGGSTYYPDSVKGRFTISRDNSKNTLYLQLNSLRAEDTAVYYCARGDYEGYFDYWGQGTLVTVSS

SEQ ID NO: 3487 - protein, 5 aa, Artificial Sequence
  Description of Artificial Sequence: Synthetic peptide
  XENP020865 vhCDR1
RYAVS

SEQ ID NO: 3488 - protein, 16 aa, Artificial Sequence
  Description of Artificial Sequence: Synthetic peptide
  XENP020865 vhCDR2
SISSGGSTYYPDSVKG

SEQ ID NO: 3489 - protein, 9 aa, Artificial Sequence
  Description of Artificial Sequence: Synthetic peptide
  XENP020865 vhCDR3
GDYEGYFDY

SEQ ID NO: 3490 - protein, 220 aa, Artificial Sequence
  Description of Artificial Sequence: Synthetic polypeptide
  XENP020865 7C2_H1L1_IgG1_PVA_/S267K Light Chain
DIVLTQSPDSLAVSLGERATINCKSSQSLLNSINQKNYLAGYQQKPGQSPKLLVYFASTRESGVPDRFIGSGSGTDFTLTISSLQAEDVAVYFCQQHYSTPLTFGAGTKLEIKRTVAAPSVFIFPPSDEQLKSGTASVVCLLNNFYPREAKVQWKVDNALQSGNSQESVTEQDSKDSTYSLSSTLTLSKADYEKHKVYACEVTHQGLSSPVTKSFNRGEC

SEQ ID NO: 3491 - protein, 113 aa, Artificial Sequence
  Description of Artificial Sequence: Synthetic polypeptide
  VL of XENP020865
DIVLTQSPDSLAVSLGERATINCKSSQSLLNSINQKNYLAGYQQKPGQSPKLLVYFASTRESGVPDRFIGSGSGTDFTLTISSLQAEDVAVYFCQQHYSTPLTFGAGTKLEIK

SEQ ID NO: 3492 - protein, 17 aa, Artificial Sequence
  Description of Artificial Sequence: Synthetic peptide
  XENP020865 vlCDR1
KSSQSLLNSINQKNYLA

SEQ ID NO: 3493 - protein, 7 aa, Artificial Sequence
  Description of Artificial Sequence: Synthetic peptide
  XENP020865 vlCDR2
FASTRES

SEQ ID NO: 3494 - protein, 9 aa, Artificial Sequence
  Description of Artificial Sequence: Synthetic peptide
  XENP020865 vlCDR3
QQHYSTPLT

SEQ ID NO: 3495 - protein, 446 aa, Artificial Sequence; identical to SEQ ID NO: 3365
  Description of Artificial Sequence: Synthetic polypeptide
  XENP021188 3H3_H1_L1.1_IgG1_PVA_/S267K Heavy Chain

SEQ ID NO: 3496 - protein, 117 aa, Artificial Sequence; identical to SEQ ID NO: 3366
  Description of Artificial Sequence: Synthetic polypeptide
  VH of XENP021188

SEQ ID NO: 3497 - protein, 5 aa, Artificial Sequence
  Description of Artificial Sequence: Synthetic peptide
  XENP021188 vhCDR1
GYGVN

SEQ ID NO: 3498 - protein, 16 aa, Artificial Sequence
  Description of Artificial Sequence: Synthetic peptide
  XENP021188 vhCDR2
MIWGDGSTDYNSALKS

SEQ ID NO: 3499 - protein, 9 aa, Artificial Sequence
  Description of Artificial Sequence: Synthetic peptide
  XENP021188 vhCDR3
SYYTSDEDY

SEQ ID NO: 3500 - protein, 219 aa, Artificial Sequence
  Description of Artificial Sequence: Synthetic polypeptide
  XENP021188 3H3_H1_L1.1_IgG1_PVA_/S267K Light Chain
DIVMTQTPLSLPVTPGEPASISCRSSQSLLNSRTRKNYLAWYLQKPGQSPQLLIYWASTRESGVPDRFTGSGSGTDFTLKISRVEAEDVGVYYCKQSYSLRTFGGGTKVEIKRTVAAPSVFIFPPSDEQLKSGTASVVCLLNNFYPREAKVQWKVDNALQSGNSQESVTEQDSKDSTYSLSSTLTLSKADYEKHKVYACEVTHQGLSSPVTKSFNRGEC

SEQ ID NO: 3501 - protein, 112 aa, Artificial Sequence
  Description of Artificial Sequence: Synthetic polypeptide
  VL of XENP021188
DIVMTQTPLSLPVTPGEPASISCRSSQSLLNSRTRKNYLAWYLQKPGQSPQLLIYWASTRESGVPDRFTGSGSGTDFTLKISRVEAEDVGVYYCKQSYSLRTFGGGTKVEIK

SEQ ID NO: 3502 - protein, 17 aa, Artificial Sequence
  Description of Artificial Sequence: Synthetic peptide
  XENP021188 vlCDR1
RSSQSLLNSRTRKNYLA

SEQ ID NO: 3503 - protein, 7 aa, Artificial Sequence
  Description of Artificial Sequence: Synthetic peptide
  XENP021188 vlCDR2
WASTRES

SEQ ID NO: 3504 - protein, 8 aa, Artificial Sequence
  Description of Artificial Sequence: Synthetic peptide
  XENP021188 vlCDR3
KQSYSLRT

SEQ ID NO: 3505 - protein, 446 aa, Artificial Sequence; identical to SEQ ID NO: 3365
  Description of Artificial Sequence: Synthetic polypeptide
  XENP021189 3H3_H1_L2.1_IgG1_PVA_/S267K Heavy Chain

SEQ ID NO: 3506 - protein, 117 aa, Artificial Sequence; identical to SEQ ID NO: 3366
  Description of Artificial Sequence: Synthetic polypeptide
  VH of XENP021189

SEQ ID NO: 3507 - protein, 5 aa, Artificial Sequence
  Description of Artificial Sequence: Synthetic peptide
  XENP021189 vhCDR1
GYGVN

SEQ ID NO: 3508 - protein, 16 aa, Artificial Sequence
  Description of Artificial Sequence: Synthetic peptide
  XENP021189 vhCDR2
MIWGDGSTDYNSALKS

SEQ ID NO: 3509 - protein, 9 aa, Artificial Sequence
  Description of Artificial Sequence: Synthetic peptide
  XENP021189 vhCDR3
SYYTSDEDY

SEQ ID NO: 3510 - protein, 219 aa, Artificial Sequence
  Description of Artificial Sequence: Synthetic polypeptide
  XENP021189 3H3_H1_L2.1_IgG1_PVA_/S267K Light Chain
DIVMTQSPDSLAVSLGERATINCKSSQSLLNSRTRKNYLAWYQQKPGQSPKLLIYWASTRESGVPDRFTGSGSGTDFTLTISSLQAEDVAVYYCKQSYSLRTFGGGTKVEIKRTVAAPSVFIFPPSDEQLKSGTASVVCLLNNFYPREAKVQWKVDNALQSGNSQESVTEQDSKDSTYSLSSTLTLSKADYEKHKVYACEVTHQGLSSPVTKSFNRGEC

SEQ ID NO: 3511 - protein, 112 aa, Artificial Sequence
  Description of Artificial Sequence: Synthetic polypeptide
  VL of XENP021189
DIVMTQSPDSLAVSLGERATINCKSSQSLLNSRTRKNYLAWYQQKPGQSPKLLIYWASTRESGVPDRFTGSGSGTDFTLTISSLQAEDVAVYYCKQSYSLRTFGGGTKVEIK

SEQ ID NO: 3512 - protein, 17 aa, Artificial Sequence
  Description of Artificial Sequence: Synthetic peptide
  XENP021189 vlCDR1
KSSQSLLNSRTRKNYLA

SEQ ID NO: 3513 - protein, 7 aa, Artificial Sequence
  Description of Artificial Sequence: Synthetic peptide
  XENP021189 vlCDR2
WASTRES

SEQ ID NO: 3514 - protein, 8 aa, Artificial Sequence
  Description of Artificial Sequence: Synthetic peptide
  XENP021189 vlCDR3
KQSYSLRT

SEQ ID NO: 3515 - protein, 446 aa, Artificial Sequence; identical to SEQ ID NO: 3385
  Description of Artificial Sequence: Synthetic polypeptide
  XENP021190 3H3_H2_L1.1_IgG1_PVA_/S267K Heavy Chain

SEQ ID NO: 3516 - protein, 117 aa, Artificial Sequence; identical to SEQ ID NO: 3386
  Description of Artificial Sequence: Synthetic polypeptide
  VH of XENP021190

SEQ ID NO: 3517 - protein, 5 aa, Artificial Sequence
  Description of Artificial Sequence: Synthetic peptide
  XENP021190 vhCDR1
GYGVN

SEQ ID NO: 3518 - protein, 16 aa, Artificial Sequence
  Description of Artificial Sequence: Synthetic peptide
  XENP021190 vhCDR2
MIWGDGSTDYNSALKS

SEQ ID NO: 3519 - protein, 9 aa, Artificial Sequence
  Description of Artificial Sequence: Synthetic peptide
  XENP021190 vhCDR3
SYYTSDFDY

SEQ ID NO: 3520 - protein, 219 aa, Artificial Sequence; identical to SEQ ID NO: 3500
  Description of Artificial Sequence: Synthetic polypeptide
  XENP021190 3H3_H2_L1.1_IgG1_PVA_/S267K Light Chain

SEQ ID NO: 3521 - protein, 112 aa, Artificial Sequence; identical to SEQ ID NO: 3501
  Description of Artificial Sequence: Synthetic polypeptide
  VL of XENP021190

SEQ ID NO: 3522 - protein, 17 aa, Artificial Sequence
  Description of Artificial Sequence: Synthetic peptide
  XENP021190 vlCDR1
RSSQSLLNSRTRKNYLA

SEQ ID NO: 3523 - protein, 7 aa, Artificial Sequence
  Description of Artificial Sequence: Synthetic peptide
  XENP021190 vlCDR2
WASTRES

SEQ ID NO: 3524 - protein, 8 aa, Artificial Sequence
  Description of Artificial Sequence: Synthetic peptide
  XENP021190 vlCDR3
KQSYSLRT

SEQ ID NO: 3525 - protein, 446 aa, Artificial Sequence; identical to SEQ ID NO: 3385
  Description of Artificial Sequence: Synthetic polypeptide
  XENP021191 3H3_H2_L2.1_IgG1_PVA_/S267K Heavy Chain

SEQ ID NO: 3526 - protein, 117 aa, Artificial Sequence; identical to SEQ ID NO: 3386
  Description of Artificial Sequence: Synthetic polypeptide
  VH of XENP021191

SEQ ID NO: 3527 - protein, 5 aa, Artificial Sequence
  Description of Artificial Sequence: Synthetic peptide
  XENP021191 vhCDR1
GYGVN

SEQ ID NO: 3528 - protein, 16 aa, Artificial Sequence
  Description of Artificial Sequence: Synthetic peptide
  XENP021191 vhCDR2
MIWGDGSTDYNSALKS

SEQ ID NO: 3529 - protein, 9 aa, Artificial Sequence
  Description of Artificial Sequence: Synthetic peptide
  XENP021191 vhCDR3
SYYTSDFDY

SEQ ID NO: 3530 - protein, 219 aa, Artificial Sequence; identical to SEQ ID NO: 3510
  Description of Artificial Sequence: Synthetic polypeptide
  XENP021191 3H3_H2_L2.1_IgG1_PVA_/S267K Light Chain

SEQ ID NO: 3531 - protein, 112 aa, Artificial Sequence; identical to SEQ ID NO: 3511
  Description of Artificial Sequence: Synthetic polypeptide
  VL of XENP021191

SEQ ID NO: 3532 - protein, 17 aa, Artificial Sequence
  Description of Artificial Sequence: Synthetic peptide
  XENP021191 vlCDR1
KSSQSLLNSRTRKNYLA

SEQ ID NO: 3533 - protein, 7 aa, Artificial Sequence
  Description of Artificial Sequence: Synthetic peptide
  XENP021191 vlCDR2
WASTRES

SEQ ID NO: 3534 - protein, 8 aa, Artificial Sequence
  Description of Artificial Sequence: Synthetic peptide
  XENP021191 vlCDR3
KQSYSLRT

SEQ ID NO: 3535 - protein, 446 aa, Artificial Sequence; identical to SEQ ID NO: 3405
  Description of Artificial Sequence: Synthetic polypeptide
  XENP021192 3H3_H3_L1.1_IgG1_PVA_/S267K Heavy Chain

SEQ ID NO: 3536 - protein, 117 aa, Artificial Sequence; identical to SEQ ID NO: 3406
  Description of Artificial Sequence: Synthetic polypeptide
  VH of XENP021192

SEQ ID NO: 3537 - protein, 5 aa, Artificial Sequence
  Description of Artificial Sequence: Synthetic peptide
  XENP021192 vhCDR1
GYGVN

SEQ ID NO: 3538 - protein, 16 aa, Artificial Sequence
  Description of Artificial Sequence: Synthetic peptide
  XENP021192 vhCDR2
MIWGDGSTDYNSAVKG

SEQ ID NO: 3539 - protein, 9 aa, Artificial Sequence
  Description of Artificial Sequence: Synthetic peptide
  XENP021192 vhCDR3
SYYTSDEDY

SEQ ID NO: 3540 - protein, 219 aa, Artificial Sequence; identical to SEQ ID NO: 3500
  Description of Artificial Sequence: Synthetic polypeptide
  XENP021192 3H3_H3_L1.1_IgG1_PVA_/S267K Light Chain

SEQ ID NO: 3541 - protein, 112 aa, Artificial Sequence; identical to SEQ ID NO: 3501
  Description of Artificial Sequence: Synthetic polypeptide
  VL of XENP021192

SEQ ID NO: 3542 - protein, 17 aa, Artificial Sequence
  Description of Artificial Sequence: Synthetic peptide
  XENP021192 vlCDR1
RSSQSLLNSRTRKNYLA

SEQ ID NO: 3543 - protein, 7 aa, Artificial Sequence
  Description of Artificial Sequence: Synthetic peptide
  XENP021192 vlCDR2
WASTRES

SEQ ID NO: 3544 - protein, 8 aa, Artificial Sequence
  Description of Artificial Sequence: Synthetic peptide
  XENP021192 vlCDR3
KQSYSLRT

SEQ ID NO: 3545 - protein, 446 aa, Artificial Sequence; identical to SEQ ID NO: 3405
  Description of Artificial Sequence: Synthetic polypeptide
  XENP021193 3H3_H3_L2.1_IgG1_PVA_/S267K Heavy Chain

SEQ ID NO: 3546 - protein, 117 aa, Artificial Sequence; identical to SEQ ID NO: 3406
  Description of Artificial Sequence: Synthetic polypeptide
  VH of XENP021193

SEQ ID NO: 3547 - protein, 5 aa, Artificial Sequence
  Description of Artificial Sequence: Synthetic peptide
  XENP021193 vhCDR1
GYGVN

SEQ ID NO: 3548 - protein, 16 aa, Artificial Sequence
  Description of Artificial Sequence: Synthetic peptide
  XENP021193 vhCDR2
MIWGDGSTDYNSAVKG

SEQ ID NO: 3549 - protein, 9 aa, Artificial Sequence
  Description of Artificial Sequence: Synthetic peptide
  XENP021193 vhCDR3
SYYTSDEDY

SEQ ID NO: 3550 - protein, 219 aa, Artificial Sequence; identical to SEQ ID NO: 3510
  Description of Artificial Sequence: Synthetic polypeptide
  XENP021193 3H3_H3_L2.1_IgG1_PVA_/S267K Light Chain

SEQ ID NO: 3551 - protein, 112 aa, Artificial Sequence; identical to SEQ ID NO: 3511
  Description of Artificial Sequence: Synthetic polypeptide
  VL of XENP021193

SEQ ID NO: 3552 - protein, 17 aa, Artificial Sequence
  Description of Artificial Sequence: Synthetic peptide
  XENP021193 vlCDR1
KSSQSLLNSRTRKNYLA

SEQ ID NO: 3553 - protein, 7 aa, Artificial Sequence
  Description of Artificial Sequence: Synthetic peptide
  XENP021193 vlCDR2
WASTRES

SEQ ID NO: 3554 - protein, 8 aa, Artificial Sequence
  Description of Artificial Sequence: Synthetic peptide
  XENP021193 vlCDR3
KQSYSLRT

SEQ ID NO: 3555 - protein, 446 aa, Artificial Sequence; identical to SEQ ID NO: 3425
  Description of Artificial Sequence: Synthetic polypeptide
  XENP021194 3H3_H4_L1.1_IgG1_PVA_/S267K Heavy Chain

SEQ ID NO: 3556 - protein, 117 aa, Artificial Sequence; identical to SEQ ID NO: 3426
  Description of Artificial Sequence: Synthetic polypeptide
  VH of XENP021194

SEQ ID NO: 3557 - protein, 5 aa, Artificial Sequence
  Description of Artificial Sequence: Synthetic peptide
  XENP021194 vhCDR1
GYGVN

SEQ ID NO: 3558 - protein, 16 aa, Artificial Sequence
  Description of Artificial Sequence: Synthetic peptide
  XENP021194 vhCDR2
MIWGDGSTDYNPSLKS

SEQ ID NO: 3559 - protein, 9 aa, Artificial Sequence
  Description of Artificial Sequence: Synthetic peptide
  XENP021194 vhCDR3
SYYTSDEDY

SEQ ID NO: 3560 - protein, 219 aa, Artificial Sequence; identical to SEQ ID NO: 3500
  Description of Artificial Sequence: Synthetic polypeptide
  XENP021194 3H3_H4_L1.1_IgG1_PVA_/S267K Light Chain

SEQ ID NO: 3561 - protein, 112 aa, Artificial Sequence; identical to SEQ ID NO: 3501
  Description of Artificial Sequence: Synthetic polypeptide
  VL of XENP021194

SEQ ID NO: 3562 - protein, 17 aa, Artificial Sequence
  Description of Artificial Sequence: Synthetic peptide
  XENP021194 vlCDR1
RSSQSLLNSRTRKNYLA

SEQ ID NO: 3563 - protein, 7 aa, Artificial Sequence
  Description of Artificial Sequence: Synthetic peptide
  XENP021194 vlCDR2
WASTRES

SEQ ID NO: 3564 - protein, 8 aa, Artificial Sequence
  Description of Artificial Sequence: Synthetic peptide
  XENP021194 vlCDR3
KQSYSLRT

SEQ ID NO: 3565 - protein, 446 aa, Artificial Sequence; identical to SEQ ID NO: 3425
  Description of Artificial Sequence: Synthetic polypeptide
  XENP021195 3H3_H4_L2.1_IgG1_PVA_/S267K Heavy Chain

SEQ ID NO: 3566 - protein, 117 aa, Artificial Sequence; identical to SEQ ID NO: 3426
  Description of Artificial Sequence: Synthetic polypeptide
  VH of XENP021195

SEQ ID NO: 3567 - protein, 5 aa, Artificial Sequence
  Description of Artificial Sequence: Synthetic peptide
  XENP021195 vhCDR1
GYGVN

SEQ ID NO: 3568 - protein, 16 aa, Artificial Sequence
  Description of Artificial Sequence: Synthetic peptide
  XENP021195 vhCDR2
MIWGDGSTDYNPSLKS

SEQ ID NO: 3569 - protein, 9 aa, Artificial Sequence
  Description of Artificial Sequence: Synthetic peptide
  XENP021195 vhCDR3
SYYTSDEDY

SEQ ID NO: 3570 - protein, 219 aa, Artificial Sequence; identical to SEQ ID NO: 3510
  Description of Artificial Sequence: Synthetic polypeptide
  XENP021195 3H3_H4_L2.1_IgG1_PVA_/S267K Light Chain

SEQ ID NO: 3571 - protein, 112 aa, Artificial Sequence; identical to SEQ ID NO: 3511
  Description of Artificial Sequence: Synthetic polypeptide
  VL of XENP021195

SEQ ID NO: 3572 - protein, 17 aa, Artificial Sequence
  Description of Artificial Sequence: Synthetic peptide
  XENP021195 vlCDR1
KSSQSLLNSRTRKNYLA

SEQ ID NO: 3573 - protein, 7 aa, Artificial Sequence
  Description of Artificial Sequence: Synthetic peptide
  XENP021195 vlCDR2
WASTRES

SEQ ID NO: 3574 - protein, 8 aa, Artificial Sequence
  Description of Artificial Sequence: Synthetic peptide
  XENP021195 vlCDR3
KQSYSLRT

SEQ ID NO: 3575 - protein, 447 aa, Artificial Sequence; identical to SEQ ID NO: 3445
  Description of Artificial Sequence: Synthetic polypeptide
  XENP021196 7B11_H1_L1.1_IgG1_PVA_/S267K Heavy Chain

SEQ ID NO: 3576 - protein, 118 aa, Artificial Sequence; identical to SEQ ID NO: 3446
  Description of Artificial Sequence: Synthetic polypeptide
  VH of XENP021196

SEQ ID NO: 3577 - protein, 5 aa, Artificial Sequence
  Description of Artificial Sequence: Synthetic peptide
  XENP021196 vhCDR1
SYAVN

SEQ ID NO: 3578 - protein, 16 aa, Artificial Sequence
  Description of Artificial Sequence: Synthetic peptide
  XENP021196 vhCDR2
VIWSGGSTDYNAKFQG

SEQ ID NO: 3579 - protein, 10 aa, Artificial Sequence
  Description of Artificial Sequence: Synthetic peptide
  XENP021196 vhCDR3
LYYRYDGFDY

SEQ ID NO: 3580 - protein, 214 aa, Artificial Sequence
  Description of Artificial Sequence: Synthetic polypeptide
  XENP021196 7B11_H1_L1.1_IgG1_PVA_/S267K Light Chain
DIVMTQSPSSLSASVGDRVTITCRASQNVGTHVAWYQQKPGKSPKALVYSASYRYSGVPDRFTGSGSGTDFTLTISSLQPEDFATYFCQQYNSYPLTFGGGTKVEIKRTVAAPSVFIFPPSDEQLKSGTASVVCLLNNFYPREAKVQWKVDNALQSGNSQESVTEQDSKDSTYSLSSTLTLSKADYEKHKVYACEVTHQGLSSPVTKSFNRGEC

SEQ ID NO: 3581 - protein, 107 aa, Artificial Sequence
  Description of Artificial Sequence: Synthetic polypeptide
  VL of XENP021196
DIVMTQSPSSLSASVGDRVTITCRASQNVGTHVAWYQQKPGKSPKALVYSASYRYSGVPDRFTGSGSGTDFTLTISSLQPEDFATYFCQQYNSYPLTFGGGTKVEIK

SEQ ID NO: 3582 - protein, 11 aa, Artificial Sequence
  Description of Artificial Sequence: Synthetic peptide
  XENP021196 vlCDR1
RASQNVGTHVA

SEQ ID NO: 3583 - protein, 7 aa, Artificial Sequence
  Description of Artificial Sequence: Synthetic peptide
  XENP021196 vlCDR2
SASYRYS

SEQ ID NO: 3584 - protein, 9 aa, Artificial Sequence
  Description of Artificial Sequence: Synthetic peptide
  XENP021196 vlCDR3
QQYNSYPLT

SEQ ID NO: 3585 - protein, 447 aa, Artificial Sequence; identical to SEQ ID NO: 3445
  Description of Artificial Sequence: Synthetic polypeptide
  XENP021201 7B11_H1_L2.1_IgG1_PVA_/S267K Heavy Chain

SEQ ID NO: 3586 - protein, 118 aa, Artificial Sequence; identical to SEQ ID NO: 3446
  Description of Artificial Sequence: Synthetic polypeptide
  VH of XENP021201

SEQ ID NO: 3587 - protein, 5 aa, Artificial Sequence
  Description of Artificial Sequence: Synthetic peptide
  XENP021201 vhCDR1
SYAVN

SEQ ID NO: 3588 - protein, 16 aa, Artificial Sequence
  Description of Artificial Sequence: Synthetic peptide
  XENP021201 vhCDR2
VIWSGGSTDYNAKFQG

SEQ ID NO: 3589 - protein, 10 aa, Artificial Sequence
  Description of Artificial Sequence: Synthetic peptide
  XENP021201 vhCDR3
LYYRYDGFDY

SEQ ID NO: 3590 - protein, 214 aa, Artificial Sequence
  Description of Artificial Sequence: Synthetic polypeptide
  XENP021201 7B11_H1_L2.1_IgG1_PVA_/S267K Light Chain
DIVMTQSPDSLAVSLGERATINCKASQNVGTHVAWYQQKPGQSPKALVYSASYRYSGVPDRFTGSGSGTDFTLTISSLQAEDVAVYFCQQYNSYPLTFGGGTKVEIKRTVAAPSVFIFPPSDEQLKSGTASVVCLLNNFYPREAKVQWKVDNALQSGNSQESVTEQDSKDSTYSLSSTLTLSKADYEKHKVYACEVTHQGLSSPVTKSFNRGEC

SEQ ID NO: 3591 - protein, 107 aa, Artificial Sequence
  Description of Artificial Sequence: Synthetic polypeptide
  VL of XENP021201
DIVMTQSPDSLAVSLGERATINCKASQNVGTHVAWYQQKPGQSPKALVYSASYRYSGVPDRFTGSGSGTDFTLTISSLQAEDVAVYFCQQYNSYPLTFGGGTKVEIK

SEQ ID NO: 3592 - protein, 11 aa, Artificial Sequence
  Description of Artificial Sequence: Synthetic peptide
  XENP021201 vlCDR1
KASQNVGTHVA

SEQ ID NO: 3593 - protein, 7 aa, Artificial Sequence
  Description of Artificial Sequence: Synthetic peptide
  XENP021201 vlCDR2
SASYRYS

SEQ ID NO: 3594 - protein, 9 aa, Artificial Sequence
  Description of Artificial Sequence: Synthetic peptide
  XENP021201 vlCDR3
QQYNSYPLT

SEQ ID NO: 3595 - protein, 447 aa, Artificial Sequence
  Description of Artificial Sequence: Synthetic polypeptide
  XENP021202 7B11_H2.1_L1.1_IgG1_PVA_/S267K Heavy Chain
EVQLVESGGGLVQPGGSLRLSCAVSGFSLTSYAVNWVRQAPGKGLEWVSVIWSGGSTDYNPSVKGRFTISKDNSKSTVYLQMNSLRAEDTAVYYCVSLYYRYDGFDYWGQGTLVTVSSASTKGPSVFPLAPSSKSTSGGTAALGCLVKDYFPEPVTVSWNSGALTSGVHTFPAVLQSSGLYSLSSVVTVPSSSLGTQTYICNVNHKPSNTKVDKKVEPKSCDKTHTCPPCPAPPVAGPSVFLFPPKPKDTLMISRTPEVTCVVVDVKHEDPEVKFNWYVDGVEVHNAKTKPREEQYNSTYRVVSVLTVLHQDWLNGKEYKCKVSNKALPAPIEKTISKAKGQPREPQVYTLPPSREEMTKNQVSLTCLVKGFYPSDIAVEWESNGQPENNYKTTPPVLDSDGSFFLYSKLTVDKSRWQQGNVFSCSVMHEALHNHYTQKSLSLSPGK

SEQ ID NO: 3596 - protein, 118 aa, Artificial Sequence
  Description of Artificial Sequence: Synthetic polypeptide
  VH of XENP021202
EVQLVESGGGLVQPGGSLRLSCAVSGFSLTSYAVNWVRQAPGKGLEWVSVIWSGGSTDYNPSVKGRFTISKDNSKSTVYLQMNSLRAEDTAVYYCVSLYYRYDGFDYWGQGTLVTVSS

SEQ ID NO: 3597 - protein, 5 aa, Artificial Sequence
  Description of Artificial Sequence: Synthetic peptide
  XENP021202 vhCDR1
SYAVN

SEQ ID NO: 3598 - protein, 16 aa, Artificial Sequence
  Description of Artificial Sequence: Synthetic peptide
  XENP021202 vhCDR2
VIWSGGSTDYNPSVKG

SEQ ID NO: 3599 - protein, 10 aa, Artificial Sequence
  Description of Artificial Sequence: Synthetic peptide
  XENP021202 vhCDR3
LYYRYDGFDY

SEQ ID NO: 3600 - protein, 214 aa, Artificial Sequence; identical to SEQ ID NO: 3580
  Description of Artificial Sequence: Synthetic polypeptide
  XENP021202 7B11_H2.1_L1.1_IgG1_PVA_/S267K Light Chain

SEQ ID NO: 3601 - protein, 107 aa, Artificial Sequence; identical to SEQ ID NO: 3581
  Description of Artificial Sequence: Synthetic polypeptide
  VL of XENP021202

SEQ ID NO: 3602 - protein, 11 aa, Artificial Sequence
  Description of Artificial Sequence: Synthetic peptide
  XENP021202 vlCDR1
RASQNVGTHVA

SEQ ID NO: 3603 - protein, 7 aa, Artificial Sequence
  Description of Artificial Sequence: Synthetic peptide
  XENP021202 vlCDR2
SASYRYS

SEQ ID NO: 3604 - protein, 9 aa, Artificial Sequence
  Description of Artificial Sequence: Synthetic peptide
  XENP021202 vlCDR3
QQYNSYPLT

SEQ ID NO: 3605 - protein, 447 aa, Artificial Sequence; identical to SEQ ID NO: 3595
  Description of Artificial Sequence: Synthetic polypeptide
  XENP021203 7B11_H2.1_L2.1_IgG1_PVA_/S267K Heavy Chain

SEQ ID NO: 3606 - protein, 118 aa, Artificial Sequence; identical to SEQ ID NO: 3596
  Description of Artificial Sequence: Synthetic polypeptide
  VH of XENP021203

SEQ ID NO: 3607 - protein, 5 aa, Artificial Sequence
  Description of Artificial Sequence: Synthetic peptide
  XENP021203 vhCDR1
SYAVN

SEQ ID NO: 3608 - protein, 16 aa, Artificial Sequence
  Description of Artificial Sequence: Synthetic peptide
  XENP021203 vhCDR2
VIWSGGSTDYNPSVKG

SEQ ID NO: 3609 - protein, 10 aa, Artificial Sequence
  Description of Artificial Sequence: Synthetic peptide
  XENP021203 vhCDR3
LYYRYDGFDY

SEQ ID NO: 3610 - protein, 214 aa, Artificial Sequence; identical to SEQ ID NO: 3590
  Description of Artificial Sequence: Synthetic polypeptide
  XENP021203 7B11_H2.1_L2.1_IgG1_PVA_/S267K Light Chain

SEQ ID NO: 3611 - protein, 107 aa, Artificial Sequence; identical to SEQ ID NO: 3591
  Description of Artificial Sequence: Synthetic polypeptide
  VL of XENP021203

SEQ ID NO: 3612 - protein, 11 aa, Artificial Sequence
  Description of Artificial Sequence: Synthetic peptide
  XENP021203 vlCDR1
KASQNVGTHVA

SEQ ID NO: 3613 - protein, 7 aa, Artificial Sequence
  Description of Artificial Sequence: Synthetic peptide
  XENP021203 vlCDR2
SASYRYS

SEQ ID NO: 3614 - protein, 9 aa, Artificial Sequence
  Description of Artificial Sequence: Synthetic peptide
  XENP021203 vlCDR3
QQYNSYPLT

SEQ ID NO: 3615 - protein, 446 aa, Artificial Sequence
  Description of Artificial Sequence: Synthetic polypeptide
  XENP021204 7C2_H1.1_L1.1_IgG1_PVA_/S267K Heavy Chain
EVQVLESGGGLVQPGGSLRLSCAASGFTFSRYAMSWVRQAPGKRLEWVSSISSGGSTYYPDSVKGRFTISRDNSKNTLYLQMNSLRAEDTAVYYCARGDYEGYFDYWGQGTLVTVSSASTKGPSVFPLAPSSKSTSGGTAALGCLVKDYFPEPVTVSWNSGALTSGVHTFPAVLQSSGLYSLSSVVTVPSSSLGTQTYICNVNHKPSNTKVDKKVEPKSCDKTHTCPPCPAPPVAGPSVFLFPPKPKDTLMISRTPEVTCVVVDVKHEDPEVKFNWYVDGVEVHNAKTKPREEQYNSTYRVVSVLTVLHQDWLNGKEYKCKVSNKALPAPIEKTISKAKGQPREPQVYTLPPSREEMTKNQVSLTCLVKGFYPSDIAVEWESNGQPENNYKTTPPVLDSDGSFFLYSKLTVDKSRWQQGNVFSCSVMHEALHNHYTQKSLSLSPGK

SEQ ID NO: 3616 - protein, 117 aa, Artificial Sequence
  Description of Artificial Sequence: Synthetic polypeptide
  VH of XENP021204
EVQVLESGGGLVQPGGSLRLSCAASGFTFSRYAMSWVRQAPGKRLEWVSSISSGGSTYYPDSVKGRFTISRDNSKNTLYLQMNSLRAEDTAVYYCARGDYEGYFDYWGQGTLVTVSS

SEQ ID NO: 3617 - protein, 5 aa, Artificial Sequence
  Description of Artificial Sequence: Synthetic peptide
  XENP021204 vhCDR1
RYAMS

SEQ ID NO: 3618 - protein, 16 aa, Artificial Sequence
  Description of Artificial Sequence: Synthetic peptide
  XENP021204 vhCDR2
SISSGGSTYYPDSVKG

SEQ ID NO: 3619 - protein, 9 aa, Artificial Sequence
  Description of Artificial Sequence: Synthetic peptide
  XENP021204 vhCDR3
GDYEGYFDY

SEQ ID NO: 3620 - protein, 220 aa, Artificial Sequence
  Description of Artificial Sequence: Synthetic polypeptide
  XENP021204 7C2_H1.1_L1.1_IgG1_PVA_/S267K Light Chain
DIVMTQSPDSLAVSLGERATINCKSSQSLLNSINQKNYLAWYQQKPGQSPKLLVYFASTRESGVPDRFIGSGSGTDFTLTISSLQAEDVAVYFCQQHYSTPLTFGAGTKLEIKRTVAAPSVFIFPPSDEQLKSGTASVVCLLNNFYPREAKVQWKVDNALQSGNSQESVTEQDSKDSTYSLSSTLTLSKADYEKHKVYACEVTHQGLSSPVTKSFNRGEC

SEQ ID NO: 3621 - protein, 113 aa, Artificial Sequence
  Description of Artificial Sequence: Synthetic polypeptide
  VL of XENP021204
DIVMTQSPDSLAVSLGERATINCKSSQSLLNSINQKNYLAWYQQKPGQSPKLLVYFASTRESGVPDRFIGSGSGTDFTLTISSLQAEDVAVYFCQQHYSTPLTFGAGTKLEIK

SEQ ID NO: 3622 - protein, 17 aa, Artificial Sequence
  Description of Artificial Sequence: Synthetic peptide
  XENP021204 vlCDR1
KSSQSLLNSINQKNYLA

SEQ ID NO: 3623 - protein, 7 aa, Artificial Sequence
  Description of Artificial Sequence: Synthetic peptide
  XENP021204 vlCDR2
FASTRES

SEQ ID NO: 3624 - protein, 9 aa, Artificial Sequence
  Description of Artificial Sequence: Synthetic peptide
  XENP021204 vlCDR3
QQHYSTPLT

SEQ ID NO: 3625 - protein, 442 aa, Artificial Sequence
  Description of Artificial Sequence: Synthetic polypeptide
  XENP021492 1D12_H0L0_IgG1_PVA_/S267K Heavy Chain
EVQLVESGGGLVKPGGSLKFSCAASGFAFSSFDMSWVRQTPEKRLEWVAYISSDGASTFYPDTMKGRFTISRDNAKNTLYLQMSSLKSEDTAMYYCTRLGAYWGQGTLVTVSAASTKGPSVFPLAPSSKSTSGGTAALGCLVKDYFPEPVTVSWNSGALTSGVHTFPAVLQSSGLYSLSSVVTVPSSSLGTQTYICNVNHKPSNTKVDKKVEPKSCDKTHTCPPCPAPPVAGPSVFLFPPKPKDTLMISRTPEVTCVVVDVKHEDPEVKFNWYVDGVEVHNAKTKPREEQYNSTYRVVSVLTVLHQDWLNGKEYKCKVSNKALPAPIEKTISKAKGQPREPQVYTLPPSREEMTKNQVSLTCLVKGFYPSDIAVEWESNGQPENNYKTTPPVLDSDGSFFLYSKLTVDKSRWQQGNVFSCSVMHEALHNHYTQKSLSLSPGK

SEQ ID NO: 3626 - protein, 113 aa, Artificial Sequence
  Description of Artificial Sequence: Synthetic polypeptide
  VH of XENP021492
EVQLVESGGGLVKPGGSLKFSCAASGFAFSSFDMSWVRQTPEKRLEWVAYISSDGASTFYPDTMKGRFTISRDNAKNTLYLQMSSLKSEDTAMYYCTRLGAYWGQGTLVTVSA

SEQ ID NO: 3627 - protein, 5 aa, Artificial Sequence
  Description of Artificial Sequence: Synthetic peptide
  XENP021492 vhCDR1
SFDMS

SEQ ID NO: 3628 - protein, 17 aa, Artificial Sequence
  Description of Artificial Sequence: Synthetic peptide
  XENP021492 vhCDR2
YISSDGASTFYPDTMKG

SEQ ID NO: 3629 - protein, 4 aa, Artificial Sequence
  Description of Artificial Sequence: Synthetic peptide
  XENP021492 vhCDR3
LGAY

SEQ ID NO: 3630 - protein, 218 aa, Artificial Sequence
  Description of Artificial Sequence: Synthetic polypeptide
  XENP021492 1D12_H0L0_IgG1_PVA_/S267K Light Chain
DIVLTQSPASLAVSLGQRATISCRASESVEYYGTSLMQWYQQKPGQPPKLLIYAASNVESGVPARFSGSGSGTDFSLNIHPVEEDDIAMYFCQQSRKVPWTFGGGTKLEIKRTVAAPSVFIFPPSDEQLKSGTASVVCLLNNFYPREAKVQWKVDNALQSGNSQESVTEQDSKDSTYSLSSTLTLSKADYEKHKVYACEVTHQGLSSPVTKSFNRGEC

SEQ ID NO: 3631 - protein, 111 aa, Artificial Sequence
  Description of Artificial Sequence: Synthetic polypeptide
  VL of XENP021492
DIVLTQSPASLAVSLGQRATISCRASESVEYYGTSLMQWYQQKPGQPPKLLIYAASNVESGVPARFSGSGSGTDFSLNIHPVEEDDIAMYFCQQSRKVPWTFGGGTKLEIK

SEQ ID NO: 3632 - protein, 15 aa, Artificial Sequence
  Description of Artificial Sequence: Synthetic peptide
  XENP021492 vlCDR1
RASESVEYYGTSLMQ

SEQ ID NO: 3633 - protein, 7 aa, Artificial Sequence
  Description of Artificial Sequence: Synthetic peptide
  XENP021492 vlCDR2
AASNVES

SEQ ID NO: 3634 - protein, 9 aa, Artificial Sequence
  Description of Artificial Sequence: Synthetic peptide
  XENP021492 vlCDR3
QQSRKVPWT

SEQ ID NO: 3635 - protein, 446 aa, Artificial Sequence
  Description of Artificial Sequence: Synthetic polypeptide
  XENP021493 6C8_H0L0_IgG1_PVA_/S267K Heavy Chain
QVQLKESGPGLVAPSQSLSITCTVSGFSLNGYGVNWVRQPPGKGLEWLGMIWGDGSTDYNSALKSRLSISKDNSKSQVFLKMNSLQTDDTARYYCARSYYTSDEDYWGQGTLVTVSAASTKGPSVFPLAPSSKSTSGGTAALGCLVKDYFPEPVTVSWNSGALTSGVHTFPAVLQSSGLYSLSSVVTVPSSSLGTQTYICNVNHKPSNTKVDKKVEPKSCDKTHTCPPCPAPPVAGPSVFLFPPKPKDTLMISRTPEVTCVVVDVKHEDPEVKFNWYVDGVEVHNAKTKPREEQYNSTYRVVSVLTVLHQDWLNGKEYKCKVSNKALPAPIEKTISKAKGQPREPQVYTLPPSREEMTKNQVSLTCLVKGFYPSDIAVEWESNGQPENNYKTTPPVLDSDGSFFLYSKLTVDKSRWQQGNVFSCSVMHEALHNHYTQKSLSLSPGK

SEQ ID NO: 3636 - protein, 117 aa, Artificial Sequence
  Description of Artificial Sequence: Synthetic polypeptide
  VH of XENP021493
QVQLKESGPGLVAPSQSLSITCTVSGFSLNGYGVNWVRQPPGKGLEWLGMIWGDGSTDYNSALKSRLSISKDNSKSQVFLKMNSLQTDDTARYYCARSYYTSDEDYWGQGTLVTVSA

SEQ ID NO: 3637 - protein, 5 aa, Artificial Sequence
  Description of Artificial Sequence: Synthetic peptide
  XENP021493 vhCDR1
GYGVN

SEQ ID NO: 3638 - protein, 16 aa, Artificial Sequence
  Description of Artificial Sequence: Synthetic peptide
  XENP021493 vhCDR2
MIWGDGSTDYNSALKS

SEQ ID NO: 3639 - protein, 9 aa, Artificial Sequence
  Description of Artificial Sequence: Synthetic peptide
  XENP021493 vhCDR3
SYYTSDEDY

SEQ ID NO: 3640 - protein, 214 aa, Artificial Sequence
  Description of Artificial Sequence: Synthetic polypeptide
  XENP021493 6C8_H0L0_IgG1_PVA_/S267K Light Chain
DIVMTQSQKFMSTSVGDRVSVTCKASQNVGSNVAWCQQKPGQSPKALIYSASFRYSGVPDRFTGSGSGTDFTLTISNVQSEDLAEYFCQQYNSYPYTFGGGTKLEIKRTVAAPSVFIFPPSDEQLKSGTASVVCLLNNFYPREAKVQWKVDNALQSGNSQESVTEQDSKDSTYSLSSTLTLSKADYEKHKVYACEVTHQGLSSPVTKSFNRGEC

SEQ ID NO: 3641 - protein, 107 aa, Artificial Sequence
  Description of Artificial Sequence: Synthetic polypeptide
  VL of XENP021493
DIVMTQSQKFMSTSVGDRVSVTCKASQNVGSNVAWCQQKPGQSPKALIYSASFRYSGVPDRFTGSGSGTDFTLTISNVQSEDLAEYFCQQYNSYPYTFGGGTKLEIK

SEQ ID NO: 3642 - protein, 11 aa, Artificial Sequence
  Description of Artificial Sequence: Synthetic peptide
  XENP021493 vlCDR1
KASQNVGSNVA

SEQ ID NO: 3643 - protein, 7 aa, Artificial Sequence
  Description of Artificial Sequence: Synthetic peptide
  XENP021493 vlCDR2
SASFRYS

SEQ ID NO: 3644 - protein, 9 aa, Artificial Sequence
  Description of Artificial Sequence: Synthetic peptide
  XENP021493 vlCDR3
QQYNSYPYT

SEQ ID NO: 3645 - protein, 446 aa, Artificial Sequence
  Description of Artificial Sequence: Synthetic polypeptide
  XENP021494 6D9_H0_1D12_L0_IgG1_PVA_/S267K Heavy Chain
QVQLKQSGPGLVQPSQSLSITCTVSGFSLTSYGVHWVRQSPGKGLEWLGVIWSGGSTEYNAAFISRLSISKDNSKSQVFFKMNSLQADDTAIYYCARGGLLSPFDYWGQGTTLTVSSASTKGPSVFPLAPSSKSTSGGTAALGCLVKDYFPEPVTVSWNSGALTSGVHTFPAVLQSSGLYSLSSVVTVPSSSLGTQTYICNVNHKPSNTKVDKKVEPKSCDKTHTCPPCPAPPVAGPSVFLFPPKPKDTLMISRTPEVTCVVVDVKHEDPEVKFNWYVDGVEVHNAKTKPREEQYNSTYRVVSVLTVLHQDWLNGKEYKCKVSNKALPAPIEKTISKAKGQPREPQVYTLPPSREEMTKNQVSLTCLVKGFYPSDIAVEWESNGQPENNYKTTPPVLDSDGSFFLYSKLTVDKSRWQQGNVFSCSVMHEALHNHYTQKSLSLSPGK

SEQ ID NO: 3646 - protein, 117 aa, Artificial Sequence
  Description of Artificial Sequence: Synthetic polypeptide
  VH of XENP021494
QVQLKQSGPGLVQPSQSLSITCTVSGFSLTSYGVHWVRQSPGKGLEWLGVIWSGGSTEYNAAFISRLSISKDNSKSQVFFKMNSLQADDTAIYYCARGGLLSPFDYWGQGTTLTVSS

SEQ ID NO: 3647 - protein, 5 aa, Artificial Sequence
  Description of Artificial Sequence: Synthetic peptide
  XENP021494 vhCDR1
SYGVH

SEQ ID NO: 3648 - protein, 16 aa, Artificial Sequence
  Description of Artificial Sequence: Synthetic peptide
  XENP021494 vhCDR2
VIWSGGSTEYNAAFIS

SEQ ID NO: 3649 - protein, 9 aa, Artificial Sequence
  Description of Artificial Sequence: Synthetic peptide
  XENP021494 vhCDR3
GGLLSPFDY

SEQ ID NO: 3650 - protein, 218 aa, Artificial Sequence; identical to SEQ ID NO: 3630
  Description of Artificial Sequence: Synthetic polypeptide
  XENP021494 6D9_H0_1D12_L0_IgG1_PVA_/S267K Light Chain

SEQ ID NO: 3651 - protein, 111 aa, Artificial Sequence; identical to SEQ ID NO: 3631
  Description of Artificial Sequence: Synthetic polypeptide
  VL of XENP021494

SEQ ID NO: 3652 - protein, 15 aa, Artificial Sequence
  Description of Artificial Sequence: Synthetic peptide
  XENP021494 vlCDR1
RASESVEYYGTSLMQ

SEQ ID NO: 3653 - protein, 7 aa, Artificial Sequence
  Description of Artificial Sequence: Synthetic peptide
  XENP021494 vlCDR2
AASNVES

SEQ ID NO: 3654 - protein, 9 aa, Artificial Sequence
  Description of Artificial Sequence: Synthetic peptide
  XENP021494 vlCDR3
QQSRKVPWT

SEQ ID NO: 3655 - protein, 452 aa, Artificial Sequence
  Description of Artificial Sequence: Synthetic polypeptide
  XENP021495 7A9_H0L0_IgG1_PVA_/S267K Heavy Chain
EVKLLESGGGLVQPGGSLKLSCAASGFDFSRYWMSWVRQAPGKGLEWIGEINPDSSTINYTPSLKDKFLISRDNAKNTLYLQMSKVRSEDTALYYCARPNGYYVGTIFPFAYWGQGTLVTVSAASTKGPSVFPLAPSSKSTSGGTAALGCLVKDYFPEPVTVSWNSGALTSGVHTFPAVLQSSGLYSLSSVVTVPSSSLGTQTYICNVNHKPSNTKVDKKVEPKSCDKTHTCPPCPAPPVAGPSVFLFPPKPKDTLMISRTPEVTCVVVDVKHEDPEVKFNWYVDGVEVHNAKTKPREEQYNSTYRVVSVLTVLHQDWLNGKEYKCKVSNKALPAPIEKTISKAKGQPREPQVYTLPPSREEMTKNQVSLTCLVKGFYPSDIAVEWESNGQPENNYKTTPPVLDSDGSFFLYSKLTVDKSRWQQGNVFSCSVMHEALHNHYTQKSLSLSPGK

SEQ ID NO: 3656 - protein, 123 aa, Artificial Sequence
  Description of Artificial Sequence: Synthetic polypeptide
  VH of XENP021495
EVKLLESGGGLVQPGGSLKLSCAASGFDFSRYWMSWVRQAPGKGLEWIGEINPDSSTINYTPSLKDKFLISRDNAKNTLYLQMSKVRSEDTALYYCARPNGYYVGTIFPFAYWGQGTLVTVSA

SEQ ID NO: 3657 - protein, 5 aa, Artificial Sequence
  Description of Artificial Sequence: Synthetic peptide
  XENP021495 vhCDR1
RYWMS

SEQ ID NO: 3658 - protein, 17 aa, Artificial Sequence
  Description of Artificial Sequence: Synthetic peptide
  XENP021495 vhCDR2
EINPDSSTINYTPSLKD

SEQ ID NO: 3659 - protein, 14 aa, Artificial Sequence
  Description of Artificial Sequence: Synthetic peptide
  XENP021495 vhCDR3
PNGYYVGTIFPFAY

SEQ ID NO: 3660 - protein, 215 aa, Artificial Sequence
  Description of Artificial Sequence: Synthetic polypeptide
  XENP021495 7A9_H0L0_IgG1_PVA_/S267K Light Chain
QAVVTQESALTTSPGETVTLTCRSSTGAVTTSNYANWVQEKPDHLFTGLIGGTNNRAPGVPARFSGSLIGDKAALTITGAQTEDEAIYFCALWYSNHWVFGGGTKLTVLGQPKAAPSVTLFPPSSEELQANKATLVCLISDFYPGAVTVAWKADSSPVKAGVETTTPSKQSNNKYAASSYLSLTPEQWKSHRSYSCQVTHEGSTVEKTVAPTECS

SEQ ID NO: 3661 - protein, 215 aa, Artificial Sequence; identical to SEQ ID NO: 3660
  Description of Artificial Sequence: Synthetic polypeptide
  VL of XENP021495

SEQ ID NO: 3662 - protein, 14 aa, Artificial Sequence
  Description of Artificial Sequence: Synthetic peptide
  XENP021495 vlCDR1
RSSTGAVTTSNYAN

SEQ ID NO: 3663 - protein, 7 aa, Artificial Sequence
  Description of Artificial Sequence: Synthetic peptide
  XENP021495 vlCDR2
GTNNRAP

SEQ ID NO: 3664 - protein, 9 aa, Artificial Sequence
  Description of Artificial Sequence: Synthetic peptide
  XENP021495 vlCDR3
ALWYSNHWV

SEQ ID NO: 3665 - protein, 447 aa, Artificial Sequence
  Description of Artificial Sequence: Synthetic polypeptide
  XENP021496 7B11_H0L0_IgG1_PVA_/S267K Heavy Chain
QVQLKQSGPGLVQPSQSLSITCTVSGFSLTSYAVNWVRQSPGKGLEWLGVIWSGGSTDYNAAFISRLSISKDNSKSQVFFKMNSLQANDTAIYYCVSLYYRYDGFDYWGQGTLVTVSAASTKGPSVFPLAPSSKSTSGGTAALGCLVKDYFPEPVTVSWNSGALTSGVHTFPAVLQSSGLYSLSSVVTVPSSSLGTQTYICNVNHKPSNTKVDKKVEPKSCDKTHTCPPCPAPPVAGPSVFLFPPKPKDTLMISRTPEVTCVVVDVKHEDPEVKFNWYVDGVEVHNAKTKPREEQYNSTYRVVSVLTVLHQDWLNGKEYKCKVSNKALPAPIEKTISKAKGQPREPQVYTLPPSREEMTKNQVSLTCLVKGFYPSDIAVEWESNGQPENNYKTTPPVLDSDGSFFLYSKLTVDKSRWQQGNVFSCSVMHEALHNHYTQKSLSLSPGK

SEQ ID NO: 3666 - protein, 118 aa, Artificial Sequence
  Description of Artificial Sequence: Synthetic polypeptide
  VH of XENP021496
QVQLKQSGPGLVQPSQSLSITCTVSGFSLTSYAVNWVRQSPGKGLEWLGVIWSGGSTDYNAAFISRLSISKDNSKSQVFFKMNSLQANDTAIYYCVSLYYRYDGFDYWGQGTLVTVSA

SEQ ID NO: 3667 - protein, 5 aa, Artificial Sequence
  Description of Artificial Sequence: Synthetic peptide
  XENP021496 vhCDR1
SYAVN

SEQ ID NO: 3668 - protein, 16 aa, Artificial Sequence
  Description of Artificial Sequence: Synthetic peptide
  XENP021496 vhCDR2
VIWSGGSTDYNAAFIS

SEQ ID NO: 3669 - protein, 10 aa, Artificial Sequence
  Description of Artificial Sequence: Synthetic peptide
  XENP021496 vhCDR3
LYYRYDGFDY

SEQ ID NO: 3670 - protein, 214 aa, Artificial Sequence
  Description of Artificial Sequence: Synthetic polypeptide
  XENP021496 7B11_H0L0_IgG1_PVA_/S267K Light Chain
DIVMTQSQKFMSTSVGDRVSVTCKASQNVGTHVAWYQQKPGQSPKALVYSASYRYSGVPDRFTGSGSGTDFTLTISNVQSEDLAEYFCQQYNSYPLTFGGGTKLEIKRTVAAPSVFIFPPSDEQLKSGTASVVCLLNNFYPREAKVQWKVDNALQSGNSQESVTEQDSKDSTYSLSSTLTLSKADYEKHKVYACEVTHQGLSSPVTKSFNRGEC

SEQ ID NO: 3671 - protein, 107 aa, Artificial Sequence
  Description of Artificial Sequence: Synthetic polypeptide
  VL of XENP021496
DIVMTQSQKFMSTSVGDRVSVTCKASQNVGTHVAWYQQKPGQSPKALVYSASYRYSGVPDRFTGSGSGTDFTLTISNVQSEDLAEYFCQQYNSYPLTFGGGTKLEIK

SEQ ID NO: 3672 - protein, 11 aa, Artificial Sequence
  Description of Artificial Sequence: Synthetic peptide
  XENP021496 vlCDR1
KASQNVGTHVA

SEQ ID NO: 3673 - protein, 7 aa, Artificial Sequence
  Description of Artificial Sequence: Synthetic peptide
  XENP021496 vlCDR2
SASYRYS

SEQ ID NO: 3674 - protein, 9 aa, Artificial Sequence
  Description of Artificial Sequence: Synthetic peptide
  XENP021496 vlCDR3
QQYNSYPLT

SEQ ID NO: 3675 - protein, 447 aa, Artificial Sequence
  Description of Artificial Sequence: Synthetic polypeptide
  XENP021501 7B11var_H0L0_IgG1_PVA_/S267K Heavy Chain
QVQLKQSGPGLVQPSQSLSITCTVSGFSLTSYAVNWVRQSPGKGLEWLGVIWSGGSTDYNAAFISRLSISKDNSKSQVFFKMNSLQADDTAIYYCVSLYYRYDGFDYWGQGTLVTVSAASTKGPSVFPLAPSSKSTSGGTAALGCLVKDYFPEPVTVSWNSGALTSGVHTFPAVLQSSGLYSLSSVVTVPSSSLGTQTYICNVNHKPSNTKVDKKVEPKSCDKTHTCPPCPAPPVAGPSVFLFPPKPKDTLMISRTPEVTCVVVDVKHEDPEVKFNWYVDGVEVHNAKTKPREEQYNSTYRVVSVLTVLHQDWLNGKEYKCKVSNKALPAPIEKTISKAKGQPREPQVYTLPPSREEMTKNQVSLTCLVKGFYPSDIAVEWESNGQPENNYKTTPPVLDSDGSFFLYSKLTVDKSRWQQGNVFSCSVMHEALHNHYTQKSLSLSPGK

SEQ ID NO: 3676 - protein, 118 aa, Artificial Sequence
  Description of Artificial Sequence: Synthetic polypeptide
  VH of XENP021501
QVQLKQSGPGLVQPSQSLSITCTVSGFSLTSYAVNWVRQSPGKGLEWLGVIWSGGSTDYNAAFISRLSISKDNSKSQVFFKMNSLQADDTAIYYCVSLYYRYDGFDYWGQGTLVTVSA

SEQ ID NO: 3677 - protein, 5 aa, Artificial Sequence
  Description of Artificial Sequence: Synthetic peptide
  XENP021501 vhCDR1
SYAVN

SEQ ID NO: 3678 - protein, 16 aa, Artificial Sequence
  Description of Artificial Sequence: Synthetic peptide
  XENP021501 vhCDR2
VIWSGGSTDYNAAFIS

SEQ ID NO: 3679 - protein, 10 aa, Artificial Sequence
  Description of Artificial Sequence: Synthetic peptide
  XENP021501 vhCDR3
LYYRYDGFDY

SEQ ID NO: 3680 - protein, 214 aa, Artificial Sequence; identical to SEQ ID NO: 3670
  Description of Artificial Sequence: Synthetic polypeptide
  XENP021501 7B11var_H0L0_IgG1_PVA_/S267K Light Chain

SEQ ID NO: 3681 - protein, 107 aa, Artificial Sequence; identical to SEQ ID NO: 3671
  Description of Artificial Sequence: Synthetic polypeptide
  VL of XENP021501

SEQ ID NO: 3682 - protein, 11 aa, Artificial Sequence
  Description of Artificial Sequence: Synthetic peptide
  XENP021501 vlCDR1
KASQNVGTHVA

SEQ ID NO: 3683 - protein, 7 aa, Artificial Sequence
  Description of Artificial Sequence: Synthetic peptide
  XENP021501 vlCDR2
SASYRYS

SEQ ID NO: 3684 - protein, 9 aa, Artificial Sequence
  Description of Artificial Sequence: Synthetic peptide
  XENP021501 vlCDR3
QQYNSYPLT

SEQ ID NO: 3685 - protein, 446 aa, Artificial Sequence
  Description of Artificial Sequence: Synthetic polypeptide
  XENP021502 7C2_H0L0_IgG1_PVA_/S267K Heavy Chain
EVKVVESGGGLVKPGGSLKLSCAASGFTFSRYAMSWVRQTPEKRLEWVASISSGGSTYYPDSVQGRFTISRDNARNILYLQMSSLRSEDTAMYYCARGDYEGYFDYWGQGTSLTVSSASTKGPSVFPLAPSSKSTSGGTAALGCLVKDYFPEPVTVSWNSGALTSGVHTFPAVLQSSGLYSLSSVVTVPSSSLGTQTYICNVNHKPSNTKVDKKVEPKSCDKTHTCPPCPAPPVAGPSVFLFPPKPKDTLMISRTPEVTCVVVDVKHEDPEVKFNWYVDGVEVHNAKTKPREEQYNSTYRVVSVLTVLHQDWLNGKEYKCKVSNKALPAPIEKTISKAKGQPREPQVYTLPPSREEMTKNQVSLTCLVKGFYPSDIAVEWESNGQPENNYKTTPPVLDSDGSFFLYSKLTVDKSRWQQGNVFSCSVMHEALHNHYTQKSLSLSPGK

SEQ ID NO: 3686 - protein, 117 aa, Artificial Sequence
  Description of Artificial Sequence: Synthetic polypeptide
  VH of XENP021502
EVKVVESGGGLVKPGGSLKLSCAASGFTFSRYAMSWVRQTPEKRLEWVASISSGGSTYYPDSVQGRFTISRDNARNILYLQMSSLRSEDTAMYYCARGDYEGYFDYWGQGTSLTVSS

SEQ ID NO: 3687 - protein, 5 aa, Artificial Sequence
  Description of Artificial Sequence: Synthetic peptide
  XENP021502 vhCDR1
RYAMS

SEQ ID NO: 3688 - protein, 16 aa, Artificial Sequence
  Description of Artificial Sequence: Synthetic peptide
  XENP021502 vhCDR2
SISSGGSTYYPDSVQG

SEQ ID NO: 3689 - protein, 9 aa, Artificial Sequence
  Description of Artificial Sequence: Synthetic peptide
  XENP021502 vhCDR3
GDYEGYFDY

SEQ ID NO: 3690 - protein, 220 aa, Artificial Sequence
  Description of Artificial Sequence: Synthetic polypeptide
  XENP021502 7C2_H0L0_IgG1_PVA_/S267K Light Chain
DIVMTQSPSSLAMSVGQKVTMSCKSSQSLLNSINQKNYLAWYQQKPGQSPKLLVYFASTRESGVPDRFIGSGSGTDFTLTISSVQAEDLADYFCQQHYSTPLTFGAGTKLELKRTVAAPSVFIFPPSDEQLKSGTASVVCLLNNFYPREAKVQWKVDNALQSGNSQESVTEQDSKDSTYSLSSTLTLSKADYEKHKVYACEVTHQGLSSPVTKSFNRGEC

SEQ ID NO: 3691 - protein, 113 aa, Artificial Sequence
  Description of Artificial Sequence: Synthetic polypeptide
  VL of XENP021502
DIVMTQSPSSLAMSVGQKVTMSCKSSQSLLNSINQKNYLAWYQQKPGQSPKLLVYFASTRESGVPDRFIGSGSGTDFTLTISSVQAEDLADYFCQQHYSTPLTFGAGTKLELK

SEQ ID NO: 3692 - protein, 17 aa, Artificial Sequence
  Description of Artificial Sequence: Synthetic peptide
  XENP021502 vlCDR1
KSSQSLLNSINQKNYLA

SEQ ID NO: 3693 - protein, 7 aa, Artificial Sequence
  Description of Artificial Sequence: Synthetic peptide
  XENP021502 vlCDR2
FASTRES

SEQ ID NO: 3694 - protein, 9 aa, Artificial Sequence
  Description of Artificial Sequence: Synthetic peptide
  XENP021502 vlCDR3
QQHYSTPLT

SEQ ID NO: 3695 - protein, 442 aa, Artificial Sequence; identical to SEQ ID NO: 3625
  Description of Artificial Sequence: Synthetic polypeptide
  XENP021503 1D10_H0L0_IgG1_PVA_/S267K Heavy Chain

SEQ ID NO: 3696 - protein, 113 aa, Artificial Sequence; identical to SEQ ID NO: 3626
  Description of Artificial Sequence: Synthetic polypeptide
  VH of XENP021503

SEQ ID NO: 3697 - protein, 5 aa, Artificial Sequence
  Description of Artificial Sequence: Synthetic peptide
  XENP021503 vhCDR1
SFDMS

SEQ ID NO: 3698 - protein, 17 aa, Artificial Sequence
  Description of Artificial Sequence: Synthetic peptide
  XENP021503 vhCDR2
YISSDGASTFYPDTMKG

SEQ ID NO: 3699 - protein, 4 aa, Artificial Sequence
  Description of Artificial Sequence: Synthetic peptide
  XENP021503 vhCDR3
LGAY

SEQ ID NO: 3700 - protein, 219 aa, Artificial Sequence
  Description of Artificial Sequence: Synthetic polypeptide
  XENP021503 1D10_H0L0_IgG1_PVA_/S267K Light Chain
DVVMTQTPLTLSVTIGQPASISCKSSQSLLDSDGKTYLNWLLQRPGQSPKRLIYLVSKLDSGVPDRFTGSGSGTDFTLKISRVEAEDLGVYYCWQGTHFPYTFGGGTKLEIKRTVAAPSVFIFPPSDEQLKSGTASVVCLLNNFYPREAKVQWKVDNALQSGNSQESVTEQDSKDSTYSLSSTLTLSKADYEKHKVYACEVTHQGLSSPVTKSFNRGEC

SEQ ID NO: 3701 - protein, 112 aa, Artificial Sequence
  Description of Artificial Sequence: Synthetic polypeptide
  VL of XENP021503
DVVMTQTPLTLSVTIGQPASISCKSSQSLLDSDGKTYLNWLLQRPGQSPKRLIYLVSKLDSGVPDRFTGSGSGTDFTLKISRVEAEDLGVYYCWQGTHFPYTFGGGTKLEIK

SEQ ID NO: 3702 - protein, 16 aa, Artificial Sequence
  Description of Artificial Sequence: Synthetic peptide
  XENP021503 vlCDR1
KSSQSLLDSDGKTYLN

SEQ ID NO: 3703 - protein, 7 aa, Artificial Sequence
  Description of Artificial Sequence: Synthetic peptide
  XENP021503 vlCDR2
LVSKLDS

SEQ ID NO: 3704 - protein, 9 aa, Artificial Sequence
  Description of Artificial Sequence: Synthetic peptide
  XENP021503 vlCDR3
WQGTHFPYT

SEQ ID NO: 3705 - protein, 120 aa, Artificial Sequence
  Description of Artificial Sequence: Synthetic polypeptide
  3C2[BTLA] variable heavy Chain
QVQLQESGPGLVKPSETLSLTCTISGGSISNYYWNWIRQPPGKGLEWIGYIYYSTSTKYNPSLKSRVTMSVETSKNQFSLKLSSVTAADTAVYYCARVKVYSTGWFFDYWGQGTLVTVSS

SEQ ID NO: 3706 - protein, 5 aa, Artificial Sequence
  Description of Artificial Sequence: Synthetic peptide
  3C2[BTLA] vhCDR1
NYYWN

SEQ ID NO: 3707 - protein, 16 aa, Artificial Sequence
  Description of Artificial Sequence: Synthetic peptide
  3C2[BTLA] vhCDR2
YIYYSTSTKYNPSLKS

SEQ ID NO: 3708 - protein, 12 aa, Artificial Sequence
  Description of Artificial Sequence: Synthetic peptide
  3C2[BTLA] vhCDR3
VKVYSTGWFFDY

SEQ ID NO: 3709 - protein, 107 aa, Artificial Sequence [sequence omitted]

SEQ ID NO: 3710 - protein, 11 aa, Artificial Sequence
  Description of Artificial Sequence: Synthetic peptide
  3C2[BTLA] vlCDR1
RASQGISSALA

SEQ ID NO: 3711 - protein, 7 aa, Artificial Sequence
  Description of Artificial Sequence: Synthetic peptide
  3C2[BTLA] vlCDR2
DASSLES

SEQ ID NO: 3712 - protein, 9 aa, Artificial Sequence
  Description of Artificial Sequence: Synthetic peptide
  3C2[BTLA] vlCDR3
QQFNSYPLT

SEQ ID NO: 3713 - protein, 127 aa, Artificial Sequence
  Description of Artificial Sequence: Synthetic polypeptide
  11E2[BTLA] variable heavy Chain
EVQLVESGGGVIRPGGSLRLSCAASGFTFDDYGMSWVRQAPGKGLEWVSGINWNGGSTGYAASVKGRFTISRDNAKNSLYLQMNSLRAEDSALYYCARDYYYGPGSPNYFYYAMDVWGQGTTVTVSS

SEQ ID NO: 3714 - protein, 5 aa, Artificial Sequence
  Description of Artificial Sequence: Synthetic peptide
  11E2[BTLA] vhCDR1
DYGMS

SEQ ID NO: 3715 - protein, 17 aa, Artificial Sequence
  Description of Artificial Sequence: Synthetic peptide
  11E2[BTLA] vhCDR2
GINWNGGSTGYAASVKG

SEQ ID NO: 3716 - protein, 18 aa, Artificial Sequence
  Description of Artificial Sequence: Synthetic peptide
  11E2[BTLA] vhCDR3
DYYYGPGSPNYFYYAMDV

SEQ ID NO: 3717 - protein, 107 aa, Artificial Sequence
  Description of Artificial Sequence: Synthetic polypeptide
  11E2[BTLA] variable light Chain
DIQMTQSPSSLSASVGDRVTITCRASQGISSWLAWYQQKPEKAPKSLIYAASSLQSGVPSRFSGSGSGTDFTLTISSLQPEDFATYYCQQYNSYPRTFGQGTKVEIK

SEQ ID NO: 3718 - protein, 11 aa, Artificial Sequence
  Description of Artificial Sequence: Synthetic peptide
  11E2[BTLA] vlCDR1
RASQGISSWLA

SEQ ID NO: 3719 - protein, 7 aa, Artificial Sequence
  Description of Artificial Sequence: Synthetic peptide
  11E2[BTLA] vlCDR2
AASSLQS

SEQ ID NO: 3720 - protein, 9 aa, Artificial Sequence
  Description of Artificial Sequence: Synthetic peptide
  11E2[BTLA] vlCDR3
QQYNSYPRT

SEQ ID NO: 3721 - protein, 119 aa, Artificial Sequence
  Description of Artificial Sequence: Synthetic polypeptide
  4C7[BTLA] variable heavy Chain
QVQLQESGPGLVKPSETLSLTCTVHGGSINHYYWSWIRQPPGKGLEWIGYIYYSGSTKYNPSLKSRVSISVDTSKNQFSLKLTSVTAADTAVYYCAREWPYYYYEMDVWGQGTTVTVSS

SEQ ID NO: 3722 - protein, 5 aa, Artificial Sequence
  Description of Artificial Sequence: Synthetic peptide
  4C7[BTLA] vhCDR1
HYYWS

SEQ ID NO: 3723 - protein, 16 aa, Artificial Sequence
  Description of Artificial Sequence: Synthetic peptide
  4C7[BTLA] vhCDR2
YIYYSGSTKYNPSLKS

SEQ ID NO: 3724 - protein, 11 aa, Artificial Sequence
  Description of Artificial Sequence: Synthetic peptide
  4C7[BTLA] vhCDR3
EWPYYYYEMDV

SEQ ID NO: 3725 - protein, 108 aa, Artificial Sequence
  Description of Artificial Sequence: Synthetic polypeptide
  4C7[BTLA] variable light Chain
EIVLTQSPGTLSLSPGERATLSCRASQSVSSSYLAWYQQKPGQAPRLLIYGASSRATGIPDRFSGSGSGTDFTLTISRLEPEDFAVYYCQQYGSSFRTFGQGTKVEIK

SEQ ID NO: 3726 - protein, 12 aa, Artificial Sequence
  Description of Artificial Sequence: Synthetic peptide
  4C7[BTLA] vlCDR1
RASQSVSSSYLA

SEQ ID NO: 3727 - protein, 7 aa, Artificial Sequence
  Description of Artificial Sequence: Synthetic peptide
  4C7[BTLA] vlCDR2
GASSRAT

SEQ ID NO: 3728 - protein, 9 aa, Artificial Sequence
  Description of Artificial Sequence: Synthetic peptide
  4C7[BTLA] vlCDR3
QQYGSSFRT

SEQ ID NO: 3729 - protein, 121 aa, Artificial Sequence
  Description of Artificial Sequence: Synthetic polypeptide
  8D5[BTLA] variable heavy Chain
EVQLVESGGGLVQPGGSLRLSCAASGFTISSYDMHWVRQATGKGLEWVSVIGPAGDTYYPGSVKGRFTISRENAKNSLYLQMNSLRAGDTAVYYCAREGMAAHNYYGMDVWGQGTTVTVSS

SEQ ID NO: 3730 - protein, 5 aa, Artificial Sequence
  Description of Artificial Sequence: Synthetic peptide
  8D5[BTLA] vhCDR1
SYDMH

SEQ ID NO: 3731 - protein, 16 aa, Artificial Sequence
  Description of Artificial Sequence: Synthetic peptide
  8D5[BTLA] vhCDR2
VIGPAGDTYYPGSVKG

SEQ ID NO: 3732 - protein, 13 aa, Artificial Sequence
  Description of Artificial Sequence: Synthetic peptide
  8D5[BTLA] vhCDR3
EGMAAHNYYGMDV

SEQ ID NO: 3733 - protein, 108 aa, Artificial Sequence
  Description of Artificial Sequence: Synthetic polypeptide
  8D5[BTLA] variable light Chain
EIVLTQSPATLSLSPGERATLSCRASQSVSSYLAWYQQKPGQAPRLLIYDASNRATGIPARFSGSGSGTDFTLTISSLEPEDFAVYYCQQRSNWPPITFGQGTRLEIK

SEQ ID NO: 3734 - protein, 11 aa, Artificial Sequence
  Description of Artificial Sequence: Synthetic peptide
  8D5[BTLA] vlCDR1
RASQSVSSYLA

SEQ ID NO: 3735 - protein, 7 aa, Artificial Sequence
  Description of Artificial Sequence: Synthetic peptide
  8D5[BTLA] vlCDR2
DASNRAT

SEQ ID NO: 3736 - protein, 10 aa, Artificial Sequence
  Description of Artificial Sequence: Synthetic peptide
  8D5[BTLA] vlCDR3
QQRSNWPPIT

SEQ ID NO: 3737 - protein, 118 aa, Artificial Sequence
  Description of Artificial Sequence: Synthetic polypeptide
  ipilimumab[CTLA-4] variable heavy Chain
QVQLVESGGGVVQPGRSLRLSCAASGFTFSSYTMHWVRQAPGKGLEWVTFISYDGNNKYYADSVKGRFTISRDNSKNTLYLQMNSLRAEDTAIYYCARTGWLGPFDYWGQGTLVTVSS

SEQ ID NO: 3738 - protein, 5 aa, Artificial Sequence
  Description of Artificial Sequence: Synthetic peptide
  ipilimumab[CTLA-4] vhCDR1
SYTMH

SEQ ID NO: 3739 - protein, 17 aa, Artificial Sequence
  Description of Artificial Sequence: Synthetic peptide
  ipilimumab[CTLA-4] vhCDR2
FISYDGNNKYYADSVKG

SEQ ID NO: 3740 - protein, 9 aa, Artificial Sequence
  Description of Artificial Sequence: Synthetic peptide
  ipilimumab[CTLA-4] vhCDR3
TGWLGPFDY

SEQ ID NO: 3741 - protein, 108 aa, Artificial Sequence
  Description of Artificial Sequence: Synthetic polypeptide
  ipilimumab[CTLA-4] variable light Chain
EIVLTQSPGTLSLSPGERATLSCRASQSVGSSYLAWYQQKPGQAPRLLIYGAFSRATGIPDRFSGSGSGTDFTLTISRLEPEDFAVYYCQQYGSSPWTFGQGTKVEIK

SEQ ID NO: 3742 - protein, 12 aa, Artificial Sequence
  Description of Artificial Sequence: Synthetic peptide
  ipilimumab[CTLA-4] vlCDR1
RASQSVGSSYLA

SEQ ID NO: 3743 - protein, 7 aa, Artificial Sequence
  Description of Artificial Sequence: Synthetic peptide
  ipilimumab[CTLA-4] vlCDR2
GAFSRAT

SEQ ID NO: 3744 - protein, 9 aa, Artificial Sequence
  Description of Artificial Sequence: Synthetic peptide
  ipilimumab[CTLA-4] vlCDR3
QQYGSSPWT

SEQ ID NO: 3745 - protein, 125 aa, Artificial Sequence
  Description of Artificial Sequence: Synthetic polypeptide
  tremelimumab[CTLA-4] variable heavy Chain
QVQLVESGGGVVQPGRSLRLSCAASGFTFSSYGMHWVRQAPGKGLEWVAVIWYDGSNKYYADSVKGRFTISRDNSKNTLYLQMNSLRAEDTAVYYCARDPRGATLYYYYYGMDVWGQGTTVTVSS

SEQ ID NO: 3746 - protein, 5 aa, Artificial Sequence
  Description of Artificial Sequence: Synthetic peptide
  tremelimumab[CTLA-4] vhCDR1
SYGMH

SEQ ID NO: 3747 - protein, 17 aa, Artificial Sequence
  Description of Artificial Sequence: Synthetic peptide
  tremelimumab[CTLA-4] vhCDR2
VIWYDGSNKYYADSVKG

SEQ ID NO: 3748 - protein, 16 aa, Artificial Sequence
  Description of Artificial Sequence: Synthetic peptide
  tremelimumab[CTLA-4] vhCDR3
DPRGATLYYYYYGMDV

SEQ ID NO: 3749 - protein, 107 aa, Artificial Sequence
  Description of Artificial Sequence: Synthetic polypeptide
  tremelimumab[CTLA-4] variable light Chain
DIQMTQSPSSLSASVGDRVTITCRASQSINSYLDWYQQKPGKAPKLLIYAASSLQSGVPSRFSGSGSGTDFTLTISSLQPEDFATYYCQQYYSTPFTFGPGTKVEIK

SEQ ID NO: 3750 - protein, 11 aa, Artificial Sequence
  Description of Artificial Sequence: Synthetic peptide
  tremelimumab[CTLA-4] vlCDR1
RASQSINSYLD

SEQ ID NO: 3751 - protein, 7 aa, Artificial Sequence
  Description of Artificial Sequence: Synthetic peptide
  tremelimumab[CTLA-4] vlCDR2
AASSLQS

SEQ ID NO: 3752 - protein, 9 aa, Artificial Sequence
  Description of Artificial Sequence: Synthetic peptide
  tremelimumab[CTLA-4] vlCDR3
QQYYSTPFT

SEQ ID NO: 3753 - protein, 118 aa, Artificial Sequence
  Description of Artificial Sequence: Synthetic polypeptide
  AGEN1884[CTLA-4] variable heavy Chain
EVQLVESGGGLVKPGGSLRLSCAASGFTFSSYSMNWVRQAPGKGLEWVSSISSSSSYIYYADSVKGRFTISRDNAKNSLYLQMNSLRAEDTAVYYCARVGLMGPFDIWGQGTMVTVSS

SEQ ID NO: 3754 - protein, 5 aa, Artificial Sequence
  Description of Artificial Sequence: Synthetic peptide
  AGEN1884[CTLA-4] vhCDR1
SYSMN

SEQ ID NO: 3755 - protein, 17 aa, Artificial Sequence
  Description of Artificial Sequence: Synthetic peptide
  AGEN1884[CTLA-4] vhCDR2
SISSSSSYIYYADSVKG

SEQ ID NO: 3756 - protein, 9 aa, Artificial Sequence
  Description of Artificial Sequence: Synthetic peptide
  AGEN1884[CTLA-4] vhCDR3
VGLMGPFDI

SEQ ID NO: 3757 - protein, 107 aa, Artificial Sequence
  Description of Artificial Sequence: Synthetic polypeptide
  AGEN1884[CTLA-4] variable light Chain
EIVLTQSPGTLSLSPGERATLSCRASQSVSRYLGWYQQKPGQAPRLLIYGASTRATGIPDRFSGSGSGTDFTLTITRLEPEDFAVYYCQQYGSSPWTFGQGTKVEIK

SEQ ID NO: 3758 - protein, 11 aa, Artificial Sequence
  Description of Artificial Sequence: Synthetic peptide
  AGEN1884[CTLA-4] vlCDR1
RASQSVSRYLG

SEQ ID NO: 3759 - protein, 7 aa, Artificial Sequence
  Description of Artificial Sequence: Synthetic peptide
  AGEN1884[CTLA-4] vlCDR2
GASTRAT

SEQ ID NO: 3760 - protein, 9 aa, Artificial Sequence
  Description of Artificial Sequence: Synthetic peptide
  AGEN1884[CTLA-4] vlCDR3
QQYGSSPWT

SEQ ID NO: 3761 - protein, 116 aa, Artificial Sequence
  Description of Artificial Sequence: Synthetic polypeptide
  4.3F6B5[CTLA-4] variable heavy Chain
EVQLQPSGPVLVKPGASVKISCKASGYTFTDYKIHWVKQSHGKSLEWIGYIYPYSGSSDYNQKFKSKATLTVDNSSTTAYMELRSLTSEDSAVYYCARGGDAMDYWGQGTAVTVSS

SEQ ID NO: 3762 - protein, 5 aa, Artificial Sequence
  Description of Artificial Sequence: Synthetic peptide
  4.3F6B5[CTLA-4] vhCDR1
DYKIH

SEQ ID NO: 3763 - protein, 17 aa, Artificial Sequence
  Description of Artificial Sequence: Synthetic peptide
  4.3F6B5[CTLA-4] vhCDR2
YIYPYSGSSDYNQKFKS

SEQ ID NO: 3764 - protein, 7 aa, Artificial Sequence
  Description of Artificial Sequence: Synthetic peptide
  4.3F6B5[CTLA-4] vhCDR3
GGDAMDY

SEQ ID NO: 3765 - protein, 106 aa, Artificial Sequence
  Description of Artificial Sequence: Synthetic polypeptide
  4.3F6B5[CTLA-4] variable light Chain
DILMTQSPASLSASVGETVTITCGASENIYGALNWYQRKQGKSPQLLIYGATNLADGMSSRFSGSGLGRQYYLKISSLHPDDVATYFCQNILGTWTFGGGTKLEIK

SEQ ID NO: 3766 - protein, 11 aa, Artificial Sequence
  Description of Artificial Sequence: Synthetic peptide
  4.3F6B5[CTLA-4] vlCDR1
GASENIYGALN

SEQ ID NO: 3767 - protein, 7 aa, Artificial Sequence
  Description of Artificial Sequence: Synthetic peptide
  4.3F6B5[CTLA-4] vlCDR2
GATNLAD

SEQ ID NO: 3768 - protein, 8 aa, Artificial Sequence
  Description of Artificial Sequence: Synthetic peptide
  4.3F6B5[CTLA-4] vlCDR3
QNILGTWT

SEQ ID NO: 3769 - protein, 117 aa, Artificial Sequence
  Description of Artificial Sequence: Synthetic polypeptide
  4.8H10H5[CTLA-4] variable heavy Chain
DVKLVESGGGLVKLGGSLKLSCAASGFTFNIYYMSWVRQTPEKRLELVAAINPDGGNTYYPDTVKGRFTISRDNAKNTLYLQMSSLKSEDSALYYCARYGGPGFDSWGQGTTLTVSS

SEQ ID NO: 3770 - protein, 5 aa, Artificial Sequence
  Description of Artificial Sequence: Synthetic peptide
  4.8H10H5[CTLA-4] vhCDR1
IYYMS

SEQ ID NO: 3771 - protein, 17 aa, Artificial Sequence
  Description of Artificial Sequence: Synthetic peptide
  4.8H10H5[CTLA-4] vhCDR2
AINPDGGNTYYPDTVKG

SEQ ID NO: 3772 - protein, 8 aa, Artificial Sequence
  Description of Artificial Sequence: Synthetic peptide
  4.8H10H5[CTLA-4] vhCDR3
YGGPGFDS

SEQ ID NO: 3773 - protein, 108 aa, Artificial Sequence
  Description of Artificial Sequence: Synthetic polypeptide
  4.8H10H5[CTLA-4] variable light Chain
ENVLTQSPAIMSASPGERVTMTCSASSSVSYMHWYQQKSNTSPKLWIYDTSKLASGVPGRFSGSGSRNSYSLTISSMEAEDVATYYCFPGSGFPFMYTFGGGTKLEIK

SEQ ID NO: 3774 - protein, 10 aa, Artificial Sequence
  Description of Artificial Sequence: Synthetic peptide
  4.8H10H5[CTLA-4] vlCDR1
SASSSVSYMH

SEQ ID NO: 3775 - protein, 7 aa, Artificial Sequence
  Description of Artificial Sequence: Synthetic peptide
  4.8H10H5[CTLA-4] vlCDR2
DTSKLAS

SEQ ID NO: 3776 - protein, 11 aa, Artificial Sequence
  Description of Artificial Sequence: Synthetic peptide
  4.8H10H5[CTLA-4] vlCDR3
FPGSGFPFMYT

SEQ ID NO: 3777 - protein, 116 aa, Artificial Sequence
  Description of Artificial Sequence: Synthetic polypeptide
  TGN2122.C[CTLA-4] variable heavy Chain
QVQLVQSGAEVKKPGASVKVSCKASGYTFTDYKIHWVRQAPGQGLEWIGYIYPYSGSSDYNQKFKSRATLTVDNSISTAYMELSRLRSDDTAVYYCARGGDAMDYWGQGTLVTVSS

SEQ ID NO: 3778 - protein, 5 aa, Artificial Sequence
  Description of Artificial Sequence: Synthetic peptide
  TGN2122.C[CTLA-4] vhCDR1
DYKIH

SEQ ID NO: 3779 - protein, 17 aa, Artificial Sequence
  Description of Artificial Sequence: Synthetic peptide
  TGN2122.C[CTLA-4] vhCDR2
YIYPYSGSSDYNQKFKS

SEQ ID NO: 3780 - protein, 7 aa, Artificial Sequence
  Description of Artificial Sequence: Synthetic peptide
  TGN2122.C[CTLA-4] vhCDR3
GGDAMDY

SEQ ID NO: 3781 - protein, 106 aa, Artificial Sequence
  Description of Artificial Sequence: Synthetic polypeptide
  TGN2122.C[CTLA-4] variable light Chain
DIQMTQSPSSLSASVGDRVTITCGASENIYGALNWYQRKPGKAPKLLIYGATNLADGVPSRFSGSGSGRDYTLTISSLQPEDFATYFCQNILGTWTFGGGTKVEIK

SEQ ID NO: 3782 - protein, 11 aa, Artificial Sequence
  Description of Artificial Sequence: Synthetic peptide
  TGN2122.C[CTLA-4] vlCDR1
GASENIYGALN

SEQ ID NO: 3783 - protein, 7 aa, Artificial Sequence
  Description of Artificial Sequence: Synthetic peptide
  TGN2122.C[CTLA-4] vlCDR2
GATNLAD

SEQ ID NO: 3784 - protein, 8 aa, Artificial Sequence
  Description of Artificial Sequence: Synthetic peptide
  TGN2122.C[CTLA-4] vlCDR3
QNILGTWT

SEQ ID NO: 3785 - protein, 117 aa, Artificial Sequence
  Description of Artificial Sequence: Synthetic polypeptide
  TGN2122.H[CTLA-4] variable heavy Chain
EVQLVESGGGLVQPGGSLRLSCAASGFTFNIYYMSWVRQAPGKGLELVAAINPDGGNTYYPDTVKGRFTISRDNAKNSLYLQMNSLRAEDTAVYYCARYGGPGFDSWGQGTLVTVSS

SEQ ID NO: 3786 - protein, 5 aa, Artificial Sequence
  Description of Artificial Sequence: Synthetic peptide
  TGN2122.H[CTLA-4] vhCDR1
IYYMS

SEQ ID NO: 3787 - protein, 17 aa, Artificial Sequence
  Description of Artificial Sequence: Synthetic peptide
  TGN2122.H[CTLA-4] vhCDR2
AINPDGGNTYYPDTVKG

SEQ ID NO: 3788 - protein, 8 aa, Artificial Sequence
  Description of Artificial Sequence: Synthetic peptide
  TGN2122.H[CTLA-4] vhCDR3
YGGPGFDS

SEQ ID NO: 3789 - protein, 108 aa, Artificial Sequence
  Description of Artificial Sequence: Synthetic polypeptide
  TGN2122.H[CTLA-4] variable light Chain
ENVLTQSPATLSLSPGERATLSCSASSSVSYMHWYQQKPGQAPRLWIYDTSKLASGIPARFSGSGSRNDYTLTISSLEPEDFAVYYCFPGSGFPFMYTFGGGTKVEIK

SEQ ID NO: 3790 - protein, 10 aa, Artificial Sequence
  Description of Artificial Sequence: Synthetic peptide
  TGN2122.H[CTLA-4] vlCDR1
SASSSVSYMH

SEQ ID NO: 3791 - protein, 7 aa, Artificial Sequence
  Description of Artificial Sequence: Synthetic peptide
  TGN2122.H[CTLA-4] vlCDR2
DTSKLAS

SEQ ID NO: 3792 - protein, 11 aa, Artificial Sequence
  Description of Artificial Sequence: Synthetic peptide
  TGN2122.H[CTLA-4] vlCDR3
FPGSGFPFMYT

SEQ ID NO: 3793 - protein, 123 aa, Artificial Sequence
  Description of Artificial Sequence: Synthetic polypeptide
  F7[CTLA-4] variable heavy Chain
QVQLVQSGAEVKKPGASVKVSCKASGYAFDGHYMHWVRQAPGQRLEWMGWVDPHSGATNYAQNFQGGVTMTRDTSINTVYMELSSLKSDDTAVYYCARDFYDTSAKSGAFDIWGQGTMVTVSS

SEQ ID NO: 3794 - protein, 5 aa, Artificial Sequence
  Description of Artificial Sequence: Synthetic peptide
  F7[CTLA-4] vhCDR1
GHYMH

SEQ ID NO: 3795 - protein, 17 aa, Artificial Sequence
  Description of Artificial Sequence: Synthetic peptide
  F7[CTLA-4] vhCDR2
WVDPHSGATNYAQNFQG

SEQ ID NO: 3796 - protein, 14 aa, Artificial Sequence
  Description of Artificial Sequence: Synthetic peptide
  F7[CTLA-4] vhCDR3
DFYDTSAKSGAFDI

SEQ ID NO: 3797 - protein, 107 aa, Artificial Sequence
  Description of Artificial Sequence: Synthetic polypeptide
  F7[CTLA-4] variable light Chain
AIQLTQSPSSVSASVGDRVTITCRASQGISSWLAWYQQKPGKAPKLLIYAASSLQSGVPSRFSGSGSGTDFTLTISSLQPEDFATYYCQQVNSFPWAFGQGTKVEIK

SEQ ID NO: 3798 - protein, 11 aa, Artificial Sequence
  Description of Artificial Sequence: Synthetic peptide
  F7[CTLA-4] vlCDR1
RASQGISSWLA

SEQ ID NO: 3799 - protein, 7 aa, Artificial Sequence
  Description of Artificial Sequence: Synthetic peptide
  F7[CTLA-4] vlCDR2
AASSLQS

SEQ ID NO: 3800 - protein, 9 aa, Artificial Sequence
  Description of Artificial Sequence: Synthetic peptide
  F7[CTLA-4] vlCDR3
QQVNSFPWA

SEQ ID NO: 3801 - protein, 121 aa, Artificial Sequence
  Description of Artificial Sequence: Synthetic polypeptide
  E8[CTLA-4] variable heavy Chain
QVQLVQSGAEVKKPGASVKVSCEASGYTFTNYYIHWLRQAPGQGLEWMGIINPSGGSTTYAQKFQGRITMTRDTSTNTLYMELSSLRSEDTAIYYCARRDCRGPSCYFAYWGQGTTVTVSS

SEQ ID NO: 3802 - protein, 5 aa, Artificial Sequence
  Description of Artificial Sequence: Synthetic peptide
  E8[CTLA-4] vhCDR1
NYYIH

SEQ ID NO: 3803 - protein, 17 aa, Artificial Sequence
  Description of Artificial Sequence: Synthetic peptide
  E8[CTLA-4] vhCDR2
IINPSGGSTTYAQKFQG

SEQ ID NO: 3804 - protein, 12 aa, Artificial Sequence
  Description of Artificial Sequence: Synthetic peptide
  E8[CTLA-4] vhCDR3
RDCRGPSCYFAY

SEQ ID NO: 3805 - protein, 107 aa, Artificial Sequence
  Description of Artificial Sequence: Synthetic polypeptide
  E8[CTLA-4] variable light Chain
DIVMTQSPSSLSASVGDRVTITCRASQSISSYLNWYQQKPGKAPKLLIYAASSLQSGVPPRFSGSGSGTEFTLTISSLQPEDFATYYCQQANSFPPTFGQGTKVDIK

SEQ ID NO: 3806 - protein, 11 aa, Artificial Sequence
  Description of Artificial Sequence: Synthetic peptide
  E8[CTLA-4] vlCDR1
RASQSISSYLN

SEQ ID NO: 3807 - protein, 7 aa, Artificial Sequence
  Description of Artificial Sequence: Synthetic peptide
  E8[CTLA-4] vlCDR2
AASSLQS

SEQ ID NO: 3808 - protein, 9 aa, Artificial Sequence
  Description of Artificial Sequence: Synthetic peptide
  E8[CTLA-4] vlCDR3
QQANSFPPT

SEQ ID NO: 3809 - protein, 114 aa, Artificial Sequence
  Description of Artificial Sequence: Synthetic polypeptide
  CT1E1[CTLA-4] variable heavy Chain
EVQLVESGGGLVQPGRSLRLSCRGSNFNFDDLAISWVRQAPGKGLEWLGFVRSKAYGETTDYVASVKGRFTISRDDSKFIAWLQMDSLKTDDTAVYYCTTFNYWGQGTLVTVSS

SEQ ID NO: 3810 - protein, 5 aa, Artificial Sequence
  Description of Artificial Sequence: Synthetic peptide
  CT1E1[CTLA-4] vhCDR1
DLAIS

SEQ ID NO: 3811 - protein, 19 aa, Artificial Sequence
  Description of Artificial Sequence: Synthetic peptide
  CT1E1[CTLA-4] vhCDR2
FVRSKAYGETTDYVASVKG

SEQ ID NO: 3812 - protein, 3 aa, Artificial Sequence
  Description of Artificial Sequence: Synthetic peptide
  CT1E1[CTLA-4] vhCDR3
FNY

SEQ ID NO: 3813 - protein, 108 aa, Artificial Sequence
  Description of Artificial Sequence: Synthetic polypeptide
  CT1E1[CTLA-4] variable light Chain
QPVLTQPPSVSVAPGKTARISCGGNNIASEAVHWYQKKPGQAPVLVIYYDSDRPSGIPERFSGSNSGNTATLRISRVDAGDEADYYCQVWDRTTDQPVFGGGTKLTVL

SEQ ID NO: 3814 - protein, 11 aa, Artificial Sequence
  Description of Artificial Sequence: Synthetic peptide
  CT1E1[CTLA-4] vlCDR1
GGNNIASEAVH

SEQ ID NO: 3815 - protein, 7 aa, Artificial Sequence
  Description of Artificial Sequence: Synthetic peptide
  CT1E1[CTLA-4] vlCDR2
YDSDRPS

SEQ ID NO: 3816 - protein, 11 aa, Artificial Sequence
  Description of Artificial Sequence: Synthetic peptide
  CT1E1[CTLA-4] vlCDR3
QVWDRTTDQPV

SEQ ID NO: 3817 - protein, 120 aa, Artificial Sequence
  Description of Artificial Sequence: Synthetic polypeptide
  BMS-986016[LAG-3] variable heavy Chain
QVQLQQWGAGLLKPSETLSLTCAVYGGSFSDYYWNWIRQPPGKGLEWIGEINHRGSTNSNPSLKSRVTLSLDTSKNQFSLKLRSVTAADTAVYYCAFGYSDYEYNWFDPWGQGTLVTVSS

SEQ ID NO: 3818 - protein, 5 aa, Artificial Sequence
  Description of Artificial Sequence: Synthetic peptide
  BMS-986016[LAG-3] vhCDR1
DYYWN

SEQ ID NO: 3819 - protein, 16 aa, Artificial Sequence
  Description of Artificial Sequence: Synthetic peptide
  BMS-986016[LAG-3] vhCDR2
EINHRGSTNSNPSLKS

SEQ ID NO: 3820 - protein, 12 aa, Artificial Sequence
  Description of Artificial Sequence: Synthetic peptide
  BMS-986016[LAG-3] vhCDR3
GYSDYEYNWFDP

SEQ ID NO: 3821 - protein, 107 aa, Artificial Sequence
  Description of Artificial Sequence: Synthetic polypeptide
  BMS-986016[LAG-3] variable light Chain
EIVLTQSPATLSLSPGERATLSCRASQSISSYLAWYQQKPGQAPRLLIYDASNRATGIPARFSGSGSGTDFTLTISSLEPEDFAVYYCQQRSNWPLTFGQGTNLEIK

SEQ ID NO: 3822 - protein, 11 aa, Artificial Sequence
  Description of Artificial Sequence: Synthetic peptide
  BMS-986016[LAG-3] vlCDR1
RASQSISSYLA

SEQ ID NO: 3823 - protein, 7 aa, Artificial Sequence
  Description of Artificial Sequence: Synthetic peptide
  BMS-986016[LAG-3] vlCDR2
DASNRAT

SEQ ID NO: 3824 - protein, 9 aa, Artificial Sequence
  Description of Artificial Sequence: Synthetic peptide
  BMS-986016[LAG-3] vlCDR3
QQRSNWPLT

SEQ ID NO: 3825 - protein, 116 aa, Artificial Sequence
  Description of Artificial Sequence: Synthetic polypeptide
  IMP731[LAG-3] variable heavy Chain
QVQLKESGPGLVAPSQSLSITCTVSGFSLTAYGVNWVRQPPGKGLEWLGMIWDDGSTDYNSALKSRLSISKDNSKSQVFLKMNSLQTDDTARYYCAREGDVAFDYWGQGTTLTVSS

SEQ ID NO: 3826 - protein, 5 aa, Artificial Sequence
  Description of Artificial Sequence: Synthetic peptide
  IMP731[LAG-3] vhCDR1
AYGVN

SEQ ID NO: 3827 - protein, 16 aa, Artificial Sequence
  Description of Artificial Sequence: Synthetic peptide
  IMP731[LAG-3] vhCDR2
MIWDDGSTDYNSALKS

SEQ ID NO: 3828 - protein, 8 aa, Artificial Sequence
  Description of Artificial Sequence: Synthetic peptide
  IMP731[LAG-3] vhCDR3
EGDVAFDY

SEQ ID NO: 3829 - protein, 113 aa, Artificial Sequence
  Description of Artificial Sequence: Synthetic polypeptide
  IMP731[LAG-3] variable light Chain
DIVMTQSPSSLAVSVGQKVTMSCKSSQSLLNGSNQKNYLAWYQQKPGQSPKLLVYFASTRDSGVPDRFIGSGSGTDFTLTISSVQAEDLADYFCLQHFGTPPTFGGGTKLEIK

SEQ ID NO: 3830 - protein, 17 aa, Artificial Sequence
  Description of Artificial Sequence: Synthetic peptide
  IMP731[LAG-3] vlCDR1
KSSQSLLNGSNQKNYLA

SEQ ID NO: 3831 - protein, 7 aa, Artificial Sequence
  Description of Artificial Sequence: Synthetic peptide
  IMP731[LAG-3] vlCDR2
FASTRDS

SEQ ID NO: 3832 - protein, 9 aa, Artificial Sequence
  Description of Artificial Sequence: Synthetic peptide
  IMP731[LAG-3] vlCDR3
LQHFGTPPT

SEQ ID NO: 3833 - protein, 123 aa, Artificial Sequence
  Description of Artificial Sequence: Synthetic polypeptide
  13E2[LAG-3] variable heavy Chain
QVTLKESGPGILQPSQTLSLTCSFSGFSLSTSGMGLGWIRQPSGKGLEWLTHIWWDDIKRYNPDLRSRLTISKDTSSSQIFLKIASVDTADTATYYCARIVEGSYSSSYFDVWGAGTTVTVSS

SEQ ID NO: 3834 - protein, 7 aa, Artificial Sequence
  Description of Artificial Sequence: Synthetic peptide
  13E2[LAG-3] vhCDR1
TSGMGLG

SEQ ID NO: 3835 - protein, 16 aa, Artificial Sequence
  Description of Artificial Sequence: Synthetic peptide
  13E2[LAG-3] vhCDR2
HIWWDDIKRYNPDLRS

SEQ ID NO: 3836 - protein, 13 aa, Artificial Sequence
  Description of Artificial Sequence: Synthetic peptide
  13E2[LAG-3] vhCDR3
IVEGSYSSSYFDV

SEQ ID NO: 3837 - protein, 107 aa, Artificial Sequence
  Description of Artificial Sequence: Synthetic polypeptide
  13E2[LAG-3] variable light Chain
DIVMTQPHKFMSTSVEDRVTITCKASQDVIFDVAWYQQKPGQSPKLLIYSASSRVSGVPDRFTGSGSGTDFTFTISSVQAEDLAVYYCQQHYSTPYTFGGGTTLEIK

SEQ ID NO: 3838 - protein, 11 aa, Artificial Sequence
  Description of Artificial Sequence: Synthetic peptide
  13E2[LAG-3] vlCDR1
KASQDVIFDVA

SEQ ID NO: 3839 - protein, 7 aa, Artificial Sequence
  Description of Artificial Sequence: Synthetic peptide
  13E2[LAG-3] vlCDR2
SASSRVS

SEQ ID NO: 3840 - protein, 9 aa, Artificial Sequence
  Description of Artificial Sequence: Synthetic peptide
  13E2[LAG-3] vlCDR3
QQHYSTPYT

SEQ ID NO: 3841 - protein, 123 aa, Artificial Sequence
  Description of Artificial Sequence: Synthetic polypeptide
  34F4[LAG-3] variable heavy Chain
QVTLKESGPGILQPSQTLSLTCSFSGFSLNTSGMGVGWIRQPSGKGLEWLTHIWWDDVKRYNPALKSRLTISKDTSSSQVFLKIASVDTADTATYYCARIEGDTYYDYYFDYWGQGVTLTVSS

SEQ ID NO: 3842 - protein, 7 aa, Artificial Sequence
  Description of Artificial Sequence: Synthetic peptide
  34F4[LAG-3] vhCDR1
TSGMGVG

SEQ ID NO: 3843 - protein, 16 aa, Artificial Sequence
  Description of Artificial Sequence: Synthetic peptide
  34F4[LAG-3] vhCDR2
HIWWDDVKRYNPALKS

SEQ ID NO: 3844 - protein, 13 aa, Artificial Sequence
  Description of Artificial Sequence: Synthetic peptide
  34F4[LAG-3] vhCDR3
IEGDTYYDYYFDY

SEQ ID NO: 3845 - protein, 107 aa, Artificial Sequence
  Description of Artificial Sequence: Synthetic polypeptide
  34F4[LAG-3] variable light Chain
DIVMTQSHKLMSTSVGDGLSITCKASQDVSIAVVWYQQKPGQSPKLLIYSASFRYTGVPDRFTGSGSGTDFTFTISSVQAEDLAVYYCQQHYSIPWTFGGGTKLEIK

SEQ ID NO: 3846 - protein, 11 aa, Artificial Sequence
  Description of Artificial Sequence: Synthetic peptide
  34F4[LAG-3] vlCDR1
KASQDVSIAVV

SEQ ID NO: 3847 - protein, 7 aa, Artificial Sequence
  Description of Artificial Sequence: Synthetic peptide
  34F4[LAG-3] vlCDR2
SASFRYT

SEQ ID NO: 3848 - protein, 9 aa, Artificial Sequence
  Description of Artificial Sequence: Synthetic peptide
  34F4[LAG-3] vlCDR3
QQHYSIPWT

SEQ ID NO: 3849 - protein, 123 aa, Artificial Sequence
  Description of Artificial Sequence: Synthetic polypeptide
  IMP761[LAG-3] variable heavy Chain
QITLKESGPTLVKPTQTLTLTCTFSGFSLSTSGMGLGWIRQPPGKTLEWLTHIWWDDIKRYNPDLRSRLSITKDTSKNQVVLTMTNMDPLDTGTYYCARIVEGSYSSSYFDVWGQGTLVTVSS

SEQ ID NO: 3850 - protein, 7 aa, Artificial Sequence
  Description of Artificial Sequence: Synthetic peptide
  IMP761[LAG-3] vhCDR1
TSGMGLG

SEQ ID NO: 3851 - protein, 16 aa, Artificial Sequence
  Description of Artificial Sequence: Synthetic peptide
  IMP761[LAG-3] vhCDR2
HIWWDDIKRYNPDLRS

SEQ ID NO: 3852 - protein, 13 aa, Artificial Sequence
  Description of Artificial Sequence: Synthetic peptide
  IMP761[LAG-3] vhCDR3
IVEGSYSSSYFDV

SEQ ID NO: 3853 - protein, 107 aa, Artificial Sequence
  Description of Artificial Sequence: Synthetic polypeptide
  IMP761[LAG-3] variable light Chain
DIVMTQTPSSLSASVGDRVTITCKASQDVIFDVAWYQQRPGQAPKLLIYSASSRVSGVPSRFSGSGSGTDFTLTISSLQPEDFATYYCQQHYSTPYTFGQGTRLDIK

SEQ ID NO: 3854 - protein, 11 aa, Artificial Sequence
  Description of Artificial Sequence: Synthetic peptide
  IMP761[LAG-3] vlCDR1
KASQDVIFDVA

SEQ ID NO: 3855 - protein, 7 aa, Artificial Sequence
  Description of Artificial Sequence: Synthetic peptide
  IMP761[LAG-3] vlCDR2
SASSRVS

SEQ ID NO: 3856 - protein, 9 aa, Artificial Sequence
  Description of Artificial Sequence: Synthetic peptide
  IMP761[LAG-3] vlCDR3
QQHYSTPYT

SEQ ID NO: 3857 - protein, 116 aa, Artificial Sequence
  Description of Artificial Sequence: Synthetic polypeptide
  H5L7[LAG-3] variable heavy Chain
QVQLQESGPGLVKPSETLSLTCTVSGFSLTAYGVNWIRQPPGKGLEWIGMIWDDGSTDYDSALKSRVTISVDTSKNQFSLKLSSVTAADTAVYYCAREGDVAFDYWGQGTLVTVSS

SEQ ID NO: 3858 - protein, 5 aa, Artificial Sequence
  Description of Artificial Sequence: Synthetic peptide
  H5L7[LAG-3] vhCDR1
AYGVN

SEQ ID NO: 3859 - protein, 16 aa, Artificial Sequence
  Description of Artificial Sequence: Synthetic peptide
  H5L7[LAG-3] vhCDR2
MIWDDGSTDYDSALKS

SEQ ID NO: 3860 - protein, 8 aa, Artificial Sequence
  Description of Artificial Sequence: Synthetic peptide
  H5L7[LAG-3] vhCDR3
EGDVAFDY

SEQ ID NO: 3861 - protein, 113 aa, Artificial Sequence
  Description of Artificial Sequence: Synthetic polypeptide
  H5L7[LAG-3] variable light Chain
DIQMTQSPSSLSASVGDRVTITCKSSQSLLNPSNQKNYLAWYQQKPGKAPKLLVYFASTRDSGVPSRFSGSGSGTDFTLTISSLQPEDFATYYCLQHFGTPPTFGQGTKLEIK

SEQ ID NO: 3862 - protein, 17 aa, Artificial Sequence
  Description of Artificial Sequence: Synthetic peptide
  H5L7[LAG-3] vlCDR1
KSSQSLLNPSNQKNYLA

SEQ ID NO: 3863 - protein, 7 aa, Artificial Sequence
  Description of Artificial Sequence: Synthetic peptide
  H5L7[LAG-3] vlCDR2
FASTRDS

SEQ ID NO: 3864 - protein, 9 aa, Artificial Sequence
  Description of Artificial Sequence: Synthetic peptide
  H5L7[LAG-3] vlCDR3
LQHFGTPPT

SEQ ID NO: 3865 - protein, 119 aa, Artificial Sequence
  Description of Artificial Sequence: Synthetic polypeptide
  hu22D2[LAG-3] variable heavy Chain
QMQLVQSGPEVKKPGTSVKVSCKASGYTFTDYNVDWVRQARGQRLEWIGDINPNNGGTIYAQKFQERVTITVDKSTSTAYMELSSLRSEDTAVYYCARNYRWFGAMDHWGQGTTVTVSS

SEQ ID NO: 3866 - protein, 5 aa, Artificial Sequence
  Description of Artificial Sequence: Synthetic peptide
  hu22D2[LAG-3] vhCDR1
DYNVD

SEQ ID NO: 3867 - protein, 17 aa, Artificial Sequence
  Description of Artificial Sequence: Synthetic peptide
  hu22D2[LAG-3] vhCDR2
DINPNNGGTIYAQKFQE

SEQ ID NO: 3868 - protein, 10 aa, Artificial Sequence
  Description of Artificial Sequence: Synthetic peptide
  hu22D2[LAG-3] vhCDR3
NYRWFGAMDH

SEQ ID NO: 3869 - protein, 111 aa, Artificial Sequence
  Description of Artificial Sequence: Synthetic polypeptide
  hu22D2[LAG-3] variable light Chain
DIVMTQTPLSLSVTPGQPASISCKASQSLDYEGDSDMNWYLQKPGQPPQLLIYGASNLESGVPDRFSGSGSGTDFTLKISRVEAEDVGVYYCQQSTEDPRTFGGGTKVEIK

SEQ ID NO: 3870 - protein, 15 aa, Artificial Sequence
  Description of Artificial Sequence: Synthetic peptide
  hu22D2[LAG-3] vlCDR1
KASQSLDYEGDSDMN

SEQ ID NO: 3871 - protein, 7 aa, Artificial Sequence
  Description of Artificial Sequence: Synthetic peptide
  hu22D2[LAG-3] vlCDR2
GASNLES

SEQ ID NO: 3872 - protein, 9 aa, Artificial Sequence
  Description of Artificial Sequence: Synthetic peptide
  hu22D2[LAG-3] vlCDR3
QQSTEDPRT

SEQ ID NO: 3873 - protein, 123 aa, Artificial Sequence
  Description of Artificial Sequence: Synthetic polypeptide
  H4sH15482P[LAG-3] variable heavy Chain
QVQLVESGGGVVQPGRSLRLSCVASGFTFSSYGMHWVRQAPGKGLEWVAIIWYDGSNKYYADSVKGRFTISRDNSKNTQYLQMNSLRAEDTAVYYCASVATSGDFDYYGMDVWGQGTTVTVSS

SEQ ID NO: 3874 - protein, 5 aa, Artificial Sequence
  Description of Artificial Sequence: Synthetic peptide
  H4sH15482P[LAG-3] vhCDR1
SYGMH

SEQ ID NO: 3875 - protein, 17 aa, Artificial Sequence
  Description of Artificial Sequence: Synthetic peptide
  H4sH15482P[LAG-3] vhCDR2
IIWYDGSNKYYADSVKG

SEQ ID NO: 3876 - protein, 14 aa, Artificial Sequence
  Description of Artificial Sequence: Synthetic peptide
  H4sH15482P[LAG-3] vhCDR3
VATSGDFDYYGMDV

SEQ ID NO: 3877 - protein, 107 aa, Artificial Sequence
  Description of Artificial Sequence: Synthetic polypeptide
  H4sH15482P[LAG-3] variable light Chain
EIVLTQSPATLSLSPGERTTLSCRASQRISTYLAWYQQKPGQAPRLLIYDASKRATGIPARFSGSGSGTGFTLTISSLEPEDFAVYYCQQRSNWPLTFGGGTKVEIK

SEQ ID NO: 3878 - protein, 11 aa, Artificial Sequence
  Description of Artificial Sequence: Synthetic peptide
  H4sH15482P[LAG-3] vlCDR1
RASQRISTYLA

SEQ ID NO: 3879 - protein, 7 aa, Artificial Sequence
  Description of Artificial Sequence: Synthetic peptide
  H4sH15482P[LAG-3] vlCDR2
DASKRAT

SEQ ID NO: 3880 - protein, 9 aa, Artificial Sequence
  Description of Artificial Sequence: Synthetic peptide
  H4sH15482P[LAG-3] vlCDR3
QQRSNWPLT

SEQ ID NO: 3881 - protein, 119 aa, Artificial Sequence
  Description of Artificial Sequence: Synthetic polypeptide
  L35D4[LAG-3] variable heavy Chain
QVQLVQSGAEVKKPGASVKVSCKASGYTFTSYYMHWVRQAPGQGLEWMGIINPSAGSTSYAQKFQGRVTMTRDTSTSTVYMELSSLRSEDTAVYYCARELMATGGFDYWGQGTLVTVSS

SEQ ID NO: 3882 - protein, 5 aa, Artificial Sequence
  Description of Artificial Sequence: Synthetic peptide
  L35D4[LAG-3] vhCDR1
SYYMH

SEQ ID NO: 3883 - protein, 17 aa, Artificial Sequence
  Description of Artificial Sequence: Synthetic peptide
  L35D4[LAG-3] vhCDR2
IINPSAGSTSYAQKFQG

SEQ ID NO: 3884 - protein, 10 aa, Artificial Sequence
  Description of Artificial Sequence: Synthetic peptide
  L35D4[LAG-3] vhCDR3
ELMATGGFDY

SEQ ID NO: 3885 - protein, 112 aa, Artificial Sequence
  Description of Artificial Sequence: Synthetic polypeptide
  L35D4[LAG-3] variable light Chain
QSVLTQPPSASGSPGQSVTISCTGTSSDVGGYNYVSWYQQYPGKAPRLMIFEVTERASGVPDRFSGSKSGNTASLTVSGLQTEDEAVYFCSSYSGSNNPGAMFGGGTKLTVL

SEQ ID NO: 3886 - protein, 14 aa, Artificial Sequence
  Description of Artificial Sequence: Synthetic peptide
  L35D4[LAG-3] vlCDR1
TGTSSDVGGYNYVS

SEQ ID NO: 3887 - protein, 7 aa, Artificial Sequence
  Description of Artificial Sequence: Synthetic peptide
  L35D4[LAG-3] vlCDR2
EVTERAS

SEQ ID NO: 3888 - protein, 12 aa, Artificial Sequence
  Description of Artificial Sequence: Synthetic peptide
  L35D4[LAG-3] vlCDR3
SSYSGSNNPGAM

SEQ ID NO: 3889 - protein, 119 aa, Artificial Sequence; identical to SEQ ID NO: 3881
  Description of Artificial Sequence: Synthetic polypeptide
  L35G6[LAG-3] variable heavy Chain

SEQ ID NO: 3890 - protein, 5 aa, Artificial Sequence
  Description of Artificial Sequence: Synthetic peptide
  L35G6[LAG-3] vhCDR1
SYYMH

SEQ ID NO: 3891 - protein, 17 aa, Artificial Sequence
  Description of Artificial Sequence: Synthetic peptide
  L35G6[LAG-3] vhCDR2
IINPSAGSTSYAQKFQG

SEQ ID NO: 3892 - protein, 10 aa, Artificial Sequence
  Description of Artificial Sequence: Synthetic peptide
  L35G6[LAG-3] vhCDR3
ELMATGGFDY

SEQ ID NO: 3893 - protein, 110 aa, Artificial Sequence
  Description of Artificial Sequence: Synthetic polypeptide
  L35G6[LAG-3] variable light Chain
QAGLTQPASVSGSPGQSITISCTGSSSDVGGYSYVSWYQKHPGKAPKLMIYDVTNRPSGVSNRFSGSKSGNTASLTISGLQAEDEADYYCSTYTRSNTLVFGPGTKVTVL

SEQ ID NO: 3894 - protein, 14 aa, Artificial Sequence
  Description of Artificial Sequence: Synthetic peptide
  L35G6[LAG-3] vlCDR1
TGSSSDVGGYSYVS

SEQ ID NO: 3895 - protein, 7 aa, Artificial Sequence
  Description of Artificial Sequence: Synthetic peptide
  L35G6[LAG-3] vlCDR2
DVTNRPS

SEQ ID NO: 3896 - protein, 10 aa, Artificial Sequence
  Description of Artificial Sequence: Synthetic peptide
  L35G6[LAG-3] vlCDR3
STYTRSNTLV

SEQ ID NO: 3897 - protein, 119 aa, Artificial Sequence; identical to SEQ ID NO: 3881
  Description of Artificial Sequence: Synthetic polypeptide
  L33H11[LAG-3] variable heavy Chain

SEQ ID NO: 3898 - protein, 5 aa, Artificial Sequence
  Description of Artificial Sequence: Synthetic peptide
  L33H11[LAG-3] vhCDR1
SYYMH

SEQ ID NO: 3899 - protein, 17 aa, Artificial Sequence
  Description of Artificial Sequence: Synthetic peptide
  L33H11[LAG-3] vhCDR2
IINPSAGSTSYAQKFQG

SEQ ID NO: 3900 - protein, 10 aa, Artificial Sequence
  Description of Artificial Sequence: Synthetic peptide
  L33H11[LAG-3] vhCDR3
ELMATGGFDY

SEQ ID NO: 3901 - protein, 110 aa, Artificial Sequence
  Description of Artificial Sequence: Synthetic polypeptide
  L33H11[LAG-3] variable light Chain
LPVLTQPASVSGSPGQSITISCTGTSSDVGGYNYVSWYQQHPGKAPKLMIYDVTNRPSGVSNRFSGSKSGNTASLTISGLQAEDEADYYCSSYTSSNTLLFGGGTQLTVL

SEQ ID NO: 3902 - protein, 14 aa, Artificial Sequence
  Description of Artificial Sequence: Synthetic peptide
  L33H11[LAG-3] vlCDR1
TGTSSDVGGYNYVS

SEQ ID NO: 3903 - protein, 7 aa, Artificial Sequence
  Description of Artificial Sequence: Synthetic peptide
  L33H11[LAG-3] vlCDR2
DVTNRPS

SEQ ID NO: 3904 - protein, 10 aa, Artificial Sequence
  Description of Artificial Sequence: Synthetic peptide
  L33H11[LAG-3] vlCDR3
SSYTSSNTLL

SEQ ID NO: 3905 - protein, 119 aa, Artificial Sequence; identical to SEQ ID NO: 3881
  Description of Artificial Sequence: Synthetic polypeptide
  L32A9[LAG-3] variable heavy Chain

SEQ ID NO: 3906 - protein, 5 aa, Artificial Sequence
  Description of Artificial Sequence: Synthetic peptide
  L32A9[LAG-3] vhCDR1
SYYMH

SEQ ID NO: 3907 - protein, 17 aa, Artificial Sequence
  Description of Artificial Sequence: Synthetic peptide
  L32A9[LAG-3] vhCDR2
IINPSAGSTSYAQKFQG

SEQ ID NO: 3908 - protein, 10 aa, Artificial Sequence
  Description of Artificial Sequence: Synthetic peptide
  L32A9[LAG-3] vhCDR3
ELMATGGFDY

SEQ ID NO: 3909 - protein, 110 aa, Artificial Sequence
  Description of Artificial Sequence: Synthetic polypeptide
  L32A9[LAG-3] variable light Chain
QSVVTQPPSVSAAPGQKVTISCSGSSSNIGNNYVSWYQQLPGTAPKLLIYDNNKRHSGIPDRFSGSTSDTSATLGITRLQTGDEADYYCGTWDSSLSAYVFGTGTKVTVL

SEQ ID NO: 3910 - protein, 13 aa, Artificial Sequence
  Description of Artificial Sequence: Synthetic peptide
  L32A9[LAG-3] vlCDR1
SGSSSNIGNNYVS

SEQ ID NO: 3911 - protein, 7 aa, Artificial Sequence
  Description of Artificial Sequence: Synthetic peptide
  L32A9[LAG-3] vlCDR2
DNNKRHS

SEQ ID NO: 3912 - protein, 11 aa, Artificial Sequence
  Description of Artificial Sequence: Synthetic peptide
  L32A9[LAG-3] vlCDR3
GTWDSSLSAYV

SEQ ID NO: 3913 - protein, 119 aa, Artificial Sequence; identical to SEQ ID NO: 3881
  Description of Artificial Sequence: Synthetic polypeptide
  L32D10[LAG-3] variable heavy Chain

SEQ ID NO: 3914 - protein, 5 aa, Artificial Sequence
  Description of Artificial Sequence: Synthetic peptide
  L32D10[LAG-3] vhCDR1
SYYMH

SEQ ID NO: 3915 - protein, 17 aa, Artificial Sequence
  Description of Artificial Sequence: Synthetic peptide
  L32D10[LAG-3] vhCDR2
IINPSAGSTSYAQKFQG

SEQ ID NO: 3916 - protein, 10 aa, Artificial Sequence
  Description of Artificial Sequence: Synthetic peptide
  L32D10[LAG-3] vhCDR3
ELMATGGFDY

SEQ ID NO: 3917 - protein, 110 aa, Artificial Sequence
  Description of Artificial Sequence: Synthetic polypeptide
  L32D10[LAG-3] variable light Chain
QSVLTQPPSASGSPGQSVTISCTGTSSDVGGYDYVSWYQQHQGKAPKLMIYDVSNRPSGVSNRFSGSKSGNTASLTISGLQAEDEADYYCSSYTSSTTLVFGGGTKLTVL

SEQ ID NO: 3918 - protein, 14 aa, Artificial Sequence
  Description of Artificial Sequence: Synthetic peptide
  L32D10[LAG-3] vlCDR1
TGTSSDVGGYDYVS

SEQ ID NO: 3919 - protein, 7 aa, Artificial Sequence
  Description of Artificial Sequence: Synthetic peptide
  L32D10[LAG-3] vlCDR2
DVSNRPS

SEQ ID NO: 3920 - protein, 10 aa, Artificial Sequence
  Description of Artificial Sequence: Synthetic peptide
  L32D10[LAG-3] vlCDR3
SSYTSSTTLV

SEQ ID NO: 3921 - protein, 119 aa, Artificial Sequence; identical to SEQ ID NO: 3881
  Description of Artificial Sequence: Synthetic polypeptide
  L32A4[LAG-3] variable heavy Chain

SEQ ID NO: 3922 - protein, 5 aa, Artificial Sequence
  Description of Artificial Sequence: Synthetic peptide
  L32A4[LAG-3] vhCDR1
SYYMH

SEQ ID NO: 3923 - protein, 17 aa, Artificial Sequence
  Description of Artificial Sequence: Synthetic peptide
  L32A4[LAG-3] vhCDR2
IINPSAGSTSYAQKFQG

SEQ ID NO: 3924 - protein, 10 aa, Artificial Sequence
  Description of Artificial Sequence: Synthetic peptide
  L32A4[LAG-3] vhCDR3
ELMATGGFDY

SEQ ID NO: 3925 - protein, 110 aa, Artificial Sequence
  Description of Artificial Sequence: Synthetic polypeptide
  L32A4[LAG-3] variable light Chain
QSVLTQPASVSGSPGQSITISCTGTSSDIGAYNFVSWYQQHPGKAPKLMIYGVSNRPSGVSSRFSGSKSGSTASLTISGLQAEDEADYYCSSYTTSGSAVFGTGTKLTVL

SEQ ID NO: 3926 - protein, 14 aa, Artificial Sequence
  Description of Artificial Sequence: Synthetic peptide
  L32A4[LAG-3] vlCDR1
TGTSSDIGAYNFVS

SEQ ID NO: 3927 - protein, 7 aa, Artificial Sequence
  Description of Artificial Sequence: Synthetic peptide
  L32A4[LAG-3] vlCDR2
GVSNRPS

SEQ ID NO: 3928 - protein, 10 aa, Artificial Sequence
  Description of Artificial Sequence: Synthetic peptide
  L32A4[LAG-3] vlCDR3
SSYTTSGSAV

SEQ ID NO: 3929 - protein, 119 aa, Artificial Sequence
  Description of Artificial Sequence: Synthetic polypeptide
  L3A1[LAG-3] variable heavy Chain
EVQLLESGAEVKKPGASVKVSCKASGYTFTSYYMHWVRQAPGQGLEWMGIINPSAGSTSYAQKFQGRVTMTRDTSTSTVYMELSSLRSEDTAVYYCARELMATGGFDYWGQGTLVTVSS

SEQ ID NO: 3930 - protein, 5 aa, Artificial Sequence
  Description of Artificial Sequence: Synthetic peptide
  L3A1[LAG-3] vhCDR1
SYYMH

SEQ ID NO: 3931 - protein, 17 aa, Artificial Sequence
  Description of Artificial Sequence: Synthetic peptide
  L3A1[LAG-3] vhCDR2
IINPSAGSTSYAQKFQG

SEQ ID NO: 3932 - protein, 10 aa, Artificial Sequence
  Description of Artificial Sequence: Synthetic peptide
  L3A1[LAG-3] vhCDR3
ELMATGGFDY

SEQ ID NO: 3933 - protein, 110 aa, Artificial Sequence
  Description of Artificial Sequence: Synthetic polypeptide
  L3A1[LAG-3] variable light Chain
QSVLTQPASVSGSPGQSITISCTGTSSDIGAYNFVSWYQQHPGKAPKLMIYGVSNRPSGVSSRFSGSKSGSTASLTITGLQAEDEADYYCSSYTTSGSAVFGTGTKLTVL

SEQ ID NO: 3934 - protein, 14 aa, Artificial Sequence
  Description of Artificial Sequence: Synthetic peptide
  L3A1[LAG-3] vlCDR1
TGTSSDIGAYNFVS

SEQ ID NO: 3935 - protein, 7 aa, Artificial Sequence
  Description of Artificial Sequence: Synthetic peptide
  L3A1[LAG-3] vlCDR2
GVSNRPS

SEQ ID NO: 3936 - protein, 10 aa, Artificial Sequence
  Description of Artificial Sequence: Synthetic peptide
  L3A1[LAG-3] vlCDR3
SSYTTSGSAV

SEQ ID NO: 3937 - protein, 121 aa, Artificial Sequence
  Description of Artificial Sequence: Synthetic polypeptide
  L3A10[LAG-3] variable heavy Chain
EVQLLESGGGVVQPGRSLRVSCAASGFTFSNHAMHWVRQAPGKGLEWVAVISYDGSKKFYSDSVRGRFTISRDNSKNTLYLQMNSLRPEDTAVYYCAKGAHGYTSGWHDYWGQGTLVTVSS

SEQ ID NO: 3938 - protein, 5 aa, Artificial Sequence
  Description of Artificial Sequence: Synthetic peptide
  L3A10[LAG-3] vhCDR1
NHAMH

SEQ ID NO: 3939 - protein, 17 aa, Artificial Sequence
  Description of Artificial Sequence: Synthetic peptide
  L3A10[LAG-3] vhCDR2
VISYDGSKKFYSDSVRG

SEQ ID NO: 3940 - protein, 12 aa, Artificial Sequence
  Description of Artificial Sequence: Synthetic peptide
  L3A10[LAG-3] vhCDR3
GAHGYTSGWHDY

SEQ ID NO: 3941 - protein, 108 aa, Artificial Sequence
  Description of Artificial Sequence: Synthetic polypeptide
  L3A10[LAG-3] variable light Chain
DVVMTQSPSSLSASVGDRVSITCRASQNIGRYLNWYQQKPGKAPKLLVSAASSLQGGVPSRFSGSGSGTDFTLTISRLQPEDFATYFCQQTYSSPQCTFGQGTKVDIK

SEQ ID NO: 3942 - protein, 11 aa, Artificial Sequence
  Description of Artificial Sequence: Synthetic peptide
  L3A10[LAG-3] vlCDR1
RASQNIGRYLN

SEQ ID NO: 3943 - protein, 7 aa, Artificial Sequence
  Description of Artificial Sequence: Synthetic peptide
  L3A10[LAG-3] vlCDR2
AASSLQG

SEQ ID NO: 3944 - protein, 10 aa, Artificial Sequence
  Description of Artificial Sequence: Synthetic peptide
  L3A10[LAG-3] vlCDR3
QQTYSSPQCT

SEQ ID NO: 3945 - protein, 121 aa, Artificial Sequence
  Description of Artificial Sequence: Synthetic polypeptide
  L3C5[LAG-3] variable heavy Chain
QVQLVQSGSELKKPGASVKVSCKASGYTFTNYYMHWVRQAPGQGLEWMGIINPSGGATNYAQKFQGRVTMTRDTSTSTVYMELSSLRSEDTAVYYCARDSGYDLGYGMDVWGQGTLVTVSS

SEQ ID NO: 3946 - protein, 5 aa, Artificial Sequence
  Description of Artificial Sequence: Synthetic peptide
  L3C5[LAG-3] vhCDR1
NYYMH

SEQ ID NO: 3947 - protein, 17 aa, Artificial Sequence
  Description of Artificial Sequence: Synthetic peptide
  L3C5[LAG-3] vhCDR2
IINPSGGATNYAQKFQG

SEQ ID NO: 3948 - protein, 12 aa, Artificial Sequence
  Description of Artificial Sequence: Synthetic peptide
  L3C5[LAG-3] vhCDR3
DSGYDLGYGMDV

SEQ ID NO: 3949 - protein, 110 aa, Artificial Sequence
  Description of Artificial Sequence: Synthetic polypeptide
  L3C5[LAG-3] variable light Chain
QSVLTQPASVSGSPGQSITISCTGTSSDVGGYNYVSWYQQHPGKAPKLMIYDVSNRPSGASNRFSGSKSGNTASLTISGLQAEDEADYYCSSYTNRNTLLFGGGTKLTVL

SEQ ID NO: 3950 - protein, 14 aa, Artificial Sequence
  Description of Artificial Sequence: Synthetic peptide
  L3C5[LAG-3] vlCDR1
TGTSSDVGGYNYVS

SEQ ID NO: 3951 - protein, 7 aa, Artificial Sequence
  Description of Artificial Sequence: Synthetic peptide
  L3C5[LAG-3] vlCDR2
DVSNRPS

SEQ ID NO: 3952 - protein, 10 aa, Artificial Sequence
  Description of Artificial Sequence: Synthetic peptide
  L3C5[LAG-3] vlCDR3
SSYTNRNTLL

SEQ ID NO: 3953 - protein, 119 aa, Artificial Sequence; identical to SEQ ID NO: 3929
  Description of Artificial Sequence: Synthetic polypeptide
  L3E3[LAG-3] variable heavy Chain

SEQ ID NO: 3954 - protein, 5 aa, Artificial Sequence
  Description of Artificial Sequence: Synthetic peptide
  L3E3[LAG-3] vhCDR1
SYYMH

SEQ ID NO: 3955 - protein, 17 aa, Artificial Sequence
  Description of Artificial Sequence: Synthetic peptide
  L3E3[LAG-3] vhCDR2
IINPSAGSTSYAQKFQG

SEQ ID NO: 3956 - protein, 10 aa, Artificial Sequence
  Description of Artificial Sequence: Synthetic peptide
  L3E3[LAG-3] vhCDR3
ELMATGGFDY

SEQ ID NO: 3957 - protein, 110 aa, Artificial Sequence
  Description of Artificial Sequence: Synthetic polypeptide
  L3E3[LAG-3] variable light Chain
QSVLTQPASASGSPGQSITISCTGTSSDVGGYNYVSWYQQHPGKAPKLMIYDVSNRPSGVSNRFSGSKSGNTASLTISGLQAEDEANYYCSSYTSSSTNVFGTGTKVTVL

SEQ ID NO: 3958 - protein, 14 aa, Artificial Sequence
  Description of Artificial Sequence: Synthetic peptide
  L3E3[LAG-3] vlCDR1
TGTSSDVGGYNYVS

SEQ ID NO: 3959 - protein, 7 aa, Artificial Sequence
  Description of Artificial Sequence: Synthetic peptide
  L3E3[LAG-3] vlCDR2
DVSNRPS

SEQ ID NO: 3960 - protein, 10 aa, Artificial Sequence
  Description of Artificial Sequence: Synthetic peptide
  L3E3[LAG-3] vlCDR3
SSYTSSSTNV

SEQ ID NO: 3961 - protein, 121 aa, Artificial Sequence
  Description of Artificial Sequence: Synthetic polypeptide
  durvalumab[PD-L1] variable heavy Chain
EVQLVESGGGLVQPGGSLRLSCAASGFTFSRYWMSWVRQAPGKGLEWVANIKQDGSEKYYVDSVKGRFTISRDNAKNSLYLQMNSLRAEDTAVYYCAREGGWFGELAFDYWGQGTLVTVSS

SEQ ID NO: 3962 - protein, 5 aa, Artificial Sequence
  Description of Artificial Sequence: Synthetic peptide
  durvalumab[PD-L1] vhCDR1
RYWMS

SEQ ID NO: 3963 - protein, 17 aa, Artificial Sequence
  Description of Artificial Sequence: Synthetic peptide
  durvalumab[PD-L1] vhCDR2
NIKQDGSEKYYVDSVKG

SEQ ID NO: 3964 - protein, 12 aa, Artificial Sequence
  Description of Artificial Sequence: Synthetic peptide
  durvalumab[PD-L1] vhCDR3
EGGWFGELAFDY

SEQ ID NO: 3965 - protein, 108 aa, Artificial Sequence
  Description of Artificial Sequence: Synthetic polypeptide
  durvalumab[PD-L1] variable light Chain
EIVLTQSPGTLSLSPGERATLSCRASQRVSSSYLAWYQQKPGQAPRLLIYDASSRATGIPDRFSGSGSGTDFTLTISRLEPEDFAVYYCQQYGSLPWTFGQGTKVEIK

SEQ ID NO: 3966 - protein, 12 aa, Artificial Sequence
  Description of Artificial Sequence: Synthetic peptide
  durvalumab[PD-L1] vlCDR1
RASQRVSSSYLA

SEQ ID NO: 3967 - protein, 7 aa, Artificial Sequence
  Description of Artificial Sequence: Synthetic peptide
  durvalumab[PD-L1] vlCDR2
DASSRAT

SEQ ID NO: 3968 - protein, 9 aa, Artificial Sequence
  Description of Artificial Sequence: Synthetic peptide
  durvalumab[PD-L1] vlCDR3
QQYGSLPWT

SEQ ID NO: 3969 - protein, 118 aa, Artificial Sequence
  Description of Artificial Sequence: Synthetic polypeptide
  atezolizumab[PD-L1] variable heavy Chain
EVQLVESGGGLVQPGGSLRLSCAASGFTFSDSWIHWVRQAPGKGLEWVAWISPYGGSTYYADSVKGRFTISADTSKNTAYLQMNSLRAEDTAVYYCARRHWPGGFDYWGQGTLVTVSA

SEQ ID NO: 3970 - protein, 5 aa, Artificial Sequence
  Description of Artificial Sequence: Synthetic peptide
  atezolizumab[PD-L1] vhCDR1
DSWIH

SEQ ID NO: 3971 - protein, 17 aa, Artificial Sequence
  Description of Artificial Sequence: Synthetic peptide
  atezolizumab[PD-L1] vhCDR2
WISPYGGSTYYADSVKG

SEQ ID NO: 3972 - protein, 9 aa, Artificial Sequence
  Description of Artificial Sequence: Synthetic peptide
  atezolizumab[PD-L1] vhCDR3
RHWPGGFDY

SEQ ID NO: 3973 - protein, 108 aa, Artificial Sequence
  Description of Artificial Sequence: Synthetic polypeptide
  atezolizumab[PD-L1] variable light Chain
DIQMTQSPSSLSASVGDRVTITCRASQDVSTAVAWYQQKPGKAPKLLIYSASFLYSGVPSRFSGSGSGTDFTLTISSLQPEDFATYYCQQYLYHPATFGQGTKVEIKR

SEQ ID NO: 3974 - protein, 11 aa, Artificial Sequence
  Description of Artificial Sequence: Synthetic peptide
  atezolizumab[PD-L1] vlCDR1
RASQDVSTAVA

SEQ ID NO: 3975 - protein, 7 aa, Artificial Sequence
  Description of Artificial Sequence: Synthetic peptide
  atezolizumab[PD-L1] vlCDR2
SASFLYS

SEQ ID NO: 3976 - protein, 9 aa, Artificial Sequence
  Description of Artificial Sequence: Synthetic peptide
  atezolizumab[PD-L1] vlCDR3
QQYLYHPAT

SEQ ID NO: 3977 - protein, 120 aa, Artificial Sequence
  Description of Artificial Sequence: Synthetic polypeptide
  A09-246-2[PD-L1] variable heavy Chain
EVQLLESGGGLVQPGGSLRLSCAASGFTFSSYIMMWVRQAPGKGLEWVSSIYPSGGITFYADTVKGRFTISRDNSKNTLYLQMNSLRAEDTAVYYCARIKLGTVTTVDYWGQGTLVTVSS

SEQ ID NO: 3978 - protein, 5 aa, Artificial Sequence
  Description of Artificial Sequence: Synthetic peptide
  A09-246-2[PD-L1] vhCDR1
SYIMM

SEQ ID NO: 3979 - protein, 17 aa, Artificial Sequence
  Description of Artificial Sequence: Synthetic peptide
  A09-246-2[PD-L1] vhCDR2
SIYPSGGITFYADTVKG

SEQ ID NO: 3980 - protein, 11 aa, Artificial Sequence
  Description of Artificial Sequence: Synthetic peptide
  A09-246-2[PD-L1] vhCDR3
IKLGTVTTVDY

SEQ ID NO: 3981 - protein, 110 aa, Artificial Sequence
  Description of Artificial Sequence: Synthetic polypeptide
  A09-246-2[PD-L1] variable light Chain
QSALTQPASVSGSPGQSITISCTGTSSDVGGYNYVSWYQQHPGKAPKLMIYDVSNRPSGVSNRFSGSKSGNTASLTISGLQAEDEADYYCSSYTSSSTRVFGTGTKVTVL

SEQ ID NO: 3982 - protein, 14 aa, Artificial Sequence
  Description of Artificial Sequence: Synthetic peptide
  A09-246-2[PD-L1] vlCDR1
TGTSSDVGGYNYVS

SEQ ID NO: 3983 - protein, 7 aa, Artificial Sequence
  Description of Artificial Sequence: Synthetic peptide
  A09-246-2[PD-L1] vlCDR2
DVSNRPS

SEQ ID NO: 3984 - protein, 10 aa, Artificial Sequence
  Description of Artificial Sequence: Synthetic peptide
  A09-246-2[PD-L1] vlCDR3
SSYTSSSTRV

SEQ ID NO: 3985 - protein, 123 aa, Artificial Sequence
  Description of Artificial Sequence: Synthetic polypeptide
  12A4[PD-L1] variable heavy Chain
QVQLVQSGAEVKKPGSSVKVSCKTSGDTFSTYAISWVRQAPGQGLEWMGGIIPIFGKAHYAQKFQGRVTITADESTSTAYMELSSLRSEDTAVYFCARKFHFVSGSPFGMDVWGQGTTVTVSS

SEQ ID NO: 3986 - protein, 5 aa, Artificial Sequence
  Description of Artificial Sequence: Synthetic peptide
  12A4[PD-L1] vhCDR1
TYAIS

SEQ ID NO: 3987 - protein, 17 aa, Artificial Sequence
  Description of Artificial Sequence: Synthetic peptide
  12A4[PD-L1] vhCDR2
GIIPIFGKAHYAQKFQG

SEQ ID NO: 3988 - protein, 14 aa, Artificial Sequence
  Description of Artificial Sequence: Synthetic peptide
  12A4[PD-L1] vhCDR3
KFHFVSGSPFGMDV

SEQ ID NO: 3989 - protein, 106 aa, Artificial Sequence
  Description of Artificial Sequence: Synthetic polypeptide
  12A4[PD-L1] variable light Chain
EIVLTQSPATLSLSPGERATLSCRASQSVSSYLAWYQQKPGQAPRLLIYDASNRATGIPARFSGSGSGTDFTLTISSLEPEDFAVYYCQQRSNWPTFGQGTKVEIK

SEQ ID NO: 3990 - protein, 11 aa, Artificial Sequence
  Description of Artificial Sequence: Synthetic peptide
  12A4[PD-L1] vlCDR1
RASQSVSSYLA

SEQ ID NO: 3991 - protein, 7 aa, Artificial Sequence
  Description of Artificial Sequence: Synthetic peptide
  12A4[PD-L1] vlCDR2
DASNRAT

SEQ ID NO: 3992 - protein, 8 aa, Artificial Sequence
  Description of Artificial Sequence: Synthetic peptide
  12A4[PD-L1] vlCDR3
QQRSNWPT

SEQ ID NO: 3993 - protein, 117 aa, Artificial Sequence
  Description of Artificial Sequence: Synthetic polypeptide
  3G10[PD-L1] variable heavy Chain
QVQLVQSGAEVKKPGASVKVSCKASGYTFTDYGFSWVRQAPGQGLEWMGWITAYNGNTNYAQKLQGRVTMTTDTSTSTVYMELRSLRSDDTAVYYCARDYFYGMDVWGQGTTVTVSS

SEQ ID NO: 3994 - protein, 5 aa, Artificial Sequence
  Description of Artificial Sequence: Synthetic peptide
  3G10[PD-L1] vhCDR1
DYGFS

SEQ ID NO: 3995 - protein, 17 aa, Artificial Sequence
  Description of Artificial Sequence: Synthetic peptide
  3G10[PD-L1] vhCDR2
WITAYNGNTNYAQKLQG

SEQ ID NO: 3996 - protein, 8 aa, Artificial Sequence
  Description of Artificial Sequence: Synthetic peptide
  3G10[PD-L1] vhCDR3
DYFYGMDV

SEQ ID NO: 3997 - protein, 107 aa, Artificial Sequence
  Description of Artificial Sequence: Synthetic polypeptide
  3G10[PD-L1] variable light Chain
EIVLTQSPATLSLSPGERATLSCRASQSVSSYLVWYQQKPGQAPRLLIYDASNRATGIPARFSGSGSGTDFTLTISSLEPEDFAVYYCQQRSNWPRTFGQGTKVEIK

SEQ ID NO: 3998 - protein, 11 aa, Artificial Sequence
  Description of Artificial Sequence: Synthetic peptide
  3G10[PD-L1] vlCDR1
RASQSVSSYLV

SEQ ID NO: 3999 - protein, 7 aa, Artificial Sequence
  Description of Artificial Sequence: Synthetic peptide
  3G10[PD-L1] vlCDR2
DASNRAT

SEQ ID NO: 4000 - protein, 9 aa, Artificial Sequence
  Description of Artificial Sequence: Synthetic peptide
  3G10[PD-L1] vlCDR3
QQRSNWPRT

SEQ ID NO: 4001 - protein, 118 aa, Artificial Sequence
  Description of Artificial Sequence: Synthetic polypeptide
  10A5[PD-L1] variable heavy Chain
QVQLVQSGAEVKKPGASVKVSCKASGYTFTSYDVHWVRQAPGQRLEWMGWLHADTGITKFSQKFQGRVTITRDTSASTAYMELSSLRSEDTAVYYCARERIQLWFDYWGQGTLVTVSS

SEQ ID NO: 4002 - protein, 5 aa, Artificial Sequence
  Description of Artificial Sequence: Synthetic peptide
  10A5[PD-L1] vhCDR1
SYDVH

SEQ ID NO: 4003 - protein, 17 aa, Artificial Sequence
  Description of Artificial Sequence: Synthetic peptide
  10A5[PD-L1] vhCDR2
WLHADTGITKFSQKFQG

SEQ ID NO: 4004 - protein, 9 aa, Artificial Sequence
  Description of Artificial Sequence: Synthetic peptide
  10A5[PD-L1] vhCDR3
ERIQLWFDY

SEQ ID NO: 4005 - protein, 107 aa, Artificial Sequence
  Description of Artificial Sequence: Synthetic polypeptide
  10A5[PD-L1] variable light Chain
DIQMTQSPSSLSASVGDRVTITCRASQGISSWLAWYQQKPEKAPKSLIYAASSLQSGVPSRFSGSGSGTDFTLTISSLQPEDFATYYCQQYNSYPYTFGQGTKLEIK

SEQ ID NO: 4006 - protein, 11 aa, Artificial Sequence
  Description of Artificial Sequence: Synthetic peptide
  10A5[PD-L1] vlCDR1
RASQGISSWLA

SEQ ID NO: 4007 - protein, 7 aa, Artificial Sequence
  Description of Artificial Sequence: Synthetic peptide
  10A5[PD-L1] vlCDR2
AASSLQS

SEQ ID NO: 4008 - protein, 9 aa, Artificial Sequence
  Description of Artificial Sequence: Synthetic peptide
  10A5[PD-L1] vlCDR3
QQYNSYPYT

SEQ ID NO: 4009 - protein, 114 aa, Artificial Sequence
  Description of Artificial Sequence: Synthetic polypeptide
  h3D10 Var 1[PD-L1] variable heavy Chain
QVQLVQSGAEVKKPGASVKVSCKASGYTFPDYYMNWVRQAPGQGLEWMGDIDPNYGGTNYAQKFQGRVTMTRDTSISTAYMELSRLRSDDTAVYYCARGALTDWGQGTMVTVSS

SEQ ID NO: 4010 - protein, 5 aa, Artificial Sequence
  Description of Artificial Sequence: Synthetic peptide
  h3D10 Var 1[PD-L1] vhCDR1
DYYMN

SEQ ID NO: 4011 - protein, 17 aa, Artificial Sequence
  Description of Artificial Sequence: Synthetic peptide
  h3D10 Var 1[PD-L1] vhCDR2
DIDPNYGGTNYAQKFQG

SEQ ID NO: 4012 - protein, 5 aa, Artificial Sequence
  Description of Artificial Sequence: Synthetic peptide
  h3D10 Var 1[PD-L1] vhCDR3
GALTD

SEQ ID NO: 4013 - protein, 106 aa, Artificial Sequence
  Description of Artificial Sequence: Synthetic polypeptide
  h3D10 Var 1[PD-L1] variable light Chain
EIVLTQSPATLSLSPGERATLSCRASSSVSYIYWFQQKPGQAPRLLIYAAFNRATGIPARFSGSGSGTDYTLTISSLEPEDFAVYYCQQWSNNPLTFGQGTKVEIK

SEQ ID NO: 4014 - protein, 10 aa, Artificial Sequence
  Description of Artificial Sequence: Synthetic peptide
  h3D10 Var 1[PD-L1] vlCDR1
RASSSVSYIY

SEQ ID NO: 4015 - protein, 7 aa, Artificial Sequence
  Description of Artificial Sequence: Synthetic peptide
  h3D10 Var 1[PD-L1] vlCDR2
AAFNRAT

SEQ ID NO: 4016 - protein, 9 aa, Artificial Sequence
  Description of Artificial Sequence: Synthetic peptide
  h3D10 Var 1[PD-L1] vlCDR3
QQWSNNPLT

SEQ ID NO: 4017 - protein, 114 aa, Artificial Sequence
  Description of Artificial Sequence: Synthetic polypeptide
  h3D10 Var 2[PD-L1] variable heavy Chain
QVQLVQSGAEVKKPGASVKVSCKASGYTFPDYYMNWVRQAPGQSLEWMGDIDPNYGGTNYNQKFQGRVTMTRDTSISTAYMELSRLRSDDTAVYYCARGALTDWGQGTMVTVSS

SEQ ID NO: 4018 - protein, 5 aa, Artificial Sequence
  Description of Artificial Sequence: Synthetic peptide
  h3D10 Var 2[PD-L1] vhCDR1
DYYMN

SEQ ID NO: 4019 - protein, 17 aa, Artificial Sequence
  Description of Artificial Sequence: Synthetic peptide
  h3D10 Var 2[PD-L1] vhCDR2
DIDPNYGGTNYNQKFQG

SEQ ID NO: 4020 - protein, 5 aa, Artificial Sequence
  Description of Artificial Sequence: Synthetic peptide
  h3D10 Var 2[PD-L1] vhCDR3
GALTD

SEQ ID NO: 4021 - protein, 106 aa, Artificial Sequence
  Description of Artificial Sequence: Synthetic polypeptide
  h3D10 Var 2[PD-L1] variable light Chain
EIVLTQSPATLSLSPGERATLSCRASSSVSYIYWFQQKPGQSPRPLIYAAFNRATGIPARFSGSGSGTDYTLTISSLEPEDFAVYYCQQWSNNPLTFGQGTKVEIK

SEQ ID NO: 4022 - protein, 10 aa, Artificial Sequence
  Description of Artificial Sequence: Synthetic peptide
  h3D10 Var 2[PD-L1] vlCDR1
RASSSVSYIY

SEQ ID NO: 4023 - protein, 7 aa, Artificial Sequence
  Description of Artificial Sequence: Synthetic peptide
  h3D10 Var 2[PD-L1] vlCDR2
AAFNRAT

SEQ ID NO: 4024 - protein, 9 aa, Artificial Sequence
  Description of Artificial Sequence: Synthetic peptide
  h3D10 Var 2[PD-L1] vlCDR3
QQWSNNPLT

SEQ ID NO: 4025 - protein, 114 aa, Artificial Sequence; identical to SEQ ID NO: 4017
  Description of Artificial Sequence: Synthetic polypeptide
  h3D10 Var 3[PD-L1] variable heavy Chain

SEQ ID NO: 4026 - protein, 5 aa, Artificial Sequence
  Description of Artificial Sequence: Synthetic peptide
  h3D10 Var 3[PD-L1] vhCDR1
DYYMN

SEQ ID NO: 4027 - protein, 17 aa, Artificial Sequence
  Description of Artificial Sequence: Synthetic peptide
  h3D10 Var 3[PD-L1] vhCDR2
DIDPNYGGTNYNQKFQG

SEQ ID NO: 4028 - protein, 5 aa, Artificial Sequence
  Description of Artificial Sequence: Synthetic peptide
  h3D10 Var 3[PD-L1] vhCDR3
GALTD

SEQ ID NO: 4029 - protein, 106 aa, Artificial Sequence
  Description of Artificial Sequence: Synthetic polypeptide
  h3D10 Var 3[PD-L1] variable light Chain
QIVLTQSPATLSLSPGERATLSCRASSSVSYIYWFQQKPGQSPRPLIYATFNLASGIPARFSGSGSGTSYTLTISRLEPEDFAVYYCQQWSNNPLTFGQGTKVEIK

SEQ ID NO: 4030 - protein, 10 aa, Artificial Sequence
  Description of Artificial Sequence: Synthetic peptide
  h3D10 Var 3[PD-L1] vlCDR1
RASSSVSYIY

SEQ ID NO: 4031 - protein, 7 aa, Artificial Sequence
  Description of Artificial Sequence: Synthetic peptide
  h3D10 Var 3[PD-L1] vlCDR2
ATFNLAS

SEQ ID NO: 4032 - protein, 9 aa, Artificial Sequence
  Description of Artificial Sequence: Synthetic peptide
  h3D10 Var 3[PD-L1] vlCDR3
QQWSNNPLT

SEQ ID NO: 4033 - protein, 114 aa, Artificial Sequence
  Description of Artificial Sequence: Synthetic polypeptide
  h3D10 Var 4[PD-L1] variable heavy Chain
EVQLVQSGAEVKKPGASVKVSCKASGYTFPDYYMNWVRQAPGQSLEWMGDIDPNYGGTNYNQKFQGRVTMTVDRSSSTAYMELSRLRSDDTAVYYCARGALTDWGQGTMVTVSS

SEQ ID NO: 4034 - protein, 5 aa, Artificial Sequence
  Description of Artificial Sequence: Synthetic peptide
  h3D10 Var 4[PD-L1] vhCDR1
DYYMN

SEQ ID NO: 4035 - protein, 17 aa, Artificial Sequence
  Description of Artificial Sequence: Synthetic peptide
  h3D10 Var 4[PD-L1] vhCDR2
DIDPNYGGTNYNQKFQG

SEQ ID NO: 4036 - protein, 5 aa, Artificial Sequence
  Description of Artificial Sequence: Synthetic peptide
  h3D10 Var 4[PD-L1] vhCDR3
GALTD

SEQ ID NO: 4037 - protein, 106 aa, Artificial Sequence; identical to SEQ ID NO: 4021
  Description of Artificial Sequence: Synthetic polypeptide
  h3D10 Var 4[PD-L1] variable light Chain

SEQ ID NO: 4038 - protein, 10 aa, Artificial Sequence
  Description of Artificial Sequence: Synthetic peptide
  h3D10 Var 4[PD-L1] vlCDR1
RASSSVSYIY

SEQ ID NO: 4039 - protein, 7 aa, Artificial Sequence
  Description of Artificial Sequence: Synthetic peptide
  h3D10 Var 4[PD-L1] vlCDR2
AAFNRAT

SEQ ID NO: 4040 - protein, 9 aa, Artificial Sequence
  Description of Artificial Sequence: Synthetic peptide
  h3D10 Var 4[PD-L1] vlCDR3
QQWSNNPLT

SEQ ID NO: 4041 - protein, 114 aa, Artificial Sequence; identical to SEQ ID NO: 4033
  Description of Artificial Sequence: Synthetic polypeptide
  h3D10 Var 5[PD-L1] variable heavy Chain

SEQ ID NO: 4042 - protein, 5 aa, Artificial Sequence
  Description of Artificial Sequence: Synthetic peptide
  h3D10 Var 5[PD-L1] vhCDR1
DYYMN

SEQ ID NO: 4043 - protein, 17 aa, Artificial Sequence
  Description of Artificial Sequence: Synthetic peptide
  h3D10 Var 5[PD-L1] vhCDR2
DIDPNYGGTNYNQKFQG

SEQ ID NO: 4044 - protein, 5 aa, Artificial Sequence
  Description of Artificial Sequence: Synthetic peptide
  h3D10 Var 5[PD-L1] vhCDR3
GALTD

SEQ ID NO: 4045 - protein, 106 aa, Artificial Sequence; identical to SEQ ID NO: 4029
  Description of Artificial Sequence: Synthetic polypeptide
  h3D10 Var 5[PD-L1] variable light Chain

SEQ ID NO: 4046 - protein, 10 aa, Artificial Sequence
  Description of Artificial Sequence: Synthetic peptide
  h3D10 Var 5[PD-L1] vlCDR1
RASSSVSYIY

SEQ ID NO: 4047 - protein, 7 aa, Artificial Sequence
  Description of Artificial Sequence: Synthetic peptide
  h3D10 Var 5[PD-L1] vlCDR2
ATFNLAS

SEQ ID NO: 4048 - protein, 9 aa, Artificial Sequence
  Description of Artificial Sequence: Synthetic peptide
  h3D10 Var 5[PD-L1] vlCDR3
QQWSNNPLT

SEQ ID NO: 4049 - protein, 114 aa, Artificial Sequence
  Description of Artificial Sequence: Synthetic polypeptide
  h3D10 Var 6[PD-L1] variable heavy Chain
EVQLVESGGGLVQPGRSLRLSCTASGYTFPDYYMNWVRQAPGKGLEWVGDIDPNYGGTTYAASVKGRFTISVDRSKSIAYLQMSSLKTEDTAVYYCTRGALTDWGQGTMVTVSS

SEQ ID NO: 4050 - protein, 5 aa, Artificial Sequence
  Description of Artificial Sequence: Synthetic peptide
  h3D10 Var 6[PD-L1] vhCDR1
DYYMN

SEQ ID NO: 4051 - protein, 17 aa, Artificial Sequence
  Description of Artificial Sequence: Synthetic peptide
  h3D10 Var 6[PD-L1] vhCDR2
DIDPNYGGTTYAASVKG

SEQ ID NO: 4052 - protein, 5 aa, Artificial Sequence
  Description of Artificial Sequence: Synthetic peptide
  h3D10 Var 6[PD-L1] vhCDR3
GALTD

SEQ ID NO: 4053 - protein, 106 aa, Artificial Sequence
  Description of Artificial Sequence: Synthetic polypeptide
  h3D10 Var 6[PD-L1] variable light Chain
DIQLTQSPSSLSASVGDRVTITCRASSGVSYIYWFQQKPGKAPKLLIYAAFNLASGVPSRFSGSGSGTEYTLTISSLQPEDFATYYCQQWSNNPLTFGQGTKVEIK

SEQ ID NO: 4054 - protein, 10 aa, Artificial Sequence
  Description of Artificial Sequence: Synthetic peptide
  h3D10 Var 6[PD-L1] vlCDR1
RASSGVSYIY

SEQ ID NO: 4055 - protein, 7 aa, Artificial Sequence
  Description of Artificial Sequence: Synthetic peptide
  h3D10 Var 6[PD-L1] vlCDR2
AAFNLAS

SEQ ID NO: 4056 - protein, 9 aa, Artificial Sequence
  Description of Artificial Sequence: Synthetic peptide
  h3D10 Var 6[PD-L1] vlCDR3
QQWSNNPLT

SEQ ID NO: 4057 - protein, 114 aa, Artificial Sequence
  Description of Artificial Sequence: Synthetic polypeptide
  h3D10 Var 7[PD-L1] variable heavy Chain
EVQLVESGGGLVQPGRSLRLSCTASGYTFPDYYMNWVRQAPGKGLEWVGDIDPNYGGTTYNASVKGRFTISVDRSKSIAYLQMSSLKTEDTAVYYCARGALTDWGQGTMVTVSS

SEQ ID NO: 4058 - protein, 5 aa, Artificial Sequence
  Description of Artificial Sequence: Synthetic peptide
  h3D10 Var 7[PD-L1] vhCDR1
DYYMN

SEQ ID NO: 4059 - protein, 17 aa, Artificial Sequence
  Description of Artificial Sequence: Synthetic peptide
  h3D10 Var 7[PD-L1] vhCDR2
DIDPNYGGTTYNASVKG

SEQ ID NO: 4060 - protein, 5 aa, Artificial Sequence
  Description of Artificial Sequence: Synthetic peptide
  h3D10 Var 7[PD-L1] vhCDR3
GALTD

SEQ ID NO: 4061 - protein, 106 aa, Artificial Sequence
  Description of Artificial Sequence: Synthetic polypeptide
  h3D10 Var 7[PD-L1] variable light Chain
DIQLTQSPSSLSASVGDRVTITCRASSGVSYIYWFQQKPGKAPKPLIYAAFNLASGVPSRFSGSGSGTEYTLTISSLQPEDFATYYCQQWSNNPLTFGQGTKVEIK

SEQ ID NO: 4062 - protein, 10 aa, Artificial Sequence
  Description of Artificial Sequence: Synthetic peptide
  h3D10 Var 7[PD-L1] vlCDR1
RASSGVSYIY

SEQ ID NO: 4063 - protein, 7 aa, Artificial Sequence
  Description of Artificial Sequence: Synthetic peptide
  h3D10 Var 7[PD-L1] vlCDR2
AAFNLAS

SEQ ID NO: 4064 - protein, 9 aa, Artificial Sequence
  Description of Artificial Sequence: Synthetic peptide
  h3D10 Var 7[PD-L1] vlCDR3
QQWSNNPLT

SEQ ID NO: 4065 - protein, 114 aa, Artificial Sequence; identical to SEQ ID NO: 4057
  Description of Artificial Sequence: Synthetic polypeptide
  h3D10 Var 8[PD-L1] variable heavy Chain

SEQ ID NO: 4066 - protein, 5 aa, Artificial Sequence
  Description of Artificial Sequence: Synthetic peptide
  h3D10 Var 8[PD-L1] vhCDR1
DYYMN

SEQ ID NO: 4067 - protein, 17 aa, Artificial Sequence
  Description of Artificial Sequence: Synthetic peptide
  h3D10 Var 8[PD-L1] vhCDR2
DIDPNYGGTTYNASVKG

SEQ ID NO: 4068 - protein, 5 aa, Artificial Sequence
  Description of Artificial Sequence: Synthetic peptide
  h3D10 Var 8[PD-L1] vhCDR3
GALTD

SEQ ID NO: 4069 - protein, 106 aa, Artificial Sequence
  Description of Artificial Sequence: Synthetic polypeptide
  h3D10 Var 8[PD-L1] variable light Chain
DIQLTQSPSILSASVGDRVTITCRASSSVSYIYWFQQKPGKAPKPLIYATFNLASGVPSRFSGSGSGTSYTLTISSLQPEDFATYYCQQWSNNPLTFGQGTKVEIK

SEQ ID NO: 4070 - protein, 10 aa, Artificial Sequence
  Description of Artificial Sequence: Synthetic peptide
  h3D10 Var 8[PD-L1] vlCDR1
RASSSVSYIY

SEQ ID NO: 4071 - protein, 7 aa, Artificial Sequence
  Description of Artificial Sequence: Synthetic peptide
  h3D10 Var 8[PD-L1] vlCDR2
ATFNLAS

SEQ ID NO: 4072 - protein, 9 aa, Artificial Sequence
  Description of Artificial Sequence: Synthetic peptide
  h3D10 Var 8[PD-L1] vlCDR3
QQWSNNPLT

SEQ ID NO: 4073 - protein, 114 aa, Artificial Sequence
  Description of Artificial Sequence: Synthetic polypeptide
  h3D10 Var 9[PD-L1] variable heavy Chain
EVQLVESGGGLVQPGRSLRLSCTASGYTFPDYYMNWVRQAPGKGLEWVGDIDPNYGGTTYNQSVKGRFTISVDRSKSIAYLQMSSLKTEDTAVYYCARGALTDWGQGTMVTVSS

SEQ ID NO: 4074 - protein, 5 aa, Artificial Sequence
  Description of Artificial Sequence: Synthetic peptide
  h3D10 Var 9[PD-L1] vhCDR1
DYYMN

SEQ ID NO: 4075 - protein, 17 aa, Artificial Sequence
  Description of Artificial Sequence: Synthetic peptide
  h3D10 Var 9[PD-L1] vhCDR2
DIDPNYGGTTYNQSVKG

SEQ ID NO: 4076 - protein, 5 aa, Artificial Sequence
  Description of Artificial Sequence: Synthetic peptide
  h3D10 Var 9[PD-L1] vhCDR3
GALTD

SEQ ID NO: 4077 - protein, 106 aa, Artificial Sequence; identical to SEQ ID NO: 4061
  Description of Artificial Sequence: Synthetic polypeptide
  h3D10 Var 9[PD-L1] variable light Chain

SEQ ID NO: 4078 - protein, 10 aa, Artificial Sequence
  Description of Artificial Sequence: Synthetic peptide
  h3D10 Var 9[PD-L1] vlCDR1
RASSGVSYIY

SEQ ID NO: 4079 - protein, 7 aa, Artificial Sequence
  Description of Artificial Sequence: Synthetic peptide
  h3D10 Var 9[PD-L1] vlCDR2
AAFNLAS

SEQ ID NO: 4080 - protein, 9 aa, Artificial Sequence
  Description of Artificial Sequence: Synthetic peptide
  h3D10 Var 9[PD-L1] vlCDR3
QQWSNNPLT

SEQ ID NO: 4081 - protein, 114 aa, Artificial Sequence; identical to SEQ ID NO: 4073
  Description of Artificial Sequence: Synthetic polypeptide
  h3D10 Var 10[PD-L1] variable heavy Chain

SEQ ID NO: 4082 - protein, 5 aa, Artificial Sequence
  Description of Artificial Sequence: Synthetic peptide
  h3D10 Var 10[PD-L1] vhCDR1
DYYMN

SEQ ID NO: 4083 - protein, 17 aa, Artificial Sequence
  Description of Artificial Sequence: Synthetic peptide
  h3D10 Var 10[PD-L1] vhCDR2
DIDPNYGGTTYNQSVKG

SEQ ID NO: 4084 - protein, 5 aa, Artificial Sequence
  Description of Artificial Sequence: Synthetic peptide
  h3D10 Var 10[PD-L1] vhCDR3
GALTD

SEQ ID NO: 4085 - protein, 106 aa, Artificial Sequence; identical to SEQ ID NO: 4069
  Description of Artificial Sequence: Synthetic polypeptide
  h3D10 Var 10[PD-L1] variable light Chain

SEQ ID NO: 4086 - protein, 10 aa, Artificial Sequence
  Description of Artificial Sequence: Synthetic peptide
  h3D10 Var 10[PD-L1] vlCDR1
RASSSVSYIY

SEQ ID NO: 4087 - protein, 7 aa, Artificial Sequence
  Description of Artificial Sequence: Synthetic peptide
  h3D10 Var 10[PD-L1] vlCDR2
ATFNLAS

SEQ ID NO: 4088 - protein, 9 aa, Artificial Sequence
  Description of Artificial Sequence: Synthetic peptide
  h3D10 Var 10[PD-L1] vlCDR3
QQWSNNPLT

SEQ ID NO: 4089 - protein, 114 aa, Artificial Sequence; identical to SEQ ID NO: 4049
  Description of Artificial Sequence: Synthetic polypeptide
  h3D10 Var 11[PD-L1] variable heavy Chain

SEQ ID NO: 4090 - protein, 5 aa, Artificial Sequence
  Description of Artificial Sequence: Synthetic peptide
  h3D10 Var 11[PD-L1] vhCDR1
DYYMN

SEQ ID NO: 4091 - protein, 17 aa, Artificial Sequence
  Description of Artificial Sequence: Synthetic peptide
  h3D10 Var 11[PD-L1] vhCDR2
DIDPNYGGTTYAASVKG

SEQ ID NO: 4092 - protein, 5 aa, Artificial Sequence
  Description of Artificial Sequence: Synthetic peptide
  h3D10 Var 11[PD-L1] vhCDR3
GALTD

SEQ ID NO: 4093 - protein, 106 aa, Artificial Sequence; identical to SEQ ID NO: 4013
  Description of Artificial Sequence: Synthetic polypeptide
  h3D10 Var 11[PD-L1] variable light Chain

SEQ ID NO: 4094 - protein, 10 aa, Artificial Sequence
  Description of Artificial Sequence: Synthetic peptide
  h3D10 Var 11[PD-L1] vlCDR1
RASSSVSYIY

SEQ ID NO: 4095 - protein, 7 aa, Artificial Sequence
  Description of Artificial Sequence: Synthetic peptide
  h3D10 Var 11[PD-L1] vlCDR2
AAFNRAT

SEQ ID NO: 4096 - protein, 9 aa, Artificial Sequence
  Description of Artificial Sequence: Synthetic peptide
  h3D10 Var 11[PD-L1] vlCDR3
QQWSNNPLT

SEQ ID NO: 4097 - protein, 114 aa, Artificial Sequence; identical to SEQ ID NO: 4009
  Description of Artificial Sequence: Synthetic polypeptide
  h3D10 Var 12[PD-L1] variable heavy Chain

SEQ ID NO: 4098 - protein, 5 aa, Artificial Sequence
  Description of Artificial Sequence: Synthetic peptide
  h3D10 Var 12[PD-L1] vhCDR1
DYYMN

SEQ ID NO: 4099 - protein, 17 aa, Artificial Sequence
  Description of Artificial Sequence: Synthetic peptide
  h3D10 Var 12[PD-L1] vhCDR2
DIDPNYGGTNYAQKFQG

SEQ ID NO: 4100 - protein, 5 aa, Artificial Sequence
  Description of Artificial Sequence: Synthetic peptide
  h3D10 Var 12[PD-L1] vhCDR3
GALTD

SEQ ID NO: 4101 - protein, 106 aa, Artificial Sequence; identical to SEQ ID NO: 4053
  Description of Artificial Sequence: Synthetic polypeptide
  h3D10 Var 12[PD-L1] variable light Chain

SEQ ID NO: 4102 - protein, 10 aa, Artificial Sequence
  Description of Artificial Sequence: Synthetic peptide
  h3D10 Var 12[PD-L1] vlCDR1
RASSGVSYIY

SEQ ID NO: 4103 - protein, 7 aa, Artificial Sequence
  Description of Artificial Sequence: Synthetic peptide
  h3D10 Var 12[PD-L1] vlCDR2
AAFNLAS

SEQ ID NO: 4104 - protein, 9 aa, Artificial Sequence
  Description of Artificial Sequence: Synthetic peptide
  h3D10 Var 12[PD-L1] vlCDR3
QQWSNNPLT

SEQ ID NO: 4105 - protein, 114 aa, Artificial Sequence; identical to SEQ ID NO: 4073
  Description of Artificial Sequence: Synthetic polypeptide
  h3D10 Var 13[PD-L1] variable heavy Chain

SEQ ID NO: 4106 - protein, 5 aa, Artificial Sequence
  Description of Artificial Sequence: Synthetic peptide
  h3D10 Var 13[PD-L1] vhCDR1
DYYMN

SEQ ID NO: 4107 - protein, 17 aa, Artificial Sequence
  Description of Artificial Sequence: Synthetic peptide
  h3D10 Var 13[PD-L1] vhCDR2
DIDPNYGGTTYNQSVKG

SEQ ID NO: 4108 - protein, 5 aa, Artificial Sequence
  Description of Artificial Sequence: Synthetic peptide
  h3D10 Var 13[PD-L1] vhCDR3
GALTD

SEQ ID NO: 4109 - protein, 106 aa, Artificial Sequence; identical to SEQ ID NO: 4029
  Description of Artificial Sequence: Synthetic polypeptide
  h3D10 Var 13[PD-L1] variable light Chain

SEQ ID NO: 4110 - protein, 10 aa, Artificial Sequence
  Description of Artificial Sequence: Synthetic peptide
  h3D10 Var 13[PD-L1] vlCDR1
RASSSVSYIY

SEQ ID NO: 4111 - protein, 7 aa, Artificial Sequence
  Description of Artificial Sequence: Synthetic peptide
  h3D10 Var 13[PD-L1] vlCDR2
ATFNLAS

SEQ ID NO: 4112 - protein, 9 aa, Artificial Sequence
  Description of Artificial Sequence: Synthetic peptide
  h3D10 Var 13[PD-L1] vlCDR3
QQWSNNPLT

SEQ ID NO: 4113 - protein, 114 aa, Artificial Sequence; identical to SEQ ID NO: 4033
  Description of Artificial Sequence: Synthetic polypeptide
  h3D10 Var 14[PD-L1] variable heavy Chain

SEQ ID NO: 4114 - protein, 5 aa, Artificial Sequence
  Description of Artificial Sequence: Synthetic peptide
  h3D10 Var 14[PD-L1] vhCDR1
DYYMN

SEQ ID NO: 4115 - protein, 17 aa, Artificial Sequence
  Description of Artificial Sequence: Synthetic peptide
  h3D10 Var 14[PD-L1] vhCDR2
DIDPNYGGTNYNQKFQG

SEQ ID NO: 4116 - protein, 5 aa, Artificial Sequence
  Description of Artificial Sequence: Synthetic peptide
  h3D10 Var 14[PD-L1] vhCDR3
GALTD

SEQ ID NO: 4117 - protein, 106 aa, Artificial Sequence; identical to SEQ ID NO: 4069
  Description of Artificial Sequence: Synthetic polypeptide
  h3D10 Var 14[PD-L1] variable light Chain

SEQ ID NO: 4118 - protein, 10 aa, Artificial Sequence
  Description of Artificial Sequence: Synthetic peptide
  h3D10 Var 14[PD-L1] vlCDR1
RASSSVSYIY

SEQ ID NO: 4119 - protein, 7 aa, Artificial Sequence
  Description of Artificial Sequence: Synthetic peptide
  h3D10 Var 14[PD-L1] vlCDR2
ATFNLAS

SEQ ID NO: 4120 - protein, 9 aa, Artificial Sequence
  Description of Artificial Sequence: Synthetic peptide
  h3D10 Var 14[PD-L1] vlCDR3
QQWSNNPLT

SEQ ID NO: 4121 - protein, 123 aa, Artificial Sequence
  Description of Artificial Sequence: Synthetic polypeptide
  Antibody A[PD-L1] variable heavy Chain
QVQLVQSGAEVKKPGSSVKVSCKASGGTFSSYAISWVRQAPGQGLEWMGGIIPIFGTANYAQKFQGRVTITADKSTSTAYMELSSLRSEDTAVYYCARSPDYSPYYYYGMDVWGQGTTVTVSS

SEQ ID NO: 4122 - protein, 5 aa, Artificial Sequence
  Description of Artificial Sequence: Synthetic peptide
  Antibody A[PD-L1] vhCDR1
SYAIS

SEQ ID NO: 4123 - protein, 17 aa, Artificial Sequence
  Description of Artificial Sequence: Synthetic peptide
  Antibody A[PD-L1] vhCDR2
GIIPIFGTANYAQKFQG

SEQ ID NO: 4124 - protein, 14 aa, Artificial Sequence
  Description of Artificial Sequence: Synthetic peptide
  Antibody A[PD-L1] vhCDR3
SPDYSPYYYYGMDV

SEQ ID NO: 4125 - protein, 111 aa, Artificial Sequence
  Description of Artificial Sequence: Synthetic polypeptide
  Antibody A[PD-L1] variable light Chain
QSVLTQPPSASGTPGQRVTISCSGSSSNIGSNTVNWYQQLPGTAPKLLIYGNSNRPSGVPDRFSGSKSGTSASLAISGLQSEDEADYYCQSYDSSLSGSVFGGGIKLTVLG

SEQ ID NO: 4126 - protein, 13 aa, Artificial Sequence
  Description of Artificial Sequence: Synthetic peptide
  Antibody A[PD-L1] vlCDR1
SGSSSNIGSNTVN

SEQ ID NO: 4127 - protein, 7 aa, Artificial Sequence
  Description of Artificial Sequence: Synthetic peptide
  Antibody A[PD-L1] vlCDR2
GNSNRPS

SEQ ID NO: 4128 - protein, 11 aa, Artificial Sequence
  Description of Artificial Sequence: Synthetic peptide
  Antibody A[PD-L1] vlCDR3
QSYDSSLSGSV

SEQ ID NO: 4129 - protein, 116 aa, Artificial Sequence
  Description of Artificial Sequence: Synthetic polypeptide
  C5H9v2[PD-L1] variable heavy Chain
EVQLLESGGGLVQPGGSLRLSCAASGFTFSSYAMSWVRQAPGKGLEWVSSIWRNGIVTVYADSVKGRFTISRDNSKNTLYLQMNSLRAEDTAVYYCAKWSAAFDYWGQGTLVTVSS

SEQ ID NO: 4130 - protein, 5 aa, Artificial Sequence
  Description of Artificial Sequence: Synthetic peptide
  C5H9v2[PD-L1] vhCDR1
SYAMS

SEQ ID NO: 4131 - protein, 17 aa, Artificial Sequence
  Description of Artificial Sequence: Synthetic peptide
  C5H9v2[PD-L1] vhCDR2
SIWRNGIVTVYADSVKG

SEQ ID NO: 4132 - protein, 7 aa, Artificial Sequence
  Description of Artificial Sequence: Synthetic peptide
  C5H9v2[PD-L1] vhCDR3
WSAAFDY

SEQ ID NO: 4133 - protein, 107 aa, Artificial Sequence
  Description of Artificial Sequence: Synthetic polypeptide
  C5H9v2[PD-L1] variable light Chain
DIQMTQSPSSLSASVGDRVTITCRASQSISSYLNWYQQKPGKAPKLLIYAASSLQSGVPSRFSGSGSGTDFTLTISSLQPEDFATYYCQQDNGYPSTFGGGTKVEIK

SEQ ID NO: 4134 - protein, 11 aa, Artificial Sequence
  Description of Artificial Sequence: Synthetic peptide
  C5H9v2[PD-L1] vlCDR1
RASQSISSYLN

SEQ ID NO: 4135 - protein, 7 aa, Artificial Sequence
  Description of Artificial Sequence: Synthetic peptide
  C5H9v2[PD-L1] vlCDR2
AASSLQS

SEQ ID NO: 4136 - protein, 9 aa, Artificial Sequence
  Description of Artificial Sequence: Synthetic peptide
  C5H9v2[PD-L1] vlCDR3
QQDNGYPST

SEQ ID NO: 4137 - protein, 115 aa, Artificial Sequence
  Description of Artificial Sequence: Synthetic polypeptide
  humanized 29E.2A3[PD-L1] variable heavy Chain
EVQLVQSGAEVKKPGASVKMSCKASGYTFTSYVMHWVKQAPGQRLEWIGYVNPFNDGTKYNEMFKGRATLTSDKSTSTAYMELSSLRSEDTAVYYCARQAWGYPWGQGTLVTVSS

SEQ ID NO: 4138 - protein, 5 aa, Artificial Sequence
  Description of Artificial Sequence: Synthetic peptide
  humanized 29E.2A3[PD-L1] vhCDR1
SYVMH

SEQ ID NO: 4139 - protein, 17 aa, Artificial Sequence
  Description of Artificial Sequence: Synthetic peptide
  humanized 29E.2A3[PD-L1] vhCDR2
YVNPFNDGTKYNEMFKG

SEQ ID NO: 4140 - protein, 6 aa, Artificial Sequence
  Description of Artificial Sequence: Synthetic peptide
  humanized 29E.2A3[PD-L1] vhCDR3
QAWGYP

SEQ ID NO: 4141 - protein, 111 aa, Artificial Sequence
  Description of Artificial Sequence: Synthetic polypeptide
  humanized 29E.2A3[PD-L1] variable light Chain
DIVLTQSPATLSLSPGERATLSCRATESVEYYGTSLVQWYQQKPGQPPKLLIYAASSVDSGVPSRFSGSGSGTDFTLTINSLEAEDAATYFCQQSRRVPYTFGQGTKLEIK

SEQ ID NO: 4142 - protein, 15 aa, Artificial Sequence
  Description of Artificial Sequence: Synthetic peptide
  humanized 29E.2A3[PD-L1] vlCDR1
RATESVEYYGTSLVQ

SEQ ID NO: 4143 - protein, 7 aa, Artificial Sequence
  Description of Artificial Sequence: Synthetic peptide
  humanized 29E.2A3[PD-L1] vlCDR2
AASSVDS

SEQ ID NO: 4144 - protein, 9 aa, Artificial Sequence
  Description of Artificial Sequence: Synthetic peptide
  humanized 29E.2A3[PD-L1] vlCDR3
QQSRRVPYT

SEQ ID NO: 4145 - protein, 121 aa, Artificial Sequence
  Description of Artificial Sequence: Synthetic polypeptide
  1B9[PD-L1] variable heavy Chain
DVQLQESGPGLVKPSQSLSLTCTVTGYSITSDHAWNWIRQVPGNKLEWMGYITYRGSTTYSPSLKSRISITRDTSKNQFFLQLNSVTTEDTATYYCARSMITTGYYVMDYWGQGTSVTVSS

SEQ ID NO: 4146 - protein, 6 aa, Artificial Sequence
  Description of Artificial Sequence: Synthetic peptide
  1B9[PD-L1] vhCDR1
SDHAWN

SEQ ID NO: 4147 - protein, 16 aa, Artificial Sequence
  Description of Artificial Sequence: Synthetic peptide
  1B9[PD-L1] vhCDR2
YITYRGSTTYSPSLKS

SEQ ID NO: 4148 - protein, 12 aa, Artificial Sequence
  Description of Artificial Sequence: Synthetic peptide
  1B9[PD-L1] vhCDR3
SMITTGYYVMDY

SEQ ID NO: 4149 - protein, 107 aa, Artificial Sequence
  Description of Artificial Sequence: Synthetic polypeptide
  1B9[PD-L1] variable light Chain
DIVMTQSHKFMSTSLGDRVTITCKASQDVGISVVWYQQKPGQSPKLLIYWASTRHTGVPDRFTGSGSGTDFTLTINNVQSEDLADYFCQQYSSYPLTVGAGTKLELK

SEQ ID NO: 4150 - protein, 11 aa, Artificial Sequence
  Description of Artificial Sequence: Synthetic peptide
  1B9[PD-L1] vlCDR1
KASQDVGISVV

SEQ ID NO: 4151 - protein, 7 aa, Artificial Sequence
  Description of Artificial Sequence: Synthetic peptide
  1B9[PD-L1] vlCDR2
WASTRHT

SEQ ID NO: 4152 - protein, 9 aa, Artificial Sequence
  Description of Artificial Sequence: Synthetic peptide
  1B9[PD-L1] vlCDR3
QQYSSYPLT

SEQ ID NO: 4153 - protein, 121 aa, Artificial Sequence
  Description of Artificial Sequence: Synthetic polypeptide
  4H1[PD-L1] variable heavy Chain
DVQLQESGPGLVKPSQSLSLTCTVTDYSITSDYAWTWIRQFPGNKLEWMGYITYRGTTRYNPSLTSRISFTRDTSKNQLFLQLNSVTTEDTGTYCCARSMITTGYYAMDYWGQGTSVTVSS

SEQ ID NO: 4154 - protein, 6 aa, Artificial Sequence
  Description of Artificial Sequence: Synthetic peptide
  4H1[PD-L1] vhCDR1
SDYAWT

SEQ ID NO: 4155 - protein, 16 aa, Artificial Sequence
  Description of Artificial Sequence: Synthetic peptide
  4H1[PD-L1] vhCDR2
YITYRGTTRYNPSLTS

SEQ ID NO: 4156 - protein, 12 aa, Artificial Sequence
  Description of Artificial Sequence: Synthetic peptide
  4H1[PD-L1] vhCDR3
SMITTGYYAMDY

SEQ ID NO: 4157 - protein, 107 aa, Artificial Sequence
  Description of Artificial Sequence: Synthetic polypeptide
  4H1[PD-L1] variable light Chain
DIVMTQSHKFMSTSVGDRVSISCKASQDVGISVAWYQQKPGQSPKLLIYWASTRHTGVPVRFTGSGSGTDFTLTISNVQSEDLADYFCQQYSSYPPTFGAGTKLELK

SEQ ID NO: 4158 - protein, 11 aa, Artificial Sequence
  Description of Artificial Sequence: Synthetic peptide
  4H1[PD-L1] vlCDR1
KASQDVGISVA

SEQ ID NO: 4159 - protein, 7 aa, Artificial Sequence
  Description of Artificial Sequence: Synthetic peptide
  4H1[PD-L1] vlCDR2
WASTRHT

SEQ ID NO: 4160 - protein, 9 aa, Artificial Sequence
  Description of Artificial Sequence: Synthetic peptide
  4H1[PD-L1] vlCDR3
QQYSSYPPT

SEQ ID NO: 4161 - protein, 120 aa, Artificial Sequence
  Description of Artificial Sequence: Synthetic polypeptide
  mAb-42[PD-L1] variable heavy Chain
QVQLVQSGAEVKKPGSSVKVSCKASGGTFSSYAISWVRQAPGQGLEWMGGIIPIFGTANYAQKFQGRVTITADKSTSTAYMELSSLRSEDTAVYYCARGRQMFGAGIDFWGPGTLVTVSS

SEQ ID NO: 4162 - protein, 5 aa, Artificial Sequence
  Description of Artificial Sequence: Synthetic peptide
  mAb-42[PD-L1] vhCDR1
SYAIS

SEQ ID NO: 4163 - protein, 17 aa, Artificial Sequence
  Description of Artificial Sequence: Synthetic peptide
  mAb-42[PD-L1] vhCDR2
GIIPIFGTANYAQKFQG

SEQ ID NO: 4164 - protein, 11 aa, Artificial Sequence
  Description of Artificial Sequence: Synthetic peptide
  mAb-42[PD-L1] vhCDR3
GRQMFGAGIDF

SEQ ID NO: 4165 - protein, 112 aa, Artificial Sequence
  Description of Artificial Sequence: Synthetic polypeptide
  mAb-42[PD-L1] variable light Chain
NFMLTQPHSVSESPGKTVTISCTRSSGSIDSNYVQWYQQRPGSAPTTVIYEDNQRPSGVPDRFSGSIDSSSNSASLTISGLKTEDEADYYCQSYDSNNRHVIFGGGTKLTVL

SEQ ID NO: 4166 - protein, 13 aa, Artificial Sequence
  Description of Artificial Sequence: Synthetic peptide
  mAb-42[PD-L1] vlCDR1
TRSSGSIDSNYVQ

SEQ ID NO: 4167 - protein, 7 aa, Artificial Sequence
  Description of Artificial Sequence: Synthetic peptide
  mAb-42[PD-L1] vlCDR2
EDNQRPS

SEQ ID NO: 4168 - protein, 11 aa, Artificial Sequence
  Description of Artificial Sequence: Synthetic peptide
  mAb-42[PD-L1] vlCDR3
QSYDSNNRHVI

SEQ ID NO: 4169 - protein, 120 aa, Artificial Sequence
  Description of Artificial Sequence: Synthetic polypeptide
  BAP058-03[PD-L1] variable heavy Chain
EVQLVQSGAEVKKPGATVKISCKVSGYTFTSYWMYWVRQATGQGLEWMGRIDPNSGSTKYNEKFKNRVTITADKSTSTAYMELSSLRSEDTAVYYCARDYRKGLYAMDYWGQGTTVTVSS

SEQ ID NO: 4170 - protein, 5 aa, Artificial Sequence
  Description of Artificial Sequence: Synthetic peptide
  BAP058-03[PD-L1] vhCDR1
SYWMY

SEQ ID NO: 4171 - protein, 17 aa, Artificial Sequence
  Description of Artificial Sequence: Synthetic peptide
  BAP058-03[PD-L1] vhCDR2
RIDPNSGSTKYNEKFKN

SEQ ID NO: 4172 - protein, 11 aa, Artificial Sequence
  Description of Artificial Sequence: Synthetic peptide
  BAP058-03[PD-L1] vhCDR3
DYRKGLYAMDY

SEQ ID NO: 4173 - protein, 107 aa, Artificial Sequence
  Description of Artificial Sequence: Synthetic polypeptide
  BAP058-03[PD-L1] variable light Chain
EIVLTQSPDFQSVTPKEKVTITCKASQDVGTAVAWYLQKPGQSPQLLIYWASTRHTGVPDRFSGSGSGTDFTLKISRVEAEDVGVYYCQQYNSYPLTFGQGTKVEIK

SEQ ID NO: 4174 - protein, 11 aa, Artificial Sequence
  Description of Artificial Sequence: Synthetic peptide
  BAP058-03[PD-L1] vlCDR1
KASQDVGTAVA

SEQ ID NO: 4175 - protein, 7 aa, Artificial Sequence
  Description of Artificial Sequence: Synthetic peptide
  BAP058-03[PD-L1] vlCDR2
WASTRHT

SEQ ID NO: 4176 - protein, 9 aa, Artificial Sequence
  Description of Artificial Sequence: Synthetic peptide
  BAP058-03[PD-L1] vlCDR3
QQYNSYPLT

SEQ ID NO: 4177 - protein, 120 aa, Artificial Sequence
  Description of Artificial Sequence: Synthetic polypeptide
  BAP058-04[PD-L1] variable heavy Chain
EVQLVQSGAEVKKPGESLRISCKGSGYTFTSYWMYWVRQAPGQGLEWMGRIDPNSGSTKYNEKFKNRVTISVDTSKNQFSLKLSSVTAADTAVYYCARDYRKGLYAMDYWGQGTTVTVSS

SEQ ID NO: 4178 - protein, 5 aa, Artificial Sequence
  Description of Artificial Sequence: Synthetic peptide
  BAP058-04[PD-L1] vhCDR1
SYWMY

SEQ ID NO: 4179 - protein, 17 aa, Artificial Sequence
  Description of Artificial Sequence: Synthetic peptide
  BAP058-04[PD-L1] vhCDR2
RIDPNSGSTKYNEKFKN

SEQ ID NO: 4180 - protein, 11 aa, Artificial Sequence
  Description of Artificial Sequence: Synthetic peptide
  BAP058-04[PD-L1] vhCDR3
DYRKGLYAMDY

SEQ ID NO: 4181 - protein, 107 aa, Artificial Sequence
  Description of Artificial Sequence: Synthetic polypeptide
  BAP058-04[PD-L1] variable light Chain
EIVLTQSPDFQSVTPKEKVTITCKASQDVGTAVAWYLQKPGQSPQLLIYWASTRHTGVPSRFSGSGSGTDFTFTISSLQPEDIATYYCQQYNSYPLTFGQGTKVEIK

SEQ ID NO: 4182 - protein, 11 aa, Artificial Sequence
  Description of Artificial Sequence: Synthetic peptide
  BAP058-04[PD-L1] vlCDR1
KASQDVGTAVA

SEQ ID NO: 4183 - protein, 7 aa, Artificial Sequence
  Description of Artificial Sequence: Synthetic peptide
  BAP058-04[PD-L1] vlCDR2
WASTRHT

SEQ ID NO: 4184 - protein, 9 aa, Artificial Sequence
  Description of Artificial Sequence: Synthetic peptide
  BAP058-04[PD-L1] vlCDR3
QQYNSYPLT

SEQ ID NO: 4185 - protein, 120 aa, Artificial Sequence
  Description of Artificial Sequence: Synthetic polypeptide
  BAP058-06[PD-L1] variable heavy Chain
EVQLVQSGAEVKKPGESLRISCKGSGYTFTSYWMYWIRQPPGKGLEWIGRIDPNSGSTKYNEKFKNRVTITADKSTSTAYMELSSLRSEDTAVYYCARDYRKGLYAMDYWGQGTTVTVSS

SEQ ID NO: 4186 - protein, 5 aa, Artificial Sequence
  Description of Artificial Sequence: Synthetic peptide
  BAP058-06[PD-L1] vhCDR1
SYWMY

SEQ ID NO: 4187 - protein, 17 aa, Artificial Sequence
  Description of Artificial Sequence: Synthetic peptide
  BAP058-06[PD-L1] vhCDR2
RIDPNSGSTKYNEKFKN

SEQ ID NO: 4188 - protein, 11 aa, Artificial Sequence
  Description of Artificial Sequence: Synthetic peptide
  BAP058-06[PD-L1] vhCDR3
DYRKGLYAMDY

SEQ ID NO: 4189 - protein, 107 aa, Artificial Sequence; identical to SEQ ID NO: 4181
  Description of Artificial Sequence: Synthetic polypeptide
  BAP058-06[PD-L1] variable light Chain

SEQ ID NO: 4190 - protein, 11 aa, Artificial Sequence
  Description of Artificial Sequence: Synthetic peptide
  BAP058-06[PD-L1] vlCDR1
KASQDVGTAVA

SEQ ID NO: 4191 - protein, 7 aa, Artificial Sequence
  Description of Artificial Sequence: Synthetic peptide
  BAP058-06[PD-L1] vlCDR2
WASTRHT

SEQ ID NO: 4192 - protein, 9 aa, Artificial Sequence
  Description of Artificial Sequence: Synthetic peptide
  BAP058-06[PD-L1] vlCDR3
QQYNSYPLT

SEQ ID NO: 4193 - protein, 120 aa, Artificial Sequence
  Description of Artificial Sequence: Synthetic polypeptide
  BAP058-07[PD-L1] variable heavy Chain
QVQLVQSGAEVKKPGASVKVSCKASGYTFTSYWMYWIRQSPSRGLEWLGRIDPNSGSTKYNEKFKNRFTISRDDSKNTAYLQMNSLKTEDTAVYYCARDYRKGLYAMDYWGQGTTVTVSS

SEQ ID NO: 4194 - protein, 5 aa, Artificial Sequence
  Description of Artificial Sequence: Synthetic peptide
  BAP058-07[PD-L1] vhCDR1
SYWMY

SEQ ID NO: 4195 - protein, 17 aa, Artificial Sequence
  Description of Artificial Sequence: Synthetic peptide
  BAP058-07[PD-L1] vhCDR2
RIDPNSGSTKYNEKFKN

SEQ ID NO: 4196 - protein, 11 aa, Artificial Sequence
  Description of Artificial Sequence: Synthetic peptide
  BAP058-07[PD-L1] vhCDR3
DYRKGLYAMDY

SEQ ID NO: 4197 - protein, 107 aa, Artificial Sequence
  Description of Artificial Sequence: Synthetic polypeptide
  BAP058-07[PD-L1] variable light Chain
EIVLTQSPATLSLSPGERATLSCKASQDVGTAVAWYLQKPGQSPQLLIYWASTRHTGIPPRFSGSGYGTDFTLTINNIESEDAAYYFCQQYNSYPLTFGQGTKVEIK

SEQ ID NO: 4198 - protein, 11 aa, Artificial Sequence
  Description of Artificial Sequence: Synthetic peptide
  BAP058-07[PD-L1] vlCDR1
KASQDVGTAVA

SEQ ID NO: 4199 - protein, 7 aa, Artificial Sequence
  Description of Artificial Sequence: Synthetic peptide
  BAP058-07[PD-L1] vlCDR2
WASTRHT

SEQ ID NO: 4200 - protein, 9 aa, Artificial Sequence
  Description of Artificial Sequence: Synthetic peptide
  BAP058-07[PD-L1] vlCDR3
QQYNSYPLT

SEQ ID NO: 4201 - protein, 120 aa, Artificial Sequence; identical to SEQ ID NO: 4169
  Description of Artificial Sequence: Synthetic polypeptide
  BAP058-11[PD-L1] variable heavy Chain

SEQ ID NO: 4202 - protein, 5 aa, Artificial Sequence
  Description of Artificial Sequence: Synthetic peptide
  BAP058-11[PD-L1] vhCDR1
SYWMY

SEQ ID NO: 4203 - protein, 17 aa, Artificial Sequence
  Description of Artificial Sequence: Synthetic peptide
  BAP058-11[PD-L1] vhCDR2
RIDPNSGSTKYNEKFKN

SEQ ID NO: 4204 - protein, 11 aa, Artificial Sequence
  Description of Artificial Sequence: Synthetic peptide
  BAP058-11[PD-L1] vhCDR3
DYRKGLYAMDY

SEQ ID NO: 4205 - protein, 107 aa, Artificial Sequence
  Description of Artificial Sequence: Synthetic polypeptide
  BAP058-11[PD-L1] variable light Chain
DVVMTQSPLSLPVTLGQPASISCKASQDVGTAVAWYQQKPGQAPRLLIYWASTRHTGVPSRFSGSGSGTEFTLTISSLQPDDFATYYCQQYNSYPLTFGQGTKVEIK

SEQ ID NO: 4206 - protein, 11 aa, Artificial Sequence
  Description of Artificial Sequence: Synthetic peptide
  BAP058-11[PD-L1] vlCDR1
KASQDVGTAVA

SEQ ID NO: 4207 - protein, 7 aa, Artificial Sequence
  Description of Artificial Sequence: Synthetic peptide
  BAP058-11[PD-L1] vlCDR2
WASTRHT

SEQ ID NO: 4208 - protein, 9 aa, Artificial Sequence
  Description of Artificial Sequence: Synthetic peptide
  BAP058-11[PD-L1] vlCDR3
QQYNSYPLT

SEQ ID NO: 4209 - protein, 120 aa, Artificial Sequence
  Description of Artificial Sequence: Synthetic polypeptide
  BAP058-13[PD-L1] variable heavy Chain
EVQLVQSGAEVKKPGATVKISCKVSGYTFTSYWMYWVRQARGQRLEWIGRIDPNSGSTKYNEKFKNRFTISRDNSKNTLYLQMNSLRAEDTAVYYCARDYRKGLYAMDYWGQGTTVTVSS

SEQ ID NO: 4210 - protein, 5 aa, Artificial Sequence
  Description of Artificial Sequence: Synthetic peptide
  BAP058-13[PD-L1] vhCDR1
SYWMY

SEQ ID NO: 4211 - protein, 17 aa, Artificial Sequence
  Description of Artificial Sequence: Synthetic peptide
  BAP058-13[PD-L1] vhCDR2
RIDPNSGSTKYNEKFKN

SEQ ID NO: 4212 - protein, 11 aa, Artificial Sequence
  Description of Artificial Sequence: Synthetic peptide
  BAP058-13[PD-L1] vhCDR3
DYRKGLYAMDY

SEQ ID NO: 4213 - protein, 107 aa, Artificial Sequence
  Description of Artificial Sequence: Synthetic polypeptide
  BAP058-13[PD-L1] variable light Chain
AIQLTQSPSSLSASVGDRVTITCKASQDVGTAVAWYLQKPGQSPQLLIYWASTRHTGVPSRFSGSGSGTDFTFTISSLEAEDAATYYCQQYNSYPLTFGQGTKVEIK

SEQ ID NO: 4214 - protein, 11 aa, Artificial Sequence
  Description of Artificial Sequence: Synthetic peptide
  BAP058-13[PD-L1] vlCDR1
KASQDVGTAVA

SEQ ID NO: 4215 - protein, 7 aa, Artificial Sequence
  Description of Artificial Sequence: Synthetic peptide
  BAP058-13[PD-L1] vlCDR2
WASTRHT

SEQ ID NO: 4216 - protein, 9 aa, Artificial Sequence
  Description of Artificial Sequence: Synthetic peptide
  BAP058-13[PD-L1] vlCDR3
QQYNSYPLT

SEQ ID NO: 4217 - protein, 121 aa, Artificial Sequence
  Description of Artificial Sequence: Synthetic polypeptide
  H6[PD-L1] variable heavy Chain
QMQLVQSGAEVKKPGSSVKVSCKASGGTFSSYAISWVRQAPGQGLEWMGGIIPIFGTANYAQKFQGRVTITADESTSTAYMELSSLRSEDTAVYYCARGNIVATITPLDYWGQGTLVTVSS

SEQ ID NO: 4218 - protein, 5 aa, Artificial Sequence
  Description of Artificial Sequence: Synthetic peptide
  H6[PD-L1] vhCDR1
SYAIS

SEQ ID NO: 4219 - protein, 17 aa, Artificial Sequence
  Description of Artificial Sequence: Synthetic peptide
  H6[PD-L1] vhCDR2
GIIPIFGTANYAQKFQG

SEQ ID NO: 4220 - protein, 12 aa, Artificial Sequence
  Description of Artificial Sequence: Synthetic peptide
  H6[PD-L1] vhCDR3
GNIVATITPLDY

SEQ ID NO: 4221 - protein, 108 aa, Artificial Sequence
  Description of Artificial Sequence: Synthetic polypeptide
  H6[PD-L1] variable light Chain
SYELMQPPSVSVAPGKTATIACGGENIGRKTVHWYQQKPGQAPVLVIYYDSDRPSGIPERFSGSNSGNTATLTISRVEAGDEADYYCQVWDSSSDHRIFGGGTKLTVL

SEQ ID NO: 4222 - protein, 11 aa, Artificial Sequence
  Description of Artificial Sequence: Synthetic peptide
  H6[PD-L1] vlCDR1
GGENIGRKTVH

SEQ ID NO: 4223 - protein, 7 aa, Artificial Sequence
  Description of Artificial Sequence: Synthetic peptide
  H6[PD-L1] vlCDR2
YDSDRPS

SEQ ID NO: 4224 - protein, 11 aa, Artificial Sequence
  Description of Artificial Sequence: Synthetic peptide
  H6[PD-L1] vlCDR3
QVWDSSSDHRI

SEQ ID NO: 4225 - protein, 121 aa, Artificial Sequence
  Description of Artificial Sequence: Synthetic polypeptide
  RC5[PD-L1] variable heavy Chain
EVQLLESGGGVVQPGGSLRLSCAASGFTFSSYWMSWVRQAPGKGLEWVANIKQDGSEKYYVDSVKGRFTISRDNSKNTVSLQMNSLRAEDTAVYYCAKDRYYNFPLGMDVWGQGTTVTVSS

SEQ ID NO: 4226 - protein, 5 aa, Artificial Sequence
  Description of Artificial Sequence: Synthetic peptide
  RC5[PD-L1] vhCDR1
SYWMS

SEQ ID NO: 4227 - protein, 17 aa, Artificial Sequence
  Description of Artificial Sequence: Synthetic peptide
  RC5[PD-L1] vhCDR2
NIKQDGSEKYYVDSVKG

SEQ ID NO: 4228 - protein, 12 aa, Artificial Sequence
  Description of Artificial Sequence: Synthetic peptide
  RC5[PD-L1] vhCDR3
DRYYNFPLGMDV

SEQ ID NO: 4229 - protein, 107 aa, Artificial Sequence
  Description of Artificial Sequence: Synthetic polypeptide
  RC5[PD-L1] variable light Chain
AIRMTQSPSSLSASVGDRVTITCRASQSISSYLNWYQQKPGKAPKLLIYTTSSLKSGVPSRFSGSGSGTDFTLTISRLQPEDFATYYCQQSYSSTWTFGRGTKVEIK

SEQ ID NO: 4230 - protein, 11 aa, Artificial Sequence
  Description of Artificial Sequence: Synthetic peptide
  RC5[PD-L1] vlCDR1
RASQSISSYLN

SEQ ID NO: 4231 - protein, 7 aa, Artificial Sequence
  Description of Artificial Sequence: Synthetic peptide
  RC5[PD-L1] vlCDR2
TTSSLKS

SEQ ID NO: 4232 - protein, 9 aa, Artificial Sequence
  Description of Artificial Sequence: Synthetic peptide
  RC5[PD-L1] vlCDR3
QQSYSSTWT

SEQ ID NO: 4233 - protein, 123 aa, Artificial Sequence
  Description of Artificial Sequence: Synthetic polypeptide
  SH1A1Q[PD-L1] variable heavy Chain
EVQLVQSGAEVKKPGSSVKVSCKASGGTFSSYAISWVRQAPGQGLEWMGGIIPIFGTANYAQKFQGRVTITADKSTSTAYMELSSLRSEDTAVYYCAREGTIYDSSGYSFDYWGQGTLVTVSS

SEQ ID NO: 4234 - protein, 5 aa, Artificial Sequence
  Description of Artificial Sequence: Synthetic peptide
  SH1A1Q[PD-L1] vhCDR1
SYAIS

SEQ ID NO: 4235 - protein, 17 aa, Artificial Sequence
  Description of Artificial Sequence: Synthetic peptide
  SH1A1Q[PD-L1] vhCDR2
GIIPIFGTANYAQKFQG

SEQ ID NO: 4236 - protein, 14 aa, Artificial Sequence
  Description of Artificial Sequence: Synthetic peptide
  SH1A1Q[PD-L1] vhCDR3
EGTIYDSSGYSFDY

SEQ ID NO: 4237 - protein, 110 aa, Artificial Sequence
  Description of Artificial Sequence: Synthetic polypeptide
  SH1A1Q[PD-L1] variable light Chain
QSVLTQPPSVSAAPGQKVTISCSGNNSNIANNYVSWYQQLPGTAPKLLIYDNNYRPSGIPDRFSGSKSGTSATLDITGLQTGDEADYYCGVWDGSLTTGVFGGGTKLTVL

SEQ ID NO: 4238 - protein, 13 aa, Artificial Sequence
  Description of Artificial Sequence: Synthetic peptide
  SH1A1Q[PD-L1] vlCDR1
SGNNSNIANNYVS

SEQ ID NO: 4239 - protein, 7 aa, Artificial Sequence
  Description of Artificial Sequence: Synthetic peptide
  SH1A1Q[PD-L1] vlCDR2
DNNYRPS

SEQ ID NO: 4240 - protein, 11 aa, Artificial Sequence
  Description of Artificial Sequence: Synthetic peptide
  SH1A1Q[PD-L1] vlCDR3
GVWDGSLTTGV

SEQ ID NO: 4241 - protein, 118 aa, Artificial Sequence
  Description of Artificial Sequence: Synthetic polypeptide
  SH1B3[PD-L1] variable heavy Chain
QVQLVESGGGVVQPGRSLRLSCAASGFTFSSYAMHWVRQAPGKGLEWVAVISFDGSNKYYADSVRGRFTISRDNSKNTLYLQMNSLRTEDTAVYYCARGWLDRDIDYWGQGTLVTVSS

SEQ ID NO: 4242 - protein, 5 aa, Artificial Sequence
  Description of Artificial Sequence: Synthetic peptide
  SH1B3[PD-L1] vhCDR1
SYAMH

SEQ ID NO: 4243 - protein, 17 aa, Artificial Sequence
  Description of Artificial Sequence: Synthetic peptide
  SH1B3[PD-L1] vhCDR2
VISFDGSNKYYADSVRG

SEQ ID NO: 4244 - protein, 9 aa, Artificial Sequence
  Description of Artificial Sequence: Synthetic peptide
  SH1B3[PD-L1] vhCDR3
GWLDRDIDY

SEQ ID NO: 4245 - protein, 110 aa, Artificial Sequence
  Description of Artificial Sequence: Synthetic polypeptide
  SH1B3[PD-L1] variable light Chain
LPVLTQPASVSGSPGQSITISCTGTTSDIGGYDYVSWYQQHPGKAPKLMIYDVSKRPSGVSNRFSGSKSGNTASLTISGLQAEDEADYYCSSYTSSSTHVFGTGTKLTVL

SEQ ID NO: 4246 - protein, 14 aa, Artificial Sequence
  Description of Artificial Sequence: Synthetic peptide
  SH1B3[PD-L1] vlCDR1
TGTTSDIGGYDYVS

SEQ ID NO: 4247 - protein, 7 aa, Artificial Sequence
  Description of Artificial Sequence: Synthetic peptide
  SH1B3[PD-L1] vlCDR2
DVSKRPS

SEQ ID NO: 4248 - protein, 10 aa, Artificial Sequence
  Description of Artificial Sequence: Synthetic peptide
  SH1B3[PD-L1] vlCDR3
SSYTSSSTHV

SEQ ID NO: 4249 - protein, 118 aa, Artificial Sequence
  Description of Artificial Sequence: Synthetic polypeptide
  SH1D1[PD-L1] variable heavy Chain
EVQLVESGGGVVQPGRSLRLSCAASGFTFSSYAMHWVRQAPGKGLEWVAVISFDGSNKYYADSVRGRFTISRDNSKNTLYLQMNSLRTEDTAVYYCARGWLDRDIDYWGQGTLVTVSS

SEQ ID NO: 4250 - protein, 5 aa, Artificial Sequence
  Description of Artificial Sequence: Synthetic peptide
  SH1D1[PD-L1] vhCDR1
SYAMH

SEQ ID NO: 4251 - protein, 17 aa, Artificial Sequence
  Description of Artificial Sequence: Synthetic peptide
  SH1D1[PD-L1] vhCDR2
VISFDGSNKYYADSVRG

SEQ ID NO: 4252 - protein, 9 aa, Artificial Sequence
  Description of Artificial Sequence: Synthetic peptide
  SH1D1[PD-L1] vhCDR3
GWLDRDIDY

SEQ ID NO: 4253 - protein, 111 aa, Artificial Sequence
  Description of Artificial Sequence: Synthetic polypeptide
  SH1D1[PD-L1] variable light Chain
QSALTQPASVSGSPGQSITISCTGTSSDVGGYNYVSWYQQHPGKAPKLMIYDVSNRPSGVSNRFSGSKSGNTASLTISGLQAEDEADYYCSSYRSSTLGPVFGGGTKLTVL

SEQ ID NO: 4254 - protein, 14 aa, Artificial Sequence
  Description of Artificial Sequence: Synthetic peptide
  SH1D1[PD-L1] vlCDR1
TGTSSDVGGYNYVS

SEQ ID NO: 4255 - protein, 7 aa, Artificial Sequence
  Description of Artificial Sequence: Synthetic peptide
  SH1D1[PD-L1] vlCDR2
DVSNRPS

SEQ ID NO: 4256 - protein, 11 aa, Artificial Sequence
  Description of Artificial Sequence: Synthetic peptide
  SH1D1[PD-L1] vlCDR3
SSYRSSTLGPV

SEQ ID NO: 4257 - protein, 118 aa, Artificial Sequence; identical to SEQ ID NO: 4241
  Description of Artificial Sequence: Synthetic polypeptide
  SH1D2[PD-L1] variable heavy Chain

SEQ ID NO: 4258 - protein, 5 aa, Artificial Sequence
  Description of Artificial Sequence: Synthetic peptide
  SH1D2[PD-L1] vhCDR1
SYAMH

SEQ ID NO: 4259 - protein, 17 aa, Artificial Sequence
  Description of Artificial Sequence: Synthetic peptide
  SH1D2[PD-L1] vhCDR2
VISFDGSNKYYADSVRG

SEQ ID NO: 4260 - protein, 9 aa, Artificial Sequence
  Description of Artificial Sequence: Synthetic peptide
  SH1D2[PD-L1] vhCDR3
GWLDRDIDY

SEQ ID NO: 4261 - protein, 110 aa, Artificial Sequence
  Description of Artificial Sequence: Synthetic polypeptide
  SH1D2[PD-L1] variable light Chain
QAGLTQPPSVSEAPRQRVTISCSGSSSNIGNNAVNWYQQLPGKAPKLLIYYDDLLPSGVSDRFSGSKSGTSASLAISGLQSEDEADYYCAAWDDSLNGYVFGTGTKLTVL

SEQ ID NO: 4262 - protein, 13 aa, Artificial Sequence
  Description of Artificial Sequence: Synthetic peptide
  SH1D2[PD-L1] vlCDR1
SGSSSNIGNNAVN

SEQ ID NO: 4263 - protein, 7 aa, Artificial Sequence
  Description of Artificial Sequence: Synthetic peptide
  SH1D2[PD-L1] vlCDR2
YDDLLPS

SEQ ID NO: 4264 - protein, 11 aa, Artificial Sequence
  Description of Artificial Sequence: Synthetic peptide
  SH1D2[PD-L1] vlCDR3
AAWDDSLNGYV

SEQ ID NO: 4265 - protein, 118 aa, Artificial Sequence; identical to SEQ ID NO: 4249
  Description of Artificial Sequence: Synthetic polypeptide
  SH1D12[PD-L1] variable heavy Chain

SEQ ID NO: 4266 - protein, 5 aa, Artificial Sequence
  Description of Artificial Sequence: Synthetic peptide
  SH1D12[PD-L1] vhCDR1
SYAMH

SEQ ID NO: 4267 - protein, 17 aa, Artificial Sequence
  Description of Artificial Sequence: Synthetic peptide
  SH1D12[PD-L1] vhCDR2
VISFDGSNKYYADSVRG

SEQ ID NO: 4268 - protein, 9 aa, Artificial Sequence
  Description of Artificial Sequence: Synthetic peptide
  SH1D12[PD-L1] vhCDR3
GWLDRDIDY

SEQ ID NO: 4269 - protein, 110 aa, Artificial Sequence
  Description of Artificial Sequence: Synthetic polypeptide
  SH1D12[PD-L1] variable light Chain
QSALTQPRSVSGSPGQSVTISCTGTSSDVGGYNYVSWYQQHPGKAPKLMIYDVSKRPSGVPDRFSGSKSGNTASLTISGLQAEDEADYYCSSYTSSTTHVFGTGTKVTVL

SEQ ID NO: 4270 - protein, 14 aa, Artificial Sequence
  Description of Artificial Sequence: Synthetic peptide
  SH1D12[PD-L1] vlCDR1
TGTSSDVGGYNYVS

SEQ ID NO: 4271 - protein, 7 aa, Artificial Sequence
  Description of Artificial Sequence: Synthetic peptide
  SH1D12[PD-L1] vlCDR2
DVSKRPS

SEQ ID NO: 4272 - protein, 10 aa, Artificial Sequence
  Description of Artificial Sequence: Synthetic peptide
  SH1D12[PD-L1] vlCDR3
SSYTSSTTHV

SEQ ID NO: 4273 - protein, 118 aa, Artificial Sequence; identical to SEQ ID NO: 4249
  Description of Artificial Sequence: Synthetic polypeptide
  SH1E1[PD-L1] variable heavy Chain

SEQ ID NO: 4274 - protein, 5 aa, Artificial Sequence
  Description of Artificial Sequence: Synthetic peptide
  SH1E1[PD-L1] vhCDR1
SYAMH

SEQ ID NO: 4275 - protein, 17 aa, Artificial Sequence
  Description of Artificial Sequence: Synthetic peptide
  SH1E1[PD-L1] vhCDR2
VISFDGSNKYYADSVRG

SEQ ID NO: 4276 - protein, 9 aa, Artificial Sequence
  Description of Artificial Sequence: Synthetic peptide
  SH1E1[PD-L1] vhCDR3
GWLDRDIDY

SEQ ID NO: 4277 - protein, 110 aa, Artificial Sequence
  Description of Artificial Sequence: Synthetic polypeptide
  SH1E1[PD-L1] variable light Chain
QSVVTQPPSVSAAPGQKVTISCSGSSSNIGNNYVSWYQQLPGTAPKLLIYDNNKRPSGIPDRFSGSKSGTSATLGITGLQTGDEADYYCGTWDSSLSVWVFGGGTQLTVL

SEQ ID NO: 4278 - protein, 13 aa, Artificial Sequence
  Description of Artificial Sequence: Synthetic peptide
  SH1E1[PD-L1] vlCDR1
SGSSSNIGNNYVS

SEQ ID NO: 4279 - protein, 7 aa, Artificial Sequence
  Description of Artificial Sequence: Synthetic peptide
  SH1E1[PD-L1] vlCDR2
DNNKRPS

SEQ ID NO: 4280 - protein, 11 aa, Artificial Sequence
  Description of Artificial Sequence: Synthetic peptide
  SH1E1[PD-L1] vlCDR3
GTWDSSLSVWV

SEQ ID NO: 4281 - protein, 118 aa, Artificial Sequence; identical to SEQ ID NO: 4241
  Description of Artificial Sequence: Synthetic polypeptide
  SH1G9[PD-L1] variable heavy Chain

SEQ ID NO: 4282 - protein, 5 aa, Artificial Sequence
  Description of Artificial Sequence: Synthetic peptide
  SH1G9[PD-L1] vhCDR1
SYAMH

SEQ ID NO: 4283 - protein, 17 aa, Artificial Sequence
  Description of Artificial Sequence: Synthetic peptide
  SH1G9[PD-L1] vhCDR2
VISFDGSNKYYADSVRG

SEQ ID NO: 4284 - protein, 9 aa, Artificial Sequence
  Description of Artificial Sequence: Synthetic peptide
  SH1G9[PD-L1] vhCDR3
GWLDRDIDY

SEQ ID NO: 4285 - protein, 112 aa, Artificial Sequence
  Description of Artificial Sequence: Synthetic polypeptide
  SH1G9[PD-L1] variable light Chain
QSVLTQPASVSGSPGQSITISCTGTSSDVGGYNYVSWYQQHPGRAPRLMIYDVSNRPSGVSNRFSGSKSGNTASLTISGLQAEDEGDYYCSSYTSGGTLGPVFGGGTKLTVL

SEQ ID NO: 4286 - protein, 14 aa, Artificial Sequence
  Description of Artificial Sequence: Synthetic peptide
  SH1G9[PD-L1] vlCDR1
TGTSSDVGGYNYVS

SEQ ID NO: 4287 - protein, 7 aa, Artificial Sequence
  Description of Artificial Sequence: Synthetic peptide
  SH1G9[PD-L1] vlCDR2
DVSNRPS

SEQ ID NO: 4288 - protein, 12 aa, Artificial Sequence
  Description of Artificial Sequence: Synthetic peptide
  SH1G9[PD-L1] vlCDR3
SSYTSGGTLGPV

SEQ ID NO: 4289 - protein, 120 aa, Artificial Sequence
  Description of Artificial Sequence: Synthetic polypeptide
  SH1E6[PD-L1] variable heavy Chain
QVQLVQSGAEVKKPGSSVKVSCKASGGTFSRYGVHWVRQAPGQGLEWMGRLIPIVSMTNYAQKFQDRVSITTDKSTGTAYMELRSLTSEDTALYYCASVGQQLPWVFFAWGQGTLVTVSS

SEQ ID NO: 4290 - protein, 5 aa, Artificial Sequence
  Description of Artificial Sequence: Synthetic peptide
  SH1E6[PD-L1] vhCDR1
RYGVH

SEQ ID NO: 4291 - protein, 17 aa, Artificial Sequence
  Description of Artificial Sequence: Synthetic peptide
  SH1E6[PD-L1] vhCDR2
RLIPIVSMTNYAQKFQD

SEQ ID NO: 4292 - protein, 11 aa, Artificial Sequence
  Description of Artificial Sequence: Synthetic peptide
  SH1E6[PD-L1] vhCDR3
VGQQLPWVFFA

SEQ ID NO: 4293 - protein, 110 aa, Artificial Sequence
  Description of Artificial Sequence: Synthetic polypeptide
  SH1E6[PD-L1] variable light Chain
QSVVTQPPSVSAAPGQKVTISCSGSSSNIGNNYVSWYQQLPGTAPKLLIYDNNKRPSGIPDRFSGSKSGTSATLGITGLQTGDEADYYCGTWDSSLSAVVFGGGTKLTVL

SEQ ID NO: 4294 - protein, 13 aa, Artificial Sequence
  Description of Artificial Sequence: Synthetic peptide
  SH1E6[PD-L1] vlCDR1
SGSSSNIGNNYVS

SEQ ID NO: 4295 - protein, 7 aa, Artificial Sequence
  Description of Artificial Sequence: Synthetic peptide
  SH1E6[PD-L1] vlCDR2
DNNKRPS

SEQ ID NO: 4296 - protein, 11 aa, Artificial Sequence
  Description of Artificial Sequence: Synthetic peptide
  SH1E6[PD-L1] vlCDR3
GTWDSSLSAVV

SEQ ID NO: 4297 - protein, 118 aa, Artificial Sequence
  Description of Artificial Sequence: Synthetic polypeptide
  SH1A2[PD-L1] variable heavy Chain
QMQLVQSGGGVVQPGRSLRLSCAASGFTFSSYAMHWVRQAPGKGLEWVAVISFDGSNKYYADSVRGRFTISRDNSKNTLYLQMNSLRTEDTAVYYCARGWLDRDIDYWGQGTLVTVSS

SEQ ID NO: 4298 - protein, 5 aa, Artificial Sequence
  Description of Artificial Sequence: Synthetic peptide
  SH1A2[PD-L1] vhCDR1
SYAMH

SEQ ID NO: 4299 - protein, 17 aa, Artificial Sequence
  Description of Artificial Sequence: Synthetic peptide
  SH1A2[PD-L1] vhCDR2
VISFDGSNKYYADSVRG

SEQ ID NO: 4300 - protein, 9 aa, Artificial Sequence
  Description of Artificial Sequence: Synthetic peptide
  SH1A2[PD-L1] vhCDR3
GWLDRDIDY

SEQ ID NO: 4301 - protein, 110 aa, Artificial Sequence
  Description of Artificial Sequence: Synthetic polypeptide
  SH1A2[PD-L1] variable light Chain
QSVVTQPPSVSAAPGQKVTISCSGSSSNIGNNYVSWYQQVPGTAPKLLIYDNNKRPSGIPDRFSGSNSDTSATLGITGLQTGDEADYYCGTWDSSLSAWVFGGGTKLTVL

SEQ ID NO: 4302 - protein, 13 aa, Artificial Sequence
  Description of Artificial Sequence: Synthetic peptide
  SH1A2[PD-L1] vlCDR1
SGSSSNIGNNYVS

SEQ ID NO: 4303 - protein, 7 aa, Artificial Sequence
  Description of Artificial Sequence: Synthetic peptide
  SH1A2[PD-L1] vlCDR2
DNNKRPS

SEQ ID NO: 4304 - protein, 11 aa, Artificial Sequence
  Description of Artificial Sequence: Synthetic peptide
  SH1A2[PD-L1] vlCDR3
GTWDSSLSAWV

SEQ ID NO: 4305 - protein, 118 aa, Artificial Sequence
  Description of Artificial Sequence: Synthetic polypeptide
  SH1B1[PD-L1] variable heavy Chain
QVQLVQSGGGVVQPGRSLRLSCAASGFTFSSYAMHWVRQAPGKGLEWVAVISFDGSNKYYADSVRGRFTISRDNSKNTLYLQMNSLRTEDTAVYYCARGWLDRDIDYWGQGTLVTVSS

SEQ ID NO: 4306 - protein, 5 aa, Artificial Sequence
  Description of Artificial Sequence: Synthetic peptide
  SH1B1[PD-L1] vhCDR1
SYAMH

SEQ ID NO: 4307 - protein, 17 aa, Artificial Sequence
  Description of Artificial Sequence: Synthetic peptide
  SH1B1[PD-L1] vhCDR2
VISFDGSNKYYADSVRG

SEQ ID NO: 4308 - protein, 9 aa, Artificial Sequence
  Description of Artificial Sequence: Synthetic peptide
  SH1B1[PD-L1] vhCDR3
GWLDRDIDY

SEQ ID NO: 4309 - protein, 112 aa, Artificial Sequence
  Description of Artificial Sequence: Synthetic polypeptide
  SH1B1[PD-L1] variable light Chain
QSVVTQPPSVSAAPGQKVTISCSGSSSNIGNNYVSWYQQLPGTAPKLLIYDNNKRPSGIPDRFSGSKSGTSATLGITGLQTGDEADYYCGTWDSSLSAGSVVFGGGTKLTVL

SEQ ID NO: 4310 - protein, 13 aa, Artificial Sequence
  Description of Artificial Sequence: Synthetic peptide
  SH1B1[PD-L1] vlCDR1
SGSSSNIGNNYVS

SEQ ID NO: 4311 - protein, 7 aa, Artificial Sequence
  Description of Artificial Sequence: Synthetic peptide
  SH1B1[PD-L1] vlCDR2
DNNKRPS

SEQ ID NO: 4312 - protein, 13 aa, Artificial Sequence
  Description of Artificial Sequence: Synthetic peptide
  SH1B1[PD-L1] vlCDR3
GTWDSSLSAGSVV

SEQ ID NO: 4313 - protein, 121 aa, Artificial Sequence
  Description of Artificial Sequence: Synthetic polypeptide
  H6B1L[PD-L1] variable heavy Chain
QMQLVQSGAEVKKPGSSVKVSCKASGGTFSSYAYSWVRQAPGQGLEWMGGIIPSFGTANYAQKFQGRVTITADESTSTAYMELSSLRSEDTAVYYCARGPIVATITPLDYWGQGTLVTVSS

SEQ ID NO: 4314 - protein, 5 aa, Artificial Sequence
  Description of Artificial Sequence: Synthetic peptide
  H6B1L[PD-L1] vhCDR1
SYAYS

SEQ ID NO: 4315 - protein, 17 aa, Artificial Sequence
  Description of Artificial Sequence: Synthetic peptide
  H6B1L[PD-L1] vhCDR2
GIIPSFGTANYAQKFQG

SEQ ID NO: 4316 - protein, 12 aa, Artificial Sequence
  Description of Artificial Sequence: Synthetic peptide
  H6B1L[PD-L1] vhCDR3
GPIVATITPLDY

SEQ ID NO: 4317 - protein, 108 aa, Artificial Sequence
  Description of Artificial Sequence: Synthetic polypeptide
  H6B1L[PD-L1] variable light Chain
SYELMQPPSVSVAPGKTATIACGGENIGRKTVHWYQQKPGQAPVLVIYYDSDRPSGIPERFSGSNSGNTATLTISRVEAGDEADYYCLVWDSSSDHRIFGGGTKLTVL

SEQ ID NO: 4318 - protein, 11 aa, Artificial Sequence
  Description of Artificial Sequence: Synthetic peptide
  H6B1L[PD-L1] vlCDR1
GGENIGRKTVH

SEQ ID NO: 4319 - protein, 7 aa, Artificial Sequence
  Description of Artificial Sequence: Synthetic peptide
  H6B1L[PD-L1] vlCDR2
YDSDRPS

SEQ ID NO: 4320 - protein, 11 aa, Artificial Sequence
  Description of Artificial Sequence: Synthetic peptide
  H6B1L[PD-L1] vlCDR3
LVWDSSSDHRI

SEQ ID NO: 4321 - protein, 121 aa, Artificial Sequence
  Description of Artificial Sequence: Synthetic polypeptide
  H6A1[PD-L1] variable heavy Chain
QMQLVQSGAEVKKPGSSVKVSCKASGGTFSSYAYSWVRQAPGQGLEWMGGIIPIFGTANYAQKFQGRVTITADESTSTAYMELSSLRSEDTAVYYCARGPIVATITPLDYWGQGTLVTVSS

SEQ ID NO: 4322 - protein, 5 aa, Artificial Sequence
  Description of Artificial Sequence: Synthetic peptide
  H6A1[PD-L1] vhCDR1
SYAYS

SEQ ID NO: 4323 - protein, 17 aa, Artificial Sequence
  Description of Artificial Sequence: Synthetic peptide
  H6A1[PD-L1] vhCDR2
GIIPIFGTANYAQKFQG

SEQ ID NO: 4324 - protein, 12 aa, Artificial Sequence
  Description of Artificial Sequence: Synthetic peptide
  H6A1[PD-L1] vhCDR3
GPIVATITPLDY

SEQ ID NO: 4325 - protein, 108 aa, Artificial Sequence; identical to SEQ ID NO: 4221
  Description of Artificial Sequence: Synthetic polypeptide
  H6A1[PD-L1] variable light Chain

SEQ ID NO: 4326 - protein, 11 aa, Artificial Sequence
  Description of Artificial Sequence: Synthetic peptide
  H6A1[PD-L1] vlCDR1
GGENIGRKTVH

SEQ ID NO: 4327 - protein, 7 aa, Artificial Sequence
  Description of Artificial Sequence: Synthetic peptide
  H6A1[PD-L1] vlCDR2
YDSDRPS

SEQ ID NO: 4328 - protein, 11 aa, Artificial Sequence
  Description of Artificial Sequence: Synthetic peptide
  H6A1[PD-L1] vlCDR3
QVWDSSSDHRI

SEQ ID NO: 4329 - protein, 121 aa, Artificial Sequence; identical to SEQ ID NO: 4313
  Description of Artificial Sequence: Synthetic polypeptide
  H6B1[PD-L1] variable heavy Chain

SEQ ID NO: 4330 - protein, 5 aa, Artificial Sequence
  Description of Artificial Sequence: Synthetic peptide
  H6B1[PD-L1] vhCDR1
SYAYS

SEQ ID NO: 4331 - protein, 17 aa, Artificial Sequence
  Description of Artificial Sequence: Synthetic peptide
  H6B1[PD-L1] vhCDR2
GIIPSFGTANYAQKFQG

SEQ ID NO: 4332 - protein, 12 aa, Artificial Sequence
  Description of Artificial Sequence: Synthetic peptide
  H6B1[PD-L1] vhCDR3
GPIVATITPLDY

SEQ ID NO: 4333 - protein, 108 aa, Artificial Sequence; identical to SEQ ID NO: 4221
  Description of Artificial Sequence: Synthetic polypeptide
  H6B1[PD-L1] variable light Chain

SEQ ID NO: 4334 - protein, 11 aa, Artificial Sequence
  Description of Artificial Sequence: Synthetic peptide
  H6B1[PD-L1] vlCDR1
GGENIGRKTVH

SEQ ID NO: 4335 - protein, 7 aa, Artificial Sequence
  Description of Artificial Sequence: Synthetic peptide
  H6B1[PD-L1] vlCDR2
YDSDRPS

SEQ ID NO: 4336 - protein, 11 aa, Artificial Sequence
  Description of Artificial Sequence: Synthetic peptide
  H6B1[PD-L1] vlCDR3
QVWDSSSDHRI

SEQ ID NO: 4337 - protein, 121 aa, Artificial Sequence
  Description of Artificial Sequence: Synthetic polypeptide
  H6B2[PD-L1] variable heavy Chain
QMQLVQSGAEVKKPGSSVKVSCKASGGTFSSYAISWVRQAPGQGLEWMGGIIPAFGTANYAQKFQGRVTITADESTSTAYMELSSLRSEDTAVYYCARGPIVATITPLDYWGQGTLVTVSS

SEQ ID NO: 4338 - protein, 5 aa, Artificial Sequence
  Description of Artificial Sequence: Synthetic peptide
  H6B2[PD-L1] vhCDR1
SYAIS

SEQ ID NO: 4339 - protein, 17 aa, Artificial Sequence
  Description of Artificial Sequence: Synthetic peptide
  H6B2[PD-L1] vhCDR2
GIIPAFGTANYAQKFQG

SEQ ID NO: 4340 - protein, 12 aa, Artificial Sequence
  Description of Artificial Sequence: Synthetic peptide
  H6B2[PD-L1] vhCDR3
GPIVATITPLDY

SEQ ID NO: 4341 - protein, 108 aa, Artificial Sequence; identical to SEQ ID NO: 4221
  Description of Artificial Sequence: Synthetic polypeptide
  H6B2[PD-L1] variable light Chain

SEQ ID NO: 4342 - protein, 11 aa, Artificial Sequence
  Description of Artificial Sequence: Synthetic peptide
  H6B2[PD-L1] vlCDR1
GGENIGRKTVH

SEQ ID NO: 4343 - protein, 7 aa, Artificial Sequence
  Description of Artificial Sequence: Synthetic peptide
  H6B2[PD-L1] vlCDR2
YDSDRPS

SEQ ID NO: 4344 - protein, 11 aa, Artificial Sequence
  Description of Artificial Sequence: Synthetic peptide
  H6B2[PD-L1] vlCDR3
QVWDSSSDHRI

SEQ ID NO: 4345 - protein, 118 aa, Artificial Sequence
  Description of Artificial Sequence: Synthetic polypeptide
  G12[PD-L1] variable heavy Chain
EVQLVQSGAEVKKPGASVKVSCKASGYTFTGYYMHWVRQAPGQGLEWMGWINPNSDNTGSAQKFQGRVFMTKTTSLNTAYMELSGLRSEDTAIYYCARERSSGYFDFWGQGTLVTVSS

SEQ ID NO: 4346 - protein, 5 aa, Artificial Sequence
  Description of Artificial Sequence: Synthetic peptide
  G12[PD-L1] vhCDR1
GYYMH

SEQ ID NO: 4347 - protein, 17 aa, Artificial Sequence
  Description of Artificial Sequence: Synthetic peptide
  G12[PD-L1] vhCDR2
WINPNSDNTGSAQKFQG

SEQ ID NO: 4348 - protein, 9 aa, Artificial Sequence
  Description of Artificial Sequence: Synthetic peptide
  G12[PD-L1] vhCDR3
ERSSGYFDF

SEQ ID NO: 4349 - protein, 107 aa, Artificial Sequence
  Description of Artificial Sequence: Synthetic polypeptide
  G12[PD-L1] variable light Chain
DIVMTQSPSSLSASVGDRVTITCRASQSISSYLNWYQQKPGKAPKLLIYAASSLQSGVPSRFSGSGSGTDFTLTISSLQPEDFATYYCQQSYSTPITFGQGTRLEIK

SEQ ID NO: 4350 - protein, 11 aa, Artificial Sequence
  Description of Artificial Sequence: Synthetic peptide
  G12[PD-L1] vlCDR1
RASQSISSYLN

SEQ ID NO: 4351 - protein, 7 aa, Artificial Sequence
  Description of Artificial Sequence: Synthetic peptide
  G12[PD-L1] vlCDR2
AASSLQS

SEQ ID NO: 4352 - protein, 9 aa, Artificial Sequence
  Description of Artificial Sequence: Synthetic peptide
  G12[PD-L1] vlCDR3
QQSYSTPIT

SEQ ID NO: 4353 - protein, 118 aa, Artificial Sequence
  Description of Artificial Sequence: Synthetic polypeptide
  RSA1[PD-L1] variable heavy Chain
EVQLVQSGGGLVQPGGSLRLSCAASGFTFSSYSMNWVRQAPGKGLEWVSYISSSSSTIYYADSVKGRFTISRDNAKNSLYLQMNSLRDEDTAVYYCARGDYYYGMDVWGQGTTVTVSS

SEQ ID NO: 4354 - protein, 5 aa, Artificial Sequence
  Description of Artificial Sequence: Synthetic peptide
  RSA1[PD-L1] vhCDR1
SYSMN

SEQ ID NO: 4355 - protein, 17 aa, Artificial Sequence
  Description of Artificial Sequence: Synthetic peptide
  RSA1[PD-L1] vhCDR2
YISSSSSTIYYADSVKG

SEQ ID NO: 4356 - protein, 9 aa, Artificial Sequence
  Description of Artificial Sequence: Synthetic peptide
  RSA1[PD-L1] vhCDR3
GDYYYGMDV

SEQ ID NO: 4357 - protein, 108 aa, Artificial Sequence
  Description of Artificial Sequence: Synthetic polypeptide
  RSA1[PD-L1] variable light Chain
NIQMTQSPSSVSASVGDRVTITCRASQDISRWLAWYQQKPGKAPKLLIYAASSLQSGVPSRFSGSGSGTDFALTISSLQPEDFATYYCQQADSFFSITFGQGTRLEIK

SEQ ID NO: 4358 - protein, 11 aa, Artificial Sequence
  Description of Artificial Sequence: Synthetic peptide
  RSA1[PD-L1] vlCDR1
RASQDISRWLA

SEQ ID NO: 4359 - protein, 7 aa, Artificial Sequence
  Description of Artificial Sequence: Synthetic peptide
  RSA1[PD-L1] vlCDR2
AASSLQS

SEQ ID NO: 4360 - protein, 10 aa, Artificial Sequence
  Description of Artificial Sequence: Synthetic peptide
  RSA1[PD-L1] vlCDR3
QQADSFFSIT

SEQ ID NO: 4361 - protein, 120 aa, Artificial Sequence
  Description of Artificial Sequence: Synthetic polypeptide
  RA3[PD-L1] variable heavy Chain
QMQLVQSGAEVKKPGSSVKVSCKASGGTFSRYGVHWVRQAPGQGLEWMGRLIPIVSMTNYAQKFQDRVSITTDKSTGTAYMELRSLTSEDTALYYCASVGQQLPWVFFAWGQGTLVTVSS

SEQ ID NO: 4362 - protein, 5 aa, Artificial Sequence
  Description of Artificial Sequence: Synthetic peptide
  RA3[PD-L1] vhCDR1
RYGVH

SEQ ID NO: 4363 - protein, 17 aa, Artificial Sequence
  Description of Artificial Sequence: Synthetic peptide
  RA3[PD-L1] vhCDR2
RLIPIVSMTNYAQKFQD

SEQ ID NO: 4364 - protein, 11 aa, Artificial Sequence
  Description of Artificial Sequence: Synthetic peptide
  RA3[PD-L1] vhCDR3
VGQQLPWVFFA

SEQ ID NO: 4365 - protein, 107 aa, Artificial Sequence
  Description of Artificial Sequence: Synthetic polypeptide
  RA3[PD-L1] variable light Chain
DIQMTQSPSSLSASVGDRVTITCQASQDISNYLNWYQQKPGKAPKLLIYDASTLQSGVPSRFSGSGSGTDFTLTISSLQPEDFATYYCQQSYSSHWTFGQGTKVEIK

SEQ ID NO: 4366 - protein, 11 aa, Artificial Sequence
  Description of Artificial Sequence: Synthetic peptide
  RA3[PD-L1] vlCDR1
QASQDISNYLN

SEQ ID NO: 4367 - protein, 7 aa, Artificial Sequence
  Description of Artificial Sequence: Synthetic peptide
  RA3[PD-L1] vlCDR2
DASTLQS

SEQ ID NO: 4368 - protein, 9 aa, Artificial Sequence
  Description of Artificial Sequence: Synthetic peptide
  RA3[PD-L1] vlCDR3
QQSYSSHWT

SEQ ID NO: 4369 - protein, 119 aa, Artificial Sequence
  Description of Artificial Sequence: Synthetic polypeptide
  SH1E2[PD-L1] variable heavy Chain
EVQLVESGAEVKKPGSSVKVSCKASGGTFSSYAISWVRQAPGQGLEWMGGIIPIFGTANYAQKFQGRVTITADESTSTAYMELSSLRSEDTAVYYCARAPYYYYYMDVWGQGTTVTVSS

SEQ ID NO: 4370 - protein, 5 aa, Artificial Sequence
  Description of Artificial Sequence: Synthetic peptide
  SH1E2[PD-L1] vhCDR1
SYAIS

SEQ ID NO: 4371 - protein, 17 aa, Artificial Sequence
  Description of Artificial Sequence: Synthetic peptide
  SH1E2[PD-L1] vhCDR2
GIIPIFGTANYAQKFQG

SEQ ID NO: 4372 - protein, 10 aa, Artificial Sequence
  Description of Artificial Sequence: Synthetic peptide
  SH1E2[PD-L1] vhCDR3
APYYYYYMDV

SEQ ID NO: 4373 - protein, 109 aa, Artificial Sequence
  Description of Artificial Sequence: Synthetic polypeptide
  SH1E2[PD-L1] variable light Chain
QSALTQPASVSGSLGQSVTISCTGSSSDVGSYNLVSWYQQHPGKAPNLMIYDVSKRSGVSNRFSGSKSGNTASLTISGLQAEDEADYYCSSYTGISTVVFGGGTKLTVL

SEQ ID NO: 4374 - protein, 14 aa, Artificial Sequence
  Description of Artificial Sequence: Synthetic peptide
  SH1E2[PD-L1] vlCDR1
TGSSSDVGSYNLVS

SEQ ID NO: 4375 - protein, 6 aa, Artificial Sequence
  Description of Artificial Sequence: Synthetic peptide
  SH1E2[PD-L1] vlCDR2
DVSKRS

SEQ ID NO: 4376 - protein, 10 aa, Artificial Sequence
  Description of Artificial Sequence: Synthetic peptide
  SH1E2[PD-L1] vlCDR3
SSYTGISTVV

SEQ ID NO: 4377 - protein, 120 aa, Artificial Sequence; identical to SEQ ID NO: 4289
  Description of Artificial Sequence: Synthetic polypeptide
  SH1E4[PD-L1] variable heavy Chain

SEQ ID NO: 4378 - protein, 5 aa, Artificial Sequence
  Description of Artificial Sequence: Synthetic peptide
  SH1E4[PD-L1] vhCDR1
RYGVH

SEQ ID NO: 4379 - protein, 17 aa, Artificial Sequence
  Description of Artificial Sequence: Synthetic peptide
  SH1E4[PD-L1] vhCDR2
RLIPIVSMTNYAQKFQD

SEQ ID NO: 4380 - protein, 11 aa, Artificial Sequence
  Description of Artificial Sequence: Synthetic peptide
  SH1E4[PD-L1] vhCDR3
VGQQLPWVFFA

SEQ ID NO: 4381 - protein, 112 aa, Artificial Sequence
  Description of Artificial Sequence: Synthetic polypeptide
  SH1E4[PD-L1] variable light Chain
QSVLTQPPSASGSPGQSVTISCTGTSSDIGGYDSVSWYQQHPGKAPKLMIYDVSKRPSGVSNRFSGSKSGNTASLTISGLQAEDEADYYCSSYTSSSIFFYVFGTGTKVTVL

SEQ ID NO: 4382 - protein, 14 aa, Artificial Sequence
  Description of Artificial Sequence: Synthetic peptide
  SH1E4[PD-L1] vlCDR1
TGTSSDIGGYDSVS

SEQ ID NO: 4383 - protein, 7 aa, Artificial Sequence
  Description of Artificial Sequence: Synthetic peptide
  SH1E4[PD-L1] vlCDR2
DVSKRPS

SEQ ID NO: 4384 - protein, 12 aa, Artificial Sequence
  Description of Artificial Sequence: Synthetic peptide
  SH1E4[PD-L1] vlCDR3
SSYTSSSIFFYV

SEQ ID NO: 4385 - protein, 121 aa, Artificial Sequence
  Description of Artificial Sequence: Synthetic polypeptide
  SH1B11[PD-L1] variable heavy Chain
QVQLVQSGSELKKPGSSVKVSCKASGYSFSGYYIHWVRQAPGQGLEWMGWIDPNSGVTNYVRRFQGRVTMTRDTSLSTAYMELSGLTADDTAVYYCARDENLWQFGYLDYWGQGTLVTVSS

SEQ ID NO: 4386 - protein, 5 aa, Artificial Sequence
  Description of Artificial Sequence: Synthetic peptide
  SH1B11[PD-L1] vhCDR1
GYYIH

SEQ ID NO: 4387 - protein, 17 aa, Artificial Sequence
  Description of Artificial Sequence: Synthetic peptide
  SH1B11[PD-L1] vhCDR2
WIDPNSGVTNYVRRFQG

SEQ ID NO: 4388 - protein, 12 aa, Artificial Sequence
  Description of Artificial Sequence: Synthetic peptide
  SH1B11[PD-L1] vhCDR3
DENLWQFGYLDY

SEQ ID NO: 4389 - protein, 107 aa, Artificial Sequence
  Description of Artificial Sequence: Synthetic polypeptide
  SH1B11[PD-L1] variable light Chain
DIVMTQSPSSLSASIGDRVTITCRASQRISAYVNWYQQKPGKAPKVLIYAASSLRSGVPSRFSGSGSGTDFTLTISSLQPEDFATYYCQQTYSSPWTFGQGTKVEIK

SEQ ID NO: 4390 - protein, 11 aa, Artificial Sequence
  Description of Artificial Sequence: Synthetic peptide
  SH1B11[PD-L1] vlCDR1
RASQRISAYVN

SEQ ID NO: 4391 - protein, 7 aa, Artificial Sequence
  Description of Artificial Sequence: Synthetic peptide
  SH1B11[PD-L1] vlCDR2
AASSLRS

SEQ ID NO: 4392 - protein, 9 aa, Artificial Sequence
  Description of Artificial Sequence: Synthetic peptide
  SH1B11[PD-L1] vlCDR3
QQTYSSPWT

SEQ ID NO: 4393 - protein, 119 aa, Artificial Sequence
  Description of Artificial Sequence: Synthetic polypeptide
  SH1C8[PD-L1] variable heavy Chain
EVQLVESGGGVVQPGRSLRLSCAASGFTFSSYAMHWVRQAPGKGLEWVAVISYDGSNKYYADSVKGRFTISRDNSKNTLYLQMNSLRAEDTAVYYCARGQWLVTELDYWGQGTLVTVSS

SEQ ID NO: 4394 - protein, 5 aa, Artificial Sequence
  Description of Artificial Sequence: Synthetic peptide
  SH1C8[PD-L1] vhCDR1
SYAMH

SEQ ID NO: 4395 - protein, 17 aa, Artificial Sequence
  Description of Artificial Sequence: Synthetic peptide
  SH1C8[PD-L1] vhCDR2
VISYDGSNKYYADSVKG

SEQ ID NO: 4396 - protein, 10 aa, Artificial Sequence
  Description of Artificial Sequence: Synthetic peptide
  SH1C8[PD-L1] vhCDR3
GQWLVTELDY

SEQ ID NO: 4397 - protein, 111 aa, Artificial Sequence
  Description of Artificial Sequence: Synthetic polypeptide
  SH1C8[PD-L1] variable light Chain
QSVVTQPPSVSAAPGQKVTISCSGSSSDIGNHYVSWYQQLPGTAPKLLIYDNNQRPSGIPDRFSGSKSGTSATLAITGLQTGDEADYYCGTWDNSLSPHLLFGGGTKLTVL

SEQ ID NO: 4398 - protein, 13 aa, Artificial Sequence
  Description of Artificial Sequence: Synthetic peptide
  SH1C8[PD-L1] vlCDR1
SGSSSDIGNHYVS

SEQ ID NO: 4399 - protein, 7 aa, Artificial Sequence
  Description of Artificial Sequence: Synthetic peptide
  SH1C8[PD-L1] vlCDR2
DNNQRPS

SEQ ID NO: 4400 - protein, 12 aa, Artificial Sequence
  Description of Artificial Sequence: Synthetic peptide
  SH1C8[PD-L1] vlCDR3
GTWDNSLSPHLL

SEQ ID NO: 4401 - protein, 123 aa, Artificial Sequence
  Description of Artificial Sequence: Synthetic polypeptide
  H1H9364P2[PD-L1] variable heavy Chain
EVQLVESGGGLVQPGRSLRLSCAASGFTFDDYALHWVRQAPGKGLEWVSGISWTGGTIDYADSVKGRFTISRDNAKNSLYLQMSSLRTEDTAIYYCTRDIRGNWKYGGWFDPWGQGTLVTVSS

SEQ ID NO: 4402 - protein, 5 aa, Artificial Sequence
  Description of Artificial Sequence: Synthetic peptide
  H1H9364P2[PD-L1] vhCDR1
DYALH

SEQ ID NO: 4403 - protein, 17 aa, Artificial Sequence
  Description of Artificial Sequence: Synthetic peptide
  H1H9364P2[PD-L1] vhCDR2
GISWTGGTIDYADSVKG

SEQ ID NO: 4404 - protein, 14 aa, Artificial Sequence
  Description of Artificial Sequence: Synthetic peptide
  H1H9364P2[PD-L1] vhCDR3
DIRGNWKYGGWFDP

SEQ ID NO: 4405 - protein, 108 aa, Artificial Sequence
  Description of Artificial Sequence: Synthetic polypeptide
  H1H9364P2[PD-L1] variable light Chain
DIQMTQSPSSLSASVGDRVTITCRASQSISSYLNWYQQKPGKAPKLLIYAASSLQSGVPSRFSGSGSGTDFTLTISSLQPEDFATYYCQQSYSTPPITFGQGTRLEIK

SEQ ID NO: 4406 - protein, 11 aa, Artificial Sequence
  Description of Artificial Sequence: Synthetic peptide
  H1H9364P2[PD-L1] vlCDR1
RASQSISSYLN

SEQ ID NO: 4407 - protein, 7 aa, Artificial Sequence
  Description of Artificial Sequence: Synthetic peptide
  H1H9364P2[PD-L1] vlCDR2
AASSLQS

SEQ ID NO: 4408 - protein, 10 aa, Artificial Sequence
  Description of Artificial Sequence: Synthetic peptide
  H1H9364P2[PD-L1] vlCDR3
QQSYSTPPIT

SEQ ID NO: 4409 - protein, 120 aa, Artificial Sequence
  Description of Artificial Sequence: Synthetic polypeptide
  H1H9373P2[PD-L1] variable heavy Chain
QVQLVQSGTEVKKPGASVKVSCKASGYTFTAYYMHWVRQAPGQGLDWMGWISPNSGFTNYAQKFQGRVTMTRDTSINTFYMELSGLRSDDTAVYYCAREGSTHHNSFDPWGQGTLVTVSS

SEQ ID NO: 4410 - protein, 5 aa, Artificial Sequence
  Description of Artificial Sequence: Synthetic peptide
  H1H9373P2[PD-L1] vhCDR1
AYYMH

SEQ ID NO: 4411 - protein, 17 aa, Artificial Sequence
  Description of Artificial Sequence: Synthetic peptide
  H1H9373P2[PD-L1] vhCDR2
WISPNSGFTNYAQKFQG

SEQ ID NO: 4412 - protein, 11 aa, Artificial Sequence
  Description of Artificial Sequence: Synthetic peptide
  H1H9373P2[PD-L1] vhCDR3
EGSTHHNSFDP

SEQ ID NO: 4413 - protein, 108 aa, Artificial Sequence; identical to SEQ ID NO: 4405
  Description of Artificial Sequence: Synthetic polypeptide
  H1H9373P2[PD-L1] variable light Chain

SEQ ID NO: 4414 - protein, 11 aa, Artificial Sequence
  Description of Artificial Sequence: Synthetic peptide
  H1H9373P2[PD-L1] vlCDR1
RASQSISSYLN

SEQ ID NO: 4415 - protein, 7 aa, Artificial Sequence
  Description of Artificial Sequence: Synthetic peptide
  H1H9373P2[PD-L1] vlCDR2
AASSLQS

SEQ ID NO: 4416 - protein, 10 aa, Artificial Sequence
  Description of Artificial Sequence: Synthetic peptide
  H1H9373P2[PD-L1] vlCDR3
QQSYSTPPIT

SEQ ID NO: 4417 - protein, 120 aa, Artificial Sequence
  Description of Artificial Sequence: Synthetic polypeptide
  H1H8314N[PD-L1] variable heavy Chain
EVQLVESGGGVVRPGGSLRLSCAASGFTFDDYGMTWVRQAPGRGLEWVSGIHWHGKRTGYADSVKGRFTISRDNAKKSLYLQMNSLKGEDTALYHCVRGGMSTGDWFDPWGQGTLVIVSS

SEQ ID NO: 4418 - protein, 5 aa, Artificial Sequence
  Description of Artificial Sequence: Synthetic peptide
  H1H8314N[PD-L1] vhCDR1
DYGMT

SEQ ID NO: 4419 - protein, 17 aa, Artificial Sequence
  Description of Artificial Sequence: Synthetic peptide
  H1H8314N[PD-L1] vhCDR2
GIHWHGKRTGYADSVKG

SEQ ID NO: 4420 - protein, 11 aa, Artificial Sequence
  Description of Artificial Sequence: Synthetic peptide
  H1H8314N[PD-L1] vhCDR3
GGMSTGDWFDP

SEQ ID NO: 4421 - protein, 108 aa, Artificial Sequence
  Description of Artificial Sequence: Synthetic polypeptide
  H1H8314N[PD-L1] variable light Chain
DIQMTQSPSSLSASLGDRVTITCRASQSINSYLNWYQQKPGKAPKLLIYVASSLQSGVPSRFSGSGSGTEFTLTISNLQPEDFATYYCQQSYSTPPITFGQGTRLEIK

SEQ ID NO: 4422 - protein, 11 aa, Artificial Sequence
  Description of Artificial Sequence: Synthetic peptide
  H1H8314N[PD-L1] vlCDR1
RASQSINSYLN

SEQ ID NO: 4423 - protein, 7 aa, Artificial Sequence
  Description of Artificial Sequence: Synthetic peptide
  H1H8314N[PD-L1] vlCDR2
VASSLQS

SEQ ID NO: 4424 - protein, 10 aa, Artificial Sequence
  Description of Artificial Sequence: Synthetic peptide
  H1H8314N[PD-L1] vlCDR3
QQSYSTPPIT

SEQ ID NO: 4425 - protein, 119 aa, Artificial Sequence
  Description of Artificial Sequence: Synthetic polypeptide
  PDL1.3.1[PD-L1] variable heavy Chain
EVQLQQSGTELVKPGASVKLSCTTSGFNIQDTYMHWVKQRPEQGLEWIGWIDPANGNTKYDPKFQGKATIIADTSSNTAYLQLRGLTSEDTAVYYCARSGVSTAHFDYWGQGTTLTVSS

SEQ ID NO: 4426 - protein, 5 aa, Artificial Sequence
  Description of Artificial Sequence: Synthetic peptide
  PDL1.3.1[PD-L1] vhCDR1
DTYMH

SEQ ID NO: 4427 - protein, 17 aa, Artificial Sequence
  Description of Artificial Sequence: Synthetic peptide
  PDL1.3.1[PD-L1] vhCDR2
WIDPANGNTKYDPKFQG

SEQ ID NO: 4428 - protein, 10 aa, Artificial Sequence
  Description of Artificial Sequence: Synthetic peptide
  PDL1.3.1[PD-L1] vhCDR3
SGVSTAHFDY

SEQ ID NO: 4429 - protein, 106 aa, Artificial Sequence
  Description of Artificial Sequence: Synthetic polypeptide
  PDL1.3.1[PD-L1] variable light Chain
QIVLSQSPAILSASPGEKVTMTCRASSSVSFMHWYQQKPGSSPKPWIYATSNLASGVPTRFSGSGSGTSYSLTLSRVEAEDAATYYCQQWSSYPRTFGGGTKLEIK

SEQ ID NO: 4430 - protein, 10 aa, Artificial Sequence
  Description of Artificial Sequence: Synthetic peptide
  PDL1.3.1[PD-L1] vlCDR1
RASSSVSFMH

SEQ ID NO: 4431 - protein, 7 aa, Artificial Sequence
  Description of Artificial Sequence: Synthetic peptide
  PDL1.3.1[PD-L1] vlCDR2
ATSNLAS

SEQ ID NO: 4432 - protein, 9 aa, Artificial Sequence
  Description of Artificial Sequence: Synthetic peptide
  PDL1.3.1[PD-L1] vlCDR3
QQWSSYPRT

SEQ ID NO: 4433 - protein, 119 aa, Artificial Sequence
  Description of Artificial Sequence: Synthetic polypeptide
  10A7[TIGIT] variable heavy Chain
EVQLVESGGGLTQPGKSLKLSCEASGFTFSSFTMHWVRQSPGKGLEWVAFIRSGSGIVFYADAVRGRFTISRDNAKNLLFLQMNDLKSEDTAMYYCARRPLGHNTFDSWGQGTLVTVSS

SEQ ID NO: 4434 - protein, 5 aa, Artificial Sequence
  Description of Artificial Sequence: Synthetic peptide
  10A7[TIGIT] vhCDR1
SFTMH

SEQ ID NO: 4435 - protein, 17 aa, Artificial Sequence
  Description of Artificial Sequence: Synthetic peptide
  10A7[TIGIT] vhCDR2
FIRSGSGIVFYADAVRG

SEQ ID NO: 4436 - protein, 10 aa, Artificial Sequence
  Description of Artificial Sequence: Synthetic peptide
  10A7[TIGIT] vhCDR3
RPLGHNTFDS

SEQ ID NO: 4437 - protein, 113 aa, Artificial Sequence
  Description of Artificial Sequence: Synthetic polypeptide
  10A7[TIGIT] variable light Chain
DIVMTQSPSSLAVSPGEKVTMTCKSSQSLYYSGVKENLLAWYQQKPGQSPKLLIYYASIRFTGVPDRFTGSGSGTDYTLTITSVQAEDMGQYFCQQGINNPLTFGDGTKLEIK

SEQ ID NO: 4438 - protein, 17 aa, Artificial Sequence
  Description of Artificial Sequence: Synthetic peptide
  10A7[TIGIT] vlCDR1
KSSQSLYYSGVKENLLA

SEQ ID NO: 4439 - protein, 7 aa, Artificial Sequence
  Description of Artificial Sequence: Synthetic peptide
  10A7[TIGIT] vlCDR2
YASIRFT

SEQ ID NO: 4440 - protein, 9 aa, Artificial Sequence
  Description of Artificial Sequence: Synthetic peptide
  10A7[TIGIT] vlCDR3
QQGINNPLT

SEQ ID NO: 4441 - protein, 119 aa, Artificial Sequence
  Description of Artificial Sequence: Synthetic polypeptide
  1F4[TIGIT] variable heavy Chain
EVQLQQSGPELVKPGTSMKISCKASGYSFTGHLMNWVKQSHGKNLEWIGLIIPYNGGTSYNQKFKGKATLTVDKSSSTAYMELLSLTSDDSAVYFCSRGLRGFYAMDYWGQGTSVTVSS

SEQ ID NO: 4442 - protein, 5 aa, Artificial Sequence
  Description of Artificial Sequence: Synthetic peptide
  1F4[TIGIT] vhCDR1
GHLMN

SEQ ID NO: 4443 - protein, 17 aa, Artificial Sequence
  Description of Artificial Sequence: Synthetic peptide
  1F4[TIGIT] vhCDR2
LIIPYNGGTSYNQKFKG

SEQ ID NO: 4444 - protein, 10 aa, Artificial Sequence
  Description of Artificial Sequence: Synthetic peptide
  1F4[TIGIT] vhCDR3
GLRGFYAMDY

SEQ ID NO: 4445 - protein, 112 aa, Artificial Sequence
  Description of Artificial Sequence: Synthetic polypeptide
  1F4[TIGIT] variable light Chain
DVVLTQTPLSLSVSFGDQVSISCRSSQSLVNSYGNTFLSWYLHKPGQSPQLLIFGISNRFSGVPDRFSGSGSGTDFTLKISTIKPEDLGMYYCLQGTHQPPTFGPGTKLEVK

SEQ ID NO: 4446 - protein, 16 aa, Artificial Sequence
  Description of Artificial Sequence: Synthetic peptide
  1F4[TIGIT] vlCDR1
RSSQSLVNSYGNTFLS

SEQ ID NO: 4447 - protein, 7 aa, Artificial Sequence
  Description of Artificial Sequence: Synthetic peptide
  1F4[TIGIT] vlCDR2
GISNRFS

SEQ ID NO: 4448 - protein, 9 aa, Artificial Sequence
  Description of Artificial Sequence: Synthetic peptide
  1F4[TIGIT] vlCDR3
LQGTHQPPT

SEQ ID NO: 4449 - protein, 126 aa, Artificial Sequence
  Description of Artificial Sequence: Synthetic polypeptide
  4.1D3[TIGIT] variable heavy Chain
QVQLQQSGPGLVKPSQTLSLTCAISGDSVSSNSAAWNWIRQSPSRGLEWLGKTYYRFKWYSDYAVSVKGRITINPDTSKNQFSLQLNSVTPEDTAVFYCTRESTTYDLLAGPFDYWGQGTLVTVSS

SEQ ID NO: 4450 - protein, 7 aa, Artificial Sequence
  Description of Artificial Sequence: Synthetic peptide
  4.1D3[TIGIT] vhCDR1
SNSAAWN

SEQ ID NO: 4451 - protein, 18 aa, Artificial Sequence
  Description of Artificial Sequence: Synthetic peptide
  4.1D3[TIGIT] vhCDR2
KTYYRFKWYSDYAVSVKG

SEQ ID NO: 4452 - protein, 14 aa, Artificial Sequence
  Description of Artificial Sequence: Synthetic peptide
  4.1D3[TIGIT] vhCDR3
ESTTYDLLAGPFDY

SEQ ID NO: 4453 - protein, 113 aa, Artificial Sequence
  Description of Artificial Sequence: Synthetic polypeptide
  4.1D3[TIGIT] variable light Chain
DIVMTQSPDSLAVSLGERATINCKSSQTVLYSSNNKKYLAWYQQKPGQPPNLLIYWASTRESGVPDRFSGSGSGTDFTLTISSLQAEDVAVYYCQQYYSTPFTFGPGTKVEIK

SEQ ID NO: 4454 - protein, 17 aa, Artificial Sequence
  Description of Artificial Sequence: Synthetic peptide
  4.1D3[TIGIT] vlCDR1
KSSQTVLYSSNNKKYLA

SEQ ID NO: 4455 - protein, 7 aa, Artificial Sequence
  Description of Artificial Sequence: Synthetic peptide
  4.1D3[TIGIT] vlCDR2
WASTRES

SEQ ID NO: 4456 - protein, 9 aa, Artificial Sequence
  Description of Artificial Sequence: Synthetic peptide
  4.1D3[TIGIT] vlCDR3
QQYYSTPFT

SEQ ID NO: 4457 - protein, 126 aa, Artificial Sequence
  Description of Artificial Sequence: Synthetic polypeptide
  4.1D3.Q1E[TIGIT] variable heavy Chain
EVQLQQSGPGLVKPSQTLSLTCAISGDSVSSNSAAWNWIRQSPSRGLEWLGKTYYRFKWYSDYAVSVKGRITINPDTSKNQFSLQLNSVTPEDTAVFYCTRESTTYDLLAGPFDYWGQGTLVTVSS

SEQ ID NO: 4458 - protein, 7 aa, Artificial Sequence
  Description of Artificial Sequence: Synthetic peptide
  4.1D3.Q1E[TIGIT] vhCDR1
SNSAAWN

SEQ ID NO: 4459 - protein, 18 aa, Artificial Sequence
  Description of Artificial Sequence: Synthetic peptide
  4.1D3.Q1E[TIGIT] vhCDR2
KTYYRFKWYSDYAVSVKG

SEQ ID NO: 4460 - protein, 14 aa, Artificial Sequence
  Description of Artificial Sequence: Synthetic peptide
  4.1D3.Q1E[TIGIT] vhCDR3
ESTTYDLLAGPFDY

SEQ ID NO: 4461 - protein, 113 aa, Artificial Sequence; identical to SEQ ID NO: 4453
  Description of Artificial Sequence: Synthetic polypeptide
  4.1D3.Q1E[TIGIT] variable light Chain

SEQ ID NO: 4462 - protein, 17 aa, Artificial Sequence
  Description of Artificial Sequence: Synthetic peptide
  4.1D3.Q1E[TIGIT] vlCDR1
KSSQTVLYSSNNKKYLA

SEQ ID NO: 4463 - protein, 7 aa, Artificial Sequence
  Description of Artificial Sequence: Synthetic peptide
  4.1D3.Q1E[TIGIT] vlCDR2
WASTRES

SEQ ID NO: 4464 - protein, 9 aa, Artificial Sequence
  Description of Artificial Sequence: Synthetic peptide
  4.1D3.Q1E[TIGIT] vlCDR3
QQYYSTPFT

SEQ ID NO: 4465 - protein, 121 aa, Artificial Sequence
  Description of Artificial Sequence: Synthetic polypeptide
  Hu14D7 VH1[TIGIT] variable heavy Chain
EVQLVESGGGLVQPGGSLKLSCAASGFTFSGAWMDWVRQAPGKGLEWVAEIRTKVNNHATNYGESVKGRFTISRDDSKSTVYLQMNSLRAEDTAVYYCRGALYDGFYFDYWGQGTLVTVSS

SEQ ID NO: 4466 - protein, 5 aa, Artificial Sequence
  Description of Artificial Sequence: Synthetic peptide
  Hu14D7 VH1[TIGIT] vhCDR1
GAWMD

SEQ ID NO: 4467 - protein, 19 aa, Artificial Sequence
  Description of Artificial Sequence: Synthetic peptide
  Hu14D7 VH1[TIGIT] vhCDR2
EIRTKVNNHATNYGESVKG

SEQ ID NO: 4468 - protein, 10 aa, Artificial Sequence
  Description of Artificial Sequence: Synthetic peptide
  Hu14D7 VH1[TIGIT] vhCDR3
ALYDGFYFDY

SEQ ID NO: 4469 - protein, 121 aa, Artificial Sequence
  Description of Artificial Sequence: Synthetic polypeptide
  Hu14D7 VH2[TIGIT] variable heavy Chain
EVQLVESGGGLVQPGGSLKLSCAASGFTFSGAWMDWVRQAPGKGLEWVAEIRTKVNNHATNYGESVKGRFTISRDDSKSSVYLQMNSLRAEDTAVYYCRGALYDGFYFDYWGQGTLVTVSS

SEQ ID NO: 4470 - protein, 5 aa, Artificial Sequence
  Description of Artificial Sequence: Synthetic peptide
  Hu14D7 VH2[TIGIT] vhCDR1
GAWMD

SEQ ID NO: 4471 - protein, 19 aa, Artificial Sequence
  Description of Artificial Sequence: Synthetic peptide
  Hu14D7 VH2[TIGIT] vhCDR2
EIRTKVNNHATNYGESVKG

SEQ ID NO: 4472 - protein, 10 aa, Artificial Sequence
  Description of Artificial Sequence: Synthetic peptide
  Hu14D7 VH2[TIGIT] vhCDR3
ALYDGFYFDY

SEQ ID NO: 4473 - protein, 121 aa, Artificial Sequence
  Description of Artificial Sequence: Synthetic polypeptide
  Hu14D7 VH3[TIGIT] variable heavy Chain
EVQLVESGGGLVQPGGSLKLSCAASGFTFSGAWMDWVRQAPGKGLEWVAEIRTKVNNHATNYGESVKGRFTISRDDSKNTVYLQMNSLRAEDTAVYYCRGALYDGFYFDYWGQGTLVTVSS

SEQ ID NO: 4474 - protein, 5 aa, Artificial Sequence
  Description of Artificial Sequence: Synthetic peptide
  Hu14D7 VH3[TIGIT] vhCDR1
GAWMD

SEQ ID NO: 4475 - protein, 19 aa, Artificial Sequence
  Description of Artificial Sequence: Synthetic peptide
  Hu14D7 VH3[TIGIT] vhCDR2
EIRTKVNNHATNYGESVKG

SEQ ID NO: 4476 - protein, 10 aa, Artificial Sequence
  Description of Artificial Sequence: Synthetic peptide
  Hu14D7 VH3[TIGIT] vhCDR3
ALYDGFYFDY

SEQ ID NO: 4477 - protein, 108 aa, Artificial Sequence
  Description of Artificial Sequence: Synthetic polypeptide
  Hu14D7 VL1[TIGIT] variable light Chain
EIVLTQSPATLSLSPGERATLSCSASSSVSSGYLYWYQQKPGQAPKLWIYGTSTLASGVPARFSGSGSGTDYTLTISSLEPEDFAVYYCHQWSSFPYTFGQGTKLEIK

SEQ ID NO: 4478 - protein, 12 aa, Artificial Sequence
  Description of Artificial Sequence: Synthetic peptide
  Hu14D7 VL1[TIGIT] vlCDR1
SASSSVSSGYLY

SEQ ID NO: 4479 - protein, 7 aa, Artificial Sequence
  Description of Artificial Sequence: Synthetic peptide
  Hu14D7 VL1[TIGIT] vlCDR2
GTSTLAS

SEQ ID NO: 4480 - protein, 9 aa, Artificial Sequence
  Description of Artificial Sequence: Synthetic peptide
  Hu14D7 VL1[TIGIT] vlCDR3
HQWSSFPYT

SEQ ID NO: 4481 - protein, 108 aa, Artificial Sequence
  Description of Artificial Sequence: Synthetic polypeptide
  Hu14D7 VL2[TIGIT] variable light Chain
EIVLTQSPATLSLSPGERATLSCSASSSVSSGYLYWYQQKPGQAPRLWIYGTSTLASGVPARFSGSGSGTDYTLTISSLEPEDFAVYYCHQWSSFPYTFGQGTKLEIK

SEQ ID NO: 4482 - protein, 12 aa, Artificial Sequence
  Description of Artificial Sequence: Synthetic peptide
  Hu14D7 VL2[TIGIT] vlCDR1
SASSSVSSGYLY

SEQ ID NO: 4483 - protein, 7 aa, Artificial Sequence
  Description of Artificial Sequence: Synthetic peptide
  Hu14D7 VL2[TIGIT] vlCDR2
GTSTLAS

SEQ ID NO: 4484 - protein, 9 aa, Artificial Sequence
  Description of Artificial Sequence: Synthetic peptide
  Hu14D7 VL2[TIGIT] vlCDR3
HQWSSFPYT

SEQ ID NO: 4485 - protein, 108 aa, Artificial Sequence
  Description of Artificial Sequence: Synthetic polypeptide
  Hu14D7 VL3[TIGIT] variable light Chain
EIVLTQSPATLSLSPGERATLSCSASSSVSSGYLYWYQQKPGQAPRLWIYGTSTLASGIPARFSGSGSGTDYTLTISSLEPEDFAVYYCHQWSSFPYTFGQGTKLEIK

SEQ ID NO: 4486 - protein, 12 aa, Artificial Sequence
  Description of Artificial Sequence: Synthetic peptide
  Hu14D7 VL3[TIGIT] vlCDR1
SASSSVSSGYLY

SEQ ID NO: 4487 - protein, 7 aa, Artificial Sequence
  Description of Artificial Sequence: Synthetic peptide
  Hu14D7 VL3[TIGIT] vlCDR2
GTSTLAS

SEQ ID NO: 4488 - protein, 9 aa, Artificial Sequence
  Description of Artificial Sequence: Synthetic peptide
  Hu14D7 VL3[TIGIT] vlCDR3
HQWSSFPYT

SEQ ID NO: 4489 - protein, 119 aa, Artificial Sequence
  Description of Artificial Sequence: Synthetic polypeptide
  Hu26B10 VH1[TIGIT] variable heavy Chain
EVQLVQSGAEVKKPGASVKISCKTSGYTFTEFTMHWVKQAPGKGLEWIGGLKPDNGGISYNQKFKGRATLTVDKSTNTAYMELSSLRSEDTAVYYCARGAYYRYDADYWGQGTLVTVSS

SEQ ID NO: 4490 - protein, 5 aa, Artificial Sequence
  Description of Artificial Sequence: Synthetic peptide
  Hu26B10 VH1[TIGIT] vhCDR1
EFTMH

SEQ ID NO: 4491 - protein, 17 aa, Artificial Sequence
  Description of Artificial Sequence: Synthetic peptide
  Hu26B10 VH1[TIGIT] vhCDR2
GLKPDNGGISYNQKFKG

SEQ ID NO: 4492 - protein, 10 aa, Artificial Sequence
  Description of Artificial Sequence: Synthetic peptide
  Hu26B10 VH1[TIGIT] vhCDR3
GAYYRYDADY

SEQ ID NO: 4493 - protein, 119 aa, Artificial Sequence
  Description of Artificial Sequence: Synthetic polypeptide
  Hu26B10 VH2[TIGIT] variable heavy Chain
EVQLVQSGAEVKKPGASVKISCKTSGYTFTEFTMHWVRQAPGKGLEWIGGLKPDNGGISYNQKFKGRATLTVDKSTSTAYMELSSLRSEDTAVYYCARGAYYRYDADYWGQGTLVTVSS

SEQ ID NO: 4494 - protein, 5 aa, Artificial Sequence
  Description of Artificial Sequence: Synthetic peptide
  Hu26B10 VH2[TIGIT] vhCDR1
EFTMH

SEQ ID NO: 4495 - protein, 17 aa, Artificial Sequence
  Description of Artificial Sequence: Synthetic peptide
  Hu26B10 VH2[TIGIT] vhCDR2
GLKPDNGGISYNQKFKG

SEQ ID NO: 4496 - protein, 10 aa, Artificial Sequence
  Description of Artificial Sequence: Synthetic peptide
  Hu26B10 VH2[TIGIT] vhCDR3
GAYYRYDADY

SEQ ID NO: 4497 - protein, 119 aa, Artificial Sequence
  Description of Artificial Sequence: Synthetic polypeptide
  Hu26B10 VH3[TIGIT] variable heavy Chain
EVQLVQSGAEVKKPGASVKISCKVSGYTFTEFTMHWVRQAPGKGLEWIGGLKPDNGGISYNQKFKGRATLTVDTSTSTAYMELSSLRSEDTAVYYCARGAYYRYDADYWGQGTLVTVSS

SEQ ID NO: 4498 - protein, 5 aa, Artificial Sequence
  Description of Artificial Sequence: Synthetic peptide
  Hu26B10 VH3[TIGIT] vhCDR1
EFTMH

SEQ ID NO: 4499 - protein, 17 aa, Artificial Sequence
  Description of Artificial Sequence: Synthetic peptide
  Hu26B10 VH3[TIGIT] vhCDR2
GLKPDNGGISYNQKFKG

SEQ ID NO: 4500 - protein, 10 aa, Artificial Sequence
  Description of Artificial Sequence: Synthetic peptide
  Hu26B10 VH3[TIGIT] vhCDR3
GAYYRYDADY

SEQ ID NO: 4501 - protein, 107 aa, Artificial Sequence
  Description of Artificial Sequence: Synthetic polypeptide
  Hu26B10 VL1[TIGIT] variable light Chain
DIQLTQSPSSLSASVGDRVTITCKASQDVKTAVAWYQQKPGKAPKLLIYSASYRNTGVPDRFSGSGSGTDFTFTISSLQPEDFATYYCQQHYSTPFTFGQGTKLEIK

SEQ ID NO: 4502 - protein, 11 aa, Artificial Sequence
  Description of Artificial Sequence: Synthetic peptide
  Hu26B10 VL1[TIGIT] vlCDR1
KASQDVKTAVA

SEQ ID NO: 4503 - protein, 7 aa, Artificial Sequence
  Description of Artificial Sequence: Synthetic peptide
  Hu26B10 VL1[TIGIT] vlCDR2
SASYRNT

SEQ ID NO: 4504 - protein, 9 aa, Artificial Sequence
  Description of Artificial Sequence: Synthetic peptide
  Hu26B10 VL1[TIGIT] vlCDR3
QQHYSTPFT

SEQ ID NO: 4505 - protein, 107 aa, Artificial Sequence
  Description of Artificial Sequence: Synthetic polypeptide
  Hu26B10 VL2[TIGIT] variable light Chain
DIQLTQSPSSLSASVGDRVTITCKASQDVKTAVAWYQQKPGKAPKLLIYSASYRNTGVPSRFSGSGSGTDFTFTISSLQPEDFATYYCQQHYSTPFTFGQGTKLEIK

SEQ ID NO: 4506 - protein, 11 aa, Artificial Sequence
  Description of Artificial Sequence: Synthetic peptide
  Hu26B10 VL2[TIGIT] vlCDR1
KASQDVKTAVA

SEQ ID NO: 4507 - protein, 7 aa, Artificial Sequence
  Description of Artificial Sequence: Synthetic peptide
  Hu26B10 VL2[TIGIT] vlCDR2
SASYRNT

SEQ ID NO: 4508 - protein, 9 aa, Artificial Sequence
  Description of Artificial Sequence: Synthetic peptide
  Hu26B10 VL2[TIGIT] vlCDR3
QQHYSTPFT

SEQ ID NO: 4509 - protein, 107 aa, Artificial Sequence
  Description of Artificial Sequence: Synthetic polypeptide
  Hu26B10 VL3[TIGIT] variable light Chain
DIQLTQSPSSLSASVGDRVTITCKASQDVKTAVAWYQQKPGKAPKLLIYSASYRNTGVPSRFSGSGSGTDFTLTISSLQPEDFATYYCQQHYSTPFTFGQGTKLEIK

SEQ ID NO: 4510 - protein, 11 aa, Artificial Sequence
  Description of Artificial Sequence: Synthetic peptide
  Hu26B10 VL3[TIGIT] vlCDR1
KASQDVKTAVA

SEQ ID NO: 4511 - protein, 7 aa, Artificial Sequence
  Description of Artificial Sequence: Synthetic peptide
  Hu26B10 VL3[TIGIT] vlCDR2
SASYRNT

SEQ ID NO: 4512 - protein, 9 aa, Artificial Sequence
  Description of Artificial Sequence: Synthetic peptide
  Hu26B10 VL3[TIGIT] vlCDR3
QQHYSTPFT

SEQ ID NO: 4513 - protein, 119 aa, Artificial Sequence
  Description of Artificial Sequence: Synthetic polypeptide
  MEB125.31C6.A1.205 VH4/VL1[TIGIT] variable heavy Chain
EVQLVQSGAEVKKPGASVKVSCKASGYTFSSYVMHWVRQAPGQGLEWIGYIDPYNDGAKYAQKFQGRVTLTSDKSTSTVYMELSSLRSEDTAVYYCARGGPYGWYFDVWGQGTTVTVSS

SEQ ID NO: 4514 - protein, 5 aa, Artificial Sequence
  Description of Artificial Sequence: Synthetic peptide
  MEB125.31C6.A1.205 VH4/VL1[TIGIT] vhCDR1
SYVMH

SEQ ID NO: 4515 - protein, 17 aa, Artificial Sequence
  Description of Artificial Sequence: Synthetic peptide
  MEB125.31C6.A1.205 VH4/VL1[TIGIT] vhCDR2
YIDPYNDGAKYAQKFQG

SEQ ID NO: 4516 - protein, 10 aa, Artificial Sequence
  Description of Artificial Sequence: Synthetic peptide
  MEB125.31C6.A1.205 VH4/VL1[TIGIT] vhCDR3
GGPYGWYFDV

SEQ ID NO: 4517 - protein, 107 aa, Artificial Sequence
  Description of Artificial Sequence: Synthetic polypeptide
  MEB125.31C6.A1.205 VH4/VL1[TIGIT] variable heavy Chain
DIQMTQSPSSLSASVGDRVTITCRASEHIYSYLSWYQQKPGKAPKLLIYNAKTLAEGVPSRFSGSGSGTDFTLTISSLQPEDFATYYCQHHFGSPLTFGQGTRLEIK

SEQ ID NO: 4518 - protein, 11 aa, Artificial Sequence
  Description of Artificial Sequence: Synthetic peptide
  MEB125.31C6.A1.205 VH4/VL1[TIGIT] vhCDR1
RASEHIYSYLS

SEQ ID NO: 4519 - protein, 7 aa, Artificial Sequence
  Description of Artificial Sequence: Synthetic peptide
  MEB125.31C6.A1.205 VH4/VL1[TIGIT] vhCDR2
NAKTLAE

SEQ ID NO: 4520 - protein, 9 aa, Artificial Sequence
  Description of Artificial Sequence: Synthetic peptide
  MEB125.31C6.A1.205 VH4/VL1[TIGIT] vhCDR3
QHHFGSPLT

SEQ ID NO: 4521 - protein, 119 aa, Artificial Sequence
  Description of Artificial Sequence: Synthetic polypeptide
  MEB125.31C6.A1.205 VH5/VL4[TIGIT] variable heavy Chain
EVQLVQSGAEVKKPGSSVKVSCKASGYTFSSYVMHWVRQAPGQGLEWIGYIDPYNDGAKYAQKFQGRVTLTSDKSTSTAYMELSSLRSEDTAVYYCARGGPYGWYFDVWGQGTTVTVSS

SEQ ID NO: 4522 - protein, 5 aa, Artificial Sequence
  Description of Artificial Sequence: Synthetic peptide
  MEB125.31C6.A1.205 VH5/VL4[TIGIT] vhCDR1
SYVMH

SEQ ID NO: 4523 - protein, 17 aa, Artificial Sequence
  Description of Artificial Sequence: Synthetic peptide
  MEB125.31C6.A1.205 VH5/VL4[TIGIT] vhCDR2
YIDPYNDGAKYAQKFQG

SEQ ID NO: 4524 - protein, 10 aa, Artificial Sequence
  Description of Artificial Sequence: Synthetic peptide
  MEB125.31C6.A1.205 VH5/VL4[TIGIT] vhCDR3
GGPYGWYFDV

SEQ ID NO: 4525 - protein, 107 aa, Artificial Sequence
  Description of Artificial Sequence: Synthetic polypeptide
  MEB125.31C6.A1.205 VH5/VL4[TIGIT] variable heavy Chain
DIQMTQSPSSLSASVGDRVTITCRASEHIYSYLSWYQQKPGKVPKLLIYNAKTLAEGVPSRFSGSGSGTQFTLTISSLQPEDVATYYCQHHFGSPLTFGQGTRLEIK

SEQ ID NO: 4526 - protein, 11 aa, Artificial Sequence
  Description of Artificial Sequence: Synthetic peptide
  MEB125.31C6.A1.205 VH5/VL4[TIGIT] vhCDR1
RASEHIYSYLS

SEQ ID NO: 4527 - protein, 7 aa, Artificial Sequence
  Description of Artificial Sequence: Synthetic peptide
  MEB125.31C6.A1.205 VH5/VL4[TIGIT] vhCDR2
NAKTLAE

SEQ ID NO: 4528 - protein, 9 aa, Artificial Sequence
  Description of Artificial Sequence: Synthetic peptide
  MEB125.31C6.A1.205 VH5/VL4[TIGIT] vhCDR3
QHHFGSPLT

SEQ ID NO: 4529 - protein, 119 aa, Artificial Sequence; identical to SEQ ID NO: 4521
  Description of Artificial Sequence: Synthetic polypeptide
  MEB125.31C6.A1.205 VH5/VL3[TIGIT] variable heavy Chain

SEQ ID NO: 4530 - protein, 5 aa, Artificial Sequence
  Description of Artificial Sequence: Synthetic peptide
  MEB125.31C6.A1.205 VH5/VL3[TIGIT] vhCDR1
SYVMH

SEQ ID NO: 4531 - protein, 17 aa, Artificial Sequence
  Description of Artificial Sequence: Synthetic peptide
  MEB125.31C6.A1.205 VH5/VL3[TIGIT] vhCDR2
YIDPYNDGAKYAQKFQG

SEQ ID NO: 4532 - protein, 10 aa, Artificial Sequence
  Description of Artificial Sequence: Synthetic peptide
  MEB125.31C6.A1.205 VH5/VL3[TIGIT] vhCDR3
GGPYGWYFDV

SEQ ID NO: 4533 - protein, 107 aa, Artificial Sequence
  Description of Artificial Sequence: Synthetic polypeptide
  MEB125.31C6.A1.205 VH5/VL3[TIGIT] variable heavy Chain
DIQMTQSPSSLSASVGDRVTITCRASEHIYSYLSWYQQKPGKVPKLLIYNAKTLAEGVPSRFSGSGSGTDFTLTISSLQPEDVATYYCQHHFGSPLTFGQGTRLEIK

SEQ ID NO: 4534 - protein, 11 aa, Artificial Sequence
  Description of Artificial Sequence: Synthetic peptide
  MEB125.31C6.A1.205 VH5/VL3[TIGIT] vhCDR1
RASEHIYSYLS

SEQ ID NO: 4535 - protein, 7 aa, Artificial Sequence
  Description of Artificial Sequence: Synthetic peptide
  MEB125.31C6.A1.205 VH5/VL3[TIGIT] vhCDR2
NAKTLAE

SEQ ID NO: 4536 - protein, 9 aa, Artificial Sequence
  Description of Artificial Sequence: Synthetic peptide
  MEB125.31C6.A1.205 VH5/VL3[TIGIT] vhCDR3
QHHFGSPLT

SEQ ID NO: 4537 - protein, 118 aa, Artificial Sequence
  Description of Artificial Sequence: Synthetic polypeptide
  15A6[TIGIT] variable heavy Chain
QLQLQESGPGLVKPSETLSLTCTVSGGSISSSRYFWGWIRQPPGKGLEWIGYIYYRGSTYYNPSLKSRVTIAVDTSKNQFSLKLSSVTAADTAVYYCASSSAWYFDYWGQGNLVTVSS

SEQ ID NO: 4538 - protein, 7 aa, Artificial Sequence
  Description of Artificial Sequence: Synthetic peptide
  15A6[TIGIT] vhCDR1
SSRYFWG

SEQ ID NO: 4539 - protein, 16 aa, Artificial Sequence
  Description of Artificial Sequence: Synthetic peptide
  15A6[TIGIT] vhCDR2
YIYYRGSTYYNPSLKS

SEQ ID NO: 4540 - protein, 8 aa, Artificial Sequence
  Description of Artificial Sequence: Synthetic peptide
  15A6[TIGIT] vhCDR3
SSAWYFDY

SEQ ID NO: 4541 - protein, 107 aa, Artificial Sequence
  Description of Artificial Sequence: Synthetic polypeptide
  15A6[TIGIT] variable light Chain
EIVLTQSPGTLSLSPGERATLSCRASQSVSSSYLAWYQQKPGQAPRLLIYGASSRATGIPDRFSGSGSGTDFTLTISRLEPEDFAVYYCQQYGSLYTFGQGTKLEIK

SEQ ID NO: 4542 - protein, 12 aa, Artificial Sequence
  Description of Artificial Sequence: Synthetic peptide
  15A6[TIGIT] vlCDR1
RASQSVSSSYLA

SEQ ID NO: 4543 - protein, 7 aa, Artificial Sequence
  Description of Artificial Sequence: Synthetic peptide
  15A6[TIGIT] vlCDR2
GASSRAT

SEQ ID NO: 4544 - protein, 8 aa, Artificial Sequence
  Description of Artificial Sequence: Synthetic peptide
  15A6[TIGIT] vlCDR3
QQYGSLYT

SEQ ID NO: 4545 - protein, 130 aa, Artificial Sequence
  Description of Artificial Sequence: Synthetic polypeptide
  22G2[TIGIT] variable heavy Chain
QVHLQESGPGLVKPSETLSLTCTVSGGSVSSGIYYWSWIRQPPGKGLEWIGYIYYSGSTNYNPSLKSRVTISVDTSKNQFSLKLSSVTAADTAVYYCARDYYVSGNYYNVDYYFFGVDVWGQGTTVTVSS

SEQ ID NO: 4546 - protein, 7 aa, Artificial Sequence
  Description of Artificial Sequence: Synthetic peptide
  22G2[TIGIT] vhCDR1
SGIYYWS

SEQ ID NO: 4547 - protein, 16 aa, Artificial Sequence
  Description of Artificial Sequence: Synthetic peptide
  22G2[TIGIT] vhCDR2
YIYYSGSTNYNPSLKS

SEQ ID NO: 4548 - protein, 20 aa, Artificial Sequence
  Description of Artificial Sequence: Synthetic peptide
  22G2[TIGIT] vhCDR3
DYYVSGNYYNVDYYFFGVDV

SEQ ID NO: 4549 - protein, 109 aa, Artificial Sequence
  Description of Artificial Sequence: Synthetic polypeptide
  22G2[TIGIT] variable light Chain
EIVLTQSPATLSLSPGERATLSCRASQSVSSYLAWYQQKPGQAPRLLIYDASNRATGIPARFSGSGSGTDFTLTISSLEPEDFAVYYCQQRSNWPPLFTFGPGTKVDIK

SEQ ID NO: 4550 - protein, 11 aa, Artificial Sequence
  Description of Artificial Sequence: Synthetic peptide
  22G2[TIGIT] vlCDR1
RASQSVSSYLA

SEQ ID NO: 4551 - protein, 7 aa, Artificial Sequence
  Description of Artificial Sequence: Synthetic peptide
  22G2[TIGIT] vlCDR2
DASNRAT

SEQ ID NO: 4552 - protein, 11 aa, Artificial Sequence
  Description of Artificial Sequence: Synthetic peptide
  22G2[TIGIT] vlCDR3
QQRSNWPPLFT

SEQ ID NO: 4553 - protein, 126 aa, Artificial Sequence
  Description of Artificial Sequence: Synthetic polypeptide
  11G11[TIGIT] variable heavy Chain
QLQLQESGPGLVKPSETLSLTCTVSGGSISSSSHYWGWIRQPPGKGLEWIGNIFYSGHTYYNPSLKSRVTISVDTSKNQFSLKLSSVTAADTAVYYCARQGLLWFGGLSPYYFDYWGQGTLVTVSS

SEQ ID NO: 4554 - protein, 7 aa, Artificial Sequence
  Description of Artificial Sequence: Synthetic peptide
  11G11[TIGIT] vhCDR1
SSSHYWG

SEQ ID NO: 4555 - protein, 16 aa, Artificial Sequence
  Description of Artificial Sequence: Synthetic peptide
  11G11[TIGIT] vhCDR2
NIFYSGHTYYNPSLKS

SEQ ID NO: 4556 - protein, 16 aa, Artificial Sequence
  Description of Artificial Sequence: Synthetic peptide
  11G11[TIGIT] vhCDR3
QGLLWFGGLSPYYFDY

SEQ ID NO: 4557 - protein, 106 aa, Artificial Sequence
  Description of Artificial Sequence: Synthetic polypeptide
  11G11[TIGIT] variable light Chain
EIVLTQSPATLSLSPGERATLSCRASQSVSSYLAWYQQKPGQAPRLLIYDASNRATGIPARFSGSGSGTDFTLTISSLEPEDFAVYYCQQRSNWPTFGQGTKLEIK

SEQ ID NO: 4558 - protein, 11 aa, Artificial Sequence
  Description of Artificial Sequence: Synthetic peptide
  11G11[TIGIT] vlCDR1
RASQSVSSYLA

SEQ ID NO: 4559 - protein, 7 aa, Artificial Sequence
  Description of Artificial Sequence: Synthetic peptide
  11G11[TIGIT] vlCDR2
DASNRAT

SEQ ID NO: 4560 - protein, 8 aa, Artificial Sequence
  Description of Artificial Sequence: Synthetic peptide
  11G11[TIGIT] vlCDR3
QQRSNWPT

SEQ ID NO: 4561 - protein, 128 aa, Artificial Sequence
  Description of Artificial Sequence: Synthetic polypeptide
  10D7[TIGIT] variable heavy Chain
QGQLVQSGAEVKKPGSSVKVSCKASGGIFRNYAISWVRQAPGQGLEWMGGIIPFFGTANYAQKFQGRVTITADESTSTAYMELSSLRSEDTAVYYCARGGAAAGTTRYGYYYYGMDVWGQGTTVTVSS

SEQ ID NO: 4562 - protein, 5 aa, Artificial Sequence
  Description of Artificial Sequence: Synthetic peptide
  10D7[TIGIT] vhCDR1
NYAIS

SEQ ID NO: 4563 - protein, 17 aa, Artificial Sequence
  Description of Artificial Sequence: Synthetic peptide
  10D7[TIGIT] vhCDR2
GIIPFFGTANYAQKFQG

SEQ ID NO: 4564 - protein, 19 aa, Artificial Sequence
  Description of Artificial Sequence: Synthetic peptide
  10D7[TIGIT] vhCDR3
GGAAAGTTRYGYYYYGMDV

SEQ ID NO: 4565 - protein, 107 aa, Artificial Sequence
  Description of Artificial Sequence: Synthetic polypeptide
  10D7[TIGIT] variable light Chain
DIQMTQSPSSLSASVGDRVTITCRASQGISSWLAWYQQKPEKAPKSLIYAASSLQSGVPSRFSGSGSGTDFTLTISSLQPEDFATYYCQQYNSYPITFGQGTRLEIK

SEQ ID NO: 4566 - protein, 11 aa, Artificial Sequence
  Description of Artificial Sequence: Synthetic peptide
  10D7[TIGIT] vlCDR1
RASQGISSWLA

SEQ ID NO: 4567 - protein, 7 aa, Artificial Sequence
  Description of Artificial Sequence: Synthetic peptide
  10D7[TIGIT] vlCDR2
AASSLQS

SEQ ID NO: 4568 - protein, 9 aa, Artificial Sequence
  Description of Artificial Sequence: Synthetic peptide
  10D7[TIGIT] vlCDR3
QQYNSYPIT

SEQ ID NO: 4569 - protein, 116 aa, Artificial Sequence
  Description of Artificial Sequence: Synthetic polypeptide
  313R19[TIGIT] variable heavy Chain
QVQLQESGPGLVKPSETLSLTCTVSGFSLSSSYMSWIRQPPGKGLEWIGIIGSNGNTYYANWAKGRVTISKSSNQVSLKLSSVTAADTAVYYCARGGYRTSGMDPWGQGTLVTVSS

SEQ ID NO: 4570 - protein, 5 aa, Artificial Sequence
  Description of Artificial Sequence: Synthetic peptide
  313R19[TIGIT] vhCDR1
SSYMS

SEQ ID NO: 4571 - protein, 14 aa, Artificial Sequence
  Description of Artificial Sequence: Synthetic peptide
  313R19[TIGIT] vhCDR2
IIGSNGNTYYANWA

SEQ ID NO: 4572 - protein, 10 aa, Artificial Sequence
  Description of Artificial Sequence: Synthetic peptide
  313R19[TIGIT] vhCDR3
GGYRTSGMDP

SEQ ID NO: 4573 - protein, 110 aa, Artificial Sequence
  Description of Artificial Sequence: Synthetic polypeptide
  313R19[TIGIT] variable light Chain
DIQMTQSPSSLSASVGDRVTITCQASQNIYSDLAWYQQKPGKAPKLLIYRASTLASGVPSRFSGSGSGTDFTLTISSLQPEDFATYYCQQEHLVAWIYNVFGQGTKVEIK

SEQ ID NO: 4574 - protein, 11 aa, Artificial Sequence
  Description of Artificial Sequence: Synthetic peptide
  313R19[TIGIT] vlCDR1
QASQNIYSDLA

SEQ ID NO: 4575 - protein, 7 aa, Artificial Sequence
  Description of Artificial Sequence: Synthetic peptide
  313R19[TIGIT] vlCDR2
RASTLAS

SEQ ID NO: 4576 - protein, 12 aa, Artificial Sequence
  Description of Artificial Sequence: Synthetic peptide
  313R19[TIGIT] vlCDR3
QQEHLVAWIYNV

SEQ ID NO: 4577 - protein, 118 aa, Artificial Sequence
  Description of Artificial Sequence: Synthetic polypeptide
  313M32[TIGIT] variable heavy Chain
QVQLQESGPGLVKPSETLSLTCAVSGYSITSDYAWNWIRQPPGKGLEWIGYISYSGSTSYNPSLRSRVTISRDTSKNQFFLKLSSVTAADTAVYYCARRQVGLGFAYWGQGTLVTVSS

SEQ ID NO: 4578 - protein, 6 aa, Artificial Sequence
  Description of Artificial Sequence: Synthetic peptide
  313M32[TIGIT] vhCDR1
SDYAWN

SEQ ID NO: 4579 - protein, 16 aa, Artificial Sequence
  Description of Artificial Sequence: Synthetic peptide
  313M32[TIGIT] vhCDR2
YISYSGSTSYNPSLRS

SEQ ID NO: 4580 - protein, 9 aa, Artificial Sequence
  Description of Artificial Sequence: Synthetic peptide
  313M32[TIGIT] vhCDR3
RQVGLGFAY

SEQ ID NO: 4581 - protein, 99 aa, Artificial Sequence
  Description of Artificial Sequence: Synthetic polypeptide
  313M32[TIGIT] variable light Chain
DIQMTQSPSSLSASVGDRVTITCKASQDVSTAVAWYQQKPGKAPKLLIYSASYRYTGVPSRFSGSGSGTDFTFTISSLQPEDIATYYCQQHYSTPWTFG

SEQ ID NO: 4582 - protein, 11 aa, Artificial Sequence
  Description of Artificial Sequence: Synthetic peptide
  313M32[TIGIT] vlCDR1
KASQDVSTAVA

SEQ ID NO: 4583 - protein, 7 aa, Artificial Sequence
  Description of Artificial Sequence: Synthetic peptide
  313M32[TIGIT] vlCDR2
SASYRYT

SEQ ID NO: 4584 - protein, 9 aa, Artificial Sequence
  Description of Artificial Sequence: Synthetic peptide
  313M32[TIGIT] vlCDR3
QQHYSTPWT

SEQ ID NO: 4585 - protein, 113 aa, Artificial Sequence
  Description of Artificial Sequence: Synthetic polypeptide
  APE5137[TIM-3] variable heavy Chain
EVQLLESGGGLVQPGGSLRLSCAAASGFTFSSYDMSWVRQAPGKGLDWVSTISGGGTYTYYQDSVKGRFTISRDNSKNTLYLQMNSLRAEDTAVYYCASMDYWGQGTTVTVSS

SEQ ID NO: 4586 - protein, 6 aa, Artificial Sequence
  Description of Artificial Sequence: Synthetic peptide
  APE5137[TIM-3] vhCDR1
SSYDMS

SEQ ID NO: 4587 - protein, 17 aa, Artificial Sequence
  Description of Artificial Sequence: Synthetic peptide
  APE5137[TIM-3] vhCDR2
TISGGGTYTYYQDSVKG

SEQ ID NO: 4588 - protein, 3 aa, Artificial Sequence
  Description of Artificial Sequence: Synthetic peptide
  APE5137[TIM-3] vhCDR3
MDY

SEQ ID NO: 4589 - protein, 107 aa, Artificial Sequence
  Description of Artificial Sequence: Synthetic polypeptide
  APE5137[TIM-3] variable light Chain
DIQMTQSPSSLSASVGDRVTITCRASQSIRRYLNWYHQKPGKAPKLLIYGASTLQSGVPSRFSGSGSGTDFTLTISSLQPEDFAVYYCQQSHSAPLTFGGGTKVEIK

SEQ ID NO: 4590 - protein, 11 aa, Artificial Sequence
  Description of Artificial Sequence: Synthetic peptide
  APE5137[TIM-3] vlCDR1
RASQSIRRYLN

SEQ ID NO: 4591 - protein, 7 aa, Artificial Sequence
  Description of Artificial Sequence: Synthetic peptide
  APE5137[TIM-3] vlCDR2
GASTLQS

SEQ ID NO: 4592 - protein, 9 aa, Artificial Sequence
  Description of Artificial Sequence: Synthetic peptide
  APE5137[TIM-3] vlCDR3
QQSHSAPLT

SEQ ID NO: 4593 - protein, 119 aa, Artificial Sequence
  Description of Artificial Sequence: Synthetic polypeptide
  APE5121[TIM-3] variable heavy Chain
EVQVLESGGGLVQPGGSLRLYCVASGFTFSGSYAMSWVRQAPGKGLEWVSAISGSGGSTYYADSVKGRFTISRDNSKNTLYLQMNSLRAEDTAVYYCAKKYYVGPADYWGQGTLVTVSS

SEQ ID NO: 4594 - protein, 6 aa, Artificial Sequence
  Description of Artificial Sequence: Synthetic peptide
  APE5121[TIM-3] vhCDR1
GSYAMS

SEQ ID NO: 4595 - protein, 17 aa, Artificial Sequence
  Description of Artificial Sequence: Synthetic peptide
  APE5121[TIM-3] vhCDR2
AISGSGGSTYYADSVKG

SEQ ID NO: 4596 - protein, 9 aa, Artificial Sequence
  Description of Artificial Sequence: Synthetic peptide
  APE5121[TIM-3] vhCDR3
KYYVGPADY

SEQ ID NO: 4597 - protein, 113 aa, Artificial Sequence
  Description of Artificial Sequence: Synthetic polypeptide
  APE5121[TIM-3] variable light Chain
DIVMTQSPDSLAVSLGERATINCKSSQSVLYSSNNKNYLAWYQHKPGQPPKLLIYWASTRESGVPDRFSGSGSGTDFTLTISSLQAEDVAVYYCQQYYSSPLTFGGGTKIEVK

SEQ ID NO: 4598 - protein, 17 aa, Artificial Sequence
  Description of Artificial Sequence: Synthetic peptide
  APE5121[TIM-3] vlCDR1
KSSQSVLYSSNNKNYLA

SEQ ID NO: 4599 - protein, 7 aa, Artificial Sequence
  Description of Artificial Sequence: Synthetic peptide
  APE5121[TIM-3] vlCDR2
WASTRES

SEQ ID NO: 4600 - protein, 9 aa, Artificial Sequence
  Description of Artificial Sequence: Synthetic peptide
  APE5121[TIM-3] vlCDR3
QQYYSSPLT

SEQ ID NO: 4601 - protein, 118 aa, Artificial Sequence
  Description of Artificial Sequence: Synthetic polypeptide
  ABTIM3-hum03[TIM-3] variable heavy Chain
QVQLVQSGAEVKKPGASVKVSCKASGYTFTSYNMHWVRQAPGQGLEWIGDIYPGQGDTSYNQKFKGRATMTADKSTSTVYMELSSLRSEDTAVYYCARVGGAFPMDYWGQGTLVTVSS

SEQ ID NO: 4602 - protein, 5 aa, Artificial Sequence
  Description of Artificial Sequence: Synthetic peptide
  ABTIM3-hum03[TIM-3] vhCDR1
SYNMH

SEQ ID NO: 4603 - protein, 17 aa, Artificial Sequence
  Description of Artificial Sequence: Synthetic peptide
  ABTIM3-hum03[TIM-3] vhCDR2
DIYPGQGDTSYNQKFKG

SEQ ID NO: 4604 - protein, 9 aa, Artificial Sequence
  Description of Artificial Sequence: Synthetic peptide
  ABTIM3-hum03[TIM-3] vhCDR3
VGGAFPMDY

SEQ ID NO: 4605 - protein, 111 aa, Artificial Sequence
  Description of Artificial Sequence: Synthetic polypeptide
  ABTIM3-hum03[TIM-3] variable light Chain
DIVLTQSPDSLAVSLGERATINCRASESVEYYGTSLMQWYQQKPGQPPKLLIYAASNVESGVPDRFSGSGSGTDFTLTISSLQAEDVAVYYCQQSRKDPSTFGGGTKVEIK

SEQ ID NO: 4606 - protein, 15 aa, Artificial Sequence
  Description of Artificial Sequence: Synthetic peptide
  ABTIM3-hum03[TIM-3] vlCDR1
RASESVEYYGTSLMQ

SEQ ID NO: 4607 - protein, 7 aa, Artificial Sequence
  Description of Artificial Sequence: Synthetic peptide
  ABTIM3-hum03[TIM-3] vlCDR2
AASNVES

SEQ ID NO: 4608 - protein, 9 aa, Artificial Sequence
  Description of Artificial Sequence: Synthetic peptide
  ABTIM3-hum03[TIM-3] vlCDR3
QQSRKDPST

SEQ ID NO: 4609 - protein, 118 aa, Artificial Sequence
  Description of Artificial Sequence: Synthetic polypeptide
  ABTIM3-hum11[TIM-3] variable heavy Chain
QVQLVQSGAEVKKPGSSVKVSCKASGYTFTSYNMHWVRQAPGQGLEWMGDIYPGNGDTSYNQKFKGRVTITADKSTSTVYMELSSLRSEDTAVYYCARVGGAFPMDYWGQGTTVTVSS

SEQ ID NO: 4610 - protein, 5 aa, Artificial Sequence
  Description of Artificial Sequence: Synthetic peptide
  ABTIM3-hum11[TIM-3] vhCDR1
SYNMH

SEQ ID NO: 4611 - protein, 17 aa, Artificial Sequence
  Description of Artificial Sequence: Synthetic peptide
  ABTIM3-hum11[TIM-3] vhCDR2
DIYPGNGDTSYNQKFKG

SEQ ID NO: 4612 - protein, 9 aa, Artificial Sequence
  Description of Artificial Sequence: Synthetic peptide
  ABTIM3-hum11[TIM-3] vhCDR3
VGGAFPMDY

SEQ ID NO: 4613 - protein, 111 aa, Artificial Sequence
  Description of Artificial Sequence: Synthetic polypeptide
  ABTIM3-hum11[TIM-3] variable light Chain
AIQLTQSPSSLSASVGDRVTITCRASESVEYYGTSLMQWYQQKPGKAPKLLIYAASNVESGVPSRFSGSGSGTDFTLTISSLQPEDFATYFCQQSRKDPSTFGGGTKVEIK

SEQ ID NO: 4614 - protein, 15 aa, Artificial Sequence
  Description of Artificial Sequence: Synthetic peptide
  ABTIM3-hum11[TIM-3] vlCDR1
RASESVEYYGTSLMQ

SEQ ID NO: 4615 - protein, 7 aa, Artificial Sequence
  Description of Artificial Sequence: Synthetic peptide
  ABTIM3-hum11[TIM-3] vlCDR2
AASNVES

SEQ ID NO: 4616 - protein, 9 aa, Artificial Sequence
  Description of Artificial Sequence: Synthetic peptide
  ABTIM3-hum11[TIM-3] vlCDR3
QQSRKDPST

SEQ ID NO: 4617 - protein, 118 aa, Artificial Sequence; identical to SEQ ID NO: 4601
  Description of Artificial Sequence: Synthetic polypeptide
  ABTIM3-hum21[TIM-3] variable heavy Chain

SEQ ID NO: 4618 - protein, 5 aa, Artificial Sequence
  Description of Artificial Sequence: Synthetic peptide
  ABTIM3-hum21[TIM-3] vhCDR1
SYNMH

SEQ ID NO: 4619 - protein, 17 aa, Artificial Sequence
  Description of Artificial Sequence: Synthetic peptide
  ABTIM3-hum21[TIM-3] vhCDR2
DIYPGQGDTSYNQKFKG

SEQ ID NO: 4620 - protein, 9 aa, Artificial Sequence
  Description of Artificial Sequence: Synthetic peptide
  ABTIM3-hum21[TIM-3] vhCDR3
VGGAFPMDY

SEQ ID NO: 4621 - protein, 111 aa, Artificial Sequence; identical to SEQ ID NO: 4605
  Description of Artificial Sequence: Synthetic polypeptide
  ABTIM3-hum21[TIM-3] variable light Chain

SEQ ID NO: 4622 - protein, 15 aa, Artificial Sequence
  Description of Artificial Sequence: Synthetic peptide
  ABTIM3-hum21[TIM-3] vlCDR1
RASESVEYYGTSLMQ

SEQ ID NO: 4623 - protein, 7 aa, Artificial Sequence
  Description of Artificial Sequence: Synthetic peptide
  ABTIM3-hum21[TIM-3] vlCDR2
AASNVES

SEQ ID NO: 4624 - protein, 9 aa, Artificial Sequence
  Description of Artificial Sequence: Synthetic peptide
  ABTIM3-hum21[TIM-3] vlCDR3
QQSRKDPST

SEQ ID NO: 4625 - protein, 121 aa, Artificial Sequence
  Description of Artificial Sequence: Synthetic polypeptide
  4177[TIM-3] variable heavy Chain
QVQLQESGPGLVKPSETLSLTCTVSGGSISSYYWSWIRQPPGKGLEWIGYIFHSGSTNYNPSLKSRVTISVDTSKNQFSLKLSSVTAADTAVYYCARDGEYFDMLTGFDYWGQGTLVTVSS

SEQ ID NO: 4626 - protein, 5 aa, Artificial Sequence
  Description of Artificial Sequence: Synthetic peptide
  4177[TIM-3] vhCDR1
SYYWS

SEQ ID NO: 4627 - protein, 16 aa, Artificial Sequence
  Description of Artificial Sequence: Synthetic peptide
  4177[TIM-3] vhCDR2
YIFHSGSTNYNPSLKS

SEQ ID NO: 4628 - protein, 13 aa, Artificial Sequence
  Description of Artificial Sequence: Synthetic peptide
  4177[TIM-3] vhCDR3
DGEYFDMLTGFDY

SEQ ID NO: 4629 - protein, 109 aa, Artificial Sequence
  Description of Artificial Sequence: Synthetic polypeptide
  4177[TIM-3] variable light Chain
RCDIQMTQSPSSLSASVGDRVTITCRASQGISSWLAWYQQKPEKAPKSLIYAASSLQSGVPSRFSGSGSGTDFTLTISSLQPEDFATYYCQQYNSYPRTFGQGTKVEIK

SEQ ID NO: 4630 - protein, 11 aa, Artificial Sequence
  Description of Artificial Sequence: Synthetic peptide
  4177[TIM-3] vlCDR1
RASQGISSWLA

SEQ ID NO: 4631 - protein, 7 aa, Artificial Sequence
  Description of Artificial Sequence: Synthetic peptide
  4177[TIM-3] vlCDR2
AASSLQS

SEQ ID NO: 4632 - protein, 9 aa, Artificial Sequence
  Description of Artificial Sequence: Synthetic peptide
  4177[TIM-3] vlCDR3
QQYNSYPRT

SEQ ID NO: 4633 - protein, 121 aa, Artificial Sequence
  Description of Artificial Sequence: Synthetic polypeptide
  4545[TIM-3] variable heavy Chain
QVQLQESGPGLVKPSETLSLTCTVSGGSFSRGGYYWNWIRQPPGKGLEWIGYIYYSGSTNYNPSLKSRVTISLDTSKNQFSLKLSSVTAADTAVYYCARDHYSSSWTFDYWGQGTLVTVSS

SEQ ID NO: 4634 - protein, 7 aa, Artificial Sequence
  Description of Artificial Sequence: Synthetic peptide
  4545[TIM-3] vhCDR1
RGGYYWN

SEQ ID NO: 4635 - protein, 16 aa, Artificial Sequence
  Description of Artificial Sequence: Synthetic peptide
  4545[TIM-3] vhCDR2
YIYYSGSTNYNPSLKS

SEQ ID NO: 4636 - protein, 11 aa, Artificial Sequence
  Description of Artificial Sequence: Synthetic peptide
  4545[TIM-3] vhCDR3
DHYSSSWTFDY

SEQ ID NO: 4637 - protein, 107 aa, Artificial Sequence
  Description of Artificial Sequence: Synthetic polypeptide
  4545[TIM-3] variable light Chain
EIVLTQSPATLSLSPGERATLSCRASQSVSSYLAWYQQKPGQAPRLLIYDASNRATGIPARFSGSGSGTDFTLTISSLEPEDFAVYYCQQRSNWPPTFGQGTKLEIK

SEQ ID NO: 4638 - protein, 11 aa, Artificial Sequence
  Description of Artificial Sequence: Synthetic peptide
  4545[TIM-3] vlCDR1
RASQSVSSYLA

SEQ ID NO: 4639 - protein, 7 aa, Artificial Sequence
  Description of Artificial Sequence: Synthetic peptide
  4545[TIM-3] vlCDR2
DASNRAT

SEQ ID NO: 4640 - protein, 9 aa, Artificial Sequence
  Description of Artificial Sequence: Synthetic peptide
  4545[TIM-3] vlCDR3
QQRSNWPPT

SEQ ID NO: 4641 - protein, 117 aa, Artificial Sequence
  Description of Artificial Sequence: Synthetic polypeptide
  8213[TIM-3] variable heavy Chain
QVQLVQSGAEVKKPGASVKVSCKASGYTFTSYWMHWVRQAPGQGLEWMGEINPSNGRTNYNEKFKTRVTITADTSTSTAYMELSSLRSEDTAVYYCARGYYLYFDYWGQGTLVTVSS

SEQ ID NO: 4642 - protein, 5 aa, Artificial Sequence
  Description of Artificial Sequence: Synthetic peptide
  8213[TIM-3] vhCDR1
SYWMH

SEQ ID NO: 4643 - protein, 17 aa, Artificial Sequence
  Description of Artificial Sequence: Synthetic peptide
  8213[TIM-3] vhCDR2
EINPSNGRTNYNEKFKT

SEQ ID NO: 4644 - protein, 8 aa, Artificial Sequence
  Description of Artificial Sequence: Synthetic peptide
  8213[TIM-3] vhCDR3
GYYLYFDY

SEQ ID NO: 4645 - protein, 107 aa, Artificial Sequence
  Description of Artificial Sequence: Synthetic polypeptide
  8213[TIM-3] variable light Chain
DIQMTQSPSSLSASVGDRVTITCHASQGIRINIGWYQQKPGKAPKLLIYHGTNLEDGVPSRFSGSGSGTDFTLTISSLQPEDFATYYCVQYGQFPWTFGQGTKLEIK

SEQ ID NO: 4646 - protein, 11 aa, Artificial Sequence
  Description of Artificial Sequence: Synthetic peptide
  8213[TIM-3] vlCDR1
HASQGIRINIG

SEQ ID NO: 4647 - protein, 7 aa, Artificial Sequence
  Description of Artificial Sequence: Synthetic peptide
  8213[TIM-3] vlCDR2
HGTNLED

SEQ ID NO: 4648 - protein, 9 aa, Artificial Sequence
  Description of Artificial Sequence: Synthetic peptide
  8213[TIM-3] vlCDR3
VQYGQFPWT

SEQ ID NO: 4649 - protein, 117 aa, Artificial Sequence
  Description of Artificial Sequence: Synthetic polypeptide
  mAb15[TIM-3] variable heavy Chain
QVQLKESGPGLVAPSQSLSITCTVSGFSLTGYGVTWVRQPPGKGLEWLGMIWGDGNTDYNSGLKSRLNISKDNSKSQVFLKMNSLQTDDTARYYCARSYYYGPPDYWGQGTTLTVSS

SEQ ID NO: 4650 - protein, 5 aa, Artificial Sequence
  Description of Artificial Sequence: Synthetic peptide
  mAb15[TIM-3] vhCDR1
GYGVT

SEQ ID NO: 4651 - protein, 16 aa, Artificial Sequence
  Description of Artificial Sequence: Synthetic peptide
  mAb15[TIM-3] vhCDR2
MIWGDGNTDYNSGLKS

SEQ ID NO: 4652 - protein, 9 aa, Artificial Sequence
  Description of Artificial Sequence: Synthetic peptide
  mAb15[TIM-3] vhCDR3
SYYYGPPDY

SEQ ID NO: 4653 - protein, 113 aa, Artificial Sequence
  Description of Artificial Sequence: Synthetic polypeptide
  mAb15[TIM-3] variable light Chain
DIVMTQSPSSLAMSVGQKVTMSCKSSQSLLNSRSQKNYLAWYQRKPGQSPKLLLYFASTRESGVPDRFIGSGSGTDFTLTISSVQAEDLADYFCHQHYNTPYTFGGGTKLEIK

SEQ ID NO: 4654 - protein, 17 aa, Artificial Sequence
  Description of Artificial Sequence: Synthetic peptide
  mAb15[TIM-3] vlCDR1
KSSQSLLNSRSQKNYLA

SEQ ID NO: 4655 - protein, 7 aa, Artificial Sequence
  Description of Artificial Sequence: Synthetic peptide
  mAb15[TIM-3] vlCDR2
FASTRES

SEQ ID NO: 4656 - protein, 9 aa, Artificial Sequence
  Description of Artificial Sequence: Synthetic peptide
  mAb15[TIM-3] vlCDR3
HQHYNTPYT

SEQ ID NO: 4657 - protein, 121 aa, Artificial Sequence
  Description of Artificial Sequence: Synthetic polypeptide
  mAb58[TIM-3] variable heavy Chain
QIQLVQSGPELKKPGETVKISCKASGYTFTTYGMSWVKQAPGKGLKLMGWINTYSGAPTYADDFKGRFAFSLETSASAAYLQINNLKNEDTATYFCARKPPHYYVNSFDYWGQGTTLTVSS

SEQ ID NO: 4658 - protein, 5 aa, Artificial Sequence
  Description of Artificial Sequence: Synthetic peptide
  mAb58[TIM-3] vhCDR1
TYGMS

SEQ ID NO: 4659 - protein, 17 aa, Artificial Sequence
  Description of Artificial Sequence: Synthetic peptide
  mAb58[TIM-3] vhCDR2
WINTYSGAPTYADDFKG

SEQ ID NO: 4660 - protein, 12 aa, Artificial Sequence
  Description of Artificial Sequence: Synthetic peptide
  mAb58[TIM-3] vhCDR3
KPPHYYVNSFDY

SEQ ID NO: 4661 - protein, 107 aa, Artificial Sequence
  Description of Artificial Sequence: Synthetic polypeptide
  mAb58[TIM-3] variable light Chain
DIVMTQSPATLSVTPGDRVSLSCRASQSISDYLHWYQQKSHESPRLLIKYASQSISGIPSRFSGSGSGSDFTLSINSVEPEDVGVYYCQNGHSFPYTFGGGTKLEIK

SEQ ID NO: 4662 - protein, 11 aa, Artificial Sequence
  Description of Artificial Sequence: Synthetic peptide
  mAb58[TIM-3] vlCDR1
RASQSISDYLH

SEQ ID NO: 4663 - protein, 7 aa, Artificial Sequence
  Description of Artificial Sequence: Synthetic peptide
  mAb58[TIM-3] vlCDR2
YASQSIS

SEQ ID NO: 4664 - protein, 9 aa, Artificial Sequence
  Description of Artificial Sequence: Synthetic peptide
  mAb58[TIM-3] vlCDR3
QNGHSFPYT

SEQ ID NO: 4665 - protein, 120 aa, Artificial Sequence
  Description of Artificial Sequence: Synthetic polypeptide
  TIM3-0433[TIM-3] variable heavy Chain
QITLKESGPTLVKPTQTLTLTCTFSGFSLSTSGMSVGWIRQPPGKGLEWLAHIWLNDDVFFNPALKSRLTITKDTSKNQVVLTMTNMDPVDTATYYCVRANGYLYALDYWGQGTLVTVSS

SEQ ID NO: 4666 - protein, 7 aa, Artificial Sequence
  Description of Artificial Sequence: Synthetic peptide
  TIM3-0433[TIM-3] vhCDR1
TSGMSVG

SEQ ID NO: 4667 - protein, 16 aa, Artificial Sequence
  Description of Artificial Sequence: Synthetic peptide
  TIM3-0433[TIM-3] vhCDR2
HIWLNDDVFFNPALKS

SEQ ID NO: 4668 - protein, 10 aa, Artificial Sequence
  Description of Artificial Sequence: Synthetic peptide
  TIM3-0433[TIM-3] vhCDR3
ANGYLYALDY

SEQ ID NO: 4669 - protein, 106 aa, Artificial Sequence
  Description of Artificial Sequence: Synthetic polypeptide
  TIM3-0433[TIM-3] variable light Chain
ETTLTQSPAFMSATPGDKVNIACSASSSVSYTQWYQQKPGEAPKLWIYDAFKLAPGIPPRFSGSGYGTDFTLTINNIESEDAAYYFCHQWSSYPWTFGQGTKLEIK

SEQ ID NO: 4670 - protein, 10 aa, Artificial Sequence
  Description of Artificial Sequence: Synthetic peptide
  TIM3-0433[TIM-3] vlCDR1
SASSSVSYTQ

SEQ ID NO: 4671 - protein, 7 aa, Artificial Sequence
  Description of Artificial Sequence: Synthetic peptide
  TIM3-0433[TIM-3] vlCDR2
DAFKLAP

SEQ ID NO: 4672 - protein, 9 aa, Artificial Sequence
  Description of Artificial Sequence: Synthetic peptide
  TIM3-0433[TIM-3] vlCDR3
HQWSSYPWT

SEQ ID NO: 4673 - protein, 120 aa, Artificial Sequence; identical to SEQ ID NO: 4665
  Description of Artificial Sequence: Synthetic polypeptide
  TIM3-0434[TIM-3] variable heavy Chain

SEQ ID NO: 4674 - protein, 7 aa, Artificial Sequence
  Description of Artificial Sequence: Synthetic peptide
  TIM3-0434[TIM-3] vhCDR1
TSGMSVG

SEQ ID NO: 4675 - protein, 16 aa, Artificial Sequence
  Description of Artificial Sequence: Synthetic peptide
  TIM3-0434[TIM-3] vhCDR2
HIWLNDDVFFNPALKS

SEQ ID NO: 4676 - protein, 10 aa, Artificial Sequence
  Description of Artificial Sequence: Synthetic peptide
  TIM3-0434[TIM-3] vhCDR3
ANGYLYALDY

SEQ ID NO: 4677 - protein, 106 aa, Artificial Sequence
  Description of Artificial Sequence: Synthetic polypeptide
  TIM3-0434[TIM-3] variable light Chain
DIQLTQSPSFLSASVGDRVTITCSASSSVSYTQWYQQKPGKAPKLWIYDAFKLAPGVPSRFSGSGSGTEFTLTISSLQPEDFATYFCHQWSSYPWTFGQGTKLEIK

SEQ ID NO: 4678 - protein, 10 aa, Artificial Sequence
  Description of Artificial Sequence: Synthetic peptide
  TIM3-0434[TIM-3] vlCDR1
SASSSVSYTQ

SEQ ID NO: 4679 - protein, 7 aa, Artificial Sequence
  Description of Artificial Sequence: Synthetic peptide
  TIM3-0434[TIM-3] vlCDR2
DAFKLAP

SEQ ID NO: 4680 - protein, 9 aa, Artificial Sequence
  Description of Artificial Sequence: Synthetic peptide
  TIM3-0434[TIM-3] vlCDR3
HQWSSYPWT

SEQ ID NO: 4681 - protein, 119 aa, Artificial Sequence
  Description of Artificial Sequence: Synthetic polypeptide
  TIM3-0438[TIM-3] variable heavy Chain
EVQLVESGGGLVQPGGSLRLSCAASGFNIKTTYMHWVRQAPGKGLEWVGRIDPADDNTKYAPKFQGKATISADTSKNTAYLQMNSLRAEDTAVYYCVRDFGYVAWFAYWGQGTLVTVSS

SEQ ID NO: 4682 - protein, 5 aa, Artificial Sequence
  Description of Artificial Sequence: Synthetic peptide
  TIM3-0438[TIM-3] vhCDR1
TTYMH

SEQ ID NO: 4683 - protein, 17 aa, Artificial Sequence
  Description of Artificial Sequence: Synthetic peptide
  TIM3-0438[TIM-3] vhCDR2
RIDPADDNTKYAPKFQG

SEQ ID NO: 4684 - protein, 10 aa, Artificial Sequence
  Description of Artificial Sequence: Synthetic peptide
  TIM3-0438[TIM-3] vhCDR3
DFGYVAWFAY

SEQ ID NO: 4685 - protein, 107 aa, Artificial Sequence
  Description of Artificial Sequence: Synthetic polypeptide
  TIM3-0438[TIM-3] variable light Chain
DIVMTQSPLSLPVTPGEPASISCRASQSVDNYVAWYLQKPGQSPQLLIYYASNRYIGVPDRFSGSGSGTDFTLKISRVEAEDVGVYYCQQHYSSPYTFGQGTKVEIK

SEQ ID NO: 4686 - protein, 11 aa, Artificial Sequence
  Description of Artificial Sequence: Synthetic peptide
  TIM3-0438[TIM-3] vlCDR1
RASQSVDNYVA

SEQ ID NO: 4687 - protein, 7 aa, Artificial Sequence
  Description of Artificial Sequence: Synthetic peptide
  TIM3-0438[TIM-3] vlCDR2
YASNRYI

SEQ ID NO: 4688 - protein, 9 aa, Artificial Sequence
  Description of Artificial Sequence: Synthetic peptide
  TIM3-0438[TIM-3] vlCDR3
QQHYSSPYT

SEQ ID NO: 4689 - protein, 119 aa, Artificial Sequence
  Description of Artificial Sequence: Synthetic polypeptide
  TIM3-0443[TIM-3] variable heavy Chain
EVQLVESGGGLVQPGGSLRLSCAASGFNIKTTYMHWVRQAPGKGLEWVGRIDPADDNTKYAPKFQGKATISADTSKNTAYLQMNSLRAEDTAVYYCVRDFGYVAWFAYWGQGTLVTFSS

SEQ ID NO: 4690 - protein, 5 aa, Artificial Sequence
  Description of Artificial Sequence: Synthetic peptide
  TIM3-0443[TIM-3] vhCDR1
TTYMH

SEQ ID NO: 4691 - protein, 17 aa, Artificial Sequence
  Description of Artificial Sequence: Synthetic peptide
  TIM3-0443[TIM-3] vhCDR2
RIDPADDNTKYAPKFQG

SEQ ID NO: 4692 - protein, 10 aa, Artificial Sequence
  Description of Artificial Sequence: Synthetic peptide
  TIM3-0443[TIM-3] vhCDR3
DFGYVAWFAY

SEQ ID NO: 4693 - protein, 107 aa, Artificial Sequence; identical to SEQ ID NO: 4685
  Description of Artificial Sequence: Synthetic polypeptide
  TIM3-0443[TIM-3] variable light Chain

SEQ ID NO: 4694 - protein, 11 aa, Artificial Sequence
  Description of Artificial Sequence: Synthetic peptide
  TIM3-0443[TIM-3] vlCDR1
RASQSVDNYVA

SEQ ID NO: 4695 - protein, 7 aa, Artificial Sequence
  Description of Artificial Sequence: Synthetic peptide
  TIM3-0443[TIM-3] vlCDR2
YASNRYI

SEQ ID NO: 4696 - protein, 9 aa, Artificial Sequence
  Description of Artificial Sequence: Synthetic peptide
  TIM3-0443[TIM-3] vlCDR3
QQHYSSPYT

SEQ ID NO: 4697 - protein, 246 aa, Artificial Sequence
  Description of Artificial Sequence: Synthetic polypeptide
  XENP019533 [CTLA-4]_H0_L0_scFv(GKPGS)4
QVQLVESGGGVVQPGRSLRLSCAASGFTFSSYTMHWVRQAPGKGLEWVTFISYDGNNKYYADSVKGRFTISRDNSKNTLYLQMNSLRAEDTAIYYCARTGWLGPFDYWGQGTLVTVSSGKPGSGKPGSGKPGSGKPGSEIVLTQSPGTLSLSPGERATLSCRASQSVGSSYLAWYQQKPGQAPRLLIYGAFSRATGIPDRFSGSGSGTDFTLTISRLEPEDFAVYYCQQYGSSPWTFGQGTKVEIK

SEQ ID NO: 4698 - protein, 118 aa, Artificial Sequence; identical to SEQ ID NO: 3737
  Description of Artificial Sequence: Synthetic polypeptide
  VH of XENP019533

SEQ ID NO: 4699 - protein, 108 aa, Artificial Sequence; identical to SEQ ID NO: 3741
  Description of Artificial Sequence: Synthetic polypeptide
  VL of XENP019533

SEQ ID NO: 4700 - protein, 5 aa, Artificial Sequence
  Description of Artificial Sequence: Synthetic peptide
  XENP019533 vhCDR1
SYTMH

SEQ ID NO: 4701 - protein, 17 aa, Artificial Sequence
  Description of Artificial Sequence: Synthetic peptide
  XENP019533 vhCDR2
FISYDGNNKYYADSVKG

SEQ ID NO: 4702 - protein, 9 aa, Artificial Sequence
  Description of Artificial Sequence: Synthetic peptide
  XENP019533 vhCDR3
TGWLGPFDY

SEQ ID NO: 4703 - protein, 12 aa, Artificial Sequence
  Description of Artificial Sequence: Synthetic peptide
  XENP019533 vlCDR1
RASQSVGSSYLA

SEQ ID NO: 4704 - protein, 7 aa, Artificial Sequence
  Description of Artificial Sequence: Synthetic peptide
  XENP019533 vlCDR2
GAFSRAT

SEQ ID NO: 4705 - protein, 9 aa, Artificial Sequence
  Description of Artificial Sequence: Synthetic peptide
  XENP019533 vlCDR3
QQYGSSPWT

SEQ ID NO: 4706 - protein, 246 aa, Artificial Sequence
  Description of Artificial Sequence: Synthetic polypeptide
  XENP019534 [CTLA-4]_H0.36_L0.50_scFv(GKPGS)4
QVQLVESGGGVVQPGRSLRLSCAASGFTFSSYTMHWVRKAPGKGLEWVTFISYDGNNKYYADSVKGRFTISRDNSKNTLYLQMNSLRAEDTAIYYCARTGWLGPFDYWGQGTLVTVSSGKPGSGKPGSGKPGSGKPGSEIVLTQSPGTLSLSPGERATLSCRASQSVGSSYLAWYQEKPGQAPRLLIYGAFSRATGIPDRFSGSGSGTDFTLTISRLEPEDFAVYYCQQYGSSPWTFGQGTKVEIK

SEQ ID NO: 4707 - protein, 118 aa, Artificial Sequence
  Description of Artificial Sequence: Synthetic polypeptide
  VH of XENP019534
QVQLVESGGGVVQPGRSLRLSCAASGFTFSSYTMHWVRKAPGKGLEWVTFISYDGNNKYYADSVKGRFTISRDNSKNTLYLQMNSLRAEDTAIYYCARTGWLGPFDYWGQGTLVTVSS

SEQ ID NO: 4708 - protein, 108 aa, Artificial Sequence
  Description of Artificial Sequence: Synthetic polypeptide
  VL of XENP019534
EIVLTQSPGTLSLSPGERATLSCRASQSVGSSYLAWYQEKPGQAPRLLIYGAFSRATGIPDRFSGSGSGTDFTLTISRLEPEDFAVYYCQQYGSSPWTFGQGTKVEIK

SEQ ID NO: 4709 - protein, 5 aa, Artificial Sequence
  Description of Artificial Sequence: Synthetic peptide
  XENP019534 vhCDR1
SYTMH

SEQ ID NO: 4710 - protein, 17 aa, Artificial Sequence
  Description of Artificial Sequence: Synthetic peptide
  XENP019534 vhCDR2
FISYDGNNKYYADSVKG

SEQ ID NO: 4711 - protein, 9 aa, Artificial Sequence
  Description of Artificial Sequence: Synthetic peptide
  XENP019534 vhCDR3
TGWLGPFDY

SEQ ID NO: 4712 - protein, 12 aa, Artificial Sequence
  Description of Artificial Sequence: Synthetic peptide
  XENP019534 vlCDR1
RASQSVGSSYLA

SEQ ID NO: 4713 - protein, 7 aa, Artificial Sequence
  Description of Artificial Sequence: Synthetic peptide
  XENP019534 vlCDR2
GAFSRAT

SEQ ID NO: 4714 - protein, 9 aa, Artificial Sequence
  Description of Artificial Sequence: Synthetic peptide
  XENP019534 vlCDR3
QQYGSSPWT

SEQ ID NO: 4715 - protein, 246 aa, Artificial Sequence
  Description of Artificial Sequence: Synthetic polypeptide
  XENP019535 [CTLA-4]_H0.36_L0.51_scFv(GKPGS)4
QVQLVESGGGVVQPGRSLRLSCAASGFTFSSYTMHWVRKAPGKGLEWVTFISYDGNNKYYADSVKGRFTISRDNSKNTLYLQMNSLRAEDTAIYYCARTGWLGPFDYWGQGTLVTVSSGKPGSGKPGSGKPGSGKPGSEIVLTQSPGTLSLSPGERATLSCRASQSVGSSYLAWYQQKPDQAPRLLIYGAFSRATGIPDRFSGSGSGTDFTLTISRLEPEDFAVYYCQQYGSSPWTFGQGTKVEIK

SEQ ID NO: 4716 - protein, 118 aa, Artificial Sequence; identical to SEQ ID NO: 4707
  Description of Artificial Sequence: Synthetic polypeptide
  VH of XENP019535

SEQ ID NO: 4717 - protein, 108 aa, Artificial Sequence
  Description of Artificial Sequence: Synthetic polypeptide
  VL of XENP019535
EIVLTQSPGTLSLSPGERATLSCRASQSVGSSYLAWYQQKPDQAPRLLIYGAFSRATGIPDRFSGSGSGTDFTLTISRLEPEDFAVYYCQQYGSSPWTFGQGTKVEIK

SEQ ID NO: 4718 - protein, 5 aa, Artificial Sequence
  Description of Artificial Sequence: Synthetic peptide
  XENP019535 vhCDR1
SYTMH

SEQ ID NO: 4719 - protein, 17 aa, Artificial Sequence
  Description of Artificial Sequence: Synthetic peptide
  XENP019535 vhCDR2
FISYDGNNKYYADSVKG

SEQ ID NO: 4720 - protein, 9 aa, Artificial Sequence
  Description of Artificial Sequence: Synthetic peptide
  XENP019535 vhCDR3
TGWLGPFDY

SEQ ID NO: 4721 - protein, 12 aa, Artificial Sequence
  Description of Artificial Sequence: Synthetic peptide
  XENP019535 vlCDR1
RASQSVGSSYLA

SEQ ID NO: 4722 - protein, 7 aa, Artificial Sequence
  Description of Artificial Sequence: Synthetic peptide
  XENP019535 vlCDR2
GAFSRAT

SEQ ID NO: 4723 - protein, 9 aa, Artificial Sequence
  Description of Artificial Sequence: Synthetic peptide
  XENP019535 vlCDR3
QQYGSSPWT

SEQ ID NO: 4724 - protein, 246 aa, Artificial Sequence
  Description of Artificial Sequence: Synthetic polypeptide
  XENP019536 [CTLA-4]_H0.37_L0.50_scFv(GKPGS)4
QVQLVESGGGVVQPGRSLRLSCAASGFTFSSYTMHWVRQAPGKRLEWVTFISYDGNNKYYADSVKGRFTISRDNSKNTLYLQMNSLRAEDTAIYYCARTGWLGPFDYWGQGTLVTVSSGKPGSGKPGSGKPGSGKPGSEIVLTQSPGTLSLSPGERATLSCRASQSVGSSYLAWYQEKPGQAPRLLIYGAFSRATGIPDRFSGSGSGTDFTLTISRLEPEDFAVYYCQQYGSSPWTFGQGTKVEIK

SEQ ID NO: 4725 - protein, 118 aa, Artificial Sequence
  Description of Artificial Sequence: Synthetic polypeptide
  VH of XENP019536
QVQLVESGGGVVQPGRSLRLSCAASGFTFSSYTMHWVRQAPGKRLEWVTFISYDGNNKYYADSVKGRFTISRDNSKNTLYLQMNSLRAEDTAIYYCARTGWLGPFDYWGQGTLVTVSS

SEQ ID NO: 4726 - protein, 108 aa, Artificial Sequence; identical to SEQ ID NO: 4708
  Description of Artificial Sequence: Synthetic polypeptide
  VL of XENP019536

SEQ ID NO: 4727 - protein, 5 aa, Artificial Sequence
  Description of Artificial Sequence: Synthetic peptide
  XENP019536 vhCDR1
SYTMH

SEQ ID NO: 4728 - protein, 17 aa, Artificial Sequence
  Description of Artificial Sequence: Synthetic peptide
  XENP019536 vhCDR2
FISYDGNNKYYADSVKG

SEQ ID NO: 4729 - protein, 9 aa, Artificial Sequence
  Description of Artificial Sequence: Synthetic peptide
  XENP019536 vhCDR3
TGWLGPFDY

SEQ ID NO: 4730 - protein, 12 aa, Artificial Sequence
  Description of Artificial Sequence: Synthetic peptide
  XENP019536 vlCDR1
RASQSVGSSYLA

SEQ ID NO: 4731 - protein, 7 aa, Artificial Sequence
  Description of Artificial Sequence: Synthetic peptide
  XENP019536 vlCDR2
GAFSRAT

SEQ ID NO: 4732 - protein, 9 aa, Artificial Sequence
  Description of Artificial Sequence: Synthetic peptide
  XENP019536 vlCDR3
QQYGSSPWT

SEQ ID NO: 4733 - protein, 246 aa, Artificial Sequence
  Description of Artificial Sequence: Synthetic polypeptide
  XENP019537 [CTLA-4]_H0.37_L0.113_scFv(GKPGS)4
QVQLVESGGGVVQPGRSLRLSCAASGFTFSSYTMHWVRQAPGKRLEWVTFISYDGNNKYYADSVKGRFTISRDNSKNTLYLQMNSLRAEDTAIYYCARTGWLGPFDYWGQGTLVTVSSGKPGSGKPGSGKPGSGKPGSEIVLTQSPGTLSLSPGERATLSCRASQSVGSSYLAWYQQKPGQAPRLLIYGAFSRATGIPDRFSGSGSGTDFTLTISRLEPEDFAVYYCQQYGSSPWTFGEGTKVEIK

SEQ ID NO: 4734 - protein, 118 aa, Artificial Sequence; identical to SEQ ID NO: 4725
  Description of Artificial Sequence: Synthetic polypeptide
  VH of XENP019537

SEQ ID NO: 4735 - protein, 108 aa, Artificial Sequence
  Description of Artificial Sequence: Synthetic polypeptide
  VL of XENP019537
EIVLTQSPGTLSLSPGERATLSCRASQSVGSSYLAWYQQKPGQAPRLLIYGAFSRATGIPDRFSGSGSGTDFTLTISRLEPEDFAVYYCQQYGSSPWTFGEGTKVEIK

SEQ ID NO: 4736 - protein, 5 aa, Artificial Sequence
  Description of Artificial Sequence: Synthetic peptide
  XENP019537 vhCDR1
SYTMH

SEQ ID NO: 4737 - protein, 17 aa, Artificial Sequence
  Description of Artificial Sequence: Synthetic peptide
  XENP019537 vhCDR2
FISYDGNNKYYADSVKG

SEQ ID NO: 4738 - protein, 9 aa, Artificial Sequence
  Description of Artificial Sequence: Synthetic peptide
  XENP019537 vhCDR3
TGWLGPFDY

SEQ ID NO: 4739 - protein, 12 aa, Artificial Sequence
  Description of Artificial Sequence: Synthetic peptide
  XENP019537 vlCDR1
RASQSVGSSYLA

SEQ ID NO: 4740 - protein, 7 aa, Artificial Sequence
  Description of Artificial Sequence: Synthetic peptide
  XENP019537 vlCDR2
GAFSRAT

SEQ ID NO: 4741 - protein, 9 aa, Artificial Sequence
  Description of Artificial Sequence: Synthetic peptide
  XENP019537 vlCDR3
QQYGSSPWT

SEQ ID NO: 4742 - protein, 246 aa, Artificial Sequence
  Description of Artificial Sequence: Synthetic polypeptide
  XENP019538 [CTLA-4]_H0.134_L0.51_scFv(GKPGS)4
QVQLVESGGGVVQPGRSLRLSCAASGFTFSSYTMHWVRQAPGKGLEWVTFISYDGNNKYYADSVKGRFTISRDNSKNTLYLQMNSLRAEDTAIYYCARTGWLGPFDYWGRGTLVTVSSGKPGSGKPGSGKPGSGKPGSEIVLTQSPGTLSLSPGERATLSCRASQSVGSSYLAWYQQKPDQAPRLLIYGAFSRATGIPDRFSGSGSGTDFTLTISRLEPEDFAVYYCQQYGSSPWTFGQGTKVEIK

SEQ ID NO: 4743 - protein, 118 aa, Artificial Sequence
  Description of Artificial Sequence: Synthetic polypeptide
  VH of XENP019538
QVQLVESGGGVVQPGRSLRLSCAASGFTFSSYTMHWVRQAPGKGLEWVTFISYDGNNKYYADSVKGRFTISRDNSKNTLYLQMNSLRAEDTAIYYCARTGWLGPFDYWGRGTLVTVSS

SEQ ID NO: 4744 - protein, 108 aa, Artificial Sequence; identical to SEQ ID NO: 4717
  Description of Artificial Sequence: Synthetic polypeptide
  VL of XENP019538

SEQ ID NO: 4745 - protein, 5 aa, Artificial Sequence
  Description of Artificial Sequence: Synthetic peptide
  XENP019538 vhCDR1
SYTMH

SEQ ID NO: 4746 - protein, 17 aa, Artificial Sequence
  Description of Artificial Sequence: Synthetic peptide
  XENP019538 vhCDR2
FISYDGNNKYYADSVKG

SEQ ID NO: 4747 - protein, 9 aa, Artificial Sequence
  Description of Artificial Sequence: Synthetic peptide
  XENP019538 vhCDR3
TGWLGPFDY

SEQ ID NO: 4748 - protein, 12 aa, Artificial Sequence
  Description of Artificial Sequence: Synthetic peptide
  XENP019538 vlCDR1
RASQSVGSSYLA

SEQ ID NO: 4749 - protein, 7 aa, Artificial Sequence
  Description of Artificial Sequence: Synthetic peptide
  XENP019538 vlCDR2
GAFSRAT

SEQ ID NO: 4750 - protein, 9 aa, Artificial Sequence
  Description of Artificial Sequence: Synthetic peptide
  XENP019538 vlCDR3
QQYGSSPWT

SEQ ID NO: 4751 - protein, 246 aa, Artificial Sequence
  Description of Artificial Sequence: Synthetic polypeptide
  XENP019539 [CTLA-4]_H0.134_L0.53_scFv(GKPGS)4
QVQLVESGGGVVQPGRSLRLSCAASGFTFSSYTMHWVRQAPGKGLEWVTFISYDGNNKYYADSVKGRFTISRDNSKNTLYLQMNSLRAEDTAIYYCARTGWLGPFDYWGRGTLVTVSSGKPGSGKPGSGKPGSGKPGSEIVLTQSPGTLSLSPGERATLSCRASQSVGSSYLAWYQQKPGEAPRLLIYGAFSRATGIPDRFSGSGSGTDFTLTISRLEPEDFAVYYCQQYGSSPWTFGQGTKVEIK

SEQ ID NO: 4752 - protein, 118 aa, Artificial Sequence; identical to SEQ ID NO: 4743
  Description of Artificial Sequence: Synthetic polypeptide
  VH of XENP019539

SEQ ID NO: 4753 - protein, 108 aa, Artificial Sequence
  Description of Artificial Sequence: Synthetic polypeptide
  VL of XENP019539
EIVLTQSPGTLSLSPGERATLSCRASQSVGSSYLAWYQQKPGEAPRLLIYGAFSRATGIPDRFSGSGSGTDFTLTISRLEPEDFAVYYCQQYGSSPWTFGQGTKVEIK

SEQ ID NO: 4754 - protein, 5 aa, Artificial Sequence
  Description of Artificial Sequence: Synthetic peptide
  XENP019539 vhCDR1
SYTMH

SEQ ID NO: 4755 - protein, 17 aa, Artificial Sequence
  Description of Artificial Sequence: Synthetic peptide
  XENP019539 vhCDR2
FISYDGNNKYYADSVKG

SEQ ID NO: 4756 - protein, 9 aa, Artificial Sequence
  Description of Artificial Sequence: Synthetic peptide
  XENP019539 vhCDR3
TGWLGPFDY

SEQ ID NO: 4757 - protein, 12 aa, Artificial Sequence
  Description of Artificial Sequence: Synthetic peptide
  XENP019539 vlCDR1
RASQSVGSSYLA

SEQ ID NO: 4758 - protein, 7 aa, Artificial Sequence
  Description of Artificial Sequence: Synthetic peptide
  XENP019539 vlCDR2
GAFSRAT

SEQ ID NO: 4759 - protein, 9 aa, Artificial Sequence
  Description of Artificial Sequence: Synthetic peptide
  XENP019539 vlCDR3
QQYGSSPWT

SEQ ID NO: 4760 - protein, 246 aa, Artificial Sequence
  Description of Artificial Sequence: Synthetic polypeptide
  XENP019540 [CTLA-4]_H0.134_L0.57_scFv(GKPGS)4
QVQLVESGGGVVQPGRSLRLSCAASGFTFSSYTMHWVRQAPGKGLEWVTFISYDGNNKYYADSVKGRFTISRDNSKNTLYLQMNSLRAEDTAIYYCARTGWLGPFDYWGRGTLVTVSSGKPGSGKPGSGKPGSGKPGSEIVLTQSPGTLSLSPGERATLSCRASQSVGSSYLAWYQQKPGQAPELLIYGAFSRATGIPDRFSGSGSGTDFTLTISRLEPEDFAVYYCQQYGSSPWTFGQGTKVEIK

SEQ ID NO: 4761 - protein, 118 aa, Artificial Sequence; identical to SEQ ID NO: 4743
  Description of Artificial Sequence: Synthetic polypeptide
  VH of XENP019540

SEQ ID NO: 4762 - protein, 108 aa, Artificial Sequence
  Description of Artificial Sequence: Synthetic polypeptide
  VL of XENP019540
EIVLTQSPGTLSLSPGERATLSCRASQSVGSSYLAWYQQKPGQAPELLIYGAFSRATGIPDRFSGSGSGTDFTLTISRLEPEDFAVYYCQQYGSSPWTFGQGTKVEIK

SEQ ID NO: 4763 - protein, 5 aa, Artificial Sequence
  Description of Artificial Sequence: Synthetic peptide
  XENP019540 vhCDR1
SYTMH

SEQ ID NO: 4764 - protein, 17 aa, Artificial Sequence
  Description of Artificial Sequence: Synthetic peptide
  XENP019540 vhCDR2
FISYDGNNKYYADSVKG

SEQ ID NO: 4765 - protein, 9 aa, Artificial Sequence
  Description of Artificial Sequence: Synthetic peptide
  XENP019540 vhCDR3
TGWLGPFDY

SEQ ID NO: 4766 - protein, 12 aa, Artificial Sequence
  Description of Artificial Sequence: Synthetic peptide
  XENP019540 vlCDR1
RASQSVGSSYLA

SEQ ID NO: 4767 - protein, 7 aa, Artificial Sequence
  Description of Artificial Sequence: Synthetic peptide
  XENP019540 vlCDR2
GAFSRAT

SEQ ID NO: 4768 - protein, 9 aa, Artificial Sequence
  Description of Artificial Sequence: Synthetic peptide
  XENP019540 vlCDR3
QQYGSSPWT

SEQ ID NO: 4769 - protein, 246 aa, Artificial Sequence
  Description of Artificial Sequence: Synthetic polypeptide
  XENP019541 [CTLA-4]_H0.137_L0.114_scFv(GKPGS)4
QVQLVESGGGVVQPGRSLRLSCAASGFTFSSYTMHWVRQAPGKCLEWVTFISYDGNNKYYADSVKGRFTISRDNSKNTLYLQMNSLRAEDTAIYYCARTGWLGPFDYWGQGTLVTVSSGKPGSGKPGSGKPGSGKPGSEIVLTQSPGTLSLSPGERATLSCRASQSVGSSYLAWYQQKPGQAPRLLIYGAFSRATGIPDRFSGSGSGTDFTLTISRLEPEDFAVYYCQQYGSSPWTFGCGTKVEIK

SEQ ID NO: 4770 - protein, 118 aa, Artificial Sequence
  Description of Artificial Sequence: Synthetic polypeptide
  VH of XENP019541
QVQLVESGGGVVQPGRSLRLSCAASGFTFSSYTMHWVRQAPGKCLEWVTFISYDGNNKYYADSVKGRFTISRDNSKNTLYLQMNSLRAEDTAIYYCARTGWLGPFDYWGQGTLVTVSS

SEQ ID NO: 4771 - protein, 108 aa, Artificial Sequence
  Description of Artificial Sequence: Synthetic polypeptide
  VL of XENP019541
EIVLTQSPGTLSLSPGERATLSCRASQSVGSSYLAWYQQKPGQAPRLLIYGAFSRATGIPDRFSGSGSGTDFTLTISRLEPEDFAVYYCQQYGSSPWTFGCGTKVEIK

SEQ ID NO: 4772 - protein, 5 aa, Artificial Sequence
  Description of Artificial Sequence: Synthetic peptide
  XENP019541 vhCDR1
SYTMH

SEQ ID NO: 4773 - protein, 17 aa, Artificial Sequence
  Description of Artificial Sequence: Synthetic peptide
  XENP019541 vhCDR2
FISYDGNNKYYADSVKG

SEQ ID NO: 4774 - protein, 9 aa, Artificial Sequence
  Description of Artificial Sequence: Synthetic peptide
  XENP019541 vhCDR3
TGWLGPFDY

SEQ ID NO: 4775 - protein, 12 aa, Artificial Sequence
  Description of Artificial Sequence: Synthetic peptide
  XENP019541 vlCDR1
RASQSVGSSYLA

SEQ ID NO: 4776 - protein, 7 aa, Artificial Sequence
  Description of Artificial Sequence: Synthetic peptide
  XENP019541 vlCDR2
GAFSRAT

SEQ ID NO: 4777 - protein, 9 aa, Artificial Sequence
  Description of Artificial Sequence: Synthetic peptide
  XENP019541 vlCDR3
QQYGSSPWT

SEQ ID NO: 4778 - protein, 246 aa, Artificial Sequence
  Description of Artificial Sequence: Synthetic polypeptide
  XENP019542 [CTLA-4]_H0.138_L0.115_scFv(GKPGS)4
QVQLVESGGGVVQPGRSLRLSCAASGFTFSSYTMHWVRQAPGKGLEWVTFISYDGNNKYYADSVKGRFTISRDNSKNTLYLQMNSLRAEDTAIYYCARTGWLGPFDYWGCGTLVTVSSGKPGSGKPGSGKPGSGKPGSEIVLTQSPGTLSLSPGERATLSCRASQSVGSSYLAWYQQKPCQAPRLLIYGAFSRATGIPDRFSGSGSGTDFTLTISRLEPEDFAVYYCQQYGSSPWTFGQGTKVEIK

SEQ ID NO: 4779 - protein, 118 aa, Artificial Sequence
  Description of Artificial Sequence: Synthetic polypeptide
  VH of XENP019542
QVQLVESGGGVVQPGRSLRLSCAASGFTFSSYTMHWVRQAPGKGLEWVTFISYDGNNKYYADSVKGRFTISRDNSKNTLYLQMNSLRAEDTAIYYCARTGWLGPFDYWGCGTLVTVSS

SEQ ID NO: 4780 - protein, 108 aa, Artificial Sequence
  Description of Artificial Sequence: Synthetic polypeptide
  VL of XENP019542
EIVLTQSPGTLSLSPGERATLSCRASQSVGSSYLAWYQQKPCQAPRLLIYGAFSRATGIPDRFSGSGSGTDFTLTISRLEPEDFAVYYCQQYGSSPWTFGQGTKVEIK

SEQ ID NO: 4781 - protein, 5 aa, Artificial Sequence
  Description of Artificial Sequence: Synthetic peptide
  XENP019542 vhCDR1
SYTMH

SEQ ID NO: 4782 - protein, 17 aa, Artificial Sequence
  Description of Artificial Sequence: Synthetic peptide
  XENP019542 vhCDR2
FISYDGNNKYYADSVKG

SEQ ID NO: 4783 - protein, 9 aa, Artificial Sequence
  Description of Artificial Sequence: Synthetic peptide
  XENP019542 vhCDR3
TGWLGPFDY

SEQ ID NO: 4784 - protein, 12 aa, Artificial Sequence
  Description of Artificial Sequence: Synthetic peptide
  XENP019542 vlCDR1
RASQSVGSSYLA

SEQ ID NO: 4785 - protein, 7 aa, Artificial Sequence
  Description of Artificial Sequence: Synthetic peptide
  XENP019542 vlCDR2
GAFSRAT

SEQ ID NO: 4786 - protein, 9 aa, Artificial Sequence
  Description of Artificial Sequence: Synthetic peptide
  XENP019542 vlCDR3
QQYGSSPWT

SEQ ID NO: 4787 - protein, 246 aa, Artificial Sequence
  Description of Artificial Sequence: Synthetic polypeptide
  XENP019543 [CTLA-4]_H0.139_L0.116_scFv(GKPGS)4
QVQLVESGGGVVQPGRSLRLSCAASGFTFSSYTMHWVRQAPGKGLEWVTFISYDGNNKYYADSVKGRFTISRDNSKNTLYLQMNSLRAEDTAIYYCARTGWLGPFDYWGCGTLVTVSSGKPGSGKPGSGKPGSGKPGSEIVLTQSPGTLSLSPGERATLSCRASQSVGSSYLAWYQQKPGCAPRLLIYGAFSRATGIPDRFSGSGSGTDFTLTISRLEPEDFAVYYCQQYGSSPWTFGQGTKVEIK

SEQ ID NO: 4788 - protein, 118 aa, Artificial Sequence; identical to SEQ ID NO: 4779
  Description of Artificial Sequence: Synthetic polypeptide
  VH of XENP019543

SEQ ID NO: 4789 - protein, 108 aa, Artificial Sequence
  Description of Artificial Sequence: Synthetic polypeptide
  VL of XENP019543
EIVLTQSPGTLSLSPGERATLSCRASQSVGSSYLAWYQQKPGCAPRLLIYGAFSRATGIPDRFSGSGSGTDFTLTISRLEPEDFAVYYCQQYGSSPWTFGQGTKVEIK

SEQ ID NO: 4790 - protein, 5 aa, Artificial Sequence
  Description of Artificial Sequence: Synthetic peptide
  XENP019543 vhCDR1
SYTMH

SEQ ID NO: 4791 - protein, 17 aa, Artificial Sequence
  Description of Artificial Sequence: Synthetic peptide
  XENP019543 vhCDR2
FISYDGNNKYYADSVKG

SEQ ID NO: 4792 - protein, 9 aa, Artificial Sequence
  Description of Artificial Sequence: Synthetic peptide
  XENP019543 vhCDR3
TGWLGPFDY

SEQ ID NO: 4793 - protein, 12 aa, Artificial Sequence
  Description of Artificial Sequence: Synthetic peptide
  XENP019543 vlCDR1
RASQSVGSSYLA

SEQ ID NO: 4794 - protein, 7 aa, Artificial Sequence
  Description of Artificial Sequence: Synthetic peptide
  XENP019543 vlCDR2
GAFSRAT

SEQ ID NO: 4795 - protein, 9 aa, Artificial Sequence
  Description of Artificial Sequence: Synthetic peptide
  XENP019543 vlCDR3
QQYGSSPWT

SEQ ID NO: 4796 - protein, 246 aa, Artificial Sequence
  Description of Artificial Sequence: Synthetic polypeptide
  XENP019551 [CTLA-4]_H1_L0_scFv(GKPGS)4
EVQLVESGGGLVQPGGSLRLSCAASGFTFSSYTMHWVRQAPGKGLEWVTFISYDGNNKYYVDSVKGRFTISRDNAKNSLYLQMNSLRAEDTAVYYCARTGWLGPFDYWGQGTLVTVSSGKPGSGKPGSGKPGSGKPGSEIVLTQSPGTLSLSPGERATLSCRASQSVGSSYLAWYQQKPGQAPRLLIYGAFSRATGIPDRFSGSGSGTDFTLTISRLEPEDFAVYYCQQYGSSPWTFGQGTKVEIK

SEQ ID NO: 4797 - protein, 118 aa, Artificial Sequence
  Description of Artificial Sequence: Synthetic polypeptide
  VH of XENP019551
EVQLVESGGGLVQPGGSLRLSCAASGFTFSSYTMHWVRQAPGKGLEWVTFISYDGNNKYYVDSVKGRFTISRDNAKNSLYLQMNSLRAEDTAVYYCARTGWLGPFDYWGQGTLVTVSS

SEQ ID NO: 4798 - protein, 108 aa, Artificial Sequence; identical to SEQ ID NO: 3741
  Description of Artificial Sequence: Synthetic polypeptide
  VL of XENP019551

SEQ ID NO: 4799 - protein, 5 aa, Artificial Sequence
  Description of Artificial Sequence: Synthetic peptide
  XENP019551 vhCDR1
SYTMH

SEQ ID NO: 4800 - protein, 17 aa, Artificial Sequence
  Description of Artificial Sequence: Synthetic peptide
  XENP019551 vhCDR2
FISYDGNNKYYVDSVKG

SEQ ID NO: 4801 - protein, 9 aa, Artificial Sequence
  Description of Artificial Sequence: Synthetic peptide
  XENP019551 vhCDR3
TGWLGPFDY

SEQ ID NO: 4802 - protein, 12 aa, Artificial Sequence
  Description of Artificial Sequence: Synthetic peptide
  XENP019551 vlCDR1
RASQSVGSSYLA

SEQ ID NO: 4803 - protein, 7 aa, Artificial Sequence
  Description of Artificial Sequence: Synthetic peptide
  XENP019551 vlCDR2
GAFSRAT

SEQ ID NO: 4804 - protein, 9 aa, Artificial Sequence
  Description of Artificial Sequence: Synthetic peptide
  XENP019551 vlCDR3
QQYGSSPWT

SEQ ID NO: 4805 - protein, 246 aa, Artificial Sequence
  Description of Artificial Sequence: Synthetic polypeptide
  XENP019552 [CTLA-4]_H2_L0_scFv(GKPGS)4
EVQLVESGGGLVQPGGSLRLSCAASGFTFSSYTMHWVRQAPGKGLEWVTFISYDGNNKYYPGSVKGRFTISRENAKNSLYLQMNSLRAGDTAVYYCARTGWLGPFDYWGQGTLVTVSSGKPGSGKPGSGKPGSGKPGSEIVLTQSPGTLSLSPGERATLSCRASQSVGSSYLAWYQQKPGQAPRLLIYGAFSRATGIPDRFSGSGSGTDFTLTISRLEPEDFAVYYCQQYGSSPWTFGQGTKVEIK

SEQ ID NO: 4806 - protein, 118 aa, Artificial Sequence
  Description of Artificial Sequence: Synthetic polypeptide
  VH of XENP019552
EVQLVESGGGLVQPGGSLRLSCAASGFTFSSYTMHWVRQAPGKGLEWVTFISYDGNNKYYPGSVKGRFTISRENAKNSLYLQMNSLRAGDTAVYYCARTGWLGPFDYWGQGTLVTVSS

SEQ ID NO: 4807 - protein, 108 aa, Artificial Sequence; identical to SEQ ID NO: 3741
  Description of Artificial Sequence: Synthetic polypeptide
  VL of XENP019552

SEQ ID NO: 4808 - protein, 5 aa, Artificial Sequence
  Description of Artificial Sequence: Synthetic peptide
  XENP019552 vhCDR1
SYTMH

SEQ ID NO: 4809 - protein, 17 aa, Artificial Sequence
  Description of Artificial Sequence: Synthetic peptide
  XENP019552 vhCDR2
FISYDGNNKYYPGSVKG

SEQ ID NO: 4810 - protein, 9 aa, Artificial Sequence
  Description of Artificial Sequence: Synthetic peptide
  XENP019552 vhCDR3
TGWLGPFDY

SEQ ID NO: 4811 - protein, 12 aa, Artificial Sequence
  Description of Artificial Sequence: Synthetic peptide
  XENP019552 vlCDR1
RASQSVGSSYLA

SEQ ID NO: 4812 - protein, 7 aa, Artificial Sequence
  Description of Artificial Sequence: Synthetic peptide
  XENP019552 vlCDR2
GAFSRAT

SEQ ID NO: 4813 - protein, 9 aa, Artificial Sequence
  Description of Artificial Sequence: Synthetic peptide
  XENP019552 vlCDR3
QQYGSSPWT

SEQ ID NO: 4814 - protein, 246 aa, Artificial Sequence
  Description of Artificial Sequence: Synthetic polypeptide
  XENP019553 [CTLA-4]_H3_L0_scFv(GKPGS)4
EVQLVESGGGLVKPGGSLRLSCAASGFTFSSYTMHWVRQAPGKGLEWVSFISYDGNNKYYADSVKGRFTISRDNAKNSLYLQMNSLRAEDTAVYYCARTGWLGPFDYWGQGTLVTVSSGKPGSGKPGSGKPGSGKPGSEIVLTQSPGTLSLSPGERATLSCRASQSVGSSYLAWYQQKPGQAPRLLIYGAFSRATGIPDRFSGSGSGTDFTLTISRLEPEDFAVYYCQQYGSSPWTFGQGTKVEIK

SEQ ID NO: 4815 - protein, 118 aa, Artificial Sequence; identical to SEQ ID NO: 2405
  Description of Artificial Sequence: Synthetic polypeptide
  VH of XENP019553

SEQ ID NO: 4816 - protein, 108 aa, Artificial Sequence; identical to SEQ ID NO: 3741
  Description of Artificial Sequence: Synthetic polypeptide
  VL of XENP019553

SEQ ID NO: 4817 - protein, 5 aa, Artificial Sequence
  Description of Artificial Sequence: Synthetic peptide
  XENP019553 vhCDR1
SYTMH

SEQ ID NO: 4818 - protein, 17 aa, Artificial Sequence
  Description of Artificial Sequence: Synthetic peptide
  XENP019553 vhCDR2
FISYDGNNKYYADSVKG

SEQ ID NO: 4819 - protein, 9 aa, Artificial Sequence
  Description of Artificial Sequence: Synthetic peptide
  XENP019553 vhCDR3
TGWLGPFDY

SEQ ID NO: 4820 - protein, 12 aa, Artificial Sequence
  Description of Artificial Sequence: Synthetic peptide
  XENP019553 vlCDR1
RASQSVGSSYLA

SEQ ID NO: 4821 - protein, 7 aa, Artificial Sequence
  Description of Artificial Sequence: Synthetic peptide
  XENP019553 vlCDR2
GAFSRAT

SEQ ID NO: 4822 - protein, 9 aa, Artificial Sequence
  Description of Artificial Sequence: Synthetic peptide
  XENP019553 vlCDR3
QQYGSSPWT

SEQ ID NO: 4823 - protein, 246 aa, Artificial Sequence
  Description of Artificial Sequence: Synthetic polypeptide
  XENP019554 [CTLA-4]_H4_L0_scFv(GKPGS)4
EVQLVESGGGLVQPGGSLRLSCAASGFTFSSYTMHWVRQAPGKGLEYVTFISYDGNNKYYADSVKGRFTISRDNSKNTLYLQMGSLRAEDMAVYYCARTGWLGPFDYWGQGTLVTVSSGKPGSGKPGSGKPGSGKPGSEIVLTQSPGTLSLSPGERATLSCRASQSVGSSYLAWYQQKPGQAPRLLIYGAFSRATGIPDRFSGSGSGTDFTLTISRLEPEDFAVYYCQQYGSSPWTFGQGTKVEIK

SEQ ID NO: 4824 - protein, 118 aa, Artificial Sequence
  Description of Artificial Sequence: Synthetic polypeptide
  VH of XENP019554
EVQLVESGGGLVQPGGSLRLSCAASGFTFSSYTMHWVRQAPGKGLEYVTFISYDGNNKYYADSVKGRFTISRDNSKNTLYLQMGSLRAEDMAVYYCARTGWLGPFDYWGQGTLVTVSS

SEQ ID NO: 4825 - protein, 108 aa, Artificial Sequence; identical to SEQ ID NO: 3741
  Description of Artificial Sequence: Synthetic polypeptide
  VL of XENP019554

SEQ ID NO: 4826 - protein, 5 aa, Artificial Sequence
  Description of Artificial Sequence: Synthetic peptide
  XENP019554 vhCDR1
SYTMH

SEQ ID NO: 4827 - protein, 17 aa, Artificial Sequence
  Description of Artificial Sequence: Synthetic peptide
  XENP019554 vhCDR2
FISYDGNNKYYADSVKG

SEQ ID NO: 4828 - protein, 9 aa, Artificial Sequence
  Description of Artificial Sequence: Synthetic peptide
  XENP019554 vhCDR3
TGWLGPFDY

SEQ ID NO: 4829 - protein, 12 aa, Artificial Sequence
  Description of Artificial Sequence: Synthetic peptide
  XENP019554 vlCDR1
RASQSVGSSYLA

SEQ ID NO: 4830 - protein, 7 aa, Artificial Sequence
  Description of Artificial Sequence: Synthetic peptide
  XENP019554 vlCDR2
GAFSRAT

SEQ ID NO: 4831 - protein, 9 aa, Artificial Sequence
  Description of Artificial Sequence: Synthetic peptide
  XENP019554 vlCDR3
QQYGSSPWT

SEQ ID NO: 4832 - protein, 246 aa, Artificial Sequence
  Description of Artificial Sequence: Synthetic polypeptide
  XENP019555 [CTLA-4]_H0_L1_scFv(GKPGS)4
QVQLVESGGGVVQPGRSLRLSCAASGFTFSSYTMHWVRQAPGKGLEWVTFISYDGNNKYYADSVKGRFTISRDNSKNTLYLQMNSLRAEDTAIYYCARTGWLGPFDYWGQGTLVTVSSGKPGSGKPGSGKPGSGKPGSEIVLTQSPATLSLSPGERATLSCGASQSVGSSYLAWYQQKPGLAPRLLIYGAFSRATGIPDRFSGSGSGTDFTLTISRLEPEDFAVYYCQQYGSSPWTFGQGTKVEIK

SEQ ID NO: 4833 - protein, 118 aa, Artificial Sequence; identical to SEQ ID NO: 3737
  Description of Artificial Sequence: Synthetic polypeptide
  VH of XENP019555

SEQ ID NO: 4834 - protein, 108 aa, Artificial Sequence
  Description of Artificial Sequence: Synthetic polypeptide
  VL of XENP019555
EIVLTQSPATLSLSPGERATLSCGASQSVGSSYLAWYQQKPGLAPRLLIYGAFSRATGIPDRFSGSGSGTDFTLTISRLEPEDFAVYYCQQYGSSPWTFGQGTKVEIK

SEQ ID NO: 4835 - protein, 5 aa, Artificial Sequence
  Description of Artificial Sequence: Synthetic peptide
  XENP019555 vhCDR1
SYTMH

SEQ ID NO: 4836 - protein, 17 aa, Artificial Sequence
  Description of Artificial Sequence: Synthetic peptide
  XENP019555 vhCDR2
FISYDGNNKYYADSVKG

SEQ ID NO: 4837 - protein, 9 aa, Artificial Sequence
  Description of Artificial Sequence: Synthetic peptide
  XENP019555 vhCDR3
TGWLGPFDY

SEQ ID NO: 4838 - protein, 12 aa, Artificial Sequence
  Description of Artificial Sequence: Synthetic peptide
  XENP019555 vlCDR1
GASQSVGSSYLA

SEQ ID NO: 4839 - protein, 7 aa, Artificial Sequence
  Description of Artificial Sequence: Synthetic peptide
  XENP019555 vlCDR2
GAFSRAT

SEQ ID NO: 4840 - protein, 9 aa, Artificial Sequence
  Description of Artificial Sequence: Synthetic peptide
  XENP019555 vlCDR3
QQYGSSPWT

SEQ ID NO: 4841 - protein, 246 aa, Artificial Sequence
  Description of Artificial Sequence: Synthetic polypeptide
  XENP019556 [CTLA-4]_H0_L2_scFv(GKPGS)4
QVQLVESGGGVVQPGRSLRLSCAASGFTFSSYTMHWVRQAPGKGLEWVTFISYDGNNKYYADSVKGRFTISRDNSKNTLYLQMNSLRAEDTAIYYCARTGWLGPFDYWGQGTLVTVSSGKPGSGKPGSGKPGSGKPGSEIVMTQSPATLSVSPGERATLSCRASQSVGSSYLAWYQQKPGQAPRLLIYGAFSRATGIPARFSGSGSGTEFTLTISSLQSEDFAVYYCQQYGSSPWTFGQGTKVEIK

SEQ ID NO: 4842 - protein, 118 aa, Artificial Sequence; identical to SEQ ID NO: 3737
  Description of Artificial Sequence: Synthetic polypeptide
  VH of XENP019556

SEQ ID NO: 4843 - protein, 108 aa, Artificial Sequence
  Description of Artificial Sequence: Synthetic polypeptide
  VL of XENP019556
EIVMTQSPATLSVSPGERATLSCRASQSVGSSYLAWYQQKPGQAPRLLIYGAFSRATGIPARFSGSGSGTEFTLTISSLQSEDFAVYYCQQYGSSPWTFGQGTKVEIK

SEQ ID NO: 4844 - protein, 5 aa, Artificial Sequence
  Description of Artificial Sequence: Synthetic peptide
  XENP019556 vhCDR1
SYTMH

SEQ ID NO: 4845 - protein, 17 aa, Artificial Sequence
  Description of Artificial Sequence: Synthetic peptide
  XENP019556 vhCDR2
FISYDGNNKYYADSVKG

SEQ ID NO: 4846 - protein, 9 aa, Artificial Sequence
  Description of Artificial Sequence: Synthetic peptide
  XENP019556 vhCDR3
TGWLGPFDY

SEQ ID NO: 4847 - protein, 12 aa, Artificial Sequence
  Description of Artificial Sequence: Synthetic peptide
  XENP019556 vlCDR1
RASQSVGSSYLA

SEQ ID NO: 4848 - protein, 7 aa, Artificial Sequence
  Description of Artificial Sequence: Synthetic peptide
  XENP019556 vlCDR2
GAFSRAT

SEQ ID NO: 4849 - protein, 9 aa, Artificial Sequence
  Description of Artificial Sequence: Synthetic peptide
  XENP019556 vlCDR3
QQYGSSPWT

SEQ ID NO: 4850 - protein, 246 aa, Artificial Sequence
  Description of Artificial Sequence: Synthetic polypeptide
  XENP019587 [CTLA-4]_H0.140_L0_scFv(GKPGS)4
QVQLVESGGGVVQPGRSLRLSCAASGFTFSSYTMHWVRQAPGKGLEWVCFISYDGNNKYYADSVKGRFTCSRDNSKNTLYLQMNSLRAEDTAIYYCARTGWLGPFDYWGQGTLVTVSSGKPGSGKPGSGKPGSGKPGSEIVLTQSPGTLSLSPGERATLSCRASQSVGSSYLAWYQQKPGQAPRLLIYGAFSRATGIPDRFSGSGSGTDFTLTISRLEPEDFAVYYCQQYGSSPWTFGQGTKVEIK

SEQ ID NO: 4851 - protein, 118 aa, Artificial Sequence
  Description of Artificial Sequence: Synthetic polypeptide
  VH of XENP019587
QVQLVESGGGVVQPGRSLRLSCAASGFTFSSYTMHWVRQAPGKGLEWVCFISYDGNNKYYADSVKGRFTCSRDNSKNTLYLQMNSLRAEDTAIYYCARTGWLGPFDYWGQGTLVTVSS

SEQ ID NO: 4852 - protein, 108 aa, Artificial Sequence; identical to SEQ ID NO: 3741
  Description of Artificial Sequence: Synthetic polypeptide
  VL of XENP019587

SEQ ID NO: 4853 - protein, 5 aa, Artificial Sequence
  Description of Artificial Sequence: Synthetic peptide
  XENP019587 vhCDR1
SYTMH

SEQ ID NO: 4854 - protein, 17 aa, Artificial Sequence
  Description of Artificial Sequence: Synthetic peptide
  XENP019587 vhCDR2
FISYDGNNKYYADSVKG

SEQ ID NO: 4855 - protein, 9 aa, Artificial Sequence
  Description of Artificial Sequence: Synthetic peptide
  XENP019587 vhCDR3
TGWLGPFDY

SEQ ID NO: 4856 - protein, 12 aa, Artificial Sequence
  Description of Artificial Sequence: Synthetic peptide
  XENP019587 vlCDR1
RASQSVGSSYLA

SEQ ID NO: 4857 - protein, 7 aa, Artificial Sequence
  Description of Artificial Sequence: Synthetic peptide
  XENP019587 vlCDR2
GAFSRAT

SEQ ID NO: 4858 - protein, 9 aa, Artificial Sequence
  Description of Artificial Sequence: Synthetic peptide
  XENP019587 vlCDR3
QQYGSSPWT

SEQ ID NO: 4859 - protein, 246 aa, Artificial Sequence
  Description of Artificial Sequence: Synthetic polypeptide
  XENP019588 [CTLA-4]_H0_L0.117_scFv(GKPGS)4
QVQLVESGGGVVQPGRSLRLSCAASGFTFSSYTMHWVRQAPGKGLEWVTFISYDGNNKYYADSVKGRFTISRDNSKNTLYLQMNSLRAEDTAIYYCARTGWLGPFDYWGQGTLVTVSSGKPGSGKPGSGKPGSGKPGSEIVLTQSPGTLSLSPGERATLSCRASQSVGSSYLAWYQQKPGQAPRLLCYGAFSRATGIPDRFSCSGSGTDFTLTISRLEPEDFAVYYCQQYGSSPWTFGQGTKVEIK

SEQ ID NO: 4860 - protein, 118 aa, Artificial Sequence; identical to SEQ ID NO: 3737
  Description of Artificial Sequence: Synthetic polypeptide
  VH of XENP019588

SEQ ID NO: 4861 - protein, 108 aa, Artificial Sequence
  Description of Artificial Sequence: Synthetic polypeptide
  VL of XENP019588
EIVLTQSPGTLSLSPGERATLSCRASQSVGSSYLAWYQQKPGQAPRLLCYGAFSRATGIPDRFSCSGSGTDFTLTISRLEPEDFAVYYCQQYGSSPWTFGQGTKVEIK

SEQ ID NO: 4862 - protein, 5 aa, Artificial Sequence
  Description of Artificial Sequence: Synthetic peptide
  XENP019588 vhCDR1
SYTMH

SEQ ID NO: 4863 - protein, 17 aa, Artificial Sequence
  Description of Artificial Sequence: Synthetic peptide
  XENP019588 vhCDR2
FISYDGNNKYYADSVKG

SEQ ID NO: 4864 - protein, 9 aa, Artificial Sequence
  Description of Artificial Sequence: Synthetic peptide
  XENP019588 vhCDR3
TGWLGPFDY

SEQ ID NO: 4865 - protein, 12 aa, Artificial Sequence
  Description of Artificial Sequence: Synthetic peptide
  XENP019588 vlCDR1
RASQSVGSSYLA

SEQ ID NO: 4866 - protein, 7 aa, Artificial Sequence
  Description of Artificial Sequence: Synthetic peptide
  XENP019588 vlCDR2
GAFSRAT

SEQ ID NO: 4867 - protein, 9 aa, Artificial Sequence
  Description of Artificial Sequence: Synthetic peptide
  XENP019588 vlCDR3
QQYGSSPWT

SEQ ID NO: 4868 - protein, 246 aa, Artificial Sequence
  Description of Artificial Sequence: Synthetic polypeptide
  XENP019745 [CTLA-4]_H0.1_L0_scFv(GKPGS)4
EVQLVESGGGVVQPGRSLRLSCAASGFTFSSYTMHWVRQAPGKGLEWVTFISYDGNNKYYADSVKGRFTISRDNSKNTLYLQMNSLRAEDTAIYYCARTGWLGPFDYWGQGTLVTVSSGKPGSGKPGSGKPGSGKPGSEIVLTQSPGTLSLSPGERATLSCRASQSVGSSYLAWYQQKPGQAPRLLIYGAFSRATGIPDRFSGSGSGTDFTLTISRLEPEDFAVYYCQQYGSSPWTFGQGTKVEIK

SEQ ID NO: 4869 - protein, 118 aa, Artificial Sequence
  Description of Artificial Sequence: Synthetic polypeptide
  VH of XENP019745
EVQLVESGGGVVQPGRSLRLSCAASGFTFSSYTMHWVRQAPGKGLEWVTFISYDGNNKYYADSVKGRFTISRDNSKNTLYLQMNSLRAEDTAIYYCARTGWLGPFDYWGQGTLVTVSS

SEQ ID NO: 4870 - protein, 108 aa, Artificial Sequence; identical to SEQ ID NO: 3741
  Description of Artificial Sequence: Synthetic polypeptide
  VL of XENP019745

SEQ ID NO: 4871 - protein, 5 aa, Artificial Sequence
  Description of Artificial Sequence: Synthetic peptide
  XENP019745 vhCDR1
SYTMH

SEQ ID NO: 4872 - protein, 17 aa, Artificial Sequence
  Description of Artificial Sequence: Synthetic peptide
  XENP019745 vhCDR2
FISYDGNNKYYADSVKG

SEQ ID NO: 4873 - protein, 9 aa, Artificial Sequence
  Description of Artificial Sequence: Synthetic peptide
  XENP019745 vhCDR3
TGWLGPFDY

SEQ ID NO: 4874 - protein, 12 aa, Artificial Sequence
  Description of Artificial Sequence: Synthetic peptide
  XENP019745 vlCDR1
RASQSVGSSYLA

SEQ ID NO: 4875 - protein, 7 aa, Artificial Sequence
  Description of Artificial Sequence: Synthetic peptide
  XENP019745 vlCDR2
GAFSRAT

SEQ ID NO: 4876 - protein, 9 aa, Artificial Sequence
  Description of Artificial Sequence: Synthetic peptide
  XENP019745 vlCDR3
QQYGSSPWT

SEQ ID NO: 4877 - protein, 246 aa, Artificial Sequence
  Description of Artificial Sequence: Synthetic polypeptide
  XENP019746 [CTLA-4]_H0.2_L0_scFv(GKPGS)4
QVQLLESGGGVVQPGRSLRLSCAASGFTFSSYTMHWVRQAPGKGLEWVTFISYDGNNKYYADSVKGRFTISRDNSKNTLYLQMNSLRAEDTAIYYCARTGWLGPFDYWGQGTLVTVSSGKPGSGKPGSGKPGSGKPGSEIVLTQSPGTLSLSPGERATLSCRASQSVGSSYLAWYQQKPGQAPRLLIYGAFSRATGIPDRFSGSGSGTDFTLTISRLEPEDFAVYYCQQYGSSPWTFGQGTKVEIK

SEQ ID NO: 4878 - protein, 118 aa, Artificial Sequence
  Description of Artificial Sequence: Synthetic polypeptide
  VH of XENP019746
QVQLLESGGGVVQPGRSLRLSCAASGFTFSSYTMHWVRQAPGKGLEWVTFISYDGNNKYYADSVKGRFTISRDNSKNTLYLQMNSLRAEDTAIYYCARTGWLGPFDYWGQGTLVTVSS

SEQ ID NO: 4879 - protein, 108 aa, Artificial Sequence; identical to SEQ ID NO: 3741
  Description of Artificial Sequence: Synthetic polypeptide
  VL of XENP019746

SEQ ID NO: 4880 - protein, 5 aa, Artificial Sequence
  Description of Artificial Sequence: Synthetic peptide
  XENP019746 vhCDR1
SYTMH

SEQ ID NO: 4881 - protein, 17 aa, Artificial Sequence
  Description of Artificial Sequence: Synthetic peptide
  XENP019746 vhCDR2
FISYDGNNKYYADSVKG

SEQ ID NO: 4882 - protein, 9 aa, Artificial Sequence
  Description of Artificial Sequence: Synthetic peptide
  XENP019746 vhCDR3
TGWLGPFDY

SEQ ID NO: 4883 - protein, 12 aa, Artificial Sequence
  Description of Artificial Sequence: Synthetic peptide
  XENP019746 vlCDR1
RASQSVGSSYLA

SEQ ID NO: 4884 - protein, 7 aa, Artificial Sequence
  Description of Artificial Sequence: Synthetic peptide
  XENP019746 vlCDR2
GAFSRAT

SEQ ID NO: 4885 - protein, 9 aa, Artificial Sequence
  Description of Artificial Sequence: Synthetic peptide
  XENP019746 vlCDR3
QQYGSSPWT

SEQ ID NO: 4886 - protein, 246 aa, Artificial Sequence
  Description of Artificial Sequence: Synthetic polypeptide
  XENP019747 [CTLA-4]_H0.3_L0_scFv(GKPGS)4
QVQLVESGGGLVQPGRSLRLSCAASGFTFSSYTMHWVRQAPGKGLEWVTFISYDGNNKYYADSVKGRFTISRDNSKNTLYLQMNSLRAEDTAIYYCARTGWLGPFDYWGQGTLVTVSSGKPGSGKPGSGKPGSGKPGSEIVLTQSPGTLSLSPGERATLSCRASQSVGSSYLAWYQQKPGQAPRLLIYGAFSRATGIPDRFSGSGSGTDFTLTISRLEPEDFAVYYCQQYGSSPWTFGQGTKVEIK

SEQ ID NO: 4887 - protein, 118 aa, Artificial Sequence
  Description of Artificial Sequence: Synthetic polypeptide
  VH of XENP019747
QVQLVESGGGLVQPGRSLRLSCAASGFTFSSYTMHWVRQAPGKGLEWVTFISYDGNNKYYADSVKGRFTISRDNSKNTLYLQMNSLRAEDTAIYYCARTGWLGPFDYWGQGTLVTVSS

SEQ ID NO: 4888 - protein, 108 aa, Artificial Sequence; identical to SEQ ID NO: 3741
  Description of Artificial Sequence: Synthetic polypeptide
  VL of XENP019747

SEQ ID NO: 4889 - protein, 5 aa, Artificial Sequence
  Description of Artificial Sequence: Synthetic peptide
  XENP019747 vhCDR1
SYTMH

SEQ ID NO: 4890 - protein, 17 aa, Artificial Sequence
  Description of Artificial Sequence: Synthetic peptide
  XENP019747 vhCDR2
FISYDGNNKYYADSVKG

SEQ ID NO: 4891 - protein, 9 aa, Artificial Sequence
  Description of Artificial Sequence: Synthetic peptide
  XENP019747 vhCDR3
TGWLGPFDY

SEQ ID NO: 4892 - protein, 12 aa, Artificial Sequence
  Description of Artificial Sequence: Synthetic peptide
  XENP019747 vlCDR1
RASQSVGSSYLA

SEQ ID NO: 4893 - protein, 7 aa, Artificial Sequence
  Description of Artificial Sequence: Synthetic peptide
  XENP019747 vlCDR2
GAFSRAT

SEQ ID NO: 4894 - protein, 9 aa, Artificial Sequence
  Description of Artificial Sequence: Synthetic peptide
  XENP019747 vlCDR3
QQYGSSPWT

SEQ ID NO: 4895 - protein, 246 aa, Artificial Sequence
  Description of Artificial Sequence: Synthetic polypeptide
  XENP019748 [CTLA-4]_H0.4_L0_scFv(GKPGS)4
QVQLVESGGGVKQPGRSLRLSCAASGFTFSSYTMHWVRQAPGKGLEWVTFISYDGNNKYYADSVKGRFTISRDNSKNTLYLQMNSLRAEDTAIYYCARTGWLGPFDYWGQGTLVTVSSGKPGSGKPGSGKPGSGKPGSEIVLTQSPGTLSLSPGERATLSCRASQSVGSSYLAWYQQKPGQAPRLLIYGAFSRATGIPDRFSGSGSGTDFTLTISRLEPEDFAVYYCQQYGSSPWTFGQGTKVEIK

SEQ ID NO: 4896 - protein, 118 aa, Artificial Sequence
  Description of Artificial Sequence: Synthetic polypeptide
  VH of XENP019748
QVQLVESGGGVKQPGRSLRLSCAASGFTFSSYTMHWVRQAPGKGLEWVTFISYDGNNKYYADSVKGRFTISRDNSKNTLYLQMNSLRAEDTAIYYCARTGWLGPFDYWGQGTLVTVSS

SEQ ID NO: 4897 - protein, 108 aa, Artificial Sequence; identical to SEQ ID NO: 3741
  Description of Artificial Sequence: Synthetic polypeptide
  VL of XENP019748

SEQ ID NO: 4898 - protein, 5 aa, Artificial Sequence
  Description of Artificial Sequence: Synthetic peptide
  XENP019748 vhCDR1
SYTMH

SEQ ID NO: 4899 - protein, 17 aa, Artificial Sequence
  Description of Artificial Sequence: Synthetic peptide
  XENP019748 vhCDR2
FISYDGNNKYYADSVKG

SEQ ID NO: 4900 - protein, 9 aa, Artificial Sequence
  Description of Artificial Sequence: Synthetic peptide
  XENP019748 vhCDR3
TGWLGPFDY

SEQ ID NO: 4901 - protein, 12 aa, Artificial Sequence
  Description of Artificial Sequence: Synthetic peptide
  XENP019748 vlCDR1
RASQSVGSSYLA

SEQ ID NO: 4902 - protein, 7 aa, Artificial Sequence
  Description of Artificial Sequence: Synthetic peptide
  XENP019748 vlCDR2
GAFSRAT

SEQ ID NO: 4903 - protein, 9 aa, Artificial Sequence
  Description of Artificial Sequence: Synthetic peptide
  XENP019748 vlCDR3
QQYGSSPWT

SEQ ID NO: 4904 - protein, 246 aa, Artificial Sequence
  Description of Artificial Sequence: Synthetic polypeptide
  XENP019749 [CTLA-4]_H0.5_L0_scFv(GKPGS)4
QVQLVESGGGVKQPGESLRLSCAASGFTFSSYTMHWVRQAPGKGLEWVTFISYDGNNKYYADSVKGRFTISRDNSKNTLYLQMNSLRAEDTAIYYCARTGWLGPFDYWGQGTLVTVSSGKPGSGKPGSGKPGSGKPGSEIVLTQSPGTLSLSPGERATLSCRASQSVGSSYLAWYQQKPGQAPRLLIYGAFSRATGIPDRFSGSGSGTDFTLTISRLEPEDFAVYYCQQYGSSPWTFGQGTKVEIK

SEQ ID NO: 4905 - protein, 118 aa, Artificial Sequence
  Description of Artificial Sequence: Synthetic polypeptide
  VH of XENP019749
QVQLVESGGGVKQPGESLRLSCAASGFTFSSYTMHWVRQAPGKGLEWVTFISYDGNNKYYADSVKGRFTISRDNSKNTLYLQMNSLRAEDTAIYYCARTGWLGPFDYWGQGTLVTVSS

SEQ ID NO: 4906 - protein, 108 aa, Artificial Sequence; identical to SEQ ID NO: 3741
  Description of Artificial Sequence: Synthetic polypeptide
  VL of XENP019749

SEQ ID NO: 4907 - protein, 5 aa, Artificial Sequence
  Description of Artificial Sequence: Synthetic peptide
  XENP019749 vhCDR1
SYTMH

SEQ ID NO: 4908 - protein, 17 aa, Artificial Sequence
  Description of Artificial Sequence: Synthetic peptide
  XENP019749 vhCDR2
FISYDGNNKYYADSVKG

SEQ ID NO: 4909 - protein, 9 aa, Artificial Sequence
  Description of Artificial Sequence: Synthetic peptide
  XENP019749 vhCDR3
TGWLGPFDY

SEQ ID NO: 4910 - protein, 12 aa, Artificial Sequence
  Description of Artificial Sequence: Synthetic peptide
  XENP019749 vlCDR1
RASQSVGSSYLA

SEQ ID NO: 4911 - protein, 7 aa, Artificial Sequence
  Description of Artificial Sequence: Synthetic peptide
  XENP019749 vlCDR2
GAFSRAT

SEQ ID NO: 4912 - protein, 9 aa, Artificial Sequence
  Description of Artificial Sequence: Synthetic peptide
  XENP019749 vlCDR3
QQYGSSPWT

SEQ ID NO: 4913 - protein, 246 aa, Artificial Sequence
  Description of Artificial Sequence: Synthetic polypeptide
  XENP019750 [CTLA-4]_H0.6_L0_scFv(GKPGS)4
QVQLVESGGGVVKPGRSLRLSCAASGFTFSSYTMHWVRQAPGKGLEWVTFISYDGNNKYYADSVKGRFTISRDNSKNTLYLQMNSLRAEDTAIYYCARTGWLGPFDYWGQGTLVTVSSGKPGSGKPGSGKPGSGKPGSEIVLTQSPGTLSLSPGERATLSCRASQSVGSSYLAWYQQKPGQAPRLLIYGAFSRATGIPDRFSGSGSGTDFTLTISRLEPEDFAVYYCQQYGSSPWTFGQGTKVEIK

SEQ ID NO: 4914 - protein, 118 aa, Artificial Sequence
  Description of Artificial Sequence: Synthetic polypeptide
  VH of XENP019750
QVQLVESGGGVVKPGRSLRLSCAASGFTFSSYTMHWVRQAPGKGLEWVTFISYDGNNKYYADSVKGRFTISRDNSKNTLYLQMNSLRAEDTAIYYCARTGWLGPFDYWGQGTLVTVSS

SEQ ID NO: 4915 - protein, 108 aa, Artificial Sequence; identical to SEQ ID NO: 3741
  Description of Artificial Sequence: Synthetic polypeptide
  VL of XENP019750

SEQ ID NO: 4916 - protein, 5 aa, Artificial Sequence
  Description of Artificial Sequence: Synthetic peptide
  XENP019750 vhCDR1
SYTMH

SEQ ID NO: 4917 - protein, 17 aa, Artificial Sequence
  Description of Artificial Sequence: Synthetic peptide
  XENP019750 vhCDR2
FISYDGNNKYYADSVKG

SEQ ID NO: 4918 - protein, 9 aa, Artificial Sequence
  Description of Artificial Sequence: Synthetic peptide
  XENP019750 vhCDR3
TGWLGPFDY

SEQ ID NO: 4919 - protein, 12 aa, Artificial Sequence
  Description of Artificial Sequence: Synthetic peptide
  XENP019750 vlCDR1
RASQSVGSSYLA

SEQ ID NO: 4920 - protein, 7 aa, Artificial Sequence
  Description of Artificial Sequence: Synthetic peptide
  XENP019750 vlCDR2
GAFSRAT

SEQ ID NO: 4921 - protein, 9 aa, Artificial Sequence
  Description of Artificial Sequence: Synthetic peptide
  XENP019750 vlCDR3
QQYGSSPWT

SEQ ID NO: 4922 - protein, 246 aa, Artificial Sequence
  Description of Artificial Sequence: Synthetic polypeptide
  XENP019751 [CTLA-4]_H0.7_L0_scFv(GKPGS)4
QVQLVESGGGVVEPGRSLRLSCAASGFTFSSYTMHWVRQAPGKGLEWVTFISYDGNNKYYADSVKGRFTISRDNSKNTLYLQMNSLRAEDTAIYYCARTGWLGPFDYWGQGTLVTVSSGKPGSGKPGSGKPGSGKPGSEIVLTQSPGTLSLSPGERATLSCRASQSVGSSYLAWYQQKPGQAPRLLIYGAFSRATGIPDRFSGSGSGTDFTLTISRLEPEDFAVYYCQQYGSSPWTFGQGTKVEIK

SEQ ID NO: 4923 - protein, 118 aa, Artificial Sequence
  Description of Artificial Sequence: Synthetic polypeptide
  VH of XENP019751
QVQLVESGGGVVEPGRSLRLSCAASGFTFSSYTMHWVRQAPGKGLEWVTFISYDGNNKYYADSVKGRFTISRDNSKNTLYLQMNSLRAEDTAIYYCARTGWLGPFDYWGQGTLVTVSS

SEQ ID NO: 4924 - protein, 108 aa, Artificial Sequence; identical to SEQ ID NO: 3741
  Description of Artificial Sequence: Synthetic polypeptide
  VL of XENP019751

SEQ ID NO: 4925 - protein, 5 aa, Artificial Sequence
  Description of Artificial Sequence: Synthetic peptide
  XENP019751 vhCDR1
SYTMH

SEQ ID NO: 4926 - protein, 17 aa, Artificial Sequence
  Description of Artificial Sequence: Synthetic peptide
  XENP019751 vhCDR2
FISYDGNNKYYADSVKG

SEQ ID NO: 4927 - protein, 9 aa, Artificial Sequence
  Description of Artificial Sequence: Synthetic peptide
  XENP019751 vhCDR3
TGWLGPFDY

SEQ ID NO: 4928 - protein, 12 aa, Artificial Sequence
  Description of Artificial Sequence: Synthetic peptide
  XENP019751 vlCDR1
RASQSVGSSYLA

SEQ ID NO: 4929 - protein, 7 aa, Artificial Sequence
  Description of Artificial Sequence: Synthetic peptide
  XENP019751 vlCDR2
GAFSRAT

SEQ ID NO: 4930 - protein, 9 aa, Artificial Sequence
  Description of Artificial Sequence: Synthetic peptide
  XENP019751 vlCDR3
QQYGSSPWT

SEQ ID NO: 4931 - protein, 246 aa, Artificial Sequence
  Description of Artificial Sequence: Synthetic polypeptide
  XENP019752 [CTLA-4]_H0.8_L0_scFv(GKPGS)4
QVQLVESGGGVVQPGGSLRLSCAASGFTFSSYTMHWVRQAPGKGLEWVTFISYDGNNKYYADSVKGRFTISRDNSKNTLYLQMNSLRAEDTAIYYCARTGWLGPFDYWGQGTLVTVSSGKPGSGKPGSGKPGSGKPGSEIVLTQSPGTLSLSPGERATLSCRASQSVGSSYLAWYQQKPGQAPRLLIYGAFSRATGIPDRFSGSGSGTDFTLTISRLEPEDFAVYYCQQYGSSPWTFGQGTKVEIK

SEQ ID NO: 4932 - protein, 118 aa, Artificial Sequence
  Description of Artificial Sequence: Synthetic polypeptide
  VH of XENP019752
QVQLVESGGGVVQPGGSLRLSCAASGFTFSSYTMHWVRQAPGKGLEWVTFISYDGNNKYYADSVKGRFTISRDNSKNTLYLQMNSLRAEDTAIYYCARTGWLGPFDYWGQGTLVTVSS

SEQ ID NO: 4933 - protein, 108 aa, Artificial Sequence; identical to SEQ ID NO: 3741
  Description of Artificial Sequence: Synthetic polypeptide
  VL of XENP019752

SEQ ID NO: 4934 - protein, 5 aa, Artificial Sequence
  Description of Artificial Sequence: Synthetic peptide
  XENP019752 vhCDR1
SYTMH

SEQ ID NO: 4935 - protein, 17 aa, Artificial Sequence
  Description of Artificial Sequence: Synthetic peptide
  XENP019752 vhCDR2
FISYDGNNKYYADSVKG

SEQ ID NO: 4936 - protein, 9 aa, Artificial Sequence
  Description of Artificial Sequence: Synthetic peptide
  XENP019752 vhCDR3
TGWLGPFDY

SEQ ID NO: 4937 - protein, 12 aa, Artificial Sequence
  Description of Artificial Sequence: Synthetic peptide
  XENP019752 vlCDR1
RASQSVGSSYLA

SEQ ID NO: 4938 - protein, 7 aa, Artificial Sequence
  Description of Artificial Sequence: Synthetic peptide
  XENP019752 vlCDR2
GAFSRAT

SEQ ID NO: 4939 - protein, 9 aa, Artificial Sequence
  Description of Artificial Sequence: Synthetic peptide
  XENP019752 vlCDR3
QQYGSSPWT

SEQ ID NO: 4940 - protein, 246 aa, Artificial Sequence
  Description of Artificial Sequence: Synthetic polypeptide
  XENP019753 [CTLA-4]_H0.9_L0_scFv(GKPGS)4
QVQLVESGGGVVQPGESLRLSCAASGFTFSSYTMHWVRQAPGKGLEWVTFISYDGNNKYYADSVKGRFTISRDNSKNTLYLQMNSLRAEDTAIYYCARTGWLGPFDYWGQGTLVTVSSGKPGSGKPGSGKPGSGKPGSEIVLTQSPGTLSLSPGERATLSCRASQSVGSSYLAWYQQKPGQAPRLLIYGAFSRATGIPDRFSGSGSGTDFTLTISRLEPEDFAVYYCQQYGSSPWTFGQGTKVEIK

SEQ ID NO: 4941 - protein, 118 aa, Artificial Sequence
  Description of Artificial Sequence: Synthetic polypeptide
  VH of XENP019753
QVQLVESGGGVVQPGESLRLSCAASGFTFSSYTMHWVRQAPGKGLEWVTFISYDGNNKYYADSVKGRFTISRDNSKNTLYLQMNSLRAEDTAIYYCARTGWLGPFDYWGQGTLVTVSS

SEQ ID NO: 4942 - protein, 108 aa, Artificial Sequence; identical to SEQ ID NO: 3741
  Description of Artificial Sequence: Synthetic polypeptide
  VL of XENP019753

SEQ ID NO: 4943 - protein, 5 aa, Artificial Sequence
  Description of Artificial Sequence: Synthetic peptide
  XENP019753 vhCDR1
SYTMH

SEQ ID NO: 4944 - protein, 17 aa, Artificial Sequence
  Description of Artificial Sequence: Synthetic peptide
  XENP019753 vhCDR2
FISYDGNNKYYADSVKG

SEQ ID NO: 4945 - protein, 9 aa, Artificial Sequence
  Description of Artificial Sequence: Synthetic peptide
  XENP019753 vhCDR3
TGWLGPFDY

SEQ ID NO: 4946 - protein, 12 aa, Artificial Sequence
  Description of Artificial Sequence: Synthetic peptide
  XENP019753 vlCDR1
RASQSVGSSYLA

SEQ ID NO: 4947 - protein, 7 aa, Artificial Sequence
  Description of Artificial Sequence: Synthetic peptide
  XENP019753 vlCDR2
GAFSRAT

SEQ ID NO: 4948 - protein, 9 aa, Artificial Sequence
  Description of Artificial Sequence: Synthetic peptide
  XENP019753 vlCDR3
QQYGSSPWT

SEQ ID NO: 4949 - protein, 246 aa, Artificial Sequence
  Description of Artificial Sequence: Synthetic polypeptide
  XENP019754 [CTLA-4]_H0.10_L0_scFv(GKPGS)4
QVQLVESGGGVVQPGRSLKLSCAASGFTFSSYTMHWVRQAPGKGLEWVTFISYDGNNKYYADSVKGRFTISRDNSKNTLYLQMNSLRAEDTAIYYCARTGWLGPFDYWGQGTLVTVSSGKPGSGKPGSGKPGSGKPGSEIVLTQSPGTLSLSPGERATLSCRASQSVGSSYLAWYQQKPGQAPRLLIYGAFSRATGIPDRFSGSGSGTDFTLTISRLEPEDFAVYYCQQYGSSPWTFGQGTKVEIK

SEQ ID NO: 4950 - protein, 118 aa, Artificial Sequence
  Description of Artificial Sequence: Synthetic polypeptide
  VH of XENP019754
QVQLVESGGGVVQPGRSLKLSCAASGFTFSSYTMHWVRQAPGKGLEWVTFISYDGNNKYYADSVKGRFTISRDNSKNTLYLQMNSLRAEDTAIYYCARTGWLGPFDYWGQGTLVTVSS

SEQ ID NO: 4951 - protein, 108 aa, Artificial Sequence; identical to SEQ ID NO: 3741
  Description of Artificial Sequence: Synthetic polypeptide
  VL of XENP019754

SEQ ID NO: 4952 - protein, 5 aa, Artificial Sequence
  Description of Artificial Sequence: Synthetic peptide
  XENP019754 vhCDR1
SYTMH

SEQ ID NO: 4953 - protein, 17 aa, Artificial Sequence
  Description of Artificial Sequence: Synthetic peptide
  XENP019754 vhCDR2
FISYDGNNKYYADSVKG

SEQ ID NO: 4954 - protein, 9 aa, Artificial Sequence
  Description of Artificial Sequence: Synthetic peptide
  XENP019754 vhCDR3
TGWLGPFDY

SEQ ID NO: 4955 - protein, 12 aa, Artificial Sequence
  Description of Artificial Sequence: Synthetic peptide
  XENP019754 vlCDR1
RASQSVGSSYLA

SEQ ID NO: 4956 - protein, 7 aa, Artificial Sequence
  Description of Artificial Sequence: Synthetic peptide
  XENP019754 vlCDR2
GAFSRAT

SEQ ID NO: 4957 - protein, 9 aa, Artificial Sequence
  Description of Artificial Sequence: Synthetic peptide
  XENP019754 vlCDR3
QQYGSSPWT

SEQ ID NO: 4958 - protein, 246 aa, Artificial Sequence
  Description of Artificial Sequence: Synthetic polypeptide
  XENP019755 [CTLA-4]_H0.11_L0_scFv(GKPGS)4
QVQLVESGGGVVQPGRSLRLSCAASGFTVSSYTMHWVRQAPGKGLEWVTFISYDGNNKYYADSVKGRFTISRDNSKNTLYLQMNSLRAEDTAIYYCARTGWLGPFDYWGQGTLVTVSSGKPGSGKPGSGKPGSGKPGSEIVLTQSPGTLSLSPGERATLSCRASQSVGSSYLAWYQQKPGQAPRLLIYGAFSRATGIPDRFSGSGSGTDFTLTISRLEPEDFAVYYCQQYGSSPWTFGQGTKVEIK

SEQ ID NO: 4959 - protein, 118 aa, Artificial Sequence
  Description of Artificial Sequence: Synthetic polypeptide
  VH of XENP019755
QVQLVESGGGVVQPGRSLRLSCAASGFTVSSYTMHWVRQAPGKGLEWVTFISYDGNNKYYADSVKGRFTISRDNSKNTLYLQMNSLRAEDTAIYYCARTGWLGPFDYWGQGTLVTVSS

SEQ ID NO: 4960 - protein, 108 aa, Artificial Sequence; identical to SEQ ID NO: 3741
  Description of Artificial Sequence: Synthetic polypeptide
  VL of XENP019755

SEQ ID NO: 4961 - protein, 5 aa, Artificial Sequence
  Description of Artificial Sequence: Synthetic peptide
  XENP019755 vhCDR1
SYTMH

SEQ ID NO: 4962 - protein, 17 aa, Artificial Sequence
  Description of Artificial Sequence: Synthetic peptide
  XENP019755 vhCDR2
FISYDGNNKYYADSVKG

SEQ ID NO: 4963 - protein, 9 aa, Artificial Sequence
  Description of Artificial Sequence: Synthetic peptide
  XENP019755 vhCDR3
TGWLGPFDY

SEQ ID NO: 4964 - protein, 12 aa, Artificial Sequence
  Description of Artificial Sequence: Synthetic peptide
  XENP019755 vlCDR1
RASQSVGSSYLA

SEQ ID NO: 4965 - protein, 7 aa, Artificial Sequence
  Description of Artificial Sequence: Synthetic peptide
  XENP019755 vlCDR2
GAFSRAT

SEQ ID NO: 4966 - protein, 9 aa, Artificial Sequence
  Description of Artificial Sequence: Synthetic peptide
  XENP019755 vlCDR3
QQYGSSPWT

SEQ ID NO: 4967 - protein, 246 aa, Artificial Sequence
  Description of Artificial Sequence: Synthetic polypeptide
  XENP019756 [CTLA-4]_H0.12_L0_scFv(GKPGS)4
QVQLVESGGGVVQPGRSLRLSCAASGFTFSAYTMHWVRQAPGKGLEWVTFISYDGNNKYYADSVKGRFTISRDNSKNTLYLQMNSLRAEDTAIYYCARTGWLGPFDYWGQGTLVTVSSGKPGSGKPGSGKPGSGKPGSEIVLTQSPGTLSLSPGERATLSCRASQSVGSSYLAWYQQKPGQAPRLLIYGAFSRATGIPDRFSGSGSGTDFTLTISRLEPEDFAVYYCQQYGSSPWTFGQGTKVEIK

SEQ ID NO: 4968 - protein, 118 aa, Artificial Sequence
  Description of Artificial Sequence: Synthetic polypeptide
  VH of XENP019756
QVQLVESGGGVVQPGRSLRLSCAASGFTFSAYTMHWVRQAPGKGLEWVTFISYDGNNKYYADSVKGRFTISRDNSKNTLYLQMNSLRAEDTAIYYCARTGWLGPFDYWGQGTLVTVSS

SEQ ID NO: 4969 - protein, 108 aa, Artificial Sequence; identical to SEQ ID NO: 3741
  Description of Artificial Sequence: Synthetic polypeptide
  VL of XENP019756

SEQ ID NO: 4970 - protein, 5 aa, Artificial Sequence
  Description of Artificial Sequence: Synthetic peptide
  XENP019756 vhCDR1
AYTMH

SEQ ID NO: 4971 - protein, 17 aa, Artificial Sequence
  Description of Artificial Sequence: Synthetic peptide
  XENP019756 vhCDR2
FISYDGNNKYYADSVKG

SEQ ID NO: 4972 - protein, 9 aa, Artificial Sequence
  Description of Artificial Sequence: Synthetic peptide
  XENP019756 vhCDR3
TGWLGPFDY

SEQ ID NO: 4973 - protein, 12 aa, Artificial Sequence
  Description of Artificial Sequence: Synthetic peptide
  XENP019756 vlCDR1
RASQSVGSSYLA

SEQ ID NO: 4974 - protein, 7 aa, Artificial Sequence
  Description of Artificial Sequence: Synthetic peptide
  XENP019756 vlCDR2
GAFSRAT

SEQ ID NO: 4975 - protein, 9 aa, Artificial Sequence
  Description of Artificial Sequence: Synthetic peptide
  XENP019756 vlCDR3
QQYGSSPWT

SEQ ID NO: 4976 - protein, 246 aa, Artificial Sequence
  Description of Artificial Sequence: Synthetic polypeptide
  XENP019757 [CTLA-4]_H0.13_L0_scFv(GKPGS)4
QVQLVESGGGVVQPGRSLRLSCAASGFTFSDYTMHWVRQAPGKGLEWVTFISYDGNNKYYADSVKGRFTISRDNSKNTLYLQMNSLRAEDTAIYYCARTGWLGPFDYWGQGTLVTVSSGKPGSGKPGSGKPGSGKPGSEIVLTQSPGTLSLSPGERATLSCRASQSVGSSYLAWYQQKPGQAPRLLIYGAFSRATGIPDRFSGSGSGTDFTLTISRLEPEDFAVYYCQQYGSSPWTFGQGTKVEIK

SEQ ID NO: 4977 - protein, 118 aa, Artificial Sequence
  Description of Artificial Sequence: Synthetic polypeptide
  VH of XENP019757
QVQLVESGGGVVQPGRSLRLSCAASGFTFSDYTMHWVRQAPGKGLEWVTFISYDGNNKYYADSVKGRFTISRDNSKNTLYLQMNSLRAEDTAIYYCARTGWLGPFDYWGQGTLVTVSS

SEQ ID NO: 4978 - protein, 108 aa, Artificial Sequence; identical to SEQ ID NO: 3741
  Description of Artificial Sequence: Synthetic polypeptide
  VL of XENP019757

SEQ ID NO: 4979 - protein, 5 aa, Artificial Sequence
  Description of Artificial Sequence: Synthetic peptide
  XENP019757 vhCDR1
DYTMH

SEQ ID NO: 4980 - protein, 17 aa, Artificial Sequence
  Description of Artificial Sequence: Synthetic peptide
  XENP019757 vhCDR2
FISYDGNNKYYADSVKG

SEQ ID NO: 4981 - protein, 9 aa, Artificial Sequence
  Description of Artificial Sequence: Synthetic peptide
  XENP019757 vhCDR3
TGWLGPFDY

SEQ ID NO: 4982 - protein, 12 aa, Artificial Sequence
  Description of Artificial Sequence: Synthetic peptide
  XENP019757 vlCDR1
RASQSVGSSYLA

SEQ ID NO: 4983 - protein, 7 aa, Artificial Sequence
  Description of Artificial Sequence: Synthetic peptide
  XENP019757 vlCDR2
GAFSRAT

SEQ ID NO: 4984 - protein, 9 aa, Artificial Sequence
  Description of Artificial Sequence: Synthetic peptide
  XENP019757 vlCDR3
QQYGSSPWT

SEQ ID NO: 4985 - protein, 246 aa, Artificial Sequence
  Description of Artificial Sequence: Synthetic polypeptide
  XENP019758 [CTLA-4]_H0.14_L0_scFv(GKPGS)4
QVQLVESGGGVVQPGRSLRLSCAASGFTFSGYTMHWVRQAPGKGLEWVTFISYDGNNKYYADSVKGRFTISRDNSKNTLYLQMNSLRAEDTAIYYCARTGWLGPFDYWGQGTLVTVSSGKPGSGKPGSGKPGSGKPGSEIVLTQSPGTLSLSPGERATLSCRASQSVGSSYLAWYQQKPGQAPRLLIYGAFSRATGIPDRFSGSGSGTDFTLTISRLEPEDFAVYYCQQYGSSPWTFGQGTKVEIK

SEQ ID NO: 4986 - protein, 118 aa, Artificial Sequence
  Description of Artificial Sequence: Synthetic polypeptide
  VH of XENP019758
QVQLVESGGGVVQPGRSLRLSCAASGFTFSGYTMHWVRQAPGKGLEWVTFISYDGNNKYYADSVKGRFTISRDNSKNTLYLQMNSLRAEDTAIYYCARTGWLGPFDYWGQGTLVTVSS

SEQ ID NO: 4987 - protein, 108 aa, Artificial Sequence; identical to SEQ ID NO: 3741
  Description of Artificial Sequence: Synthetic polypeptide
  VL of XENP019758

SEQ ID NO: 4988 - protein, 5 aa, Artificial Sequence
  Description of Artificial Sequence: Synthetic peptide
  XENP019758 vhCDR1
GYTMH

SEQ ID NO: 4989 - protein, 17 aa, Artificial Sequence
  Description of Artificial Sequence: Synthetic peptide
  XENP019758 vhCDR2
FISYDGNNKYYADSVKG

SEQ ID NO: 4990 - protein, 9 aa, Artificial Sequence
  Description of Artificial Sequence: Synthetic peptide
  XENP019758 vhCDR3
TGWLGPFDY

SEQ ID NO: 4991 - protein, 12 aa, Artificial Sequence
  Description of Artificial Sequence: Synthetic peptide
  XENP019758 vlCDR1
RASQSVGSSYLA

SEQ ID NO: 4992 - protein, 7 aa, Artificial Sequence
  Description of Artificial Sequence: Synthetic peptide
  XENP019758 vlCDR2
GAFSRAT

SEQ ID NO: 4993 - protein, 9 aa, Artificial Sequence
  Description of Artificial Sequence: Synthetic peptide
  XENP019758 vlCDR3
QQYGSSPWT

SEQ ID NO: 4994 - protein, 246 aa, Artificial Sequence
  Description of Artificial Sequence: Synthetic polypeptide
  XENP019759 [CTLA-4]_H0.15_L0_scFv(GKPGS)4
QVQLVESGGGVVQPGRSLRLSCAASGFTFSNYTMHWVRQAPGKGLEWVTFISYDGNNKYYADSVKGRFTISRDNSKNTLYLQMNSLRAEDTAIYYCARTGWLGPFDYWGQGTLVTVSSGKPGSGKPGSGKPGSGKPGSEIVLTQSPGTLSLSPGERATLSCRASQSVGSSYLAWYQQKPGQAPRLLIYGAFSRATGIPDRFSGSGSGTDFTLTISRLEPEDFAVYYCQQYGSSPWTFGQGTKVEIK

SEQ ID NO: 4995 - protein, 118 aa, Artificial Sequence
  Description of Artificial Sequence: Synthetic polypeptide
  VH of XENP019759
QVQLVESGGGVVQPGRSLRLSCAASGFTFSNYTMHWVRQAPGKGLEWVTFISYDGNNKYYADSVKGRFTISRDNSKNTLYLQMNSLRAEDTAIYYCARTGWLGPFDYWGQGTLVTVSS

SEQ ID NO: 4996 - protein, 108 aa, Artificial Sequence; identical to SEQ ID NO: 3741
  Description of Artificial Sequence: Synthetic polypeptide
  VL of XENP019759

SEQ ID NO: 4997 - protein, 5 aa, Artificial Sequence
  Description of Artificial Sequence: Synthetic peptide
  XENP019759 vhCDR1
NYTMH

SEQ ID NO: 4998 - protein, 17 aa, Artificial Sequence
  Description of Artificial Sequence: Synthetic peptide
  XENP019759 vhCDR2
FISYDGNNKYYADSVKG

SEQ ID NO: 4999 - protein, 9 aa, Artificial Sequence
  Description of Artificial Sequence: Synthetic peptide
  XENP019759 vhCDR3
TGWLGPFDY

SEQ ID NO: 5000 - protein, 12 aa, Artificial Sequence
  Description of Artificial Sequence: Synthetic peptide
  XENP019759 vlCDR1
RASQSVGSSYLA

SEQ ID NO: 5001 - protein, 7 aa, Artificial Sequence
  Description of Artificial Sequence: Synthetic peptide
  XENP019759 vlCDR2
GAFSRAT

SEQ ID NO: 5002 - protein, 9 aa, Artificial Sequence
  Description of Artificial Sequence: Synthetic peptide
  XENP019759 vlCDR3
QQYGSSPWT

SEQ ID NO: 5003 - protein, 246 aa, Artificial Sequence
  Description of Artificial Sequence: Synthetic polypeptide
  XENP019760 [CTLA-4]_H0.16_L0_scFv(GKPGS)4
QVQLVESGGGVVQPGRSLRLSCAASGFTFSQYTMHWVRQAPGKGLEWVTFISYDGNNKYYADSVKGRFTISRDNSKNTLYLQMNSLRAEDTAIYYCARTGWLGPFDYWGQGTLVTVSSGKPGSGKPGSGKPGSGKPGSEIVLTQSPGTLSLSPGERATLSCRASQSVGSSYLAWYQQKPGQAPRLLIYGAFSRATGIPDRFSGSGSGTDFTLTISRLEPEDFAVYYCQQYGSSPWTFGQGTKVEIK

SEQ ID NO: 5004 - protein, 118 aa, Artificial Sequence
  Description of Artificial Sequence: Synthetic polypeptide
  VH of XENP019760
QVQLVESGGGVVQPGRSLRLSCAASGFTFSQYTMHWVRQAPGKGLEWVTFISYDGNNKYYADSVKGRFTISRDNSKNTLYLQMNSLRAEDTAIYYCARTGWLGPFDYWGQGTLVTVSS

SEQ ID NO: 5005 - protein, 108 aa, Artificial Sequence; identical to SEQ ID NO: 3741
  Description of Artificial Sequence: Synthetic polypeptide
  VL of XENP019760

SEQ ID NO: 5006 - protein, 5 aa, Artificial Sequence
  Description of Artificial Sequence: Synthetic peptide
  XENP019760 vhCDR1
QYTMH

SEQ ID NO: 5007 - protein, 17 aa, Artificial Sequence
  Description of Artificial Sequence: Synthetic peptide
  XENP019760 vhCDR2
FISYDGNNKYYADSVKG

SEQ ID NO: 5008 - protein, 9 aa, Artificial Sequence
  Description of Artificial Sequence: Synthetic peptide
  XENP019760 vhCDR3
TGWLGPFDY

SEQ ID NO: 5009 - protein, 12 aa, Artificial Sequence
  Description of Artificial Sequence: Synthetic peptide
  XENP019760 vlCDR1
RASQSVGSSYLA

SEQ ID NO: 5010 - protein, 7 aa, Artificial Sequence
  Description of Artificial Sequence: Synthetic peptide
  XENP019760 vlCDR2
GAFSRAT

SEQ ID NO: 5011 - protein, 9 aa, Artificial Sequence
  Description of Artificial Sequence: Synthetic peptide
  XENP019760 vlCDR3
QQYGSSPWT

SEQ ID NO: 5012 - protein, 246 aa, Artificial Sequence
  Description of Artificial Sequence: Synthetic polypeptide
  XENP019761 [CTLA-4]_H0.17_L0_scFv(GKPGS)4
QVQLVESGGGVVQPGRSLRLSCAASGFTFSTYTMHWVRQAPGKGLEWVTFISYDGNNKYYADSVKGRFTISRDNSKNTLYLQMNSLRAEDTAIYYCARTGWLGPFDYWGQGTLVTVSSGKPGSGKPGSGKPGSGKPGSEIVLTQSPGTLSLSPGERATLSCRASQSVGSSYLAWYQQKPGQAPRLLIYGAFSRATGIPDRFSGSGSGTDFTLTISRLEPEDFAVYYCQQYGSSPWTFGQGTKVEIK

SEQ ID NO: 5013 - protein, 118 aa, Artificial Sequence
  Description of Artificial Sequence: Synthetic polypeptide
  VH of XENP019761
QVQLVESGGGVVQPGRSLRLSCAASGFTFSTYTMHWVRQAPGKGLEWVTFISYDGNNKYYADSVKGRFTISRDNSKNTLYLQMNSLRAEDTAIYYCARTGWLGPFDYWGQGTLVTVSS

SEQ ID NO: 5014 - protein, 108 aa, Artificial Sequence; identical to SEQ ID NO: 3741
  Description of Artificial Sequence: Synthetic polypeptide
  VL of XENP019761

SEQ ID NO: 5015 - protein, 5 aa, Artificial Sequence
  Description of Artificial Sequence: Synthetic peptide
  XENP019761 vhCDR1
TYTMH

SEQ ID NO: 5016 - protein, 17 aa, Artificial Sequence
  Description of Artificial Sequence: Synthetic peptide
  XENP019761 vhCDR2
FISYDGNNKYYADSVKG

SEQ ID NO: 5017 - protein, 9 aa, Artificial Sequence
  Description of Artificial Sequence: Synthetic peptide
  XENP019761 vhCDR3
TGWLGPFDY

SEQ ID NO: 5018 - protein, 12 aa, Artificial Sequence
  Description of Artificial Sequence: Synthetic peptide
  XENP019761 vlCDR1
RASQSVGSSYLA

SEQ ID NO: 5019 - protein, 7 aa, Artificial Sequence
  Description of Artificial Sequence: Synthetic peptide
  XENP019761 vlCDR2
GAFSRAT

SEQ ID NO: 5020 - protein, 9 aa, Artificial Sequence
  Description of Artificial Sequence: Synthetic peptide
  XENP019761 vlCDR3
QQYGSSPWT

SEQ ID NO: 5021 - protein, 246 aa, Artificial Sequence
  Description of Artificial Sequence: Synthetic polypeptide
  XENP019762 [CTLA-4]_H0.18_L0_scFv(GKPGS)4
QVQLVESGGGVVQPGRSLRLSCAASGFTFSSATMHWVRQAPGKGLEWVTFISYDGNNKYYADSVKGRFTISRDNSKNTLYLQMNSLRAEDTAIYYCARTGWLGPFDYWGQGTLVTVSSGKPGSGKPGSGKPGSGKPGSEIVLTQSPGTLSLSPGERATLSCRASQSVGSSYLAWYQQKPGQAPRLLIYGAFSRATGIPDRFSGSGSGTDFTLTISRLEPEDFAVYYCQQYGSSPWTFGQGTKVEIK

SEQ ID NO: 5022 - protein, 118 aa, Artificial Sequence
  Description of Artificial Sequence: Synthetic polypeptide
  VH of XENP019762
QVQLVESGGGVVQPGRSLRLSCAASGFTFSSATMHWVRQAPGKGLEWVTFISYDGNNKYYADSVKGRFTISRDNSKNTLYLQMNSLRAEDTAIYYCARTGWLGPFDYWGQGTLVTVSS

SEQ ID NO: 5023 - protein, 108 aa, Artificial Sequence; identical to SEQ ID NO: 3741
  Description of Artificial Sequence: Synthetic polypeptide
  VL of XENP019762

SEQ ID NO: 5024 - protein, 5 aa, Artificial Sequence
  Description of Artificial Sequence: Synthetic peptide
  XENP019762 vhCDR1
SATMH

SEQ ID NO: 5025 - protein, 17 aa, Artificial Sequence
  Description of Artificial Sequence: Synthetic peptide
  XENP019762 vhCDR2
FISYDGNNKYYADSVKG

SEQ ID NO: 5026 - protein, 9 aa, Artificial Sequence
  Description of Artificial Sequence: Synthetic peptide
  XENP019762 vhCDR3
TGWLGPFDY

SEQ ID NO: 5027 - protein, 12 aa, Artificial Sequence
  Description of Artificial Sequence: Synthetic peptide
  XENP019762 vlCDR1
RASQSVGSSYLA

SEQ ID NO: 5028 - protein, 7 aa, Artificial Sequence
  Description of Artificial Sequence: Synthetic peptide
  XENP019762 vlCDR2
GAFSRAT

SEQ ID NO: 5029 - protein, 9 aa, Artificial Sequence
  Description of Artificial Sequence: Synthetic peptide
  XENP019762 vlCDR3
QQYGSSPWT

SEQ ID NO: 5030 - protein, 246 aa, Artificial Sequence
  Description of Artificial Sequence: Synthetic polypeptide
  XENP019763 [CTLA-4]_H0.19_L0_scFv(GKPGS)4
QVQLVESGGGVVQPGRSLRLSCAASGFTFSSHTMHWVRQAPGKGLEWVTFISYDGNNKYYADSVKGRFTISRDNSKNTLYLQMNSLRAEDTAIYYCARTGWLGPFDYWGQGTLVTVSSGKPGSGKPGSGKPGSGKPGSEIVLTQSPGTLSLSPGERATLSCRASQSVGSSYLAWYQQKPGQAPRLLIYGAFSRATGIPDRFSGSGSGTDFTLTISRLEPEDFAVYYCQQYGSSPWTFGQGTKVEIK

SEQ ID NO: 5031 - protein, 118 aa, Artificial Sequence
  Description of Artificial Sequence: Synthetic polypeptide
  VH of XENP019763
QVQLVESGGGVVQPGRSLRLSCAASGFTFSSHTMHWVRQAPGKGLEWVTFISYDGNNKYYADSVKGRFTISRDNSKNTLYLQMNSLRAEDTAIYYCARTGWLGPFDYWGQGTLVTVSS

SEQ ID NO: 5032 - protein, 108 aa, Artificial Sequence; identical to SEQ ID NO: 3741
  Description of Artificial Sequence: Synthetic polypeptide
  VL of XENP019763

SEQ ID NO: 5033 - protein, 5 aa, Artificial Sequence
  Description of Artificial Sequence: Synthetic peptide
  XENP019763 vhCDR1
SHTMH

SEQ ID NO: 5034 - protein, 17 aa, Artificial Sequence
  Description of Artificial Sequence: Synthetic peptide
  XENP019763 vhCDR2
FISYDGNNKYYADSVKG

SEQ ID NO: 5035 - protein, 9 aa, Artificial Sequence
  Description of Artificial Sequence: Synthetic peptide
  XENP019763 vhCDR3
TGWLGPFDY

SEQ ID NO: 5036 - protein, 12 aa, Artificial Sequence
  Description of Artificial Sequence: Synthetic peptide
  XENP019763 vlCDR1
RASQSVGSSYLA

SEQ ID NO: 5037 - protein, 7 aa, Artificial Sequence
  Description of Artificial Sequence: Synthetic peptide
  XENP019763 vlCDR2
GAFSRAT

SEQ ID NO: 5038 - protein, 9 aa, Artificial Sequence
  Description of Artificial Sequence: Synthetic peptide
  XENP019763 vlCDR3
QQYGSSPWT

SEQ ID NO: 5039 - protein, 246 aa, Artificial Sequence
  Description of Artificial Sequence: Synthetic polypeptide
  XENP019764 [CTLA-4]_H0.20_L0_scFv(GKPGS)4
QVQLVESGGGVVQPGRSLRLSCAASGFTFSSFTMHWVRQAPGKGLEWVTFISYDGNNKYYADSVKGRFTISRDNSKNTLYLQMNSLRAEDTAIYYCARTGWLGPFDYWGQGTLVTVSSGKPGSGKPGSGKPGSGKPGSEIVLTQSPGTLSLSPGERATLSCRASQSVGSSYLAWYQQKPGQAPRLLIYGAFSRATGIPDRFSGSGSGTDFTLTISRLEPEDFAVYYCQQYGSSPWTFGQGTKVEIK

SEQ ID NO: 5040 - protein, 118 aa, Artificial Sequence
  Description of Artificial Sequence: Synthetic polypeptide
  VH of XENP019764
QVQLVESGGGVVQPGRSLRLSCAASGFTFSSFTMHWVRQAPGKGLEWVTFISYDGNNKYYADSVKGRFTISRDNSKNTLYLQMNSLRAEDTAIYYCARTGWLGPFDYWGQGTLVTVSS

SEQ ID NO: 5041 - protein, 108 aa, Artificial Sequence; identical to SEQ ID NO: 3741
  Description of Artificial Sequence: Synthetic polypeptide
  VL of XENP019764

SEQ ID NO: 5042 - protein, 5 aa, Artificial Sequence
  Description of Artificial Sequence: Synthetic peptide
  XENP019764 vhCDR1
SFTMH

SEQ ID NO: 5043 - protein, 17 aa, Artificial Sequence
  Description of Artificial Sequence: Synthetic peptide
  XENP019764 vhCDR2
FISYDGNNKYYADSVKG

SEQ ID NO: 5044 - protein, 9 aa, Artificial Sequence
  Description of Artificial Sequence: Synthetic peptide
  XENP019764 vhCDR3
TGWLGPFDY

SEQ ID NO: 5045 - protein, 12 aa, Artificial Sequence
  Description of Artificial Sequence: Synthetic peptide
  XENP019764 vlCDR1
RASQSVGSSYLA

SEQ ID NO: 5046 - protein, 7 aa, Artificial Sequence
  Description of Artificial Sequence: Synthetic peptide
  XENP019764 vlCDR2
GAFSRAT

SEQ ID NO: 5047 - protein, 9 aa, Artificial Sequence
  Description of Artificial Sequence: Synthetic peptide
  XENP019764 vlCDR3
QQYGSSPWT

SEQ ID NO: 5048 - protein, 246 aa, Artificial Sequence
  Description of Artificial Sequence: Synthetic polypeptide
  XENP019765 [CTLA-4]_H0.21_L0_scFv(GKPGS)4
QVQLVESGGGVVQPGRSLRLSCAASGFTFSSLTMHWVRQAPGKGLEWVTFISYDGNNKYYADSVKGRFTISRDNSKNTLYLQMNSLRAEDTAIYYCARTGWLGPFDYWGQGTLVTVSSGKPGSGKPGSGKPGSGKPGSEIVLTQSPGTLSLSPGERATLSCRASQSVGSSYLAWYQQKPGQAPRLLIYGAFSRATGIPDRFSGSGSGTDFTLTISRLEPEDFAVYYCQQYGSSPWTFGQGTKVEIK

SEQ ID NO: 5049 - protein, 118 aa, Artificial Sequence
  Description of Artificial Sequence: Synthetic polypeptide
  VH of XENP019765
QVQLVESGGGVVQPGRSLRLSCAASGFTFSSLTMHWVRQAPGKGLEWVTFISYDGNNKYYADSVKGRFTISRDNSKNTLYLQMNSLRAEDTAIYYCARTGWLGPFDYWGQGTLVTVSS

SEQ ID NO: 5050 - protein, 108 aa, Artificial Sequence; identical to SEQ ID NO: 3741
  Description of Artificial Sequence: Synthetic polypeptide
  VL of XENP019765

SEQ ID NO: 5051 - protein, 5 aa, Artificial Sequence
  Description of Artificial Sequence: Synthetic peptide
  XENP019765 vhCDR1
SLTMH

SEQ ID NO: 5052 - protein, 17 aa, Artificial Sequence
  Description of Artificial Sequence: Synthetic peptide
  XENP019765 vhCDR2
FISYDGNNKYYADSVKG

SEQ ID NO: 5053 - protein, 9 aa, Artificial Sequence
  Description of Artificial Sequence: Synthetic peptide
  XENP019765 vhCDR3
TGWLGPFDY

SEQ ID NO: 5054 - protein, 12 aa, Artificial Sequence
  Description of Artificial Sequence: Synthetic peptide
  XENP019765 vlCDR1
RASQSVGSSYLA

SEQ ID NO: 5055 - protein, 7 aa, Artificial Sequence
  Description of Artificial Sequence: Synthetic peptide
  XENP019765 vlCDR2
GAFSRAT

SEQ ID NO: 5056 - protein, 9 aa, Artificial Sequence
  Description of Artificial Sequence: Synthetic peptide
  XENP019765 vlCDR3
QQYGSSPWT

SEQ ID NO: 5057 - protein, 246 aa, Artificial Sequence
  Description of Artificial Sequence: Synthetic polypeptide
  XENP019766 [CTLA-4]_H0.22_L0_scFv(GKPGS)4
QVQLVESGGGVVQPGRSLRLSCAASGFTFSSNTMHWVRQAPGKGLEWVTFISYDGNNKYYADSVKGRFTISRDNSKNTLYLQMNSLRAEDTAIYYCARTGWLGPFDYWGQGTLVTVSSGKPGSGKPGSGKPGSGKPGSEIVLTQSPGTLSLSPGERATLSCRASQSVGSSYLAWYQQKPGQAPRLLIYGAFSRATGIPDRFSGSGSGTDFTLTISRLEPEDFAVYYCQQYGSSPWTFGQGTKVEIK

SEQ ID NO: 5058 - protein, 118 aa, Artificial Sequence
  Description of Artificial Sequence: Synthetic polypeptide
  VH of XENP019766
QVQLVESGGGVVQPGRSLRLSCAASGFTFSSNTMHWVRQAPGKGLEWVTFISYDGNNKYYADSVKGRFTISRDNSKNTLYLQMNSLRAEDTAIYYCARTGWLGPFDYWGQGTLVTVSS

SEQ ID NO: 5059 - protein, 108 aa, Artificial Sequence; identical to SEQ ID NO: 3741
  Description of Artificial Sequence: Synthetic polypeptide
  VL of XENP019766

SEQ ID NO: 5060 - protein, 5 aa, Artificial Sequence
  Description of Artificial Sequence: Synthetic peptide
  XENP019766 vhCDR1
SNTMH

SEQ ID NO: 5061 - protein, 17 aa, Artificial Sequence
  Description of Artificial Sequence: Synthetic peptide
  XENP019766 vhCDR2
FISYDGNNKYYADSVKG

SEQ ID NO: 5062 - protein, 9 aa, Artificial Sequence
  Description of Artificial Sequence: Synthetic peptide
  XENP019766 vhCDR3
TGWLGPFDY

SEQ ID NO: 5063 - protein, 12 aa, Artificial Sequence
  Description of Artificial Sequence: Synthetic peptide
  XENP019766 vlCDR1
RASQSVGSSYLA

SEQ ID NO: 5064 - protein, 7 aa, Artificial Sequence
  Description of Artificial Sequence: Synthetic peptide
  XENP019766 vlCDR2
GAFSRAT

SEQ ID NO: 5065 - protein, 9 aa, Artificial Sequence
  Description of Artificial Sequence: Synthetic peptide
  XENP019766 vlCDR3
QQYGSSPWT

SEQ ID NO: 5066 - protein, 246 aa, Artificial Sequence
  Description of Artificial Sequence: Synthetic polypeptide
  XENP019767 [CTLA-4]_H0.23_L0_scFv(GKPGS)4
QVQLVESGGGVVQPGRSLRLSCAASGFTFSSSTMHWVRQAPGKGLEWVTFISYDGNNKYYADSVKGRFTISRDNSKNTLYLQMNSLRAEDTAIYYCARTGWLGPFDYWGQGTLVTVSSGKPGSGKPGSGKPGSGKPGSEIVLTQSPGTLSLSPGERATLSCRASQSVGSSYLAWYQQKPGQAPRLLIYGAFSRATGIPDRFSGSGSGTDFTLTISRLEPEDFAVYYCQQYGSSPWTFGQGTKVEIK

SEQ ID NO: 5067 - protein, 118 aa, Artificial Sequence
  Description of Artificial Sequence: Synthetic polypeptide
  VH of XENP019767
QVQLVESGGGVVQPGRSLRLSCAASGFTFSSSTMHWVRQAPGKGLEWVTFISYDGNNKYYADSVKGRFTISRDNSKNTLYLQMNSLRAEDTAIYYCARTGWLGPFDYWGQGTLVTVSS

SEQ ID NO: 5068 - protein, 108 aa, Artificial Sequence; identical to SEQ ID NO: 3741
  Description of Artificial Sequence: Synthetic polypeptide
  VL of XENP019767

SEQ ID NO: 5069 - protein, 5 aa, Artificial Sequence
  Description of Artificial Sequence: Synthetic peptide
  XENP019767 vhCDR1
SSTMH

SEQ ID NO: 5070 - protein, 17 aa, Artificial Sequence
  Description of Artificial Sequence: Synthetic peptide
  XENP019767 vhCDR2
FISYDGNNKYYADSVKG

SEQ ID NO: 5071 - protein, 9 aa, Artificial Sequence
  Description of Artificial Sequence: Synthetic peptide
  XENP019767 vhCDR3
TGWLGPFDY

SEQ ID NO: 5072 - protein, 12 aa, Artificial Sequence
  Description of Artificial Sequence: Synthetic peptide
  XENP019767 vlCDR1
RASQSVGSSYLA

SEQ ID NO: 5073 - protein, 7 aa, Artificial Sequence
  Description of Artificial Sequence: Synthetic peptide
  XENP019767 vlCDR2
GAFSRAT

SEQ ID NO: 5074 - protein, 9 aa, Artificial Sequence
  Description of Artificial Sequence: Synthetic peptide
  XENP019767 vlCDR3
QQYGSSPWT

SEQ ID NO: 5075 - protein, 246 aa, Artificial Sequence
  Description of Artificial Sequence: Synthetic polypeptide
  XENP019768 [CTLA-4]_H0.24_L0_scFv(GKPGS)4
QVQLVESGGGVVQPGRSLRLSCAASGFTFSSVTMHWVRQAPGKGLEWVTFISYDGNNKYYADSVKGRFTISRDNSKNTLYLQMNSLRAEDTAIYYCARTGWLGPFDYWGQGTLVTVSSGKPGSGKPGSGKPGSGKPGSEIVLTQSPGTLSLSPGERATLSCRASQSVGSSYLAWYQQKPGQAPRLLIYGAFSRATGIPDRFSGSGSGTDFTLTISRLEPEDFAVYYCQQYGSSPWTFGQGTKVEIK

SEQ ID NO: 5076 - protein, 118 aa, Artificial Sequence
  Description of Artificial Sequence: Synthetic polypeptide
  VH of XENP019768
QVQLVESGGGVVQPGRSLRLSCAASGFTFSSVTMHWVRQAPGKGLEWVTFISYDGNNKYYADSVKGRFTISRDNSKNTLYLQMNSLRAEDTAIYYCARTGWLGPFDYWGQGTLVTVSS

SEQ ID NO: 5077 - protein, 108 aa, Artificial Sequence; identical to SEQ ID NO: 3741
  Description of Artificial Sequence: Synthetic polypeptide
  VL of XENP019768

SEQ ID NO: 5078 - protein, 5 aa, Artificial Sequence
  Description of Artificial Sequence: Synthetic peptide
  XENP019768 vhCDR1
SVTMH

SEQ ID NO: 5079 - protein, 17 aa, Artificial Sequence
  Description of Artificial Sequence: Synthetic peptide
  XENP019768 vhCDR2
FISYDGNNKYYADSVKG

SEQ ID NO: 5080 - protein, 9 aa, Artificial Sequence
  Description of Artificial Sequence: Synthetic peptide
  XENP019768 vhCDR3
TGWLGPFDY

SEQ ID NO: 5081 - protein, 12 aa, Artificial Sequence
  Description of Artificial Sequence: Synthetic peptide
  XENP019768 vlCDR1
RASQSVGSSYLA

SEQ ID NO: 5082 - protein, 7 aa, Artificial Sequence
  Description of Artificial Sequence: Synthetic peptide
  XENP019768 vlCDR2
GAFSRAT

SEQ ID NO: 5083 - protein, 9 aa, Artificial Sequence
  Description of Artificial Sequence: Synthetic peptide
  XENP019768 vlCDR3
QQYGSSPWT

SEQ ID NO: 5084 - protein, 246 aa, Artificial Sequence
  Description of Artificial Sequence: Synthetic polypeptide
  XENP019769 [CTLA-4]_H0.25_L0_scFv(GKPGS)4
QVQLVESGGGVVQPGRSLRLSCAASGFTFSSYAMHWVRQAPGKGLEWVTFISYDGNNKYYADSVKGRFTISRDNSKNTLYLQMNSLRAEDTAIYYCARTGWLGPFDYWGQGTLVTVSSGKPGSGKPGSGKPGSGKPGSEIVLTQSPGTLSLSPGERATLSCRASQSVGSSYLAWYQQKPGQAPRLLIYGAFSRATGIPDRFSGSGSGTDFTLTISRLEPEDFAVYYCQQYGSSPWTFGQGTKVEIK

SEQ ID NO: 5085 - protein, 118 aa, Artificial Sequence
  Description of Artificial Sequence: Synthetic polypeptide
  VH of XENP019769
QVQLVESGGGVVQPGRSLRLSCAASGFTFSSYAMHWVRQAPGKGLEWVTFISYDGNNKYYADSVKGRFTISRDNSKNTLYLQMNSLRAEDTAIYYCARTGWLGPFDYWGQGTLVTVSS

SEQ ID NO: 5086 - protein, 108 aa, Artificial Sequence; identical to SEQ ID NO: 3741
  Description of Artificial Sequence: Synthetic polypeptide
  VL of XENP019769

SEQ ID NO: 5087 - protein, 5 aa, Artificial Sequence
  Description of Artificial Sequence: Synthetic peptide
  XENP019769 vhCDR1
SYAMH

SEQ ID NO: 5088 - protein, 17 aa, Artificial Sequence
  Description of Artificial Sequence: Synthetic peptide
  XENP019769 vhCDR2
FISYDGNNKYYADSVKG

SEQ ID NO: 5089 - protein, 9 aa, Artificial Sequence
  Description of Artificial Sequence: Synthetic peptide
  XENP019769 vhCDR3
TGWLGPFDY

SEQ ID NO: 5090 - protein, 12 aa, Artificial Sequence
  Description of Artificial Sequence: Synthetic peptide
  XENP019769 vlCDR1
RASQSVGSSYLA

SEQ ID NO: 5091 - protein, 7 aa, Artificial Sequence
  Description of Artificial Sequence: Synthetic peptide
  XENP019769 vlCDR2
GAFSRAT

SEQ ID NO: 5092 - protein, 9 aa, Artificial Sequence
  Description of Artificial Sequence: Synthetic peptide
  XENP019769 vlCDR3
QQYGSSPWT

SEQ ID NO: 5093 - protein, 246 aa, Artificial Sequence
  Description of Artificial Sequence: Synthetic polypeptide
  XENP019770 [CTLA-4]_H0.26_L0_scFv(GKPGS)4
QVQLVESGGGVVQPGRSLRLSCAASGFTFSSYGMHWVRQAPGKGLEWVTFISYDGNNKYYADSVKGRFTISRDNSKNTLYLQMNSLRAEDTAIYYCARTGWLGPFDYWGQGTLVTVSSGKPGSGKPGSGKPGSGKPGSEIVLTQSPGTLSLSPGERATLSCRASQSVGSSYLAWYQQKPGQAPRLLIYGAFSRATGIPDRFSGSGSGTDFTLTISRLEPEDFAVYYCQQYGSSPWTFGQGTKVEIK

SEQ ID NO: 5094 - protein, 118 aa, Artificial Sequence
  Description of Artificial Sequence: Synthetic polypeptide
  VH of XENP019770
QVQLVESGGGVVQPGRSLRLSCAASGFTFSSYGMHWVRQAPGKGLEWVTFISYDGNNKYYADSVKGRFTISRDNSKNTLYLQMNSLRAEDTAIYYCARTGWLGPFDYWGQGTLVTVSS

SEQ ID NO: 5095 - protein, 108 aa, Artificial Sequence; identical to SEQ ID NO: 3741
  Description of Artificial Sequence: Synthetic polypeptide
  VL of XENP019770

SEQ ID NO: 5096 - protein, 5 aa, Artificial Sequence
  Description of Artificial Sequence: Synthetic peptide
  XENP019770 vhCDR1
SYGMH

SEQ ID NO: 5097 - protein, 17 aa, Artificial Sequence
  Description of Artificial Sequence: Synthetic peptide
  XENP019770 vhCDR2
FISYDGNNKYYADSVKG

SEQ ID NO: 5098 - protein, 9 aa, Artificial Sequence
  Description of Artificial Sequence: Synthetic peptide
  XENP019770 vhCDR3
TGWLGPFDY

SEQ ID NO: 5099 - protein, 12 aa, Artificial Sequence
  Description of Artificial Sequence: Synthetic peptide
  XENP019770 vlCDR1
RASQSVGSSYLA

SEQ ID NO: 5100 - protein, 7 aa, Artificial Sequence
  Description of Artificial Sequence: Synthetic peptide
  XENP019770 vlCDR2
GAFSRAT

SEQ ID NO: 5101 - protein, 9 aa, Artificial Sequence
  Description of Artificial Sequence: Synthetic peptide
  XENP019770 vlCDR3
QQYGSSPWT

SEQ ID NO: 5102 - protein, 246 aa, Artificial Sequence
  Description of Artificial Sequence: Synthetic polypeptide
  XENP019771 [CTLA-4]_H0.27_L0_scFv(GKPGS)4
QVQLVESGGGVVQPGRSLRLSCAASGFTFSSYSMHWVRQAPGKGLEWVTFISYDGNNKYYADSVKGRFTISRDNSKNTLYLQMNSLRAEDTAIYYCARTGWLGPFDYWGQGTLVTVSSGKPGSGKPGSGKPGSGKPGSEIVLTQSPGTLSLSPGERATLSCRASQSVGSSYLAWYQQKPGQAPRLLIYGAFSRATGIPDRFSGSGSGTDFTLTISRLEPEDFAVYYCQQYGSSPWTFGQGTKVEIK

SEQ ID NO: 5103 - protein, 118 aa, Artificial Sequence
  Description of Artificial Sequence: Synthetic polypeptide
  VH of XENP019771
QVQLVESGGGVVQPGRSLRLSCAASGFTFSSYSMHWVRQAPGKGLEWVTFISYDGNNKYYADSVKGRFTISRDNSKNTLYLQMNSLRAEDTAIYYCARTGWLGPFDYWGQGTLVTVSS

SEQ ID NO: 5104 - protein, 108 aa, Artificial Sequence; identical to SEQ ID NO: 3741
  Description of Artificial Sequence: Synthetic polypeptide
  VL of XENP019771

SEQ ID NO: 5105 - protein, 5 aa, Artificial Sequence
  Description of Artificial Sequence: Synthetic peptide
  XENP019771 vhCDR1
SYSMH

SEQ ID NO: 5106 - protein, 17 aa, Artificial Sequence
  Description of Artificial Sequence: Synthetic peptide
  XENP019771 vhCDR2
FISYDGNNKYYADSVKG

SEQ ID NO: 5107 - protein, 9 aa, Artificial Sequence
  Description of Artificial Sequence: Synthetic peptide
  XENP019771 vhCDR3
TGWLGPFDY

SEQ ID NO: 5108 - protein, 12 aa, Artificial Sequence
  Description of Artificial Sequence: Synthetic peptide
  XENP019771 vlCDR1
RASQSVGSSYLA

SEQ ID NO: 5109 - protein, 7 aa, Artificial Sequence
  Description of Artificial Sequence: Synthetic peptide
  XENP019771 vlCDR2
GAFSRAT

SEQ ID NO: 5110 - protein, 9 aa, Artificial Sequence
  Description of Artificial Sequence: Synthetic peptide
  XENP019771 vlCDR3
QQYGSSPWT

SEQ ID NO: 5111 - protein, 246 aa, Artificial Sequence
  Description of Artificial Sequence: Synthetic polypeptide
  XENP019772 [CTLA-4]_H0.28_L0_scFv(GKPGS)4
QVQLVESGGGVVQPGRSLRLSCAASGFTFSSYVMHWVRQAPGKGLEWVTFISYDGNNKYYADSVKGRFTISRDNSKNTLYLQMNSLRAEDTAIYYCARTGWLGPFDYWGQGTLVTVSSGKPGSGKPGSGKPGSGKPGSEIVLTQSPGTLSLSPGERATLSCRASQSVGSSYLAWYQQKPGQAPRLLIYGAFSRATGIPDRFSGSGSGTDFTLTISRLEPEDFAVYYCQQYGSSPWTFGQGTKVEIK

SEQ ID NO: 5112 - protein, 118 aa, Artificial Sequence
  Description of Artificial Sequence: Synthetic polypeptide
  VH of XENP019772
QVQLVESGGGVVQPGRSLRLSCAASGFTFSSYVMHWVRQAPGKGLEWVTFISYDGNNKYYADSVKGRFTISRDNSKNTLYLQMNSLRAEDTAIYYCARTGWLGPFDYWGQGTLVTVSS

SEQ ID NO: 5113 - protein, 108 aa, Artificial Sequence; identical to SEQ ID NO: 3741
  Description of Artificial Sequence: Synthetic polypeptide
  VL of XENP019772

SEQ ID NO: 5114 - protein, 5 aa, Artificial Sequence
  Description of Artificial Sequence: Synthetic peptide
  XENP019772 vhCDR1
SYVMH

SEQ ID NO: 5115 - protein, 17 aa, Artificial Sequence
  Description of Artificial Sequence: Synthetic peptide
  XENP019772 vhCDR2
FISYDGNNKYYADSVKG

SEQ ID NO: 5116 - protein, 9 aa, Artificial Sequence
  Description of Artificial Sequence: Synthetic peptide
  XENP019772 vhCDR3
TGWLGPFDY

SEQ ID NO: 5117 - protein, 12 aa, Artificial Sequence
  Description of Artificial Sequence: Synthetic peptide
  XENP019772 vlCDR1
RASQSVGSSYLA

SEQ ID NO: 5118 - protein, 7 aa, Artificial Sequence
  Description of Artificial Sequence: Synthetic peptide
  XENP019772 vlCDR2
GAFSRAT

SEQ ID NO: 5119 - protein, 9 aa, Artificial Sequence
  Description of Artificial Sequence: Synthetic peptide
  XENP019772 vlCDR3
QQYGSSPWT

SEQ ID NO: 5120 - protein, 246 aa, Artificial Sequence
  Description of Artificial Sequence: Synthetic polypeptide
  XENP019773 [CTLA-4]_H0.29_L0_scFv(GKPGS)4
QVQLVESGGGVVQPGRSLRLSCAASGFTFSSYYMHWVRQAPGKGLEWVTFISYDGNNKYYADSVKGRFTISRDNSKNTLYLQMNSLRAEDTAIYYCARTGWLGPFDYWGQGTLVTVSSGKPGSGKPGSGKPGSGKPGSEIVLTQSPGTLSLSPGERATLSCRASQSVGSSYLAWYQQKPGQAPRLLIYGAFSRATGIPDRFSGSGSGTDFTLTISRLEPEDFAVYYCQQYGSSPWTFGQGTKVEIK

SEQ ID NO: 5121 - protein, 118 aa, Artificial Sequence
  Description of Artificial Sequence: Synthetic polypeptide
  VH of XENP019773
QVQLVESGGGVVQPGRSLRLSCAASGFTFSSYYMHWVRQAPGKGLEWVTFISYDGNNKYYADSVKGRFTISRDNSKNTLYLQMNSLRAEDTAIYYCARTGWLGPFDYWGQGTLVTVSS

SEQ ID NO: 5122 - protein, 108 aa, Artificial Sequence; identical to SEQ ID NO: 3741
  Description of Artificial Sequence: Synthetic polypeptide
  VL of XENP019773

SEQ ID NO: 5123 - protein, 5 aa, Artificial Sequence
  Description of Artificial Sequence: Synthetic peptide
  XENP019773 vhCDR1
SYYMH

SEQ ID NO: 5124 - protein, 17 aa, Artificial Sequence
  Description of Artificial Sequence: Synthetic peptide
  XENP019773 vhCDR2
FISYDGNNKYYADSVKG

SEQ ID NO: 5125 - protein, 9 aa, Artificial Sequence
  Description of Artificial Sequence: Synthetic peptide
  XENP019773 vhCDR3
TGWLGPFDY

SEQ ID NO: 5126 - protein, 12 aa, Artificial Sequence
  Description of Artificial Sequence: Synthetic peptide
  XENP019773 vlCDR1
RASQSVGSSYLA

SEQ ID NO: 5127 - protein, 7 aa, Artificial Sequence
  Description of Artificial Sequence: Synthetic peptide
  XENP019773 vlCDR2
GAFSRAT

SEQ ID NO: 5128 - protein, 9 aa, Artificial Sequence
  Description of Artificial Sequence: Synthetic peptide
  XENP019773 vlCDR3
QQYGSSPWT

SEQ ID NO: 5129 - protein, 246 aa, Artificial Sequence
  Description of Artificial Sequence: Synthetic polypeptide
  XENP019774 [CTLA-4]_H0.30_L0_scFv(GKPGS)4
QVQLVESGGGVVQPGRSLRLSCAASGFTFSSYTMDWVRQAPGKGLEWVTFISYDGNNKYYADSVKGRFTISRDNSKNTLYLQMNSLRAEDTAIYYCARTGWLGPFDYWGQGTLVTVSSGKPGSGKPGSGKPGSGKPGSEIVLTQSPGTLSLSPGERATLSCRASQSVGSSYLAWYQQKPGQAPRLLIYGAFSRATGIPDRFSGSGSGTDFTLTISRLEPEDFAVYYCQQYGSSPWTFGQGTKVEIK

SEQ ID NO: 5130 - protein, 118 aa, Artificial Sequence
  Description of Artificial Sequence: Synthetic polypeptide
  VH of XENP019774
QVQLVESGGGVVQPGRSLRLSCAASGFTFSSYTMDWVRQAPGKGLEWVTFISYDGNNKYYADSVKGRFTISRDNSKNTLYLQMNSLRAEDTAIYYCARTGWLGPFDYWGQGTLVTVSS

SEQ ID NO: 5131 - protein, 108 aa, Artificial Sequence; identical to SEQ ID NO: 3741
  Description of Artificial Sequence: Synthetic polypeptide
  VL of XENP019774

SEQ ID NO: 5132 - protein, 5 aa, Artificial Sequence
  Description of Artificial Sequence: Synthetic peptide
  XENP019774 vhCDR1
SYTMD

SEQ ID NO: 5133 - protein, 17 aa, Artificial Sequence
  Description of Artificial Sequence: Synthetic peptide
  XENP019774 vhCDR2
FISYDGNNKYYADSVKG

SEQ ID NO: 5134 - protein, 9 aa, Artificial Sequence
  Description of Artificial Sequence: Synthetic peptide
  XENP019774 vhCDR3
TGWLGPFDY

SEQ ID NO: 5135 - protein, 12 aa, Artificial Sequence
  Description of Artificial Sequence: Synthetic peptide
  XENP019774 vlCDR1
RASQSVGSSYLA

SEQ ID NO: 5136 - protein, 7 aa, Artificial Sequence
  Description of Artificial Sequence: Synthetic peptide
  XENP019774 vlCDR2
GAFSRAT

SEQ ID NO: 5137 - protein, 9 aa, Artificial Sequence
  Description of Artificial Sequence: Synthetic peptide
  XENP019774 vlCDR3
QQYGSSPWT

SEQ ID NO: 5138 - protein, 246 aa, Artificial Sequence
  Description of Artificial Sequence: Synthetic polypeptide
  XENP019775 [CTLA-4]_H0.31_L0_scFv(GKPGS)4
QVQLVESGGGVVQPGRSLRLSCAASGFTFSSYTMFWVRQAPGKGLEWVTFISYDGNNKYYADSVKGRFTISRDNSKNTLYLQMNSLRAEDTAIYYCARTGWLGPFDYWGQGTLVTVSSGKPGSGKPGSGKPGSGKPGSEIVLTQSPGTLSLSPGERATLSCRASQSVGSSYLAWYQQKPGQAPRLLIYGAFSRATGIPDRFSGSGSGTDFTLTISRLEPEDFAVYYCQQYGSSPWTFGQGTKVEIK

SEQ ID NO: 5139 - protein, 118 aa, Artificial Sequence
  Description of Artificial Sequence: Synthetic polypeptide
  VH of XENP019775
QVQLVESGGGVVQPGRSLRLSCAASGFTFSSYTMFWVRQAPGKGLEWVTFISYDGNNKYYADSVKGRFTISRDNSKNTLYLQMNSLRAEDTAIYYCARTGWLGPFDYWGQGTLVTVSS

SEQ ID NO: 5140 - protein, 108 aa, Artificial Sequence; identical to SEQ ID NO: 3741
  Description of Artificial Sequence: Synthetic polypeptide
  VL of XENP019775

SEQ ID NO: 5141 - protein, 5 aa, Artificial Sequence
  Description of Artificial Sequence: Synthetic peptide
  XENP019775 vhCDR1
SYTMF

SEQ ID NO: 5142 - protein, 17 aa, Artificial Sequence
  Description of Artificial Sequence: Synthetic peptide
  XENP019775 vhCDR2
FISYDGNNKYYADSVKG

SEQ ID NO: 5143 - protein, 9 aa, Artificial Sequence
  Description of Artificial Sequence: Synthetic peptide
  XENP019775 vhCDR3
TGWLGPFDY

SEQ ID NO: 5144 - protein, 12 aa, Artificial Sequence
  Description of Artificial Sequence: Synthetic peptide
  XENP019775 vlCDR1
RASQSVGSSYLA

SEQ ID NO: 5145 - protein, 7 aa, Artificial Sequence
  Description of Artificial Sequence: Synthetic peptide
  XENP019775 vlCDR2
GAFSRAT

SEQ ID NO: 5146 - protein, 9 aa, Artificial Sequence
  Description of Artificial Sequence: Synthetic peptide
  XENP019775 vlCDR3
QQYGSSPWT

SEQ ID NO: 5147 - protein, 246 aa, Artificial Sequence
  Description of Artificial Sequence: Synthetic polypeptide
  XENP019776 [CTLA-4]_H0.32_L0_scFv(GKPGS)4
QVQLVESGGGVVQPGRSLRLSCAASGFTFSSYTMNWVRQAPGKGLEWVTFISYDGNNKYYADSVKGRFTISRDNSKNTLYLQMNSLRAEDTAIYYCARTGWLGPFDYWGQGTLVTVSSGKPGSGKPGSGKPGSGKPGSEIVLTQSPGTLSLSPGERATLSCRASQSVGSSYLAWYQQKPGQAPRLLIYGAFSRATGIPDRFSGSGSGTDFTLTISRLEPEDFAVYYCQQYGSSPWTFGQGTKVEIK

SEQ ID NO: 5148 - protein, 118 aa, Artificial Sequence
  Description of Artificial Sequence: Synthetic polypeptide
  VH of XENP019776
QVQLVESGGGVVQPGRSLRLSCAASGFTFSSYTMNWVRQAPGKGLEWVTFISYDGNNKYYADSVKGRFTISRDNSKNTLYLQMNSLRAEDTAIYYCARTGWLGPFDYWGQGTLVTVSS

SEQ ID NO: 5149 - protein, 108 aa, Artificial Sequence; identical to SEQ ID NO: 3741
  Description of Artificial Sequence: Synthetic polypeptide
  VL of XENP019776

SEQ ID NO: 5150 - protein, 5 aa, Artificial Sequence
  Description of Artificial Sequence: Synthetic peptide
  XENP019776 vhCDR1
SYTMN

SEQ ID NO: 5151 - protein, 17 aa, Artificial Sequence
  Description of Artificial Sequence: Synthetic peptide
  XENP019776 vhCDR2
FISYDGNNKYYADSVKG

SEQ ID NO: 5152 - protein, 9 aa, Artificial Sequence
  Description of Artificial Sequence: Synthetic peptide
  XENP019776 vhCDR3
TGWLGPFDY

SEQ ID NO: 5153 - protein, 12 aa, Artificial Sequence
  Description of Artificial Sequence: Synthetic peptide
  XENP019776 vlCDR1
RASQSVGSSYLA

SEQ ID NO: 5154 - protein, 7 aa, Artificial Sequence
  Description of Artificial Sequence: Synthetic peptide
  XENP019776 vlCDR2
GAFSRAT

SEQ ID NO: 5155 - protein, 9 aa, Artificial Sequence
  Description of Artificial Sequence: Synthetic peptide
  XENP019776 vlCDR3
QQYGSSPWT

SEQ ID NO: 5156 - protein, 246 aa, Artificial Sequence
  Description of Artificial Sequence: Synthetic polypeptide
  XENP019777 [CTLA-4]_H0.33_L0_scFv(GKPGS)4
QVQLVESGGGVVQPGRSLRLSCAASGFTFSSYTMSWVRQAPGKGLEWVTFISYDGNNKYYADSVKGRFTISRDNSKNTLYLQMNSLRAEDTAIYYCARTGWLGPFDYWGQGTLVTVSSGKPGSGKPGSGKPGSGKPGSEIVLTQSPGTLSLSPGERATLSCRASQSVGSSYLAWYQQKPGQAPRLLIYGAFSRATGIPDRFSGSGSGTDFTLTISRLEPEDFAVYYCQQYGSSPWTFGQGTKVEIK

SEQ ID NO: 5157 - protein, 118 aa, Artificial Sequence
  Description of Artificial Sequence: Synthetic polypeptide
  VH of XENP019777
QVQLVESGGGVVQPGRSLRLSCAASGFTFSSYTMSWVRQAPGKGLEWVTFISYDGNNKYYADSVKGRFTISRDNSKNTLYLQMNSLRAEDTAIYYCARTGWLGPFDYWGQGTLVTVSS

SEQ ID NO: 5158 - protein, 108 aa, Artificial Sequence; identical to SEQ ID NO: 3741
  Description of Artificial Sequence: Synthetic polypeptide
  VL of XENP019777

SEQ ID NO: 5159 - protein, 5 aa, Artificial Sequence
  Description of Artificial Sequence: Synthetic peptide
  XENP019777 vhCDR1
SYTMS

SEQ ID NO: 5160 - protein, 17 aa, Artificial Sequence
  Description of Artificial Sequence: Synthetic peptide
  XENP019777 vhCDR2
FISYDGNNKYYADSVKG

SEQ ID NO: 5161 - protein, 9 aa, Artificial Sequence
  Description of Artificial Sequence: Synthetic peptide
  XENP019777 vhCDR3
TGWLGPFDY

SEQ ID NO: 5162 - protein, 12 aa, Artificial Sequence
  Description of Artificial Sequence: Synthetic peptide
  XENP019777 vlCDR1
RASQSVGSSYLA

SEQ ID NO: 5163 - protein, 7 aa, Artificial Sequence
  Description of Artificial Sequence: Synthetic peptide
  XENP019777 vlCDR2
GAFSRAT

SEQ ID NO: 5164 - protein, 9 aa, Artificial Sequence
  Description of Artificial Sequence: Synthetic peptide
  XENP019777 vlCDR3
QQYGSSPWT

SEQ ID NO: 5165 - protein, 246 aa, Artificial Sequence
  Description of Artificial Sequence: Synthetic polypeptide
  XENP019778 [CTLA-4]_H0.34_L0_scFv(GKPGS)4
QVQLVESGGGVVQPGRSLRLSCAASGFTFSSYTMYWVRQAPGKGLEWVTFISYDGNNKYYADSVKGRFTISRDNSKNTLYLQMNSLRAEDTAIYYCARTGWLGPFDYWGQGTLVTVSSGKPGSGKPGSGKPGSGKPGSEIVLTQSPGTLSLSPGERATLSCRASQSVGSSYLAWYQQKPGQAPRLLIYGAFSRATGIPDRFSGSGSGTDFTLTISRLEPEDFAVYYCQQYGSSPWTFGQGTKVEIK

SEQ ID NO: 5166 - protein, 118 aa, Artificial Sequence
  Description of Artificial Sequence: Synthetic polypeptide
  VH of XENP019778
QVQLVESGGGVVQPGRSLRLSCAASGFTFSSYTMYWVRQAPGKGLEWVTFISYDGNNKYYADSVKGRFTISRDNSKNTLYLQMNSLRAEDTAIYYCARTGWLGPFDYWGQGTLVTVSS

SEQ ID NO: 5167 - protein, 108 aa, Artificial Sequence; identical to SEQ ID NO: 3741
  Description of Artificial Sequence: Synthetic polypeptide
  VL of XENP019778

SEQ ID NO: 5168 - protein, 5 aa, Artificial Sequence
  Description of Artificial Sequence: Synthetic peptide
  XENP019778 vhCDR1
SYTMY

SEQ ID NO: 5169 - protein, 17 aa, Artificial Sequence
  Description of Artificial Sequence: Synthetic peptide
  XENP019778 vhCDR2
FISYDGNNKYYADSVKG

SEQ ID NO: 5170 - protein, 9 aa, Artificial Sequence
  Description of Artificial Sequence: Synthetic peptide
  XENP019778 vhCDR3
TGWLGPFDY

SEQ ID NO: 5171 - protein, 12 aa, Artificial Sequence
  Description of Artificial Sequence: Synthetic peptide
  XENP019778 vlCDR1
RASQSVGSSYLA

SEQ ID NO: 5172 - protein, 7 aa, Artificial Sequence
  Description of Artificial Sequence: Synthetic peptide
  XENP019778 vlCDR2
GAFSRAT

SEQ ID NO: 5173 - protein, 9 aa, Artificial Sequence
  Description of Artificial Sequence: Synthetic peptide
  XENP019778 vlCDR3
QQYGSSPWT

SEQ ID NO: 5174 - protein, 246 aa, Artificial Sequence
  Description of Artificial Sequence: Synthetic polypeptide
  XENP019779 [CTLA-4]_H0.35_L0_scFv(GKPGS)4
QVQLVESGGGVVQPGRSLRLSCAASGFTFSSYTMHWIRQAPGKGLEWVTFISYDGNNKYYADSVKGRFTISRDNSKNTLYLQMNSLRAEDTAIYYCARTGWLGPFDYWGQGTLVTVSSGKPGSGKPGSGKPGSGKPGSEIVLTQSPGTLSLSPGERATLSCRASQSVGSSYLAWYQQKPGQAPRLLIYGAFSRATGIPDRFSGSGSGTDFTLTISRLEPEDFAVYYCQQYGSSPWTFGQGTKVEIK

SEQ ID NO: 5175 - protein, 118 aa, Artificial Sequence
  Description of Artificial Sequence: Synthetic polypeptide
  VH of XENP019779
QVQLVESGGGVVQPGRSLRLSCAASGFTFSSYTMHWIRQAPGKGLEWVTFISYDGNNKYYADSVKGRFTISRDNSKNTLYLQMNSLRAEDTAIYYCARTGWLGPFDYWGQGTLVTVSS

SEQ ID NO: 5176 - protein, 108 aa, Artificial Sequence; identical to SEQ ID NO: 3741
  Description of Artificial Sequence: Synthetic polypeptide
  VL of XENP019779

SEQ ID NO: 5177 - protein, 5 aa, Artificial Sequence
  Description of Artificial Sequence: Synthetic peptide
  XENP019779 vhCDR1
SYTMH

SEQ ID NO: 5178 - protein, 17 aa, Artificial Sequence
  Description of Artificial Sequence: Synthetic peptide
  XENP019779 vhCDR2
FISYDGNNKYYADSVKG

SEQ ID NO: 5179 - protein, 9 aa, Artificial Sequence
  Description of Artificial Sequence: Synthetic peptide
  XENP019779 vhCDR3
TGWLGPFDY

SEQ ID NO: 5180 - protein, 12 aa, Artificial Sequence
  Description of Artificial Sequence: Synthetic peptide
  XENP019779 vlCDR1
RASQSVGSSYLA

SEQ ID NO: 5181 - protein, 7 aa, Artificial Sequence
  Description of Artificial Sequence: Synthetic peptide
  XENP019779 vlCDR2
GAFSRAT

SEQ ID NO: 5182 - protein, 9 aa, Artificial Sequence
  Description of Artificial Sequence: Synthetic peptide
  XENP019779 vlCDR3
QQYGSSPWT

SEQ ID NO: 5183 - protein, 246 aa, Artificial Sequence
  Description of Artificial Sequence: Synthetic polypeptide
  XENP019780 [CTLA-4]_H0.36_L0_scFv(GKPGS)4
QVQLVESGGGVVQPGRSLRLSCAASGFTFSSYTMHWVRKAPGKGLEWVTFISYDGNNKYYADSVKGRFTISRDNSKNTLYLQMNSLRAEDTAIYYCARTGWLGPFDYWGQGTLVTVSSGKPGSGKPGSGKPGSGKPGSEIVLTQSPGTLSLSPGERATLSCRASQSVGSSYLAWYQQKPGQAPRLLIYGAFSRATGIPDRFSGSGSGTDFTLTISRLEPEDFAVYYCQQYGSSPWTFGQGTKVEIK

SEQ ID NO: 5184 - protein, 118 aa, Artificial Sequence; identical to SEQ ID NO: 4707
  Description of Artificial Sequence: Synthetic polypeptide
  VH of XENP019780

SEQ ID NO: 5185 - protein, 108 aa, Artificial Sequence; identical to SEQ ID NO: 3741
  Description of Artificial Sequence: Synthetic polypeptide
  VL of XENP019780

SEQ ID NO: 5186 - protein, 5 aa, Artificial Sequence
  Description of Artificial Sequence: Synthetic peptide
  XENP019780 vhCDR1
SYTMH

SEQ ID NO: 5187 - protein, 17 aa, Artificial Sequence
  Description of Artificial Sequence: Synthetic peptide
  XENP019780 vhCDR2
FISYDGNNKYYADSVKG

SEQ ID NO: 5188 - protein, 9 aa, Artificial Sequence
  Description of Artificial Sequence: Synthetic peptide
  XENP019780 vhCDR3
TGWLGPFDY

SEQ ID NO: 5189 - protein, 12 aa, Artificial Sequence
  Description of Artificial Sequence: Synthetic peptide
  XENP019780 vlCDR1
RASQSVGSSYLA

SEQ ID NO: 5190 - protein, 7 aa, Artificial Sequence
  Description of Artificial Sequence: Synthetic peptide
  XENP019780 vlCDR2
GAFSRAT

SEQ ID NO: 5191 - protein, 9 aa, Artificial Sequence
  Description of Artificial Sequence: Synthetic peptide
  XENP019780 vlCDR3
QQYGSSPWT

SEQ ID NO: 5192 - protein, 246 aa, Artificial Sequence
  Description of Artificial Sequence: Synthetic polypeptide
  XENP019781 [CTLA-4]_H0.37_L0_scFv(GKPGS)4
QVQLVESGGGVVQPGRSLRLSCAASGFTFSSYTMHWVRQAPGKRLEWVTFISYDGNNKYYADSVKGRFTISRDNSKNTLYLQMNSLRAEDTAIYYCARTGWLGPFDYWGQGTLVTVSSGKPGSGKPGSGKPGSGKPGSEIVLTQSPGTLSLSPGERATLSCRASQSVGSSYLAWYQQKPGQAPRLLIYGAFSRATGIPDRFSGSGSGTDFTLTISRLEPEDFAVYYCQQYGSSPWTFGQGTKVEIK

SEQ ID NO: 5193 - protein, 118 aa, Artificial Sequence; identical to SEQ ID NO: 4725
  Description of Artificial Sequence: Synthetic polypeptide
  VH of XENP019781

SEQ ID NO: 5194 - protein, 108 aa, Artificial Sequence; identical to SEQ ID NO: 3741
  Description of Artificial Sequence: Synthetic polypeptide
  VL of XENP019781

SEQ ID NO: 5195 - protein, 5 aa, Artificial Sequence
  Description of Artificial Sequence: Synthetic peptide
  XENP019781 vhCDR1
SYTMH

SEQ ID NO: 5196 - protein, 17 aa, Artificial Sequence
  Description of Artificial Sequence: Synthetic peptide
  XENP019781 vhCDR2
FISYDGNNKYYADSVKG

SEQ ID NO: 5197 - protein, 9 aa, Artificial Sequence
  Description of Artificial Sequence: Synthetic peptide
  XENP019781 vhCDR3
TGWLGPFDY

SEQ ID NO: 5198 - protein, 12 aa, Artificial Sequence
  Description of Artificial Sequence: Synthetic peptide
  XENP019781 vlCDR1
RASQSVGSSYLA

SEQ ID NO: 5199 - protein, 7 aa, Artificial Sequence
  Description of Artificial Sequence: Synthetic peptide
  XENP019781 vlCDR2
GAFSRAT

SEQ ID NO: 5200 - protein, 9 aa, Artificial Sequence
  Description of Artificial Sequence: Synthetic peptide
  XENP019781 vlCDR3
QQYGSSPWT

SEQ ID NO: 5201 - protein, 246 aa, Artificial Sequence
  Description of Artificial Sequence: Synthetic polypeptide
  XENP019782 [CTLA-4]_H0.38_L0_scFv(GKPGS)4
QVQLVESGGGVVQPGRSLRLSCAASGFTFSSYTMHWVRQAPGKGLEWVAFISYDGNNKYYADSVKGRFTISRDNSKNTLYLQMNSLRAEDTAIYYCARTGWLGPFDYWGQGTLVTVSSGKPGSGKPGSGKPGSGKPGSEIVLTQSPGTLSLSPGERATLSCRASQSVGSSYLAWYQQKPGQAPRLLIYGAFSRATGIPDRFSGSGSGTDFTLTISRLEPEDFAVYYCQQYGSSPWTFGQGTKVEIK

SEQ ID NO: 5202 - protein, 118 aa, Artificial Sequence
  Description of Artificial Sequence: Synthetic polypeptide
  VH of XENP019782
QVQLVESGGGVVQPGRSLRLSCAASGFTFSSYTMHWVRQAPGKGLEWVAFISYDGNNKYYADSVKGRFTISRDNSKNTLYLQMNSLRAEDTAIYYCARTGWLGPFDYWGQGTLVTVSS

SEQ ID NO: 5203 - protein, 108 aa, Artificial Sequence; identical to SEQ ID NO: 3741
  Description of Artificial Sequence: Synthetic polypeptide
  VL of XENP019782

SEQ ID NO: 5204 - protein, 5 aa, Artificial Sequence
  Description of Artificial Sequence: Synthetic peptide
  XENP019782 vhCDR1
SYTMH

SEQ ID NO: 5205 - protein, 17 aa, Artificial Sequence
  Description of Artificial Sequence: Synthetic peptide
  XENP019782 vhCDR2
FISYDGNNKYYADSVKG

SEQ ID NO: 5206 - protein, 9 aa, Artificial Sequence
  Description of Artificial Sequence: Synthetic peptide
  XENP019782 vhCDR3
TGWLGPFDY

SEQ ID NO: 5207 - protein, 12 aa, Artificial Sequence
  Description of Artificial Sequence: Synthetic peptide
  XENP019782 vlCDR1
RASQSVGSSYLA

SEQ ID NO: 5208 - protein, 7 aa, Artificial Sequence
  Description of Artificial Sequence: Synthetic peptide
  XENP019782 vlCDR2
GAFSRAT

SEQ ID NO: 5209 - protein, 9 aa, Artificial Sequence
  Description of Artificial Sequence: Synthetic peptide
  XENP019782 vlCDR3
QQYGSSPWT

SEQ ID NO: 5210 - protein, 246 aa, Artificial Sequence
  Description of Artificial Sequence: Synthetic polypeptide
  XENP019783 [CTLA-4]_H0.39_L0_scFv(GKPGS)4
QVQLVESGGGVVQPGRSLRLSCAASGFTFSSYTMHWVRQAPGKGLEWVGFISYDGNNKYYADSVKGRFTISRDNSKNTLYLQMNSLRAEDTAIYYCARTGWLGPFDYWGQGTLVTVSSGKPGSGKPGSGKPGSGKPGSEIVLTQSPGTLSLSPGERATLSCRASQSVGSSYLAWYQQKPGQAPRLLIYGAFSRATGIPDRFSGSGSGTDFTLTISRLEPEDFAVYYCQQYGSSPWTFGQGTKVEIK

SEQ ID NO: 5211 - protein, 118 aa, Artificial Sequence
  Description of Artificial Sequence: Synthetic polypeptide
  VH of XENP019783
QVQLVESGGGVVQPGRSLRLSCAASGFTFSSYTMHWVRQAPGKGLEWVGFISYDGNNKYYADSVKGRFTISRDNSKNTLYLQMNSLRAEDTAIYYCARTGWLGPFDYWGQGTLVTVSS

SEQ ID NO: 5212 - protein, 108 aa, Artificial Sequence; identical to SEQ ID NO: 3741
  Description of Artificial Sequence: Synthetic polypeptide
  VL of XENP019783

SEQ ID NO: 5213 - protein, 5 aa, Artificial Sequence
  Description of Artificial Sequence: Synthetic peptide
  XENP019783 vhCDR1
SYTMH

SEQ ID NO: 5214 - protein, 17 aa, Artificial Sequence
  Description of Artificial Sequence: Synthetic peptide
  XENP019783 vhCDR2
FISYDGNNKYYADSVKG

SEQ ID NO: 5215 - protein, 9 aa, Artificial Sequence
  Description of Artificial Sequence: Synthetic peptide
  XENP019783 vhCDR3
TGWLGPFDY

SEQ ID NO: 5216 - protein, 12 aa, Artificial Sequence
  Description of Artificial Sequence: Synthetic peptide
  XENP019783 vlCDR1
RASQSVGSSYLA

SEQ ID NO: 5217 - protein, 7 aa, Artificial Sequence
  Description of Artificial Sequence: Synthetic peptide
  XENP019783 vlCDR2
GAFSRAT

SEQ ID NO: 5218 - protein, 9 aa, Artificial Sequence
  Description of Artificial Sequence: Synthetic peptide
  XENP019783 vlCDR3
QQYGSSPWT

SEQ ID NO: 5219 - protein, 246 aa, Artificial Sequence
  Description of Artificial Sequence: Synthetic polypeptide
  XENP019784 [CTLA-4]_H0.40_L0_scFv(GKPGS)4
QVQLVESGGGVVQPGRSLRLSCAASGFTFSSYTMHWVRQAPGKGLEWVSFISYDGNNKYYADSVKGRFTISRDNSKNTLYLQMNSLRAEDTAIYYCARTGWLGPFDYWGQGTLVTVSSGKPGSGKPGSGKPGSGKPGSEIVLTQSPGTLSLSPGERATLSCRASQSVGSSYLAWYQQKPGQAPRLLIYGAFSRATGIPDRFSGSGSGTDFTLTISRLEPEDFAVYYCQQYGSSPWTFGQGTKVEIK

SEQ ID NO: 5220 - protein, 118 aa, Artificial Sequence
  Description of Artificial Sequence: Synthetic polypeptide
  VH of XENP019784
QVQLVESGGGVVQPGRSLRLSCAASGFTFSSYTMHWVRQAPGKGLEWVSFISYDGNNKYYADSVKGRFTISRDNSKNTLYLQMNSLRAEDTAIYYCARTGWLGPFDYWGQGTLVTVSS

SEQ ID NO: 5221 - protein, 108 aa, Artificial Sequence; identical to SEQ ID NO: 3741
  Description of Artificial Sequence: Synthetic polypeptide
  VL of XENP019784

SEQ ID NO: 5222 - protein, 5 aa, Artificial Sequence
  Description of Artificial Sequence: Synthetic peptide
  XENP019784 vhCDR1
SYTMH

SEQ ID NO: 5223 - protein, 17 aa, Artificial Sequence
  Description of Artificial Sequence: Synthetic peptide
  XENP019784 vhCDR2
FISYDGNNKYYADSVKG

SEQ ID NO: 5224 - protein, 9 aa, Artificial Sequence
  Description of Artificial Sequence: Synthetic peptide
  XENP019784 vhCDR3
TGWLGPFDY

SEQ ID NO: 5225 - protein, 12 aa, Artificial Sequence
  Description of Artificial Sequence: Synthetic peptide
  XENP019784 vlCDR1
RASQSVGSSYLA

SEQ ID NO: 5226 - protein, 7 aa, Artificial Sequence
  Description of Artificial Sequence: Synthetic peptide
  XENP019784 vlCDR2
GAFSRAT

SEQ ID NO: 5227 - protein, 9 aa, Artificial Sequence
  Description of Artificial Sequence: Synthetic peptide
  XENP019784 vlCDR3
QQYGSSPWT

SEQ ID NO: 5228 - protein, 246 aa, Artificial Sequence
  Description of Artificial Sequence: Synthetic polypeptide
  XENP019785 [CTLA-4]_H0.41_L0_scFv(GKPGS)4
QVQLVESGGGVVQPGRSLRLSCAASGFTFSSYTMHWVRQAPGKGLEWVVFISYDGNNKYYADSVKGRFTISRDNSKNTLYLQMNSLRAEDTAIYYCARTGWLGPFDYWGQGTLVTVSSGKPGSGKPGSGKPGSGKPGSEIVLTQSPGTLSLSPGERATLSCRASQSVGSSYLAWYQQKPGQAPRLLIYGAFSRATGIPDRFSGSGSGTDFTLTISRLEPEDFAVYYCQQYGSSPWTFGQGTKVEIK

SEQ ID NO: 5229 - protein, 118 aa, Artificial Sequence
  Description of Artificial Sequence: Synthetic polypeptide
  VH of XENP019785
QVQLVESGGGVVQPGRSLRLSCAASGFTFSSYTMHWVRQAPGKGLEWVVFISYDGNNKYYADSVKGRFTISRDNSKNTLYLQMNSLRAEDTAIYYCARTGWLGPFDYWGQGTLVTVSS

SEQ ID NO: 5230 - protein, 108 aa, Artificial Sequence; identical to SEQ ID NO: 3741
  Description of Artificial Sequence: Synthetic polypeptide
  VL of XENP019785

SEQ ID NO: 5231 - protein, 5 aa, Artificial Sequence
  Description of Artificial Sequence: Synthetic peptide
  XENP019785 vhCDR1
SYTMH

SEQ ID NO: 5232 - protein, 17 aa, Artificial Sequence
  Description of Artificial Sequence: Synthetic peptide
  XENP019785 vhCDR2
FISYDGNNKYYADSVKG

SEQ ID NO: 5233 - protein, 9 aa, Artificial Sequence
  Description of Artificial Sequence: Synthetic peptide
  XENP019785 vhCDR3
TGWLGPFDY

SEQ ID NO: 5234 - protein, 12 aa, Artificial Sequence
  Description of Artificial Sequence: Synthetic peptide
  XENP019785 vlCDR1
RASQSVGSSYLA

SEQ ID NO: 5235 - protein, 7 aa, Artificial Sequence
  Description of Artificial Sequence: Synthetic peptide
  XENP019785 vlCDR2
GAFSRAT

SEQ ID NO: 5236 - protein, 9 aa, Artificial Sequence
  Description of Artificial Sequence: Synthetic peptide
  XENP019785 vlCDR3
QQYGSSPWT

SEQ ID NO: 5237 - protein, 246 aa, Artificial Sequence
  Description of Artificial Sequence: Synthetic polypeptide
  XENP019786 [CTLA-4]_H0.42_L0_scFv(GKPGS)4
QVQLVESGGGVVQPGRSLRLSCAASGFTFSSYTMHWVRQAPGKGLEWVTAISYDGNNKYYADSVKGRFTISRDNSKNTLYLQMNSLRAEDTAIYYCARTGWLGPFDYWGQGTLVTVSSGKPGSGKPGSGKPGSGKPGSEIVLTQSPGTLSLSPGERATLSCRASQSVGSSYLAWYQQKPGQAPRLLIYGAFSRATGIPDRFSGSGSGTDFTLTISRLEPEDFAVYYCQQYGSSPWTFGQGTKVEIK

SEQ ID NO: 5238 - protein, 118 aa, Artificial Sequence
  Description of Artificial Sequence: Synthetic polypeptide
  VH of XENP019786
QVQLVESGGGVVQPGRSLRLSCAASGFTFSSYTMHWVRQAPGKGLEWVTAISYDGNNKYYADSVKGRFTISRDNSKNTLYLQMNSLRAEDTAIYYCARTGWLGPFDYWGQGTLVTVSS

SEQ ID NO: 5239 - protein, 108 aa, Artificial Sequence; identical to SEQ ID NO: 3741
  Description of Artificial Sequence: Synthetic polypeptide
  VL of XENP019786

SEQ ID NO: 5240 - protein, 5 aa, Artificial Sequence
  Description of Artificial Sequence: Synthetic peptide
  XENP019786 vhCDR1
SYTMH

SEQ ID NO: 5241 - protein, 17 aa, Artificial Sequence
  Description of Artificial Sequence: Synthetic peptide
  XENP019786 vhCDR2
AISYDGNNKYYADSVKG

SEQ ID NO: 5242 - protein, 9 aa, Artificial Sequence
  Description of Artificial Sequence: Synthetic peptide
  XENP019786 vhCDR3
TGWLGPFDY

SEQ ID NO: 5243 - protein, 12 aa, Artificial Sequence
  Description of Artificial Sequence: Synthetic peptide
  XENP019786 vlCDR1
RASQSVGSSYLA

SEQ ID NO: 5244 - protein, 7 aa, Artificial Sequence
  Description of Artificial Sequence: Synthetic peptide
  XENP019786 vlCDR2
GAFSRAT

SEQ ID NO: 5245 - protein, 9 aa, Artificial Sequence
  Description of Artificial Sequence: Synthetic peptide
  XENP019786 vlCDR3
QQYGSSPWT

SEQ ID NO: 5246 - protein, 246 aa, Artificial Sequence
  Description of Artificial Sequence: Synthetic polypeptide
  XENP019787 [CTLA-4]_H0.43_L0_scFv(GKPGS)4
QVQLVESGGGVVQPGRSLRLSCAASGFTFSSYTMHWVRQAPGKGLEWVTGISYDGNNKYYADSVKGRFTISRDNSKNTLYLQMNSLRAEDTAIYYCARTGWLGPFDYWGQGTLVTVSSGKPGSGKPGSGKPGSGKPGSEIVLTQSPGTLSLSPGERATLSCRASQSVGSSYLAWYQQKPGQAPRLLIYGAFSRATGIPDRFSGSGSGTDFTLTISRLEPEDFAVYYCQQYGSSPWTFGQGTKVEIK

SEQ ID NO: 5247 - protein, 118 aa, Artificial Sequence
  Description of Artificial Sequence: Synthetic polypeptide
  VH of XENP019787
QVQLVESGGGVVQPGRSLRLSCAASGFTFSSYTMHWVRQAPGKGLEWVTGISYDGNNKYYADSVKGRFTISRDNSKNTLYLQMNSLRAEDTAIYYCARTGWLGPFDYWGQGTLVTVSS

SEQ ID NO: 5248 - protein, 108 aa, Artificial Sequence; identical to SEQ ID NO: 3741
  Description of Artificial Sequence: Synthetic polypeptide
  VL of XENP019787

SEQ ID NO: 5249 - protein, 5 aa, Artificial Sequence
  Description of Artificial Sequence: Synthetic peptide
  XENP019787 vhCDR1
SYTMH

SEQ ID NO: 5250 - protein, 17 aa, Artificial Sequence
  Description of Artificial Sequence: Synthetic peptide
  XENP019787 vhCDR2
GISYDGNNKYYADSVKG

SEQ ID NO: 5251 - protein, 9 aa, Artificial Sequence
  Description of Artificial Sequence: Synthetic peptide
  XENP019787 vhCDR3
TGWLGPFDY

SEQ ID NO: 5252 - protein, 12 aa, Artificial Sequence
  Description of Artificial Sequence: Synthetic peptide
  XENP019787 vlCDR1
RASQSVGSSYLA

SEQ ID NO: 5253 - protein, 7 aa, Artificial Sequence
  Description of Artificial Sequence: Synthetic peptide
  XENP019787 vlCDR2
GAFSRAT

SEQ ID NO: 5254 - protein, 9 aa, Artificial Sequence
  Description of Artificial Sequence: Synthetic peptide
  XENP019787 vlCDR3
QQYGSSPWT

SEQ ID NO: 5255 - protein, 246 aa, Artificial Sequence
  Description of Artificial Sequence: Synthetic polypeptide
  XENP019788 [CTLA-4]_H0.44_L0_scFv(GKPGS)4
QVQLVESGGGVVQPGRSLRLSCAASGFTFSSYTMHWVRQAPGKGLEWVTLISYDGNNKYYADSVKGRFTISRDNSKNTLYLQMNSLRAEDTAIYYCARTGWLGPFDYWGQGTLVTVSSGKPGSGKPGSGKPGSGKPGSEIVLTQSPGTLSLSPGERATLSCRASQSVGSSYLAWYQQKPGQAPRLLIYGAFSRATGIPDRFSGSGSGTDFTLTISRLEPEDFAVYYCQQYGSSPWTFGQGTKVEIK

SEQ ID NO: 5256 - protein, 118 aa, Artificial Sequence
  Description of Artificial Sequence: Synthetic polypeptide
  VH of XENP019788
QVQLVESGGGVVQPGRSLRLSCAASGFTFSSYTMHWVRQAPGKGLEWVTLISYDGNNKYYADSVKGRFTISRDNSKNTLYLQMNSLRAEDTAIYYCARTGWLGPFDYWGQGTLVTVSS

SEQ ID NO: 5257 - protein, 108 aa, Artificial Sequence; identical to SEQ ID NO: 3741
  Description of Artificial Sequence: Synthetic polypeptide
  VL of XENP019788

SEQ ID NO: 5258 - protein, 5 aa, Artificial Sequence
  Description of Artificial Sequence: Synthetic peptide
  XENP019788 vhCDR1
SYTMH

SEQ ID NO: 5259 - protein, 17 aa, Artificial Sequence
  Description of Artificial Sequence: Synthetic peptide
  XENP019788 vhCDR2
LISYDGNNKYYADSVKG

SEQ ID NO: 5260 - protein, 9 aa, Artificial Sequence
  Description of Artificial Sequence: Synthetic peptide
  XENP019788 vhCDR3
TGWLGPFDY

SEQ ID NO: 5261 - protein, 12 aa, Artificial Sequence
  Description of Artificial Sequence: Synthetic peptide
  XENP019788 vlCDR1
RASQSVGSSYLA

SEQ ID NO: 5262 - protein, 7 aa, Artificial Sequence
  Description of Artificial Sequence: Synthetic peptide
  XENP019788 vlCDR2
GAFSRAT

SEQ ID NO: 5263 - protein, 9 aa, Artificial Sequence
  Description of Artificial Sequence: Synthetic peptide
  XENP019788 vlCDR3
QQYGSSPWT

SEQ ID NO: 5264 - protein, 246 aa, Artificial Sequence
  Description of Artificial Sequence: Synthetic polypeptide
  XENP019789 [CTLA-4]_H0.45_L0_scFv(GKPGS)4
QVQLVESGGGVVQPGRSLRLSCAASGFTFSSYTMHWVRQAPGKGLEWVTIISYDGNNKYYADSVKGRFTISRDNSKNTLYLQMNSLRAEDTAIYYCARTGWLGPFDYWGQGTLVTVSSGKPGSGKPGSGKPGSGKPGSEIVLTQSPGTLSLSPGERATLSCRASQSVGSSYLAWYQQKPGQAPRLLIYGAFSRATGIPDRFSGSGSGTDFTLTISRLEPEDFAVYYCQQYGSSPWTFGQGTKVEIK

SEQ ID NO: 5265 - protein, 118 aa, Artificial Sequence
  Description of Artificial Sequence: Synthetic polypeptide
  VH of XENP019789
QVQLVESGGGVVQPGRSLRLSCAASGFTFSSYTMHWVRQAPGKGLEWVTIISYDGNNKYYADSVKGRFTISRDNSKNTLYLQMNSLRAEDTAIYYCARTGWLGPFDYWGQGTLVTVSS

SEQ ID NO: 5266 - protein, 108 aa, Artificial Sequence; identical to SEQ ID NO: 3741
  Description of Artificial Sequence: Synthetic polypeptide
  VL of XENP019789

SEQ ID NO: 5267 - protein, 5 aa, Artificial Sequence
  Description of Artificial Sequence: Synthetic peptide
  XENP019789 vhCDR1
SYTMH

SEQ ID NO: 5268 - protein, 17 aa, Artificial Sequence
  Description of Artificial Sequence: Synthetic peptide
  XENP019789 vhCDR2
IISYDGNNKYYADSVKG

SEQ ID NO: 5269 - protein, 9 aa, Artificial Sequence
  Description of Artificial Sequence: Synthetic peptide
  XENP019789 vhCDR3
TGWLGPFDY

SEQ ID NO: 5270 - protein, 12 aa, Artificial Sequence
  Description of Artificial Sequence: Synthetic peptide
  XENP019789 vlCDR1
RASQSVGSSYLA

SEQ ID NO: 5271 - protein, 7 aa, Artificial Sequence
  Description of Artificial Sequence: Synthetic peptide
  XENP019789 vlCDR2
GAFSRAT

SEQ ID NO: 5272 - protein, 9 aa, Artificial Sequence
  Description of Artificial Sequence: Synthetic peptide
  XENP019789 vlCDR3
QQYGSSPWT

SEQ ID NO: 5273 - protein, 246 aa, Artificial Sequence
  Description of Artificial Sequence: Synthetic polypeptide
  XENP019790 [CTLA-4]_H0.46_L0_scFv(GKPGS)4
QVQLVESGGGVVQPGRSLRLSCAASGFTFSSYTMHWVRQAPGKGLEWVTRISYDGNNKYYADSVKGRFTISRDNSKNTLYLQMNSLRAEDTAIYYCARTGWLGPFDYWGQGTLVTVSSGKPGSGKPGSGKPGSGKPGSEIVLTQSPGTLSLSPGERATLSCRASQSVGSSYLAWYQQKPGQAPRLLIYGAFSRATGIPDRFSGSGSGTDFTLTISRLEPEDFAVYYCQQYGSSPWTFGQGTKVEIK

SEQ ID NO: 5274 - protein, 118 aa, Artificial Sequence
  Description of Artificial Sequence: Synthetic polypeptide
  VH of XENP019790
QVQLVESGGGVVQPGRSLRLSCAASGFTFSSYTMHWVRQAPGKGLEWVTRISYDGNNKYYADSVKGRFTISRDNSKNTLYLQMNSLRAEDTAIYYCARTGWLGPFDYWGQGTLVTVSS

SEQ ID NO: 5275 - protein, 108 aa, Artificial Sequence; identical to SEQ ID NO: 3741
  Description of Artificial Sequence: Synthetic polypeptide
  VL of XENP019790

SEQ ID NO: 5276 - protein, 5 aa, Artificial Sequence
  Description of Artificial Sequence: Synthetic peptide
  XENP019790 vhCDR1
SYTMH

SEQ ID NO: 5277 - protein, 17 aa, Artificial Sequence
  Description of Artificial Sequence: Synthetic peptide
  XENP019790 vhCDR2
RISYDGNNKYYADSVKG

SEQ ID NO: 5278 - protein, 9 aa, Artificial Sequence
  Description of Artificial Sequence: Synthetic peptide
  XENP019790 vhCDR3
TGWLGPFDY

SEQ ID NO: 5279 - protein, 12 aa, Artificial Sequence
  Description of Artificial Sequence: Synthetic peptide
  XENP019790 vlCDR1
RASQSVGSSYLA

SEQ ID NO: 5280 - protein, 7 aa, Artificial Sequence
  Description of Artificial Sequence: Synthetic peptide
  XENP019790 vlCDR2
GAFSRAT

SEQ ID NO: 5281 - protein, 9 aa, Artificial Sequence
  Description of Artificial Sequence: Synthetic peptide
  XENP019790 vlCDR3
QQYGSSPWT

SEQ ID NO: 5282 - protein, 246 aa, Artificial Sequence
  Description of Artificial Sequence: Synthetic polypeptide
  XENP019791 [CTLA-4]_H0.47_L0_scFv(GKPGS)4
QVQLVESGGGVVQPGRSLRLSCAASGFTFSSYTMHWVRQAPGKGLEWVTVISYDGNNKYYADSVKGRFTISRDNSKNTLYLQMNSLRAEDTAIYYCARTGWLGPFDYWGQGTLVTVSSGKPGSGKPGSGKPGSGKPGSEIVLTQSPGTLSLSPGERATLSCRASQSVGSSYLAWYQQKPGQAPRLLIYGAFSRATGIPDRFSGSGSGTDFTLTISRLEPEDFAVYYCQQYGSSPWTFGQGTKVEIK

SEQ ID NO: 5283 - protein, 118 aa, Artificial Sequence
  Description of Artificial Sequence: Synthetic polypeptide
  VH of XENP019791
QVQLVESGGGVVQPGRSLRLSCAASGFTFSSYTMHWVRQAPGKGLEWVTVISYDGNNKYYADSVKGRFTISRDNSKNTLYLQMNSLRAEDTAIYYCARTGWLGPFDYWGQGTLVTVSS

SEQ ID NO: 5284 - protein, 108 aa, Artificial Sequence; identical to SEQ ID NO: 3741
  Description of Artificial Sequence: Synthetic polypeptide
  VL of XENP019791

SEQ ID NO: 5285 - protein, 5 aa, Artificial Sequence
  Description of Artificial Sequence: Synthetic peptide
  XENP019791 vhCDR1
SYTMH

SEQ ID NO: 5286 - protein, 17 aa, Artificial Sequence
  Description of Artificial Sequence: Synthetic peptide
  XENP019791 vhCDR2
VISYDGNNKYYADSVKG

SEQ ID NO: 5287 - protein, 9 aa, Artificial Sequence
  Description of Artificial Sequence: Synthetic peptide
  XENP019791 vhCDR3
TGWLGPFDY

SEQ ID NO: 5288 - protein, 12 aa, Artificial Sequence
  Description of Artificial Sequence: Synthetic peptide
  XENP019791 vlCDR1
RASQSVGSSYLA

SEQ ID NO: 5289 - protein, 7 aa, Artificial Sequence
  Description of Artificial Sequence: Synthetic peptide
  XENP019791 vlCDR2
GAFSRAT

SEQ ID NO: 5290 - protein, 9 aa, Artificial Sequence
  Description of Artificial Sequence: Synthetic peptide
  XENP019791 vlCDR3
QQYGSSPWT

SEQ ID NO: 5291 - protein, 246 aa, Artificial Sequence
  Description of Artificial Sequence: Synthetic polypeptide
  XENP019792 [CTLA-4]_H0.48_L0_scFv(GKPGS)4
QVQLVESGGGVVQPGRSLRLSCAASGFTFSSYTMHWVRQAPGKGLEWVTYISYDGNNKYYADSVKGRFTISRDNSKNTLYLQMNSLRAEDTAIYYCARTGWLGPFDYWGQGTLVTVSSGKPGSGKPGSGKPGSGKPGSEIVLTQSPGTLSLSPGERATLSCRASQSVGSSYLAWYQQKPGQAPRLLIYGAFSRATGIPDRFSGSGSGTDFTLTISRLEPEDFAVYYCQQYGSSPWTFGQGTKVEIK

SEQ ID NO: 5292 - protein, 118 aa, Artificial Sequence
  Description of Artificial Sequence: Synthetic polypeptide
  VH of XENP019792
QVQLVESGGGVVQPGRSLRLSCAASGFTFSSYTMHWVRQAPGKGLEWVTYISYDGNNKYYADSVKGRFTISRDNSKNTLYLQMNSLRAEDTAIYYCARTGWLGPFDYWGQGTLVTVSS

SEQ ID NO: 5293 - protein, 108 aa, Artificial Sequence; identical to SEQ ID NO: 3741
  Description of Artificial Sequence: Synthetic polypeptide
  VL of XENP019792

SEQ ID NO: 5294 - protein, 5 aa, Artificial Sequence
  Description of Artificial Sequence: Synthetic peptide
  XENP019792 vhCDR1
SYTMH

SEQ ID NO: 5295 - protein, 17 aa, Artificial Sequence
  Description of Artificial Sequence: Synthetic peptide
  XENP019792 vhCDR2
YISYDGNNKYYADSVKG

SEQ ID NO: 5296 - protein, 9 aa, Artificial Sequence
  Description of Artificial Sequence: Synthetic peptide
  XENP019792 vhCDR3
TGWLGPFDY

SEQ ID NO: 5297 - protein, 12 aa, Artificial Sequence
  Description of Artificial Sequence: Synthetic peptide
  XENP019792 vlCDR1
RASQSVGSSYLA

SEQ ID NO: 5298 - protein, 7 aa, Artificial Sequence
  Description of Artificial Sequence: Synthetic peptide
  XENP019792 vlCDR2
GAFSRAT

SEQ ID NO: 5299 - protein, 9 aa, Artificial Sequence
  Description of Artificial Sequence: Synthetic peptide
  XENP019792 vlCDR3
QQYGSSPWT

SEQ ID NO: 5300 - protein, 246 aa, Artificial Sequence
  Description of Artificial Sequence: Synthetic polypeptide
  XENP019793 [CTLA-4]_H0.49_L0_scFv(GKPGS)4
QVQLVESGGGVVQPGRSLRLSCAASGFTFSSYTMHWVRQAPGKGLEWVTFESYDGNNKYYADSVKGRFTISRDNSKNTLYLQMNSLRAEDTAIYYCARTGWLGPFDYWGQGTLVTVSSGKPGSGKPGSGKPGSGKPGSEIVLTQSPGTLSLSPGERATLSCRASQSVGSSYLAWYQQKPGQAPRLLIYGAFSRATGIPDRFSGSGSGTDFTLTISRLEPEDFAVYYCQQYGSSPWTFGQGTKVEIK

SEQ ID NO: 5301 - protein, 118 aa, Artificial Sequence
  Description of Artificial Sequence: Synthetic polypeptide
  VH of XENP019793
QVQLVESGGGVVQPGRSLRLSCAASGFTFSSYTMHWVRQAPGKGLEWVTFESYDGNNKYYADSVKGRFTISRDNSKNTLYLQMNSLRAEDTAIYYCARTGWLGPFDYWGQGTLVTVSS

SEQ ID NO: 5302 - protein, 108 aa, Artificial Sequence; identical to SEQ ID NO: 3741
  Description of Artificial Sequence: Synthetic polypeptide
  VL of XENP019793

SEQ ID NO: 5303 - protein, 5 aa, Artificial Sequence
  Description of Artificial Sequence: Synthetic peptide
  XENP019793 vhCDR1
SYTMH

SEQ ID NO: 5304 - protein, 17 aa, Artificial Sequence
  Description of Artificial Sequence: Synthetic peptide
  XENP019793 vhCDR2
FESYDGNNKYYADSVKG

SEQ ID NO: 5305 - protein, 9 aa, Artificial Sequence
  Description of Artificial Sequence: Synthetic peptide
  XENP019793 vhCDR3
TGWLGPFDY

SEQ ID NO: 5306 - protein, 12 aa, Artificial Sequence
  Description of Artificial Sequence: Synthetic peptide
  XENP019793 vlCDR1
RASQSVGSSYLA

SEQ ID NO: 5307 - protein, 7 aa, Artificial Sequence
  Description of Artificial Sequence: Synthetic peptide
  XENP019793 vlCDR2
GAFSRAT

SEQ ID NO: 5308 - protein, 9 aa, Artificial Sequence
  Description of Artificial Sequence: Synthetic peptide
  XENP019793 vlCDR3
QQYGSSPWT

SEQ ID NO: 5309 - protein, 246 aa, Artificial Sequence
  Description of Artificial Sequence: Synthetic polypeptide
  XENP019794 [CTLA-4]_H0.50_L0_scFv(GKPGS)4
QVQLVESGGGVVQPGRSLRLSCAASGFTFSSYTMHWVRQAPGKGLEWVTFHSYDGNNKYYADSVKGRFTISRDNSKNTLYLQMNSLRAEDTAIYYCARTGWLGPFDYWGQGTLVTVSSGKPGSGKPGSGKPGSGKPGSEIVLTQSPGTLSLSPGERATLSCRASQSVGSSYLAWYQQKPGQAPRLLIYGAFSRATGIPDRFSGSGSGTDFTLTISRLEPEDFAVYYCQQYGSSPWTFGQGTKVEIK

SEQ ID NO: 5310 - protein, 118 aa, Artificial Sequence
  Description of Artificial Sequence: Synthetic polypeptide
  VH of XENP019794
QVQLVESGGGVVQPGRSLRLSCAASGFTFSSYTMHWVRQAPGKGLEWVTFHSYDGNNKYYADSVKGRFTISRDNSKNTLYLQMNSLRAEDTAIYYCARTGWLGPFDYWGQGTLVTVSS

SEQ ID NO: 5311 - protein, 108 aa, Artificial Sequence; identical to SEQ ID NO: 3741
  Description of Artificial Sequence: Synthetic polypeptide
  VL of XENP019794

SEQ ID NO: 5312 - protein, 5 aa, Artificial Sequence
  Description of Artificial Sequence: Synthetic peptide
  XENP019794 vhCDR1
SYTMH

SEQ ID NO: 5313 - protein, 17 aa, Artificial Sequence
  Description of Artificial Sequence: Synthetic peptide
  XENP019794 vhCDR2
FHSYDGNNKYYADSVKG

SEQ ID NO: 5314 - protein, 9 aa, Artificial Sequence
  Description of Artificial Sequence: Synthetic peptide
  XENP019794 vhCDR3
TGWLGPFDY

SEQ ID NO: 5315 - protein, 12 aa, Artificial Sequence
  Description of Artificial Sequence: Synthetic peptide
  XENP019794 vlCDR1
RASQSVGSSYLA

SEQ ID NO: 5316 - protein, 7 aa, Artificial Sequence
  Description of Artificial Sequence: Synthetic peptide
  XENP019794 vlCDR2
GAFSRAT

SEQ ID NO: 5317 - protein, 9 aa, Artificial Sequence
  Description of Artificial Sequence: Synthetic peptide
  XENP019794 vlCDR3
QQYGSSPWT

SEQ ID NO: 5318 - protein, 246 aa, Artificial Sequence
  Description of Artificial Sequence: Synthetic polypeptide
  XENP019795 [CTLA-4]_H0.51_L0_scFv(GKPGS)4
QVQLVESGGGVVQPGRSLRLSCAASGFTFSSYTMHWVRQAPGKGLEWVTFTSYDGNNKYYADSVKGRFTISRDNSKNTLYLQMNSLRAEDTAIYYCARTGWLGPFDYWGQGTLVTVSSGKPGSGKPGSGKPGSGKPGSEIVLTQSPGTLSLSPGERATLSCRASQSVGSSYLAWYQQKPGQAPRLLIYGAFSRATGIPDRFSGSGSGTDFTLTISRLEPEDFAVYYCQQYGSSPWTFGQGTKVEIK

SEQ ID NO: 5319 - protein, 118 aa, Artificial Sequence
  Description of Artificial Sequence: Synthetic polypeptide
  VH of XENP019795
QVQLVESGGGVVQPGRSLRLSCAASGFTFSSYTMHWVRQAPGKGLEWVTFTSYDGNNKYYADSVKGRFTISRDNSKNTLYLQMNSLRAEDTAIYYCARTGWLGPFDYWGQGTLVTVSS

SEQ ID NO: 5320 - protein, 108 aa, Artificial Sequence; identical to SEQ ID NO: 3741
  Description of Artificial Sequence: Synthetic polypeptide
  VL of XENP019795

SEQ ID NO: 5321 - protein, 5 aa, Artificial Sequence
  Description of Artificial Sequence: Synthetic peptide
  XENP019795 vhCDR1
SYTMH

SEQ ID NO: 5322 - protein, 17 aa, Artificial Sequence
  Description of Artificial Sequence: Synthetic peptide
  XENP019795 vhCDR2
FTSYDGNNKYYADSVKG

SEQ ID NO: 5323 - protein, 9 aa, Artificial Sequence
  Description of Artificial Sequence: Synthetic peptide
  XENP019795 vhCDR3
TGWLGPFDY

SEQ ID NO: 5324 - protein, 12 aa, Artificial Sequence
  Description of Artificial Sequence: Synthetic peptide
  XENP019795 vlCDR1
RASQSVGSSYLA

SEQ ID NO: 5325 - protein, 7 aa, Artificial Sequence
  Description of Artificial Sequence: Synthetic peptide
  XENP019795 vlCDR2
GAFSRAT

SEQ ID NO: 5326 - protein, 9 aa, Artificial Sequence
  Description of Artificial Sequence: Synthetic peptide
  XENP019795 vlCDR3
QQYGSSPWT

SEQ ID NO: 5327 - protein, 246 aa, Artificial Sequence
  Description of Artificial Sequence: Synthetic polypeptide
  XENP019796 [CTLA-4]_H0.52_L0_scFv(GKPGS)4
QVQLVESGGGVVQPGRSLRLSCAASGFTFSSYTMHWVRQAPGKGLEWVTFVSYDGNNKYYADSVKGRFTISRDNSKNTLYLQMNSLRAEDTAIYYCARTGWLGPFDYWGQGTLVTVSSGKPGSGKPGSGKPGSGKPGSEIVLTQSPGTLSLSPGERATLSCRASQSVGSSYLAWYQQKPGQAPRLLIYGAFSRATGIPDRFSGSGSGTDFTLTISRLEPEDFAVYYCQQYGSSPWTFGQGTKVEIK

SEQ ID NO: 5328 - protein, 118 aa, Artificial Sequence
  Description of Artificial Sequence: Synthetic polypeptide
  VH of XENP019796
QVQLVESGGGVVQPGRSLRLSCAASGFTFSSYTMHWVRQAPGKGLEWVTFVSYDGNNKYYADSVKGRFTISRDNSKNTLYLQMNSLRAEDTAIYYCARTGWLGPFDYWGQGTLVTVSS

SEQ ID NO: 5329 - protein, 108 aa, Artificial Sequence; identical to SEQ ID NO: 3741
  Description of Artificial Sequence: Synthetic polypeptide
  VL of XENP019796

SEQ ID NO: 5330 - protein, 5 aa, Artificial Sequence
  Description of Artificial Sequence: Synthetic peptide
  XENP019796 vhCDR1
SYTMH

SEQ ID NO: 5331 - protein, 17 aa, Artificial Sequence
  Description of Artificial Sequence: Synthetic peptide
  XENP019796 vhCDR2
FVSYDGNNKYYADSVKG

SEQ ID NO: 5332 - protein, 9 aa, Artificial Sequence
  Description of Artificial Sequence: Synthetic peptide
  XENP019796 vhCDR3
TGWLGPFDY

SEQ ID NO: 5333 - protein, 12 aa, Artificial Sequence
  Description of Artificial Sequence: Synthetic peptide
  XENP019796 vlCDR1
RASQSVGSSYLA

SEQ ID NO: 5334 - protein, 7 aa, Artificial Sequence
  Description of Artificial Sequence: Synthetic peptide
  XENP019796 vlCDR2
GAFSRAT

SEQ ID NO: 5335 - protein, 9 aa, Artificial Sequence
  Description of Artificial Sequence: Synthetic peptide
  XENP019796 vlCDR3
QQYGSSPWT

SEQ ID NO: 5336 - protein, 246 aa, Artificial Sequence
  Description of Artificial Sequence: Synthetic polypeptide
  XENP019801 [CTLA-4]_H0.53_L0_scFv(GKPGS)4
QVQLVESGGGVVQPGRSLRLSCAASGFTFSSYTMHWVRQAPGKGLEWVTFYSYDGNNKYYADSVKGRFTISRDNSKNTLYLQMNSLRAEDTAIYYCARTGWLGPFDYWGQGTLVTVSSGKPGSGKPGSGKPGSGKPGSEIVLTQSPGTLSLSPGERATLSCRASQSVGSSYLAWYQQKPGQAPRLLIYGAFSRATGIPDRFSGSGSGTDFTLTISRLEPEDFAVYYCQQYGSSPWTFGQGTKVEIK

SEQ ID NO: 5337 - protein, 118 aa, Artificial Sequence
  Description of Artificial Sequence: Synthetic polypeptide
  VH of XENP019801
QVQLVESGGGVVQPGRSLRLSCAASGFTFSSYTMHWVRQAPGKGLEWVTFYSYDGNNKYYADSVKGRFTISRDNSKNTLYLQMNSLRAEDTAIYYCARTGWLGPFDYWGQGTLVTVSS

SEQ ID NO: 5338 - protein, 108 aa, Artificial Sequence; identical to SEQ ID NO: 3741
  Description of Artificial Sequence: Synthetic polypeptide
  VL of XENP019801

SEQ ID NO: 5339 - protein, 5 aa, Artificial Sequence
  Description of Artificial Sequence: Synthetic peptide
  XENP019801 vhCDR1
SYTMH

SEQ ID NO: 5340 - protein, 17 aa, Artificial Sequence
  Description of Artificial Sequence: Synthetic peptide
  XENP019801 vhCDR2
FYSYDGNNKYYADSVKG

SEQ ID NO: 5341 - protein, 9 aa, Artificial Sequence
  Description of Artificial Sequence: Synthetic peptide
  XENP019801 vhCDR3
TGWLGPFDY

SEQ ID NO: 5342 - protein, 12 aa, Artificial Sequence
  Description of Artificial Sequence: Synthetic peptide
  XENP019801 vlCDR1
RASQSVGSSYLA

SEQ ID NO: 5343 - protein, 7 aa, Artificial Sequence
  Description of Artificial Sequence: Synthetic peptide
  XENP019801 vlCDR2
GAFSRAT

SEQ ID NO: 5344 - protein, 9 aa, Artificial Sequence
  Description of Artificial Sequence: Synthetic peptide
  XENP019801 vlCDR3
QQYGSSPWT

SEQ ID NO: 5345 - protein, 246 aa, Artificial Sequence
  Description of Artificial Sequence: Synthetic polypeptide
  XENP019802 [CTLA-4]_H0.54_L0_scFv(GKPGS)4
QVQLVESGGGVVQPGRSLRLSCAASGFTFSSYTMHWVRQAPGKGLEWVTFISGDGNNKYYADSVKGRFTISRDNSKNTLYLQMNSLRAEDTAIYYCARTGWLGPFDYWGQGTLVTVSSGKPGSGKPGSGKPGSGKPGSEIVLTQSPGTLSLSPGERATLSCRASQSVGSSYLAWYQQKPGQAPRLLIYGAFSRATGIPDRFSGSGSGTDFTLTISRLEPEDFAVYYCQQYGSSPWTFGQGTKVEIK

SEQ ID NO: 5346 - protein, 118 aa, Artificial Sequence
  Description of Artificial Sequence: Synthetic polypeptide
  VH of XENP019802
QVQLVESGGGVVQPGRSLRLSCAASGFTFSSYTMHWVRQAPGKGLEWVTFISGDGNNKYYADSVKGRFTISRDNSKNTLYLQMNSLRAEDTAIYYCARTGWLGPFDYWGQGTLVTVSS

SEQ ID NO: 5347 - protein, 108 aa, Artificial Sequence; identical to SEQ ID NO: 3741
  Description of Artificial Sequence: Synthetic polypeptide
  VL of XENP019802

SEQ ID NO: 5348 - protein, 5 aa, Artificial Sequence
  Description of Artificial Sequence: Synthetic peptide
  XENP019802 vhCDR1
SYTMH

SEQ ID NO: 5349 - protein, 17 aa, Artificial Sequence
  Description of Artificial Sequence: Synthetic peptide
  XENP019802 vhCDR2
FISGDGNNKYYADSVKG

SEQ ID NO: 5350 - protein, 9 aa, Artificial Sequence
  Description of Artificial Sequence: Synthetic peptide
  XENP019802 vhCDR3
TGWLGPFDY

SEQ ID NO: 5351 - protein, 12 aa, Artificial Sequence
  Description of Artificial Sequence: Synthetic peptide
  XENP019802 vlCDR1
RASQSVGSSYLA

SEQ ID NO: 5352 - protein, 7 aa, Artificial Sequence
  Description of Artificial Sequence: Synthetic peptide
  XENP019802 vlCDR2
GAFSRAT

SEQ ID NO: 5353 - protein, 9 aa, Artificial Sequence
  Description of Artificial Sequence: Synthetic peptide
  XENP019802 vlCDR3
QQYGSSPWT

SEQ ID NO: 5354 - protein, 246 aa, Artificial Sequence
  Description of Artificial Sequence: Synthetic polypeptide
  XENP019803 [CTLA-4]_H0.55_L0_scFv(GKPGS)4
QVQLVESGGGVVQPGRSLRLSCAASGFTFSSYTMHWVRQAPGKGLEWVTFISNDGNNKYYADSVKGRFTISRDNSKNTLYLQMNSLRAEDTAIYYCARTGWLGPFDYWGQGTLVTVSSGKPGSGKPGSGKPGSGKPGSEIVLTQSPGTLSLSPGERATLSCRASQSVGSSYLAWYQQKPGQAPRLLIYGAFSRATGIPDRFSGSGSGTDFTLTISRLEPEDFAVYYCQQYGSSPWTFGQGTKVEIK

SEQ ID NO: 5355 - protein, 118 aa, Artificial Sequence
  Description of Artificial Sequence: Synthetic polypeptide
  VH of XENP019803
QVQLVESGGGVVQPGRSLRLSCAASGFTFSSYTMHWVRQAPGKGLEWVTFISNDGNNKYYADSVKGRFTISRDNSKNTLYLQMNSLRAEDTAIYYCARTGWLGPFDYWGQGTLVTVSS

SEQ ID NO: 5356 - protein, 108 aa, Artificial Sequence; identical to SEQ ID NO: 3741
  Description of Artificial Sequence: Synthetic polypeptide
  VL of XENP019803

SEQ ID NO: 5357 - protein, 5 aa, Artificial Sequence
  Description of Artificial Sequence: Synthetic peptide
  XENP019803 vhCDR1
SYTMH

SEQ ID NO: 5358 - protein, 17 aa, Artificial Sequence
  Description of Artificial Sequence: Synthetic peptide
  XENP019803 vhCDR2
FISNDGNNKYYADSVKG

SEQ ID NO: 5359 - protein, 9 aa, Artificial Sequence
  Description of Artificial Sequence: Synthetic peptide
  XENP019803 vhCDR3
TGWLGPFDY

SEQ ID NO: 5360 - protein, 12 aa, Artificial Sequence
  Description of Artificial Sequence: Synthetic peptide
  XENP019803 vlCDR1
RASQSVGSSYLA

SEQ ID NO: 5361 - protein, 7 aa, Artificial Sequence
  Description of Artificial Sequence: Synthetic peptide
  XENP019803 vlCDR2
GAFSRAT

SEQ ID NO: 5362 - protein, 9 aa, Artificial Sequence
  Description of Artificial Sequence: Synthetic peptide
  XENP019803 vlCDR3
QQYGSSPWT

SEQ ID NO: 5363 - protein, 246 aa, Artificial Sequence
  Description of Artificial Sequence: Synthetic polypeptide
  XENP019804 [CTLA-4]_H0.56_L0_scFv(GKPGS)4
QVQLVESGGGVVQPGRSLRLSCAASGFTFSSYTMHWVRQAPGKGLEWVTFISSDGNNKYYADSVKGRFTISRDNSKNTLYLQMNSLRAEDTAIYYCARTGWLGPFDYWGQGTLVTVSSGKPGSGKPGSGKPGSGKPGSEIVLTQSPGTLSLSPGERATLSCRASQSVGSSYLAWYQQKPGQAPRLLIYGAFSRATGIPDRFSGSGSGTDFTLTISRLEPEDFAVYYCQQYGSSPWTFGQGTKVEIK

SEQ ID NO: 5364 - protein, 118 aa, Artificial Sequence
  Description of Artificial Sequence: Synthetic polypeptide
  VH of XENP019804
QVQLVESGGGVVQPGRSLRLSCAASGFTFSSYTMHWVRQAPGKGLEWVTFISSDGNNKYYADSVKGRFTISRDNSKNTLYLQMNSLRAEDTAIYYCARTGWLGPFDYWGQGTLVTVSS

SEQ ID NO: 5365 - protein, 108 aa, Artificial Sequence; identical to SEQ ID NO: 3741
  Description of Artificial Sequence: Synthetic polypeptide
  VL of XENP019804

SEQ ID NO: 5366 - protein, 5 aa, Artificial Sequence
  Description of Artificial Sequence: Synthetic peptide
  XENP019804 vhCDR1
SYTMH

SEQ ID NO: 5367 - protein, 17 aa, Artificial Sequence
  Description of Artificial Sequence: Synthetic peptide
  XENP019804 vhCDR2
FISSDGNNKYYADSVKG

SEQ ID NO: 5368 - protein, 9 aa, Artificial Sequence
  Description of Artificial Sequence: Synthetic peptide
  XENP019804 vhCDR3
TGWLGPFDY

SEQ ID NO: 5369 - protein, 12 aa, Artificial Sequence
  Description of Artificial Sequence: Synthetic peptide
  XENP019804 vlCDR1
RASQSVGSSYLA

SEQ ID NO: 5370 - protein, 7 aa, Artificial Sequence
  Description of Artificial Sequence: Synthetic peptide
  XENP019804 vlCDR2
GAFSRAT

SEQ ID NO: 5371 - protein, 9 aa, Artificial Sequence
  Description of Artificial Sequence: Synthetic peptide
  XENP019804 vlCDR3
QQYGSSPWT

SEQ ID NO: 5372 - protein, 246 aa, Artificial Sequence
  Description of Artificial Sequence: Synthetic polypeptide
  XENP019805 [CTLA-4]_H0.57_L0_scFv(GKPGS)4
QVQLVESGGGVVQPGRSLRLSCAASGFTFSSYTMHWVRQAPGKGLEWVTFISYNGNNKYYADSVKGRFTISRDNSKNTLYLQMNSLRAEDTAIYYCARTGWLGPFDYWGQGTLVTVSSGKPGSGKPGSGKPGSGKPGSEIVLTQSPGTLSLSPGERATLSCRASQSVGSSYLAWYQQKPGQAPRLLIYGAFSRATGIPDRFSGSGSGTDFTLTISRLEPEDFAVYYCQQYGSSPWTFGQGTKVEIK

SEQ ID NO: 5373 - protein, 118 aa, Artificial Sequence
  Description of Artificial Sequence: Synthetic polypeptide
  VH of XENP019805
QVQLVESGGGVVQPGRSLRLSCAASGFTFSSYTMHWVRQAPGKGLEWVTFISYNGNNKYYADSVKGRFTISRDNSKNTLYLQMNSLRAEDTAIYYCARTGWLGPFDYWGQGTLVTVSS

SEQ ID NO: 5374 - protein, 108 aa, Artificial Sequence; identical to SEQ ID NO: 3741
  Description of Artificial Sequence: Synthetic polypeptide
  VL of XENP019805

SEQ ID NO: 5375 - protein, 5 aa, Artificial Sequence
  Description of Artificial Sequence: Synthetic peptide
  XENP019805 vhCDR1
SYTMH

SEQ ID NO: 5376 - protein, 17 aa, Artificial Sequence
  Description of Artificial Sequence: Synthetic peptide
  XENP019805 vhCDR2
FISYNGNNKYYADSVKG

SEQ ID NO: 5377 - protein, 9 aa, Artificial Sequence
  Description of Artificial Sequence: Synthetic peptide
  XENP019805 vhCDR3
TGWLGPFDY

SEQ ID NO: 5378 - protein, 12 aa, Artificial Sequence
  Description of Artificial Sequence: Synthetic peptide
  XENP019805 vlCDR1
RASQSVGSSYLA

SEQ ID NO: 5379 - protein, 7 aa, Artificial Sequence
  Description of Artificial Sequence: Synthetic peptide
  XENP019805 vlCDR2
GAFSRAT

SEQ ID NO: 5380 - protein, 9 aa, Artificial Sequence
  Description of Artificial Sequence: Synthetic peptide
  XENP019805 vlCDR3
QQYGSSPWT

SEQ ID NO: 5381 - protein, 246 aa, Artificial Sequence
  Description of Artificial Sequence: Synthetic polypeptide
  XENP019806 [CTLA-4]_H0.58_L0_scFv(GKPGS)4
QVQLVESGGGVVQPGRSLRLSCAASGFTFSSYTMHWVRQAPGKGLEWVTFISYSGNNKYYADSVKGRFTISRDNSKNTLYLQMNSLRAEDTAIYYCARTGWLGPFDYWGQGTLVTVSSGKPGSGKPGSGKPGSGKPGSEIVLTQSPGTLSLSPGERATLSCRASQSVGSSYLAWYQQKPGQAPRLLIYGAFSRATGIPDRFSGSGSGTDFTLTISRLEPEDFAVYYCQQYGSSPWTFGQGTKVEIK

SEQ ID NO: 5382 - protein, 118 aa, Artificial Sequence
  Description of Artificial Sequence: Synthetic polypeptide
  VH of XENP019806
QVQLVESGGGVVQPGRSLRLSCAASGFTFSSYTMHWVRQAPGKGLEWVTFISYSGNNKYYADSVKGRFTISRDNSKNTLYLQMNSLRAEDTAIYYCARTGWLGPFDYWGQGTLVTVSS

SEQ ID NO: 5383 - protein, 108 aa, Artificial Sequence; identical to SEQ ID NO: 3741
  Description of Artificial Sequence: Synthetic polypeptide
  VL of XENP019806

SEQ ID NO: 5384 - protein, 5 aa, Artificial Sequence
  Description of Artificial Sequence: Synthetic peptide
  XENP019806 vhCDR1
SYTMH

SEQ ID NO: 5385 - protein, 17 aa, Artificial Sequence
  Description of Artificial Sequence: Synthetic peptide
  XENP019806 vhCDR2
FISYSGNNKYYADSVKG

SEQ ID NO: 5386 - protein, 9 aa, Artificial Sequence
  Description of Artificial Sequence: Synthetic peptide
  XENP019806 vhCDR3
TGWLGPFDY

SEQ ID NO: 5387 - protein, 12 aa, Artificial Sequence
  Description of Artificial Sequence: Synthetic peptide
  XENP019806 vlCDR1
RASQSVGSSYLA

SEQ ID NO: 5388 - protein, 7 aa, Artificial Sequence
  Description of Artificial Sequence: Synthetic peptide
  XENP019806 vlCDR2
GAFSRAT

SEQ ID NO: 5389 - protein, 9 aa, Artificial Sequence
  Description of Artificial Sequence: Synthetic peptide
  XENP019806 vlCDR3
QQYGSSPWT

SEQ ID NO: 5390 - protein, 246 aa, Artificial Sequence
  Description of Artificial Sequence: Synthetic polypeptide
  XENP019807 [CTLA-4]_H0.59_L0_scFv(GKPGS)4
QVQLVESGGGVVQPGRSLRLSCAASGFTFSSYTMHWVRQAPGKGLEWVTFISYEGNNKYYADSVKGRFTISRDNSKNTLYLQMNSLRAEDTAIYYCARTGWLGPFDYWGQGTLVTVSSGKPGSGKPGSGKPGSGKPGSEIVLTQSPGTLSLSPGERATLSCRASQSVGSSYLAWYQQKPGQAPRLLIYGAFSRATGIPDRFSGSGSGTDFTLTISRLEPEDFAVYYCQQYGSSPWTFGQGTKVEIK

SEQ ID NO: 5391 - protein, 118 aa, Artificial Sequence
  Description of Artificial Sequence: Synthetic polypeptide
  VH of XENP019807
QVQLVESGGGVVQPGRSLRLSCAASGFTFSSYTMHWVRQAPGKGLEWVTFISYEGNNKYYADSVKGRFTISRDNSKNTLYLQMNSLRAEDTAIYYCARTGWLGPFDYWGQGTLVTVSS

SEQ ID NO: 5392 - protein, 108 aa, Artificial Sequence; identical to SEQ ID NO: 3741
  Description of Artificial Sequence: Synthetic polypeptide
  VL of XENP019807

SEQ ID NO: 5393 - protein, 5 aa, Artificial Sequence
  Description of Artificial Sequence: Synthetic peptide
  XENP019807 vhCDR1
SYTMH

SEQ ID NO: 5394 - protein, 17 aa, Artificial Sequence
  Description of Artificial Sequence: Synthetic peptide
  XENP019807 vhCDR2
FISYEGNNKYYADSVKG

SEQ ID NO: 5395 - protein, 9 aa, Artificial Sequence
  Description of Artificial Sequence: Synthetic peptide
  XENP019807 vhCDR3
TGWLGPFDY

SEQ ID NO: 5396 - protein, 12 aa, Artificial Sequence
  Description of Artificial Sequence: Synthetic peptide
  XENP019807 vlCDR1
RASQSVGSSYLA

SEQ ID NO: 5397 - protein, 7 aa, Artificial Sequence
  Description of Artificial Sequence: Synthetic peptide
  XENP019807 vlCDR2
GAFSRAT

SEQ ID NO: 5398 - protein, 9 aa, Artificial Sequence
  Description of Artificial Sequence: Synthetic peptide
  XENP019807 vlCDR3
QQYGSSPWT

SEQ ID NO: 5399 - protein, 246 aa, Artificial Sequence
  Description of Artificial Sequence: Synthetic polypeptide
  XENP019808 [CTLA-4]_H0.60_L0_scFv(GKPGS)4
QVQLVESGGGVVQPGRSLRLSCAASGFTFSSYTMHWVRQAPGKGLEWVTFISYHGNNKYYADSVKGRFTISRDNSKNTLYLQMNSLRAEDTAIYYCARTGWLGPFDYWGQGTLVTVSSGKPGSGKPGSGKPGSGKPGSEIVLTQSPGTLSLSPGERATLSCRASQSVGSSYLAWYQQKPGQAPRLLIYGAFSRATGIPDRFSGSGSGTDFTLTISRLEPEDFAVYYCQQYGSSPWTFGQGTKVEIK

SEQ ID NO: 5400 - protein, 118 aa, Artificial Sequence
  Description of Artificial Sequence: Synthetic polypeptide
  VH of XENP019808
QVQLVESGGGVVQPGRSLRLSCAASGFTFSSYTMHWVRQAPGKGLEWVTFISYHGNNKYYADSVKGRFTISRDNSKNTLYLQMNSLRAEDTAIYYCARTGWLGPFDYWGQGTLVTVSS

SEQ ID NO: 5401 - protein, 108 aa, Artificial Sequence; identical to SEQ ID NO: 3741
  Description of Artificial Sequence: Synthetic polypeptide
  VL of XENP019808

SEQ ID NO: 5402 - protein, 5 aa, Artificial Sequence
  Description of Artificial Sequence: Synthetic peptide
  XENP019808 vhCDR1
SYTMH

SEQ ID NO: 5403 - protein, 17 aa, Artificial Sequence
  Description of Artificial Sequence: Synthetic peptide
  XENP019808 vhCDR2
FISYHGNNKYYADSVKG

SEQ ID NO: 5404 - protein, 9 aa, Artificial Sequence
  Description of Artificial Sequence: Synthetic peptide
  XENP019808 vhCDR3
TGWLGPFDY

SEQ ID NO: 5405 - protein, 12 aa, Artificial Sequence
  Description of Artificial Sequence: Synthetic peptide
  XENP019808 vlCDR1
RASQSVGSSYLA

SEQ ID NO: 5406 - protein, 7 aa, Artificial Sequence
  Description of Artificial Sequence: Synthetic peptide
  XENP019808 vlCDR2
GAFSRAT

SEQ ID NO: 5407 - protein, 9 aa, Artificial Sequence
  Description of Artificial Sequence: Synthetic peptide
  XENP019808 vlCDR3
QQYGSSPWT

SEQ ID NO: 5408 - protein, 246 aa, Artificial Sequence
  Description of Artificial Sequence: Synthetic polypeptide
  XENP019809 [CTLA-4]_H0.61_L0_scFv(GKPGS)4
QVQLVESGGGVVQPGRSLRLSCAASGFTFSSYTMHWVRQAPGKGLEWVTFISYKGNNKYYADSVKGRFTISRDNSKNTLYLQMNSLRAEDTAIYYCARTGWLGPFDYWGQGTLVTVSSGKPGSGKPGSGKPGSGKPGSEIVLTQSPGTLSLSPGERATLSCRASQSVGSSYLAWYQQKPGQAPRLLIYGAFSRATGIPDRFSGSGSGTDFTLTISRLEPEDFAVYYCQQYGSSPWTFGQGTKVEIK

SEQ ID NO: 5409 - protein, 118 aa, Artificial Sequence
  Description of Artificial Sequence: Synthetic polypeptide
  VH of XENP019809
QVQLVESGGGVVQPGRSLRLSCAASGFTFSSYTMHWVRQAPGKGLEWVTFISYKGNNKYYADSVKGRFTISRDNSKNTLYLQMNSLRAEDTAIYYCARTGWLGPFDYWGQGTLVTVSS

SEQ ID NO: 5410 - protein, 108 aa, Artificial Sequence; identical to SEQ ID NO: 3741
  Description of Artificial Sequence: Synthetic polypeptide
  VL of XENP019809

SEQ ID NO: 5411 - protein, 5 aa, Artificial Sequence
  Description of Artificial Sequence: Synthetic peptide
  XENP019809 vhCDR1
SYTMH

SEQ ID NO: 5412 - protein, 17 aa, Artificial Sequence
  Description of Artificial Sequence: Synthetic peptide
  XENP019809 vhCDR2
FISYKGNNKYYADSVKG

SEQ ID NO: 5413 - protein, 9 aa, Artificial Sequence
  Description of Artificial Sequence: Synthetic peptide
  XENP019809 vhCDR3
TGWLGPFDY

SEQ ID NO: 5414 - protein, 12 aa, Artificial Sequence
  Description of Artificial Sequence: Synthetic peptide
  XENP019809 vlCDR1
RASQSVGSSYLA

SEQ ID NO: 5415 - protein, 7 aa, Artificial Sequence
  Description of Artificial Sequence: Synthetic peptide
  XENP019809 vlCDR2
GAFSRAT

SEQ ID NO: 5416 - protein, 9 aa, Artificial Sequence
  Description of Artificial Sequence: Synthetic peptide
  XENP019809 vlCDR3
QQYGSSPWT

SEQ ID NO: 5417 - protein, 246 aa, Artificial Sequence
  Description of Artificial Sequence: Synthetic polypeptide
  XENP019810 [CTLA-4]_H0.62_L0_scFv(GKPGS)4
QVQLVESGGGVVQPGRSLRLSCAASGFTFSSYTMHWVRQAPGKGLEWVTFISYKGNNKYYADSVKGRFTISEDNSKNTLYLQMNSLRAEDTAIYYCARTGWLGPFDYWGQGTLVTVSSGKPGSGKPGSGKPGSGKPGSEIVLTQSPGTLSLSPGERATLSCRASQSVGSSYLAWYQQKPGQAPRLLIYGAFSRATGIPDRFSGSGSGTDFTLTISRLEPEDFAVYYCQQYGSSPWTFGQGTKVEIK

SEQ ID NO: 5418 - protein, 118 aa, Artificial Sequence
  Description of Artificial Sequence: Synthetic polypeptide
  VH of XENP019810
QVQLVESGGGVVQPGRSLRLSCAASGFTFSSYTMHWVRQAPGKGLEWVTFISYKGNNKYYADSVKGRFTISEDNSKNTLYLQMNSLRAEDTAIYYCARTGWLGPFDYWGQGTLVTVSS

SEQ ID NO: 5419 - protein, 108 aa, Artificial Sequence; identical to SEQ ID NO: 3741
  Description of Artificial Sequence: Synthetic polypeptide
  VL of XENP019810

SEQ ID NO: 5420 - protein, 5 aa, Artificial Sequence
  Description of Artificial Sequence: Synthetic peptide
  XENP019810 vhCDR1
SYTMH

SEQ ID NO: 5421 - protein, 17 aa, Artificial Sequence
  Description of Artificial Sequence: Synthetic peptide
  XENP019810 vhCDR2
FISYKGNNKYYADSVKG

SEQ ID NO: 5422 - protein, 9 aa, Artificial Sequence
  Description of Artificial Sequence: Synthetic peptide
  XENP019810 vhCDR3
TGWLGPFDY

SEQ ID NO: 5423 - protein, 12 aa, Artificial Sequence
  Description of Artificial Sequence: Synthetic peptide
  XENP019810 vlCDR1
RASQSVGSSYLA

SEQ ID NO: 5424 - protein, 7 aa, Artificial Sequence
  Description of Artificial Sequence: Synthetic peptide
  XENP019810 vlCDR2
GAFSRAT

SEQ ID NO: 5425 - protein, 9 aa, Artificial Sequence
  Description of Artificial Sequence: Synthetic peptide
  XENP019810 vlCDR3
QQYGSSPWT

SEQ ID NO: 5426 - protein, 246 aa, Artificial Sequence
  Description of Artificial Sequence: Synthetic polypeptide
  XENP019811 [CTLA-4]_H0.63_L0_scFv(GKPGS)4
QVQLVESGGGVVQPGRSLRLSCAASGFTFSSYTMHWVRQAPGKGLEWVTFISYQGNNKYYADSVKGRFTISRDNSKNTLYLQMNSLRAEDTAIYYCARTGWLGPFDYWGQGTLVTVSSGKPGSGKPGSGKPGSGKPGSEIVLTQSPGTLSLSPGERATLSCRASQSVGSSYLAWYQQKPGQAPRLLIYGAFSRATGIPDRFSGSGSGTDFTLTISRLEPEDFAVYYCQQYGSSPWTFGQGTKVEIK

SEQ ID NO: 5427 - protein, 118 aa, Artificial Sequence
  Description of Artificial Sequence: Synthetic polypeptide
  VH of XENP019811
QVQLVESGGGVVQPGRSLRLSCAASGFTFSSYTMHWVRQAPGKGLEWVTFISYQGNNKYYADSVKGRFTISRDNSKNTLYLQMNSLRAEDTAIYYCARTGWLGPFDYWGQGTLVTVSS

SEQ ID NO: 5428 - protein, 108 aa, Artificial Sequence; identical to SEQ ID NO: 3741
  Description of Artificial Sequence: Synthetic polypeptide
  VL of XENP019811

SEQ ID NO: 5429 - protein, 5 aa, Artificial Sequence
  Description of Artificial Sequence: Synthetic peptide
  XENP019811 vhCDR1
SYTMH

SEQ ID NO: 5430 - protein, 17 aa, Artificial Sequence
  Description of Artificial Sequence: Synthetic peptide
  XENP019811 vhCDR2
FISYQGNNKYYADSVKG

SEQ ID NO: 5431 - protein, 9 aa, Artificial Sequence
  Description of Artificial Sequence: Synthetic peptide
  XENP019811 vhCDR3
TGWLGPFDY

SEQ ID NO: 5432 - protein, 12 aa, Artificial Sequence
  Description of Artificial Sequence: Synthetic peptide
  XENP019811 vlCDR1
RASQSVGSSYLA

SEQ ID NO: 5433 - protein, 7 aa, Artificial Sequence
  Description of Artificial Sequence: Synthetic peptide
  XENP019811 vlCDR2
GAFSRAT

SEQ ID NO: 5434 - protein, 9 aa, Artificial Sequence
  Description of Artificial Sequence: Synthetic peptide
  XENP019811 vlCDR3
QQYGSSPWT

SEQ ID NO: 5435 - protein, 246 aa, Artificial Sequence
  Description of Artificial Sequence: Synthetic polypeptide
  XENP019812 [CTLA-4]_H0.64_L0_scFv(GKPGS)4
QVQLVESGGGVVQPGRSLRLSCAASGFTFSSYTMHWVRQAPGKGLEWVTFISYDKNNKYYADSVKGRFTISRDNSKNTLYLQMNSLRAEDTAIYYCARTGWLGPFDYWGQGTLVTVSSGKPGSGKPGSGKPGSGKPGSEIVLTQSPGTLSLSPGERATLSCRASQSVGSSYLAWYQQKPGQAPRLLIYGAFSRATGIPDRFSGSGSGTDFTLTISRLEPEDFAVYYCQQYGSSPWTFGQGTKVEIK

SEQ ID NO: 5436 - protein, 118 aa, Artificial Sequence
  Description of Artificial Sequence: Synthetic polypeptide
  VH of XENP019812
QVQLVESGGGVVQPGRSLRLSCAASGFTFSSYTMHWVRQAPGKGLEWVTFISYDKNNKYYADSVKGRFTISRDNSKNTLYLQMNSLRAEDTAIYYCARTGWLGPFDYWGQGTLVTVSS

SEQ ID NO: 5437 - protein, 108 aa, Artificial Sequence; identical to SEQ ID NO: 3741
  Description of Artificial Sequence: Synthetic polypeptide
  VL of XENP019812

SEQ ID NO: 5438 - protein, 5 aa, Artificial Sequence
  Description of Artificial Sequence: Synthetic peptide
  XENP019812 vhCDR1
SYTMH

SEQ ID NO: 5439 - protein, 17 aa, Artificial Sequence
  Description of Artificial Sequence: Synthetic peptide
  XENP019812 vhCDR2
FISYDKNNKYYADSVKG

SEQ ID NO: 5440 - protein, 9 aa, Artificial Sequence
  Description of Artificial Sequence: Synthetic peptide
  XENP019812 vhCDR3
TGWLGPFDY

SEQ ID NO: 5441 - protein, 12 aa, Artificial Sequence
  Description of Artificial Sequence: Synthetic peptide
  XENP019812 vlCDR1
RASQSVGSSYLA

SEQ ID NO: 5442 - protein, 7 aa, Artificial Sequence
  Description of Artificial Sequence: Synthetic peptide
  XENP019812 vlCDR2
GAFSRAT

SEQ ID NO: 5443 - protein, 9 aa, Artificial Sequence
  Description of Artificial Sequence: Synthetic peptide
  XENP019812 vlCDR3
QQYGSSPWT

SEQ ID NO: 5444 - protein, 246 aa, Artificial Sequence
  Description of Artificial Sequence: Synthetic polypeptide
  XENP019813 [CTLA-4]_H0.65_L0_scFv(GKPGS)4
QVQLVESGGGVVQPGRSLRLSCAASGFTFSSYTMHWVRQAPGKGLEWVTFISYDKNNKYYADSVKGRFTISEDNSKNTLYLQMNSLRAEDTAIYYCARTGWLGPFDYWGQGTLVTVSSGKPGSGKPGSGKPGSGKPGSEIVLTQSPGTLSLSPGERATLSCRASQSVGSSYLAWYQQKPGQAPRLLIYGAFSRATGIPDRFSGSGSGTDFTLTISRLEPEDFAVYYCQQYGSSPWTFGQGTKVEIK

SEQ ID NO: 5445 - protein, 118 aa, Artificial Sequence
  Description of Artificial Sequence: Synthetic polypeptide
  VH of XENP019813
QVQLVESGGGVVQPGRSLRLSCAASGFTFSSYTMHWVRQAPGKGLEWVTFISYDKNNKYYADSVKGRFTISEDNSKNTLYLQMNSLRAEDTAIYYCARTGWLGPFDYWGQGTLVTVSS

SEQ ID NO: 5446 - protein, 108 aa, Artificial Sequence; identical to SEQ ID NO: 3741
  Description of Artificial Sequence: Synthetic polypeptide
  VL of XENP019813

SEQ ID NO: 5447 - protein, 5 aa, Artificial Sequence
  Description of Artificial Sequence: Synthetic peptide
  XENP019813 vhCDR1
SYTMH

SEQ ID NO: 5448 - protein, 17 aa, Artificial Sequence
  Description of Artificial Sequence: Synthetic peptide
  XENP019813 vhCDR2
FISYDKNNKYYADSVKG

SEQ ID NO: 5449 - protein, 9 aa, Artificial Sequence
  Description of Artificial Sequence: Synthetic peptide
  XENP019813 vhCDR3
TGWLGPFDY

SEQ ID NO: 5450 - protein, 12 aa, Artificial Sequence
  Description of Artificial Sequence: Synthetic peptide
  XENP019813 vlCDR1
RASQSVGSSYLA

SEQ ID NO: 5451 - protein, 7 aa, Artificial Sequence
  Description of Artificial Sequence: Synthetic peptide
  XENP019813 vlCDR2
GAFSRAT

SEQ ID NO: 5452 - protein, 9 aa, Artificial Sequence
  Description of Artificial Sequence: Synthetic peptide
  XENP019813 vlCDR3
QQYGSSPWT

SEQ ID NO: 5453 - protein, 246 aa, Artificial Sequence
  Description of Artificial Sequence: Synthetic polypeptide
  XENP019814 [CTLA-4]_H0.66_L0_scFv(GKPGS)4
QVQLVESGGGVVQPGRSLRLSCAASGFTFSSYTMHWVRQAPGKGLEWVTFISYDGDNKYYADSVKGRFTISRDNSKNTLYLQMNSLRAEDTAIYYCARTGWLGPFDYWGQGTLVTVSSGKPGSGKPGSGKPGSGKPGSEIVLTQSPGTLSLSPGERATLSCRASQSVGSSYLAWYQQKPGQAPRLLIYGAFSRATGIPDRFSGSGSGTDFTLTISRLEPEDFAVYYCQQYGSSPWTFGQGTKVEIK

SEQ ID NO: 5454 - protein, 118 aa, Artificial Sequence
  Description of Artificial Sequence: Synthetic polypeptide
  VH of XENP019814
QVQLVESGGGVVQPGRSLRLSCAASGFTFSSYTMHWVRQAPGKGLEWVTFISYDGDNKYYADSVKGRFTISRDNSKNTLYLQMNSLRAEDTAIYYCARTGWLGPFDYWGQGTLVTVSS

SEQ ID NO: 5455 - protein, 108 aa, Artificial Sequence; identical to SEQ ID NO: 3741
  Description of Artificial Sequence: Synthetic polypeptide
  VL of XENP019814

SEQ ID NO: 5456 - protein, 5 aa, Artificial Sequence
  Description of Artificial Sequence: Synthetic peptide
  XENP019814 vhCDR1
SYTMH

SEQ ID NO: 5457 - protein, 17 aa, Artificial Sequence
  Description of Artificial Sequence: Synthetic peptide
  XENP019814 vhCDR2
FISYDGDNKYYADSVKG

SEQ ID NO: 5458 - protein, 9 aa, Artificial Sequence
  Description of Artificial Sequence: Synthetic peptide
  XENP019814 vhCDR3
TGWLGPFDY

SEQ ID NO: 5459 - protein, 12 aa, Artificial Sequence
  Description of Artificial Sequence: Synthetic peptide
  XENP019814 vlCDR1
RASQSVGSSYLA

SEQ ID NO: 5460 - protein, 7 aa, Artificial Sequence
  Description of Artificial Sequence: Synthetic peptide
  XENP019814 vlCDR2
GAFSRAT

SEQ ID NO: 5461 - protein, 9 aa, Artificial Sequence
  Description of Artificial Sequence: Synthetic peptide
  XENP019814 vlCDR3
QQYGSSPWT

SEQ ID NO: 5462 - protein, 246 aa, Artificial Sequence
  Description of Artificial Sequence: Synthetic polypeptide
  XENP019815 [CTLA-4]_H0.67_L0_scFv(GKPGS)4
QVQLVESGGGVVQPGRSLRLSCAASGFTFSSYTMHWVRQAPGKGLEWVTFISYDGGNKYYADSVKGRFTISRDNSKNTLYLQMNSLRAEDTAIYYCARTGWLGPFDYWGQGTLVTVSSGKPGSGKPGSGKPGSGKPGSEIVLTQSPGTLSLSPGERATLSCRASQSVGSSYLAWYQQKPGQAPRLLIYGAFSRATGIPDRFSGSGSGTDFTLTISRLEPEDFAVYYCQQYGSSPWTFGQGTKVEIK

SEQ ID NO: 5463 - protein, 118 aa, Artificial Sequence
  Description of Artificial Sequence: Synthetic polypeptide
  VH of XENP019815
QVQLVESGGGVVQPGRSLRLSCAASGFTFSSYTMHWVRQAPGKGLEWVTFISYDGGNKYYADSVKGRFTISRDNSKNTLYLQMNSLRAEDTAIYYCARTGWLGPFDYWGQGTLVTVSS

SEQ ID NO: 5464 - protein, 108 aa, Artificial Sequence; identical to SEQ ID NO: 3741
  Description of Artificial Sequence: Synthetic polypeptide
  VL of XENP019815

SEQ ID NO: 5465 - protein, 5 aa, Artificial Sequence
  Description of Artificial Sequence: Synthetic peptide
  XENP019815 vhCDR1
SYTMH

SEQ ID NO: 5466 - protein, 17 aa, Artificial Sequence
  Description of Artificial Sequence: Synthetic peptide
  XENP019815 vhCDR2
FISYDGGNKYYADSVKG

SEQ ID NO: 5467 - protein, 9 aa, Artificial Sequence
  Description of Artificial Sequence: Synthetic peptide
  XENP019815 vhCDR3
TGWLGPFDY

SEQ ID NO: 5468 - protein, 12 aa, Artificial Sequence
  Description of Artificial Sequence: Synthetic peptide
  XENP019815 vlCDR1
RASQSVGSSYLA

SEQ ID NO: 5469 - protein, 7 aa, Artificial Sequence
  Description of Artificial Sequence: Synthetic peptide
  XENP019815 vlCDR2
GAFSRAT

SEQ ID NO: 5470 - protein, 9 aa, Artificial Sequence
  Description of Artificial Sequence: Synthetic peptide
  XENP019815 vlCDR3
QQYGSSPWT

SEQ ID NO: 5471 - protein, 246 aa, Artificial Sequence
  Description of Artificial Sequence: Synthetic polypeptide
  XENP019816 [CTLA-4]_H0.68_L0_scFv(GKPGS)4
QVQLVESGGGVVQPGRSLRLSCAASGFTFSSYTMHWVRQAPGKGLEWVTFISYDGHNKYYADSVKGRFTISRDNSKNTLYLQMNSLRAEDTAIYYCARTGWLGPFDYWGQGTLVTVSSGKPGSGKPGSGKPGSGKPGSEIVLTQSPGTLSLSPGERATLSCRASQSVGSSYLAWYQQKPGQAPRLLIYGAFSRATGIPDRFSGSGSGTDFTLTISRLEPEDFAVYYCQQYGSSPWTFGQGTKVEIK

SEQ ID NO: 5472 - protein, 118 aa, Artificial Sequence
  Description of Artificial Sequence: Synthetic polypeptide
  VH of XENP019816
QVQLVESGGGVVQPGRSLRLSCAASGFTFSSYTMHWVRQAPGKGLEWVTFISYDGHNKYYADSVKGRFTISRDNSKNTLYLQMNSLRAEDTAIYYCARTGWLGPFDYWGQGTLVTVSS

SEQ ID NO: 5473 - protein, 108 aa, Artificial Sequence; identical to SEQ ID NO: 3741
  Description of Artificial Sequence: Synthetic polypeptide
  VL of XENP019816

SEQ ID NO: 5474 - protein, 5 aa, Artificial Sequence
  Description of Artificial Sequence: Synthetic peptide
  XENP019816 vhCDR1
SYTMH

SEQ ID NO: 5475 - protein, 17 aa, Artificial Sequence
  Description of Artificial Sequence: Synthetic peptide
  XENP019816 vhCDR2
FISYDGHNKYYADSVKG

SEQ ID NO: 5476 - protein, 9 aa, Artificial Sequence
  Description of Artificial Sequence: Synthetic peptide
  XENP019816 vhCDR3
TGWLGPFDY

SEQ ID NO: 5477 - protein, 12 aa, Artificial Sequence
  Description of Artificial Sequence: Synthetic peptide
  XENP019816 vlCDR1
RASQSVGSSYLA

SEQ ID NO: 5478 - protein, 7 aa, Artificial Sequence
  Description of Artificial Sequence: Synthetic peptide
  XENP019816 vlCDR2
GAFSRAT

SEQ ID NO: 5479 - protein, 9 aa, Artificial Sequence
  Description of Artificial Sequence: Synthetic peptide
  XENP019816 vlCDR3
QQYGSSPWT

SEQ ID NO: 5480 - protein, 246 aa, Artificial Sequence
  Description of Artificial Sequence: Synthetic polypeptide
  XENP019817 [CTLA-4]_H0.69_L0_scFv(GKPGS)4
QVQLVESGGGVVQPGRSLRLSCAASGFTFSSYTMHWVRQAPGKGLEWVTFISYDGQNKYYADSVKGRFTISRDNSKNTLYLQMNSLRAEDTAIYYCARTGWLGPFDYWGQGTLVTVSSGKPGSGKPGSGKPGSGKPGSEIVLTQSPGTLSLSPGERATLSCRASQSVGSSYLAWYQQKPGQAPRLLIYGAFSRATGIPDRFSGSGSGTDFTLTISRLEPEDFAVYYCQQYGSSPWTFGQGTKVEIK

SEQ ID NO: 5481 - protein, 118 aa, Artificial Sequence
  Description of Artificial Sequence: Synthetic polypeptide
  VH of XENP019817
QVQLVESGGGVVQPGRSLRLSCAASGFTFSSYTMHWVRQAPGKGLEWVTFISYDGQNKYYADSVKGRFTISRDNSKNTLYLQMNSLRAEDTAIYYCARTGWLGPFDYWGQGTLVTVSS

SEQ ID NO: 5482 - protein, 108 aa, Artificial Sequence; identical to SEQ ID NO: 3741
  Description of Artificial Sequence: Synthetic polypeptide
  VL of XENP019817

SEQ ID NO: 5483 - protein, 5 aa, Artificial Sequence
  Description of Artificial Sequence: Synthetic peptide
  XENP019817 vhCDR1
SYTMH

SEQ ID NO: 5484 - protein, 17 aa, Artificial Sequence
  Description of Artificial Sequence: Synthetic peptide
  XENP019817 vhCDR2
FISYDGQNKYYADSVKG

SEQ ID NO: 5485 - protein, 9 aa, Artificial Sequence
  Description of Artificial Sequence: Synthetic peptide
  XENP019817 vhCDR3
TGWLGPFDY

SEQ ID NO: 5486 - protein, 12 aa, Artificial Sequence
  Description of Artificial Sequence: Synthetic peptide
  XENP019817 vlCDR1
RASQSVGSSYLA

SEQ ID NO: 5487 - protein, 7 aa, Artificial Sequence
  Description of Artificial Sequence: Synthetic peptide
  XENP019817 vlCDR2
GAFSRAT

SEQ ID NO: 5488 - protein, 9 aa, Artificial Sequence
  Description of Artificial Sequence: Synthetic peptide
  XENP019817 vlCDR3
QQYGSSPWT

SEQ ID NO: 5489 - protein, 246 aa, Artificial Sequence
  Description of Artificial Sequence: Synthetic polypeptide
  XENP019818 [CTLA-4]_H0.70_L0_scFv(GKPGS)4
QVQLVESGGGVVQPGRSLRLSCAASGFTFSSYTMHWVRQAPGKGLEWVTFISYDGSNKYYADSVKGRFTISRDNSKNTLYLQMNSLRAEDTAIYYCARTGWLGPFDYWGQGTLVTVSSGKPGSGKPGSGKPGSGKPGSEIVLTQSPGTLSLSPGERATLSCRASQSVGSSYLAWYQQKPGQAPRLLIYGAFSRATGIPDRFSGSGSGTDFTLTISRLEPEDFAVYYCQQYGSSPWTFGQGTKVEIK

SEQ ID NO: 5490 - protein, 118 aa, Artificial Sequence
  Description of Artificial Sequence: Synthetic polypeptide
  VH of XENP019818
QVQLVESGGGVVQPGRSLRLSCAASGFTFSSYTMHWVRQAPGKGLEWVTFISYDGSNKYYADSVKGRFTISRDNSKNTLYLQMNSLRAEDTAIYYCARTGWLGPFDYWGQGTLVTVSS

SEQ ID NO: 5491 - protein, 108 aa, Artificial Sequence; identical to SEQ ID NO: 3741
  Description of Artificial Sequence: Synthetic polypeptide
  VL of XENP019818

SEQ ID NO: 5492 - protein, 5 aa, Artificial Sequence
  Description of Artificial Sequence: Synthetic peptide
  XENP019818 vhCDR1
SYTMH

SEQ ID NO: 5493 - protein, 17 aa, Artificial Sequence
  Description of Artificial Sequence: Synthetic peptide
  XENP019818 vhCDR2
FISYDGSNKYYADSVKG

SEQ ID NO: 5494 - protein, 9 aa, Artificial Sequence
  Description of Artificial Sequence: Synthetic peptide
  XENP019818 vhCDR3
TGWLGPFDY

SEQ ID NO: 5495 - protein, 12 aa, Artificial Sequence
  Description of Artificial Sequence: Synthetic peptide
  XENP019818 vlCDR1
RASQSVGSSYLA

SEQ ID NO: 5496 - protein, 7 aa, Artificial Sequence
  Description of Artificial Sequence: Synthetic peptide
  XENP019818 vlCDR2
GAFSRAT

SEQ ID NO: 5497 - protein, 9 aa, Artificial Sequence
  Description of Artificial Sequence: Synthetic peptide
  XENP019818 vlCDR3
QQYGSSPWT

SEQ ID NO: 5498 - protein, 246 aa, Artificial Sequence
  Description of Artificial Sequence: Synthetic polypeptide
  XENP019819 [CTLA-4]_H0.71_L0_scFv(GKPGS)4
QVQLVESGGGVVQPGRSLRLSCAASGFTFSSYTMHWVRQAPGKGLEWVTFISYDGNDKYYADSVKGRFTISRDNSKNTLYLQMNSLRAEDTAIYYCARTGWLGPFDYWGQGTLVTVSSGKPGSGKPGSGKPGSGKPGSEIVLTQSPGTLSLSPGERATLSCRASQSVGSSYLAWYQQKPGQAPRLLIYGAFSRATGIPDRFSGSGSGTDFTLTISRLEPEDFAVYYCQQYGSSPWTFGQGTKVEIK

SEQ ID NO: 5499 - protein, 118 aa, Artificial Sequence
  Description of Artificial Sequence: Synthetic polypeptide
  VH of XENP019819
QVQLVESGGGVVQPGRSLRLSCAASGFTFSSYTMHWVRQAPGKGLEWVTFISYDGNDKYYADSVKGRFTISRDNSKNTLYLQMNSLRAEDTAIYYCARTGWLGPFDYWGQGTLVTVSS

SEQ ID NO: 5500 - protein, 108 aa, Artificial Sequence; identical to SEQ ID NO: 3741
  Description of Artificial Sequence: Synthetic polypeptide
  VL of XENP019819

SEQ ID NO: 5501 - protein, 5 aa, Artificial Sequence
  Description of Artificial Sequence: Synthetic peptide
  XENP019819 vhCDR1
SYTMH

SEQ ID NO: 5502 - protein, 17 aa, Artificial Sequence
  Description of Artificial Sequence: Synthetic peptide
  XENP019819 vhCDR2
FISYDGNDKYYADSVKG

SEQ ID NO: 5503 - protein, 9 aa, Artificial Sequence
  Description of Artificial Sequence: Synthetic peptide
  XENP019819 vhCDR3
TGWLGPFDY

SEQ ID NO: 5504 - protein, 12 aa, Artificial Sequence
  Description of Artificial Sequence: Synthetic peptide
  XENP019819 vlCDR1
RASQSVGSSYLA

SEQ ID NO: 5505 - protein, 7 aa, Artificial Sequence
  Description of Artificial Sequence: Synthetic peptide
  XENP019819 vlCDR2
GAFSRAT

SEQ ID NO: 5506 - protein, 9 aa, Artificial Sequence
  Description of Artificial Sequence: Synthetic peptide
  XENP019819 vlCDR3
QQYGSSPWT

SEQ ID NO: 5507 - protein, 246 aa, Artificial Sequence
  Description of Artificial Sequence: Synthetic polypeptide
  XENP019820 [CTLA-4]_H0.72_L0_scFv(GKPGS)4
QVQLVESGGGVVQPGRSLRLSCAASGFTFSSYTMHWVRQAPGKGLEWVTFISYDGNEKYYADSVKGRFTISRDNSKNTLYLQMNSLRAEDTAIYYCARTGWLGPFDYWGQGTLVTVSSGKPGSGKPGSGKPGSGKPGSEIVLTQSPGTLSLSPGERATLSCRASQSVGSSYLAWYQQKPGQAPRLLIYGAFSRATGIPDRFSGSGSGTDFTLTISRLEPEDFAVYYCQQYGSSPWTFGQGTKVEIK

SEQ ID NO: 5508 - protein, 118 aa, Artificial Sequence
  Description of Artificial Sequence: Synthetic polypeptide
  VH of XENP019820
QVQLVESGGGVVQPGRSLRLSCAASGFTFSSYTMHWVRQAPGKGLEWVTFISYDGNEKYYADSVKGRFTISRDNSKNTLYLQMNSLRAEDTAIYYCARTGWLGPFDYWGQGTLVTVSS

SEQ ID NO: 5509 - protein, 108 aa, Artificial Sequence; identical to SEQ ID NO: 3741
  Description of Artificial Sequence: Synthetic polypeptide
  VL of XENP019820

SEQ ID NO: 5510 - protein, 5 aa, Artificial Sequence
  Description of Artificial Sequence: Synthetic peptide
  XENP019820 vhCDR1
SYTMH

SEQ ID NO: 5511 - protein, 17 aa, Artificial Sequence
  Description of Artificial Sequence: Synthetic peptide
  XENP019820 vhCDR2
FISYDGNEKYYADSVKG

SEQ ID NO: 5512 - protein, 9 aa, Artificial Sequence
  Description of Artificial Sequence: Synthetic peptide
  XENP019820 vhCDR3
TGWLGPFDY

SEQ ID NO: 5513 - protein, 12 aa, Artificial Sequence
  Description of Artificial Sequence: Synthetic peptide
  XENP019820 vlCDR1
RASQSVGSSYLA

SEQ ID NO: 5514 - protein, 7 aa, Artificial Sequence
  Description of Artificial Sequence: Synthetic peptide
  XENP019820 vlCDR2
GAFSRAT

SEQ ID NO: 5515 - protein, 9 aa, Artificial Sequence
  Description of Artificial Sequence: Synthetic peptide
  XENP019820 vlCDR3
QQYGSSPWT

SEQ ID NO: 5516 - protein, 246 aa, Artificial Sequence
  Description of Artificial Sequence: Synthetic polypeptide
  XENP019821 [CTLA-4]_H0.73_L0_scFv(GKPGS)4
QVQLVESGGGVVQPGRSLRLSCAASGFTFSSYTMHWVRQAPGKGLEWVTFISYDGNHKYYADSVKGRFTISRDNSKNTLYLQMNSLRAEDTAIYYCARTGWLGPFDYWGQGTLVTVSSGKPGSGKPGSGKPGSGKPGSEIVLTQSPGTLSLSPGERATLSCRASQSVGSSYLAWYQQKPGQAPRLLIYGAFSRATGIPDRFSGSGSGTDFTLTISRLEPEDFAVYYCQQYGSSPWTFGQGTKVEIK

SEQ ID NO: 5517 - protein, 118 aa, Artificial Sequence
  Description of Artificial Sequence: Synthetic polypeptide
  VH of XENP019821
QVQLVESGGGVVQPGRSLRLSCAASGFTFSSYTMHWVRQAPGKGLEWVTFISYDGNHKYYADSVKGRFTISRDNSKNTLYLQMNSLRAEDTAIYYCARTGWLGPFDYWGQGTLVTVSS

SEQ ID NO: 5518 - protein, 108 aa, Artificial Sequence; identical to SEQ ID NO: 3741
  Description of Artificial Sequence: Synthetic polypeptide
  VL of XENP019821

SEQ ID NO: 5519 - protein, 5 aa, Artificial Sequence
  Description of Artificial Sequence: Synthetic peptide
  XENP019821 vhCDR1
SYTMH

SEQ ID NO: 5520 - protein, 17 aa, Artificial Sequence
  Description of Artificial Sequence: Synthetic peptide
  XENP019821 vhCDR2
FISYDGNHKYYADSVKG

SEQ ID NO: 5521 - protein, 9 aa, Artificial Sequence
  Description of Artificial Sequence: Synthetic peptide
  XENP019821 vhCDR3
TGWLGPFDY

SEQ ID NO: 5522 - protein, 12 aa, Artificial Sequence
  Description of Artificial Sequence: Synthetic peptide
  XENP019821 vlCDR1
RASQSVGSSYLA

SEQ ID NO: 5523 - protein, 7 aa, Artificial Sequence
  Description of Artificial Sequence: Synthetic peptide
  XENP019821 vlCDR2
GAFSRAT

SEQ ID NO: 5524 - protein, 9 aa, Artificial Sequence
  Description of Artificial Sequence: Synthetic peptide
  XENP019821 vlCDR3
QQYGSSPWT

SEQ ID NO: 5525 - protein, 246 aa, Artificial Sequence
  Description of Artificial Sequence: Synthetic polypeptide
  XENP019822 [CTLA-4]_H0.74_L0_scFv(GKPGS)4
QVQLVESGGGVVQPGRSLRLSCAASGFTFSSYTMHWVRQAPGKGLEWVTFISYDGNSKYYADSVKGRFTISRDNSKNTLYLQMNSLRAEDTAIYYCARTGWLGPFDYWGQGTLVTVSSGKPGSGKPGSGKPGSGKPGSEIVLTQSPGTLSLSPGERATLSCRASQSVGSSYLAWYQQKPGQAPRLLIYGAFSRATGIPDRFSGSGSGTDFTLTISRLEPEDFAVYYCQQYGSSPWTFGQGTKVEIK

SEQ ID NO: 5526 - protein, 118 aa, Artificial Sequence
  Description of Artificial Sequence: Synthetic polypeptide
  VH of XENP019822
QVQLVESGGGVVQPGRSLRLSCAASGFTFSSYTMHWVRQAPGKGLEWVTFISYDGNSKYYADSVKGRFTISRDNSKNTLYLQMNSLRAEDTAIYYCARTGWLGPFDYWGQGTLVTVSS

SEQ ID NO: 5527 - protein, 108 aa, Artificial Sequence; identical to SEQ ID NO: 3741
  Description of Artificial Sequence: Synthetic polypeptide
  VL of XENP019822

SEQ ID NO: 5528 - protein, 5 aa, Artificial Sequence
  Description of Artificial Sequence: Synthetic peptide
  XENP019822 vhCDR1
SYTMH

SEQ ID NO: 5529 - protein, 17 aa, Artificial Sequence
  Description of Artificial Sequence: Synthetic peptide
  XENP019822 vhCDR2
FISYDGNSKYYADSVKG

SEQ ID NO: 5530 - protein, 9 aa, Artificial Sequence
  Description of Artificial Sequence: Synthetic peptide
  XENP019822 vhCDR3
TGWLGPFDY

SEQ ID NO: 5531 - protein, 12 aa, Artificial Sequence
  Description of Artificial Sequence: Synthetic peptide
  XENP019822 vlCDR1
RASQSVGSSYLA

SEQ ID NO: 5532 - protein, 7 aa, Artificial Sequence
  Description of Artificial Sequence: Synthetic peptide
  XENP019822 vlCDR2
GAFSRAT

SEQ ID NO: 5533 - protein, 9 aa, Artificial Sequence
  Description of Artificial Sequence: Synthetic peptide
  XENP019822 vlCDR3
QQYGSSPWT

SEQ ID NO: 5534 - protein, 246 aa, Artificial Sequence
  Description of Artificial Sequence: Synthetic polypeptide
  XENP019823 [CTLA-4]_H0.75_L0_scFv(GKPGS)4
QVQLVESGGGVVQPGRSLRLSCAASGFTFSSYTMHWVRQAPGKGLEWVTFISYDGNTKYYADSVKGRFTISRDNSKNTLYLQMNSLRAEDTAIYYCARTGWLGPFDYWGQGTLVTVSSGKPGSGKPGSGKPGSGKPGSEIVLTQSPGTLSLSPGERATLSCRASQSVGSSYLAWYQQKPGQAPRLLIYGAFSRATGIPDRFSGSGSGTDFTLTISRLEPEDFAVYYCQQYGSSPWTFGQGTKVEIK

SEQ ID NO: 5535 - protein, 118 aa, Artificial Sequence
  Description of Artificial Sequence: Synthetic polypeptide
  VH of XENP019823
QVQLVESGGGVVQPGRSLRLSCAASGFTFSSYTMHWVRQAPGKGLEWVTFISYDGNTKYYADSVKGRFTISRDNSKNTLYLQMNSLRAEDTAIYYCARTGWLGPFDYWGQGTLVTVSS

SEQ ID NO: 5536 - protein, 108 aa, Artificial Sequence; identical to SEQ ID NO: 3741
  Description of Artificial Sequence: Synthetic polypeptide
  VL of XENP019823

SEQ ID NO: 5537 - protein, 5 aa, Artificial Sequence
  Description of Artificial Sequence: Synthetic peptide
  XENP019823 vhCDR1
SYTMH

SEQ ID NO: 5538 - protein, 17 aa, Artificial Sequence
  Description of Artificial Sequence: Synthetic peptide
  XENP019823 vhCDR2
FISYDGNTKYYADSVKG

SEQ ID NO: 5539 - protein, 9 aa, Artificial Sequence
  Description of Artificial Sequence: Synthetic peptide
  XENP019823 vhCDR3
TGWLGPFDY

SEQ ID NO: 5540 - protein, 12 aa, Artificial Sequence
  Description of Artificial Sequence: Synthetic peptide
  XENP019823 vlCDR1
RASQSVGSSYLA

SEQ ID NO: 5541 - protein, 7 aa, Artificial Sequence
  Description of Artificial Sequence: Synthetic peptide
  XENP019823 vlCDR2
GAFSRAT

SEQ ID NO: 5542 - protein, 9 aa, Artificial Sequence
  Description of Artificial Sequence: Synthetic peptide
  XENP019823 vlCDR3
QQYGSSPWT

SEQ ID NO: 5543 - protein, 246 aa, Artificial Sequence
  Description of Artificial Sequence: Synthetic polypeptide
  XENP019824 [CTLA-4]_H0.76_L0_scFv(GKPGS)4
QVQLVESGGGVVQPGRSLRLSCAASGFTFSSYTMHWVRQAPGKGLEWVTFISYDGNQKYYADSVKGRFTISRDNSKNTLYLQMNSLRAEDTAIYYCARTGWLGPFDYWGQGTLVTVSSGKPGSGKPGSGKPGSGKPGSEIVLTQSPGTLSLSPGERATLSCRASQSVGSSYLAWYQQKPGQAPRLLIYGAFSRATGIPDRFSGSGSGTDFTLTISRLEPEDFAVYYCQQYGSSPWTFGQGTKVEIK

SEQ ID NO: 5544 - protein, 118 aa, Artificial Sequence
  Description of Artificial Sequence: Synthetic polypeptide
  VH of XENP019824
QVQLVESGGGVVQPGRSLRLSCAASGFTFSSYTMHWVRQAPGKGLEWVTFISYDGNQKYYADSVKGRFTISRDNSKNTLYLQMNSLRAEDTAIYYCARTGWLGPFDYWGQGTLVTVSS

SEQ ID NO: 5545 - protein, 108 aa, Artificial Sequence; identical to SEQ ID NO: 3741
  Description of Artificial Sequence: Synthetic polypeptide
  VL of XENP019824

SEQ ID NO: 5546 - protein, 5 aa, Artificial Sequence
  Description of Artificial Sequence: Synthetic peptide
  XENP019824 vhCDR1
SYTMH

SEQ ID NO: 5547 - protein, 17 aa, Artificial Sequence
  Description of Artificial Sequence: Synthetic peptide
  XENP019824 vhCDR2
FISYDGNQKYYADSVKG

SEQ ID NO: 5548 - protein, 9 aa, Artificial Sequence
  Description of Artificial Sequence: Synthetic peptide
  XENP019824 vhCDR3
TGWLGPFDY

SEQ ID NO: 5549 - protein, 12 aa, Artificial Sequence
  Description of Artificial Sequence: Synthetic peptide
  XENP019824 vlCDR1
RASQSVGSSYLA

SEQ ID NO: 5550 - protein, 7 aa, Artificial Sequence
  Description of Artificial Sequence: Synthetic peptide
  XENP019824 vlCDR2
GAFSRAT

SEQ ID NO: 5551 - protein, 9 aa, Artificial Sequence
  Description of Artificial Sequence: Synthetic peptide
  XENP019824 vlCDR3
QQYGSSPWT

SEQ ID NO: 5552 - protein, 246 aa, Artificial Sequence
  Description of Artificial Sequence: Synthetic polypeptide
  XENP019825 [CTLA-4]_H0.77_L0_scFv(GKPGS)4
QVQLVESGGGVVQPGRSLRLSCAASGFTFSSYTMHWVRQAPGKGLEWVTFISYDGNNIYYADSVKGRFTISRDNSKNTLYLQMNSLRAEDTAIYYCARTGWLGPFDYWGQGTLVTVSSGKPGSGKPGSGKPGSGKPGSEIVLTQSPGTLSLSPGERATLSCRASQSVGSSYLAWYQQKPGQAPRLLIYGAFSRATGIPDRFSGSGSGTDFTLTISRLEPEDFAVYYCQQYGSSPWTFGQGTKVEIK

SEQ ID NO: 5553 - protein, 118 aa, Artificial Sequence
  Description of Artificial Sequence: Synthetic polypeptide
  VH of XENP019825
QVQLVESGGGVVQPGRSLRLSCAASGFTFSSYTMHWVRQAPGKGLEWVTFISYDGNNIYYADSVKGRFTISRDNSKNTLYLQMNSLRAEDTAIYYCARTGWLGPFDYWGQGTLVTVSS

SEQ ID NO: 5554 - protein, 108 aa, Artificial Sequence; identical to SEQ ID NO: 3741
  Description of Artificial Sequence: Synthetic polypeptide
  VL of XENP019825

SEQ ID NO: 5555 - protein, 5 aa, Artificial Sequence
  Description of Artificial Sequence: Synthetic peptide
  XENP019825 vhCDR1
SYTMH

SEQ ID NO: 5556 - protein, 17 aa, Artificial Sequence
  Description of Artificial Sequence: Synthetic peptide
  XENP019825 vhCDR2
FISYDGNNIYYADSVKG

SEQ ID NO: 5557 - protein, 9 aa, Artificial Sequence
  Description of Artificial Sequence: Synthetic peptide
  XENP019825 vhCDR3
TGWLGPFDY

SEQ ID NO: 5558 - protein, 12 aa, Artificial Sequence
  Description of Artificial Sequence: Synthetic peptide
  XENP019825 vlCDR1
RASQSVGSSYLA

SEQ ID NO: 5559 - protein, 7 aa, Artificial Sequence
  Description of Artificial Sequence: Synthetic peptide
  XENP019825 vlCDR2
GAFSRAT

SEQ ID NO: 5560 - protein, 9 aa, Artificial Sequence
  Description of Artificial Sequence: Synthetic peptide
  XENP019825 vlCDR3
QQYGSSPWT

SEQ ID NO: 5561 - protein, 246 aa, Artificial Sequence
  Description of Artificial Sequence: Synthetic polypeptide
  XENP019826 [CTLA-4]_H0.78_L0_scFv(GKPGS)4
QVQLVESGGGVVQPGRSLRLSCAASGFTFSSYTMHWVRQAPGKGLEWVTFISYDGNNTYYADSVKGRFTISRDNSKNTLYLQMNSLRAEDTAIYYCARTGWLGPFDYWGQGTLVTVSSGKPGSGKPGSGKPGSGKPGSEIVLTQSPGTLSLSPGERATLSCRASQSVGSSYLAWYQQKPGQAPRLLIYGAFSRATGIPDRFSGSGSGTDFTLTISRLEPEDFAVYYCQQYGSSPWTFGQGTKVEIK

SEQ ID NO: 5562 - protein, 118 aa, Artificial Sequence
  Description of Artificial Sequence: Synthetic polypeptide
  VH of XENP019826
QVQLVESGGGVVQPGRSLRLSCAASGFTFSSYTMHWVRQAPGKGLEWVTFISYDGNNTYYADSVKGRFTISRDNSKNTLYLQMNSLRAEDTAIYYCARTGWLGPFDYWGQGTLVTVSS

SEQ ID NO: 5563 - protein, 108 aa, Artificial Sequence; identical to SEQ ID NO: 3741
  Description of Artificial Sequence: Synthetic polypeptide
  VL of XENP019826

SEQ ID NO: 5564 - protein, 5 aa, Artificial Sequence
  Description of Artificial Sequence: Synthetic peptide
  XENP019826 vhCDR1
SYTMH

SEQ ID NO: 5565 - protein, 17 aa, Artificial Sequence
  Description of Artificial Sequence: Synthetic peptide
  XENP019826 vhCDR2
FISYDGNNTYYADSVKG

SEQ ID NO: 5566 - protein, 9 aa, Artificial Sequence
  Description of Artificial Sequence: Synthetic peptide
  XENP019826 vhCDR3
TGWLGPFDY

SEQ ID NO: 5567 - protein, 12 aa, Artificial Sequence
  Description of Artificial Sequence: Synthetic peptide
  XENP019826 vlCDR1
RASQSVGSSYLA

SEQ ID NO: 5568 - protein, 7 aa, Artificial Sequence
  Description of Artificial Sequence: Synthetic peptide
  XENP019826 vlCDR2
GAFSRAT

SEQ ID NO: 5569 - protein, 9 aa, Artificial Sequence
  Description of Artificial Sequence: Synthetic peptide
  XENP019826 vlCDR3
QQYGSSPWT

SEQ ID NO: 5570 - protein, 246 aa, Artificial Sequence
  Description of Artificial Sequence: Synthetic polypeptide
  XENP019827 [CTLA-4]_H0.79_L0_scFv(GKPGS)4
QVQLVESGGGVVQPGRSLRLSCAASGFTFSSYTMHWVRQAPGKGLEWVTFISYDGNNKAYADSVKGRFTISRDNSKNTLYLQMNSLRAEDTAIYYCARTGWLGPFDYWGQGTLVTVSSGKPGSGKPGSGKPGSGKPGSEIVLTQSPGTLSLSPGERATLSCRASQSVGSSYLAWYQQKPGQAPRLLIYGAFSRATGIPDRFSGSGSGTDFTLTISRLEPEDFAVYYCQQYGSSPWTFGQGTKVEIK

SEQ ID NO: 5571 - protein, 118 aa, Artificial Sequence
  Description of Artificial Sequence: Synthetic polypeptide
  VH of XENP019827
QVQLVESGGGVVQPGRSLRLSCAASGFTFSSYTMHWVRQAPGKGLEWVTFISYDGNNKAYADSVKGRFTISRDNSKNTLYLQMNSLRAEDTAIYYCARTGWLGPFDYWGQGTLVTVSS

SEQ ID NO: 5572 - protein, 108 aa, Artificial Sequence; identical to SEQ ID NO: 3741
  Description of Artificial Sequence: Synthetic polypeptide
  VL of XENP019827

SEQ ID NO: 5573 - protein, 5 aa, Artificial Sequence
  Description of Artificial Sequence: Synthetic peptide
  XENP019827 vhCDR1
SYTMH

SEQ ID NO: 5574 - protein, 17 aa, Artificial Sequence
  Description of Artificial Sequence: Synthetic peptide
  XENP019827 vhCDR2
FISYDGNNKAYADSVKG

SEQ ID NO: 5575 - protein, 9 aa, Artificial Sequence
  Description of Artificial Sequence: Synthetic peptide
  XENP019827 vhCDR3
TGWLGPFDY

SEQ ID NO: 5576 - protein, 12 aa, Artificial Sequence
  Description of Artificial Sequence: Synthetic peptide
  XENP019827 vlCDR1
RASQSVGSSYLA

SEQ ID NO: 5577 - protein, 7 aa, Artificial Sequence
  Description of Artificial Sequence: Synthetic peptide
  XENP019827 vlCDR2
GAFSRAT

SEQ ID NO: 5578 - protein, 9 aa, Artificial Sequence
  Description of Artificial Sequence: Synthetic peptide
  XENP019827 vlCDR3
QQYGSSPWT

SEQ ID NO: 5579 - protein, 246 aa, Artificial Sequence
  Description of Artificial Sequence: Synthetic polypeptide
  XENP019828 [CTLA-4]_H0.80_L0_scFv(GKPGS)4
QVQLVESGGGVVQPGRSLRLSCAASGFTFSSYTMHWVRQAPGKGLEWVTFISYDGNNKYYAASVKGRFTISRDNSKNTLYLQMNSLRAEDTAIYYCARTGWLGPFDYWGQGTLVTVSSGKPGSGKPGSGKPGSGKPGSEIVLTQSPGTLSLSPGERATLSCRASQSVGSSYLAWYQQKPGQAPRLLIYGAFSRATGIPDRFSGSGSGTDFTLTISRLEPEDFAVYYCQQYGSSPWTFGQGTKVEIK

SEQ ID NO: 5580 - protein, 118 aa, Artificial Sequence
  Description of Artificial Sequence: Synthetic polypeptide
  VH of XENP019828
QVQLVESGGGVVQPGRSLRLSCAASGFTFSSYTMHWVRQAPGKGLEWVTFISYDGNNKYYAASVKGRFTISRDNSKNTLYLQMNSLRAEDTAIYYCARTGWLGPFDYWGQGTLVTVSS

SEQ ID NO: 5581 - protein, 108 aa, Artificial Sequence; identical to SEQ ID NO: 3741
  Description of Artificial Sequence: Synthetic polypeptide
  VL of XENP019828

SEQ ID NO: 5582 - protein, 5 aa, Artificial Sequence
  Description of Artificial Sequence: Synthetic peptide
  XENP019828 vhCDR1
SYTMH

SEQ ID NO: 5583 - protein, 17 aa, Artificial Sequence
  Description of Artificial Sequence: Synthetic peptide
  XENP019828 vhCDR2
FISYDGNNKYYAASVKG

SEQ ID NO: 5584 - protein, 9 aa, Artificial Sequence
  Description of Artificial Sequence: Synthetic peptide
  XENP019828 vhCDR3
TGWLGPFDY

SEQ ID NO: 5585 - protein, 12 aa, Artificial Sequence
  Description of Artificial Sequence: Synthetic peptide
  XENP019828 vlCDR1
RASQSVGSSYLA

SEQ ID NO: 5586 - protein, 7 aa, Artificial Sequence
  Description of Artificial Sequence: Synthetic peptide
  XENP019828 vlCDR2
GAFSRAT

SEQ ID NO: 5587 - protein, 9 aa, Artificial Sequence
  Description of Artificial Sequence: Synthetic peptide
  XENP019828 vlCDR3
QQYGSSPWT

SEQ ID NO: 5588 - protein, 246 aa, Artificial Sequence
  Description of Artificial Sequence: Synthetic polypeptide
  XENP019829 [CTLA-4]_H0.81_L0_scFv(GKPGS)4
QVQLVESGGGVVQPGRSLRLSCAASGFTFSSYTMHWVRQAPGKGLEWVTFISYDGNNKYYAKSVKGRFTISRDNSKNTLYLQMNSLRAEDTAIYYCARTGWLGPFDYWGQGTLVTVSSGKPGSGKPGSGKPGSGKPGSEIVLTQSPGTLSLSPGERATLSCRASQSVGSSYLAWYQQKPGQAPRLLIYGAFSRATGIPDRFSGSGSGTDFTLTISRLEPEDFAVYYCQQYGSSPWTFGQGTKVEIK

SEQ ID NO: 5589 - protein, 118 aa, Artificial Sequence
  Description of Artificial Sequence: Synthetic polypeptide
  VH of XENP019829
QVQLVESGGGVVQPGRSLRLSCAASGFTFSSYTMHWVRQAPGKGLEWVTFISYDGNNKYYAKSVKGRFTISRDNSKNTLYLQMNSLRAEDTAIYYCARTGWLGPFDYWGQGTLVTVSS

SEQ ID NO: 5590 - protein, 108 aa, Artificial Sequence; identical to SEQ ID NO: 3741
  Description of Artificial Sequence: Synthetic polypeptide
  VL of XENP019829

SEQ ID NO: 5591 - protein, 5 aa, Artificial Sequence
  Description of Artificial Sequence: Synthetic peptide
  XENP019829 vhCDR1
SYTMH

SEQ ID NO: 5592 - protein, 17 aa, Artificial Sequence
  Description of Artificial Sequence: Synthetic peptide
  XENP019829 vhCDR2
FISYDGNNKYYAKSVKG

SEQ ID NO: 5593 - protein, 9 aa, Artificial Sequence
  Description of Artificial Sequence: Synthetic peptide
  XENP019829 vhCDR3
TGWLGPFDY

SEQ ID NO: 5594 - protein, 12 aa, Artificial Sequence
  Description of Artificial Sequence: Synthetic peptide
  XENP019829 vlCDR1
RASQSVGSSYLA

SEQ ID NO: 5595 - protein, 7 aa, Artificial Sequence
  Description of Artificial Sequence: Synthetic peptide
  XENP019829 vlCDR2
GAFSRAT

SEQ ID NO: 5596 - protein, 9 aa, Artificial Sequence
  Description of Artificial Sequence: Synthetic peptide
  XENP019829 vlCDR3
QQYGSSPWT

SEQ ID NO: 5597 - protein, 246 aa, Artificial Sequence
  Description of Artificial Sequence: Synthetic polypeptide
  XENP019830 [CTLA-4]_H0.82_L0_scFv(GKPGS)4
QVQLVESGGGVVQPGRSLRLSCAASGFTFSSYTMHWVRQAPGKGLEWVTFISYDGNNKYYADSVKDRFTISRDNSKNTLYLQMNSLRAEDTAIYYCARTGWLGPFDYWGQGTLVTVSSGKPGSGKPGSGKPGSGKPGSEIVLTQSPGTLSLSPGERATLSCRASQSVGSSYLAWYQQKPGQAPRLLIYGAFSRATGIPDRFSGSGSGTDFTLTISRLEPEDFAVYYCQQYGSSPWTFGQGTKVEIK

SEQ ID NO: 5598 - protein, 118 aa, Artificial Sequence
  Description of Artificial Sequence: Synthetic polypeptide
  VH of XENP019830
QVQLVESGGGVVQPGRSLRLSCAASGFTFSSYTMHWVRQAPGKGLEWVTFISYDGNNKYYADSVKDRFTISRDNSKNTLYLQMNSLRAEDTAIYYCARTGWLGPFDYWGQGTLVTVSS

SEQ ID NO: 5599 - protein, 108 aa, Artificial Sequence; identical to SEQ ID NO: 3741
  Description of Artificial Sequence: Synthetic polypeptide
  VL of XENP019830

SEQ ID NO: 5600 - protein, 5 aa, Artificial Sequence
  Description of Artificial Sequence: Synthetic peptide
  XENP019830 vhCDR1
SYTMH

SEQ ID NO: 5601 - protein, 17 aa, Artificial Sequence
  Description of Artificial Sequence: Synthetic peptide
  XENP019830 vhCDR2
FISYDGNNKYYADSVKD

SEQ ID NO: 5602 - protein, 9 aa, Artificial Sequence
  Description of Artificial Sequence: Synthetic peptide
  XENP019830 vhCDR3
TGWLGPFDY

SEQ ID NO: 5603 - protein, 12 aa, Artificial Sequence
  Description of Artificial Sequence: Synthetic peptide
  XENP019830 vlCDR1
RASQSVGSSYLA

SEQ ID NO: 5604 - protein, 7 aa, Artificial Sequence
  Description of Artificial Sequence: Synthetic peptide
  XENP019830 vlCDR2
GAFSRAT

SEQ ID NO: 5605 - protein, 9 aa, Artificial Sequence
  Description of Artificial Sequence: Synthetic peptide
  XENP019830 vlCDR3
QQYGSSPWT

SEQ ID NO: 5606 - protein, 246 aa, Artificial Sequence
  Description of Artificial Sequence: Synthetic polypeptide
  XENP019831 [CTLA-4]_H0.83_L0_scFv(GKPGS)4
QVQLVESGGGVVQPGRSLRLSCAASGFTFSSYTMHWVRQAPGKGLEWVTFISYDGNNKYYADSVKERFTISRDNSKNTLYLQMNSLRAEDTAIYYCARTGWLGPFDYWGQGTLVTVSSGKPGSGKPGSGKPGSGKPGSEIVLTQSPGTLSLSPGERATLSCRASQSVGSSYLAWYQQKPGQAPRLLIYGAFSRATGIPDRFSGSGSGTDFTLTISRLEPEDFAVYYCQQYGSSPWTFGQGTKVEIK

SEQ ID NO: 5607 - protein, 118 aa, Artificial Sequence
  Description of Artificial Sequence: Synthetic polypeptide
  VH of XENP019831
QVQLVESGGGVVQPGRSLRLSCAASGFTFSSYTMHWVRQAPGKGLEWVTFISYDGNNKYYADSVKERFTISRDNSKNTLYLQMNSLRAEDTAIYYCARTGWLGPFDYWGQGTLVTVSS

SEQ ID NO: 5608 - protein, 108 aa, Artificial Sequence; identical to SEQ ID NO: 3741
  Description of Artificial Sequence: Synthetic polypeptide
  VL of XENP019831

SEQ ID NO: 5609 - protein, 5 aa, Artificial Sequence
  Description of Artificial Sequence: Synthetic peptide
  XENP019831 vhCDR1
SYTMH

SEQ ID NO: 5610 - protein, 17 aa, Artificial Sequence
  Description of Artificial Sequence: Synthetic peptide
  XENP019831 vhCDR2
FISYDGNNKYYADSVKE

SEQ ID NO: 5611 - protein, 9 aa, Artificial Sequence
  Description of Artificial Sequence: Synthetic peptide
  XENP019831 vhCDR3
TGWLGPFDY

SEQ ID NO: 5612 - protein, 12 aa, Artificial Sequence
  Description of Artificial Sequence: Synthetic peptide
  XENP019831 vlCDR1
RASQSVGSSYLA

SEQ ID NO: 5613 - protein, 7 aa, Artificial Sequence
  Description of Artificial Sequence: Synthetic peptide
  XENP019831 vlCDR2
GAFSRAT

SEQ ID NO: 5614 - protein, 9 aa, Artificial Sequence
  Description of Artificial Sequence: Synthetic peptide
  XENP019831 vlCDR3
QQYGSSPWT

SEQ ID NO: 5615 - protein, 246 aa, Artificial Sequence
  Description of Artificial Sequence: Synthetic polypeptide
  XENP019832 [CTLA-4]_H0.84_L0_scFv(GKPGS)4
QVQLVESGGGVVQPGRSLRLSCAASGFTFSSYTMHWVRQAPGKGLEWVTFISYDGNNKYYADSVKGQFTISRDNSKNTLYLQMNSLRAEDTAIYYCARTGWLGPFDYWGQGTLVTVSSGKPGSGKPGSGKPGSGKPGSEIVLTQSPGTLSLSPGERATLSCRASQSVGSSYLAWYQQKPGQAPRLLIYGAFSRATGIPDRFSGSGSGTDFTLTISRLEPEDFAVYYCQQYGSSPWTFGQGTKVEIK

SEQ ID NO: 5616 - protein, 118 aa, Artificial Sequence
  Description of Artificial Sequence: Synthetic polypeptide
  VH of XENP019832
QVQLVESGGGVVQPGRSLRLSCAASGFTFSSYTMHWVRQAPGKGLEWVTFISYDGNNKYYADSVKGQFTISRDNSKNTLYLQMNSLRAEDTAIYYCARTGWLGPFDYWGQGTLVTVSS

SEQ ID NO: 5617 - protein, 108 aa, Artificial Sequence; identical to SEQ ID NO: 3741
  Description of Artificial Sequence: Synthetic polypeptide
  VL of XENP019832

SEQ ID NO: 5618 - protein, 5 aa, Artificial Sequence
  Description of Artificial Sequence: Synthetic peptide
  XENP019832 vhCDR1
SYTMH

SEQ ID NO: 5619 - protein, 17 aa, Artificial Sequence
  Description of Artificial Sequence: Synthetic peptide
  XENP019832 vhCDR2
FISYDGNNKYYADSVKG

SEQ ID NO: 5620 - protein, 9 aa, Artificial Sequence
  Description of Artificial Sequence: Synthetic peptide
  XENP019832 vhCDR3
TGWLGPFDY

SEQ ID NO: 5621 - protein, 12 aa, Artificial Sequence
  Description of Artificial Sequence: Synthetic peptide
  XENP019832 vlCDR1
RASQSVGSSYLA

SEQ ID NO: 5622 - protein, 7 aa, Artificial Sequence
  Description of Artificial Sequence: Synthetic peptide
  XENP019832 vlCDR2
GAFSRAT

SEQ ID NO: 5623 - protein, 9 aa, Artificial Sequence
  Description of Artificial Sequence: Synthetic peptide
  XENP019832 vlCDR3
QQYGSSPWT

SEQ ID NO: 5624 - protein, 246 aa, Artificial Sequence
  Description of Artificial Sequence: Synthetic polypeptide
  XENP019833 [CTLA-4]_H0.85_L0_scFv(GKPGS)4
QVQLVESGGGVVQPGRSLRLSCAASGFTFSSYTMHWVRQAPGKGLEWVTFISYDGNNKYYADSVKGRFTMSRDNSKNTLYLQMNSLRAEDTAIYYCARTGWLGPFDYWGQGTLVTVSSGKPGSGKPGSGKPGSGKPGSEIVLTQSPGTLSLSPGERATLSCRASQSVGSSYLAWYQQKPGQAPRLLIYGAFSRATGIPDRFSGSGSGTDFTLTISRLEPEDFAVYYCQQYGSSPWTFGQGTKVEIK

SEQ ID NO: 5625 - protein, 118 aa, Artificial Sequence
  Description of Artificial Sequence: Synthetic polypeptide
  VH of XENP019833
QVQLVESGGGVVQPGRSLRLSCAASGFTFSSYTMHWVRQAPGKGLEWVTFISYDGNNKYYADSVKGRFTMSRDNSKNTLYLQMNSLRAEDTAIYYCARTGWLGPFDYWGQGTLVTVSS

SEQ ID NO: 5626 - protein, 108 aa, Artificial Sequence; identical to SEQ ID NO: 3741
  Description of Artificial Sequence: Synthetic polypeptide
  VL of XENP019833

SEQ ID NO: 5627 - protein, 5 aa, Artificial Sequence
  Description of Artificial Sequence: Synthetic peptide
  XENP019833 vhCDR1
SYTMH

SEQ ID NO: 5628 - protein, 17 aa, Artificial Sequence
  Description of Artificial Sequence: Synthetic peptide
  XENP019833 vhCDR2
FISYDGNNKYYADSVKG

SEQ ID NO: 5629 - protein, 9 aa, Artificial Sequence
  Description of Artificial Sequence: Synthetic peptide
  XENP019833 vhCDR3
TGWLGPFDY

SEQ ID NO: 5630 - protein, 12 aa, Artificial Sequence
  Description of Artificial Sequence: Synthetic peptide
  XENP019833 vlCDR1
RASQSVGSSYLA

SEQ ID NO: 5631 - protein, 7 aa, Artificial Sequence
  Description of Artificial Sequence: Synthetic peptide
  XENP019833 vlCDR2
GAFSRAT

SEQ ID NO: 5632 - protein, 9 aa, Artificial Sequence
  Description of Artificial Sequence: Synthetic peptide
  XENP019833 vlCDR3
QQYGSSPWT

SEQ ID NO: 5633 - protein, 246 aa, Artificial Sequence
  Description of Artificial Sequence: Synthetic polypeptide
  XENP019834 [CTLA-4]_H0.86_L0_scFv(GKPGS)4
QVQLVESGGGVVQPGRSLRLSCAASGFTFSSYTMHWVRQAPGKGLEWVTFISYDGNNKYYADSVKGRFTVSRDNSKNTLYLQMNSLRAEDTAIYYCARTGWLGPFDYWGQGTLVTVSSGKPGSGKPGSGKPGSGKPGSEIVLTQSPGTLSLSPGERATLSCRASQSVGSSYLAWYQQKPGQAPRLLIYGAFSRATGIPDRFSGSGSGTDFTLTISRLEPEDFAVYYCQQYGSSPWTFGQGTKVEIK

SEQ ID NO: 5634 - protein, 118 aa, Artificial Sequence
  Description of Artificial Sequence: Synthetic polypeptide
  VH of XENP019834
QVQLVESGGGVVQPGRSLRLSCAASGFTFSSYTMHWVRQAPGKGLEWVTFISYDGNNKYYADSVKGRFTVSRDNSKNTLYLQMNSLRAEDTAIYYCARTGWLGPFDYWGQGTLVTVSS

SEQ ID NO: 5635 - protein, 108 aa, Artificial Sequence; identical to SEQ ID NO: 3741
  Description of Artificial Sequence: Synthetic polypeptide
  VL of XENP019834

SEQ ID NO: 5636 - protein, 5 aa, Artificial Sequence
  Description of Artificial Sequence: Synthetic peptide
  XENP019834 vhCDR1
SYTMH

SEQ ID NO: 5637 - protein, 17 aa, Artificial Sequence
  Description of Artificial Sequence: Synthetic peptide
  XENP019834 vhCDR2
FISYDGNNKYYADSVKG

SEQ ID NO: 5638 - protein, 9 aa, Artificial Sequence
  Description of Artificial Sequence: Synthetic peptide
  XENP019834 vhCDR3
TGWLGPFDY

SEQ ID NO: 5639 - protein, 12 aa, Artificial Sequence
  Description of Artificial Sequence: Synthetic peptide
  XENP019834 vlCDR1
RASQSVGSSYLA

SEQ ID NO: 5640 - protein, 7 aa, Artificial Sequence
  Description of Artificial Sequence: Synthetic peptide
  XENP019834 vlCDR2
GAFSRAT

SEQ ID NO: 5641 - protein, 9 aa, Artificial Sequence
  Description of Artificial Sequence: Synthetic peptide
  XENP019834 vlCDR3
QQYGSSPWT

SEQ ID NO: 5642 - protein, 246 aa, Artificial Sequence
  Description of Artificial Sequence: Synthetic polypeptide
  XENP019835 [CTLA-4]_H0.87_L0_scFv(GKPGS)4
QVQLVESGGGVVQPGRSLRLSCAASGFTFSSYTMHWVRQAPGKGLEWVTFISYDGNNKYYADSVKGRFTISEDNSKNTLYLQMNSLRAEDTAIYYCARTGWLGPFDYWGQGTLVTVSSGKPGSGKPGSGKPGSGKPGSEIVLTQSPGTLSLSPGERATLSCRASQSVGSSYLAWYQQKPGQAPRLLIYGAFSRATGIPDRFSGSGSGTDFTLTISRLEPEDFAVYYCQQYGSSPWTFGQGTKVEIK

SEQ ID NO: 5643 - protein, 118 aa, Artificial Sequence
  Description of Artificial Sequence: Synthetic polypeptide
  VH of XENP019835
QVQLVESGGGVVQPGRSLRLSCAASGFTFSSYTMHWVRQAPGKGLEWVTFISYDGNNKYYADSVKGRFTISEDNSKNTLYLQMNSLRAEDTAIYYCARTGWLGPFDYWGQGTLVTVSS

SEQ ID NO: 5644 - protein, 108 aa, Artificial Sequence; identical to SEQ ID NO: 3741
  Description of Artificial Sequence: Synthetic polypeptide
  VL of XENP019835

SEQ ID NO: 5645 - protein, 5 aa, Artificial Sequence
  Description of Artificial Sequence: Synthetic peptide
  XENP019835 vhCDR1
SYTMH

SEQ ID NO: 5646 - protein, 17 aa, Artificial Sequence
  Description of Artificial Sequence: Synthetic peptide
  XENP019835 vhCDR2
FISYDGNNKYYADSVKG

SEQ ID NO: 5647 - protein, 9 aa, Artificial Sequence
  Description of Artificial Sequence: Synthetic peptide
  XENP019835 vhCDR3
TGWLGPFDY

SEQ ID NO: 5648 - protein, 12 aa, Artificial Sequence
  Description of Artificial Sequence: Synthetic peptide
  XENP019835 vlCDR1
RASQSVGSSYLA

SEQ ID NO: 5649 - protein, 7 aa, Artificial Sequence
  Description of Artificial Sequence: Synthetic peptide
  XENP019835 vlCDR2
GAFSRAT

SEQ ID NO: 5650 - protein, 9 aa, Artificial Sequence
  Description of Artificial Sequence: Synthetic peptide
  XENP019835 vlCDR3
QQYGSSPWT

SEQ ID NO: 5651 - protein, 246 aa, Artificial Sequence
  Description of Artificial Sequence: Synthetic polypeptide
  XENP019836 [CTLA-4]_H0.88_L0_scFv(GKPGS)4
QVQLVESGGGVVQPGRSLRLSCAASGFTFSSYTMHWVRQAPGKGLEWVTFISYDGNNKYYADSVKGRFTISRENSKNTLYLQMNSLRAEDTAIYYCARTGWLGPFDYWGQGTLVTVSSGKPGSGKPGSGKPGSGKPGSEIVLTQSPGTLSLSPGERATLSCRASQSVGSSYLAWYQQKPGQAPRLLIYGAFSRATGIPDRFSGSGSGTDFTLTISRLEPEDFAVYYCQQYGSSPWTFGQGTKVEIK

SEQ ID NO: 5652 - protein, 118 aa, Artificial Sequence
  Description of Artificial Sequence: Synthetic polypeptide
  VH of XENP019836
QVQLVESGGGVVQPGRSLRLSCAASGFTFSSYTMHWVRQAPGKGLEWVTFISYDGNNKYYADSVKGRFTISRENSKNTLYLQMNSLRAEDTAIYYCARTGWLGPFDYWGQGTLVTVSS

SEQ ID NO: 5653 - protein, 108 aa, Artificial Sequence; identical to SEQ ID NO: 3741
  Description of Artificial Sequence: Synthetic polypeptide
  VL of XENP019836

SEQ ID NO: 5654 - protein, 5 aa, Artificial Sequence
  Description of Artificial Sequence: Synthetic peptide
  XENP019836 vhCDR1
SYTMH

SEQ ID NO: 5655 - protein, 17 aa, Artificial Sequence
  Description of Artificial Sequence: Synthetic peptide
  XENP019836 vhCDR2
FISYDGNNKYYADSVKG

SEQ ID NO: 5656 - protein, 9 aa, Artificial Sequence
  Description of Artificial Sequence: Synthetic peptide
  XENP019836 vhCDR3
TGWLGPFDY

SEQ ID NO: 5657 - protein, 12 aa, Artificial Sequence
  Description of Artificial Sequence: Synthetic peptide
  XENP019836 vlCDR1
RASQSVGSSYLA

SEQ ID NO: 5658 - protein, 7 aa, Artificial Sequence
  Description of Artificial Sequence: Synthetic peptide
  XENP019836 vlCDR2
GAFSRAT

SEQ ID NO: 5659 - protein, 9 aa, Artificial Sequence
  Description of Artificial Sequence: Synthetic peptide
  XENP019836 vlCDR3
QQYGSSPWT

SEQ ID NO: 5660 - protein, 246 aa, Artificial Sequence
  Description of Artificial Sequence: Synthetic polypeptide
  XENP019837 [CTLA-4]_H0.89_L0_scFv(GKPGS)4
QVQLVESGGGVVQPGRSLRLSCAASGFTFSSYTMHWVRQAPGKGLEWVTFISYDGNNKYYADSVKGRFTISRDDSKNTLYLQMNSLRAEDTAIYYCARTGWLGPFDYWGQGTLVTVSSGKPGSGKPGSGKPGSGKPGSEIVLTQSPGTLSLSPGERATLSCRASQSVGSSYLAWYQQKPGQAPRLLIYGAFSRATGIPDRFSGSGSGTDFTLTISRLEPEDFAVYYCQQYGSSPWTFGQGTKVEIK

SEQ ID NO: 5661 - protein, 118 aa, Artificial Sequence
  Description of Artificial Sequence: Synthetic polypeptide
  VH of XENP019837
QVQLVESGGGVVQPGRSLRLSCAASGFTFSSYTMHWVRQAPGKGLEWVTFISYDGNNKYYADSVKGRFTISRDDSKNTLYLQMNSLRAEDTAIYYCARTGWLGPFDYWGQGTLVTVSS

SEQ ID NO: 5662 - protein, 108 aa, Artificial Sequence; identical to SEQ ID NO: 3741
  Description of Artificial Sequence: Synthetic polypeptide
  VL of XENP019837

SEQ ID NO: 5663 - protein, 5 aa, Artificial Sequence
  Description of Artificial Sequence: Synthetic peptide
  XENP019837 vhCDR1
SYTMH

SEQ ID NO: 5664 - protein, 17 aa, Artificial Sequence
  Description of Artificial Sequence: Synthetic peptide
  XENP019837 vhCDR2
FISYDGNNKYYADSVKG

SEQ ID NO: 5665 - protein, 9 aa, Artificial Sequence
  Description of Artificial Sequence: Synthetic peptide
  XENP019837 vhCDR3
TGWLGPFDY

SEQ ID NO: 5666 - protein, 12 aa, Artificial Sequence
  Description of Artificial Sequence: Synthetic peptide
  XENP019837 vlCDR1
RASQSVGSSYLA

SEQ ID NO: 5667 - protein, 7 aa, Artificial Sequence
  Description of Artificial Sequence: Synthetic peptide
  XENP019837 vlCDR2
GAFSRAT

SEQ ID NO: 5668 - protein, 9 aa, Artificial Sequence
  Description of Artificial Sequence: Synthetic peptide
  XENP019837 vlCDR3
QQYGSSPWT

SEQ ID NO: 5669 - protein, 246 aa, Artificial Sequence
  Description of Artificial Sequence: Synthetic polypeptide
  XENP019838 [CTLA-4]_H0.90_L0_scFv(GKPGS)4
QVQLVESGGGVVQPGRSLRLSCAASGFTFSSYTMHWVRQAPGKGLEWVTFISYDGNNKYYADSVKGRFTISRDNAKNTLYLQMNSLRAEDTAIYYCARTGWLGPFDYWGQGTLVTVSSGKPGSGKPGSGKPGSGKPGSEIVLTQSPGTLSLSPGERATLSCRASQSVGSSYLAWYQQKPGQAPRLLIYGAFSRATGIPDRFSGSGSGTDFTLTISRLEPEDFAVYYCQQYGSSPWTFGQGTKVEIK

SEQ ID NO: 5670 - protein, 118 aa, Artificial Sequence
  Description of Artificial Sequence: Synthetic polypeptide
  VH of XENP019838
QVQLVESGGGVVQPGRSLRLSCAASGFTFSSYTMHWVRQAPGKGLEWVTFISYDGNNKYYADSVKGRFTISRDNAKNTLYLQMNSLRAEDTAIYYCARTGWLGPFDYWGQGTLVTVSS

SEQ ID NO: 5671 - protein, 108 aa, Artificial Sequence; identical to SEQ ID NO: 3741
  Description of Artificial Sequence: Synthetic polypeptide
  VL of XENP019838

SEQ ID NO: 5672 - protein, 5 aa, Artificial Sequence
  Description of Artificial Sequence: Synthetic peptide
  XENP019838 vhCDR1
SYTMH

SEQ ID NO: 5673 - protein, 17 aa, Artificial Sequence
  Description of Artificial Sequence: Synthetic peptide
  XENP019838 vhCDR2
FISYDGNNKYYADSVKG

SEQ ID NO: 5674 - protein, 9 aa, Artificial Sequence
  Description of Artificial Sequence: Synthetic peptide
  XENP019838 vhCDR3
TGWLGPFDY

SEQ ID NO: 5675 - protein, 12 aa, Artificial Sequence
  Description of Artificial Sequence: Synthetic peptide
  XENP019838 vlCDR1
RASQSVGSSYLA

SEQ ID NO: 5676 - protein, 7 aa, Artificial Sequence
  Description of Artificial Sequence: Synthetic peptide
  XENP019838 vlCDR2
GAFSRAT

SEQ ID NO: 5677 - protein, 9 aa, Artificial Sequence
  Description of Artificial Sequence: Synthetic peptide
  XENP019838 vlCDR3
QQYGSSPWT

SEQ ID NO: 5678 - protein, 246 aa, Artificial Sequence
  Description of Artificial Sequence: Synthetic polypeptide
  XENP019839 [CTLA-4]_H0.91_L0_scFv(GKPGS)4
QVQLVESGGGVVQPGRSLRLSCAASGFTFSSYTMHWVRQAPGKGLEWVTFISYDGNNKYYADSVKGRFTISRDNSRNTLYLQMNSLRAEDTAIYYCARTGWLGPFDYWGQGTLVTVSSGKPGSGKPGSGKPGSGKPGSEIVLTQSPGTLSLSPGERATLSCRASQSVGSSYLAWYQQKPGQAPRLLIYGAFSRATGIPDRFSGSGSGTDFTLTISRLEPEDFAVYYCQQYGSSPWTFGQGTKVEIK

SEQ ID NO: 5679 - protein, 118 aa, Artificial Sequence
  Description of Artificial Sequence: Synthetic polypeptide
  VH of XENP019839
QVQLVESGGGVVQPGRSLRLSCAASGFTFSSYTMHWVRQAPGKGLEWVTFISYDGNNKYYADSVKGRFTISRDNSRNTLYLQMNSLRAEDTAIYYCARTGWLGPFDYWGQGTLVTVSS

SEQ ID NO: 5680 - protein, 108 aa, Artificial Sequence; identical to SEQ ID NO: 3741
  Description of Artificial Sequence: Synthetic polypeptide
  VL of XENP019839

SEQ ID NO: 5681 - protein, 5 aa, Artificial Sequence
  Description of Artificial Sequence: Synthetic peptide
  XENP019839 vhCDR1
SYTMH

SEQ ID NO: 5682 - protein, 17 aa, Artificial Sequence
  Description of Artificial Sequence: Synthetic peptide
  XENP019839 vhCDR2
FISYDGNNKYYADSVKG

SEQ ID NO: 5683 - protein, 9 aa, Artificial Sequence
  Description of Artificial Sequence: Synthetic peptide
  XENP019839 vhCDR3
TGWLGPFDY

SEQ ID NO: 5684 - protein, 12 aa, Artificial Sequence
  Description of Artificial Sequence: Synthetic peptide
  XENP019839 vlCDR1
RASQSVGSSYLA

SEQ ID NO: 5685 - protein, 7 aa, Artificial Sequence
  Description of Artificial Sequence: Synthetic peptide
  XENP019839 vlCDR2
GAFSRAT

SEQ ID NO: 5686 - protein, 9 aa, Artificial Sequence
  Description of Artificial Sequence: Synthetic peptide
  XENP019839 vlCDR3
QQYGSSPWT

SEQ ID NO: 5687 - protein, 246 aa, Artificial Sequence
  Description of Artificial Sequence: Synthetic polypeptide
  XENP019840 [CTLA-4]_H0.92_L0_scFv(GKPGS)4
QVQLVESGGGVVQPGRSLRLSCAASGFTFSSYTMHWVRQAPGKGLEWVTFISYDGNNKYYADSVKGRFTISRDNSKNSLYLQMNSLRAEDTAIYYCARTGWLGPFDYWGQGTLVTVSSGKPGSGKPGSGKPGSGKPGSEIVLTQSPGTLSLSPGERATLSCRASQSVGSSYLAWYQQKPGQAPRLLIYGAFSRATGIPDRFSGSGSGTDFTLTISRLEPEDFAVYYCQQYGSSPWTFGQGTKVEIK

SEQ ID NO: 5688 - protein, 118 aa, Artificial Sequence
  Description of Artificial Sequence: Synthetic polypeptide
  VH of XENP019840
QVQLVESGGGVVQPGRSLRLSCAASGFTFSSYTMHWVRQAPGKGLEWVTFISYDGNNKYYADSVKGRFTISRDNSKNSLYLQMNSLRAEDTAIYYCARTGWLGPFDYWGQGTLVTVSS

SEQ ID NO: 5689 - protein, 108 aa, Artificial Sequence; identical to SEQ ID NO: 3741
  Description of Artificial Sequence: Synthetic polypeptide
  VL of XENP019840

SEQ ID NO: 5690 - protein, 5 aa, Artificial Sequence
  Description of Artificial Sequence: Synthetic peptide
  XENP019840 vhCDR1
SYTMH

SEQ ID NO: 5691 - protein, 17 aa, Artificial Sequence
  Description of Artificial Sequence: Synthetic peptide
  XENP019840 vhCDR2
FISYDGNNKYYADSVKG

SEQ ID NO: 5692 - protein, 9 aa, Artificial Sequence
  Description of Artificial Sequence: Synthetic peptide
  XENP019840 vhCDR3
TGWLGPFDY

SEQ ID NO: 5693 - protein, 12 aa, Artificial Sequence
  Description of Artificial Sequence: Synthetic peptide
  XENP019840 vlCDR1
RASQSVGSSYLA

SEQ ID NO: 5694 - protein, 7 aa, Artificial Sequence
  Description of Artificial Sequence: Synthetic peptide
  XENP019840 vlCDR2
GAFSRAT

SEQ ID NO: 5695 - protein, 9 aa, Artificial Sequence
  Description of Artificial Sequence: Synthetic peptide
  XENP019840 vlCDR3
QQYGSSPWT

SEQ ID NO: 5696 - protein, 246 aa, Artificial Sequence
  Description of Artificial Sequence: Synthetic polypeptide
  XENP019841 [CTLA-4]_H0.93_L0_scFv(GKPGS)4
QVQLVESGGGVVQPGRSLRLSCAASGFTFSSYTMHWVRQAPGKGLEWVTFISYDGNNKYYADSVKGRFTISRDNSKNQLYLQMNSLRAEDTAIYYCARTGWLGPFDYWGQGTLVTVSSGKPGSGKPGSGKPGSGKPGSEIVLTQSPGTLSLSPGERATLSCRASQSVGSSYLAWYQQKPGQAPRLLIYGAFSRATGIPDRFSGSGSGTDFTLTISRLEPEDFAVYYCQQYGSSPWTFGQGTKVEIK

SEQ ID NO: 5697 - protein, 118 aa, Artificial Sequence
  Description of Artificial Sequence: Synthetic polypeptide
  VH of XENP019841
QVQLVESGGGVVQPGRSLRLSCAASGFTFSSYTMHWVRQAPGKGLEWVTFISYDGNNKYYADSVKGRFTISRDNSKNQLYLQMNSLRAEDTAIYYCARTGWLGPFDYWGQGTLVTVSS

SEQ ID NO: 5698 - protein, 108 aa, Artificial Sequence; identical to SEQ ID NO: 3741
  Description of Artificial Sequence: Synthetic polypeptide
  VL of XENP019841

SEQ ID NO: 5699 - protein, 5 aa, Artificial Sequence
  Description of Artificial Sequence: Synthetic peptide
  XENP019841 vhCDR1
SYTMH

SEQ ID NO: 5700 - protein, 17 aa, Artificial Sequence
  Description of Artificial Sequence: Synthetic peptide
  XENP019841 vhCDR2
FISYDGNNKYYADSVKG

SEQ ID NO: 5701 - protein, 9 aa, Artificial Sequence
  Description of Artificial Sequence: Synthetic peptide
  XENP019841 vhCDR3
TGWLGPFDY

SEQ ID NO: 5702 - protein, 12 aa, Artificial Sequence
  Description of Artificial Sequence: Synthetic peptide
  XENP019841 vlCDR1
RASQSVGSSYLA

SEQ ID NO: 5703 - protein, 7 aa, Artificial Sequence
  Description of Artificial Sequence: Synthetic peptide
  XENP019841 vlCDR2
GAFSRAT

SEQ ID NO: 5704 - protein, 9 aa, Artificial Sequence
  Description of Artificial Sequence: Synthetic peptide
  XENP019841 vlCDR3
QQYGSSPWT

SEQ ID NO: 5705 - protein, 246 aa, Artificial Sequence
  Description of Artificial Sequence: Synthetic polypeptide
  XENP019842 [CTLA-4]_H0.94_L0_scFv(GKPGS)4
QVQLVESGGGVVQPGRSLRLSCAASGFTFSSYTMHWVRQAPGKGLEWVTFISYDGNNKYYADSVKGRFTISRDNSKNTLYLEMNSLRAEDTAIYYCARTGWLGPFDYWGQGTLVTVSSGKPGSGKPGSGKPGSGKPGSEIVLTQSPGTLSLSPGERATLSCRASQSVGSSYLAWYQQKPGQAPRLLIYGAFSRATGIPDRFSGSGSGTDFTLTISRLEPEDFAVYYCQQYGSSPWTFGQGTKVEIK

SEQ ID NO: 5706 - protein, 118 aa, Artificial Sequence
  Description of Artificial Sequence: Synthetic polypeptide
  VH of XENP019842
QVQLVESGGGVVQPGRSLRLSCAASGFTFSSYTMHWVRQAPGKGLEWVTFISYDGNNKYYADSVKGRFTISRDNSKNTLYLEMNSLRAEDTAIYYCARTGWLGPFDYWGQGTLVTVSS

SEQ ID NO: 5707 - protein, 108 aa, Artificial Sequence; identical to SEQ ID NO: 3741
  Description of Artificial Sequence: Synthetic polypeptide
  VL of XENP019842

SEQ ID NO: 5708 - protein, 5 aa, Artificial Sequence
  Description of Artificial Sequence: Synthetic peptide
  XENP019842 vhCDR1
SYTMH

SEQ ID NO: 5709 - protein, 17 aa, Artificial Sequence
  Description of Artificial Sequence: Synthetic peptide
  XENP019842 vhCDR2
FISYDGNNKYYADSVKG

SEQ ID NO: 5710 - protein, 9 aa, Artificial Sequence
  Description of Artificial Sequence: Synthetic peptide
  XENP019842 vhCDR3
TGWLGPFDY

SEQ ID NO: 5711 - protein, 12 aa, Artificial Sequence
  Description of Artificial Sequence: Synthetic peptide
  XENP019842 vlCDR1
RASQSVGSSYLA

SEQ ID NO: 5712 - protein, 7 aa, Artificial Sequence
  Description of Artificial Sequence: Synthetic peptide
  XENP019842 vlCDR2
GAFSRAT

SEQ ID NO: 5713 - protein, 9 aa, Artificial Sequence
  Description of Artificial Sequence: Synthetic peptide
  XENP019842 vlCDR3
QQYGSSPWT

SEQ ID NO: 5714 - protein, 246 aa, Artificial Sequence
  Description of Artificial Sequence: Synthetic polypeptide
  XENP019843 [CTLA-4]_H0.95_L0_scFv(GKPGS)4
QVQLVESGGGVVQPGRSLRLSCAASGFTFSSYTMHWVRQAPGKGLEWVTFISYDGNNKYYADSVKGRFTISRDNSKNTLYLQMDSLRAEDTAIYYCARTGWLGPFDYWGQGTLVTVSSGKPGSGKPGSGKPGSGKPGSEIVLTQSPGTLSLSPGERATLSCRASQSVGSSYLAWYQQKPGQAPRLLIYGAFSRATGIPDRFSGSGSGTDFTLTISRLEPEDFAVYYCQQYGSSPWTFGQGTKVEIK

SEQ ID NO: 5715 - protein, 118 aa, Artificial Sequence
  Description of Artificial Sequence: Synthetic polypeptide
  VH of XENP019843
QVQLVESGGGVVQPGRSLRLSCAASGFTFSSYTMHWVRQAPGKGLEWVTFISYDGNNKYYADSVKGRFTISRDNSKNTLYLQMDSLRAEDTAIYYCARTGWLGPFDYWGQGTLVTVSS

SEQ ID NO: 5716 - protein, 108 aa, Artificial Sequence; identical to SEQ ID NO: 3741
  Description of Artificial Sequence: Synthetic polypeptide
  VL of XENP019843

SEQ ID NO: 5717 - protein, 5 aa, Artificial Sequence
  Description of Artificial Sequence: Synthetic peptide
  XENP019843 vhCDR1
SYTMH

SEQ ID NO: 5718 - protein, 17 aa, Artificial Sequence
  Description of Artificial Sequence: Synthetic peptide
  XENP019843 vhCDR2
FISYDGNNKYYADSVKG

SEQ ID NO: 5719 - protein, 9 aa, Artificial Sequence
  Description of Artificial Sequence: Synthetic peptide
  XENP019843 vhCDR3
TGWLGPFDY

SEQ ID NO: 5720 - protein, 12 aa, Artificial Sequence
  Description of Artificial Sequence: Synthetic peptide
  XENP019843 vlCDR1
RASQSVGSSYLA

SEQ ID NO: 5721 - protein, 7 aa, Artificial Sequence
  Description of Artificial Sequence: Synthetic peptide
  XENP019843 vlCDR2
GAFSRAT

SEQ ID NO: 5722 - protein, 9 aa, Artificial Sequence
  Description of Artificial Sequence: Synthetic peptide
  XENP019843 vlCDR3
QQYGSSPWT

SEQ ID NO: 5723 - protein, 246 aa, Artificial Sequence
  Description of Artificial Sequence: Synthetic polypeptide
  XENP019844 [CTLA-4]_H0.96_L0_scFv(GKPGS)4
QVQLVESGGGVVQPGRSLRLSCAASGFTFSSYTMHWVRQAPGKGLEWVTFISYDGNNKYYADSVKGRFTISRDNSKNTLYLQMNDLRAEDTAIYYCARTGWLGPFDYWGQGTLVTVSSGKPGSGKPGSGKPGSGKPGSEIVLTQSPGTLSLSPGERATLSCRASQSVGSSYLAWYQQKPGQAPRLLIYGAFSRATGIPDRFSGSGSGTDFTLTISRLEPEDFAVYYCQQYGSSPWTFGQGTKVEIK

SEQ ID NO: 5724 - protein, 118 aa, Artificial Sequence
  Description of Artificial Sequence: Synthetic polypeptide
  VH of XENP019844
QVQLVESGGGVVQPGRSLRLSCAASGFTFSSYTMHWVRQAPGKGLEWVTFISYDGNNKYYADSVKGRFTISRDNSKNTLYLQMNDLRAEDTAIYYCARTGWLGPFDYWGQGTLVTVSS

SEQ ID NO: 5725 - protein, 108 aa, Artificial Sequence; identical to SEQ ID NO: 3741
  Description of Artificial Sequence: Synthetic polypeptide
  VL of XENP019844

SEQ ID NO: 5726 - protein, 5 aa, Artificial Sequence
  Description of Artificial Sequence: Synthetic peptide
  XENP019844 vhCDR1
SYTMH

SEQ ID NO: 5727 - protein, 17 aa, Artificial Sequence
  Description of Artificial Sequence: Synthetic peptide
  XENP019844 vhCDR2
FISYDGNNKYYADSVKG

SEQ ID NO: 5728 - protein, 9 aa, Artificial Sequence
  Description of Artificial Sequence: Synthetic peptide
  XENP019844 vhCDR3
TGWLGPFDY

SEQ ID NO: 5729 - protein, 12 aa, Artificial Sequence
  Description of Artificial Sequence: Synthetic peptide
  XENP019844 vlCDR1
RASQSVGSSYLA

SEQ ID NO: 5730 - protein, 7 aa, Artificial Sequence
  Description of Artificial Sequence: Synthetic peptide
  XENP019844 vlCDR2
GAFSRAT

SEQ ID NO: 5731 - protein, 9 aa, Artificial Sequence
  Description of Artificial Sequence: Synthetic peptide
  XENP019844 vlCDR3
QQYGSSPWT

SEQ ID NO: 5732 - protein, 246 aa, Artificial Sequence
  Description of Artificial Sequence: Synthetic polypeptide
  XENP019845 [CTLA-4]_H0.97_L0_scFv(GKPGS)4
QVQLVESGGGVVQPGRSLRLSCAASGFTFSSYTMHWVRQAPGKGLEWVTFISYDGNNKYYADSVKGRFTISRDNSKNTLYLQMNSLRTEDTAIYYCARTGWLGPFDYWGQGTLVTVSSGKPGSGKPGSGKPGSGKPGSEIVLTQSPGTLSLSPGERATLSCRASQSVGSSYLAWYQQKPGQAPRLLIYGAFSRATGIPDRFSGSGSGTDFTLTISRLEPEDFAVYYCQQYGSSPWTFGQGTKVEIK

SEQ ID NO: 5733 - protein, 118 aa, Artificial Sequence
  Description of Artificial Sequence: Synthetic polypeptide
  VH of XENP019845
QVQLVESGGGVVQPGRSLRLSCAASGFTFSSYTMHWVRQAPGKGLEWVTFISYDGNNKYYADSVKGRFTISRDNSKNTLYLQMNSLRTEDTAIYYCARTGWLGPFDYWGQGTLVTVSS

SEQ ID NO: 5734 - protein, 108 aa, Artificial Sequence; identical to SEQ ID NO: 3741
  Description of Artificial Sequence: Synthetic polypeptide
  VL of XENP019845

SEQ ID NO: 5735 - protein, 5 aa, Artificial Sequence
  Description of Artificial Sequence: Synthetic peptide
  XENP019845 vhCDR1
SYTMH

SEQ ID NO: 5736 - protein, 17 aa, Artificial Sequence
  Description of Artificial Sequence: Synthetic peptide
  XENP019845 vhCDR2
FISYDGNNKYYADSVKG

SEQ ID NO: 5737 - protein, 9 aa, Artificial Sequence
  Description of Artificial Sequence: Synthetic peptide
  XENP019845 vhCDR3
TGWLGPFDY

SEQ ID NO: 5738 - protein, 12 aa, Artificial Sequence
  Description of Artificial Sequence: Synthetic peptide
  XENP019845 vlCDR1
RASQSVGSSYLA

SEQ ID NO: 5739 - protein, 7 aa, Artificial Sequence
  Description of Artificial Sequence: Synthetic peptide
  XENP019845 vlCDR2
GAFSRAT

SEQ ID NO: 5740 - protein, 9 aa, Artificial Sequence
  Description of Artificial Sequence: Synthetic peptide
  XENP019845 vlCDR3
QQYGSSPWT

SEQ ID NO: 5741 - protein, 246 aa, Artificial Sequence
  Description of Artificial Sequence: Synthetic polypeptide
  XENP019846 [CTLA-4]_H0.98_L0_scFv(GKPGS)4
QVQLVESGGGVVQPGRSLRLSCAASGFTFSSYTMHWVRQAPGKGLEWVTFISYDGNNKYYADSVKGRFTISRDNSKNTLYLQMNSLRAEDTALYYCARTGWLGPFDYWGQGTLVTVSSGKPGSGKPGSGKPGSGKPGSEIVLTQSPGTLSLSPGERATLSCRASQSVGSSYLAWYQQKPGQAPRLLIYGAFSRATGIPDRFSGSGSGTDFTLTISRLEPEDFAVYYCQQYGSSPWTFGQGTKVEIK

SEQ ID NO: 5742 - protein, 118 aa, Artificial Sequence
  Description of Artificial Sequence: Synthetic polypeptide
  VH of XENP019846
QVQLVESGGGVVQPGRSLRLSCAASGFTFSSYTMHWVRQAPGKGLEWVTFISYDGNNKYYADSVKGRFTISRDNSKNTLYLQMNSLRAEDTALYYCARTGWLGPFDYWGQGTLVTVSS

SEQ ID NO: 5743 - protein, 108 aa, Artificial Sequence; identical to SEQ ID NO: 3741
  Description of Artificial Sequence: Synthetic polypeptide
  VL of XENP019846

SEQ ID NO: 5744 - protein, 5 aa, Artificial Sequence
  Description of Artificial Sequence: Synthetic peptide
  XENP019846 vhCDR1
SYTMH

SEQ ID NO: 5745 - protein, 17 aa, Artificial Sequence
  Description of Artificial Sequence: Synthetic peptide
  XENP019846 vhCDR2
FISYDGNNKYYADSVKG

SEQ ID NO: 5746 - protein, 9 aa, Artificial Sequence
  Description of Artificial Sequence: Synthetic peptide
  XENP019846 vhCDR3
TGWLGPFDY

SEQ ID NO: 5747 - protein, 12 aa, Artificial Sequence
  Description of Artificial Sequence: Synthetic peptide
  XENP019846 vlCDR1
RASQSVGSSYLA

SEQ ID NO: 5748 - protein, 7 aa, Artificial Sequence
  Description of Artificial Sequence: Synthetic peptide
  XENP019846 vlCDR2
GAFSRAT

SEQ ID NO: 5749 - protein, 9 aa, Artificial Sequence
  Description of Artificial Sequence: Synthetic peptide
  XENP019846 vlCDR3
QQYGSSPWT

SEQ ID NO: 5750 - protein, 246 aa, Artificial Sequence
  Description of Artificial Sequence: Synthetic polypeptide
  XENP019847 [CTLA-4]_H0.99_L0_scFv(GKPGS)4
QVQLVESGGGVVQPGRSLRLSCAASGFTFSSYTMHWVRQAPGKGLEWVTFISYDGNNKYYADSVKGRFTISRDNSKNTLYLQMNSLRAEDTAVYYCARTGWLGPFDYWGQGTLVTVSSGKPGSGKPGSGKPGSGKPGSEIVLTQSPGTLSLSPGERATLSCRASQSVGSSYLAWYQQKPGQAPRLLIYGAFSRATGIPDRFSGSGSGTDFTLTISRLEPEDFAVYYCQQYGSSPWTFGQGTKVEIK

SEQ ID NO: 5751 - protein, 118 aa, Artificial Sequence
  Description of Artificial Sequence: Synthetic polypeptide
  VH of XENP019847
QVQLVESGGGVVQPGRSLRLSCAASGFTFSSYTMHWVRQAPGKGLEWVTFISYDGNNKYYADSVKGRFTISRDNSKNTLYLQMNSLRAEDTAVYYCARTGWLGPFDYWGQGTLVTVSS

SEQ ID NO: 5752 - protein, 108 aa, Artificial Sequence; identical to SEQ ID NO: 3741
  Description of Artificial Sequence: Synthetic polypeptide
  VL of XENP019847

SEQ ID NO: 5753 - protein, 5 aa, Artificial Sequence
  Description of Artificial Sequence: Synthetic peptide
  XENP019847 vhCDR1
SYTMH

SEQ ID NO: 5754 - protein, 17 aa, Artificial Sequence
  Description of Artificial Sequence: Synthetic peptide
  XENP019847 vhCDR2
FISYDGNNKYYADSVKG

SEQ ID NO: 5755 - protein, 9 aa, Artificial Sequence
  Description of Artificial Sequence: Synthetic peptide
  XENP019847 vhCDR3
TGWLGPFDY

SEQ ID NO: 5756 - protein, 12 aa, Artificial Sequence
  Description of Artificial Sequence: Synthetic peptide
  XENP019847 vlCDR1
RASQSVGSSYLA

SEQ ID NO: 5757 - protein, 7 aa, Artificial Sequence
  Description of Artificial Sequence: Synthetic peptide
  XENP019847 vlCDR2
GAFSRAT

SEQ ID NO: 5758 - protein, 9 aa, Artificial Sequence
  Description of Artificial Sequence: Synthetic peptide
  XENP019847 vlCDR3
QQYGSSPWT

SEQ ID NO: 5759 - protein, 246 aa, Artificial Sequence
  Description of Artificial Sequence: Synthetic polypeptide
  XENP019848 [CTLA-4]_H0.100_L0_scFv(GKPGS)4
QVQLVESGGGVVQPGRSLRLSCAASGFTFSSYTMHWVRQAPGKGLEWVTFISYDGNNKYYADSVKGRFTISRDNSKNTLYLQMNSLRAEDTAIYYCTRTGWLGPFDYWGQGTLVTVSSGKPGSGKPGSGKPGSGKPGSEIVLTQSPGTLSLSPGERATLSCRASQSVGSSYLAWYQQKPGQAPRLLIYGAFSRATGIPDRFSGSGSGTDFTLTISRLEPEDFAVYYCQQYGSSPWTFGQGTKVEIK

SEQ ID NO: 5760 - protein, 118 aa, Artificial Sequence
  Description of Artificial Sequence: Synthetic polypeptide
  VH of XENP019848
QVQLVESGGGVVQPGRSLRLSCAASGFTFSSYTMHWVRQAPGKGLEWVTFISYDGNNKYYADSVKGRFTISRDNSKNTLYLQMNSLRAEDTAIYYCTRTGWLGPFDYWGQGTLVTVSS

SEQ ID NO: 5761 - protein, 108 aa, Artificial Sequence; identical to SEQ ID NO: 3741
  Description of Artificial Sequence: Synthetic polypeptide
  VL of XENP019848

SEQ ID NO: 5762 - protein, 5 aa, Artificial Sequence
  Description of Artificial Sequence: Synthetic peptide
  XENP019848 vhCDR1
SYTMH

SEQ ID NO: 5763 - protein, 17 aa, Artificial Sequence
  Description of Artificial Sequence: Synthetic peptide
  XENP019848 vhCDR2
FISYDGNNKYYADSVKG

SEQ ID NO: 5764 - protein, 9 aa, Artificial Sequence
  Description of Artificial Sequence: Synthetic peptide
  XENP019848 vhCDR3
TGWLGPFDY

SEQ ID NO: 5765 - protein, 12 aa, Artificial Sequence
  Description of Artificial Sequence: Synthetic peptide
  XENP019848 vlCDR1
RASQSVGSSYLA

SEQ ID NO: 5766 - protein, 7 aa, Artificial Sequence
  Description of Artificial Sequence: Synthetic peptide
  XENP019848 vlCDR2
GAFSRAT

SEQ ID NO: 5767 - protein, 9 aa, Artificial Sequence
  Description of Artificial Sequence: Synthetic peptide
  XENP019848 vlCDR3
QQYGSSPWT

SEQ ID NO: 5768 - protein, 246 aa, Artificial Sequence
  Description of Artificial Sequence: Synthetic polypeptide
  XENP019849 [CTLA-4]_H0.101_L0_scFv(GKPGS)4
QVQLVESGGGVVQPGRSLRLSCAASGFTFSSYTMHWVRQAPGKGLEWVTFISYDGNNKYYADSVKGRFTISRDNSKNTLYLQMNSLRAEDTAIYYCAKTGWLGPFDYWGQGTLVTVSSGKPGSGKPGSGKPGSGKPGSEIVLTQSPGTLSLSPGERATLSCRASQSVGSSYLAWYQQKPGQAPRLLIYGAFSRATGIPDRFSGSGSGTDFTLTISRLEPEDFAVYYCQQYGSSPWTFGQGTKVEIK

SEQ ID NO: 5769 - protein, 118 aa, Artificial Sequence
  Description of Artificial Sequence: Synthetic polypeptide
  VH of XENP019849
QVQLVESGGGVVQPGRSLRLSCAASGFTFSSYTMHWVRQAPGKGLEWVTFISYDGNNKYYADSVKGRFTISRDNSKNTLYLQMNSLRAEDTAIYYCAKTGWLGPFDYWGQGTLVTVSS

SEQ ID NO: 5770 - protein, 108 aa, Artificial Sequence; identical to SEQ ID NO: 3741
  Description of Artificial Sequence: Synthetic polypeptide
  VL of XENP019849

SEQ ID NO: 5771 - protein, 5 aa, Artificial Sequence
  Description of Artificial Sequence: Synthetic peptide
  XENP019849 vhCDR1
SYTMH

SEQ ID NO: 5772 - protein, 17 aa, Artificial Sequence
  Description of Artificial Sequence: Synthetic peptide
  XENP019849 vhCDR2
FISYDGNNKYYADSVKG

SEQ ID NO: 5773 - protein, 9 aa, Artificial Sequence
  Description of Artificial Sequence: Synthetic peptide
  XENP019849 vhCDR3
TGWLGPFDY

SEQ ID NO: 5774 - protein, 12 aa, Artificial Sequence
  Description of Artificial Sequence: Synthetic peptide
  XENP019849 vlCDR1
RASQSVGSSYLA

SEQ ID NO: 5775 - protein, 7 aa, Artificial Sequence
  Description of Artificial Sequence: Synthetic peptide
  XENP019849 vlCDR2
GAFSRAT

SEQ ID NO: 5776 - protein, 9 aa, Artificial Sequence
  Description of Artificial Sequence: Synthetic peptide
  XENP019849 vlCDR3
QQYGSSPWT

SEQ ID NO: 5777 - protein, 246 aa, Artificial Sequence
  Description of Artificial Sequence: Synthetic polypeptide
  XENP019850 [CTLA-4]_H0.102_L0_scFv(GKPGS)4
QVQLVESGGGVVQPGRSLRLSCAASGFTFSSYTMHWVRQAPGKGLEWVTFISYDGNNKYYADSVKGRFTISRDNSKNTLYLQMNSLRAEDTAIYYCARAGWLGPFDYWGQGTLVTVSSGKPGSGKPGSGKPGSGKPGSEIVLTQSPGTLSLSPGERATLSCRASQSVGSSYLAWYQQKPGQAPRLLIYGAFSRATGIPDRFSGSGSGTDFTLTISRLEPEDFAVYYCQQYGSSPWTFGQGTKVEIK

SEQ ID NO: 5778 - protein, 118 aa, Artificial Sequence
  Description of Artificial Sequence: Synthetic polypeptide
  VH of XENP019850
QVQLVESGGGVVQPGRSLRLSCAASGFTFSSYTMHWVRQAPGKGLEWVTFISYDGNNKYYADSVKGRFTISRDNSKNTLYLQMNSLRAEDTAIYYCARAGWLGPFDYWGQGTLVTVSS

SEQ ID NO: 5779 - protein, 108 aa, Artificial Sequence; identical to SEQ ID NO: 3741
  Description of Artificial Sequence: Synthetic polypeptide
  VL of XENP019850

SEQ ID NO: 5780 - protein, 5 aa, Artificial Sequence
  Description of Artificial Sequence: Synthetic peptide
  XENP019850 vhCDR1
SYTMH

SEQ ID NO: 5781 - protein, 17 aa, Artificial Sequence
  Description of Artificial Sequence: Synthetic peptide
  XENP019850 vhCDR2
FISYDGNNKYYADSVKG

SEQ ID NO: 5782 - protein, 9 aa, Artificial Sequence
  Description of Artificial Sequence: Synthetic peptide
  XENP019850 vhCDR3
AGWLGPFDY

SEQ ID NO: 5783 - protein, 12 aa, Artificial Sequence
  Description of Artificial Sequence: Synthetic peptide
  XENP019850 vlCDR1
RASQSVGSSYLA

SEQ ID NO: 5784 - protein, 7 aa, Artificial Sequence
  Description of Artificial Sequence: Synthetic peptide
  XENP019850 vlCDR2
GAFSRAT

SEQ ID NO: 5785 - protein, 9 aa, Artificial Sequence
  Description of Artificial Sequence: Synthetic peptide
  XENP019850 vlCDR3
QQYGSSPWT

SEQ ID NO: 5786 - protein, 246 aa, Artificial Sequence
  Description of Artificial Sequence: Synthetic polypeptide
  XENP019851 [CTLA-4]_H0.103_L0_scFv(GKPGS)4
QVQLVESGGGVVQPGRSLRLSCAASGFTFSSYTMHWVRQAPGKGLEWVTFISYDGNNKYYADSVKGRFTISRDNSKNTLYLQMNSLRAEDTAIYYCARGGWLGPFDYWGQGTLVTVSSGKPGSGKPGSGKPGSGKPGSEIVLTQSPGTLSLSPGERATLSCRASQSVGSSYLAWYQQKPGQAPRLLIYGAFSRATGIPDRFSGSGSGTDFTLTISRLEPEDFAVYYCQQYGSSPWTFGQGTKVEIK

SEQ ID NO: 5787 - protein, 118 aa, Artificial Sequence
  Description of Artificial Sequence: Synthetic polypeptide
  VH of XENP019851
QVQLVESGGGVVQPGRSLRLSCAASGFTFSSYTMHWVRQAPGKGLEWVTFISYDGNNKYYADSVKGRFTISRDNSKNTLYLQMNSLRAEDTAIYYCARGGWLGPFDYWGQGTLVTVSS

SEQ ID NO: 5788 - protein, 108 aa, Artificial Sequence; identical to SEQ ID NO: 3741
  Description of Artificial Sequence: Synthetic polypeptide
  VL of XENP019851

SEQ ID NO: 5789 - protein, 5 aa, Artificial Sequence
  Description of Artificial Sequence: Synthetic peptide
  XENP019851 vhCDR1
SYTMH

SEQ ID NO: 5790 - protein, 17 aa, Artificial Sequence
  Description of Artificial Sequence: Synthetic peptide
  XENP019851 vhCDR2
FISYDGNNKYYADSVKG

SEQ ID NO: 5791 - protein, 9 aa, Artificial Sequence
  Description of Artificial Sequence: Synthetic peptide
  XENP019851 vhCDR3
GGWLGPFDY

SEQ ID NO: 5792 - protein, 12 aa, Artificial Sequence
  Description of Artificial Sequence: Synthetic peptide
  XENP019851 vlCDR1
RASQSVGSSYLA

SEQ ID NO: 5793 - protein, 7 aa, Artificial Sequence
  Description of Artificial Sequence: Synthetic peptide
  XENP019851 vlCDR2
GAFSRAT

SEQ ID NO: 5794 - protein, 9 aa, Artificial Sequence
  Description of Artificial Sequence: Synthetic peptide
  XENP019851 vlCDR3
QQYGSSPWT

SEQ ID NO: 5795 - protein, 246 aa, Artificial Sequence
  Description of Artificial Sequence: Synthetic polypeptide
  XENP019852 [CTLA-4]_H0.104_L0_scFv(GKPGS)4
QVQLVESGGGVVQPGRSLRLSCAASGFTFSSYTMHWVRQAPGKGLEWVTFISYDGNNKYYADSVKGRFTISRDNSKNTLYLQMNSLRAEDTAIYYCARDGWLGPFDYWGQGTLVTVSSGKPGSGKPGSGKPGSGKPGSEIVLTQSPGTLSLSPGERATLSCRASQSVGSSYLAWYQQKPGQAPRLLIYGAFSRATGIPDRFSGSGSGTDFTLTISRLEPEDFAVYYCQQYGSSPWTFGQGTKVEIK

SEQ ID NO: 5796 - protein, 118 aa, Artificial Sequence
  Description of Artificial Sequence: Synthetic polypeptide
  VH of XENP019852
QVQLVESGGGVVQPGRSLRLSCAASGFTFSSYTMHWVRQAPGKGLEWVTFISYDGNNKYYADSVKGRFTISRDNSKNTLYLQMNSLRAEDTAIYYCARDGWLGPFDYWGQGTLVTVSS

SEQ ID NO: 5797 - protein, 108 aa, Artificial Sequence; identical to SEQ ID NO: 3741
  Description of Artificial Sequence: Synthetic polypeptide
  VL of XENP019852

SEQ ID NO: 5798 - protein, 5 aa, Artificial Sequence
  Description of Artificial Sequence: Synthetic peptide
  XENP019852 vhCDR1
SYTMH

SEQ ID NO: 5799 - protein, 17 aa, Artificial Sequence
  Description of Artificial Sequence: Synthetic peptide
  XENP019852 vhCDR2
FISYDGNNKYYADSVKG

SEQ ID NO: 5800 - protein, 9 aa, Artificial Sequence
  Description of Artificial Sequence: Synthetic peptide
  XENP019852 vhCDR3
DGWLGPFDY

SEQ ID NO: 5801 - protein, 12 aa, Artificial Sequence
  Description of Artificial Sequence: Synthetic peptide
  XENP019852 vlCDR1
RASQSVGSSYLA

SEQ ID NO: 5802 - protein, 7 aa, Artificial Sequence
  Description of Artificial Sequence: Synthetic peptide
  XENP019852 vlCDR2
GAFSRAT

SEQ ID NO: 5803 - protein, 9 aa, Artificial Sequence
  Description of Artificial Sequence: Synthetic peptide
  XENP019852 vlCDR3
QQYGSSPWT

SEQ ID NO: 5804 - protein, 246 aa, Artificial Sequence
  Description of Artificial Sequence: Synthetic polypeptide
  XENP019853 [CTLA-4]_H0.105_L0_scFv(GKPGS)4
QVQLVESGGGVVQPGRSLRLSCAASGFTFSSYTMHWVRQAPGKGLEWVTFISYDGNNKYYADSVKGRFTISRDNSKNTLYLQMNSLRAEDTAIYYCARSGWLGPFDYWGQGTLVTVSSGKPGSGKPGSGKPGSGKPGSEIVLTQSPGTLSLSPGERATLSCRASQSVGSSYLAWYQQKPGQAPRLLIYGAFSRATGIPDRFSGSGSGTDFTLTISRLEPEDFAVYYCQQYGSSPWTFGQGTKVEIK

SEQ ID NO: 5805 - protein, 118 aa, Artificial Sequence
  Description of Artificial Sequence: Synthetic polypeptide
  VH of XENP019853
QVQLVESGGGVVQPGRSLRLSCAASGFTFSSYTMHWVRQAPGKGLEWVTFISYDGNNKYYADSVKGRFTISRDNSKNTLYLQMNSLRAEDTAIYYCARSGWLGPFDYWGQGTLVTVSS

SEQ ID NO: 5806 - protein, 108 aa, Artificial Sequence; identical to SEQ ID NO: 3741
  Description of Artificial Sequence: Synthetic polypeptide
  VL of XENP019853

SEQ ID NO: 5807 - protein, 5 aa, Artificial Sequence
  Description of Artificial Sequence: Synthetic peptide
  XENP019853 vhCDR1
SYTMH

SEQ ID NO: 5808 - protein, 17 aa, Artificial Sequence
  Description of Artificial Sequence: Synthetic peptide
  XENP019853 vhCDR2
FISYDGNNKYYADSVKG

SEQ ID NO: 5809 - protein, 9 aa, Artificial Sequence
  Description of Artificial Sequence: Synthetic peptide
  XENP019853 vhCDR3
SGWLGPFDY

SEQ ID NO: 5810 - protein, 12 aa, Artificial Sequence
  Description of Artificial Sequence: Synthetic peptide
  XENP019853 vlCDR1
RASQSVGSSYLA

SEQ ID NO: 5811 - protein, 7 aa, Artificial Sequence
  Description of Artificial Sequence: Synthetic peptide
  XENP019853 vlCDR2
GAFSRAT

SEQ ID NO: 5812 - protein, 9 aa, Artificial Sequence
  Description of Artificial Sequence: Synthetic peptide
  XENP019853 vlCDR3
QQYGSSPWT

SEQ ID NO: 5813 - protein, 246 aa, Artificial Sequence
  Description of Artificial Sequence: Synthetic polypeptide
  XENP019854 [CTLA-4]_H0.106_L0_scFv(GKPGS)4
QVQLVESGGGVVQPGRSLRLSCAASGFTFSSYTMHWVRQAPGKGLEWVTFISYDGNNKYYADSVKGRFTISRDNSKNTLYLQMNSLRAEDTAIYYCARVGWLGPFDYWGQGTLVTVSSGKPGSGKPGSGKPGSGKPGSEIVLTQSPGTLSLSPGERATLSCRASQSVGSSYLAWYQQKPGQAPRLLIYGAFSRATGIPDRFSGSGSGTDFTLTISRLEPEDFAVYYCQQYGSSPWTFGQGTKVEIK

SEQ ID NO: 5814 - protein, 118 aa, Artificial Sequence
  Description of Artificial Sequence: Synthetic polypeptide
  VH of XENP019854
QVQLVESGGGVVQPGRSLRLSCAASGFTFSSYTMHWVRQAPGKGLEWVTFISYDGNNKYYADSVKGRFTISRDNSKNTLYLQMNSLRAEDTAIYYCARVGWLGPFDYWGQGTLVTVSS

SEQ ID NO: 5815 - protein, 108 aa, Artificial Sequence; identical to SEQ ID NO: 3741
  Description of Artificial Sequence: Synthetic polypeptide
  VL of XENP019854

SEQ ID NO: 5816 - protein, 5 aa, Artificial Sequence
  Description of Artificial Sequence: Synthetic peptide
  XENP019854 vhCDR1
SYTMH

SEQ ID NO: 5817 - protein, 17 aa, Artificial Sequence
  Description of Artificial Sequence: Synthetic peptide
  XENP019854 vhCDR2
FISYDGNNKYYADSVKG

SEQ ID NO: 5818 - protein, 9 aa, Artificial Sequence
  Description of Artificial Sequence: Synthetic peptide
  XENP019854 vhCDR3
VGWLGPFDY

SEQ ID NO: 5819 - protein, 12 aa, Artificial Sequence
  Description of Artificial Sequence: Synthetic peptide
  XENP019854 vlCDR1
RASQSVGSSYLA

SEQ ID NO: 5820 - protein, 7 aa, Artificial Sequence
  Description of Artificial Sequence: Synthetic peptide
  XENP019854 vlCDR2
GAFSRAT

SEQ ID NO: 5821 - protein, 9 aa, Artificial Sequence
  Description of Artificial Sequence: Synthetic peptide
  XENP019854 vlCDR3
QQYGSSPWT

SEQ ID NO: 5822 - protein, 246 aa, Artificial Sequence
  Description of Artificial Sequence: Synthetic polypeptide
  XENP019855 [CTLA-4]_H0.107_L0_scFv(GKPGS)4
QVQLVESGGGVVQPGRSLRLSCAASGFTFSSYTMHWVRQAPGKGLEWVTFISYDGNNKYYADSVKGRFTISRDNSKNTLYLQMNSLRAEDTAIYYCARYGWLGPFDYWGQGTLVTVSSGKPGSGKPGSGKPGSGKPGSEIVLTQSPGTLSLSPGERATLSCRASQSVGSSYLAWYQQKPGQAPRLLIYGAFSRATGIPDRFSGSGSGTDFTLTISRLEPEDFAVYYCQQYGSSPWTFGQGTKVEIK

SEQ ID NO: 5823 - protein, 118 aa, Artificial Sequence
  Description of Artificial Sequence: Synthetic polypeptide
  VH of XENP019855
QVQLVESGGGVVQPGRSLRLSCAASGFTFSSYTMHWVRQAPGKGLEWVTFISYDGNNKYYADSVKGRFTISRDNSKNTLYLQMNSLRAEDTAIYYCARYGWLGPFDYWGQGTLVTVSS

SEQ ID NO: 5824 - protein, 108 aa, Artificial Sequence; identical to SEQ ID NO: 3741
  Description of Artificial Sequence: Synthetic polypeptide
  VL of XENP019855

SEQ ID NO: 5825 - protein, 5 aa, Artificial Sequence
  Description of Artificial Sequence: Synthetic peptide
  XENP019855 vhCDR1
SYTMH

SEQ ID NO: 5826 - protein, 17 aa, Artificial Sequence
  Description of Artificial Sequence: Synthetic peptide
  XENP019855 vhCDR2
FISYDGNNKYYADSVKG

SEQ ID NO: 5827 - protein, 9 aa, Artificial Sequence
  Description of Artificial Sequence: Synthetic peptide
  XENP019855 vhCDR3
YGWLGPFDY

SEQ ID NO: 5828 - protein, 12 aa, Artificial Sequence
  Description of Artificial Sequence: Synthetic peptide
  XENP019855 vlCDR1
RASQSVGSSYLA

SEQ ID NO: 5829 - protein, 7 aa, Artificial Sequence
  Description of Artificial Sequence: Synthetic peptide
  XENP019855 vlCDR2
GAFSRAT

SEQ ID NO: 5830 - protein, 9 aa, Artificial Sequence
  Description of Artificial Sequence: Synthetic peptide
  XENP019855 vlCDR3
QQYGSSPWT

SEQ ID NO: 5831 - protein, 246 aa, Artificial Sequence
  Description of Artificial Sequence: Synthetic polypeptide
  XENP019856 [CTLA-4]_H0.108_L0_scFv(GKPGS)4
QVQLVESGGGVVQPGRSLRLSCAASGFTFSSYTMHWVRQAPGKGLEWVTFISYDGNNKYYADSVKGRFTISRDNSKNTLYLQMNSLRAEDTAIYYCARTAWLGPFDYWGQGTLVTVSSGKPGSGKPGSGKPGSGKPGSEIVLTQSPGTLSLSPGERATLSCRASQSVGSSYLAWYQQKPGQAPRLLIYGAFSRATGIPDRFSGSGSGTDFTLTISRLEPEDFAVYYCQQYGSSPWTFGQGTKVEIK

SEQ ID NO: 5832 - protein, 118 aa, Artificial Sequence
  Description of Artificial Sequence: Synthetic polypeptide
  VH of XENP019856
QVQLVESGGGVVQPGRSLRLSCAASGFTFSSYTMHWVRQAPGKGLEWVTFISYDGNNKYYADSVKGRFTISRDNSKNTLYLQMNSLRAEDTAIYYCARTAWLGPFDYWGQGTLVTVSS

SEQ ID NO: 5833 - protein, 108 aa, Artificial Sequence; identical to SEQ ID NO: 3741
  Description of Artificial Sequence: Synthetic polypeptide
  VL of XENP019856

SEQ ID NO: 5834 - protein, 5 aa, Artificial Sequence
  Description of Artificial Sequence: Synthetic peptide
  XENP019856 vhCDR1
SYTMH

SEQ ID NO: 5835 - protein, 17 aa, Artificial Sequence
  Description of Artificial Sequence: Synthetic peptide
  XENP019856 vhCDR2
FISYDGNNKYYADSVKG

SEQ ID NO: 5836 - protein, 9 aa, Artificial Sequence
  Description of Artificial Sequence: Synthetic peptide
  XENP019856 vhCDR3
TAWLGPFDY

SEQ ID NO: 5837 - protein, 12 aa, Artificial Sequence
  Description of Artificial Sequence: Synthetic peptide
  XENP019856 vlCDR1
RASQSVGSSYLA

SEQ ID NO: 5838 - protein, 7 aa, Artificial Sequence
  Description of Artificial Sequence: Synthetic peptide
  XENP019856 vlCDR2
GAFSRAT

SEQ ID NO: 5839 - protein, 9 aa, Artificial Sequence
  Description of Artificial Sequence: Synthetic peptide
  XENP019856 vlCDR3
QQYGSSPWT

SEQ ID NO: 5840 - protein, 246 aa, Artificial Sequence
  Description of Artificial Sequence: Synthetic polypeptide
  XENP019857 [CTLA-4]_H0.109_L0_scFv(GKPGS)4
QVQLVESGGGVVQPGRSLRLSCAASGFTFSSYTMHWVRQAPGKGLEWVTFISYDGNNKYYADSVKGRFTISRDNSKNTLYLQMNSLRAEDTAIYYCARTSWLGPFDYWGQGTLVTVSSGKPGSGKPGSGKPGSGKPGSEIVLTQSPGTLSLSPGERATLSCRASQSVGSSYLAWYQQKPGQAPRLLIYGAFSRATGIPDRFSGSGSGTDFTLTISRLEPEDFAVYYCQQYGSSPWTFGQGTKVEIK

SEQ ID NO: 5841 - protein, 118 aa, Artificial Sequence
  Description of Artificial Sequence: Synthetic polypeptide
  VH of XENP019857
QVQLVESGGGVVQPGRSLRLSCAASGFTFSSYTMHWVRQAPGKGLEWVTFISYDGNNKYYADSVKGRFTISRDNSKNTLYLQMNSLRAEDTAIYYCARTSWLGPFDYWGQGTLVTVSS

SEQ ID NO: 5842 - protein, 108 aa, Artificial Sequence; identical to SEQ ID NO: 3741
  Description of Artificial Sequence: Synthetic polypeptide
  VL of XENP019857

SEQ ID NO: 5843 - protein, 5 aa, Artificial Sequence
  Description of Artificial Sequence: Synthetic peptide
  XENP019857 vhCDR1
SYTMH

SEQ ID NO: 5844 - protein, 17 aa, Artificial Sequence
  Description of Artificial Sequence: Synthetic peptide
  XENP019857 vhCDR2
FISYDGNNKYYADSVKG

SEQ ID NO: 5845 - protein, 9 aa, Artificial Sequence
  Description of Artificial Sequence: Synthetic peptide
  XENP019857 vhCDR3
TSWLGPFDY

SEQ ID NO: 5846 - protein, 12 aa, Artificial Sequence
  Description of Artificial Sequence: Synthetic peptide
  XENP019857 vlCDR1
RASQSVGSSYLA

SEQ ID NO: 5847 - protein, 7 aa, Artificial Sequence
  Description of Artificial Sequence: Synthetic peptide
  XENP019857 vlCDR2
GAFSRAT

SEQ ID NO: 5848 - protein, 9 aa, Artificial Sequence
  Description of Artificial Sequence: Synthetic peptide
  XENP019857 vlCDR3
QQYGSSPWT

SEQ ID NO: 5849 - protein, 246 aa, Artificial Sequence
  Description of Artificial Sequence: Synthetic polypeptide
  XENP019858 [CTLA-4]_H0.110_L0_scFv(GKPGS)4
QVQLVESGGGVVQPGRSLRLSCAASGFTFSSYTMHWVRQAPGKGLEWVTFISYDGNNKYYADSVKGRFTISRDNSKNTLYLQMNSLRAEDTAIYYCARTTWLGPFDYWGQGTLVTVSSGKPGSGKPGSGKPGSGKPGSEIVLTQSPGTLSLSPGERATLSCRASQSVGSSYLAWYQQKPGQAPRLLIYGAFSRATGIPDRFSGSGSGTDFTLTISRLEPEDFAVYYCQQYGSSPWTFGQGTKVEIK

SEQ ID NO: 5850 - protein, 118 aa, Artificial Sequence
  Description of Artificial Sequence: Synthetic polypeptide
  VH of XENP019858
QVQLVESGGGVVQPGRSLRLSCAASGFTFSSYTMHWVRQAPGKGLEWVTFISYDGNNKYYADSVKGRFTISRDNSKNTLYLQMNSLRAEDTAIYYCARTTWLGPFDYWGQGTLVTVSS

SEQ ID NO: 5851 - protein, 108 aa, Artificial Sequence; identical to SEQ ID NO: 3741
  Description of Artificial Sequence: Synthetic polypeptide
  VL of XENP019858

SEQ ID NO: 5852 - protein, 5 aa, Artificial Sequence
  Description of Artificial Sequence: Synthetic peptide
  XENP019858 vhCDR1
SYTMH

SEQ ID NO: 5853 - protein, 17 aa, Artificial Sequence
  Description of Artificial Sequence: Synthetic peptide
  XENP019858 vhCDR2
FISYDGNNKYYADSVKG

SEQ ID NO: 5854 - protein, 9 aa, Artificial Sequence
  Description of Artificial Sequence: Synthetic peptide
  XENP019858 vhCDR3
TTWLGPFDY

SEQ ID NO: 5855 - protein, 12 aa, Artificial Sequence
  Description of Artificial Sequence: Synthetic peptide
  XENP019858 vlCDR1
RASQSVGSSYLA

SEQ ID NO: 5856 - protein, 7 aa, Artificial Sequence
  Description of Artificial Sequence: Synthetic peptide
  XENP019858 vlCDR2
GAFSRAT

SEQ ID NO: 5857 - protein, 9 aa, Artificial Sequence
  Description of Artificial Sequence: Synthetic peptide
  XENP019858 vlCDR3
QQYGSSPWT

SEQ ID NO: 5858 - protein, 246 aa, Artificial Sequence
  Description of Artificial Sequence: Synthetic polypeptide
  XENP019859 [CTLA-4]_H0.111_L0_scFv(GKPGS)4
QVQLVESGGGVVQPGRSLRLSCAASGFTFSSYTMHWVRQAPGKGLEWVTFISYDGNNKYYADSVKGRFTISRDNSKNTLYLQMNSLRAEDTAIYYCARTGFLGPFDYWGQGTLVTVSSGKPGSGKPGSGKPGSGKPGSEIVLTQSPGTLSLSPGERATLSCRASQSVGSSYLAWYQQKPGQAPRLLIYGAFSRATGIPDRFSGSGSGTDFTLTISRLEPEDFAVYYCQQYGSSPWTFGQGTKVEIK

SEQ ID NO: 5859 - protein, 118 aa, Artificial Sequence
  Description of Artificial Sequence: Synthetic polypeptide
  VH of XENP019859
QVQLVESGGGVVQPGRSLRLSCAASGFTFSSYTMHWVRQAPGKGLEWVTFISYDGNNKYYADSVKGRFTISRDNSKNTLYLQMNSLRAEDTAIYYCARTGFLGPFDYWGQGTLVTVSS

SEQ ID NO: 5860 - protein, 108 aa, Artificial Sequence; identical to SEQ ID NO: 3741
  Description of Artificial Sequence: Synthetic polypeptide
  VL of XENP019859

SEQ ID NO: 5861 - protein, 5 aa, Artificial Sequence
  Description of Artificial Sequence: Synthetic peptide
  XENP019859 vhCDR1
SYTMH

SEQ ID NO: 5862 - protein, 17 aa, Artificial Sequence
  Description of Artificial Sequence: Synthetic peptide
  XENP019859 vhCDR2
FISYDGNNKYYADSVKG

SEQ ID NO: 5863 - protein, 9 aa, Artificial Sequence
  Description of Artificial Sequence: Synthetic peptide
  XENP019859 vhCDR3
TGFLGPFDY

SEQ ID NO: 5864 - protein, 12 aa, Artificial Sequence
  Description of Artificial Sequence: Synthetic peptide
  XENP019859 vlCDR1
RASQSVGSSYLA

SEQ ID NO: 5865 - protein, 7 aa, Artificial Sequence
  Description of Artificial Sequence: Synthetic peptide
  XENP019859 vlCDR2
GAFSRAT

SEQ ID NO: 5866 - protein, 9 aa, Artificial Sequence
  Description of Artificial Sequence: Synthetic peptide
  XENP019859 vlCDR3
QQYGSSPWT

SEQ ID NO: 5867 - protein, 246 aa, Artificial Sequence
  Description of Artificial Sequence: Synthetic polypeptide
  XENP019860 [CTLA-4]_H0.112_L0_scFv(GKPGS)4
QVQLVESGGGVVQPGRSLRLSCAASGFTFSSYTMHWVRQAPGKGLEWVTFISYDGNNKYYADSVKGRFTISRDNSKNTLYLQMNSLRAEDTAIYYCARTGGLGPFDYWGQGTLVTVSSGKPGSGKPGSGKPGSGKPGSEIVLTQSPGTLSLSPGERATLSCRASQSVGSSYLAWYQQKPGQAPRLLIYGAFSRATGIPDRFSGSGSGTDFTLTISRLEPEDFAVYYCQQYGSSPWTFGQGTKVEIK

SEQ ID NO: 5868 - protein, 118 aa, Artificial Sequence
  Description of Artificial Sequence: Synthetic polypeptide
  VH of XENP019860
QVQLVESGGGVVQPGRSLRLSCAASGFTFSSYTMHWVRQAPGKGLEWVTFISYDGNNKYYADSVKGRFTISRDNSKNTLYLQMNSLRAEDTAIYYCARTGGLGPFDYWGQGTLVTVSS

SEQ ID NO: 5869 - protein, 108 aa, Artificial Sequence; identical to SEQ ID NO: 3741
  Description of Artificial Sequence: Synthetic polypeptide
  VL of XENP019860

SEQ ID NO: 5870 - protein, 5 aa, Artificial Sequence
  Description of Artificial Sequence: Synthetic peptide
  XENP019860 vhCDR1
SYTMH

SEQ ID NO: 5871 - protein, 17 aa, Artificial Sequence
  Description of Artificial Sequence: Synthetic peptide
  XENP019860 vhCDR2
FISYDGNNKYYADSVKG

SEQ ID NO: 5872 - protein, 9 aa, Artificial Sequence
  Description of Artificial Sequence: Synthetic peptide
  XENP019860 vhCDR3
TGGLGPFDY

SEQ ID NO: 5873 - protein, 12 aa, Artificial Sequence
  Description of Artificial Sequence: Synthetic peptide
  XENP019860 vlCDR1
RASQSVGSSYLA

SEQ ID NO: 5874 - protein, 7 aa, Artificial Sequence
  Description of Artificial Sequence: Synthetic peptide
  XENP019860 vlCDR2
GAFSRAT

SEQ ID NO: 5875 - protein, 9 aa, Artificial Sequence
  Description of Artificial Sequence: Synthetic peptide
  XENP019860 vlCDR3
QQYGSSPWT

SEQ ID NO: 5876 - protein, 246 aa, Artificial Sequence
  Description of Artificial Sequence: Synthetic polypeptide
  XENP019861 [CTLA-4]_H0.113_L0_scFv(GKPGS)4
QVQLVESGGGVVQPGRSLRLSCAASGFTFSSYTMHWVRQAPGKGLEWVTFISYDGNNKYYADSVKGRFTISRDNSKNTLYLQMNSLRAEDTAIYYCARTGHLGPFDYWGQGTLVTVSSGKPGSGKPGSGKPGSGKPGSEIVLTQSPGTLSLSPGERATLSCRASQSVGSSYLAWYQQKPGQAPRLLIYGAFSRATGIPDRFSGSGSGTDFTLTISRLEPEDFAVYYCQQYGSSPWTFGQGTKVEIK

SEQ ID NO: 5877 - protein, 118 aa, Artificial Sequence
  Description of Artificial Sequence: Synthetic polypeptide
  VH of XENP019861
QVQLVESGGGVVQPGRSLRLSCAASGFTFSSYTMHWVRQAPGKGLEWVTFISYDGNNKYYADSVKGRFTISRDNSKNTLYLQMNSLRAEDTAIYYCARTGHLGPFDYWGQGTLVTVSS

SEQ ID NO: 5878 - protein, 108 aa, Artificial Sequence; identical to SEQ ID NO: 3741
  Description of Artificial Sequence: Synthetic polypeptide
  VL of XENP019861

SEQ ID NO: 5879 - protein, 5 aa, Artificial Sequence
  Description of Artificial Sequence: Synthetic peptide
  XENP019861 vhCDR1
SYTMH

SEQ ID NO: 5880 - protein, 17 aa, Artificial Sequence
  Description of Artificial Sequence: Synthetic peptide
  XENP019861 vhCDR2
FISYDGNNKYYADSVKG

SEQ ID NO: 5881 - protein, 9 aa, Artificial Sequence
  Description of Artificial Sequence: Synthetic peptide
  XENP019861 vhCDR3
TGHLGPFDY

SEQ ID NO: 5882 - protein, 12 aa, Artificial Sequence
  Description of Artificial Sequence: Synthetic peptide
  XENP019861 vlCDR1
RASQSVGSSYLA

SEQ ID NO: 5883 - protein, 7 aa, Artificial Sequence
  Description of Artificial Sequence: Synthetic peptide
  XENP019861 vlCDR2
GAFSRAT

SEQ ID NO: 5884 - protein, 9 aa, Artificial Sequence
  Description of Artificial Sequence: Synthetic peptide
  XENP019861 vlCDR3
QQYGSSPWT

SEQ ID NO: 5885 - protein, 246 aa, Artificial Sequence
  Description of Artificial Sequence: Synthetic polypeptide
  XENP019862 [CTLA-4]_H0.114_L0_scFv(GKPGS)4
QVQLVESGGGVVQPGRSLRLSCAASGFTFSSYTMHWVRQAPGKGLEWVTFISYDGNNKYYADSVKGRFTISRDNSKNTLYLQMNSLRAEDTAIYYCARTGLLGPFDYWGQGTLVTVSSGKPGSGKPGSGKPGSGKPGSEIVLTQSPGTLSLSPGERATLSCRASQSVGSSYLAWYQQKPGQAPRLLIYGAFSRATGIPDRFSGSGSGTDFTLTISRLEPEDFAVYYCQQYGSSPWTFGQGTKVEIK

SEQ ID NO: 5886 - protein, 118 aa, Artificial Sequence
  Description of Artificial Sequence: Synthetic polypeptide
  VH of XENP019862
QVQLVESGGGVVQPGRSLRLSCAASGFTFSSYTMHWVRQAPGKGLEWVTFISYDGNNKYYADSVKGRFTISRDNSKNTLYLQMNSLRAEDTAIYYCARTGLLGPFDYWGQGTLVTVSS

SEQ ID NO: 5887 - protein, 108 aa, Artificial Sequence; identical to SEQ ID NO: 3741
  Description of Artificial Sequence: Synthetic polypeptide
  VL of XENP019862

SEQ ID NO: 5888 - protein, 5 aa, Artificial Sequence
  Description of Artificial Sequence: Synthetic peptide
  XENP019862 vhCDR1
SYTMH

SEQ ID NO: 5889 - protein, 17 aa, Artificial Sequence
  Description of Artificial Sequence: Synthetic peptide
  XENP019862 vhCDR2
FISYDGNNKYYADSVKG

SEQ ID NO: 5890 - protein, 9 aa, Artificial Sequence
  Description of Artificial Sequence: Synthetic peptide
  XENP019862 vhCDR3
TGLLGPFDY

SEQ ID NO: 5891 - protein, 12 aa, Artificial Sequence
  Description of Artificial Sequence: Synthetic peptide
  XENP019862 vlCDR1
RASQSVGSSYLA

SEQ ID NO: 5892 - protein, 7 aa, Artificial Sequence
  Description of Artificial Sequence: Synthetic peptide
  XENP019862 vlCDR2
GAFSRAT

SEQ ID NO: 5893 - protein, 9 aa, Artificial Sequence
  Description of Artificial Sequence: Synthetic peptide
  XENP019862 vlCDR3
QQYGSSPWT

SEQ ID NO: 5894 - protein, 246 aa, Artificial Sequence
  Description of Artificial Sequence: Synthetic polypeptide
  XENP019863 [CTLA-4]_H0.115_L0_scFv(GKPGS)4
QVQLVESGGGVVQPGRSLRLSCAASGFTFSSYTMHWVRQAPGKGLEWVTFISYDGNNKYYADSVKGRFTISRDNSKNTLYLQMNSLRAEDTAIYYCARTGYLGPFDYWGQGTLVTVSSGKPGSGKPGSGKPGSGKPGSEIVLTQSPGTLSLSPGERATLSCRASQSVGSSYLAWYQQKPGQAPRLLIYGAFSRATGIPDRFSGSGSGTDFTLTISRLEPEDFAVYYCQQYGSSPWTFGQGTKVEIK

SEQ ID NO: 5895 - protein, 118 aa, Artificial Sequence
  Description of Artificial Sequence: Synthetic polypeptide
  VH of XENP019863
QVQLVESGGGVVQPGRSLRLSCAASGFTFSSYTMHWVRQAPGKGLEWVTFISYDGNNKYYADSVKGRFTISRDNSKNTLYLQMNSLRAEDTAIYYCARTGYLGPFDYWGQGTLVTVSS

SEQ ID NO: 5896 - protein, 108 aa, Artificial Sequence; identical to SEQ ID NO: 3741
  Description of Artificial Sequence: Synthetic polypeptide
  VL of XENP019863

SEQ ID NO: 5897 - protein, 5 aa, Artificial Sequence
  Description of Artificial Sequence: Synthetic peptide
  XENP019863 vhCDR1
SYTMH

SEQ ID NO: 5898 - protein, 17 aa, Artificial Sequence
  Description of Artificial Sequence: Synthetic peptide
  XENP019863 vhCDR2
FISYDGNNKYYADSVKG

SEQ ID NO: 5899 - protein, 9 aa, Artificial Sequence
  Description of Artificial Sequence: Synthetic peptide
  XENP019863 vhCDR3
TGYLGPFDY

SEQ ID NO: 5900 - protein, 12 aa, Artificial Sequence
  Description of Artificial Sequence: Synthetic peptide
  XENP019863 vlCDR1
RASQSVGSSYLA

SEQ ID NO: 5901 - protein, 7 aa, Artificial Sequence
  Description of Artificial Sequence: Synthetic peptide
  XENP019863 vlCDR2
GAFSRAT

SEQ ID NO: 5902 - protein, 9 aa, Artificial Sequence
  Description of Artificial Sequence: Synthetic peptide
  XENP019863 vlCDR3
QQYGSSPWT

SEQ ID NO: 5903 - protein, 246 aa, Artificial Sequence
  Description of Artificial Sequence: Synthetic polypeptide
  XENP019864 [CTLA-4]_H0.116_L0_scFv(GKPGS)4
QVQLVESGGGVVQPGRSLRLSCAASGFTFSSYTMHWVRQAPGKGLEWVTFISYDGNNKYYADSVKGRFTISRDNSKNTLYLQMNSLRAEDTAIYYCARTGWDGPFDYWGQGTLVTVSSGKPGSGKPGSGKPGSGKPGSEIVLTQSPGTLSLSPGERATLSCRASQSVGSSYLAWYQQKPGQAPRLLIYGAFSRATGIPDRFSGSGSGTDFTLTISRLEPEDFAVYYCQQYGSSPWTFGQGTKVEIK

SEQ ID NO: 5904 - protein, 118 aa, Artificial Sequence
  Description of Artificial Sequence: Synthetic polypeptide
  VH of XENP019864
QVQLVESGGGVVQPGRSLRLSCAASGFTFSSYTMHWVRQAPGKGLEWVTFISYDGNNKYYADSVKGRFTISRDNSKNTLYLQMNSLRAEDTAIYYCARTGWDGPFDYWGQGTLVTVSS

SEQ ID NO: 5905 - protein, 108 aa, Artificial Sequence; identical to SEQ ID NO: 3741
  Description of Artificial Sequence: Synthetic polypeptide
  VL of XENP019864

SEQ ID NO: 5906 - protein, 5 aa, Artificial Sequence
  Description of Artificial Sequence: Synthetic peptide
  XENP019864 vhCDR1
SYTMH

SEQ ID NO: 5907 - protein, 17 aa, Artificial Sequence
  Description of Artificial Sequence: Synthetic peptide
  XENP019864 vhCDR2
FISYDGNNKYYADSVKG

SEQ ID NO: 5908 - protein, 9 aa, Artificial Sequence
  Description of Artificial Sequence: Synthetic peptide
  XENP019864 vhCDR3
TGWDGPFDY

SEQ ID NO: 5909 - protein, 12 aa, Artificial Sequence
  Description of Artificial Sequence: Synthetic peptide
  XENP019864 vlCDR1
RASQSVGSSYLA

SEQ ID NO: 5910 - protein, 7 aa, Artificial Sequence
  Description of Artificial Sequence: Synthetic peptide
  XENP019864 vlCDR2
GAFSRAT

SEQ ID NO: 5911 - protein, 9 aa, Artificial Sequence
  Description of Artificial Sequence: Synthetic peptide
  XENP019864 vlCDR3
QQYGSSPWT

SEQ ID NO: 5912 - protein, 246 aa, Artificial Sequence
  Description of Artificial Sequence: Synthetic polypeptide
  XENP019865 [CTLA-4]_H0.117_L0_scFv(GKPGS)4
QVQLVESGGGVVQPGRSLRLSCAASGFTFSSYTMHWVRQAPGKGLEWVTFISYDGNNKYYADSVKGRFTISRDNSKNTLYLQMNSLRAEDTAIYYCARTGWIGPFDYWGQGTLVTVSSGKPGSGKPGSGKPGSGKPGSEIVLTQSPGTLSLSPGERATLSCRASQSVGSSYLAWYQQKPGQAPRLLIYGAFSRATGIPDRFSGSGSGTDFTLTISRLEPEDFAVYYCQQYGSSPWTFGQGTKVEIK

SEQ ID NO: 5913 - protein, 118 aa, Artificial Sequence
  Description of Artificial Sequence: Synthetic polypeptide
  VH of XENP019865
QVQLVESGGGVVQPGRSLRLSCAASGFTFSSYTMHWVRQAPGKGLEWVTFISYDGNNKYYADSVKGRFTISRDNSKNTLYLQMNSLRAEDTAIYYCARTGWIGPFDYWGQGTLVTVSS

SEQ ID NO: 5914 - protein, 108 aa, Artificial Sequence; identical to SEQ ID NO: 3741
  Description of Artificial Sequence: Synthetic polypeptide
  VL of XENP019865

SEQ ID NO: 5915 - protein, 5 aa, Artificial Sequence
  Description of Artificial Sequence: Synthetic peptide
  XENP019865 vhCDR1
SYTMH

SEQ ID NO: 5916 - protein, 17 aa, Artificial Sequence
  Description of Artificial Sequence: Synthetic peptide
  XENP019865 vhCDR2
FISYDGNNKYYADSVKG

SEQ ID NO: 5917 - protein, 9 aa, Artificial Sequence
  Description of Artificial Sequence: Synthetic peptide
  XENP019865 vhCDR3
TGWIGPFDY

SEQ ID NO: 5918 - protein, 12 aa, Artificial Sequence
  Description of Artificial Sequence: Synthetic peptide
  XENP019865 vlCDR1
RASQSVGSSYLA

SEQ ID NO: 5919 - protein, 7 aa, Artificial Sequence
  Description of Artificial Sequence: Synthetic peptide
  XENP019865 vlCDR2
GAFSRAT

SEQ ID NO: 5920 - protein, 9 aa, Artificial Sequence
  Description of Artificial Sequence: Synthetic peptide
  XENP019865 vlCDR3
QQYGSSPWT

SEQ ID NO: 5921 - protein, 246 aa, Artificial Sequence
  Description of Artificial Sequence: Synthetic polypeptide
  XENP019866 [CTLA-4]_H0.118_L0_scFv(GKPGS)4
QVQLVESGGGVVQPGRSLRLSCAASGFTFSSYTMHWVRQAPGKGLEWVTFISYDGNNKYYADSVKGRFTISRDNSKNTLYLQMNSLRAEDTAIYYCARTGWVGPFDYWGQGTLVTVSSGKPGSGKPGSGKPGSGKPGSEIVLTQSPGTLSLSPGERATLSCRASQSVGSSYLAWYQQKPGQAPRLLIYGAFSRATGIPDRFSGSGSGTDFTLTISRLEPEDFAVYYCQQYGSSPWTFGQGTKVEIK

SEQ ID NO: 5922 - protein, 118 aa, Artificial Sequence
  Description of Artificial Sequence: Synthetic polypeptide
  VH of XENP019866
QVQLVESGGGVVQPGRSLRLSCAASGFTFSSYTMHWVRQAPGKGLEWVTFISYDGNNKYYADSVKGRFTISRDNSKNTLYLQMNSLRAEDTAIYYCARTGWVGPFDYWGQGTLVTVSS

SEQ ID NO: 5923 - protein, 108 aa, Artificial Sequence; identical to SEQ ID NO: 3741
  Description of Artificial Sequence: Synthetic polypeptide
  VL of XENP019866

SEQ ID NO: 5924 - protein, 5 aa, Artificial Sequence
  Description of Artificial Sequence: Synthetic peptide
  XENP019866 vhCDR1
SYTMH

SEQ ID NO: 5925 - protein, 17 aa, Artificial Sequence
  Description of Artificial Sequence: Synthetic peptide
  XENP019866 vhCDR2
FISYDGNNKYYADSVKG

SEQ ID NO: 5926 - protein, 9 aa, Artificial Sequence
  Description of Artificial Sequence: Synthetic peptide
  XENP019866 vhCDR3
TGWVGPFDY

SEQ ID NO: 5927 - protein, 12 aa, Artificial Sequence
  Description of Artificial Sequence: Synthetic peptide
  XENP019866 vlCDR1
RASQSVGSSYLA

SEQ ID NO: 5928 - protein, 7 aa, Artificial Sequence
  Description of Artificial Sequence: Synthetic peptide
  XENP019866 vlCDR2
GAFSRAT

SEQ ID NO: 5929 - protein, 9 aa, Artificial Sequence
  Description of Artificial Sequence: Synthetic peptide
  XENP019866 vlCDR3
QQYGSSPWT

SEQ ID NO: 5930 - protein, 246 aa, Artificial Sequence
  Description of Artificial Sequence: Synthetic polypeptide
  XENP019867 [CTLA-4]_H0.119_L0_scFv(GKPGS)4
QVQLVESGGGVVQPGRSLRLSCAASGFTFSSYTMHWVRQAPGKGLEWVTFISYDGNNKYYADSVKGRFTISRDNSKNTLYLQMNSLRAEDTAIYYCARTGWLAPFDYWGQGTLVTVSSGKPGSGKPGSGKPGSGKPGSEIVLTQSPGTLSLSPGERATLSCRASQSVGSSYLAWYQQKPGQAPRLLIYGAFSRATGIPDRFSGSGSGTDFTLTISRLEPEDFAVYYCQQYGSSPWTFGQGTKVEIK

SEQ ID NO: 5931 - protein, 118 aa, Artificial Sequence
  Description of Artificial Sequence: Synthetic polypeptide
  VH of XENP019867
QVQLVESGGGVVQPGRSLRLSCAASGFTFSSYTMHWVRQAPGKGLEWVTFISYDGNNKYYADSVKGRFTISRDNSKNTLYLQMNSLRAEDTAIYYCARTGWLAPFDYWGQGTLVTVSS

SEQ ID NO: 5932 - protein, 108 aa, Artificial Sequence; identical to SEQ ID NO: 3741
  Description of Artificial Sequence: Synthetic polypeptide
  VL of XENP019867

SEQ ID NO: 5933 - protein, 5 aa, Artificial Sequence
  Description of Artificial Sequence: Synthetic peptide
  XENP019867 vhCDR1
SYTMH

SEQ ID NO: 5934 - protein, 17 aa, Artificial Sequence
  Description of Artificial Sequence: Synthetic peptide
  XENP019867 vhCDR2
FISYDGNNKYYADSVKG

SEQ ID NO: 5935 - protein, 9 aa, Artificial Sequence
  Description of Artificial Sequence: Synthetic peptide
  XENP019867 vhCDR3
TGWLAPFDY

SEQ ID NO: 5936 - protein, 12 aa, Artificial Sequence
  Description of Artificial Sequence: Synthetic peptide
  XENP019867 vlCDR1
RASQSVGSSYLA

SEQ ID NO: 5937 - protein, 7 aa, Artificial Sequence
  Description of Artificial Sequence: Synthetic peptide
  XENP019867 vlCDR2
GAFSRAT

SEQ ID NO: 5938 - protein, 9 aa, Artificial Sequence
  Description of Artificial Sequence: Synthetic peptide
  XENP019867 vlCDR3
QQYGSSPWT

SEQ ID NO: 5939 - protein, 246 aa, Artificial Sequence
  Description of Artificial Sequence: Synthetic polypeptide
  XENP019868 [CTLA-4]_H0.120_L0_scFv(GKPGS)4
QVQLVESGGGVVQPGRSLRLSCAASGFTFSSYTMHWVRQAPGKGLEWVTFISYDGNNKYYADSVKGRFTISRDNSKNTLYLQMNSLRAEDTAIYYCARTGWLSPFDYWGQGTLVTVSSGKPGSGKPGSGKPGSGKPGSEIVLTQSPGTLSLSPGERATLSCRASQSVGSSYLAWYQQKPGQAPRLLIYGAFSRATGIPDRFSGSGSGTDFTLTISRLEPEDFAVYYCQQYGSSPWTFGQGTKVEIK

SEQ ID NO: 5940 - protein, 118 aa, Artificial Sequence
  Description of Artificial Sequence: Synthetic polypeptide
  VH of XENP019868
QVQLVESGGGVVQPGRSLRLSCAASGFTFSSYTMHWVRQAPGKGLEWVTFISYDGNNKYYADSVKGRFTISRDNSKNTLYLQMNSLRAEDTAIYYCARTGWLSPFDYWGQGTLVTVSS

SEQ ID NO: 5941 - protein, 108 aa, Artificial Sequence; identical to SEQ ID NO: 3741
  Description of Artificial Sequence: Synthetic polypeptide
  VL of XENP019868

SEQ ID NO: 5942 - protein, 5 aa, Artificial Sequence
  Description of Artificial Sequence: Synthetic peptide
  XENP019868 vhCDR1
SYTMH

SEQ ID NO: 5943 - protein, 17 aa, Artificial Sequence
  Description of Artificial Sequence: Synthetic peptide
  XENP019868 vhCDR2
FISYDGNNKYYADSVKG

SEQ ID NO: 5944 - protein, 9 aa, Artificial Sequence
  Description of Artificial Sequence: Synthetic peptide
  XENP019868 vhCDR3
TGWLSPFDY

SEQ ID NO: 5945 - protein, 12 aa, Artificial Sequence
  Description of Artificial Sequence: Synthetic peptide
  XENP019868 vlCDR1
RASQSVGSSYLA

SEQ ID NO: 5946 - protein, 7 aa, Artificial Sequence
  Description of Artificial Sequence: Synthetic peptide
  XENP019868 vlCDR2
GAFSRAT

SEQ ID NO: 5947 - protein, 9 aa, Artificial Sequence
  Description of Artificial Sequence: Synthetic peptide
  XENP019868 vlCDR3
QQYGSSPWT

SEQ ID NO: 5948 - protein, 246 aa, Artificial Sequence
  Description of Artificial Sequence: Synthetic polypeptide
  XENP019869 [CTLA-4]_H0.121_L0_scFv(GKPGS)4
QVQLVESGGGVVQPGRSLRLSCAASGFTFSSYTMHWVRQAPGKGLEWVTFISYDGNNKYYADSVKGRFTISRDNSKNTLYLQMNSLRAEDTAIYYCARTGWLTPFDYWGQGTLVTVSSGKPGSGKPGSGKPGSGKPGSEIVLTQSPGTLSLSPGERATLSCRASQSVGSSYLAWYQQKPGQAPRLLIYGAFSRATGIPDRFSGSGSGTDFTLTISRLEPEDFAVYYCQQYGSSPWTFGQGTKVEIK

SEQ ID NO: 5949 - protein, 118 aa, Artificial Sequence
  Description of Artificial Sequence: Synthetic polypeptide
  VH of XENP019869
QVQLVESGGGVVQPGRSLRLSCAASGFTFSSYTMHWVRQAPGKGLEWVTFISYDGNNKYYADSVKGRFTISRDNSKNTLYLQMNSLRAEDTAIYYCARTGWLTPFDYWGQGTLVTVSS

SEQ ID NO: 5950 - protein, 108 aa, Artificial Sequence; identical to SEQ ID NO: 3741
  Description of Artificial Sequence: Synthetic polypeptide
  VL of XENP019869

SEQ ID NO: 5951 - protein, 5 aa, Artificial Sequence
  Description of Artificial Sequence: Synthetic peptide
  XENP019869 vhCDR1
SYTMH

SEQ ID NO: 5952 - protein, 17 aa, Artificial Sequence
  Description of Artificial Sequence: Synthetic peptide
  XENP019869 vhCDR2
FISYDGNNKYYADSVKG

SEQ ID NO: 5953 - protein, 9 aa, Artificial Sequence
  Description of Artificial Sequence: Synthetic peptide
  XENP019869 vhCDR3
TGWLTPFDY

SEQ ID NO: 5954 - protein, 12 aa, Artificial Sequence
  Description of Artificial Sequence: Synthetic peptide
  XENP019869 vlCDR1
RASQSVGSSYLA

SEQ ID NO: 5955 - protein, 7 aa, Artificial Sequence
  Description of Artificial Sequence: Synthetic peptide
  XENP019869 vlCDR2
GAFSRAT

SEQ ID NO: 5956 - protein, 9 aa, Artificial Sequence
  Description of Artificial Sequence: Synthetic peptide
  XENP019869 vlCDR3
QQYGSSPWT

SEQ ID NO: 5957 - protein, 246 aa, Artificial Sequence
  Description of Artificial Sequence: Synthetic polypeptide
  XENP019870 [CTLA-4]_H0.122_L0_scFv(GKPGS)4
QVQLVESGGGVVQPGRSLRLSCAASGFTFSSYTMHWVRQAPGKGLEWVTFISYDGNNKYYADSVKGRFTISRDNSKNTLYLQMNSLRAEDTAIYYCARTGWLGPLDYWGQGTLVTVSSGKPGSGKPGSGKPGSGKPGSEIVLTQSPGTLSLSPGERATLSCRASQSVGSSYLAWYQQKPGQAPRLLIYGAFSRATGIPDRFSGSGSGTDFTLTISRLEPEDFAVYYCQQYGSSPWTFGQGTKVEIK

SEQ ID NO: 5958 - protein, 118 aa, Artificial Sequence
  Description of Artificial Sequence: Synthetic polypeptide
  VH of XENP019870
QVQLVESGGGVVQPGRSLRLSCAASGFTFSSYTMHWVRQAPGKGLEWVTFISYDGNNKYYADSVKGRFTISRDNSKNTLYLQMNSLRAEDTAIYYCARTGWLGPLDYWGQGTLVTVSS

SEQ ID NO: 5959 - protein, 108 aa, Artificial Sequence; identical to SEQ ID NO: 3741
  Description of Artificial Sequence: Synthetic polypeptide
  VL of XENP019870

SEQ ID NO: 5960 - protein, 5 aa, Artificial Sequence
  Description of Artificial Sequence: Synthetic peptide
  XENP019870 vhCDR1
SYTMH

SEQ ID NO: 5961 - protein, 17 aa, Artificial Sequence
  Description of Artificial Sequence: Synthetic peptide
  XENP019870 vhCDR2
FISYDGNNKYYADSVKG

SEQ ID NO: 5962 - protein, 9 aa, Artificial Sequence
  Description of Artificial Sequence: Synthetic peptide
  XENP019870 vhCDR3
TGWLGPLDY

SEQ ID NO: 5963 - protein, 12 aa, Artificial Sequence
  Description of Artificial Sequence: Synthetic peptide
  XENP019870 vlCDR1
RASQSVGSSYLA

SEQ ID NO: 5964 - protein, 7 aa, Artificial Sequence
  Description of Artificial Sequence: Synthetic peptide
  XENP019870 vlCDR2
GAFSRAT

SEQ ID NO: 5965 - protein, 9 aa, Artificial Sequence
  Description of Artificial Sequence: Synthetic peptide
  XENP019870 vlCDR3
QQYGSSPWT

SEQ ID NO: 5966 - protein, 246 aa, Artificial Sequence
  Description of Artificial Sequence: Synthetic polypeptide
  XENP019871 [CTLA-4]_H0.123_L0_scFv(GKPGS)4
QVQLVESGGGVVQPGRSLRLSCAASGFTFSSYTMHWVRQAPGKGLEWVTFISYDGNNKYYADSVKGRFTISRDNSKNTLYLQMNSLRAEDTAIYYCARTGWLGPMDYWGQGTLVTVSSGKPGSGKPGSGKPGSGKPGSEIVLTQSPGTLSLSPGERATLSCRASQSVGSSYLAWYQQKPGQAPRLLIYGAFSRATGIPDRFSGSGSGTDFTLTISRLEPEDFAVYYCQQYGSSPWTFGQGTKVEIK

SEQ ID NO: 5967 - protein, 118 aa, Artificial Sequence
  Description of Artificial Sequence: Synthetic polypeptide
  VH of XENP019871
QVQLVESGGGVVQPGRSLRLSCAASGFTFSSYTMHWVRQAPGKGLEWVTFISYDGNNKYYADSVKGRFTISRDNSKNTLYLQMNSLRAEDTAIYYCARTGWLGPMDYWGQGTLVTVSS

SEQ ID NO: 5968 - protein, 108 aa, Artificial Sequence; identical to SEQ ID NO: 3741
  Description of Artificial Sequence: Synthetic polypeptide
  VL of XENP019871

SEQ ID NO: 5969 - protein, 5 aa, Artificial Sequence
  Description of Artificial Sequence: Synthetic peptide
  XENP019871 vhCDR1
SYTMH

SEQ ID NO: 5970 - protein, 17 aa, Artificial Sequence
  Description of Artificial Sequence: Synthetic peptide
  XENP019871 vhCDR2
FISYDGNNKYYADSVKG

SEQ ID NO: 5971 - protein, 9 aa, Artificial Sequence
  Description of Artificial Sequence: Synthetic peptide
  XENP019871 vhCDR3
TGWLGPMDY

SEQ ID NO: 5972 - protein, 12 aa, Artificial Sequence
  Description of Artificial Sequence: Synthetic peptide
  XENP019871 vlCDR1
RASQSVGSSYLA

SEQ ID NO: 5973 - protein, 7 aa, Artificial Sequence
  Description of Artificial Sequence: Synthetic peptide
  XENP019871 vlCDR2
GAFSRAT

SEQ ID NO: 5974 - protein, 9 aa, Artificial Sequence
  Description of Artificial Sequence: Synthetic peptide
  XENP019871 vlCDR3
QQYGSSPWT

SEQ ID NO: 5975 - protein, 246 aa, Artificial Sequence
  Description of Artificial Sequence: Synthetic polypeptide
  XENP019872 [CTLA-4]_H0.124_L0_scFv(GKPGS)4
QVQLVESGGGVVQPGRSLRLSCAASGFTFSSYTMHWVRQAPGKGLEWVTFISYDGNNKYYADSVKGRFTISRDNSKNTLYLQMNSLRAEDTAIYYCARTGWLGPFAYWGQGTLVTVSSGKPGSGKPGSGKPGSGKPGSEIVLTQSPGTLSLSPGERATLSCRASQSVGSSYLAWYQQKPGQAPRLLIYGAFSRATGIPDRFSGSGSGTDFTLTISRLEPEDFAVYYCQQYGSSPWTFGQGTKVEIK

SEQ ID NO: 5976 - protein, 118 aa, Artificial Sequence
  Description of Artificial Sequence: Synthetic polypeptide
  VH of XENP019872
QVQLVESGGGVVQPGRSLRLSCAASGFTFSSYTMHWVRQAPGKGLEWVTFISYDGNNKYYADSVKGRFTISRDNSKNTLYLQMNSLRAEDTAIYYCARTGWLGPFAYWGQGTLVTVSS

SEQ ID NO: 5977 - protein, 108 aa, Artificial Sequence; identical to SEQ ID NO: 3741
  Description of Artificial Sequence: Synthetic polypeptide
  VL of XENP019872

SEQ ID NO: 5978 - protein, 5 aa, Artificial Sequence
  Description of Artificial Sequence: Synthetic peptide
  XENP019872 vhCDR1
SYTMH

SEQ ID NO: 5979 - protein, 17 aa, Artificial Sequence
  Description of Artificial Sequence: Synthetic peptide
  XENP019872 vhCDR2
FISYDGNNKYYADSVKG

SEQ ID NO: 5980 - protein, 9 aa, Artificial Sequence
  Description of Artificial Sequence: Synthetic peptide
  XENP019872 vhCDR3
TGWLGPFAY

SEQ ID NO: 5981 - protein, 12 aa, Artificial Sequence
  Description of Artificial Sequence: Synthetic peptide
  XENP019872 vlCDR1
RASQSVGSSYLA

SEQ ID NO: 5982 - protein, 7 aa, Artificial Sequence
  Description of Artificial Sequence: Synthetic peptide
  XENP019872 vlCDR2
GAFSRAT

SEQ ID NO: 5983 - protein, 9 aa, Artificial Sequence
  Description of Artificial Sequence: Synthetic peptide
  XENP019872 vlCDR3
QQYGSSPWT

SEQ ID NO: 5984 - protein, 246 aa, Artificial Sequence
  Description of Artificial Sequence: Synthetic polypeptide
  XENP019873 [CTLA-4]_H0.125_L0_scFv(GKPGS)4
QVQLVESGGGVVQPGRSLRLSCAASGFTFSSYTMHWVRQAPGKGLEWVTFISYDGNNKYYADSVKGRFTISRDNSKNTLYLQMNSLRAEDTAIYYCARTGWLGPFEYWGQGTLVTVSSGKPGSGKPGSGKPGSGKPGSEIVLTQSPGTLSLSPGERATLSCRASQSVGSSYLAWYQQKPGQAPRLLIYGAFSRATGIPDRFSGSGSGTDFTLTISRLEPEDFAVYYCQQYGSSPWTFGQGTKVEIK

SEQ ID NO: 5985 - protein, 118 aa, Artificial Sequence
  Description of Artificial Sequence: Synthetic polypeptide
  VH of XENP019873
QVQLVESGGGVVQPGRSLRLSCAASGFTFSSYTMHWVRQAPGKGLEWVTFISYDGNNKYYADSVKGRFTISRDNSKNTLYLQMNSLRAEDTAIYYCARTGWLGPFEYWGQGTLVTVSS

SEQ ID NO: 5986 - protein, 108 aa, Artificial Sequence; identical to SEQ ID NO: 3741
  Description of Artificial Sequence: Synthetic polypeptide
  VL of XENP019873

SEQ ID NO: 5987 - protein, 5 aa, Artificial Sequence
  Description of Artificial Sequence: Synthetic peptide
  XENP019873 vhCDR1
SYTMH

SEQ ID NO: 5988 - protein, 17 aa, Artificial Sequence
  Description of Artificial Sequence: Synthetic peptide
  XENP019873 vhCDR2
FISYDGNNKYYADSVKG

SEQ ID NO: 5989 - protein, 9 aa, Artificial Sequence
  Description of Artificial Sequence: Synthetic peptide
  XENP019873 vhCDR3
TGWLGPFEY

SEQ ID NO: 5990 - protein, 12 aa, Artificial Sequence
  Description of Artificial Sequence: Synthetic peptide
  XENP019873 vlCDR1
RASQSVGSSYLA

SEQ ID NO: 5991 - protein, 7 aa, Artificial Sequence
  Description of Artificial Sequence: Synthetic peptide
  XENP019873 vlCDR2
GAFSRAT

SEQ ID NO: 5992 - protein, 9 aa, Artificial Sequence
  Description of Artificial Sequence: Synthetic peptide
  XENP019873 vlCDR3
QQYGSSPWT

SEQ ID NO: 5993 - protein, 246 aa, Artificial Sequence
  Description of Artificial Sequence: Synthetic polypeptide
  XENP019874 [CTLA-4]_H0.126_L0_scFv(GKPGS)4
QVQLVESGGGVVQPGRSLRLSCAASGFTFSSYTMHWVRQAPGKGLEWVTFISYDGNNKYYADSVKGRFTISRDNSKNTLYLQMNSLRAEDTAIYYCARTGWLGPFHYWGQGTLVTVSSGKPGSGKPGSGKPGSGKPGSEIVLTQSPGTLSLSPGERATLSCRASQSVGSSYLAWYQQKPGQAPRLLIYGAFSRATGIPDRFSGSGSGTDFTLTISRLEPEDFAVYYCQQYGSSPWTFGQGTKVEIK

SEQ ID NO: 5994 - protein, 118 aa, Artificial Sequence
  Description of Artificial Sequence: Synthetic polypeptide
  VH of XENP019874
QVQLVESGGGVVQPGRSLRLSCAASGFTFSSYTMHWVRQAPGKGLEWVTFISYDGNNKYYADSVKGRFTISRDNSKNTLYLQMNSLRAEDTAIYYCARTGWLGPFHYWGQGTLVTVSS

SEQ ID NO: 5995 - protein, 108 aa, Artificial Sequence; identical to SEQ ID NO: 3741
  Description of Artificial Sequence: Synthetic polypeptide
  VL of XENP019874

SEQ ID NO: 5996 - protein, 5 aa, Artificial Sequence
  Description of Artificial Sequence: Synthetic peptide
  XENP019874 vhCDR1
SYTMH

SEQ ID NO: 5997 - protein, 17 aa, Artificial Sequence
  Description of Artificial Sequence: Synthetic peptide
  XENP019874 vhCDR2
FISYDGNNKYYADSVKG

SEQ ID NO: 5998 - protein, 9 aa, Artificial Sequence
  Description of Artificial Sequence: Synthetic peptide
  XENP019874 vhCDR3
TGWLGPFHY

SEQ ID NO: 5999 - protein, 12 aa, Artificial Sequence
  Description of Artificial Sequence: Synthetic peptide
  XENP019874 vlCDR1
RASQSVGSSYLA

SEQ ID NO: 6000 - protein, 7 aa, Artificial Sequence
  Description of Artificial Sequence: Synthetic peptide
  XENP019874 vlCDR2
GAFSRAT

SEQ ID NO: 6001 - protein, 9 aa, Artificial Sequence
  Description of Artificial Sequence: Synthetic peptide
  XENP019874 vlCDR3
QQYGSSPWT

SEQ ID NO: 6002 - protein, 246 aa, Artificial Sequence
  Description of Artificial Sequence: Synthetic polypeptide
  XENP019875 [CTLA-4]_H0.127_L0_scFv(GKPGS)4
QVQLVESGGGVVQPGRSLRLSCAASGFTFSSYTMHWVRQAPGKGLEWVTFISYDGNNKYYADSVKGRFTISRDNSKNTLYLQMNSLRAEDTAIYYCARTGWLGPFNYWGQGTLVTVSSGKPGSGKPGSGKPGSGKPGSEIVLTQSPGTLSLSPGERATLSCRASQSVGSSYLAWYQQKPGQAPRLLIYGAFSRATGIPDRFSGSGSGTDFTLTISRLEPEDFAVYYCQQYGSSPWTFGQGTKVEIK

SEQ ID NO: 6003 - protein, 118 aa, Artificial Sequence
  Description of Artificial Sequence: Synthetic polypeptide
  VH of XENP019875
QVQLVESGGGVVQPGRSLRLSCAASGFTFSSYTMHWVRQAPGKGLEWVTFISYDGNNKYYADSVKGRFTISRDNSKNTLYLQMNSLRAEDTAIYYCARTGWLGPFNYWGQGTLVTVSS

SEQ ID NO: 6004 - protein, 108 aa, Artificial Sequence; identical to SEQ ID NO: 3741
  Description of Artificial Sequence: Synthetic polypeptide
  VL of XENP019875

SEQ ID NO: 6005 - protein, 5 aa, Artificial Sequence
  Description of Artificial Sequence: Synthetic peptide
  XENP019875 vhCDR1
SYTMH

SEQ ID NO: 6006 - protein, 17 aa, Artificial Sequence
  Description of Artificial Sequence: Synthetic peptide
  XENP019875 vhCDR2
FISYDGNNKYYADSVKG

SEQ ID NO: 6007 - protein, 9 aa, Artificial Sequence
  Description of Artificial Sequence: Synthetic peptide
  XENP019875 vhCDR3
TGWLGPFNY

SEQ ID NO: 6008 - protein, 12 aa, Artificial Sequence
  Description of Artificial Sequence: Synthetic peptide
  XENP019875 vlCDR1
RASQSVGSSYLA

SEQ ID NO: 6009 - protein, 7 aa, Artificial Sequence
  Description of Artificial Sequence: Synthetic peptide
  XENP019875 vlCDR2
GAFSRAT

SEQ ID NO: 6010 - protein, 9 aa, Artificial Sequence
  Description of Artificial Sequence: Synthetic peptide
  XENP019875 vlCDR3
QQYGSSPWT

SEQ ID NO: 6011 - protein, 246 aa, Artificial Sequence
  Description of Artificial Sequence: Synthetic polypeptide
  XENP019876 [CTLA-4]_H0.128_L0_scFv(GKPGS)4
QVQLVESGGGVVQPGRSLRLSCAASGFTFSSYTMHWVRQAPGKGLEWVTFISYDGNNKYYADSVKGRFTISRDNSKNTLYLQMNSLRAEDTAIYYCARTGWLGPFSYWGQGTLVTVSSGKPGSGKPGSGKPGSGKPGSEIVLTQSPGTLSLSPGERATLSCRASQSVGSSYLAWYQQKPGQAPRLLIYGAFSRATGIPDRFSGSGSGTDFTLTISRLEPEDFAVYYCQQYGSSPWTFGQGTKVEIK

SEQ ID NO: 6012 - protein, 118 aa, Artificial Sequence
  Description of Artificial Sequence: Synthetic polypeptide
  VH of XENP019876
QVQLVESGGGVVQPGRSLRLSCAASGFTFSSYTMHWVRQAPGKGLEWVTFISYDGNNKYYADSVKGRFTISRDNSKNTLYLQMNSLRAEDTAIYYCARTGWLGPFSYWGQGTLVTVSS

SEQ ID NO: 6013 - protein, 108 aa, Artificial Sequence; identical to SEQ ID NO: 3741
  Description of Artificial Sequence: Synthetic polypeptide
  VL of XENP019876

SEQ ID NO: 6014 - protein, 5 aa, Artificial Sequence
  Description of Artificial Sequence: Synthetic peptide
  XENP019876 vhCDR1
SYTMH

SEQ ID NO: 6015 - protein, 17 aa, Artificial Sequence
  Description of Artificial Sequence: Synthetic peptide
  XENP019876 vhCDR2
FISYDGNNKYYADSVKG

SEQ ID NO: 6016 - protein, 9 aa, Artificial Sequence
  Description of Artificial Sequence: Synthetic peptide
  XENP019876 vhCDR3
TGWLGPFSY

SEQ ID NO: 6017 - protein, 12 aa, Artificial Sequence
  Description of Artificial Sequence: Synthetic peptide
  XENP019876 vlCDR1
RASQSVGSSYLA

SEQ ID NO: 6018 - protein, 7 aa, Artificial Sequence
  Description of Artificial Sequence: Synthetic peptide
  XENP019876 vlCDR2
GAFSRAT

SEQ ID NO: 6019 - protein, 9 aa, Artificial Sequence
  Description of Artificial Sequence: Synthetic peptide
  XENP019876 vlCDR3
QQYGSSPWT

SEQ ID NO: 6020 - protein, 246 aa, Artificial Sequence
  Description of Artificial Sequence: Synthetic polypeptide
  XENP019877 [CTLA-4]_H0.129_L0_scFv(GKPGS)4
QVQLVESGGGVVQPGRSLRLSCAASGFTFSSYTMHWVRQAPGKGLEWVTFISYDGNNKYYADSVKGRFTISRDNSKNTLYLQMNSLRAEDTAIYYCARTGWLGPFQYWGQGTLVTVSSGKPGSGKPGSGKPGSGKPGSEIVLTQSPGTLSLSPGERATLSCRASQSVGSSYLAWYQQKPGQAPRLLIYGAFSRATGIPDRFSGSGSGTDFTLTISRLEPEDFAVYYCQQYGSSPWTFGQGTKVEIK

SEQ ID NO: 6021 - protein, 118 aa, Artificial Sequence
  Description of Artificial Sequence: Synthetic polypeptide
  VH of XENP019877
QVQLVESGGGVVQPGRSLRLSCAASGFTFSSYTMHWVRQAPGKGLEWVTFISYDGNNKYYADSVKGRFTISRDNSKNTLYLQMNSLRAEDTAIYYCARTGWLGPFQYWGQGTLVTVSS

SEQ ID NO: 6022 - protein, 108 aa, Artificial Sequence; identical to SEQ ID NO: 3741
  Description of Artificial Sequence: Synthetic polypeptide
  VL of XENP019877

SEQ ID NO: 6023 - protein, 5 aa, Artificial Sequence
  Description of Artificial Sequence: Synthetic peptide
  XENP019877 vhCDR1
SYTMH

SEQ ID NO: 6024 - protein, 17 aa, Artificial Sequence
  Description of Artificial Sequence: Synthetic peptide
  XENP019877 vhCDR2
FISYDGNNKYYADSVKG

SEQ ID NO: 6025 - protein, 9 aa, Artificial Sequence
  Description of Artificial Sequence: Synthetic peptide
  XENP019877 vhCDR3
TGWLGPFQY

SEQ ID NO: 6026 - protein, 12 aa, Artificial Sequence
  Description of Artificial Sequence: Synthetic peptide
  XENP019877 vlCDR1
RASQSVGSSYLA

SEQ ID NO: 6027 - protein, 7 aa, Artificial Sequence
  Description of Artificial Sequence: Synthetic peptide
  XENP019877 vlCDR2
GAFSRAT

SEQ ID NO: 6028 - protein, 9 aa, Artificial Sequence
  Description of Artificial Sequence: Synthetic peptide
  XENP019877 vlCDR3
QQYGSSPWT

SEQ ID NO: 6029 - protein, 246 aa, Artificial Sequence
  Description of Artificial Sequence: Synthetic polypeptide
  XENP019878 [CTLA-4]_H0.130_L0_scFv(GKPGS)4
QVQLVESGGGVVQPGRSLRLSCAASGFTFSSYTMHWVRQAPGKGLEWVTFISYDGNNKYYADSVKGRFTISRDNSKNTLYLQMNSLRAEDTAIYYCARTGWLGPFDHWGQGTLVTVSSGKPGSGKPGSGKPGSGKPGSEIVLTQSPGTLSLSPGERATLSCRASQSVGSSYLAWYQQKPGQAPRLLIYGAFSRATGIPDRFSGSGSGTDFTLTISRLEPEDFAVYYCQQYGSSPWTFGQGTKVEIK

SEQ ID NO: 6030 - protein, 118 aa, Artificial Sequence
  Description of Artificial Sequence: Synthetic polypeptide
  VH of XENP019878
QVQLVESGGGVVQPGRSLRLSCAASGFTFSSYTMHWVRQAPGKGLEWVTFISYDGNNKYYADSVKGRFTISRDNSKNTLYLQMNSLRAEDTAIYYCARTGWLGPFDHWGQGTLVTVSS

SEQ ID NO: 6031 - protein, 108 aa, Artificial Sequence; identical to SEQ ID NO: 3741
  Description of Artificial Sequence: Synthetic polypeptide
  VL of XENP019878

SEQ ID NO: 6032 - protein, 5 aa, Artificial Sequence
  Description of Artificial Sequence: Synthetic peptide
  XENP019878 vhCDR1
SYTMH

SEQ ID NO: 6033 - protein, 17 aa, Artificial Sequence
  Description of Artificial Sequence: Synthetic peptide
  XENP019878 vhCDR2
FISYDGNNKYYADSVKG

SEQ ID NO: 6034 - protein, 9 aa, Artificial Sequence
  Description of Artificial Sequence: Synthetic peptide
  XENP019878 vhCDR3
TGWLGPFDH

SEQ ID NO: 6035 - protein, 12 aa, Artificial Sequence
  Description of Artificial Sequence: Synthetic peptide
  XENP019878 vlCDR1
RASQSVGSSYLA

SEQ ID NO: 6036 - protein, 7 aa, Artificial Sequence
  Description of Artificial Sequence: Synthetic peptide
  XENP019878 vlCDR2
GAFSRAT

SEQ ID NO: 6037 - protein, 9 aa, Artificial Sequence
  Description of Artificial Sequence: Synthetic peptide
  XENP019878 vlCDR3
QQYGSSPWT

SEQ ID NO: 6038 - protein, 246 aa, Artificial Sequence
  Description of Artificial Sequence: Synthetic polypeptide
  XENP019879 [CTLA-4]_H0.131_L0_scFv(GKPGS)4
QVQLVESGGGVVQPGRSLRLSCAASGFTFSSYTMHWVRQAPGKGLEWVTFISYDGNNKYYADSVKGRFTISRDNSKNTLYLQMNSLRAEDTAIYYCARTGWLGPFDLWGQGTLVTVSSGKPGSGKPGSGKPGSGKPGSEIVLTQSPGTLSLSPGERATLSCRASQSVGSSYLAWYQQKPGQAPRLLIYGAFSRATGIPDRFSGSGSGTDFTLTISRLEPEDFAVYYCQQYGSSPWTFGQGTKVEIK

SEQ ID NO: 6039 - protein, 118 aa, Artificial Sequence
  Description of Artificial Sequence: Synthetic polypeptide
  VH of XENP019879
QVQLVESGGGVVQPGRSLRLSCAASGFTFSSYTMHWVRQAPGKGLEWVTFISYDGNNKYYADSVKGRFTISRDNSKNTLYLQMNSLRAEDTAIYYCARTGWLGPFDLWGQGTLVTVSS

SEQ ID NO: 6040 - protein, 108 aa, Artificial Sequence; identical to SEQ ID NO: 3741
  Description of Artificial Sequence: Synthetic polypeptide
  VL of XENP019879

SEQ ID NO: 6041 - protein, 5 aa, Artificial Sequence
  Description of Artificial Sequence: Synthetic peptide
  XENP019879 vhCDR1
SYTMH

SEQ ID NO: 6042 - protein, 17 aa, Artificial Sequence
  Description of Artificial Sequence: Synthetic peptide
  XENP019879 vhCDR2
FISYDGNNKYYADSVKG

SEQ ID NO: 6043 - protein, 9 aa, Artificial Sequence
  Description of Artificial Sequence: Synthetic peptide
  XENP019879 vhCDR3
TGWLGPFDL

SEQ ID NO: 6044 - protein, 12 aa, Artificial Sequence
  Description of Artificial Sequence: Synthetic peptide
  XENP019879 vlCDR1
RASQSVGSSYLA

SEQ ID NO: 6045 - protein, 7 aa, Artificial Sequence
  Description of Artificial Sequence: Synthetic peptide
  XENP019879 vlCDR2
GAFSRAT

SEQ ID NO: 6046 - protein, 9 aa, Artificial Sequence
  Description of Artificial Sequence: Synthetic peptide
  XENP019879 vlCDR3
QQYGSSPWT

SEQ ID NO: 6047 - protein, 246 aa, Artificial Sequence
  Description of Artificial Sequence: Synthetic polypeptide
  XENP019880 [CTLA-4]_H0.132_L0_scFv(GKPGS)4
QVQLVESGGGVVQPGRSLRLSCAASGFTFSSYTMHWVRQAPGKGLEWVTFISYDGNNKYYADSVKGRFTISRDNSKNTLYLQMNSLRAEDTAIYYCARTGWLGPFDSWGQGTLVTVSSGKPGSGKPGSGKPGSGKPGSEIVLTQSPGTLSLSPGERATLSCRASQSVGSSYLAWYQQKPGQAPRLLIYGAFSRATGIPDRFSGSGSGTDFTLTISRLEPEDFAVYYCQQYGSSPWTFGQGTKVEIK

SEQ ID NO: 6048 - protein, 118 aa, Artificial Sequence
  Description of Artificial Sequence: Synthetic polypeptide
  VH of XENP019880
QVQLVESGGGVVQPGRSLRLSCAASGFTFSSYTMHWVRQAPGKGLEWVTFISYDGNNKYYADSVKGRFTISRDNSKNTLYLQMNSLRAEDTAIYYCARTGWLGPFDSWGQGTLVTVSS

SEQ ID NO: 6049 - protein, 108 aa, Artificial Sequence; identical to SEQ ID NO: 3741
  Description of Artificial Sequence: Synthetic polypeptide
  VL of XENP019880

SEQ ID NO: 6050 - protein, 5 aa, Artificial Sequence
  Description of Artificial Sequence: Synthetic peptide
  XENP019880 vhCDR1
SYTMH

SEQ ID NO: 6051 - protein, 17 aa, Artificial Sequence
  Description of Artificial Sequence: Synthetic peptide
  XENP019880 vhCDR2
FISYDGNNKYYADSVKG

SEQ ID NO: 6052 - protein, 9 aa, Artificial Sequence
  Description of Artificial Sequence: Synthetic peptide
  XENP019880 vhCDR3
TGWLGPFDS

SEQ ID NO: 6053 - protein, 12 aa, Artificial Sequence
  Description of Artificial Sequence: Synthetic peptide
  XENP019880 vlCDR1
RASQSVGSSYLA

SEQ ID NO: 6054 - protein, 7 aa, Artificial Sequence
  Description of Artificial Sequence: Synthetic peptide
  XENP019880 vlCDR2
GAFSRAT

SEQ ID NO: 6055 - protein, 9 aa, Artificial Sequence
  Description of Artificial Sequence: Synthetic peptide
  XENP019880 vlCDR3
QQYGSSPWT

SEQ ID NO: 6056 - protein, 246 aa, Artificial Sequence
  Description of Artificial Sequence: Synthetic polypeptide
  XENP019881 [CTLA-4]_H0.133_L0_scFv(GKPGS)4
QVQLVESGGGVVQPGRSLRLSCAASGFTFSSYTMHWVRQAPGKGLEWVTFISYDGNNKYYADSVKGRFTISRDNSKNTLYLQMNSLRAEDTAIYYCARTGWLGPFDVWGQGTLVTVSSGKPGSGKPGSGKPGSGKPGSEIVLTQSPGTLSLSPGERATLSCRASQSVGSSYLAWYQQKPGQAPRLLIYGAFSRATGIPDRFSGSGSGTDFTLTISRLEPEDFAVYYCQQYGSSPWTFGQGTKVEIK

SEQ ID NO: 6057 - protein, 118 aa, Artificial Sequence
  Description of Artificial Sequence: Synthetic polypeptide
  VH of XENP019881
QVQLVESGGGVVQPGRSLRLSCAASGFTFSSYTMHWVRQAPGKGLEWVTFISYDGNNKYYADSVKGRFTISRDNSKNTLYLQMNSLRAEDTAIYYCARTGWLGPFDVWGQGTLVTVSS

SEQ ID NO: 6058 - protein, 108 aa, Artificial Sequence; identical to SEQ ID NO: 3741
  Description of Artificial Sequence: Synthetic polypeptide
  VL of XENP019881

SEQ ID NO: 6059 - protein, 5 aa, Artificial Sequence
  Description of Artificial Sequence: Synthetic peptide
  XENP019881 vhCDR1
SYTMH

SEQ ID NO: 6060 - protein, 17 aa, Artificial Sequence
  Description of Artificial Sequence: Synthetic peptide
  XENP019881 vhCDR2
FISYDGNNKYYADSVKG

SEQ ID NO: 6061 - protein, 9 aa, Artificial Sequence
  Description of Artificial Sequence: Synthetic peptide
  XENP019881 vhCDR3
TGWLGPFDV

SEQ ID NO: 6062 - protein, 12 aa, Artificial Sequence
  Description of Artificial Sequence: Synthetic peptide
  XENP019881 vlCDR1
RASQSVGSSYLA

SEQ ID NO: 6063 - protein, 7 aa, Artificial Sequence
  Description of Artificial Sequence: Synthetic peptide
  XENP019881 vlCDR2
GAFSRAT

SEQ ID NO: 6064 - protein, 9 aa, Artificial Sequence
  Description of Artificial Sequence: Synthetic peptide
  XENP019881 vlCDR3
QQYGSSPWT

SEQ ID NO: 6065 - protein, 246 aa, Artificial Sequence
  Description of Artificial Sequence: Synthetic polypeptide
  XENP019882 [CTLA-4]_H0.134_L0_scFv(GKPGS)4
QVQLVESGGGVVQPGRSLRLSCAASGFTFSSYTMHWVRQAPGKGLEWVTFISYDGNNKYYADSVKGRFTISRDNSKNTLYLQMNSLRAEDTAIYYCARTGWLGPFDYWGRGTLVTVSSGKPGSGKPGSGKPGSGKPGSEIVLTQSPGTLSLSPGERATLSCRASQSVGSSYLAWYQQKPGQAPRLLIYGAFSRATGIPDRFSGSGSGTDFTLTISRLEPEDFAVYYCQQYGSSPWTFGQGTKVEIK

SEQ ID NO: 6066 - protein, 118 aa, Artificial Sequence; identical to SEQ ID NO: 4743
  Description of Artificial Sequence: Synthetic polypeptide
  VH of XENP019882

SEQ ID NO: 6067 - protein, 108 aa, Artificial Sequence; identical to SEQ ID NO: 3741
  Description of Artificial Sequence: Synthetic polypeptide
  VL of XENP019882

SEQ ID NO: 6068 - protein, 5 aa, Artificial Sequence
  Description of Artificial Sequence: Synthetic peptide
  XENP019882 vhCDR1
SYTMH

SEQ ID NO: 6069 - protein, 17 aa, Artificial Sequence
  Description of Artificial Sequence: Synthetic peptide
  XENP019882 vhCDR2
FISYDGNNKYYADSVKG

SEQ ID NO: 6070 - protein, 9 aa, Artificial Sequence
  Description of Artificial Sequence: Synthetic peptide
  XENP019882 vhCDR3
TGWLGPFDY

SEQ ID NO: 6071 - protein, 12 aa, Artificial Sequence
  Description of Artificial Sequence: Synthetic peptide
  XENP019882 vlCDR1
RASQSVGSSYLA

SEQ ID NO: 6072 - protein, 7 aa, Artificial Sequence
  Description of Artificial Sequence: Synthetic peptide
  XENP019882 vlCDR2
GAFSRAT

SEQ ID NO: 6073 - protein, 9 aa, Artificial Sequence
  Description of Artificial Sequence: Synthetic peptide
  XENP019882 vlCDR3
QQYGSSPWT

SEQ ID NO: 6074 - protein, 246 aa, Artificial Sequence
  Description of Artificial Sequence: Synthetic polypeptide
  XENP019883 [CTLA-4]_H0.135_L0_scFv(GKPGS)4
QVQLVESGGGVVQPGRSLRLSCAASGFTFSSYTMHWVRQAPGKGLEWVTFISYDGNNKYYADSVKGRFTISRDNSKNTLYLQMNSLRAEDTAIYYCARTGWLGPFDYWGQGTMVTVSSGKPGSGKPGSGKPGSGKPGSEIVLTQSPGTLSLSPGERATLSCRASQSVGSSYLAWYQQKPGQAPRLLIYGAFSRATGIPDRFSGSGSGTDFTLTISRLEPEDFAVYYCQQYGSSPWTFGQGTKVEIK

SEQ ID NO: 6075 - protein, 118 aa, Artificial Sequence
  Description of Artificial Sequence: Synthetic polypeptide
  VH of XENP019883
QVQLVESGGGVVQPGRSLRLSCAASGFTFSSYTMHWVRQAPGKGLEWVTFISYDGNNKYYADSVKGRFTISRDNSKNTLYLQMNSLRAEDTAIYYCARTGWLGPFDYWGQGTMVTVSS

SEQ ID NO: 6076 - protein, 108 aa, Artificial Sequence; identical to SEQ ID NO: 3741
  Description of Artificial Sequence: Synthetic polypeptide
  VL of XENP019883

SEQ ID NO: 6077 - protein, 5 aa, Artificial Sequence
  Description of Artificial Sequence: Synthetic peptide
  XENP019883 vhCDR1
SYTMH

SEQ ID NO: 6078 - protein, 17 aa, Artificial Sequence
  Description of Artificial Sequence: Synthetic peptide
  XENP019883 vhCDR2
FISYDGNNKYYADSVKG

SEQ ID NO: 6079 - protein, 9 aa, Artificial Sequence
  Description of Artificial Sequence: Synthetic peptide
  XENP019883 vhCDR3
TGWLGPFDY

SEQ ID NO: 6080 - protein, 12 aa, Artificial Sequence
  Description of Artificial Sequence: Synthetic peptide
  XENP019883 vlCDR1
RASQSVGSSYLA

SEQ ID NO: 6081 - protein, 7 aa, Artificial Sequence
  Description of Artificial Sequence: Synthetic peptide
  XENP019883 vlCDR2
GAFSRAT

SEQ ID NO: 6082 - protein, 9 aa, Artificial Sequence
  Description of Artificial Sequence: Synthetic peptide
  XENP019883 vlCDR3
QQYGSSPWT

SEQ ID NO: 6083 - protein, 246 aa, Artificial Sequence
  Description of Artificial Sequence: Synthetic polypeptide
  XENP019884 [CTLA-4]_H0.136_L0_scFv(GKPGS)4
QVQLVESGGGVVQPGRSLRLSCAASGFTFSSYTMHWVRQAPGKGLEWVTFISYDGNNKYYADSVKGRFTISRDNSKNTLYLQMNSLRAEDTAIYYCARTGWLGPFDYWGQGTTVTVSSGKPGSGKPGSGKPGSGKPGSEIVLTQSPGTLSLSPGERATLSCRASQSVGSSYLAWYQQKPGQAPRLLIYGAFSRATGIPDRFSGSGSGTDFTLTISRLEPEDFAVYYCQQYGSSPWTFGQGTKVEIK

SEQ ID NO: 6084 - protein, 118 aa, Artificial Sequence
  Description of Artificial Sequence: Synthetic polypeptide
  VH of XENP019884
QVQLVESGGGVVQPGRSLRLSCAASGFTFSSYTMHWVRQAPGKGLEWVTFISYDGNNKYYADSVKGRFTISRDNSKNTLYLQMNSLRAEDTAIYYCARTGWLGPFDYWGQGTTVTVSS

SEQ ID NO: 6085 - protein, 108 aa, Artificial Sequence; identical to SEQ ID NO: 3741
  Description of Artificial Sequence: Synthetic polypeptide
  VL of XENP019884

SEQ ID NO: 6086 - protein, 5 aa, Artificial Sequence
  Description of Artificial Sequence: Synthetic peptide
  XENP019884 vhCDR1
SYTMH

SEQ ID NO: 6087 - protein, 17 aa, Artificial Sequence
  Description of Artificial Sequence: Synthetic peptide
  XENP019884 vhCDR2
FISYDGNNKYYADSVKG

SEQ ID NO: 6088 - protein, 9 aa, Artificial Sequence
  Description of Artificial Sequence: Synthetic peptide
  XENP019884 vhCDR3
TGWLGPFDY

SEQ ID NO: 6089 - protein, 12 aa, Artificial Sequence
  Description of Artificial Sequence: Synthetic peptide
  XENP019884 vlCDR1
RASQSVGSSYLA

SEQ ID NO: 6090 - protein, 7 aa, Artificial Sequence
  Description of Artificial Sequence: Synthetic peptide
  XENP019884 vlCDR2
GAFSRAT

SEQ ID NO: 6091 - protein, 9 aa, Artificial Sequence
  Description of Artificial Sequence: Synthetic peptide
  XENP019884 vlCDR3
QQYGSSPWT

SEQ ID NO: 6092 - protein, 246 aa, Artificial Sequence
  Description of Artificial Sequence: Synthetic polypeptide
  XENP019885 [CTLA-4]_H0_L0.1_scFv(GKPGS)4
QVQLVESGGGVVQPGRSLRLSCAASGFTFSSYTMHWVRQAPGKGLEWVTFISYDGNNKYYADSVKGRFTISRDNSKNTLYLQMNSLRAEDTAIYYCARTGWLGPFDYWGQGTLVTVSSGKPGSGKPGSGKPGSGKPGSAIVLTQSPGTLSLSPGERATLSCRASQSVGSSYLAWYQQKPGQAPRLLIYGAFSRATGIPDRFSGSGSGTDFTLTISRLEPEDFAVYYCQQYGSSPWTFGQGTKVEIK

SEQ ID NO: 6093 - protein, 118 aa, Artificial Sequence; identical to SEQ ID NO: 3737
  Description of Artificial Sequence: Synthetic polypeptide
  VH of XENP019885

SEQ ID NO: 6094 - protein, 108 aa, Artificial Sequence
  Description of Artificial Sequence: Synthetic polypeptide
  VL of XENP019885
AIVLTQSPGTLSLSPGERATLSCRASQSVGSSYLAWYQQKPGQAPRLLIYGAFSRATGIPDRFSGSGSGTDFTLTISRLEPEDFAVYYCQQYGSSPWTFGQGTKVEIK

SEQ ID NO: 6095 - protein, 5 aa, Artificial Sequence
  Description of Artificial Sequence: Synthetic peptide
  XENP019885 vhCDR1
SYTMH

SEQ ID NO: 6096 - protein, 17 aa, Artificial Sequence
  Description of Artificial Sequence: Synthetic peptide
  XENP019885 vhCDR2
FISYDGNNKYYADSVKG

SEQ ID NO: 6097 - protein, 9 aa, Artificial Sequence
  Description of Artificial Sequence: Synthetic peptide
  XENP019885 vhCDR3
TGWLGPFDY

SEQ ID NO: 6098 - protein, 12 aa, Artificial Sequence
  Description of Artificial Sequence: Synthetic peptide
  XENP019885 vlCDR1
RASQSVGSSYLA

SEQ ID NO: 6099 - protein, 7 aa, Artificial Sequence
  Description of Artificial Sequence: Synthetic peptide
  XENP019885 vlCDR2
GAFSRAT

SEQ ID NO: 6100 - protein, 9 aa, Artificial Sequence
  Description of Artificial Sequence: Synthetic peptide
  XENP019885 vlCDR3
QQYGSSPWT

SEQ ID NO: 6101 - protein, 246 aa, Artificial Sequence
  Description of Artificial Sequence: Synthetic polypeptide
  XENP019886 [CTLA-4]_H0_L0.2_scFv(GKPGS)4
QVQLVESGGGVVQPGRSLRLSCAASGFTFSSYTMHWVRQAPGKGLEWVTFISYDGNNKYYADSVKGRFTISRDNSKNTLYLQMNSLRAEDTAIYYCARTGWLGPFDYWGQGTLVTVSSGKPGSGKPGSGKPGSGKPGSDIVLTQSPGTLSLSPGERATLSCRASQSVGSSYLAWYQQKPGQAPRLLIYGAFSRATGIPDRFSGSGSGTDFTLTISRLEPEDFAVYYCQQYGSSPWTFGQGTKVEIK

SEQ ID NO: 6102 - protein, 118 aa, Artificial Sequence; identical to SEQ ID NO: 3737
  Description of Artificial Sequence: Synthetic polypeptide
  VH of XENP019886

SEQ ID NO: 6103 - protein, 108 aa, Artificial Sequence
  Description of Artificial Sequence: Synthetic polypeptide
  VL of XENP019886
DIVLTQSPGTLSLSPGERATLSCRASQSVGSSYLAWYQQKPGQAPRLLIYGAFSRATGIPDRFSGSGSGTDFTLTISRLEPEDFAVYYCQQYGSSPWTFGQGTKVEIK

SEQ ID NO: 6104 - protein, 5 aa, Artificial Sequence
  Description of Artificial Sequence: Synthetic peptide
  XENP019886 vhCDR1
SYTMH

SEQ ID NO: 6105 - protein, 17 aa, Artificial Sequence
  Description of Artificial Sequence: Synthetic peptide
  XENP019886 vhCDR2
FISYDGNNKYYADSVKG

SEQ ID NO: 6106 - protein, 9 aa, Artificial Sequence
  Description of Artificial Sequence: Synthetic peptide
  XENP019886 vhCDR3
TGWLGPFDY

SEQ ID NO: 6107 - protein, 12 aa, Artificial Sequence
  Description of Artificial Sequence: Synthetic peptide
  XENP019886 vlCDR1
RASQSVGSSYLA

SEQ ID NO: 6108 - protein, 7 aa, Artificial Sequence
  Description of Artificial Sequence: Synthetic peptide
  XENP019886 vlCDR2
GAFSRAT

SEQ ID NO: 6109 - protein, 9 aa, Artificial Sequence
  Description of Artificial Sequence: Synthetic peptide
  XENP019886 vlCDR3
QQYGSSPWT

SEQ ID NO: 6110 - protein, 246 aa, Artificial Sequence
  Description of Artificial Sequence: Synthetic polypeptide
  XENP019887 [CTLA-4]_H0_L0.3_scFv(GKPGS)4
QVQLVESGGGVVQPGRSLRLSCAASGFTFSSYTMHWVRQAPGKGLEWVTFISYDGNNKYYADSVKGRFTISRDNSKNTLYLQMNSLRAEDTAIYYCARTGWLGPFDYWGQGTLVTVSSGKPGSGKPGSGKPGSGKPGSQIVLTQSPGTLSLSPGERATLSCRASQSVGSSYLAWYQQKPGQAPRLLIYGAFSRATGIPDRFSGSGSGTDFTLTISRLEPEDFAVYYCQQYGSSPWTFGQGTKVEIK

SEQ ID NO: 6111 - protein, 118 aa, Artificial Sequence; identical to SEQ ID NO: 3737
  Description of Artificial Sequence: Synthetic polypeptide
  VH of XENP019887

SEQ ID NO: 6112 - protein, 108 aa, Artificial Sequence
  Description of Artificial Sequence: Synthetic polypeptide
  VL of XENP019887
QIVLTQSPGTLSLSPGERATLSCRASQSVGSSYLAWYQQKPGQAPRLLIYGAFSRATGIPDRFSGSGSGTDFTLTISRLEPEDFAVYYCQQYGSSPWTFGQGTKVEIK

SEQ ID NO: 6113 - protein, 5 aa, Artificial Sequence
  Description of Artificial Sequence: Synthetic peptide
  XENP019887 vhCDR1
SYTMH

SEQ ID NO: 6114 - protein, 17 aa, Artificial Sequence
  Description of Artificial Sequence: Synthetic peptide
  XENP019887 vhCDR2
FISYDGNNKYYADSVKG

SEQ ID NO: 6115 - protein, 9 aa, Artificial Sequence
  Description of Artificial Sequence: Synthetic peptide
  XENP019887 vhCDR3
TGWLGPFDY

SEQ ID NO: 6116 - protein, 12 aa, Artificial Sequence
  Description of Artificial Sequence: Synthetic peptide
  XENP019887 vlCDR1
RASQSVGSSYLA

SEQ ID NO: 6117 - protein, 7 aa, Artificial Sequence
  Description of Artificial Sequence: Synthetic peptide
  XENP019887 vlCDR2
GAFSRAT

SEQ ID NO: 6118 - protein, 9 aa, Artificial Sequence
  Description of Artificial Sequence: Synthetic peptide
  XENP019887 vlCDR3
QQYGSSPWT

SEQ ID NO: 6119 - protein, 246 aa, Artificial Sequence
  Description of Artificial Sequence: Synthetic polypeptide
  XENP019888 [CTLA-4]_H0_L0.4_scFv(GKPGS)4
QVQLVESGGGVVQPGRSLRLSCAASGFTFSSYTMHWVRQAPGKGLEWVTFISYDGNNKYYADSVKGRFTISRDNSKNTLYLQMNSLRAEDTAIYYCARTGWLGPFDYWGQGTLVTVSSGKPGSGKPGSGKPGSGKPGSRIVLTQSPGTLSLSPGERATLSCRASQSVGSSYLAWYQQKPGQAPRLLIYGAFSRATGIPDRFSGSGSGTDFTLTISRLEPEDFAVYYCQQYGSSPWTFGQGTKVEIK

SEQ ID NO: 6120 - protein, 118 aa, Artificial Sequence; identical to SEQ ID NO: 3737
  Description of Artificial Sequence: Synthetic polypeptide
  VH of XENP019888

SEQ ID NO: 6121 - protein, 108 aa, Artificial Sequence
  Description of Artificial Sequence: Synthetic polypeptide
  VL of XENP019888
RIVLTQSPGTLSLSPGERATLSCRASQSVGSSYLAWYQQKPGQAPRLLIYGAFSRATGIPDRFSGSGSGTDFTLTISRLEPEDFAVYYCQQYGSSPWTFGQGTKVEIK

SEQ ID NO: 6122 - protein, 5 aa, Artificial Sequence
  Description of Artificial Sequence: Synthetic peptide
  XENP019888 vhCDR1
SYTMH

SEQ ID NO: 6123 - protein, 17 aa, Artificial Sequence
  Description of Artificial Sequence: Synthetic peptide
  XENP019888 vhCDR2
FISYDGNNKYYADSVKG

SEQ ID NO: 6124 - protein, 9 aa, Artificial Sequence
  Description of Artificial Sequence: Synthetic peptide
  XENP019888 vhCDR3
TGWLGPFDY

SEQ ID NO: 6125 - protein, 12 aa, Artificial Sequence
  Description of Artificial Sequence: Synthetic peptide
  XENP019888 vlCDR1
RASQSVGSSYLA

SEQ ID NO: 6126 - protein, 7 aa, Artificial Sequence
  Description of Artificial Sequence: Synthetic peptide
  XENP019888 vlCDR2
GAFSRAT

SEQ ID NO: 6127 - protein, 9 aa, Artificial Sequence
  Description of Artificial Sequence: Synthetic peptide
  XENP019888 vlCDR3
QQYGSSPWT

SEQ ID NO: 6128 - protein, 246 aa, Artificial Sequence
  Description of Artificial Sequence: Synthetic polypeptide
  XENP019889 [CTLA-4]_H0_L0.5_scFv(GKPGS)4
QVQLVESGGGVVQPGRSLRLSCAASGFTFSSYTMHWVRQAPGKGLEWVTFISYDGNNKYYADSVKGRFTISRDNSKNTLYLQMNSLRAEDTAIYYCARTGWLGPFDYWGQGTLVTVSSGKPGSGKPGSGKPGSGKPGSEIRLTQSPGTLSLSPGERATLSCRASQSVGSSYLAWYQQKPGQAPRLLIYGAFSRATGIPDRFSGSGSGTDFTLTISRLEPEDFAVYYCQQYGSSPWTFGQGTKVEIK

SEQ ID NO: 6129 - protein, 118 aa, Artificial Sequence; identical to SEQ ID NO: 3737
  Description of Artificial Sequence: Synthetic polypeptide
  VH of XENP019889

SEQ ID NO: 6130 - protein, 108 aa, Artificial Sequence
  Description of Artificial Sequence: Synthetic polypeptide
  VL of XENP019889
EIRLTQSPGTLSLSPGERATLSCRASQSVGSSYLAWYQQKPGQAPRLLIYGAFSRATGIPDRFSGSGSGTDFTLTISRLEPEDFAVYYCQQYGSSPWTFGQGTKVEIK

SEQ ID NO: 6131 - protein, 5 aa, Artificial Sequence
  Description of Artificial Sequence: Synthetic peptide
  XENP019889 vhCDR1
SYTMH

SEQ ID NO: 6132 - protein, 17 aa, Artificial Sequence
  Description of Artificial Sequence: Synthetic peptide
  XENP019889 vhCDR2
FISYDGNNKYYADSVKG

SEQ ID NO: 6133 - protein, 9 aa, Artificial Sequence
  Description of Artificial Sequence: Synthetic peptide
  XENP019889 vhCDR3
TGWLGPFDY

SEQ ID NO: 6134 - protein, 12 aa, Artificial Sequence
  Description of Artificial Sequence: Synthetic peptide
  XENP019889 vlCDR1
RASQSVGSSYLA

SEQ ID NO: 6135 - protein, 7 aa, Artificial Sequence
  Description of Artificial Sequence: Synthetic peptide
  XENP019889 vlCDR2
GAFSRAT

SEQ ID NO: 6136 - protein, 9 aa, Artificial Sequence
  Description of Artificial Sequence: Synthetic peptide
  XENP019889 vlCDR3
QQYGSSPWT

SEQ ID NO: 6137 - protein, 246 aa, Artificial Sequence
  Description of Artificial Sequence: Synthetic polypeptide
  XENP019890 [CTLA-4]_H0_L0.6_scFv(GKPGS)4
QVQLVESGGGVVQPGRSLRLSCAASGFTFSSYTMHWVRQAPGKGLEWVTFISYDGNNKYYADSVKGRFTISRDNSKNTLYLQMNSLRAEDTAIYYCARTGWLGPFDYWGQGTLVTVSSGKPGSGKPGSGKPGSGKPGSEIRLTQSPGTLSLSPGERATLSCRASQSVGSSYLAWYQQKPGQAPRLLIYGAFSRATGIPDRFSGSGSGTDFTLTISRLEPEDFAVYYCQQYGSSPWTFGEGTKVEIK

SEQ ID NO: 6138 - protein, 118 aa, Artificial Sequence; identical to SEQ ID NO: 3737
  Description of Artificial Sequence: Synthetic polypeptide
  VH of XENP019890

SEQ ID NO: 6139 - protein, 108 aa, Artificial Sequence
  Description of Artificial Sequence: Synthetic polypeptide
  VL of XENP019890
EIRLTQSPGTLSLSPGERATLSCRASQSVGSSYLAWYQQKPGQAPRLLIYGAFSRATGIPDRFSGSGSGTDFTLTISRLEPEDFAVYYCQQYGSSPWTFGEGTKVEIK

SEQ ID NO: 6140 - protein, 5 aa, Artificial Sequence
  Description of Artificial Sequence: Synthetic peptide
  XENP019890 vhCDR1
SYTMH

SEQ ID NO: 6141 - protein, 17 aa, Artificial Sequence
  Description of Artificial Sequence: Synthetic peptide
  XENP019890 vhCDR2
FISYDGNNKYYADSVKG

SEQ ID NO: 6142 - protein, 9 aa, Artificial Sequence
  Description of Artificial Sequence: Synthetic peptide
  XENP019890 vhCDR3
TGWLGPFDY

SEQ ID NO: 6143 - protein, 12 aa, Artificial Sequence
  Description of Artificial Sequence: Synthetic peptide
  XENP019890 vlCDR1
RASQSVGSSYLA

SEQ ID NO: 6144 - protein, 7 aa, Artificial Sequence
  Description of Artificial Sequence: Synthetic peptide
  XENP019890 vlCDR2
GAFSRAT

SEQ ID NO: 6145 - protein, 9 aa, Artificial Sequence
  Description of Artificial Sequence: Synthetic peptide
  XENP019890 vlCDR3
QQYGSSPWT

SEQ ID NO: 6146 - protein, 246 aa, Artificial Sequence
  Description of Artificial Sequence: Synthetic polypeptide
  XENP019891 [CTLA-4]_H0_L0.7_scFv(GKPGS)4
QVQLVESGGGVVQPGRSLRLSCAASGFTFSSYTMHWVRQAPGKGLEWVTFISYDGNNKYYADSVKGRFTISRDNSKNTLYLQMNSLRAEDTAIYYCARTGWLGPFDYWGQGTLVTVSSGKPGSGKPGSGKPGSGKPGSEIVMTQSPGTLSLSPGERATLSCRASQSVGSSYLAWYQQKPGQAPRLLIYGAFSRATGIPDRFSGSGSGTDFTLTISRLEPEDFAVYYCQQYGSSPWTFGQGTKVEIK

SEQ ID NO: 6147 - protein, 118 aa, Artificial Sequence; identical to SEQ ID NO: 3737
  Description of Artificial Sequence: Synthetic polypeptide
  VH of XENP019891

SEQ ID NO: 6148 - protein, 108 aa, Artificial Sequence
  Description of Artificial Sequence: Synthetic polypeptide
  VL of XENP019891
EIVMTQSPGTLSLSPGERATLSCRASQSVGSSYLAWYQQKPGQAPRLLIYGAFSRATGIPDRFSGSGSGTDFTLTISRLEPEDFAVYYCQQYGSSPWTFGQGTKVEIK

SEQ ID NO: 6149 - protein, 5 aa, Artificial Sequence
  Description of Artificial Sequence: Synthetic peptide
  XENP019891 vhCDR1
SYTMH

SEQ ID NO: 6150 - protein, 17 aa, Artificial Sequence
  Description of Artificial Sequence: Synthetic peptide
  XENP019891 vhCDR2
FISYDGNNKYYADSVKG

SEQ ID NO: 6151 - protein, 9 aa, Artificial Sequence
  Description of Artificial Sequence: Synthetic peptide
  XENP019891 vhCDR3
TGWLGPFDY

SEQ ID NO: 6152 - protein, 12 aa, Artificial Sequence
  Description of Artificial Sequence: Synthetic peptide
  XENP019891 vlCDR1
RASQSVGSSYLA

SEQ ID NO: 6153 - protein, 7 aa, Artificial Sequence
  Description of Artificial Sequence: Synthetic peptide
  XENP019891 vlCDR2
GAFSRAT

SEQ ID NO: 6154 - protein, 9 aa, Artificial Sequence
  Description of Artificial Sequence: Synthetic peptide
  XENP019891 vlCDR3
QQYGSSPWT

SEQ ID NO: 6155 - protein, 246 aa, Artificial Sequence
  Description of Artificial Sequence: Synthetic polypeptide
  XENP019892 [CTLA-4]_H0_L0.8_scFv(GKPGS)4
QVQLVESGGGVVQPGRSLRLSCAASGFTFSSYTMHWVRQAPGKGLEWVTFISYDGNNKYYADSVKGRFTISRDNSKNTLYLQMNSLRAEDTAIYYCARTGWLGPFDYWGQGTLVTVSSGKPGSGKPGSGKPGSGKPGSEIVLTQSPATLSLSPGERATLSCRASQSVGSSYLAWYQQKPGQAPRLLIYGAFSRATGIPDRFSGSGSGTDFTLTISRLEPEDFAVYYCQQYGSSPWTFGQGTKVEIK

SEQ ID NO: 6156 - protein, 118 aa, Artificial Sequence; identical to SEQ ID NO: 3737
  Description of Artificial Sequence: Synthetic polypeptide
  VH of XENP019892

SEQ ID NO: 6157 - protein, 108 aa, Artificial Sequence
  Description of Artificial Sequence: Synthetic polypeptide
  VL of XENP019892
EIVLTQSPATLSLSPGERATLSCRASQSVGSSYLAWYQQKPGQAPRLLIYGAFSRATGIPDRFSGSGSGTDFTLTISRLEPEDFAVYYCQQYGSSPWTFGQGTKVEIK

SEQ ID NO: 6158 - protein, 5 aa, Artificial Sequence
  Description of Artificial Sequence: Synthetic peptide
  XENP019892 vhCDR1
SYTMH

SEQ ID NO: 6159 - protein, 17 aa, Artificial Sequence
  Description of Artificial Sequence: Synthetic peptide
  XENP019892 vhCDR2
FISYDGNNKYYADSVKG

SEQ ID NO: 6160 - protein, 9 aa, Artificial Sequence
  Description of Artificial Sequence: Synthetic peptide
  XENP019892 vhCDR3
TGWLGPFDY

SEQ ID NO: 6161 - protein, 12 aa, Artificial Sequence
  Description of Artificial Sequence: Synthetic peptide
  XENP019892 vlCDR1
RASQSVGSSYLA

SEQ ID NO: 6162 - protein, 7 aa, Artificial Sequence
  Description of Artificial Sequence: Synthetic peptide
  XENP019892 vlCDR2
GAFSRAT

SEQ ID NO: 6163 - protein, 9 aa, Artificial Sequence
  Description of Artificial Sequence: Synthetic peptide
  XENP019892 vlCDR3
QQYGSSPWT

SEQ ID NO: 6164 - protein, 246 aa, Artificial Sequence
  Description of Artificial Sequence: Synthetic polypeptide
  XENP019893 [CTLA-4]_H0_L0.9_scFv(GKPGS)4
QVQLVESGGGVVQPGRSLRLSCAASGFTFSSYTMHWVRQAPGKGLEWVTFISYDGNNKYYADSVKGRFTISRDNSKNTLYLQMNSLRAEDTAIYYCARTGWLGPFDYWGQGTLVTVSSGKPGSGKPGSGKPGSGKPGSEIVLTQSPPTLSLSPGERATLSCRASQSVGSSYLAWYQQKPGQAPRLLIYGAFSRATGIPDRFSGSGSGTDFTLTISRLEPEDFAVYYCQQYGSSPWTFGQGTKVEIK

SEQ ID NO: 6165 - protein, 118 aa, Artificial Sequence; identical to SEQ ID NO: 3737
  Description of Artificial Sequence: Synthetic polypeptide
  VH of XENP019893

SEQ ID NO: 6166 - protein, 108 aa, Artificial Sequence
  Description of Artificial Sequence: Synthetic polypeptide
  VL of XENP019893
EIVLTQSPPTLSLSPGERATLSCRASQSVGSSYLAWYQQKPGQAPRLLIYGAFSRATGIPDRFSGSGSGTDFTLTISRLEPEDFAVYYCQQYGSSPWTFGQGTKVEIK

SEQ ID NO: 6167 - protein, 5 aa, Artificial Sequence
  Description of Artificial Sequence: Synthetic peptide
  XENP019893 vhCDR1
SYTMH

SEQ ID NO: 6168 - protein, 17 aa, Artificial Sequence
  Description of Artificial Sequence: Synthetic peptide
  XENP019893 vhCDR2
FISYDGNNKYYADSVKG

SEQ ID NO: 6169 - protein, 9 aa, Artificial Sequence
  Description of Artificial Sequence: Synthetic peptide
  XENP019893 vhCDR3
TGWLGPFDY

SEQ ID NO: 6170 - protein, 12 aa, Artificial Sequence
  Description of Artificial Sequence: Synthetic peptide
  XENP019893 vlCDR1
RASQSVGSSYLA

SEQ ID NO: 6171 - protein, 7 aa, Artificial Sequence
  Description of Artificial Sequence: Synthetic peptide
  XENP019893 vlCDR2
GAFSRAT

SEQ ID NO: 6172 - protein, 9 aa, Artificial Sequence
  Description of Artificial Sequence: Synthetic peptide
  XENP019893 vlCDR3
QQYGSSPWT

SEQ ID NO: 6173 - protein, 246 aa, Artificial Sequence
  Description of Artificial Sequence: Synthetic polypeptide
  XENP019894 [CTLA-4]_H0_L0.10_scFv(GKPGS)4
QVQLVESGGGVVQPGRSLRLSCAASGFTFSSYTMHWVRQAPGKGLEWVTFISYDGNNKYYADSVKGRFTISRDNSKNTLYLQMNSLRAEDTAIYYCARTGWLGPFDYWGQGTLVTVSSGKPGSGKPGSGKPGSGKPGSEIVLTQSPSTLSLSPGERATLSCRASQSVGSSYLAWYQQKPGQAPRLLIYGAFSRATGIPDRFSGSGSGTDFTLTISRLEPEDFAVYYCQQYGSSPWTFGQGTKVEIK

SEQ ID NO: 6174 - protein, 118 aa, Artificial Sequence; identical to SEQ ID NO: 3737
  Description of Artificial Sequence: Synthetic polypeptide
  VH of XENP019894

SEQ ID NO: 6175 - protein, 108 aa, Artificial Sequence
  Description of Artificial Sequence: Synthetic polypeptide
  VL of XENP019894
EIVLTQSPSTLSLSPGERATLSCRASQSVGSSYLAWYQQKPGQAPRLLIYGAFSRATGIPDRFSGSGSGTDFTLTISRLEPEDFAVYYCQQYGSSPWTFGQGTKVEIK

SEQ ID NO: 6176 - protein, 5 aa, Artificial Sequence
  Description of Artificial Sequence: Synthetic peptide
  XENP019894 vhCDR1
SYTMH

SEQ ID NO: 6177 - protein, 17 aa, Artificial Sequence
  Description of Artificial Sequence: Synthetic peptide
  XENP019894 vhCDR2
FISYDGNNKYYADSVKG

SEQ ID NO: 6178 - protein, 9 aa, Artificial Sequence
  Description of Artificial Sequence: Synthetic peptide
  XENP019894 vhCDR3
TGWLGPFDY

SEQ ID NO: 6179 - protein, 12 aa, Artificial Sequence
  Description of Artificial Sequence: Synthetic peptide
  XENP019894 vlCDR1
RASQSVGSSYLA

SEQ ID NO: 6180 - protein, 7 aa, Artificial Sequence
  Description of Artificial Sequence: Synthetic peptide
  XENP019894 vlCDR2
GAFSRAT

SEQ ID NO: 6181 - protein, 9 aa, Artificial Sequence
  Description of Artificial Sequence: Synthetic peptide
  XENP019894 vlCDR3
QQYGSSPWT

SEQ ID NO: 6182 - protein, 246 aa, Artificial Sequence
  Description of Artificial Sequence: Synthetic polypeptide
  XENP019895 [CTLA-4]_H0_L0.11_scFv(GKPGS)4
QVQLVESGGGVVQPGRSLRLSCAASGFTFSSYTMHWVRQAPGKGLEWVTFISYDGNNKYYADSVKGRFTISRDNSKNTLYLQMNSLRAEDTAIYYCARTGWLGPFDYWGQGTLVTVSSGKPGSGKPGSGKPGSGKPGSEIVLTQSPGSLSLSPGERATLSCRASQSVGSSYLAWYQQKPGQAPRLLIYGAFSRATGIPDRFSGSGSGTDFTLTISRLEPEDFAVYYCQQYGSSPWTFGQGTKVEIK

SEQ ID NO: 6183 - protein, 118 aa, Artificial Sequence; identical to SEQ ID NO: 3737
  Description of Artificial Sequence: Synthetic polypeptide
  VH of XENP019895

SEQ ID NO: 6184 - protein, 108 aa, Artificial Sequence
  Description of Artificial Sequence: Synthetic polypeptide
  VL of XENP019895
EIVLTQSPGSLSLSPGERATLSCRASQSVGSSYLAWYQQKPGQAPRLLIYGAFSRATGIPDRFSGSGSGTDFTLTISRLEPEDFAVYYCQQYGSSPWTFGQGTKVEIK

SEQ ID NO: 6185 - protein, 5 aa, Artificial Sequence
  Description of Artificial Sequence: Synthetic peptide
  XENP019895 vhCDR1
SYTMH

SEQ ID NO: 6186 - protein, 17 aa, Artificial Sequence
  Description of Artificial Sequence: Synthetic peptide
  XENP019895 vhCDR2
FISYDGNNKYYADSVKG

SEQ ID NO: 6187 - protein, 9 aa, Artificial Sequence
  Description of Artificial Sequence: Synthetic peptide
  XENP019895 vhCDR3
TGWLGPFDY

SEQ ID NO: 6188 - protein, 12 aa, Artificial Sequence
  Description of Artificial Sequence: Synthetic peptide
  XENP019895 vlCDR1
RASQSVGSSYLA

SEQ ID NO: 6189 - protein, 7 aa, Artificial Sequence
  Description of Artificial Sequence: Synthetic peptide
  XENP019895 vlCDR2
GAFSRAT

SEQ ID NO: 6190 - protein, 9 aa, Artificial Sequence
  Description of Artificial Sequence: Synthetic peptide
  XENP019895 vlCDR3
QQYGSSPWT

SEQ ID NO: 6191 - protein, 246 aa, Artificial Sequence
  Description of Artificial Sequence: Synthetic polypeptide
  XENP019896 [CTLA-4]_H0_L0.12_scFv(GKPGS)4
QVQLVESGGGVVQPGRSLRLSCAASGFTFSSYTMHWVRQAPGKGLEWVTFISYDGNNKYYADSVKGRFTISRDNSKNTLYLQMNSLRAEDTAIYYCARTGWLGPFDYWGQGTLVTVSSGKPGSGKPGSGKPGSGKPGSEIVLTQSPGTLSVSPGERATLSCRASQSVGSSYLAWYQQKPGQAPRLLIYGAFSRATGIPDRFSGSGSGTDFTLTISRLEPEDFAVYYCQQYGSSPWTFGQGTKVEIK

SEQ ID NO: 6192 - protein, 118 aa, Artificial Sequence; identical to SEQ ID NO: 3737
  Description of Artificial Sequence: Synthetic polypeptide
  VH of XENP019896

SEQ ID NO: 6193 - protein, 108 aa, Artificial Sequence
  Description of Artificial Sequence: Synthetic polypeptide
  VL of XENP019896
EIVLTQSPGTLSVSPGERATLSCRASQSVGSSYLAWYQQKPGQAPRLLIYGAFSRATGIPDRFSGSGSGTDFTLTISRLEPEDFAVYYCQQYGSSPWTFGQGTKVEIK

SEQ ID NO: 6194 - protein, 5 aa, Artificial Sequence
  Description of Artificial Sequence: Synthetic peptide
  XENP019896 vhCDR1
SYTMH

SEQ ID NO: 6195 - protein, 17 aa, Artificial Sequence
  Description of Artificial Sequence: Synthetic peptide
  XENP019896 vhCDR2
FISYDGNNKYYADSVKG

SEQ ID NO: 6196 - protein, 9 aa, Artificial Sequence
  Description of Artificial Sequence: Synthetic peptide
  XENP019896 vhCDR3
TGWLGPFDY

SEQ ID NO: 6197 - protein, 12 aa, Artificial Sequence
  Description of Artificial Sequence: Synthetic peptide
  XENP019896 vlCDR1
RASQSVGSSYLA

SEQ ID NO: 6198 - protein, 7 aa, Artificial Sequence
  Description of Artificial Sequence: Synthetic peptide
  XENP019896 vlCDR2
GAFSRAT

SEQ ID NO: 6199 - protein, 9 aa, Artificial Sequence
  Description of Artificial Sequence: Synthetic peptide
  XENP019896 vlCDR3
QQYGSSPWT

SEQ ID NO: 6200 - protein, 246 aa, Artificial Sequence
  Description of Artificial Sequence: Synthetic polypeptide
  XENP019901 [CTLA-4]_H0_L0.13_scFv(GKPGS)4
QVQLVESGGGVVQPGRSLRLSCAASGFTFSSYTMHWVRQAPGKGLEWVTFISYDGNNKYYADSVKGRFTISRDNSKNTLYLQMNSLRAEDTAIYYCARTGWLGPFDYWGQGTLVTVSSGKPGSGKPGSGKPGSGKPGSEIVLTQSPGTLSLSPGEPATLSCRASQSVGSSYLAWYQQKPGQAPRLLIYGAFSRATGIPDRFSGSGSGTDFTLTISRLEPEDFAVYYCQQYGSSPWTFGQGTKVEIK

SEQ ID NO: 6201 - protein, 118 aa, Artificial Sequence; identical to SEQ ID NO: 3737
  Description of Artificial Sequence: Synthetic polypeptide
  VH of XENP019901

SEQ ID NO: 6202 - protein, 108 aa, Artificial Sequence
  Description of Artificial Sequence: Synthetic polypeptide
  VL of XENP019901
EIVLTQSPGTLSLSPGEPATLSCRASQSVGSSYLAWYQQKPGQAPRLLIYGAFSRATGIPDRFSGSGSGTDFTLTISRLEPEDFAVYYCQQYGSSPWTFGQGTKVEIK

SEQ ID NO: 6203 - protein, 5 aa, Artificial Sequence
  Description of Artificial Sequence: Synthetic peptide
  XENP019901 vhCDR1
SYTMH

SEQ ID NO: 6204 - protein, 17 aa, Artificial Sequence
  Description of Artificial Sequence: Synthetic peptide
  XENP019901 vhCDR2
FISYDGNNKYYADSVKG

SEQ ID NO: 6205 - protein, 9 aa, Artificial Sequence
  Description of Artificial Sequence: Synthetic peptide
  XENP019901 vhCDR3
TGWLGPFDY

SEQ ID NO: 6206 - protein, 12 aa, Artificial Sequence
  Description of Artificial Sequence: Synthetic peptide
  XENP019901 vlCDR1
RASQSVGSSYLA

SEQ ID NO: 6207 - protein, 7 aa, Artificial Sequence
  Description of Artificial Sequence: Synthetic peptide
  XENP019901 vlCDR2
GAFSRAT

SEQ ID NO: 6208 - protein, 9 aa, Artificial Sequence
  Description of Artificial Sequence: Synthetic peptide
  XENP019901 vlCDR3
QQYGSSPWT

SEQ ID NO: 6209 - protein, 246 aa, Artificial Sequence
  Description of Artificial Sequence: Synthetic polypeptide
  XENP019902 [CTLA-4]_H0_L0.14_scFv(GKPGS)4
QVQLVESGGGVVQPGRSLRLSCAASGFTFSSYTMHWVRQAPGKGLEWVTFISYDGNNKYYADSVKGRFTISRDNSKNTLYLQMNSLRAEDTAIYYCARTGWLGPFDYWGQGTLVTVSSGKPGSGKPGSGKPGSGKPGSEIVLTQSPGTLSLSPGEQATLSCRASQSVGSSYLAWYQQKPGQAPRLLIYGAFSRATGIPDRFSGSGSGTDFTLTISRLEPEDFAVYYCQQYGSSPWTFGQGTKVEIK

SEQ ID NO: 6210 - protein, 118 aa, Artificial Sequence; identical to SEQ ID NO: 3737
  Description of Artificial Sequence: Synthetic polypeptide
  VH of XENP019902

SEQ ID NO: 6211 - protein, 108 aa, Artificial Sequence
  Description of Artificial Sequence: Synthetic polypeptide
  VL of XENP019902
EIVLTQSPGTLSLSPGEQATLSCRASQSVGSSYLAWYQQKPGQAPRLLIYGAFSRATGIPDRFSGSGSGTDFTLTISRLEPEDFAVYYCQQYGSSPWTFGQGTKVEIK

SEQ ID NO: 6212 - protein, 5 aa, Artificial Sequence
  Description of Artificial Sequence: Synthetic peptide
  XENP019902 vhCDR1
SYTMH

SEQ ID NO: 6213 - protein, 17 aa, Artificial Sequence
  Description of Artificial Sequence: Synthetic peptide
  XENP019902 vhCDR2
FISYDGNNKYYADSVKG

SEQ ID NO: 6214 - protein, 9 aa, Artificial Sequence
  Description of Artificial Sequence: Synthetic peptide
  XENP019902 vhCDR3
TGWLGPFDY

SEQ ID NO: 6215 - protein, 12 aa, Artificial Sequence
  Description of Artificial Sequence: Synthetic peptide
  XENP019902 vlCDR1
RASQSVGSSYLA

SEQ ID NO: 6216 - protein, 7 aa, Artificial Sequence
  Description of Artificial Sequence: Synthetic peptide
  XENP019902 vlCDR2
GAFSRAT

SEQ ID NO: 6217 - protein, 9 aa, Artificial Sequence
  Description of Artificial Sequence: Synthetic peptide
  XENP019902 vlCDR3
QQYGSSPWT

SEQ ID NO: 6218 - protein, 246 aa, Artificial Sequence
  Description of Artificial Sequence: Synthetic polypeptide
  XENP019903 [CTLA-4]_H0_L0.15_scFv(GKPGS)4
QVQLVESGGGVVQPGRSLRLSCAASGFTFSSYTMHWVRQAPGKGLEWVTFISYDGNNKYYADSVKGRFTISRDNSKNTLYLQMNSLRAEDTAIYYCARTGWLGPFDYWGQGTLVTVSSGKPGSGKPGSGKPGSGKPGSEIVLTQSPGTLSLSPGERVTLSCRASQSVGSSYLAWYQQKPGQAPRLLIYGAFSRATGIPDRFSGSGSGTDFTLTISRLEPEDFAVYYCQQYGSSPWTFGQGTKVEIK

SEQ ID NO: 6219 - protein, 118 aa, Artificial Sequence; identical to SEQ ID NO: 3737
  Description of Artificial Sequence: Synthetic polypeptide
  VH of XENP019903

SEQ ID NO: 6220 - protein, 108 aa, Artificial Sequence
  Description of Artificial Sequence: Synthetic polypeptide
  VL of XENP019903
EIVLTQSPGTLSLSPGERVTLSCRASQSVGSSYLAWYQQKPGQAPRLLIYGAFSRATGIPDRFSGSGSGTDFTLTISRLEPEDFAVYYCQQYGSSPWTFGQGTKVEIK

SEQ ID NO: 6221 - protein, 5 aa, Artificial Sequence
  Description of Artificial Sequence: Synthetic peptide
  XENP019903 vhCDR1
SYTMH

SEQ ID NO: 6222 - protein, 17 aa, Artificial Sequence
  Description of Artificial Sequence: Synthetic peptide
  XENP019903 vhCDR2
FISYDGNNKYYADSVKG

SEQ ID NO: 6223 - protein, 9 aa, Artificial Sequence
  Description of Artificial Sequence: Synthetic peptide
  XENP019903 vhCDR3
TGWLGPFDY

SEQ ID NO: 6224 - protein, 12 aa, Artificial Sequence
  Description of Artificial Sequence: Synthetic peptide
  XENP019903 vlCDR1
RASQSVGSSYLA

SEQ ID NO: 6225 - protein, 7 aa, Artificial Sequence
  Description of Artificial Sequence: Synthetic peptide
  XENP019903 vlCDR2
GAFSRAT

SEQ ID NO: 6226 - protein, 9 aa, Artificial Sequence
  Description of Artificial Sequence: Synthetic peptide
  XENP019903 vlCDR3
QQYGSSPWT

SEQ ID NO: 6227 - protein, 246 aa, Artificial Sequence
  Description of Artificial Sequence: Synthetic polypeptide
  XENP019904 [CTLA-4]_H0_L0.16_scFv(GKPGS)4
QVQLVESGGGVVQPGRSLRLSCAASGFTFSSYTMHWVRQAPGKGLEWVTFISYDGNNKYYADSVKGRFTISRDNSKNTLYLQMNSLRAEDTAIYYCARTGWLGPFDYWGQGTLVTVSSGKPGSGKPGSGKPGSGKPGSEIVLTQSPGTLSLSPGERASLSCRASQSVGSSYLAWYQQKPGQAPRLLIYGAFSRATGIPDRFSGSGSGTDFTLTISRLEPEDFAVYYCQQYGSSPWTFGQGTKVEIK

SEQ ID NO: 6228 - protein, 118 aa, Artificial Sequence; identical to SEQ ID NO: 3737
  Description of Artificial Sequence: Synthetic polypeptide
  VH of XENP019904

SEQ ID NO: 6229 - protein, 108 aa, Artificial Sequence
  Description of Artificial Sequence: Synthetic polypeptide
  VL of XENP019904
EIVLTQSPGTLSLSPGERASLSCRASQSVGSSYLAWYQQKPGQAPRLLIYGAFSRATGIPDRFSGSGSGTDFTLTISRLEPEDFAVYYCQQYGSSPWTFGQGTKVEIK

SEQ ID NO: 6230 - protein, 5 aa, Artificial Sequence
  Description of Artificial Sequence: Synthetic peptide
  XENP019904 vhCDR1
SYTMH

SEQ ID NO: 6231 - protein, 17 aa, Artificial Sequence
  Description of Artificial Sequence: Synthetic peptide
  XENP019904 vhCDR2
FISYDGNNKYYADSVKG

SEQ ID NO: 6232 - protein, 9 aa, Artificial Sequence
  Description of Artificial Sequence: Synthetic peptide
  XENP019904 vhCDR3
TGWLGPFDY

SEQ ID NO: 6233 - protein, 12 aa, Artificial Sequence
  Description of Artificial Sequence: Synthetic peptide
  XENP019904 vlCDR1
RASQSVGSSYLA

SEQ ID NO: 6234 - protein, 7 aa, Artificial Sequence
  Description of Artificial Sequence: Synthetic peptide
  XENP019904 vlCDR2
GAFSRAT

SEQ ID NO: 6235 - protein, 9 aa, Artificial Sequence
  Description of Artificial Sequence: Synthetic peptide
  XENP019904 vlCDR3
QQYGSSPWT

SEQ ID NO: 6236 - protein, 246 aa, Artificial Sequence
  Description of Artificial Sequence: Synthetic polypeptide
  XENP019905 [CTLA-4]_H0_L0.17_scFv(GKPGS)4
QVQLVESGGGVVQPGRSLRLSCAASGFTFSSYTMHWVRQAPGKGLEWVTFISYDGNNKYYADSVKGRFTISRDNSKNTLYLQMNSLRAEDTAIYYCARTGWLGPFDYWGQGTLVTVSSGKPGSGKPGSGKPGSGKPGSEIVLTQSPGTLSLSPGERATISCRASQSVGSSYLAWYQQKPGQAPRLLIYGAFSRATGIPDRFSGSGSGTDFTLTISRLEPEDFAVYYCQQYGSSPWTFGQGTKVEIK

SEQ ID NO: 6237 - protein, 118 aa, Artificial Sequence; identical to SEQ ID NO: 3737
  Description of Artificial Sequence: Synthetic polypeptide
  VH of XENP019905

SEQ ID NO: 6238 - protein, 108 aa, Artificial Sequence
  Description of Artificial Sequence: Synthetic polypeptide
  VL of XENP019905
EIVLTQSPGTLSLSPGERATISCRASQSVGSSYLAWYQQKPGQAPRLLIYGAFSRATGIPDRFSGSGSGTDFTLTISRLEPEDFAVYYCQQYGSSPWTFGQGTKVEIK

SEQ ID NO: 6239 - protein, 5 aa, Artificial Sequence
  Description of Artificial Sequence: Synthetic peptide
  XENP019905 vhCDR1
SYTMH

SEQ ID NO: 6240 - protein, 17 aa, Artificial Sequence
  Description of Artificial Sequence: Synthetic peptide
  XENP019905 vhCDR2
FISYDGNNKYYADSVKG

SEQ ID NO: 6241 - protein, 9 aa, Artificial Sequence
  Description of Artificial Sequence: Synthetic peptide
  XENP019905 vhCDR3
TGWLGPFDY

SEQ ID NO: 6242 - protein, 12 aa, Artificial Sequence
  Description of Artificial Sequence: Synthetic peptide
  XENP019905 vlCDR1
RASQSVGSSYLA

SEQ ID NO: 6243 - protein, 7 aa, Artificial Sequence
  Description of Artificial Sequence: Synthetic peptide
  XENP019905 vlCDR2
GAFSRAT

SEQ ID NO: 6244 - protein, 9 aa, Artificial Sequence
  Description of Artificial Sequence: Synthetic peptide
  XENP019905 vlCDR3
QQYGSSPWT

SEQ ID NO: 6245 - protein, 246 aa, Artificial Sequence
  Description of Artificial Sequence: Synthetic polypeptide
  XENP019906 [CTLA-4]_H0_L0.18_scFv(GKPGS)4
QVQLVESGGGVVQPGRSLRLSCAASGFTFSSYTMHWVRQAPGKGLEWVTFISYDGNNKYYADSVKGRFTISRDNSKNTLYLQMNSLRAEDTAIYYCARTGWLGPFDYWGQGTLVTVSSGKPGSGKPGSGKPGSGKPGSEIVLTQSPGTLSLSPGERATLSCRSSQSVGSSYLAWYQQKPGQAPRLLIYGAFSRATGIPDRFSGSGSGTDFTLTISRLEPEDFAVYYCQQYGSSPWTFGQGTKVEIK

SEQ ID NO: 6246 - protein, 118 aa, Artificial Sequence; identical to SEQ ID NO: 3737
  Description of Artificial Sequence: Synthetic polypeptide
  VH of XENP019906

SEQ ID NO: 6247 - protein, 108 aa, Artificial Sequence
  Description of Artificial Sequence: Synthetic polypeptide
  VL of XENP019906
EIVLTQSPGTLSLSPGERATLSCRSSQSVGSSYLAWYQQKPGQAPRLLIYGAFSRATGIPDRFSGSGSGTDFTLTISRLEPEDFAVYYCQQYGSSPWTFGQGTKVEIK

SEQ ID NO: 6248 - protein, 5 aa, Artificial Sequence
  Description of Artificial Sequence: Synthetic peptide
  XENP019906 vhCDR1
SYTMH

SEQ ID NO: 6249 - protein, 17 aa, Artificial Sequence
  Description of Artificial Sequence: Synthetic peptide
  XENP019906 vhCDR2
FISYDGNNKYYADSVKG

SEQ ID NO: 6250 - protein, 9 aa, Artificial Sequence
  Description of Artificial Sequence: Synthetic peptide
  XENP019906 vhCDR3
TGWLGPFDY

SEQ ID NO: 6251 - protein, 12 aa, Artificial Sequence
  Description of Artificial Sequence: Synthetic peptide
  XENP019906 vlCDR1
RSSQSVGSSYLA

SEQ ID NO: 6252 - protein, 7 aa, Artificial Sequence
  Description of Artificial Sequence: Synthetic peptide
  XENP019906 vlCDR2
GAFSRAT

SEQ ID NO: 6253 - protein, 9 aa, Artificial Sequence
  Description of Artificial Sequence: Synthetic peptide
  XENP019906 vlCDR3
QQYGSSPWT

SEQ ID NO: 6254 - protein, 246 aa, Artificial Sequence
  Description of Artificial Sequence: Synthetic polypeptide
  XENP019907 [CTLA-4]_H0_L0.19_scFv(GKPGS)4
QVQLVESGGGVVQPGRSLRLSCAASGFTFSSYTMHWVRQAPGKGLEWVTFISYDGNNKYYADSVKGRFTISRDNSKNTLYLQMNSLRAEDTAIYYCARTGWLGPFDYWGQGTLVTVSSGKPGSGKPGSGKPGSGKPGSEIVLTQSPGTLSLSPGERATLSCRASQSDGSSYLAWYQQKPGQAPRLLIYGAFSRATGIPDRFSGSGSGTDFTLTISRLEPEDFAVYYCQQYGSSPWTFGQGTKVEIK

SEQ ID NO: 6255 - protein, 118 aa, Artificial Sequence; identical to SEQ ID NO: 3737
  Description of Artificial Sequence: Synthetic polypeptide
  VH of XENP019907

SEQ ID NO: 6256 - protein, 108 aa, Artificial Sequence
  Description of Artificial Sequence: Synthetic polypeptide
  VL of XENP019907
EIVLTQSPGTLSLSPGERATLSCRASQSDGSSYLAWYQQKPGQAPRLLIYGAFSRATGIPDRFSGSGSGTDFTLTISRLEPEDFAVYYCQQYGSSPWTFGQGTKVEIK

SEQ ID NO: 6257 - protein, 5 aa, Artificial Sequence
  Description of Artificial Sequence: Synthetic peptide
  XENP019907 vhCDR1
SYTMH

SEQ ID NO: 6258 - protein, 17 aa, Artificial Sequence
  Description of Artificial Sequence: Synthetic peptide
  XENP019907 vhCDR2
FISYDGNNKYYADSVKG

SEQ ID NO: 6259 - protein, 9 aa, Artificial Sequence
  Description of Artificial Sequence: Synthetic peptide
  XENP019907 vhCDR3
TGWLGPFDY

SEQ ID NO: 6260 - protein, 12 aa, Artificial Sequence
  Description of Artificial Sequence: Synthetic peptide
  XENP019907 vlCDR1
RASQSDGSSYLA

SEQ ID NO: 6261 - protein, 7 aa, Artificial Sequence
  Description of Artificial Sequence: Synthetic peptide
  XENP019907 vlCDR2
GAFSRAT

SEQ ID NO: 6262 - protein, 9 aa, Artificial Sequence
  Description of Artificial Sequence: Synthetic peptide
  XENP019907 vlCDR3
QQYGSSPWT

SEQ ID NO: 6263 - protein, 246 aa, Artificial Sequence
  Description of Artificial Sequence: Synthetic polypeptide
  XENP019908 [CTLA-4]_H0_L0.20_scFv(GKPGS)4
QVQLVESGGGVVQPGRSLRLSCAASGFTFSSYTMHWVRQAPGKGLEWVTFISYDGNNKYYADSVKGRFTISRDNSKNTLYLQMNSLRAEDTAIYYCARTGWLGPFDYWGQGTLVTVSSGKPGSGKPGSGKPGSGKPGSEIVLTQSPGTLSLSPGERATLSCRASQSSGSSYLAWYQQKPGQAPRLLIYGAFSRATGIPDRFSGSGSGTDFTLTISRLEPEDFAVYYCQQYGSSPWTFGQGTKVEIK

SEQ ID NO: 6264 - protein, 118 aa, Artificial Sequence; identical to SEQ ID NO: 3737
  Description of Artificial Sequence: Synthetic polypeptide
  VH of XENP019908

SEQ ID NO: 6265 - protein, 108 aa, Artificial Sequence
  Description of Artificial Sequence: Synthetic polypeptide
  VL of XENP019908
EIVLTQSPGTLSLSPGERATLSCRASQSSGSSYLAWYQQKPGQAPRLLIYGAFSRATGIPDRFSGSGSGTDFTLTISRLEPEDFAVYYCQQYGSSPWTFGQGTKVEIK

SEQ ID NO: 6266 - protein, 5 aa, Artificial Sequence
  Description of Artificial Sequence: Synthetic peptide
  XENP019908 vhCDR1
SYTMH

SEQ ID NO: 6267 - protein, 17 aa, Artificial Sequence
  Description of Artificial Sequence: Synthetic peptide
  XENP019908 vhCDR2
FISYDGNNKYYADSVKG

SEQ ID NO: 6268 - protein, 9 aa, Artificial Sequence
  Description of Artificial Sequence: Synthetic peptide
  XENP019908 vhCDR3
TGWLGPFDY

SEQ ID NO: 6269 - protein, 12 aa, Artificial Sequence
  Description of Artificial Sequence: Synthetic peptide
  XENP019908 vlCDR1
RASQSSGSSYLA

SEQ ID NO: 6270 - protein, 7 aa, Artificial Sequence
  Description of Artificial Sequence: Synthetic peptide
  XENP019908 vlCDR2
GAFSRAT

SEQ ID NO: 6271 - protein, 9 aa, Artificial Sequence
  Description of Artificial Sequence: Synthetic peptide
  XENP019908 vlCDR3
QQYGSSPWT

SEQ ID NO: 6272 - protein, 246 aa, Artificial Sequence
  Description of Artificial Sequence: Synthetic polypeptide
  XENP019909 [CTLA-4]_H0_L0.21_scFv(GKPGS)4
QVQLVESGGGVVQPGRSLRLSCAASGFTFSSYTMHWVRQAPGKGLEWVTFISYDGNNKYYADSVKGRFTISRDNSKNTLYLQMNSLRAEDTAIYYCARTGWLGPFDYWGQGTLVTVSSGKPGSGKPGSGKPGSGKPGSEIVLTQSPGTLSLSPGERATLSCRASQSVASSYLAWYQQKPGQAPRLLIYGAFSRATGIPDRFSGSGSGTDFTLTISRLEPEDFAVYYCQQYGSSPWTFGQGTKVEIK

SEQ ID NO: 6273 - protein, 118 aa, Artificial Sequence; identical to SEQ ID NO: 3737
  Description of Artificial Sequence: Synthetic polypeptide
  VH of XENP019909

SEQ ID NO: 6274 - protein, 108 aa, Artificial Sequence
  Description of Artificial Sequence: Synthetic polypeptide
  VL of XENP019909
EIVLTQSPGTLSLSPGERATLSCRASQSVASSYLAWYQQKPGQAPRLLIYGAFSRATGIPDRFSGSGSGTDFTLTISRLEPEDFAVYYCQQYGSSPWTFGQGTKVEIK

SEQ ID NO: 6275 - protein, 5 aa, Artificial Sequence
  Description of Artificial Sequence: Synthetic peptide
  XENP019909 vhCDR1
SYTMH

SEQ ID NO: 6276 - protein, 17 aa, Artificial Sequence
  Description of Artificial Sequence: Synthetic peptide
  XENP019909 vhCDR2
FISYDGNNKYYADSVKG

SEQ ID NO: 6277 - protein, 9 aa, Artificial Sequence
  Description of Artificial Sequence: Synthetic peptide
  XENP019909 vhCDR3
TGWLGPFDY

SEQ ID NO: 6278 - protein, 12 aa, Artificial Sequence
  Description of Artificial Sequence: Synthetic peptide
  XENP019909 vlCDR1
RASQSVASSYLA

SEQ ID NO: 6279 - protein, 7 aa, Artificial Sequence
  Description of Artificial Sequence: Synthetic peptide
  XENP019909 vlCDR2
GAFSRAT

SEQ ID NO: 6280 - protein, 9 aa, Artificial Sequence
  Description of Artificial Sequence: Synthetic peptide
  XENP019909 vlCDR3
QQYGSSPWT

SEQ ID NO: 6281 - protein, 246 aa, Artificial Sequence
  Description of Artificial Sequence: Synthetic polypeptide
  XENP019910 [CTLA-4]_H0_L0.22_scFv(GKPGS)4
QVQLVESGGGVVQPGRSLRLSCAASGFTFSSYTMHWVRQAPGKGLEWVTFISYDGNNKYYADSVKGRFTISRDNSKNTLYLQMNSLRAEDTAIYYCARTGWLGPFDYWGQGTLVTVSSGKPGSGKPGSGKPGSGKPGSEIVLTQSPGTLSLSPGERATLSCRASQSVSSSYLAWYQQKPGQAPRLLIYGAFSRATGIPDRFSGSGSGTDFTLTISRLEPEDFAVYYCQQYGSSPWTFGQGTKVEIK

SEQ ID NO: 6282 - protein, 118 aa, Artificial Sequence; identical to SEQ ID NO: 3737
  Description of Artificial Sequence: Synthetic polypeptide
  VH of XENP019910

SEQ ID NO: 6283 - protein, 108 aa, Artificial Sequence; identical to SEQ ID NO: 2411
  Description of Artificial Sequence: Synthetic polypeptide
  VL of XENP019910

SEQ ID NO: 6284 - protein, 5 aa, Artificial Sequence
  Description of Artificial Sequence: Synthetic peptide
  XENP019910 vhCDR1
SYTMH

SEQ ID NO: 6285 - protein, 17 aa, Artificial Sequence
  Description of Artificial Sequence: Synthetic peptide
  XENP019910 vhCDR2
FISYDGNNKYYADSVKG

SEQ ID NO: 6286 - protein, 9 aa, Artificial Sequence
  Description of Artificial Sequence: Synthetic peptide
  XENP019910 vhCDR3
TGWLGPFDY

SEQ ID NO: 6287 - protein, 12 aa, Artificial Sequence
  Description of Artificial Sequence: Synthetic peptide
  XENP019910 vlCDR1
RASQSVSSSYLA

SEQ ID NO: 6288 - protein, 7 aa, Artificial Sequence
  Description of Artificial Sequence: Synthetic peptide
  XENP019910 vlCDR2
GAFSRAT

SEQ ID NO: 6289 - protein, 9 aa, Artificial Sequence
  Description of Artificial Sequence: Synthetic peptide
  XENP019910 vlCDR3
QQYGSSPWT

SEQ ID NO: 6290 - protein, 246 aa, Artificial Sequence
  Description of Artificial Sequence: Synthetic polypeptide
  XENP019911 [CTLA-4]_H0_L0.23_scFv(GKPGS)4
QVQLVESGGGVVQPGRSLRLSCAASGFTFSSYTMHWVRQAPGKGLEWVTFISYDGNNKYYADSVKGRFTISRDNSKNTLYLQMNSLRAEDTAIYYCARTGWLGPFDYWGQGTLVTVSSGKPGSGKPGSGKPGSGKPGSEIVLTQSPGTLSLSPGERATLSCRASQSVTSSYLAWYQQKPGQAPRLLIYGAFSRATGIPDRFSGSGSGTDFTLTISRLEPEDFAVYYCQQYGSSPWTFGQGTKVEIK

SEQ ID NO: 6291 - protein, 118 aa, Artificial Sequence; identical to SEQ ID NO: 3737
  Description of Artificial Sequence: Synthetic polypeptide
  VH of XENP019911

SEQ ID NO: 6292 - protein, 108 aa, Artificial Sequence
  Description of Artificial Sequence: Synthetic polypeptide
  VL of XENP019911
EIVLTQSPGTLSLSPGERATLSCRASQSVTSSYLAWYQQKPGQAPRLLIYGAFSRATGIPDRFSGSGSGTDFTLTISRLEPEDFAVYYCQQYGSSPWTFGQGTKVEIK

SEQ ID NO: 6293 - protein, 5 aa, Artificial Sequence
  Description of Artificial Sequence: Synthetic peptide
  XENP019911 vhCDR1
SYTMH

SEQ ID NO: 6294 - protein, 17 aa, Artificial Sequence
  Description of Artificial Sequence: Synthetic peptide
  XENP019911 vhCDR2
FISYDGNNKYYADSVKG

SEQ ID NO: 6295 - protein, 9 aa, Artificial Sequence
  Description of Artificial Sequence: Synthetic peptide
  XENP019911 vhCDR3
TGWLGPFDY

SEQ ID NO: 6296 - protein, 12 aa, Artificial Sequence
  Description of Artificial Sequence: Synthetic peptide
  XENP019911 vlCDR1
RASQSVTSSYLA

SEQ ID NO: 6297 - protein, 7 aa, Artificial Sequence
  Description of Artificial Sequence: Synthetic peptide
  XENP019911 vlCDR2
GAFSRAT

SEQ ID NO: 6298 - protein, 9 aa, Artificial Sequence
  Description of Artificial Sequence: Synthetic peptide
  XENP019911 vlCDR3
QQYGSSPWT

SEQ ID NO: 6299 - protein, 246 aa, Artificial Sequence
  Description of Artificial Sequence: Synthetic polypeptide
  XENP019912 [CTLA-4]_H0_L0.24_scFv(GKPGS)4
QVQLVESGGGVVQPGRSLRLSCAASGFTFSSYTMHWVRQAPGKGLEWVTFISYDGNNKYYADSVKGRFTISRDNSKNTLYLQMNSLRAEDTAIYYCARTGWLGPFDYWGQGTLVTVSSGKPGSGKPGSGKPGSGKPGSEIVLTQSPGTLSLSPGERATLSCRASQSVGASYLAWYQQKPGQAPRLLIYGAFSRATGIPDRFSGSGSGTDFTLTISRLEPEDFAVYYCQQYGSSPWTFGQGTKVEIK

SEQ ID NO: 6300 - protein, 118 aa, Artificial Sequence; identical to SEQ ID NO: 3737
  Description of Artificial Sequence: Synthetic polypeptide
  VH of XENP019912

SEQ ID NO: 6301 - protein, 108 aa, Artificial Sequence
  Description of Artificial Sequence: Synthetic polypeptide
  VL of XENP019912
EIVLTQSPGTLSLSPGERATLSCRASQSVGASYLAWYQQKPGQAPRLLIYGAFSRATGIPDRFSGSGSGTDFTLTISRLEPEDFAVYYCQQYGSSPWTFGQGTKVEIK

SEQ ID NO: 6302 - protein, 5 aa, Artificial Sequence
  Description of Artificial Sequence: Synthetic peptide
  XENP019912 vhCDR1
SYTMH

SEQ ID NO: 6303 - protein, 17 aa, Artificial Sequence
  Description of Artificial Sequence: Synthetic peptide
  XENP019912 vhCDR2
FISYDGNNKYYADSVKG

SEQ ID NO: 6304 - protein, 9 aa, Artificial Sequence
  Description of Artificial Sequence: Synthetic peptide
  XENP019912 vhCDR3
TGWLGPFDY

SEQ ID NO: 6305 - protein, 12 aa, Artificial Sequence
  Description of Artificial Sequence: Synthetic peptide
  XENP019912 vlCDR1
RASQSVGASYLA

SEQ ID NO: 6306 - protein, 7 aa, Artificial Sequence
  Description of Artificial Sequence: Synthetic peptide
  XENP019912 vlCDR2
GAFSRAT

SEQ ID NO: 6307 - protein, 9 aa, Artificial Sequence
  Description of Artificial Sequence: Synthetic peptide
  XENP019912 vlCDR3
QQYGSSPWT

SEQ ID NO: 6308 - protein, 246 aa, Artificial Sequence
  Description of Artificial Sequence: Synthetic polypeptide
  XENP019913 [CTLA-4]_H0_L0.25_scFv(GKPGS)4
QVQLVESGGGVVQPGRSLRLSCAASGFTFSSYTMHWVRQAPGKGLEWVTFISYDGNNKYYADSVKGRFTISRDNSKNTLYLQMNSLRAEDTAIYYCARTGWLGPFDYWGQGTLVTVSSGKPGSGKPGSGKPGSGKPGSEIVLTQSPGTLSLSPGERATLSCRASQSVGGSYLAWYQQKPGQAPRLLIYGAFSRATGIPDRFSGSGSGTDFTLTISRLEPEDFAVYYCQQYGSSPWTFGQGTKVEIK

SEQ ID NO: 6309 - protein, 118 aa, Artificial Sequence; identical to SEQ ID NO: 3737
  Description of Artificial Sequence: Synthetic polypeptide
  VH of XENP019913

SEQ ID NO: 6310 - protein, 108 aa, Artificial Sequence
  Description of Artificial Sequence: Synthetic polypeptide
  VL of XENP019913
EIVLTQSPGTLSLSPGERATLSCRASQSVGGSYLAWYQQKPGQAPRLLIYGAFSRATGIPDRFSGSGSGTDFTLTISRLEPEDFAVYYCQQYGSSPWTFGQGTKVEIK

SEQ ID NO: 6311 - protein, 5 aa, Artificial Sequence
  Description of Artificial Sequence: Synthetic peptide
  XENP019913 vhCDR1
SYTMH

SEQ ID NO: 6312 - protein, 17 aa, Artificial Sequence
  Description of Artificial Sequence: Synthetic peptide
  XENP019913 vhCDR2
FISYDGNNKYYADSVKG

SEQ ID NO: 6313 - protein, 9 aa, Artificial Sequence
  Description of Artificial Sequence: Synthetic peptide
  XENP019913 vhCDR3
TGWLGPFDY

SEQ ID NO: 6314 - protein, 12 aa, Artificial Sequence
  Description of Artificial Sequence: Synthetic peptide
  XENP019913 vlCDR1
RASQSVGGSYLA

SEQ ID NO: 6315 - protein, 7 aa, Artificial Sequence
  Description of Artificial Sequence: Synthetic peptide
  XENP019913 vlCDR2
GAFSRAT

SEQ ID NO: 6316 - protein, 9 aa, Artificial Sequence
  Description of Artificial Sequence: Synthetic peptide
  XENP019913 vlCDR3
QQYGSSPWT

SEQ ID NO: 6317 - protein, 246 aa, Artificial Sequence
  Description of Artificial Sequence: Synthetic polypeptide
  XENP019914 [CTLA-4]_H0_L0.26_scFv(GKPGS)4
QVQLVESGGGVVQPGRSLRLSCAASGFTFSSYTMHWVRQAPGKGLEWVTFISYDGNNKYYADSVKGRFTISRDNSKNTLYLQMNSLRAEDTAIYYCARTGWLGPFDYWGQGTLVTVSSGKPGSGKPGSGKPGSGKPGSEIVLTQSPGTLSLSPGERATLSCRASQSVGNSYLAWYQQKPGQAPRLLIYGAFSRATGIPDRFSGSGSGTDFTLTISRLEPEDFAVYYCQQYGSSPWTFGQGTKVEIK

SEQ ID NO: 6318 - protein, 118 aa, Artificial Sequence; identical to SEQ ID NO: 3737
  Description of Artificial Sequence: Synthetic polypeptide
  VH of XENP019914

SEQ ID NO: 6319 - protein, 108 aa, Artificial Sequence
  Description of Artificial Sequence: Synthetic polypeptide
  VL of XENP019914
EIVLTQSPGTLSLSPGERATLSCRASQSVGNSYLAWYQQKPGQAPRLLIYGAFSRATGIPDRFSGSGSGTDFTLTISRLEPEDFAVYYCQQYGSSPWTFGQGTKVEIK

SEQ ID NO: 6320 - protein, 5 aa, Artificial Sequence
  Description of Artificial Sequence: Synthetic peptide
  XENP019914 vhCDR1
SYTMH

SEQ ID NO: 6321 - protein, 17 aa, Artificial Sequence
  Description of Artificial Sequence: Synthetic peptide
  XENP019914 vhCDR2
FISYDGNNKYYADSVKG

SEQ ID NO: 6322 - protein, 9 aa, Artificial Sequence
  Description of Artificial Sequence: Synthetic peptide
  XENP019914 vhCDR3
TGWLGPFDY

SEQ ID NO: 6323 - protein, 12 aa, Artificial Sequence
  Description of Artificial Sequence: Synthetic peptide
  XENP019914 vlCDR1
RASQSVGNSYLA

SEQ ID NO: 6324 - protein, 7 aa, Artificial Sequence
  Description of Artificial Sequence: Synthetic peptide
  XENP019914 vlCDR2
GAFSRAT

SEQ ID NO: 6325 - protein, 9 aa, Artificial Sequence
  Description of Artificial Sequence: Synthetic peptide
  XENP019914 vlCDR3
QQYGSSPWT

SEQ ID NO: 6326 - protein, 246 aa, Artificial Sequence
  Description of Artificial Sequence: Synthetic polypeptide
  XENP019915 [CTLA-4]_H0_L0.27_scFv(GKPGS)4
QVQLVESGGGVVQPGRSLRLSCAASGFTFSSYTMHWVRQAPGKGLEWVTFISYDGNNKYYADSVKGRFTISRDNSKNTLYLQMNSLRAEDTAIYYCARTGWLGPFDYWGQGTLVTVSSGKPGSGKPGSGKPGSGKPGSEIVLTQSPGTLSLSPGERATLSCRASQSVGQSYLAWYQQKPGQAPRLLIYGAFSRATGIPDRFSGSGSGTDFTLTISRLEPEDFAVYYCQQYGSSPWTFGQGTKVEIK

SEQ ID NO: 6327 - protein, 118 aa, Artificial Sequence; identical to SEQ ID NO: 3737
  Description of Artificial Sequence: Synthetic polypeptide
  VH of XENP019915

SEQ ID NO: 6328 - protein, 108 aa, Artificial Sequence
  Description of Artificial Sequence: Synthetic polypeptide
  VL of XENP019915
EIVLTQSPGTLSLSPGERATLSCRASQSVGQSYLAWYQQKPGQAPRLLIYGAFSRATGIPDRFSGSGSGTDFTLTISRLEPEDFAVYYCQQYGSSPWTFGQGTKVEIK

SEQ ID NO: 6329 - protein, 5 aa, Artificial Sequence
  Description of Artificial Sequence: Synthetic peptide
  XENP019915 vhCDR1
SYTMH

SEQ ID NO: 6330 - protein, 17 aa, Artificial Sequence
  Description of Artificial Sequence: Synthetic peptide
  XENP019915 vhCDR2
FISYDGNNKYYADSVKG

SEQ ID NO: 6331 - protein, 9 aa, Artificial Sequence
  Description of Artificial Sequence: Synthetic peptide
  XENP019915 vhCDR3
TGWLGPFDY

SEQ ID NO: 6332 - protein, 12 aa, Artificial Sequence
  Description of Artificial Sequence: Synthetic peptide
  XENP019915 vlCDR1
RASQSVGQSYLA

SEQ ID NO: 6333 - protein, 7 aa, Artificial Sequence
  Description of Artificial Sequence: Synthetic peptide
  XENP019915 vlCDR2
GAFSRAT

SEQ ID NO: 6334 - protein, 9 aa, Artificial Sequence
  Description of Artificial Sequence: Synthetic peptide
  XENP019915 vlCDR3
QQYGSSPWT

SEQ ID NO: 6335 - protein, 246 aa, Artificial Sequence
  Description of Artificial Sequence: Synthetic polypeptide
  XENP019916 [CTLA-4]_H0_L0.28_scFv(GKPGS)4
QVQLVESGGGVVQPGRSLRLSCAASGFTFSSYTMHWVRQAPGKGLEWVTFISYDGNNKYYADSVKGRFTISRDNSKNTLYLQMNSLRAEDTAIYYCARTGWLGPFDYWGQGTLVTVSSGKPGSGKPGSGKPGSGKPGSEIVLTQSPGTLSLSPGERATLSCRASQSVGTSYLAWYQQKPGQAPRLLIYGAFSRATGIPDRFSGSGSGTDFTLTISRLEPEDFAVYYCQQYGSSPWTFGQGTKVEIK

SEQ ID NO: 6336 - protein, 118 aa, Artificial Sequence; identical to SEQ ID NO: 3737
  Description of Artificial Sequence: Synthetic polypeptide
  VH of XENP019916

SEQ ID NO: 6337 - protein, 108 aa, Artificial Sequence
  Description of Artificial Sequence: Synthetic polypeptide
  VL of XENP019916
EIVLTQSPGTLSLSPGERATLSCRASQSVGTSYLAWYQQKPGQAPRLLIYGAFSRATGIPDRFSGSGSGTDFTLTISRLEPEDFAVYYCQQYGSSPWTFGQGTKVEIK

SEQ ID NO: 6338 - protein, 5 aa, Artificial Sequence
  Description of Artificial Sequence: Synthetic peptide
  XENP019916 vhCDR1
SYTMH

SEQ ID NO: 6339 - protein, 17 aa, Artificial Sequence
  Description of Artificial Sequence: Synthetic peptide
  XENP019916 vhCDR2
FISYDGNNKYYADSVKG

SEQ ID NO: 6340 - protein, 9 aa, Artificial Sequence
  Description of Artificial Sequence: Synthetic peptide
  XENP019916 vhCDR3
TGWLGPFDY

SEQ ID NO: 6341 - protein, 12 aa, Artificial Sequence
  Description of Artificial Sequence: Synthetic peptide
  XENP019916 vlCDR1
RASQSVGTSYLA

SEQ ID NO: 6342 - protein, 7 aa, Artificial Sequence
  Description of Artificial Sequence: Synthetic peptide
  XENP019916 vlCDR2
GAFSRAT

SEQ ID NO: 6343 - protein, 9 aa, Artificial Sequence
  Description of Artificial Sequence: Synthetic peptide
  XENP019916 vlCDR3
QQYGSSPWT

SEQ ID NO: 6344 - protein, 246 aa, Artificial Sequence
  Description of Artificial Sequence: Synthetic polypeptide
  XENP019917 [CTLA-4]_H0_L0.29_scFv(GKPGS)4
QVQLVESGGGVVQPGRSLRLSCAASGFTFSSYTMHWVRQAPGKGLEWVTFISYDGNNKYYADSVKGRFTISRDNSKNTLYLQMNSLRAEDTAIYYCARTGWLGPFDYWGQGTLVTVSSGKPGSGKPGSGKPGSGKPGSEIVLTQSPGTLSLSPGERATLSCRASQSVGSAYLAWYQQKPGQAPRLLIYGAFSRATGIPDRFSGSGSGTDFTLTISRLEPEDFAVYYCQQYGSSPWTFGQGTKVEIK

SEQ ID NO: 6345 - protein, 118 aa, Artificial Sequence; identical to SEQ ID NO: 3737
  Description of Artificial Sequence: Synthetic polypeptide
  VH of XENP019917

SEQ ID NO: 6346 - protein, 108 aa, Artificial Sequence
  Description of Artificial Sequence: Synthetic polypeptide
  VL of XENP019917
EIVLTQSPGTLSLSPGERATLSCRASQSVGSAYLAWYQQKPGQAPRLLIYGAFSRATGIPDRFSGSGSGTDFTLTISRLEPEDFAVYYCQQYGSSPWTFGQGTKVEIK

SEQ ID NO: 6347 - protein, 5 aa, Artificial Sequence
  Description of Artificial Sequence: Synthetic peptide
  XENP019917 vhCDR1
SYTMH

SEQ ID NO: 6348 - protein, 17 aa, Artificial Sequence
  Description of Artificial Sequence: Synthetic peptide
  XENP019917 vhCDR2
FISYDGNNKYYADSVKG

SEQ ID NO: 6349 - protein, 9 aa, Artificial Sequence
  Description of Artificial Sequence: Synthetic peptide
  XENP019917 vhCDR3
TGWLGPFDY

SEQ ID NO: 6350 - protein, 12 aa, Artificial Sequence
  Description of Artificial Sequence: Synthetic peptide
  XENP019917 vlCDR1
RASQSVGSAYLA

SEQ ID NO: 6351 - protein, 7 aa, Artificial Sequence
  Description of Artificial Sequence: Synthetic peptide
  XENP019917 vlCDR2
GAFSRAT

SEQ ID NO: 6352 - protein, 9 aa, Artificial Sequence
  Description of Artificial Sequence: Synthetic peptide
  XENP019917 vlCDR3
QQYGSSPWT

SEQ ID NO: 6353 - protein, 246 aa, Artificial Sequence
  Description of Artificial Sequence: Synthetic polypeptide
  XENP019918 [CTLA-4]_H0_L0.30_scFv(GKPGS)4
QVQLVESGGGVVQPGRSLRLSCAASGFTFSSYTMHWVRQAPGKGLEWVTFISYDGNNKYYADSVKGRFTISRDNSKNTLYLQMNSLRAEDTAIYYCARTGWLGPFDYWGQGTLVTVSSGKPGSGKPGSGKPGSGKPGSEIVLTQSPGTLSLSPGERATLSCRASQSVGSGYLAWYQQKPGQAPRLLIYGAFSRATGIPDRFSGSGSGTDFTLTISRLEPEDFAVYYCQQYGSSPWTFGQGTKVEIK

SEQ ID NO: 6354 - protein, 118 aa, Artificial Sequence; identical to SEQ ID NO: 3737
  Description of Artificial Sequence: Synthetic polypeptide
  VH of XENP019918

SEQ ID NO: 6355 - protein, 108 aa, Artificial Sequence
  Description of Artificial Sequence: Synthetic polypeptide
  VL of XENP019918
EIVLTQSPGTLSLSPGERATLSCRASQSVGSGYLAWYQQKPGQAPRLLIYGAFSRATGIPDRFSGSGSGTDFTLTISRLEPEDFAVYYCQQYGSSPWTFGQGTKVEIK

SEQ ID NO: 6356 - protein, 5 aa, Artificial Sequence
  Description of Artificial Sequence: Synthetic peptide
  XENP019918 vhCDR1
SYTMH

SEQ ID NO: 6357 - protein, 17 aa, Artificial Sequence
  Description of Artificial Sequence: Synthetic peptide
  XENP019918 vhCDR2
FISYDGNNKYYADSVKG

SEQ ID NO: 6358 - protein, 9 aa, Artificial Sequence
  Description of Artificial Sequence: Synthetic peptide
  XENP019918 vhCDR3
TGWLGPFDY

SEQ ID NO: 6359 - protein, 12 aa, Artificial Sequence
  Description of Artificial Sequence: Synthetic peptide
  XENP019918 vlCDR1
RASQSVGSGYLA

SEQ ID NO: 6360 - protein, 7 aa, Artificial Sequence
  Description of Artificial Sequence: Synthetic peptide
  XENP019918 vlCDR2
GAFSRAT

SEQ ID NO: 6361 - protein, 9 aa, Artificial Sequence
  Description of Artificial Sequence: Synthetic peptide
  XENP019918 vlCDR3
QQYGSSPWT

SEQ ID NO: 6362 - protein, 246 aa, Artificial Sequence
  Description of Artificial Sequence: Synthetic polypeptide
  XENP019919 [CTLA-4]_H0_L0.31_scFv(GKPGS)4
QVQLVESGGGVVQPGRSLRLSCAASGFTFSSYTMHWVRQAPGKGLEWVTFISYDGNNKYYADSVKGRFTISRDNSKNTLYLQMNSLRAEDTAIYYCARTGWLGPFDYWGQGTLVTVSSGKPGSGKPGSGKPGSGKPGSEIVLTQSPGTLSLSPGERATLSCRASQSVGSNYLAWYQQKPGQAPRLLIYGAFSRATGIPDRFSGSGSGTDFTLTISRLEPEDFAVYYCQQYGSSPWTFGQGTKVEIK

SEQ ID NO: 6363 - protein, 118 aa, Artificial Sequence; identical to SEQ ID NO: 3737
  Description of Artificial Sequence: Synthetic polypeptide
  VH of XENP019919

SEQ ID NO: 6364 - protein, 108 aa, Artificial Sequence
  Description of Artificial Sequence: Synthetic polypeptide
  VL of XENP019919
EIVLTQSPGTLSLSPGERATLSCRASQSVGSNYLAWYQQKPGQAPRLLIYGAFSRATGIPDRFSGSGSGTDFTLTISRLEPEDFAVYYCQQYGSSPWTFGQGTKVEIK

SEQ ID NO: 6365 - protein, 5 aa, Artificial Sequence
  Description of Artificial Sequence: Synthetic peptide
  XENP019919 vhCDR1
SYTMH

SEQ ID NO: 6366 - protein, 17 aa, Artificial Sequence
  Description of Artificial Sequence: Synthetic peptide
  XENP019919 vhCDR2
FISYDGNNKYYADSVKG

SEQ ID NO: 6367 - protein, 9 aa, Artificial Sequence
  Description of Artificial Sequence: Synthetic peptide
  XENP019919 vhCDR3
TGWLGPFDY

SEQ ID NO: 6368 - protein, 12 aa, Artificial Sequence
  Description of Artificial Sequence: Synthetic peptide
  XENP019919 vlCDR1
RASQSVGSNYLA

SEQ ID NO: 6369 - protein, 7 aa, Artificial Sequence
  Description of Artificial Sequence: Synthetic peptide
  XENP019919 vlCDR2
GAFSRAT

SEQ ID NO: 6370 - protein, 9 aa, Artificial Sequence
  Description of Artificial Sequence: Synthetic peptide
  XENP019919 vlCDR3
QQYGSSPWT

SEQ ID NO: 6371 - protein, 246 aa, Artificial Sequence
  Description of Artificial Sequence: Synthetic polypeptide
  XENP019920 [CTLA-4]_H0_L0.32_scFv(GKPGS)4
QVQLVESGGGVVQPGRSLRLSCAASGFTFSSYTMHWVRQAPGKGLEWVTFISYDGNNKYYADSVKGRFTISRDNSKNTLYLQMNSLRAEDTAIYYCARTGWLGPFDYWGQGTLVTVSSGKPGSGKPGSGKPGSGKPGSEIVLTQSPGTLSLSPGERATLSCRASQSVGSQYLAWYQQKPGQAPRLLIYGAFSRATGIPDRFSGSGSGTDFTLTISRLEPEDFAVYYCQQYGSSPWTFGQGTKVEIK

SEQ ID NO: 6372 - protein, 118 aa, Artificial Sequence; identical to SEQ ID NO: 3737
  Description of Artificial Sequence: Synthetic polypeptide
  VH of XENP019920

SEQ ID NO: 6373 - protein, 108 aa, Artificial Sequence
  Description of Artificial Sequence: Synthetic polypeptide
  VL of XENP019920
EIVLTQSPGTLSLSPGERATLSCRASQSVGSQYLAWYQQKPGQAPRLLIYGAFSRATGIPDRFSGSGSGTDFTLTISRLEPEDFAVYYCQQYGSSPWTFGQGTKVEIK

SEQ ID NO: 6374 - protein, 5 aa, Artificial Sequence
  Description of Artificial Sequence: Synthetic peptide
  XENP019920 vhCDR1
SYTMH

SEQ ID NO: 6375 - protein, 17 aa, Artificial Sequence
  Description of Artificial Sequence: Synthetic peptide
  XENP019920 vhCDR2
FISYDGNNKYYADSVKG

SEQ ID NO: 6376 - protein, 9 aa, Artificial Sequence
  Description of Artificial Sequence: Synthetic peptide
  XENP019920 vhCDR3
TGWLGPFDY

SEQ ID NO: 6377 - protein, 12 aa, Artificial Sequence
  Description of Artificial Sequence: Synthetic peptide
  XENP019920 vlCDR1
RASQSVGSQYLA

SEQ ID NO: 6378 - protein, 7 aa, Artificial Sequence
  Description of Artificial Sequence: Synthetic peptide
  XENP019920 vlCDR2
GAFSRAT

SEQ ID NO: 6379 - protein, 9 aa, Artificial Sequence
  Description of Artificial Sequence: Synthetic peptide
  XENP019920 vlCDR3
QQYGSSPWT

SEQ ID NO: 6380 - protein, 246 aa, Artificial Sequence
  Description of Artificial Sequence: Synthetic polypeptide
  XENP019921 [CTLA-4]_H0_L0.33_scFv(GKPGS)4
QVQLVESGGGVVQPGRSLRLSCAASGFTFSSYTMHWVRQAPGKGLEWVTFISYDGNNKYYADSVKGRFTISRDNSKNTLYLQMNSLRAEDTAIYYCARTGWLGPFDYWGQGTLVTVSSGKPGSGKPGSGKPGSGKPGSEIVLTQSPGTLSLSPGERATLSCRASQSVGSTYLAWYQQKPGQAPRLLIYGAFSRATGIPDRFSGSGSGTDFTLTISRLEPEDFAVYYCQQYGSSPWTFGQGTKVEIK

SEQ ID NO: 6381 - protein, 118 aa, Artificial Sequence; identical to SEQ ID NO: 3737
  Description of Artificial Sequence: Synthetic polypeptide
  VH of XENP019921

SEQ ID NO: 6382 - protein, 108 aa, Artificial Sequence
  Description of Artificial Sequence: Synthetic polypeptide
  VL of XENP019921
EIVLTQSPGTLSLSPGERATLSCRASQSVGSTYLAWYQQKPGQAPRLLIYGAFSRATGIPDRFSGSGSGTDFTLTISRLEPEDFAVYYCQQYGSSPWTFGQGTKVEIK

SEQ ID NO: 6383 - protein, 5 aa, Artificial Sequence
  Description of Artificial Sequence: Synthetic peptide
  XENP019921 vhCDR1
SYTMH

SEQ ID NO: 6384 - protein, 17 aa, Artificial Sequence
  Description of Artificial Sequence: Synthetic peptide
  XENP019921 vhCDR2
FISYDGNNKYYADSVKG

SEQ ID NO: 6385 - protein, 9 aa, Artificial Sequence
  Description of Artificial Sequence: Synthetic peptide
  XENP019921 vhCDR3
TGWLGPFDY

SEQ ID NO: 6386 - protein, 12 aa, Artificial Sequence
  Description of Artificial Sequence: Synthetic peptide
  XENP019921 vlCDR1
RASQSVGSTYLA

SEQ ID NO: 6387 - protein, 7 aa, Artificial Sequence
  Description of Artificial Sequence: Synthetic peptide
  XENP019921 vlCDR2
GAFSRAT

SEQ ID NO: 6388 - protein, 9 aa, Artificial Sequence
  Description of Artificial Sequence: Synthetic peptide
  XENP019921 vlCDR3
QQYGSSPWT

SEQ ID NO: 6389 - protein, 246 aa, Artificial Sequence
  Description of Artificial Sequence: Synthetic polypeptide
  XENP019922 [CTLA-4]_H0_L0.34_scFv(GKPGS)4
QVQLVESGGGVVQPGRSLRLSCAASGFTFSSYTMHWVRQAPGKGLEWVTFISYDGNNKYYADSVKGRFTISRDNSKNTLYLQMNSLRAEDTAIYYCARTGWLGPFDYWGQGTLVTVSSGKPGSGKPGSGKPGSGKPGSEIVLTQSPGTLSLSPGERATLSCRASQSVGSSALAWYQQKPGQAPRLLIYGAFSRATGIPDRFSGSGSGTDFTLTISRLEPEDFAVYYCQQYGSSPWTFGQGTKVEIK

SEQ ID NO: 6390 - protein, 118 aa, Artificial Sequence; identical to SEQ ID NO: 3737
  Description of Artificial Sequence: Synthetic polypeptide
  VH of XENP019922

SEQ ID NO: 6391 - protein, 108 aa, Artificial Sequence
  Description of Artificial Sequence: Synthetic polypeptide
  VL of XENP019922
EIVLTQSPGTLSLSPGERATLSCRASQSVGSSALAWYQQKPGQAPRLLIYGAFSRATGIPDRFSGSGSGTDFTLTISRLEPEDFAVYYCQQYGSSPWTFGQGTKVEIK

SEQ ID NO: 6392 - protein, 5 aa, Artificial Sequence
  Description of Artificial Sequence: Synthetic peptide
  XENP019922 vhCDR1
SYTMH

SEQ ID NO: 6393 - protein, 17 aa, Artificial Sequence
  Description of Artificial Sequence: Synthetic peptide
  XENP019922 vhCDR2
FISYDGNNKYYADSVKG

SEQ ID NO: 6394 - protein, 9 aa, Artificial Sequence
  Description of Artificial Sequence: Synthetic peptide
  XENP019922 vhCDR3
TGWLGPFDY

SEQ ID NO: 6395 - protein, 12 aa, Artificial Sequence
  Description of Artificial Sequence: Synthetic peptide
  XENP019922 vlCDR1
RASQSVGSSALA

SEQ ID NO: 6396 - protein, 7 aa, Artificial Sequence
  Description of Artificial Sequence: Synthetic peptide
  XENP019922 vlCDR2
GAFSRAT

SEQ ID NO: 6397 - protein, 9 aa, Artificial Sequence
  Description of Artificial Sequence: Synthetic peptide
  XENP019922 vlCDR3
QQYGSSPWT

SEQ ID NO: 6398 - protein, 246 aa, Artificial Sequence
  Description of Artificial Sequence: Synthetic polypeptide
  XENP019923 [CTLA-4]_H0_L0.35_scFv(GKPGS)4
QVQLVESGGGVVQPGRSLRLSCAASGFTFSSYTMHWVRQAPGKGLEWVTFISYDGNNKYYADSVKGRFTISRDNSKNTLYLQMNSLRAEDTAIYYCARTGWLGPFDYWGQGTLVTVSSGKPGSGKPGSGKPGSGKPGSEIVLTQSPGTLSLSPGERATLSCRASQSVGSSFLAWYQQKPGQAPRLLIYGAFSRATGIPDRFSGSGSGTDFTLTISRLEPEDFAVYYCQQYGSSPWTFGQGTKVEIK

SEQ ID NO: 6399 - protein, 118 aa, Artificial Sequence; identical to SEQ ID NO: 3737
  Description of Artificial Sequence: Synthetic polypeptide
  VH of XENP019923

SEQ ID NO: 6400 - protein, 108 aa, Artificial Sequence
  Description of Artificial Sequence: Synthetic polypeptide
  VL of XENP019923
EIVLTQSPGTLSLSPGERATLSCRASQSVGSSFLAWYQQKPGQAPRLLIYGAFSRATGIPDRFSGSGSGTDFTLTISRLEPEDFAVYYCQQYGSSPWTFGQGTKVEIK

SEQ ID NO: 6401 - protein, 5 aa, Artificial Sequence
  Description of Artificial Sequence: Synthetic peptide
  XENP019923 vhCDR1
SYTMH

SEQ ID NO: 6402 - protein, 17 aa, Artificial Sequence
  Description of Artificial Sequence: Synthetic peptide
  XENP019923 vhCDR2
FISYDGNNKYYADSVKG

SEQ ID NO: 6403 - protein, 9 aa, Artificial Sequence
  Description of Artificial Sequence: Synthetic peptide
  XENP019923 vhCDR3
TGWLGPFDY

SEQ ID NO: 6404 - protein, 12 aa, Artificial Sequence
  Description of Artificial Sequence: Synthetic peptide
  XENP019923 vlCDR1
RASQSVGSSFLA

SEQ ID NO: 6405 - protein, 7 aa, Artificial Sequence
  Description of Artificial Sequence: Synthetic peptide
  XENP019923 vlCDR2
GAFSRAT

SEQ ID NO: 6406 - protein, 9 aa, Artificial Sequence
  Description of Artificial Sequence: Synthetic peptide
  XENP019923 vlCDR3
QQYGSSPWT

SEQ ID NO: 6407 - protein, 246 aa, Artificial Sequence
  Description of Artificial Sequence: Synthetic polypeptide
  XENP019924 [CTLA-4]_H0_L0.36_scFv(GKPGS)4
QVQLVESGGGVVQPGRSLRLSCAASGFTFSSYTMHWVRQAPGKGLEWVTFISYDGNNKYYADSVKGRFTISRDNSKNTLYLQMNSLRAEDTAIYYCARTGWLGPFDYWGQGTLVTVSSGKPGSGKPGSGKPGSGKPGSEIVLTQSPGTLSLSPGERATLSCRASQSVGSSHLAWYQQKPGQAPRLLIYGAFSRATGIPDRFSGSGSGTDFTLTISRLEPEDFAVYYCQQYGSSPWTFGQGTKVEIK

SEQ ID NO: 6408 - protein, 118 aa, Artificial Sequence; identical to SEQ ID NO: 3737
  Description of Artificial Sequence: Synthetic polypeptide
  VH of XENP019924

SEQ ID NO: 6409 - protein, 108 aa, Artificial Sequence
  Description of Artificial Sequence: Synthetic polypeptide
  VL of XENP019924
EIVLTQSPGTLSLSPGERATLSCRASQSVGSSHLAWYQQKPGQAPRLLIYGAFSRATGIPDRFSGSGSGTDFTLTISRLEPEDFAVYYCQQYGSSPWTFGQGTKVEIK

SEQ ID NO: 6410 - protein, 5 aa, Artificial Sequence
  Description of Artificial Sequence: Synthetic peptide
  XENP019924 vhCDR1
SYTMH

SEQ ID NO: 6411 - protein, 17 aa, Artificial Sequence
  Description of Artificial Sequence: Synthetic peptide
  XENP019924 vhCDR2
FISYDGNNKYYADSVKG

SEQ ID NO: 6412 - protein, 9 aa, Artificial Sequence
  Description of Artificial Sequence: Synthetic peptide
  XENP019924 vhCDR3
TGWLGPFDY

SEQ ID NO: 6413 - protein, 12 aa, Artificial Sequence
  Description of Artificial Sequence: Synthetic peptide
  XENP019924 vlCDR1
RASQSVGSSHLA

SEQ ID NO: 6414 - protein, 7 aa, Artificial Sequence
  Description of Artificial Sequence: Synthetic peptide
  XENP019924 vlCDR2
GAFSRAT

SEQ ID NO: 6415 - protein, 9 aa, Artificial Sequence
  Description of Artificial Sequence: Synthetic peptide
  XENP019924 vlCDR3
QQYGSSPWT

SEQ ID NO: 6416 - protein, 246 aa, Artificial Sequence
  Description of Artificial Sequence: Synthetic polypeptide
  XENP019925 [CTLA-4]_H0_L0.37_scFv(GKPGS)4
QVQLVESGGGVVQPGRSLRLSCAASGFTFSSYTMHWVRQAPGKGLEWVTFISYDGNNKYYADSVKGRFTISRDNSKNTLYLQMNSLRAEDTAIYYCARTGWLGPFDYWGQGTLVTVSSGKPGSGKPGSGKPGSGKPGSEIVLTQSPGTLSLSPGERATLSCRASQSVGSSLLAWYQQKPGQAPRLLIYGAFSRATGIPDRFSGSGSGTDFTLTISRLEPEDFAVYYCQQYGSSPWTFGQGTKVEIK

SEQ ID NO: 6417 - protein, 118 aa, Artificial Sequence; identical to SEQ ID NO: 3737
  Description of Artificial Sequence: Synthetic polypeptide
  VH of XENP019925

SEQ ID NO: 6418 - protein, 108 aa, Artificial Sequence
  Description of Artificial Sequence: Synthetic polypeptide
  VL of XENP019925
EIVLTQSPGTLSLSPGERATLSCRASQSVGSSLLAWYQQKPGQAPRLLIYGAFSRATGIPDRFSGSGSGTDFTLTISRLEPEDFAVYYCQQYGSSPWTFGQGTKVEIK

SEQ ID NO: 6419 - protein, 5 aa, Artificial Sequence
  Description of Artificial Sequence: Synthetic peptide
  XENP019925 vhCDR1
SYTMH

SEQ ID NO: 6420 - protein, 17 aa, Artificial Sequence
  Description of Artificial Sequence: Synthetic peptide
  XENP019925 vhCDR2
FISYDGNNKYYADSVKG

SEQ ID NO: 6421 - protein, 9 aa, Artificial Sequence
  Description of Artificial Sequence: Synthetic peptide
  XENP019925 vhCDR3
TGWLGPFDY

SEQ ID NO: 6422 - protein, 12 aa, Artificial Sequence
  Description of Artificial Sequence: Synthetic peptide
  XENP019925 vlCDR1
RASQSVGSSLLA

SEQ ID NO: 6423 - protein, 7 aa, Artificial Sequence
  Description of Artificial Sequence: Synthetic peptide
  XENP019925 vlCDR2
GAFSRAT

SEQ ID NO: 6424 - protein, 9 aa, Artificial Sequence
  Description of Artificial Sequence: Synthetic peptide
  XENP019925 vlCDR3
QQYGSSPWT

SEQ ID NO: 6425 - protein, 246 aa, Artificial Sequence
  Description of Artificial Sequence: Synthetic polypeptide
  XENP019926 [CTLA-4]_H0_L0.38_scFv(GKPGS)4
QVQLVESGGGVVQPGRSLRLSCAASGFTFSSYTMHWVRQAPGKGLEWVTFISYDGNNKYYADSVKGRFTISRDNSKNTLYLQMNSLRAEDTAIYYCARTGWLGPFDYWGQGTLVTVSSGKPGSGKPGSGKPGSGKPGSEIVLTQSPGTLSLSPGERATLSCRASQSVGSSNLAWYQQKPGQAPRLLIYGAFSRATGIPDRFSGSGSGTDFTLTISRLEPEDFAVYYCQQYGSSPWTFGQGTKVEIK

SEQ ID NO: 6426 - protein, 118 aa, Artificial Sequence; identical to SEQ ID NO: 3737
  Description of Artificial Sequence: Synthetic polypeptide
  VH of XENP019926

SEQ ID NO: 6427 - protein, 108 aa, Artificial Sequence
  Description of Artificial Sequence: Synthetic polypeptide
  VL of XENP019926
EIVLTQSPGTLSLSPGERATLSCRASQSVGSSNLAWYQQKPGQAPRLLIYGAFSRATGIPDRFSGSGSGTDFTLTISRLEPEDFAVYYCQQYGSSPWTFGQGTKVEIK

SEQ ID NO: 6428 - protein, 5 aa, Artificial Sequence
  Description of Artificial Sequence: Synthetic peptide
  XENP019926 vhCDR1
SYTMH

SEQ ID NO: 6429 - protein, 17 aa, Artificial Sequence
  Description of Artificial Sequence: Synthetic peptide
  XENP019926 vhCDR2
FISYDGNNKYYADSVKG

SEQ ID NO: 6430 - protein, 9 aa, Artificial Sequence
  Description of Artificial Sequence: Synthetic peptide
  XENP019926 vhCDR3
TGWLGPFDY

SEQ ID NO: 6431 - protein, 12 aa, Artificial Sequence
  Description of Artificial Sequence: Synthetic peptide
  XENP019926 vlCDR1
RASQSVGSSNLA

SEQ ID NO: 6432 - protein, 7 aa, Artificial Sequence
  Description of Artificial Sequence: Synthetic peptide
  XENP019926 vlCDR2
GAFSRAT

SEQ ID NO: 6433 - protein, 9 aa, Artificial Sequence
  Description of Artificial Sequence: Synthetic peptide
  XENP019926 vlCDR3
QQYGSSPWT

SEQ ID NO: 6434 - protein, 246 aa, Artificial Sequence
  Description of Artificial Sequence: Synthetic polypeptide
  XENP019927 [CTLA-4]_H0_L0.39_scFv(GKPGS)4
QVQLVESGGGVVQPGRSLRLSCAASGFTFSSYTMHWVRQAPGKGLEWVTFISYDGNNKYYADSVKGRFTISRDNSKNTLYLQMNSLRAEDTAIYYCARTGWLGPFDYWGQGTLVTVSSGKPGSGKPGSGKPGSGKPGSEIVLTQSPGTLSLSPGERATLSCRASQSVGSSSLAWYQQKPGQAPRLLIYGAFSRATGIPDRFSGSGSGTDFTLTISRLEPEDFAVYYCQQYGSSPWTFGQGTKVEIK

SEQ ID NO: 6435 - protein, 118 aa, Artificial Sequence; identical to SEQ ID NO: 3737
  Description of Artificial Sequence: Synthetic polypeptide
  VH of XENP019927

SEQ ID NO: 6436 - protein, 108 aa, Artificial Sequence
  Description of Artificial Sequence: Synthetic polypeptide
  VL of XENP019927
EIVLTQSPGTLSLSPGERATLSCRASQSVGSSSLAWYQQKPGQAPRLLIYGAFSRATGIPDRFSGSGSGTDFTLTISRLEPEDFAVYYCQQYGSSPWTFGQGTKVEIK

SEQ ID NO: 6437 - protein, 5 aa, Artificial Sequence
  Description of Artificial Sequence: Synthetic peptide
  XENP019927 vhCDR1
SYTMH

SEQ ID NO: 6438 - protein, 17 aa, Artificial Sequence
  Description of Artificial Sequence: Synthetic peptide
  XENP019927 vhCDR2
FISYDGNNKYYADSVKG

SEQ ID NO: 6439 - protein, 9 aa, Artificial Sequence
  Description of Artificial Sequence: Synthetic peptide
  XENP019927 vhCDR3
TGWLGPFDY

SEQ ID NO: 6440 - protein, 12 aa, Artificial Sequence
  Description of Artificial Sequence: Synthetic peptide
  XENP019927 vlCDR1
RASQSVGSSSLA

SEQ ID NO: 6441 - protein, 7 aa, Artificial Sequence
  Description of Artificial Sequence: Synthetic peptide
  XENP019927 vlCDR2
GAFSRAT

SEQ ID NO: 6442 - protein, 9 aa, Artificial Sequence
  Description of Artificial Sequence: Synthetic peptide
  XENP019927 vlCDR3
QQYGSSPWT

SEQ ID NO: 6443 - protein, 246 aa, Artificial Sequence
  Description of Artificial Sequence: Synthetic polypeptide
  XENP019928 [CTLA-4]_H0_L0.40_scFv(GKPGS)4
QVQLVESGGGVVQPGRSLRLSCAASGFTFSSYTMHWVRQAPGKGLEWVTFISYDGNNKYYADSVKGRFTISRDNSKNTLYLQMNSLRAEDTAIYYCARTGWLGPFDYWGQGTLVTVSSGKPGSGKPGSGKPGSGKPGSEIVLTQSPGTLSLSPGERATLSCRASQSVGSSVLAWYQQKPGQAPRLLIYGAFSRATGIPDRFSGSGSGTDFTLTISRLEPEDFAVYYCQQYGSSPWTFGQGTKVEIK

SEQ ID NO: 6444 - protein, 118 aa, Artificial Sequence; identical to SEQ ID NO: 3737
  Description of Artificial Sequence: Synthetic polypeptide
  VH of XENP019928

SEQ ID NO: 6445 - protein, 108 aa, Artificial Sequence
  Description of Artificial Sequence: Synthetic polypeptide
  VL of XENP019928
EIVLTQSPGTLSLSPGERATLSCRASQSVGSSVLAWYQQKPGQAPRLLIYGAFSRATGIPDRFSGSGSGTDFTLTISRLEPEDFAVYYCQQYGSSPWTFGQGTKVEIK

SEQ ID NO: 6446 - protein, 5 aa, Artificial Sequence
  Description of Artificial Sequence: Synthetic peptide
  XENP019928 vhCDR1
SYTMH

SEQ ID NO: 6447 - protein, 17 aa, Artificial Sequence
  Description of Artificial Sequence: Synthetic peptide
  XENP019928 vhCDR2
FISYDGNNKYYADSVKG

SEQ ID NO: 6448 - protein, 9 aa, Artificial Sequence
  Description of Artificial Sequence: Synthetic peptide
  XENP019928 vhCDR3
TGWLGPFDY

SEQ ID NO: 6449 - protein, 12 aa, Artificial Sequence
  Description of Artificial Sequence: Synthetic peptide
  XENP019928 vlCDR1
RASQSVGSSVLA

SEQ ID NO: 6450 - protein, 7 aa, Artificial Sequence
  Description of Artificial Sequence: Synthetic peptide
  XENP019928 vlCDR2
GAFSRAT

SEQ ID NO: 6451 - protein, 9 aa, Artificial Sequence
  Description of Artificial Sequence: Synthetic peptide
  XENP019928 vlCDR3
QQYGSSPWT

SEQ ID NO: 6452 - protein, 246 aa, Artificial Sequence
  Description of Artificial Sequence: Synthetic polypeptide
  XENP019929 [CTLA-4]_H0_L0.41_scFv(GKPGS)4
QVQLVESGGGVVQPGRSLRLSCAASGFTFSSYTMHWVRQAPGKGLEWVTFISYDGNNKYYADSVKGRFTISRDNSKNTLYLQMNSLRAEDTAIYYCARTGWLGPFDYWGQGTLVTVSSGKPGSGKPGSGKPGSGKPGSEIVLTQSPGTLSLSPGERATLSCRASQSVGSSYMAWYQQKPGQAPRLLIYGAFSRATGIPDRFSGSGSGTDFTLTISRLEPEDFAVYYCQQYGSSPWTFGQGTKVEIK

SEQ ID NO: 6453 - protein, 118 aa, Artificial Sequence; identical to SEQ ID NO: 3737
  Description of Artificial Sequence: Synthetic polypeptide
  VH of XENP019929

SEQ ID NO: 6454 - protein, 108 aa, Artificial Sequence
  Description of Artificial Sequence: Synthetic polypeptide
  VL of XENP019929
EIVLTQSPGTLSLSPGERATLSCRASQSVGSSYMAWYQQKPGQAPRLLIYGAFSRATGIPDRFSGSGSGTDFTLTISRLEPEDFAVYYCQQYGSSPWTFGQGTKVEIK

SEQ ID NO: 6455 - protein, 5 aa, Artificial Sequence
  Description of Artificial Sequence: Synthetic peptide
  XENP019929 vhCDR1
SYTMH

SEQ ID NO: 6456 - protein, 17 aa, Artificial Sequence
  Description of Artificial Sequence: Synthetic peptide
  XENP019929 vhCDR2
FISYDGNNKYYADSVKG

SEQ ID NO: 6457 - protein, 9 aa, Artificial Sequence
  Description of Artificial Sequence: Synthetic peptide
  XENP019929 vhCDR3
TGWLGPFDY

SEQ ID NO: 6458 - protein, 12 aa, Artificial Sequence
  Description of Artificial Sequence: Synthetic peptide
  XENP019929 vlCDR1
RASQSVGSSYMA

SEQ ID NO: 6459 - protein, 7 aa, Artificial Sequence
  Description of Artificial Sequence: Synthetic peptide
  XENP019929 vlCDR2
GAFSRAT

SEQ ID NO: 6460 - protein, 9 aa, Artificial Sequence
  Description of Artificial Sequence: Synthetic peptide
  XENP019929 vlCDR3
QQYGSSPWT

SEQ ID NO: 6461 - protein, 246 aa, Artificial Sequence
  Description of Artificial Sequence: Synthetic polypeptide
  XENP019930 [CTLA-4]_H0_L0.42_scFv(GKPGS)4
QVQLVESGGGVVQPGRSLRLSCAASGFTFSSYTMHWVRQAPGKGLEWVTFISYDGNNKYYADSVKGRFTISRDNSKNTLYLQMNSLRAEDTAIYYCARTGWLGPFDYWGQGTLVTVSSGKPGSGKPGSGKPGSGKPGSEIVLTQSPGTLSLSPGERATLSCRASQSVGSSYLDWYQQKPGQAPRLLIYGAFSRATGIPDRFSGSGSGTDFTLTISRLEPEDFAVYYCQQYGSSPWTFGQGTKVEIK

SEQ ID NO: 6462 - protein, 118 aa, Artificial Sequence; identical to SEQ ID NO: 3737
  Description of Artificial Sequence: Synthetic polypeptide
  VH of XENP019930

SEQ ID NO: 6463 - protein, 108 aa, Artificial Sequence
  Description of Artificial Sequence: Synthetic polypeptide
  VL of XENP019930
EIVLTQSPGTLSLSPGERATLSCRASQSVGSSYLDWYQQKPGQAPRLLIYGAFSRATGIPDRFSGSGSGTDFTLTISRLEPEDFAVYYCQQYGSSPWTFGQGTKVEIK

SEQ ID NO: 6464 - protein, 5 aa, Artificial Sequence
  Description of Artificial Sequence: Synthetic peptide
  XENP019930 vhCDR1
SYTMH

SEQ ID NO: 6465 - protein, 17 aa, Artificial Sequence
  Description of Artificial Sequence: Synthetic peptide
  XENP019930 vhCDR2
FISYDGNNKYYADSVKG

SEQ ID NO: 6466 - protein, 9 aa, Artificial Sequence
  Description of Artificial Sequence: Synthetic peptide
  XENP019930 vhCDR3
TGWLGPFDY

SEQ ID NO: 6467 - protein, 12 aa, Artificial Sequence
  Description of Artificial Sequence: Synthetic peptide
  XENP019930 vlCDR1
RASQSVGSSYLD

SEQ ID NO: 6468 - protein, 7 aa, Artificial Sequence
  Description of Artificial Sequence: Synthetic peptide
  XENP019930 vlCDR2
GAFSRAT

SEQ ID NO: 6469 - protein, 9 aa, Artificial Sequence
  Description of Artificial Sequence: Synthetic peptide
  XENP019930 vlCDR3
QQYGSSPWT

SEQ ID NO: 6470 - protein, 246 aa, Artificial Sequence
  Description of Artificial Sequence: Synthetic polypeptide
  XENP019931 [CTLA-4]_H0_L0.43_scFv(GKPGS)4
QVQLVESGGGVVQPGRSLRLSCAASGFTFSSYTMHWVRQAPGKGLEWVTFISYDGNNKYYADSVKGRFTISRDNSKNTLYLQMNSLRAEDTAIYYCARTGWLGPFDYWGQGTLVTVSSGKPGSGKPGSGKPGSGKPGSEIVLTQSPGTLSLSPGERATLSCRASQSVGSSYLDWYQQKPGQAPRLLIYGAFSRATGIPDRFSGSGSGTDFTLTISRLEPEDFAVYYCKQYGSSPWTFGQGTKVEIK

SEQ ID NO: 6471 - protein, 118 aa, Artificial Sequence; identical to SEQ ID NO: 3737
  Description of Artificial Sequence: Synthetic polypeptide
  VH of XENP019931

SEQ ID NO: 6472 - protein, 108 aa, Artificial Sequence
  Description of Artificial Sequence: Synthetic polypeptide
  VL of XENP019931
EIVLTQSPGTLSLSPGERATLSCRASQSVGSSYLDWYQQKPGQAPRLLIYGAFSRATGIPDRFSGSGSGTDFTLTISRLEPEDFAVYYCKQYGSSPWTFGQGTKVEIK

SEQ ID NO: 6473 - protein, 5 aa, Artificial Sequence
  Description of Artificial Sequence: Synthetic peptide
  XENP019931 vhCDR1
SYTMH

SEQ ID NO: 6474 - protein, 17 aa, Artificial Sequence
  Description of Artificial Sequence: Synthetic peptide
  XENP019931 vhCDR2
FISYDGNNKYYADSVKG

SEQ ID NO: 6475 - protein, 9 aa, Artificial Sequence
  Description of Artificial Sequence: Synthetic peptide
  XENP019931 vhCDR3
TGWLGPFDY

SEQ ID NO: 6476 - protein, 12 aa, Artificial Sequence
  Description of Artificial Sequence: Synthetic peptide
  XENP019931 vlCDR1
RASQSVGSSYLD

SEQ ID NO: 6477 - protein, 7 aa, Artificial Sequence
  Description of Artificial Sequence: Synthetic peptide
  XENP019931 vlCDR2
GAFSRAT

SEQ ID NO: 6478 - protein, 9 aa, Artificial Sequence
  Description of Artificial Sequence: Synthetic peptide
  XENP019931 vlCDR3
KQYGSSPWT

SEQ ID NO: 6479 - protein, 246 aa, Artificial Sequence
  Description of Artificial Sequence: Synthetic polypeptide
  XENP019932 [CTLA-4]_H0_L0.44_scFv(GKPGS)4
QVQLVESGGGVVQPGRSLRLSCAASGFTFSSYTMHWVRQAPGKGLEWVTFISYDGNNKYYADSVKGRFTISRDNSKNTLYLQMNSLRAEDTAIYYCARTGWLGPFDYWGQGTLVTVSSGKPGSGKPGSGKPGSGKPGSEIVLTQSPGTLSLSPGERATLSCRASQSVGSSYLSWYQQKPGQAPRLLIYGAFSRATGIPDRFSGSGSGTDFTLTISRLEPEDFAVYYCQQYGSSPWTFGQGTKVEIK

SEQ ID NO: 6480 - protein, 118 aa, Artificial Sequence; identical to SEQ ID NO: 3737
  Description of Artificial Sequence: Synthetic polypeptide
  VH of XENP019932

SEQ ID NO: 6481 - protein, 108 aa, Artificial Sequence
  Description of Artificial Sequence: Synthetic polypeptide
  VL of XENP019932
EIVLTQSPGTLSLSPGERATLSCRASQSVGSSYLSWYQQKPGQAPRLLIYGAFSRATGIPDRFSGSGSGTDFTLTISRLEPEDFAVYYCQQYGSSPWTFGQGTKVEIK

SEQ ID NO: 6482 - protein, 5 aa, Artificial Sequence
  Description of Artificial Sequence: Synthetic peptide
  XENP019932 vhCDR1
SYTMH

SEQ ID NO: 6483 - protein, 17 aa, Artificial Sequence
  Description of Artificial Sequence: Synthetic peptide
  XENP019932 vhCDR2
FISYDGNNKYYADSVKG

SEQ ID NO: 6484 - protein, 9 aa, Artificial Sequence
  Description of Artificial Sequence: Synthetic peptide
  XENP019932 vhCDR3
TGWLGPFDY

SEQ ID NO: 6485 - protein, 12 aa, Artificial Sequence
  Description of Artificial Sequence: Synthetic peptide
  XENP019932 vlCDR1
RASQSVGSSYLS

SEQ ID NO: 6486 - protein, 7 aa, Artificial Sequence
  Description of Artificial Sequence: Synthetic peptide
  XENP019932 vlCDR2
GAFSRAT

SEQ ID NO: 6487 - protein, 9 aa, Artificial Sequence
  Description of Artificial Sequence: Synthetic peptide
  XENP019932 vlCDR3
QQYGSSPWT

SEQ ID NO: 6488 - protein, 246 aa, Artificial Sequence
  Description of Artificial Sequence: Synthetic polypeptide
  XENP019933 [CTLA-4]_H0_L0.45_scFv(GKPGS)4
QVQLVESGGGVVQPGRSLRLSCAASGFTFSSYTMHWVRQAPGKGLEWVTFISYDGNNKYYADSVKGRFTISRDNSKNTLYLQMNSLRAEDTAIYYCARTGWLGPFDYWGQGTLVTVSSGKPGSGKPGSGKPGSGKPGSEIVLTQSPGTLSLSPGERATLSCRASQSVGSSYLTWYQQKPGQAPRLLIYGAFSRATGIPDRFSGSGSGTDFTLTISRLEPEDFAVYYCQQYGSSPWTFGQGTKVEIK

SEQ ID NO: 6489 - protein, 118 aa, Artificial Sequence; identical to SEQ ID NO: 3737
  Description of Artificial Sequence: Synthetic polypeptide
  VH of XENP019933

SEQ ID NO: 6490 - protein, 108 aa, Artificial Sequence
  Description of Artificial Sequence: Synthetic polypeptide
  VL of XENP019933
EIVLTQSPGTLSLSPGERATLSCRASQSVGSSYLTWYQQKPGQAPRLLIYGAFSRATGIPDRFSGSGSGTDFTLTISRLEPEDFAVYYCQQYGSSPWTFGQGTKVEIK

SEQ ID NO: 6491 - protein, 5 aa, Artificial Sequence
  Description of Artificial Sequence: Synthetic peptide
  XENP019933 vhCDR1
SYTMH

SEQ ID NO: 6492 - protein, 17 aa, Artificial Sequence
  Description of Artificial Sequence: Synthetic peptide
  XENP019933 vhCDR2
FISYDGNNKYYADSVKG

SEQ ID NO: 6493 - protein, 9 aa, Artificial Sequence
  Description of Artificial Sequence: Synthetic peptide
  XENP019933 vhCDR3
TGWLGPFDY

SEQ ID NO: 6494 - protein, 12 aa, Artificial Sequence
  Description of Artificial Sequence: Synthetic peptide
  XENP019933 vlCDR1
RASQSVGSSYLT

SEQ ID NO: 6495 - protein, 7 aa, Artificial Sequence
  Description of Artificial Sequence: Synthetic peptide
  XENP019933 vlCDR2
GAFSRAT

SEQ ID NO: 6496 - protein, 9 aa, Artificial Sequence
  Description of Artificial Sequence: Synthetic peptide
  XENP019933 vlCDR3
QQYGSSPWT

SEQ ID NO: 6497 - protein, 246 aa, Artificial Sequence
  Description of Artificial Sequence: Synthetic polypeptide
  XENP019934 [CTLA-4]_H0_L0.46_scFv(GKPGS)4
QVQLVESGGGVVQPGRSLRLSCAASGFTFSSYTMHWVRQAPGKGLEWVTFISYDGNNKYYADSVKGRFTISRDNSKNTLYLQMNSLRAEDTAIYYCARTGWLGPFDYWGQGTLVTVSSGKPGSGKPGSGKPGSGKPGSEIVLTQSPGTLSLSPGERATLSCRASQSVGSSYLAWYEQKPGQAPRLLIYGAFSRATGIPDRFSGSGSGTDFTLTISRLEPEDFAVYYCQQYGSSPWTFGQGTKVEIK

SEQ ID NO: 6498 - protein, 118 aa, Artificial Sequence; identical to SEQ ID NO: 3737
  Description of Artificial Sequence: Synthetic polypeptide
  VH of XENP019934

SEQ ID NO: 6499 - protein, 108 aa, Artificial Sequence
  Description of Artificial Sequence: Synthetic polypeptide
  VL of XENP019934
EIVLTQSPGTLSLSPGERATLSCRASQSVGSSYLAWYEQKPGQAPRLLIYGAFSRATGIPDRFSGSGSGTDFTLTISRLEPEDFAVYYCQQYGSSPWTFGQGTKVEIK

SEQ ID NO: 6500 - protein, 5 aa, Artificial Sequence
  Description of Artificial Sequence: Synthetic peptide
  XENP019934 vhCDR1
SYTMH

SEQ ID NO: 6501 - protein, 17 aa, Artificial Sequence
  Description of Artificial Sequence: Synthetic peptide
  XENP019934 vhCDR2
FISYDGNNKYYADSVKG

SEQ ID NO: 6502 - protein, 9 aa, Artificial Sequence
  Description of Artificial Sequence: Synthetic peptide
  XENP019934 vhCDR3
TGWLGPFDY

SEQ ID NO: 6503 - protein, 12 aa, Artificial Sequence
  Description of Artificial Sequence: Synthetic peptide
  XENP019934 vlCDR1
RASQSVGSSYLA

SEQ ID NO: 6504 - protein, 7 aa, Artificial Sequence
  Description of Artificial Sequence: Synthetic peptide
  XENP019934 vlCDR2
GAFSRAT

SEQ ID NO: 6505 - protein, 9 aa, Artificial Sequence
  Description of Artificial Sequence: Synthetic peptide
  XENP019934 vlCDR3
QQYGSSPWT

SEQ ID NO: 6506 - protein, 246 aa, Artificial Sequence
  Description of Artificial Sequence: Synthetic polypeptide
  XENP019935 [CTLA-4]_H0_L0.47_scFv(GKPGS)4
QVQLVESGGGVVQPGRSLRLSCAASGFTFSSYTMHWVRQAPGKGLEWVTFISYDGNNKYYADSVKGRFTISRDNSKNTLYLQMNSLRAEDTAIYYCARTGWLGPFDYWGQGTLVTVSSGKPGSGKPGSGKPGSGKPGSEIVLTQSPGTLSLSPGERATLSCRASQSVGSSYLAWYLQKPGQAPRLLIYGAFSRATGIPDRFSGSGSGTDFTLTISRLEPEDFAVYYCQQYGSSPWTFGQGTKVEIK

SEQ ID NO: 6507 - protein, 118 aa, Artificial Sequence; identical to SEQ ID NO: 3737
  Description of Artificial Sequence: Synthetic polypeptide
  VH of XENP019935

SEQ ID NO: 6508 - protein, 108 aa, Artificial Sequence
  Description of Artificial Sequence: Synthetic polypeptide
  VL of XENP019935
EIVLTQSPGTLSLSPGERATLSCRASQSVGSSYLAWYLQKPGQAPRLLIYGAFSRATGIPDRFSGSGSGTDFTLTISRLEPEDFAVYYCQQYGSSPWTFGQGTKVEIK

SEQ ID NO: 6509 - protein, 5 aa, Artificial Sequence
  Description of Artificial Sequence: Synthetic peptide
  XENP019935 vhCDR1
SYTMH

SEQ ID NO: 6510 - protein, 17 aa, Artificial Sequence
  Description of Artificial Sequence: Synthetic peptide
  XENP019935 vhCDR2
FISYDGNNKYYADSVKG

SEQ ID NO: 6511 - protein, 9 aa, Artificial Sequence
  Description of Artificial Sequence: Synthetic peptide
  XENP019935 vhCDR3
TGWLGPFDY

SEQ ID NO: 6512 - protein, 12 aa, Artificial Sequence
  Description of Artificial Sequence: Synthetic peptide
  XENP019935 vlCDR1
RASQSVGSSYLA

SEQ ID NO: 6513 - protein, 7 aa, Artificial Sequence
  Description of Artificial Sequence: Synthetic peptide
  XENP019935 vlCDR2
GAFSRAT

SEQ ID NO: 6514 - protein, 9 aa, Artificial Sequence
  Description of Artificial Sequence: Synthetic peptide
  XENP019935 vlCDR3
QQYGSSPWT

SEQ ID NO: 6515 - protein, 246 aa, Artificial Sequence
  Description of Artificial Sequence: Synthetic polypeptide
  XENP019936 [CTLA-4]_H0_L0.48_scFv(GKPGS)4
QVQLVESGGGVVQPGRSLRLSCAASGFTFSSYTMHWVRQAPGKGLEWVTFISYDGNNKYYADSVKGRFTISRDNSKNTLYLQMNSLRAEDTAIYYCARTGWLGPFDYWGQGTLVTVSSGKPGSGKPGSGKPGSGKPGSEIVLTQSPGTLSLSPGERATLSCRASQSVGSSYLAWYRQKPGQAPRLLIYGAFSRATGIPDRFSGSGSGTDFTLTISRLEPEDFAVYYCQQYGSSPWTFGQGTKVEIK

SEQ ID NO: 6516 - protein, 118 aa, Artificial Sequence; identical to SEQ ID NO: 3737
  Description of Artificial Sequence: Synthetic polypeptide
  VH of XENP019936

SEQ ID NO: 6517 - protein, 108 aa, Artificial Sequence
  Description of Artificial Sequence: Synthetic polypeptide
  VL of XENP019936
EIVLTQSPGTLSLSPGERATLSCRASQSVGSSYLAWYRQKPGQAPRLLIYGAFSRATGIPDRFSGSGSGTDFTLTISRLEPEDFAVYYCQQYGSSPWTFGQGTKVEIK

SEQ ID NO: 6518 - protein, 5 aa, Artificial Sequence
  Description of Artificial Sequence: Synthetic peptide
  XENP019936 vhCDR1
SYTMH

SEQ ID NO: 6519 - protein, 17 aa, Artificial Sequence
  Description of Artificial Sequence: Synthetic peptide
  XENP019936 vhCDR2
FISYDGNNKYYADSVKG

SEQ ID NO: 6520 - protein, 9 aa, Artificial Sequence
  Description of Artificial Sequence: Synthetic peptide
  XENP019936 vhCDR3
TGWLGPFDY

SEQ ID NO: 6521 - protein, 12 aa, Artificial Sequence
  Description of Artificial Sequence: Synthetic peptide
  XENP019936 vlCDR1
RASQSVGSSYLA

SEQ ID NO: 6522 - protein, 7 aa, Artificial Sequence
  Description of Artificial Sequence: Synthetic peptide
  XENP019936 vlCDR2
GAFSRAT

SEQ ID NO: 6523 - protein, 9 aa, Artificial Sequence
  Description of Artificial Sequence: Synthetic peptide
  XENP019936 vlCDR3
QQYGSSPWT

SEQ ID NO: 6524 - protein, 246 aa, Artificial Sequence
  Description of Artificial Sequence: Synthetic polypeptide
  XENP019937 [CTLA-4]_H0_L0.49_scFv(GKPGS)4
QVQLVESGGGVVQPGRSLRLSCAASGFTFSSYTMHWVRQAPGKGLEWVTFISYDGNNKYYADSVKGRFTISRDNSKNTLYLQMNSLRAEDTAIYYCARTGWLGPFDYWGQGTLVTVSSGKPGSGKPGSGKPGSGKPGSEIVLTQSPGTLSLSPGERATLSCRASQSVGSSYLAWYRQKPGQAPELLIYGAFSRATGIPDRFSGSGSGTDFTLTISRLEPEDFAVYYCQQYGSSPWTFGQGTKVEIK

SEQ ID NO: 6525 - protein, 118 aa, Artificial Sequence; identical to SEQ ID NO: 3737
  Description of Artificial Sequence: Synthetic polypeptide
  VH of XENP019937

SEQ ID NO: 6526 - protein, 108 aa, Artificial Sequence
  Description of Artificial Sequence: Synthetic polypeptide
  VL of XENP019937
EIVLTQSPGTLSLSPGERATLSCRASQSVGSSYLAWYRQKPGQAPELLIYGAFSRATGIPDRFSGSGSGTDFTLTISRLEPEDFAVYYCQQYGSSPWTFGQGTKVEIK

SEQ ID NO: 6527 - protein, 5 aa, Artificial Sequence
  Description of Artificial Sequence: Synthetic peptide
  XENP019937 vhCDR1
SYTMH

SEQ ID NO: 6528 - protein, 17 aa, Artificial Sequence
  Description of Artificial Sequence: Synthetic peptide
  XENP019937 vhCDR2
FISYDGNNKYYADSVKG

SEQ ID NO: 6529 - protein, 9 aa, Artificial Sequence
  Description of Artificial Sequence: Synthetic peptide
  XENP019937 vhCDR3
TGWLGPFDY

SEQ ID NO: 6530 - protein, 12 aa, Artificial Sequence
  Description of Artificial Sequence: Synthetic peptide
  XENP019937 vlCDR1
RASQSVGSSYLA

SEQ ID NO: 6531 - protein, 7 aa, Artificial Sequence
  Description of Artificial Sequence: Synthetic peptide
  XENP019937 vlCDR2
GAFSRAT

SEQ ID NO: 6532 - protein, 9 aa, Artificial Sequence
  Description of Artificial Sequence: Synthetic peptide
  XENP019937 vlCDR3
QQYGSSPWT

SEQ ID NO: 6533 - protein, 246 aa, Artificial Sequence
  Description of Artificial Sequence: Synthetic polypeptide
  XENP019938 [CTLA-4]_H0_L0.50_scFv(GKPGS)4
QVQLVESGGGVVQPGRSLRLSCAASGFTFSSYTMHWVRQAPGKGLEWVTFISYDGNNKYYADSVKGRFTISRDNSKNTLYLQMNSLRAEDTAIYYCARTGWLGPFDYWGQGTLVTVSSGKPGSGKPGSGKPGSGKPGSEIVLTQSPGTLSLSPGERATLSCRASQSVGSSYLAWYQEKPGQAPRLLIYGAFSRATGIPDRFSGSGSGTDFTLTISRLEPEDFAVYYCQQYGSSPWTFGQGTKVEIK

SEQ ID NO: 6534 - protein, 118 aa, Artificial Sequence; identical to SEQ ID NO: 3737
  Description of Artificial Sequence: Synthetic polypeptide
  VH of XENP019938

SEQ ID NO: 6535 - protein, 108 aa, Artificial Sequence; identical to SEQ ID NO: 4708
  Description of Artificial Sequence: Synthetic polypeptide
  VL of XENP019938

SEQ ID NO: 6536 - protein, 5 aa, Artificial Sequence
  Description of Artificial Sequence: Synthetic peptide
  XENP019938 vhCDR1
SYTMH

SEQ ID NO: 6537 - protein, 17 aa, Artificial Sequence
  Description of Artificial Sequence: Synthetic peptide
  XENP019938 vhCDR2
FISYDGNNKYYADSVKG

SEQ ID NO: 6538 - protein, 9 aa, Artificial Sequence
  Description of Artificial Sequence: Synthetic peptide
  XENP019938 vhCDR3
TGWLGPFDY

SEQ ID NO: 6539 - protein, 12 aa, Artificial Sequence
  Description of Artificial Sequence: Synthetic peptide
  XENP019938 vlCDR1
RASQSVGSSYLA

SEQ ID NO: 6540 - protein, 7 aa, Artificial Sequence
  Description of Artificial Sequence: Synthetic peptide
  XENP019938 vlCDR2
GAFSRAT

SEQ ID NO: 6541 - protein, 9 aa, Artificial Sequence
  Description of Artificial Sequence: Synthetic peptide
  XENP019938 vlCDR3
QQYGSSPWT

SEQ ID NO: 6542 - protein, 246 aa, Artificial Sequence
  Description of Artificial Sequence: Synthetic polypeptide
  XENP019939 [CTLA-4]_H0_L0.51_scFv(GKPGS)4
QVQLVESGGGVVQPGRSLRLSCAASGFTFSSYTMHWVRQAPGKGLEWVTFISYDGNNKYYADSVKGRFTISRDNSKNTLYLQMNSLRAEDTAIYYCARTGWLGPFDYWGQGTLVTVSSGKPGSGKPGSGKPGSGKPGSEIVLTQSPGTLSLSPGERATLSCRASQSVGSSYLAWYQQKPDQAPRLLIYGAFSRATGIPDRFSGSGSGTDFTLTISRLEPEDFAVYYCQQYGSSPWTFGQGTKVEIK

SEQ ID NO: 6543 - protein, 118 aa, Artificial Sequence; identical to SEQ ID NO: 3737
  Description of Artificial Sequence: Synthetic polypeptide
  VH of XENP019939

SEQ ID NO: 6544 - protein, 108 aa, Artificial Sequence; identical to SEQ ID NO: 4717
  Description of Artificial Sequence: Synthetic polypeptide
  VL of XENP019939

SEQ ID NO: 6545 - protein, 5 aa, Artificial Sequence
  Description of Artificial Sequence: Synthetic peptide
  XENP019939 vhCDR1
SYTMH

SEQ ID NO: 6546 - protein, 17 aa, Artificial Sequence
  Description of Artificial Sequence: Synthetic peptide
  XENP019939 vhCDR2
FISYDGNNKYYADSVKG

SEQ ID NO: 6547 - protein, 9 aa, Artificial Sequence
  Description of Artificial Sequence: Synthetic peptide
  XENP019939 vhCDR3
TGWLGPFDY

SEQ ID NO: 6548 - protein, 12 aa, Artificial Sequence
  Description of Artificial Sequence: Synthetic peptide
  XENP019939 vlCDR1
RASQSVGSSYLA

SEQ ID NO: 6549 - protein, 7 aa, Artificial Sequence
  Description of Artificial Sequence: Synthetic peptide
  XENP019939 vlCDR2
GAFSRAT

SEQ ID NO: 6550 - protein, 9 aa, Artificial Sequence
  Description of Artificial Sequence: Synthetic peptide
  XENP019939 vlCDR3
QQYGSSPWT

SEQ ID NO: 6551 - protein, 246 aa, Artificial Sequence
  Description of Artificial Sequence: Synthetic polypeptide
  XENP019940 [CTLA-4]_H0_L0.52_scFv(GKPGS)4
QVQLVESGGGVVQPGRSLRLSCAASGFTFSSYTMHWVRQAPGKGLEWVTFISYDGNNKYYADSVKGRFTISRDNSKNTLYLQMNSLRAEDTAIYYCARTGWLGPFDYWGQGTLVTVSSGKPGSGKPGSGKPGSGKPGSEIVLTQSPGTLSLSPGERATLSCRASQSVGSSYLAWYQQKPEQAPRLLIYGAFSRATGIPDRFSGSGSGTDFTLTISRLEPEDFAVYYCQQYGSSPWTFGQGTKVEIK

SEQ ID NO: 6552 - protein, 118 aa, Artificial Sequence; identical to SEQ ID NO: 3737
  Description of Artificial Sequence: Synthetic polypeptide
  VH of XENP019940

SEQ ID NO: 6553 - protein, 108 aa, Artificial Sequence
  Description of Artificial Sequence: Synthetic polypeptide
  VL of XENP019940
EIVLTQSPGTLSLSPGERATLSCRASQSVGSSYLAWYQQKPEQAPRLLIYGAFSRATGIPDRFSGSGSGTDFTLTISRLEPEDFAVYYCQQYGSSPWTFGQGTKVEIK

SEQ ID NO: 6554 - protein, 5 aa, Artificial Sequence
  Description of Artificial Sequence: Synthetic peptide
  XENP019940 vhCDR1
SYTMH

SEQ ID NO: 6555 - protein, 17 aa, Artificial Sequence
  Description of Artificial Sequence: Synthetic peptide
  XENP019940 vhCDR2
FISYDGNNKYYADSVKG

SEQ ID NO: 6556 - protein, 9 aa, Artificial Sequence
  Description of Artificial Sequence: Synthetic peptide
  XENP019940 vhCDR3
TGWLGPFDY

SEQ ID NO: 6557 - protein, 12 aa, Artificial Sequence
  Description of Artificial Sequence: Synthetic peptide
  XENP019940 vlCDR1
RASQSVGSSYLA

SEQ ID NO: 6558 - protein, 7 aa, Artificial Sequence
  Description of Artificial Sequence: Synthetic peptide
  XENP019940 vlCDR2
GAFSRAT

SEQ ID NO: 6559 - protein, 9 aa, Artificial Sequence
  Description of Artificial Sequence: Synthetic peptide
  XENP019940 vlCDR3
QQYGSSPWT

SEQ ID NO: 6560 - protein, 246 aa, Artificial Sequence
  Description of Artificial Sequence: Synthetic polypeptide
  XENP019941 [CTLA-4]_H0_L0.53_scFv(GKPGS)4
QVQLVESGGGVVQPGRSLRLSCAASGFTFSSYTMHWVRQAPGKGLEWVTFISYDGNNKYYADSVKGRFTISRDNSKNTLYLQMNSLRAEDTAIYYCARTGWLGPFDYWGQGTLVTVSSGKPGSGKPGSGKPGSGKPGSEIVLTQSPGTLSLSPGERATLSCRASQSVGSSYLAWYQQKPGEAPRLLIYGAFSRATGIPDRFSGSGSGTDFTLTISRLEPEDFAVYYCQQYGSSPWTFGQGTKVEIK

SEQ ID NO: 6561 - protein, 118 aa, Artificial Sequence; identical to SEQ ID NO: 3737
  Description of Artificial Sequence: Synthetic polypeptide
  VH of XENP019941

SEQ ID NO: 6562 - protein, 108 aa, Artificial Sequence; identical to SEQ ID NO: 4753
  Description of Artificial Sequence: Synthetic polypeptide
  VL of XENP019941

SEQ ID NO: 6563 - protein, 5 aa, Artificial Sequence
  Description of Artificial Sequence: Synthetic peptide
  XENP019941 vhCDR1
SYTMH

SEQ ID NO: 6564 - protein, 17 aa, Artificial Sequence
  Description of Artificial Sequence: Synthetic peptide
  XENP019941 vhCDR2
FISYDGNNKYYADSVKG

SEQ ID NO: 6565 - protein, 9 aa, Artificial Sequence
  Description of Artificial Sequence: Synthetic peptide
  XENP019941 vhCDR3
TGWLGPFDY

SEQ ID NO: 6566 - protein, 12 aa, Artificial Sequence
  Description of Artificial Sequence: Synthetic peptide
  XENP019941 vlCDR1
RASQSVGSSYLA

SEQ ID NO: 6567 - protein, 7 aa, Artificial Sequence
  Description of Artificial Sequence: Synthetic peptide
  XENP019941 vlCDR2
GAFSRAT

SEQ ID NO: 6568 - protein, 9 aa, Artificial Sequence
  Description of Artificial Sequence: Synthetic peptide
  XENP019941 vlCDR3
QQYGSSPWT

SEQ ID NO: 6569 - protein, 246 aa, Artificial Sequence
  Description of Artificial Sequence: Synthetic polypeptide
  XENP019942 [CTLA-4]_H0_L0.54_scFv(GKPGS)4
QVQLVESGGGVVQPGRSLRLSCAASGFTFSSYTMHWVRQAPGKGLEWVTFISYDGNNKYYADSVKGRFTISRDNSKNTLYLQMNSLRAEDTAIYYCARTGWLGPFDYWGQGTLVTVSSGKPGSGKPGSGKPGSGKPGSEIVLTQSPGTLSLSPGERATLSCRASQSVGSSYLAWYQQKPGKAPRLLIYGAFSRATGIPDRFSGSGSGTDFTLTISRLEPEDFAVYYCQQYGSSPWTFGQGTKVEIK

SEQ ID NO: 6570 - protein, 118 aa, Artificial Sequence; identical to SEQ ID NO: 3737
  Description of Artificial Sequence: Synthetic polypeptide
  VH of XENP019942

SEQ ID NO: 6571 - protein, 108 aa, Artificial Sequence
  Description of Artificial Sequence: Synthetic polypeptide
  VL of XENP019942
EIVLTQSPGTLSLSPGERATLSCRASQSVGSSYLAWYQQKPGKAPRLLIYGAFSRATGIPDRFSGSGSGTDFTLTISRLEPEDFAVYYCQQYGSSPWTFGQGTKVEIK

SEQ ID NO: 6572 - protein, 5 aa, Artificial Sequence
  Description of Artificial Sequence: Synthetic peptide
  XENP019942 vhCDR1
SYTMH

SEQ ID NO: 6573 - protein, 17 aa, Artificial Sequence
  Description of Artificial Sequence: Synthetic peptide
  XENP019942 vhCDR2
FISYDGNNKYYADSVKG

SEQ ID NO: 6574 - protein, 9 aa, Artificial Sequence
  Description of Artificial Sequence: Synthetic peptide
  XENP019942 vhCDR3
TGWLGPFDY

SEQ ID NO: 6575 - protein, 12 aa, Artificial Sequence
  Description of Artificial Sequence: Synthetic peptide
  XENP019942 vlCDR1
RASQSVGSSYLA

SEQ ID NO: 6576 - protein, 7 aa, Artificial Sequence
  Description of Artificial Sequence: Synthetic peptide
  XENP019942 vlCDR2
GAFSRAT

SEQ ID NO: 6577 - protein, 9 aa, Artificial Sequence
  Description of Artificial Sequence: Synthetic peptide
  XENP019942 vlCDR3
QQYGSSPWT

SEQ ID NO: 6578 - protein, 246 aa, Artificial Sequence
  Description of Artificial Sequence: Synthetic polypeptide
  XENP019943 [CTLA-4]_H0_L0.55_scFv(GKPGS)4
QVQLVESGGGVVQPGRSLRLSCAASGFTFSSYTMHWVRQAPGKGLEWVTFISYDGNNKYYADSVKGRFTISRDNSKNTLYLQMNSLRAEDTAIYYCARTGWLGPFDYWGQGTLVTVSSGKPGSGKPGSGKPGSGKPGSEIVLTQSPGTLSLSPGERATLSCRASQSVGSSYLAWYQQKPGKSPRLLIYGAFSRATGIPDRFSGSGSGTDFTLTISRLEPEDFAVYYCQQYGSSPWTFGQGTKVEIK

SEQ ID NO: 6579 - protein, 118 aa, Artificial Sequence; identical to SEQ ID NO: 3737
  Description of Artificial Sequence: Synthetic polypeptide
  VH of XENP019943

SEQ ID NO: 6580 - protein, 108 aa, Artificial Sequence
  Description of Artificial Sequence: Synthetic polypeptide
  VL of XENP019943
EIVLTQSPGTLSLSPGERATLSCRASQSVGSSYLAWYQQKPGKSPRLLIYGAFSRATGIPDRFSGSGSGTDFTLTISRLEPEDFAVYYCQQYGSSPWTFGQGTKVEIK

SEQ ID NO: 6581 - protein, 5 aa, Artificial Sequence
  Description of Artificial Sequence: Synthetic peptide
  XENP019943 vhCDR1
SYTMH

SEQ ID NO: 6582 - protein, 17 aa, Artificial Sequence
  Description of Artificial Sequence: Synthetic peptide
  XENP019943 vhCDR2
FISYDGNNKYYADSVKG

SEQ ID NO: 6583 - protein, 9 aa, Artificial Sequence
  Description of Artificial Sequence: Synthetic peptide
  XENP019943 vhCDR3
TGWLGPFDY

SEQ ID NO: 6584 - protein, 12 aa, Artificial Sequence
  Description of Artificial Sequence: Synthetic peptide
  XENP019943 vlCDR1
RASQSVGSSYLA

SEQ ID NO: 6585 - protein, 7 aa, Artificial Sequence
  Description of Artificial Sequence: Synthetic peptide
  XENP019943 vlCDR2
GAFSRAT

SEQ ID NO: 6586 - protein, 9 aa, Artificial Sequence
  Description of Artificial Sequence: Synthetic peptide
  XENP019943 vlCDR3
QQYGSSPWT

SEQ ID NO: 6587 - protein, 246 aa, Artificial Sequence
  Description of Artificial Sequence: Synthetic polypeptide
  XENP019944 [CTLA-4]_H0_L0.56_scFv(GKPGS)4
QVQLVESGGGVVQPGRSLRLSCAASGFTFSSYTMHWVRQAPGKGLEWVTFISYDGNNKYYADSVKGRFTISRDNSKNTLYLQMNSLRAEDTAIYYCARTGWLGPFDYWGQGTLVTVSSGKPGSGKPGSGKPGSGKPGSEIVLTQSPGTLSLSPGERATLSCRASQSVGSSYLAWYQQKPGQSPRLLIYGAFSRATGIPDRFSGSGSGTDFTLTISRLEPEDFAVYYCQQYGSSPWTFGQGTKVEIK

SEQ ID NO: 6588 - protein, 118 aa, Artificial Sequence; identical to SEQ ID NO: 3737
  Description of Artificial Sequence: Synthetic polypeptide
  VH of XENP019944

SEQ ID NO: 6589 - protein, 108 aa, Artificial Sequence
  Description of Artificial Sequence: Synthetic polypeptide
  VL of XENP019944
EIVLTQSPGTLSLSPGERATLSCRASQSVGSSYLAWYQQKPGQSPRLLIYGAFSRATGIPDRFSGSGSGTDFTLTISRLEPEDFAVYYCQQYGSSPWTFGQGTKVEIK

SEQ ID NO: 6590 - protein, 5 aa, Artificial Sequence
  Description of Artificial Sequence: Synthetic peptide
  XENP019944 vhCDR1
SYTMH

SEQ ID NO: 6591 - protein, 17 aa, Artificial Sequence
  Description of Artificial Sequence: Synthetic peptide
  XENP019944 vhCDR2
FISYDGNNKYYADSVKG

SEQ ID NO: 6592 - protein, 9 aa, Artificial Sequence
  Description of Artificial Sequence: Synthetic peptide
  XENP019944 vhCDR3
TGWLGPFDY

SEQ ID NO: 6593 - protein, 12 aa, Artificial Sequence
  Description of Artificial Sequence: Synthetic peptide
  XENP019944 vlCDR1
RASQSVGSSYLA

SEQ ID NO: 6594 - protein, 7 aa, Artificial Sequence
  Description of Artificial Sequence: Synthetic peptide
  XENP019944 vlCDR2
GAFSRAT

SEQ ID NO: 6595 - protein, 9 aa, Artificial Sequence
  Description of Artificial Sequence: Synthetic peptide
  XENP019944 vlCDR3
QQYGSSPWT

SEQ ID NO: 6596 - protein, 246 aa, Artificial Sequence
  Description of Artificial Sequence: Synthetic polypeptide
  XENP019945 [CTLA-4]_H0_L0.57_scFv(GKPGS)4
QVQLVESGGGVVQPGRSLRLSCAASGFTFSSYTMHWVRQAPGKGLEWVTFISYDGNNKYYADSVKGRFTISRDNSKNTLYLQMNSLRAEDTAIYYCARTGWLGPFDYWGQGTLVTVSSGKPGSGKPGSGKPGSGKPGSEIVLTQSPGTLSLSPGERATLSCRASQSVGSSYLAWYQQKPGQAPELLIYGAFSRATGIPDRFSGSGSGTDFTLTISRLEPEDFAVYYCQQYGSSPWTFGQGTKVEIK

SEQ ID NO: 6597 - protein, 118 aa, Artificial Sequence; identical to SEQ ID NO: 3737
  Description of Artificial Sequence: Synthetic polypeptide
  VH of XENP019945

SEQ ID NO: 6598 - protein, 108 aa, Artificial Sequence; identical to SEQ ID NO: 4762
  Description of Artificial Sequence: Synthetic polypeptide
  VL of XENP019945

SEQ ID NO: 6599 - protein, 5 aa, Artificial Sequence
  Description of Artificial Sequence: Synthetic peptide
  XENP019945 vhCDR1
SYTMH

SEQ ID NO: 6600 - protein, 17 aa, Artificial Sequence
  Description of Artificial Sequence: Synthetic peptide
  XENP019945 vhCDR2
FISYDGNNKYYADSVKG

SEQ ID NO: 6601 - protein, 9 aa, Artificial Sequence
  Description of Artificial Sequence: Synthetic peptide
  XENP019945 vhCDR3
TGWLGPFDY

SEQ ID NO: 6602 - protein, 12 aa, Artificial Sequence
  Description of Artificial Sequence: Synthetic peptide
  XENP019945 vlCDR1
RASQSVGSSYLA

SEQ ID NO: 6603 - protein, 7 aa, Artificial Sequence
  Description of Artificial Sequence: Synthetic peptide
  XENP019945 vlCDR2
GAFSRAT

SEQ ID NO: 6604 - protein, 9 aa, Artificial Sequence
  Description of Artificial Sequence: Synthetic peptide
  XENP019945 vlCDR3
QQYGSSPWT

SEQ ID NO: 6605 - protein, 246 aa, Artificial Sequence
  Description of Artificial Sequence: Synthetic polypeptide
  XENP019946 [CTLA-4]_H0_L0.58_scFv(GKPGS)4
QVQLVESGGGVVQPGRSLRLSCAASGFTFSSYTMHWVRQAPGKGLEWVTFISYDGNNKYYADSVKGRFTISRDNSKNTLYLQMNSLRAEDTAIYYCARTGWLGPFDYWGQGTLVTVSSGKPGSGKPGSGKPGSGKPGSEIVLTQSPGTLSLSPGERATLSCRASQSVGSSYLAWYQQKPGQAPELLIYGAFSRATGIPDRFSGSGSGTDFTLTISRLEPQDFAVYYCQQYGSSPWTFGQGTKVEIK

SEQ ID NO: 6606 - protein, 118 aa, Artificial Sequence; identical to SEQ ID NO: 3737
  Description of Artificial Sequence: Synthetic polypeptide
  VH of XENP019946

SEQ ID NO: 6607 - protein, 108 aa, Artificial Sequence
  Description of Artificial Sequence: Synthetic polypeptide
  VL of XENP019946
EIVLTQSPGTLSLSPGERATLSCRASQSVGSSYLAWYQQKPGQAPELLIYGAFSRATGIPDRFSGSGSGTDFTLTISRLEPQDFAVYYCQQYGSSPWTFGQGTKVEIK

SEQ ID NO: 6608 - protein, 5 aa, Artificial Sequence
  Description of Artificial Sequence: Synthetic peptide
  XENP019946 vhCDR1
SYTMH

SEQ ID NO: 6609 - protein, 17 aa, Artificial Sequence
  Description of Artificial Sequence: Synthetic peptide
  XENP019946 vhCDR2
FISYDGNNKYYADSVKG

SEQ ID NO: 6610 - protein, 9 aa, Artificial Sequence
  Description of Artificial Sequence: Synthetic peptide
  XENP019946 vhCDR3
TGWLGPFDY

SEQ ID NO: 6611 - protein, 12 aa, Artificial Sequence
  Description of Artificial Sequence: Synthetic peptide
  XENP019946 vlCDR1
RASQSVGSSYLA

SEQ ID NO: 6612 - protein, 7 aa, Artificial Sequence
  Description of Artificial Sequence: Synthetic peptide
  XENP019946 vlCDR2
GAFSRAT

SEQ ID NO: 6613 - protein, 9 aa, Artificial Sequence
  Description of Artificial Sequence: Synthetic peptide
  XENP019946 vlCDR3
QQYGSSPWT

SEQ ID NO: 6614 - protein, 246 aa, Artificial Sequence
  Description of Artificial Sequence: Synthetic polypeptide
  XENP019947 [CTLA-4]_H0_L0.59_scFv(GKPGS)4
QVQLVESGGGVVQPGRSLRLSCAASGFTFSSYTMHWVRQAPGKGLEWVTFISYDGNNKYYADSVKGRFTISRDNSKNTLYLQMNSLRAEDTAIYYCARTGWLGPFDYWGQGTLVTVSSGKPGSGKPGSGKPGSGKPGSEIVLTQSPGTLSLSPGERATLSCRASQSVGSSYLAWYQQKPGQAPKLLIYGAFSRATGIPDRFSGSGSGTDFTLTISRLEPEDFAVYYCQQYGSSPWTFGQGTKVEIK

SEQ ID NO: 6615 - protein, 118 aa, Artificial Sequence; identical to SEQ ID NO: 3737
  Description of Artificial Sequence: Synthetic polypeptide
  VH of XENP019947

SEQ ID NO: 6616 - protein, 108 aa, Artificial Sequence
  Description of Artificial Sequence: Synthetic polypeptide
  VL of XENP019947
EIVLTQSPGTLSLSPGERATLSCRASQSVGSSYLAWYQQKPGQAPKLLIYGAFSRATGIPDRFSGSGSGTDFTLTISRLEPEDFAVYYCQQYGSSPWTFGQGTKVEIK

SEQ ID NO: 6617 - protein, 5 aa, Artificial Sequence
  Description of Artificial Sequence: Synthetic peptide
  XENP019947 vhCDR1
SYTMH

SEQ ID NO: 6618 - protein, 17 aa, Artificial Sequence
  Description of Artificial Sequence: Synthetic peptide
  XENP019947 vhCDR2
FISYDGNNKYYADSVKG

SEQ ID NO: 6619 - protein, 9 aa, Artificial Sequence
  Description of Artificial Sequence: Synthetic peptide
  XENP019947 vhCDR3
TGWLGPFDY

SEQ ID NO: 6620 - protein, 12 aa, Artificial Sequence
  Description of Artificial Sequence: Synthetic peptide
  XENP019947 vlCDR1
RASQSVGSSYLA

SEQ ID NO: 6621 - protein, 7 aa, Artificial Sequence
  Description of Artificial Sequence: Synthetic peptide
  XENP019947 vlCDR2
GAFSRAT

SEQ ID NO: 6622 - protein, 9 aa, Artificial Sequence
  Description of Artificial Sequence: Synthetic peptide
  XENP019947 vlCDR3
QQYGSSPWT

SEQ ID NO: 6623 - protein, 246 aa, Artificial Sequence
  Description of Artificial Sequence: Synthetic polypeptide
  XENP019948 [CTLA-4]_H0_L0.60_scFv(GKPGS)4
QVQLVESGGGVVQPGRSLRLSCAASGFTFSSYTMHWVRQAPGKGLEWVTFISYDGNNKYYADSVKGRFTISRDNSKNTLYLQMNSLRAEDTAIYYCARTGWLGPFDYWGQGTLVTVSSGKPGSGKPGSGKPGSGKPGSEIVLTQSPGTLSLSPGERATLSCRASQSVGSSYLAWYQQKPGQAPRRLIYGAFSRATGIPDRFSGSGSGTDFTLTISRLEPEDFAVYYCQQYGSSPWTFGQGTKVEIK

SEQ ID NO: 6624 - protein, 118 aa, Artificial Sequence; identical to SEQ ID NO: 3737
  Description of Artificial Sequence: Synthetic polypeptide
  VH of XENP019948

SEQ ID NO: 6625 - protein, 108 aa, Artificial Sequence
  Description of Artificial Sequence: Synthetic polypeptide
  VL of XENP019948
EIVLTQSPGTLSLSPGERATLSCRASQSVGSSYLAWYQQKPGQAPRRLIYGAFSRATGIPDRFSGSGSGTDFTLTISRLEPEDFAVYYCQQYGSSPWTFGQGTKVEIK

SEQ ID NO: 6626 - protein, 5 aa, Artificial Sequence
  Description of Artificial Sequence: Synthetic peptide
  XENP019948 vhCDR1
SYTMH

SEQ ID NO: 6627 - protein, 17 aa, Artificial Sequence
  Description of Artificial Sequence: Synthetic peptide
  XENP019948 vhCDR2
FISYDGNNKYYADSVKG

SEQ ID NO: 6628 - protein, 9 aa, Artificial Sequence
  Description of Artificial Sequence: Synthetic peptide
  XENP019948 vhCDR3
TGWLGPFDY

SEQ ID NO: 6629 - protein, 12 aa, Artificial Sequence
  Description of Artificial Sequence: Synthetic peptide
  XENP019948 vlCDR1
RASQSVGSSYLA

SEQ ID NO: 6630 - protein, 7 aa, Artificial Sequence
  Description of Artificial Sequence: Synthetic peptide
  XENP019948 vlCDR2
GAFSRAT

SEQ ID NO: 6631 - protein, 9 aa, Artificial Sequence
  Description of Artificial Sequence: Synthetic peptide
  XENP019948 vlCDR3
QQYGSSPWT

SEQ ID NO: 6632 - protein, 246 aa, Artificial Sequence
  Description of Artificial Sequence: Synthetic polypeptide
  XENP019949 [CTLA-4]_H0_L0.61_scFv(GKPGS)4
QVQLVESGGGVVQPGRSLRLSCAASGFTFSSYTMHWVRQAPGKGLEWVTFISYDGNNKYYADSVKGRFTISRDNSKNTLYLQMNSLRAEDTAIYYCARTGWLGPFDYWGQGTLVTVSSGKPGSGKPGSGKPGSGKPGSEIVLTQSPGTLSLSPGERATLSCRASQSVGSSYLAWYQQKPGQAPRRLIYGAFSRDTGIPDRFSGSGSGTDFTLTISRLEPEDFAVYYCQQYGSSPWTFGQGTKVEIK

SEQ ID NO: 6633 - protein, 118 aa, Artificial Sequence; identical to SEQ ID NO: 3737
  Description of Artificial Sequence: Synthetic polypeptide
  VH of XENP019949

SEQ ID NO: 6634 - protein, 108 aa, Artificial Sequence
  Description of Artificial Sequence: Synthetic polypeptide
  VL of XENP019949
EIVLTQSPGTLSLSPGERATLSCRASQSVGSSYLAWYQQKPGQAPRRLIYGAFSRDTGIPDRFSGSGSGTDFTLTISRLEPEDFAVYYCQQYGSSPWTFGQGTKVEIK

SEQ ID NO: 6635 - protein, 5 aa, Artificial Sequence
  Description of Artificial Sequence: Synthetic peptide
  XENP019949 vhCDR1
SYTMH

SEQ ID NO: 6636 - protein, 17 aa, Artificial Sequence
  Description of Artificial Sequence: Synthetic peptide
  XENP019949 vhCDR2
FISYDGNNKYYADSVKG

SEQ ID NO: 6637 - protein, 9 aa, Artificial Sequence
  Description of Artificial Sequence: Synthetic peptide
  XENP019949 vhCDR3
TGWLGPFDY

SEQ ID NO: 6638 - protein, 12 aa, Artificial Sequence
  Description of Artificial Sequence: Synthetic peptide
  XENP019949 vlCDR1
RASQSVGSSYLA

SEQ ID NO: 6639 - protein, 7 aa, Artificial Sequence
  Description of Artificial Sequence: Synthetic peptide
  XENP019949 vlCDR2
GAFSRDT

SEQ ID NO: 6640 - protein, 9 aa, Artificial Sequence
  Description of Artificial Sequence: Synthetic peptide
  XENP019949 vlCDR3
QQYGSSPWT

SEQ ID NO: 6641 - protein, 246 aa, Artificial Sequence
  Description of Artificial Sequence: Synthetic polypeptide
  XENP019950 [CTLA-4]_H0_L0.62_scFv(GKPGS)4
QVQLVESGGGVVQPGRSLRLSCAASGFTFSSYTMHWVRQAPGKGLEWVTFISYDGNNKYYADSVKGRFTISRDNSKNTLYLQMNSLRAEDTAIYYCARTGWLGPFDYWGQGTLVTVSSGKPGSGKPGSGKPGSGKPGSEIVLTQSPGTLSLSPGERATLSCRASQSVGSSYLAWYQQKPGQAPRLLIAGAFSRATGIPDRFSGSGSGTDFTLTISRLEPEDFAVYYCQQYGSSPWTFGQGTKVEIK

SEQ ID NO: 6642 - protein, 118 aa, Artificial Sequence; identical to SEQ ID NO: 3737
  Description of Artificial Sequence: Synthetic polypeptide
  VH of XENP019950

SEQ ID NO: 6643 - protein, 108 aa, Artificial Sequence
  Description of Artificial Sequence: Synthetic polypeptide
  VL of XENP019950
EIVLTQSPGTLSLSPGERATLSCRASQSVGSSYLAWYQQKPGQAPRLLIAGAFSRATGIPDRFSGSGSGTDFTLTISRLEPEDFAVYYCQQYGSSPWTFGQGTKVEIK

SEQ ID NO: 6644 - protein, 5 aa, Artificial Sequence
  Description of Artificial Sequence: Synthetic peptide
  XENP019950 vhCDR1
SYTMH

SEQ ID NO: 6645 - protein, 17 aa, Artificial Sequence
  Description of Artificial Sequence: Synthetic peptide
  XENP019950 vhCDR2
FISYDGNNKYYADSVKG

SEQ ID NO: 6646 - protein, 9 aa, Artificial Sequence
  Description of Artificial Sequence: Synthetic peptide
  XENP019950 vhCDR3
TGWLGPFDY

SEQ ID NO: 6647 - protein, 12 aa, Artificial Sequence
  Description of Artificial Sequence: Synthetic peptide
  XENP019950 vlCDR1
RASQSVGSSYLA

SEQ ID NO: 6648 - protein, 7 aa, Artificial Sequence
  Description of Artificial Sequence: Synthetic peptide
  XENP019950 vlCDR2
GAFSRAT

SEQ ID NO: 6649 - protein, 9 aa, Artificial Sequence
  Description of Artificial Sequence: Synthetic peptide
  XENP019950 vlCDR3
QQYGSSPWT

SEQ ID NO: 6650 - protein, 246 aa, Artificial Sequence
  Description of Artificial Sequence: Synthetic polypeptide
  XENP019951 [CTLA-4]_H0_L0.63_scFv(GKPGS)4
QVQLVESGGGVVQPGRSLRLSCAASGFTFSSYTMHWVRQAPGKGLEWVTFISYDGNNKYYADSVKGRFTISRDNSKNTLYLQMNSLRAEDTAIYYCARTGWLGPFDYWGQGTLVTVSSGKPGSGKPGSGKPGSGKPGSEIVLTQSPGTLSLSPGERATLSCRASQSVGSSYLAWYQQKPGQAPRLLIFGAFSRATGIPDRFSGSGSGTDFTLTISRLEPEDFAVYYCQQYGSSPWTFGQGTKVEIK

SEQ ID NO: 6651 - protein, 118 aa, Artificial Sequence; identical to SEQ ID NO: 3737
  Description of Artificial Sequence: Synthetic polypeptide
  VH of XENP019951

SEQ ID NO: 6652 - protein, 108 aa, Artificial Sequence
  Description of Artificial Sequence: Synthetic polypeptide
  VL of XENP019951
EIVLTQSPGTLSLSPGERATLSCRASQSVGSSYLAWYQQKPGQAPRLLIFGAFSRATGIPDRFSGSGSGTDFTLTISRLEPEDFAVYYCQQYGSSPWTFGQGTKVEIK

SEQ ID NO: 6653 - protein, 5 aa, Artificial Sequence
  Description of Artificial Sequence: Synthetic peptide
  XENP019951 vhCDR1
SYTMH

SEQ ID NO: 6654 - protein, 17 aa, Artificial Sequence
  Description of Artificial Sequence: Synthetic peptide
  XENP019951 vhCDR2
FISYDGNNKYYADSVKG

SEQ ID NO: 6655 - protein, 9 aa, Artificial Sequence
  Description of Artificial Sequence: Synthetic peptide
  XENP019951 vhCDR3
TGWLGPFDY

SEQ ID NO: 6656 - protein, 12 aa, Artificial Sequence
  Description of Artificial Sequence: Synthetic peptide
  XENP019951 vlCDR1
RASQSVGSSYLA

SEQ ID NO: 6657 - protein, 7 aa, Artificial Sequence
  Description of Artificial Sequence: Synthetic peptide
  XENP019951 vlCDR2
GAFSRAT

SEQ ID NO: 6658 - protein, 9 aa, Artificial Sequence
  Description of Artificial Sequence: Synthetic peptide
  XENP019951 vlCDR3
QQYGSSPWT

SEQ ID NO: 6659 - protein, 246 aa, Artificial Sequence
  Description of Artificial Sequence: Synthetic polypeptide
  XENP019952 [CTLA-4]_H0_L0.64_scFv(GKPGS)4
QVQLVESGGGVVQPGRSLRLSCAASGFTFSSYTMHWVRQAPGKGLEWVTFISYDGNNKYYADSVKGRFTISRDNSKNTLYLQMNSLRAEDTAIYYCARTGWLGPFDYWGQGTLVTVSSGKPGSGKPGSGKPGSGKPGSEIVLTQSPGTLSLSPGERATLSCRASQSVGSSYLAWYQQKPGQAPRLLIHGAFSRATGIPDRFSGSGSGTDFTLTISRLEPEDFAVYYCQQYGSSPWTFGQGTKVEIK

SEQ ID NO: 6660 - protein, 118 aa, Artificial Sequence; identical to SEQ ID NO: 3737
  Description of Artificial Sequence: Synthetic polypeptide
  VH of XENP019952

SEQ ID NO: 6661 - protein, 108 aa, Artificial Sequence
  Description of Artificial Sequence: Synthetic polypeptide
  VL of XENP019952
EIVLTQSPGTLSLSPGERATLSCRASQSVGSSYLAWYQQKPGQAPRLLIHGAFSRATGIPDRFSGSGSGTDFTLTISRLEPEDFAVYYCQQYGSSPWTFGQGTKVEIK

SEQ ID NO: 6662 - protein, 5 aa, Artificial Sequence
  Description of Artificial Sequence: Synthetic peptide
  XENP019952 vhCDR1
SYTMH

SEQ ID NO: 6663 - protein, 17 aa, Artificial Sequence
  Description of Artificial Sequence: Synthetic peptide
  XENP019952 vhCDR2
FISYDGNNKYYADSVKG

SEQ ID NO: 6664 - protein, 9 aa, Artificial Sequence
  Description of Artificial Sequence: Synthetic peptide
  XENP019952 vhCDR3
TGWLGPFDY

SEQ ID NO: 6665 - protein, 12 aa, Artificial Sequence
  Description of Artificial Sequence: Synthetic peptide
  XENP019952 vlCDR1
RASQSVGSSYLA

SEQ ID NO: 6666 - protein, 7 aa, Artificial Sequence
  Description of Artificial Sequence: Synthetic peptide
  XENP019952 vlCDR2
GAFSRAT

SEQ ID NO: 6667 - protein, 9 aa, Artificial Sequence
  Description of Artificial Sequence: Synthetic peptide
  XENP019952 vlCDR3
QQYGSSPWT

SEQ ID NO: 6668 - protein, 246 aa, Artificial Sequence
  Description of Artificial Sequence: Synthetic polypeptide
  XENP019953 [CTLA-4]_H0_L0.65_scFv(GKPGS)4
QVQLVESGGGVVQPGRSLRLSCAASGFTFSSYTMHWVRQAPGKGLEWVTFISYDGNNKYYADSVKGRFTISRDNSKNTLYLQMNSLRAEDTAIYYCARTGWLGPFDYWGQGTLVTVSSGKPGSGKPGSGKPGSGKPGSEIVLTQSPGTLSLSPGERATLSCRASQSVGSSYLAWYQQKPGQAPRLLILGAFSRATGIPDRFSGSGSGTDFTLTISRLEPEDFAVYYCQQYGSSPWTFGQGTKVEIK

SEQ ID NO: 6669 - protein, 118 aa, Artificial Sequence; identical to SEQ ID NO: 3737
  Description of Artificial Sequence: Synthetic polypeptide
  VH of XENP019953

SEQ ID NO: 6670 - protein, 108 aa, Artificial Sequence
  Description of Artificial Sequence: Synthetic polypeptide
  VL of XENP019953
EIVLTQSPGTLSLSPGERATLSCRASQSVGSSYLAWYQQKPGQAPRLLILGAFSRATGIPDRFSGSGSGTDFTLTISRLEPEDFAVYYCQQYGSSPWTFGQGTKVEIK

SEQ ID NO: 6671 - protein, 5 aa, Artificial Sequence
  Description of Artificial Sequence: Synthetic peptide
  XENP019953 vhCDR1
SYTMH

SEQ ID NO: 6672 - protein, 17 aa, Artificial Sequence
  Description of Artificial Sequence: Synthetic peptide
  XENP019953 vhCDR2
FISYDGNNKYYADSVKG

SEQ ID NO: 6673 - protein, 9 aa, Artificial Sequence
  Description of Artificial Sequence: Synthetic peptide
  XENP019953 vhCDR3
TGWLGPFDY

SEQ ID NO: 6674 - protein, 12 aa, Artificial Sequence
  Description of Artificial Sequence: Synthetic peptide
  XENP019953 vlCDR1
RASQSVGSSYLA

SEQ ID NO: 6675 - protein, 7 aa, Artificial Sequence
  Description of Artificial Sequence: Synthetic peptide
  XENP019953 vlCDR2
GAFSRAT

SEQ ID NO: 6676 - protein, 9 aa, Artificial Sequence
  Description of Artificial Sequence: Synthetic peptide
  XENP019953 vlCDR3
QQYGSSPWT

SEQ ID NO: 6677 - protein, 246 aa, Artificial Sequence
  Description of Artificial Sequence: Synthetic polypeptide
  XENP019954 [CTLA-4]_H0_L0.66_scFv(GKPGS)4
QVQLVESGGGVVQPGRSLRLSCAASGFTFSSYTMHWVRQAPGKGLEWVTFISYDGNNKYYADSVKGRFTISRDNSKNTLYLQMNSLRAEDTAIYYCARTGWLGPFDYWGQGTLVTVSSGKPGSGKPGSGKPGSGKPGSEIVLTQSPGTLSLSPGERATLSCRASQSVGSSYLAWYQQKPGQAPRLLIVGAFSRATGIPDRFSGSGSGTDFTLTISRLEPEDFAVYYCQQYGSSPWTFGQGTKVEIK

SEQ ID NO: 6678 - protein, 118 aa, Artificial Sequence; identical to SEQ ID NO: 3737
  Description of Artificial Sequence: Synthetic polypeptide
  VH of XENP019954

SEQ ID NO: 6679 - protein, 108 aa, Artificial Sequence
  Description of Artificial Sequence: Synthetic polypeptide
  VL of XENP019954
EIVLTQSPGTLSLSPGERATLSCRASQSVGSSYLAWYQQKPGQAPRLLIVGAFSRATGIPDRFSGSGSGTDFTLTISRLEPEDFAVYYCQQYGSSPWTFGQGTKVEIK

SEQ ID NO: 6680 - protein, 5 aa, Artificial Sequence
  Description of Artificial Sequence: Synthetic peptide
  XENP019954 vhCDR1
SYTMH

SEQ ID NO: 6681 - protein, 17 aa, Artificial Sequence
  Description of Artificial Sequence: Synthetic peptide
  XENP019954 vhCDR2
FISYDGNNKYYADSVKG

SEQ ID NO: 6682 - protein, 9 aa, Artificial Sequence
  Description of Artificial Sequence: Synthetic peptide
  XENP019954 vhCDR3
TGWLGPFDY

SEQ ID NO: 6683 - protein, 12 aa, Artificial Sequence
  Description of Artificial Sequence: Synthetic peptide
  XENP019954 vlCDR1
RASQSVGSSYLA

SEQ ID NO: 6684 - protein, 7 aa, Artificial Sequence
  Description of Artificial Sequence: Synthetic peptide
  XENP019954 vlCDR2
GAFSRAT

SEQ ID NO: 6685 - protein, 9 aa, Artificial Sequence
  Description of Artificial Sequence: Synthetic peptide
  XENP019954 vlCDR3
QQYGSSPWT

SEQ ID NO: 6686 - protein, 246 aa, Artificial Sequence
  Description of Artificial Sequence: Synthetic polypeptide
  XENP019955 [CTLA-4]_H0_L0.67_scFv(GKPGS)4
QVQLVESGGGVVQPGRSLRLSCAASGFTFSSYTMHWVRQAPGKGLEWVTFISYDGNNKYYADSVKGRFTISRDNSKNTLYLQMNSLRAEDTAIYYCARTGWLGPFDYWGQGTLVTVSSGKPGSGKPGSGKPGSGKPGSEIVLTQSPGTLSLSPGERATLSCRASQSVGSSYLAWYQQKPGQAPRLLIYDAFSRATGIPDRFSGSGSGTDFTLTISRLEPEDFAVYYCQQYGSSPWTFGQGTKVEIK

SEQ ID NO: 6687 - protein, 118 aa, Artificial Sequence; identical to SEQ ID NO: 3737
  Description of Artificial Sequence: Synthetic polypeptide
  VH of XENP019955

SEQ ID NO: 6688 - protein, 108 aa, Artificial Sequence
  Description of Artificial Sequence: Synthetic polypeptide
  VL of XENP019955
EIVLTQSPGTLSLSPGERATLSCRASQSVGSSYLAWYQQKPGQAPRLLIYDAFSRATGIPDRFSGSGSGTDFTLTISRLEPEDFAVYYCQQYGSSPWTFGQGTKVEIK

SEQ ID NO: 6689 - protein, 5 aa, Artificial Sequence
  Description of Artificial Sequence: Synthetic peptide
  XENP019955 vhCDR1
SYTMH

SEQ ID NO: 6690 - protein, 17 aa, Artificial Sequence
  Description of Artificial Sequence: Synthetic peptide
  XENP019955 vhCDR2
FISYDGNNKYYADSVKG

SEQ ID NO: 6691 - protein, 9 aa, Artificial Sequence
  Description of Artificial Sequence: Synthetic peptide
  XENP019955 vhCDR3
TGWLGPFDY

SEQ ID NO: 6692 - protein, 12 aa, Artificial Sequence
  Description of Artificial Sequence: Synthetic peptide
  XENP019955 vlCDR1
RASQSVGSSYLA

SEQ ID NO: 6693 - protein, 7 aa, Artificial Sequence
  Description of Artificial Sequence: Synthetic peptide
  XENP019955 vlCDR2
DAFSRAT

SEQ ID NO: 6694 - protein, 9 aa, Artificial Sequence
  Description of Artificial Sequence: Synthetic peptide
  XENP019955 vlCDR3
QQYGSSPWT

SEQ ID NO: 6695 - protein, 246 aa, Artificial Sequence
  Description of Artificial Sequence: Synthetic polypeptide
  XENP019956 [CTLA-4]_H0_L0.68_scFv(GKPGS)4
QVQLVESGGGVVQPGRSLRLSCAASGFTFSSYTMHWVRQAPGKGLEWVTFISYDGNNKYYADSVKGRFTISRDNSKNTLYLQMNSLRAEDTAIYYCARTGWLGPFDYWGQGTLVTVSSGKPGSGKPGSGKPGSGKPGSEIVLTQSPGTLSLSPGERATLSCRASQSVGSSYLAWYQQKPGQAPRLLIYSAFSRATGIPDRFSGSGSGTDFTLTISRLEPEDFAVYYCQQYGSSPWTFGQGTKVEIK

SEQ ID NO: 6696 - protein, 118 aa, Artificial Sequence; identical to SEQ ID NO: 3737
  Description of Artificial Sequence: Synthetic polypeptide
  VH of XENP019956

SEQ ID NO: 6697 - protein, 108 aa, Artificial Sequence
  Description of Artificial Sequence: Synthetic polypeptide
  VL of XENP019956
EIVLTQSPGTLSLSPGERATLSCRASQSVGSSYLAWYQQKPGQAPRLLIYSAFSRATGIPDRFSGSGSGTDFTLTISRLEPEDFAVYYCQQYGSSPWTFGQGTKVEIK

SEQ ID NO: 6698 - protein, 5 aa, Artificial Sequence
  Description of Artificial Sequence: Synthetic peptide
  XENP019956 vhCDR1
SYTMH

SEQ ID NO: 6699 - protein, 17 aa, Artificial Sequence
  Description of Artificial Sequence: Synthetic peptide
  XENP019956 vhCDR2
FISYDGNNKYYADSVKG

SEQ ID NO: 6700 - protein, 9 aa, Artificial Sequence
  Description of Artificial Sequence: Synthetic peptide
  XENP019956 vhCDR3
TGWLGPFDY

SEQ ID NO: 6701 - protein, 12 aa, Artificial Sequence
  Description of Artificial Sequence: Synthetic peptide
  XENP019956 vlCDR1
RASQSVGSSYLA

SEQ ID NO: 6702 - protein, 7 aa, Artificial Sequence
  Description of Artificial Sequence: Synthetic peptide
  XENP019956 vlCDR2
SAFSRAT

SEQ ID NO: 6703 - protein, 9 aa, Artificial Sequence
  Description of Artificial Sequence: Synthetic peptide
  XENP019956 vlCDR3
QQYGSSPWT

SEQ ID NO: 6704 - protein, 246 aa, Artificial Sequence
  Description of Artificial Sequence: Synthetic polypeptide
  XENP019957 [CTLA-4]_H0_L0.69_scFv(GKPGS)4
QVQLVESGGGVVQPGRSLRLSCAASGFTFSSYTMHWVRQAPGKGLEWVTFISYDGNNKYYADSVKGRFTISRDNSKNTLYLQMNSLRAEDTAIYYCARTGWLGPFDYWGQGTLVTVSSGKPGSGKPGSGKPGSGKPGSEIVLTQSPGTLSLSPGERATLSCRASQSVGSSYLAWYQQKPGQAPRLLIYGVFSRATGIPDRFSGSGSGTDFTLTISRLEPEDFAVYYCQQYGSSPWTFGQGTKVEIK

SEQ ID NO: 6705 - protein, 118 aa, Artificial Sequence; identical to SEQ ID NO: 3737
  Description of Artificial Sequence: Synthetic polypeptide
  VH of XENP019957

SEQ ID NO: 6706 - protein, 108 aa, Artificial Sequence
  Description of Artificial Sequence: Synthetic polypeptide
  VL of XENP019957
EIVLTQSPGTLSLSPGERATLSCRASQSVGSSYLAWYQQKPGQAPRLLIYGVFSRATGIPDRFSGSGSGTDFTLTISRLEPEDFAVYYCQQYGSSPWTFGQGTKVEIK

SEQ ID NO: 6707 - protein, 5 aa, Artificial Sequence
  Description of Artificial Sequence: Synthetic peptide
  XENP019957 vhCDR1
SYTMH

SEQ ID NO: 6708 - protein, 17 aa, Artificial Sequence
  Description of Artificial Sequence: Synthetic peptide
  XENP019957 vhCDR2
FISYDGNNKYYADSVKG

SEQ ID NO: 6709 - protein, 9 aa, Artificial Sequence
  Description of Artificial Sequence: Synthetic peptide
  XENP019957 vhCDR3
TGWLGPFDY

SEQ ID NO: 6710 - protein, 12 aa, Artificial Sequence
  Description of Artificial Sequence: Synthetic peptide
  XENP019957 vlCDR1
RASQSVGSSYLA

SEQ ID NO: 6711 - protein, 7 aa, Artificial Sequence
  Description of Artificial Sequence: Synthetic peptide
  XENP019957 vlCDR2
GVFSRAT

SEQ ID NO: 6712 - protein, 9 aa, Artificial Sequence
  Description of Artificial Sequence: Synthetic peptide
  XENP019957 vlCDR3
QQYGSSPWT

SEQ ID NO: 6713 - protein, 246 aa, Artificial Sequence
  Description of Artificial Sequence: Synthetic polypeptide
  XENP019958 [CTLA-4]_H0_L0.70_scFv(GKPGS)4
QVQLVESGGGVVQPGRSLRLSCAASGFTFSSYTMHWVRQAPGKGLEWVTFISYDGNNKYYADSVKGRFTISRDNSKNTLYLQMNSLRAEDTAIYYCARTGWLGPFDYWGQGTLVTVSSGKPGSGKPGSGKPGSGKPGSEIVLTQSPGTLSLSPGERATLSCRASQSVGSSYLAWYQQKPGQAPRLLIYGAHSRATGIPDRFSGSGSGTDFTLTISRLEPEDFAVYYCQQYGSSPWTFGQGTKVEIK

SEQ ID NO: 6714 - protein, 118 aa, Artificial Sequence; identical to SEQ ID NO: 3737
  Description of Artificial Sequence: Synthetic polypeptide
  VH of XENP019958

SEQ ID NO: 6715 - protein, 108 aa, Artificial Sequence
  Description of Artificial Sequence: Synthetic polypeptide
  VL of XENP019958
EIVLTQSPGTLSLSPGERATLSCRASQSVGSSYLAWYQQKPGQAPRLLIYGAHSRATGIPDRFSGSGSGTDFTLTISRLEPEDFAVYYCQQYGSSPWTFGQGTKVEIK

SEQ ID NO: 6716 - protein, 5 aa, Artificial Sequence
  Description of Artificial Sequence: Synthetic peptide
  XENP019958 vhCDR1
SYTMH

SEQ ID NO: 6717 - protein, 17 aa, Artificial Sequence
  Description of Artificial Sequence: Synthetic peptide
  XENP019958 vhCDR2
FISYDGNNKYYADSVKG

SEQ ID NO: 6718 - protein, 9 aa, Artificial Sequence
  Description of Artificial Sequence: Synthetic peptide
  XENP019958 vhCDR3
TGWLGPFDY

SEQ ID NO: 6719 - protein, 12 aa, Artificial Sequence
  Description of Artificial Sequence: Synthetic peptide
  XENP019958 vlCDR1
RASQSVGSSYLA

SEQ ID NO: 6720 - protein, 7 aa, Artificial Sequence
  Description of Artificial Sequence: Synthetic peptide
  XENP019958 vlCDR2
GAHSRAT

SEQ ID NO: 6721 - protein, 9 aa, Artificial Sequence
  Description of Artificial Sequence: Synthetic peptide
  XENP019958 vlCDR3
QQYGSSPWT

SEQ ID NO: 6722 - protein, 246 aa, Artificial Sequence
  Description of Artificial Sequence: Synthetic polypeptide
  XENP019959 [CTLA-4]_H0_L0.71_scFv(GKPGS)4
QVQLVESGGGVVQPGRSLRLSCAASGFTFSSYTMHWVRQAPGKGLEWVTFISYDGNNKYYADSVKGRFTISRDNSKNTLYLQMNSLRAEDTAIYYCARTGWLGPFDYWGQGTLVTVSSGKPGSGKPGSGKPGSGKPGSEIVLTQSPGTLSLSPGERATLSCRASQSVGSSYLAWYQQKPGQAPRLLIYGAISRATGIPDRFSGSGSGTDFTLTISRLEPEDFAVYYCQQYGSSPWTFGQGTKVEIK

SEQ ID NO: 6723 - protein, 118 aa, Artificial Sequence; identical to SEQ ID NO: 3737
  Description of Artificial Sequence: Synthetic polypeptide
  VH of XENP019959

SEQ ID NO: 6724 - protein, 108 aa, Artificial Sequence
  Description of Artificial Sequence: Synthetic polypeptide
  VL of XENP019959
EIVLTQSPGTLSLSPGERATLSCRASQSVGSSYLAWYQQKPGQAPRLLIYGAISRATGIPDRFSGSGSGTDFTLTISRLEPEDFAVYYCQQYGSSPWTFGQGTKVEIK

SEQ ID NO: 6725 - protein, 5 aa, Artificial Sequence
  Description of Artificial Sequence: Synthetic peptide
  XENP019959 vhCDR1
SYTMH

SEQ ID NO: 6726 - protein, 17 aa, Artificial Sequence
  Description of Artificial Sequence: Synthetic peptide
  XENP019959 vhCDR2
FISYDGNNKYYADSVKG

SEQ ID NO: 6727 - protein, 9 aa, Artificial Sequence
  Description of Artificial Sequence: Synthetic peptide
  XENP019959 vhCDR3
TGWLGPFDY

SEQ ID NO: 6728 - protein, 12 aa, Artificial Sequence
  Description of Artificial Sequence: Synthetic peptide
  XENP019959 vlCDR1
RASQSVGSSYLA

SEQ ID NO: 6729 - protein, 7 aa, Artificial Sequence
  Description of Artificial Sequence: Synthetic peptide
  XENP019959 vlCDR2
GAISRAT

SEQ ID NO: 6730 - protein, 9 aa, Artificial Sequence
  Description of Artificial Sequence: Synthetic peptide
  XENP019959 vlCDR3
QQYGSSPWT

SEQ ID NO: 6731 - protein, 246 aa, Artificial Sequence
  Description of Artificial Sequence: Synthetic polypeptide
  XENP019960 [CTLA-4]_H0_L0.72_scFv(GKPGS)4
QVQLVESGGGVVQPGRSLRLSCAASGFTFSSYTMHWVRQAPGKGLEWVTFISYDGNNKYYADSVKGRFTISRDNSKNTLYLQMNSLRAEDTAIYYCARTGWLGPFDYWGQGTLVTVSSGKPGSGKPGSGKPGSGKPGSEIVLTQSPGTLSLSPGERATLSCRASQSVGSSYLAWYQQKPGQAPRLLIYGALSRATGIPDRFSGSGSGTDFTLTISRLEPEDFAVYYCQQYGSSPWTFGQGTKVEIK

SEQ ID NO: 6732 - protein, 118 aa, Artificial Sequence; identical to SEQ ID NO: 3737
  Description of Artificial Sequence: Synthetic polypeptide
  VH of XENP019960

SEQ ID NO: 6733 - protein, 108 aa, Artificial Sequence
  Description of Artificial Sequence: Synthetic polypeptide
  VL of XENP019960
EIVLTQSPGTLSLSPGERATLSCRASQSVGSSYLAWYQQKPGQAPRLLIYGALSRATGIPDRFSGSGSGTDFTLTISRLEPEDFAVYYCQQYGSSPWTFGQGTKVEIK

SEQ ID NO: 6734 - protein, 5 aa, Artificial Sequence
  Description of Artificial Sequence: Synthetic peptide
  XENP019960 vhCDR1
SYTMH

SEQ ID NO: 6735 - protein, 17 aa, Artificial Sequence
  Description of Artificial Sequence: Synthetic peptide
  XENP019960 vhCDR2
FISYDGNNKYYADSVKG

SEQ ID NO: 6736 - protein, 9 aa, Artificial Sequence
  Description of Artificial Sequence: Synthetic peptide
  XENP019960 vhCDR3
TGWLGPFDY

SEQ ID NO: 6737 - protein, 12 aa, Artificial Sequence
  Description of Artificial Sequence: Synthetic peptide
  XENP019960 vlCDR1
RASQSVGSSYLA

SEQ ID NO: 6738 - protein, 7 aa, Artificial Sequence
  Description of Artificial Sequence: Synthetic peptide
  XENP019960 vlCDR2
GALSRAT

SEQ ID NO: 6739 - protein, 9 aa, Artificial Sequence
  Description of Artificial Sequence: Synthetic peptide
  XENP019960 vlCDR3
QQYGSSPWT

SEQ ID NO: 6740 - protein, 246 aa, Artificial Sequence
  Description of Artificial Sequence: Synthetic polypeptide
  XENP019961 [CTLA-4]_H0_L0.73_scFv(GKPGS)4
QVQLVESGGGVVQPGRSLRLSCAASGFTFSSYTMHWVRQAPGKGLEWVTFISYDGNNKYYADSVKGRFTISRDNSKNTLYLQMNSLRAEDTAIYYCARTGWLGPFDYWGQGTLVTVSSGKPGSGKPGSGKPGSGKPGSEIVLTQSPGTLSLSPGERATLSCRASQSVGSSYLAWYQQKPGQAPRLLIYGASSRATGIPDRFSGSGSGTDFTLTISRLEPEDFAVYYCQQYGSSPWTFGQGTKVEIK

SEQ ID NO: 6741 - protein, 118 aa, Artificial Sequence; identical to SEQ ID NO: 3737
  Description of Artificial Sequence: Synthetic polypeptide
  VH of XENP019961

SEQ ID NO: 6742 - protein, 108 aa, Artificial Sequence
  Description of Artificial Sequence: Synthetic polypeptide
  VL of XENP019961
EIVLTQSPGTLSLSPGERATLSCRASQSVGSSYLAWYQQKPGQAPRLLIYGASSRATGIPDRFSGSGSGTDFTLTISRLEPEDFAVYYCQQYGSSPWTFGQGTKVEIK

SEQ ID NO: 6743 - protein, 5 aa, Artificial Sequence
  Description of Artificial Sequence: Synthetic peptide
  XENP019961 vhCDR1
SYTMH

SEQ ID NO: 6744 - protein, 17 aa, Artificial Sequence
  Description of Artificial Sequence: Synthetic peptide
  XENP019961 vhCDR2
FISYDGNNKYYADSVKG

SEQ ID NO: 6745 - protein, 9 aa, Artificial Sequence
  Description of Artificial Sequence: Synthetic peptide
  XENP019961 vhCDR3
TGWLGPFDY

SEQ ID NO: 6746 - protein, 12 aa, Artificial Sequence
  Description of Artificial Sequence: Synthetic peptide
  XENP019961 vlCDR1
RASQSVGSSYLA

SEQ ID NO: 6747 - protein, 7 aa, Artificial Sequence
  Description of Artificial Sequence: Synthetic peptide
  XENP019961 vlCDR2
GASSRAT

SEQ ID NO: 6748 - protein, 9 aa, Artificial Sequence
  Description of Artificial Sequence: Synthetic peptide
  XENP019961 vlCDR3
QQYGSSPWT

SEQ ID NO: 6749 - protein, 246 aa, Artificial Sequence
  Description of Artificial Sequence: Synthetic polypeptide
  XENP019962 [CTLA-4]_H0_L0.74_scFv(GKPGS)4
QVQLVESGGGVVQPGRSLRLSCAASGFTFSSYTMHWVRQAPGKGLEWVTFISYDGNNKYYADSVKGRFTISRDNSKNTLYLQMNSLRAEDTAIYYCARTGWLGPFDYWGQGTLVTVSSGKPGSGKPGSGKPGSGKPGSEIVLTQSPGTLSLSPGERATLSCRASQSVGSSYLAWYQQKPGQAPRLLIYGAYSRATGIPDRFSGSGSGTDFTLTISRLEPEDFAVYYCQQYGSSPWTFGQGTKVEIK

SEQ ID NO: 6750 - protein, 118 aa, Artificial Sequence; identical to SEQ ID NO: 3737
  Description of Artificial Sequence: Synthetic polypeptide
  VH of XENP019962

SEQ ID NO: 6751 - protein, 108 aa, Artificial Sequence
  Description of Artificial Sequence: Synthetic polypeptide
  VL of XENP019962
EIVLTQSPGTLSLSPGERATLSCRASQSVGSSYLAWYQQKPGQAPRLLIYGAYSRATGIPDRFSGSGSGTDFTLTISRLEPEDFAVYYCQQYGSSPWTFGQGTKVEIK

SEQ ID NO: 6752 - protein, 5 aa, Artificial Sequence
  Description of Artificial Sequence: Synthetic peptide
  XENP019962 vhCDR1
SYTMH

SEQ ID NO: 6753 - protein, 17 aa, Artificial Sequence
  Description of Artificial Sequence: Synthetic peptide
  XENP019962 vhCDR2
FISYDGNNKYYADSVKG

SEQ ID NO: 6754 - protein, 9 aa, Artificial Sequence
  Description of Artificial Sequence: Synthetic peptide
  XENP019962 vhCDR3
TGWLGPFDY

SEQ ID NO: 6755 - protein, 12 aa, Artificial Sequence
  Description of Artificial Sequence: Synthetic peptide
  XENP019962 vlCDR1
RASQSVGSSYLA

SEQ ID NO: 6756 - protein, 7 aa, Artificial Sequence
  Description of Artificial Sequence: Synthetic peptide
  XENP019962 vlCDR2
GAYSRAT

SEQ ID NO: 6757 - protein, 9 aa, Artificial Sequence
  Description of Artificial Sequence: Synthetic peptide
  XENP019962 vlCDR3
QQYGSSPWT

SEQ ID NO: 6758 - protein, 246 aa, Artificial Sequence
  Description of Artificial Sequence: Synthetic polypeptide
  XENP019963 [CTLA-4]_H0_L0.75_scFv(GKPGS)4
QVQLVESGGGVVQPGRSLRLSCAASGFTFSSYTMHWVRQAPGKGLEWVTFISYDGNNKYYADSVKGRFTISRDNSKNTLYLQMNSLRAEDTAIYYCARTGWLGPFDYWGQGTLVTVSSGKPGSGKPGSGKPGSGKPGSEIVLTQSPGTLSLSPGERATLSCRASQSVGSSYLAWYQQKPGQAPRLLIYGAFARATGIPDRFSGSGSGTDFTLTISRLEPEDFAVYYCQQYGSSPWTFGQGTKVEIK

SEQ ID NO: 6759 - protein, 118 aa, Artificial Sequence; identical to SEQ ID NO: 3737
  Description of Artificial Sequence: Synthetic polypeptide
  VH of XENP019963

SEQ ID NO: 6760 - protein, 108 aa, Artificial Sequence
  Description of Artificial Sequence: Synthetic polypeptide
  VL of XENP019963
EIVLTQSPGTLSLSPGERATLSCRASQSVGSSYLAWYQQKPGQAPRLLIYGAFARATGIPDRFSGSGSGTDFTLTISRLEPEDFAVYYCQQYGSSPWTFGQGTKVEIK

SEQ ID NO: 6761 - protein, 5 aa, Artificial Sequence
  Description of Artificial Sequence: Synthetic peptide
  XENP019963 vhCDR1
SYTMH

SEQ ID NO: 6762 - protein, 17 aa, Artificial Sequence
  Description of Artificial Sequence: Synthetic peptide
  XENP019963 vhCDR2
FISYDGNNKYYADSVKG

SEQ ID NO: 6763 - protein, 9 aa, Artificial Sequence
  Description of Artificial Sequence: Synthetic peptide
  XENP019963 vhCDR3
TGWLGPFDY

SEQ ID NO: 6764 - protein, 12 aa, Artificial Sequence
  Description of Artificial Sequence: Synthetic peptide
  XENP019963 vlCDR1
RASQSVGSSYLA

SEQ ID NO: 6765 - protein, 7 aa, Artificial Sequence
  Description of Artificial Sequence: Synthetic peptide
  XENP019963 vlCDR2
GAFARAT

SEQ ID NO: 6766 - protein, 9 aa, Artificial Sequence
  Description of Artificial Sequence: Synthetic peptide
  XENP019963 vlCDR3
QQYGSSPWT

SEQ ID NO: 6767 - protein, 246 aa, Artificial Sequence
  Description of Artificial Sequence: Synthetic polypeptide
  XENP019964 [CTLA-4]_H0_L0.76_scFv(GKPGS)4
QVQLVESGGGVVQPGRSLRLSCAASGFTFSSYTMHWVRQAPGKGLEWVTFISYDGNNKYYADSVKGRFTISRDNSKNTLYLQMNSLRAEDTAIYYCARTGWLGPFDYWGQGTLVTVSSGKPGSGKPGSGKPGSGKPGSEIVLTQSPGTLSLSPGERATLSCRASQSVGSSYLAWYQQKPGQAPRLLIYGAFGRATGIPDRFSGSGSGTDFTLTISRLEPEDFAVYYCQQYGSSPWTFGQGTKVEIK

SEQ ID NO: 6768 - protein, 118 aa, Artificial Sequence; identical to SEQ ID NO: 3737
  Description of Artificial Sequence: Synthetic polypeptide
  VH of XENP019964

SEQ ID NO: 6769 - protein, 108 aa, Artificial Sequence
  Description of Artificial Sequence: Synthetic polypeptide
  VL of XENP019964
EIVLTQSPGTLSLSPGERATLSCRASQSVGSSYLAWYQQKPGQAPRLLIYGAFGRATGIPDRFSGSGSGTDFTLTISRLEPEDFAVYYCQQYGSSPWTFGQGTKVEIK

SEQ ID NO: 6770 - protein, 5 aa, Artificial Sequence
  Description of Artificial Sequence: Synthetic peptide
  XENP019964 vhCDR1
SYTMH

SEQ ID NO: 6771 - protein, 17 aa, Artificial Sequence
  Description of Artificial Sequence: Synthetic peptide
  XENP019964 vhCDR2
FISYDGNNKYYADSVKG

SEQ ID NO: 6772 - protein, 9 aa, Artificial Sequence
  Description of Artificial Sequence: Synthetic peptide
  XENP019964 vhCDR3
TGWLGPFDY

SEQ ID NO: 6773 - protein, 12 aa, Artificial Sequence
  Description of Artificial Sequence: Synthetic peptide
  XENP019964 vlCDR1
RASQSVGSSYLA

SEQ ID NO: 6774 - protein, 7 aa, Artificial Sequence
  Description of Artificial Sequence: Synthetic peptide
  XENP019964 vlCDR2
GAFGRAT

SEQ ID NO: 6775 - protein, 9 aa, Artificial Sequence
  Description of Artificial Sequence: Synthetic peptide
  XENP019964 vlCDR3
QQYGSSPWT

SEQ ID NO: 6776 - protein, 246 aa, Artificial Sequence
  Description of Artificial Sequence: Synthetic polypeptide
  XENP019965 [CTLA-4]_H0_L0.77_scFv(GKPGS)4
QVQLVESGGGVVQPGRSLRLSCAASGFTFSSYTMHWVRQAPGKGLEWVTFISYDGNNKYYADSVKGRFTISRDNSKNTLYLQMNSLRAEDTAIYYCARTGWLGPFDYWGQGTLVTVSSGKPGSGKPGSGKPGSGKPGSEIVLTQSPGTLSLSPGERATLSCRASQSVGSSYLAWYQQKPGQAPRLLIYGAFNRATGIPDRFSGSGSGTDFTLTISRLEPEDFAVYYCQQYGSSPWTFGQGTKVEIK

SEQ ID NO: 6777 - protein, 118 aa, Artificial Sequence; identical to SEQ ID NO: 3737
  Description of Artificial Sequence: Synthetic polypeptide
  VH of XENP019965

SEQ ID NO: 6778 - protein, 108 aa, Artificial Sequence
  Description of Artificial Sequence: Synthetic polypeptide
  VL of XENP019965
EIVLTQSPGTLSLSPGERATLSCRASQSVGSSYLAWYQQKPGQAPRLLIYGAFNRATGIPDRFSGSGSGTDFTLTISRLEPEDFAVYYCQQYGSSPWTFGQGTKVEIK

SEQ ID NO: 6779 - protein, 5 aa, Artificial Sequence
  Description of Artificial Sequence: Synthetic peptide
  XENP019965 vhCDR1
SYTMH

SEQ ID NO: 6780 - protein, 17 aa, Artificial Sequence
  Description of Artificial Sequence: Synthetic peptide
  XENP019965 vhCDR2
FISYDGNNKYYADSVKG

SEQ ID NO: 6781 - protein, 9 aa, Artificial Sequence
  Description of Artificial Sequence: Synthetic peptide
  XENP019965 vhCDR3
TGWLGPFDY

SEQ ID NO: 6782 - protein, 12 aa, Artificial Sequence
  Description of Artificial Sequence: Synthetic peptide
  XENP019965 vlCDR1
RASQSVGSSYLA

SEQ ID NO: 6783 - protein, 7 aa, Artificial Sequence
  Description of Artificial Sequence: Synthetic peptide
  XENP019965 vlCDR2
GAFNRAT

SEQ ID NO: 6784 - protein, 9 aa, Artificial Sequence
  Description of Artificial Sequence: Synthetic peptide
  XENP019965 vlCDR3
QQYGSSPWT

SEQ ID NO: 6785 - protein, 246 aa, Artificial Sequence
  Description of Artificial Sequence: Synthetic polypeptide
  XENP019966 [CTLA-4]_H0_L0.78_scFv(GKPGS)4
QVQLVESGGGVVQPGRSLRLSCAASGFTFSSYTMHWVRQAPGKGLEWVTFISYDGNNKYYADSVKGRFTISRDNSKNTLYLQMNSLRAEDTAIYYCARTGWLGPFDYWGQGTLVTVSSGKPGSGKPGSGKPGSGKPGSEIVLTQSPGTLSLSPGERATLSCRASQSVGSSYLAWYQQKPGQAPRLLIYGAFQRATGIPDRFSGSGSGTDFTLTISRLEPEDFAVYYCQQYGSSPWTFGQGTKVEIK

SEQ ID NO: 6786 - protein, 118 aa, Artificial Sequence; identical to SEQ ID NO: 3737
  Description of Artificial Sequence: Synthetic polypeptide
  VH of XENP019966

SEQ ID NO: 6787 - protein, 108 aa, Artificial Sequence
  Description of Artificial Sequence: Synthetic polypeptide
  VL of XENP019966
EIVLTQSPGTLSLSPGERATLSCRASQSVGSSYLAWYQQKPGQAPRLLIYGAFQRATGIPDRFSGSGSGTDFTLTISRLEPEDFAVYYCQQYGSSPWTFGQGTKVEIK

SEQ ID NO: 6788 - protein, 5 aa, Artificial Sequence
  Description of Artificial Sequence: Synthetic peptide
  XENP019966 vhCDR1
SYTMH

SEQ ID NO: 6789 - protein, 17 aa, Artificial Sequence
  Description of Artificial Sequence: Synthetic peptide
  XENP019966 vhCDR2
FISYDGNNKYYADSVKG

SEQ ID NO: 6790 - protein, 9 aa, Artificial Sequence
  Description of Artificial Sequence: Synthetic peptide
  XENP019966 vhCDR3
TGWLGPFDY

SEQ ID NO: 6791 - protein, 12 aa, Artificial Sequence
  Description of Artificial Sequence: Synthetic peptide
  XENP019966 vlCDR1
RASQSVGSSYLA

SEQ ID NO: 6792 - protein, 7 aa, Artificial Sequence
  Description of Artificial Sequence: Synthetic peptide
  XENP019966 vlCDR2
GAFQRAT

SEQ ID NO: 6793 - protein, 9 aa, Artificial Sequence
  Description of Artificial Sequence: Synthetic peptide
  XENP019966 vlCDR3
QQYGSSPWT

SEQ ID NO: 6794 - protein, 246 aa, Artificial Sequence
  Description of Artificial Sequence: Synthetic polypeptide
  XENP019967 [CTLA-4]_H0_L0.79_scFv(GKPGS)4
QVQLVESGGGVVQPGRSLRLSCAASGFTFSSYTMHWVRQAPGKGLEWVTFISYDGNNKYYADSVKGRFTISRDNSKNTLYLQMNSLRAEDTAIYYCARTGWLGPFDYWGQGTLVTVSSGKPGSGKPGSGKPGSGKPGSEIVLTQSPGTLSLSPGERATLSCRASQSVGSSYLAWYQQKPGQAPRLLIYGAFTRATGIPDRFSGSGSGTDFTLTISRLEPEDFAVYYCQQYGSSPWTFGQGTKVEIK

SEQ ID NO: 6795 - protein, 118 aa, Artificial Sequence; identical to SEQ ID NO: 3737
  Description of Artificial Sequence: Synthetic polypeptide
  VH of XENP019967

SEQ ID NO: 6796 - protein, 108 aa, Artificial Sequence
  Description of Artificial Sequence: Synthetic polypeptide
  VL of XENP019967
EIVLTQSPGTLSLSPGERATLSCRASQSVGSSYLAWYQQKPGQAPRLLIYGAFTRATGIPDRFSGSGSGTDFTLTISRLEPEDFAVYYCQQYGSSPWTFGQGTKVEIK

SEQ ID NO: 6797 - protein, 5 aa, Artificial Sequence
  Description of Artificial Sequence: Synthetic peptide
  XENP019967 vhCDR1
SYTMH

SEQ ID NO: 6798 - protein, 17 aa, Artificial Sequence
  Description of Artificial Sequence: Synthetic peptide
  XENP019967 vhCDR2
FISYDGNNKYYADSVKG

SEQ ID NO: 6799 - protein, 9 aa, Artificial Sequence
  Description of Artificial Sequence: Synthetic peptide
  XENP019967 vhCDR3
TGWLGPFDY

SEQ ID NO: 6800 - protein, 12 aa, Artificial Sequence
  Description of Artificial Sequence: Synthetic peptide
  XENP019967 vlCDR1
RASQSVGSSYLA

SEQ ID NO: 6801 - protein, 7 aa, Artificial Sequence
  Description of Artificial Sequence: Synthetic peptide
  XENP019967 vlCDR2
GAFTRAT

SEQ ID NO: 6802 - protein, 9 aa, Artificial Sequence
  Description of Artificial Sequence: Synthetic peptide
  XENP019967 vlCDR3
QQYGSSPWT

SEQ ID NO: 6803 - protein, 246 aa, Artificial Sequence
  Description of Artificial Sequence: Synthetic polypeptide
  XENP019968 [CTLA-4]_H0_L0.80_scFv(GKPGS)4
QVQLVESGGGVVQPGRSLRLSCAASGFTFSSYTMHWVRQAPGKGLEWVTFISYDGNNKYYADSVKGRFTISRDNSKNTLYLQMNSLRAEDTAIYYCARTGWLGPFDYWGQGTLVTVSSGKPGSGKPGSGKPGSGKPGSEIVLTQSPGTLSLSPGERATLSCRASQSVGSSYLAWYQQKPGQAPRLLIYGAFSRDTGIPDRFSGSGSGTDFTLTISRLEPEDFAVYYCQQYGSSPWTFGQGTKVEIK

SEQ ID NO: 6804 - protein, 118 aa, Artificial Sequence; identical to SEQ ID NO: 3737
  Description of Artificial Sequence: Synthetic polypeptide
  VH of XENP019968

SEQ ID NO: 6805 - protein, 108 aa, Artificial Sequence
  Description of Artificial Sequence: Synthetic polypeptide
  VL of XENP019968
EIVLTQSPGTLSLSPGERATLSCRASQSVGSSYLAWYQQKPGQAPRLLIYGAFSRDTGIPDRFSGSGSGTDFTLTISRLEPEDFAVYYCQQYGSSPWTFGQGTKVEIK

SEQ ID NO: 6806 - protein, 5 aa, Artificial Sequence
  Description of Artificial Sequence: Synthetic peptide
  XENP019968 vhCDR1
SYTMH

SEQ ID NO: 6807 - protein, 17 aa, Artificial Sequence
  Description of Artificial Sequence: Synthetic peptide
  XENP019968 vhCDR2
FISYDGNNKYYADSVKG

SEQ ID NO: 6808 - protein, 9 aa, Artificial Sequence
  Description of Artificial Sequence: Synthetic peptide
  XENP019968 vhCDR3
TGWLGPFDY

SEQ ID NO: 6809 - protein, 12 aa, Artificial Sequence
  Description of Artificial Sequence: Synthetic peptide
  XENP019968 vlCDR1
RASQSVGSSYLA

SEQ ID NO: 6810 - protein, 7 aa, Artificial Sequence
  Description of Artificial Sequence: Synthetic peptide
  XENP019968 vlCDR2
GAFSRDT

SEQ ID NO: 6811 - protein, 9 aa, Artificial Sequence
  Description of Artificial Sequence: Synthetic peptide
  XENP019968 vlCDR3
QQYGSSPWT

SEQ ID NO: 6812 - protein, 246 aa, Artificial Sequence
  Description of Artificial Sequence: Synthetic polypeptide
  XENP019969 [CTLA-4]_H0_L0.81_scFv(GKPGS)4
QVQLVESGGGVVQPGRSLRLSCAASGFTFSSYTMHWVRQAPGKGLEWVTFISYDGNNKYYADSVKGRFTISRDNSKNTLYLQMNSLRAEDTAIYYCARTGWLGPFDYWGQGTLVTVSSGKPGSGKPGSGKPGSGKPGSEIVLTQSPGTLSLSPGERATLSCRASQSVGSSYLAWYQQKPGQAPRLLIYGAFSRASGIPDRFSGSGSGTDFTLTISRLEPEDFAVYYCQQYGSSPWTFGQGTKVEIK

SEQ ID NO: 6813 - protein, 118 aa, Artificial Sequence; identical to SEQ ID NO: 3737
  Description of Artificial Sequence: Synthetic polypeptide
  VH of XENP019969

SEQ ID NO: 6814 - protein, 108 aa, Artificial Sequence
  Description of Artificial Sequence: Synthetic polypeptide
  VL of XENP019969
EIVLTQSPGTLSLSPGERATLSCRASQSVGSSYLAWYQQKPGQAPRLLIYGAFSRASGIPDRFSGSGSGTDFTLTISRLEPEDFAVYYCQQYGSSPWTFGQGTKVEIK

SEQ ID NO: 6815 - protein, 5 aa, Artificial Sequence
  Description of Artificial Sequence: Synthetic peptide
  XENP019969 vhCDR1
SYTMH

SEQ ID NO: 6816 - protein, 17 aa, Artificial Sequence
  Description of Artificial Sequence: Synthetic peptide
  XENP019969 vhCDR2
FISYDGNNKYYADSVKG

SEQ ID NO: 6817 - protein, 9 aa, Artificial Sequence
  Description of Artificial Sequence: Synthetic peptide
  XENP019969 vhCDR3
TGWLGPFDY

SEQ ID NO: 6818 - protein, 12 aa, Artificial Sequence
  Description of Artificial Sequence: Synthetic peptide
  XENP019969 vlCDR1
RASQSVGSSYLA

SEQ ID NO: 6819 - protein, 7 aa, Artificial Sequence
  Description of Artificial Sequence: Synthetic peptide
  XENP019969 vlCDR2
GAFSRAS

SEQ ID NO: 6820 - protein, 9 aa, Artificial Sequence
  Description of Artificial Sequence: Synthetic peptide
  XENP019969 vlCDR3
QQYGSSPWT

SEQ ID NO: 6821 - protein, 246 aa, Artificial Sequence
  Description of Artificial Sequence: Synthetic polypeptide
  XENP019970 [CTLA-4]_H0_L0.82_scFv(GKPGS)4
QVQLVESGGGVVQPGRSLRLSCAASGFTFSSYTMHWVRQAPGKGLEWVTFISYDGNNKYYADSVKGRFTISRDNSKNTLYLQMNSLRAEDTAIYYCARTGWLGPFDYWGQGTLVTVSSGKPGSGKPGSGKPGSGKPGSEIVLTQSPGTLSLSPGERATLSCRASQSVGSSYLAWYQQKPGQAPRLLIYGAFSRATGVPDRFSGSGSGTDFTLTISRLEPEDFAVYYCQQYGSSPWTFGQGTKVEIK

SEQ ID NO: 6822 - protein, 118 aa, Artificial Sequence; identical to SEQ ID NO: 3737
  Description of Artificial Sequence: Synthetic polypeptide
  VH of XENP019970

SEQ ID NO: 6823 - protein, 108 aa, Artificial Sequence
  Description of Artificial Sequence: Synthetic polypeptide
  VL of XENP019970
EIVLTQSPGTLSLSPGERATLSCRASQSVGSSYLAWYQQKPGQAPRLLIYGAFSRATGVPDRFSGSGSGTDFTLTISRLEPEDFAVYYCQQYGSSPWTFGQGTKVEIK

SEQ ID NO: 6824 - protein, 5 aa, Artificial Sequence
  Description of Artificial Sequence: Synthetic peptide
  XENP019970 vhCDR1
SYTMH

SEQ ID NO: 6825 - protein, 17 aa, Artificial Sequence
  Description of Artificial Sequence: Synthetic peptide
  XENP019970 vhCDR2
FISYDGNNKYYADSVKG

SEQ ID NO: 6826 - protein, 9 aa, Artificial Sequence
  Description of Artificial Sequence: Synthetic peptide
  XENP019970 vhCDR3
TGWLGPFDY

SEQ ID NO: 6827 - protein, 12 aa, Artificial Sequence
  Description of Artificial Sequence: Synthetic peptide
  XENP019970 vlCDR1
RASQSVGSSYLA

SEQ ID NO: 6828 - protein, 7 aa, Artificial Sequence
  Description of Artificial Sequence: Synthetic peptide
  XENP019970 vlCDR2
GAFSRAT

SEQ ID NO: 6829 - protein, 9 aa, Artificial Sequence
  Description of Artificial Sequence: Synthetic peptide
  XENP019970 vlCDR3
QQYGSSPWT

SEQ ID NO: 6830 - protein, 246 aa, Artificial Sequence
  Description of Artificial Sequence: Synthetic polypeptide
  XENP019971 [CTLA-4]_H0_L0.83_scFv(GKPGS)4
QVQLVESGGGVVQPGRSLRLSCAASGFTFSSYTMHWVRQAPGKGLEWVTFISYDGNNKYYADSVKGRFTISRDNSKNTLYLQMNSLRAEDTAIYYCARTGWLGPFDYWGQGTLVTVSSGKPGSGKPGSGKPGSGKPGSEIVLTQSPGTLSLSPGERATLSCRASQSVGSSYLAWYQQKPGQAPRLLIYGAFSRATGIPARFSGSGSGTDFTLTISRLEPEDFAVYYCQQYGSSPWTFGQGTKVEIK

SEQ ID NO: 6831 - protein, 118 aa, Artificial Sequence; identical to SEQ ID NO: 3737
  Description of Artificial Sequence: Synthetic polypeptide
  VH of XENP019971

SEQ ID NO: 6832 - protein, 108 aa, Artificial Sequence
  Description of Artificial Sequence: Synthetic polypeptide
  VL of XENP019971
EIVLTQSPGTLSLSPGERATLSCRASQSVGSSYLAWYQQKPGQAPRLLIYGAFSRATGIPARFSGSGSGTDFTLTISRLEPEDFAVYYCQQYGSSPWTFGQGTKVEIK

SEQ ID NO: 6833 - protein, 5 aa, Artificial Sequence
  Description of Artificial Sequence: Synthetic peptide
  XENP019971 vhCDR1
SYTMH

SEQ ID NO: 6834 - protein, 17 aa, Artificial Sequence
  Description of Artificial Sequence: Synthetic peptide
  XENP019971 vhCDR2
FISYDGNNKYYADSVKG

SEQ ID NO: 6835 - protein, 9 aa, Artificial Sequence
  Description of Artificial Sequence: Synthetic peptide
  XENP019971 vhCDR3
TGWLGPFDY

SEQ ID NO: 6836 - protein, 12 aa, Artificial Sequence
  Description of Artificial Sequence: Synthetic peptide
  XENP019971 vlCDR1
RASQSVGSSYLA

SEQ ID NO: 6837 - protein, 7 aa, Artificial Sequence
  Description of Artificial Sequence: Synthetic peptide
  XENP019971 vlCDR2
GAFSRAT

SEQ ID NO: 6838 - protein, 9 aa, Artificial Sequence
  Description of Artificial Sequence: Synthetic peptide
  XENP019971 vlCDR3
QQYGSSPWT

SEQ ID NO: 6839 - protein, 246 aa, Artificial Sequence
  Description of Artificial Sequence: Synthetic polypeptide
  XENP019972 [CTLA-4]_H0_L0.84_scFv(GKPGS)4
QVQLVESGGGVVQPGRSLRLSCAASGFTFSSYTMHWVRQAPGKGLEWVTFISYDGNNKYYADSVKGRFTISRDNSKNTLYLQMNSLRAEDTAIYYCARTGWLGPFDYWGQGTLVTVSSGKPGSGKPGSGKPGSGKPGSEIVLTQSPGTLSLSPGERATLSCRASQSVGSSYLAWYQQKPGQAPRLLIYGAFSRATGIPDRFSGSGSRTDFTLTISRLEPEDFAVYYCQQYGSSPWTFGQGTKVEIK

SEQ ID NO: 6840 - protein, 118 aa, Artificial Sequence; identical to SEQ ID NO: 3737
  Description of Artificial Sequence: Synthetic polypeptide
  VH of XENP019972

SEQ ID NO: 6841 - protein, 108 aa, Artificial Sequence
  Description of Artificial Sequence: Synthetic polypeptide
  VL of XENP019972
EIVLTQSPGTLSLSPGERATLSCRASQSVGSSYLAWYQQKPGQAPRLLIYGAFSRATGIPDRFSGSGSRTDFTLTISRLEPEDFAVYYCQQYGSSPWTFGQGTKVEIK

SEQ ID NO: 6842 - protein, 5 aa, Artificial Sequence
  Description of Artificial Sequence: Synthetic peptide
  XENP019972 vhCDR1
SYTMH

SEQ ID NO: 6843 - protein, 17 aa, Artificial Sequence
  Description of Artificial Sequence: Synthetic peptide
  XENP019972 vhCDR2
FISYDGNNKYYADSVKG

SEQ ID NO: 6844 - protein, 9 aa, Artificial Sequence
  Description of Artificial Sequence: Synthetic peptide
  XENP019972 vhCDR3
TGWLGPFDY

SEQ ID NO: 6845 - protein, 12 aa, Artificial Sequence
  Description of Artificial Sequence: Synthetic peptide
  XENP019972 vlCDR1
RASQSVGSSYLA

SEQ ID NO: 6846 - protein, 7 aa, Artificial Sequence
  Description of Artificial Sequence: Synthetic peptide
  XENP019972 vlCDR2
GAFSRAT

SEQ ID NO: 6847 - protein, 9 aa, Artificial Sequence
  Description of Artificial Sequence: Synthetic peptide
  XENP019972 vlCDR3
QQYGSSPWT

SEQ ID NO: 6848 - protein, 246 aa, Artificial Sequence
  Description of Artificial Sequence: Synthetic polypeptide
  XENP019973 [CTLA-4]_H0_L0.85_scFv(GKPGS)4
QVQLVESGGGVVQPGRSLRLSCAASGFTFSSYTMHWVRQAPGKGLEWVTFISYDGNNKYYADSVKGRFTISRDNSKNTLYLQMNSLRAEDTAIYYCARTGWLGPFDYWGQGTLVTVSSGKPGSGKPGSGKPGSGKPGSEIVLTQSPGTLSLSPGERATLSCRASQSVGSSYLAWYQQKPGQAPRLLIYGAFSRATGIPDRFSGSGSGTEFTLTISRLEPEDFAVYYCQQYGSSPWTFGQGTKVEIK

SEQ ID NO: 6849 - protein, 118 aa, Artificial Sequence; identical to SEQ ID NO: 3737
  Description of Artificial Sequence: Synthetic polypeptide
  VH of XENP019973

SEQ ID NO: 6850 - protein, 108 aa, Artificial Sequence
  Description of Artificial Sequence: Synthetic polypeptide
  VL of XENP019973
EIVLTQSPGTLSLSPGERATLSCRASQSVGSSYLAWYQQKPGQAPRLLIYGAFSRATGIPDRFSGSGSGTEFTLTISRLEPEDFAVYYCQQYGSSPWTFGQGTKVEIK

SEQ ID NO: 6851 - protein, 5 aa, Artificial Sequence
  Description of Artificial Sequence: Synthetic peptide
  XENP019973 vhCDR1
SYTMH

SEQ ID NO: 6852 - protein, 17 aa, Artificial Sequence
  Description of Artificial Sequence: Synthetic peptide
  XENP019973 vhCDR2
FISYDGNNKYYADSVKG

SEQ ID NO: 6853 - protein, 9 aa, Artificial Sequence
  Description of Artificial Sequence: Synthetic peptide
  XENP019973 vhCDR3
TGWLGPFDY

SEQ ID NO: 6854 - protein, 12 aa, Artificial Sequence
  Description of Artificial Sequence: Synthetic peptide
  XENP019973 vlCDR1
RASQSVGSSYLA

SEQ ID NO: 6855 - protein, 7 aa, Artificial Sequence
  Description of Artificial Sequence: Synthetic peptide
  XENP019973 vlCDR2
GAFSRAT

SEQ ID NO: 6856 - protein, 9 aa, Artificial Sequence
  Description of Artificial Sequence: Synthetic peptide
  XENP019973 vlCDR3
QQYGSSPWT

SEQ ID NO: 6857 - protein, 246 aa, Artificial Sequence
  Description of Artificial Sequence: Synthetic polypeptide
  XENP019974 [CTLA-4]_H0_L0.86_scFv(GKPGS)4
QVQLVESGGGVVQPGRSLRLSCAASGFTFSSYTMHWVRQAPGKGLEWVTFISYDGNNKYYADSVKGRFTISRDNSKNTLYLQMNSLRAEDTAIYYCARTGWLGPFDYWGQGTLVTVSSGKPGSGKPGSGKPGSGKPGSEIVLTQSPGTLSLSPGERATLSCRASQSVGSSYLAWYQQKPGQAPRLLIYGAFSRATGIPDRFSGSGSGTDFTLKISRLEPEDFAVYYCQQYGSSPWTFGQGTKVEIK

SEQ ID NO: 6858 - protein, 118 aa, Artificial Sequence; identical to SEQ ID NO: 3737
  Description of Artificial Sequence: Synthetic polypeptide
  VH of XENP019974

SEQ ID NO: 6859 - protein, 108 aa, Artificial Sequence
  Description of Artificial Sequence: Synthetic polypeptide
  VL of XENP019974
EIVLTQSPGTLSLSPGERATLSCRASQSVGSSYLAWYQQKPGQAPRLLIYGAFSRATGIPDRFSGSGSGTDFTLKISRLEPEDFAVYYCQQYGSSPWTFGQGTKVEIK

SEQ ID NO: 6860 - protein, 5 aa, Artificial Sequence
  Description of Artificial Sequence: Synthetic peptide
  XENP019974 vhCDR1
SYTMH

SEQ ID NO: 6861 - protein, 17 aa, Artificial Sequence
  Description of Artificial Sequence: Synthetic peptide
  XENP019974 vhCDR2
FISYDGNNKYYADSVKG

SEQ ID NO: 6862 - protein, 9 aa, Artificial Sequence
  Description of Artificial Sequence: Synthetic peptide
  XENP019974 vhCDR3
TGWLGPFDY

SEQ ID NO: 6863 - protein, 12 aa, Artificial Sequence
  Description of Artificial Sequence: Synthetic peptide
  XENP019974 vlCDR1
RASQSVGSSYLA

SEQ ID NO: 6864 - protein, 7 aa, Artificial Sequence
  Description of Artificial Sequence: Synthetic peptide
  XENP019974 vlCDR2
GAFSRAT

SEQ ID NO: 6865 - protein, 9 aa, Artificial Sequence
  Description of Artificial Sequence: Synthetic peptide
  XENP019974 vlCDR3
QQYGSSPWT

SEQ ID NO: 6866 - protein, 246 aa, Artificial Sequence
  Description of Artificial Sequence: Synthetic polypeptide
  XENP019975 [CTLA-4]_H0_L0.87_scFv(GKPGS)4
QVQLVESGGGVVQPGRSLRLSCAASGFTFSSYTMHWVRQAPGKGLEWVTFISYDGNNKYYADSVKGRFTISRDNSKNTLYLQMNSLRAEDTAIYYCARTGWLGPFDYWGQGTLVTVSSGKPGSGKPGSGKPGSGKPGSEIVLTQSPGTLSLSPGERATLSCRASQSVGSSYLAWYQQKPGQAPRLLIYGAFSRATGIPDRFSGSGSGTDFTLTISSLEPEDFAVYYCQQYGSSPWTFGQGTKVEIK

SEQ ID NO: 6867 - protein, 118 aa, Artificial Sequence; identical to SEQ ID NO: 3737
  Description of Artificial Sequence: Synthetic polypeptide
  VH of XENP019975

SEQ ID NO: 6868 - protein, 108 aa, Artificial Sequence
  Description of Artificial Sequence: Synthetic polypeptide
  VL of XENP019975
EIVLTQSPGTLSLSPGERATLSCRASQSVGSSYLAWYQQKPGQAPRLLIYGAFSRATGIPDRFSGSGSGTDFTLTISSLEPEDFAVYYCQQYGSSPWTFGQGTKVEIK

SEQ ID NO: 6869 - protein, 5 aa, Artificial Sequence
  Description of Artificial Sequence: Synthetic peptide
  XENP019975 vhCDR1
SYTMH

SEQ ID NO: 6870 - protein, 17 aa, Artificial Sequence
  Description of Artificial Sequence: Synthetic peptide
  XENP019975 vhCDR2
FISYDGNNKYYADSVKG

SEQ ID NO: 6871 - protein, 9 aa, Artificial Sequence
  Description of Artificial Sequence: Synthetic peptide
  XENP019975 vhCDR3
TGWLGPFDY

SEQ ID NO: 6872 - protein, 12 aa, Artificial Sequence
  Description of Artificial Sequence: Synthetic peptide
  XENP019975 vlCDR1
RASQSVGSSYLA

SEQ ID NO: 6873 - protein, 7 aa, Artificial Sequence
  Description of Artificial Sequence: Synthetic peptide
  XENP019975 vlCDR2
GAFSRAT

SEQ ID NO: 6874 - protein, 9 aa, Artificial Sequence
  Description of Artificial Sequence: Synthetic peptide
  XENP019975 vlCDR3
QQYGSSPWT

SEQ ID NO: 6875 - protein, 246 aa, Artificial Sequence
  Description of Artificial Sequence: Synthetic polypeptide
  XENP019976 [CTLA-4]_H0_L0.88_scFv(GKPGS)4
QVQLVESGGGVVQPGRSLRLSCAASGFTFSSYTMHWVRQAPGKGLEWVTFISYDGNNKYYADSVKGRFTISRDNSKNTLYLQMNSLRAEDTAIYYCARTGWLGPFDYWGQGTLVTVSSGKPGSGKPGSGKPGSGKPGSEIVLTQSPGTLSLSPGERATLSCRASQSVGSSYLAWYQQKPGQAPRLLIYGAFSRATGIPDRFSGSGSGTDFTLTISSLQSEDFAVYYCQQYGSSPWTFGQGTKVEIK

SEQ ID NO: 6876 - protein, 118 aa, Artificial Sequence; identical to SEQ ID NO: 3737
  Description of Artificial Sequence: Synthetic polypeptide
  VH of XENP019976

SEQ ID NO: 6877 - protein, 108 aa, Artificial Sequence
  Description of Artificial Sequence: Synthetic polypeptide
  VL of XENP019976
EIVLTQSPGTLSLSPGERATLSCRASQSVGSSYLAWYQQKPGQAPRLLIYGAFSRATGIPDRFSGSGSGTDFTLTISSLQSEDFAVYYCQQYGSSPWTFGQGTKVEIK

SEQ ID NO: 6878 - protein, 5 aa, Artificial Sequence
  Description of Artificial Sequence: Synthetic peptide
  XENP019976 vhCDR1
SYTMH

SEQ ID NO: 6879 - protein, 17 aa, Artificial Sequence
  Description of Artificial Sequence: Synthetic peptide
  XENP019976 vhCDR2
FISYDGNNKYYADSVKG

SEQ ID NO: 6880 - protein, 9 aa, Artificial Sequence
  Description of Artificial Sequence: Synthetic peptide
  XENP019976 vhCDR3
TGWLGPFDY

SEQ ID NO: 6881 - protein, 12 aa, Artificial Sequence
  Description of Artificial Sequence: Synthetic peptide
  XENP019976 vlCDR1
RASQSVGSSYLA

SEQ ID NO: 6882 - protein, 7 aa, Artificial Sequence
  Description of Artificial Sequence: Synthetic peptide
  XENP019976 vlCDR2
GAFSRAT

SEQ ID NO: 6883 - protein, 9 aa, Artificial Sequence
  Description of Artificial Sequence: Synthetic peptide
  XENP019976 vlCDR3
QQYGSSPWT

SEQ ID NO: 6884 - protein, 246 aa, Artificial Sequence
  Description of Artificial Sequence: Synthetic polypeptide
  XENP019977 [CTLA-4]_H0_L0.89_scFv(GKPGS)4
QVQLVESGGGVVQPGRSLRLSCAASGFTFSSYTMHWVRQAPGKGLEWVTFISYDGNNKYYADSVKGRFTISRDNSKNTLYLQMNSLRAEDTAIYYCARTGWLGPFDYWGQGTLVTVSSGKPGSGKPGSGKPGSGKPGSEIVLTQSPGTLSLSPGERATLSCRASQSVGSSYLAWYQQKPGQAPRLLIYGAFSRATGIPDRFSGSGSGTDFTLTISRVEPEDFAVYYCQQYGSSPWTFGQGTKVEIK

SEQ ID NO: 6885 - protein, 118 aa, Artificial Sequence; identical to SEQ ID NO: 3737
  Description of Artificial Sequence: Synthetic polypeptide
  VH of XENP019977

SEQ ID NO: 6886 - protein, 108 aa, Artificial Sequence
  Description of Artificial Sequence: Synthetic polypeptide
  VL of XENP019977
EIVLTQSPGTLSLSPGERATLSCRASQSVGSSYLAWYQQKPGQAPRLLIYGAFSRATGIPDRFSGSGSGTDFTLTISRVEPEDFAVYYCQQYGSSPWTFGQGTKVEIK

SEQ ID NO: 6887 - protein, 5 aa, Artificial Sequence
  Description of Artificial Sequence: Synthetic peptide
  XENP019977 vhCDR1
SYTMH

SEQ ID NO: 6888 - protein, 17 aa, Artificial Sequence
  Description of Artificial Sequence: Synthetic peptide
  XENP019977 vhCDR2
FISYDGNNKYYADSVKG

SEQ ID NO: 6889 - protein, 9 aa, Artificial Sequence
  Description of Artificial Sequence: Synthetic peptide
  XENP019977 vhCDR3
TGWLGPFDY

SEQ ID NO: 6890 - protein, 12 aa, Artificial Sequence
  Description of Artificial Sequence: Synthetic peptide
  XENP019977 vlCDR1
RASQSVGSSYLA

SEQ ID NO: 6891 - protein, 7 aa, Artificial Sequence
  Description of Artificial Sequence: Synthetic peptide
  XENP019977 vlCDR2
GAFSRAT

SEQ ID NO: 6892 - protein, 9 aa, Artificial Sequence
  Description of Artificial Sequence: Synthetic peptide
  XENP019977 vlCDR3
QQYGSSPWT

SEQ ID NO: 6893 - protein, 246 aa, Artificial Sequence
  Description of Artificial Sequence: Synthetic polypeptide
  XENP019978 [CTLA-4]_H0_L0.90_scFv(GKPGS)4
QVQLVESGGGVVQPGRSLRLSCAASGFTFSSYTMHWVRQAPGKGLEWVTFISYDGNNKYYADSVKGRFTISRDNSKNTLYLQMNSLRAEDTAIYYCARTGWLGPFDYWGQGTLVTVSSGKPGSGKPGSGKPGSGKPGSEIVLTQSPGTLSLSPGERATLSCRASQSVGSSYLAWYQQKPGQAPRLLIYGAFSRATGIPDRFSGSGSGTDFTLTISRLQPEDFAVYYCQQYGSSPWTFGQGTKVEIK

SEQ ID NO: 6894 - protein, 118 aa, Artificial Sequence; identical to SEQ ID NO: 3737
  Description of Artificial Sequence: Synthetic polypeptide
  VH of XENP019978

SEQ ID NO: 6895 - protein, 108 aa, Artificial Sequence
  Description of Artificial Sequence: Synthetic polypeptide
  VL of XENP019978
EIVLTQSPGTLSLSPGERATLSCRASQSVGSSYLAWYQQKPGQAPRLLIYGAFSRATGIPDRFSGSGSGTDFTLTISRLQPEDFAVYYCQQYGSSPWTFGQGTKVEIK

SEQ ID NO: 6896 - protein, 5 aa, Artificial Sequence
  Description of Artificial Sequence: Synthetic peptide
  XENP019978 vhCDR1
SYTMH

SEQ ID NO: 6897 - protein, 17 aa, Artificial Sequence
  Description of Artificial Sequence: Synthetic peptide
  XENP019978 vhCDR2
FISYDGNNKYYADSVKG

SEQ ID NO: 6898 - protein, 9 aa, Artificial Sequence
  Description of Artificial Sequence: Synthetic peptide
  XENP019978 vhCDR3
TGWLGPFDY

SEQ ID NO: 6899 - protein, 12 aa, Artificial Sequence
  Description of Artificial Sequence: Synthetic peptide
  XENP019978 vlCDR1
RASQSVGSSYLA

SEQ ID NO: 6900 - protein, 7 aa, Artificial Sequence
  Description of Artificial Sequence: Synthetic peptide
  XENP019978 vlCDR2
GAFSRAT

SEQ ID NO: 6901 - protein, 9 aa, Artificial Sequence
  Description of Artificial Sequence: Synthetic peptide
  XENP019978 vlCDR3
QQYGSSPWT

SEQ ID NO: 6902 - protein, 246 aa, Artificial Sequence
  Description of Artificial Sequence: Synthetic polypeptide
  XENP019979 [CTLA-4]_H0_L0.91_scFv(GKPGS)4
QVQLVESGGGVVQPGRSLRLSCAASGFTFSSYTMHWVRQAPGKGLEWVTFISYDGNNKYYADSVKGRFTISRDNSKNTLYLQMNSLRAEDTAIYYCARTGWLGPFDYWGQGTLVTVSSGKPGSGKPGSGKPGSGKPGSEIVLTQSPGTLSLSPGERATLSCRASQSVGSSYLAWYQQKPGQAPRLLIYGAFSRATGIPDRFSGSGSGTDFTLTISRLESEDFAVYYCQQYGSSPWTFGQGTKVEIK

SEQ ID NO: 6903 - protein, 118 aa, Artificial Sequence; identical to SEQ ID NO: 3737
  Description of Artificial Sequence: Synthetic polypeptide
  VH of XENP019979

SEQ ID NO: 6904 - protein, 108 aa, Artificial Sequence
  Description of Artificial Sequence: Synthetic polypeptide
  VL of XENP019979
EIVLTQSPGTLSLSPGERATLSCRASQSVGSSYLAWYQQKPGQAPRLLIYGAFSRATGIPDRFSGSGSGTDFTLTISRLESEDFAVYYCQQYGSSPWTFGQGTKVEIK

SEQ ID NO: 6905 - protein, 5 aa, Artificial Sequence
  Description of Artificial Sequence: Synthetic peptide
  XENP019979 vhCDR1
SYTMH

SEQ ID NO: 6906 - protein, 17 aa, Artificial Sequence
  Description of Artificial Sequence: Synthetic peptide
  XENP019979 vhCDR2
FISYDGNNKYYADSVKG

SEQ ID NO: 6907 - protein, 9 aa, Artificial Sequence
  Description of Artificial Sequence: Synthetic peptide
  XENP019979 vhCDR3
TGWLGPFDY

SEQ ID NO: 6908 - protein, 12 aa, Artificial Sequence
  Description of Artificial Sequence: Synthetic peptide
  XENP019979 vlCDR1
RASQSVGSSYLA

SEQ ID NO: 6909 - protein, 7 aa, Artificial Sequence
  Description of Artificial Sequence: Synthetic peptide
  XENP019979 vlCDR2
GAFSRAT

SEQ ID NO: 6910 - protein, 9 aa, Artificial Sequence
  Description of Artificial Sequence: Synthetic peptide
  XENP019979 vlCDR3
QQYGSSPWT

SEQ ID NO: 6911 - protein, 246 aa, Artificial Sequence
  Description of Artificial Sequence: Synthetic polypeptide
  XENP019980 [CTLA-4]_H0_L0.92_scFv(GKPGS)4
QVQLVESGGGVVQPGRSLRLSCAASGFTFSSYTMHWVRQAPGKGLEWVTFISYDGNNKYYADSVKGRFTISRDNSKNTLYLQMNSLRAEDTAIYYCARTGWLGPFDYWGQGTLVTVSSGKPGSGKPGSGKPGSGKPGSEIVLTQSPGTLSLSPGERATLSCRASQSVGSSYLAWYQQKPGQAPRLLIYGAFSRATGIPDRFSGSGSGTDFTLTISRLEPQDFAVYYCQQYGSSPWTFGQGTKVEIK

SEQ ID NO: 6912 - protein, 118 aa, Artificial Sequence; identical to SEQ ID NO: 3737
  Description of Artificial Sequence: Synthetic polypeptide
  VH of XENP019980

SEQ ID NO: 6913 - protein, 108 aa, Artificial Sequence
  Description of Artificial Sequence: Synthetic polypeptide
  VL of XENP019980
EIVLTQSPGTLSLSPGERATLSCRASQSVGSSYLAWYQQKPGQAPRLLIYGAFSRATGIPDRFSGSGSGTDFTLTISRLEPQDFAVYYCQQYGSSPWTFGQGTKVEIK

SEQ ID NO: 6914 - protein, 5 aa, Artificial Sequence
  Description of Artificial Sequence: Synthetic peptide
  XENP019980 vhCDR1
SYTMH

SEQ ID NO: 6915 - protein, 17 aa, Artificial Sequence
  Description of Artificial Sequence: Synthetic peptide
  XENP019980 vhCDR2
FISYDGNNKYYADSVKG

SEQ ID NO: 6916 - protein, 9 aa, Artificial Sequence
  Description of Artificial Sequence: Synthetic peptide
  XENP019980 vhCDR3
TGWLGPFDY

SEQ ID NO: 6917 - protein, 12 aa, Artificial Sequence
  Description of Artificial Sequence: Synthetic peptide
  XENP019980 vlCDR1
RASQSVGSSYLA

SEQ ID NO: 6918 - protein, 7 aa, Artificial Sequence
  Description of Artificial Sequence: Synthetic peptide
  XENP019980 vlCDR2
GAFSRAT

SEQ ID NO: 6919 - protein, 9 aa, Artificial Sequence
  Description of Artificial Sequence: Synthetic peptide
  XENP019980 vlCDR3
QQYGSSPWT

SEQ ID NO: 6920 - protein, 246 aa, Artificial Sequence
  Description of Artificial Sequence: Synthetic polypeptide
  XENP019981 [CTLA-4]_H0_L0.93_scFv(GKPGS)4
QVQLVESGGGVVQPGRSLRLSCAASGFTFSSYTMHWVRQAPGKGLEWVTFISYDGNNKYYADSVKGRFTISRDNSKNTLYLQMNSLRAEDTAIYYCARTGWLGPFDYWGQGTLVTVSSGKPGSGKPGSGKPGSGKPGSEIVLTQSPGTLSLSPGERATLSCRASQSVGSSYLAWYQQKPGQAPRLLIYGAFSRATGIPDRFSGSGSGTDFTLTISRLEPEDFAVYYCKQYGSSPWTFGQGTKVEIK

SEQ ID NO: 6921 - protein, 118 aa, Artificial Sequence; identical to SEQ ID NO: 3737
  Description of Artificial Sequence: Synthetic polypeptide
  VH of XENP019981

SEQ ID NO: 6922 - protein, 108 aa, Artificial Sequence
  Description of Artificial Sequence: Synthetic polypeptide
  VL of XENP019981
EIVLTQSPGTLSLSPGERATLSCRASQSVGSSYLAWYQQKPGQAPRLLIYGAFSRATGIPDRFSGSGSGTDFTLTISRLEPEDFAVYYCKQYGSSPWTFGQGTKVEIK

SEQ ID NO: 6923 - protein, 5 aa, Artificial Sequence
  Description of Artificial Sequence: Synthetic peptide
  XENP019981 vhCDR1
SYTMH

SEQ ID NO: 6924 - protein, 17 aa, Artificial Sequence
  Description of Artificial Sequence: Synthetic peptide
  XENP019981 vhCDR2
FISYDGNNKYYADSVKG

SEQ ID NO: 6925 - protein, 9 aa, Artificial Sequence
  Description of Artificial Sequence: Synthetic peptide
  XENP019981 vhCDR3
TGWLGPFDY

SEQ ID NO: 6926 - protein, 12 aa, Artificial Sequence
  Description of Artificial Sequence: Synthetic peptide
  XENP019981 vlCDR1
RASQSVGSSYLA

SEQ ID NO: 6927 - protein, 7 aa, Artificial Sequence
  Description of Artificial Sequence: Synthetic peptide
  XENP019981 vlCDR2
GAFSRAT

SEQ ID NO: 6928 - protein, 9 aa, Artificial Sequence
  Description of Artificial Sequence: Synthetic peptide
  XENP019981 vlCDR3
KQYGSSPWT

SEQ ID NO: 6929 - protein, 246 aa, Artificial Sequence
  Description of Artificial Sequence: Synthetic polypeptide
  XENP019982 [CTLA-4]_H0_L0.94_scFv(GKPGS)4
QVQLVESGGGVVQPGRSLRLSCAASGFTFSSYTMHWVRQAPGKGLEWVTFISYDGNNKYYADSVKGRFTISRDNSKNTLYLQMNSLRAEDTAIYYCARTGWLGPFDYWGQGTLVTVSSGKPGSGKPGSGKPGSGKPGSEIVLTQSPGTLSLSPGERATLSCRASQSVGSSYLAWYQQKPGQAPRLLIYGAFSRATGIPDRFSGSGSGTDFTLTISRLEPEDFAVYYCLQYGSSPWTFGQGTKVEIK

SEQ ID NO: 6930 - protein, 118 aa, Artificial Sequence; identical to SEQ ID NO: 3737
  Description of Artificial Sequence: Synthetic polypeptide
  VH of XENP019982

SEQ ID NO: 6931 - protein, 108 aa, Artificial Sequence
  Description of Artificial Sequence: Synthetic polypeptide
  VL of XENP019982
EIVLTQSPGTLSLSPGERATLSCRASQSVGSSYLAWYQQKPGQAPRLLIYGAFSRATGIPDRFSGSGSGTDFTLTISRLEPEDFAVYYCLQYGSSPWTFGQGTKVEIK

SEQ ID NO: 6932 - protein, 5 aa, Artificial Sequence
  Description of Artificial Sequence: Synthetic peptide
  XENP019982 vhCDR1
SYTMH

SEQ ID NO: 6933 - protein, 17 aa, Artificial Sequence
  Description of Artificial Sequence: Synthetic peptide
  XENP019982 vhCDR2
FISYDGNNKYYADSVKG

SEQ ID NO: 6934 - protein, 9 aa, Artificial Sequence
  Description of Artificial Sequence: Synthetic peptide
  XENP019982 vhCDR3
TGWLGPFDY

SEQ ID NO: 6935 - protein, 12 aa, Artificial Sequence
  Description of Artificial Sequence: Synthetic peptide
  XENP019982 vlCDR1
RASQSVGSSYLA

SEQ ID NO: 6936 - protein, 7 aa, Artificial Sequence
  Description of Artificial Sequence: Synthetic peptide
  XENP019982 vlCDR2
GAFSRAT

SEQ ID NO: 6937 - protein, 9 aa, Artificial Sequence
  Description of Artificial Sequence: Synthetic peptide
  XENP019982 vlCDR3
LQYGSSPWT

SEQ ID NO: 6938 - protein, 246 aa, Artificial Sequence
  Description of Artificial Sequence: Synthetic polypeptide
  XENP019983 [CTLA-4]_H0_L0.95_scFv(GKPGS)4
QVQLVESGGGVVQPGRSLRLSCAASGFTFSSYTMHWVRQAPGKGLEWVTFISYDGNNKYYADSVKGRFTISRDNSKNTLYLQMNSLRAEDTAIYYCARTGWLGPFDYWGQGTLVTVSSGKPGSGKPGSGKPGSGKPGSEIVLTQSPGTLSLSPGERATLSCRASQSVGSSYLAWYQQKPGQAPRLLIYGAFSRATGIPDRFSGSGSGTDFTLTISRLEPEDFAVYYCMQYGSSPWTFGQGTKVEIK

SEQ ID NO: 6939 - protein, 118 aa, Artificial Sequence; identical to SEQ ID NO: 3737
  Description of Artificial Sequence: Synthetic polypeptide
  VH of XENP019983

SEQ ID NO: 6940 - protein, 108 aa, Artificial Sequence
  Description of Artificial Sequence: Synthetic polypeptide
  VL of XENP019983
EIVLTQSPGTLSLSPGERATLSCRASQSVGSSYLAWYQQKPGQAPRLLIYGAFSRATGIPDRFSGSGSGTDFTLTISRLEPEDFAVYYCMQYGSSPWTFGQGTKVEIK

SEQ ID NO: 6941 - protein, 5 aa, Artificial Sequence
  Description of Artificial Sequence: Synthetic peptide
  XENP019983 vhCDR1
SYTMH

SEQ ID NO: 6942 - protein, 17 aa, Artificial Sequence
  Description of Artificial Sequence: Synthetic peptide
  XENP019983 vhCDR2
FISYDGNNKYYADSVKG

SEQ ID NO: 6943 - protein, 9 aa, Artificial Sequence
  Description of Artificial Sequence: Synthetic peptide
  XENP019983 vhCDR3
TGWLGPFDY

SEQ ID NO: 6944 - protein, 12 aa, Artificial Sequence
  Description of Artificial Sequence: Synthetic peptide
  XENP019983 vlCDR1
RASQSVGSSYLA

SEQ ID NO: 6945 - protein, 7 aa, Artificial Sequence
  Description of Artificial Sequence: Synthetic peptide
  XENP019983 vlCDR2
GAFSRAT

SEQ ID NO: 6946 - protein, 9 aa, Artificial Sequence
  Description of Artificial Sequence: Synthetic peptide
  XENP019983 vlCDR3
MQYGSSPWT

SEQ ID NO: 6947 - protein, 246 aa, Artificial Sequence
  Description of Artificial Sequence: Synthetic polypeptide
  XENP019984 [CTLA-4]_H0_L0.96_scFv(GKPGS)4
QVQLVESGGGVVQPGRSLRLSCAASGFTFSSYTMHWVRQAPGKGLEWVTFISYDGNNKYYADSVKGRFTISRDNSKNTLYLQMNSLRAEDTAIYYCARTGWLGPFDYWGQGTLVTVSSGKPGSGKPGSGKPGSGKPGSEIVLTQSPGTLSLSPGERATLSCRASQSVGSSYLAWYQQKPGQAPRLLIYGAFSRATGIPDRFSGSGSGTDFTLTISRLEPEDFAVYYCQSYGSSPWTFGQGTKVEIK

SEQ ID NO: 6948 - protein, 118 aa, Artificial Sequence; identical to SEQ ID NO: 3737
  Description of Artificial Sequence: Synthetic polypeptide
  VH of XENP019984

SEQ ID NO: 6949 - protein, 108 aa, Artificial Sequence
  Description of Artificial Sequence: Synthetic polypeptide
  VL of XENP019984
EIVLTQSPGTLSLSPGERATLSCRASQSVGSSYLAWYQQKPGQAPRLLIYGAFSRATGIPDRFSGSGSGTDFTLTISRLEPEDFAVYYCQSYGSSPWTFGQGTKVEIK

SEQ ID NO: 6950 - protein, 5 aa, Artificial Sequence
  Description of Artificial Sequence: Synthetic peptide
  XENP019984 vhCDR1
SYTMH

SEQ ID NO: 6951 - protein, 17 aa, Artificial Sequence
  Description of Artificial Sequence: Synthetic peptide
  XENP019984 vhCDR2
FISYDGNNKYYADSVKG

SEQ ID NO: 6952 - protein, 9 aa, Artificial Sequence
  Description of Artificial Sequence: Synthetic peptide
  XENP019984 vhCDR3
TGWLGPFDY

SEQ ID NO: 6953 - protein, 12 aa, Artificial Sequence
  Description of Artificial Sequence: Synthetic peptide
  XENP019984 vlCDR1
RASQSVGSSYLA

SEQ ID NO: 6954 - protein, 7 aa, Artificial Sequence
  Description of Artificial Sequence: Synthetic peptide
  XENP019984 vlCDR2
GAFSRAT

SEQ ID NO: 6955 - protein, 9 aa, Artificial Sequence
  Description of Artificial Sequence: Synthetic peptide
  XENP019984 vlCDR3
QSYGSSPWT

SEQ ID NO: 6956 - protein, 246 aa, Artificial Sequence
  Description of Artificial Sequence: Synthetic polypeptide
  XENP019985 [CTLA-4]_H0_L0.97_scFv(GKPGS)4
QVQLVESGGGVVQPGRSLRLSCAASGFTFSSYTMHWVRQAPGKGLEWVTFISYDGNNKYYADSVKGRFTISRDNSKNTLYLQMNSLRAEDTAIYYCARTGWLGPFDYWGQGTLVTVSSGKPGSGKPGSGKPGSGKPGSEIVLTQSPGTLSLSPGERATLSCRASQSVGSSYLAWYQQKPGQAPRLLIYGAFSRATGIPDRFSGSGSGTDFTLTISRLEPEDFAVYYCQQAGSSPWTFGQGTKVEIK

SEQ ID NO: 6957 - protein, 118 aa, Artificial Sequence; identical to SEQ ID NO: 3737
  Description of Artificial Sequence: Synthetic polypeptide
  VH of XENP019985

SEQ ID NO: 6958 - protein, 108 aa, Artificial Sequence
  Description of Artificial Sequence: Synthetic polypeptide
  VL of XENP019985
EIVLTQSPGTLSLSPGERATLSCRASQSVGSSYLAWYQQKPGQAPRLLIYGAFSRATGIPDRFSGSGSGTDFTLTISRLEPEDFAVYYCQQAGSSPWTFGQGTKVEIK

SEQ ID NO: 6959 - protein, 5 aa, Artificial Sequence
  Description of Artificial Sequence: Synthetic peptide
  XENP019985 vhCDR1
SYTMH

SEQ ID NO: 6960 - protein, 17 aa, Artificial Sequence
  Description of Artificial Sequence: Synthetic peptide
  XENP019985 vhCDR2
FISYDGNNKYYADSVKG

SEQ ID NO: 6961 - protein, 9 aa, Artificial Sequence
  Description of Artificial Sequence: Synthetic peptide
  XENP019985 vhCDR3
TGWLGPFDY

SEQ ID NO: 6962 - protein, 12 aa, Artificial Sequence
  Description of Artificial Sequence: Synthetic peptide
  XENP019985 vlCDR1
RASQSVGSSYLA

SEQ ID NO: 6963 - protein, 7 aa, Artificial Sequence
  Description of Artificial Sequence: Synthetic peptide
  XENP019985 vlCDR2
GAFSRAT

SEQ ID NO: 6964 - protein, 9 aa, Artificial Sequence
  Description of Artificial Sequence: Synthetic peptide
  XENP019985 vlCDR3
QQAGSSPWT

SEQ ID NO: 6965 - protein, 246 aa, Artificial Sequence
  Description of Artificial Sequence: Synthetic polypeptide
  XENP019986 [CTLA-4]_H0_L0.98_scFv(GKPGS)4
QVQLVESGGGVVQPGRSLRLSCAASGFTFSSYTMHWVRQAPGKGLEWVTFISYDGNNKYYADSVKGRFTISRDNSKNTLYLQMNSLRAEDTAIYYCARTGWLGPFDYWGQGTLVTVSSGKPGSGKPGSGKPGSGKPGSEIVLTQSPGTLSLSPGERATLSCRASQSVGSSYLAWYQQKPGQAPRLLIYGAFSRATGIPDRFSGSGSGTDFTLTISRLEPEDFAVYYCQQFGSSPWTFGQGTKVEIK

SEQ ID NO: 6966 - protein, 118 aa, Artificial Sequence; identical to SEQ ID NO: 3737
  Description of Artificial Sequence: Synthetic polypeptide
  VH of XENP019986

SEQ ID NO: 6967 - protein, 108 aa, Artificial Sequence
  Description of Artificial Sequence: Synthetic polypeptide
  VL of XENP019986
EIVLTQSPGTLSLSPGERATLSCRASQSVGSSYLAWYQQKPGQAPRLLIYGAFSRATGIPDRFSGSGSGTDFTLTISRLEPEDFAVYYCQQFGSSPWTFGQGTKVEIK

SEQ ID NO: 6968 - protein, 5 aa, Artificial Sequence
  Description of Artificial Sequence: Synthetic peptide
  XENP019986 vhCDR1
SYTMH

SEQ ID NO: 6969 - protein, 17 aa, Artificial Sequence
  Description of Artificial Sequence: Synthetic peptide
  XENP019986 vhCDR2
FISYDGNNKYYADSVKG

SEQ ID NO: 6970 - protein, 9 aa, Artificial Sequence
  Description of Artificial Sequence: Synthetic peptide
  XENP019986 vhCDR3
TGWLGPFDY

SEQ ID NO: 6971 - protein, 12 aa, Artificial Sequence
  Description of Artificial Sequence: Synthetic peptide
  XENP019986 vlCDR1
RASQSVGSSYLA

SEQ ID NO: 6972 - protein, 7 aa, Artificial Sequence
  Description of Artificial Sequence: Synthetic peptide
  XENP019986 vlCDR2
GAFSRAT

SEQ ID NO: 6973 - protein, 9 aa, Artificial Sequence
  Description of Artificial Sequence: Synthetic peptide
  XENP019986 vlCDR3
QQFGSSPWT

SEQ ID NO: 6974 - protein, 246 aa, Artificial Sequence
  Description of Artificial Sequence: Synthetic polypeptide
  XENP019987 [CTLA-4]_H0_L0.99_scFv(GKPGS)4
QVQLVESGGGVVQPGRSLRLSCAASGFTFSSYTMHWVRQAPGKGLEWVTFISYDGNNKYYADSVKGRFTISRDNSKNTLYLQMNSLRAEDTAIYYCARTGWLGPFDYWGQGTLVTVSSGKPGSGKPGSGKPGSGKPGSEIVLTQSPGTLSLSPGERATLSCRASQSVGSSYLAWYQQKPGQAPRLLIYGAFSRATGIPDRFSGSGSGTDFTLTISRLEPEDFAVYYCQQHGSSPWTFGQGTKVEIK

SEQ ID NO: 6975 - protein, 118 aa, Artificial Sequence; identical to SEQ ID NO: 3737
  Description of Artificial Sequence: Synthetic polypeptide
  VH of XENP019987

SEQ ID NO: 6976 - protein, 108 aa, Artificial Sequence
  Description of Artificial Sequence: Synthetic polypeptide
  VL of XENP019987
EIVLTQSPGTLSLSPGERATLSCRASQSVGSSYLAWYQQKPGQAPRLLIYGAFSRATGIPDRFSGSGSGTDFTLTISRLEPEDFAVYYCQQHGSSPWTFGQGTKVEIK

SEQ ID NO: 6977 - protein, 5 aa, Artificial Sequence
  Description of Artificial Sequence: Synthetic peptide
  XENP019987 vhCDR1
SYTMH

SEQ ID NO: 6978 - protein, 17 aa, Artificial Sequence
  Description of Artificial Sequence: Synthetic peptide
  XENP019987 vhCDR2
FISYDGNNKYYADSVKG

SEQ ID NO: 6979 - protein, 9 aa, Artificial Sequence
  Description of Artificial Sequence: Synthetic peptide
  XENP019987 vhCDR3
TGWLGPFDY

SEQ ID NO: 6980 - protein, 12 aa, Artificial Sequence
  Description of Artificial Sequence: Synthetic peptide
  XENP019987 vlCDR1
RASQSVGSSYLA

SEQ ID NO: 6981 - protein, 7 aa, Artificial Sequence
  Description of Artificial Sequence: Synthetic peptide
  XENP019987 vlCDR2
GAFSRAT

SEQ ID NO: 6982 - protein, 9 aa, Artificial Sequence
  Description of Artificial Sequence: Synthetic peptide
  XENP019987 vlCDR3
QQHGSSPWT

SEQ ID NO: 6983 - protein, 246 aa, Artificial Sequence
  Description of Artificial Sequence: Synthetic polypeptide
  XENP019988 [CTLA-4]_H0_L0.100_scFv(GKPGS)4
QVQLVESGGGVVQPGRSLRLSCAASGFTFSSYTMHWVRQAPGKGLEWVTFISYDGNNKYYADSVKGRFTISRDNSKNTLYLQMNSLRAEDTAIYYCARTGWLGPFDYWGQGTLVTVSSGKPGSGKPGSGKPGSGKPGSEIVLTQSPGTLSLSPGERATLSCRASQSVGSSYLAWYQQKPGQAPRLLIYGAFSRATGIPDRFSGSGSGTDFTLTISRLEPEDFAVYYCQQLGSSPWTFGQGTKVEIK

SEQ ID NO: 6984 - protein, 118 aa, Artificial Sequence; identical to SEQ ID NO: 3737
  Description of Artificial Sequence: Synthetic polypeptide
  VH of XENP019988

SEQ ID NO: 6985 - protein, 108 aa, Artificial Sequence
  Description of Artificial Sequence: Synthetic polypeptide
  VL of XENP019988
EIVLTQSPGTLSLSPGERATLSCRASQSVGSSYLAWYQQKPGQAPRLLIYGAFSRATGIPDRFSGSGSGTDFTLTISRLEPEDFAVYYCQQLGSSPWTFGQGTKVEIK

SEQ ID NO: 6986 - protein, 5 aa, Artificial Sequence
  Description of Artificial Sequence: Synthetic peptide
  XENP019988 vhCDR1
SYTMH

SEQ ID NO: 6987 - protein, 17 aa, Artificial Sequence
  Description of Artificial Sequence: Synthetic peptide
  XENP019988 vhCDR2
FISYDGNNKYYADSVKG

SEQ ID NO: 6988 - protein, 9 aa, Artificial Sequence
  Description of Artificial Sequence: Synthetic peptide
  XENP019988 vhCDR3
TGWLGPFDY

SEQ ID NO: 6989 - protein, 12 aa, Artificial Sequence
  Description of Artificial Sequence: Synthetic peptide
  XENP019988 vlCDR1
RASQSVGSSYLA

SEQ ID NO: 6990 - protein, 7 aa, Artificial Sequence
  Description of Artificial Sequence: Synthetic peptide
  XENP019988 vlCDR2
GAFSRAT

SEQ ID NO: 6991 - protein, 9 aa, Artificial Sequence
  Description of Artificial Sequence: Synthetic peptide
  XENP019988 vlCDR3
QQLGSSPWT

SEQ ID NO: 6992 - protein, 246 aa, Artificial Sequence
  Description of Artificial Sequence: Synthetic polypeptide
  XENP019989 [CTLA-4]_H0_L0.101_scFv(GKPGS)4
QVQLVESGGGVVQPGRSLRLSCAASGFTFSSYTMHWVRQAPGKGLEWVTFISYDGNNKYYADSVKGRFTISRDNSKNTLYLQMNSLRAEDTAIYYCARTGWLGPFDYWGQGTLVTVSSGKPGSGKPGSGKPGSGKPGSEIVLTQSPGTLSLSPGERATLSCRASQSVGSSYLAWYQQKPGQAPRLLIYGAFSRATGIPDRFSGSGSGTDFTLTISRLEPEDFAVYYCQQVGSSPWTFGQGTKVEIK

SEQ ID NO: 6993 - protein, 118 aa, Artificial Sequence; identical to SEQ ID NO: 3737
  Description of Artificial Sequence: Synthetic polypeptide
  VH of XENP019989

SEQ ID NO: 6994 - protein, 108 aa, Artificial Sequence
  Description of Artificial Sequence: Synthetic polypeptide
  VL of XENP019989
EIVLTQSPGTLSLSPGERATLSCRASQSVGSSYLAWYQQKPGQAPRLLIYGAFSRATGIPDRFSGSGSGTDFTLTISRLEPEDFAVYYCQQVGSSPWTFGQGTKVEIK

SEQ ID NO: 6995 - protein, 5 aa, Artificial Sequence
  Description of Artificial Sequence: Synthetic peptide
  XENP019989 vhCDR1
SYTMH

SEQ ID NO: 6996 - protein, 17 aa, Artificial Sequence
  Description of Artificial Sequence: Synthetic peptide
  XENP019989 vhCDR2
FISYDGNNKYYADSVKG

SEQ ID NO: 6997 - protein, 9 aa, Artificial Sequence
  Description of Artificial Sequence: Synthetic peptide
  XENP019989 vhCDR3
TGWLGPFDY

SEQ ID NO: 6998 - protein, 12 aa, Artificial Sequence
  Description of Artificial Sequence: Synthetic peptide
  XENP019989 vlCDR1
RASQSVGSSYLA

SEQ ID NO: 6999 - protein, 7 aa, Artificial Sequence
  Description of Artificial Sequence: Synthetic peptide
  XENP019989 vlCDR2
GAFSRAT

SEQ ID NO: 7000 - protein, 9 aa, Artificial Sequence
  Description of Artificial Sequence: Synthetic peptide
  XENP019989 vlCDR3
QQVGSSPWT

SEQ ID NO: 7001 - protein, 246 aa, Artificial Sequence
  Description of Artificial Sequence: Synthetic polypeptide
  XENP019990 [CTLA-4]_H0_L0.102_scFv(GKPGS)4
QVQLVESGGGVVQPGRSLRLSCAASGFTFSSYTMHWVRQAPGKGLEWVTFISYDGNNKYYADSVKGRFTISRDNSKNTLYLQMNSLRAEDTAIYYCARTGWLGPFDYWGQGTLVTVSSGKPGSGKPGSGKPGSGKPGSEIVLTQSPGTLSLSPGERATLSCRASQSVGSSYLAWYQQKPGQAPRLLIYGAFSRATGIPDRFSGSGSGTDFTLTISRLEPEDFAVYYCQQYGESPWTFGQGTKVEIK

SEQ ID NO: 7002 - protein, 118 aa, Artificial Sequence; identical to SEQ ID NO: 3737
  Description of Artificial Sequence: Synthetic polypeptide
  VH of XENP019990

SEQ ID NO: 7003 - protein, 108 aa, Artificial Sequence
  Description of Artificial Sequence: Synthetic polypeptide
  VL of XENP019990
EIVLTQSPGTLSLSPGERATLSCRASQSVGSSYLAWYQQKPGQAPRLLIYGAFSRATGIPDRFSGSGSGTDFTLTISRLEPEDFAVYYCQQYGESPWTFGQGTKVEIK

SEQ ID NO: 7004 - protein, 5 aa, Artificial Sequence
  Description of Artificial Sequence: Synthetic peptide
  XENP019990 vhCDR1
SYTMH

SEQ ID NO: 7005 - protein, 17 aa, Artificial Sequence
  Description of Artificial Sequence: Synthetic peptide
  XENP019990 vhCDR2
FISYDGNNKYYADSVKG

SEQ ID NO: 7006 - protein, 9 aa, Artificial Sequence
  Description of Artificial Sequence: Synthetic peptide
  XENP019990 vhCDR3
TGWLGPFDY

SEQ ID NO: 7007 - protein, 12 aa, Artificial Sequence
  Description of Artificial Sequence: Synthetic peptide
  XENP019990 vlCDR1
RASQSVGSSYLA

SEQ ID NO: 7008 - protein, 7 aa, Artificial Sequence
  Description of Artificial Sequence: Synthetic peptide
  XENP019990 vlCDR2
GAFSRAT

SEQ ID NO: 7009 - protein, 9 aa, Artificial Sequence
  Description of Artificial Sequence: Synthetic peptide
  XENP019990 vlCDR3
QQYGESPWT

SEQ ID NO: 7010 - protein, 246 aa, Artificial Sequence
  Description of Artificial Sequence: Synthetic polypeptide
  XENP019991 [CTLA-4]_H0_L0.103_scFv(GKPGS)4
QVQLVESGGGVVQPGRSLRLSCAASGFTFSSYTMHWVRQAPGKGLEWVTFISYDGNNKYYADSVKGRFTISRDNSKNTLYLQMNSLRAEDTAIYYCARTGWLGPFDYWGQGTLVTVSSGKPGSGKPGSGKPGSGKPGSEIVLTQSPGTLSLSPGERATLSCRASQSVGSSYLAWYQQKPGQAPRLLIYGAFSRATGIPDRFSGSGSGTDFTLTISRLEPEDFAVYYCQQYGKSPWTFGQGTKVEIK

SEQ ID NO: 7011 - protein, 118 aa, Artificial Sequence; identical to SEQ ID NO: 3737
  Description of Artificial Sequence: Synthetic polypeptide
  VH of XENP019991

SEQ ID NO: 7012 - protein, 108 aa, Artificial Sequence
  Description of Artificial Sequence: Synthetic polypeptide
  VL of XENP019991
EIVLTQSPGTLSLSPGERATLSCRASQSVGSSYLAWYQQKPGQAPRLLIYGAFSRATGIPDRFSGSGSGTDFTLTISRLEPEDFAVYYCQQYGKSPWTFGQGTKVEIK

SEQ ID NO: 7013 - protein, 5 aa, Artificial Sequence
  Description of Artificial Sequence: Synthetic peptide
  XENP019991 vhCDR1
SYTMH

SEQ ID NO: 7014 - protein, 17 aa, Artificial Sequence
  Description of Artificial Sequence: Synthetic peptide
  XENP019991 vhCDR2
FISYDGNNKYYADSVKG

SEQ ID NO: 7015 - protein, 9 aa, Artificial Sequence
  Description of Artificial Sequence: Synthetic peptide
  XENP019991 vhCDR3
TGWLGPFDY

SEQ ID NO: 7016 - protein, 12 aa, Artificial Sequence
  Description of Artificial Sequence: Synthetic peptide
  XENP019991 vlCDR1
RASQSVGSSYLA

SEQ ID NO: 7017 - protein, 7 aa, Artificial Sequence
  Description of Artificial Sequence: Synthetic peptide
  XENP019991 vlCDR2
GAFSRAT

SEQ ID NO: 7018 - protein, 9 aa, Artificial Sequence
  Description of Artificial Sequence: Synthetic peptide
  XENP019991 vlCDR3
QQYGKSPWT

SEQ ID NO: 7019 - protein, 246 aa, Artificial Sequence
  Description of Artificial Sequence: Synthetic polypeptide
  XENP019992 [CTLA-4]_H0_L0.104_scFv(GKPGS)4
QVQLVESGGGVVQPGRSLRLSCAASGFTFSSYTMHWVRQAPGKGLEWVTFISYDGNNKYYADSVKGRFTISRDNSKNTLYLQMNSLRAEDTAIYYCARTGWLGPFDYWGQGTLVTVSSGKPGSGKPGSGKPGSGKPGSEIVLTQSPGTLSLSPGERATLSCRASQSVGSSYLAWYQQKPGQAPRLLIYGAFSRATGIPDRFSGSGSGTDFTLTISRLEPEDFAVYYCQQYGSYPWTFGQGTKVEIK

SEQ ID NO: 7020 - protein, 118 aa, Artificial Sequence; identical to SEQ ID NO: 3737
  Description of Artificial Sequence: Synthetic polypeptide
  VH of XENP019992

SEQ ID NO: 7021 - protein, 108 aa, Artificial Sequence
  Description of Artificial Sequence: Synthetic polypeptide
  VL of XENP019992
EIVLTQSPGTLSLSPGERATLSCRASQSVGSSYLAWYQQKPGQAPRLLIYGAFSRATGIPDRFSGSGSGTDFTLTISRLEPEDFAVYYCQQYGSYPWTFGQGTKVEIK

SEQ ID NO: 7022 - protein, 5 aa, Artificial Sequence
  Description of Artificial Sequence: Synthetic peptide
  XENP019992 vhCDR1
SYTMH

SEQ ID NO: 7023 - protein, 17 aa, Artificial Sequence
  Description of Artificial Sequence: Synthetic peptide
  XENP019992 vhCDR2
FISYDGNNKYYADSVKG

SEQ ID NO: 7024 - protein, 9 aa, Artificial Sequence
  Description of Artificial Sequence: Synthetic peptide
  XENP019992 vhCDR3
TGWLGPFDY

SEQ ID NO: 7025 - protein, 12 aa, Artificial Sequence
  Description of Artificial Sequence: Synthetic peptide
  XENP019992 vlCDR1
RASQSVGSSYLA

SEQ ID NO: 7026 - protein, 7 aa, Artificial Sequence
  Description of Artificial Sequence: Synthetic peptide
  XENP019992 vlCDR2
GAFSRAT

SEQ ID NO: 7027 - protein, 9 aa, Artificial Sequence
  Description of Artificial Sequence: Synthetic peptide
  XENP019992 vlCDR3
QQYGSYPWT

SEQ ID NO: 7028 - protein, 246 aa, Artificial Sequence
  Description of Artificial Sequence: Synthetic polypeptide
  XENP019993 [CTLA-4]_H0_L0.105_scFv(GKPGS)4
QVQLVESGGGVVQPGRSLRLSCAASGFTFSSYTMHWVRQAPGKGLEWVTFISYDGNNKYYADSVKGRFTISRDNSKNTLYLQMNSLRAEDTAIYYCARTGWLGPFDYWGQGTLVTVSSGKPGSGKPGSGKPGSGKPGSEIVLTQSPGTLSLSPGERATLSCRASQSVGSSYLAWYQQKPGQAPRLLIYGAFSRATGIPDRFSGSGSGTDFTLTISRLEPEDFAVYYCQQYGSSHWTFGQGTKVEIK

SEQ ID NO: 7029 - protein, 118 aa, Artificial Sequence; identical to SEQ ID NO: 3737
  Description of Artificial Sequence: Synthetic polypeptide
  VH of XENP019993

SEQ ID NO: 7030 - protein, 108 aa, Artificial Sequence
  Description of Artificial Sequence: Synthetic polypeptide
  VL of XENP019993
EIVLTQSPGTLSLSPGERATLSCRASQSVGSSYLAWYQQKPGQAPRLLIYGAFSRATGIPDRFSGSGSGTDFTLTISRLEPEDFAVYYCQQYGSSHWTFGQGTKVEIK

SEQ ID NO: 7031 - protein, 5 aa, Artificial Sequence
  Description of Artificial Sequence: Synthetic peptide
  XENP019993 vhCDR1
SYTMH

SEQ ID NO: 7032 - protein, 17 aa, Artificial Sequence
  Description of Artificial Sequence: Synthetic peptide
  XENP019993 vhCDR2
FISYDGNNKYYADSVKG

SEQ ID NO: 7033 - protein, 9 aa, Artificial Sequence
  Description of Artificial Sequence: Synthetic peptide
  XENP019993 vhCDR3
TGWLGPFDY

SEQ ID NO: 7034 - protein, 12 aa, Artificial Sequence
  Description of Artificial Sequence: Synthetic peptide
  XENP019993 vlCDR1
RASQSVGSSYLA

SEQ ID NO: 7035 - protein, 7 aa, Artificial Sequence
  Description of Artificial Sequence: Synthetic peptide
  XENP019993 vlCDR2
GAFSRAT

SEQ ID NO: 7036 - protein, 9 aa, Artificial Sequence
  Description of Artificial Sequence: Synthetic peptide
  XENP019993 vlCDR3
QQYGSSHWT

SEQ ID NO: 7037 - protein, 246 aa, Artificial Sequence
  Description of Artificial Sequence: Synthetic polypeptide
  XENP019994 [CTLA-4]_H0_L0.106_scFv(GKPGS)4
QVQLVESGGGVVQPGRSLRLSCAASGFTFSSYTMHWVRQAPGKGLEWVTFISYDGNNKYYADSVKGRFTISRDNSKNTLYLQMNSLRAEDTAIYYCARTGWLGPFDYWGQGTLVTVSSGKPGSGKPGSGKPGSGKPGSEIVLTQSPGTLSLSPGERATLSCRASQSVGSSYLAWYQQKPGQAPRLLIYGAFSRATGIPDRFSGSGSGTDFTLTISRLEPEDFAVYYCQQYGSSPFTFGQGTKVEIK

SEQ ID NO: 7038 - protein, 118 aa, Artificial Sequence; identical to SEQ ID NO: 3737
  Description of Artificial Sequence: Synthetic polypeptide
  VH of XENP019994

SEQ ID NO: 7039 - protein, 108 aa, Artificial Sequence
  Description of Artificial Sequence: Synthetic polypeptide
  VL of XENP019994
EIVLTQSPGTLSLSPGERATLSCRASQSVGSSYLAWYQQKPGQAPRLLIYGAFSRATGIPDRFSGSGSGTDFTLTISRLEPEDFAVYYCQQYGSSPFTFGQGTKVEIK

SEQ ID NO: 7040 - protein, 5 aa, Artificial Sequence
  Description of Artificial Sequence: Synthetic peptide
  XENP019994 vhCDR1
SYTMH

SEQ ID NO: 7041 - protein, 17 aa, Artificial Sequence
  Description of Artificial Sequence: Synthetic peptide
  XENP019994 vhCDR2
FISYDGNNKYYADSVKG

SEQ ID NO: 7042 - protein, 9 aa, Artificial Sequence
  Description of Artificial Sequence: Synthetic peptide
  XENP019994 vhCDR3
TGWLGPFDY

SEQ ID NO: 7043 - protein, 12 aa, Artificial Sequence
  Description of Artificial Sequence: Synthetic peptide
  XENP019994 vlCDR1
RASQSVGSSYLA

SEQ ID NO: 7044 - protein, 7 aa, Artificial Sequence
  Description of Artificial Sequence: Synthetic peptide
  XENP019994 vlCDR2
GAFSRAT

SEQ ID NO: 7045 - protein, 9 aa, Artificial Sequence
  Description of Artificial Sequence: Synthetic peptide
  XENP019994 vlCDR3
QQYGSSPFT

SEQ ID NO: 7046 - protein, 246 aa, Artificial Sequence
  Description of Artificial Sequence: Synthetic polypeptide
  XENP019995 [CTLA-4]_H0_L0.107_scFv(GKPGS)4
QVQLVESGGGVVQPGRSLRLSCAASGFTFSSYTMHWVRQAPGKGLEWVTFISYDGNNKYYADSVKGRFTISRDNSKNTLYLQMNSLRAEDTAIYYCARTGWLGPFDYWGQGTLVTVSSGKPGSGKPGSGKPGSGKPGSEIVLTQSPGTLSLSPGERATLSCRASQSVGSSYLAWYQQKPGQAPRLLIYGAFSRATGIPDRFSGSGSGTDFTLTISRLEPEDFAVYYCQQYGSSPHTFGQGTKVEIK

SEQ ID NO: 7047 - protein, 118 aa, Artificial Sequence; identical to SEQ ID NO: 3737
  Description of Artificial Sequence: Synthetic polypeptide
  VH of XENP019995

SEQ ID NO: 7048 - protein, 108 aa, Artificial Sequence
  Description of Artificial Sequence: Synthetic polypeptide
  VL of XENP019995
EIVLTQSPGTLSLSPGERATLSCRASQSVGSSYLAWYQQKPGQAPRLLIYGAFSRATGIPDRFSGSGSGTDFTLTISRLEPEDFAVYYCQQYGSSPHTFGQGTKVEIK

SEQ ID NO: 7049 - protein, 5 aa, Artificial Sequence
  Description of Artificial Sequence: Synthetic peptide
  XENP019995 vhCDR1
SYTMH

SEQ ID NO: 7050 - protein, 17 aa, Artificial Sequence
  Description of Artificial Sequence: Synthetic peptide
  XENP019995 vhCDR2
FISYDGNNKYYADSVKG

SEQ ID NO: 7051 - protein, 9 aa, Artificial Sequence
  Description of Artificial Sequence: Synthetic peptide
  XENP019995 vhCDR3
TGWLGPFDY

SEQ ID NO: 7052 - protein, 12 aa, Artificial Sequence
  Description of Artificial Sequence: Synthetic peptide
  XENP019995 vlCDR1
RASQSVGSSYLA

SEQ ID NO: 7053 - protein, 7 aa, Artificial Sequence
  Description of Artificial Sequence: Synthetic peptide
  XENP019995 vlCDR2
GAFSRAT

SEQ ID NO: 7054 - protein, 9 aa, Artificial Sequence
  Description of Artificial Sequence: Synthetic peptide
  XENP019995 vlCDR3
QQYGSSPHT

SEQ ID NO: 7055 - protein, 246 aa, Artificial Sequence
  Description of Artificial Sequence: Synthetic polypeptide
  XENP019996 [CTLA-4]_H0_L0.108_scFv(GKPGS)4
QVQLVESGGGVVQPGRSLRLSCAASGFTFSSYTMHWVRQAPGKGLEWVTFISYDGNNKYYADSVKGRFTISRDNSKNTLYLQMNSLRAEDTAIYYCARTGWLGPFDYWGQGTLVTVSSGKPGSGKPGSGKPGSGKPGSEIVLTQSPGTLSLSPGERATLSCRASQSVGSSYLAWYQQKPGQAPRLLIYGAFSRATGIPDRFSGSGSGTDFTLTISRLEPEDFAVYYCQQYGSSPITFGQGTKVEIK

SEQ ID NO: 7056 - protein, 118 aa, Artificial Sequence; identical to SEQ ID NO: 3737
  Description of Artificial Sequence: Synthetic polypeptide
  VH of XENP019996

SEQ ID NO: 7057 - protein, 108 aa, Artificial Sequence
  Description of Artificial Sequence: Synthetic polypeptide
  VL of XENP019996
EIVLTQSPGTLSLSPGERATLSCRASQSVGSSYLAWYQQKPGQAPRLLIYGAFSRATGIPDRFSGSGSGTDFTLTISRLEPEDFAVYYCQQYGSSPITFGQGTKVEIK

SEQ ID NO: 7058 - protein, 5 aa, Artificial Sequence
  Description of Artificial Sequence: Synthetic peptide
  XENP019996 vhCDR1
SYTMH

SEQ ID NO: 7059 - protein, 17 aa, Artificial Sequence
  Description of Artificial Sequence: Synthetic peptide
  XENP019996 vhCDR2
FISYDGNNKYYADSVKG

SEQ ID NO: 7060 - protein, 9 aa, Artificial Sequence
  Description of Artificial Sequence: Synthetic peptide
  XENP019996 vhCDR3
TGWLGPFDY

SEQ ID NO: 7061 - protein, 12 aa, Artificial Sequence
  Description of Artificial Sequence: Synthetic peptide
  XENP019996 vlCDR1
RASQSVGSSYLA

SEQ ID NO: 7062 - protein, 7 aa, Artificial Sequence
  Description of Artificial Sequence: Synthetic peptide
  XENP019996 vlCDR2
GAFSRAT

SEQ ID NO: 7063 - protein, 9 aa, Artificial Sequence
  Description of Artificial Sequence: Synthetic peptide
  XENP019996 vlCDR3
QQYGSSPIT

SEQ ID NO: 7064 - protein, 246 aa, Artificial Sequence
  Description of Artificial Sequence: Synthetic polypeptide
  XENP020001 [CTLA-4]_H0_L0.109_scFv(GKPGS)4
QVQLVESGGGVVQPGRSLRLSCAASGFTFSSYTMHWVRQAPGKGLEWVTFISYDGNNKYYADSVKGRFTISRDNSKNTLYLQMNSLRAEDTAIYYCARTGWLGPFDYWGQGTLVTVSSGKPGSGKPGSGKPGSGKPGSEIVLTQSPGTLSLSPGERATLSCRASQSVGSSYLAWYQQKPGQAPRLLIYGAFSRATGIPDRFSGSGSGTDFTLTISRLEPEDFAVYYCQQYGSSPLTFGQGTKVEIK

SEQ ID NO: 7065 - protein, 118 aa, Artificial Sequence; identical to SEQ ID NO: 3737
  Description of Artificial Sequence: Synthetic polypeptide
  VH of XENP020001

SEQ ID NO: 7066 - protein, 108 aa, Artificial Sequence
  Description of Artificial Sequence: Synthetic polypeptide
  VL of XENP020001
EIVLTQSPGTLSLSPGERATLSCRASQSVGSSYLAWYQQKPGQAPRLLIYGAFSRATGIPDRFSGSGSGTDFTLTISRLEPEDFAVYYCQQYGSSPLTFGQGTKVEIK

SEQ ID NO: 7067 - protein, 5 aa, Artificial Sequence
  Description of Artificial Sequence: Synthetic peptide
  XENP020001 vhCDR1
SYTMH

SEQ ID NO: 7068 - protein, 17 aa, Artificial Sequence
  Description of Artificial Sequence: Synthetic peptide
  XENP020001 vhCDR2
FISYDGNNKYYADSVKG

SEQ ID NO: 7069 - protein, 9 aa, Artificial Sequence
  Description of Artificial Sequence: Synthetic peptide
  XENP020001 vhCDR3
TGWLGPFDY

SEQ ID NO: 7070 - protein, 12 aa, Artificial Sequence
  Description of Artificial Sequence: Synthetic peptide
  XENP020001 vlCDR1
RASQSVGSSYLA

SEQ ID NO: 7071 - protein, 7 aa, Artificial Sequence
  Description of Artificial Sequence: Synthetic peptide
  XENP020001 vlCDR2
GAFSRAT

SEQ ID NO: 7072 - protein, 9 aa, Artificial Sequence
  Description of Artificial Sequence: Synthetic peptide
  XENP020001 vlCDR3
QQYGSSPLT

SEQ ID NO: 7073 - protein, 246 aa, Artificial Sequence
  Description of Artificial Sequence: Synthetic polypeptide
  XENP020002 [CTLA-4]_H0_L0.110_scFv(GKPGS)4
QVQLVESGGGVVQPGRSLRLSCAASGFTFSSYTMHWVRQAPGKGLEWVTFISYDGNNKYYADSVKGRFTISRDNSKNTLYLQMNSLRAEDTAIYYCARTGWLGPFDYWGQGTLVTVSSGKPGSGKPGSGKPGSGKPGSEIVLTQSPGTLSLSPGERATLSCRASQSVGSSYLAWYQQKPGQAPRLLIYGAFSRATGIPDRFSGSGSGTDFTLTISRLEPEDFAVYYCQQYGSSPYTFGQGTKVEIK

SEQ ID NO: 7074 - protein, 118 aa, Artificial Sequence; identical to SEQ ID NO: 3737
  Description of Artificial Sequence: Synthetic polypeptide
  VH of XENP020002

SEQ ID NO: 7075 - protein, 108 aa, Artificial Sequence
  Description of Artificial Sequence: Synthetic polypeptide
  VL of XENP020002
EIVLTQSPGTLSLSPGERATLSCRASQSVGSSYLAWYQQKPGQAPRLLIYGAFSRATGIPDRFSGSGSGTDFTLTISRLEPEDFAVYYCQQYGSSPYTFGQGTKVEIK

SEQ ID NO: 7076 - protein, 5 aa, Artificial Sequence
  Description of Artificial Sequence: Synthetic peptide
  XENP020002 vhCDR1
SYTMH

SEQ ID NO: 7077 - protein, 17 aa, Artificial Sequence
  Description of Artificial Sequence: Synthetic peptide
  XENP020002 vhCDR2
FISYDGNNKYYADSVKG

SEQ ID NO: 7078 - protein, 9 aa, Artificial Sequence
  Description of Artificial Sequence: Synthetic peptide
  XENP020002 vhCDR3
TGWLGPFDY

SEQ ID NO: 7079 - protein, 12 aa, Artificial Sequence
  Description of Artificial Sequence: Synthetic peptide
  XENP020002 vlCDR1
RASQSVGSSYLA

SEQ ID NO: 7080 - protein, 7 aa, Artificial Sequence
  Description of Artificial Sequence: Synthetic peptide
  XENP020002 vlCDR2
GAFSRAT

SEQ ID NO: 7081 - protein, 9 aa, Artificial Sequence
  Description of Artificial Sequence: Synthetic peptide
  XENP020002 vlCDR3
QQYGSSPYT

SEQ ID NO: 7082 - protein, 246 aa, Artificial Sequence
  Description of Artificial Sequence: Synthetic polypeptide
  XENP020003 [CTLA-4]_H0_L0.111_scFv(GKPGS)4
QVQLVESGGGVVQPGRSLRLSCAASGFTFSSYTMHWVRQAPGKGLEWVTFISYDGNNKYYADSVKGRFTISRDNSKNTLYLQMNSLRAEDTAIYYCARTGWLGPFDYWGQGTLVTVSSGKPGSGKPGSGKPGSGKPGSEIVLTQSPGTLSLSPGERATLSCRASQSVGSSYLAWYQQKPGQAPRLLIYGAFSRATGIPDRFSGSGSGTDFTLTISRLEPEDFAVYYCQQYGSSPWVFGQGTKVEIK

SEQ ID NO: 7083 - protein, 118 aa, Artificial Sequence; identical to SEQ ID NO: 3737
  Description of Artificial Sequence: Synthetic polypeptide
  VH of XENP020003

SEQ ID NO: 7084 - protein, 108 aa, Artificial Sequence
  Description of Artificial Sequence: Synthetic polypeptide
  VL of XENP020003
EIVLTQSPGTLSLSPGERATLSCRASQSVGSSYLAWYQQKPGQAPRLLIYGAFSRATGIPDRFSGSGSGTDFTLTISRLEPEDFAVYYCQQYGSSPWVFGQGTKVEIK

SEQ ID NO: 7085 - protein, 5 aa, Artificial Sequence
  Description of Artificial Sequence: Synthetic peptide
  XENP020003 vhCDR1
SYTMH

SEQ ID NO: 7086 - protein, 17 aa, Artificial Sequence
  Description of Artificial Sequence: Synthetic peptide
  XENP020003 vhCDR2
FISYDGNNKYYADSVKG

SEQ ID NO: 7087 - protein, 9 aa, Artificial Sequence
  Description of Artificial Sequence: Synthetic peptide
  XENP020003 vhCDR3
TGWLGPFDY

SEQ ID NO: 7088 - protein, 12 aa, Artificial Sequence
  Description of Artificial Sequence: Synthetic peptide
  XENP020003 vlCDR1
RASQSVGSSYLA

SEQ ID NO: 7089 - protein, 7 aa, Artificial Sequence
  Description of Artificial Sequence: Synthetic peptide
  XENP020003 vlCDR2
GAFSRAT

SEQ ID NO: 7090 - protein, 9 aa, Artificial Sequence
  Description of Artificial Sequence: Synthetic peptide
  XENP020003 vlCDR3
QQYGSSPWV

SEQ ID NO: 7091 - protein, 246 aa, Artificial Sequence
  Description of Artificial Sequence: Synthetic polypeptide
  XENP020004 [CTLA-4]_H0_L0.112_scFv(GKPGS)4
QVQLVESGGGVVQPGRSLRLSCAASGFTFSSYTMHWVRQAPGKGLEWVTFISYDGNNKYYADSVKGRFTISRDNSKNTLYLQMNSLRAEDTAIYYCARTGWLGPFDYWGQGTLVTVSSGKPGSGKPGSGKPGSGKPGSEIVLTQSPGTLSLSPGERATLSCRASQSVGSSYLAWYQQKPGQAPRLLIYGAFSRATGIPDRFSGSGSGTDFTLTISRLEPEDFAVYYCQQYGSSPWTFGGGTKVEIK

SEQ ID NO: 7092 - protein, 118 aa, Artificial Sequence; identical to SEQ ID NO: 3737
  Description of Artificial Sequence: Synthetic polypeptide
  VH of XENP020004

SEQ ID NO: 7093 - protein, 108 aa, Artificial Sequence
  Description of Artificial Sequence: Synthetic polypeptide
  VL of XENP020004
EIVLTQSPGTLSLSPGERATLSCRASQSVGSSYLAWYQQKPGQAPRLLIYGAFSRATGIPDRFSGSGSGTDFTLTISRLEPEDFAVYYCQQYGSSPWTFGGGTKVEIK

SEQ ID NO: 7094 - protein, 5 aa, Artificial Sequence
  Description of Artificial Sequence: Synthetic peptide
  XENP020004 vhCDR1
SYTMH

SEQ ID NO: 7095 - protein, 17 aa, Artificial Sequence
  Description of Artificial Sequence: Synthetic peptide
  XENP020004 vhCDR2
FISYDGNNKYYADSVKG

SEQ ID NO: 7096 - protein, 9 aa, Artificial Sequence
  Description of Artificial Sequence: Synthetic peptide
  XENP020004 vhCDR3
TGWLGPFDY

SEQ ID NO: 7097 - protein, 12 aa, Artificial Sequence
  Description of Artificial Sequence: Synthetic peptide
  XENP020004 vlCDR1
RASQSVGSSYLA

SEQ ID NO: 7098 - protein, 7 aa, Artificial Sequence
  Description of Artificial Sequence: Synthetic peptide
  XENP020004 vlCDR2
GAFSRAT

SEQ ID NO: 7099 - protein, 9 aa, Artificial Sequence
  Description of Artificial Sequence: Synthetic peptide
  XENP020004 vlCDR3
QQYGSSPWT

SEQ ID NO: 7100 - protein, 246 aa, Artificial Sequence
  Description of Artificial Sequence: Synthetic polypeptide
  XENP020005 [CTLA-4]_H0_L0.113_scFv(GKPGS)4
QVQLVESGGGVVQPGRSLRLSCAASGFTFSSYTMHWVRQAPGKGLEWVTFISYDGNNKYYADSVKGRFTISRDNSKNTLYLQMNSLRAEDTAIYYCARTGWLGPFDYWGQGTLVTVSSGKPGSGKPGSGKPGSGKPGSEIVLTQSPGTLSLSPGERATLSCRASQSVGSSYLAWYQQKPGQAPRLLIYGAFSRATGIPDRFSGSGSGTDFTLTISRLEPEDFAVYYCQQYGSSPWTFGEGTKVEIK

SEQ ID NO: 7101 - protein, 118 aa, Artificial Sequence; identical to SEQ ID NO: 3737
  Description of Artificial Sequence: Synthetic polypeptide
  VH of XENP020005

SEQ ID NO: 7102 - protein, 108 aa, Artificial Sequence; identical to SEQ ID NO: 4735
  Description of Artificial Sequence: Synthetic polypeptide
  VL of XENP020005

SEQ ID NO: 7103 - protein, 5 aa, Artificial Sequence
  Description of Artificial Sequence: Synthetic peptide
  XENP020005 vhCDR1
SYTMH

SEQ ID NO: 7104 - protein, 17 aa, Artificial Sequence
  Description of Artificial Sequence: Synthetic peptide
  XENP020005 vhCDR2
FISYDGNNKYYADSVKG

SEQ ID NO: 7105 - protein, 9 aa, Artificial Sequence
  Description of Artificial Sequence: Synthetic peptide
  XENP020005 vhCDR3
TGWLGPFDY

SEQ ID NO: 7106 - protein, 12 aa, Artificial Sequence
  Description of Artificial Sequence: Synthetic peptide
  XENP020005 vlCDR1
RASQSVGSSYLA

SEQ ID NO: 7107 - protein, 7 aa, Artificial Sequence
  Description of Artificial Sequence: Synthetic peptide
  XENP020005 vlCDR2
GAFSRAT

SEQ ID NO: 7108 - protein, 9 aa, Artificial Sequence
  Description of Artificial Sequence: Synthetic peptide
  XENP020005 vlCDR3
QQYGSSPWT

SEQ ID NO: 7109 - protein, 246 aa, Artificial Sequence
  Description of Artificial Sequence: Synthetic polypeptide
  XENP020075 [CTLA-4]_H3.1_L0.12_scFv(GKPGS)4
EVQLVESGGGLVKPGGSLRLSCAASGFTFSSYTMHWVRQAPGKGLEWVSFISYDGNHKYYADSVKGRFTISRDNAKNSLYLQMNSLRAEDTAVYYCARTGLLGPFDLWGQGTMVTVSSGKPGSGKPGSGKPGSGKPGSEIVLTQSPGTLSVSPGERATLSCRASQSVGSSYLAWYQQKPGQAPRLLIYGAFSRATGIPDRFSGSGSGTDFTLTISRLEPEDFAVYYCQQYGSSPWTFGQGTKVEIK

SEQ ID NO: 7110 - protein, 118 aa, Artificial Sequence
  Description of Artificial Sequence: Synthetic polypeptide
  VH of XENP020075
EVQLVESGGGLVKPGGSLRLSCAASGFTFSSYTMHWVRQAPGKGLEWVSFISYDGNHKYYADSVKGRFTISRDNAKNSLYLQMNSLRAEDTAVYYCARTGLLGPFDLWGQGTMVTVSS

SEQ ID NO: 7111 - protein, 108 aa, Artificial Sequence; identical to SEQ ID NO: 6193
  Description of Artificial Sequence: Synthetic polypeptide
  VL of XENP020075

SEQ ID NO: 7112 - protein, 5 aa, Artificial Sequence
  Description of Artificial Sequence: Synthetic peptide
  XENP020075 vhCDR1
SYTMH

SEQ ID NO: 7113 - protein, 17 aa, Artificial Sequence
  Description of Artificial Sequence: Synthetic peptide
  XENP020075 vhCDR2
FISYDGNHKYYADSVKG

SEQ ID NO: 7114 - protein, 9 aa, Artificial Sequence
  Description of Artificial Sequence: Synthetic peptide
  XENP020075 vhCDR3
TGLLGPFDL

SEQ ID NO: 7115 - protein, 12 aa, Artificial Sequence
  Description of Artificial Sequence: Synthetic peptide
  XENP020075 vlCDR1
RASQSVGSSYLA

SEQ ID NO: 7116 - protein, 7 aa, Artificial Sequence
  Description of Artificial Sequence: Synthetic peptide
  XENP020075 vlCDR2
GAFSRAT

SEQ ID NO: 7117 - protein, 9 aa, Artificial Sequence
  Description of Artificial Sequence: Synthetic peptide
  XENP020075 vlCDR3
QQYGSSPWT

SEQ ID NO: 7118 - protein, 246 aa, Artificial Sequence
  Description of Artificial Sequence: Synthetic polypeptide
  XENP020076 [CTLA-4]_H3.2_L0.12_scFv(GKPGS)4
EVQLVESGGGLVKPGGSLRLSCAASGFTFSSYTMHWVRQAPGKGLEWVSFISYDGNTKYYADSVKGRFTISRDNAKNSLYLQMNSLRAEDTAVYYCARTGLLGPFDLWGQGTMVTVSSGKPGSGKPGSGKPGSGKPGSEIVLTQSPGTLSVSPGERATLSCRASQSVGSSYLAWYQQKPGQAPRLLIYGAFSRATGIPDRFSGSGSGTDFTLTISRLEPEDFAVYYCQQYGSSPWTFGQGTKVEIK

SEQ ID NO: 7119 - protein, 118 aa, Artificial Sequence
  Description of Artificial Sequence: Synthetic polypeptide
  VH of XENP020076
EVQLVESGGGLVKPGGSLRLSCAASGFTFSSYTMHWVRQAPGKGLEWVSFISYDGNTKYYADSVKGRFTISRDNAKNSLYLQMNSLRAEDTAVYYCARTGLLGPFDLWGQGTMVTVSS

SEQ ID NO: 7120 - protein, 108 aa, Artificial Sequence; identical to SEQ ID NO: 6193
  Description of Artificial Sequence: Synthetic polypeptide
  VL of XENP020076

SEQ ID NO: 7121 - protein, 5 aa, Artificial Sequence
  Description of Artificial Sequence: Synthetic peptide
  XENP020076 vhCDR1
SYTMH

SEQ ID NO: 7122 - protein, 17 aa, Artificial Sequence
  Description of Artificial Sequence: Synthetic peptide
  XENP020076 vhCDR2
FISYDGNTKYYADSVKG

SEQ ID NO: 7123 - protein, 9 aa, Artificial Sequence
  Description of Artificial Sequence: Synthetic peptide
  XENP020076 vhCDR3
TGLLGPFDL

SEQ ID NO: 7124 - protein, 12 aa, Artificial Sequence
  Description of Artificial Sequence: Synthetic peptide
  XENP020076 vlCDR1
RASQSVGSSYLA

SEQ ID NO: 7125 - protein, 7 aa, Artificial Sequence
  Description of Artificial Sequence: Synthetic peptide
  XENP020076 vlCDR2
GAFSRAT

SEQ ID NO: 7126 - protein, 9 aa, Artificial Sequence
  Description of Artificial Sequence: Synthetic peptide
  XENP020076 vlCDR3
QQYGSSPWT

SEQ ID NO: 7127 - protein, 246 aa, Artificial Sequence
  Description of Artificial Sequence: Synthetic polypeptide
  XENP020077 [CTLA-4]_H3.3_L0.12_scFv(GKPGS)4
EVQLVESGGGLVKPGGSLRLSCAASGFTFSSYTMHWVRQAPGKGLEWVSFISYDGNQKYYADSVKGRFTISRDNAKNSLYLQMNSLRAEDTAVYYCARTGLLGPFDLWGQGTMVTVSSGKPGSGKPGSGKPGSGKPGSEIVLTQSPGTLSVSPGERATLSCRASQSVGSSYLAWYQQKPGQAPRLLIYGAFSRATGIPDRFSGSGSGTDFTLTISRLEPEDFAVYYCQQYGSSPWTFGQGTKVEIK

SEQ ID NO: 7128 - protein, 118 aa, Artificial Sequence
  Description of Artificial Sequence: Synthetic polypeptide
  VH of XENP020077
EVQLVESGGGLVKPGGSLRLSCAASGFTFSSYTMHWVRQAPGKGLEWVSFISYDGNQKYYADSVKGRFTISRDNAKNSLYLQMNSLRAEDTAVYYCARTGLLGPFDLWGQGTMVTVSS

SEQ ID NO: 7129 - protein, 108 aa, Artificial Sequence; identical to SEQ ID NO: 6193
  Description of Artificial Sequence: Synthetic polypeptide
  VL of XENP020077

SEQ ID NO: 7130 - protein, 5 aa, Artificial Sequence
  Description of Artificial Sequence: Synthetic peptide
  XENP020077 vhCDR1
SYTMH

SEQ ID NO: 7131 - protein, 17 aa, Artificial Sequence
  Description of Artificial Sequence: Synthetic peptide
  XENP020077 vhCDR2
FISYDGNQKYYADSVKG

SEQ ID NO: 7132 - protein, 9 aa, Artificial Sequence
  Description of Artificial Sequence: Synthetic peptide
  XENP020077 vhCDR3
TGLLGPFDL

SEQ ID NO: 7133 - protein, 12 aa, Artificial Sequence
  Description of Artificial Sequence: Synthetic peptide
  XENP020077 vlCDR1
RASQSVGSSYLA

SEQ ID NO: 7134 - protein, 7 aa, Artificial Sequence
  Description of Artificial Sequence: Synthetic peptide
  XENP020077 vlCDR2
GAFSRAT

SEQ ID NO: 7135 - protein, 9 aa, Artificial Sequence
  Description of Artificial Sequence: Synthetic peptide
  XENP020077 vlCDR3
QQYGSSPWT

SEQ ID NO: 7136 - protein, 246 aa, Artificial Sequence
  Description of Artificial Sequence: Synthetic polypeptide
  XENP020078 [CTLA-4]_H3.4_L0.12_scFv(GKPGS)4
EVQLVESGGGLVKPGGSLRLSCAASGFTFSSYTMHWVRQAPGKGLEWVSFISYDGNHKYYADSVKGRFTISRDNAKNSLYLQMNSLRAEDTAVYYCARTGHLGPFDLWGQGTMVTVSSGKPGSGKPGSGKPGSGKPGSEIVLTQSPGTLSVSPGERATLSCRASQSVGSSYLAWYQQKPGQAPRLLIYGAFSRATGIPDRFSGSGSGTDFTLTISRLEPEDFAVYYCQQYGSSPWTFGQGTKVEIK

SEQ ID NO: 7137 - protein, 118 aa, Artificial Sequence
  Description of Artificial Sequence: Synthetic polypeptide
  VH of XENP020078
EVQLVESGGGLVKPGGSLRLSCAASGFTFSSYTMHWVRQAPGKGLEWVSFISYDGNHKYYADSVKGRFTISRDNAKNSLYLQMNSLRAEDTAVYYCARTGHLGPFDLWGQGTMVTVSS

SEQ ID NO: 7138 - protein, 108 aa, Artificial Sequence; identical to SEQ ID NO: 6193
  Description of Artificial Sequence: Synthetic polypeptide
  VL of XENP020078

SEQ ID NO: 7139 - protein, 5 aa, Artificial Sequence
  Description of Artificial Sequence: Synthetic peptide
  XENP020078 vhCDR1
SYTMH

SEQ ID NO: 7140 - protein, 17 aa, Artificial Sequence
  Description of Artificial Sequence: Synthetic peptide
  XENP020078 vhCDR2
FISYDGNHKYYADSVKG

SEQ ID NO: 7141 - protein, 9 aa, Artificial Sequence
  Description of Artificial Sequence: Synthetic peptide
  XENP020078 vhCDR3
TGHLGPFDL

SEQ ID NO: 7142 - protein, 12 aa, Artificial Sequence
  Description of Artificial Sequence: Synthetic peptide
  XENP020078 vlCDR1
RASQSVGSSYLA

SEQ ID NO: 7143 - protein, 7 aa, Artificial Sequence
  Description of Artificial Sequence: Synthetic peptide
  XENP020078 vlCDR2
GAFSRAT

SEQ ID NO: 7144 - protein, 9 aa, Artificial Sequence
  Description of Artificial Sequence: Synthetic peptide
  XENP020078 vlCDR3
QQYGSSPWT

SEQ ID NO: 7145 - protein, 246 aa, Artificial Sequence
  Description of Artificial Sequence: Synthetic polypeptide
  XENP020079 [CTLA-4]_H3.5_L0.12_scFv(GKPGS)4
EVQLVESGGGLVKPGGSLRLSCAASGFTFSSYTMHWVRQAPGKGLEWVSFISYDGNTKYYADSVKGRFTISRDNAKNSLYLQMNSLRAEDTAVYYCARTGHLGPFDLWGQGTMVTVSSGKPGSGKPGSGKPGSGKPGSEIVLTQSPGTLSVSPGERATLSCRASQSVGSSYLAWYQQKPGQAPRLLIYGAFSRATGIPDRFSGSGSGTDFTLTISRLEPEDFAVYYCQQYGSSPWTFGQGTKVEIK

SEQ ID NO: 7146 - protein, 118 aa, Artificial Sequence
  Description of Artificial Sequence: Synthetic polypeptide
  VH of XENP020079
EVQLVESGGGLVKPGGSLRLSCAASGFTFSSYTMHWVRQAPGKGLEWVSFISYDGNTKYYADSVKGRFTISRDNAKNSLYLQMNSLRAEDTAVYYCARTGHLGPFDLWGQGTMVTVSS

SEQ ID NO: 7147 - protein, 108 aa, Artificial Sequence; identical to SEQ ID NO: 6193
  Description of Artificial Sequence: Synthetic polypeptide
  VL of XENP020079

SEQ ID NO: 7148 - protein, 5 aa, Artificial Sequence
  Description of Artificial Sequence: Synthetic peptide
  XENP020079 vhCDR1
SYTMH

SEQ ID NO: 7149 - protein, 17 aa, Artificial Sequence
  Description of Artificial Sequence: Synthetic peptide
  XENP020079 vhCDR2
FISYDGNTKYYADSVKG

SEQ ID NO: 7150 - protein, 9 aa, Artificial Sequence
  Description of Artificial Sequence: Synthetic peptide
  XENP020079 vhCDR3
TGHLGPFDL

SEQ ID NO: 7151 - protein, 12 aa, Artificial Sequence
  Description of Artificial Sequence: Synthetic peptide
  XENP020079 vlCDR1
RASQSVGSSYLA

SEQ ID NO: 7152 - protein, 7 aa, Artificial Sequence
  Description of Artificial Sequence: Synthetic peptide
  XENP020079 vlCDR2
GAFSRAT

SEQ ID NO: 7153 - protein, 9 aa, Artificial Sequence
  Description of Artificial Sequence: Synthetic peptide
  XENP020079 vlCDR3
QQYGSSPWT

SEQ ID NO: 7154 - protein, 246 aa, Artificial Sequence
  Description of Artificial Sequence: Synthetic polypeptide
  XENP020080 [CTLA-4]_H3.6_L0.12_scFv(GKPGS)4
EVQLVESGGGLVKPGGSLRLSCAASGFTFSSYTMHWVRQAPGKGLEWVSFISYDGNQKYYADSVKGRFTISRDNAKNSLYLQMNSLRAEDTAVYYCARTGHLGPFDLWGQGTMVTVSSGKPGSGKPGSGKPGSGKPGSEIVLTQSPGTLSVSPGERATLSCRASQSVGSSYLAWYQQKPGQAPRLLIYGAFSRATGIPDRFSGSGSGTDFTLTISRLEPEDFAVYYCQQYGSSPWTFGQGTKVEIK

SEQ ID NO: 7155 - protein, 118 aa, Artificial Sequence
  Description of Artificial Sequence: Synthetic polypeptide
  VH of XENP020080
EVQLVESGGGLVKPGGSLRLSCAASGFTFSSYTMHWVRQAPGKGLEWVSFISYDGNQKYYADSVKGRFTISRDNAKNSLYLQMNSLRAEDTAVYYCARTGHLGPFDLWGQGTMVTVSS

SEQ ID NO: 7156 - protein, 108 aa, Artificial Sequence; identical to SEQ ID NO: 6193
  Description of Artificial Sequence: Synthetic polypeptide
  VL of XENP020080

SEQ ID NO: 7157 - protein, 5 aa, Artificial Sequence
  Description of Artificial Sequence: Synthetic peptide
  XENP020080 vhCDR1
SYTMH

SEQ ID NO: 7158 - protein, 17 aa, Artificial Sequence
  Description of Artificial Sequence: Synthetic peptide
  XENP020080 vhCDR2
FISYDGNQKYYADSVKG

SEQ ID NO: 7159 - protein, 9 aa, Artificial Sequence
  Description of Artificial Sequence: Synthetic peptide
  XENP020080 vhCDR3
TGHLGPFDL

SEQ ID NO: 7160 - protein, 12 aa, Artificial Sequence
  Description of Artificial Sequence: Synthetic peptide
  XENP020080 vlCDR1
RASQSVGSSYLA

SEQ ID NO: 7161 - protein, 7 aa, Artificial Sequence
  Description of Artificial Sequence: Synthetic peptide
  XENP020080 vlCDR2
GAFSRAT

SEQ ID NO: 7162 - protein, 9 aa, Artificial Sequence
  Description of Artificial Sequence: Synthetic peptide
  XENP020080 vlCDR3
QQYGSSPWT

SEQ ID NO: 7163 - protein, 246 aa, Artificial Sequence
  Description of Artificial Sequence: Synthetic polypeptide
  XENP020081 [CTLA-4]_H3.7_L0.12_scFv(GKPGS)4
EVQLVESGGGLVKPGGSLRLSCAASGFTFSSYTMHWVRQAPGKGLEWVCFISYDGNNKYYADSVKGRFTCSRDNAKNSLYLQMNSLRAEDTAVYYCARTGWLGPFDYWGQGTLVTVSSGKPGSGKPGSGKPGSGKPGSEIVLTQSPGTLSVSPGERATLSCRASQSVGSSYLAWYQQKPGQAPRLLIYGAFSRATGIPDRFSGSGSGTDFTLTISRLEPEDFAVYYCQQYGSSPWTFGQGTKVEIK

SEQ ID NO: 7164 - protein, 118 aa, Artificial Sequence
  Description of Artificial Sequence: Synthetic polypeptide
  VH of XENP020081
EVQLVESGGGLVKPGGSLRLSCAASGFTFSSYTMHWVRQAPGKGLEWVCFISYDGNNKYYADSVKGRFTCSRDNAKNSLYLQMNSLRAEDTAVYYCARTGWLGPFDYWGQGTLVTVSS

SEQ ID NO: 7165 - protein, 108 aa, Artificial Sequence; identical to SEQ ID NO: 6193
  Description of Artificial Sequence: Synthetic polypeptide
  VL of XENP020081

SEQ ID NO: 7166 - protein, 5 aa, Artificial Sequence
  Description of Artificial Sequence: Synthetic peptide
  XENP020081 vhCDR1
SYTMH

SEQ ID NO: 7167 - protein, 17 aa, Artificial Sequence
  Description of Artificial Sequence: Synthetic peptide
  XENP020081 vhCDR2
FISYDGNNKYYADSVKG

SEQ ID NO: 7168 - protein, 9 aa, Artificial Sequence
  Description of Artificial Sequence: Synthetic peptide
  XENP020081 vhCDR3
TGWLGPFDY

SEQ ID NO: 7169 - protein, 12 aa, Artificial Sequence
  Description of Artificial Sequence: Synthetic peptide
  XENP020081 vlCDR1
RASQSVGSSYLA

SEQ ID NO: 7170 - protein, 7 aa, Artificial Sequence
  Description of Artificial Sequence: Synthetic peptide
  XENP020081 vlCDR2
GAFSRAT

SEQ ID NO: 7171 - protein, 9 aa, Artificial Sequence
  Description of Artificial Sequence: Synthetic peptide
  XENP020081 vlCDR3
QQYGSSPWT

SEQ ID NO: 7172 - protein, 246 aa, Artificial Sequence
  Description of Artificial Sequence: Synthetic polypeptide
  XENP020082 [CTLA-4]_H3.8_L0.12_scFv(GKPGS)4
EVQLVESGGGLVKPGGSLRLSCAASGFTFSSYTMHWVRQAPGKCLEWVSFISYDGNNKYYADSVKGRFTISRDNAKNSLYLQMNSLRAEDTAVYYCARTGWLGPFDYWGQGTLVTVSSGKPGSGKPGSGKPGSGKPGSEIVLTQSPGTLSVSPGERATLSCRASQSVGSSYLAWYQQKPGQAPRLLIYGAFSRATGIPDRFSGSGSGTDFTLTISRLEPEDFAVYYCQQYGSSPWTFGQGTKVEIK

SEQ ID NO: 7173 - protein, 118 aa, Artificial Sequence
  Description of Artificial Sequence: Synthetic polypeptide
  VH of XENP020082
EVQLVESGGGLVKPGGSLRLSCAASGFTFSSYTMHWVRQAPGKCLEWVSFISYDGNNKYYADSVKGRFTISRDNAKNSLYLQMNSLRAEDTAVYYCARTGWLGPFDYWGQGTLVTVSS

SEQ ID NO: 7174 - protein, 108 aa, Artificial Sequence; identical to SEQ ID NO: 6193
  Description of Artificial Sequence: Synthetic polypeptide
  VL of XENP020082

SEQ ID NO: 7175 - protein, 5 aa, Artificial Sequence
  Description of Artificial Sequence: Synthetic peptide
  XENP020082 vhCDR1
SYTMH

SEQ ID NO: 7176 - protein, 17 aa, Artificial Sequence
  Description of Artificial Sequence: Synthetic peptide
  XENP020082 vhCDR2
FISYDGNNKYYADSVKG

SEQ ID NO: 7177 - protein, 9 aa, Artificial Sequence
  Description of Artificial Sequence: Synthetic peptide
  XENP020082 vhCDR3
TGWLGPFDY

SEQ ID NO: 7178 - protein, 12 aa, Artificial Sequence
  Description of Artificial Sequence: Synthetic peptide
  XENP020082 vlCDR1
RASQSVGSSYLA

SEQ ID NO: 7179 - protein, 7 aa, Artificial Sequence
  Description of Artificial Sequence: Synthetic peptide
  XENP020082 vlCDR2
GAFSRAT

SEQ ID NO: 7180 - protein, 9 aa, Artificial Sequence
  Description of Artificial Sequence: Synthetic peptide
  XENP020082 vlCDR3
QQYGSSPWT

SEQ ID NO: 7181 - protein, 246 aa, Artificial Sequence
  Description of Artificial Sequence: Synthetic polypeptide
  XENP020360 [CTLA-4]_H3.9_L0.12_scFv(GKPGS)4
EVQLVESGGGLVKPGGSLRLSCAASGFTFSSYTMHWVRQAPGKGLEWVSFISYDGNYKYYADSVKGRFTISRDNAKNSLYLQMNSLRAEDTAVYYCARTGHLGPFDLWGQGTMVTVSSGKPGSGKPGSGKPGSGKPGSEIVLTQSPGTLSVSPGERATLSCRASQSVGSSYLAWYQQKPGQAPRLLIYGAFSRATGIPDRFSGSGSGTDFTLTISRLEPEDFAVYYCQQYGSSPWTFGQGTKVEIK

SEQ ID NO: 7182 - protein, 118 aa, Artificial Sequence
  Description of Artificial Sequence: Synthetic polypeptide
  VH of XENP020360
EVQLVESGGGLVKPGGSLRLSCAASGFTFSSYTMHWVRQAPGKGLEWVSFISYDGNYKYYADSVKGRFTISRDNAKNSLYLQMNSLRAEDTAVYYCARTGHLGPFDLWGQGTMVTVSS

SEQ ID NO: 7183 - protein, 108 aa, Artificial Sequence; identical to SEQ ID NO: 6193
  Description of Artificial Sequence: Synthetic polypeptide
  VL of XENP020360

SEQ ID NO: 7184 - protein, 5 aa, Artificial Sequence
  Description of Artificial Sequence: Synthetic peptide
  XENP020360 vhCDR1
SYTMH

SEQ ID NO: 7185 - protein, 17 aa, Artificial Sequence
  Description of Artificial Sequence: Synthetic peptide
  XENP020360 vhCDR2
FISYDGNYKYYADSVKG

SEQ ID NO: 7186 - protein, 9 aa, Artificial Sequence
  Description of Artificial Sequence: Synthetic peptide
  XENP020360 vhCDR3
TGHLGPFDL

SEQ ID NO: 7187 - protein, 12 aa, Artificial Sequence
  Description of Artificial Sequence: Synthetic peptide
  XENP020360 vlCDR1
RASQSVGSSYLA

SEQ ID NO: 7188 - protein, 7 aa, Artificial Sequence
  Description of Artificial Sequence: Synthetic peptide
  XENP020360 vlCDR2
GAFSRAT

SEQ ID NO: 7189 - protein, 9 aa, Artificial Sequence
  Description of Artificial Sequence: Synthetic peptide
  XENP020360 vlCDR3
QQYGSSPWT

SEQ ID NO: 7190 - protein, 246 aa, Artificial Sequence
  Description of Artificial Sequence: Synthetic polypeptide
  XENP020361 [CTLA-4]_H3.10_L0.12_scFv(GKPGS)4
EVQLVESGGGLVKPGGSLRLSCAASGFTFSSYTMHWVRQAPGKGLEWVSFISYDGNYKYYADSVKGRFTISRDNAKNSLYLQMNSLRAEDTAVYYCARTGLLGPFDLWGQGTMVTVSSGKPGSGKPGSGKPGSGKPGSEIVLTQSPGTLSVSPGERATLSCRASQSVGSSYLAWYQQKPGQAPRLLIYGAFSRATGIPDRFSGSGSGTDFTLTISRLEPEDFAVYYCQQYGSSPWTFGQGTKVEIK

SEQ ID NO: 7191 - protein, 118 aa, Artificial Sequence
  Description of Artificial Sequence: Synthetic polypeptide
  VH of XENP020361
EVQLVESGGGLVKPGGSLRLSCAASGFTFSSYTMHWVRQAPGKGLEWVSFISYDGNYKYYADSVKGRFTISRDNAKNSLYLQMNSLRAEDTAVYYCARTGLLGPFDLWGQGTMVTVSS

SEQ ID NO: 7192 - protein, 108 aa, Artificial Sequence; identical to SEQ ID NO: 6193
  Description of Artificial Sequence: Synthetic polypeptide
  VL of XENP020361

SEQ ID NO: 7193 - protein, 5 aa, Artificial Sequence
  Description of Artificial Sequence: Synthetic peptide
  XENP020361 vhCDR1
SYTMH

SEQ ID NO: 7194 - protein, 17 aa, Artificial Sequence
  Description of Artificial Sequence: Synthetic peptide
  XENP020361 vhCDR2
FISYDGNYKYYADSVKG

SEQ ID NO: 7195 - protein, 9 aa, Artificial Sequence
  Description of Artificial Sequence: Synthetic peptide
  XENP020361 vhCDR3
TGLLGPFDL

SEQ ID NO: 7196 - protein, 12 aa, Artificial Sequence
  Description of Artificial Sequence: Synthetic peptide
  XENP020361 vlCDR1
RASQSVGSSYLA

SEQ ID NO: 7197 - protein, 7 aa, Artificial Sequence
  Description of Artificial Sequence: Synthetic peptide
  XENP020361 vlCDR2
GAFSRAT

SEQ ID NO: 7198 - protein, 9 aa, Artificial Sequence
  Description of Artificial Sequence: Synthetic peptide
  XENP020361 vlCDR3
QQYGSSPWT

SEQ ID NO: 7199 - protein, 246 aa, Artificial Sequence
  Description of Artificial Sequence: Synthetic polypeptide
  XENP020362 [CTLA-4]_H3.11_L0.12_scFv(GKPGS)4
EVQLVESGGGLVKPGGSLRLSCAASGFTFSSYTMHWVRQAPGKGLEWVSFISYDGNHKYYADSVKGRFTISRDNAKNSLYLQMNSLRAEDTAVYYCARGGHLGPFDLWGQGTMVTVSSGKPGSGKPGSGKPGSGKPGSEIVLTQSPGTLSVSPGERATLSCRASQSVGSSYLAWYQQKPGQAPRLLIYGAFSRATGIPDRFSGSGSGTDFTLTISRLEPEDFAVYYCQQYGSSPWTFGQGTKVEIK

SEQ ID NO: 7200 - protein, 118 aa, Artificial Sequence
  Description of Artificial Sequence: Synthetic polypeptide
  VH of XENP020362
EVQLVESGGGLVKPGGSLRLSCAASGFTFSSYTMHWVRQAPGKGLEWVSFISYDGNHKYYADSVKGRFTISRDNAKNSLYLQMNSLRAEDTAVYYCARGGHLGPFDLWGQGTMVTVSS

SEQ ID NO: 7201 - protein, 108 aa, Artificial Sequence; identical to SEQ ID NO: 6193
  Description of Artificial Sequence: Synthetic polypeptide
  VL of XENP020362

SEQ ID NO: 7202 - protein, 5 aa, Artificial Sequence
  Description of Artificial Sequence: Synthetic peptide
  XENP020362 vhCDR1
SYTMH

SEQ ID NO: 7203 - protein, 17 aa, Artificial Sequence
  Description of Artificial Sequence: Synthetic peptide
  XENP020362 vhCDR2
FISYDGNHKYYADSVKG

SEQ ID NO: 7204 - protein, 9 aa, Artificial Sequence
  Description of Artificial Sequence: Synthetic peptide
  XENP020362 vhCDR3
GGHLGPFDL

SEQ ID NO: 7205 - protein, 12 aa, Artificial Sequence
  Description of Artificial Sequence: Synthetic peptide
  XENP020362 vlCDR1
RASQSVGSSYLA

SEQ ID NO: 7206 - protein, 7 aa, Artificial Sequence
  Description of Artificial Sequence: Synthetic peptide
  XENP020362 vlCDR2
GAFSRAT

SEQ ID NO: 7207 - protein, 9 aa, Artificial Sequence
  Description of Artificial Sequence: Synthetic peptide
  XENP020362 vlCDR3
QQYGSSPWT

SEQ ID NO: 7208 - protein, 246 aa, Artificial Sequence
  Description of Artificial Sequence: Synthetic polypeptide
  XENP020363 [CTLA-4]_H3.12_L0.12_scFv(GKPGS)4
EVQLVESGGGLVKPGGSLRLSCAASGFTFSSYTMHWVRQAPGKGLEWVSFISYDGNHKYYADSVKGRFTISRDNAKNSLYLQMNSLRAEDTAVYYCARTSHLGPFDLWGQGTMVTVSSGKPGSGKPGSGKPGSGKPGSEIVLTQSPGTLSVSPGERATLSCRASQSVGSSYLAWYQQKPGQAPRLLIYGAFSRATGIPDRFSGSGSGTDFTLTISRLEPEDFAVYYCQQYGSSPWTFGQGTKVEIK

SEQ ID NO: 7209 - protein, 118 aa, Artificial Sequence
  Description of Artificial Sequence: Synthetic polypeptide
  VH of XENP020363
EVQLVESGGGLVKPGGSLRLSCAASGFTFSSYTMHWVRQAPGKGLEWVSFISYDGNHKYYADSVKGRFTISRDNAKNSLYLQMNSLRAEDTAVYYCARTSHLGPFDLWGQGTMVTVSS

SEQ ID NO: 7210 - protein, 108 aa, Artificial Sequence; identical to SEQ ID NO: 6193
  Description of Artificial Sequence: Synthetic polypeptide
  VL of XENP020363

SEQ ID NO: 7211 - protein, 5 aa, Artificial Sequence
  Description of Artificial Sequence: Synthetic peptide
  XENP020363 vhCDR1
SYTMH

SEQ ID NO: 7212 - protein, 17 aa, Artificial Sequence
  Description of Artificial Sequence: Synthetic peptide
  XENP020363 vhCDR2
FISYDGNHKYYADSVKG

SEQ ID NO: 7213 - protein, 9 aa, Artificial Sequence
  Description of Artificial Sequence: Synthetic peptide
  XENP020363 vhCDR3
TSHLGPFDL

SEQ ID NO: 7214 - protein, 12 aa, Artificial Sequence
  Description of Artificial Sequence: Synthetic peptide
  XENP020363 vlCDR1
RASQSVGSSYLA

SEQ ID NO: 7215 - protein, 7 aa, Artificial Sequence
  Description of Artificial Sequence: Synthetic peptide
  XENP020363 vlCDR2
GAFSRAT

SEQ ID NO: 7216 - protein, 9 aa, Artificial Sequence
  Description of Artificial Sequence: Synthetic peptide
  XENP020363 vlCDR3
QQYGSSPWT

SEQ ID NO: 7217 - protein, 246 aa, Artificial Sequence
  Description of Artificial Sequence: Synthetic polypeptide
  XENP020364 [CTLA-4]_H3.13_L0.12_scFv(GKPGS)4
EVQLVESGGGLVKPGGSLRLSCAASGFTFSSYTMHWVRQAPGKGLEWVSFISYDGNHKYYADSVKGRFTISRDNAKNSLYLQMNSLRAEDTAVYYCARGGLLGPFDLWGQGTMVTVSSGKPGSGKPGSGKPGSGKPGSEIVLTQSPGTLSVSPGERATLSCRASQSVGSSYLAWYQQKPGQAPRLLIYGAFSRATGIPDRFSGSGSGTDFTLTISRLEPEDFAVYYCQQYGSSPWTFGQGTKVEIK

SEQ ID NO: 7218 - protein, 118 aa, Artificial Sequence
  Description of Artificial Sequence: Synthetic polypeptide
  VH of XENP020364
EVQLVESGGGLVKPGGSLRLSCAASGFTFSSYTMHWVRQAPGKGLEWVSFISYDGNHKYYADSVKGRFTISRDNAKNSLYLQMNSLRAEDTAVYYCARGGLLGPFDLWGQGTMVTVSS

SEQ ID NO: 7219 - protein, 108 aa, Artificial Sequence; identical to SEQ ID NO: 6193
  Description of Artificial Sequence: Synthetic polypeptide
  VL of XENP020364

SEQ ID NO: 7220 - protein, 5 aa, Artificial Sequence
  Description of Artificial Sequence: Synthetic peptide
  XENP020364 vhCDR1
SYTMH

SEQ ID NO: 7221 - protein, 17 aa, Artificial Sequence
  Description of Artificial Sequence: Synthetic peptide
  XENP020364 vhCDR2
FISYDGNHKYYADSVKG

SEQ ID NO: 7222 - protein, 9 aa, Artificial Sequence
  Description of Artificial Sequence: Synthetic peptide
  XENP020364 vhCDR3
GGLLGPFDL

SEQ ID NO: 7223 - protein, 12 aa, Artificial Sequence
  Description of Artificial Sequence: Synthetic peptide
  XENP020364 vlCDR1
RASQSVGSSYLA

SEQ ID NO: 7224 - protein, 7 aa, Artificial Sequence
  Description of Artificial Sequence: Synthetic peptide
  XENP020364 vlCDR2
GAFSRAT

SEQ ID NO: 7225 - protein, 9 aa, Artificial Sequence
  Description of Artificial Sequence: Synthetic peptide
  XENP020364 vlCDR3
QQYGSSPWT

SEQ ID NO: 7226 - protein, 246 aa, Artificial Sequence
  Description of Artificial Sequence: Synthetic polypeptide
  XENP020365 [CTLA-4]_H3.14_L0.12_scFv(GKPGS)4
EVQLVESGGGLVKPGGSLRLSCAASGFTFSSYTMHWVRQAPGKGLEWVSFISYDGNHKYYADSVKGRFTISRDNAKNSLYLQMNSLRAEDTAVYYCARTSLLGPFDLWGQGTMVTVSSGKPGSGKPGSGKPGSGKPGSEIVLTQSPGTLSVSPGERATLSCRASQSVGSSYLAWYQQKPGQAPRLLIYGAFSRATGIPDRFSGSGSGTDFTLTISRLEPEDFAVYYCQQYGSSPWTFGQGTKVEIK

SEQ ID NO: 7227 - protein, 118 aa, Artificial Sequence
  Description of Artificial Sequence: Synthetic polypeptide
  VH of XENP020365
EVQLVESGGGLVKPGGSLRLSCAASGFTFSSYTMHWVRQAPGKGLEWVSFISYDGNHKYYADSVKGRFTISRDNAKNSLYLQMNSLRAEDTAVYYCARTSLLGPFDLWGQGTMVTVSS

SEQ ID NO: 7228 - protein, 108 aa, Artificial Sequence; identical to SEQ ID NO: 6193
  Description of Artificial Sequence: Synthetic polypeptide
  VL of XENP020365

SEQ ID NO: 7229 - protein, 5 aa, Artificial Sequence
  Description of Artificial Sequence: Synthetic peptide
  XENP020365 vhCDR1
SYTMH

SEQ ID NO: 7230 - protein, 17 aa, Artificial Sequence
  Description of Artificial Sequence: Synthetic peptide
  XENP020365 vhCDR2
FISYDGNHKYYADSVKG

SEQ ID NO: 7231 - protein, 9 aa, Artificial Sequence
  Description of Artificial Sequence: Synthetic peptide
  XENP020365 vhCDR3
TSLLGPFDL

SEQ ID NO: 7232 - protein, 12 aa, Artificial Sequence
  Description of Artificial Sequence: Synthetic peptide
  XENP020365 vlCDR1
RASQSVGSSYLA

SEQ ID NO: 7233 - protein, 7 aa, Artificial Sequence
  Description of Artificial Sequence: Synthetic peptide
  XENP020365 vlCDR2
GAFSRAT

SEQ ID NO: 7234 - protein, 9 aa, Artificial Sequence
  Description of Artificial Sequence: Synthetic peptide
  XENP020365 vlCDR3
QQYGSSPWT

SEQ ID NO: 7235 - protein, 246 aa, Artificial Sequence
  Description of Artificial Sequence: Synthetic polypeptide
  XENP020366 [CTLA-4]_H3.15_L0.12_scFv(GKPGS)4
EVQLVESGGGLVKPGGSLRLSCAASGFTFSSYTMHWVRQAPGKGLEWVSFISYDGNQKYYADSVKGRFTISRDNAKNSLYLQMNSLRAEDTAVYYCARGGHLGPFDLWGQGTMVTVSSGKPGSGKPGSGKPGSGKPGSEIVLTQSPGTLSVSPGERATLSCRASQSVGSSYLAWYQQKPGQAPRLLIYGAFSRATGIPDRFSGSGSGTDFTLTISRLEPEDFAVYYCQQYGSSPWTFGQGTKVEIK

SEQ ID NO: 7236 - protein, 118 aa, Artificial Sequence
  Description of Artificial Sequence: Synthetic polypeptide
  VH of XENP020366
EVQLVESGGGLVKPGGSLRLSCAASGFTFSSYTMHWVRQAPGKGLEWVSFISYDGNQKYYADSVKGRFTISRDNAKNSLYLQMNSLRAEDTAVYYCARGGHLGPFDLWGQGTMVTVSS

SEQ ID NO: 7237 - protein, 108 aa, Artificial Sequence; identical to SEQ ID NO: 6193
  Description of Artificial Sequence: Synthetic polypeptide
  VL of XENP020366

SEQ ID NO: 7238 - protein, 5 aa, Artificial Sequence
  Description of Artificial Sequence: Synthetic peptide
  XENP020366 vhCDR1
SYTMH

SEQ ID NO: 7239 - protein, 17 aa, Artificial Sequence
  Description of Artificial Sequence: Synthetic peptide
  XENP020366 vhCDR2
FISYDGNQKYYADSVKG

SEQ ID NO: 7240 - protein, 9 aa, Artificial Sequence
  Description of Artificial Sequence: Synthetic peptide
  XENP020366 vhCDR3
GGHLGPFDL

SEQ ID NO: 7241 - protein, 12 aa, Artificial Sequence
  Description of Artificial Sequence: Synthetic peptide
  XENP020366 vlCDR1
RASQSVGSSYLA

SEQ ID NO: 7242 - protein, 7 aa, Artificial Sequence
  Description of Artificial Sequence: Synthetic peptide
  XENP020366 vlCDR2
GAFSRAT

SEQ ID NO: 7243 - protein, 9 aa, Artificial Sequence
  Description of Artificial Sequence: Synthetic peptide
  XENP020366 vlCDR3
QQYGSSPWT

SEQ ID NO: 7244 - protein, 246 aa, Artificial Sequence
  Description of Artificial Sequence: Synthetic polypeptide
  XENP020367 [CTLA-4]_H3.16_L0.12_scFv(GKPGS)4
EVQLVESGGGLVKPGGSLRLSCAASGFTFSSYTMHWVRQAPGKGLEWVSFISYDGNQKYYADSVKGRFTISRDNAKNSLYLQMNSLRAEDTAVYYCARTSHLGPFDLWGQGTMVTVSSGKPGSGKPGSGKPGSGKPGSEIVLTQSPGTLSVSPGERATLSCRASQSVGSSYLAWYQQKPGQAPRLLIYGAFSRATGIPDRFSGSGSGTDFTLTISRLEPEDFAVYYCQQYGSSPWTFGQGTKVEIK

SEQ ID NO: 7245 - protein, 118 aa, Artificial Sequence
  Description of Artificial Sequence: Synthetic polypeptide
  VH of XENP020367
EVQLVESGGGLVKPGGSLRLSCAASGFTFSSYTMHWVRQAPGKGLEWVSFISYDGNQKYYADSVKGRFTISRDNAKNSLYLQMNSLRAEDTAVYYCARTSHLGPFDLWGQGTMVTVSS

SEQ ID NO: 7246 - protein, 108 aa, Artificial Sequence; identical to SEQ ID NO: 6193
  Description of Artificial Sequence: Synthetic polypeptide
  VL of XENP020367

SEQ ID NO: 7247 - protein, 5 aa, Artificial Sequence
  Description of Artificial Sequence: Synthetic peptide
  XENP020367 vhCDR1
SYTMH

SEQ ID NO: 7248 - protein, 17 aa, Artificial Sequence
  Description of Artificial Sequence: Synthetic peptide
  XENP020367 vhCDR2
FISYDGNQKYYADSVKG

SEQ ID NO: 7249 - protein, 9 aa, Artificial Sequence
  Description of Artificial Sequence: Synthetic peptide
  XENP020367 vhCDR3
TSHLGPFDL

SEQ ID NO: 7250 - protein, 12 aa, Artificial Sequence
  Description of Artificial Sequence: Synthetic peptide
  XENP020367 vlCDR1
RASQSVGSSYLA

SEQ ID NO: 7251 - protein, 7 aa, Artificial Sequence
  Description of Artificial Sequence: Synthetic peptide
  XENP020367 vlCDR2
GAFSRAT

SEQ ID NO: 7252 - protein, 9 aa, Artificial Sequence
  Description of Artificial Sequence: Synthetic peptide
  XENP020367 vlCDR3
QQYGSSPWT

SEQ ID NO: 7253 - protein, 246 aa, Artificial Sequence
  Description of Artificial Sequence: Synthetic polypeptide
  XENP020368 [CTLA-4]_H3.17_L0.12_scFv(GKPGS)4
EVQLVESGGGLVKPGGSLRLSCAASGFTFSSYTMHWVRQAPGKGLEWVSFISYDGNQKYYADSVKGRFTISRDNAKNSLYLQMNSLRAEDTAVYYCARGGLLGPFDLWGQGTMVTVSSGKPGSGKPGSGKPGSGKPGSEIVLTQSPGTLSVSPGERATLSCRASQSVGSSYLAWYQQKPGQAPRLLIYGAFSRATGIPDRFSGSGSGTDFTLTISRLEPEDFAVYYCQQYGSSPWTFGQGTKVEIK

SEQ ID NO: 7254 - protein, 118 aa, Artificial Sequence
  Description of Artificial Sequence: Synthetic polypeptide
  VH of XENP020368
EVQLVESGGGLVKPGGSLRLSCAASGFTFSSYTMHWVRQAPGKGLEWVSFISYDGNQKYYADSVKGRFTISRDNAKNSLYLQMNSLRAEDTAVYYCARGGLLGPFDLWGQGTMVTVSS

SEQ ID NO: 7255 - protein, 108 aa, Artificial Sequence; identical to SEQ ID NO: 6193
  Description of Artificial Sequence: Synthetic polypeptide
  VL of XENP020368

SEQ ID NO: 7256 - protein, 5 aa, Artificial Sequence
  Description of Artificial Sequence: Synthetic peptide
  XENP020368 vhCDR1
SYTMH

SEQ ID NO: 7257 - protein, 17 aa, Artificial Sequence
  Description of Artificial Sequence: Synthetic peptide
  XENP020368 vhCDR2
FISYDGNQKYYADSVKG

SEQ ID NO: 7258 - protein, 9 aa, Artificial Sequence
  Description of Artificial Sequence: Synthetic peptide
  XENP020368 vhCDR3
GGLLGPFDL

SEQ ID NO: 7259 - protein, 12 aa, Artificial Sequence
  Description of Artificial Sequence: Synthetic peptide
  XENP020368 vlCDR1
RASQSVGSSYLA

SEQ ID NO: 7260 - protein, 7 aa, Artificial Sequence
  Description of Artificial Sequence: Synthetic peptide
  XENP020368 vlCDR2
GAFSRAT

SEQ ID NO: 7261 - protein, 9 aa, Artificial Sequence
  Description of Artificial Sequence: Synthetic peptide
  XENP020368 vlCDR3
QQYGSSPWT

SEQ ID NO: 7262 - protein, 246 aa, Artificial Sequence
  Description of Artificial Sequence: Synthetic polypeptide
  XENP020369 [CTLA-4]_H3.18_L0.12_scFv(GKPGS)4
EVQLVESGGGLVKPGGSLRLSCAASGFTFSSYTMHWVRQAPGKGLEWVSFISYDGNQKYYADSVKGRFTISRDNAKNSLYLQMNSLRAEDTAVYYCARTSLLGPFDLWGQGTMVTVSSGKPGSGKPGSGKPGSGKPGSEIVLTQSPGTLSVSPGERATLSCRASQSVGSSYLAWYQQKPGQAPRLLIYGAFSRATGIPDRFSGSGSGTDFTLTISRLEPEDFAVYYCQQYGSSPWTFGQGTKVEIK

SEQ ID NO: 7263 - protein, 118 aa, Artificial Sequence
  Description of Artificial Sequence: Synthetic polypeptide
  VH of XENP020369
EVQLVESGGGLVKPGGSLRLSCAASGFTFSSYTMHWVRQAPGKGLEWVSFISYDGNQKYYADSVKGRFTISRDNAKNSLYLQMNSLRAEDTAVYYCARTSLLGPFDLWGQGTMVTVSS

SEQ ID NO: 7264 - protein, 108 aa, Artificial Sequence; identical to SEQ ID NO: 6193
  Description of Artificial Sequence: Synthetic polypeptide
  VL of XENP020369

SEQ ID NO: 7265 - protein, 5 aa, Artificial Sequence
  Description of Artificial Sequence: Synthetic peptide
  XENP020369 vhCDR1
SYTMH

SEQ ID NO: 7266 - protein, 17 aa, Artificial Sequence
  Description of Artificial Sequence: Synthetic peptide
  XENP020369 vhCDR2
FISYDGNQKYYADSVKG

SEQ ID NO: 7267 - protein, 9 aa, Artificial Sequence
  Description of Artificial Sequence: Synthetic peptide
  XENP020369 vhCDR3
TSLLGPFDL

SEQ ID NO: 7268 - protein, 12 aa, Artificial Sequence
  Description of Artificial Sequence: Synthetic peptide
  XENP020369 vlCDR1
RASQSVGSSYLA

SEQ ID NO: 7269 - protein, 7 aa, Artificial Sequence
  Description of Artificial Sequence: Synthetic peptide
  XENP020369 vlCDR2
GAFSRAT

SEQ ID NO: 7270 - protein, 9 aa, Artificial Sequence
  Description of Artificial Sequence: Synthetic peptide
  XENP020369 vlCDR3
QQYGSSPWT

SEQ ID NO: 7271 - protein, 246 aa, Artificial Sequence
  Description of Artificial Sequence: Synthetic polypeptide
  XENP020370 [CTLA-4]_H3.19_L0.12_scFv(GKPGS)4
EVQLVESGGGLVKPGGSLRLSCAASGFTFSSYTMHWVRQAPGKGLEWVSFISYDGNTKYYADSVKGRFTISRDNAKNSLYLQMNSLRAEDTAVYYCARGGHLGPFDLWGQGTMVTVSSGKPGSGKPGSGKPGSGKPGSEIVLTQSPGTLSVSPGERATLSCRASQSVGSSYLAWYQQKPGQAPRLLIYGAFSRATGIPDRFSGSGSGTDFTLTISRLEPEDFAVYYCQQYGSSPWTFGQGTKVEIK

SEQ ID NO: 7272 - protein, 118 aa, Artificial Sequence
  Description of Artificial Sequence: Synthetic polypeptide
  VH of XENP020370
EVQLVESGGGLVKPGGSLRLSCAASGFTFSSYTMHWVRQAPGKGLEWVSFISYDGNTKYYADSVKGRFTISRDNAKNSLYLQMNSLRAEDTAVYYCARGGHLGPFDLWGQGTMVTVSS

SEQ ID NO: 7273 - protein, 108 aa, Artificial Sequence; identical to SEQ ID NO: 6193
  Description of Artificial Sequence: Synthetic polypeptide
  VL of XENP020370

SEQ ID NO: 7274 - protein, 5 aa, Artificial Sequence
  Description of Artificial Sequence: Synthetic peptide
  XENP020370 vhCDR1
SYTMH

SEQ ID NO: 7275 - protein, 17 aa, Artificial Sequence
  Description of Artificial Sequence: Synthetic peptide
  XENP020370 vhCDR2
FISYDGNTKYYADSVKG

SEQ ID NO: 7276 - protein, 9 aa, Artificial Sequence
  Description of Artificial Sequence: Synthetic peptide
  XENP020370 vhCDR3
GGHLGPFDL

SEQ ID NO: 7277 - protein, 12 aa, Artificial Sequence
  Description of Artificial Sequence: Synthetic peptide
  XENP020370 vlCDR1
RASQSVGSSYLA

SEQ ID NO: 7278 - protein, 7 aa, Artificial Sequence
  Description of Artificial Sequence: Synthetic peptide
  XENP020370 vlCDR2
GAFSRAT

SEQ ID NO: 7279 - protein, 9 aa, Artificial Sequence
  Description of Artificial Sequence: Synthetic peptide
  XENP020370 vlCDR3
QQYGSSPWT

SEQ ID NO: 7280 - protein, 246 aa, Artificial Sequence
  Description of Artificial Sequence: Synthetic polypeptide
  XENP020371 [CTLA-4]_H3.20_L0.12_scFv(GKPGS)4
EVQLVESGGGLVKPGGSLRLSCAASGFTFSSYTMHWVRQAPGKGLEWVSFISYDGNTKYYADSVKGRFTISRDNAKNSLYLQMNSLRAEDTAVYYCARTSHLGPFDLWGQGTMVTVSSGKPGSGKPGSGKPGSGKPGSEIVLTQSPGTLSVSPGERATLSCRASQSVGSSYLAWYQQKPGQAPRLLIYGAFSRATGIPDRFSGSGSGTDFTLTISRLEPEDFAVYYCQQYGSSPWTFGQGTKVEIK

SEQ ID NO: 7281 - protein, 118 aa, Artificial Sequence
  Description of Artificial Sequence: Synthetic polypeptide
  VH of XENP020371
EVQLVESGGGLVKPGGSLRLSCAASGFTFSSYTMHWVRQAPGKGLEWVSFISYDGNTKYYADSVKGRFTISRDNAKNSLYLQMNSLRAEDTAVYYCARTSHLGPFDLWGQGTMVTVSS

SEQ ID NO: 7282 - protein, 108 aa, Artificial Sequence; identical to SEQ ID NO: 6193
  Description of Artificial Sequence: Synthetic polypeptide
  VL of XENP020371

SEQ ID NO: 7283 - protein, 5 aa, Artificial Sequence
  Description of Artificial Sequence: Synthetic peptide
  XENP020371 vhCDR1
SYTMH

SEQ ID NO: 7284 - protein, 17 aa, Artificial Sequence
  Description of Artificial Sequence: Synthetic peptide
  XENP020371 vhCDR2
FISYDGNTKYYADSVKG

SEQ ID NO: 7285 - protein, 9 aa, Artificial Sequence
  Description of Artificial Sequence: Synthetic peptide
  XENP020371 vhCDR3
TSHLGPFDL

SEQ ID NO: 7286 - protein, 12 aa, Artificial Sequence
  Description of Artificial Sequence: Synthetic peptide
  XENP020371 vlCDR1
RASQSVGSSYLA

SEQ ID NO: 7287 - protein, 7 aa, Artificial Sequence
  Description of Artificial Sequence: Synthetic peptide
  XENP020371 vlCDR2
GAFSRAT

SEQ ID NO: 7288 - protein, 9 aa, Artificial Sequence
  Description of Artificial Sequence: Synthetic peptide
  XENP020371 vlCDR3
QQYGSSPWT

SEQ ID NO: 7289 - protein, 246 aa, Artificial Sequence
  Description of Artificial Sequence: Synthetic polypeptide
  XENP020372 [CTLA-4]_H3.21_L0.12_scFv(GKPGS)4
EVQLVESGGGLVKPGGSLRLSCAASGFTFSSYTMHWVRQAPGKGLEWVSFISYDGNTKYYADSVKGRFTISRDNAKNSLYLQMNSLRAEDTAVYYCARGGLLGPFDLWGQGTMVTVSSGKPGSGKPGSGKPGSGKPGSEIVLTQSPGTLSVSPGERATLSCRASQSVGSSYLAWYQQKPGQAPRLLIYGAFSRATGIPDRFSGSGSGTDFTLTISRLEPEDFAVYYCQQYGSSPWTFGQGTKVEIK

SEQ ID NO: 7290 - protein, 118 aa, Artificial Sequence
  Description of Artificial Sequence: Synthetic polypeptide
  VH of XENP020372
EVQLVESGGGLVKPGGSLRLSCAASGFTFSSYTMHWVRQAPGKGLEWVSFISYDGNTKYYADSVKGRFTISRDNAKNSLYLQMNSLRAEDTAVYYCARGGLLGPFDLWGQGTMVTVSS

SEQ ID NO: 7291 - protein, 108 aa, Artificial Sequence; identical to SEQ ID NO: 6193
  Description of Artificial Sequence: Synthetic polypeptide
  VL of XENP020372

SEQ ID NO: 7292 - protein, 5 aa, Artificial Sequence
  Description of Artificial Sequence: Synthetic peptide
  XENP020372 vhCDR1
SYTMH

SEQ ID NO: 7293 - protein, 17 aa, Artificial Sequence
  Description of Artificial Sequence: Synthetic peptide
  XENP020372 vhCDR2
FISYDGNTKYYADSVKG

SEQ ID NO: 7294 - protein, 9 aa, Artificial Sequence
  Description of Artificial Sequence: Synthetic peptide
  XENP020372 vhCDR3
GGLLGPFDL

SEQ ID NO: 7295 - protein, 12 aa, Artificial Sequence
  Description of Artificial Sequence: Synthetic peptide
  XENP020372 vlCDR1
RASQSVGSSYLA

SEQ ID NO: 7296 - protein, 7 aa, Artificial Sequence
  Description of Artificial Sequence: Synthetic peptide
  XENP020372 vlCDR2
GAFSRAT

SEQ ID NO: 7297 - protein, 9 aa, Artificial Sequence
  Description of Artificial Sequence: Synthetic peptide
  XENP020372 vlCDR3
QQYGSSPWT

SEQ ID NO: 7298 - protein, 246 aa, Artificial Sequence
  Description of Artificial Sequence: Synthetic polypeptide
  XENP020373 [CTLA-4]_H3.22_L0.12_scFv(GKPGS)4
EVQLVESGGGLVKPGGSLRLSCAASGFTFSSYTMHWVRQAPGKGLEWVSFISYDGNTKYYADSVKGRFTISRDNAKNSLYLQMNSLRAEDTAVYYCARTSLLGPFDLWGQGTMVTVSSGKPGSGKPGSGKPGSGKPGSEIVLTQSPGTLSVSPGERATLSCRASQSVGSSYLAWYQQKPGQAPRLLIYGAFSRATGIPDRFSGSGSGTDFTLTISRLEPEDFAVYYCQQYGSSPWTFGQGTKVEIK

SEQ ID NO: 7299 - protein, 118 aa, Artificial Sequence
  Description of Artificial Sequence: Synthetic polypeptide
  VH of XENP020373
EVQLVESGGGLVKPGGSLRLSCAASGFTFSSYTMHWVRQAPGKGLEWVSFISYDGNTKYYADSVKGRFTISRDNAKNSLYLQMNSLRAEDTAVYYCARTSLLGPFDLWGQGTMVTVSS

SEQ ID NO: 7300 - protein, 108 aa, Artificial Sequence; identical to SEQ ID NO: 6193
  Description of Artificial Sequence: Synthetic polypeptide
  VL of XENP020373

SEQ ID NO: 7301 - protein, 5 aa, Artificial Sequence
  Description of Artificial Sequence: Synthetic peptide
  XENP020373 vhCDR1
SYTMH

SEQ ID NO: 7302 - protein, 17 aa, Artificial Sequence
  Description of Artificial Sequence: Synthetic peptide
  XENP020373 vhCDR2
FISYDGNTKYYADSVKG

SEQ ID NO: 7303 - protein, 9 aa, Artificial Sequence
  Description of Artificial Sequence: Synthetic peptide
  XENP020373 vhCDR3
TSLLGPFDL

SEQ ID NO: 7304 - protein, 12 aa, Artificial Sequence
  Description of Artificial Sequence: Synthetic peptide
  XENP020373 vlCDR1
RASQSVGSSYLA

SEQ ID NO: 7305 - protein, 7 aa, Artificial Sequence
  Description of Artificial Sequence: Synthetic peptide
  XENP020373 vlCDR2
GAFSRAT

SEQ ID NO: 7306 - protein, 9 aa, Artificial Sequence
  Description of Artificial Sequence: Synthetic peptide
  XENP020373 vlCDR3
QQYGSSPWT

SEQ ID NO: 7307 - protein, 246 aa, Artificial Sequence
  Description of Artificial Sequence: Synthetic polypeptide
  XENP020374 [CTLA-4]_H3.23_L0.12_scFv(GKPGS)4
EVQLVESGGGLVKPGGSLRLSCAASGFTFSSYTMHWVRQAPGKGLEWVSFISYDGNYKYYADSVKGRFTISRDNAKNSLYLQMNSLRAEDTAVYYCARGGHLGPFDLWGQGTMVTVSSGKPGSGKPGSGKPGSGKPGSEIVLTQSPGTLSVSPGERATLSCRASQSVGSSYLAWYQQKPGQAPRLLIYGAFSRATGIPDRFSGSGSGTDFTLTISRLEPEDFAVYYCQQYGSSPWTFGQGTKVEIK

SEQ ID NO: 7308 - protein, 118 aa, Artificial Sequence; identical to SEQ ID NO: 2395
  Description of Artificial Sequence: Synthetic polypeptide
  VH of XENP020374

SEQ ID NO: 7309 - protein, 108 aa, Artificial Sequence; identical to SEQ ID NO: 6193
  Description of Artificial Sequence: Synthetic polypeptide
  VL of XENP020374

SEQ ID NO: 7310 - protein, 5 aa, Artificial Sequence
  Description of Artificial Sequence: Synthetic peptide
  XENP020374 vhCDR1
SYTMH

SEQ ID NO: 7311 - protein, 17 aa, Artificial Sequence
  Description of Artificial Sequence: Synthetic peptide
  XENP020374 vhCDR2
FISYDGNYKYYADSVKG

SEQ ID NO: 7312 - protein, 9 aa, Artificial Sequence
  Description of Artificial Sequence: Synthetic peptide
  XENP020374 vhCDR3
GGHLGPFDL

SEQ ID NO: 7313 - protein, 12 aa, Artificial Sequence
  Description of Artificial Sequence: Synthetic peptide
  XENP020374 vlCDR1
RASQSVGSSYLA

SEQ ID NO: 7314 - protein, 7 aa, Artificial Sequence
  Description of Artificial Sequence: Synthetic peptide
  XENP020374 vlCDR2
GAFSRAT

SEQ ID NO: 7315 - protein, 9 aa, Artificial Sequence
  Description of Artificial Sequence: Synthetic peptide
  XENP020374 vlCDR3
QQYGSSPWT

SEQ ID NO: 7316 - protein, 246 aa, Artificial Sequence
  Description of Artificial Sequence: Synthetic polypeptide
  XENP020375 [CTLA-4]_H3.24_L0.12_scFv(GKPGS)4
EVQLVESGGGLVKPGGSLRLSCAASGFTFSSYTMHWVRQAPGKGLEWVSFISYDGNYKYYADSVKGRFTISRDNAKNSLYLQMNSLRAEDTAVYYCARTSHLGPFDLWGQGTMVTVSSGKPGSGKPGSGKPGSGKPGSEIVLTQSPGTLSVSPGERATLSCRASQSVGSSYLAWYQQKPGQAPRLLIYGAFSRATGIPDRFSGSGSGTDFTLTISRLEPEDFAVYYCQQYGSSPWTFGQGTKVEIK

SEQ ID NO: 7317 - protein, 118 aa, Artificial Sequence
  Description of Artificial Sequence: Synthetic polypeptide
  VH of XENP020375
EVQLVESGGGLVKPGGSLRLSCAASGFTFSSYTMHWVRQAPGKGLEWVSFISYDGNYKYYADSVKGRFTISRDNAKNSLYLQMNSLRAEDTAVYYCARTSHLGPFDLWGQGTMVTVSS

SEQ ID NO: 7318 - protein, 108 aa, Artificial Sequence; identical to SEQ ID NO: 6193
  Description of Artificial Sequence: Synthetic polypeptide
  VL of XENP020375

SEQ ID NO: 7319 - protein, 5 aa, Artificial Sequence
  Description of Artificial Sequence: Synthetic peptide
  XENP020375 vhCDR1
SYTMH

SEQ ID NO: 7320 - protein, 17 aa, Artificial Sequence
  Description of Artificial Sequence: Synthetic peptide
  XENP020375 vhCDR2
FISYDGNYKYYADSVKG

SEQ ID NO: 7321 - protein, 9 aa, Artificial Sequence
  Description of Artificial Sequence: Synthetic peptide
  XENP020375 vhCDR3
TSHLGPFDL

SEQ ID NO: 7322 - protein, 12 aa, Artificial Sequence
  Description of Artificial Sequence: Synthetic peptide
  XENP020375 vlCDR1
RASQSVGSSYLA

SEQ ID NO: 7323 - protein, 7 aa, Artificial Sequence
  Description of Artificial Sequence: Synthetic peptide
  XENP020375 vlCDR2
GAFSRAT

SEQ ID NO: 7324 - protein, 9 aa, Artificial Sequence
  Description of Artificial Sequence: Synthetic peptide
  XENP020375 vlCDR3
QQYGSSPWT

SEQ ID NO: 7325 - protein, 246 aa, Artificial Sequence
  Description of Artificial Sequence: Synthetic polypeptide
  XENP020376 [CTLA-4]_H3.25_L0.12_scFv(GKPGS)4
EVQLVESGGGLVKPGGSLRLSCAASGFTFSSYTMHWVRQAPGKGLEWVSFISYDGNYKYYADSVKGRFTISRDNAKNSLYLQMNSLRAEDTAVYYCARGGLLGPFDLWGQGTMVTVSSGKPGSGKPGSGKPGSGKPGSEIVLTQSPGTLSVSPGERATLSCRASQSVGSSYLAWYQQKPGQAPRLLIYGAFSRATGIPDRFSGSGSGTDFTLTISRLEPEDFAVYYCQQYGSSPWTFGQGTKVEIK

SEQ ID NO: 7326 - protein, 118 aa, Artificial Sequence
  Description of Artificial Sequence: Synthetic polypeptide
  VH of XENP020376
EVQLVESGGGLVKPGGSLRLSCAASGFTFSSYTMHWVRQAPGKGLEWVSFISYDGNYKYYADSVKGRFTISRDNAKNSLYLQMNSLRAEDTAVYYCARGGLLGPFDLWGQGTMVTVSS

SEQ ID NO: 7327 - protein, 108 aa, Artificial Sequence; identical to SEQ ID NO: 6193
  Description of Artificial Sequence: Synthetic polypeptide
  VL of XENP020376

SEQ ID NO: 7328 - protein, 5 aa, Artificial Sequence
  Description of Artificial Sequence: Synthetic peptide
  XENP020376 vhCDR1
SYTMH

SEQ ID NO: 7329 - protein, 17 aa, Artificial Sequence
  Description of Artificial Sequence: Synthetic peptide
  XENP020376 vhCDR2
FISYDGNYKYYADSVKG

SEQ ID NO: 7330 - protein, 9 aa, Artificial Sequence
  Description of Artificial Sequence: Synthetic peptide
  XENP020376 vhCDR3
GGLLGPFDL

SEQ ID NO: 7331 - protein, 12 aa, Artificial Sequence
  Description of Artificial Sequence: Synthetic peptide
  XENP020376 vlCDR1
RASQSVGSSYLA

SEQ ID NO: 7332 - protein, 7 aa, Artificial Sequence
  Description of Artificial Sequence: Synthetic peptide
  XENP020376 vlCDR2
GAFSRAT

SEQ ID NO: 7333 - protein, 9 aa, Artificial Sequence
  Description of Artificial Sequence: Synthetic peptide
  XENP020376 vlCDR3
QQYGSSPWT

SEQ ID NO: 7334 - protein, 246 aa, Artificial Sequence
  Description of Artificial Sequence: Synthetic polypeptide
  XENP020377 [CTLA-4]_H3.26_L0.12_scFv(GKPGS)4
EVQLVESGGGLVKPGGSLRLSCAASGFTFSSYTMHWVRQAPGKGLEWVSFISYDGNYKYYADSVKGRFTISRDNAKNSLYLQMNSLRAEDTAVYYCARTSLLGPFDLWGQGTMVTVSSGKPGSGKPGSGKPGSGKPGSEIVLTQSPGTLSVSPGERATLSCRASQSVGSSYLAWYQQKPGQAPRLLIYGAFSRATGIPDRFSGSGSGTDFTLTISRLEPEDFAVYYCQQYGSSPWTFGQGTKVEIK

SEQ ID NO: 7335 - protein, 118 aa, Artificial Sequence
  Description of Artificial Sequence: Synthetic polypeptide
  VH of XENP020377
EVQLVESGGGLVKPGGSLRLSCAASGFTFSSYTMHWVRQAPGKGLEWVSFISYDGNYKYYADSVKGRFTISRDNAKNSLYLQMNSLRAEDTAVYYCARTSLLGPFDLWGQGTMVTVSS

SEQ ID NO: 7336 - protein, 108 aa, Artificial Sequence; identical to SEQ ID NO: 6193
  Description of Artificial Sequence: Synthetic polypeptide
  VL of XENP020377

SEQ ID NO: 7337 - protein, 5 aa, Artificial Sequence
  Description of Artificial Sequence: Synthetic peptide
  XENP020377 vhCDR1
SYTMH

SEQ ID NO: 7338 - protein, 17 aa, Artificial Sequence
  Description of Artificial Sequence: Synthetic peptide
  XENP020377 vhCDR2
FISYDGNYKYYADSVKG

SEQ ID NO: 7339 - protein, 9 aa, Artificial Sequence
  Description of Artificial Sequence: Synthetic peptide
  XENP020377 vhCDR3
TSLLGPFDL

SEQ ID NO: 7340 - protein, 12 aa, Artificial Sequence
  Description of Artificial Sequence: Synthetic peptide
  XENP020377 vlCDR1
RASQSVGSSYLA

SEQ ID NO: 7341 - protein, 7 aa, Artificial Sequence
  Description of Artificial Sequence: Synthetic peptide
  XENP020377 vlCDR2
GAFSRAT

SEQ ID NO: 7342 - protein, 9 aa, Artificial Sequence
  Description of Artificial Sequence: Synthetic peptide
  XENP020377 vlCDR3
QQYGSSPWT

SEQ ID NO: 7343 - protein, 246 aa, Artificial Sequence
  Description of Artificial Sequence: Synthetic polypeptide
  XENP020378 [CTLA-4]_H3.4_L0.118_scFv(GKPGS)4
EVQLVESGGGLVKPGGSLRLSCAASGFTFSSYTMHWVRQAPGKGLEWVSFISYDGNHKYYADSVKGRFTISRDNAKNSLYLQMNSLRAEDTAVYYCARTGHLGPFDLWGQGTMVTVSSGKPGSGKPGSGKPGSGKPGSEIVLTQSPATLSVSPGERATLSCRASQSVGSSYLAWYQQKPGQAPRLLIYGAFSRATGIPDRFSGSGSGTDFTLTISRLEPEDFAVYYCQQYGSSPWTFGQGTKVEIK

SEQ ID NO: 7344 - protein, 118 aa, Artificial Sequence; identical to SEQ ID NO: 7137
  Description of Artificial Sequence: Synthetic polypeptide
  VH of XENP020378

SEQ ID NO: 7345 - protein, 108 aa, Artificial Sequence
  Description of Artificial Sequence: Synthetic polypeptide
  VL of XENP020378
EIVLTQSPATLSVSPGERATLSCRASQSVGSSYLAWYQQKPGQAPRLLIYGAFSRATGIPDRFSGSGSGTDFTLTISRLEPEDFAVYYCQQYGSSPWTFGQGTKVEIK

SEQ ID NO: 7346 - protein, 5 aa, Artificial Sequence
  Description of Artificial Sequence: Synthetic peptide
  XENP020378 vhCDR1
SYTMH

SEQ ID NO: 7347 - protein, 17 aa, Artificial Sequence
  Description of Artificial Sequence: Synthetic peptide
  XENP020378 vhCDR2
FISYDGNHKYYADSVKG

SEQ ID NO: 7348 - protein, 9 aa, Artificial Sequence
  Description of Artificial Sequence: Synthetic peptide
  XENP020378 vhCDR3
TGHLGPFDL

SEQ ID NO: 7349 - protein, 12 aa, Artificial Sequence
  Description of Artificial Sequence: Synthetic peptide
  XENP020378 vlCDR1
RASQSVGSSYLA

SEQ ID NO: 7350 - protein, 7 aa, Artificial Sequence
  Description of Artificial Sequence: Synthetic peptide
  XENP020378 vlCDR2
GAFSRAT

SEQ ID NO: 7351 - protein, 9 aa, Artificial Sequence
  Description of Artificial Sequence: Synthetic peptide
  XENP020378 vlCDR3
QQYGSSPWT

SEQ ID NO: 7352 - protein, 246 aa, Artificial Sequence
  Description of Artificial Sequence: Synthetic polypeptide
  XENP020379 [CTLA-4]_H3.4_L0.119_scFv(GKPGS)4
EVQLVESGGGLVKPGGSLRLSCAASGFTFSSYTMHWVRQAPGKGLEWVSFISYDGNHKYYADSVKGRFTISRDNAKNSLYLQMNSLRAEDTAVYYCARTGHLGPFDLWGQGTMVTVSSGKPGSGKPGSGKPGSGKPGSEIVLTQSPGTLSLSPGERATLSCRASQSVGSSYLAWYQQKPGQAPRLLIYGAFSRATGIPDRFSGSGSGTDFTLTISRLEPEDFAVYYCQQYGSSPWTFGQGTKVEIK

SEQ ID NO: 7353 - protein, 118 aa, Artificial Sequence; identical to SEQ ID NO: 7137
  Description of Artificial Sequence: Synthetic polypeptide
  VH of XENP020379

SEQ ID NO: 7354 - protein, 108 aa, Artificial Sequence; identical to SEQ ID NO: 3741
  Description of Artificial Sequence: Synthetic polypeptide
  VL of XENP020379

SEQ ID NO: 7355 - protein, 5 aa, Artificial Sequence
  Description of Artificial Sequence: Synthetic peptide
  XENP020379 vhCDR1
SYTMH

SEQ ID NO: 7356 - protein, 17 aa, Artificial Sequence
  Description of Artificial Sequence: Synthetic peptide
  XENP020379 vhCDR2
FISYDGNHKYYADSVKG

SEQ ID NO: 7357 - protein, 9 aa, Artificial Sequence
  Description of Artificial Sequence: Synthetic peptide
  XENP020379 vhCDR3
TGHLGPFDL

SEQ ID NO: 7358 - protein, 12 aa, Artificial Sequence
  Description of Artificial Sequence: Synthetic peptide
  XENP020379 vlCDR1
RASQSVGSSYLA

SEQ ID NO: 7359 - protein, 7 aa, Artificial Sequence
  Description of Artificial Sequence: Synthetic peptide
  XENP020379 vlCDR2
GAFSRAT

SEQ ID NO: 7360 - protein, 9 aa, Artificial Sequence
  Description of Artificial Sequence: Synthetic peptide
  XENP020379 vlCDR3
QQYGSSPWT

SEQ ID NO: 7361 - protein, 246 aa, Artificial Sequence
  Description of Artificial Sequence: Synthetic polypeptide
  XENP020380 [CTLA-4]_H3.4_L0.120_scFv(GKPGS)4
EVQLVESGGGLVKPGGSLRLSCAASGFTFSSYTMHWVRQAPGKGLEWVSFISYDGNHKYYADSVKGRFTISRDNAKNSLYLQMNSLRAEDTAVYYCARTGHLGPFDLWGQGTMVTVSSGKPGSGKPGSGKPGSGKPGSEIVLTQSPGTLSVSPGERATLSCRASQSVSSSYLAWYQQKPGQAPRLLIYGAFSRATGIPDRFSGSGSGTDFTLTISRLEPEDFAVYYCQQYGSSPWTFGQGTKVEIK

SEQ ID NO: 7362 - protein, 118 aa, Artificial Sequence; identical to SEQ ID NO: 7137
  Description of Artificial Sequence: Synthetic polypeptide
  VH of XENP020380

SEQ ID NO: 7363 - protein, 108 aa, Artificial Sequence
  Description of Artificial Sequence: Synthetic polypeptide
  VL of XENP020380
EIVLTQSPGTLSVSPGERATLSCRASQSVSSSYLAWYQQKPGQAPRLLIYGAFSRATGIPDRFSGSGSGTDFTLTISRLEPEDFAVYYCQQYGSSPWTFGQGTKVEIK

SEQ ID NO: 7364 - protein, 5 aa, Artificial Sequence
  Description of Artificial Sequence: Synthetic peptide
  XENP020380 vhCDR1
SYTMH

SEQ ID NO: 7365 - protein, 17 aa, Artificial Sequence
  Description of Artificial Sequence: Synthetic peptide
  XENP020380 vhCDR2
FISYDGNHKYYADSVKG

SEQ ID NO: 7366 - protein, 9 aa, Artificial Sequence
  Description of Artificial Sequence: Synthetic peptide
  XENP020380 vhCDR3
TGHLGPFDL

SEQ ID NO: 7367 - protein, 12 aa, Artificial Sequence
  Description of Artificial Sequence: Synthetic peptide
  XENP020380 vlCDR1
RASQSVSSSYLA

SEQ ID NO: 7368 - protein, 7 aa, Artificial Sequence
  Description of Artificial Sequence: Synthetic peptide
  XENP020380 vlCDR2
GAFSRAT

SEQ ID NO: 7369 - protein, 9 aa, Artificial Sequence
  Description of Artificial Sequence: Synthetic peptide
  XENP020380 vlCDR3
QQYGSSPWT

SEQ ID NO: 7370 - protein, 246 aa, Artificial Sequence
  Description of Artificial Sequence: Synthetic polypeptide
  XENP020381 [CTLA-4]_H3.4_L0.121_scFv(GKPGS)4
EVQLVESGGGLVKPGGSLRLSCAASGFTFSSYTMHWVRQAPGKGLEWVSFISYDGNHKYYADSVKGRFTISRDNAKNSLYLQMNSLRAEDTAVYYCARTGHLGPFDLWGQGTMVTVSSGKPGSGKPGSGKPGSGKPGSEIVLTQSPGTLSVSPGERATLSCRASQSVGSSYLAWYQQKPGQAPRLLIYGASSRATGIPDRFSGSGSGTDFTLTISRLEPEDFAVYYCQQYGSSPWTFGQGTKVEIK

SEQ ID NO: 7371 - protein, 118 aa, Artificial Sequence; identical to SEQ ID NO: 7137
  Description of Artificial Sequence: Synthetic polypeptide
  VH of XENP020381

SEQ ID NO: 7372 - protein, 108 aa, Artificial Sequence
  Description of Artificial Sequence: Synthetic polypeptide
  VL of XENP020381
EIVLTQSPGTLSVSPGERATLSCRASQSVGSSYLAWYQQKPGQAPRLLIYGASSRATGIPDRFSGSGSGTDFTLTISRLEPEDFAVYYCQQYGSSPWTFGQGTKVEIK

SEQ ID NO: 7373 - protein, 5 aa, Artificial Sequence
  Description of Artificial Sequence: Synthetic peptide
  XENP020381 vhCDR1
SYTMH

SEQ ID NO: 7374 - protein, 17 aa, Artificial Sequence
  Description of Artificial Sequence: Synthetic peptide
  XENP020381 vhCDR2
FISYDGNHKYYADSVKG

SEQ ID NO: 7375 - protein, 9 aa, Artificial Sequence
  Description of Artificial Sequence: Synthetic peptide
  XENP020381 vhCDR3
TGHLGPFDL

SEQ ID NO: 7376 - protein, 12 aa, Artificial Sequence
  Description of Artificial Sequence: Synthetic peptide
  XENP020381 vlCDR1
RASQSVGSSYLA

SEQ ID NO: 7377 - protein, 7 aa, Artificial Sequence
  Description of Artificial Sequence: Synthetic peptide
  XENP020381 vlCDR2
GASSRAT

SEQ ID NO: 7378 - protein, 9 aa, Artificial Sequence
  Description of Artificial Sequence: Synthetic peptide
  XENP020381 vlCDR3
QQYGSSPWT

SEQ ID NO: 7379 - protein, 246 aa, Artificial Sequence
  Description of Artificial Sequence: Synthetic polypeptide
  XENP020382 [CTLA-4]_H3.4_L0.122_scFv(GKPGS)4
EVQLVESGGGLVKPGGSLRLSCAASGFTFSSYTMHWVRQAPGKGLEWVSFISYDGNHKYYADSVKGRFTISRDNAKNSLYLQMNSLRAEDTAVYYCARTGHLGPFDLWGQGTMVTVSSGKPGSGKPGSGKPGSGKPGSEIVLTQSPATLSLSPGERATLSCRASQSVGSSYLAWYQQKPGQAPRLLIYGAFSRATGIPDRFSGSGSGTDFTLTISRLEPEDFAVYYCQQYGSSPWTFGQGTKVEIK

SEQ ID NO: 7380 - protein, 118 aa, Artificial Sequence; identical to SEQ ID NO: 7137
  Description of Artificial Sequence: Synthetic polypeptide
  VH of XENP020382

SEQ ID NO: 7381 - protein, 108 aa, Artificial Sequence; identical to SEQ ID NO: 6157
  Description of Artificial Sequence: Synthetic polypeptide
  VL of XENP020382

SEQ ID NO: 7382 - protein, 5 aa, Artificial Sequence
  Description of Artificial Sequence: Synthetic peptide
  XENP020382 vhCDR1
SYTMH

SEQ ID NO: 7383 - protein, 17 aa, Artificial Sequence
  Description of Artificial Sequence: Synthetic peptide
  XENP020382 vhCDR2
FISYDGNHKYYADSVKG

SEQ ID NO: 7384 - protein, 9 aa, Artificial Sequence
  Description of Artificial Sequence: Synthetic peptide
  XENP020382 vhCDR3
TGHLGPFDL

SEQ ID NO: 7385 - protein, 12 aa, Artificial Sequence
  Description of Artificial Sequence: Synthetic peptide
  XENP020382 vlCDR1
RASQSVGSSYLA

SEQ ID NO: 7386 - protein, 7 aa, Artificial Sequence
  Description of Artificial Sequence: Synthetic peptide
  XENP020382 vlCDR2
GAFSRAT

SEQ ID NO: 7387 - protein, 9 aa, Artificial Sequence
  Description of Artificial Sequence: Synthetic peptide
  XENP020382 vlCDR3
QQYGSSPWT

SEQ ID NO: 7388 - protein, 246 aa, Artificial Sequence
  Description of Artificial Sequence: Synthetic polypeptide
  XENP020383 [CTLA-4]_H3.4_L0.123_scFv(GKPGS)4
EVQLVESGGGLVKPGGSLRLSCAASGFTFSSYTMHWVRQAPGKGLEWVSFISYDGNHKYYADSVKGRFTISRDNAKNSLYLQMNSLRAEDTAVYYCARTGHLGPFDLWGQGTMVTVSSGKPGSGKPGSGKPGSGKPGSEIVLTQSPATLSVSPGERATLSCRASQSVSSSYLAWYQQKPGQAPRLLIYGAFSRATGIPDRFSGSGSGTDFTLTISRLEPEDFAVYYCQQYGSSPWTFGQGTKVEIK

SEQ ID NO: 7389 - protein, 118 aa, Artificial Sequence; identical to SEQ ID NO: 7137
  Description of Artificial Sequence: Synthetic polypeptide
  VH of XENP020383

SEQ ID NO: 7390 - protein, 108 aa, Artificial Sequence
  Description of Artificial Sequence: Synthetic polypeptide
  VL of XENP020383
EIVLTQSPATLSVSPGERATLSCRASQSVSSSYLAWYQQKPGQAPRLLIYGAFSRATGIPDRFSGSGSGTDFTLTISRLEPEDFAVYYCQQYGSSPWTFGQGTKVEIK

SEQ ID NO: 7391 - protein, 5 aa, Artificial Sequence
  Description of Artificial Sequence: Synthetic peptide
  XENP020383 vhCDR1
SYTMH

SEQ ID NO: 7392 - protein, 17 aa, Artificial Sequence
  Description of Artificial Sequence: Synthetic peptide
  XENP020383 vhCDR2
FISYDGNHKYYADSVKG

SEQ ID NO: 7393 - protein, 9 aa, Artificial Sequence
  Description of Artificial Sequence: Synthetic peptide
  XENP020383 vhCDR3
TGHLGPFDL

SEQ ID NO: 7394 - protein, 12 aa, Artificial Sequence
  Description of Artificial Sequence: Synthetic peptide
  XENP020383 vlCDR1
RASQSVSSSYLA

SEQ ID NO: 7395 - protein, 7 aa, Artificial Sequence
  Description of Artificial Sequence: Synthetic peptide
  XENP020383 vlCDR2
GAFSRAT

SEQ ID NO: 7396 - protein, 9 aa, Artificial Sequence
  Description of Artificial Sequence: Synthetic peptide
  XENP020383 vlCDR3
QQYGSSPWT

SEQ ID NO: 7397 - protein, 246 aa, Artificial Sequence
  Description of Artificial Sequence: Synthetic polypeptide
  XENP020384 [CTLA-4]_H3.4_L0.124_scFv(GKPGS)4
EVQLVESGGGLVKPGGSLRLSCAASGFTFSSYTMHWVRQAPGKGLEWVSFISYDGNHKYYADSVKGRFTISRDNAKNSLYLQMNSLRAEDTAVYYCARTGHLGPFDLWGQGTMVTVSSGKPGSGKPGSGKPGSGKPGSEIVLTQSPATLSVSPGERATLSCRASQSVGSSYLAWYQQKPGQAPRLLIYGASSRATGIPDRFSGSGSGTDFTLTISRLEPEDFAVYYCQQYGSSPWTFGQGTKVEIK

SEQ ID NO: 7398 - protein, 118 aa, Artificial Sequence; identical to SEQ ID NO: 7137
  Description of Artificial Sequence: Synthetic polypeptide
  VH of XENP020384

SEQ ID NO: 7399 - protein, 108 aa, Artificial Sequence
  Description of Artificial Sequence: Synthetic polypeptide
  VL of XENP020384
EIVLTQSPATLSVSPGERATLSCRASQSVGSSYLAWYQQKPGQAPRLLIYGASSRATGIPDRFSGSGSGTDFTLTISRLEPEDFAVYYCQQYGSSPWTFGQGTKVEIK

SEQ ID NO: 7400 - protein, 5 aa, Artificial Sequence
  Description of Artificial Sequence: Synthetic peptide
  XENP020384 vhCDR1
SYTMH

SEQ ID NO: 7401 - protein, 17 aa, Artificial Sequence
  Description of Artificial Sequence: Synthetic peptide
  XENP020384 vhCDR2
FISYDGNHKYYADSVKG

SEQ ID NO: 7402 - protein, 9 aa, Artificial Sequence
  Description of Artificial Sequence: Synthetic peptide
  XENP020384 vhCDR3
TGHLGPFDL

SEQ ID NO: 7403 - protein, 12 aa, Artificial Sequence
  Description of Artificial Sequence: Synthetic peptide
  XENP020384 vlCDR1
RASQSVGSSYLA

SEQ ID NO: 7404 - protein, 7 aa, Artificial Sequence
  Description of Artificial Sequence: Synthetic peptide
  XENP020384 vlCDR2
GASSRAT

SEQ ID NO: 7405 - protein, 9 aa, Artificial Sequence
  Description of Artificial Sequence: Synthetic peptide
  XENP020384 vlCDR3
QQYGSSPWT

SEQ ID NO: 7406 - protein, 246 aa, Artificial Sequence
  Description of Artificial Sequence: Synthetic polypeptide
  XENP020385 [CTLA-4]_H3.4_L0.125_scFv(GKPGS)4
EVQLVESGGGLVKPGGSLRLSCAASGFTFSSYTMHWVRQAPGKGLEWVSFISYDGNHKYYADSVKGRFTISRDNAKNSLYLQMNSLRAEDTAVYYCARTGHLGPFDLWGQGTMVTVSSGKPGSGKPGSGKPGSGKPGSEIVLTQSPGTLSLSPGERATLSCRASQSVSSSYLAWYQQKPGQAPRLLIYGAFSRATGIPDRFSGSGSGTDFTLTISRLEPEDFAVYYCQQYGSSPWTFGQGTKVEIK

SEQ ID NO: 7407 - protein, 118 aa, Artificial Sequence; identical to SEQ ID NO: 7137
  Description of Artificial Sequence: Synthetic polypeptide
  VH of XENP020385

SEQ ID NO: 7408 - protein, 108 aa, Artificial Sequence; identical to SEQ ID NO: 2411
  Description of Artificial Sequence: Synthetic polypeptide
  VL of XENP020385

SEQ ID NO: 7409 - protein, 5 aa, Artificial Sequence
  Description of Artificial Sequence: Synthetic peptide
  XENP020385 vhCDR1
SYTMH

SEQ ID NO: 7410 - protein, 17 aa, Artificial Sequence
  Description of Artificial Sequence: Synthetic peptide
  XENP020385 vhCDR2
FISYDGNHKYYADSVKG

SEQ ID NO: 7411 - protein, 9 aa, Artificial Sequence
  Description of Artificial Sequence: Synthetic peptide
  XENP020385 vhCDR3
TGHLGPFDL

SEQ ID NO: 7412 - protein, 12 aa, Artificial Sequence
  Description of Artificial Sequence: Synthetic peptide
  XENP020385 vlCDR1
RASQSVSSSYLA

SEQ ID NO: 7413 - protein, 7 aa, Artificial Sequence
  Description of Artificial Sequence: Synthetic peptide
  XENP020385 vlCDR2
GAFSRAT

SEQ ID NO: 7414 - protein, 9 aa, Artificial Sequence
  Description of Artificial Sequence: Synthetic peptide
  XENP020385 vlCDR3
QQYGSSPWT

SEQ ID NO: 7415 - protein, 246 aa, Artificial Sequence
  Description of Artificial Sequence: Synthetic polypeptide
  XENP020386 [CTLA-4]_H3.4_L0.126_scFv(GKPGS)4
EVQLVESGGGLVKPGGSLRLSCAASGFTFSSYTMHWVRQAPGKGLEWVSFISYDGNHKYYADSVKGRFTISRDNAKNSLYLQMNSLRAEDTAVYYCARTGHLGPFDLWGQGTMVTVSSGKPGSGKPGSGKPGSGKPGSEIVLTQSPGTLSLSPGERATLSCRASQSVGSSYLAWYQQKPGQAPRLLIYGASSRATGIPDRFSGSGSGTDFTLTISRLEPEDFAVYYCQQYGSSPWTFGQGTKVEIK

SEQ ID NO: 7416 - protein, 118 aa, Artificial Sequence; identical to SEQ ID NO: 7137
  Description of Artificial Sequence: Synthetic polypeptide
  VH of XENP020386

SEQ ID NO: 7417 - protein, 108 aa, Artificial Sequence; identical to SEQ ID NO: 6742
  Description of Artificial Sequence: Synthetic polypeptide
  VL of XENP020386

SEQ ID NO: 7418 - protein, 5 aa, Artificial Sequence
  Description of Artificial Sequence: Synthetic peptide
  XENP020386 vhCDR1
SYTMH

SEQ ID NO: 7419 - protein, 17 aa, Artificial Sequence
  Description of Artificial Sequence: Synthetic peptide
  XENP020386 vhCDR2
FISYDGNHKYYADSVKG

SEQ ID NO: 7420 - protein, 9 aa, Artificial Sequence
  Description of Artificial Sequence: Synthetic peptide
  XENP020386 vhCDR3
TGHLGPFDL

SEQ ID NO: 7421 - protein, 12 aa, Artificial Sequence
  Description of Artificial Sequence: Synthetic peptide
  XENP020386 vlCDR1
RASQSVGSSYLA

SEQ ID NO: 7422 - protein, 7 aa, Artificial Sequence
  Description of Artificial Sequence: Synthetic peptide
  XENP020386 vlCDR2
GASSRAT

SEQ ID NO: 7423 - protein, 9 aa, Artificial Sequence
  Description of Artificial Sequence: Synthetic peptide
  XENP020386 vlCDR3
QQYGSSPWT

SEQ ID NO: 7424 - protein, 246 aa, Artificial Sequence
  Description of Artificial Sequence: Synthetic polypeptide
  XENP020387 [CTLA-4]_H3.4_L0.127_scFv(GKPGS)4
EVQLVESGGGLVKPGGSLRLSCAASGFTFSSYTMHWVRQAPGKGLEWVSFISYDGNHKYYADSVKGRFTISRDNAKNSLYLQMNSLRAEDTAVYYCARTGHLGPFDLWGQGTMVTVSSGKPGSGKPGSGKPGSGKPGSEIVLTQSPGTLSVSPGERATLSCRASQSVSSSYLAWYQQKPGQAPRLLIYGASSRATGIPDRFSGSGSGTDFTLTISRLEPEDFAVYYCQQYGSSPWTFGQGTKVEIK

SEQ ID NO: 7425 - protein, 118 aa, Artificial Sequence; identical to SEQ ID NO: 7137
  Description of Artificial Sequence: Synthetic polypeptide
  VH of XENP020387

SEQ ID NO: 7426 - protein, 108 aa, Artificial Sequence
  Description of Artificial Sequence: Synthetic polypeptide
  VL of XENP020387
EIVLTQSPGTLSVSPGERATLSCRASQSVSSSYLAWYQQKPGQAPRLLIYGASSRATGIPDRFSGSGSGTDFTLTISRLEPEDFAVYYCQQYGSSPWTFGQGTKVEIK

SEQ ID NO: 7427 - protein, 5 aa, Artificial Sequence
  Description of Artificial Sequence: Synthetic peptide
  XENP020387 vhCDR1
SYTMH

SEQ ID NO: 7428 - protein, 17 aa, Artificial Sequence
  Description of Artificial Sequence: Synthetic peptide
  XENP020387 vhCDR2
FISYDGNHKYYADSVKG

SEQ ID NO: 7429 - protein, 9 aa, Artificial Sequence
  Description of Artificial Sequence: Synthetic peptide
  XENP020387 vhCDR3
TGHLGPFDL

SEQ ID NO: 7430 - protein, 12 aa, Artificial Sequence
  Description of Artificial Sequence: Synthetic peptide
  XENP020387 vlCDR1
RASQSVSSSYLA

SEQ ID NO: 7431 - protein, 7 aa, Artificial Sequence
  Description of Artificial Sequence: Synthetic peptide
  XENP020387 vlCDR2
GASSRAT

SEQ ID NO: 7432 - protein, 9 aa, Artificial Sequence
  Description of Artificial Sequence: Synthetic peptide
  XENP020387 vlCDR3
QQYGSSPWT

SEQ ID NO: 7433 - protein, 246 aa, Artificial Sequence
  Description of Artificial Sequence: Synthetic polypeptide
  XENP020388 [CTLA-4]_H3.4_L0.128_scFv(GKPGS)4
EVQLVESGGGLVKPGGSLRLSCAASGFTFSSYTMHWVRQAPGKGLEWVSFISYDGNHKYYADSVKGRFTISRDNAKNSLYLQMNSLRAEDTAVYYCARTGHLGPFDLWGQGTMVTVSSGKPGSGKPGSGKPGSGKPGSEIVLTQSPATLSLSPGERATLSCRASQSVSSSYLAWYQQKPGQAPRLLIYGAFSRATGIPDRFSGSGSGTDFTLTISRLEPEDFAVYYCQQYGSSPWTFGQGTKVEIK

SEQ ID NO: 7434 - protein, 118 aa, Artificial Sequence; identical to SEQ ID NO: 7137
  Description of Artificial Sequence: Synthetic polypeptide
  VH of XENP020388

SEQ ID NO: 7435 - protein, 108 aa, Artificial Sequence
  Description of Artificial Sequence: Synthetic polypeptide
  VL of XENP020388
EIVLTQSPATLSLSPGERATLSCRASQSVSSSYLAWYQQKPGQAPRLLIYGAFSRATGIPDRFSGSGSGTDFTLTISRLEPEDFAVYYCQQYGSSPWTFGQGTKVEIK

SEQ ID NO: 7436 - protein, 5 aa, Artificial Sequence
  Description of Artificial Sequence: Synthetic peptide
  XENP020388 vhCDR1
SYTMH

SEQ ID NO: 7437 - protein, 17 aa, Artificial Sequence
  Description of Artificial Sequence: Synthetic peptide
  XENP020388 vhCDR2
FISYDGNHKYYADSVKG

SEQ ID NO: 7438 - protein, 9 aa, Artificial Sequence
  Description of Artificial Sequence: Synthetic peptide
  XENP020388 vhCDR3
TGHLGPFDL

SEQ ID NO: 7439 - protein, 12 aa, Artificial Sequence
  Description of Artificial Sequence: Synthetic peptide
  XENP020388 vlCDR1
RASQSVSSSYLA

SEQ ID NO: 7440 - protein, 7 aa, Artificial Sequence
  Description of Artificial Sequence: Synthetic peptide
  XENP020388 vlCDR2
GAFSRAT

SEQ ID NO: 7441 - protein, 9 aa, Artificial Sequence
  Description of Artificial Sequence: Synthetic peptide
  XENP020388 vlCDR3
QQYGSSPWT

SEQ ID NO: 7442 - protein, 246 aa, Artificial Sequence
  Description of Artificial Sequence: Synthetic polypeptide
  XENP020389 [CTLA-4]_H3.4_L0.129_scFv(GKPGS)4
EVQLVESGGGLVKPGGSLRLSCAASGFTFSSYTMHWVRQAPGKGLEWVSFISYDGNHKYYADSVKGRFTISRDNAKNSLYLQMNSLRAEDTAVYYCARTGHLGPFDLWGQGTMVTVSSGKPGSGKPGSGKPGSGKPGSEIVLTQSPATLSLSPGERATLSCRASQSVGSSYLAWYQQKPGQAPRLLIYGASSRATGIPDRFSGSGSGTDFTLTISRLEPEDFAVYYCQQYGSSPWTFGQGTKVEIK

SEQ ID NO: 7443 - protein, 118 aa, Artificial Sequence; identical to SEQ ID NO: 7137
  Description of Artificial Sequence: Synthetic polypeptide
  VH of XENP020389

SEQ ID NO: 7444 - protein, 108 aa, Artificial Sequence; identical to SEQ ID NO: 2396
  Description of Artificial Sequence: Synthetic polypeptide
  VL of XENP020389

SEQ ID NO: 7445 - protein, 5 aa, Artificial Sequence
  Description of Artificial Sequence: Synthetic peptide
  XENP020389 vhCDR1
SYTMH

SEQ ID NO: 7446 - protein, 17 aa, Artificial Sequence
  Description of Artificial Sequence: Synthetic peptide
  XENP020389 vhCDR2
FISYDGNHKYYADSVKG

SEQ ID NO: 7447 - protein, 9 aa, Artificial Sequence
  Description of Artificial Sequence: Synthetic peptide
  XENP020389 vhCDR3
TGHLGPFDL

SEQ ID NO: 7448 - protein, 12 aa, Artificial Sequence
  Description of Artificial Sequence: Synthetic peptide
  XENP020389 vlCDR1
RASQSVGSSYLA

SEQ ID NO: 7449 - protein, 7 aa, Artificial Sequence
  Description of Artificial Sequence: Synthetic peptide
  XENP020389 vlCDR2
GASSRAT

SEQ ID NO: 7450 - protein, 9 aa, Artificial Sequence
  Description of Artificial Sequence: Synthetic peptide
  XENP020389 vlCDR3
QQYGSSPWT

SEQ ID NO: 7451 - protein, 246 aa, Artificial Sequence
  Description of Artificial Sequence: Synthetic polypeptide
  XENP020390 [CTLA-4]_H3.4_L0.130_scFv(GKPGS)4
EVQLVESGGGLVKPGGSLRLSCAASGFTFSSYTMHWVRQAPGKGLEWVSFISYDGNHKYYADSVKGRFTISRDNAKNSLYLQMNSLRAEDTAVYYCARTGHLGPFDLWGQGTMVTVSSGKPGSGKPGSGKPGSGKPGSEIVLTQSPATLSVSPGERATLSCRASQSVSSSYLAWYQQKPGQAPRLLIYGASSRATGIPDRFSGSGSGTDFTLTISRLEPEDFAVYYCQQYGSSPWTFGQGTKVEIK

SEQ ID NO: 7452 - protein, 118 aa, Artificial Sequence; identical to SEQ ID NO: 7137
  Description of Artificial Sequence: Synthetic polypeptide
  VH of XENP020390

SEQ ID NO: 7453 - protein, 108 aa, Artificial Sequence
  Description of Artificial Sequence: Synthetic polypeptide
  VL of XENP020390
EIVLTQSPATLSVSPGERATLSCRASQSVSSSYLAWYQQKPGQAPRLLIYGASSRATGIPDRFSGSGSGTDFTLTISRLEPEDFAVYYCQQYGSSPWTFGQGTKVEIK

SEQ ID NO: 7454 - protein, 5 aa, Artificial Sequence
  Description of Artificial Sequence: Synthetic peptide
  XENP020390 vhCDR1
SYTMH

SEQ ID NO: 7455 - protein, 17 aa, Artificial Sequence
  Description of Artificial Sequence: Synthetic peptide
  XENP020390 vhCDR2
FISYDGNHKYYADSVKG

SEQ ID NO: 7456 - protein, 9 aa, Artificial Sequence
  Description of Artificial Sequence: Synthetic peptide
  XENP020390 vhCDR3
TGHLGPFDL

SEQ ID NO: 7457 - protein, 12 aa, Artificial Sequence
  Description of Artificial Sequence: Synthetic peptide
  XENP020390 vlCDR1
RASQSVSSSYLA

SEQ ID NO: 7458 - protein, 7 aa, Artificial Sequence
  Description of Artificial Sequence: Synthetic peptide
  XENP020390 vlCDR2
GASSRAT

SEQ ID NO: 7459 - protein, 9 aa, Artificial Sequence
  Description of Artificial Sequence: Synthetic peptide
  XENP020390 vlCDR3
QQYGSSPWT

SEQ ID NO: 7460 - protein, 246 aa, Artificial Sequence
  Description of Artificial Sequence: Synthetic polypeptide
  XENP020391 [CTLA-4]_H3.4_L0.131_scFv(GKPGS)4
EVQLVESGGGLVKPGGSLRLSCAASGFTFSSYTMHWVRQAPGKGLEWVSFISYDGNHKYYADSVKGRFTISRDNAKNSLYLQMNSLRAEDTAVYYCARTGHLGPFDLWGQGTMVTVSSGKPGSGKPGSGKPGSGKPGSEIVLTQSPGTLSLSPGERATLSCRASQSVSSSYLAWYQQKPGQAPRLLIYGASSRATGIPDRFSGSGSGTDFTLTISRLEPEDFAVYYCQQYGSSPWTFGQGTKVEIK

SEQ ID NO: 7461 - protein, 118 aa, Artificial Sequence; identical to SEQ ID NO: 7137
  Description of Artificial Sequence: Synthetic polypeptide
  VH of XENP020391

SEQ ID NO: 7462 - protein, 108 aa, Artificial Sequence
  Description of Artificial Sequence: Synthetic polypeptide
  VL of XENP020391
EIVLTQSPGTLSLSPGERATLSCRASQSVSSSYLAWYQQKPGQAPRLLIYGASSRATGIPDRFSGSGSGTDFTLTISRLEPEDFAVYYCQQYGSSPWTFGQGTKVEIK

SEQ ID NO: 7463 - protein, 5 aa, Artificial Sequence
  Description of Artificial Sequence: Synthetic peptide
  XENP020391 vhCDR1
SYTMH

SEQ ID NO: 7464 - protein, 17 aa, Artificial Sequence
  Description of Artificial Sequence: Synthetic peptide
  XENP020391 vhCDR2
FISYDGNHKYYADSVKG

SEQ ID NO: 7465 - protein, 9 aa, Artificial Sequence
  Description of Artificial Sequence: Synthetic peptide
  XENP020391 vhCDR3
TGHLGPFDL

SEQ ID NO: 7466 - protein, 12 aa, Artificial Sequence
  Description of Artificial Sequence: Synthetic peptide
  XENP020391 vlCDR1
RASQSVSSSYLA

SEQ ID NO: 7467 - protein, 7 aa, Artificial Sequence
  Description of Artificial Sequence: Synthetic peptide
  XENP020391 vlCDR2
GASSRAT

SEQ ID NO: 7468 - protein, 9 aa, Artificial Sequence
  Description of Artificial Sequence: Synthetic peptide
  XENP020391 vlCDR3
QQYGSSPWT

SEQ ID NO: 7469 - protein, 246 aa, Artificial Sequence
  Description of Artificial Sequence: Synthetic polypeptide
  XENP020392 [CTLA-4]_H3.4_L0.132_scFv(GKPGS)4
EVQLVESGGGLVKPGGSLRLSCAASGFTFSSYTMHWVRQAPGKGLEWVSFISYDGNHKYYADSVKGRFTISRDNAKNSLYLQMNSLRAEDTAVYYCARTGHLGPFDLWGQGTMVTVSSGKPGSGKPGSGKPGSGKPGSEIVLTQSPATLSLSPGERATLSCRASQSVSSSYLAWYQQKPGQAPRLLIYGASSRATGIPDRFSGSGSGTDFTLTISRLEPEDFAVYYCQQYGSSPWTFGQGTKVEIK

SEQ ID NO: 7470 - protein, 118 aa, Artificial Sequence; identical to SEQ ID NO: 7137
  Description of Artificial Sequence: Synthetic polypeptide
  VH of XENP020392

SEQ ID NO: 7471 - protein, 108 aa, Artificial Sequence
  Description of Artificial Sequence: Synthetic polypeptide
  VL of XENP020392
EIVLTQSPATLSLSPGERATLSCRASQSVSSSYLAWYQQKPGQAPRLLIYGASSRATGIPDRFSGSGSGTDFTLTISRLEPEDFAVYYCQQYGSSPWTFGQGTKVEIK

SEQ ID NO: 7472 - protein, 5 aa, Artificial Sequence
  Description of Artificial Sequence: Synthetic peptide
  XENP020392 vhCDR1
SYTMH

SEQ ID NO: 7473 - protein, 17 aa, Artificial Sequence
  Description of Artificial Sequence: Synthetic peptide
  XENP020392 vhCDR2
FISYDGNHKYYADSVKG

SEQ ID NO: 7474 - protein, 9 aa, Artificial Sequence
  Description of Artificial Sequence: Synthetic peptide
  XENP020392 vhCDR3
TGHLGPFDL

SEQ ID NO: 7475 - protein, 12 aa, Artificial Sequence
  Description of Artificial Sequence: Synthetic peptide
  XENP020392 vlCDR1
RASQSVSSSYLA

SEQ ID NO: 7476 - protein, 7 aa, Artificial Sequence
  Description of Artificial Sequence: Synthetic peptide
  XENP020392 vlCDR2
GASSRAT

SEQ ID NO: 7477 - protein, 9 aa, Artificial Sequence
  Description of Artificial Sequence: Synthetic peptide
  XENP020392 vlCDR3
QQYGSSPWT

SEQ ID NO: 7478 - protein, 246 aa, Artificial Sequence
  Description of Artificial Sequence: Synthetic polypeptide
  XENP020393 [CTLA-4]_H3.5_L2_scFv(GKPGS)4
EVQLVESGGGLVKPGGSLRLSCAASGFTFSSYTMHWVRQAPGKGLEWVSFISYDGNTKYYADSVKGRFTISRDNAKNSLYLQMNSLRAEDTAVYYCARTGHLGPFDLWGQGTMVTVSSGKPGSGKPGSGKPGSGKPGSEIVMTQSPATLSVSPGERATLSCRASQSVGSSYLAWYQQKPGQAPRLLIYGAFSRATGIPARFSGSGSGTEFTLTISSLQSEDFAVYYCQQYGSSPWTFGQGTKVEIK

SEQ ID NO: 7479 - protein, 118 aa, Artificial Sequence; identical to SEQ ID NO: 7146
  Description of Artificial Sequence: Synthetic polypeptide
  VH of XENP020393

SEQ ID NO: 7480 - protein, 108 aa, Artificial Sequence; identical to SEQ ID NO: 4843
  Description of Artificial Sequence: Synthetic polypeptide
  VL of XENP020393

SEQ ID NO: 7481 - protein, 5 aa, Artificial Sequence
  Description of Artificial Sequence: Synthetic peptide
  XENP020393 vhCDR1
SYTMH

SEQ ID NO: 7482 - protein, 17 aa, Artificial Sequence
  Description of Artificial Sequence: Synthetic peptide
  XENP020393 vhCDR2
FISYDGNTKYYADSVKG

SEQ ID NO: 7483 - protein, 9 aa, Artificial Sequence
  Description of Artificial Sequence: Synthetic peptide
  XENP020393 vhCDR3
TGHLGPFDL

SEQ ID NO: 7484 - protein, 12 aa, Artificial Sequence
  Description of Artificial Sequence: Synthetic peptide
  XENP020393 vlCDR1
RASQSVGSSYLA

SEQ ID NO: 7485 - protein, 7 aa, Artificial Sequence
  Description of Artificial Sequence: Synthetic peptide
  XENP020393 vlCDR2
GAFSRAT

SEQ ID NO: 7486 - protein, 9 aa, Artificial Sequence
  Description of Artificial Sequence: Synthetic peptide
  XENP020393 vlCDR3
QQYGSSPWT

SEQ ID NO: 7487 - protein, 246 aa, Artificial Sequence
  Description of Artificial Sequence: Synthetic polypeptide
  XENP020394 [CTLA-4]_H3.5_L2.1_scFv(GKPGS)4
EVQLVESGGGLVKPGGSLRLSCAASGFTFSSYTMHWVRQAPGKGLEWVSFISYDGNTKYYADSVKGRFTISRDNAKNSLYLQMNSLRAEDTAVYYCARTGHLGPFDLWGQGTMVTVSSGKPGSGKPGSGKPGSGKPGSEIVMTQSPATLSVSPGERATLSCRASQSVSSSYLAWYQQKPGQAPRLLIYGAFSRATGIPARFSGSGSGTEFTLTISSLQSEDFAVYYCQQYGSSPWTFGQGTKVEIK

SEQ ID NO: 7488 - protein, 118 aa, Artificial Sequence; identical to SEQ ID NO: 7146
  Description of Artificial Sequence: Synthetic polypeptide
  VH of XENP020394

SEQ ID NO: 7489 - protein, 108 aa, Artificial Sequence
  Description of Artificial Sequence: Synthetic polypeptide
  VL of XENP020394
EIVMTQSPATLSVSPGERATLSCRASQSVSSSYLAWYQQKPGQAPRLLIYGAFSRATGIPARFSGSGSGTEFTLTISSLQSEDFAVYYCQQYGSSPWTFGQGTKVEIK

SEQ ID NO: 7490 - protein, 5 aa, Artificial Sequence
  Description of Artificial Sequence: Synthetic peptide
  XENP020394 vhCDR1
SYTMH

SEQ ID NO: 7491 - protein, 17 aa, Artificial Sequence
  Description of Artificial Sequence: Synthetic peptide
  XENP020394 vhCDR2
FISYDGNTKYYADSVKG

SEQ ID NO: 7492 - protein, 9 aa, Artificial Sequence
  Description of Artificial Sequence: Synthetic peptide
  XENP020394 vhCDR3
TGHLGPFDL

SEQ ID NO: 7493 - protein, 12 aa, Artificial Sequence
  Description of Artificial Sequence: Synthetic peptide
  XENP020394 vlCDR1
RASQSVSSSYLA

SEQ ID NO: 7494 - protein, 7 aa, Artificial Sequence
  Description of Artificial Sequence: Synthetic peptide
  XENP020394 vlCDR2
GAFSRAT

SEQ ID NO: 7495 - protein, 9 aa, Artificial Sequence
  Description of Artificial Sequence: Synthetic peptide
  XENP020394 vlCDR3
QQYGSSPWT

SEQ ID NO: 7496 - protein, 246 aa, Artificial Sequence
  Description of Artificial Sequence: Synthetic polypeptide
  XENP020395 [CTLA-4]_H3.5_L2.2_scFv(GKPGS)4
EVQLVESGGGLVKPGGSLRLSCAASGFTFSSYTMHWVRQAPGKGLEWVSFISYDGNTKYYADSVKGRFTISRDNAKNSLYLQMNSLRAEDTAVYYCARTGHLGPFDLWGQGTMVTVSSGKPGSGKPGSGKPGSGKPGSEIVMTQSPATLSVSPGERATLSCRASQSVGSSYLAWYQQKPGQAPRLLIYGASSRATGIPARFSGSGSGTEFTLTISSLQSEDFAVYYCQQYGSSPWTFGQGTKVEIK

SEQ ID NO: 7497 - protein, 118 aa, Artificial Sequence; identical to SEQ ID NO: 7146
  Description of Artificial Sequence: Synthetic polypeptide
  VH of XENP020395

SEQ ID NO: 7498 - protein, 108 aa, Artificial Sequence
  Description of Artificial Sequence: Synthetic polypeptide
  VL of XENP020395
EIVMTQSPATLSVSPGERATLSCRASQSVGSSYLAWYQQKPGQAPRLLIYGASSRATGIPARFSGSGSGTEFTLTISSLQSEDFAVYYCQQYGSSPWTFGQGTKVEIK

SEQ ID NO: 7499 - protein, 5 aa, Artificial Sequence
  Description of Artificial Sequence: Synthetic peptide
  XENP020395 vhCDR1
SYTMH

SEQ ID NO: 7500 - protein, 17 aa, Artificial Sequence
  Description of Artificial Sequence: Synthetic peptide
  XENP020395 vhCDR2
FISYDGNTKYYADSVKG

SEQ ID NO: 7501 - protein, 9 aa, Artificial Sequence
  Description of Artificial Sequence: Synthetic peptide
  XENP020395 vhCDR3
TGHLGPFDL

SEQ ID NO: 7502 - protein, 12 aa, Artificial Sequence
  Description of Artificial Sequence: Synthetic peptide
  XENP020395 vlCDR1
RASQSVGSSYLA

SEQ ID NO: 7503 - protein, 7 aa, Artificial Sequence
  Description of Artificial Sequence: Synthetic peptide
  XENP020395 vlCDR2
GASSRAT

SEQ ID NO: 7504 - protein, 9 aa, Artificial Sequence
  Description of Artificial Sequence: Synthetic peptide
  XENP020395 vlCDR3
QQYGSSPWT

SEQ ID NO: 7505 - protein, 246 aa, Artificial Sequence
  Description of Artificial Sequence: Synthetic polypeptide
  XENP020396 [CTLA-4]_H3.5_L2.3_scFv(GKPGS)4
EVQLVESGGGLVKPGGSLRLSCAASGFTFSSYTMHWVRQAPGKGLEWVSFISYDGNTKYYADSVKGRFTISRDNAKNSLYLQMNSLRAEDTAVYYCARTGHLGPFDLWGQGTMVTVSSGKPGSGKPGSGKPGSGKPGSEIVMTQSPATLSVSPGERATLSCRASQSVSSSYLAWYQQKPGQAPRLLIYGASSRATGIPARFSGSGSGTEFTLTISSLQSEDFAVYYCQQYGSSPWTFGQGTKVEIK

SEQ ID NO: 7506 - protein, 118 aa, Artificial Sequence; identical to SEQ ID NO: 7146
  Description of Artificial Sequence: Synthetic polypeptide
  VH of XENP020396

SEQ ID NO: 7507 - protein, 108 aa, Artificial Sequence
  Description of Artificial Sequence: Synthetic polypeptide
  VL of XENP020396
EIVMTQSPATLSVSPGERATLSCRASQSVSSSYLAWYQQKPGQAPRLLIYGASSRATGIPARFSGSGSGTEFTLTISSLQSEDFAVYYCQQYGSSPWTFGQGTKVEIK

SEQ ID NO: 7508 - protein, 5 aa, Artificial Sequence
  Description of Artificial Sequence: Synthetic peptide
  XENP020396 vhCDR1
SYTMH

SEQ ID NO: 7509 - protein, 17 aa, Artificial Sequence
  Description of Artificial Sequence: Synthetic peptide
  XENP020396 vhCDR2
FISYDGNTKYYADSVKG

SEQ ID NO: 7510 - protein, 9 aa, Artificial Sequence
  Description of Artificial Sequence: Synthetic peptide
  XENP020396 vhCDR3
TGHLGPFDL

SEQ ID NO: 7511 - protein, 12 aa, Artificial Sequence
  Description of Artificial Sequence: Synthetic peptide
  XENP020396 vlCDR1
RASQSVSSSYLA

SEQ ID NO: 7512 - protein, 7 aa, Artificial Sequence
  Description of Artificial Sequence: Synthetic peptide
  XENP020396 vlCDR2
GASSRAT

SEQ ID NO: 7513 - protein, 9 aa, Artificial Sequence
  Description of Artificial Sequence: Synthetic peptide
  XENP020396 vlCDR3
QQYGSSPWT

SEQ ID NO: 7514 - protein, 246 aa, Artificial Sequence
  Description of Artificial Sequence: Synthetic polypeptide
  XENP020431 [CTLA-4]_H3.21_L0.124_scFv(GKPGS)4
EVQLVESGGGLVKPGGSLRLSCAASGFTFSSYTMHWVRQAPGKGLEWVSFISYDGNTKYYADSVKGRFTISRDNAKNSLYLQMNSLRAEDTAVYYCARGGLLGPFDLWGQGTMVTVSSGKPGSGKPGSGKPGSGKPGSEIVLTQSPATLSVSPGERATLSCRASQSVGSSYLAWYQQKPGQAPRLLIYGASSRATGIPDRFSGSGSGTDFTLTISRLEPEDFAVYYCQQYGSSPWTFGQGTKVEIK

SEQ ID NO: 7515 - protein, 118 aa, Artificial Sequence; identical to SEQ ID NO: 7290
  Description of Artificial Sequence: Synthetic polypeptide
  VH of XENP020431

SEQ ID NO: 7516 - protein, 108 aa, Artificial Sequence; identical to SEQ ID NO: 7399
  Description of Artificial Sequence: Synthetic polypeptide
  VL of XENP020431

SEQ ID NO: 7517 - protein, 5 aa, Artificial Sequence
  Description of Artificial Sequence: Synthetic peptide
  XENP020431 vhCDR1
SYTMH

SEQ ID NO: 7518 - protein, 17 aa, Artificial Sequence
  Description of Artificial Sequence: Synthetic peptide
  XENP020431 vhCDR2
FISYDGNTKYYADSVKG

SEQ ID NO: 7519 - protein, 9 aa, Artificial Sequence
  Description of Artificial Sequence: Synthetic peptide
  XENP020431 vhCDR3
GGLLGPFDL

SEQ ID NO: 7520 - protein, 12 aa, Artificial Sequence
  Description of Artificial Sequence: Synthetic peptide
  XENP020431 vlCDR1
RASQSVGSSYLA

SEQ ID NO: 7521 - protein, 7 aa, Artificial Sequence
  Description of Artificial Sequence: Synthetic peptide
  XENP020431 vlCDR2
GASSRAT

SEQ ID NO: 7522 - protein, 9 aa, Artificial Sequence
  Description of Artificial Sequence: Synthetic peptide
  XENP020431 vlCDR3
QQYGSSPWT

SEQ ID NO: 7523 - protein, 246 aa, Artificial Sequence
  Description of Artificial Sequence: Synthetic polypeptide
  XENP020432 [CTLA-4]_H3.21_L0.129_scFv(GKPGS)4
EVQLVESGGGLVKPGGSLRLSCAASGFTFSSYTMHWVRQAPGKGLEWVSFISYDGNTKYYADSVKGRFTISRDNAKNSLYLQMNSLRAEDTAVYYCARGGLLGPFDLWGQGTMVTVSSGKPGSGKPGSGKPGSGKPGSEIVLTQSPATLSLSPGERATLSCRASQSVGSSYLAWYQQKPGQAPRLLIYGASSRATGIPDRFSGSGSGTDFTLTISRLEPEDFAVYYCQQYGSSPWTFGQGTKVEIK

SEQ ID NO: 7524 - protein, 118 aa, Artificial Sequence; identical to SEQ ID NO: 7290
  Description of Artificial Sequence: Synthetic polypeptide
  VH of XENP020432

SEQ ID NO: 7525 - protein, 108 aa, Artificial Sequence; identical to SEQ ID NO: 2396
  Description of Artificial Sequence: Synthetic polypeptide
  VL of XENP020432

SEQ ID NO: 7526 - protein, 5 aa, Artificial Sequence
  Description of Artificial Sequence: Synthetic peptide
  XENP020432 vhCDR1
SYTMH

SEQ ID NO: 7527 - protein, 17 aa, Artificial Sequence
  Description of Artificial Sequence: Synthetic peptide
  XENP020432 vhCDR2
FISYDGNTKYYADSVKG

SEQ ID NO: 7528 - protein, 9 aa, Artificial Sequence
  Description of Artificial Sequence: Synthetic peptide
  XENP020432 vhCDR3
GGLLGPFDL

SEQ ID NO: 7529 - protein, 12 aa, Artificial Sequence
  Description of Artificial Sequence: Synthetic peptide
  XENP020432 vlCDR1
RASQSVGSSYLA

SEQ ID NO: 7530 - protein, 7 aa, Artificial Sequence
  Description of Artificial Sequence: Synthetic peptide
  XENP020432 vlCDR2
GASSRAT

SEQ ID NO: 7531 - protein, 9 aa, Artificial Sequence
  Description of Artificial Sequence: Synthetic peptide
  XENP020432 vlCDR3
QQYGSSPWT

SEQ ID NO: 7532 - protein, 246 aa, Artificial Sequence
  Description of Artificial Sequence: Synthetic polypeptide
  XENP020433 [CTLA-4]_H3.21_L0.132_scFv(GKPGS)4
EVQLVESGGGLVKPGGSLRLSCAASGFTFSSYTMHWVRQAPGKGLEWVSFISYDGNTKYYADSVKGRFTISRDNAKNSLYLQMNSLRAEDTAVYYCARGGLLGPFDLWGQGTMVTVSSGKPGSGKPGSGKPGSGKPGSEIVLTQSPATLSLSPGERATLSCRASQSVSSSYLAWYQQKPGQAPRLLIYGASSRATGIPDRFSGSGSGTDFTLTISRLEPEDFAVYYCQQYGSSPWTFGQGTKVEIK

SEQ ID NO: 7533 - protein, 118 aa, Artificial Sequence; identical to SEQ ID NO: 7290
  Description of Artificial Sequence: Synthetic polypeptide
  VH of XENP020433

SEQ ID NO: 7534 - protein, 108 aa, Artificial Sequence; identical to SEQ ID NO: 7471
  Description of Artificial Sequence: Synthetic polypeptide
  VL of XENP020433

SEQ ID NO: 7535 - protein, 5 aa, Artificial Sequence
  Description of Artificial Sequence: Synthetic peptide
  XENP020433 vhCDR1
SYTMH

SEQ ID NO: 7536 - protein, 17 aa, Artificial Sequence
  Description of Artificial Sequence: Synthetic peptide
  XENP020433 vhCDR2
FISYDGNTKYYADSVKG

SEQ ID NO: 7537 - protein, 9 aa, Artificial Sequence
  Description of Artificial Sequence: Synthetic peptide
  XENP020433 vhCDR3
GGLLGPFDL

SEQ ID NO: 7538 - protein, 12 aa, Artificial Sequence
  Description of Artificial Sequence: Synthetic peptide
  XENP020433 vlCDR1
RASQSVSSSYLA

SEQ ID NO: 7539 - protein, 7 aa, Artificial Sequence
  Description of Artificial Sequence: Synthetic peptide
  XENP020433 vlCDR2
GASSRAT

SEQ ID NO: 7540 - protein, 9 aa, Artificial Sequence
  Description of Artificial Sequence: Synthetic peptide
  XENP020433 vlCDR3
QQYGSSPWT

SEQ ID NO: 7541 - protein, 246 aa, Artificial Sequence
  Description of Artificial Sequence: Synthetic polypeptide
  XENP020434 [CTLA-4]_H3.23_L0.124_scFv(GKPGS)4
EVQLVESGGGLVKPGGSLRLSCAASGFTFSSYTMHWVRQAPGKGLEWVSFISYDGNYKYYADSVKGRFTISRDNAKNSLYLQMNSLRAEDTAVYYCARGGHLGPFDLWGQGTMVTVSSGKPGSGKPGSGKPGSGKPGSEIVLTQSPATLSVSPGERATLSCRASQSVGSSYLAWYQQKPGQAPRLLIYGASSRATGIPDRFSGSGSGTDFTLTISRLEPEDFAVYYCQQYGSSPWTFGQGTKVEIK

SEQ ID NO: 7542 - protein, 118 aa, Artificial Sequence; identical to SEQ ID NO: 2395
  Description of Artificial Sequence: Synthetic polypeptide
  VH of XENP020434

SEQ ID NO: 7543 - protein, 108 aa, Artificial Sequence; identical to SEQ ID NO: 7399
  Description of Artificial Sequence: Synthetic polypeptide
  VL of XENP020434

SEQ ID NO: 7544 - protein, 5 aa, Artificial Sequence
  Description of Artificial Sequence: Synthetic peptide
  XENP020434 vhCDR1
SYTMH

SEQ ID NO: 7545 - protein, 17 aa, Artificial Sequence
  Description of Artificial Sequence: Synthetic peptide
  XENP020434 vhCDR2
FISYDGNYKYYADSVKG

SEQ ID NO: 7546 - protein, 9 aa, Artificial Sequence
  Description of Artificial Sequence: Synthetic peptide
  XENP020434 vhCDR3
GGHLGPFDL

SEQ ID NO: 7547 - protein, 12 aa, Artificial Sequence
  Description of Artificial Sequence: Synthetic peptide
  XENP020434 vlCDR1
RASQSVGSSYLA

SEQ ID NO: 7548 - protein, 7 aa, Artificial Sequence
  Description of Artificial Sequence: Synthetic peptide
  XENP020434 vlCDR2
GASSRAT

SEQ ID NO: 7549 - protein, 9 aa, Artificial Sequence
  Description of Artificial Sequence: Synthetic peptide
  XENP020434 vlCDR3
QQYGSSPWT

SEQ ID NO: 7550 - protein, 246 aa, Artificial Sequence
  Description of Artificial Sequence: Synthetic polypeptide
  XENP020435 [CTLA-4]_H3.23_L0.129_scFv(GKPGS)4
EVQLVESGGGLVKPGGSLRLSCAASGFTFSSYTMHWVRQAPGKGLEWVSFISYDGNYKYYADSVKGRFTISRDNAKNSLYLQMNSLRAEDTAVYYCARGGHLGPFDLWGQGTMVTVSSGKPGSGKPGSGKPGSGKPGSEIVLTQSPATLSLSPGERATLSCRASQSVGSSYLAWYQQKPGQAPRLLIYGASSRATGIPDRFSGSGSGTDFTLTISRLEPEDFAVYYCQQYGSSPWTFGQGTKVEIK

SEQ ID NO: 7551 - protein, 118 aa, Artificial Sequence; identical to SEQ ID NO: 2395
  Description of Artificial Sequence: Synthetic polypeptide
  VH of XENP020435

SEQ ID NO: 7552 - protein, 108 aa, Artificial Sequence; identical to SEQ ID NO: 2396
  Description of Artificial Sequence: Synthetic polypeptide
  VL of XENP020435

SEQ ID NO: 7553 - protein, 5 aa, Artificial Sequence
  Description of Artificial Sequence: Synthetic peptide
  XENP020435 vhCDR1
SYTMH

SEQ ID NO: 7554 - protein, 17 aa, Artificial Sequence
  Description of Artificial Sequence: Synthetic peptide
  XENP020435 vhCDR2
FISYDGNYKYYADSVKG

SEQ ID NO: 7555 - protein, 9 aa, Artificial Sequence
  Description of Artificial Sequence: Synthetic peptide
  XENP020435 vhCDR3
GGHLGPFDL

SEQ ID NO: 7556 - protein, 12 aa, Artificial Sequence
  Description of Artificial Sequence: Synthetic peptide
  XENP020435 vlCDR1
RASQSVGSSYLA

SEQ ID NO: 7557 - protein, 7 aa, Artificial Sequence
  Description of Artificial Sequence: Synthetic peptide
  XENP020435 vlCDR2
GASSRAT

SEQ ID NO: 7558 - protein, 9 aa, Artificial Sequence
  Description of Artificial Sequence: Synthetic peptide
  XENP020435 vlCDR3
QQYGSSPWT

SEQ ID NO: 7559 - protein, 246 aa, Artificial Sequence
  Description of Artificial Sequence: Synthetic polypeptide
  XENP020436 [CTLA-4]_H3.23_L0.132_scFv(GKPGS)4
EVQLVESGGGLVKPGGSLRLSCAASGFTFSSYTMHWVRQAPGKGLEWVSFISYDGNYKYYADSVKGRFTISRDNAKNSLYLQMNSLRAEDTAVYYCARGGHLGPFDLWGQGTMVTVSSGKPGSGKPGSGKPGSGKPGSEIVLTQSPATLSLSPGERATLSCRASQSVSSSYLAWYQQKPGQAPRLLIYGASSRATGIPDRFSGSGSGTDFTLTISRLEPEDFAVYYCQQYGSSPWTFGQGTKVEIK

SEQ ID NO: 7560 - protein, 118 aa, Artificial Sequence; identical to SEQ ID NO: 2395
  Description of Artificial Sequence: Synthetic polypeptide
  VH of XENP020436

SEQ ID NO: 7561 - protein, 108 aa, Artificial Sequence; identical to SEQ ID NO: 7471
  Description of Artificial Sequence: Synthetic polypeptide
  VL of XENP020436

SEQ ID NO: 7562 - protein, 5 aa, Artificial Sequence
  Description of Artificial Sequence: Synthetic peptide
  XENP020436 vhCDR1
SYTMH

SEQ ID NO: 7563 - protein, 17 aa, Artificial Sequence
  Description of Artificial Sequence: Synthetic peptide
  XENP020436 vhCDR2
FISYDGNYKYYADSVKG

SEQ ID NO: 7564 - protein, 9 aa, Artificial Sequence
  Description of Artificial Sequence: Synthetic peptide
  XENP020436 vhCDR3
GGHLGPFDL

SEQ ID NO: 7565 - protein, 12 aa, Artificial Sequence
  Description of Artificial Sequence: Synthetic peptide
  XENP020436 vlCDR1
RASQSVSSSYLA

SEQ ID NO: 7566 - protein, 7 aa, Artificial Sequence
  Description of Artificial Sequence: Synthetic peptide
  XENP020436 vlCDR2
GASSRAT

SEQ ID NO: 7567 - protein, 9 aa, Artificial Sequence
  Description of Artificial Sequence: Synthetic peptide
  XENP020436 vlCDR3
QQYGSSPWT

SEQ ID NO: 7568 - protein, 246 aa, Artificial Sequence
  Description of Artificial Sequence: Synthetic polypeptide
  XENP020437 [CTLA-4]_H3.25_L0.124_scFv(GKPGS)4
EVQLVESGGGLVKPGGSLRLSCAASGFTFSSYTMHWVRQAPGKGLEWVSFISYDGNYKYYADSVKGRFTISRDNAKNSLYLQMNSLRAEDTAVYYCARGGLLGPFDLWGQGTMVTVSSGKPGSGKPGSGKPGSGKPGSEIVLTQSPATLSVSPGERATLSCRASQSVGSSYLAWYQQKPGQAPRLLIYGASSRATGIPDRFSGSGSGTDFTLTISRLEPEDFAVYYCQQYGSSPWTFGQGTKVEIK

SEQ ID NO: 7569 - protein, 118 aa, Artificial Sequence; identical to SEQ ID NO: 7326
  Description of Artificial Sequence: Synthetic polypeptide
  VH of XENP020437

SEQ ID NO: 7570 - protein, 108 aa, Artificial Sequence; identical to SEQ ID NO: 7399
  Description of Artificial Sequence: Synthetic polypeptide
  VL of XENP020437

SEQ ID NO: 7571 - protein, 5 aa, Artificial Sequence
  Description of Artificial Sequence: Synthetic peptide
  XENP020437 vhCDR1
SYTMH

SEQ ID NO: 7572 - protein, 17 aa, Artificial Sequence
  Description of Artificial Sequence: Synthetic peptide
  XENP020437 vhCDR2
FISYDGNYKYYADSVKG

SEQ ID NO: 7573 - protein, 9 aa, Artificial Sequence
  Description of Artificial Sequence: Synthetic peptide
  XENP020437 vhCDR3
GGLLGPFDL

SEQ ID NO: 7574 - protein, 12 aa, Artificial Sequence
  Description of Artificial Sequence: Synthetic peptide
  XENP020437 vlCDR1
RASQSVGSSYLA

SEQ ID NO: 7575 - protein, 7 aa, Artificial Sequence
  Description of Artificial Sequence: Synthetic peptide
  XENP020437 vlCDR2
GASSRAT

SEQ ID NO: 7576 - protein, 9 aa, Artificial Sequence
  Description of Artificial Sequence: Synthetic peptide
  XENP020437 vlCDR3
QQYGSSPWT

SEQ ID NO: 7577 - protein, 246 aa, Artificial Sequence
  Description of Artificial Sequence: Synthetic polypeptide
  XENP020438 [CTLA-4]_H3.25_L0.129_scFv(GKPGS)4
EVQLVESGGGLVKPGGSLRLSCAASGFTFSSYTMHWVRQAPGKGLEWVSFISYDGNYKYYADSVKGRFTISRDNAKNSLYLQMNSLRAEDTAVYYCARGGLLGPFDLWGQGTMVTVSSGKPGSGKPGSGKPGSGKPGSEIVLTQSPATLSLSPGERATLSCRASQSVGSSYLAWYQQKPGQAPRLLIYGASSRATGIPDRFSGSGSGTDFTLTISRLEPEDFAVYYCQQYGSSPWTFGQGTKVEIK

SEQ ID NO: 7578 - protein, 118 aa, Artificial Sequence; identical to SEQ ID NO: 7326
  Description of Artificial Sequence: Synthetic polypeptide
  VH of XENP020438

SEQ ID NO: 7579 - protein, 108 aa, Artificial Sequence; identical to SEQ ID NO: 2396
  Description of Artificial Sequence: Synthetic polypeptide
  VL of XENP020438

SEQ ID NO: 7580 - protein, 5 aa, Artificial Sequence
  Description of Artificial Sequence: Synthetic peptide
  XENP020438 vhCDR1
SYTMH

SEQ ID NO: 7581 - protein, 17 aa, Artificial Sequence
  Description of Artificial Sequence: Synthetic peptide
  XENP020438 vhCDR2
FISYDGNYKYYADSVKG

SEQ ID NO: 7582 - protein, 9 aa, Artificial Sequence
  Description of Artificial Sequence: Synthetic peptide
  XENP020438 vhCDR3
GGLLGPFDL

SEQ ID NO: 7583 - protein, 12 aa, Artificial Sequence
  Description of Artificial Sequence: Synthetic peptide
  XENP020438 vlCDR1
RASQSVGSSYLA

SEQ ID NO: 7584 - protein, 7 aa, Artificial Sequence
  Description of Artificial Sequence: Synthetic peptide
  XENP020438 vlCDR2
GASSRAT

SEQ ID NO: 7585 - protein, 9 aa, Artificial Sequence
  Description of Artificial Sequence: Synthetic peptide
  XENP020438 vlCDR3
QQYGSSPWT

SEQ ID NO: 7586 - protein, 246 aa, Artificial Sequence
  Description of Artificial Sequence: Synthetic polypeptide
  XENP020439 [CTLA-4]_H3.25_L0.132_scFv(GKPGS)4
EVQLVESGGGLVKPGGSLRLSCAASGFTFSSYTMHWVRQAPGKGLEWVSFISYDGNYKYYADSVKGRFTISRDNAKNSLYLQMNSLRAEDTAVYYCARGGLLGPFDLWGQGTMVTVSSGKPGSGKPGSGKPGSGKPGSEIVLTQSPATLSLSPGERATLSCRASQSVSSSYLAWYQQKPGQAPRLLIYGASSRATGIPDRFSGSGSGTDFTLTISRLEPEDFAVYYCQQYGSSPWTFGQGTKVEIK

SEQ ID NO: 7587 - protein, 118 aa, Artificial Sequence; identical to SEQ ID NO: 7326
  Description of Artificial Sequence: Synthetic polypeptide
  VH of XENP020439

SEQ ID NO: 7588 - protein, 108 aa, Artificial Sequence; identical to SEQ ID NO: 7471
  Description of Artificial Sequence: Synthetic polypeptide
  VL of XENP020439

SEQ ID NO: 7589 - protein, 5 aa, Artificial Sequence
  Description of Artificial Sequence: Synthetic peptide
  XENP020439 vhCDR1
SYTMH

SEQ ID NO: 7590 - protein, 17 aa, Artificial Sequence
  Description of Artificial Sequence: Synthetic peptide
  XENP020439 vhCDR2
FISYDGNYKYYADSVKG

SEQ ID NO: 7591 - protein, 9 aa, Artificial Sequence
  Description of Artificial Sequence: Synthetic peptide
  XENP020439 vhCDR3
GGLLGPFDL

SEQ ID NO: 7592 - protein, 12 aa, Artificial Sequence
  Description of Artificial Sequence: Synthetic peptide
  XENP020439 vlCDR1
RASQSVSSSYLA

SEQ ID NO: 7593 - protein, 7 aa, Artificial Sequence
  Description of Artificial Sequence: Synthetic peptide
  XENP020439 vlCDR2
GASSRAT

SEQ ID NO: 7594 - protein, 9 aa, Artificial Sequence
  Description of Artificial Sequence: Synthetic peptide
  XENP020439 vlCDR3
QQYGSSPWT

SEQ ID NO: 7595 - protein, 221 aa, Artificial Sequence
  Description of Artificial Sequence: Synthetic polypeptide
  XENP009950 [CTLA-4]_H0_L0_Fab_Heavy Chain
QVQLVESGGGVVQPGRSLRLSCAASGFTFSSYTMHWVRQAPGKGLEWVTFISYDGNNKYYADSVKGRFTISRDNSKNTLYLQMNSLRAEDTAIYYCARTGWLGPFDYWGQGTLVTVSSASTKGPSVFPLAPSSKSTSGGTAALGCLVKDYFPEPVTVSWNSGALTSGVHTFPAVLQSSGLYSLSSVVTVPSSSLGTQTYICNVNHKPSNTKVDKKVEPKSC

SEQ ID NO: 7596 - protein, 118 aa, Artificial Sequence; identical to SEQ ID NO: 3737
  Description of Artificial Sequence: Synthetic polypeptide
  VH of XENP009950

SEQ ID NO: 7597 - protein, 5 aa, Artificial Sequence
  Description of Artificial Sequence: Synthetic peptide
  XENP009950 vhCDR1
SYTMH

SEQ ID NO: 7598 - protein, 17 aa, Artificial Sequence
  Description of Artificial Sequence: Synthetic peptide
  XENP009950 vhCDR2
FISYDGNNKYYADSVKG

SEQ ID NO: 7599 - protein, 9 aa, Artificial Sequence
  Description of Artificial Sequence: Synthetic peptide
  XENP009950 vhCDR3
TGWLGPFDY

SEQ ID NO: 7600 - protein, 215 aa, Artificial Sequence
  Description of Artificial Sequence: Synthetic polypeptide
  XENP009950 [CTLA-4]_H0_L0_Fab Light Chain
EIVLTQSPGTLSLSPGERATLSCRASQSVGSSYLAWYQQKPGQAPRLLIYGAFSRATGIPDRFSGSGSGTDFTLTISRLEPEDFAVYYCQQYGSSPWTFGQGTKVEIKRTVAAPSVFIFPPSDEQLKSGTASVVCLLNNFYPREAKVQWKVDNALQSGNSQESVTEQDSKDSTYSLSSTLTLSKADYEKHKVYACEVTHQGLSSPVTKSFNRGEC

SEQ ID NO: 7601 - protein, 108 aa, Artificial Sequence; identical to SEQ ID NO: 3741
  Description of Artificial Sequence: Synthetic polypeptide
  VL of XENP009950

SEQ ID NO: 7602 - protein, 12 aa, Artificial Sequence
  Description of Artificial Sequence: Synthetic peptide
  XENP009950 vlCDR1
RASQSVGSSYLA

SEQ ID NO: 7603 - protein, 7 aa, Artificial Sequence
  Description of Artificial Sequence: Synthetic peptide
  XENP009950 vlCDR2
GAFSRAT

SEQ ID NO: 7604 - protein, 9 aa, Artificial Sequence
  Description of Artificial Sequence: Synthetic peptide
  XENP009950 vlCDR3
QQYGSSPWT

SEQ ID NO: 7605 - protein, 221 aa, Artificial Sequence
  Description of Artificial Sequence: Synthetic polypeptide
  XENP019211 [CTLA-4]_H0.1_L0_Fab Heavy Chain
EVQLVESGGGVVQPGRSLRLSCAASGFTFSSYTMHWVRQAPGKGLEWVTFISYDGNNKYYADSVKGRFTISRDNSKNTLYLQMNSLRAEDTAIYYCARTGWLGPFDYWGQGTLVTVSSASTKGPSVFPLAPSSKSTSGGTAALGCLVKDYFPEPVTVSWNSGALTSGVHTFPAVLQSSGLYSLSSVVTVPSSSLGTQTYICNVNHKPSNTKVDKKVEPKSC

SEQ ID NO: 7606 - protein, 118 aa, Artificial Sequence; identical to SEQ ID NO: 4869
  Description of Artificial Sequence: Synthetic polypeptide
  VH of XENP019211

SEQ ID NO: 7607 - protein, 5 aa, Artificial Sequence
  Description of Artificial Sequence: Synthetic peptide
  XENP019211 vhCDR1
SYTMH

SEQ ID NO: 7608 - protein, 17 aa, Artificial Sequence
  Description of Artificial Sequence: Synthetic peptide
  XENP019211 vhCDR2
FISYDGNNKYYADSVKG

SEQ ID NO: 7609 - protein, 9 aa, Artificial Sequence
  Description of Artificial Sequence: Synthetic peptide
  XENP019211 vhCDR3
TGWLGPFDY

SEQ ID NO: 7610 - protein, 215 aa, Artificial Sequence; identical to SEQ ID NO: 7600
  Description of Artificial Sequence: Synthetic polypeptide
  XENP019211 [CTLA-4]_H0.1_L0_Fab Light Chain

SEQ ID NO: 7611 - protein, 108 aa, Artificial Sequence; identical to SEQ ID NO: 3741
  Description of Artificial Sequence: Synthetic polypeptide
  VL of XENP019211

SEQ ID NO: 7612 - protein, 12 aa, Artificial Sequence
  Description of Artificial Sequence: Synthetic peptide
  XENP019211 vlCDR1
RASQSVGSSYLA

SEQ ID NO: 7613 - protein, 7 aa, Artificial Sequence
  Description of Artificial Sequence: Synthetic peptide
  XENP019211 vlCDR2
GAFSRAT

SEQ ID NO: 7614 - protein, 9 aa, Artificial Sequence
  Description of Artificial Sequence: Synthetic peptide
  XENP019211 vlCDR3
QQYGSSPWT

SEQ ID NO: 7615 - protein, 221 aa, Artificial Sequence
  Description of Artificial Sequence: Synthetic polypeptide
  XENP019212 [CTLA-4]_H0.2_L0_Fab Heavy Chain
QVQLLESGGGVVQPGRSLRLSCAASGFTFSSYTMHWVRQAPGKGLEWVTFISYDGNNKYYADSVKGRFTISRDNSKNTLYLQMNSLRAEDTAIYYCARTGWLGPFDYWGQGTLVTVSSASTKGPSVFPLAPSSKSTSGGTAALGCLVKDYFPEPVTVSWNSGALTSGVHTFPAVLQSSGLYSLSSVVTVPSSSLGTQTYICNVNHKPSNTKVDKKVEPKSC

SEQ ID NO: 7616 - protein, 118 aa, Artificial Sequence; identical to SEQ ID NO: 4878
  Description of Artificial Sequence: Synthetic polypeptide
  VH of XENP019212

SEQ ID NO: 7617 - protein, 5 aa, Artificial Sequence
  Description of Artificial Sequence: Synthetic peptide
  XENP019212 vhCDR1
SYTMH

SEQ ID NO: 7618 - protein, 17 aa, Artificial Sequence
  Description of Artificial Sequence: Synthetic peptide
  XENP019212 vhCDR2
FISYDGNNKYYADSVKG

SEQ ID NO: 7619 - protein, 9 aa, Artificial Sequence
  Description of Artificial Sequence: Synthetic peptide
  XENP019212 vhCDR3
TGWLGPFDY

SEQ ID NO: 7620 - protein, 215 aa, Artificial Sequence; identical to SEQ ID NO: 7600
  Description of Artificial Sequence: Synthetic polypeptide
  XENP019212 [CTLA-4]_H0.2_L0_Fab Light Chain

SEQ ID NO: 7621 - protein, 108 aa, Artificial Sequence; identical to SEQ ID NO: 3741
  Description of Artificial Sequence: Synthetic polypeptide
  VL of XENP019212

SEQ ID NO: 7622 - protein, 12 aa, Artificial Sequence
  Description of Artificial Sequence: Synthetic peptide
  XENP019212 vlCDR1
RASQSVGSSYLA

SEQ ID NO: 7623 - protein, 7 aa, Artificial Sequence
  Description of Artificial Sequence: Synthetic peptide
  XENP019212 vlCDR2
GAFSRAT

SEQ ID NO: 7624 - protein, 9 aa, Artificial Sequence
  Description of Artificial Sequence: Synthetic peptide
  XENP019212 vlCDR3
QQYGSSPWT

SEQ ID NO: 7625 - protein, 221 aa, Artificial Sequence
  Description of Artificial Sequence: Synthetic polypeptide
  XENP019213 [CTLA-4]_H0.3_L0_Fab Heavy Chain
QVQLVESGGGLVQPGRSLRLSCAASGFTFSSYTMHWVRQAPGKGLEWVTFISYDGNNKYYADSVKGRFTISRDNSKNTLYLQMNSLRAEDTAIYYCARTGWLGPFDYWGQGTLVTVSSASTKGPSVFPLAPSSKSTSGGTAALGCLVKDYFPEPVTVSWNSGALTSGVHTFPAVLQSSGLYSLSSVVTVPSSSLGTQTYICNVNHKPSNTKVDKKVEPKSC

SEQ ID NO: 7626 - protein, 118 aa, Artificial Sequence; identical to SEQ ID NO: 4887
  Description of Artificial Sequence: Synthetic polypeptide
  VH of XENP019213

SEQ ID NO: 7627 - protein, 5 aa, Artificial Sequence
  Description of Artificial Sequence: Synthetic peptide
  XENP019213 vhCDR1
SYTMH

SEQ ID NO: 7628 - protein, 17 aa, Artificial Sequence
  Description of Artificial Sequence: Synthetic peptide
  XENP019213 vhCDR2
FISYDGNNKYYADSVKG

SEQ ID NO: 7629 - protein, 9 aa, Artificial Sequence
  Description of Artificial Sequence: Synthetic peptide
  XENP019213 vhCDR3
TGWLGPFDY

SEQ ID NO: 7630 - protein, 215 aa, Artificial Sequence; identical to SEQ ID NO: 7600
  Description of Artificial Sequence: Synthetic polypeptide
  XENP019213 [CTLA-4]_H0.3_L0_Fab Light Chain

SEQ ID NO: 7631 - protein, 108 aa, Artificial Sequence; identical to SEQ ID NO: 3741
  Description of Artificial Sequence: Synthetic polypeptide
  VL of XENP019213

SEQ ID NO: 7632 - protein, 12 aa, Artificial Sequence
  Description of Artificial Sequence: Synthetic peptide
  XENP019213 vlCDR1
RASQSVGSSYLA

SEQ ID NO: 7633 - protein, 7 aa, Artificial Sequence
  Description of Artificial Sequence: Synthetic peptide
  XENP019213 vlCDR2
GAFSRAT

SEQ ID NO: 7634 - protein, 9 aa, Artificial Sequence
  Description of Artificial Sequence: Synthetic peptide
  XENP019213 vlCDR3
QQYGSSPWT

SEQ ID NO: 7635 - protein, 221 aa, Artificial Sequence
  Description of Artificial Sequence: Synthetic polypeptide
  XENP019214 [CTLA-4]_H0.4_L0_Fab Heavy Chain
QVQLVESGGGVKQPGRSLRLSCAASGFTFSSYTMHWVRQAPGKGLEWVTFISYDGNNKYYADSVKGRFTISRDNSKNTLYLQMNSLRAEDTAIYYCARTGWLGPFDYWGQGTLVTVSSASTKGPSVFPLAPSSKSTSGGTAALGCLVKDYFPEPVTVSWNSGALTSGVHTFPAVLQSSGLYSLSSVVTVPSSSLGTQTYICNVNHKPSNTKVDKKVEPKSC

SEQ ID NO: 7636 - protein, 118 aa, Artificial Sequence; identical to SEQ ID NO: 4896
  Description of Artificial Sequence: Synthetic polypeptide
  VH of XENP019214

SEQ ID NO: 7637 - protein, 5 aa, Artificial Sequence
  Description of Artificial Sequence: Synthetic peptide
  XENP019214 vhCDR1
SYTMH

SEQ ID NO: 7638 - protein, 17 aa, Artificial Sequence
  Description of Artificial Sequence: Synthetic peptide
  XENP019214 vhCDR2
FISYDGNNKYYADSVKG

SEQ ID NO: 7639 - protein, 9 aa, Artificial Sequence
  Description of Artificial Sequence: Synthetic peptide
  XENP019214 vhCDR3
TGWLGPFDY

SEQ ID NO: 7640 - protein, 215 aa, Artificial Sequence; identical to SEQ ID NO: 7600
  Description of Artificial Sequence: Synthetic polypeptide
  XENP019214 [CTLA-4]_H0.4_L0_Fab Light Chain

SEQ ID NO: 7641 - protein, 108 aa, Artificial Sequence; identical to SEQ ID NO: 3741
  Description of Artificial Sequence: Synthetic polypeptide
  VL of XENP019214

SEQ ID NO: 7642 - protein, 12 aa, Artificial Sequence
  Description of Artificial Sequence: Synthetic peptide
  XENP019214 vlCDR1
RASQSVGSSYLA

SEQ ID NO: 7643 - protein, 7 aa, Artificial Sequence
  Description of Artificial Sequence: Synthetic peptide
  XENP019214 vlCDR2
GAFSRAT

SEQ ID NO: 7644 - protein, 9 aa, Artificial Sequence
  Description of Artificial Sequence: Synthetic peptide
  XENP019214 vlCDR3
QQYGSSPWT

SEQ ID NO: 7645 - protein, 221 aa, Artificial Sequence
  Description of Artificial Sequence: Synthetic polypeptide
  XENP019215 [CTLA-4]_H0.5_L0_Fab Heavy Chain
QVQLVESGGGVKQPGESLRLSCAASGFTFSSYTMHWVRQAPGKGLEWVTFISYDGNNKYYADSVKGRFTISRDNSKNTLYLQMNSLRAEDTAIYYCARTGWLGPFDYWGQGTLVTVSSASTKGPSVFPLAPSSKSTSGGTAALGCLVKDYFPEPVTVSWNSGALTSGVHTFPAVLQSSGLYSLSSVVTVPSSSLGTQTYICNVNHKPSNTKVDKKVEPKSC

SEQ ID NO: 7646 - protein, 118 aa, Artificial Sequence; identical to SEQ ID NO: 4905
  Description of Artificial Sequence: Synthetic polypeptide
  VH of XENP019215

SEQ ID NO: 7647 - protein, 5 aa, Artificial Sequence
  Description of Artificial Sequence: Synthetic peptide
  XENP019215 vhCDR1
SYTMH

SEQ ID NO: 7648 - protein, 17 aa, Artificial Sequence
  Description of Artificial Sequence: Synthetic peptide
  XENP019215 vhCDR2
FISYDGNNKYYADSVKG

SEQ ID NO: 7649 - protein, 9 aa, Artificial Sequence
  Description of Artificial Sequence: Synthetic peptide
  XENP019215 vhCDR3
TGWLGPFDY

SEQ ID NO: 7650 - protein, 215 aa, Artificial Sequence; identical to SEQ ID NO: 7600
  Description of Artificial Sequence: Synthetic polypeptide
  XENP019215 [CTLA-4]_H0.5_L0_Fab Light Chain

SEQ ID NO: 7651 - protein, 108 aa, Artificial Sequence; identical to SEQ ID NO: 3741
  Description of Artificial Sequence: Synthetic polypeptide
  VL of XENP019215

SEQ ID NO: 7652 - protein, 12 aa, Artificial Sequence
  Description of Artificial Sequence: Synthetic peptide
  XENP019215 vlCDR1
RASQSVGSSYLA

SEQ ID NO: 7653 - protein, 7 aa, Artificial Sequence
  Description of Artificial Sequence: Synthetic peptide
  XENP019215 vlCDR2
GAFSRAT

SEQ ID NO: 7654 - protein, 9 aa, Artificial Sequence
  Description of Artificial Sequence: Synthetic peptide
  XENP019215 vlCDR3
QQYGSSPWT

SEQ ID NO: 7655 - protein, 221 aa, Artificial Sequence
  Description of Artificial Sequence: Synthetic polypeptide
  XENP019216 [CTLA-4]_H0.6_L0_Fab Heavy Chain
QVQLVESGGGVVKPGRSLRLSCAASGFTFSSYTMHWVRQAPGKGLEWVTFISYDGNNKYYADSVKGRFTISRDNSKNTLYLQMNSLRAEDTAIYYCARTGWLGPFDYWGQGTLVTVSSASTKGPSVFPLAPSSKSTSGGTAALGCLVKDYFPEPVTVSWNSGALTSGVHTFPAVLQSSGLYSLSSVVTVPSSSLGTQTYICNVNHKPSNTKVDKKVEPKSC

SEQ ID NO: 7656 - protein, 118 aa, Artificial Sequence; identical to SEQ ID NO: 4914
  Description of Artificial Sequence: Synthetic polypeptide
  VH of XENP019216

SEQ ID NO: 7657 - protein, 5 aa, Artificial Sequence
  Description of Artificial Sequence: Synthetic peptide
  XENP019216 vhCDR1
SYTMH

SEQ ID NO: 7658 - protein, 17 aa, Artificial Sequence
  Description of Artificial Sequence: Synthetic peptide
  XENP019216 vhCDR2
FISYDGNNKYYADSVKG

SEQ ID NO: 7659 - protein, 9 aa, Artificial Sequence
  Description of Artificial Sequence: Synthetic peptide
  XENP019216 vhCDR3
TGWLGPFDY

SEQ ID NO: 7660 - protein, 215 aa, Artificial Sequence; identical to SEQ ID NO: 7600
  Description of Artificial Sequence: Synthetic polypeptide
  XENP019216 [CTLA-4]_H0.6_L0_Fab Light Chain

SEQ ID NO: 7661 - protein, 108 aa, Artificial Sequence; identical to SEQ ID NO: 3741
  Description of Artificial Sequence: Synthetic polypeptide
  VL of XENP019216

SEQ ID NO: 7662 - protein, 12 aa, Artificial Sequence
  Description of Artificial Sequence: Synthetic peptide
  XENP019216 vlCDR1
RASQSVGSSYLA

SEQ ID NO: 7663 - protein, 7 aa, Artificial Sequence
  Description of Artificial Sequence: Synthetic peptide
  XENP019216 vlCDR2
GAFSRAT

SEQ ID NO: 7664 - protein, 9 aa, Artificial Sequence
  Description of Artificial Sequence: Synthetic peptide
  XENP019216 vlCDR3
QQYGSSPWT

SEQ ID NO: 7665 - protein, 221 aa, Artificial Sequence
  Description of Artificial Sequence: Synthetic polypeptide
  XENP019217 [CTLA-4]_H0.7_L0_Fab Heavy Chain
QVQLVESGGGVVEPGRSLRLSCAASGFTFSSYTMHWVRQAPGKGLEWVTFISYDGNNKYYADSVKGRFTISRDNSKNTLYLQMNSLRAEDTAIYYCARTGWLGPFDYWGQGTLVTVSSASTKGPSVFPLAPSSKSTSGGTAALGCLVKDYFPEPVTVSWNSGALTSGVHTFPAVLQSSGLYSLSSVVTVPSSSLGTQTYICNVNHKPSNTKVDKKVEPKSC

SEQ ID NO: 7666 - protein, 118 aa, Artificial Sequence; identical to SEQ ID NO: 4923
  Description of Artificial Sequence: Synthetic polypeptide
  VH of XENP019217

SEQ ID NO: 7667 - protein, 5 aa, Artificial Sequence
  Description of Artificial Sequence: Synthetic peptide
  XENP019217 vhCDR1
SYTMH

SEQ ID NO: 7668 - protein, 17 aa, Artificial Sequence
  Description of Artificial Sequence: Synthetic peptide
  XENP019217 vhCDR2
FISYDGNNKYYADSVKG

SEQ ID NO: 7669 - protein, 9 aa, Artificial Sequence
  Description of Artificial Sequence: Synthetic peptide
  XENP019217 vhCDR3
TGWLGPFDY

SEQ ID NO: 7670 - protein, 215 aa, Artificial Sequence; identical to SEQ ID NO: 7600
  Description of Artificial Sequence: Synthetic polypeptide
  XENP019217 [CTLA-4]_H0.7_L0_Fab Light Chain

SEQ ID NO: 7671 - protein, 108 aa, Artificial Sequence; identical to SEQ ID NO: 3741
  Description of Artificial Sequence: Synthetic polypeptide
  VL of XENP019217

SEQ ID NO: 7672 - protein, 12 aa, Artificial Sequence
  Description of Artificial Sequence: Synthetic peptide
  XENP019217 vlCDR1
RASQSVGSSYLA

SEQ ID NO: 7673 - protein, 7 aa, Artificial Sequence
  Description of Artificial Sequence: Synthetic peptide
  XENP019217 vlCDR2
GAFSRAT

SEQ ID NO: 7674 - protein, 9 aa, Artificial Sequence
  Description of Artificial Sequence: Synthetic peptide
  XENP019217 vlCDR3
QQYGSSPWT

SEQ ID NO: 7675 - protein, 221 aa, Artificial Sequence
  Description of Artificial Sequence: Synthetic polypeptide
  XENP019218 [CTLA-4]_H0.8_L0_Fab Heavy Chain
QVQLVESGGGVVQPGGSLRLSCAASGFTFSSYTMHWVRQAPGKGLEWVTFISYDGNNKYYADSVKGRFTISRDNSKNTLYLQMNSLRAEDTAIYYCARTGWLGPFDYWGQGTLVTVSSASTKGPSVFPLAPSSKSTSGGTAALGCLVKDYFPEPVTVSWNSGALTSGVHTFPAVLQSSGLYSLSSVVTVPSSSLGTQTYICNVNHKPSNTKVDKKVEPKSC

SEQ ID NO: 7676 - protein, 118 aa, Artificial Sequence; identical to SEQ ID NO: 4932
  Description of Artificial Sequence: Synthetic polypeptide
  VH of XENP019218

SEQ ID NO: 7677 - protein, 5 aa, Artificial Sequence
  Description of Artificial Sequence: Synthetic peptide
  XENP019218 vhCDR1
SYTMH

SEQ ID NO: 7678 - protein, 17 aa, Artificial Sequence
  Description of Artificial Sequence: Synthetic peptide
  XENP019218 vhCDR2
FISYDGNNKYYADSVKG

SEQ ID NO: 7679 - protein, 9 aa, Artificial Sequence
  Description of Artificial Sequence: Synthetic peptide
  XENP019218 vhCDR3
TGWLGPFDY

SEQ ID NO: 7680 - protein, 215 aa, Artificial Sequence; identical to SEQ ID NO: 7600
  Description of Artificial Sequence: Synthetic polypeptide
  XENP019218 [CTLA-4]_H0.8_L0_Fab Light Chain

SEQ ID NO: 7681 - protein, 108 aa, Artificial Sequence; identical to SEQ ID NO: 3741
  Description of Artificial Sequence: Synthetic polypeptide
  VL of XENP019218

SEQ ID NO: 7682 - protein, 12 aa, Artificial Sequence
  Description of Artificial Sequence: Synthetic peptide
  XENP019218 vlCDR1
RASQSVGSSYLA

SEQ ID NO: 7683 - protein, 7 aa, Artificial Sequence
  Description of Artificial Sequence: Synthetic peptide
  XENP019218 vlCDR2
GAFSRAT

SEQ ID NO: 7684 - protein, 9 aa, Artificial Sequence
  Description of Artificial Sequence: Synthetic peptide
  XENP019218 vlCDR3
QQYGSSPWT

SEQ ID NO: 7685 - protein, 221 aa, Artificial Sequence
  Description of Artificial Sequence: Synthetic polypeptide
  XENP019219 [CTLA-4]_H0.9_L0_Fab Heavy Chain
QVQLVESGGGVVQPGESLRLSCAASGFTFSSYTMHWVRQAPGKGLEWVTFISYDGNNKYYADSVKGRFTISRDNSKNTLYLQMNSLRAEDTAIYYCARTGWLGPFDYWGQGTLVTVSSASTKGPSVFPLAPSSKSTSGGTAALGCLVKDYFPEPVTVSWNSGALTSGVHTFPAVLQSSGLYSLSSVVTVPSSSLGTQTYICNVNHKPSNTKVDKKVEPKSC

SEQ ID NO: 7686 - protein, 118 aa, Artificial Sequence; identical to SEQ ID NO: 4941
  Description of Artificial Sequence: Synthetic polypeptide
  VH of XENP019219

SEQ ID NO: 7687 - protein, 5 aa, Artificial Sequence
  Description of Artificial Sequence: Synthetic peptide
  XENP019219 vhCDR1
SYTMH

SEQ ID NO: 7688 - protein, 17 aa, Artificial Sequence
  Description of Artificial Sequence: Synthetic peptide
  XENP019219 vhCDR2
FISYDGNNKYYADSVKG

SEQ ID NO: 7689 - protein, 9 aa, Artificial Sequence
  Description of Artificial Sequence: Synthetic peptide
  XENP019219 vhCDR3
TGWLGPFDY

SEQ ID NO: 7690 - protein, 215 aa, Artificial Sequence; identical to SEQ ID NO: 7600
  Description of Artificial Sequence: Synthetic polypeptide
  XENP019219 [CTLA-4]_H0.9_L0_Fab Light Chain

SEQ ID NO: 7691 - protein, 108 aa, Artificial Sequence; identical to SEQ ID NO: 3741
  Description of Artificial Sequence: Synthetic polypeptide
  VL of XENP019219

SEQ ID NO: 7692 - protein, 12 aa, Artificial Sequence
  Description of Artificial Sequence: Synthetic peptide
  XENP019219 vlCDR1
RASQSVGSSYLA

SEQ ID NO: 7693 - protein, 7 aa, Artificial Sequence
  Description of Artificial Sequence: Synthetic peptide
  XENP019219 vlCDR2
GAFSRAT

SEQ ID NO: 7694 - protein, 9 aa, Artificial Sequence
  Description of Artificial Sequence: Synthetic peptide
  XENP019219 vlCDR3
QQYGSSPWT

SEQ ID NO: 7695 - protein, 221 aa, Artificial Sequence
  Description of Artificial Sequence: Synthetic polypeptide
  XENP019220 [CTLA-4]_H0.10_L0_Fab Heavy Chain
QVQLVESGGGVVQPGRSLKLSCAASGFTFSSYTMHWVRQAPGKGLEWVTFISYDGNNKYYADSVKGRFTISRDNSKNTLYLQMNSLRAEDTAIYYCARTGWLGPFDYWGQGTLVTVSSASTKGPSVFPLAPSSKSTSGGTAALGCLVKDYFPEPVTVSWNSGALTSGVHTFPAVLQSSGLYSLSSVVTVPSSSLGTQTYICNVNHKPSNTKVDKKVEPKSC

SEQ ID NO: 7696 - protein, 118 aa, Artificial Sequence; identical to SEQ ID NO: 4950
  Description of Artificial Sequence: Synthetic polypeptide
  VH of XENP019220

SEQ ID NO: 7697 - protein, 5 aa, Artificial Sequence
  Description of Artificial Sequence: Synthetic peptide
  XENP019220 vhCDR1
SYTMH

SEQ ID NO: 7698 - protein, 17 aa, Artificial Sequence
  Description of Artificial Sequence: Synthetic peptide
  XENP019220 vhCDR2
FISYDGNNKYYADSVKG

SEQ ID NO: 7699 - protein, 9 aa, Artificial Sequence
  Description of Artificial Sequence: Synthetic peptide
  XENP019220 vhCDR3
TGWLGPFDY

SEQ ID NO: 7700 - protein, 215 aa, Artificial Sequence; identical to SEQ ID NO: 7600
  Description of Artificial Sequence: Synthetic polypeptide
  XENP019220 [CTLA-4]_H0.10_L0_Fab Light Chain

SEQ ID NO: 7701 - protein, 108 aa, Artificial Sequence; identical to SEQ ID NO: 3741
  Description of Artificial Sequence: Synthetic polypeptide
  VL of XENP019220

SEQ ID NO: 7702 - protein, 12 aa, Artificial Sequence
  Description of Artificial Sequence: Synthetic peptide
  XENP019220 vlCDR1
RASQSVGSSYLA

SEQ ID NO: 7703 - protein, 7 aa, Artificial Sequence
  Description of Artificial Sequence: Synthetic peptide
  XENP019220 vlCDR2
GAFSRAT

SEQ ID NO: 7704 - protein, 9 aa, Artificial Sequence
  Description of Artificial Sequence: Synthetic peptide
  XENP019220 vlCDR3
QQYGSSPWT

SEQ ID NO: 7705 - protein, 221 aa, Artificial Sequence
  Description of Artificial Sequence: Synthetic polypeptide
  XENP019221 [CTLA-4]_H0.11_L0_Fab Heavy Chain
QVQLVESGGGVVQPGRSLRLSCAASGFTVSSYTMHWVRQAPGKGLEWVTFISYDGNNKYYADSVKGRFTISRDNSKNTLYLQMNSLRAEDTAIYYCARTGWLGPFDYWGQGTLVTVSSASTKGPSVFPLAPSSKSTSGGTAALGCLVKDYFPEPVTVSWNSGALTSGVHTFPAVLQSSGLYSLSSVVTVPSSSLGTQTYICNVNHKPSNTKVDKKVEPKSC

SEQ ID NO: 7706 - protein, 118 aa, Artificial Sequence; identical to SEQ ID NO: 4959
  Description of Artificial Sequence: Synthetic polypeptide
  VH of XENP019221

SEQ ID NO: 7707 - protein, 5 aa, Artificial Sequence
  Description of Artificial Sequence: Synthetic peptide
  XENP019221 vhCDR1
SYTMH

SEQ ID NO: 7708 - protein, 17 aa, Artificial Sequence
  Description of Artificial Sequence: Synthetic peptide
  XENP019221 vhCDR2
FISYDGNNKYYADSVKG

SEQ ID NO: 7709 - protein, 9 aa, Artificial Sequence
  Description of Artificial Sequence: Synthetic peptide
  XENP019221 vhCDR3
TGWLGPFDY

SEQ ID NO: 7710 - protein, 215 aa, Artificial Sequence; identical to SEQ ID NO: 7600
  Description of Artificial Sequence: Synthetic polypeptide
  XENP019221 [CTLA-4]_H0.11_L0_Fab Light Chain

SEQ ID NO: 7711 - protein, 108 aa, Artificial Sequence; identical to SEQ ID NO: 3741
  Description of Artificial Sequence: Synthetic polypeptide
  VL of XENP019221

SEQ ID NO: 7712 - protein, 12 aa, Artificial Sequence
  Description of Artificial Sequence: Synthetic peptide
  XENP019221 vlCDR1
RASQSVGSSYLA

SEQ ID NO: 7713 - protein, 7 aa, Artificial Sequence
  Description of Artificial Sequence: Synthetic peptide
  XENP019221 vlCDR2
GAFSRAT

SEQ ID NO: 7714 - protein, 9 aa, Artificial Sequence
  Description of Artificial Sequence: Synthetic peptide
  XENP019221 vlCDR3
QQYGSSPWT

SEQ ID NO: 7715 - protein, 221 aa, Artificial Sequence
  Description of Artificial Sequence: Synthetic polypeptide
  XENP019222 [CTLA-4]_H0.12_L0_Fab Heavy Chain
QVQLVESGGGVVQPGRSLRLSCAASGFTFSAYTMHWVRQAPGKGLEWVTFISYDGNNKYYADSVKGRFTISRDNSKNTLYLQMNSLRAEDTAIYYCARTGWLGPFDYWGQGTLVTVSSASTKGPSVFPLAPSSKSTSGGTAALGCLVKDYFPEPVTVSWNSGALTSGVHTFPAVLQSSGLYSLSSVVTVPSSSLGTQTYICNVNHKPSNTKVDKKVEPKSC

SEQ ID NO: 7716 - protein, 118 aa, Artificial Sequence; identical to SEQ ID NO: 4968
  Description of Artificial Sequence: Synthetic polypeptide
  VH of XENP019222

SEQ ID NO: 7717 - protein, 5 aa, Artificial Sequence
  Description of Artificial Sequence: Synthetic peptide
  XENP019222 vhCDR1
AYTMH

SEQ ID NO: 7718 - protein, 17 aa, Artificial Sequence
  Description of Artificial Sequence: Synthetic peptide
  XENP019222 vhCDR2
FISYDGNNKYYADSVKG

SEQ ID NO: 7719 - protein, 9 aa, Artificial Sequence
  Description of Artificial Sequence: Synthetic peptide
  XENP019222 vhCDR3
TGWLGPFDY

SEQ ID NO: 7720 - protein, 215 aa, Artificial Sequence; identical to SEQ ID NO: 7600
  Description of Artificial Sequence: Synthetic polypeptide
  XENP019222 [CTLA-4]_H0.12_L0_Fab Light Chain

SEQ ID NO: 7721 - protein, 108 aa, Artificial Sequence; identical to SEQ ID NO: 3741
  Description of Artificial Sequence: Synthetic polypeptide
  VL of XENP019222

SEQ ID NO: 7722 - protein, 12 aa, Artificial Sequence
  Description of Artificial Sequence: Synthetic peptide
  XENP019222 vlCDR1
RASQSVGSSYLA

SEQ ID NO: 7723 - protein, 7 aa, Artificial Sequence
  Description of Artificial Sequence: Synthetic peptide
  XENP019222 vlCDR2
GAFSRAT

SEQ ID NO: 7724 - protein, 9 aa, Artificial Sequence
  Description of Artificial Sequence: Synthetic peptide
  XENP019222 vlCDR3
QQYGSSPWT

SEQ ID NO: 7725 - protein, 221 aa, Artificial Sequence
  Description of Artificial Sequence: Synthetic polypeptide
  XENP019223 [CTLA-4]_H0.13_L0_Fab Heavy Chain
QVQLVESGGGVVQPGRSLRLSCAASGFTFSDYTMHWVRQAPGKGLEWVTFISYDGNNKYYADSVKGRFTISRDNSKNTLYLQMNSLRAEDTAIYYCARTGWLGPFDYWGQGTLVTVSSASTKGPSVFPLAPSSKSTSGGTAALGCLVKDYFPEPVTVSWNSGALTSGVHTFPAVLQSSGLYSLSSVVTVPSSSLGTQTYICNVNHKPSNTKVDKKVEPKSC

SEQ ID NO: 7726 - protein, 118 aa, Artificial Sequence; identical to SEQ ID NO: 4977
  Description of Artificial Sequence: Synthetic polypeptide
  VH of XENP019223

SEQ ID NO: 7727 - protein, 5 aa, Artificial Sequence
  Description of Artificial Sequence: Synthetic peptide
  XENP019223 vhCDR1
DYTMH

SEQ ID NO: 7728 - protein, 17 aa, Artificial Sequence
  Description of Artificial Sequence: Synthetic peptide
  XENP019223 vhCDR2
FISYDGNNKYYADSVKG

SEQ ID NO: 7729 - protein, 9 aa, Artificial Sequence
  Description of Artificial Sequence: Synthetic peptide
  XENP019223 vhCDR3
TGWLGPFDY

SEQ ID NO: 7730 - protein, 215 aa, Artificial Sequence; identical to SEQ ID NO: 7600
  Description of Artificial Sequence: Synthetic polypeptide
  XENP019223 [CTLA-4]_H0.13_L0_Fab Light Chain

SEQ ID NO: 7731 - protein, 108 aa, Artificial Sequence; identical to SEQ ID NO: 3741
  Description of Artificial Sequence: Synthetic polypeptide
  VL of XENP019223

SEQ ID NO: 7732 - protein, 12 aa, Artificial Sequence
  Description of Artificial Sequence: Synthetic peptide
  XENP019223 vlCDR1
RASQSVGSSYLA

SEQ ID NO: 7733 - protein, 7 aa, Artificial Sequence
  Description of Artificial Sequence: Synthetic peptide
  XENP019223 vlCDR2
GAFSRAT

SEQ ID NO: 7734 - protein, 9 aa, Artificial Sequence
  Description of Artificial Sequence: Synthetic peptide
  XENP019223 vlCDR3
QQYGSSPWT

SEQ ID NO: 7735 - protein, 221 aa, Artificial Sequence
  Description of Artificial Sequence: Synthetic polypeptide
  XENP019224 [CTLA-4]_H0.14_L0_Fab Heavy Chain
QVQLVESGGGVVQPGRSLRLSCAASGFTFSGYTMHWVRQAPGKGLEWVTFISYDGNNKYYADSVKGRFTISRDNSKNTLYLQMNSLRAEDTAIYYCARTGWLGPFDYWGQGTLVTVSSASTKGPSVFPLAPSSKSTSGGTAALGCLVKDYFPEPVTVSWNSGALTSGVHTFPAVLQSSGLYSLSSVVTVPSSSLGTQTYICNVNHKPSNTKVDKKVEPKSC

SEQ ID NO: 7736 - protein, 118 aa, Artificial Sequence; identical to SEQ ID NO: 4986
  Description of Artificial Sequence: Synthetic polypeptide
  VH of XENP019224

SEQ ID NO: 7737 - protein, 5 aa, Artificial Sequence
  Description of Artificial Sequence: Synthetic peptide
  XENP019224 vhCDR1
GYTMH

SEQ ID NO: 7738 - protein, 17 aa, Artificial Sequence
  Description of Artificial Sequence: Synthetic peptide
  XENP019224 vhCDR2
FISYDGNNKYYADSVKG

SEQ ID NO: 7739 - protein, 9 aa, Artificial Sequence
  Description of Artificial Sequence: Synthetic peptide
  XENP019224 vhCDR3
TGWLGPFDY

SEQ ID NO: 7740 - protein, 215 aa, Artificial Sequence; identical to SEQ ID NO: 7600
  Description of Artificial Sequence: Synthetic polypeptide
  XENP019224 [CTLA-4]_H0.14_L0_Fab Light Chain

SEQ ID NO: 7741 - protein, 108 aa, Artificial Sequence; identical to SEQ ID NO: 3741
  Description of Artificial Sequence: Synthetic polypeptide
  VL of XENP019224

SEQ ID NO: 7742 - protein, 12 aa, Artificial Sequence
  Description of Artificial Sequence: Synthetic peptide
  XENP019224 vlCDR1
RASQSVGSSYLA

SEQ ID NO: 7743 - protein, 7 aa, Artificial Sequence
  Description of Artificial Sequence: Synthetic peptide
  XENP019224 vlCDR2
GAFSRAT

SEQ ID NO: 7744 - protein, 9 aa, Artificial Sequence
  Description of Artificial Sequence: Synthetic peptide
  XENP019224 vlCDR3
QQYGSSPWT

SEQ ID NO: 7745 - protein, 221 aa, Artificial Sequence
  Description of Artificial Sequence: Synthetic polypeptide
  XENP019225 [CTLA-4]_H0.15_L0_Fab Heavy Chain
QVQLVESGGGVVQPGRSLRLSCAASGFTFSNYTMHWVRQAPGKGLEWVTFISYDGNNKYYADSVKGRFTISRDNSKNTLYLQMNSLRAEDTAIYYCARTGWLGPFDYWGQGTLVTVSSASTKGPSVFPLAPSSKSTSGGTAALGCLVKDYFPEPVTVSWNSGALTSGVHTFPAVLQSSGLYSLSSVVTVPSSSLGTQTYICNVNHKPSNTKVDKKVEPKSC

SEQ ID NO: 7746 - protein, 118 aa, Artificial Sequence; identical to SEQ ID NO: 4995
  Description of Artificial Sequence: Synthetic polypeptide
  VH of XENP019225

SEQ ID NO: 7747 - protein, 5 aa, Artificial Sequence
  Description of Artificial Sequence: Synthetic peptide
  XENP019225 vhCDR1
NYTMH

SEQ ID NO: 7748 - protein, 17 aa, Artificial Sequence
  Description of Artificial Sequence: Synthetic peptide
  XENP019225 vhCDR2
FISYDGNNKYYADSVKG

SEQ ID NO: 7749 - protein, 9 aa, Artificial Sequence
  Description of Artificial Sequence: Synthetic peptide
  XENP019225 vhCDR3
TGWLGPFDY

SEQ ID NO: 7750 - protein, 215 aa, Artificial Sequence; identical to SEQ ID NO: 7600
  Description of Artificial Sequence: Synthetic polypeptide
  XENP019225 [CTLA-4]_H0.15_L0_Fab Light Chain

SEQ ID NO: 7751 - protein, 108 aa, Artificial Sequence; identical to SEQ ID NO: 3741
  Description of Artificial Sequence: Synthetic polypeptide
  VL of XENP019225

SEQ ID NO: 7752 - protein, 12 aa, Artificial Sequence
  Description of Artificial Sequence: Synthetic peptide
  XENP019225 vlCDR1
RASQSVGSSYLA

SEQ ID NO: 7753 - protein, 7 aa, Artificial Sequence
  Description of Artificial Sequence: Synthetic peptide
  XENP019225 vlCDR2
GAFSRAT

SEQ ID NO: 7754 - protein, 9 aa, Artificial Sequence
  Description of Artificial Sequence: Synthetic peptide
  XENP019225 vlCDR3
QQYGSSPWT

SEQ ID NO: 7755 - protein, 221 aa, Artificial Sequence
  Description of Artificial Sequence: Synthetic polypeptide
  XENP019226 [CTLA-4]_H0.16_L0_Fab Heavy Chain
QVQLVESGGGVVQPGRSLRLSCAASGFTFSQYTMHWVRQAPGKGLEWVTFISYDGNNKYYADSVKGRFTISRDNSKNTLYLQMNSLRAEDTAIYYCARTGWLGPFDYWGQGTLVTVSSASTKGPSVFPLAPSSKSTSGGTAALGCLVKDYFPEPVTVSWNSGALTSGVHTFPAVLQSSGLYSLSSVVTVPSSSLGTQTYICNVNHKPSNTKVDKKVEPKSC

SEQ ID NO: 7756 - protein, 118 aa, Artificial Sequence; identical to SEQ ID NO: 5004
  Description of Artificial Sequence: Synthetic polypeptide
  VH of XENP019226

SEQ ID NO: 7757 - protein, 5 aa, Artificial Sequence
  Description of Artificial Sequence: Synthetic peptide
  XENP019226 vhCDR1
QYTMH

SEQ ID NO: 7758 - protein, 17 aa, Artificial Sequence
  Description of Artificial Sequence: Synthetic peptide
  XENP019226 vhCDR2
FISYDGNNKYYADSVKG

SEQ ID NO: 7759 - protein, 9 aa, Artificial Sequence
  Description of Artificial Sequence: Synthetic peptide
  XENP019226 vhCDR3
TGWLGPFDY

SEQ ID NO: 7760 - protein, 215 aa, Artificial Sequence; identical to SEQ ID NO: 7600
  Description of Artificial Sequence: Synthetic polypeptide
  XENP019226 [CTLA-4]_H0.16_L0_Fab Light Chain

SEQ ID NO: 7761 - protein, 108 aa, Artificial Sequence; identical to SEQ ID NO: 3741
  Description of Artificial Sequence: Synthetic polypeptide
  VL of XENP019226

SEQ ID NO: 7762 - protein, 12 aa, Artificial Sequence
  Description of Artificial Sequence: Synthetic peptide
  XENP019226 vlCDR1
RASQSVGSSYLA

SEQ ID NO: 7763 - protein, 7 aa, Artificial Sequence
  Description of Artificial Sequence: Synthetic peptide
  XENP019226 vlCDR2
GAFSRAT

SEQ ID NO: 7764 - protein, 9 aa, Artificial Sequence
  Description of Artificial Sequence: Synthetic peptide
  XENP019226 vlCDR3
QQYGSSPWT

SEQ ID NO: 7765 - protein, 221 aa, Artificial Sequence
  Description of Artificial Sequence: Synthetic polypeptide
  XENP019227 [CTLA-4]_H0.17_L0_Fab Heavy Chain
QVQLVESGGGVVQPGRSLRLSCAASGFTFSTYTMHWVRQAPGKGLEWVTFISYDGNNKYYADSVKGRFTISRDNSKNTLYLQMNSLRAEDTAIYYCARTGWLGPFDYWGQGTLVTVSSASTKGPSVFPLAPSSKSTSGGTAALGCLVKDYFPEPVTVSWNSGALTSGVHTFPAVLQSSGLYSLSSVVTVPSSSLGTQTYICNVNHKPSNTKVDKKVEPKSC

SEQ ID NO: 7766 - protein, 118 aa, Artificial Sequence; identical to SEQ ID NO: 5013
  Description of Artificial Sequence: Synthetic polypeptide
  VH of XENP019227

SEQ ID NO: 7767 - protein, 5 aa, Artificial Sequence
  Description of Artificial Sequence: Synthetic peptide
  XENP019227 vhCDR1
TYTMH

SEQ ID NO: 7768 - protein, 17 aa, Artificial Sequence
  Description of Artificial Sequence: Synthetic peptide
  XENP019227 vhCDR2
FISYDGNNKYYADSVKG

SEQ ID NO: 7769 - protein, 9 aa, Artificial Sequence
  Description of Artificial Sequence: Synthetic peptide
  XENP019227 vhCDR3
TGWLGPFDY

SEQ ID NO: 7770 - protein, 215 aa, Artificial Sequence; identical to SEQ ID NO: 7600
  Description of Artificial Sequence: Synthetic polypeptide
  XENP019227 [CTLA-4]_H0.17_L0_Fab Light Chain

SEQ ID NO: 7771 - protein, 108 aa, Artificial Sequence; identical to SEQ ID NO: 3741
  Description of Artificial Sequence: Synthetic polypeptide
  VL of XENP019227

SEQ ID NO: 7772 - protein, 12 aa, Artificial Sequence
  Description of Artificial Sequence: Synthetic peptide
  XENP019227 vlCDR1
RASQSVGSSYLA

SEQ ID NO: 7773 - protein, 7 aa, Artificial Sequence
  Description of Artificial Sequence: Synthetic peptide
  XENP019227 vlCDR2
GAFSRAT

SEQ ID NO: 7774 - protein, 9 aa, Artificial Sequence
  Description of Artificial Sequence: Synthetic peptide
  XENP019227 vlCDR3
QQYGSSPWT

SEQ ID NO: 7775 - protein, 221 aa, Artificial Sequence
  Description of Artificial Sequence: Synthetic polypeptide
  XENP019228 [CTLA-4]_H0.18_L0_Fab Heavy Chain
QVQLVESGGGVVQPGRSLRLSCAASGFTFSSATMHWVRQAPGKGLEWVTFISYDGNNKYYADSVKGRFTISRDNSKNTLYLQMNSLRAEDTAIYYCARTGWLGPFDYWGQGTLVTVSSASTKGPSVFPLAPSSKSTSGGTAALGCLVKDYFPEPVTVSWNSGALTSGVHTFPAVLQSSGLYSLSSVVTVPSSSLGTQTYICNVNHKPSNTKVDKKVEPKSC

SEQ ID NO: 7776 - protein, 118 aa, Artificial Sequence; identical to SEQ ID NO: 5022
  Description of Artificial Sequence: Synthetic polypeptide
  VH of XENP019228

SEQ ID NO: 7777 - protein, 5 aa, Artificial Sequence
  Description of Artificial Sequence: Synthetic peptide
  XENP019228 vhCDR1
SATMH

SEQ ID NO: 7778 - protein, 17 aa, Artificial Sequence
  Description of Artificial Sequence: Synthetic peptide
  XENP019228 vhCDR2
FISYDGNNKYYADSVKG

SEQ ID NO: 7779 - protein, 9 aa, Artificial Sequence
  Description of Artificial Sequence: Synthetic peptide
  XENP019228 vhCDR3
TGWLGPFDY

SEQ ID NO: 7780 - protein, 215 aa, Artificial Sequence; identical to SEQ ID NO: 7600
  Description of Artificial Sequence: Synthetic polypeptide
  XENP019228 [CTLA-4]_H0.18_L0_Fab Light Chain

SEQ ID NO: 7781 - protein, 108 aa, Artificial Sequence; identical to SEQ ID NO: 3741
  Description of Artificial Sequence: Synthetic polypeptide
  VL of XENP019228

SEQ ID NO: 7782 - protein, 12 aa, Artificial Sequence
  Description of Artificial Sequence: Synthetic peptide
  XENP019228 vlCDR1
RASQSVGSSYLA

SEQ ID NO: 7783 - protein, 7 aa, Artificial Sequence
  Description of Artificial Sequence: Synthetic peptide
  XENP019228 vlCDR2
GAFSRAT

SEQ ID NO: 7784 - protein, 9 aa, Artificial Sequence
  Description of Artificial Sequence: Synthetic peptide
  XENP019228 vlCDR3
QQYGSSPWT

SEQ ID NO: 7785 - protein, 221 aa, Artificial Sequence
  Description of Artificial Sequence: Synthetic polypeptide
  XENP019229 [CTLA-4]_H0.19_L0_Fab Heavy Chain
QVQLVESGGGVVQPGRSLRLSCAASGFTFSSHTMHWVRQAPGKGLEWVTFISYDGNNKYYADSVKGRFTISRDNSKNTLYLQMNSLRAEDTAIYYCARTGWLGPFDYWGQGTLVTVSSASTKGPSVFPLAPSSKSTSGGTAALGCLVKDYFPEPVTVSWNSGALTSGVHTFPAVLQSSGLYSLSSVVTVPSSSLGTQTYICNVNHKPSNTKVDKKVEPKSC

SEQ ID NO: 7786 - protein, 118 aa, Artificial Sequence; identical to SEQ ID NO: 5031
  Description of Artificial Sequence: Synthetic polypeptide
  VH of XENP019229

SEQ ID NO: 7787 - protein, 5 aa, Artificial Sequence
  Description of Artificial Sequence: Synthetic peptide
  XENP019229 vhCDR1
SHTMH

SEQ ID NO: 7788 - protein, 17 aa, Artificial Sequence
  Description of Artificial Sequence: Synthetic peptide
  XENP019229 vhCDR2
FISYDGNNKYYADSVKG

SEQ ID NO: 7789 - protein, 9 aa, Artificial Sequence
  Description of Artificial Sequence: Synthetic peptide
  XENP019229 vhCDR3
TGWLGPFDY

SEQ ID NO: 7790 - protein, 215 aa, Artificial Sequence; identical to SEQ ID NO: 7600
  Description of Artificial Sequence: Synthetic polypeptide
  XENP019229 [CTLA-4]_H0.19_L0_Fab Light Chain

SEQ ID NO: 7791 - protein, 108 aa, Artificial Sequence; identical to SEQ ID NO: 3741
  Description of Artificial Sequence: Synthetic polypeptide
  VL of XENP019229

SEQ ID NO: 7792 - protein, 12 aa, Artificial Sequence
  Description of Artificial Sequence: Synthetic peptide
  XENP019229 vlCDR1
RASQSVGSSYLA

SEQ ID NO: 7793 - protein, 7 aa, Artificial Sequence
  Description of Artificial Sequence: Synthetic peptide
  XENP019229 vlCDR2
GAFSRAT

SEQ ID NO: 7794 - protein, 9 aa, Artificial Sequence
  Description of Artificial Sequence: Synthetic peptide
  XENP019229 vlCDR3
QQYGSSPWT

SEQ ID NO: 7795 - protein, 221 aa, Artificial Sequence
  Description of Artificial Sequence: Synthetic polypeptide
  XENP019230 [CTLA-4]_H0.20_L0_Fab Heavy Chain
QVQLVESGGGVVQPGRSLRLSCAASGFTFSSFTMHWVRQAPGKGLEWVTFISYDGNNKYYADSVKGRFTISRDNSKNTLYLQMNSLRAEDTAIYYCARTGWLGPFDYWGQGTLVTVSSASTKGPSVFPLAPSSKSTSGGTAALGCLVKDYFPEPVTVSWNSGALTSGVHTFPAVLQSSGLYSLSSVVTVPSSSLGTQTYICNVNHKPSNTKVDKKVEPKSC

SEQ ID NO: 7796 - protein, 118 aa, Artificial Sequence; identical to SEQ ID NO: 5040
  Description of Artificial Sequence: Synthetic polypeptide
  VH of XENP019230

SEQ ID NO: 7797 - protein, 5 aa, Artificial Sequence
  Description of Artificial Sequence: Synthetic peptide
  XENP019230 vhCDR1
SFTMH

SEQ ID NO: 7798 - protein, 17 aa, Artificial Sequence
  Description of Artificial Sequence: Synthetic peptide
  XENP019230 vhCDR2
FISYDGNNKYYADSVKG

SEQ ID NO: 7799 - protein, 9 aa, Artificial Sequence
  Description of Artificial Sequence: Synthetic peptide
  XENP019230 vhCDR3
TGWLGPFDY

SEQ ID NO: 7800 - protein, 215 aa, Artificial Sequence; identical to SEQ ID NO: 7600
  Description of Artificial Sequence: Synthetic polypeptide
  XENP019230 [CTLA-4]_H0.20_L0_Fab Light Chain

SEQ ID NO: 7801 - protein, 108 aa, Artificial Sequence; identical to SEQ ID NO: 3741
  Description of Artificial Sequence: Synthetic polypeptide
  VL of XENP019230

SEQ ID NO: 7802 - protein, 12 aa, Artificial Sequence
  Description of Artificial Sequence: Synthetic peptide
  XENP019230 vlCDR1
RASQSVGSSYLA

SEQ ID NO: 7803 - protein, 7 aa, Artificial Sequence
  Description of Artificial Sequence: Synthetic peptide
  XENP019230 vlCDR2
GAFSRAT

SEQ ID NO: 7804 - protein, 9 aa, Artificial Sequence
  Description of Artificial Sequence: Synthetic peptide
  XENP019230 vlCDR3
QQYGSSPWT

SEQ ID NO: 7805 - protein, 221 aa, Artificial Sequence
  Description of Artificial Sequence: Synthetic polypeptide
  XENP019231 [CTLA-4]_H0.21_L0_Fab Heavy Chain
QVQLVESGGGVVQPGRSLRLSCAASGFTFSSLTMHWVRQAPGKGLEWVTFISYDGNNKYYADSVKGRFTISRDNSKNTLYLQMNSLRAEDTAIYYCARTGWLGPFDYWGQGTLVTVSSASTKGPSVFPLAPSSKSTSGGTAALGCLVKDYFPEPVTVSWNSGALTSGVHTFPAVLQSSGLYSLSSVVTVPSSSLGTQTYICNVNHKPSNTKVDKKVEPKSC

SEQ ID NO: 7806 - protein, 118 aa, Artificial Sequence; identical to SEQ ID NO: 5049
  Description of Artificial Sequence: Synthetic polypeptide
  VH of XENP019231

SEQ ID NO: 7807 - protein, 5 aa, Artificial Sequence
  Description of Artificial Sequence: Synthetic peptide
  XENP019231 vhCDR1
SLTMH

SEQ ID NO: 7808 - protein, 17 aa, Artificial Sequence
  Description of Artificial Sequence: Synthetic peptide
  XENP019231 vhCDR2
FISYDGNNKYYADSVKG

SEQ ID NO: 7809 - protein, 9 aa, Artificial Sequence
  Description of Artificial Sequence: Synthetic peptide
  XENP019231 vhCDR3
TGWLGPFDY

SEQ ID NO: 7810 - protein, 215 aa, Artificial Sequence; identical to SEQ ID NO: 7600
  Description of Artificial Sequence: Synthetic polypeptide
  XENP019231 [CTLA-4]_H0.21_L0_Fab Light Chain

SEQ ID NO: 7811 - protein, 108 aa, Artificial Sequence; identical to SEQ ID NO: 3741
  Description of Artificial Sequence: Synthetic polypeptide
  VL of XENP019231

SEQ ID NO: 7812 - protein, 12 aa, Artificial Sequence
  Description of Artificial Sequence: Synthetic peptide
  XENP019231 vlCDR1
RASQSVGSSYLA

SEQ ID NO: 7813 - protein, 7 aa, Artificial Sequence
  Description of Artificial Sequence: Synthetic peptide
  XENP019231 vlCDR2
GAFSRAT

SEQ ID NO: 7814 - protein, 9 aa, Artificial Sequence
  Description of Artificial Sequence: Synthetic peptide
  XENP019231 vlCDR3
QQYGSSPWT

SEQ ID NO: 7815 - protein, 221 aa, Artificial Sequence
  Description of Artificial Sequence: Synthetic polypeptide
  XENP019232 [CTLA-4]_H0.22_L0_Fab Heavy Chain
QVQLVESGGGVVQPGRSLRLSCAASGFTFSSNTMHWVRQAPGKGLEWVTFISYDGNNKYYADSVKGRFTISRDNSKNTLYLQMNSLRAEDTAIYYCARTGWLGPFDYWGQGTLVTVSSASTKGPSVFPLAPSSKSTSGGTAALGCLVKDYFPEPVTVSWNSGALTSGVHTFPAVLQSSGLYSLSSVVTVPSSSLGTQTYICNVNHKPSNTKVDKKVEPKSC

SEQ ID NO: 7816 - protein, 118 aa, Artificial Sequence; identical to SEQ ID NO: 5058
  Description of Artificial Sequence: Synthetic polypeptide
  VH of XENP019232

SEQ ID NO: 7817 - protein, 5 aa, Artificial Sequence
  Description of Artificial Sequence: Synthetic peptide
  XENP019232 vhCDR1
SNTMH

SEQ ID NO: 7818 - protein, 17 aa, Artificial Sequence
  Description of Artificial Sequence: Synthetic peptide
  XENP019232 vhCDR2
FISYDGNNKYYADSVKG

SEQ ID NO: 7819 - protein, 9 aa, Artificial Sequence
  Description of Artificial Sequence: Synthetic peptide
  XENP019232 vhCDR3
TGWLGPFDY

SEQ ID NO: 7820 - protein, 215 aa, Artificial Sequence; identical to SEQ ID NO: 7600
  Description of Artificial Sequence: Synthetic polypeptide
  XENP019232 [CTLA-4]_H0.22_L0_Fab Light Chain

SEQ ID NO: 7821 - protein, 108 aa, Artificial Sequence; identical to SEQ ID NO: 3741
  Description of Artificial Sequence: Synthetic polypeptide
  VL of XENP019232

SEQ ID NO: 7822 - protein, 12 aa, Artificial Sequence
  Description of Artificial Sequence: Synthetic peptide
  XENP019232 vlCDR1
RASQSVGSSYLA

SEQ ID NO: 7823 - protein, 7 aa, Artificial Sequence
  Description of Artificial Sequence: Synthetic peptide
  XENP019232 vlCDR2
GAFSRAT

SEQ ID NO: 7824 - protein, 9 aa, Artificial Sequence
  Description of Artificial Sequence: Synthetic peptide
  XENP019232 vlCDR3
QQYGSSPWT

SEQ ID NO: 7825 - protein, 221 aa, Artificial Sequence
  Description of Artificial Sequence: Synthetic polypeptide
  XENP019233 [CTLA-4]_H0.23_L0_Fab Heavy Chain
QVQLVESGGGVVQPGRSLRLSCAASGFTFSSSTMHWVRQAPGKGLEWVTFISYDGNNKYYADSVKGRFTISRDNSKNTLYLQMNSLRAEDTAIYYCARTGWLGPFDYWGQGTLVTVSSASTKGPSVFPLAPSSKSTSGGTAALGCLVKDYFPEPVTVSWNSGALTSGVHTFPAVLQSSGLYSLSSVVTVPSSSLGTQTYICNVNHKPSNTKVDKKVEPKSC

SEQ ID NO: 7826 - protein, 118 aa, Artificial Sequence; identical to SEQ ID NO: 5067
  Description of Artificial Sequence: Synthetic polypeptide
  VH of XENP019233

SEQ ID NO: 7827 - protein, 5 aa, Artificial Sequence
  Description of Artificial Sequence: Synthetic peptide
  XENP019233 vhCDR1
SSTMH

SEQ ID NO: 7828 - protein, 17 aa, Artificial Sequence
  Description of Artificial Sequence: Synthetic peptide
  XENP019233 vhCDR2
FISYDGNNKYYADSVKG

SEQ ID NO: 7829 - protein, 9 aa, Artificial Sequence
  Description of Artificial Sequence: Synthetic peptide
  XENP019233 vhCDR3
TGWLGPFDY

SEQ ID NO: 7830 - protein, 215 aa, Artificial Sequence; identical to SEQ ID NO: 7600
  Description of Artificial Sequence: Synthetic polypeptide
  XENP019233 [CTLA-4]_H0.23_L0_Fab Light Chain

SEQ ID NO: 7831 - protein, 108 aa, Artificial Sequence; identical to SEQ ID NO: 3741
  Description of Artificial Sequence: Synthetic polypeptide
  VL of XENP019233

SEQ ID NO: 7832 - protein, 12 aa, Artificial Sequence
  Description of Artificial Sequence: Synthetic peptide
  XENP019233 vlCDR1
RASQSVGSSYLA

SEQ ID NO: 7833 - protein, 7 aa, Artificial Sequence
  Description of Artificial Sequence: Synthetic peptide
  XENP019233 vlCDR2
GAFSRAT

SEQ ID NO: 7834 - protein, 9 aa, Artificial Sequence
  Description of Artificial Sequence: Synthetic peptide
  XENP019233 vlCDR3
QQYGSSPWT

SEQ ID NO: 7835 - protein, 221 aa, Artificial Sequence
  Description of Artificial Sequence: Synthetic polypeptide
  XENP019234 [CTLA-4]_H0.24_L0_Fab Heavy Chain
QVQLVESGGGVVQPGRSLRLSCAASGFTFSSVTMHWVRQAPGKGLEWVTFISYDGNNKYYADSVKGRFTISRDNSKNTLYLQMNSLRAEDTAIYYCARTGWLGPFDYWGQGTLVTVSSASTKGPSVFPLAPSSKSTSGGTAALGCLVKDYFPEPVTVSWNSGALTSGVHTFPAVLQSSGLYSLSSVVTVPSSSLGTQTYICNVNHKPSNTKVDKKVEPKSC

SEQ ID NO: 7836 - protein, 118 aa, Artificial Sequence; identical to SEQ ID NO: 5076
  Description of Artificial Sequence: Synthetic polypeptide
  VH of XENP019234

SEQ ID NO: 7837 - protein, 5 aa, Artificial Sequence
  Description of Artificial Sequence: Synthetic peptide
  XENP019234 vhCDR1
SVTMH

SEQ ID NO: 7838 - protein, 17 aa, Artificial Sequence
  Description of Artificial Sequence: Synthetic peptide
  XENP019234 vhCDR2
FISYDGNNKYYADSVKG

SEQ ID NO: 7839 - protein, 9 aa, Artificial Sequence
  Description of Artificial Sequence: Synthetic peptide
  XENP019234 vhCDR3
TGWLGPFDY

SEQ ID NO: 7840 - protein, 215 aa, Artificial Sequence; identical to SEQ ID NO: 7600
  Description of Artificial Sequence: Synthetic polypeptide
  XENP019234 [CTLA-4]_H0.24_L0_Fab Light Chain

SEQ ID NO: 7841 - protein, 108 aa, Artificial Sequence; identical to SEQ ID NO: 3741
  Description of Artificial Sequence: Synthetic polypeptide
  VL of XENP019234

SEQ ID NO: 7842 - protein, 12 aa, Artificial Sequence
  Description of Artificial Sequence: Synthetic peptide
  XENP019234 vlCDR1
RASQSVGSSYLA

SEQ ID NO: 7843 - protein, 7 aa, Artificial Sequence
  Description of Artificial Sequence: Synthetic peptide
  XENP019234 vlCDR2
GAFSRAT

SEQ ID NO: 7844 - protein, 9 aa, Artificial Sequence
  Description of Artificial Sequence: Synthetic peptide
  XENP019234 vlCDR3
QQYGSSPWT

SEQ ID NO: 7845 - protein, 221 aa, Artificial Sequence
  Description of Artificial Sequence: Synthetic polypeptide
  XENP019235 [CTLA-4]_H0.25_L0_Fab Heavy Chain
QVQLVESGGGVVQPGRSLRLSCAASGFTFSSYAMHWVRQAPGKGLEWVTFISYDGNNKYYADSVKGRFTISRDNSKNTLYLQMNSLRAEDTAIYYCARTGWLGPFDYWGQGTLVTVSSASTKGPSVFPLAPSSKSTSGGTAALGCLVKDYFPEPVTVSWNSGALTSGVHTFPAVLQSSGLYSLSSVVTVPSSSLGTQTYICNVNHKPSNTKVDKKVEPKSC

SEQ ID NO: 7846 - protein, 118 aa, Artificial Sequence; identical to SEQ ID NO: 5085
  Description of Artificial Sequence: Synthetic polypeptide
  VH of XENP019235

SEQ ID NO: 7847 - protein, 5 aa, Artificial Sequence
  Description of Artificial Sequence: Synthetic peptide
  XENP019235 vhCDR1
SYAMH

SEQ ID NO: 7848 - protein, 17 aa, Artificial Sequence
  Description of Artificial Sequence: Synthetic peptide
  XENP019235 vhCDR2
FISYDGNNKYYADSVKG

SEQ ID NO: 7849 - protein, 9 aa, Artificial Sequence
  Description of Artificial Sequence: Synthetic peptide
  XENP019235 vhCDR3
TGWLGPFDY

SEQ ID NO: 7850 - protein, 215 aa, Artificial Sequence; identical to SEQ ID NO: 7600
  Description of Artificial Sequence: Synthetic polypeptide
  XENP019235 [CTLA-4]_H0.25_L0_Fab Light Chain

SEQ ID NO: 7851 - protein, 108 aa, Artificial Sequence; identical to SEQ ID NO: 3741
  Description of Artificial Sequence: Synthetic polypeptide
  VL of XENP019235

SEQ ID NO: 7852 - protein, 12 aa, Artificial Sequence
  Description of Artificial Sequence: Synthetic peptide
  XENP019235 vlCDR1
RASQSVGSSYLA

SEQ ID NO: 7853 - protein, 7 aa, Artificial Sequence
  Description of Artificial Sequence: Synthetic peptide
  XENP019235 vlCDR2
GAFSRAT

SEQ ID NO: 7854 - protein, 9 aa, Artificial Sequence
  Description of Artificial Sequence: Synthetic peptide
  XENP019235 vlCDR3
QQYGSSPWT

SEQ ID NO: 7855 - protein, 221 aa, Artificial Sequence
  Description of Artificial Sequence: Synthetic polypeptide
  XENP019236 [CTLA-4]_H0.26_L0_Fab Heavy Chain
QVQLVESGGGVVQPGRSLRLSCAASGFTFSSYGMHWVRQAPGKGLEWVTFISYDGNNKYYADSVKGRFTISRDNSKNTLYLQMNSLRAEDTAIYYCARTGWLGPFDYWGQGTLVTVSSASTKGPSVFPLAPSSKSTSGGTAALGCLVKDYFPEPVTVSWNSGALTSGVHTFPAVLQSSGLYSLSSVVTVPSSSLGTQTYICNVNHKPSNTKVDKKVEPKSC

SEQ ID NO: 7856 - protein, 118 aa, Artificial Sequence; identical to SEQ ID NO: 5094
  Description of Artificial Sequence: Synthetic polypeptide
  VH of XENP019236

SEQ ID NO: 7857 - protein, 5 aa, Artificial Sequence
  Description of Artificial Sequence: Synthetic peptide
  XENP019236 vhCDR1
SYGMH

SEQ ID NO: 7858 - protein, 17 aa, Artificial Sequence
  Description of Artificial Sequence: Synthetic peptide
  XENP019236 vhCDR2
FISYDGNNKYYADSVKG

SEQ ID NO: 7859 - protein, 9 aa, Artificial Sequence
  Description of Artificial Sequence: Synthetic peptide
  XENP019236 vhCDR3
TGWLGPFDY

SEQ ID NO: 7860 - protein, 215 aa, Artificial Sequence; identical to SEQ ID NO: 7600
  Description of Artificial Sequence: Synthetic polypeptide
  XENP019236 [CTLA-4]_H0.26_L0_Fab Light Chain

SEQ ID NO: 7861 - protein, 108 aa, Artificial Sequence; identical to SEQ ID NO: 3741
  Description of Artificial Sequence: Synthetic polypeptide
  VL of XENP019236

SEQ ID NO: 7862 - protein, 12 aa, Artificial Sequence
  Description of Artificial Sequence: Synthetic peptide
  XENP019236 vlCDR1
RASQSVGSSYLA

SEQ ID NO: 7863 - protein, 7 aa, Artificial Sequence
  Description of Artificial Sequence: Synthetic peptide
  XENP019236 vlCDR2
GAFSRAT

SEQ ID NO: 7864 - protein, 9 aa, Artificial Sequence
  Description of Artificial Sequence: Synthetic peptide
  XENP019236 vlCDR3
QQYGSSPWT

SEQ ID NO: 7865 - protein, 221 aa, Artificial Sequence
  Description of Artificial Sequence: Synthetic polypeptide
  XENP019237 [CTLA-4]_H0.27_L0_Fab Heavy Chain
QVQLVESGGGVVQPGRSLRLSCAASGFTFSSYSMHWVRQAPGKGLEWVTFISYDGNNKYYADSVKGRFTISRDNSKNTLYLQMNSLRAEDTAIYYCARTGWLGPFDYWGQGTLVTVSSASTKGPSVFPLAPSSKSTSGGTAALGCLVKDYFPEPVTVSWNSGALTSGVHTFPAVLQSSGLYSLSSVVTVPSSSLGTQTYICNVNHKPSNTKVDKKVEPKSC

SEQ ID NO: 7866 - protein, 118 aa, Artificial Sequence; identical to SEQ ID NO: 5103
  Description of Artificial Sequence: Synthetic polypeptide
  VH of XENP019237

SEQ ID NO: 7867 - protein, 5 aa, Artificial Sequence
  Description of Artificial Sequence: Synthetic peptide
  XENP019237 vhCDR1
SYSMH

SEQ ID NO: 7868 - protein, 17 aa, Artificial Sequence
  Description of Artificial Sequence: Synthetic peptide
  XENP019237 vhCDR2
FISYDGNNKYYADSVKG

SEQ ID NO: 7869 - protein, 9 aa, Artificial Sequence
  Description of Artificial Sequence: Synthetic peptide
  XENP019237 vhCDR3
TGWLGPFDY

SEQ ID NO: 7870 - protein, 215 aa, Artificial Sequence; identical to SEQ ID NO: 7600
  Description of Artificial Sequence: Synthetic polypeptide
  XENP019237 [CTLA-4]_H0.27_L0_Fab Light Chain

SEQ ID NO: 7871 - protein, 108 aa, Artificial Sequence; identical to SEQ ID NO: 3741
  Description of Artificial Sequence: Synthetic polypeptide
  VL of XENP019237

SEQ ID NO: 7872 - protein, 12 aa, Artificial Sequence
  Description of Artificial Sequence: Synthetic peptide
  XENP019237 vlCDR1
RASQSVGSSYLA

SEQ ID NO: 7873 - protein, 7 aa, Artificial Sequence
  Description of Artificial Sequence: Synthetic peptide
  XENP019237 vlCDR2
GAFSRAT

SEQ ID NO: 7874 - protein, 9 aa, Artificial Sequence
  Description of Artificial Sequence: Synthetic peptide
  XENP019237 vlCDR3
QQYGSSPWT

SEQ ID NO: 7875 - protein, 221 aa, Artificial Sequence
  Description of Artificial Sequence: Synthetic polypeptide
  XENP019238 [CTLA-4]_H0.28_L0_Fab Heavy Chain
QVQLVESGGGVVQPGRSLRLSCAASGFTFSSYVMHWVRQAPGKGLEWVTFISYDGNNKYYADSVKGRFTISRDNSKNTLYLQMNSLRAEDTAIYYCARTGWLGPFDYWGQGTLVTVSSASTKGPSVFPLAPSSKSTSGGTAALGCLVKDYFPEPVTVSWNSGALTSGVHTFPAVLQSSGLYSLSSVVTVPSSSLGTQTYICNVNHKPSNTKVDKKVEPKSC

SEQ ID NO: 7876 - protein, 118 aa, Artificial Sequence; identical to SEQ ID NO: 5112
  Description of Artificial Sequence: Synthetic polypeptide
  VH of XENP019238

SEQ ID NO: 7877 - protein, 5 aa, Artificial Sequence
  Description of Artificial Sequence: Synthetic peptide
  XENP019238 vhCDR1
SYVMH

SEQ ID NO: 7878 - protein, 17 aa, Artificial Sequence
  Description of Artificial Sequence: Synthetic peptide
  XENP019238 vhCDR2
FISYDGNNKYYADSVKG

SEQ ID NO: 7879 - protein, 9 aa, Artificial Sequence
  Description of Artificial Sequence: Synthetic peptide
  XENP019238 vhCDR3
TGWLGPFDY

SEQ ID NO: 7880 - protein, 215 aa, Artificial Sequence; identical to SEQ ID NO: 7600
  Description of Artificial Sequence: Synthetic polypeptide
  XENP019238 [CTLA-4]_H0.28_L0_Fab Light Chain

SEQ ID NO: 7881 - protein, 108 aa, Artificial Sequence; identical to SEQ ID NO: 3741
  Description of Artificial Sequence: Synthetic polypeptide
  VL of XENP019238

SEQ ID NO: 7882 - protein, 12 aa, Artificial Sequence
  Description of Artificial Sequence: Synthetic peptide
  XENP019238 vlCDR1
RASQSVGSSYLA

SEQ ID NO: 7883 - protein, 7 aa, Artificial Sequence
  Description of Artificial Sequence: Synthetic peptide
  XENP019238 vlCDR2
GAFSRAT

SEQ ID NO: 7884 - protein, 9 aa, Artificial Sequence
  Description of Artificial Sequence: Synthetic peptide
  XENP019238 vlCDR3
QQYGSSPWT

SEQ ID NO: 7885 - protein, 221 aa, Artificial Sequence
  Description of Artificial Sequence: Synthetic polypeptide
  XENP019239 [CTLA-4]_H0.29_L0_Fab Heavy Chain
QVQLVESGGGVVQPGRSLRLSCAASGFTFSSYYMHWVRQAPGKGLEWVTFISYDGNNKYYADSVKGRFTISRDNSKNTLYLQMNSLRAEDTAIYYCARTGWLGPFDYWGQGTLVTVSSASTKGPSVFPLAPSSKSTSGGTAALGCLVKDYFPEPVTVSWNSGALTSGVHTFPAVLQSSGLYSLSSVVTVPSSSLGTQTYICNVNHKPSNTKVDKKVEPKSC

SEQ ID NO: 7886 - protein, 118 aa, Artificial Sequence; identical to SEQ ID NO: 5121
  Description of Artificial Sequence: Synthetic polypeptide
  VH of XENP019239

SEQ ID NO: 7887 - protein, 5 aa, Artificial Sequence
  Description of Artificial Sequence: Synthetic peptide
  XENP019239 vhCDR1
SYYMH

SEQ ID NO: 7888 - protein, 17 aa, Artificial Sequence
  Description of Artificial Sequence: Synthetic peptide
  XENP019239 vhCDR2
FISYDGNNKYYADSVKG

SEQ ID NO: 7889 - protein, 9 aa, Artificial Sequence
  Description of Artificial Sequence: Synthetic peptide
  XENP019239 vhCDR3
TGWLGPFDY

SEQ ID NO: 7890 - protein, 215 aa, Artificial Sequence; identical to SEQ ID NO: 7600
  Description of Artificial Sequence: Synthetic polypeptide
  XENP019239 [CTLA-4]_H0.29_L0_Fab Light Chain

SEQ ID NO: 7891 - protein, 108 aa, Artificial Sequence; identical to SEQ ID NO: 3741
  Description of Artificial Sequence: Synthetic polypeptide
  VL of XENP019239

SEQ ID NO: 7892 - protein, 12 aa, Artificial Sequence
  Description of Artificial Sequence: Synthetic peptide
  XENP019239 vlCDR1
RASQSVGSSYLA

SEQ ID NO: 7893 - protein, 7 aa, Artificial Sequence
  Description of Artificial Sequence: Synthetic peptide
  XENP019239 vlCDR2
GAFSRAT

SEQ ID NO: 7894 - protein, 9 aa, Artificial Sequence
  Description of Artificial Sequence: Synthetic peptide
  XENP019239 vlCDR3
QQYGSSPWT

SEQ ID NO: 7895 - protein, 221 aa, Artificial Sequence
  Description of Artificial Sequence: Synthetic polypeptide
  XENP019240 [CTLA-4]_H0.30_L0_Fab Heavy Chain
QVQLVESGGGVVQPGRSLRLSCAASGFTFSSYTMDWVRQAPGKGLEWVTFISYDGNNKYYADSVKGRFTISRDNSKNTLYLQMNSLRAEDTAIYYCARTGWLGPFDYWGQGTLVTVSSASTKGPSVFPLAPSSKSTSGGTAALGCLVKDYFPEPVTVSWNSGALTSGVHTFPAVLQSSGLYSLSSVVTVPSSSLGTQTYICNVNHKPSNTKVDKKVEPKSC

SEQ ID NO: 7896 - protein, 118 aa, Artificial Sequence; identical to SEQ ID NO: 5130
  Description of Artificial Sequence: Synthetic polypeptide
  VH of XENP019240

SEQ ID NO: 7897 - protein, 5 aa, Artificial Sequence
  Description of Artificial Sequence: Synthetic peptide
  XENP019240 vhCDR1
SYTMD

SEQ ID NO: 7898 - protein, 17 aa, Artificial Sequence
  Description of Artificial Sequence: Synthetic peptide
  XENP019240 vhCDR2
FISYDGNNKYYADSVKG

SEQ ID NO: 7899 - protein, 9 aa, Artificial Sequence
  Description of Artificial Sequence: Synthetic peptide
  XENP019240 vhCDR3
TGWLGPFDY

SEQ ID NO: 7900 - protein, 215 aa, Artificial Sequence; identical to SEQ ID NO: 7600
  Description of Artificial Sequence: Synthetic polypeptide
  XENP019240 [CTLA-4]_H0.30_L0_Fab Light Chain

SEQ ID NO: 7901 - protein, 108 aa, Artificial Sequence; identical to SEQ ID NO: 3741
  Description of Artificial Sequence: Synthetic polypeptide
  VL of XENP019240

SEQ ID NO: 7902 - protein, 12 aa, Artificial Sequence
  Description of Artificial Sequence: Synthetic peptide
  XENP019240 vlCDR1
RASQSVGSSYLA

SEQ ID NO: 7903 - protein, 7 aa, Artificial Sequence
  Description of Artificial Sequence: Synthetic peptide
  XENP019240 vlCDR2
GAFSRAT

SEQ ID NO: 7904 - protein, 9 aa, Artificial Sequence
  Description of Artificial Sequence: Synthetic peptide
  XENP019240 vlCDR3
QQYGSSPWT

SEQ ID NO: 7905 - protein, 221 aa, Artificial Sequence
  Description of Artificial Sequence: Synthetic polypeptide
  XENP019241 [CTLA-4]_H0.31_L0_Fab Heavy Chain
QVQLVESGGGVVQPGRSLRLSCAASGFTFSSYTMFWVRQAPGKGLEWVTFISYDGNNKYYADSVKGRFTISRDNSKNTLYLQMNSLRAEDTAIYYCARTGWLGPFDYWGQGTLVTVSSASTKGPSVFPLAPSSKSTSGGTAALGCLVKDYFPEPVTVSWNSGALTSGVHTFPAVLQSSGLYSLSSVVTVPSSSLGTQTYICNVNHKPSNTKVDKKVEPKSC

SEQ ID NO: 7906 - protein, 118 aa, Artificial Sequence; identical to SEQ ID NO: 5139
  Description of Artificial Sequence: Synthetic polypeptide
  VH of XENP019241

SEQ ID NO: 7907 - protein, 5 aa, Artificial Sequence
  Description of Artificial Sequence: Synthetic peptide
  XENP019241 vhCDR1
SYTMF

SEQ ID NO: 7908 - protein, 17 aa, Artificial Sequence
  Description of Artificial Sequence: Synthetic peptide
  XENP019241 vhCDR2
FISYDGNNKYYADSVKG

SEQ ID NO: 7909 - protein, 9 aa, Artificial Sequence
  Description of Artificial Sequence: Synthetic peptide
  XENP019241 vhCDR3
TGWLGPFDY

SEQ ID NO: 7910 - protein, 215 aa, Artificial Sequence; identical to SEQ ID NO: 7600
  Description of Artificial Sequence: Synthetic polypeptide
  XENP019241 [CTLA-4]_H0.31_L0_Fab Light Chain

SEQ ID NO: 7911 - protein, 108 aa, Artificial Sequence; identical to SEQ ID NO: 3741
  Description of Artificial Sequence: Synthetic polypeptide
  VL of XENP019241

SEQ ID NO: 7912 - protein, 12 aa, Artificial Sequence
  Description of Artificial Sequence: Synthetic peptide
  XENP019241 vlCDR1
RASQSVGSSYLA

SEQ ID NO: 7913 - protein, 7 aa, Artificial Sequence
  Description of Artificial Sequence: Synthetic peptide
  XENP019241 vlCDR2
GAFSRAT

SEQ ID NO: 7914 - protein, 9 aa, Artificial Sequence
  Description of Artificial Sequence: Synthetic peptide
  XENP019241 vlCDR3
QQYGSSPWT

SEQ ID NO: 7915 - protein, 221 aa, Artificial Sequence
  Description of Artificial Sequence: Synthetic polypeptide
  XENP019242 [CTLA-4]_H0.32_L0_Fab Heavy Chain
QVQLVESGGGVVQPGRSLRLSCAASGFTFSSYTMNWVRQAPGKGLEWVTFISYDGNNKYYADSVKGRFTISRDNSKNTLYLQMNSLRAEDTAIYYCARTGWLGPFDYWGQGTLVTVSSASTKGPSVFPLAPSSKSTSGGTAALGCLVKDYFPEPVTVSWNSGALTSGVHTFPAVLQSSGLYSLSSVVTVPSSSLGTQTYICNVNHKPSNTKVDKKVEPKSC

SEQ ID NO: 7916 - protein, 118 aa, Artificial Sequence; identical to SEQ ID NO: 5148
  Description of Artificial Sequence: Synthetic polypeptide
  VH of XENP019242

SEQ ID NO: 7917 - protein, 5 aa, Artificial Sequence
  Description of Artificial Sequence: Synthetic peptide
  XENP019242 vhCDR1
SYTMN

SEQ ID NO: 7918 - protein, 17 aa, Artificial Sequence
  Description of Artificial Sequence: Synthetic peptide
  XENP019242 vhCDR2
FISYDGNNKYYADSVKG

SEQ ID NO: 7919 - protein, 9 aa, Artificial Sequence
  Description of Artificial Sequence: Synthetic peptide
  XENP019242 vhCDR3
TGWLGPFDY

SEQ ID NO: 7920 - protein, 215 aa, Artificial Sequence; identical to SEQ ID NO: 7600
  Description of Artificial Sequence: Synthetic polypeptide
  XENP019242 [CTLA-4]_H0.32_L0_Fab Light Chain

SEQ ID NO: 7921 - protein, 108 aa, Artificial Sequence; identical to SEQ ID NO: 3741
  Description of Artificial Sequence: Synthetic polypeptide
  VL of XENP019242

SEQ ID NO: 7922 - protein, 12 aa, Artificial Sequence
  Description of Artificial Sequence: Synthetic peptide
  XENP019242 vlCDR1
RASQSVGSSYLA

SEQ ID NO: 7923 - protein, 7 aa, Artificial Sequence
  Description of Artificial Sequence: Synthetic peptide
  XENP019242 vlCDR2
GAFSRAT

SEQ ID NO: 7924 - protein, 9 aa, Artificial Sequence
  Description of Artificial Sequence: Synthetic peptide
  XENP019242 vlCDR3
QQYGSSPWT

SEQ ID NO: 7925 - protein, 221 aa, Artificial Sequence
  Description of Artificial Sequence: Synthetic polypeptide
  XENP019243 [CTLA-4]_H0.33_L0_Fab Heavy Chain
QVQLVESGGGVVQPGRSLRLSCAASGFTFSSYTMSWVRQAPGKGLEWVTFISYDGNNKYYADSVKGRFTISRDNSKNTLYLQMNSLRAEDTAIYYCARTGWLGPFDYWGQGTLVTVSSASTKGPSVFPLAPSSKSTSGGTAALGCLVKDYFPEPVTVSWNSGALTSGVHTFPAVLQSSGLYSLSSVVTVPSSSLGTQTYICNVNHKPSNTKVDKKVEPKSC

SEQ ID NO: 7926 - protein, 118 aa, Artificial Sequence; identical to SEQ ID NO: 5157
  Description of Artificial Sequence: Synthetic polypeptide
  VH of XENP019243

SEQ ID NO: 7927 - protein, 5 aa, Artificial Sequence
  Description of Artificial Sequence: Synthetic peptide
  XENP019243 vhCDR1
SYTMS

SEQ ID NO: 7928 - protein, 17 aa, Artificial Sequence
  Description of Artificial Sequence: Synthetic peptide
  XENP019243 vhCDR2
FISYDGNNKYYADSVKG

SEQ ID NO: 7929 - protein, 9 aa, Artificial Sequence
  Description of Artificial Sequence: Synthetic peptide
  XENP019243 vhCDR3
TGWLGPFDY

SEQ ID NO: 7930 - protein, 215 aa, Artificial Sequence; identical to SEQ ID NO: 7600
  Description of Artificial Sequence: Synthetic polypeptide
  XENP019243 [CTLA-4]_H0.33_L0_Fab Light Chain

SEQ ID NO: 7931 - protein, 108 aa, Artificial Sequence; identical to SEQ ID NO: 3741
  Description of Artificial Sequence: Synthetic polypeptide
  VL of XENP019243

SEQ ID NO: 7932 - protein, 12 aa, Artificial Sequence
  Description of Artificial Sequence: Synthetic peptide
  XENP019243 vlCDR1
RASQSVGSSYLA

SEQ ID NO: 7933 - protein, 7 aa, Artificial Sequence
  Description of Artificial Sequence: Synthetic peptide
  XENP019243 vlCDR2
GAFSRAT

SEQ ID NO: 7934 - protein, 9 aa, Artificial Sequence
  Description of Artificial Sequence: Synthetic peptide
  XENP019243 vlCDR3
QQYGSSPWT

SEQ ID NO: 7935 - protein, 221 aa, Artificial Sequence
  Description of Artificial Sequence: Synthetic polypeptide
  XENP019244 [CTLA-4]_H0.34_L0_Fab Heavy Chain
QVQLVESGGGVVQPGRSLRLSCAASGFTFSSYTMYWVRQAPGKGLEWVTFISYDGNNKYYADSVKGRFTISRDNSKNTLYLQMNSLRAEDTAIYYCARTGWLGPFDYWGQGTLVTVSSASTKGPSVFPLAPSSKSTSGGTAALGCLVKDYFPEPVTVSWNSGALTSGVHTFPAVLQSSGLYSLSSVVTVPSSSLGTQTYICNVNHKPSNTKVDKKVEPKSC

SEQ ID NO: 7936 - protein, 118 aa, Artificial Sequence; identical to SEQ ID NO: 5166
  Description of Artificial Sequence: Synthetic polypeptide
  VH of XENP019244

SEQ ID NO: 7937 - protein, 5 aa, Artificial Sequence
  Description of Artificial Sequence: Synthetic peptide
  XENP019244 vhCDR1
SYTMY

SEQ ID NO: 7938 - protein, 17 aa, Artificial Sequence
  Description of Artificial Sequence: Synthetic peptide
  XENP019244 vhCDR2
FISYDGNNKYYADSVKG

SEQ ID NO: 7939 - protein, 9 aa, Artificial Sequence
  Description of Artificial Sequence: Synthetic peptide
  XENP019244 vhCDR3
TGWLGPFDY

SEQ ID NO: 7940 - protein, 215 aa, Artificial Sequence; identical to SEQ ID NO: 7600
  Description of Artificial Sequence: Synthetic polypeptide
  XENP019244 [CTLA-4]_H0.34_L0_Fab Light Chain

SEQ ID NO: 7941 - protein, 108 aa, Artificial Sequence; identical to SEQ ID NO: 3741
  Description of Artificial Sequence: Synthetic polypeptide
  VL of XENP019244

SEQ ID NO: 7942 - protein, 12 aa, Artificial Sequence
  Description of Artificial Sequence: Synthetic peptide
  XENP019244 vlCDR1
RASQSVGSSYLA

SEQ ID NO: 7943 - protein, 7 aa, Artificial Sequence
  Description of Artificial Sequence: Synthetic peptide
  XENP019244 vlCDR2
GAFSRAT

SEQ ID NO: 7944 - protein, 9 aa, Artificial Sequence
  Description of Artificial Sequence: Synthetic peptide
  XENP019244 vlCDR3
QQYGSSPWT

SEQ ID NO: 7945 - protein, 221 aa, Artificial Sequence
  Description of Artificial Sequence: Synthetic polypeptide
  XENP019245 [CTLA-4]_H0.35_L0_Fab Heavy Chain
QVQLVESGGGVVQPGRSLRLSCAASGFTFSSYTMHWIRQAPGKGLEWVTFISYDGNNKYYADSVKGRFTISRDNSKNTLYLQMNSLRAEDTAIYYCARTGWLGPFDYWGQGTLVTVSSASTKGPSVFPLAPSSKSTSGGTAALGCLVKDYFPEPVTVSWNSGALTSGVHTFPAVLQSSGLYSLSSVVTVPSSSLGTQTYICNVNHKPSNTKVDKKVEPKSC

SEQ ID NO: 7946 - protein, 118 aa, Artificial Sequence; identical to SEQ ID NO: 5175
  Description of Artificial Sequence: Synthetic polypeptide
  VH of XENP019245

SEQ ID NO: 7947 - protein, 5 aa, Artificial Sequence
  Description of Artificial Sequence: Synthetic peptide
  XENP019245 vhCDR1
SYTMH

SEQ ID NO: 7948 - protein, 17 aa, Artificial Sequence
  Description of Artificial Sequence: Synthetic peptide
  XENP019245 vhCDR2
FISYDGNNKYYADSVKG

SEQ ID NO: 7949 - protein, 9 aa, Artificial Sequence
  Description of Artificial Sequence: Synthetic peptide
  XENP019245 vhCDR3
TGWLGPFDY

SEQ ID NO: 7950 - protein, 215 aa, Artificial Sequence; identical to SEQ ID NO: 7600
  Description of Artificial Sequence: Synthetic polypeptide
  XENP019245 [CTLA-4]_H0.35_L0_Fab Light Chain

SEQ ID NO: 7951 - protein, 108 aa, Artificial Sequence; identical to SEQ ID NO: 3741
  Description of Artificial Sequence: Synthetic polypeptide
  VL of XENP019245

SEQ ID NO: 7952 - protein, 12 aa, Artificial Sequence
  Description of Artificial Sequence: Synthetic peptide
  XENP019245 vlCDR1
RASQSVGSSYLA

SEQ ID NO: 7953 - protein, 7 aa, Artificial Sequence
  Description of Artificial Sequence: Synthetic peptide
  XENP019245 vlCDR2
GAFSRAT

SEQ ID NO: 7954 - protein, 9 aa, Artificial Sequence
  Description of Artificial Sequence: Synthetic peptide
  XENP019245 vlCDR3
QQYGSSPWT

SEQ ID NO: 7955 - protein, 221 aa, Artificial Sequence
  Description of Artificial Sequence: Synthetic polypeptide
  XENP019246 [CTLA-4]_H0.36_L0_Fab Heavy Chain
QVQLVESGGGVVQPGRSLRLSCAASGFTFSSYTMHWVRKAPGKGLEWVTFISYDGNNKYYADSVKGRFTISRDNSKNTLYLQMNSLRAEDTAIYYCARTGWLGPFDYWGQGTLVTVSSASTKGPSVFPLAPSSKSTSGGTAALGCLVKDYFPEPVTVSWNSGALTSGVHTFPAVLQSSGLYSLSSVVTVPSSSLGTQTYICNVNHKPSNTKVDKKVEPKSC

SEQ ID NO: 7956 - protein, 118 aa, Artificial Sequence; identical to SEQ ID NO: 4707
  Description of Artificial Sequence: Synthetic polypeptide
  VH of XENP019246

SEQ ID NO: 7957 - protein, 5 aa, Artificial Sequence
  Description of Artificial Sequence: Synthetic peptide
  XENP019246 vhCDR1
SYTMH

SEQ ID NO: 7958 - protein, 17 aa, Artificial Sequence
  Description of Artificial Sequence: Synthetic peptide
  XENP019246 vhCDR2
FISYDGNNKYYADSVKG

SEQ ID NO: 7959 - protein, 9 aa, Artificial Sequence
  Description of Artificial Sequence: Synthetic peptide
  XENP019246 vhCDR3
TGWLGPFDY

SEQ ID NO: 7960 - protein, 215 aa, Artificial Sequence; identical to SEQ ID NO: 7600
  Description of Artificial Sequence: Synthetic polypeptide
  XENP019246 [CTLA-4]_H0.36_L0_Fab Light Chain

SEQ ID NO: 7961 - protein, 108 aa, Artificial Sequence; identical to SEQ ID NO: 3741
  Description of Artificial Sequence: Synthetic polypeptide
  VL of XENP019246

SEQ ID NO: 7962 - protein, 12 aa, Artificial Sequence
  Description of Artificial Sequence: Synthetic peptide
  XENP019246 vlCDR1
RASQSVGSSYLA

SEQ ID NO: 7963 - protein, 7 aa, Artificial Sequence
  Description of Artificial Sequence: Synthetic peptide
  XENP019246 vlCDR2
GAFSRAT

SEQ ID NO: 7964 - protein, 9 aa, Artificial Sequence
  Description of Artificial Sequence: Synthetic peptide
  XENP019246 vlCDR3
QQYGSSPWT

SEQ ID NO: 7965 - protein, 221 aa, Artificial Sequence
  Description of Artificial Sequence: Synthetic polypeptide
  XENP019247 [CTLA-4]_H0.37_L0_Fab Heavy Chain
QVQLVESGGGVVQPGRSLRLSCAASGFTFSSYTMHWVRQAPGKRLEWVTFISYDGNNKYYADSVKGRFTISRDNSKNTLYLQMNSLRAEDTAIYYCARTGWLGPFDYWGQGTLVTVSSASTKGPSVFPLAPSSKSTSGGTAALGCLVKDYFPEPVTVSWNSGALTSGVHTFPAVLQSSGLYSLSSVVTVPSSSLGTQTYICNVNHKPSNTKVDKKVEPKSC

SEQ ID NO: 7966 - protein, 118 aa, Artificial Sequence; identical to SEQ ID NO: 4725
  Description of Artificial Sequence: Synthetic polypeptide
  VH of XENP019247

SEQ ID NO: 7967 - protein, 5 aa, Artificial Sequence
  Description of Artificial Sequence: Synthetic peptide
  XENP019247 vhCDR1
SYTMH

SEQ ID NO: 7968 - protein, 17 aa, Artificial Sequence
  Description of Artificial Sequence: Synthetic peptide
  XENP019247 vhCDR2
FISYDGNNKYYADSVKG

SEQ ID NO: 7969 - protein, 9 aa, Artificial Sequence
  Description of Artificial Sequence: Synthetic peptide
  XENP019247 vhCDR3
TGWLGPFDY

SEQ ID NO: 7970 - protein, 215 aa, Artificial Sequence; identical to SEQ ID NO: 7600
  Description of Artificial Sequence: Synthetic polypeptide
  XENP019247 [CTLA-4]_H0.37_L0_Fab Light Chain

SEQ ID NO: 7971 - protein, 108 aa, Artificial Sequence; identical to SEQ ID NO: 3741
  Description of Artificial Sequence: Synthetic polypeptide
  VL of XENP019247

SEQ ID NO: 7972 - protein, 12 aa, Artificial Sequence
  Description of Artificial Sequence: Synthetic peptide
  XENP019247 vlCDR1
RASQSVGSSYLA

SEQ ID NO: 7973 - protein, 7 aa, Artificial Sequence
  Description of Artificial Sequence: Synthetic peptide
  XENP019247 vlCDR2
GAFSRAT

SEQ ID NO: 7974 - protein, 9 aa, Artificial Sequence
  Description of Artificial Sequence: Synthetic peptide
  XENP019247 vlCDR3
QQYGSSPWT

SEQ ID NO: 7975 - protein, 221 aa, Artificial Sequence
  Description of Artificial Sequence: Synthetic polypeptide
  XENP019248 [CTLA-4]_H0.38_L0_Fab Heavy Chain
QVQLVESGGGVVQPGRSLRLSCAASGFTFSSYTMHWVRQAPGKGLEWVAFISYDGNNKYYADSVKGRFTISRDNSKNTLYLQMNSLRAEDTAIYYCARTGWLGPFDYWGQGTLVTVSSASTKGPSVFPLAPSSKSTSGGTAALGCLVKDYFPEPVTVSWNSGALTSGVHTFPAVLQSSGLYSLSSVVTVPSSSLGTQTYICNVNHKPSNTKVDKKVEPKSC

SEQ ID NO: 7976 - protein, 118 aa, Artificial Sequence; identical to SEQ ID NO: 5202
  Description of Artificial Sequence: Synthetic polypeptide
  VH of XENP019248

SEQ ID NO: 7977 - protein, 5 aa, Artificial Sequence
  Description of Artificial Sequence: Synthetic peptide
  XENP019248 vhCDR1
SYTMH

SEQ ID NO: 7978 - protein, 17 aa, Artificial Sequence
  Description of Artificial Sequence: Synthetic peptide
  XENP019248 vhCDR2
FISYDGNNKYYADSVKG

SEQ ID NO: 7979 - protein, 9 aa, Artificial Sequence
  Description of Artificial Sequence: Synthetic peptide
  XENP019248 vhCDR3
TGWLGPFDY

SEQ ID NO: 7980 - protein, 215 aa, Artificial Sequence; identical to SEQ ID NO: 7600
  Description of Artificial Sequence: Synthetic polypeptide
  XENP019248 [CTLA-4]_H0.38_L0_Fab Light Chain

SEQ ID NO: 7981 - protein, 108 aa, Artificial Sequence; identical to SEQ ID NO: 3741
  Description of Artificial Sequence: Synthetic polypeptide
  VL of XENP019248

SEQ ID NO: 7982 - protein, 12 aa, Artificial Sequence
  Description of Artificial Sequence: Synthetic peptide
  XENP019248 vlCDR1
RASQSVGSSYLA

SEQ ID NO: 7983 - protein, 7 aa, Artificial Sequence
  Description of Artificial Sequence: Synthetic peptide
  XENP019248 vlCDR2
GAFSRAT

SEQ ID NO: 7984 - protein, 9 aa, Artificial Sequence
  Description of Artificial Sequence: Synthetic peptide
  XENP019248 vlCDR3
QQYGSSPWT

SEQ ID NO: 7985 - protein, 221 aa, Artificial Sequence
  Description of Artificial Sequence: Synthetic polypeptide
  XENP019249 [CTLA-4]_H0.39_L0_Fab Heavy Chain
QVQLVESGGGVVQPGRSLRLSCAASGFTFSSYTMHWVRQAPGKGLEWVGFISYDGNNKYYADSVKGRFTISRDNSKNTLYLQMNSLRAEDTAIYYCARTGWLGPFDYWGQGTLVTVSSASTKGPSVFPLAPSSKSTSGGTAALGCLVKDYFPEPVTVSWNSGALTSGVHTFPAVLQSSGLYSLSSVVTVPSSSLGTQTYICNVNHKPSNTKVDKKVEPKSC

SEQ ID NO: 7986 - protein, 118 aa, Artificial Sequence; identical to SEQ ID NO: 5211
  Description of Artificial Sequence: Synthetic polypeptide
  VH of XENP019249

SEQ ID NO: 7987 - protein, 5 aa, Artificial Sequence
  Description of Artificial Sequence: Synthetic peptide
  XENP019249 vhCDR1
SYTMH

SEQ ID NO: 7988 - protein, 17 aa, Artificial Sequence
  Description of Artificial Sequence: Synthetic peptide
  XENP019249 vhCDR2
FISYDGNNKYYADSVKG

SEQ ID NO: 7989 - protein, 9 aa, Artificial Sequence
  Description of Artificial Sequence: Synthetic peptide
  XENP019249 vhCDR3
TGWLGPFDY

SEQ ID NO: 7990 - protein, 215 aa, Artificial Sequence; identical to SEQ ID NO: 7600
  Description of Artificial Sequence: Synthetic polypeptide
  XENP019249 [CTLA-4]_H0.39_L0_Fab Light Chain

SEQ ID NO: 7991 - protein, 108 aa, Artificial Sequence; identical to SEQ ID NO: 3741
  Description of Artificial Sequence: Synthetic polypeptide
  VL of XENP019249

SEQ ID NO: 7992 - protein, 12 aa, Artificial Sequence
  Description of Artificial Sequence: Synthetic peptide
  XENP019249 vlCDR1
RASQSVGSSYLA

SEQ ID NO: 7993 - protein, 7 aa, Artificial Sequence
  Description of Artificial Sequence: Synthetic peptide
  XENP019249 vlCDR2
GAFSRAT

SEQ ID NO: 7994 - protein, 9 aa, Artificial Sequence
  Description of Artificial Sequence: Synthetic peptide
  XENP019249 vlCDR3
QQYGSSPWT

SEQ ID NO: 7995 - protein, 221 aa, Artificial Sequence
  Description of Artificial Sequence: Synthetic polypeptide
  XENP019250 [CTLA-4]_H0.40_L0_Fab Heavy Chain
QVQLVESGGGVVQPGRSLRLSCAASGFTFSSYTMHWVRQAPGKGLEWVSFISYDGNNKYYADSVKGRFTISRDNSKNTLYLQMNSLRAEDTAIYYCARTGWLGPFDYWGQGTLVTVSSASTKGPSVFPLAPSSKSTSGGTAALGCLVKDYFPEPVTVSWNSGALTSGVHTFPAVLQSSGLYSLSSVVTVPSSSLGTQTYICNVNHKPSNTKVDKKVEPKSC

SEQ ID NO: 7996 - protein, 118 aa, Artificial Sequence; identical to SEQ ID NO: 5220
  Description of Artificial Sequence: Synthetic polypeptide
  VH of XENP019250

SEQ ID NO: 7997 - protein, 5 aa, Artificial Sequence
  Description of Artificial Sequence: Synthetic peptide
  XENP019250 vhCDR1
SYTMH

SEQ ID NO: 7998 - protein, 17 aa, Artificial Sequence
  Description of Artificial Sequence: Synthetic peptide
  XENP019250 vhCDR2
FISYDGNNKYYADSVKG

SEQ ID NO: 7999 - protein, 9 aa, Artificial Sequence
  Description of Artificial Sequence: Synthetic peptide
  XENP019250 vhCDR3
TGWLGPFDY

SEQ ID NO: 8000 - protein, 215 aa, Artificial Sequence; identical to SEQ ID NO: 7600
  Description of Artificial Sequence: Synthetic polypeptide
  XENP019250 [CTLA-4]_H0.40_L0_Fab Light Chain

SEQ ID NO: 8001 - protein, 108 aa, Artificial Sequence; identical to SEQ ID NO: 3741
  Description of Artificial Sequence: Synthetic polypeptide
  VL of XENP019250

SEQ ID NO: 8002 - protein, 12 aa, Artificial Sequence
  Description of Artificial Sequence: Synthetic peptide
  XENP019250 vlCDR1
RASQSVGSSYLA

SEQ ID NO: 8003 - protein, 7 aa, Artificial Sequence
  Description of Artificial Sequence: Synthetic peptide
  XENP019250 vlCDR2
GAFSRAT

SEQ ID NO: 8004 - protein, 9 aa, Artificial Sequence
  Description of Artificial Sequence: Synthetic peptide
  XENP019250 vlCDR3
QQYGSSPWT

SEQ ID NO: 8005 - protein, 221 aa, Artificial Sequence
  Description of Artificial Sequence: Synthetic polypeptide
  XENP019251 [CTLA-4]_H0.41_L0_Fab Heavy Chain
QVQLVESGGGVVQPGRSLRLSCAASGFTFSSYTMHWVRQAPGKGLEWVVFISYDGNNKYYADSVKGRFTISRDNSKNTLYLQMNSLRAEDTAIYYCARTGWLGPFDYWGQGTLVTVSSASTKGPSVFPLAPSSKSTSGGTAALGCLVKDYFPEPVTVSWNSGALTSGVHTFPAVLQSSGLYSLSSVVTVPSSSLGTQTYICNVNHKPSNTKVDKKVEPKSC

SEQ ID NO: 8006 - protein, 118 aa, Artificial Sequence; identical to SEQ ID NO: 5229
  Description of Artificial Sequence: Synthetic polypeptide
  VH of XENP019251

SEQ ID NO: 8007 - protein, 5 aa, Artificial Sequence
  Description of Artificial Sequence: Synthetic peptide
  XENP019251 vhCDR1
SYTMH

SEQ ID NO: 8008 - protein, 17 aa, Artificial Sequence
  Description of Artificial Sequence: Synthetic peptide
  XENP019251 vhCDR2
FISYDGNNKYYADSVKG

SEQ ID NO: 8009 - protein, 9 aa, Artificial Sequence
  Description of Artificial Sequence: Synthetic peptide
  XENP019251 vhCDR3
TGWLGPFDY

SEQ ID NO: 8010 - protein, 215 aa, Artificial Sequence; identical to SEQ ID NO: 7600
  Description of Artificial Sequence: Synthetic polypeptide
  XENP019251 [CTLA-4]_H0.41_L0_Fab Light Chain

SEQ ID NO: 8011 - protein, 108 aa, Artificial Sequence; identical to SEQ ID NO: 3741
  Description of Artificial Sequence: Synthetic polypeptide
  VL of XENP019251

SEQ ID NO: 8012 - protein, 12 aa, Artificial Sequence
  Description of Artificial Sequence: Synthetic peptide
  XENP019251 vlCDR1
RASQSVGSSYLA

SEQ ID NO: 8013 - protein, 7 aa, Artificial Sequence
  Description of Artificial Sequence: Synthetic peptide
  XENP019251 vlCDR2
GAFSRAT

SEQ ID NO: 8014 - protein, 9 aa, Artificial Sequence
  Description of Artificial Sequence: Synthetic peptide
  XENP019251 vlCDR3
QQYGSSPWT

SEQ ID NO: 8015 - protein, 221 aa, Artificial Sequence
  Description of Artificial Sequence: Synthetic polypeptide
  XENP019252 [CTLA-4]_H0.42_L0_Fab Heavy Chain
QVQLVESGGGVVQPGRSLRLSCAASGFTFSSYTMHWVRQAPGKGLEWVTAISYDGNNKYYADSVKGRFTISRDNSKNTLYLQMNSLRAEDTAIYYCARTGWLGPFDYWGQGTLVTVSSASTKGPSVFPLAPSSKSTSGGTAALGCLVKDYFPEPVTVSWNSGALTSGVHTFPAVLQSSGLYSLSSVVTVPSSSLGTQTYICNVNHKPSNTKVDKKVEPKSC

SEQ ID NO: 8016 - protein, 118 aa, Artificial Sequence; identical to SEQ ID NO: 5238
  Description of Artificial Sequence: Synthetic polypeptide
  VH of XENP019252

SEQ ID NO: 8017 - protein, 5 aa, Artificial Sequence
  Description of Artificial Sequence: Synthetic peptide
  XENP019252 vhCDR1
SYTMH

SEQ ID NO: 8018 - protein, 17 aa, Artificial Sequence
  Description of Artificial Sequence: Synthetic peptide
  XENP019252 vhCDR2
AISYDGNNKYYADSVKG

SEQ ID NO: 8019 - protein, 9 aa, Artificial Sequence
  Description of Artificial Sequence: Synthetic peptide
  XENP019252 vhCDR3
TGWLGPFDY

SEQ ID NO: 8020 - protein, 215 aa, Artificial Sequence; identical to SEQ ID NO: 7600
  Description of Artificial Sequence: Synthetic polypeptide
  XENP019252 [CTLA-4]_H0.42_L0_Fab Light Chain

SEQ ID NO: 8021 - protein, 108 aa, Artificial Sequence; identical to SEQ ID NO: 3741
  Description of Artificial Sequence: Synthetic polypeptide
  VL of XENP019252

SEQ ID NO: 8022 - protein, 12 aa, Artificial Sequence
  Description of Artificial Sequence: Synthetic peptide
  XENP019252 vlCDR1
RASQSVGSSYLA

SEQ ID NO: 8023 - protein, 7 aa, Artificial Sequence
  Description of Artificial Sequence: Synthetic peptide
  XENP019252 vlCDR2
GAFSRAT

SEQ ID NO: 8024 - protein, 9 aa, Artificial Sequence
  Description of Artificial Sequence: Synthetic peptide
  XENP019252 vlCDR3
QQYGSSPWT

SEQ ID NO: 8025 - protein, 221 aa, Artificial Sequence
  Description of Artificial Sequence: Synthetic polypeptide
  XENP019253 [CTLA-4]_H0.43_L0_Fab Heavy Chain
QVQLVESGGGVVQPGRSLRLSCAASGFTFSSYTMHWVRQAPGKGLEWVTGISYDGNNKYYADSVKGRFTISRDNSKNTLYLQMNSLRAEDTAIYYCARTGWLGPFDYWGQGTLVTVSSASTKGPSVFPLAPSSKSTSGGTAALGCLVKDYFPEPVTVSWNSGALTSGVHTFPAVLQSSGLYSLSSVVTVPSSSLGTQTYICNVNHKPSNTKVDKKVEPKSC

SEQ ID NO: 8026 - protein, 118 aa, Artificial Sequence; identical to SEQ ID NO: 5247
  Description of Artificial Sequence: Synthetic polypeptide
  VH of XENP019253

SEQ ID NO: 8027 - protein, 5 aa, Artificial Sequence
  Description of Artificial Sequence: Synthetic peptide
  XENP019253 vhCDR1
SYTMH

SEQ ID NO: 8028 - protein, 17 aa, Artificial Sequence
  Description of Artificial Sequence: Synthetic peptide
  XENP019253 vhCDR2
GISYDGNNKYYADSVKG

SEQ ID NO: 8029 - protein, 9 aa, Artificial Sequence
  Description of Artificial Sequence: Synthetic peptide
  XENP019253 vhCDR3
TGWLGPFDY

SEQ ID NO: 8030 - protein, 215 aa, Artificial Sequence; identical to SEQ ID NO: 7600
  Description of Artificial Sequence: Synthetic polypeptide
  XENP019253 [CTLA-4]_H0.43_L0_Fab Light Chain

SEQ ID NO: 8031 - protein, 108 aa, Artificial Sequence; identical to SEQ ID NO: 3741
  Description of Artificial Sequence: Synthetic polypeptide
  VL of XENP019253

SEQ ID NO: 8032 - protein, 12 aa, Artificial Sequence
  Description of Artificial Sequence: Synthetic peptide
  XENP019253 vlCDR1
RASQSVGSSYLA

SEQ ID NO: 8033 - protein, 7 aa, Artificial Sequence
  Description of Artificial Sequence: Synthetic peptide
  XENP019253 vlCDR2
GAFSRAT

SEQ ID NO: 8034 - protein, 9 aa, Artificial Sequence
  Description of Artificial Sequence: Synthetic peptide
  XENP019253 vlCDR3
QQYGSSPWT

SEQ ID NO: 8035 - protein, 221 aa, Artificial Sequence
  Description of Artificial Sequence: Synthetic polypeptide
  XENP019254 [CTLA-4]_H0.44_L0_Fab Heavy Chain
QVQLVESGGGVVQPGRSLRLSCAASGFTFSSYTMHWVRQAPGKGLEWVTLISYDGNNKYYADSVKGRFTISRDNSKNTLYLQMNSLRAEDTAIYYCARTGWLGPFDYWGQGTLVTVSSASTKGPSVFPLAPSSKSTSGGTAALGCLVKDYFPEPVTVSWNSGALTSGVHTFPAVLQSSGLYSLSSVVTVPSSSLGTQTYICNVNHKPSNTKVDKKVEPKSC

SEQ ID NO: 8036 - protein, 118 aa, Artificial Sequence; identical to SEQ ID NO: 5256
  Description of Artificial Sequence: Synthetic polypeptide
  VH of XENP019254

SEQ ID NO: 8037 - protein, 5 aa, Artificial Sequence
  Description of Artificial Sequence: Synthetic peptide
  XENP019254 vhCDR1
SYTMH

SEQ ID NO: 8038 - protein, 17 aa, Artificial Sequence
  Description of Artificial Sequence: Synthetic peptide
  XENP019254 vhCDR2
LISYDGNNKYYADSVKG

SEQ ID NO: 8039 - protein, 9 aa, Artificial Sequence
  Description of Artificial Sequence: Synthetic peptide
  XENP019254 vhCDR3
TGWLGPFDY

SEQ ID NO: 8040 - protein, 215 aa, Artificial Sequence; identical to SEQ ID NO: 7600
  Description of Artificial Sequence: Synthetic polypeptide
  XENP019254 [CTLA-4]_H0.44_L0_Fab Light Chain

SEQ ID NO: 8041 - protein, 108 aa, Artificial Sequence; identical to SEQ ID NO: 3741
  Description of Artificial Sequence: Synthetic polypeptide
  VL of XENP019254

SEQ ID NO: 8042 - protein, 12 aa, Artificial Sequence
  Description of Artificial Sequence: Synthetic peptide
  XENP019254 vlCDR1
RASQSVGSSYLA

SEQ ID NO: 8043 - protein, 7 aa, Artificial Sequence
  Description of Artificial Sequence: Synthetic peptide
  XENP019254 vlCDR2
GAFSRAT

SEQ ID NO: 8044 - protein, 9 aa, Artificial Sequence
  Description of Artificial Sequence: Synthetic peptide
  XENP019254 vlCDR3
QQYGSSPWT

SEQ ID NO: 8045 - protein, 221 aa, Artificial Sequence
  Description of Artificial Sequence: Synthetic polypeptide
  XENP019255 [CTLA-4]_H0.45_L0_Fab Heavy Chain
QVQLVESGGGVVQPGRSLRLSCAASGFTFSSYTMHWVRQAPGKGLEWVTIISYDGNNKYYADSVKGRFTISRDNSKNTLYLQMNSLRAEDTAIYYCARTGWLGPFDYWGQGTLVTVSSASTKGPSVFPLAPSSKSTSGGTAALGCLVKDYFPEPVTVSWNSGALTSGVHTFPAVLQSSGLYSLSSVVTVPSSSLGTQTYICNVNHKPSNTKVDKKVEPKSC

SEQ ID NO: 8046 - protein, 118 aa, Artificial Sequence; identical to SEQ ID NO: 5265
  Description of Artificial Sequence: Synthetic polypeptide
  VH of XENP019255

SEQ ID NO: 8047 - protein, 5 aa, Artificial Sequence
  Description of Artificial Sequence: Synthetic peptide
  XENP019255 vhCDR1
SYTMH

SEQ ID NO: 8048 - protein, 17 aa, Artificial Sequence
  Description of Artificial Sequence: Synthetic peptide
  XENP019255 vhCDR2
IISYDGNNKYYADSVKG

SEQ ID NO: 8049 - protein, 9 aa, Artificial Sequence
  Description of Artificial Sequence: Synthetic peptide
  XENP019255 vhCDR3
TGWLGPFDY

SEQ ID NO: 8050 - protein, 215 aa, Artificial Sequence; identical to SEQ ID NO: 7600
  Description of Artificial Sequence: Synthetic polypeptide
  XENP019255 [CTLA-4]_H0.45_L0_Fab Light Chain

SEQ ID NO: 8051 - protein, 108 aa, Artificial Sequence; identical to SEQ ID NO: 3741
  Description of Artificial Sequence: Synthetic polypeptide
  VL of XENP019255

SEQ ID NO: 8052 - protein, 12 aa, Artificial Sequence
  Description of Artificial Sequence: Synthetic peptide
  XENP019255 vlCDR1
RASQSVGSSYLA

SEQ ID NO: 8053 - protein, 7 aa, Artificial Sequence
  Description of Artificial Sequence: Synthetic peptide
  XENP019255 vlCDR2
GAFSRAT

SEQ ID NO: 8054 - protein, 9 aa, Artificial Sequence
  Description of Artificial Sequence: Synthetic peptide
  XENP019255 vlCDR3
QQYGSSPWT

SEQ ID NO: 8055 - protein, 221 aa, Artificial Sequence
  Description of Artificial Sequence: Synthetic polypeptide
  XENP019256 [CTLA-4]_H0.46_L0_Fab Heavy Chain
QVQLVESGGGVVQPGRSLRLSCAASGFTFSSYTMHWVRQAPGKGLEWVTRISYDGNNKYYADSVKGRFTISRDNSKNTLYLQMNSLRAEDTAIYYCARTGWLGPFDYWGQGTLVTVSSASTKGPSVFPLAPSSKSTSGGTAALGCLVKDYFPEPVTVSWNSGALTSGVHTFPAVLQSSGLYSLSSVVTVPSSSLGTQTYICNVNHKPSNTKVDKKVEPKSC

SEQ ID NO: 8056 - protein, 118 aa, Artificial Sequence; identical to SEQ ID NO: 5274
  Description of Artificial Sequence: Synthetic polypeptide
  VH of XENP019256

SEQ ID NO: 8057 - protein, 5 aa, Artificial Sequence
  Description of Artificial Sequence: Synthetic peptide
  XENP019256 vhCDR1
SYTMH

SEQ ID NO: 8058 - protein, 17 aa, Artificial Sequence
  Description of Artificial Sequence: Synthetic peptide
  XENP019256 vhCDR2
RISYDGNNKYYADSVKG

SEQ ID NO: 8059 - protein, 9 aa, Artificial Sequence
  Description of Artificial Sequence: Synthetic peptide
  XENP019256 vhCDR3
TGWLGPFDY

SEQ ID NO: 8060 - protein, 215 aa, Artificial Sequence; identical to SEQ ID NO: 7600
  Description of Artificial Sequence: Synthetic polypeptide
  XENP019256 [CTLA-4]_H0.46_L0_Fab Light Chain

SEQ ID NO: 8061 - protein, 108 aa, Artificial Sequence; identical to SEQ ID NO: 3741
  Description of Artificial Sequence: Synthetic polypeptide
  VL of XENP019256

SEQ ID NO: 8062 - protein, 12 aa, Artificial Sequence
  Description of Artificial Sequence: Synthetic peptide
  XENP019256 vlCDR1
RASQSVGSSYLA

SEQ ID NO: 8063 - protein, 7 aa, Artificial Sequence
  Description of Artificial Sequence: Synthetic peptide
  XENP019256 vlCDR2
GAFSRAT

SEQ ID NO: 8064 - protein, 9 aa, Artificial Sequence
  Description of Artificial Sequence: Synthetic peptide
  XENP019256 vlCDR3
QQYGSSPWT

SEQ ID NO: 8065 - protein, 221 aa, Artificial Sequence
  Description of Artificial Sequence: Synthetic polypeptide
  XENP019257 [CTLA-4]_H0.47_L0_Fab Heavy Chain
QVQLVESGGGVVQPGRSLRLSCAASGFTFSSYTMHWVRQAPGKGLEWVTVISYDGNNKYYADSVKGRFTISRDNSKNTLYLQMNSLRAEDTAIYYCARTGWLGPFDYWGQGTLVTVSSASTKGPSVFPLAPSSKSTSGGTAALGCLVKDYFPEPVTVSWNSGALTSGVHTFPAVLQSSGLYSLSSVVTVPSSSLGTQTYICNVNHKPSNTKVDKKVEPKSC

SEQ ID NO: 8066 - protein, 118 aa, Artificial Sequence; identical to SEQ ID NO: 5283
  Description of Artificial Sequence: Synthetic polypeptide
  VH of XENP019257

SEQ ID NO: 8067 - protein, 5 aa, Artificial Sequence
  Description of Artificial Sequence: Synthetic peptide
  XENP019257 vhCDR1
SYTMH

SEQ ID NO: 8068 - protein, 17 aa, Artificial Sequence
  Description of Artificial Sequence: Synthetic peptide
  XENP019257 vhCDR2
VISYDGNNKYYADSVKG

SEQ ID NO: 8069 - protein, 9 aa, Artificial Sequence
  Description of Artificial Sequence: Synthetic peptide
  XENP019257 vhCDR3
TGWLGPFDY

SEQ ID NO: 8070 - protein, 215 aa, Artificial Sequence; identical to SEQ ID NO: 7600
  Description of Artificial Sequence: Synthetic polypeptide
  XENP019257 [CTLA-4]_H0.47_L0_Fab Light Chain

SEQ ID NO: 8071 - protein, 108 aa, Artificial Sequence; identical to SEQ ID NO: 3741
  Description of Artificial Sequence: Synthetic polypeptide
  VL of XENP019257

SEQ ID NO: 8072 - protein, 12 aa, Artificial Sequence
  Description of Artificial Sequence: Synthetic peptide
  XENP019257 vlCDR1
RASQSVGSSYLA

SEQ ID NO: 8073 - protein, 7 aa, Artificial Sequence
  Description of Artificial Sequence: Synthetic peptide
  XENP019257 vlCDR2
GAFSRAT

SEQ ID NO: 8074 - protein, 9 aa, Artificial Sequence
  Description of Artificial Sequence: Synthetic peptide
  XENP019257 vlCDR3
QQYGSSPWT

SEQ ID NO: 8075 - protein, 221 aa, Artificial Sequence
  Description of Artificial Sequence: Synthetic polypeptide
  XENP019258 [CTLA-4]_H0.48_L0_Fab Heavy Chain
QVQLVESGGGVVQPGRSLRLSCAASGFTFSSYTMHWVRQAPGKGLEWVTYISYDGNNKYYADSVKGRFTISRDNSKNTLYLQMNSLRAEDTAIYYCARTGWLGPFDYWGQGTLVTVSSASTKGPSVFPLAPSSKSTSGGTAALGCLVKDYFPEPVTVSWNSGALTSGVHTFPAVLQSSGLYSLSSVVTVPSSSLGTQTYICNVNHKPSNTKVDKKVEPKSC

SEQ ID NO: 8076 - protein, 118 aa, Artificial Sequence; identical to SEQ ID NO: 5292
  Description of Artificial Sequence: Synthetic polypeptide
  VH of XENP019258

SEQ ID NO: 8077 - protein, 5 aa, Artificial Sequence
  Description of Artificial Sequence: Synthetic peptide
  XENP019258 vhCDR1
SYTMH

SEQ ID NO: 8078 - protein, 17 aa, Artificial Sequence
  Description of Artificial Sequence: Synthetic peptide
  XENP019258 vhCDR2
YISYDGNNKYYADSVKG

SEQ ID NO: 8079 - protein, 9 aa, Artificial Sequence
  Description of Artificial Sequence: Synthetic peptide
  XENP019258 vhCDR3
TGWLGPFDY

SEQ ID NO: 8080 - protein, 215 aa, Artificial Sequence; identical to SEQ ID NO: 7600
  Description of Artificial Sequence: Synthetic polypeptide
  XENP019258 [CTLA-4]_H0.48_L0_Fab Light Chain

SEQ ID NO: 8081 - protein, 108 aa, Artificial Sequence; identical to SEQ ID NO: 3741
  Description of Artificial Sequence: Synthetic polypeptide
  VL of XENP019258

SEQ ID NO: 8082 - protein, 12 aa, Artificial Sequence
  Description of Artificial Sequence: Synthetic peptide
  XENP019258 vlCDR1
RASQSVGSSYLA

SEQ ID NO: 8083 - protein, 7 aa, Artificial Sequence
  Description of Artificial Sequence: Synthetic peptide
  XENP019258 vlCDR2
GAFSRAT

SEQ ID NO: 8084 - protein, 9 aa, Artificial Sequence
  Description of Artificial Sequence: Synthetic peptide
  XENP019258 vlCDR3
QQYGSSPWT

SEQ ID NO: 8085 - protein, 221 aa, Artificial Sequence
  Description of Artificial Sequence: Synthetic polypeptide
  XENP019259 [CTLA-4]_H0.49_L0_Fab Heavy Chain
QVQLVESGGGVVQPGRSLRLSCAASGFTFSSYTMHWVRQAPGKGLEWVTFESYDGNNKYYADSVKGRFTISRDNSKNTLYLQMNSLRAEDTAIYYCARTGWLGPFDYWGQGTLVTVSSASTKGPSVFPLAPSSKSTSGGTAALGCLVKDYFPEPVTVSWNSGALTSGVHTFPAVLQSSGLYSLSSVVTVPSSSLGTQTYICNVNHKPSNTKVDKKVEPKSC

SEQ ID NO: 8086 - protein, 118 aa, Artificial Sequence; identical to SEQ ID NO: 5301
  Description of Artificial Sequence: Synthetic polypeptide
  VH of XENP019259

SEQ ID NO: 8087 - protein, 5 aa, Artificial Sequence
  Description of Artificial Sequence: Synthetic peptide
  XENP019259 vhCDR1
SYTMH

SEQ ID NO: 8088 - protein, 17 aa, Artificial Sequence
  Description of Artificial Sequence: Synthetic peptide
  XENP019259 vhCDR2
FESYDGNNKYYADSVKG

SEQ ID NO: 8089 - protein, 9 aa, Artificial Sequence
  Description of Artificial Sequence: Synthetic peptide
  XENP019259 vhCDR3
TGWLGPFDY

SEQ ID NO: 8090 - protein, 215 aa, Artificial Sequence; identical to SEQ ID NO: 7600
  Description of Artificial Sequence: Synthetic polypeptide
  XENP019259 [CTLA-4]_H0.49_L0_Fab Light Chain

SEQ ID NO: 8091 - protein, 108 aa, Artificial Sequence; identical to SEQ ID NO: 3741
  Description of Artificial Sequence: Synthetic polypeptide
  VL of XENP019259

SEQ ID NO: 8092 - protein, 12 aa, Artificial Sequence
  Description of Artificial Sequence: Synthetic peptide
  XENP019259 vlCDR1
RASQSVGSSYLA

SEQ ID NO: 8093 - protein, 7 aa, Artificial Sequence
  Description of Artificial Sequence: Synthetic peptide
  XENP019259 vlCDR2
GAFSRAT

SEQ ID NO: 8094 - protein, 9 aa, Artificial Sequence
  Description of Artificial Sequence: Synthetic peptide
  XENP019259 vlCDR3
QQYGSSPWT

SEQ ID NO: 8095 - protein, 221 aa, Artificial Sequence
  Description of Artificial Sequence: Synthetic polypeptide
  XENP019260 [CTLA-4]_H0.50_L0_Fab Heavy Chain
QVQLVESGGGVVQPGRSLRLSCAASGFTFSSYTMHWVRQAPGKGLEWVTFHSYDGNNKYYADSVKGRFTISRDNSKNTLYLQMNSLRAEDTAIYYCARTGWLGPFDYWGQGTLVTVSSASTKGPSVFPLAPSSKSTSGGTAALGCLVKDYFPEPVTVSWNSGALTSGVHTFPAVLQSSGLYSLSSVVTVPSSSLGTQTYICNVNHKPSNTKVDKKVEPKSC

SEQ ID NO: 8096 - protein, 118 aa, Artificial Sequence; identical to SEQ ID NO: 5310
  Description of Artificial Sequence: Synthetic polypeptide
  VH of XENP019260

SEQ ID NO: 8097 - protein, 5 aa, Artificial Sequence
  Description of Artificial Sequence: Synthetic peptide
  XENP019260 vhCDR1
SYTMH

SEQ ID NO: 8098 - protein, 17 aa, Artificial Sequence
  Description of Artificial Sequence: Synthetic peptide
  XENP019260 vhCDR2
FHSYDGNNKYYADSVKG

SEQ ID NO: 8099 - protein, 9 aa, Artificial Sequence
  Description of Artificial Sequence: Synthetic peptide
  XENP019260 vhCDR3
TGWLGPFDY

SEQ ID NO: 8100 - protein, 215 aa, Artificial Sequence; identical to SEQ ID NO: 7600
  Description of Artificial Sequence: Synthetic polypeptide
  XENP019260 [CTLA-4]_H0.50_L0_Fab Light Chain

SEQ ID NO: 8101 - protein, 108 aa, Artificial Sequence; identical to SEQ ID NO: 3741
  Description of Artificial Sequence: Synthetic polypeptide
  VL of XENP019260

SEQ ID NO: 8102 - protein, 12 aa, Artificial Sequence
  Description of Artificial Sequence: Synthetic peptide
  XENP019260 vlCDR1
RASQSVGSSYLA

SEQ ID NO: 8103 - protein, 7 aa, Artificial Sequence
  Description of Artificial Sequence: Synthetic peptide
  XENP019260 vlCDR2
GAFSRAT

SEQ ID NO: 8104 - protein, 9 aa, Artificial Sequence
  Description of Artificial Sequence: Synthetic peptide
  XENP019260 vlCDR3
QQYGSSPWT

SEQ ID NO: 8105 - protein, 221 aa, Artificial Sequence
  Description of Artificial Sequence: Synthetic polypeptide
  XENP019261 [CTLA-4]_H0.51_L0_Fab Heavy Chain
QVQLVESGGGVVQPGRSLRLSCAASGFTFSSYTMHWVRQAPGKGLEWVTFTSYDGNNKYYADSVKGRFTISRDNSKNTLYLQMNSLRAEDTAIYYCARTGWLGPFDYWGQGTLVTVSSASTKGPSVFPLAPSSKSTSGGTAALGCLVKDYFPEPVTVSWNSGALTSGVHTFPAVLQSSGLYSLSSVVTVPSSSLGTQTYICNVNHKPSNTKVDKKVEPKSC

SEQ ID NO: 8106 - protein, 118 aa, Artificial Sequence; identical to SEQ ID NO: 5319
  Description of Artificial Sequence: Synthetic polypeptide
  VH of XENP019261

SEQ ID NO: 8107 - protein, 5 aa, Artificial Sequence
  Description of Artificial Sequence: Synthetic peptide
  XENP019261 vhCDR1
SYTMH

SEQ ID NO: 8108 - protein, 17 aa, Artificial Sequence
  Description of Artificial Sequence: Synthetic peptide
  XENP019261 vhCDR2
FTSYDGNNKYYADSVKG

SEQ ID NO: 8109 - protein, 9 aa, Artificial Sequence
  Description of Artificial Sequence: Synthetic peptide
  XENP019261 vhCDR3
TGWLGPFDY

SEQ ID NO: 8110 - protein, 215 aa, Artificial Sequence; identical to SEQ ID NO: 7600
  Description of Artificial Sequence: Synthetic polypeptide
  XENP019261 [CTLA-4]_H0.51_L0_Fab Light Chain

SEQ ID NO: 8111 - protein, 108 aa, Artificial Sequence; identical to SEQ ID NO: 3741
  Description of Artificial Sequence: Synthetic polypeptide
  VL of XENP019261

SEQ ID NO: 8112 - protein, 12 aa, Artificial Sequence
  Description of Artificial Sequence: Synthetic peptide
  XENP019261 vlCDR1
RASQSVGSSYLA

SEQ ID NO: 8113 - protein, 7 aa, Artificial Sequence
  Description of Artificial Sequence: Synthetic peptide
  XENP019261 vlCDR2
GAFSRAT

SEQ ID NO: 8114 - protein, 9 aa, Artificial Sequence
  Description of Artificial Sequence: Synthetic peptide
  XENP019261 vlCDR3
QQYGSSPWT

SEQ ID NO: 8115 - protein, 221 aa, Artificial Sequence
  Description of Artificial Sequence: Synthetic polypeptide
  XENP019262 [CTLA-4]_H0.52_L0_Fab Heavy Chain
QVQLVESGGGVVQPGRSLRLSCAASGFTFSSYTMHWVRQAPGKGLEWVTFVSYDGNNKYYADSVKGRFTISRDNSKNTLYLQMNSLRAEDTAIYYCARTGWLGPFDYWGQGTLVTVSSASTKGPSVFPLAPSSKSTSGGTAALGCLVKDYFPEPVTVSWNSGALTSGVHTFPAVLQSSGLYSLSSVVTVPSSSLGTQTYICNVNHKPSNTKVDKKVEPKSC

SEQ ID NO: 8116 - protein, 118 aa, Artificial Sequence; identical to SEQ ID NO: 5328
  Description of Artificial Sequence: Synthetic polypeptide
  VH of XENP019262

SEQ ID NO: 8117 - protein, 5 aa, Artificial Sequence
  Description of Artificial Sequence: Synthetic peptide
  XENP019262 vhCDR1
SYTMH

SEQ ID NO: 8118 - protein, 17 aa, Artificial Sequence
  Description of Artificial Sequence: Synthetic peptide
  XENP019262 vhCDR2
FVSYDGNNKYYADSVKG

SEQ ID NO: 8119 - protein, 9 aa, Artificial Sequence
  Description of Artificial Sequence: Synthetic peptide
  XENP019262 vhCDR3
TGWLGPFDY

SEQ ID NO: 8120 - protein, 215 aa, Artificial Sequence; identical to SEQ ID NO: 7600
  Description of Artificial Sequence: Synthetic polypeptide
  XENP019262 [CTLA-4]_H0.52_L0_Fab Light Chain

SEQ ID NO: 8121 - protein, 108 aa, Artificial Sequence; identical to SEQ ID NO: 3741
  Description of Artificial Sequence: Synthetic polypeptide
  VL of XENP019262

SEQ ID NO: 8122 - protein, 12 aa, Artificial Sequence
  Description of Artificial Sequence: Synthetic peptide
  XENP019262 vlCDR1
RASQSVGSSYLA

SEQ ID NO: 8123 - protein, 7 aa, Artificial Sequence
  Description of Artificial Sequence: Synthetic peptide
  XENP019262 vlCDR2
GAFSRAT

SEQ ID NO: 8124 - protein, 9 aa, Artificial Sequence
  Description of Artificial Sequence: Synthetic peptide
  XENP019262 vlCDR3
QQYGSSPWT

SEQ ID NO: 8125 - protein, 221 aa, Artificial Sequence
  Description of Artificial Sequence: Synthetic polypeptide
  XENP019263 [CTLA-4]_H0.53_L0_Fab Heavy Chain
QVQLVESGGGVVQPGRSLRLSCAASGFTFSSYTMHWVRQAPGKGLEWVTFYSYDGNNKYYADSVKGRFTISRDNSKNTLYLQMNSLRAEDTAIYYCARTGWLGPFDYWGQGTLVTVSSASTKGPSVFPLAPSSKSTSGGTAALGCLVKDYFPEPVTVSWNSGALTSGVHTFPAVLQSSGLYSLSSVVTVPSSSLGTQTYICNVNHKPSNTKVDKKVEPKSC

SEQ ID NO: 8126 - protein, 118 aa, Artificial Sequence; identical to SEQ ID NO: 5337
  Description of Artificial Sequence: Synthetic polypeptide
  VH of XENP019263

SEQ ID NO: 8127 - protein, 5 aa, Artificial Sequence
  Description of Artificial Sequence: Synthetic peptide
  XENP019263 vhCDR1
SYTMH

SEQ ID NO: 8128 - protein, 17 aa, Artificial Sequence
  Description of Artificial Sequence: Synthetic peptide
  XENP019263 vhCDR2
FYSYDGNNKYYADSVKG

SEQ ID NO: 8129 - protein, 9 aa, Artificial Sequence
  Description of Artificial Sequence: Synthetic peptide
  XENP019263 vhCDR3
TGWLGPFDY

SEQ ID NO: 8130 - protein, 215 aa, Artificial Sequence; identical to SEQ ID NO: 7600
  Description of Artificial Sequence: Synthetic polypeptide
  XENP019263 [CTLA-4]_H0.53_L0_Fab Light Chain

SEQ ID NO: 8131 - protein, 108 aa, Artificial Sequence; identical to SEQ ID NO: 3741
  Description of Artificial Sequence: Synthetic polypeptide
  VL of XENP019263

SEQ ID NO: 8132 - protein, 12 aa, Artificial Sequence
  Description of Artificial Sequence: Synthetic peptide
  XENP019263 vlCDR1
RASQSVGSSYLA

SEQ ID NO: 8133 - protein, 7 aa, Artificial Sequence
  Description of Artificial Sequence: Synthetic peptide
  XENP019263 vlCDR2
GAFSRAT

SEQ ID NO: 8134 - protein, 9 aa, Artificial Sequence
  Description of Artificial Sequence: Synthetic peptide
  XENP019263 vlCDR3
QQYGSSPWT

SEQ ID NO: 8135 - protein, 221 aa, Artificial Sequence
  Description of Artificial Sequence: Synthetic polypeptide
  XENP019264 [CTLA-4]_H0.54_L0_Fab Heavy Chain
QVQLVESGGGVVQPGRSLRLSCAASGFTFSSYTMHWVRQAPGKGLEWVTFISGDGNNKYYADSVKGRFTISRDNSKNTLYLQMNSLRAEDTAIYYCARTGWLGPFDYWGQGTLVTVSSASTKGPSVFPLAPSSKSTSGGTAALGCLVKDYFPEPVTVSWNSGALTSGVHTFPAVLQSSGLYSLSSVVTVPSSSLGTQTYICNVNHKPSNTKVDKKVEPKSC

SEQ ID NO: 8136 - protein, 118 aa, Artificial Sequence; identical to SEQ ID NO: 5346
  Description of Artificial Sequence: Synthetic polypeptide
  VH of XENP019264

SEQ ID NO: 8137 - protein, 5 aa, Artificial Sequence
  Description of Artificial Sequence: Synthetic peptide
  XENP019264 vhCDR1
SYTMH

SEQ ID NO: 8138 - protein, 17 aa, Artificial Sequence
  Description of Artificial Sequence: Synthetic peptide
  XENP019264 vhCDR2
FISGDGNNKYYADSVKG

SEQ ID NO: 8139 - protein, 9 aa, Artificial Sequence
  Description of Artificial Sequence: Synthetic peptide
  XENP019264 vhCDR3
TGWLGPFDY

SEQ ID NO: 8140 - protein, 215 aa, Artificial Sequence; identical to SEQ ID NO: 7600
  Description of Artificial Sequence: Synthetic polypeptide
  XENP019264 [CTLA-4]_H0.54_L0_Fab Light Chain

SEQ ID NO: 8141 - protein, 108 aa, Artificial Sequence; identical to SEQ ID NO: 3741
  Description of Artificial Sequence: Synthetic polypeptide
  VL of XENP019264

SEQ ID NO: 8142 - protein, 12 aa, Artificial Sequence
  Description of Artificial Sequence: Synthetic peptide
  XENP019264 vlCDR1
RASQSVGSSYLA

SEQ ID NO: 8143 - protein, 7 aa, Artificial Sequence
  Description of Artificial Sequence: Synthetic peptide
  XENP019264 vlCDR2
GAFSRAT

SEQ ID NO: 8144 - protein, 9 aa, Artificial Sequence
  Description of Artificial Sequence: Synthetic peptide
  XENP019264 vlCDR3
QQYGSSPWT

SEQ ID NO: 8145 - protein, 221 aa, Artificial Sequence
  Description of Artificial Sequence: Synthetic polypeptide
  XENP019265 [CTLA-4]_H0.55_L0_Fab Heavy Chain
QVQLVESGGGVVQPGRSLRLSCAASGFTFSSYTMHWVRQAPGKGLEWVTFISNDGNNKYYADSVKGRFTISRDNSKNTLYLQMNSLRAEDTAIYYCARTGWLGPFDYWGQGTLVTVSSASTKGPSVFPLAPSSKSTSGGTAALGCLVKDYFPEPVTVSWNSGALTSGVHTFPAVLQSSGLYSLSSVVTVPSSSLGTQTYICNVNHKPSNTKVDKKVEPKSC

SEQ ID NO: 8146 - protein, 118 aa, Artificial Sequence; identical to SEQ ID NO: 5355
  Description of Artificial Sequence: Synthetic polypeptide
  VH of XENP019265

SEQ ID NO: 8147 - protein, 5 aa, Artificial Sequence
  Description of Artificial Sequence: Synthetic peptide
  XENP019265 vhCDR1
SYTMH

SEQ ID NO: 8148 - protein, 17 aa, Artificial Sequence
  Description of Artificial Sequence: Synthetic peptide
  XENP019265 vhCDR2
FISNDGNNKYYADSVKG

SEQ ID NO: 8149 - protein, 9 aa, Artificial Sequence
  Description of Artificial Sequence: Synthetic peptide
  XENP019265 vhCDR3
TGWLGPFDY

SEQ ID NO: 8150 - protein, 215 aa, Artificial Sequence; identical to SEQ ID NO: 7600
  Description of Artificial Sequence: Synthetic polypeptide
  XENP019265 [CTLA-4]_H0.55_L0_Fab Light Chain

SEQ ID NO: 8151 - protein, 108 aa, Artificial Sequence; identical to SEQ ID NO: 3741
  Description of Artificial Sequence: Synthetic polypeptide
  VL of XENP019265

SEQ ID NO: 8152 - protein, 12 aa, Artificial Sequence
  Description of Artificial Sequence: Synthetic peptide
  XENP019265 vlCDR1
RASQSVGSSYLA

SEQ ID NO: 8153 - protein, 7 aa, Artificial Sequence
  Description of Artificial Sequence: Synthetic peptide
  XENP019265 vlCDR2
GAFSRAT

SEQ ID NO: 8154 - protein, 9 aa, Artificial Sequence
  Description of Artificial Sequence: Synthetic peptide
  XENP019265 vlCDR3
QQYGSSPWT

SEQ ID NO: 8155 - protein, 221 aa, Artificial Sequence
  Description of Artificial Sequence: Synthetic polypeptide
  XENP019266 [CTLA-4]_H0.56_L0_Fab Heavy Chain
QVQLVESGGGVVQPGRSLRLSCAASGFTFSSYTMHWVRQAPGKGLEWVTFISSDGNNKYYADSVKGRFTISRDNSKNTLYLQMNSLRAEDTAIYYCARTGWLGPFDYWGQGTLVTVSSASTKGPSVFPLAPSSKSTSGGTAALGCLVKDYFPEPVTVSWNSGALTSGVHTFPAVLQSSGLYSLSSVVTVPSSSLGTQTYICNVNHKPSNTKVDKKVEPKSC

SEQ ID NO: 8156 - protein, 118 aa, Artificial Sequence; identical to SEQ ID NO: 5364
  Description of Artificial Sequence: Synthetic polypeptide
  VH of XENP019266

SEQ ID NO: 8157 - protein, 5 aa, Artificial Sequence
  Description of Artificial Sequence: Synthetic peptide
  XENP019266 vhCDR1
SYTMH

SEQ ID NO: 8158 - protein, 17 aa, Artificial Sequence
  Description of Artificial Sequence: Synthetic peptide
  XENP019266 vhCDR2
FISSDGNNKYYADSVKG

SEQ ID NO: 8159 - protein, 9 aa, Artificial Sequence
  Description of Artificial Sequence: Synthetic peptide
  XENP019266 vhCDR3
TGWLGPFDY

SEQ ID NO: 8160 - protein, 215 aa, Artificial Sequence; identical to SEQ ID NO: 7600
  Description of Artificial Sequence: Synthetic polypeptide
  XENP019266 [CTLA-4]_H0.56_L0_Fab Light Chain

SEQ ID NO: 8161 - protein, 108 aa, Artificial Sequence; identical to SEQ ID NO: 3741
  Description of Artificial Sequence: Synthetic polypeptide
  VL of XENP019266

SEQ ID NO: 8162 - protein, 12 aa, Artificial Sequence
  Description of Artificial Sequence: Synthetic peptide
  XENP019266 vlCDR1
RASQSVGSSYLA

SEQ ID NO: 8163 - protein, 7 aa, Artificial Sequence
  Description of Artificial Sequence: Synthetic peptide
  XENP019266 vlCDR2
GAFSRAT

SEQ ID NO: 8164 - protein, 9 aa, Artificial Sequence
  Description of Artificial Sequence: Synthetic peptide
  XENP019266 vlCDR3
QQYGSSPWT

SEQ ID NO: 8165 - protein, 221 aa, Artificial Sequence
  Description of Artificial Sequence: Synthetic polypeptide
  XENP019267 [CTLA-4]_H0.57_L0_Fab Heavy Chain
QVQLVESGGGVVQPGRSLRLSCAASGFTFSSYTMHWVRQAPGKGLEWVTFISYNGNNKYYADSVKGRFTISRDNSKNTLYLQMNSLRAEDTAIYYCARTGWLGPFDYWGQGTLVTVSSASTKGPSVFPLAPSSKSTSGGTAALGCLVKDYFPEPVTVSWNSGALTSGVHTFPAVLQSSGLYSLSSVVTVPSSSLGTQTYICNVNHKPSNTKVDKKVEPKSC

SEQ ID NO: 8166 - protein, 118 aa, Artificial Sequence; identical to SEQ ID NO: 5373
  Description of Artificial Sequence: Synthetic polypeptide
  VH of XENP019267

SEQ ID NO: 8167 - protein, 5 aa, Artificial Sequence
  Description of Artificial Sequence: Synthetic peptide
  XENP019267 vhCDR1
SYTMH

SEQ ID NO: 8168 - protein, 17 aa, Artificial Sequence
  Description of Artificial Sequence: Synthetic peptide
  XENP019267 vhCDR2
FISYNGNNKYYADSVKG

SEQ ID NO: 8169 - protein, 9 aa, Artificial Sequence
  Description of Artificial Sequence: Synthetic peptide
  XENP019267 vhCDR3
TGWLGPFDY

SEQ ID NO: 8170 - protein, 215 aa, Artificial Sequence; identical to SEQ ID NO: 7600
  Description of Artificial Sequence: Synthetic polypeptide
  XENP019267 [CTLA-4]_H0.57_L0_Fab Light Chain

SEQ ID NO: 8171 - protein, 108 aa, Artificial Sequence; identical to SEQ ID NO: 3741
  Description of Artificial Sequence: Synthetic polypeptide
  VL of XENP019267

SEQ ID NO: 8172 - protein, 12 aa, Artificial Sequence
  Description of Artificial Sequence: Synthetic peptide
  XENP019267 vlCDR1
RASQSVGSSYLA

SEQ ID NO: 8173 - protein, 7 aa, Artificial Sequence
  Description of Artificial Sequence: Synthetic peptide
  XENP019267 vlCDR2
GAFSRAT

SEQ ID NO: 8174 - protein, 9 aa, Artificial Sequence
  Description of Artificial Sequence: Synthetic peptide
  XENP019267 vlCDR3
QQYGSSPWT

SEQ ID NO: 8175 - protein, 221 aa, Artificial Sequence
  Description of Artificial Sequence: Synthetic polypeptide
  XENP019268 [CTLA-4]_H0.58_L0_Fab Heavy Chain
QVQLVESGGGVVQPGRSLRLSCAASGFTFSSYTMHWVRQAPGKGLEWVTFISYSGNNKYYADSVKGRFTISRDNSKNTLYLQMNSLRAEDTAIYYCARTGWLGPFDYWGQGTLVTVSSASTKGPSVFPLAPSSKSTSGGTAALGCLVKDYFPEPVTVSWNSGALTSGVHTFPAVLQSSGLYSLSSVVTVPSSSLGTQTYICNVNHKPSNTKVDKKVEPKSC

SEQ ID NO: 8176 - protein, 118 aa, Artificial Sequence; identical to SEQ ID NO: 5382
  Description of Artificial Sequence: Synthetic polypeptide
  VH of XENP019268

SEQ ID NO: 8177 - protein, 5 aa, Artificial Sequence
  Description of Artificial Sequence: Synthetic peptide
  XENP019268 vhCDR1
SYTMH

SEQ ID NO: 8178 - protein, 17 aa, Artificial Sequence
  Description of Artificial Sequence: Synthetic peptide
  XENP019268 vhCDR2
FISYSGNNKYYADSVKG

SEQ ID NO: 8179 - protein, 9 aa, Artificial Sequence
  Description of Artificial Sequence: Synthetic peptide
  XENP019268 vhCDR3
TGWLGPFDY

SEQ ID NO: 8180 - protein, 215 aa, Artificial Sequence; identical to SEQ ID NO: 7600
  Description of Artificial Sequence: Synthetic polypeptide
  XENP019268 [CTLA-4]_H0.58_L0_Fab Light Chain

SEQ ID NO: 8181 - protein, 108 aa, Artificial Sequence; identical to SEQ ID NO: 3741
  Description of Artificial Sequence: Synthetic polypeptide
  VL of XENP019268

SEQ ID NO: 8182 - protein, 12 aa, Artificial Sequence
  Description of Artificial Sequence: Synthetic peptide
  XENP019268 vlCDR1
RASQSVGSSYLA

SEQ ID NO: 8183 - protein, 7 aa, Artificial Sequence
  Description of Artificial Sequence: Synthetic peptide
  XENP019268 vlCDR2
GAFSRAT

SEQ ID NO: 8184 - protein, 9 aa, Artificial Sequence
  Description of Artificial Sequence: Synthetic peptide
  XENP019268 vlCDR3
QQYGSSPWT

SEQ ID NO: 8185 - protein, 221 aa, Artificial Sequence
  Description of Artificial Sequence: Synthetic polypeptide
  XENP019269 [CTLA-4]_H0.59_L0_Fab Heavy Chain
QVQLVESGGGVVQPGRSLRLSCAASGFTFSSYTMHWVRQAPGKGLEWVTFISYEGNNKYYADSVKGRFTISRDNSKNTLYLQMNSLRAEDTAIYYCARTGWLGPFDYWGQGTLVTVSSASTKGPSVFPLAPSSKSTSGGTAALGCLVKDYFPEPVTVSWNSGALTSGVHTFPAVLQSSGLYSLSSVVTVPSSSLGTQTYICNVNHKPSNTKVDKKVEPKSC

SEQ ID NO: 8186 - protein, 118 aa, Artificial Sequence; identical to SEQ ID NO: 5391
  Description of Artificial Sequence: Synthetic polypeptide
  VH of XENP019269

SEQ ID NO: 8187 - protein, 5 aa, Artificial Sequence
  Description of Artificial Sequence: Synthetic peptide
  XENP019269 vhCDR1
SYTMH

SEQ ID NO: 8188 - protein, 17 aa, Artificial Sequence
  Description of Artificial Sequence: Synthetic peptide
  XENP019269 vhCDR2
FISYEGNNKYYADSVKG

SEQ ID NO: 8189 - protein, 9 aa, Artificial Sequence
  Description of Artificial Sequence: Synthetic peptide
  XENP019269 vhCDR3
TGWLGPFDY

SEQ ID NO: 8190 - protein, 215 aa, Artificial Sequence; identical to SEQ ID NO: 7600
  Description of Artificial Sequence: Synthetic polypeptide
  XENP019269 [CTLA-4]_H0.59_L0_Fab Light Chain

SEQ ID NO: 8191 - protein, 108 aa, Artificial Sequence; identical to SEQ ID NO: 3741
  Description of Artificial Sequence: Synthetic polypeptide
  VL of XENP019269

SEQ ID NO: 8192 - protein, 12 aa, Artificial Sequence
  Description of Artificial Sequence: Synthetic peptide
  XENP019269 vlCDR1
RASQSVGSSYLA

SEQ ID NO: 8193 - protein, 7 aa, Artificial Sequence
  Description of Artificial Sequence: Synthetic peptide
  XENP019269 vlCDR2
GAFSRAT

SEQ ID NO: 8194 - protein, 9 aa, Artificial Sequence
  Description of Artificial Sequence: Synthetic peptide
  XENP019269 vlCDR3
QQYGSSPWT

SEQ ID NO: 8195 - protein, 221 aa, Artificial Sequence
  Description of Artificial Sequence: Synthetic polypeptide
  XENP019270 [CTLA-4]_H0.60_L0_Fab Heavy Chain
QVQLVESGGGVVQPGRSLRLSCAASGFTFSSYTMHWVRQAPGKGLEWVTFISYHGNNKYYADSVKGRFTISRDNSKNTLYLQMNSLRAEDTAIYYCARTGWLGPFDYWGQGTLVTVSSASTKGPSVFPLAPSSKSTSGGTAALGCLVKDYFPEPVTVSWNSGALTSGVHTFPAVLQSSGLYSLSSVVTVPSSSLGTQTYICNVNHKPSNTKVDKKVEPKSC

SEQ ID NO: 8196 - protein, 118 aa, Artificial Sequence; identical to SEQ ID NO: 5400
  Description of Artificial Sequence: Synthetic polypeptide
  VH of XENP019270

SEQ ID NO: 8197 - protein, 5 aa, Artificial Sequence
  Description of Artificial Sequence: Synthetic peptide
  XENP019270 vhCDR1
SYTMH

SEQ ID NO: 8198 - protein, 17 aa, Artificial Sequence
  Description of Artificial Sequence: Synthetic peptide
  XENP019270 vhCDR2
FISYHGNNKYYADSVKG

SEQ ID NO: 8199 - protein, 9 aa, Artificial Sequence
  Description of Artificial Sequence: Synthetic peptide
  XENP019270 vhCDR3
TGWLGPFDY

SEQ ID NO: 8200 - protein, 215 aa, Artificial Sequence; identical to SEQ ID NO: 7600
  Description of Artificial Sequence: Synthetic polypeptide
  XENP019270 [CTLA-4]_H0.60_L0_Fab Light Chain

SEQ ID NO: 8201 - protein, 108 aa, Artificial Sequence; identical to SEQ ID NO: 3741
  Description of Artificial Sequence: Synthetic polypeptide
  VL of XENP019270

SEQ ID NO: 8202 - protein, 12 aa, Artificial Sequence
  Description of Artificial Sequence: Synthetic peptide
  XENP019270 vlCDR1
RASQSVGSSYLA

SEQ ID NO: 8203 - protein, 7 aa, Artificial Sequence
  Description of Artificial Sequence: Synthetic peptide
  XENP019270 vlCDR2
GAFSRAT

SEQ ID NO: 8204 - protein, 9 aa, Artificial Sequence
  Description of Artificial Sequence: Synthetic peptide
  XENP019270 vlCDR3
QQYGSSPWT

SEQ ID NO: 8205 - protein, 221 aa, Artificial Sequence
  Description of Artificial Sequence: Synthetic polypeptide
  XENP019271 [CTLA-4]_H0.61_L0_Fab Heavy Chain
QVQLVESGGGVVQPGRSLRLSCAASGFTFSSYTMHWVRQAPGKGLEWVTFISYKGNNKYYADSVKGRFTISRDNSKNTLYLQMNSLRAEDTAIYYCARTGWLGPFDYWGQGTLVTVSSASTKGPSVFPLAPSSKSTSGGTAALGCLVKDYFPEPVTVSWNSGALTSGVHTFPAVLQSSGLYSLSSVVTVPSSSLGTQTYICNVNHKPSNTKVDKKVEPKSC

SEQ ID NO: 8206 - protein, 118 aa, Artificial Sequence; identical to SEQ ID NO: 5409
  Description of Artificial Sequence: Synthetic polypeptide
  VH of XENP019271

SEQ ID NO: 8207 - protein, 5 aa, Artificial Sequence
  Description of Artificial Sequence: Synthetic peptide
  XENP019271 vhCDR1
SYTMH

SEQ ID NO: 8208 - protein, 17 aa, Artificial Sequence
  Description of Artificial Sequence: Synthetic peptide
  XENP019271 vhCDR2
FISYKGNNKYYADSVKG

SEQ ID NO: 8209 - protein, 9 aa, Artificial Sequence
  Description of Artificial Sequence: Synthetic peptide
  XENP019271 vhCDR3
TGWLGPFDY

SEQ ID NO: 8210 - protein, 215 aa, Artificial Sequence; identical to SEQ ID NO: 7600
  Description of Artificial Sequence: Synthetic polypeptide
  XENP019271 [CTLA-4]_H0.61_L0_Fab Light Chain

SEQ ID NO: 8211 - protein, 108 aa, Artificial Sequence; identical to SEQ ID NO: 3741
  Description of Artificial Sequence: Synthetic polypeptide
  VL of XENP019271

SEQ ID NO: 8212 - protein, 12 aa, Artificial Sequence
  Description of Artificial Sequence: Synthetic peptide
  XENP019271 vlCDR1
RASQSVGSSYLA

SEQ ID NO: 8213 - protein, 7 aa, Artificial Sequence
  Description of Artificial Sequence: Synthetic peptide
  XENP019271 vlCDR2
GAFSRAT

SEQ ID NO: 8214 - protein, 9 aa, Artificial Sequence
  Description of Artificial Sequence: Synthetic peptide
  XENP019271 vlCDR3
QQYGSSPWT

SEQ ID NO: 8215 - protein, 221 aa, Artificial Sequence
  Description of Artificial Sequence: Synthetic polypeptide
  XENP019272 [CTLA-4]_H0.62_L0_Fab Heavy Chain
QVQLVESGGGVVQPGRSLRLSCAASGFTFSSYTMHWVRQAPGKGLEWVTFISYKGNNKYYADSVKGRFTISEDNSKNTLYLQMNSLRAEDTAIYYCARTGWLGPFDYWGQGTLVTVSSASTKGPSVFPLAPSSKSTSGGTAALGCLVKDYFPEPVTVSWNSGALTSGVHTFPAVLQSSGLYSLSSVVTVPSSSLGTQTYICNVNHKPSNTKVDKKVEPKSC

SEQ ID NO: 8216 - protein, 118 aa, Artificial Sequence; identical to SEQ ID NO: 5418
  Description of Artificial Sequence: Synthetic polypeptide
  VH of XENP019272

SEQ ID NO: 8217 - protein, 5 aa, Artificial Sequence
  Description of Artificial Sequence: Synthetic peptide
  XENP019272 vhCDR1
SYTMH

SEQ ID NO: 8218 - protein, 17 aa, Artificial Sequence
  Description of Artificial Sequence: Synthetic peptide
  XENP019272 vhCDR2
FISYKGNNKYYADSVKG

SEQ ID NO: 8219 - protein, 9 aa, Artificial Sequence
  Description of Artificial Sequence: Synthetic peptide
  XENP019272 vhCDR3
TGWLGPFDY

SEQ ID NO: 8220 - protein, 215 aa, Artificial Sequence; identical to SEQ ID NO: 7600
  Description of Artificial Sequence: Synthetic polypeptide
  XENP019272 [CTLA-4]_H0.62_L0_Fab Light Chain

SEQ ID NO: 8221 - protein, 108 aa, Artificial Sequence; identical to SEQ ID NO: 3741
  Description of Artificial Sequence: Synthetic polypeptide
  VL of XENP019272

SEQ ID NO: 8222 - protein, 12 aa, Artificial Sequence
  Description of Artificial Sequence: Synthetic peptide
  XENP019272 vlCDR1
RASQSVGSSYLA

SEQ ID NO: 8223 - protein, 7 aa, Artificial Sequence
  Description of Artificial Sequence: Synthetic peptide
  XENP019272 vlCDR2
GAFSRAT

SEQ ID NO: 8224 - protein, 9 aa, Artificial Sequence
  Description of Artificial Sequence: Synthetic peptide
  XENP019272 vlCDR3
QQYGSSPWT

SEQ ID NO: 8225 - protein, 221 aa, Artificial Sequence
  Description of Artificial Sequence: Synthetic polypeptide
  XENP019273 [CTLA-4]_H0.63_L0_Fab Heavy Chain
QVQLVESGGGVVQPGRSLRLSCAASGFTFSSYTMHWVRQAPGKGLEWVTFISYQGNNKYYADSVKGRFTISRDNSKNTLYLQMNSLRAEDTAIYYCARTGWLGPFDYWGQGTLVTVSSASTKGPSVFPLAPSSKSTSGGTAALGCLVKDYFPEPVTVSWNSGALTSGVHTFPAVLQSSGLYSLSSVVTVPSSSLGTQTYICNVNHKPSNTKVDKKVEPKSC

SEQ ID NO: 8226 - protein, 118 aa, Artificial Sequence; identical to SEQ ID NO: 5427
  Description of Artificial Sequence: Synthetic polypeptide
  VH of XENP019273

SEQ ID NO: 8227 - protein, 5 aa, Artificial Sequence
  Description of Artificial Sequence: Synthetic peptide
  XENP019273 vhCDR1
SYTMH

SEQ ID NO: 8228 - protein, 17 aa, Artificial Sequence
  Description of Artificial Sequence: Synthetic peptide
  XENP019273 vhCDR2
FISYQGNNKYYADSVKG

SEQ ID NO: 8229 - protein, 9 aa, Artificial Sequence
  Description of Artificial Sequence: Synthetic peptide
  XENP019273 vhCDR3
TGWLGPFDY

SEQ ID NO: 8230 - protein, 215 aa, Artificial Sequence; identical to SEQ ID NO: 7600
  Description of Artificial Sequence: Synthetic polypeptide
  XENP019273 [CTLA-4]_H0.63_L0_Fab Light Chain

SEQ ID NO: 8231 - protein, 108 aa, Artificial Sequence; identical to SEQ ID NO: 3741
  Description of Artificial Sequence: Synthetic polypeptide
  VL of XENP019273

SEQ ID NO: 8232 - protein, 12 aa, Artificial Sequence
  Description of Artificial Sequence: Synthetic peptide
  XENP019273 vlCDR1
RASQSVGSSYLA

SEQ ID NO: 8233 - protein, 7 aa, Artificial Sequence
  Description of Artificial Sequence: Synthetic peptide
  XENP019273 vlCDR2
GAFSRAT

SEQ ID NO: 8234 - protein, 9 aa, Artificial Sequence
  Description of Artificial Sequence: Synthetic peptide
  XENP019273 vlCDR3
QQYGSSPWT

SEQ ID NO: 8235 - protein, 221 aa, Artificial Sequence
  Description of Artificial Sequence: Synthetic polypeptide
  XENP019274 [CTLA-4]_H0.64_L0_Fab Heavy Chain
QVQLVESGGGVVQPGRSLRLSCAASGFTFSSYTMHWVRQAPGKGLEWVTFISYDKNNKYYADSVKGRFTISRDNSKNTLYLQMNSLRAEDTAIYYCARTGWLGPFDYWGQGTLVTVSSASTKGPSVFPLAPSSKSTSGGTAALGCLVKDYFPEPVTVSWNSGALTSGVHTFPAVLQSSGLYSLSSVVTVPSSSLGTQTYICNVNHKPSNTKVDKKVEPKSC

SEQ ID NO: 8236 - protein, 118 aa, Artificial Sequence; identical to SEQ ID NO: 5436
  Description of Artificial Sequence: Synthetic polypeptide
  VH of XENP019274

SEQ ID NO: 8237 - protein, 5 aa, Artificial Sequence
  Description of Artificial Sequence: Synthetic peptide
  XENP019274 vhCDR1
SYTMH

SEQ ID NO: 8238 - protein, 17 aa, Artificial Sequence
  Description of Artificial Sequence: Synthetic peptide
  XENP019274 vhCDR2
FISYDKNNKYYADSVKG

SEQ ID NO: 8239 - protein, 9 aa, Artificial Sequence
  Description of Artificial Sequence: Synthetic peptide
  XENP019274 vhCDR3
TGWLGPFDY

SEQ ID NO: 8240 - protein, 215 aa, Artificial Sequence; identical to SEQ ID NO: 7600
  Description of Artificial Sequence: Synthetic polypeptide
  XENP019274 [CTLA-4]_H0.64_L0_Fab Light Chain

SEQ ID NO: 8241 - protein, 108 aa, Artificial Sequence; identical to SEQ ID NO: 3741
  Description of Artificial Sequence: Synthetic polypeptide
  VL of XENP019274

SEQ ID NO: 8242 - protein, 12 aa, Artificial Sequence
  Description of Artificial Sequence: Synthetic peptide
  XENP019274 vlCDR1
RASQSVGSSYLA

SEQ ID NO: 8243 - protein, 7 aa, Artificial Sequence
  Description of Artificial Sequence: Synthetic peptide
  XENP019274 vlCDR2
GAFSRAT

SEQ ID NO: 8244 - protein, 9 aa, Artificial Sequence
  Description of Artificial Sequence: Synthetic peptide
  XENP019274 vlCDR3
QQYGSSPWT

SEQ ID NO: 8245 - protein, 221 aa, Artificial Sequence
  Description of Artificial Sequence: Synthetic polypeptide
  XENP019275 [CTLA-4]_H0.65_L0_Fab Heavy Chain
QVQLVESGGGVVQPGRSLRLSCAASGFTFSSYTMHWVRQAPGKGLEWVTFISYDKNNKYYADSVKGRFTISEDNSKNTLYLQMNSLRAEDTAIYYCARTGWLGPFDYWGQGTLVTVSSASTKGPSVFPLAPSSKSTSGGTAALGCLVKDYFPEPVTVSWNSGALTSGVHTFPAVLQSSGLYSLSSVVTVPSSSLGTQTYICNVNHKPSNTKVDKKVEPKSC

SEQ ID NO: 8246 - protein, 118 aa, Artificial Sequence; identical to SEQ ID NO: 5445
  Description of Artificial Sequence: Synthetic polypeptide
  VH of XENP019275

SEQ ID NO: 8247 - protein, 5 aa, Artificial Sequence
  Description of Artificial Sequence: Synthetic peptide
  XENP019275 vhCDR1
SYTMH

SEQ ID NO: 8248 - protein, 17 aa, Artificial Sequence
  Description of Artificial Sequence: Synthetic peptide
  XENP019275 vhCDR2
FISYDKNNKYYADSVKG

SEQ ID NO: 8249 - protein, 9 aa, Artificial Sequence
  Description of Artificial Sequence: Synthetic peptide
  XENP019275 vhCDR3
TGWLGPFDY

SEQ ID NO: 8250 - protein, 215 aa, Artificial Sequence; identical to SEQ ID NO: 7600
  Description of Artificial Sequence: Synthetic polypeptide
  XENP019275 [CTLA-4]_H0.65_L0_Fab Light Chain

SEQ ID NO: 8251 - protein, 108 aa, Artificial Sequence; identical to SEQ ID NO: 3741
  Description of Artificial Sequence: Synthetic polypeptide
  VL of XENP019275

SEQ ID NO: 8252 - protein, 12 aa, Artificial Sequence
  Description of Artificial Sequence: Synthetic peptide
  XENP019275 vlCDR1
RASQSVGSSYLA

SEQ ID NO: 8253 - protein, 7 aa, Artificial Sequence
  Description of Artificial Sequence: Synthetic peptide
  XENP019275 vlCDR2
GAFSRAT

SEQ ID NO: 8254 - protein, 9 aa, Artificial Sequence
  Description of Artificial Sequence: Synthetic peptide
  XENP019275 vlCDR3
QQYGSSPWT

SEQ ID NO: 8255 - protein, 221 aa, Artificial Sequence
  Description of Artificial Sequence: Synthetic polypeptide
  XENP019276 [CTLA-4]_H0.66_L0_Fab Heavy Chain
QVQLVESGGGVVQPGRSLRLSCAASGFTFSSYTMHWVRQAPGKGLEWVTFISYDGDNKYYADSVKGRFTISRDNSKNTLYLQMNSLRAEDTAIYYCARTGWLGPFDYWGQGTLVTVSSASTKGPSVFPLAPSSKSTSGGTAALGCLVKDYFPEPVTVSWNSGALTSGVHTFPAVLQSSGLYSLSSVVTVPSSSLGTQTYICNVNHKPSNTKVDKKVEPKSC

SEQ ID NO: 8256 - protein, 118 aa, Artificial Sequence; identical to SEQ ID NO: 5454
  Description of Artificial Sequence: Synthetic polypeptide
  VH of XENP019276

SEQ ID NO: 8257 - protein, 5 aa, Artificial Sequence
  Description of Artificial Sequence: Synthetic peptide
  XENP019276 vhCDR1
SYTMH

SEQ ID NO: 8258 - protein, 17 aa, Artificial Sequence
  Description of Artificial Sequence: Synthetic peptide
  XENP019276 vhCDR2
FISYDGDNKYYADSVKG

SEQ ID NO: 8259 - protein, 9 aa, Artificial Sequence
  Description of Artificial Sequence: Synthetic peptide
  XENP019276 vhCDR3
TGWLGPFDY

SEQ ID NO: 8260 - protein, 215 aa, Artificial Sequence; identical to SEQ ID NO: 7600
  Description of Artificial Sequence: Synthetic polypeptide
  XENP019276 [CTLA-4]_H0.66_L0_Fab Light Chain

SEQ ID NO: 8261 - protein, 108 aa, Artificial Sequence; identical to SEQ ID NO: 3741
  Description of Artificial Sequence: Synthetic polypeptide
  VL of XENP019276

SEQ ID NO: 8262 - protein, 12 aa, Artificial Sequence
  Description of Artificial Sequence: Synthetic peptide
  XENP019276 vlCDR1
RASQSVGSSYLA

SEQ ID NO: 8263 - protein, 7 aa, Artificial Sequence
  Description of Artificial Sequence: Synthetic peptide
  XENP019276 vlCDR2
GAFSRAT

SEQ ID NO: 8264 - protein, 9 aa, Artificial Sequence
  Description of Artificial Sequence: Synthetic peptide
  XENP019276 vlCDR3
QQYGSSPWT

SEQ ID NO: 8265 - protein, 221 aa, Artificial Sequence
  Description of Artificial Sequence: Synthetic polypeptide
  XENP019277 [CTLA-4]_H0.67_L0_Fab Heavy Chain
QVQLVESGGGVVQPGRSLRLSCAASGFTFSSYTMHWVRQAPGKGLEWVTFISYDGGNKYYADSVKGRFTISRDNSKNTLYLQMNSLRAEDTAIYYCARTGWLGPFDYWGQGTLVTVSSASTKGPSVFPLAPSSKSTSGGTAALGCLVKDYFPEPVTVSWNSGALTSGVHTFPAVLQSSGLYSLSSVVTVPSSSLGTQTYICNVNHKPSNTKVDKKVEPKSC

SEQ ID NO: 8266 - protein, 118 aa, Artificial Sequence; identical to SEQ ID NO: 5463
  Description of Artificial Sequence: Synthetic polypeptide
  VH of XENP019277

SEQ ID NO: 8267 - protein, 5 aa, Artificial Sequence
  Description of Artificial Sequence: Synthetic peptide
  XENP019277 vhCDR1
SYTMH

SEQ ID NO: 8268 - protein, 17 aa, Artificial Sequence
  Description of Artificial Sequence: Synthetic peptide
  XENP019277 vhCDR2
FISYDGGNKYYADSVKG

SEQ ID NO: 8269 - protein, 9 aa, Artificial Sequence
  Description of Artificial Sequence: Synthetic peptide
  XENP019277 vhCDR3
TGWLGPFDY

SEQ ID NO: 8270 - protein, 215 aa, Artificial Sequence; identical to SEQ ID NO: 7600
  Description of Artificial Sequence: Synthetic polypeptide
  XENP019277 [CTLA-4]_H0.67_L0_Fab Light Chain

SEQ ID NO: 8271 - protein, 108 aa, Artificial Sequence; identical to SEQ ID NO: 3741
  Description of Artificial Sequence: Synthetic polypeptide
  VL of XENP019277

SEQ ID NO: 8272 - protein, 12 aa, Artificial Sequence
  Description of Artificial Sequence: Synthetic peptide
  XENP019277 vlCDR1
RASQSVGSSYLA

SEQ ID NO: 8273 - protein, 7 aa, Artificial Sequence
  Description of Artificial Sequence: Synthetic peptide
  XENP019277 vlCDR2
GAFSRAT

SEQ ID NO: 8274 - protein, 9 aa, Artificial Sequence
  Description of Artificial Sequence: Synthetic peptide
  XENP019277 vlCDR3
QQYGSSPWT

SEQ ID NO: 8275 - protein, 221 aa, Artificial Sequence
  Description of Artificial Sequence: Synthetic polypeptide
  XENP019278 [CTLA-4]_H0.68_L0_Fab Heavy Chain
QVQLVESGGGVVQPGRSLRLSCAASGFTFSSYTMHWVRQAPGKGLEWVTFISYDGHNKYYADSVKGRFTISRDNSKNTLYLQMNSLRAEDTAIYYCARTGWLGPFDYWGQGTLVTVSSASTKGPSVFPLAPSSKSTSGGTAALGCLVKDYFPEPVTVSWNSGALTSGVHTFPAVLQSSGLYSLSSVVTVPSSSLGTQTYICNVNHKPSNTKVDKKVEPKSC

SEQ ID NO: 8276 - protein, 118 aa, Artificial Sequence; identical to SEQ ID NO: 5472
  Description of Artificial Sequence: Synthetic polypeptide
  VH of XENP019278

SEQ ID NO: 8277 - protein, 5 aa, Artificial Sequence
  Description of Artificial Sequence: Synthetic peptide
  XENP019278 vhCDR1
SYTMH

SEQ ID NO: 8278 - protein, 17 aa, Artificial Sequence
  Description of Artificial Sequence: Synthetic peptide
  XENP019278 vhCDR2
FISYDGHNKYYADSVKG

SEQ ID NO: 8279 - protein, 9 aa, Artificial Sequence
  Description of Artificial Sequence: Synthetic peptide
  XENP019278 vhCDR3
TGWLGPFDY

SEQ ID NO: 8280 - protein, 215 aa, Artificial Sequence; identical to SEQ ID NO: 7600
  Description of Artificial Sequence: Synthetic polypeptide
  XENP019278 [CTLA-4]_H0.68_L0_Fab Light Chain

SEQ ID NO: 8281 - protein, 108 aa, Artificial Sequence; identical to SEQ ID NO: 3741
  Description of Artificial Sequence: Synthetic polypeptide
  VL of XENP019278

SEQ ID NO: 8282 - protein, 12 aa, Artificial Sequence
  Description of Artificial Sequence: Synthetic peptide
  XENP019278 vlCDR1
RASQSVGSSYLA

SEQ ID NO: 8283 - protein, 7 aa, Artificial Sequence
  Description of Artificial Sequence: Synthetic peptide
  XENP019278 vlCDR2
GAFSRAT

SEQ ID NO: 8284 - protein, 9 aa, Artificial Sequence
  Description of Artificial Sequence: Synthetic peptide
  XENP019278 vlCDR3
QQYGSSPWT

SEQ ID NO: 8285 - protein, 221 aa, Artificial Sequence
  Description of Artificial Sequence: Synthetic polypeptide
  XENP019279 [CTLA-4]_H0.69_L0_Fab Heavy Chain
QVQLVESGGGVVQPGRSLRLSCAASGFTFSSYTMHWVRQAPGKGLEWVTFISYDGQNKYYADSVKGRFTISRDNSKNTLYLQMNSLRAEDTAIYYCARTGWLGPFDYWGQGTLVTVSSASTKGPSVFPLAPSSKSTSGGTAALGCLVKDYFPEPVTVSWNSGALTSGVHTFPAVLQSSGLYSLSSVVTVPSSSLGTQTYICNVNHKPSNTKVDKKVEPKSC

SEQ ID NO: 8286 - protein, 118 aa, Artificial Sequence; identical to SEQ ID NO: 5481
  Description of Artificial Sequence: Synthetic polypeptide
  VH of XENP019279

SEQ ID NO: 8287 - protein, 5 aa, Artificial Sequence
  Description of Artificial Sequence: Synthetic peptide
  XENP019279 vhCDR1
SYTMH

SEQ ID NO: 8288 - protein, 17 aa, Artificial Sequence
  Description of Artificial Sequence: Synthetic peptide
  XENP019279 vhCDR2
FISYDGQNKYYADSVKG

SEQ ID NO: 8289 - protein, 9 aa, Artificial Sequence
  Description of Artificial Sequence: Synthetic peptide
  XENP019279 vhCDR3
TGWLGPFDY

SEQ ID NO: 8290 - protein, 215 aa, Artificial Sequence; identical to SEQ ID NO: 7600
  Description of Artificial Sequence: Synthetic polypeptide
  XENP019279 [CTLA-4]_H0.69_L0_Fab Light Chain

SEQ ID NO: 8291 - protein, 108 aa, Artificial Sequence; identical to SEQ ID NO: 3741
  Description of Artificial Sequence: Synthetic polypeptide
  VL of XENP019279

SEQ ID NO: 8292 - protein, 12 aa, Artificial Sequence
  Description of Artificial Sequence: Synthetic peptide
  XENP019279 vlCDR1
RASQSVGSSYLA

SEQ ID NO: 8293 - protein, 7 aa, Artificial Sequence
  Description of Artificial Sequence: Synthetic peptide
  XENP019279 vlCDR2
GAFSRAT

SEQ ID NO: 8294 - protein, 9 aa, Artificial Sequence
  Description of Artificial Sequence: Synthetic peptide
  XENP019279 vlCDR3
QQYGSSPWT

SEQ ID NO: 8295 - protein, 221 aa, Artificial Sequence
  Description of Artificial Sequence: Synthetic polypeptide
  XENP019280 [CTLA-4]_H0.70_L0_Fab Heavy Chain
QVQLVESGGGVVQPGRSLRLSCAASGFTFSSYTMHWVRQAPGKGLEWVTFISYDGSNKYYADSVKGRFTISRDNSKNTLYLQMNSLRAEDTAIYYCARTGWLGPFDYWGQGTLVTVSSASTKGPSVFPLAPSSKSTSGGTAALGCLVKDYFPEPVTVSWNSGALTSGVHTFPAVLQSSGLYSLSSVVTVPSSSLGTQTYICNVNHKPSNTKVDKKVEPKSC

SEQ ID NO: 8296 - protein, 118 aa, Artificial Sequence; identical to SEQ ID NO: 5490
  Description of Artificial Sequence: Synthetic polypeptide
  VH of XENP019280

SEQ ID NO: 8297 - protein, 5 aa, Artificial Sequence
  Description of Artificial Sequence: Synthetic peptide
  XENP019280 vhCDR1
SYTMH

SEQ ID NO: 8298 - protein, 17 aa, Artificial Sequence
  Description of Artificial Sequence: Synthetic peptide
  XENP019280 vhCDR2
FISYDGSNKYYADSVKG

SEQ ID NO: 8299 - protein, 9 aa, Artificial Sequence
  Description of Artificial Sequence: Synthetic peptide
  XENP019280 vhCDR3
TGWLGPFDY

SEQ ID NO: 8300 - protein, 215 aa, Artificial Sequence; identical to SEQ ID NO: 7600
  Description of Artificial Sequence: Synthetic polypeptide
  XENP019280 [CTLA-4]_H0.70_L0_Fab Light Chain

SEQ ID NO: 8301 - protein, 108 aa, Artificial Sequence; identical to SEQ ID NO: 3741
  Description of Artificial Sequence: Synthetic polypeptide
  VL of XENP019280

SEQ ID NO: 8302 - protein, 12 aa, Artificial Sequence
  Description of Artificial Sequence: Synthetic peptide
  XENP019280 vlCDR1
RASQSVGSSYLA

SEQ ID NO: 8303 - protein, 7 aa, Artificial Sequence
  Description of Artificial Sequence: Synthetic peptide
  XENP019280 vlCDR2
GAFSRAT

SEQ ID NO: 8304 - protein, 9 aa, Artificial Sequence
  Description of Artificial Sequence: Synthetic peptide
  XENP019280 vlCDR3
QQYGSSPWT

SEQ ID NO: 8305 - protein, 221 aa, Artificial Sequence
  Description of Artificial Sequence: Synthetic polypeptide
  XENP019281 [CTLA-4]_H0.71_L0_Fab Heavy Chain
QVQLVESGGGVVQPGRSLRLSCAASGFTFSSYTMHWVRQAPGKGLEWVTFISYDGNDKYYADSVKGRFTISRDNSKNTLYLQMNSLRAEDTAIYYCARTGWLGPFDYWGQGTLVTVSSASTKGPSVFPLAPSSKSTSGGTAALGCLVKDYFPEPVTVSWNSGALTSGVHTFPAVLQSSGLYSLSSVVTVPSSSLGTQTYICNVNHKPSNTKVDKKVEPKSC

SEQ ID NO: 8306 - protein, 118 aa, Artificial Sequence; identical to SEQ ID NO: 5499
  Description of Artificial Sequence: Synthetic polypeptide
  VH of XENP019281

SEQ ID NO: 8307 - protein, 5 aa, Artificial Sequence
  Description of Artificial Sequence: Synthetic peptide
  XENP019281 vhCDR1
SYTMH

SEQ ID NO: 8308 - protein, 17 aa, Artificial Sequence
  Description of Artificial Sequence: Synthetic peptide
  XENP019281 vhCDR2
FISYDGNDKYYADSVKG

SEQ ID NO: 8309 - protein, 9 aa, Artificial Sequence
  Description of Artificial Sequence: Synthetic peptide
  XENP019281 vhCDR3
TGWLGPFDY

SEQ ID NO: 8310 - protein, 215 aa, Artificial Sequence; identical to SEQ ID NO: 7600
  Description of Artificial Sequence: Synthetic polypeptide
  XENP019281 [CTLA-4]_H0.71_L0_Fab Light Chain

SEQ ID NO: 8311 - protein, 108 aa, Artificial Sequence; identical to SEQ ID NO: 3741
  Description of Artificial Sequence: Synthetic polypeptide
  VL of XENP019281

SEQ ID NO: 8312 - protein, 12 aa, Artificial Sequence
  Description of Artificial Sequence: Synthetic peptide
  XENP019281 vlCDR1
RASQSVGSSYLA

SEQ ID NO: 8313 - protein, 7 aa, Artificial Sequence
  Description of Artificial Sequence: Synthetic peptide
  XENP019281 vlCDR2
GAFSRAT

SEQ ID NO: 8314 - protein, 9 aa, Artificial Sequence
  Description of Artificial Sequence: Synthetic peptide
  XENP019281 vlCDR3
QQYGSSPWT

SEQ ID NO: 8315 - protein, 221 aa, Artificial Sequence
  Description of Artificial Sequence: Synthetic polypeptide
  XENP019282 [CTLA-4]_H0.72_L0_Fab Heavy Chain
QVQLVESGGGVVQPGRSLRLSCAASGFTFSSYTMHWVRQAPGKGLEWVTFISYDGNEKYYADSVKGRFTISRDNSKNTLYLQMNSLRAEDTAIYYCARTGWLGPFDYWGQGTLVTVSSASTKGPSVFPLAPSSKSTSGGTAALGCLVKDYFPEPVTVSWNSGALTSGVHTFPAVLQSSGLYSLSSVVTVPSSSLGTQTYICNVNHKPSNTKVDKKVEPKSC

SEQ ID NO: 8316 - protein, 118 aa, Artificial Sequence; identical to SEQ ID NO: 5508
  Description of Artificial Sequence: Synthetic polypeptide
  VH of XENP019282

SEQ ID NO: 8317 - protein, 5 aa, Artificial Sequence
  Description of Artificial Sequence: Synthetic peptide
  XENP019282 vhCDR1
SYTMH

SEQ ID NO: 8318 - protein, 17 aa, Artificial Sequence
  Description of Artificial Sequence: Synthetic peptide
  XENP019282 vhCDR2
FISYDGNEKYYADSVKG

SEQ ID NO: 8319 - protein, 9 aa, Artificial Sequence
  Description of Artificial Sequence: Synthetic peptide
  XENP019282 vhCDR3
TGWLGPFDY

SEQ ID NO: 8320 - protein, 215 aa, Artificial Sequence; identical to SEQ ID NO: 7600
  Description of Artificial Sequence: Synthetic polypeptide
  XENP019282 [CTLA-4]_H0.72_L0_Fab Light Chain

SEQ ID NO: 8321 - protein, 108 aa, Artificial Sequence; identical to SEQ ID NO: 3741
  Description of Artificial Sequence: Synthetic polypeptide
  VL of XENP019282

SEQ ID NO: 8322 - protein, 12 aa, Artificial Sequence
  Description of Artificial Sequence: Synthetic peptide
  XENP019282 vlCDR1
RASQSVGSSYLA

SEQ ID NO: 8323 - protein, 7 aa, Artificial Sequence
  Description of Artificial Sequence: Synthetic peptide
  XENP019282 vlCDR2
GAFSRAT

SEQ ID NO: 8324 - protein, 9 aa, Artificial Sequence
  Description of Artificial Sequence: Synthetic peptide
  XENP019282 vlCDR3
QQYGSSPWT

SEQ ID NO: 8325 - protein, 221 aa, Artificial Sequence
  Description of Artificial Sequence: Synthetic polypeptide
  XENP019283 [CTLA-4]_H0.73_L0_Fab Heavy Chain
QVQLVESGGGVVQPGRSLRLSCAASGFTFSSYTMHWVRQAPGKGLEWVTFISYDGNHKYYADSVKGRFTISRDNSKNTLYLQMNSLRAEDTAIYYCARTGWLGPFDYWGQGTLVTVSSASTKGPSVFPLAPSSKSTSGGTAALGCLVKDYFPEPVTVSWNSGALTSGVHTFPAVLQSSGLYSLSSVVTVPSSSLGTQTYICNVNHKPSNTKVDKKVEPKSC

SEQ ID NO: 8326 - protein, 118 aa, Artificial Sequence; identical to SEQ ID NO: 5517
  Description of Artificial Sequence: Synthetic polypeptide
  VH of XENP019283

SEQ ID NO: 8327 - protein, 5 aa, Artificial Sequence
  Description of Artificial Sequence: Synthetic peptide
  XENP019283 vhCDR1
SYTMH

SEQ ID NO: 8328 - protein, 17 aa, Artificial Sequence
  Description of Artificial Sequence: Synthetic peptide
  XENP019283 vhCDR2
FISYDGNHKYYADSVKG

SEQ ID NO: 8329 - protein, 9 aa, Artificial Sequence
  Description of Artificial Sequence: Synthetic peptide
  XENP019283 vhCDR3
TGWLGPFDY

SEQ ID NO: 8330 - protein, 215 aa, Artificial Sequence; identical to SEQ ID NO: 7600
  Description of Artificial Sequence: Synthetic polypeptide
  XENP019283 [CTLA-4]_H0.73_L0_Fab Light Chain

SEQ ID NO: 8331 - protein, 108 aa, Artificial Sequence; identical to SEQ ID NO: 3741
  Description of Artificial Sequence: Synthetic polypeptide
  VL of XENP019283

SEQ ID NO: 8332 - protein, 12 aa, Artificial Sequence
  Description of Artificial Sequence: Synthetic peptide
  XENP019283 vlCDR1
RASQSVGSSYLA

SEQ ID NO: 8333 - protein, 7 aa, Artificial Sequence
  Description of Artificial Sequence: Synthetic peptide
  XENP019283 vlCDR2
GAFSRAT

SEQ ID NO: 8334 - protein, 9 aa, Artificial Sequence
  Description of Artificial Sequence: Synthetic peptide
  XENP019283 vlCDR3
QQYGSSPWT

SEQ ID NO: 8335 - protein, 221 aa, Artificial Sequence
  Description of Artificial Sequence: Synthetic polypeptide
  XENP019284 [CTLA-4]_H0.74_L0_Fab Heavy Chain
QVQLVESGGGVVQPGRSLRLSCAASGFTFSSYTMHWVRQAPGKGLEWVTFISYDGNSKYYADSVKGRFTISRDNSKNTLYLQMNSLRAEDTAIYYCARTGWLGPFDYWGQGTLVTVSSASTKGPSVFPLAPSSKSTSGGTAALGCLVKDYFPEPVTVSWNSGALTSGVHTFPAVLQSSGLYSLSSVVTVPSSSLGTQTYICNVNHKPSNTKVDKKVEPKSC

SEQ ID NO: 8336 - protein, 118 aa, Artificial Sequence; identical to SEQ ID NO: 5526
  Description of Artificial Sequence: Synthetic polypeptide
  VH of XENP019284

SEQ ID NO: 8337 - protein, 5 aa, Artificial Sequence
  Description of Artificial Sequence: Synthetic peptide
  XENP019284 vhCDR1
SYTMH

SEQ ID NO: 8338 - protein, 17 aa, Artificial Sequence
  Description of Artificial Sequence: Synthetic peptide
  XENP019284 vhCDR2
FISYDGNSKYYADSVKG

SEQ ID NO: 8339 - protein, 9 aa, Artificial Sequence
  Description of Artificial Sequence: Synthetic peptide
  XENP019284 vhCDR3
TGWLGPFDY

SEQ ID NO: 8340 - protein, 215 aa, Artificial Sequence; identical to SEQ ID NO: 7600
  Description of Artificial Sequence: Synthetic polypeptide
  XENP019284 [CTLA-4]_H0.74_L0_Fab Light Chain

SEQ ID NO: 8341 - protein, 108 aa, Artificial Sequence; identical to SEQ ID NO: 3741
  Description of Artificial Sequence: Synthetic polypeptide
  VL of XENP019284

SEQ ID NO: 8342 - protein, 12 aa, Artificial Sequence
  Description of Artificial Sequence: Synthetic peptide
  XENP019284 vlCDR1
RASQSVGSSYLA

SEQ ID NO: 8343 - protein, 7 aa, Artificial Sequence
  Description of Artificial Sequence: Synthetic peptide
  XENP019284 vlCDR2
GAFSRAT

SEQ ID NO: 8344 - protein, 9 aa, Artificial Sequence
  Description of Artificial Sequence: Synthetic peptide
  XENP019284 vlCDR3
QQYGSSPWT

SEQ ID NO: 8345 - protein, 221 aa, Artificial Sequence
  Description of Artificial Sequence: Synthetic polypeptide
  XENP019285 [CTLA-4]_H0.75_L0_Fab Heavy Chain
QVQLVESGGGVVQPGRSLRLSCAASGFTFSSYTMHWVRQAPGKGLEWVTFISYDGNTKYYADSVKGRFTISRDNSKNTLYLQMNSLRAEDTAIYYCARTGWLGPFDYWGQGTLVTVSSASTKGPSVFPLAPSSKSTSGGTAALGCLVKDYFPEPVTVSWNSGALTSGVHTFPAVLQSSGLYSLSSVVTVPSSSLGTQTYICNVNHKPSNTKVDKKVEPKSC

SEQ ID NO: 8346 - protein, 118 aa, Artificial Sequence; identical to SEQ ID NO: 5535
  Description of Artificial Sequence: Synthetic polypeptide
  VH of XENP019285

SEQ ID NO: 8347 - protein, 5 aa, Artificial Sequence
  Description of Artificial Sequence: Synthetic peptide
  XENP019285 vhCDR1
SYTMH

SEQ ID NO: 8348 - protein, 17 aa, Artificial Sequence
  Description of Artificial Sequence: Synthetic peptide
  XENP019285 vhCDR2
FISYDGNTKYYADSVKG

SEQ ID NO: 8349 - protein, 9 aa, Artificial Sequence
  Description of Artificial Sequence: Synthetic peptide
  XENP019285 vhCDR3
TGWLGPFDY

SEQ ID NO: 8350 - protein, 215 aa, Artificial Sequence; identical to SEQ ID NO: 7600
  Description of Artificial Sequence: Synthetic polypeptide
  XENP019285 [CTLA-4]_H0.75_L0_Fab Light Chain

SEQ ID NO: 8351 - protein, 108 aa, Artificial Sequence; identical to SEQ ID NO: 3741
  Description of Artificial Sequence: Synthetic polypeptide
  VL of XENP019285

SEQ ID NO: 8352 - protein, 12 aa, Artificial Sequence
  Description of Artificial Sequence: Synthetic peptide
  XENP019285 vlCDR1
RASQSVGSSYLA

SEQ ID NO: 8353 - protein, 7 aa, Artificial Sequence
  Description of Artificial Sequence: Synthetic peptide
  XENP019285 vlCDR2
GAFSRAT

SEQ ID NO: 8354 - protein, 9 aa, Artificial Sequence
  Description of Artificial Sequence: Synthetic peptide
  XENP019285 vlCDR3
QQYGSSPWT

SEQ ID NO: 8355 - protein, 221 aa, Artificial Sequence
  Description of Artificial Sequence: Synthetic polypeptide
  XENP019286 [CTLA-4]_H0.76_L0_Fab Heavy Chain
QVQLVESGGGVVQPGRSLRLSCAASGFTFSSYTMHWVRQAPGKGLEWVTFISYDGNQKYYADSVKGRFTISRDNSKNTLYLQMNSLRAEDTAIYYCARTGWLGPFDYWGQGTLVTVSSASTKGPSVFPLAPSSKSTSGGTAALGCLVKDYFPEPVTVSWNSGALTSGVHTFPAVLQSSGLYSLSSVVTVPSSSLGTQTYICNVNHKPSNTKVDKKVEPKSC

SEQ ID NO: 8356 - protein, 118 aa, Artificial Sequence; identical to SEQ ID NO: 5544
  Description of Artificial Sequence: Synthetic polypeptide
  VH of XENP019286

SEQ ID NO: 8357 - protein, 5 aa, Artificial Sequence
  Description of Artificial Sequence: Synthetic peptide
  XENP019286 vhCDR1
SYTMH

SEQ ID NO: 8358 - protein, 17 aa, Artificial Sequence
  Description of Artificial Sequence: Synthetic peptide
  XENP019286 vhCDR2
FISYDGNQKYYADSVKG

SEQ ID NO: 8359 - protein, 9 aa, Artificial Sequence
  Description of Artificial Sequence: Synthetic peptide
  XENP019286 vhCDR3
TGWLGPFDY

SEQ ID NO: 8360 - protein, 215 aa, Artificial Sequence; identical to SEQ ID NO: 7600
  Description of Artificial Sequence: Synthetic polypeptide
  XENP019286 [CTLA-4]_H0.76_L0_Fab Light Chain

SEQ ID NO: 8361 - protein, 108 aa, Artificial Sequence; identical to SEQ ID NO: 3741
  Description of Artificial Sequence: Synthetic polypeptide
  VL of XENP019286

SEQ ID NO: 8362 - protein, 12 aa, Artificial Sequence
  Description of Artificial Sequence: Synthetic peptide
  XENP019286 vlCDR1
RASQSVGSSYLA

SEQ ID NO: 8363 - protein, 7 aa, Artificial Sequence
  Description of Artificial Sequence: Synthetic peptide
  XENP019286 vlCDR2
GAFSRAT

SEQ ID NO: 8364 - protein, 9 aa, Artificial Sequence
  Description of Artificial Sequence: Synthetic peptide
  XENP019286 vlCDR3
QQYGSSPWT

SEQ ID NO: 8365 - protein, 221 aa, Artificial Sequence
  Description of Artificial Sequence: Synthetic polypeptide
  XENP019287 [CTLA-4]_H0.77_L0_Fab Heavy Chain
QVQLVESGGGVVQPGRSLRLSCAASGFTFSSYTMHWVRQAPGKGLEWVTFISYDGNNIYYADSVKGRFTISRDNSKNTLYLQMNSLRAEDTAIYYCARTGWLGPFDYWGQGTLVTVSSASTKGPSVFPLAPSSKSTSGGTAALGCLVKDYFPEPVTVSWNSGALTSGVHTFPAVLQSSGLYSLSSVVTVPSSSLGTQTYICNVNHKPSNTKVDKKVEPKSC

SEQ ID NO: 8366 - protein, 118 aa, Artificial Sequence; identical to SEQ ID NO: 5553
  Description of Artificial Sequence: Synthetic polypeptide
  VH of XENP019287

SEQ ID NO: 8367 - protein, 5 aa, Artificial Sequence
  Description of Artificial Sequence: Synthetic peptide
  XENP019287 vhCDR1
SYTMH

SEQ ID NO: 8368 - protein, 17 aa, Artificial Sequence
  Description of Artificial Sequence: Synthetic peptide
  XENP019287 vhCDR2
FISYDGNNIYYADSVKG

SEQ ID NO: 8369 - protein, 9 aa, Artificial Sequence
  Description of Artificial Sequence: Synthetic peptide
  XENP019287 vhCDR3
TGWLGPFDY

SEQ ID NO: 8370 - protein, 215 aa, Artificial Sequence; identical to SEQ ID NO: 7600
  Description of Artificial Sequence: Synthetic polypeptide
  XENP019287 [CTLA-4]_H0.77_L0_Fab Light Chain

SEQ ID NO: 8371 - protein, 108 aa, Artificial Sequence; identical to SEQ ID NO: 3741
  Description of Artificial Sequence: Synthetic polypeptide
  VL of XENP019287

SEQ ID NO: 8372 - protein, 12 aa, Artificial Sequence
  Description of Artificial Sequence: Synthetic peptide
  XENP019287 vlCDR1
RASQSVGSSYLA

SEQ ID NO: 8373 - protein, 7 aa, Artificial Sequence
  Description of Artificial Sequence: Synthetic peptide
  XENP019287 vlCDR2
GAFSRAT

SEQ ID NO: 8374 - protein, 9 aa, Artificial Sequence
  Description of Artificial Sequence: Synthetic peptide
  XENP019287 vlCDR3
QQYGSSPWT

SEQ ID NO: 8375 - protein, 221 aa, Artificial Sequence
  Description of Artificial Sequence: Synthetic polypeptide
  XENP019288 [CTLA-4]_H0.78_L0_Fab Heavy Chain
QVQLVESGGGVVQPGRSLRLSCAASGFTFSSYTMHWVRQAPGKGLEWVTFISYDGNNTYYADSVKGRFTISRDNSKNTLYLQMNSLRAEDTAIYYCARTGWLGPFDYWGQGTLVTVSSASTKGPSVFPLAPSSKSTSGGTAALGCLVKDYFPEPVTVSWNSGALTSGVHTFPAVLQSSGLYSLSSVVTVPSSSLGTQTYICNVNHKPSNTKVDKKVEPKSC

SEQ ID NO: 8376 - protein, 118 aa, Artificial Sequence; identical to SEQ ID NO: 5562
  Description of Artificial Sequence: Synthetic polypeptide
  VH of XENP019288

SEQ ID NO: 8377 - protein, 5 aa, Artificial Sequence
  Description of Artificial Sequence: Synthetic peptide
  XENP019288 vhCDR1
SYTMH

SEQ ID NO: 8378 - protein, 17 aa, Artificial Sequence
  Description of Artificial Sequence: Synthetic peptide
  XENP019288 vhCDR2
FISYDGNNTYYADSVKG

SEQ ID NO: 8379 - protein, 9 aa, Artificial Sequence
  Description of Artificial Sequence: Synthetic peptide
  XENP019288 vhCDR3
TGWLGPFDY

SEQ ID NO: 8380 - protein, 215 aa, Artificial Sequence; identical to SEQ ID NO: 7600
  Description of Artificial Sequence: Synthetic polypeptide
  XENP019288 [CTLA-4]_H0.78_L0_Fab Light Chain

SEQ ID NO: 8381 - protein, 108 aa, Artificial Sequence; identical to SEQ ID NO: 3741
  Description of Artificial Sequence: Synthetic polypeptide
  VL of XENP019288

SEQ ID NO: 8382 - protein, 12 aa, Artificial Sequence
  Description of Artificial Sequence: Synthetic peptide
  XENP019288 vlCDR1
RASQSVGSSYLA

SEQ ID NO: 8383 - protein, 7 aa, Artificial Sequence
  Description of Artificial Sequence: Synthetic peptide
  XENP019288 vlCDR2
GAFSRAT

SEQ ID NO: 8384 - protein, 9 aa, Artificial Sequence
  Description of Artificial Sequence: Synthetic peptide
  XENP019288 vlCDR3
QQYGSSPWT

SEQ ID NO: 8385 - protein, 221 aa, Artificial Sequence
  Description of Artificial Sequence: Synthetic polypeptide
  XENP019289 [CTLA-4]_H0.79_L0_Fab Heavy Chain
QVQLVESGGGVVQPGRSLRLSCAASGFTFSSYTMHWVRQAPGKGLEWVTFISYDGNNKAYADSVKGRFTISRDNSKNTLYLQMNSLRAEDTAIYYCARTGWLGPFDYWGQGTLVTVSSASTKGPSVFPLAPSSKSTSGGTAALGCLVKDYFPEPVTVSWNSGALTSGVHTFPAVLQSSGLYSLSSVVTVPSSSLGTQTYICNVNHKPSNTKVDKKVEPKSC

SEQ ID NO: 8386 - protein, 118 aa, Artificial Sequence; identical to SEQ ID NO: 5571
  Description of Artificial Sequence: Synthetic polypeptide
  VH of XENP019289

SEQ ID NO: 8387 - protein, 5 aa, Artificial Sequence
  Description of Artificial Sequence: Synthetic peptide
  XENP019289 vhCDR1
SYTMH

SEQ ID NO: 8388 - protein, 17 aa, Artificial Sequence
  Description of Artificial Sequence: Synthetic peptide
  XENP019289 vhCDR2
FISYDGNNKAYADSVKG

SEQ ID NO: 8389 - protein, 9 aa, Artificial Sequence
  Description of Artificial Sequence: Synthetic peptide
  XENP019289 vhCDR3
TGWLGPFDY

SEQ ID NO: 8390 - protein, 215 aa, Artificial Sequence; identical to SEQ ID NO: 7600
  Description of Artificial Sequence: Synthetic polypeptide
  XENP019289 [CTLA-4]_H0.79_L0_Fab Light Chain

SEQ ID NO: 8391 - protein, 108 aa, Artificial Sequence; identical to SEQ ID NO: 3741
  Description of Artificial Sequence: Synthetic polypeptide
  VL of XENP019289

SEQ ID NO: 8392 - protein, 12 aa, Artificial Sequence
  Description of Artificial Sequence: Synthetic peptide
  XENP019289 vlCDR1
RASQSVGSSYLA

SEQ ID NO: 8393 - protein, 7 aa, Artificial Sequence
  Description of Artificial Sequence: Synthetic peptide
  XENP019289 vlCDR2
GAFSRAT

SEQ ID NO: 8394 - protein, 9 aa, Artificial Sequence
  Description of Artificial Sequence: Synthetic peptide
  XENP019289 vlCDR3
QQYGSSPWT

SEQ ID NO: 8395 - protein, 221 aa, Artificial Sequence
  Description of Artificial Sequence: Synthetic polypeptide
  XENP019290 [CTLA-4]_H0.80_L0_Fab Heavy Chain
QVQLVESGGGVVQPGRSLRLSCAASGFTFSSYTMHWVRQAPGKGLEWVTFISYDGNNKYYAASVKGRFTISRDNSKNTLYLQMNSLRAEDTAIYYCARTGWLGPFDYWGQGTLVTVSSASTKGPSVFPLAPSSKSTSGGTAALGCLVKDYFPEPVTVSWNSGALTSGVHTFPAVLQSSGLYSLSSVVTVPSSSLGTQTYICNVNHKPSNTKVDKKVEPKSC

SEQ ID NO: 8396 - protein, 118 aa, Artificial Sequence; identical to SEQ ID NO: 5580
  Description of Artificial Sequence: Synthetic polypeptide
  VH of XENP019290

SEQ ID NO: 8397 - protein, 5 aa, Artificial Sequence
  Description of Artificial Sequence: Synthetic peptide
  XENP019290 vhCDR1
SYTMH

SEQ ID NO: 8398 - protein, 17 aa, Artificial Sequence
  Description of Artificial Sequence: Synthetic peptide
  XENP019290 vhCDR2
FISYDGNNKYYAASVKG

SEQ ID NO: 8399 - protein, 9 aa, Artificial Sequence
  Description of Artificial Sequence: Synthetic peptide
  XENP019290 vhCDR3
TGWLGPFDY

SEQ ID NO: 8400 - protein, 215 aa, Artificial Sequence; identical to SEQ ID NO: 7600
  Description of Artificial Sequence: Synthetic polypeptide
  XENP019290 [CTLA-4]_H0.80_L0_Fab Light Chain

SEQ ID NO: 8401 - protein, 108 aa, Artificial Sequence; identical to SEQ ID NO: 3741
  Description of Artificial Sequence: Synthetic polypeptide
  VL of XENP019290

SEQ ID NO: 8402 - protein, 12 aa, Artificial Sequence
  Description of Artificial Sequence: Synthetic peptide
  XENP019290 vlCDR1
RASQSVGSSYLA

SEQ ID NO: 8403 - protein, 7 aa, Artificial Sequence
  Description of Artificial Sequence: Synthetic peptide
  XENP019290 vlCDR2
GAFSRAT

SEQ ID NO: 8404 - protein, 9 aa, Artificial Sequence
  Description of Artificial Sequence: Synthetic peptide
  XENP019290 vlCDR3
QQYGSSPWT

SEQ ID NO: 8405 - protein, 221 aa, Artificial Sequence
  Description of Artificial Sequence: Synthetic polypeptide
  XENP019291 [CTLA-4]_H0.81_L0_Fab Heavy Chain
QVQLVESGGGVVQPGRSLRLSCAASGFTFSSYTMHWVRQAPGKGLEWVTFISYDGNNKYYAKSVKGRFTISRDNSKNTLYLQMNSLRAEDTAIYYCARTGWLGPFDYWGQGTLVTVSSASTKGPSVFPLAPSSKSTSGGTAALGCLVKDYFPEPVTVSWNSGALTSGVHTFPAVLQSSGLYSLSSVVTVPSSSLGTQTYICNVNHKPSNTKVDKKVEPKSC

SEQ ID NO: 8406 - protein, 118 aa, Artificial Sequence; identical to SEQ ID NO: 5589
  Description of Artificial Sequence: Synthetic polypeptide
  VH of XENP019291

SEQ ID NO: 8407 - protein, 5 aa, Artificial Sequence
  Description of Artificial Sequence: Synthetic peptide
  XENP019291 vhCDR1
SYTMH

SEQ ID NO: 8408 - protein, 17 aa, Artificial Sequence
  Description of Artificial Sequence: Synthetic peptide
  XENP019291 vhCDR2
FISYDGNNKYYAKSVKG

SEQ ID NO: 8409 - protein, 9 aa, Artificial Sequence
  Description of Artificial Sequence: Synthetic peptide
  XENP019291 vhCDR3
TGWLGPFDY

SEQ ID NO: 8410 - protein, 215 aa, Artificial Sequence; identical to SEQ ID NO: 7600
  Description of Artificial Sequence: Synthetic polypeptide
  XENP019291 [CTLA-4]_H0.81_L0_Fab Light Chain

SEQ ID NO: 8411 - protein, 108 aa, Artificial Sequence; identical to SEQ ID NO: 3741
  Description of Artificial Sequence: Synthetic polypeptide
  VL of XENP019291

SEQ ID NO: 8412 - protein, 12 aa, Artificial Sequence
  Description of Artificial Sequence: Synthetic peptide
  XENP019291 vlCDR1
RASQSVGSSYLA

SEQ ID NO: 8413 - protein, 7 aa, Artificial Sequence
  Description of Artificial Sequence: Synthetic peptide
  XENP019291 vlCDR2
GAFSRAT

SEQ ID NO: 8414 - protein, 9 aa, Artificial Sequence
  Description of Artificial Sequence: Synthetic peptide
  XENP019291 vlCDR3
QQYGSSPWT

SEQ ID NO: 8415 - protein, 221 aa, Artificial Sequence
  Description of Artificial Sequence: Synthetic polypeptide
  XENP019292 [CTLA-4]_H0.82_L0_Fab Heavy Chain
QVQLVESGGGVVQPGRSLRLSCAASGFTFSSYTMHWVRQAPGKGLEWVTFISYDGNNKYYADSVKDRFTISRDNSKNTLYLQMNSLRAEDTAIYYCARTGWLGPFDYWGQGTLVTVSSASTKGPSVFPLAPSSKSTSGGTAALGCLVKDYFPEPVTVSWNSGALTSGVHTFPAVLQSSGLYSLSSVVTVPSSSLGTQTYICNVNHKPSNTKVDKKVEPKSC

SEQ ID NO: 8416 - protein, 118 aa, Artificial Sequence; identical to SEQ ID NO: 5598
  Description of Artificial Sequence: Synthetic polypeptide
  VH of XENP019292

SEQ ID NO: 8417 - protein, 5 aa, Artificial Sequence
  Description of Artificial Sequence: Synthetic peptide
  XENP019292 vhCDR1
SYTMH

SEQ ID NO: 8418 - protein, 17 aa, Artificial Sequence
  Description of Artificial Sequence: Synthetic peptide
  XENP019292 vhCDR2
FISYDGNNKYYADSVKD

SEQ ID NO: 8419 - protein, 9 aa, Artificial Sequence
  Description of Artificial Sequence: Synthetic peptide
  XENP019292 vhCDR3
TGWLGPFDY

SEQ ID NO: 8420 - protein, 215 aa, Artificial Sequence; identical to SEQ ID NO: 7600
  Description of Artificial Sequence: Synthetic polypeptide
  XENP019292 [CTLA-4]_H0.82_L0_Fab Light Chain

SEQ ID NO: 8421 - protein, 108 aa, Artificial Sequence; identical to SEQ ID NO: 3741
  Description of Artificial Sequence: Synthetic polypeptide
  VL of XENP019292

SEQ ID NO: 8422 - protein, 12 aa, Artificial Sequence
  Description of Artificial Sequence: Synthetic peptide
  XENP019292 vlCDR1
RASQSVGSSYLA

SEQ ID NO: 8423 - protein, 7 aa, Artificial Sequence
  Description of Artificial Sequence: Synthetic peptide
  XENP019292 vlCDR2
GAFSRAT

SEQ ID NO: 8424 - protein, 9 aa, Artificial Sequence
  Description of Artificial Sequence: Synthetic peptide
  XENP019292 vlCDR3
QQYGSSPWT

SEQ ID NO: 8425 - protein, 221 aa, Artificial Sequence
  Description of Artificial Sequence: Synthetic polypeptide
  XENP019293 [CTLA-4]_H0.83_L0_Fab Heavy Chain
QVQLVESGGGVVQPGRSLRLSCAASGFTFSSYTMHWVRQAPGKGLEWVTFISYDGNNKYYADSVKERFTISRDNSKNTLYLQMNSLRAEDTAIYYCARTGWLGPFDYWGQGTLVTVSSASTKGPSVFPLAPSSKSTSGGTAALGCLVKDYFPEPVTVSWNSGALTSGVHTFPAVLQSSGLYSLSSVVTVPSSSLGTQTYICNVNHKPSNTKVDKKVEPKSC

SEQ ID NO: 8426 - protein, 118 aa, Artificial Sequence; identical to SEQ ID NO: 5607
  Description of Artificial Sequence: Synthetic polypeptide
  VH of XENP019293

SEQ ID NO: 8427 - protein, 5 aa, Artificial Sequence
  Description of Artificial Sequence: Synthetic peptide
  XENP019293 vhCDR1
SYTMH

SEQ ID NO: 8428 - protein, 17 aa, Artificial Sequence
  Description of Artificial Sequence: Synthetic peptide
  XENP019293 vhCDR2
FISYDGNNKYYADSVKE

SEQ ID NO: 8429 - protein, 9 aa, Artificial Sequence
  Description of Artificial Sequence: Synthetic peptide
  XENP019293 vhCDR3
TGWLGPFDY

SEQ ID NO: 8430 - protein, 215 aa, Artificial Sequence; identical to SEQ ID NO: 7600
  Description of Artificial Sequence: Synthetic polypeptide
  XENP019293 [CTLA-4]_H0.83_L0_Fab Light Chain

SEQ ID NO: 8431 - protein, 108 aa, Artificial Sequence; identical to SEQ ID NO: 3741
  Description of Artificial Sequence: Synthetic polypeptide
  VL of XENP019293

SEQ ID NO: 8432 - protein, 12 aa, Artificial Sequence
  Description of Artificial Sequence: Synthetic peptide
  XENP019293 vlCDR1
RASQSVGSSYLA

SEQ ID NO: 8433 - protein, 7 aa, Artificial Sequence
  Description of Artificial Sequence: Synthetic peptide
  XENP019293 vlCDR2
GAFSRAT

SEQ ID NO: 8434 - protein, 9 aa, Artificial Sequence
  Description of Artificial Sequence: Synthetic peptide
  XENP019293 vlCDR3
QQYGSSPWT

SEQ ID NO: 8435 - protein, 221 aa, Artificial Sequence
  Description of Artificial Sequence: Synthetic polypeptide
  XENP019294 [CTLA-4]_H0.84_L0_Fab Heavy Chain
QVQLVESGGGVVQPGRSLRLSCAASGFTFSSYTMHWVRQAPGKGLEWVTFISYDGNNKYYADSVKGQFTISRDNSKNTLYLQMNSLRAEDTAIYYCARTGWLGPFDYWGQGTLVTVSSASTKGPSVFPLAPSSKSTSGGTAALGCLVKDYFPEPVTVSWNSGALTSGVHTFPAVLQSSGLYSLSSVVTVPSSSLGTQTYICNVNHKPSNTKVDKKVEPKSC

SEQ ID NO: 8436 - protein, 118 aa, Artificial Sequence; identical to SEQ ID NO: 5616
  Description of Artificial Sequence: Synthetic polypeptide
  VH of XENP019294

SEQ ID NO: 8437 - protein, 5 aa, Artificial Sequence
  Description of Artificial Sequence: Synthetic peptide
  XENP019294 vhCDR1
SYTMH

SEQ ID NO: 8438 - protein, 17 aa, Artificial Sequence
  Description of Artificial Sequence: Synthetic peptide
  XENP019294 vhCDR2
FISYDGNNKYYADSVKG

SEQ ID NO: 8439 - protein, 9 aa, Artificial Sequence
  Description of Artificial Sequence: Synthetic peptide
  XENP019294 vhCDR3
TGWLGPFDY

SEQ ID NO: 8440 - protein, 215 aa, Artificial Sequence; identical to SEQ ID NO: 7600
  Description of Artificial Sequence: Synthetic polypeptide
  XENP019294 [CTLA-4]_H0.84_L0_Fab Light Chain

SEQ ID NO: 8441 - protein, 108 aa, Artificial Sequence; identical to SEQ ID NO: 3741
  Description of Artificial Sequence: Synthetic polypeptide
  VL of XENP019294

SEQ ID NO: 8442 - protein, 12 aa, Artificial Sequence
  Description of Artificial Sequence: Synthetic peptide
  XENP019294 vlCDR1
RASQSVGSSYLA

SEQ ID NO: 8443 - protein, 7 aa, Artificial Sequence
  Description of Artificial Sequence: Synthetic peptide
  XENP019294 vlCDR2
GAFSRAT

SEQ ID NO: 8444 - protein, 9 aa, Artificial Sequence
  Description of Artificial Sequence: Synthetic peptide
  XENP019294 vlCDR3
QQYGSSPWT

SEQ ID NO: 8445 - protein, 221 aa, Artificial Sequence
  Description of Artificial Sequence: Synthetic polypeptide
  XENP019295 [CTLA-4]_H0.85_L0_Fab Heavy Chain
QVQLVESGGGVVQPGRSLRLSCAASGFTFSSYTMHWVRQAPGKGLEWVTFISYDGNNKYYADSVKGRFTMSRDNSKNTLYLQMNSLRAEDTAIYYCARTGWLGPFDYWGQGTLVTVSSASTKGPSVFPLAPSSKSTSGGTAALGCLVKDYFPEPVTVSWNSGALTSGVHTFPAVLQSSGLYSLSSVVTVPSSSLGTQTYICNVNHKPSNTKVDKKVEPKSC

SEQ ID NO: 8446 - protein, 118 aa, Artificial Sequence; identical to SEQ ID NO: 5625
  Description of Artificial Sequence: Synthetic polypeptide
  VH of XENP019295

SEQ ID NO: 8447 - protein, 5 aa, Artificial Sequence
  Description of Artificial Sequence: Synthetic peptide
  XENP019295 vhCDR1
SYTMH

SEQ ID NO: 8448 - protein, 17 aa, Artificial Sequence
  Description of Artificial Sequence: Synthetic peptide
  XENP019295 vhCDR2
FISYDGNNKYYADSVKG

SEQ ID NO: 8449 - protein, 9 aa, Artificial Sequence
  Description of Artificial Sequence: Synthetic peptide
  XENP019295 vhCDR3
TGWLGPFDY

SEQ ID NO: 8450 - protein, 215 aa, Artificial Sequence; identical to SEQ ID NO: 7600
  Description of Artificial Sequence: Synthetic polypeptide
  XENP019295 [CTLA-4]_H0.85_L0_Fab Light Chain

SEQ ID NO: 8451 - protein, 108 aa, Artificial Sequence; identical to SEQ ID NO: 3741
  Description of Artificial Sequence: Synthetic polypeptide
  VL of XENP019295

SEQ ID NO: 8452 - protein, 12 aa, Artificial Sequence
  Description of Artificial Sequence: Synthetic peptide
  XENP019295 vlCDR1
RASQSVGSSYLA

SEQ ID NO: 8453 - protein, 7 aa, Artificial Sequence
  Description of Artificial Sequence: Synthetic peptide
  XENP019295 vlCDR2
GAFSRAT

SEQ ID NO: 8454 - protein, 9 aa, Artificial Sequence
  Description of Artificial Sequence: Synthetic peptide
  XENP019295 vlCDR3
QQYGSSPWT

SEQ ID NO: 8455 - protein, 221 aa, Artificial Sequence
  Description of Artificial Sequence: Synthetic polypeptide
  XENP019296 [CTLA-4]_H0.86_L0_Fab Heavy Chain
QVQLVESGGGVVQPGRSLRLSCAASGFTFSSYTMHWVRQAPGKGLEWVTFISYDGNNKYYADSVKGRFTVSRDNSKNTLYLQMNSLRAEDTAIYYCARTGWLGPFDYWGQGTLVTVSSASTKGPSVFPLAPSSKSTSGGTAALGCLVKDYFPEPVTVSWNSGALTSGVHTFPAVLQSSGLYSLSSVVTVPSSSLGTQTYICNVNHKPSNTKVDKKVEPKSC

SEQ ID NO: 8456 - protein, 118 aa, Artificial Sequence; identical to SEQ ID NO: 5634
  Description of Artificial Sequence: Synthetic polypeptide
  VH of XENP019296

SEQ ID NO: 8457 - protein, 5 aa, Artificial Sequence
  Description of Artificial Sequence: Synthetic peptide
  XENP019296 vhCDR1
SYTMH

SEQ ID NO: 8458 - protein, 17 aa, Artificial Sequence
  Description of Artificial Sequence: Synthetic peptide
  XENP019296 vhCDR2
FISYDGNNKYYADSVKG

SEQ ID NO: 8459 - protein, 9 aa, Artificial Sequence
  Description of Artificial Sequence: Synthetic peptide
  XENP019296 vhCDR3
TGWLGPFDY

SEQ ID NO: 8460 - protein, 215 aa, Artificial Sequence; identical to SEQ ID NO: 7600
  Description of Artificial Sequence: Synthetic polypeptide
  XENP019296 [CTLA-4]_H0.86_L0_Fab Light Chain

SEQ ID NO: 8461 - protein, 108 aa, Artificial Sequence; identical to SEQ ID NO: 3741
  Description of Artificial Sequence: Synthetic polypeptide
  VL of XENP019296

SEQ ID NO: 8462 - protein, 12 aa, Artificial Sequence
  Description of Artificial Sequence: Synthetic peptide
  XENP019296 vlCDR1
RASQSVGSSYLA

SEQ ID NO: 8463 - protein, 7 aa, Artificial Sequence
  Description of Artificial Sequence: Synthetic peptide
  XENP019296 vlCDR2
GAFSRAT

SEQ ID NO: 8464 - protein, 9 aa, Artificial Sequence
  Description of Artificial Sequence: Synthetic peptide
  XENP019296 vlCDR3
QQYGSSPWT

SEQ ID NO: 8465 - protein, 221 aa, Artificial Sequence
  Description of Artificial Sequence: Synthetic polypeptide
  XENP019301 [CTLA-4]_H0.87_L0_Fab Heavy Chain
QVQLVESGGGVVQPGRSLRLSCAASGFTFSSYTMHWVRQAPGKGLEWVTFISYDGNNKYYADSVKGRFTISEDNSKNTLYLQMNSLRAEDTAIYYCARTGWLGPFDYWGQGTLVTVSSASTKGPSVFPLAPSSKSTSGGTAALGCLVKDYFPEPVTVSWNSGALTSGVHTFPAVLQSSGLYSLSSVVTVPSSSLGTQTYICNVNHKPSNTKVDKKVEPKSC

SEQ ID NO: 8466 - protein, 118 aa, Artificial Sequence; identical to SEQ ID NO: 5643
  Description of Artificial Sequence: Synthetic polypeptide
  VH of XENP019301

SEQ ID NO: 8467 - protein, 5 aa, Artificial Sequence
  Description of Artificial Sequence: Synthetic peptide
  XENP019301 vhCDR1
SYTMH

SEQ ID NO: 8468 - protein, 17 aa, Artificial Sequence
  Description of Artificial Sequence: Synthetic peptide
  XENP019301 vhCDR2
FISYDGNNKYYADSVKG

SEQ ID NO: 8469 - protein, 9 aa, Artificial Sequence
  Description of Artificial Sequence: Synthetic peptide
  XENP019301 vhCDR3
TGWLGPFDY

SEQ ID NO: 8470 - protein, 215 aa, Artificial Sequence; identical to SEQ ID NO: 7600
  Description of Artificial Sequence: Synthetic polypeptide
  XENP019301 [CTLA-4]_H0.87_L0_Fab Light Chain

SEQ ID NO: 8471 - protein, 108 aa, Artificial Sequence; identical to SEQ ID NO: 3741
  Description of Artificial Sequence: Synthetic polypeptide
  VL of XENP019301

SEQ ID NO: 8472 - protein, 12 aa, Artificial Sequence
  Description of Artificial Sequence: Synthetic peptide
  XENP019301 vlCDR1
RASQSVGSSYLA

SEQ ID NO: 8473 - protein, 7 aa, Artificial Sequence
  Description of Artificial Sequence: Synthetic peptide
  XENP019301 vlCDR2
GAFSRAT

SEQ ID NO: 8474 - protein, 9 aa, Artificial Sequence
  Description of Artificial Sequence: Synthetic peptide
  XENP019301 vlCDR3
QQYGSSPWT

SEQ ID NO: 8475 - protein, 221 aa, Artificial Sequence
  Description of Artificial Sequence: Synthetic polypeptide
  XENP019302 [CTLA-4]_H0.88_L0_Fab Heavy Chain
QVQLVESGGGVVQPGRSLRLSCAASGFTFSSYTMHWVRQAPGKGLEWVTFISYDGNNKYYADSVKGRFTISRENSKNTLYLQMNSLRAEDTAIYYCARTGWLGPFDYWGQGTLVTVSSASTKGPSVFPLAPSSKSTSGGTAALGCLVKDYFPEPVTVSWNSGALTSGVHTFPAVLQSSGLYSLSSVVTVPSSSLGTQTYICNVNHKPSNTKVDKKVEPKSC

SEQ ID NO: 8476 - protein, 118 aa, Artificial Sequence; identical to SEQ ID NO: 5652
  Description of Artificial Sequence: Synthetic polypeptide
  VH of XENP019302

SEQ ID NO: 8477 - protein, 5 aa, Artificial Sequence
  Description of Artificial Sequence: Synthetic peptide
  XENP019302 vhCDR1
SYTMH

SEQ ID NO: 8478 - protein, 17 aa, Artificial Sequence
  Description of Artificial Sequence: Synthetic peptide
  XENP019302 vhCDR2
FISYDGNNKYYADSVKG

SEQ ID NO: 8479 - protein, 9 aa, Artificial Sequence
  Description of Artificial Sequence: Synthetic peptide
  XENP019302 vhCDR3
TGWLGPFDY

SEQ ID NO: 8480 - protein, 215 aa, Artificial Sequence; identical to SEQ ID NO: 7600
  Description of Artificial Sequence: Synthetic polypeptide
  XENP019302 [CTLA-4]_H0.88_L0_Fab Light Chain

SEQ ID NO: 8481 - protein, 108 aa, Artificial Sequence; identical to SEQ ID NO: 3741
  Description of Artificial Sequence: Synthetic polypeptide
  VL of XENP019302

SEQ ID NO: 8482 - protein, 12 aa, Artificial Sequence
  Description of Artificial Sequence: Synthetic peptide
  XENP019302 vlCDR1
RASQSVGSSYLA

SEQ ID NO: 8483 - protein, 7 aa, Artificial Sequence
  Description of Artificial Sequence: Synthetic peptide
  XENP019302 vlCDR2
GAFSRAT

SEQ ID NO: 8484 - protein, 9 aa, Artificial Sequence
  Description of Artificial Sequence: Synthetic peptide
  XENP019302 vlCDR3
QQYGSSPWT

SEQ ID NO: 8485 - protein, 221 aa, Artificial Sequence
  Description of Artificial Sequence: Synthetic polypeptide
  XENP019303 [CTLA-4]_H0.89_L0_Fab Heavy Chain
QVQLVESGGGVVQPGRSLRLSCAASGFTFSSYTMHWVRQAPGKGLEWVTFISYDGNNKYYADSVKGRFTISRDDSKNTLYLQMNSLRAEDTAIYYCARTGWLGPFDYWGQGTLVTVSSASTKGPSVFPLAPSSKSTSGGTAALGCLVKDYFPEPVTVSWNSGALTSGVHTFPAVLQSSGLYSLSSVVTVPSSSLGTQTYICNVNHKPSNTKVDKKVEPKSC

SEQ ID NO: 8486 - protein, 118 aa, Artificial Sequence; identical to SEQ ID NO: 5661
  Description of Artificial Sequence: Synthetic polypeptide
  VH of XENP019303

SEQ ID NO: 8487 - protein, 5 aa, Artificial Sequence
  Description of Artificial Sequence: Synthetic peptide
  XENP019303 vhCDR1
SYTMH

SEQ ID NO: 8488 - protein, 17 aa, Artificial Sequence
  Description of Artificial Sequence: Synthetic peptide
  XENP019303 vhCDR2
FISYDGNNKYYADSVKG

SEQ ID NO: 8489 - protein, 9 aa, Artificial Sequence
  Description of Artificial Sequence: Synthetic peptide
  XENP019303 vhCDR3
TGWLGPFDY

SEQ ID NO: 8490 - protein, 215 aa, Artificial Sequence; identical to SEQ ID NO: 7600
  Description of Artificial Sequence: Synthetic polypeptide
  XENP019303 [CTLA-4]_H0.89_L0_Fab Light Chain

SEQ ID NO: 8491 - protein, 108 aa, Artificial Sequence; identical to SEQ ID NO: 3741
  Description of Artificial Sequence: Synthetic polypeptide
  VL of XENP019303

SEQ ID NO: 8492 - protein, 12 aa, Artificial Sequence
  Description of Artificial Sequence: Synthetic peptide
  XENP019303 vlCDR1
RASQSVGSSYLA

SEQ ID NO: 8493 - protein, 7 aa, Artificial Sequence
  Description of Artificial Sequence: Synthetic peptide
  XENP019303 vlCDR2
GAFSRAT

SEQ ID NO: 8494 - protein, 9 aa, Artificial Sequence
  Description of Artificial Sequence: Synthetic peptide
  XENP019303 vlCDR3
QQYGSSPWT

SEQ ID NO: 8495 - protein, 221 aa, Artificial Sequence
  Description of Artificial Sequence: Synthetic polypeptide
  XENP019304 [CTLA-4]_H0.90_L0_Fab Heavy Chain
QVQLVESGGGVVQPGRSLRLSCAASGFTFSSYTMHWVRQAPGKGLEWVTFISYDGNNKYYADSVKGRFTISRDNAKNTLYLQMNSLRAEDTAIYYCARTGWLGPFDYWGQGTLVTVSSASTKGPSVFPLAPSSKSTSGGTAALGCLVKDYFPEPVTVSWNSGALTSGVHTFPAVLQSSGLYSLSSVVTVPSSSLGTQTYICNVNHKPSNTKVDKKVEPKSC

SEQ ID NO: 8496 - protein, 118 aa, Artificial Sequence; identical to SEQ ID NO: 5670
  Description of Artificial Sequence: Synthetic polypeptide
  VH of XENP019304

SEQ ID NO: 8497 - protein, 5 aa, Artificial Sequence
  Description of Artificial Sequence: Synthetic peptide
  XENP019304 vhCDR1
SYTMH

SEQ ID NO: 8498 - protein, 17 aa, Artificial Sequence
  Description of Artificial Sequence: Synthetic peptide
  XENP019304 vhCDR2
FISYDGNNKYYADSVKG

SEQ ID NO: 8499 - protein, 9 aa, Artificial Sequence
  Description of Artificial Sequence: Synthetic peptide
  XENP019304 vhCDR3
TGWLGPFDY

SEQ ID NO: 8500 - protein, 215 aa, Artificial Sequence; identical to SEQ ID NO: 7600
  Description of Artificial Sequence: Synthetic polypeptide
  XENP019304 [CTLA-4]_H0.90_L0_Fab Light Chain

SEQ ID NO: 8501 - protein, 108 aa, Artificial Sequence; identical to SEQ ID NO: 3741
  Description of Artificial Sequence: Synthetic polypeptide
  VL of XENP019304

SEQ ID NO: 8502 - protein, 12 aa, Artificial Sequence
  Description of Artificial Sequence: Synthetic peptide
  XENP019304 vlCDR1
RASQSVGSSYLA

SEQ ID NO: 8503 - protein, 7 aa, Artificial Sequence
  Description of Artificial Sequence: Synthetic peptide
  XENP019304 vlCDR2
GAFSRAT

SEQ ID NO: 8504 - protein, 9 aa, Artificial Sequence
  Description of Artificial Sequence: Synthetic peptide
  XENP019304 vlCDR3
QQYGSSPWT

SEQ ID NO: 8505 - protein, 221 aa, Artificial Sequence
  Description of Artificial Sequence: Synthetic polypeptide
  XENP019305 [CTLA-4]_H0.91_L0_Fab Heavy Chain
QVQLVESGGGVVQPGRSLRLSCAASGFTFSSYTMHWVRQAPGKGLEWVTFISYDGNNKYYADSVKGRFTISRDNSRNTLYLQMNSLRAEDTAIYYCARTGWLGPFDYWGQGTLVTVSSASTKGPSVFPLAPSSKSTSGGTAALGCLVKDYFPEPVTVSWNSGALTSGVHTFPAVLQSSGLYSLSSVVTVPSSSLGTQTYICNVNHKPSNTKVDKKVEPKSC

SEQ ID NO: 8506 - protein, 118 aa, Artificial Sequence; identical to SEQ ID NO: 5679
  Description of Artificial Sequence: Synthetic polypeptide
  VH of XENP019305

SEQ ID NO: 8507 - protein, 5 aa, Artificial Sequence
  Description of Artificial Sequence: Synthetic peptide
  XENP019305 vhCDR1
SYTMH

SEQ ID NO: 8508 - protein, 17 aa, Artificial Sequence
  Description of Artificial Sequence: Synthetic peptide
  XENP019305 vhCDR2
FISYDGNNKYYADSVKG

SEQ ID NO: 8509 - protein, 9 aa, Artificial Sequence
  Description of Artificial Sequence: Synthetic peptide
  XENP019305 vhCDR3
TGWLGPFDY

SEQ ID NO: 8510 - protein, 215 aa, Artificial Sequence; identical to SEQ ID NO: 7600
  Description of Artificial Sequence: Synthetic polypeptide
  XENP019305 [CTLA-4]_H0.91_L0_Fab Light Chain

SEQ ID NO: 8511 - protein, 108 aa, Artificial Sequence; identical to SEQ ID NO: 3741
  Description of Artificial Sequence: Synthetic polypeptide
  VL of XENP019305

SEQ ID NO: 8512 - protein, 12 aa, Artificial Sequence
  Description of Artificial Sequence: Synthetic peptide
  XENP019305 vlCDR1
RASQSVGSSYLA

SEQ ID NO: 8513 - protein, 7 aa, Artificial Sequence
  Description of Artificial Sequence: Synthetic peptide
  XENP019305 vlCDR2
GAFSRAT

SEQ ID NO: 8514 - protein, 9 aa, Artificial Sequence
  Description of Artificial Sequence: Synthetic peptide
  XENP019305 vlCDR3
QQYGSSPWT

SEQ ID NO: 8515 - protein, 221 aa, Artificial Sequence
  Description of Artificial Sequence: Synthetic polypeptide
  XENP019306 [CTLA-4]_H0.92_L0_Fab Heavy Chain
QVQLVESGGGVVQPGRSLRLSCAASGFTFSSYTMHWVRQAPGKGLEWVTFISYDGNNKYYADSVKGRFTISRDNSKNSLYLQMNSLRAEDTAIYYCARTGWLGPFDYWGQGTLVTVSSASTKGPSVFPLAPSSKSTSGGTAALGCLVKDYFPEPVTVSWNSGALTSGVHTFPAVLQSSGLYSLSSVVTVPSSSLGTQTYICNVNHKPSNTKVDKKVEPKSC

SEQ ID NO: 8516 - protein, 118 aa, Artificial Sequence; identical to SEQ ID NO: 5688
  Description of Artificial Sequence: Synthetic polypeptide
  VH of XENP019306

SEQ ID NO: 8517 - protein, 5 aa, Artificial Sequence
  Description of Artificial Sequence: Synthetic peptide
  XENP019306 vhCDR1
SYTMH

SEQ ID NO: 8518 - protein, 17 aa, Artificial Sequence
  Description of Artificial Sequence: Synthetic peptide
  XENP019306 vhCDR2
FISYDGNNKYYADSVKG

SEQ ID NO: 8519 - protein, 9 aa, Artificial Sequence
  Description of Artificial Sequence: Synthetic peptide
  XENP019306 vhCDR3
TGWLGPFDY

SEQ ID NO: 8520 - protein, 215 aa, Artificial Sequence; identical to SEQ ID NO: 7600
  Description of Artificial Sequence: Synthetic polypeptide
  XENP019306 [CTLA-4]_H0.92_L0_Fab Light Chain

SEQ ID NO: 8521 - protein, 108 aa, Artificial Sequence; identical to SEQ ID NO: 3741
  Description of Artificial Sequence: Synthetic polypeptide
  VL of XENP019306

SEQ ID NO: 8522 - protein, 12 aa, Artificial Sequence
  Description of Artificial Sequence: Synthetic peptide
  XENP019306 vlCDR1
RASQSVGSSYLA

SEQ ID NO: 8523 - protein, 7 aa, Artificial Sequence
  Description of Artificial Sequence: Synthetic peptide
  XENP019306 vlCDR2
GAFSRAT

SEQ ID NO: 8524 - protein, 9 aa, Artificial Sequence
  Description of Artificial Sequence: Synthetic peptide
  XENP019306 vlCDR3
QQYGSSPWT

SEQ ID NO: 8525 - protein, 221 aa, Artificial Sequence
  Description of Artificial Sequence: Synthetic polypeptide
  XENP019307 [CTLA-4]_H0.93_L0_Fab Heavy Chain
QVQLVESGGGVVQPGRSLRLSCAASGFTFSSYTMHWVRQAPGKGLEWVTFISYDGNNKYYADSVKGRFTISRDNSKNQLYLQMNSLRAEDTAIYYCARTGWLGPFDYWGQGTLVTVSSASTKGPSVFPLAPSSKSTSGGTAALGCLVKDYFPEPVTVSWNSGALTSGVHTFPAVLQSSGLYSLSSVVTVPSSSLGTQTYICNVNHKPSNTKVDKKVEPKSC

SEQ ID NO: 8526 - protein, 118 aa, Artificial Sequence; identical to SEQ ID NO: 5697
  Description of Artificial Sequence: Synthetic polypeptide
  VH of XENP019307

SEQ ID NO: 8527 - protein, 5 aa, Artificial Sequence
  Description of Artificial Sequence: Synthetic peptide
  XENP019307 vhCDR1
SYTMH

SEQ ID NO: 8528 - protein, 17 aa, Artificial Sequence
  Description of Artificial Sequence: Synthetic peptide
  XENP019307 vhCDR2
FISYDGNNKYYADSVKG

SEQ ID NO: 8529 - protein, 9 aa, Artificial Sequence
  Description of Artificial Sequence: Synthetic peptide
  XENP019307 vhCDR3
TGWLGPFDY

SEQ ID NO: 8530 - protein, 215 aa, Artificial Sequence; identical to SEQ ID NO: 7600
  Description of Artificial Sequence: Synthetic polypeptide
  XENP019307 [CTLA-4]_H0.93_L0_Fab Light Chain

SEQ ID NO: 8531 - protein, 108 aa, Artificial Sequence; identical to SEQ ID NO: 3741
  Description of Artificial Sequence: Synthetic polypeptide
  VL of XENP019307

SEQ ID NO: 8532 - protein, 12 aa, Artificial Sequence
  Description of Artificial Sequence: Synthetic peptide
  XENP019307 vlCDR1
RASQSVGSSYLA

SEQ ID NO: 8533 - protein, 7 aa, Artificial Sequence
  Description of Artificial Sequence: Synthetic peptide
  XENP019307 vlCDR2
GAFSRAT

SEQ ID NO: 8534 - protein, 9 aa, Artificial Sequence
  Description of Artificial Sequence: Synthetic peptide
  XENP019307 vlCDR3
QQYGSSPWT

SEQ ID NO: 8535 - protein, 221 aa, Artificial Sequence
  Description of Artificial Sequence: Synthetic polypeptide
  XENP019308 [CTLA-4]_H0.94_L0_Fab Heavy Chain
QVQLVESGGGVVQPGRSLRLSCAASGFTFSSYTMHWVRQAPGKGLEWVTFISYDGNNKYYADSVKGRFTISRDNSKNTLYLEMNSLRAEDTAIYYCARTGWLGPFDYWGQGTLVTVSSASTKGPSVFPLAPSSKSTSGGTAALGCLVKDYFPEPVTVSWNSGALTSGVHTFPAVLQSSGLYSLSSVVTVPSSSLGTQTYICNVNHKPSNTKVDKKVEPKSC

SEQ ID NO: 8536 - protein, 118 aa, Artificial Sequence; identical to SEQ ID NO: 5706
  Description of Artificial Sequence: Synthetic polypeptide
  VH of XENP019308

SEQ ID NO: 8537 - protein, 5 aa, Artificial Sequence
  Description of Artificial Sequence: Synthetic peptide
  XENP019308 vhCDR1
SYTMH

SEQ ID NO: 8538 - protein, 17 aa, Artificial Sequence
  Description of Artificial Sequence: Synthetic peptide
  XENP019308 vhCDR2
FISYDGNNKYYADSVKG

SEQ ID NO: 8539 - protein, 9 aa, Artificial Sequence
  Description of Artificial Sequence: Synthetic peptide
  XENP019308 vhCDR3
TGWLGPFDY

SEQ ID NO: 8540 - protein, 215 aa, Artificial Sequence; identical to SEQ ID NO: 7600
  Description of Artificial Sequence: Synthetic polypeptide
  XENP019308 [CTLA-4]_H0.94_L0_Fab Light Chain

SEQ ID NO: 8541 - protein, 108 aa, Artificial Sequence; identical to SEQ ID NO: 3741
  Description of Artificial Sequence: Synthetic polypeptide
  VL of XENP019308

SEQ ID NO: 8542 - protein, 12 aa, Artificial Sequence
  Description of Artificial Sequence: Synthetic peptide
  XENP019308 vlCDR1
RASQSVGSSYLA

SEQ ID NO: 8543 - protein, 7 aa, Artificial Sequence
  Description of Artificial Sequence: Synthetic peptide
  XENP019308 vlCDR2
GAFSRAT

SEQ ID NO: 8544 - protein, 9 aa, Artificial Sequence
  Description of Artificial Sequence: Synthetic peptide
  XENP019308 vlCDR3
QQYGSSPWT

SEQ ID NO: 8545 - protein, 221 aa, Artificial Sequence
  Description of Artificial Sequence: Synthetic polypeptide
  XENP019309 [CTLA-4]_H0.95_L0_Fab Heavy Chain
QVQLVESGGGVVQPGRSLRLSCAASGFTFSSYTMHWVRQAPGKGLEWVTFISYDGNNKYYADSVKGRFTISRDNSKNTLYLQMDSLRAEDTAIYYCARTGWLGPFDYWGQGTLVTVSSASTKGPSVFPLAPSSKSTSGGTAALGCLVKDYFPEPVTVSWNSGALTSGVHTFPAVLQSSGLYSLSSVVTVPSSSLGTQTYICNVNHKPSNTKVDKKVEPKSC

SEQ ID NO: 8546 - protein, 118 aa, Artificial Sequence; identical to SEQ ID NO: 5715
  Description of Artificial Sequence: Synthetic polypeptide
  VH of XENP019309

SEQ ID NO: 8547 - protein, 5 aa, Artificial Sequence
  Description of Artificial Sequence: Synthetic peptide
  XENP019309 vhCDR1
SYTMH

SEQ ID NO: 8548 - protein, 17 aa, Artificial Sequence
  Description of Artificial Sequence: Synthetic peptide
  XENP019309 vhCDR2
FISYDGNNKYYADSVKG

SEQ ID NO: 8549 - protein, 9 aa, Artificial Sequence
  Description of Artificial Sequence: Synthetic peptide
  XENP019309 vhCDR3
TGWLGPFDY

SEQ ID NO: 8550 - protein, 215 aa, Artificial Sequence; identical to SEQ ID NO: 7600
  Description of Artificial Sequence: Synthetic polypeptide
  XENP019309 [CTLA-4]_H0.95_L0_Fab Light Chain

SEQ ID NO: 8551 - protein, 108 aa, Artificial Sequence; identical to SEQ ID NO: 3741
  Description of Artificial Sequence: Synthetic polypeptide
  VL of XENP019309

SEQ ID NO: 8552 - protein, 12 aa, Artificial Sequence
  Description of Artificial Sequence: Synthetic peptide
  XENP019309 vlCDR1
RASQSVGSSYLA

SEQ ID NO: 8553 - protein, 7 aa, Artificial Sequence
  Description of Artificial Sequence: Synthetic peptide
  XENP019309 vlCDR2
GAFSRAT

SEQ ID NO: 8554 - protein, 9 aa, Artificial Sequence
  Description of Artificial Sequence: Synthetic peptide
  XENP019309 vlCDR3
QQYGSSPWT

SEQ ID NO: 8555 - protein, 221 aa, Artificial Sequence
  Description of Artificial Sequence: Synthetic polypeptide
  XENP019310 [CTLA-4]_H0.96_L0_Fab Heavy Chain
QVQLVESGGGVVQPGRSLRLSCAASGFTFSSYTMHWVRQAPGKGLEWVTFISYDGNNKYYADSVKGRFTISRDNSKNTLYLQMNDLRAEDTAIYYCARTGWLGPFDYWGQGTLVTVSSASTKGPSVFPLAPSSKSTSGGTAALGCLVKDYFPEPVTVSWNSGALTSGVHTFPAVLQSSGLYSLSSVVTVPSSSLGTQTYICNVNHKPSNTKVDKKVEPKSC

SEQ ID NO: 8556 - protein, 118 aa, Artificial Sequence; identical to SEQ ID NO: 5724
  Description of Artificial Sequence: Synthetic polypeptide
  VH of XENP019310

SEQ ID NO: 8557 - protein, 5 aa, Artificial Sequence
  Description of Artificial Sequence: Synthetic peptide
  XENP019310 vhCDR1
SYTMH

SEQ ID NO: 8558 - protein, 17 aa, Artificial Sequence
  Description of Artificial Sequence: Synthetic peptide
  XENP019310 vhCDR2
FISYDGNNKYYADSVKG

SEQ ID NO: 8559 - protein, 9 aa, Artificial Sequence
  Description of Artificial Sequence: Synthetic peptide
  XENP019310 vhCDR3
TGWLGPFDY

SEQ ID NO: 8560 - protein, 215 aa, Artificial Sequence; identical to SEQ ID NO: 7600
  Description of Artificial Sequence: Synthetic polypeptide
  XENP019310 [CTLA-4]_H0.96_L0_Fab Light Chain

SEQ ID NO: 8561 - protein, 108 aa, Artificial Sequence; identical to SEQ ID NO: 3741
  Description of Artificial Sequence: Synthetic polypeptide
  VL of XENP019310

SEQ ID NO: 8562 - protein, 12 aa, Artificial Sequence
  Description of Artificial Sequence: Synthetic peptide
  XENP019310 vlCDR1
RASQSVGSSYLA

SEQ ID NO: 8563 - protein, 7 aa, Artificial Sequence
  Description of Artificial Sequence: Synthetic peptide
  XENP019310 vlCDR2
GAFSRAT

SEQ ID NO: 8564 - protein, 9 aa, Artificial Sequence
  Description of Artificial Sequence: Synthetic peptide
  XENP019310 vlCDR3
QQYGSSPWT

SEQ ID NO: 8565 - protein, 221 aa, Artificial Sequence
  Description of Artificial Sequence: Synthetic polypeptide
  XENP019311 [CTLA-4]_H0.97_L0_Fab Heavy Chain
QVQLVESGGGVVQPGRSLRLSCAASGFTFSSYTMHWVRQAPGKGLEWVTFISYDGNNKYYADSVKGRFTISRDNSKNTLYLQMNSLRTEDTAIYYCARTGWLGPFDYWGQGTLVTVSSASTKGPSVFPLAPSSKSTSGGTAALGCLVKDYFPEPVTVSWNSGALTSGVHTFPAVLQSSGLYSLSSVVTVPSSSLGTQTYICNVNHKPSNTKVDKKVEPKSC

SEQ ID NO: 8566 - protein, 118 aa, Artificial Sequence; identical to SEQ ID NO: 5733
  Description of Artificial Sequence: Synthetic polypeptide
  VH of XENP019311

SEQ ID NO: 8567 - protein, 5 aa, Artificial Sequence
  Description of Artificial Sequence: Synthetic peptide
  XENP019311 vhCDR1
SYTMH

SEQ ID NO: 8568 - protein, 17 aa, Artificial Sequence
  Description of Artificial Sequence: Synthetic peptide
  XENP019311 vhCDR2
FISYDGNNKYYADSVKG

SEQ ID NO: 8569 - protein, 9 aa, Artificial Sequence
  Description of Artificial Sequence: Synthetic peptide
  XENP019311 vhCDR3
TGWLGPFDY

SEQ ID NO: 8570 - protein, 215 aa, Artificial Sequence; identical to SEQ ID NO: 7600
  Description of Artificial Sequence: Synthetic polypeptide
  XENP019311 [CTLA-4]_H0.97_L0_Fab Light Chain

SEQ ID NO: 8571 - protein, 108 aa, Artificial Sequence; identical to SEQ ID NO: 3741
  Description of Artificial Sequence: Synthetic polypeptide
  VL of XENP019311

SEQ ID NO: 8572 - protein, 12 aa, Artificial Sequence
  Description of Artificial Sequence: Synthetic peptide
  XENP019311 vlCDR1
RASQSVGSSYLA

SEQ ID NO: 8573 - protein, 7 aa, Artificial Sequence
  Description of Artificial Sequence: Synthetic peptide
  XENP019311 vlCDR2
GAFSRAT

SEQ ID NO: 8574 - protein, 9 aa, Artificial Sequence
  Description of Artificial Sequence: Synthetic peptide
  XENP019311 vlCDR3
QQYGSSPWT

SEQ ID NO: 8575 - protein, 221 aa, Artificial Sequence
  Description of Artificial Sequence: Synthetic polypeptide
  XENP019312 [CTLA-4]_H0.98_L0_Fab Heavy Chain
QVQLVESGGGVVQPGRSLRLSCAASGFTFSSYTMHWVRQAPGKGLEWVTFISYDGNNKYYADSVKGRFTISRDNSKNTLYLQMNSLRAEDTALYYCARTGWLGPFDYWGQGTLVTVSSASTKGPSVFPLAPSSKSTSGGTAALGCLVKDYFPEPVTVSWNSGALTSGVHTFPAVLQSSGLYSLSSVVTVPSSSLGTQTYICNVNHKPSNTKVDKKVEPKSC

SEQ ID NO: 8576 - protein, 118 aa, Artificial Sequence; identical to SEQ ID NO: 5742
  Description of Artificial Sequence: Synthetic polypeptide
  VH of XENP019312

SEQ ID NO: 8577 - protein, 5 aa, Artificial Sequence
  Description of Artificial Sequence: Synthetic peptide
  XENP019312 vhCDR1
SYTMH

SEQ ID NO: 8578 - protein, 17 aa, Artificial Sequence
  Description of Artificial Sequence: Synthetic peptide
  XENP019312 vhCDR2
FISYDGNNKYYADSVKG

SEQ ID NO: 8579 - protein, 9 aa, Artificial Sequence
  Description of Artificial Sequence: Synthetic peptide
  XENP019312 vhCDR3
TGWLGPFDY

SEQ ID NO: 8580 - protein, 215 aa, Artificial Sequence; identical to SEQ ID NO: 7600
  Description of Artificial Sequence: Synthetic polypeptide
  XENP019312 [CTLA-4]_H0.98_L0_Fab Light Chain

SEQ ID NO: 8581 - protein, 108 aa, Artificial Sequence; identical to SEQ ID NO: 3741
  Description of Artificial Sequence: Synthetic polypeptide
  VL of XENP019312

SEQ ID NO: 8582 - protein, 12 aa, Artificial Sequence
  Description of Artificial Sequence: Synthetic peptide
  XENP019312 vlCDR1
RASQSVGSSYLA

SEQ ID NO: 8583 - protein, 7 aa, Artificial Sequence
  Description of Artificial Sequence: Synthetic peptide
  XENP019312 vlCDR2
GAFSRAT

SEQ ID NO: 8584 - protein, 9 aa, Artificial Sequence
  Description of Artificial Sequence: Synthetic peptide
  XENP019312 vlCDR3
QQYGSSPWT

SEQ ID NO: 8585 - protein, 221 aa, Artificial Sequence
  Description of Artificial Sequence: Synthetic polypeptide
  XENP019313 [CTLA-4]_H0.99_L0_Fab Heavy Chain
QVQLVESGGGVVQPGRSLRLSCAASGFTFSSYTMHWVRQAPGKGLEWVTFISYDGNNKYYADSVKGRFTISRDNSKNTLYLQMNSLRAEDTAVYYCARTGWLGPFDYWGQGTLVTVSSASTKGPSVFPLAPSSKSTSGGTAALGCLVKDYFPEPVTVSWNSGALTSGVHTFPAVLQSSGLYSLSSVVTVPSSSLGTQTYICNVNHKPSNTKVDKKVEPKSC

SEQ ID NO: 8586 - protein, 118 aa, Artificial Sequence; identical to SEQ ID NO: 5751
  Description of Artificial Sequence: Synthetic polypeptide
  VH of XENP019313

SEQ ID NO: 8587 - protein, 5 aa, Artificial Sequence
  Description of Artificial Sequence: Synthetic peptide
  XENP019313 vhCDR1
SYTMH

SEQ ID NO: 8588 - protein, 17 aa, Artificial Sequence
  Description of Artificial Sequence: Synthetic peptide
  XENP019313 vhCDR2
FISYDGNNKYYADSVKG

SEQ ID NO: 8589 - protein, 9 aa, Artificial Sequence
  Description of Artificial Sequence: Synthetic peptide
  XENP019313 vhCDR3
TGWLGPFDY

SEQ ID NO: 8590 - protein, 215 aa, Artificial Sequence; identical to SEQ ID NO: 7600
  Description of Artificial Sequence: Synthetic polypeptide
  XENP019313 [CTLA-4]_H0.99_L0_Fab Light Chain

SEQ ID NO: 8591 - protein, 108 aa, Artificial Sequence; identical to SEQ ID NO: 3741
  Description of Artificial Sequence: Synthetic polypeptide
  VL of XENP019313

SEQ ID NO: 8592 - protein, 12 aa, Artificial Sequence
  Description of Artificial Sequence: Synthetic peptide
  XENP019313 vlCDR1
RASQSVGSSYLA

SEQ ID NO: 8593 - protein, 7 aa, Artificial Sequence
  Description of Artificial Sequence: Synthetic peptide
  XENP019313 vlCDR2
GAFSRAT

SEQ ID NO: 8594 - protein, 9 aa, Artificial Sequence
  Description of Artificial Sequence: Synthetic peptide
  XENP019313 vlCDR3
QQYGSSPWT

SEQ ID NO: 8595 - protein, 221 aa, Artificial Sequence
  Description of Artificial Sequence: Synthetic polypeptide
  XENP019314 [CTLA-4]_H0.100_L0_Fab Heavy Chain
QVQLVESGGGVVQPGRSLRLSCAASGFTFSSYTMHWVRQAPGKGLEWVTFISYDGNNKYYADSVKGRFTISRDNSKNTLYLQMNSLRAEDTAIYYCTRTGWLGPFDYWGQGTLVTVSSASTKGPSVFPLAPSSKSTSGGTAALGCLVKDYFPEPVTVSWNSGALTSGVHTFPAVLQSSGLYSLSSVVTVPSSSLGTQTYICNVNHKPSNTKVDKKVEPKSC

SEQ ID NO: 8596 - protein, 118 aa, Artificial Sequence; identical to SEQ ID NO: 5760
  Description of Artificial Sequence: Synthetic polypeptide
  VH of XENP019314

SEQ ID NO: 8597 - protein, 5 aa, Artificial Sequence
  Description of Artificial Sequence: Synthetic peptide
  XENP019314 vhCDR1
SYTMH

SEQ ID NO: 8598 - protein, 17 aa, Artificial Sequence
  Description of Artificial Sequence: Synthetic peptide
  XENP019314 vhCDR2
FISYDGNNKYYADSVKG

SEQ ID NO: 8599 - protein, 9 aa, Artificial Sequence
  Description of Artificial Sequence: Synthetic peptide
  XENP019314 vhCDR3
TGWLGPFDY

SEQ ID NO: 8600 - protein, 215 aa, Artificial Sequence; identical to SEQ ID NO: 7600
  Description of Artificial Sequence: Synthetic polypeptide
  XENP019314 [CTLA-4]_H0.100_L0_Fab Light Chain

SEQ ID NO: 8601 - protein, 108 aa, Artificial Sequence; identical to SEQ ID NO: 3741
  Description of Artificial Sequence: Synthetic polypeptide
  VL of XENP019314

SEQ ID NO: 8602 - protein, 12 aa, Artificial Sequence
  Description of Artificial Sequence: Synthetic peptide
  XENP019314 vlCDR1
RASQSVGSSYLA

SEQ ID NO: 8603 - protein, 7 aa, Artificial Sequence
  Description of Artificial Sequence: Synthetic peptide
  XENP019314 vlCDR2
GAFSRAT

SEQ ID NO: 8604 - protein, 9 aa, Artificial Sequence
  Description of Artificial Sequence: Synthetic peptide
  XENP019314 vlCDR3
QQYGSSPWT

SEQ ID NO: 8605 - protein, 221 aa, Artificial Sequence
  Description of Artificial Sequence: Synthetic polypeptide
  XENP019315 [CTLA-4]_H0.101_L0_Fab Heavy Chain
QVQLVESGGGVVQPGRSLRLSCAASGFTFSSYTMHWVRQAPGKGLEWVTFISYDGNNKYYADSVKGRFTISRDNSKNTLYLQMNSLRAEDTAIYYCAKTGWLGPFDYWGQGTLVTVSSASTKGPSVFPLAPSSKSTSGGTAALGCLVKDYFPEPVTVSWNSGALTSGVHTFPAVLQSSGLYSLSSVVTVPSSSLGTQTYICNVNHKPSNTKVDKKVEPKSC

SEQ ID NO: 8606 - protein, 118 aa, Artificial Sequence; identical to SEQ ID NO: 5769
  Description of Artificial Sequence: Synthetic polypeptide
  VH of XENP019315

SEQ ID NO: 8607 - protein, 5 aa, Artificial Sequence
  Description of Artificial Sequence: Synthetic peptide
  XENP019315 vhCDR1
SYTMH

SEQ ID NO: 8608 - protein, 17 aa, Artificial Sequence
  Description of Artificial Sequence: Synthetic peptide
  XENP019315 vhCDR2
FISYDGNNKYYADSVKG

SEQ ID NO: 8609 - protein, 9 aa, Artificial Sequence
  Description of Artificial Sequence: Synthetic peptide
  XENP019315 vhCDR3
TGWLGPFDY

SEQ ID NO: 8610 - protein, 215 aa, Artificial Sequence; identical to SEQ ID NO: 7600
  Description of Artificial Sequence: Synthetic polypeptide
  XENP019315 [CTLA-4]_H0.101_L0_Fab Light Chain

SEQ ID NO: 8611 - protein, 108 aa, Artificial Sequence; identical to SEQ ID NO: 3741
  Description of Artificial Sequence: Synthetic polypeptide
  VL of XENP019315

SEQ ID NO: 8612 - protein, 12 aa, Artificial Sequence
  Description of Artificial Sequence: Synthetic peptide
  XENP019315 vlCDR1
RASQSVGSSYLA

SEQ ID NO: 8613 - protein, 7 aa, Artificial Sequence
  Description of Artificial Sequence: Synthetic peptide
  XENP019315 vlCDR2
GAFSRAT

SEQ ID NO: 8614 - protein, 9 aa, Artificial Sequence
  Description of Artificial Sequence: Synthetic peptide
  XENP019315 vlCDR3
QQYGSSPWT

SEQ ID NO: 8615 - protein, 221 aa, Artificial Sequence
  Description of Artificial Sequence: Synthetic polypeptide
  XENP019316 [CTLA-4]_H0.102_L0_Fab Heavy Chain
QVQLVESGGGVVQPGRSLRLSCAASGFTFSSYTMHWVRQAPGKGLEWVTFISYDGNNKYYADSVKGRFTISRDNSKNTLYLQMNSLRAEDTAIYYCARAGWLGPFDYWGQGTLVTVSSASTKGPSVFPLAPSSKSTSGGTAALGCLVKDYFPEPVTVSWNSGALTSGVHTFPAVLQSSGLYSLSSVVTVPSSSLGTQTYICNVNHKPSNTKVDKKVEPKSC

SEQ ID NO: 8616 - protein, 118 aa, Artificial Sequence; identical to SEQ ID NO: 5778
  Description of Artificial Sequence: Synthetic polypeptide
  VH of XENP019316

SEQ ID NO: 8617 - protein, 5 aa, Artificial Sequence
  Description of Artificial Sequence: Synthetic peptide
  XENP019316 vhCDR1
SYTMH

SEQ ID NO: 8618 - protein, 17 aa, Artificial Sequence
  Description of Artificial Sequence: Synthetic peptide
  XENP019316 vhCDR2
FISYDGNNKYYADSVKG

SEQ ID NO: 8619 - protein, 9 aa, Artificial Sequence
  Description of Artificial Sequence: Synthetic peptide
  XENP019316 vhCDR3
AGWLGPFDY

SEQ ID NO: 8620 - protein, 215 aa, Artificial Sequence; identical to SEQ ID NO: 7600
  Description of Artificial Sequence: Synthetic polypeptide
  XENP019316 [CTLA-4]_H0.102_L0_Fab Light Chain

SEQ ID NO: 8621 - protein, 108 aa, Artificial Sequence; identical to SEQ ID NO: 3741
  Description of Artificial Sequence: Synthetic polypeptide
  VL of XENP019316

SEQ ID NO: 8622 - protein, 12 aa, Artificial Sequence
  Description of Artificial Sequence: Synthetic peptide
  XENP019316 vlCDR1
RASQSVGSSYLA

SEQ ID NO: 8623 - protein, 7 aa, Artificial Sequence
  Description of Artificial Sequence: Synthetic peptide
  XENP019316 vlCDR2
GAFSRAT

SEQ ID NO: 8624 - protein, 9 aa, Artificial Sequence
  Description of Artificial Sequence: Synthetic peptide
  XENP019316 vlCDR3
QQYGSSPWT

SEQ ID NO: 8625 - protein, 221 aa, Artificial Sequence
  Description of Artificial Sequence: Synthetic polypeptide
  XENP019317 [CTLA-4]_H0.103_L0_Fab Heavy Chain
QVQLVESGGGVVQPGRSLRLSCAASGFTFSSYTMHWVRQAPGKGLEWVTFISYDGNNKYYADSVKGRFTISRDNSKNTLYLQMNSLRAEDTAIYYCARGGWLGPFDYWGQGTLVTVSSASTKGPSVFPLAPSSKSTSGGTAALGCLVKDYFPEPVTVSWNSGALTSGVHTFPAVLQSSGLYSLSSVVTVPSSSLGTQTYICNVNHKPSNTKVDKKVEPKSC

SEQ ID NO: 8626 - protein, 118 aa, Artificial Sequence; identical to SEQ ID NO: 5787
  Description of Artificial Sequence: Synthetic polypeptide
  VH of XENP019317

SEQ ID NO: 8627 - protein, 5 aa, Artificial Sequence
  Description of Artificial Sequence: Synthetic peptide
  XENP019317 vhCDR1
SYTMH

SEQ ID NO: 8628 - protein, 17 aa, Artificial Sequence
  Description of Artificial Sequence: Synthetic peptide
  XENP019317 vhCDR2
FISYDGNNKYYADSVKG

SEQ ID NO: 8629 - protein, 9 aa, Artificial Sequence
  Description of Artificial Sequence: Synthetic peptide
  XENP019317 vhCDR3
GGWLGPFDY

SEQ ID NO: 8630 - protein, 215 aa, Artificial Sequence; identical to SEQ ID NO: 7600
  Description of Artificial Sequence: Synthetic polypeptide
  XENP019317 [CTLA-4]_H0.103_L0_Fab Light Chain

SEQ ID NO: 8631 - protein, 108 aa, Artificial Sequence; identical to SEQ ID NO: 3741
  Description of Artificial Sequence: Synthetic polypeptide
  VL of XENP019317

SEQ ID NO: 8632 - protein, 12 aa, Artificial Sequence
  Description of Artificial Sequence: Synthetic peptide
  XENP019317 vlCDR1
RASQSVGSSYLA

SEQ ID NO: 8633 - protein, 7 aa, Artificial Sequence
  Description of Artificial Sequence: Synthetic peptide
  XENP019317 vlCDR2
GAFSRAT

SEQ ID NO: 8634 - protein, 9 aa, Artificial Sequence
  Description of Artificial Sequence: Synthetic peptide
  XENP019317 vlCDR3
QQYGSSPWT

SEQ ID NO: 8635 - protein, 221 aa, Artificial Sequence
  Description of Artificial Sequence: Synthetic polypeptide
  XENP019318 [CTLA-4]_H0.104_L0_Fab Heavy Chain
QVQLVESGGGVVQPGRSLRLSCAASGFTFSSYTMHWVRQAPGKGLEWVTFISYDGNNKYYADSVKGRFTISRDNSKNTLYLQMNSLRAEDTAIYYCARDGWLGPFDYWGQGTLVTVSSASTKGPSVFPLAPSSKSTSGGTAALGCLVKDYFPEPVTVSWNSGALTSGVHTFPAVLQSSGLYSLSSVVTVPSSSLGTQTYICNVNHKPSNTKVDKKVEPKSC

SEQ ID NO: 8636 - protein, 118 aa, Artificial Sequence; identical to SEQ ID NO: 5796
  Description of Artificial Sequence: Synthetic polypeptide
  VH of XENP019318

SEQ ID NO: 8637 - protein, 5 aa, Artificial Sequence
  Description of Artificial Sequence: Synthetic peptide
  XENP019318 vhCDR1
SYTMH

SEQ ID NO: 8638 - protein, 17 aa, Artificial Sequence
  Description of Artificial Sequence: Synthetic peptide
  XENP019318 vhCDR2
FISYDGNNKYYADSVKG

SEQ ID NO: 8639 - protein, 9 aa, Artificial Sequence
  Description of Artificial Sequence: Synthetic peptide
  XENP019318 vhCDR3
DGWLGPFDY

SEQ ID NO: 8640 - protein, 215 aa, Artificial Sequence; identical to SEQ ID NO: 7600
  Description of Artificial Sequence: Synthetic polypeptide
  XENP019318 [CTLA-4]_H0.104_L0_Fab Light Chain

SEQ ID NO: 8641 - protein, 108 aa, Artificial Sequence; identical to SEQ ID NO: 3741
  Description of Artificial Sequence: Synthetic polypeptide
  VL of XENP019318

SEQ ID NO: 8642 - protein, 12 aa, Artificial Sequence
  Description of Artificial Sequence: Synthetic peptide
  XENP019318 vlCDR1
RASQSVGSSYLA

SEQ ID NO: 8643 - protein, 7 aa, Artificial Sequence
  Description of Artificial Sequence: Synthetic peptide
  XENP019318 vlCDR2
GAFSRAT

SEQ ID NO: 8644 - protein, 9 aa, Artificial Sequence
  Description of Artificial Sequence: Synthetic peptide
  XENP019318 vlCDR3
QQYGSSPWT

SEQ ID NO: 8645 - protein, 221 aa, Artificial Sequence
  Description of Artificial Sequence: Synthetic polypeptide
  XENP019319 [CTLA-4]_H0.105_L0_Fab Heavy Chain
QVQLVESGGGVVQPGRSLRLSCAASGFTFSSYTMHWVRQAPGKGLEWVTFISYDGNNKYYADSVKGRFTISRDNSKNTLYLQMNSLRAEDTAIYYCARSGWLGPFDYWGQGTLVTVSSASTKGPSVFPLAPSSKSTSGGTAALGCLVKDYFPEPVTVSWNSGALTSGVHTFPAVLQSSGLYSLSSVVTVPSSSLGTQTYICNVNHKPSNTKVDKKVEPKSC

SEQ ID NO: 8646 - protein, 118 aa, Artificial Sequence; identical to SEQ ID NO: 5805
  Description of Artificial Sequence: Synthetic polypeptide
  VH of XENP019319

SEQ ID NO: 8647 - protein, 5 aa, Artificial Sequence
  Description of Artificial Sequence: Synthetic peptide
  XENP019319 vhCDR1
SYTMH

SEQ ID NO: 8648 - protein, 17 aa, Artificial Sequence
  Description of Artificial Sequence: Synthetic peptide
  XENP019319 vhCDR2
FISYDGNNKYYADSVKG

SEQ ID NO: 8649 - protein, 9 aa, Artificial Sequence
  Description of Artificial Sequence: Synthetic peptide
  XENP019319 vhCDR3
SGWLGPFDY

SEQ ID NO: 8650 - protein, 215 aa, Artificial Sequence; identical to SEQ ID NO: 7600
  Description of Artificial Sequence: Synthetic polypeptide
  XENP019319 [CTLA-4]_H0.105_L0_Fab Light Chain

SEQ ID NO: 8651 - protein, 108 aa, Artificial Sequence; identical to SEQ ID NO: 3741
  Description of Artificial Sequence: Synthetic polypeptide
  VL of XENP019319

SEQ ID NO: 8652 - protein, 12 aa, Artificial Sequence
  Description of Artificial Sequence: Synthetic peptide
  XENP019319 vlCDR1
RASQSVGSSYLA

SEQ ID NO: 8653 - protein, 7 aa, Artificial Sequence
  Description of Artificial Sequence: Synthetic peptide
  XENP019319 vlCDR2
GAFSRAT

SEQ ID NO: 8654 - protein, 9 aa, Artificial Sequence
  Description of Artificial Sequence: Synthetic peptide
  XENP019319 vlCDR3
QQYGSSPWT

SEQ ID NO: 8655 - protein, 221 aa, Artificial Sequence
  Description of Artificial Sequence: Synthetic polypeptide
  XENP019320 [CTLA-4]_H0.106_L0_Fab Heavy Chain
QVQLVESGGGVVQPGRSLRLSCAASGFTFSSYTMHWVRQAPGKGLEWVTFISYDGNNKYYADSVKGRFTISRDNSKNTLYLQMNSLRAEDTAIYYCARVGWLGPFDYWGQGTLVTVSSASTKGPSVFPLAPSSKSTSGGTAALGCLVKDYFPEPVTVSWNSGALTSGVHTFPAVLQSSGLYSLSSVVTVPSSSLGTQTYICNVNHKPSNTKVDKKVEPKSC

SEQ ID NO: 8656 - protein, 118 aa, Artificial Sequence; identical to SEQ ID NO: 5814
  Description of Artificial Sequence: Synthetic polypeptide
  VH of XENP019320

SEQ ID NO: 8657 - protein, 5 aa, Artificial Sequence
  Description of Artificial Sequence: Synthetic peptide
  XENP019320 vhCDR1
SYTMH

SEQ ID NO: 8658 - protein, 17 aa, Artificial Sequence
  Description of Artificial Sequence: Synthetic peptide
  XENP019320 vhCDR2
FISYDGNNKYYADSVKG

SEQ ID NO: 8659 - protein, 9 aa, Artificial Sequence
  Description of Artificial Sequence: Synthetic peptide
  XENP019320 vhCDR3
VGWLGPFDY

SEQ ID NO: 8660 - protein, 215 aa, Artificial Sequence; identical to SEQ ID NO: 7600
  Description of Artificial Sequence: Synthetic polypeptide
  XENP019320 [CTLA-4]_H0.106_L0_Fab Light Chain

SEQ ID NO: 8661 - protein, 108 aa, Artificial Sequence; identical to SEQ ID NO: 3741
  Description of Artificial Sequence: Synthetic polypeptide
  VL of XENP019320

SEQ ID NO: 8662 - protein, 12 aa, Artificial Sequence
  Description of Artificial Sequence: Synthetic peptide
  XENP019320 vlCDR1
RASQSVGSSYLA

SEQ ID NO: 8663 - protein, 7 aa, Artificial Sequence
  Description of Artificial Sequence: Synthetic peptide
  XENP019320 vlCDR2
GAFSRAT

SEQ ID NO: 8664 - protein, 9 aa, Artificial Sequence
  Description of Artificial Sequence: Synthetic peptide
  XENP019320 vlCDR3
QQYGSSPWT

SEQ ID NO: 8665 - protein, 221 aa, Artificial Sequence
  Description of Artificial Sequence: Synthetic polypeptide
  XENP019321 [CTLA-4]_H0.107_L0_Fab Heavy Chain
QVQLVESGGGVVQPGRSLRLSCAASGFTFSSYTMHWVRQAPGKGLEWVTFISYDGNNKYYADSVKGRFTISRDNSKNTLYLQMNSLRAEDTAIYYCARYGWLGPFDYWGQGTLVTVSSASTKGPSVFPLAPSSKSTSGGTAALGCLVKDYFPEPVTVSWNSGALTSGVHTFPAVLQSSGLYSLSSVVTVPSSSLGTQTYICNVNHKPSNTKVDKKVEPKSC

SEQ ID NO: 8666 - protein, 118 aa, Artificial Sequence; identical to SEQ ID NO: 5823
  Description of Artificial Sequence: Synthetic polypeptide
  VH of XENP019321

SEQ ID NO: 8667 - protein, 5 aa, Artificial Sequence
  Description of Artificial Sequence: Synthetic peptide
  XENP019321 vhCDR1
SYTMH

SEQ ID NO: 8668 - protein, 17 aa, Artificial Sequence
  Description of Artificial Sequence: Synthetic peptide
  XENP019321 vhCDR2
FISYDGNNKYYADSVKG

SEQ ID NO: 8669 - protein, 9 aa, Artificial Sequence
  Description of Artificial Sequence: Synthetic peptide
  XENP019321 vhCDR3
YGWLGPFDY

SEQ ID NO: 8670 - protein, 215 aa, Artificial Sequence; identical to SEQ ID NO: 7600
  Description of Artificial Sequence: Synthetic polypeptide
  XENP019321 [CTLA-4]_H0.107_L0_Fab Light Chain

SEQ ID NO: 8671 - protein, 108 aa, Artificial Sequence; identical to SEQ ID NO: 3741
  Description of Artificial Sequence: Synthetic polypeptide
  VL of XENP019321

SEQ ID NO: 8672 - protein, 12 aa, Artificial Sequence
  Description of Artificial Sequence: Synthetic peptide
  XENP019321 vlCDR1
RASQSVGSSYLA

SEQ ID NO: 8673 - protein, 7 aa, Artificial Sequence
  Description of Artificial Sequence: Synthetic peptide
  XENP019321 vlCDR2
GAFSRAT

SEQ ID NO: 8674 - protein, 9 aa, Artificial Sequence
  Description of Artificial Sequence: Synthetic peptide
  XENP019321 vlCDR3
QQYGSSPWT

SEQ ID NO: 8675 - protein, 221 aa, Artificial Sequence
  Description of Artificial Sequence: Synthetic polypeptide
  XENP019322 [CTLA-4]_H0.108_L0_Fab Heavy Chain
QVQLVESGGGVVQPGRSLRLSCAASGFTFSSYTMHWVRQAPGKGLEWVTFISYDGNNKYYADSVKGRFTISRDNSKNTLYLQMNSLRAEDTAIYYCARTAWLGPFDYWGQGTLVTVSSASTKGPSVFPLAPSSKSTSGGTAALGCLVKDYFPEPVTVSWNSGALTSGVHTFPAVLQSSGLYSLSSVVTVPSSSLGTQTYICNVNHKPSNTKVDKKVEPKSC

SEQ ID NO: 8676 - protein, 118 aa, Artificial Sequence; identical to SEQ ID NO: 5832
  Description of Artificial Sequence: Synthetic polypeptide
  VH of XENP019322

SEQ ID NO: 8677 - protein, 5 aa, Artificial Sequence
  Description of Artificial Sequence: Synthetic peptide
  XENP019322 vhCDR1
SYTMH

SEQ ID NO: 8678 - protein, 17 aa, Artificial Sequence
  Description of Artificial Sequence: Synthetic peptide
  XENP019322 vhCDR2
FISYDGNNKYYADSVKG

SEQ ID NO: 8679 - protein, 9 aa, Artificial Sequence
  Description of Artificial Sequence: Synthetic peptide
  XENP019322 vhCDR3
TAWLGPFDY

SEQ ID NO: 8680 - protein, 215 aa, Artificial Sequence; identical to SEQ ID NO: 7600
  Description of Artificial Sequence: Synthetic polypeptide
  XENP019322 [CTLA-4]_H0.108_L0_Fab Light Chain

SEQ ID NO: 8681 - protein, 108 aa, Artificial Sequence; identical to SEQ ID NO: 3741
  Description of Artificial Sequence: Synthetic polypeptide
  VL of XENP019322

SEQ ID NO: 8682 - protein, 12 aa, Artificial Sequence
  Description of Artificial Sequence: Synthetic peptide
  XENP019322 vlCDR1
RASQSVGSSYLA

SEQ ID NO: 8683 - protein, 7 aa, Artificial Sequence
  Description of Artificial Sequence: Synthetic peptide
  XENP019322 vlCDR2
GAFSRAT

SEQ ID NO: 8684 - protein, 9 aa, Artificial Sequence
  Description of Artificial Sequence: Synthetic peptide
  XENP019322 vlCDR3
QQYGSSPWT

SEQ ID NO: 8685 - protein, 221 aa, Artificial Sequence
  Description of Artificial Sequence: Synthetic polypeptide
  XENP019323 [CTLA-4]_H0.109_L0_Fab Heavy Chain
QVQLVESGGGVVQPGRSLRLSCAASGFTFSSYTMHWVRQAPGKGLEWVTFISYDGNNKYYADSVKGRFTISRDNSKNTLYLQMNSLRAEDTAIYYCARTSWLGPFDYWGQGTLVTVSSASTKGPSVFPLAPSSKSTSGGTAALGCLVKDYFPEPVTVSWNSGALTSGVHTFPAVLQSSGLYSLSSVVTVPSSSLGTQTYICNVNHKPSNTKVDKKVEPKSC

SEQ ID NO: 8686 - protein, 118 aa, Artificial Sequence; identical to SEQ ID NO: 5841
  Description of Artificial Sequence: Synthetic polypeptide
  VH of XENP019323

SEQ ID NO: 8687 - protein, 5 aa, Artificial Sequence
  Description of Artificial Sequence: Synthetic peptide
  XENP019323 vhCDR1
SYTMH

SEQ ID NO: 8688 - protein, 17 aa, Artificial Sequence
  Description of Artificial Sequence: Synthetic peptide
  XENP019323 vhCDR2
FISYDGNNKYYADSVKG

SEQ ID NO: 8689 - protein, 9 aa, Artificial Sequence
  Description of Artificial Sequence: Synthetic peptide
  XENP019323 vhCDR3
TSWLGPFDY

SEQ ID NO: 8690 - protein, 215 aa, Artificial Sequence; identical to SEQ ID NO: 7600
  Description of Artificial Sequence: Synthetic polypeptide
  XENP019323 [CTLA-4]_H0.109_L0_Fab Light Chain

SEQ ID NO: 8691 - protein, 108 aa, Artificial Sequence; identical to SEQ ID NO: 3741
  Description of Artificial Sequence: Synthetic polypeptide
  VL of XENP019323

SEQ ID NO: 8692 - protein, 12 aa, Artificial Sequence
  Description of Artificial Sequence: Synthetic peptide
  XENP019323 vlCDR1
RASQSVGSSYLA

SEQ ID NO: 8693 - protein, 7 aa, Artificial Sequence
  Description of Artificial Sequence: Synthetic peptide
  XENP019323 vlCDR2
GAFSRAT

SEQ ID NO: 8694 - protein, 9 aa, Artificial Sequence
  Description of Artificial Sequence: Synthetic peptide
  XENP019323 vlCDR3
QQYGSSPWT

SEQ ID NO: 8695 - protein, 221 aa, Artificial Sequence
  Description of Artificial Sequence: Synthetic polypeptide
  XENP019324 [CTLA-4]_H0.110_L0_Fab Heavy Chain
QVQLVESGGGVVQPGRSLRLSCAASGFTFSSYTMHWVRQAPGKGLEWVTFISYDGNNKYYADSVKGRFTISRDNSKNTLYLQMNSLRAEDTAIYYCARTTWLGPFDYWGQGTLVTVSSASTKGPSVFPLAPSSKSTSGGTAALGCLVKDYFPEPVTVSWNSGALTSGVHTFPAVLQSSGLYSLSSVVTVPSSSLGTQTYICNVNHKPSNTKVDKKVEPKSC

SEQ ID NO: 8696 - protein, 118 aa, Artificial Sequence; identical to SEQ ID NO: 5850
  Description of Artificial Sequence: Synthetic polypeptide
  VH of XENP019324

SEQ ID NO: 8697 - protein, 5 aa, Artificial Sequence
  Description of Artificial Sequence: Synthetic peptide
  XENP019324 vhCDR1
SYTMH

SEQ ID NO: 8698 - protein, 17 aa, Artificial Sequence
  Description of Artificial Sequence: Synthetic peptide
  XENP019324 vhCDR2
FISYDGNNKYYADSVKG

SEQ ID NO: 8699 - protein, 9 aa, Artificial Sequence
  Description of Artificial Sequence: Synthetic peptide
  XENP019324 vhCDR3
TTWLGPFDY

SEQ ID NO: 8700 - protein, 215 aa, Artificial Sequence; identical to SEQ ID NO: 7600
  Description of Artificial Sequence: Synthetic polypeptide
  XENP019324 [CTLA-4]_H0.110_L0_Fab Light Chain

SEQ ID NO: 8701 - protein, 108 aa, Artificial Sequence; identical to SEQ ID NO: 3741
  Description of Artificial Sequence: Synthetic polypeptide
  VL of XENP019324

SEQ ID NO: 8702 - protein, 12 aa, Artificial Sequence
  Description of Artificial Sequence: Synthetic peptide
  XENP019324 vlCDR1
RASQSVGSSYLA

SEQ ID NO: 8703 - protein, 7 aa, Artificial Sequence
  Description of Artificial Sequence: Synthetic peptide
  XENP019324 vlCDR2
GAFSRAT

SEQ ID NO: 8704 - protein, 9 aa, Artificial Sequence
  Description of Artificial Sequence: Synthetic peptide
  XENP019324 vlCDR3
QQYGSSPWT

SEQ ID NO: 8705 - protein, 221 aa, Artificial Sequence
  Description of Artificial Sequence: Synthetic polypeptide
  XENP019325 [CTLA-4]_H0.111_L0_Fab Heavy Chain
QVQLVESGGGVVQPGRSLRLSCAASGFTFSSYTMHWVRQAPGKGLEWVTFISYDGNNKYYADSVKGRFTISRDNSKNTLYLQMNSLRAEDTAIYYCARTGFLGPFDYWGQGTLVTVSSASTKGPSVFPLAPSSKSTSGGTAALGCLVKDYFPEPVTVSWNSGALTSGVHTFPAVLQSSGLYSLSSVVTVPSSSLGTQTYICNVNHKPSNTKVDKKVEPKSC

SEQ ID NO: 8706 - protein, 118 aa, Artificial Sequence; identical to SEQ ID NO: 5859
  Description of Artificial Sequence: Synthetic polypeptide
  VH of XENP019325

SEQ ID NO: 8707 - protein, 5 aa, Artificial Sequence
  Description of Artificial Sequence: Synthetic peptide
  XENP019325 vhCDR1
SYTMH

SEQ ID NO: 8708 - protein, 17 aa, Artificial Sequence
  Description of Artificial Sequence: Synthetic peptide
  XENP019325 vhCDR2
FISYDGNNKYYADSVKG

SEQ ID NO: 8709 - protein, 9 aa, Artificial Sequence
  Description of Artificial Sequence: Synthetic peptide
  XENP019325 vhCDR3
TGFLGPFDY

SEQ ID NO: 8710 - protein, 215 aa, Artificial Sequence; identical to SEQ ID NO: 7600
  Description of Artificial Sequence: Synthetic polypeptide
  XENP019325 [CTLA-4]_H0.111_L0_Fab Light Chain

SEQ ID NO: 8711 - protein, 108 aa, Artificial Sequence; identical to SEQ ID NO: 3741
  Description of Artificial Sequence: Synthetic polypeptide
  VL of XENP019325

SEQ ID NO: 8712 - protein, 12 aa, Artificial Sequence
  Description of Artificial Sequence: Synthetic peptide
  XENP019325 vlCDR1
RASQSVGSSYLA

SEQ ID NO: 8713 - protein, 7 aa, Artificial Sequence
  Description of Artificial Sequence: Synthetic peptide
  XENP019325 vlCDR2
GAFSRAT

SEQ ID NO: 8714 - protein, 9 aa, Artificial Sequence
  Description of Artificial Sequence: Synthetic peptide
  XENP019325 vlCDR3
QQYGSSPWT

SEQ ID NO: 8715 - protein, 221 aa, Artificial Sequence
  Description of Artificial Sequence: Synthetic polypeptide
  XENP019326 [CTLA-4]_H0.112_L0_Fab Heavy Chain
QVQLVESGGGVVQPGRSLRLSCAASGFTFSSYTMHWVRQAPGKGLEWVTFISYDGNNKYYADSVKGRFTISRDNSKNTLYLQMNSLRAEDTAIYYCARTGGLGPFDYWGQGTLVTVSSASTKGPSVFPLAPSSKSTSGGTAALGCLVKDYFPEPVTVSWNSGALTSGVHTFPAVLQSSGLYSLSSVVTVPSSSLGTQTYICNVNHKPSNTKVDKKVEPKSC

SEQ ID NO: 8716 - protein, 118 aa, Artificial Sequence; identical to SEQ ID NO: 5868
  Description of Artificial Sequence: Synthetic polypeptide
  VH of XENP019326

SEQ ID NO: 8717 - protein, 5 aa, Artificial Sequence
  Description of Artificial Sequence: Synthetic peptide
  XENP019326 vhCDR1
SYTMH

SEQ ID NO: 8718 - protein, 17 aa, Artificial Sequence
  Description of Artificial Sequence: Synthetic peptide
  XENP019326 vhCDR2
FISYDGNNKYYADSVKG

SEQ ID NO: 8719 - protein, 9 aa, Artificial Sequence
  Description of Artificial Sequence: Synthetic peptide
  XENP019326 vhCDR3
TGGLGPFDY

SEQ ID NO: 8720 - protein, 215 aa, Artificial Sequence; identical to SEQ ID NO: 7600
  Description of Artificial Sequence: Synthetic polypeptide
  XENP019326 [CTLA-4]_H0.112_L0_Fab Light Chain

SEQ ID NO: 8721 - protein, 108 aa, Artificial Sequence; identical to SEQ ID NO: 3741
  Description of Artificial Sequence: Synthetic polypeptide
  VL of XENP019326

SEQ ID NO: 8722 - protein, 12 aa, Artificial Sequence
  Description of Artificial Sequence: Synthetic peptide
  XENP019326 vlCDR1
RASQSVGSSYLA

SEQ ID NO: 8723 - protein, 7 aa, Artificial Sequence
  Description of Artificial Sequence: Synthetic peptide
  XENP019326 vlCDR2
GAFSRAT

SEQ ID NO: 8724 - protein, 9 aa, Artificial Sequence
  Description of Artificial Sequence: Synthetic peptide
  XENP019326 vlCDR3
QQYGSSPWT

SEQ ID NO: 8725 - protein, 221 aa, Artificial Sequence
  Description of Artificial Sequence: Synthetic polypeptide
  XENP019327 [CTLA-4]_H0.113_L0_Fab Heavy Chain
QVQLVESGGGVVQPGRSLRLSCAASGFTFSSYTMHWVRQAPGKGLEWVTFISYDGNNKYYADSVKGRFTISRDNSKNTLYLQMNSLRAEDTAIYYCARTGHLGPFDYWGQGTLVTVSSASTKGPSVFPLAPSSKSTSGGTAALGCLVKDYFPEPVTVSWNSGALTSGVHTFPAVLQSSGLYSLSSVVTVPSSSLGTQTYICNVNHKPSNTKVDKKVEPKSC

SEQ ID NO: 8726 - protein, 118 aa, Artificial Sequence; identical to SEQ ID NO: 5877
  Description of Artificial Sequence: Synthetic polypeptide
  VH of XENP019327

SEQ ID NO: 8727 - protein, 5 aa, Artificial Sequence
  Description of Artificial Sequence: Synthetic peptide
  XENP019327 vhCDR1
SYTMH

SEQ ID NO: 8728 - protein, 17 aa, Artificial Sequence
  Description of Artificial Sequence: Synthetic peptide
  XENP019327 vhCDR2
FISYDGNNKYYADSVKG

SEQ ID NO: 8729 - protein, 9 aa, Artificial Sequence
  Description of Artificial Sequence: Synthetic peptide
  XENP019327 vhCDR3
TGHLGPFDY

SEQ ID NO: 8730 - protein, 215 aa, Artificial Sequence; identical to SEQ ID NO: 7600
  Description of Artificial Sequence: Synthetic polypeptide
  XENP019327 [CTLA-4]_H0.113_L0_Fab Light Chain

SEQ ID NO: 8731 - protein, 108 aa, Artificial Sequence; identical to SEQ ID NO: 3741
  Description of Artificial Sequence: Synthetic polypeptide
  VL of XENP019327

SEQ ID NO: 8732 - protein, 12 aa, Artificial Sequence
  Description of Artificial Sequence: Synthetic peptide
  XENP019327 vlCDR1
RASQSVGSSYLA

SEQ ID NO: 8733 - protein, 7 aa, Artificial Sequence
  Description of Artificial Sequence: Synthetic peptide
  XENP019327 vlCDR2
GAFSRAT

SEQ ID NO: 8734 - protein, 9 aa, Artificial Sequence
  Description of Artificial Sequence: Synthetic peptide
  XENP019327 vlCDR3
QQYGSSPWT

SEQ ID NO: 8735 - protein, 221 aa, Artificial Sequence
  Description of Artificial Sequence: Synthetic polypeptide
  XENP019328 [CTLA-4]_H0.114_L0_Fab Heavy Chain
QVQLVESGGGVVQPGRSLRLSCAASGFTFSSYTMHWVRQAPGKGLEWVTFISYDGNNKYYADSVKGRFTISRDNSKNTLYLQMNSLRAEDTAIYYCARTGLLGPFDYWGQGTLVTVSSASTKGPSVFPLAPSSKSTSGGTAALGCLVKDYFPEPVTVSWNSGALTSGVHTFPAVLQSSGLYSLSSVVTVPSSSLGTQTYICNVNHKPSNTKVDKKVEPKSC

SEQ ID NO: 8736 - protein, 118 aa, Artificial Sequence; identical to SEQ ID NO: 5886
  Description of Artificial Sequence: Synthetic polypeptide
  VH of XENP019328

SEQ ID NO: 8737 - protein, 5 aa, Artificial Sequence
  Description of Artificial Sequence: Synthetic peptide
  XENP019328 vhCDR1
SYTMH

SEQ ID NO: 8738 - protein, 17 aa, Artificial Sequence
  Description of Artificial Sequence: Synthetic peptide
  XENP019328 vhCDR2
FISYDGNNKYYADSVKG

SEQ ID NO: 8739 - protein, 9 aa, Artificial Sequence
  Description of Artificial Sequence: Synthetic peptide
  XENP019328 vhCDR3
TGLLGPFDY

SEQ ID NO: 8740 - protein, 215 aa, Artificial Sequence; identical to SEQ ID NO: 7600
  Description of Artificial Sequence: Synthetic polypeptide
  XENP019328 [CTLA-4]_H0.114_L0_Fab Light Chain

SEQ ID NO: 8741 - protein, 108 aa, Artificial Sequence; identical to SEQ ID NO: 3741
  Description of Artificial Sequence: Synthetic polypeptide
  VL of XENP019328

SEQ ID NO: 8742 - protein, 12 aa, Artificial Sequence
  Description of Artificial Sequence: Synthetic peptide
  XENP019328 vlCDR1
RASQSVGSSYLA

SEQ ID NO: 8743 - protein, 7 aa, Artificial Sequence
  Description of Artificial Sequence: Synthetic peptide
  XENP019328 vlCDR2
GAFSRAT

SEQ ID NO: 8744 - protein, 9 aa, Artificial Sequence
  Description of Artificial Sequence: Synthetic peptide
  XENP019328 vlCDR3
QQYGSSPWT

SEQ ID NO: 8745 - protein, 221 aa, Artificial Sequence
  Description of Artificial Sequence: Synthetic polypeptide
  XENP019329 [CTLA-4]_H0.115_L0_Fab Heavy Chain
QVQLVESGGGVVQPGRSLRLSCAASGFTFSSYTMHWVRQAPGKGLEWVTFISYDGNNKYYADSVKGRFTISRDNSKNTLYLQMNSLRAEDTAIYYCARTGYLGPFDYWGQGTLVTVSSASTKGPSVFPLAPSSKSTSGGTAALGCLVKDYFPEPVTVSWNSGALTSGVHTFPAVLQSSGLYSLSSVVTVPSSSLGTQTYICNVNHKPSNTKVDKKVEPKSC

SEQ ID NO: 8746 - protein, 118 aa, Artificial Sequence; identical to SEQ ID NO: 5895
  Description of Artificial Sequence: Synthetic polypeptide
  VH of XENP019329

SEQ ID NO: 8747 - protein, 5 aa, Artificial Sequence
  Description of Artificial Sequence: Synthetic peptide
  XENP019329 vhCDR1
SYTMH

SEQ ID NO: 8748 - protein, 17 aa, Artificial Sequence
  Description of Artificial Sequence: Synthetic peptide
  XENP019329 vhCDR2
FISYDGNNKYYADSVKG

SEQ ID NO: 8749 - protein, 9 aa, Artificial Sequence
  Description of Artificial Sequence: Synthetic peptide
  XENP019329 vhCDR3
TGYLGPFDY

SEQ ID NO: 8750 - protein, 215 aa, Artificial Sequence; identical to SEQ ID NO: 7600
  Description of Artificial Sequence: Synthetic polypeptide
  XENP019329 [CTLA-4]_H0.115_L0_Fab Light Chain

SEQ ID NO: 8751 - protein, 108 aa, Artificial Sequence; identical to SEQ ID NO: 3741
  Description of Artificial Sequence: Synthetic polypeptide
  VL of XENP019329

SEQ ID NO: 8752 - protein, 12 aa, Artificial Sequence
  Description of Artificial Sequence: Synthetic peptide
  XENP019329 vlCDR1
RASQSVGSSYLA

SEQ ID NO: 8753 - protein, 7 aa, Artificial Sequence
  Description of Artificial Sequence: Synthetic peptide
  XENP019329 vlCDR2
GAFSRAT

SEQ ID NO: 8754 - protein, 9 aa, Artificial Sequence
  Description of Artificial Sequence: Synthetic peptide
  XENP019329 vlCDR3
QQYGSSPWT

SEQ ID NO: 8755 - protein, 221 aa, Artificial Sequence
  Description of Artificial Sequence: Synthetic polypeptide
  XENP019330 [CTLA-4]_H0.116_L0_Fab Heavy Chain
QVQLVESGGGVVQPGRSLRLSCAASGFTFSSYTMHWVRQAPGKGLEWVTFISYDGNNKYYADSVKGRFTISRDNSKNTLYLQMNSLRAEDTAIYYCARTGWDGPFDYWGQGTLVTVSSASTKGPSVFPLAPSSKSTSGGTAALGCLVKDYFPEPVTVSWNSGALTSGVHTFPAVLQSSGLYSLSSVVTVPSSSLGTQTYICNVNHKPSNTKVDKKVEPKSC

SEQ ID NO: 8756 - protein, 118 aa, Artificial Sequence; identical to SEQ ID NO: 5904
  Description of Artificial Sequence: Synthetic polypeptide
  VH of XENP019330

SEQ ID NO: 8757 - protein, 5 aa, Artificial Sequence
  Description of Artificial Sequence: Synthetic peptide
  XENP019330 vhCDR1
SYTMH

SEQ ID NO: 8758 - protein, 17 aa, Artificial Sequence
  Description of Artificial Sequence: Synthetic peptide
  XENP019330 vhCDR2
FISYDGNNKYYADSVKG

SEQ ID NO: 8759 - protein, 9 aa, Artificial Sequence
  Description of Artificial Sequence: Synthetic peptide
  XENP019330 vhCDR3
TGWDGPFDY

SEQ ID NO: 8760 - protein, 215 aa, Artificial Sequence; identical to SEQ ID NO: 7600
  Description of Artificial Sequence: Synthetic polypeptide
  XENP019330 [CTLA-4]_H0.116_L0_Fab Light Chain

SEQ ID NO: 8761 - protein, 108 aa, Artificial Sequence; identical to SEQ ID NO: 3741
  Description of Artificial Sequence: Synthetic polypeptide
  VL of XENP019330

SEQ ID NO: 8762 - protein, 12 aa, Artificial Sequence
  Description of Artificial Sequence: Synthetic peptide
  XENP019330 vlCDR1
RASQSVGSSYLA

SEQ ID NO: 8763 - protein, 7 aa, Artificial Sequence
  Description of Artificial Sequence: Synthetic peptide
  XENP019330 vlCDR2
GAFSRAT

SEQ ID NO: 8764 - protein, 9 aa, Artificial Sequence
  Description of Artificial Sequence: Synthetic peptide
  XENP019330 vlCDR3
QQYGSSPWT

SEQ ID NO: 8765 - protein, 221 aa, Artificial Sequence
  Description of Artificial Sequence: Synthetic polypeptide
  XENP019331 [CTLA-4]_H0.117_L0_Fab Heavy Chain
QVQLVESGGGVVQPGRSLRLSCAASGFTFSSYTMHWVRQAPGKGLEWVTFISYDGNNKYYADSVKGRFTISRDNSKNTLYLQMNSLRAEDTAIYYCARTGWIGPFDYWGQGTLVTVSSASTKGPSVFPLAPSSKSTSGGTAALGCLVKDYFPEPVTVSWNSGALTSGVHTFPAVLQSSGLYSLSSVVTVPSSSLGTQTYICNVNHKPSNTKVDKKVEPKSC

SEQ ID NO: 8766 - protein, 118 aa, Artificial Sequence; identical to SEQ ID NO: 5913
  Description of Artificial Sequence: Synthetic polypeptide
  VH of XENP019331

SEQ ID NO: 8767 - protein, 5 aa, Artificial Sequence
  Description of Artificial Sequence: Synthetic peptide
  XENP019331 vhCDR1
SYTMH

SEQ ID NO: 8768 - protein, 17 aa, Artificial Sequence
  Description of Artificial Sequence: Synthetic peptide
  XENP019331 vhCDR2
FISYDGNNKYYADSVKG

SEQ ID NO: 8769 - protein, 9 aa, Artificial Sequence
  Description of Artificial Sequence: Synthetic peptide
  XENP019331 vhCDR3
TGWIGPFDY

SEQ ID NO: 8770 - protein, 215 aa, Artificial Sequence; identical to SEQ ID NO: 7600
  Description of Artificial Sequence: Synthetic polypeptide
  XENP019331 [CTLA-4]_H0.117_L0_Fab Light Chain

SEQ ID NO: 8771 - protein, 108 aa, Artificial Sequence; identical to SEQ ID NO: 3741
  Description of Artificial Sequence: Synthetic polypeptide
  VL of XENP019331

SEQ ID NO: 8772 - protein, 12 aa, Artificial Sequence
  Description of Artificial Sequence: Synthetic peptide
  XENP019331 vlCDR1
RASQSVGSSYLA

SEQ ID NO: 8773 - protein, 7 aa, Artificial Sequence
  Description of Artificial Sequence: Synthetic peptide
  XENP019331 vlCDR2
GAFSRAT

SEQ ID NO: 8774 - protein, 9 aa, Artificial Sequence
  Description of Artificial Sequence: Synthetic peptide
  XENP019331 vlCDR3
QQYGSSPWT

SEQ ID NO: 8775 - protein, 221 aa, Artificial Sequence
  Description of Artificial Sequence: Synthetic polypeptide
  XENP019332 [CTLA-4]_H0.118_L0_Fab Heavy Chain
QVQLVESGGGVVQPGRSLRLSCAASGFTFSSYTMHWVRQAPGKGLEWVTFISYDGNNKYYADSVKGRFTISRDNSKNTLYLQMNSLRAEDTAIYYCARTGWVGPFDYWGQGTLVTVSSASTKGPSVFPLAPSSKSTSGGTAALGCLVKDYFPEPVTVSWNSGALTSGVHTFPAVLQSSGLYSLSSVVTVPSSSLGTQTYICNVNHKPSNTKVDKKVEPKSC

SEQ ID NO: 8776 - protein, 118 aa, Artificial Sequence; identical to SEQ ID NO: 5922
  Description of Artificial Sequence: Synthetic polypeptide
  VH of XENP019332

SEQ ID NO: 8777 - protein, 5 aa, Artificial Sequence
  Description of Artificial Sequence: Synthetic peptide
  XENP019332 vhCDR1
SYTMH

SEQ ID NO: 8778 - protein, 17 aa, Artificial Sequence
  Description of Artificial Sequence: Synthetic peptide
  XENP019332 vhCDR2
FISYDGNNKYYADSVKG

SEQ ID NO: 8779 - protein, 9 aa, Artificial Sequence
  Description of Artificial Sequence: Synthetic peptide
  XENP019332 vhCDR3
TGWVGPFDY

SEQ ID NO: 8780 - protein, 215 aa, Artificial Sequence; identical to SEQ ID NO: 7600
  Description of Artificial Sequence: Synthetic polypeptide
  XENP019332 [CTLA-4]_H0.118_L0_Fab Light Chain

SEQ ID NO: 8781 - protein, 108 aa, Artificial Sequence; identical to SEQ ID NO: 3741
  Description of Artificial Sequence: Synthetic polypeptide
  VL of XENP019332

SEQ ID NO: 8782 - protein, 12 aa, Artificial Sequence
  Description of Artificial Sequence: Synthetic peptide
  XENP019332 vlCDR1
RASQSVGSSYLA

SEQ ID NO: 8783 - protein, 7 aa, Artificial Sequence
  Description of Artificial Sequence: Synthetic peptide
  XENP019332 vlCDR2
GAFSRAT

SEQ ID NO: 8784 - protein, 9 aa, Artificial Sequence
  Description of Artificial Sequence: Synthetic peptide
  XENP019332 vlCDR3
QQYGSSPWT

SEQ ID NO: 8785 - protein, 221 aa, Artificial Sequence
  Description of Artificial Sequence: Synthetic polypeptide
  XENP019333 [CTLA-4]_H0.119_L0_Fab Heavy Chain
QVQLVESGGGVVQPGRSLRLSCAASGFTFSSYTMHWVRQAPGKGLEWVTFISYDGNNKYYADSVKGRFTISRDNSKNTLYLQMNSLRAEDTAIYYCARTGWLAPFDYWGQGTLVTVSSASTKGPSVFPLAPSSKSTSGGTAALGCLVKDYFPEPVTVSWNSGALTSGVHTFPAVLQSSGLYSLSSVVTVPSSSLGTQTYICNVNHKPSNTKVDKKVEPKSC

SEQ ID NO: 8786 - protein, 118 aa, Artificial Sequence; identical to SEQ ID NO: 5931
  Description of Artificial Sequence: Synthetic polypeptide
  VH of XENP019333

SEQ ID NO: 8787 - protein, 5 aa, Artificial Sequence
  Description of Artificial Sequence: Synthetic peptide
  XENP019333 vhCDR1
SYTMH

SEQ ID NO: 8788 - protein, 17 aa, Artificial Sequence
  Description of Artificial Sequence: Synthetic peptide
  XENP019333 vhCDR2
FISYDGNNKYYADSVKG

SEQ ID NO: 8789 - protein, 9 aa, Artificial Sequence
  Description of Artificial Sequence: Synthetic peptide
  XENP019333 vhCDR3
TGWLAPFDY

SEQ ID NO: 8790 - protein, 215 aa, Artificial Sequence; identical to SEQ ID NO: 7600
  Description of Artificial Sequence: Synthetic polypeptide
  XENP019333 [CTLA-4]_H0.119_L0_Fab Light Chain

SEQ ID NO: 8791 - protein, 108 aa, Artificial Sequence; identical to SEQ ID NO: 3741
  Description of Artificial Sequence: Synthetic polypeptide
  VL of XENP019333

SEQ ID NO: 8792 - protein, 12 aa, Artificial Sequence
  Description of Artificial Sequence: Synthetic peptide
  XENP019333 vlCDR1
RASQSVGSSYLA

SEQ ID NO: 8793 - protein, 7 aa, Artificial Sequence
  Description of Artificial Sequence: Synthetic peptide
  XENP019333 vlCDR2
GAFSRAT

SEQ ID NO: 8794 - protein, 9 aa, Artificial Sequence
  Description of Artificial Sequence: Synthetic peptide
  XENP019333 vlCDR3
QQYGSSPWT

SEQ ID NO: 8795 - protein, 221 aa, Artificial Sequence
  Description of Artificial Sequence: Synthetic polypeptide
  XENP019334 [CTLA-4]_H0.120_L0_Fab Heavy Chain
QVQLVESGGGVVQPGRSLRLSCAASGFTFSSYTMHWVRQAPGKGLEWVTFISYDGNNKYYADSVKGRFTISRDNSKNTLYLQMNSLRAEDTAIYYCARTGWLSPFDYWGQGTLVTVSSASTKGPSVFPLAPSSKSTSGGTAALGCLVKDYFPEPVTVSWNSGALTSGVHTFPAVLQSSGLYSLSSVVTVPSSSLGTQTYICNVNHKPSNTKVDKKVEPKSC

SEQ ID NO: 8796 - protein, 118 aa, Artificial Sequence; identical to SEQ ID NO: 5940
  Description of Artificial Sequence: Synthetic polypeptide
  VH of XENP019334

SEQ ID NO: 8797 - protein, 5 aa, Artificial Sequence
  Description of Artificial Sequence: Synthetic peptide
  XENP019334 vhCDR1
SYTMH

SEQ ID NO: 8798 - protein, 17 aa, Artificial Sequence
  Description of Artificial Sequence: Synthetic peptide
  XENP019334 vhCDR2
FISYDGNNKYYADSVKG

SEQ ID NO: 8799 - protein, 9 aa, Artificial Sequence
  Description of Artificial Sequence: Synthetic peptide
  XENP019334 vhCDR3
TGWLSPFDY

SEQ ID NO: 8800 - protein, 215 aa, Artificial Sequence; identical to SEQ ID NO: 7600
  Description of Artificial Sequence: Synthetic polypeptide
  XENP019334 [CTLA-4]_H0.120_L0_Fab Light Chain

SEQ ID NO: 8801 - protein, 108 aa, Artificial Sequence; identical to SEQ ID NO: 3741
  Description of Artificial Sequence: Synthetic polypeptide
  VL of XENP019334

SEQ ID NO: 8802 - protein, 12 aa, Artificial Sequence
  Description of Artificial Sequence: Synthetic peptide
  XENP019334 vlCDR1
RASQSVGSSYLA

SEQ ID NO: 8803 - protein, 7 aa, Artificial Sequence
  Description of Artificial Sequence: Synthetic peptide
  XENP019334 vlCDR2
GAFSRAT

SEQ ID NO: 8804 - protein, 9 aa, Artificial Sequence
  Description of Artificial Sequence: Synthetic peptide
  XENP019334 vlCDR3
QQYGSSPWT

SEQ ID NO: 8805 - protein, 221 aa, Artificial Sequence
  Description of Artificial Sequence: Synthetic polypeptide
  XENP019335 [CTLA-4]_H0.121_L0_Fab Heavy Chain
QVQLVESGGGVVQPGRSLRLSCAASGFTFSSYTMHWVRQAPGKGLEWVTFISYDGNNKYYADSVKGRFTISRDNSKNTLYLQMNSLRAEDTAIYYCARTGWLTPFDYWGQGTLVTVSSASTKGPSVFPLAPSSKSTSGGTAALGCLVKDYFPEPVTVSWNSGALTSGVHTFPAVLQSSGLYSLSSVVTVPSSSLGTQTYICNVNHKPSNTKVDKKVEPKSC

SEQ ID NO: 8806 - protein, 118 aa, Artificial Sequence; identical to SEQ ID NO: 5949
  Description of Artificial Sequence: Synthetic polypeptide
  VH of XENP019335

SEQ ID NO: 8807 - protein, 5 aa, Artificial Sequence
  Description of Artificial Sequence: Synthetic peptide
  XENP019335 vhCDR1
SYTMH

SEQ ID NO: 8808 - protein, 17 aa, Artificial Sequence
  Description of Artificial Sequence: Synthetic peptide
  XENP019335 vhCDR2
FISYDGNNKYYADSVKG

SEQ ID NO: 8809 - protein, 9 aa, Artificial Sequence
  Description of Artificial Sequence: Synthetic peptide
  XENP019335 vhCDR3
TGWLTPFDY

SEQ ID NO: 8810 - protein, 215 aa, Artificial Sequence; identical to SEQ ID NO: 7600
  Description of Artificial Sequence: Synthetic polypeptide
  XENP019335 [CTLA-4]_H0.121_L0_Fab Light Chain

SEQ ID NO: 8811 - protein, 108 aa, Artificial Sequence; identical to SEQ ID NO: 3741
  Description of Artificial Sequence: Synthetic polypeptide
  VL of XENP019335

SEQ ID NO: 8812 - protein, 12 aa, Artificial Sequence
  Description of Artificial Sequence: Synthetic peptide
  XENP019335 vlCDR1
RASQSVGSSYLA

SEQ ID NO: 8813 - protein, 7 aa, Artificial Sequence
  Description of Artificial Sequence: Synthetic peptide
  XENP019335 vlCDR2
GAFSRAT

SEQ ID NO: 8814 - protein, 9 aa, Artificial Sequence
  Description of Artificial Sequence: Synthetic peptide
  XENP019335 vlCDR3
QQYGSSPWT

SEQ ID NO: 8815 - protein, 221 aa, Artificial Sequence
  Description of Artificial Sequence: Synthetic polypeptide
  XENP019336 [CTLA-4]_H0.122_L0_Fab Heavy Chain
QVQLVESGGGVVQPGRSLRLSCAASGFTFSSYTMHWVRQAPGKGLEWVTFISYDGNNKYYADSVKGRFTISRDNSKNTLYLQMNSLRAEDTAIYYCARTGWLGPLDYWGQGTLVTVSSASTKGPSVFPLAPSSKSTSGGTAALGCLVKDYFPEPVTVSWNSGALTSGVHTFPAVLQSSGLYSLSSVVTVPSSSLGTQTYICNVNHKPSNTKVDKKVEPKSC

SEQ ID NO: 8816 - protein, 118 aa, Artificial Sequence; identical to SEQ ID NO: 5958
  Description of Artificial Sequence: Synthetic polypeptide
  VH of XENP019336

SEQ ID NO: 8817 - protein, 5 aa, Artificial Sequence
  Description of Artificial Sequence: Synthetic peptide
  XENP019336 vhCDR1
SYTMH

SEQ ID NO: 8818 - protein, 17 aa, Artificial Sequence
  Description of Artificial Sequence: Synthetic peptide
  XENP019336 vhCDR2
FISYDGNNKYYADSVKG

SEQ ID NO: 8819 - protein, 9 aa, Artificial Sequence
  Description of Artificial Sequence: Synthetic peptide
  XENP019336 vhCDR3
TGWLGPLDY

SEQ ID NO: 8820 - protein, 215 aa, Artificial Sequence; identical to SEQ ID NO: 7600
  Description of Artificial Sequence: Synthetic polypeptide
  XENP019336 [CTLA-4]_H0.122_L0_Fab Light Chain

SEQ ID NO: 8821 - protein, 108 aa, Artificial Sequence; identical to SEQ ID NO: 3741
  Description of Artificial Sequence: Synthetic polypeptide
  VL of XENP019336

SEQ ID NO: 8822 - protein, 12 aa, Artificial Sequence
  Description of Artificial Sequence: Synthetic peptide
  XENP019336 vlCDR1
RASQSVGSSYLA

SEQ ID NO: 8823 - protein, 7 aa, Artificial Sequence
  Description of Artificial Sequence: Synthetic peptide
  XENP019336 vlCDR2
GAFSRAT

SEQ ID NO: 8824 - protein, 9 aa, Artificial Sequence
  Description of Artificial Sequence: Synthetic peptide
  XENP019336 vlCDR3
QQYGSSPWT

SEQ ID NO: 8825 - protein, 221 aa, Artificial Sequence
  Description of Artificial Sequence: Synthetic polypeptide
  XENP019337 [CTLA-4]_H0.123_L0_Fab Heavy Chain
QVQLVESGGGVVQPGRSLRLSCAASGFTFSSYTMHWVRQAPGKGLEWVTFISYDGNNKYYADSVKGRFTISRDNSKNTLYLQMNSLRAEDTAIYYCARTGWLGPMDYWGQGTLVTVSSASTKGPSVFPLAPSSKSTSGGTAALGCLVKDYFPEPVTVSWNSGALTSGVHTFPAVLQSSGLYSLSSVVTVPSSSLGTQTYICNVNHKPSNTKVDKKVEPKSC

SEQ ID NO: 8826 - protein, 118 aa, Artificial Sequence; identical to SEQ ID NO: 5967
  Description of Artificial Sequence: Synthetic polypeptide
  VH of XENP019337

SEQ ID NO: 8827 - protein, 5 aa, Artificial Sequence
  Description of Artificial Sequence: Synthetic peptide
  XENP019337 vhCDR1
SYTMH

SEQ ID NO: 8828 - protein, 17 aa, Artificial Sequence
  Description of Artificial Sequence: Synthetic peptide
  XENP019337 vhCDR2
FISYDGNNKYYADSVKG

SEQ ID NO: 8829 - protein, 9 aa, Artificial Sequence
  Description of Artificial Sequence: Synthetic peptide
  XENP019337 vhCDR3
TGWLGPMDY

SEQ ID NO: 8830 - protein, 215 aa, Artificial Sequence; identical to SEQ ID NO: 7600
  Description of Artificial Sequence: Synthetic polypeptide
  XENP019337 [CTLA-4]_H0.123_L0_Fab Light Chain

SEQ ID NO: 8831 - protein, 108 aa, Artificial Sequence; identical to SEQ ID NO: 3741
  Description of Artificial Sequence: Synthetic polypeptide
  VL of XENP019337

SEQ ID NO: 8832 - protein, 12 aa, Artificial Sequence
  Description of Artificial Sequence: Synthetic peptide
  XENP019337 vlCDR1
RASQSVGSSYLA

SEQ ID NO: 8833 - protein, 7 aa, Artificial Sequence
  Description of Artificial Sequence: Synthetic peptide
  XENP019337 vlCDR2
GAFSRAT

SEQ ID NO: 8834 - protein, 9 aa, Artificial Sequence
  Description of Artificial Sequence: Synthetic peptide
  XENP019337 vlCDR3
QQYGSSPWT

SEQ ID NO: 8835 - protein, 221 aa, Artificial Sequence
  Description of Artificial Sequence: Synthetic polypeptide
  XENP019338 [CTLA-4]_H0.124_L0_Fab Heavy Chain
QVQLVESGGGVVQPGRSLRLSCAASGFTFSSYTMHWVRQAPGKGLEWVTFISYDGNNKYYADSVKGRFTISRDNSKNTLYLQMNSLRAEDTAIYYCARTGWLGPFAYWGQGTLVTVSSASTKGPSVFPLAPSSKSTSGGTAALGCLVKDYFPEPVTVSWNSGALTSGVHTFPAVLQSSGLYSLSSVVTVPSSSLGTQTYICNVNHKPSNTKVDKKVEPKSC

SEQ ID NO: 8836 - protein, 118 aa, Artificial Sequence; identical to SEQ ID NO: 5976
  Description of Artificial Sequence: Synthetic polypeptide
  VH of XENP019338

SEQ ID NO: 8837 - protein, 5 aa, Artificial Sequence
  Description of Artificial Sequence: Synthetic peptide
  XENP019338 vhCDR1
SYTMH

SEQ ID NO: 8838 - protein, 17 aa, Artificial Sequence
  Description of Artificial Sequence: Synthetic peptide
  XENP019338 vhCDR2
FISYDGNNKYYADSVKG

SEQ ID NO: 8839 - protein, 9 aa, Artificial Sequence
  Description of Artificial Sequence: Synthetic peptide
  XENP019338 vhCDR3
TGWLGPFAY

SEQ ID NO: 8840 - protein, 215 aa, Artificial Sequence; identical to SEQ ID NO: 7600
  Description of Artificial Sequence: Synthetic polypeptide
  XENP019338 [CTLA-4]_H0.124_L0_Fab Light Chain

SEQ ID NO: 8841 - protein, 108 aa, Artificial Sequence; identical to SEQ ID NO: 3741
  Description of Artificial Sequence: Synthetic polypeptide
  VL of XENP019338

SEQ ID NO: 8842 - protein, 12 aa, Artificial Sequence
  Description of Artificial Sequence: Synthetic peptide
  XENP019338 vlCDR1
RASQSVGSSYLA

SEQ ID NO: 8843 - protein, 7 aa, Artificial Sequence
  Description of Artificial Sequence: Synthetic peptide
  XENP019338 vlCDR2
GAFSRAT

SEQ ID NO: 8844 - protein, 9 aa, Artificial Sequence
  Description of Artificial Sequence: Synthetic peptide
  XENP019338 vlCDR3
QQYGSSPWT

SEQ ID NO: 8845 - protein, 221 aa, Artificial Sequence
  Description of Artificial Sequence: Synthetic polypeptide
  XENP019339 [CTLA-4]_H0.125_L0_Fab Heavy Chain
QVQLVESGGGVVQPGRSLRLSCAASGFTFSSYTMHWVRQAPGKGLEWVTFISYDGNNKYYADSVKGRFTISRDNSKNTLYLQMNSLRAEDTAIYYCARTGWLGPFEYWGQGTLVTVSSASTKGPSVFPLAPSSKSTSGGTAALGCLVKDYFPEPVTVSWNSGALTSGVHTFPAVLQSSGLYSLSSVVTVPSSSLGTQTYICNVNHKPSNTKVDKKVEPKSC

SEQ ID NO: 8846 - protein, 118 aa, Artificial Sequence; identical to SEQ ID NO: 5985
  Description of Artificial Sequence: Synthetic polypeptide
  VH of XENP019339

SEQ ID NO: 8847 - protein, 5 aa, Artificial Sequence
  Description of Artificial Sequence: Synthetic peptide
  XENP019339 vhCDR1
SYTMH

SEQ ID NO: 8848 - protein, 17 aa, Artificial Sequence
  Description of Artificial Sequence: Synthetic peptide
  XENP019339 vhCDR2
FISYDGNNKYYADSVKG

SEQ ID NO: 8849 - protein, 9 aa, Artificial Sequence
  Description of Artificial Sequence: Synthetic peptide
  XENP019339 vhCDR3
TGWLGPFEY

SEQ ID NO: 8850 - protein, 215 aa, Artificial Sequence; identical to SEQ ID NO: 7600
  Description of Artificial Sequence: Synthetic polypeptide
  XENP019339 [CTLA-4]_H0.125_L0_Fab Light Chain

SEQ ID NO: 8851 - protein, 108 aa, Artificial Sequence; identical to SEQ ID NO: 3741
  Description of Artificial Sequence: Synthetic polypeptide
  VL of XENP019339

SEQ ID NO: 8852 - protein, 12 aa, Artificial Sequence
  Description of Artificial Sequence: Synthetic peptide
  XENP019339 vlCDR1
RASQSVGSSYLA

SEQ ID NO: 8853 - protein, 7 aa, Artificial Sequence
  Description of Artificial Sequence: Synthetic peptide
  XENP019339 vlCDR2
GAFSRAT

SEQ ID NO: 8854 - protein, 9 aa, Artificial Sequence
  Description of Artificial Sequence: Synthetic peptide
  XENP019339 vlCDR3
QQYGSSPWT

SEQ ID NO: 8855 - protein, 221 aa, Artificial Sequence
  Description of Artificial Sequence: Synthetic polypeptide
  XENP019340 [CTLA-4]_H0.126_L0_Fab Heavy Chain
QVQLVESGGGVVQPGRSLRLSCAASGFTFSSYTMHWVRQAPGKGLEWVTFISYDGNNKYYADSVKGRFTISRDNSKNTLYLQMNSLRAEDTAIYYCARTGWLGPFHYWGQGTLVTVSSASTKGPSVFPLAPSSKSTSGGTAALGCLVKDYFPEPVTVSWNSGALTSGVHTFPAVLQSSGLYSLSSVVTVPSSSLGTQTYICNVNHKPSNTKVDKKVEPKSC

SEQ ID NO: 8856 - protein, 118 aa, Artificial Sequence; identical to SEQ ID NO: 5994
  Description of Artificial Sequence: Synthetic polypeptide
  VH of XENP019340

SEQ ID NO: 8857 - protein, 5 aa, Artificial Sequence
  Description of Artificial Sequence: Synthetic peptide
  XENP019340 vhCDR1
SYTMH

SEQ ID NO: 8858 - protein, 17 aa, Artificial Sequence
  Description of Artificial Sequence: Synthetic peptide
  XENP019340 vhCDR2
FISYDGNNKYYADSVKG

SEQ ID NO: 8859 - protein, 9 aa, Artificial Sequence
  Description of Artificial Sequence: Synthetic peptide
  XENP019340 vhCDR3
TGWLGPFHY

SEQ ID NO: 8860 - protein, 215 aa, Artificial Sequence; identical to SEQ ID NO: 7600
  Description of Artificial Sequence: Synthetic polypeptide
  XENP019340 [CTLA-4]_H0.126_L0_Fab Light Chain

SEQ ID NO: 8861 - protein, 108 aa, Artificial Sequence; identical to SEQ ID NO: 3741
  Description of Artificial Sequence: Synthetic polypeptide
  VL of XENP019340

SEQ ID NO: 8862 - protein, 12 aa, Artificial Sequence
  Description of Artificial Sequence: Synthetic peptide
  XENP019340 vlCDR1
RASQSVGSSYLA

SEQ ID NO: 8863 - protein, 7 aa, Artificial Sequence
  Description of Artificial Sequence: Synthetic peptide
  XENP019340 vlCDR2
GAFSRAT

SEQ ID NO: 8864 - protein, 9 aa, Artificial Sequence
  Description of Artificial Sequence: Synthetic peptide
  XENP019340 vlCDR3
QQYGSSPWT

SEQ ID NO: 8865 - protein, 221 aa, Artificial Sequence
  Description of Artificial Sequence: Synthetic polypeptide
  XENP019341 [CTLA-4]_H0.127_L0_Fab Heavy Chain
QVQLVESGGGVVQPGRSLRLSCAASGFTFSSYTMHWVRQAPGKGLEWVTFISYDGNNKYYADSVKGRFTISRDNSKNTLYLQMNSLRAEDTAIYYCARTGWLGPFNYWGQGTLVTVSSASTKGPSVFPLAPSSKSTSGGTAALGCLVKDYFPEPVTVSWNSGALTSGVHTFPAVLQSSGLYSLSSVVTVPSSSLGTQTYICNVNHKPSNTKVDKKVEPKSC

SEQ ID NO: 8866 - protein, 118 aa, Artificial Sequence; identical to SEQ ID NO: 6003
  Description of Artificial Sequence: Synthetic polypeptide
  VH of XENP019341

SEQ ID NO: 8867 - protein, 5 aa, Artificial Sequence
  Description of Artificial Sequence: Synthetic peptide
  XENP019341 vhCDR1
SYTMH

SEQ ID NO: 8868 - protein, 17 aa, Artificial Sequence
  Description of Artificial Sequence: Synthetic peptide
  XENP019341 vhCDR2
FISYDGNNKYYADSVKG

SEQ ID NO: 8869 - protein, 9 aa, Artificial Sequence
  Description of Artificial Sequence: Synthetic peptide
  XENP019341 vhCDR3
TGWLGPFNY

SEQ ID NO: 8870 - protein, 215 aa, Artificial Sequence; identical to SEQ ID NO: 7600
  Description of Artificial Sequence: Synthetic polypeptide
  XENP019341 [CTLA-4]_H0.127_L0_Fab Light Chain

SEQ ID NO: 8871 - protein, 108 aa, Artificial Sequence; identical to SEQ ID NO: 3741
  Description of Artificial Sequence: Synthetic polypeptide
  VL of XENP019341

SEQ ID NO: 8872 - protein, 12 aa, Artificial Sequence
  Description of Artificial Sequence: Synthetic peptide
  XENP019341 vlCDR1
RASQSVGSSYLA

SEQ ID NO: 8873 - protein, 7 aa, Artificial Sequence
  Description of Artificial Sequence: Synthetic peptide
  XENP019341 vlCDR2
GAFSRAT

SEQ ID NO: 8874 - protein, 9 aa, Artificial Sequence
  Description of Artificial Sequence: Synthetic peptide
  XENP019341 vlCDR3
QQYGSSPWT

SEQ ID NO: 8875 - protein, 221 aa, Artificial Sequence
  Description of Artificial Sequence: Synthetic polypeptide
  XENP019342 [CTLA-4]_H0.128_L0_Fab Heavy Chain
QVQLVESGGGVVQPGRSLRLSCAASGFTFSSYTMHWVRQAPGKGLEWVTFISYDGNNKYYADSVKGRFTISRDNSKNTLYLQMNSLRAEDTAIYYCARTGWLGPFSYWGQGTLVTVSSASTKGPSVFPLAPSSKSTSGGTAALGCLVKDYFPEPVTVSWNSGALTSGVHTFPAVLQSSGLYSLSSVVTVPSSSLGTQTYICNVNHKPSNTKVDKKVEPKSC

SEQ ID NO: 8876 - protein, 118 aa, Artificial Sequence; identical to SEQ ID NO: 6012
  Description of Artificial Sequence: Synthetic polypeptide
  VH of XENP019342

SEQ ID NO: 8877 - protein, 5 aa, Artificial Sequence
  Description of Artificial Sequence: Synthetic peptide
  XENP019342 vhCDR1
SYTMH

SEQ ID NO: 8878 - protein, 17 aa, Artificial Sequence
  Description of Artificial Sequence: Synthetic peptide
  XENP019342 vhCDR2
FISYDGNNKYYADSVKG

SEQ ID NO: 8879 - protein, 9 aa, Artificial Sequence
  Description of Artificial Sequence: Synthetic peptide
  XENP019342 vhCDR3
TGWLGPFSY

SEQ ID NO: 8880 - protein, 215 aa, Artificial Sequence; identical to SEQ ID NO: 7600
  Description of Artificial Sequence: Synthetic polypeptide
  XENP019342 [CTLA-4]_H0.128_L0_Fab Light Chain

SEQ ID NO: 8881 - protein, 108 aa, Artificial Sequence; identical to SEQ ID NO: 3741
  Description of Artificial Sequence: Synthetic polypeptide
  VL of XENP019342

SEQ ID NO: 8882 - protein, 12 aa, Artificial Sequence
  Description of Artificial Sequence: Synthetic peptide
  XENP019342 vlCDR1
RASQSVGSSYLA

SEQ ID NO: 8883 - protein, 7 aa, Artificial Sequence
  Description of Artificial Sequence: Synthetic peptide
  XENP019342 vlCDR2
GAFSRAT

SEQ ID NO: 8884 - protein, 9 aa, Artificial Sequence
  Description of Artificial Sequence: Synthetic peptide
  XENP019342 vlCDR3
QQYGSSPWT

SEQ ID NO: 8885 - protein, 221 aa, Artificial Sequence
  Description of Artificial Sequence: Synthetic polypeptide
  XENP019343 [CTLA-4]_H0.129_L0_Fab Heavy Chain
QVQLVESGGGVVQPGRSLRLSCAASGFTFSSYTMHWVRQAPGKGLEWVTFISYDGNNKYYADSVKGRFTISRDNSKNTLYLQMNSLRAEDTAIYYCARTGWLGPFQYWGQGTLVTVSSASTKGPSVFPLAPSSKSTSGGTAALGCLVKDYFPEPVTVSWNSGALTSGVHTFPAVLQSSGLYSLSSVVTVPSSSLGTQTYICNVNHKPSNTKVDKKVEPKSC

SEQ ID NO: 8886 - protein, 118 aa, Artificial Sequence; identical to SEQ ID NO: 6021
  Description of Artificial Sequence: Synthetic polypeptide
  VH of XENP019343

SEQ ID NO: 8887 - protein, 5 aa, Artificial Sequence
  Description of Artificial Sequence: Synthetic peptide
  XENP019343 vhCDR1
SYTMH

SEQ ID NO: 8888 - protein, 17 aa, Artificial Sequence
  Description of Artificial Sequence: Synthetic peptide
  XENP019343 vhCDR2
FISYDGNNKYYADSVKG

SEQ ID NO: 8889 - protein, 9 aa, Artificial Sequence
  Description of Artificial Sequence: Synthetic peptide
  XENP019343 vhCDR3
TGWLGPFQY

SEQ ID NO: 8890 - protein, 215 aa, Artificial Sequence; identical to SEQ ID NO: 7600
  Description of Artificial Sequence: Synthetic polypeptide
  XENP019343 [CTLA-4]_H0.129_L0_Fab Light Chain

SEQ ID NO: 8891 - protein, 108 aa, Artificial Sequence; identical to SEQ ID NO: 3741
  Description of Artificial Sequence: Synthetic polypeptide
  VL of XENP019343

SEQ ID NO: 8892 - protein, 12 aa, Artificial Sequence
  Description of Artificial Sequence: Synthetic peptide
  XENP019343 vlCDR1
RASQSVGSSYLA

SEQ ID NO: 8893 - protein, 7 aa, Artificial Sequence
  Description of Artificial Sequence: Synthetic peptide
  XENP019343 vlCDR2
GAFSRAT

SEQ ID NO: 8894 - protein, 9 aa, Artificial Sequence
  Description of Artificial Sequence: Synthetic peptide
  XENP019343 vlCDR3
QQYGSSPWT

SEQ ID NO: 8895 - protein, 221 aa, Artificial Sequence
  Description of Artificial Sequence: Synthetic polypeptide
  XENP019344 [CTLA-4]_H0.130_L0_Fab Heavy Chain
QVQLVESGGGVVQPGRSLRLSCAASGFTFSSYTMHWVRQAPGKGLEWVTFISYDGNNKYYADSVKGRFTISRDNSKNTLYLQMNSLRAEDTAIYYCARTGWLGPFDHWGQGTLVTVSSASTKGPSVFPLAPSSKSTSGGTAALGCLVKDYFPEPVTVSWNSGALTSGVHTFPAVLQSSGLYSLSSVVTVPSSSLGTQTYICNVNHKPSNTKVDKKVEPKSC

SEQ ID NO: 8896 - protein, 118 aa, Artificial Sequence; identical to SEQ ID NO: 6030
  Description of Artificial Sequence: Synthetic polypeptide
  VH of XENP019344

SEQ ID NO: 8897 - protein, 5 aa, Artificial Sequence
  Description of Artificial Sequence: Synthetic peptide
  XENP019344 vhCDR1
SYTMH

SEQ ID NO: 8898 - protein, 17 aa, Artificial Sequence
  Description of Artificial Sequence: Synthetic peptide
  XENP019344 vhCDR2
FISYDGNNKYYADSVKG

SEQ ID NO: 8899 - protein, 9 aa, Artificial Sequence
  Description of Artificial Sequence: Synthetic peptide
  XENP019344 vhCDR3
TGWLGPFDH

SEQ ID NO: 8900 - protein, 215 aa, Artificial Sequence; identical to SEQ ID NO: 7600
  Description of Artificial Sequence: Synthetic polypeptide
  XENP019344 [CTLA-4]_H0.130_L0_Fab Light Chain

SEQ ID NO: 8901 - protein, 108 aa, Artificial Sequence; identical to SEQ ID NO: 3741
  Description of Artificial Sequence: Synthetic polypeptide
  VL of XENP019344

SEQ ID NO: 8902 - protein, 12 aa, Artificial Sequence
  Description of Artificial Sequence: Synthetic peptide
  XENP019344 vlCDR1
RASQSVGSSYLA

SEQ ID NO: 8903 - protein, 7 aa, Artificial Sequence
  Description of Artificial Sequence: Synthetic peptide
  XENP019344 vlCDR2
GAFSRAT

SEQ ID NO: 8904 - protein, 9 aa, Artificial Sequence
  Description of Artificial Sequence: Synthetic peptide
  XENP019344 vlCDR3
QQYGSSPWT

SEQ ID NO: 8905 - protein, 221 aa, Artificial Sequence
  Description of Artificial Sequence: Synthetic polypeptide
  XENP019345 [CTLA-4]_H0.131_L0_Fab Heavy Chain
QVQLVESGGGVVQPGRSLRLSCAASGFTFSSYTMHWVRQAPGKGLEWVTFISYDGNNKYYADSVKGRFTISRDNSKNTLYLQMNSLRAEDTAIYYCARTGWLGPFDLWGQGTLVTVSSASTKGPSVFPLAPSSKSTSGGTAALGCLVKDYFPEPVTVSWNSGALTSGVHTFPAVLQSSGLYSLSSVVTVPSSSLGTQTYICNVNHKPSNTKVDKKVEPKSC

SEQ ID NO: 8906 - protein, 118 aa, Artificial Sequence; identical to SEQ ID NO: 6039
  Description of Artificial Sequence: Synthetic polypeptide
  VH of XENP019345

SEQ ID NO: 8907 - protein, 5 aa, Artificial Sequence
  Description of Artificial Sequence: Synthetic peptide
  XENP019345 vhCDR1
SYTMH

SEQ ID NO: 8908 - protein, 17 aa, Artificial Sequence
  Description of Artificial Sequence: Synthetic peptide
  XENP019345 vhCDR2
FISYDGNNKYYADSVKG

SEQ ID NO: 8909 - protein, 9 aa, Artificial Sequence
  Description of Artificial Sequence: Synthetic peptide
  XENP019345 vhCDR3
TGWLGPFDL

SEQ ID NO: 8910 - protein, 215 aa, Artificial Sequence; identical to SEQ ID NO: 7600
  Description of Artificial Sequence: Synthetic polypeptide
  XENP019345 [CTLA-4]_H0.131_L0_Fab Light Chain

SEQ ID NO: 8911 - protein, 108 aa, Artificial Sequence; identical to SEQ ID NO: 3741
  Description of Artificial Sequence: Synthetic polypeptide
  VL of XENP019345

SEQ ID NO: 8912 - protein, 12 aa, Artificial Sequence
  Description of Artificial Sequence: Synthetic peptide
  XENP019345 vlCDR1
RASQSVGSSYLA

SEQ ID NO: 8913 - protein, 7 aa, Artificial Sequence
  Description of Artificial Sequence: Synthetic peptide
  XENP019345 vlCDR2
GAFSRAT

SEQ ID NO: 8914 - protein, 9 aa, Artificial Sequence
  Description of Artificial Sequence: Synthetic peptide
  XENP019345 vlCDR3
QQYGSSPWT

SEQ ID NO: 8915 - protein, 221 aa, Artificial Sequence
  Description of Artificial Sequence: Synthetic polypeptide
  XENP019346 [CTLA-4]_H0.132_L0_Fab Heavy Chain
QVQLVESGGGVVQPGRSLRLSCAASGFTFSSYTMHWVRQAPGKGLEWVTFISYDGNNKYYADSVKGRFTISRDNSKNTLYLQMNSLRAEDTAIYYCARTGWLGPFDSWGQGTLVTVSSASTKGPSVFPLAPSSKSTSGGTAALGCLVKDYFPEPVTVSWNSGALTSGVHTFPAVLQSSGLYSLSSVVTVPSSSLGTQTYICNVNHKPSNTKVDKKVEPKSC

SEQ ID NO: 8916 - protein, 118 aa, Artificial Sequence; identical to SEQ ID NO: 6048
  Description of Artificial Sequence: Synthetic polypeptide
  VH of XENP019346

SEQ ID NO: 8917 - protein, 5 aa, Artificial Sequence
  Description of Artificial Sequence: Synthetic peptide
  XENP019346 vhCDR1
SYTMH

SEQ ID NO: 8918 - protein, 17 aa, Artificial Sequence
  Description of Artificial Sequence: Synthetic peptide
  XENP019346 vhCDR2
FISYDGNNKYYADSVKG

SEQ ID NO: 8919 - protein, 9 aa, Artificial Sequence
  Description of Artificial Sequence: Synthetic peptide
  XENP019346 vhCDR3
TGWLGPFDS

SEQ ID NO: 8920 - protein, 215 aa, Artificial Sequence; identical to SEQ ID NO: 7600
  Description of Artificial Sequence: Synthetic polypeptide
  XENP019346 [CTLA-4]_H0.132_L0_Fab Light Chain

SEQ ID NO: 8921 - protein, 108 aa, Artificial Sequence; identical to SEQ ID NO: 3741
  Description of Artificial Sequence: Synthetic polypeptide
  VL of XENP019346

SEQ ID NO: 8922 - protein, 12 aa, Artificial Sequence
  Description of Artificial Sequence: Synthetic peptide
  XENP019346 vlCDR1
RASQSVGSSYLA

SEQ ID NO: 8923 - protein, 7 aa, Artificial Sequence
  Description of Artificial Sequence: Synthetic peptide
  XENP019346 vlCDR2
GAFSRAT

SEQ ID NO: 8924 - protein, 9 aa, Artificial Sequence
  Description of Artificial Sequence: Synthetic peptide
  XENP019346 vlCDR3
QQYGSSPWT

SEQ ID NO: 8925 - protein, 221 aa, Artificial Sequence
  Description of Artificial Sequence: Synthetic polypeptide
  XENP019347 [CTLA-4]_H0.133_L0_Fab Heavy Chain
QVQLVESGGGVVQPGRSLRLSCAASGFTFSSYTMHWVRQAPGKGLEWVTFISYDGNNKYYADSVKGRFTISRDNSKNTLYLQMNSLRAEDTAIYYCARTGWLGPFDVWGQGTLVTVSSASTKGPSVFPLAPSSKSTSGGTAALGCLVKDYFPEPVTVSWNSGALTSGVHTFPAVLQSSGLYSLSSVVTVPSSSLGTQTYICNVNHKPSNTKVDKKVEPKSC

SEQ ID NO: 8926 - protein, 118 aa, Artificial Sequence; identical to SEQ ID NO: 6057
  Description of Artificial Sequence: Synthetic polypeptide
  VH of XENP019347

SEQ ID NO: 8927 - protein, 5 aa, Artificial Sequence
  Description of Artificial Sequence: Synthetic peptide
  XENP019347 vhCDR1
SYTMH

SEQ ID NO: 8928 - protein, 17 aa, Artificial Sequence
  Description of Artificial Sequence: Synthetic peptide
  XENP019347 vhCDR2
FISYDGNNKYYADSVKG

SEQ ID NO: 8929 - protein, 9 aa, Artificial Sequence
  Description of Artificial Sequence: Synthetic peptide
  XENP019347 vhCDR3
TGWLGPFDV

SEQ ID NO: 8930 - protein, 215 aa, Artificial Sequence; identical to SEQ ID NO: 7600
  Description of Artificial Sequence: Synthetic polypeptide
  XENP019347 [CTLA-4]_H0.133_L0_Fab Light Chain

SEQ ID NO: 8931 - protein, 108 aa, Artificial Sequence; identical to SEQ ID NO: 3741
  Description of Artificial Sequence: Synthetic polypeptide
  VL of XENP019347

SEQ ID NO: 8932 - protein, 12 aa, Artificial Sequence
  Description of Artificial Sequence: Synthetic peptide
  XENP019347 vlCDR1
RASQSVGSSYLA

SEQ ID NO: 8933 - protein, 7 aa, Artificial Sequence
  Description of Artificial Sequence: Synthetic peptide
  XENP019347 vlCDR2
GAFSRAT

SEQ ID NO: 8934 - protein, 9 aa, Artificial Sequence
  Description of Artificial Sequence: Synthetic peptide
  XENP019347 vlCDR3
QQYGSSPWT

SEQ ID NO: 8935 - protein, 221 aa, Artificial Sequence
  Description of Artificial Sequence: Synthetic polypeptide
  XENP019348 [CTLA-4]_H0.134_L0_Fab Heavy Chain
QVQLVESGGGVVQPGRSLRLSCAASGFTFSSYTMHWVRQAPGKGLEWVTFISYDGNNKYYADSVKGRFTISRDNSKNTLYLQMNSLRAEDTAIYYCARTGWLGPFDYWGRGTLVTVSSASTKGPSVFPLAPSSKSTSGGTAALGCLVKDYFPEPVTVSWNSGALTSGVHTFPAVLQSSGLYSLSSVVTVPSSSLGTQTYICNVNHKPSNTKVDKKVEPKSC

SEQ ID NO: 8936 - protein, 118 aa, Artificial Sequence; identical to SEQ ID NO: 4743
  Description of Artificial Sequence: Synthetic polypeptide
  VH of XENP019348

SEQ ID NO: 8937 - protein, 5 aa, Artificial Sequence
  Description of Artificial Sequence: Synthetic peptide
  XENP019348 vhCDR1
SYTMH

SEQ ID NO: 8938 - protein, 17 aa, Artificial Sequence
  Description of Artificial Sequence: Synthetic peptide
  XENP019348 vhCDR2
FISYDGNNKYYADSVKG

SEQ ID NO: 8939 - protein, 9 aa, Artificial Sequence
  Description of Artificial Sequence: Synthetic peptide
  XENP019348 vhCDR3
TGWLGPFDY

SEQ ID NO: 8940 - protein, 215 aa, Artificial Sequence; identical to SEQ ID NO: 7600
  Description of Artificial Sequence: Synthetic polypeptide
  XENP019348 [CTLA-4]_H0.134_L0_Fab Light Chain

SEQ ID NO: 8941 - protein, 108 aa, Artificial Sequence; identical to SEQ ID NO: 3741
  Description of Artificial Sequence: Synthetic polypeptide
  VL of XENP019348

SEQ ID NO: 8942 - protein, 12 aa, Artificial Sequence
  Description of Artificial Sequence: Synthetic peptide
  XENP019348 vlCDR1
RASQSVGSSYLA

SEQ ID NO: 8943 - protein, 7 aa, Artificial Sequence
  Description of Artificial Sequence: Synthetic peptide
  XENP019348 vlCDR2
GAFSRAT

SEQ ID NO: 8944 - protein, 9 aa, Artificial Sequence
  Description of Artificial Sequence: Synthetic peptide
  XENP019348 vlCDR3
QQYGSSPWT

SEQ ID NO: 8945 - protein, 221 aa, Artificial Sequence
  Description of Artificial Sequence: Synthetic polypeptide
  XENP019349 [CTLA-4]_H0.135_L0_Fab Heavy Chain
QVQLVESGGGVVQPGRSLRLSCAASGFTFSSYTMHWVRQAPGKGLEWVTFISYDGNNKYYADSVKGRFTISRDNSKNTLYLQMNSLRAEDTAIYYCARTGWLGPFDYWGQGTMVTVSSASTKGPSVFPLAPSSKSTSGGTAALGCLVKDYFPEPVTVSWNSGALTSGVHTFPAVLQSSGLYSLSSVVTVPSSSLGTQTYICNVNHKPSNTKVDKKVEPKSC

SEQ ID NO: 8946 - protein, 118 aa, Artificial Sequence; identical to SEQ ID NO: 6075
  Description of Artificial Sequence: Synthetic polypeptide
  VH of XENP019349

SEQ ID NO: 8947 - protein, 5 aa, Artificial Sequence
  Description of Artificial Sequence: Synthetic peptide
  XENP019349 vhCDR1
SYTMH

SEQ ID NO: 8948 - protein, 17 aa, Artificial Sequence
  Description of Artificial Sequence: Synthetic peptide
  XENP019349 vhCDR2
FISYDGNNKYYADSVKG

SEQ ID NO: 8949 - protein, 9 aa, Artificial Sequence
  Description of Artificial Sequence: Synthetic peptide
  XENP019349 vhCDR3
TGWLGPFDY

SEQ ID NO: 8950 - protein, 215 aa, Artificial Sequence; identical to SEQ ID NO: 7600
  Description of Artificial Sequence: Synthetic polypeptide
  XENP019349 [CTLA-4]_H0.135_L0_Fab Light Chain

SEQ ID NO: 8951 - protein, 108 aa, Artificial Sequence; identical to SEQ ID NO: 3741
  Description of Artificial Sequence: Synthetic polypeptide
  VL of XENP019349

SEQ ID NO: 8952 - protein, 12 aa, Artificial Sequence
  Description of Artificial Sequence: Synthetic peptide
  XENP019349 vlCDR1
RASQSVGSSYLA

SEQ ID NO: 8953 - protein, 7 aa, Artificial Sequence
  Description of Artificial Sequence: Synthetic peptide
  XENP019349 vlCDR2
GAFSRAT

SEQ ID NO: 8954 - protein, 9 aa, Artificial Sequence
  Description of Artificial Sequence: Synthetic peptide
  XENP019349 vlCDR3
QQYGSSPWT

SEQ ID NO: 8955 - protein, 221 aa, Artificial Sequence
  Description of Artificial Sequence: Synthetic polypeptide
  XENP019350 [CTLA-4]_H0.136_L0_Fab Heavy Chain
QVQLVESGGGVVQPGRSLRLSCAASGFTFSSYTMHWVRQAPGKGLEWVTFISYDGNNKYYADSVKGRFTISRDNSKNTLYLQMNSLRAEDTAIYYCARTGWLGPFDYWGQGTTVTVSSASTKGPSVFPLAPSSKSTSGGTAALGCLVKDYFPEPVTVSWNSGALTSGVHTFPAVLQSSGLYSLSSVVTVPSSSLGTQTYICNVNHKPSNTKVDKKVEPKSC

SEQ ID NO: 8956 - protein, 118 aa, Artificial Sequence; identical to SEQ ID NO: 6084
  Description of Artificial Sequence: Synthetic polypeptide
  VH of XENP019350

SEQ ID NO: 8957 - protein, 5 aa, Artificial Sequence
  Description of Artificial Sequence: Synthetic peptide
  XENP019350 vhCDR1
SYTMH

SEQ ID NO: 8958 - protein, 17 aa, Artificial Sequence
  Description of Artificial Sequence: Synthetic peptide
  XENP019350 vhCDR2
FISYDGNNKYYADSVKG

SEQ ID NO: 8959 - protein, 9 aa, Artificial Sequence
  Description of Artificial Sequence: Synthetic peptide
  XENP019350 vhCDR3
TGWLGPFDY

SEQ ID NO: 8960 - protein, 215 aa, Artificial Sequence; identical to SEQ ID NO: 7600
  Description of Artificial Sequence: Synthetic polypeptide
  XENP019350 [CTLA-4]_H0.136_L0_Fab Light Chain

SEQ ID NO: 8961 - protein, 108 aa, Artificial Sequence; identical to SEQ ID NO: 3741
  Description of Artificial Sequence: Synthetic polypeptide
  VL of XENP019350

SEQ ID NO: 8962 - protein, 12 aa, Artificial Sequence
  Description of Artificial Sequence: Synthetic peptide
  XENP019350 vlCDR1
RASQSVGSSYLA

SEQ ID NO: 8963 - protein, 7 aa, Artificial Sequence
  Description of Artificial Sequence: Synthetic peptide
  XENP019350 vlCDR2
GAFSRAT

SEQ ID NO: 8964 - protein, 9 aa, Artificial Sequence
  Description of Artificial Sequence: Synthetic peptide
  XENP019350 vlCDR3
QQYGSSPWT

SEQ ID NO: 8965 - protein, 221 aa, Artificial Sequence; identical to SEQ ID NO: 7595
  Description of Artificial Sequence: Synthetic polypeptide
  XENP019416 [CTLA-4]_H0_L0.1_Fab Heavy Chain

SEQ ID NO: 8966 - protein, 118 aa, Artificial Sequence; identical to SEQ ID NO: 3737
  Description of Artificial Sequence: Synthetic polypeptide
  VH of XENP019416

SEQ ID NO: 8967 - protein, 5 aa, Artificial Sequence
  Description of Artificial Sequence: Synthetic peptide
  XENP019416 vhCDR1
SYTMH

SEQ ID NO: 8968 - protein, 17 aa, Artificial Sequence
  Description of Artificial Sequence: Synthetic peptide
  XENP019416 vhCDR2
FISYDGNNKYYADSVKG

SEQ ID NO: 8969 - protein, 9 aa, Artificial Sequence
  Description of Artificial Sequence: Synthetic peptide
  XENP019416 vhCDR3
TGWLGPFDY

SEQ ID NO: 8970 - protein, 215 aa, Artificial Sequence
  Description of Artificial Sequence: Synthetic polypeptide
  XENP019416 [CTLA-4]_H0_L0.1_Fab Light Chain
AIVLTQSPGTLSLSPGERATLSCRASQSVGSSYLAWYQQKPGQAPRLLIYGAFSRATGIPDRFSGSGSGTDFTLTISRLEPEDFAVYYCQQYGSSPWTFGQGTKVEIKRTVAAPSVFIFPPSDEQLKSGTASVVCLLNNFYPREAKVQWKVDNALQSGNSQESVTEQDSKDSTYSLSSTLTLSKADYEKHKVYACEVTHQGLSSPVTKSFNRGEC

SEQ ID NO: 8971 - protein, 108 aa, Artificial Sequence; identical to SEQ ID NO: 6094
  Description of Artificial Sequence: Synthetic polypeptide
  VL of XENP019416

SEQ ID NO: 8972 - protein, 12 aa, Artificial Sequence
  Description of Artificial Sequence: Synthetic peptide
  XENP019416 vlCDR1
RASQSVGSSYLA

SEQ ID NO: 8973 - protein, 7 aa, Artificial Sequence
  Description of Artificial Sequence: Synthetic peptide
  XENP019416 vlCDR2
GAFSRAT

SEQ ID NO: 8974 - protein, 9 aa, Artificial Sequence
  Description of Artificial Sequence: Synthetic peptide
  XENP019416 vlCDR3
QQYGSSPWT

SEQ ID NO: 8975 - protein, 221 aa, Artificial Sequence; identical to SEQ ID NO: 7595
  Description of Artificial Sequence: Synthetic polypeptide
  XENP019417 [CTLA-4]_H0_L0.2_Fab Heavy Chain

SEQ ID NO: 8976 - protein, 118 aa, Artificial Sequence; identical to SEQ ID NO: 3737
  Description of Artificial Sequence: Synthetic polypeptide
  VH of XENP019417

SEQ ID NO: 8977 - protein, 5 aa, Artificial Sequence
  Description of Artificial Sequence: Synthetic peptide
  XENP019417 vhCDR1
SYTMH

SEQ ID NO: 8978 - protein, 17 aa, Artificial Sequence
  Description of Artificial Sequence: Synthetic peptide
  XENP019417 vhCDR2
FISYDGNNKYYADSVKG

SEQ ID NO: 8979 - protein, 9 aa, Artificial Sequence
  Description of Artificial Sequence: Synthetic peptide
  XENP019417 vhCDR3
TGWLGPFDY

SEQ ID NO: 8980 - protein, 215 aa, Artificial Sequence
  Description of Artificial Sequence: Synthetic polypeptide
  XENP019417 [CTLA-4]_H0_L0.2_Fab Light Chain
DIVLTQSPGTLSLSPGERATLSCRASQSVGSSYLAWYQQKPGQAPRLLIYGAFSRATGIPDRFSGSGSGTDFTLTISRLEPEDFAVYYCQQYGSSPWTFGQGTKVEIKRTVAAPSVFIFPPSDEQLKSGTASVVCLLNNFYPREAKVQWKVDNALQSGNSQESVTEQDSKDSTYSLSSTLTLSKADYEKHKVYACEVTHQGLSSPVTKSFNRGEC

SEQ ID NO: 8981 - protein, 108 aa, Artificial Sequence; identical to SEQ ID NO: 6103
  Description of Artificial Sequence: Synthetic polypeptide
  VL of XENP019417

SEQ ID NO: 8982 - protein, 12 aa, Artificial Sequence
  Description of Artificial Sequence: Synthetic peptide
  XENP019417 vlCDR1
RASQSVGSSYLA

SEQ ID NO: 8983 - protein, 7 aa, Artificial Sequence
  Description of Artificial Sequence: Synthetic peptide
  XENP019417 vlCDR2
GAFSRAT

SEQ ID NO: 8984 - protein, 9 aa, Artificial Sequence
  Description of Artificial Sequence: Synthetic peptide
  XENP019417 vlCDR3
QQYGSSPWT

SEQ ID NO: 8985 - protein, 221 aa, Artificial Sequence; identical to SEQ ID NO: 7595
  Description of Artificial Sequence: Synthetic polypeptide
  XENP019418 [CTLA-4]_H0_L0.3_Fab Heavy Chain

SEQ ID NO: 8986 - protein, 118 aa, Artificial Sequence; identical to SEQ ID NO: 3737
  Description of Artificial Sequence: Synthetic polypeptide
  VH of XENP019418

SEQ ID NO: 8987 - protein, 5 aa, Artificial Sequence
  Description of Artificial Sequence: Synthetic peptide
  XENP019418 vhCDR1
SYTMH

SEQ ID NO: 8988 - protein, 17 aa, Artificial Sequence
  Description of Artificial Sequence: Synthetic peptide
  XENP019418 vhCDR2
FISYDGNNKYYADSVKG

SEQ ID NO: 8989 - protein, 9 aa, Artificial Sequence
  Description of Artificial Sequence: Synthetic peptide
  XENP019418 vhCDR3
TGWLGPFDY

SEQ ID NO: 8990 - protein, 215 aa, Artificial Sequence
  Description of Artificial Sequence: Synthetic polypeptide
  XENP019418 [CTLA-4]_H0_L0.3_Fab Light Chain
QIVLTQSPGTLSLSPGERATLSCRASQSVGSSYLAWYQQKPGQAPRLLIYGAFSRATGIPDRFSGSGSGTDFTLTISRLEPEDFAVYYCQQYGSSPWTFGQGTKVEIKRTVAAPSVFIFPPSDEQLKSGTASVVCLLNNFYPREAKVQWKVDNALQSGNSQESVTEQDSKDSTYSLSSTLTLSKADYEKHKVYACEVTHQGLSSPVTKSFNRGEC

SEQ ID NO: 8991 - protein, 108 aa, Artificial Sequence; identical to SEQ ID NO: 6112
  Description of Artificial Sequence: Synthetic polypeptide
  VL of XENP019418

SEQ ID NO: 8992 - protein, 12 aa, Artificial Sequence
  Description of Artificial Sequence: Synthetic peptide
  XENP019418 vlCDR1
RASQSVGSSYLA

SEQ ID NO: 8993 - protein, 7 aa, Artificial Sequence
  Description of Artificial Sequence: Synthetic peptide
  XENP019418 vlCDR2
GAFSRAT

SEQ ID NO: 8994 - protein, 9 aa, Artificial Sequence
  Description of Artificial Sequence: Synthetic peptide
  XENP019418 vlCDR3
QQYGSSPWT

SEQ ID NO: 8995 - protein, 221 aa, Artificial Sequence; identical to SEQ ID NO: 7595
  Description of Artificial Sequence: Synthetic polypeptide
  XENP019419 [CTLA-4]_H0_L0.4_Fab Heavy Chain

SEQ ID NO: 8996 - protein, 118 aa, Artificial Sequence; identical to SEQ ID NO: 3737
  Description of Artificial Sequence: Synthetic polypeptide
  VH of XENP019419

SEQ ID NO: 8997 - protein, 5 aa, Artificial Sequence
  Description of Artificial Sequence: Synthetic peptide
  XENP019419 vhCDR1
SYTMH

SEQ ID NO: 8998 - protein, 17 aa, Artificial Sequence
  Description of Artificial Sequence: Synthetic peptide
  XENP019419 vhCDR2
FISYDGNNKYYADSVKG

SEQ ID NO: 8999 - protein, 9 aa, Artificial Sequence
  Description of Artificial Sequence: Synthetic peptide
  XENP019419 vhCDR3
TGWLGPFDY

SEQ ID NO: 9000 - protein, 215 aa, Artificial Sequence
  Description of Artificial Sequence: Synthetic polypeptide
  XENP019419 [CTLA-4]_H0_L0.4_Fab Light Chain
RIVLTQSPGTLSLSPGERATLSCRASQSVGSSYLAWYQQKPGQAPRLLIYGAFSRATGIPDRFSGSGSGTDFTLTISRLEPEDFAVYYCQQYGSSPWTFGQGTKVEIKRTVAAPSVFIFPPSDEQLKSGTASVVCLLNNFYPREAKVQWKVDNALQSGNSQESVTEQDSKDSTYSLSSTLTLSKADYEKHKVYACEVTHQGLSSPVTKSFNRGEC

SEQ ID NO: 9001 - protein, 108 aa, Artificial Sequence; identical to SEQ ID NO: 6121
  Description of Artificial Sequence: Synthetic polypeptide
  VL of XENP019419

SEQ ID NO: 9002 - protein, 12 aa, Artificial Sequence
  Description of Artificial Sequence: Synthetic peptide
  XENP019419 vlCDR1
RASQSVGSSYLA

SEQ ID NO: 9003 - protein, 7 aa, Artificial Sequence
  Description of Artificial Sequence: Synthetic peptide
  XENP019419 vlCDR2
GAFSRAT

SEQ ID NO: 9004 - protein, 9 aa, Artificial Sequence
  Description of Artificial Sequence: Synthetic peptide
  XENP019419 vlCDR3
QQYGSSPWT

SEQ ID NO: 9005 - protein, 221 aa, Artificial Sequence; identical to SEQ ID NO: 7595
  Description of Artificial Sequence: Synthetic polypeptide
  XENP019420 [CTLA-4]_H0_L0.5_Fab Heavy Chain

SEQ ID NO: 9006 - protein, 118 aa, Artificial Sequence; identical to SEQ ID NO: 3737
  Description of Artificial Sequence: Synthetic polypeptide
  VH of XENP019420

SEQ ID NO: 9007 - protein, 5 aa, Artificial Sequence
  Description of Artificial Sequence: Synthetic peptide
  XENP019420 vhCDR1
SYTMH

SEQ ID NO: 9008 - protein, 17 aa, Artificial Sequence
  Description of Artificial Sequence: Synthetic peptide
  XENP019420 vhCDR2
FISYDGNNKYYADSVKG

SEQ ID NO: 9009 - protein, 9 aa, Artificial Sequence
  Description of Artificial Sequence: Synthetic peptide
  XENP019420 vhCDR3
TGWLGPFDY

SEQ ID NO: 9010 - protein, 215 aa, Artificial Sequence
  Description of Artificial Sequence: Synthetic polypeptide
  XENP019420 [CTLA-4]_H0_L0.5_Fab Light Chain
EIRLTQSPGTLSLSPGERATLSCRASQSVGSSYLAWYQQKPGQAPRLLIYGAFSRATGIPDRFSGSGSGTDFTLTISRLEPEDFAVYYCQQYGSSPWTFGQGTKVEIKRTVAAPSVFIFPPSDEQLKSGTASVVCLLNNFYPREAKVQWKVDNALQSGNSQESVTEQDSKDSTYSLSSTLTLSKADYEKHKVYACEVTHQGLSSPVTKSFNRGEC

SEQ ID NO: 9011 - protein, 108 aa, Artificial Sequence; identical to SEQ ID NO: 6130
  Description of Artificial Sequence: Synthetic polypeptide
  VL of XENP019420

SEQ ID NO: 9012 - protein, 12 aa, Artificial Sequence
  Description of Artificial Sequence: Synthetic peptide
  XENP019420 vlCDR1
RASQSVGSSYLA

SEQ ID NO: 9013 - protein, 7 aa, Artificial Sequence
  Description of Artificial Sequence: Synthetic peptide
  XENP019420 vlCDR2
GAFSRAT

SEQ ID NO: 9014 - protein, 9 aa, Artificial Sequence
  Description of Artificial Sequence: Synthetic peptide
  XENP019420 vlCDR3
QQYGSSPWT

SEQ ID NO: 9015 - protein, 221 aa, Artificial Sequence; identical to SEQ ID NO: 7595
  Description of Artificial Sequence: Synthetic polypeptide
  XENP019421 [CTLA-4]_H0_L0.6_Fab Heavy Chain

SEQ ID NO: 9016 - protein, 118 aa, Artificial Sequence; identical to SEQ ID NO: 3737
  Description of Artificial Sequence: Synthetic polypeptide
  VH of XENP019421

SEQ ID NO: 9017 - protein, 5 aa, Artificial Sequence
  Description of Artificial Sequence: Synthetic peptide
  XENP019421 vhCDR1
SYTMH

SEQ ID NO: 9018 - protein, 17 aa, Artificial Sequence
  Description of Artificial Sequence: Synthetic peptide
  XENP019421 vhCDR2
FISYDGNNKYYADSVKG

SEQ ID NO: 9019 - protein, 9 aa, Artificial Sequence
  Description of Artificial Sequence: Synthetic peptide
  XENP019421 vhCDR3
TGWLGPFDY

SEQ ID NO: 9020 - protein, 215 aa, Artificial Sequence
  Description of Artificial Sequence: Synthetic polypeptide
  XENP019421 [CTLA-4]_H0_L0.6_Fab Light Chain
EIRLTQSPGTLSLSPGERATLSCRASQSVGSSYLAWYQQKPGQAPRLLIYGAFSRATGIPDRFSGSGSGTDFTLTISRLEPEDFAVYYCQQYGSSPWTFGEGTKVEIKRTVAAPSVFIFPPSDEQLKSGTASVVCLLNNFYPREAKVQWKVDNALQSGNSQESVTEQDSKDSTYSLSSTLTLSKADYEKHKVYACEVTHQGLSSPVTKSFNRGEC

SEQ ID NO: 9021 - protein, 108 aa, Artificial Sequence; identical to SEQ ID NO: 6139
  Description of Artificial Sequence: Synthetic polypeptide
  VL of XENP019421

SEQ ID NO: 9022 - protein, 12 aa, Artificial Sequence
  Description of Artificial Sequence: Synthetic peptide
  XENP019421 vlCDR1
RASQSVGSSYLA

SEQ ID NO: 9023 - protein, 7 aa, Artificial Sequence
  Description of Artificial Sequence: Synthetic peptide
  XENP019421 vlCDR2
GAFSRAT

SEQ ID NO: 9024 - protein, 9 aa, Artificial Sequence
  Description of Artificial Sequence: Synthetic peptide
  XENP019421 vlCDR3
QQYGSSPWT

SEQ ID NO: 9025 - protein, 221 aa, Artificial Sequence; identical to SEQ ID NO: 7595
  Description of Artificial Sequence: Synthetic polypeptide
  XENP019422 [CTLA-4]_H0_L0.7_Fab Heavy Chain

SEQ ID NO: 9026 - protein, 118 aa, Artificial Sequence; identical to SEQ ID NO: 3737
  Description of Artificial Sequence: Synthetic polypeptide
  VH of XENP019422

SEQ ID NO: 9027 - protein, 5 aa, Artificial Sequence
  Description of Artificial Sequence: Synthetic peptide
  XENP019422 vhCDR1
SYTMH

SEQ ID NO: 9028 - protein, 17 aa, Artificial Sequence
  Description of Artificial Sequence: Synthetic peptide
  XENP019422 vhCDR2
FISYDGNNKYYADSVKG

SEQ ID NO: 9029 - protein, 9 aa, Artificial Sequence
  Description of Artificial Sequence: Synthetic peptide
  XENP019422 vhCDR3
TGWLGPFDY

SEQ ID NO: 9030 - protein, 215 aa, Artificial Sequence
  Description of Artificial Sequence: Synthetic polypeptide
  XENP019422 [CTLA-4]_H0_L0.7_Fab Light Chain
EIVMTQSPGTLSLSPGERATLSCRASQSVGSSYLAWYQQKPGQAPRLLIYGAFSRATGIPDRFSGSGSGTDFTLTISRLEPEDFAVYYCQQYGSSPWTFGQGTKVEIKRTVAAPSVFIFPPSDEQLKSGTASVVCLLNNFYPREAKVQWKVDNALQSGNSQESVTEQDSKDSTYSLSSTLTLSKADYEKHKVYACEVTHQGLSSPVTKSFNRGEC

SEQ ID NO: 9031 - protein, 108 aa, Artificial Sequence; identical to SEQ ID NO: 6148
  Description of Artificial Sequence: Synthetic polypeptide
  VL of XENP019422

SEQ ID NO: 9032 - protein, 12 aa, Artificial Sequence
  Description of Artificial Sequence: Synthetic peptide
  XENP019422 vlCDR1
RASQSVGSSYLA

SEQ ID NO: 9033 - protein, 7 aa, Artificial Sequence
  Description of Artificial Sequence: Synthetic peptide
  XENP019422 vlCDR2
GAFSRAT

SEQ ID NO: 9034 - protein, 9 aa, Artificial Sequence
  Description of Artificial Sequence: Synthetic peptide
  XENP019422 vlCDR3
QQYGSSPWT

SEQ ID NO: 9035 - protein, 221 aa, Artificial Sequence; identical to SEQ ID NO: 7595
  Description of Artificial Sequence: Synthetic polypeptide
  XENP019423 [CTLA-4]_H0_L0.8_Fab Heavy Chain

SEQ ID NO: 9036 - protein, 118 aa, Artificial Sequence; identical to SEQ ID NO: 3737
  Description of Artificial Sequence: Synthetic polypeptide
  VH of XENP019423

SEQ ID NO: 9037 - protein, 5 aa, Artificial Sequence
  Description of Artificial Sequence: Synthetic peptide
  XENP019423 vhCDR1
SYTMH

SEQ ID NO: 9038 - protein, 17 aa, Artificial Sequence
  Description of Artificial Sequence: Synthetic peptide
  XENP019423 vhCDR2
FISYDGNNKYYADSVKG

SEQ ID NO: 9039 - protein, 9 aa, Artificial Sequence
  Description of Artificial Sequence: Synthetic peptide
  XENP019423 vhCDR3
TGWLGPFDY

SEQ ID NO: 9040 - protein, 215 aa, Artificial Sequence
  Description of Artificial Sequence: Synthetic polypeptide
  XENP019423 [CTLA-4]_H0_L0.8_Fab Light Chain
EIVLTQSPATLSLSPGERATLSCRASQSVGSSYLAWYQQKPGQAPRLLIYGAFSRATGIPDRFSGSGSGTDFTLTISRLEPEDFAVYYCQQYGSSPWTFGQGTKVEIKRTVAAPSVFIFPPSDEQLKSGTASVVCLLNNFYPREAKVQWKVDNALQSGNSQESVTEQDSKDSTYSLSSTLTLSKADYEKHKVYACEVTHQGLSSPVTKSFNRGEC

SEQ ID NO: 9041 - protein, 108 aa, Artificial Sequence; identical to SEQ ID NO: 6157
  Description of Artificial Sequence: Synthetic polypeptide
  VL of XENP019423

SEQ ID NO: 9042 - protein, 12 aa, Artificial Sequence
  Description of Artificial Sequence: Synthetic peptide
  XENP019423 vlCDR1
RASQSVGSSYLA

SEQ ID NO: 9043 - protein, 7 aa, Artificial Sequence
  Description of Artificial Sequence: Synthetic peptide
  XENP019423 vlCDR2
GAFSRAT

SEQ ID NO: 9044 - protein, 9 aa, Artificial Sequence
  Description of Artificial Sequence: Synthetic peptide
  XENP019423 vlCDR3
QQYGSSPWT

SEQ ID NO: 9045 - protein, 221 aa, Artificial Sequence; identical to SEQ ID NO: 7595
  Description of Artificial Sequence: Synthetic polypeptide
  XENP019424 [CTLA-4]_H0_L0.9_Fab Heavy Chain

SEQ ID NO: 9046 - protein, 118 aa, Artificial Sequence; identical to SEQ ID NO: 3737
  Description of Artificial Sequence: Synthetic polypeptide
  VH of XENP019424

SEQ ID NO: 9047 - protein, 5 aa, Artificial Sequence
  Description of Artificial Sequence: Synthetic peptide
  XENP019424 vhCDR1
SYTMH

SEQ ID NO: 9048 - protein, 17 aa, Artificial Sequence
  Description of Artificial Sequence: Synthetic peptide
  XENP019424 vhCDR2
FISYDGNNKYYADSVKG

SEQ ID NO: 9049 - protein, 9 aa, Artificial Sequence
  Description of Artificial Sequence: Synthetic peptide
  XENP019424 vhCDR3
TGWLGPFDY

SEQ ID NO: 9050 - protein, 215 aa, Artificial Sequence
  Description of Artificial Sequence: Synthetic polypeptide
  XENP019424 [CTLA-4]_H0_L0.9_Fab Light Chain
EIVLTQSPPTLSLSPGERATLSCRASQSVGSSYLAWYQQKPGQAPRLLIYGAFSRATGIPDRFSGSGSGTDFTLTISRLEPEDFAVYYCQQYGSSPWTFGQGTKVEIKRTVAAPSVFIFPPSDEQLKSGTASVVCLLNNFYPREAKVQWKVDNALQSGNSQESVTEQDSKDSTYSLSSTLTLSKADYEKHKVYACEVTHQGLSSPVTKSFNRGEC

SEQ ID NO: 9051 - protein, 108 aa, Artificial Sequence; identical to SEQ ID NO: 6166
  Description of Artificial Sequence: Synthetic polypeptide
  VL of XENP019424

SEQ ID NO: 9052 - protein, 12 aa, Artificial Sequence
  Description of Artificial Sequence: Synthetic peptide
  XENP019424 vlCDR1
RASQSVGSSYLA

SEQ ID NO: 9053 - protein, 7 aa, Artificial Sequence
  Description of Artificial Sequence: Synthetic peptide
  XENP019424 vlCDR2
GAFSRAT

SEQ ID NO: 9054 - protein, 9 aa, Artificial Sequence
  Description of Artificial Sequence: Synthetic peptide
  XENP019424 vlCDR3
QQYGSSPWT

SEQ ID NO: 9055 - protein, 221 aa, Artificial Sequence; identical to SEQ ID NO: 7595
  Description of Artificial Sequence: Synthetic polypeptide
  XENP019425 [CTLA-4]_H0_L0.10_Fab Heavy Chain

SEQ ID NO: 9056 - protein, 118 aa, Artificial Sequence; identical to SEQ ID NO: 3737
  Description of Artificial Sequence: Synthetic polypeptide
  VH of XENP019425

SEQ ID NO: 9057 - protein, 5 aa, Artificial Sequence
  Description of Artificial Sequence: Synthetic peptide
  XENP019425 vhCDR1
SYTMH

SEQ ID NO: 9058 - protein, 17 aa, Artificial Sequence
  Description of Artificial Sequence: Synthetic peptide
  XENP019425 vhCDR2
FISYDGNNKYYADSVKG

SEQ ID NO: 9059 - protein, 9 aa, Artificial Sequence
  Description of Artificial Sequence: Synthetic peptide
  XENP019425 vhCDR3
TGWLGPFDY

SEQ ID NO: 9060 - protein, 215 aa, Artificial Sequence
  Description of Artificial Sequence: Synthetic polypeptide
  XENP019425 [CTLA-4]_H0_L0.10_Fab Light Chain
EIVLTQSPSTLSLSPGERATLSCRASQSVGSSYLAWYQQKPGQAPRLLIYGAFSRATGIPDRFSGSGSGTDFTLTISRLEPEDFAVYYCQQYGSSPWTFGQGTKVEIKRTVAAPSVFIFPPSDEQLKSGTASVVCLLNNFYPREAKVQWKVDNALQSGNSQESVTEQDSKDSTYSLSSTLTLSKADYEKHKVYACEVTHQGLSSPVTKSFNRGEC

SEQ ID NO: 9061 - protein, 108 aa, Artificial Sequence; identical to SEQ ID NO: 6175
  Description of Artificial Sequence: Synthetic polypeptide
  VL of XENP019425

SEQ ID NO: 9062 - protein, 12 aa, Artificial Sequence
  Description of Artificial Sequence: Synthetic peptide
  XENP019425 vlCDR1
RASQSVGSSYLA

SEQ ID NO: 9063 - protein, 7 aa, Artificial Sequence
  Description of Artificial Sequence: Synthetic peptide
  XENP019425 vlCDR2
GAFSRAT

SEQ ID NO: 9064 - protein, 9 aa, Artificial Sequence
  Description of Artificial Sequence: Synthetic peptide
  XENP019425 vlCDR3
QQYGSSPWT

SEQ ID NO: 9065 - protein, 221 aa, Artificial Sequence; identical to SEQ ID NO: 7595
  Description of Artificial Sequence: Synthetic polypeptide
  XENP019426 [CTLA-4]_H0_L0.11_Fab Heavy Chain

SEQ ID NO: 9066 - protein, 118 aa, Artificial Sequence; identical to SEQ ID NO: 3737
  Description of Artificial Sequence: Synthetic polypeptide
  VH of XENP019426

SEQ ID NO: 9067 - protein, 5 aa, Artificial Sequence
  Description of Artificial Sequence: Synthetic peptide
  XENP019426 vhCDR1
SYTMH

SEQ ID NO: 9068 - protein, 17 aa, Artificial Sequence
  Description of Artificial Sequence: Synthetic peptide
  XENP019426 vhCDR2
FISYDGNNKYYADSVKG

SEQ ID NO: 9069 - protein, 9 aa, Artificial Sequence
  Description of Artificial Sequence: Synthetic peptide
  XENP019426 vhCDR3
TGWLGPFDY

SEQ ID NO: 9070 - protein, 215 aa, Artificial Sequence
  Description of Artificial Sequence: Synthetic polypeptide
  XENP019426 [CTLA-4]_H0_L0.11_Fab Light Chain
EIVLTQSPGSLSLSPGERATLSCRASQSVGSSYLAWYQQKPGQAPRLLIYGAFSRATGIPDRFSGSGSGTDFTLTISRLEPEDFAVYYCQQYGSSPWTFGQGTKVEIKRTVAAPSVFIFPPSDEQLKSGTASVVCLLNNFYPREAKVQWKVDNALQSGNSQESVTEQDSKDSTYSLSSTLTLSKADYEKHKVYACEVTHQGLSSPVTKSFNRGEC

SEQ ID NO: 9071 - protein, 108 aa, Artificial Sequence; identical to SEQ ID NO: 6184
  Description of Artificial Sequence: Synthetic polypeptide
  VL of XENP019426

SEQ ID NO: 9072 - protein, 12 aa, Artificial Sequence
  Description of Artificial Sequence: Synthetic peptide
  XENP019426 vlCDR1
RASQSVGSSYLA

SEQ ID NO: 9073 - protein, 7 aa, Artificial Sequence
  Description of Artificial Sequence: Synthetic peptide
  XENP019426 vlCDR2
GAFSRAT

SEQ ID NO: 9074 - protein, 9 aa, Artificial Sequence
  Description of Artificial Sequence: Synthetic peptide
  XENP019426 vlCDR3
QQYGSSPWT

SEQ ID NO: 9075 - protein, 221 aa, Artificial Sequence; identical to SEQ ID NO: 7595
  Description of Artificial Sequence: Synthetic polypeptide
  XENP019427 [CTLA-4]_H0_L0.12_Fab Heavy Chain

SEQ ID NO: 9076 - protein, 118 aa, Artificial Sequence; identical to SEQ ID NO: 3737
  Description of Artificial Sequence: Synthetic polypeptide
  VH of XENP019427

SEQ ID NO: 9077 - protein, 5 aa, Artificial Sequence
  Description of Artificial Sequence: Synthetic peptide
  XENP019427 vhCDR1
SYTMH

SEQ ID NO: 9078 - protein, 17 aa, Artificial Sequence
  Description of Artificial Sequence: Synthetic peptide
  XENP019427 vhCDR2
FISYDGNNKYYADSVKG

SEQ ID NO: 9079 - protein, 9 aa, Artificial Sequence
  Description of Artificial Sequence: Synthetic peptide
  XENP019427 vhCDR3
TGWLGPFDY

SEQ ID NO: 9080 - protein, 215 aa, Artificial Sequence
  Description of Artificial Sequence: Synthetic polypeptide
  XENP019427 [CTLA-4]_H0_L0.12_Fab Light Chain
EIVLTQSPGTLSVSPGERATLSCRASQSVGSSYLAWYQQKPGQAPRLLIYGAFSRATGIPDRFSGSGSGTDFTLTISRLEPEDFAVYYCQQYGSSPWTFGQGTKVEIKRTVAAPSVFIFPPSDEQLKSGTASVVCLLNNFYPREAKVQWKVDNALQSGNSQESVTEQDSKDSTYSLSSTLTLSKADYEKHKVYACEVTHQGLSSPVTKSFNRGEC

SEQ ID NO: 9081 - protein, 108 aa, Artificial Sequence; identical to SEQ ID NO: 6193
  Description of Artificial Sequence: Synthetic polypeptide
  VL of XENP019427

SEQ ID NO: 9082 - protein, 12 aa, Artificial Sequence
  Description of Artificial Sequence: Synthetic peptide
  XENP019427 vlCDR1
RASQSVGSSYLA

SEQ ID NO: 9083 - protein, 7 aa, Artificial Sequence
  Description of Artificial Sequence: Synthetic peptide
  XENP019427 vlCDR2
GAFSRAT

SEQ ID NO: 9084 - protein, 9 aa, Artificial Sequence
  Description of Artificial Sequence: Synthetic peptide
  XENP019427 vlCDR3
QQYGSSPWT

SEQ ID NO: 9085 - protein, 221 aa, Artificial Sequence; identical to SEQ ID NO: 7595
  Description of Artificial Sequence: Synthetic polypeptide
  XENP019428 [CTLA-4]_H0_L0.13_Fab Heavy Chain

SEQ ID NO: 9086 - protein, 118 aa, Artificial Sequence; identical to SEQ ID NO: 3737
  Description of Artificial Sequence: Synthetic polypeptide
  VH of XENP019428

SEQ ID NO: 9087 - protein, 5 aa, Artificial Sequence
  Description of Artificial Sequence: Synthetic peptide
  XENP019428 vhCDR1
SYTMH

SEQ ID NO: 9088 - protein, 17 aa, Artificial Sequence
  Description of Artificial Sequence: Synthetic peptide
  XENP019428 vhCDR2
FISYDGNNKYYADSVKG

SEQ ID NO: 9089 - protein, 9 aa, Artificial Sequence
  Description of Artificial Sequence: Synthetic peptide
  XENP019428 vhCDR3
TGWLGPFDY

SEQ ID NO: 9090 - protein, 215 aa, Artificial Sequence
  Description of Artificial Sequence: Synthetic polypeptide
  XENP019428 [CTLA-4]_H0_L0.13_Fab Light Chain
EIVLTQSPGTLSLSPGEPATLSCRASQSVGSSYLAWYQQKPGQAPRLLIYGAFSRATGIPDRFSGSGSGTDFTLTISRLEPEDFAVYYCQQYGSSPWTFGQGTKVEIKRTVAAPSVFIFPPSDEQLKSGTASVVCLLNNFYPREAKVQWKVDNALQSGNSQESVTEQDSKDSTYSLSSTLTLSKADYEKHKVYACEVTHQGLSSPVTKSFNRGEC

SEQ ID NO: 9091 - protein, 108 aa, Artificial Sequence; identical to SEQ ID NO: 6202
  Description of Artificial Sequence: Synthetic polypeptide
  VL of XENP019428

SEQ ID NO: 9092 - protein, 12 aa, Artificial Sequence
  Description of Artificial Sequence: Synthetic peptide
  XENP019428 vlCDR1
RASQSVGSSYLA

SEQ ID NO: 9093 - protein, 7 aa, Artificial Sequence
  Description of Artificial Sequence: Synthetic peptide
  XENP019428 vlCDR2
GAFSRAT

SEQ ID NO: 9094 - protein, 9 aa, Artificial Sequence
  Description of Artificial Sequence: Synthetic peptide
  XENP019428 vlCDR3
QQYGSSPWT

SEQ ID NO: 9095 - protein, 221 aa, Artificial Sequence; identical to SEQ ID NO: 7595
  Description of Artificial Sequence: Synthetic polypeptide
  XENP019429 [CTLA-4]_H0_L0.14_Fab Heavy Chain

SEQ ID NO: 9096 - protein, 118 aa, Artificial Sequence; identical to SEQ ID NO: 3737
  Description of Artificial Sequence: Synthetic polypeptide
  VH of XENP019429

SEQ ID NO: 9097 - protein, 5 aa, Artificial Sequence
  Description of Artificial Sequence: Synthetic peptide
  XENP019429 vhCDR1
SYTMH

SEQ ID NO: 9098 - protein, 17 aa, Artificial Sequence
  Description of Artificial Sequence: Synthetic peptide
  XENP019429 vhCDR2
FISYDGNNKYYADSVKG

SEQ ID NO: 9099 - protein, 9 aa, Artificial Sequence
  Description of Artificial Sequence: Synthetic peptide
  XENP019429 vhCDR3
TGWLGPFDY

SEQ ID NO: 9100 - protein, 215 aa, Artificial Sequence
  Description of Artificial Sequence: Synthetic polypeptide
  XENP019429 [CTLA-4]_H0_L0.14_Fab Light Chain
EIVLTQSPGTLSLSPGEQATLSCRASQSVGSSYLAWYQQKPGQAPRLLIYGAFSRATGIPDRFSGSGSGTDFTLTISRLEPEDFAVYYCQQYGSSPWTFGQGTKVEIKRTVAAPSVFIFPPSDEQLKSGTASVVCLLNNFYPREAKVQWKVDNALQSGNSQESVTEQDSKDSTYSLSSTLTLSKADYEKHKVYACEVTHQGLSSPVTKSFNRGEC

SEQ ID NO: 9101 - protein, 108 aa, Artificial Sequence; identical to SEQ ID NO: 6211
  Description of Artificial Sequence: Synthetic polypeptide
  VL of XENP019429

SEQ ID NO: 9102 - protein, 12 aa, Artificial Sequence
  Description of Artificial Sequence: Synthetic peptide
  XENP019429 vlCDR1
RASQSVGSSYLA

SEQ ID NO: 9103 - protein, 7 aa, Artificial Sequence
  Description of Artificial Sequence: Synthetic peptide
  XENP019429 vlCDR2
GAFSRAT

SEQ ID NO: 9104 - protein, 9 aa, Artificial Sequence
  Description of Artificial Sequence: Synthetic peptide
  XENP019429 vlCDR3
QQYGSSPWT

SEQ ID NO: 9105 - protein, 221 aa, Artificial Sequence; identical to SEQ ID NO: 7595
  Description of Artificial Sequence: Synthetic polypeptide
  XENP019430 [CTLA-4]_H0_L0.15_Fab Heavy Chain

SEQ ID NO: 9106 - protein, 118 aa, Artificial Sequence; identical to SEQ ID NO: 3737
  Description of Artificial Sequence: Synthetic polypeptide
  VH of XENP019430

SEQ ID NO: 9107 - protein, 5 aa, Artificial Sequence
  Description of Artificial Sequence: Synthetic peptide
  XENP019430 vhCDR1
SYTMH

SEQ ID NO: 9108 - protein, 17 aa, Artificial Sequence
  Description of Artificial Sequence: Synthetic peptide
  XENP019430 vhCDR2
FISYDGNNKYYADSVKG

SEQ ID NO: 9109 - protein, 9 aa, Artificial Sequence
  Description of Artificial Sequence: Synthetic peptide
  XENP019430 vhCDR3
TGWLGPFDY

SEQ ID NO: 9110 - protein, 215 aa, Artificial Sequence
  Description of Artificial Sequence: Synthetic polypeptide
  XENP019430 [CTLA-4]_H0_L0.15_Fab Light Chain
EIVLTQSPGTLSLSPGERVTLSCRASQSVGSSYLAWYQQKPGQAPRLLIYGAFSRATGIPDRFSGSGSGTDFTLTISRLEPEDFAVYYCQQYGSSPWTFGQGTKVEIKRTVAAPSVFIFPPSDEQLKSGTASVVCLLNNFYPREAKVQWKVDNALQSGNSQESVTEQDSKDSTYSLSSTLTLSKADYEKHKVYACEVTHQGLSSPVTKSFNRGEC

SEQ ID NO: 9111 - protein, 108 aa, Artificial Sequence; identical to SEQ ID NO: 6220
  Description of Artificial Sequence: Synthetic polypeptide
  VL of XENP019430

SEQ ID NO: 9112 - protein, 12 aa, Artificial Sequence
  Description of Artificial Sequence: Synthetic peptide
  XENP019430 vlCDR1
RASQSVGSSYLA

SEQ ID NO: 9113 - protein, 7 aa, Artificial Sequence
  Description of Artificial Sequence: Synthetic peptide
  XENP019430 vlCDR2
GAFSRAT

SEQ ID NO: 9114 - protein, 9 aa, Artificial Sequence
  Description of Artificial Sequence: Synthetic peptide
  XENP019430 vlCDR3
QQYGSSPWT

SEQ ID NO: 9115 - protein, 221 aa, Artificial Sequence; identical to SEQ ID NO: 7595
  Description of Artificial Sequence: Synthetic polypeptide
  XENP019431 [CTLA-4]_H0_L0.16_Fab Heavy Chain

SEQ ID NO: 9116 - protein, 118 aa, Artificial Sequence; identical to SEQ ID NO: 3737
  Description of Artificial Sequence: Synthetic polypeptide
  VH of XENP019431

SEQ ID NO: 9117 - protein, 5 aa, Artificial Sequence
  Description of Artificial Sequence: Synthetic peptide
  XENP019431 vhCDR1
SYTMH

SEQ ID NO: 9118 - protein, 17 aa, Artificial Sequence
  Description of Artificial Sequence: Synthetic peptide
  XENP019431 vhCDR2
FISYDGNNKYYADSVKG

SEQ ID NO: 9119 - protein, 9 aa, Artificial Sequence
  Description of Artificial Sequence: Synthetic peptide
  XENP019431 vhCDR3
TGWLGPFDY

SEQ ID NO: 9120 - protein, 215 aa, Artificial Sequence
  Description of Artificial Sequence: Synthetic polypeptide
  XENP019431 [CTLA-4]_H0_L0.16_Fab Light Chain
EIVLTQSPGTLSLSPGERASLSCRASQSVGSSYLAWYQQKPGQAPRLLIYGAFSRATGIPDRFSGSGSGTDFTLTISRLEPEDFAVYYCQQYGSSPWTFGQGTKVEIKRTVAAPSVFIFPPSDEQLKSGTASVVCLLNNFYPREAKVQWKVDNALQSGNSQESVTEQDSKDSTYSLSSTLTLSKADYEKHKVYACEVTHQGLSSPVTKSFNRGEC

SEQ ID NO: 9121 - protein, 108 aa, Artificial Sequence; identical to SEQ ID NO: 6229
  Description of Artificial Sequence: Synthetic polypeptide
  VL of XENP019431

SEQ ID NO: 9122 - protein, 12 aa, Artificial Sequence
  Description of Artificial Sequence: Synthetic peptide
  XENP019431 vlCDR1
RASQSVGSSYLA

SEQ ID NO: 9123 - protein, 7 aa, Artificial Sequence
  Description of Artificial Sequence: Synthetic peptide
  XENP019431 vlCDR2
GAFSRAT

SEQ ID NO: 9124 - protein, 9 aa, Artificial Sequence
  Description of Artificial Sequence: Synthetic peptide
  XENP019431 vlCDR3
QQYGSSPWT

SEQ ID NO: 9125 - protein, 221 aa, Artificial Sequence; identical to SEQ ID NO: 7595
  Description of Artificial Sequence: Synthetic polypeptide
  XENP019432 [CTLA-4]_H0_L0.17_Fab Heavy Chain

SEQ ID NO: 9126 - protein, 118 aa, Artificial Sequence; identical to SEQ ID NO: 3737
  Description of Artificial Sequence: Synthetic polypeptide
  VH of XENP019432

SEQ ID NO: 9127 - protein, 5 aa, Artificial Sequence
  Description of Artificial Sequence: Synthetic peptide
  XENP019432 vhCDR1
SYTMH

SEQ ID NO: 9128 - protein, 17 aa, Artificial Sequence
  Description of Artificial Sequence: Synthetic peptide
  XENP019432 vhCDR2
FISYDGNNKYYADSVKG

SEQ ID NO: 9129 - protein, 9 aa, Artificial Sequence
  Description of Artificial Sequence: Synthetic peptide
  XENP019432 vhCDR3
TGWLGPFDY

SEQ ID NO: 9130 - protein, 215 aa, Artificial Sequence
  Description of Artificial Sequence: Synthetic polypeptide
  XENP019432 [CTLA-4]_H0_L0.17_Fab Light Chain
EIVLTQSPGTLSLSPGERATISCRASQSVGSSYLAWYQQKPGQAPRLLIYGAFSRATGIPDRFSGSGSGTDFTLTISRLEPEDFAVYYCQQYGSSPWTFGQGTKVEIKRTVAAPSVFIFPPSDEQLKSGTASVVCLLNNFYPREAKVQWKVDNALQSGNSQESVTEQDSKDSTYSLSSTLTLSKADYEKHKVYACEVTHQGLSSPVTKSFNRGEC

SEQ ID NO: 9131 - protein, 108 aa, Artificial Sequence; identical to SEQ ID NO: 6238
  Description of Artificial Sequence: Synthetic polypeptide
  VL of XENP019432

SEQ ID NO: 9132 - protein, 12 aa, Artificial Sequence
  Description of Artificial Sequence: Synthetic peptide
  XENP019432 vlCDR1
RASQSVGSSYLA

SEQ ID NO: 9133 - protein, 7 aa, Artificial Sequence
  Description of Artificial Sequence: Synthetic peptide
  XENP019432 vlCDR2
GAFSRAT

SEQ ID NO: 9134 - protein, 9 aa, Artificial Sequence
  Description of Artificial Sequence: Synthetic peptide
  XENP019432 vlCDR3
QQYGSSPWT

SEQ ID NO: 9135 - protein, 221 aa, Artificial Sequence; identical to SEQ ID NO: 7595
  Description of Artificial Sequence: Synthetic polypeptide
  XENP019433 [CTLA-4]_H0_L0.18_Fab Heavy Chain

SEQ ID NO: 9136 - protein, 118 aa, Artificial Sequence; identical to SEQ ID NO: 3737
  Description of Artificial Sequence: Synthetic polypeptide
  VH of XENP019433

SEQ ID NO: 9137 - protein, 5 aa, Artificial Sequence
  Description of Artificial Sequence: Synthetic peptide
  XENP019433 vhCDR1
SYTMH

SEQ ID NO: 9138 - protein, 17 aa, Artificial Sequence
  Description of Artificial Sequence: Synthetic peptide
  XENP019433 vhCDR2
FISYDGNNKYYADSVKG

SEQ ID NO: 9139 - protein, 9 aa, Artificial Sequence
  Description of Artificial Sequence: Synthetic peptide
  XENP019433 vhCDR3
TGWLGPFDY

SEQ ID NO: 9140 - protein, 215 aa, Artificial Sequence
  Description of Artificial Sequence: Synthetic polypeptide
  XENP019433 [CTLA-4]_H0_L0.18_Fab Light Chain
EIVLTQSPGTLSLSPGERATLSCRSSQSVGSSYLAWYQQKPGQAPRLLIYGAFSRATGIPDRFSGSGSGTDFTLTISRLEPEDFAVYYCQQYGSSPWTFGQGTKVEIKRTVAAPSVFIFPPSDEQLKSGTASVVCLLNNFYPREAKVQWKVDNALQSGNSQESVTEQDSKDSTYSLSSTLTLSKADYEKHKVYACEVTHQGLSSPVTKSFNRGEC

SEQ ID NO: 9141 - protein, 108 aa, Artificial Sequence; identical to SEQ ID NO: 6247
  Description of Artificial Sequence: Synthetic polypeptide
  VL of XENP019433

SEQ ID NO: 9142 - protein, 12 aa, Artificial Sequence
  Description of Artificial Sequence: Synthetic peptide
  XENP019433 vlCDR1
RSSQSVGSSYLA

SEQ ID NO: 9143 - protein, 7 aa, Artificial Sequence
  Description of Artificial Sequence: Synthetic peptide
  XENP019433 vlCDR2
GAFSRAT

SEQ ID NO: 9144 - protein, 9 aa, Artificial Sequence
  Description of Artificial Sequence: Synthetic peptide
  XENP019433 vlCDR3
QQYGSSPWT

SEQ ID NO: 9145 - protein, 221 aa, Artificial Sequence; identical to SEQ ID NO: 7595
  Description of Artificial Sequence: Synthetic polypeptide
  XENP019434 [CTLA-4]_H0_L0.19_Fab Heavy Chain

SEQ ID NO: 9146 - protein, 118 aa, Artificial Sequence; identical to SEQ ID NO: 3737
  Description of Artificial Sequence: Synthetic polypeptide
  VH of XENP019434

SEQ ID NO: 9147 - protein, 5 aa, Artificial Sequence
  Description of Artificial Sequence: Synthetic peptide
  XENP019434 vhCDR1
SYTMH

SEQ ID NO: 9148 - protein, 17 aa, Artificial Sequence
  Description of Artificial Sequence: Synthetic peptide
  XENP019434 vhCDR2
FISYDGNNKYYADSVKG

SEQ ID NO: 9149 - protein, 9 aa, Artificial Sequence
  Description of Artificial Sequence: Synthetic peptide
  XENP019434 vhCDR3
TGWLGPFDY

SEQ ID NO: 9150 - protein, 215 aa, Artificial Sequence
  Description of Artificial Sequence: Synthetic polypeptide
  XENP019434 [CTLA-4]_H0_L0.19_Fab Light Chain
EIVLTQSPGTLSLSPGERATLSCRASQSDGSSYLAWYQQKPGQAPRLLIYGAFSRATGIPDRFSGSGSGTDFTLTISRLEPEDFAVYYCQQYGSSPWTFGQGTKVEIKRTVAAPSVFIFPPSDEQLKSGTASVVCLLNNFYPREAKVQWKVDNALQSGNSQESVTEQDSKDSTYSLSSTLTLSKADYEKHKVYACEVTHQGLSSPVTKSFNRGEC

SEQ ID NO: 9151 - protein, 108 aa, Artificial Sequence; identical to SEQ ID NO: 6256
  Description of Artificial Sequence: Synthetic polypeptide
  VL of XENP019434

SEQ ID NO: 9152 - protein, 12 aa, Artificial Sequence
  Description of Artificial Sequence: Synthetic peptide
  XENP019434 vlCDR1
RASQSDGSSYLA

SEQ ID NO: 9153 - protein, 7 aa, Artificial Sequence
  Description of Artificial Sequence: Synthetic peptide
  XENP019434 vlCDR2
GAFSRAT

SEQ ID NO: 9154 - protein, 9 aa, Artificial Sequence
  Description of Artificial Sequence: Synthetic peptide
  XENP019434 vlCDR3
QQYGSSPWT

SEQ ID NO: 9155 - protein, 221 aa, Artificial Sequence; identical to SEQ ID NO: 7595
  Description of Artificial Sequence: Synthetic polypeptide
  XENP019435 [CTLA-4]_H0_L0.20_Fab Heavy Chain

SEQ ID NO: 9156 - protein, 118 aa, Artificial Sequence; identical to SEQ ID NO: 3737
  Description of Artificial Sequence: Synthetic polypeptide
  VH of XENP019435

SEQ ID NO: 9157 - protein, 5 aa, Artificial Sequence
  Description of Artificial Sequence: Synthetic peptide
  XENP019435 vhCDR1
SYTMH

SEQ ID NO: 9158 - protein, 17 aa, Artificial Sequence
  Description of Artificial Sequence: Synthetic peptide
  XENP019435 vhCDR2
FISYDGNNKYYADSVKG

SEQ ID NO: 9159 - protein, 9 aa, Artificial Sequence
  Description of Artificial Sequence: Synthetic peptide
  XENP019435 vhCDR3
TGWLGPFDY

SEQ ID NO: 9160 - protein, 215 aa, Artificial Sequence
  Description of Artificial Sequence: Synthetic polypeptide
  XENP019435 [CTLA-4]_H0_L0.20_Fab Light Chain
EIVLTQSPGTLSLSPGERATLSCRASQSSGSSYLAWYQQKPGQAPRLLIYGAFSRATGIPDRFSGSGSGTDFTLTISRLEPEDFAVYYCQQYGSSPWTFGQGTKVEIKRTVAAPSVFIFPPSDEQLKSGTASVVCLLNNFYPREAKVQWKVDNALQSGNSQESVTEQDSKDSTYSLSSTLTLSKADYEKHKVYACEVTHQGLSSPVTKSFNRGEC

SEQ ID NO: 9161 - protein, 108 aa, Artificial Sequence; identical to SEQ ID NO: 6265
  Description of Artificial Sequence: Synthetic polypeptide
  VL of XENP019435

SEQ ID NO: 9162 - protein, 12 aa, Artificial Sequence
  Description of Artificial Sequence: Synthetic peptide
  XENP019435 vlCDR1
RASQSSGSSYLA

SEQ ID NO: 9163 - protein, 7 aa, Artificial Sequence
  Description of Artificial Sequence: Synthetic peptide
  XENP019435 vlCDR2
GAFSRAT

SEQ ID NO: 9164 - protein, 9 aa, Artificial Sequence
  Description of Artificial Sequence: Synthetic peptide
  XENP019435 vlCDR3
QQYGSSPWT

SEQ ID NO: 9165 - protein, 221 aa, Artificial Sequence; identical to SEQ ID NO: 7595
  Description of Artificial Sequence: Synthetic polypeptide
  XENP019436 [CTLA-4]_H0_L0.21_Fab Heavy Chain

SEQ ID NO: 9166 - protein, 118 aa, Artificial Sequence; identical to SEQ ID NO: 3737
  Description of Artificial Sequence: Synthetic polypeptide
  VH of XENP019436

SEQ ID NO: 9167 - protein, 5 aa, Artificial Sequence
  Description of Artificial Sequence: Synthetic peptide
  XENP019436 vhCDR1
SYTMH

SEQ ID NO: 9168 - protein, 17 aa, Artificial Sequence
  Description of Artificial Sequence: Synthetic peptide
  XENP019436 vhCDR2
FISYDGNNKYYADSVKG

SEQ ID NO: 9169 - protein, 9 aa, Artificial Sequence
  Description of Artificial Sequence: Synthetic peptide
  XENP019436 vhCDR3
TGWLGPFDY

SEQ ID NO: 9170 - protein, 215 aa, Artificial Sequence
  Description of Artificial Sequence: Synthetic polypeptide
  XENP019436 [CTLA-4]_H0_L0.21_Fab Light Chain
EIVLTQSPGTLSLSPGERATLSCRASQSVASSYLAWYQQKPGQAPRLLIYGAFSRATGIPDRFSGSGSGTDFTLTISRLEPEDFAVYYCQQYGSSPWTFGQGTKVEIKRTVAAPSVFIFPPSDEQLKSGTASVVCLLNNFYPREAKVQWKVDNALQSGNSQESVTEQDSKDSTYSLSSTLTLSKADYEKHKVYACEVTHQGLSSPVTKSFNRGEC

SEQ ID NO: 9171 - protein, 108 aa, Artificial Sequence; identical to SEQ ID NO: 6274
  Description of Artificial Sequence: Synthetic polypeptide
  VL of XENP019436

SEQ ID NO: 9172 - protein, 12 aa, Artificial Sequence
  Description of Artificial Sequence: Synthetic peptide
  XENP019436 vlCDR1
RASQSVASSYLA

SEQ ID NO: 9173 - protein, 7 aa, Artificial Sequence
  Description of Artificial Sequence: Synthetic peptide
  XENP019436 vlCDR2
GAFSRAT

SEQ ID NO: 9174 - protein, 9 aa, Artificial Sequence
  Description of Artificial Sequence: Synthetic peptide
  XENP019436 vlCDR3
QQYGSSPWT

SEQ ID NO: 9175 - protein, 221 aa, Artificial Sequence; identical to SEQ ID NO: 7595
  Description of Artificial Sequence: Synthetic polypeptide
  XENP019437 [CTLA-4]_H0_L0.22_Fab Heavy Chain

SEQ ID NO: 9176 - protein, 118 aa, Artificial Sequence; identical to SEQ ID NO: 3737
  Description of Artificial Sequence: Synthetic polypeptide
  VH of XENP019437

SEQ ID NO: 9177 - protein, 5 aa, Artificial Sequence
  Description of Artificial Sequence: Synthetic peptide
  XENP019437 vhCDR1
SYTMH

SEQ ID NO: 9178 - protein, 17 aa, Artificial Sequence
  Description of Artificial Sequence: Synthetic peptide
  XENP019437 vhCDR2
FISYDGNNKYYADSVKG

SEQ ID NO: 9179 - protein, 9 aa, Artificial Sequence
  Description of Artificial Sequence: Synthetic peptide
  XENP019437 vhCDR3
TGWLGPFDY

SEQ ID NO: 9180 - protein, 215 aa, Artificial Sequence; identical to SEQ ID NO: 2410
  Description of Artificial Sequence: Synthetic polypeptide
  XENP019437 [CTLA-4]_H0_L0.22_Fab Light Chain

SEQ ID NO: 9181 - protein, 108 aa, Artificial Sequence; identical to SEQ ID NO: 2411
  Description of Artificial Sequence: Synthetic polypeptide
  VL of XENP019437

SEQ ID NO: 9182 - protein, 12 aa, Artificial Sequence
  Description of Artificial Sequence: Synthetic peptide
  XENP019437 vlCDR1
RASQSVSSSYLA

SEQ ID NO: 9183 - protein, 7 aa, Artificial Sequence
  Description of Artificial Sequence: Synthetic peptide
  XENP019437 vlCDR2
GAFSRAT

SEQ ID NO: 9184 - protein, 9 aa, Artificial Sequence
  Description of Artificial Sequence: Synthetic peptide
  XENP019437 vlCDR3
QQYGSSPWT

SEQ ID NO: 9185 - protein, 221 aa, Artificial Sequence; identical to SEQ ID NO: 7595
  Description of Artificial Sequence: Synthetic polypeptide
  XENP019438 [CTLA-4]_H0_L0.23_Fab Heavy Chain

SEQ ID NO: 9186 - protein, 118 aa, Artificial Sequence; identical to SEQ ID NO: 3737
  Description of Artificial Sequence: Synthetic polypeptide
  VH of XENP019438

SEQ ID NO: 9187 - protein, 5 aa, Artificial Sequence
  Description of Artificial Sequence: Synthetic peptide
  XENP019438 vhCDR1
SYTMH

SEQ ID NO: 9188 - protein, 17 aa, Artificial Sequence
  Description of Artificial Sequence: Synthetic peptide
  XENP019438 vhCDR2
FISYDGNNKYYADSVKG

SEQ ID NO: 9189 - protein, 9 aa, Artificial Sequence
  Description of Artificial Sequence: Synthetic peptide
  XENP019438 vhCDR3
TGWLGPFDY

SEQ ID NO: 9190 - protein, 215 aa, Artificial Sequence
  Description of Artificial Sequence: Synthetic polypeptide
  XENP019438 [CTLA-4]_H0_L0.23_Fab Light Chain
EIVLTQSPGTLSLSPGERATLSCRASQSVTSSYLAWYQQKPGQAPRLLIYGAFSRATGIPDRFSGSGSGTDFTLTISRLEPEDFAVYYCQQYGSSPWTFGQGTKVEIKRTVAAPSVFIFPPSDEQLKSGTASVVCLLNNFYPREAKVQWKVDNALQSGNSQESVTEQDSKDSTYSLSSTLTLSKADYEKHKVYACEVTHQGLSSPVTKSFNRGEC

SEQ ID NO: 9191 - protein, 108 aa, Artificial Sequence; identical to SEQ ID NO: 6292
  Description of Artificial Sequence: Synthetic polypeptide
  VL of XENP019438

SEQ ID NO: 9192 - protein, 12 aa, Artificial Sequence
  Description of Artificial Sequence: Synthetic peptide
  XENP019438 vlCDR1
RASQSVTSSYLA

SEQ ID NO: 9193 - protein, 7 aa, Artificial Sequence
  Description of Artificial Sequence: Synthetic peptide
  XENP019438 vlCDR2
GAFSRAT

SEQ ID NO: 9194 - protein, 9 aa, Artificial Sequence
  Description of Artificial Sequence: Synthetic peptide
  XENP019438 vlCDR3
QQYGSSPWT

SEQ ID NO: 9195 - protein, 221 aa, Artificial Sequence; identical to SEQ ID NO: 7595
  Description of Artificial Sequence: Synthetic polypeptide
  XENP019439 [CTLA-4]_H0_L0.24_Fab Heavy Chain

SEQ ID NO: 9196 - protein, 118 aa, Artificial Sequence; identical to SEQ ID NO: 3737
  Description of Artificial Sequence: Synthetic polypeptide
  VH of XENP019439

SEQ ID NO: 9197 - protein, 5 aa, Artificial Sequence
  Description of Artificial Sequence: Synthetic peptide
  XENP019439 vhCDR1
SYTMH

SEQ ID NO: 9198 - protein, 17 aa, Artificial Sequence
  Description of Artificial Sequence: Synthetic peptide
  XENP019439 vhCDR2
FISYDGNNKYYADSVKG

SEQ ID NO: 9199 - protein, 9 aa, Artificial Sequence
  Description of Artificial Sequence: Synthetic peptide
  XENP019439 vhCDR3
TGWLGPFDY

SEQ ID NO: 9200 - protein, 215 aa, Artificial Sequence
  Description of Artificial Sequence: Synthetic polypeptide
  XENP019439 [CTLA-4]_H0_L0.24_Fab Light Chain
EIVLTQSPGTLSLSPGERATLSCRASQSVGASYLAWYQQKPGQAPRLLIYGAFSRATGIPDRFSGSGSGTDFTLTISRLEPEDFAVYYCQQYGSSPWTFGQGTKVEIKRTVAAPSVFIFPPSDEQLKSGTASVVCLLNNFYPREAKVQWKVDNALQSGNSQESVTEQDSKDSTYSLSSTLTLSKADYEKHKVYACEVTHQGLSSPVTKSFNRGEC

SEQ ID NO: 9201 - protein, 108 aa, Artificial Sequence; identical to SEQ ID NO: 6301
  Description of Artificial Sequence: Synthetic polypeptide
  VL of XENP019439

SEQ ID NO: 9202 - protein, 12 aa, Artificial Sequence
  Description of Artificial Sequence: Synthetic peptide
  XENP019439 vlCDR1
RASQSVGASYLA

SEQ ID NO: 9203 - protein, 7 aa, Artificial Sequence
  Description of Artificial Sequence: Synthetic peptide
  XENP019439 vlCDR2
GAFSRAT

SEQ ID NO: 9204 - protein, 9 aa, Artificial Sequence
  Description of Artificial Sequence: Synthetic peptide
  XENP019439 vlCDR3
QQYGSSPWT

SEQ ID NO: 9205 - protein, 221 aa, Artificial Sequence; identical to SEQ ID NO: 7595
  Description of Artificial Sequence: Synthetic polypeptide
  XENP019440 [CTLA-4]_H0_L0.25_Fab Heavy Chain

SEQ ID NO: 9206 - protein, 118 aa, Artificial Sequence; identical to SEQ ID NO: 3737
  Description of Artificial Sequence: Synthetic polypeptide
  VH of XENP019440

SEQ ID NO: 9207 - protein, 5 aa, Artificial Sequence
  Description of Artificial Sequence: Synthetic peptide
  XENP019440 vhCDR1
SYTMH

SEQ ID NO: 9208 - protein, 17 aa, Artificial Sequence
  Description of Artificial Sequence: Synthetic peptide
  XENP019440 vhCDR2
FISYDGNNKYYADSVKG

SEQ ID NO: 9209 - protein, 9 aa, Artificial Sequence
  Description of Artificial Sequence: Synthetic peptide
  XENP019440 vhCDR3
TGWLGPFDY

SEQ ID NO: 9210 - protein, 215 aa, Artificial Sequence
  Description of Artificial Sequence: Synthetic polypeptide
  XENP019440 [CTLA-4]_H0_L0.25_Fab Light Chain
EIVLTQSPGTLSLSPGERATLSCRASQSVGGSYLAWYQQKPGQAPRLLIYGAFSRATGIPDRFSGSGSGTDFTLTISRLEPEDFAVYYCQQYGSSPWTFGQGTKVEIKRTVAAPSVFIFPPSDEQLKSGTASVVCLLNNFYPREAKVQWKVDNALQSGNSQESVTEQDSKDSTYSLSSTLTLSKADYEKHKVYACEVTHQGLSSPVTKSFNRGEC

SEQ ID NO: 9211 - protein, 108 aa, Artificial Sequence; identical to SEQ ID NO: 6310
  Description of Artificial Sequence: Synthetic polypeptide
  VL of XENP019440

SEQ ID NO: 9212 - protein, 12 aa, Artificial Sequence
  Description of Artificial Sequence: Synthetic peptide
  XENP019440 vlCDR1
RASQSVGGSYLA

SEQ ID NO: 9213 - protein, 7 aa, Artificial Sequence
  Description of Artificial Sequence: Synthetic peptide
  XENP019440 vlCDR2
GAFSRAT

SEQ ID NO: 9214 - protein, 9 aa, Artificial Sequence
  Description of Artificial Sequence: Synthetic peptide
  XENP019440 vlCDR3
QQYGSSPWT

SEQ ID NO: 9215 - protein, 221 aa, Artificial Sequence; identical to SEQ ID NO: 7595
  Description of Artificial Sequence: Synthetic polypeptide
  XENP019441 [CTLA-4]_H0_L0.26_Fab Heavy Chain

SEQ ID NO: 9216 - protein, 118 aa, Artificial Sequence; identical to SEQ ID NO: 3737
  Description of Artificial Sequence: Synthetic polypeptide
  VH of XENP019441

SEQ ID NO: 9217 - protein, 5 aa, Artificial Sequence
  Description of Artificial Sequence: Synthetic peptide
  XENP019441 vhCDR1
SYTMH

SEQ ID NO: 9218 - protein, 17 aa, Artificial Sequence
  Description of Artificial Sequence: Synthetic peptide
  XENP019441 vhCDR2
FISYDGNNKYYADSVKG

SEQ ID NO: 9219 - protein, 9 aa, Artificial Sequence
  Description of Artificial Sequence: Synthetic peptide
  XENP019441 vhCDR3
TGWLGPFDY

SEQ ID NO: 9220 - protein, 215 aa, Artificial Sequence
  Description of Artificial Sequence: Synthetic polypeptide
  XENP019441 [CTLA-4]_H0_L0.26_Fab Light Chain
EIVLTQSPGTLSLSPGERATLSCRASQSVGNSYLAWYQQKPGQAPRLLIYGAFSRATGIPDRFSGSGSGTDFTLTISRLEPEDFAVYYCQQYGSSPWTFGQGTKVEIKRTVAAPSVFIFPPSDEQLKSGTASVVCLLNNFYPREAKVQWKVDNALQSGNSQESVTEQDSKDSTYSLSSTLTLSKADYEKHKVYACEVTHQGLSSPVTKSFNRGEC

SEQ ID NO: 9221 - protein, 108 aa, Artificial Sequence; identical to SEQ ID NO: 6319
  Description of Artificial Sequence: Synthetic polypeptide
  VL of XENP019441

SEQ ID NO: 9222 - protein, 12 aa, Artificial Sequence
  Description of Artificial Sequence: Synthetic peptide
  XENP019441 vlCDR1
RASQSVGNSYLA

SEQ ID NO: 9223 - protein, 7 aa, Artificial Sequence
  Description of Artificial Sequence: Synthetic peptide
  XENP019441 vlCDR2
GAFSRAT

SEQ ID NO: 9224 - protein, 9 aa, Artificial Sequence
  Description of Artificial Sequence: Synthetic peptide
  XENP019441 vlCDR3
QQYGSSPWT

SEQ ID NO: 9225 - protein, 221 aa, Artificial Sequence; identical to SEQ ID NO: 7595
  Description of Artificial Sequence: Synthetic polypeptide
  XENP019442 [CTLA-4]_H0_L0.27_Fab Heavy Chain

SEQ ID NO: 9226 - protein, 118 aa, Artificial Sequence; identical to SEQ ID NO: 3737
  Description of Artificial Sequence: Synthetic polypeptide
  VH of XENP019442

SEQ ID NO: 9227 - protein, 5 aa, Artificial Sequence
  Description of Artificial Sequence: Synthetic peptide
  XENP019442 vhCDR1
SYTMH

SEQ ID NO: 9228 - protein, 17 aa, Artificial Sequence
  Description of Artificial Sequence: Synthetic peptide
  XENP019442 vhCDR2
FISYDGNNKYYADSVKG

SEQ ID NO: 9229 - protein, 9 aa, Artificial Sequence
  Description of Artificial Sequence: Synthetic peptide
  XENP019442 vhCDR3
TGWLGPFDY

SEQ ID NO: 9230 - protein, 215 aa, Artificial Sequence
  Description of Artificial Sequence: Synthetic polypeptide
  XENP019442 [CTLA-4]_H0_L0.27_Fab Light Chain
EIVLTQSPGTLSLSPGERATLSCRASQSVGQSYLAWYQQKPGQAPRLLIYGAFSRATGIPDRFSGSGSGTDFTLTISRLEPEDFAVYYCQQYGSSPWTFGQGTKVEIKRTVAAPSVFIFPPSDEQLKSGTASVVCLLNNFYPREAKVQWKVDNALQSGNSQESVTEQDSKDSTYSLSSTLTLSKADYEKHKVYACEVTHQGLSSPVTKSFNRGEC

SEQ ID NO: 9231 - protein, 108 aa, Artificial Sequence; identical to SEQ ID NO: 6328
  Description of Artificial Sequence: Synthetic polypeptide
  VL of XENP019442

SEQ ID NO: 9232 - protein, 12 aa, Artificial Sequence
  Description of Artificial Sequence: Synthetic peptide
  XENP019442 vlCDR1
RASQSVGQSYLA

SEQ ID NO: 9233 - protein, 7 aa, Artificial Sequence
  Description of Artificial Sequence: Synthetic peptide
  XENP019442 vlCDR2
GAFSRAT

SEQ ID NO: 9234 - protein, 9 aa, Artificial Sequence
  Description of Artificial Sequence: Synthetic peptide
  XENP019442 vlCDR3
QQYGSSPWT

SEQ ID NO: 9235 - protein, 221 aa, Artificial Sequence; identical to SEQ ID NO: 7595
  Description of Artificial Sequence: Synthetic polypeptide
  XENP019443 [CTLA-4]_H0_L0.28_Fab Heavy Chain

SEQ ID NO: 9236 - protein, 118 aa, Artificial Sequence; identical to SEQ ID NO: 3737
  Description of Artificial Sequence: Synthetic polypeptide
  VH of XENP019443

SEQ ID NO: 9237 - protein, 5 aa, Artificial Sequence
  Description of Artificial Sequence: Synthetic peptide
  XENP019443 vhCDR1
SYTMH

SEQ ID NO: 9238 - protein, 17 aa, Artificial Sequence
  Description of Artificial Sequence: Synthetic peptide
  XENP019443 vhCDR2
FISYDGNNKYYADSVKG

SEQ ID NO: 9239 - protein, 9 aa, Artificial Sequence
  Description of Artificial Sequence: Synthetic peptide
  XENP019443 vhCDR3
TGWLGPFDY

SEQ ID NO: 9240 - protein, 215 aa, Artificial Sequence
  Description of Artificial Sequence: Synthetic polypeptide
  XENP019443 [CTLA-4]_H0_L0.28_Fab Light Chain
EIVLTQSPGTLSLSPGERATLSCRASQSVGTSYLAWYQQKPGQAPRLLIYGAFSRATGIPDRFSGSGSGTDFTLTISRLEPEDFAVYYCQQYGSSPWTFGQGTKVEIKRTVAAPSVFIFPPSDEQLKSGTASVVCLLNNFYPREAKVQWKVDNALQSGNSQESVTEQDSKDSTYSLSSTLTLSKADYEKHKVYACEVTHQGLSSPVTKSFNRGEC

SEQ ID NO: 9241 - protein, 108 aa, Artificial Sequence; identical to SEQ ID NO: 6337
  Description of Artificial Sequence: Synthetic polypeptide
  VL of XENP019443

SEQ ID NO: 9242 - protein, 12 aa, Artificial Sequence
  Description of Artificial Sequence: Synthetic peptide
  XENP019443 vlCDR1
RASQSVGTSYLA

SEQ ID NO: 9243 - protein, 7 aa, Artificial Sequence
  Description of Artificial Sequence: Synthetic peptide
  XENP019443 vlCDR2
GAFSRAT

SEQ ID NO: 9244 - protein, 9 aa, Artificial Sequence
  Description of Artificial Sequence: Synthetic peptide
  XENP019443 vlCDR3
QQYGSSPWT

SEQ ID NO: 9245 - protein, 221 aa, Artificial Sequence; identical to SEQ ID NO: 7595
  Description of Artificial Sequence: Synthetic polypeptide
  XENP019444 [CTLA-4]_H0_L0.29_Fab Heavy Chain

SEQ ID NO: 9246 - protein, 118 aa, Artificial Sequence; identical to SEQ ID NO: 3737
  Description of Artificial Sequence: Synthetic polypeptide
  VH of XENP019444

SEQ ID NO: 9247 - protein, 5 aa, Artificial Sequence
  Description of Artificial Sequence: Synthetic peptide
  XENP019444 vhCDR1
SYTMH

SEQ ID NO: 9248 - protein, 17 aa, Artificial Sequence
  Description of Artificial Sequence: Synthetic peptide
  XENP019444 vhCDR2
FISYDGNNKYYADSVKG

SEQ ID NO: 9249 - protein, 9 aa, Artificial Sequence
  Description of Artificial Sequence: Synthetic peptide
  XENP019444 vhCDR3
TGWLGPFDY

SEQ ID NO: 9250 - protein, 215 aa, Artificial Sequence
  Description of Artificial Sequence: Synthetic polypeptide
  XENP019444 [CTLA-4]_H0_L0.29_Fab Light Chain
EIVLTQSPGTLSLSPGERATLSCRASQSVGSAYLAWYQQKPGQAPRLLIYGAFSRATGIPDRFSGSGSGTDFTLTISRLEPEDFAVYYCQQYGSSPWTFGQGTKVEIKRTVAAPSVFIFPPSDEQLKSGTASVVCLLNNFYPREAKVQWKVDNALQSGNSQESVTEQDSKDSTYSLSSTLTLSKADYEKHKVYACEVTHQGLSSPVTKSFNRGEC

SEQ ID NO: 9251 - protein, 108 aa, Artificial Sequence; identical to SEQ ID NO: 6346
  Description of Artificial Sequence: Synthetic polypeptide
  VL of XENP019444

SEQ ID NO: 9252 - protein, 12 aa, Artificial Sequence
  Description of Artificial Sequence: Synthetic peptide
  XENP019444 vlCDR1
RASQSVGSAYLA

SEQ ID NO: 9253 - protein, 7 aa, Artificial Sequence
  Description of Artificial Sequence: Synthetic peptide
  XENP019444 vlCDR2
GAFSRAT

SEQ ID NO: 9254 - protein, 9 aa, Artificial Sequence
  Description of Artificial Sequence: Synthetic peptide
  XENP019444 vlCDR3
QQYGSSPWT

SEQ ID NO: 9255 - protein, 221 aa, Artificial Sequence; identical to SEQ ID NO: 7595
  Description of Artificial Sequence: Synthetic polypeptide
  XENP019445 [CTLA-4]_H0_L0.30_Fab Heavy Chain

SEQ ID NO: 9256 - protein, 118 aa, Artificial Sequence; identical to SEQ ID NO: 3737
  Description of Artificial Sequence: Synthetic polypeptide
  VH of XENP019445

SEQ ID NO: 9257 - protein, 5 aa, Artificial Sequence
  Description of Artificial Sequence: Synthetic peptide
  XENP019445 vhCDR1
SYTMH

SEQ ID NO: 9258 - protein, 17 aa, Artificial Sequence
  Description of Artificial Sequence: Synthetic peptide
  XENP019445 vhCDR2
FISYDGNNKYYADSVKG

SEQ ID NO: 9259 - protein, 9 aa, Artificial Sequence
  Description of Artificial Sequence: Synthetic peptide
  XENP019445 vhCDR3
TGWLGPFDY

SEQ ID NO: 9260 - protein, 215 aa, Artificial Sequence
  Description of Artificial Sequence: Synthetic polypeptide
  XENP019445 [CTLA-4]_H0_L0.30_Fab Light Chain
EIVLTQSPGTLSLSPGERATLSCRASQSVGSGYLAWYQQKPGQAPRLLIYGAFSRATGIPDRFSGSGSGTDFTLTISRLEPEDFAVYYCQQYGSSPWTFGQGTKVEIKRTVAAPSVFIFPPSDEQLKSGTASVVCLLNNFYPREAKVQWKVDNALQSGNSQESVTEQDSKDSTYSLSSTLTLSKADYEKHKVYACEVTHQGLSSPVTKSFNRGEC

SEQ ID NO: 9261 - protein, 108 aa, Artificial Sequence; identical to SEQ ID NO: 6355
  Description of Artificial Sequence: Synthetic polypeptide
  VL of XENP019445

SEQ ID NO: 9262 - protein, 12 aa, Artificial Sequence
  Description of Artificial Sequence: Synthetic peptide
  XENP019445 vlCDR1
RASQSVGSGYLA

SEQ ID NO: 9263 - protein, 7 aa, Artificial Sequence
  Description of Artificial Sequence: Synthetic peptide
  XENP019445 vlCDR2
GAFSRAT

SEQ ID NO: 9264 - protein, 9 aa, Artificial Sequence
  Description of Artificial Sequence: Synthetic peptide
  XENP019445 vlCDR3
QQYGSSPWT

SEQ ID NO: 9265 - protein, 221 aa, Artificial Sequence; identical to SEQ ID NO: 7595
  Description of Artificial Sequence: Synthetic polypeptide
  XENP019446 [CTLA-4]_H0_L0.31_Fab Heavy Chain

SEQ ID NO: 9266 - protein, 118 aa, Artificial Sequence; identical to SEQ ID NO: 3737
  Description of Artificial Sequence: Synthetic polypeptide
  VH of XENP019446

SEQ ID NO: 9267 - protein, 5 aa, Artificial Sequence
  Description of Artificial Sequence: Synthetic peptide
  XENP019446 vhCDR1
SYTMH

SEQ ID NO: 9268 - protein, 17 aa, Artificial Sequence
  Description of Artificial Sequence: Synthetic peptide
  XENP019446 vhCDR2
FISYDGNNKYYADSVKG

SEQ ID NO: 9269 - protein, 9 aa, Artificial Sequence
  Description of Artificial Sequence: Synthetic peptide
  XENP019446 vhCDR3
TGWLGPFDY

SEQ ID NO: 9270 - protein, 215 aa, Artificial Sequence
  Description of Artificial Sequence: Synthetic polypeptide
  XENP019446 [CTLA-4]_H0_L0.31_Fab Light Chain
EIVLTQSPGTLSLSPGERATLSCRASQSVGSNYLAWYQQKPGQAPRLLIYGAFSRATGIPDRFSGSGSGTDFTLTISRLEPEDFAVYYCQQYGSSPWTFGQGTKVEIKRTVAAPSVFIFPPSDEQLKSGTASVVCLLNNFYPREAKVQWKVDNALQSGNSQESVTEQDSKDSTYSLSSTLTLSKADYEKHKVYACEVTHQGLSSPVTKSFNRGEC

SEQ ID NO: 9271 - protein, 108 aa, Artificial Sequence; identical to SEQ ID NO: 6364
  Description of Artificial Sequence: Synthetic polypeptide
  VL of XENP019446

SEQ ID NO: 9272 - protein, 12 aa, Artificial Sequence
  Description of Artificial Sequence: Synthetic peptide
  XENP019446 vlCDR1
RASQSVGSNYLA

SEQ ID NO: 9273 - protein, 7 aa, Artificial Sequence
  Description of Artificial Sequence: Synthetic peptide
  XENP019446 vlCDR2
GAFSRAT

SEQ ID NO: 9274 - protein, 9 aa, Artificial Sequence
  Description of Artificial Sequence: Synthetic peptide
  XENP019446 vlCDR3
QQYGSSPWT

SEQ ID NO: 9275 - protein, 221 aa, Artificial Sequence; identical to SEQ ID NO: 7595
  Description of Artificial Sequence: Synthetic polypeptide
  XENP019447 [CTLA-4]_H0_L0.32_Fab Heavy Chain

SEQ ID NO: 9276 - protein, 118 aa, Artificial Sequence; identical to SEQ ID NO: 3737
  Description of Artificial Sequence: Synthetic polypeptide
  VH of XENP019447

SEQ ID NO: 9277 - protein, 5 aa, Artificial Sequence
  Description of Artificial Sequence: Synthetic peptide
  XENP019447 vhCDR1
SYTMH

SEQ ID NO: 9278 - protein, 17 aa, Artificial Sequence
  Description of Artificial Sequence: Synthetic peptide
  XENP019447 vhCDR2
FISYDGNNKYYADSVKG

SEQ ID NO: 9279 - protein, 9 aa, Artificial Sequence
  Description of Artificial Sequence: Synthetic peptide
  XENP019447 vhCDR3
TGWLGPFDY

SEQ ID NO: 9280 - protein, 215 aa, Artificial Sequence
  Description of Artificial Sequence: Synthetic polypeptide
  XENP019447 [CTLA-4]_H0_L0.32_Fab Light Chain
EIVLTQSPGTLSLSPGERATLSCRASQSVGSQYLAWYQQKPGQAPRLLIYGAFSRATGIPDRFSGSGSGTDFTLTISRLEPEDFAVYYCQQYGSSPWTFGQGTKVEIKRTVAAPSVFIFPPSDEQLKSGTASVVCLLNNFYPREAKVQWKVDNALQSGNSQESVTEQDSKDSTYSLSSTLTLSKADYEKHKVYACEVTHQGLSSPVTKSFNRGEC

SEQ ID NO: 9281 - protein, 108 aa, Artificial Sequence; identical to SEQ ID NO: 6373
  Description of Artificial Sequence: Synthetic polypeptide
  VL of XENP019447

SEQ ID NO: 9282 - protein, 12 aa, Artificial Sequence
  Description of Artificial Sequence: Synthetic peptide
  XENP019447 vlCDR1
RASQSVGSQYLA

SEQ ID NO: 9283 - protein, 7 aa, Artificial Sequence
  Description of Artificial Sequence: Synthetic peptide
  XENP019447 vlCDR2
GAFSRAT

SEQ ID NO: 9284 - protein, 9 aa, Artificial Sequence
  Description of Artificial Sequence: Synthetic peptide
  XENP019447 vlCDR3
QQYGSSPWT

SEQ ID NO: 9285 - protein, 221 aa, Artificial Sequence; identical to SEQ ID NO: 7595
  Description of Artificial Sequence: Synthetic polypeptide
  XENP019448 [CTLA-4]_H0_L0.33_Fab Heavy Chain

SEQ ID NO: 9286 - protein, 118 aa, Artificial Sequence; identical to SEQ ID NO: 3737
  Description of Artificial Sequence: Synthetic polypeptide
  VH of XENP019448

SEQ ID NO: 9287 - protein, 5 aa, Artificial Sequence
  Description of Artificial Sequence: Synthetic peptide
  XENP019448 vhCDR1
SYTMH

SEQ ID NO: 9288 - protein, 17 aa, Artificial Sequence
  Description of Artificial Sequence: Synthetic peptide
  XENP019448 vhCDR2
FISYDGNNKYYADSVKG

SEQ ID NO: 9289 - protein, 9 aa, Artificial Sequence
  Description of Artificial Sequence: Synthetic peptide
  XENP019448 vhCDR3
TGWLGPFDY

SEQ ID NO: 9290 - protein, 215 aa, Artificial Sequence
  Description of Artificial Sequence: Synthetic polypeptide
  XENP019448 [CTLA-4]_H0_L0.33_Fab Light Chain
EIVLTQSPGTLSLSPGERATLSCRASQSVGSTYLAWYQQKPGQAPRLLIYGAFSRATGIPDRFSGSGSGTDFTLTISRLEPEDFAVYYCQQYGSSPWTFGQGTKVEIKRTVAAPSVFIFPPSDEQLKSGTASVVCLLNNFYPREAKVQWKVDNALQSGNSQESVTEQDSKDSTYSLSSTLTLSKADYEKHKVYACEVTHQGLSSPVTKSFNRGEC

SEQ ID NO: 9291 - protein, 108 aa, Artificial Sequence; identical to SEQ ID NO: 6382
  Description of Artificial Sequence: Synthetic polypeptide
  VL of XENP019448

SEQ ID NO: 9292 - protein, 12 aa, Artificial Sequence
  Description of Artificial Sequence: Synthetic peptide
  XENP019448 vlCDR1
RASQSVGSTYLA

SEQ ID NO: 9293 - protein, 7 aa, Artificial Sequence
  Description of Artificial Sequence: Synthetic peptide
  XENP019448 vlCDR2
GAFSRAT

SEQ ID NO: 9294 - protein, 9 aa, Artificial Sequence
  Description of Artificial Sequence: Synthetic peptide
  XENP019448 vlCDR3
QQYGSSPWT

SEQ ID NO: 9295 - protein, 221 aa, Artificial Sequence; identical to SEQ ID NO: 7595
  Description of Artificial Sequence: Synthetic polypeptide
  XENP019449 [CTLA-4]_H0_L0.34_Fab Heavy Chain

SEQ ID NO: 9296 - protein, 118 aa, Artificial Sequence; identical to SEQ ID NO: 3737
  Description of Artificial Sequence: Synthetic polypeptide
  VH of XENP019449

SEQ ID NO: 9297 - protein, 5 aa, Artificial Sequence
  Description of Artificial Sequence: Synthetic peptide
  XENP019449 vhCDR1
SYTMH

SEQ ID NO: 9298 - protein, 17 aa, Artificial Sequence
  Description of Artificial Sequence: Synthetic peptide
  XENP019449 vhCDR2
FISYDGNNKYYADSVKG

SEQ ID NO: 9299 - protein, 9 aa, Artificial Sequence
  Description of Artificial Sequence: Synthetic peptide
  XENP019449 vhCDR3
TGWLGPFDY

SEQ ID NO: 9300 - protein, 215 aa, Artificial Sequence
  Description of Artificial Sequence: Synthetic polypeptide
  XENP019449 [CTLA-4]_H0_L0.34_Fab Light Chain
EIVLTQSPGTLSLSPGERATLSCRASQSVGSSALAWYQQKPGQAPRLLIYGAFSRATGIPDRFSGSGSGTDFTLTISRLEPEDFAVYYCQQYGSSPWTFGQGTKVEIKRTVAAPSVFIFPPSDEQLKSGTASVVCLLNNFYPREAKVQWKVDNALQSGNSQESVTEQDSKDSTYSLSSTLTLSKADYEKHKVYACEVTHQGLSSPVTKSFNRGEC

SEQ ID NO: 9301 - protein, 108 aa, Artificial Sequence; identical to SEQ ID NO: 6391
  Description of Artificial Sequence: Synthetic polypeptide
  VL of XENP019449

SEQ ID NO: 9302 - protein, 12 aa, Artificial Sequence
  Description of Artificial Sequence: Synthetic peptide
  XENP019449 vlCDR1
RASQSVGSSALA

SEQ ID NO: 9303 - protein, 7 aa, Artificial Sequence
  Description of Artificial Sequence: Synthetic peptide
  XENP019449 vlCDR2
GAFSRAT

SEQ ID NO: 9304 - protein, 9 aa, Artificial Sequence
  Description of Artificial Sequence: Synthetic peptide
  XENP019449 vlCDR3
QQYGSSPWT

SEQ ID NO: 9305 - protein, 221 aa, Artificial Sequence; identical to SEQ ID NO: 7595
  Description of Artificial Sequence: Synthetic polypeptide
  XENP019450 [CTLA-4]_H0_L0.35_Fab Heavy Chain

SEQ ID NO: 9306 - protein, 118 aa, Artificial Sequence; identical to SEQ ID NO: 3737
  Description of Artificial Sequence: Synthetic polypeptide
  VH of XENP019450

SEQ ID NO: 9307 - protein, 5 aa, Artificial Sequence
  Description of Artificial Sequence: Synthetic peptide
  XENP019450 vhCDR1
SYTMH

SEQ ID NO: 9308 - protein, 17 aa, Artificial Sequence
  Description of Artificial Sequence: Synthetic peptide
  XENP019450 vhCDR2
FISYDGNNKYYADSVKG

SEQ ID NO: 9309 - protein, 9 aa, Artificial Sequence
  Description of Artificial Sequence: Synthetic peptide
  XENP019450 vhCDR3
TGWLGPFDY

SEQ ID NO: 9310 - protein, 215 aa, Artificial Sequence
  Description of Artificial Sequence: Synthetic polypeptide
  XENP019450 [CTLA-4]_H0_L0.35_Fab Light Chain
EIVLTQSPGTLSLSPGERATLSCRASQSVGSSFLAWYQQKPGQAPRLLIYGAFSRATGIPDRFSGSGSGTDFTLTISRLEPEDFAVYYCQQYGSSPWTFGQGTKVEIKRTVAAPSVFIFPPSDEQLKSGTASVVCLLNNFYPREAKVQWKVDNALQSGNSQESVTEQDSKDSTYSLSSTLTLSKADYEKHKVYACEVTHQGLSSPVTKSFNRGEC

SEQ ID NO: 9311 - protein, 108 aa, Artificial Sequence; identical to SEQ ID NO: 6400
  Description of Artificial Sequence: Synthetic polypeptide
  VL of XENP019450

SEQ ID NO: 9312 - protein, 12 aa, Artificial Sequence
  Description of Artificial Sequence: Synthetic peptide
  XENP019450 vlCDR1
RASQSVGSSFLA

SEQ ID NO: 9313 - protein, 7 aa, Artificial Sequence
  Description of Artificial Sequence: Synthetic peptide
  XENP019450 vlCDR2
GAFSRAT

SEQ ID NO: 9314 - protein, 9 aa, Artificial Sequence
  Description of Artificial Sequence: Synthetic peptide
  XENP019450 vlCDR3
QQYGSSPWT

SEQ ID NO: 9315 - protein, 221 aa, Artificial Sequence; identical to SEQ ID NO: 7595
  Description of Artificial Sequence: Synthetic polypeptide
  XENP019451 [CTLA-4]_H0_L0.36_Fab Heavy Chain

SEQ ID NO: 9316 - protein, 118 aa, Artificial Sequence; identical to SEQ ID NO: 3737
  Description of Artificial Sequence: Synthetic polypeptide
  VH of XENP019451

SEQ ID NO: 9317 - protein, 5 aa, Artificial Sequence
  Description of Artificial Sequence: Synthetic peptide
  XENP019451 vhCDR1
SYTMH

SEQ ID NO: 9318 - protein, 17 aa, Artificial Sequence
  Description of Artificial Sequence: Synthetic peptide
  XENP019451 vhCDR2
FISYDGNNKYYADSVKG

SEQ ID NO: 9319 - protein, 9 aa, Artificial Sequence
  Description of Artificial Sequence: Synthetic peptide
  XENP019451 vhCDR3
TGWLGPFDY

SEQ ID NO: 9320 - protein, 215 aa, Artificial Sequence
  Description of Artificial Sequence: Synthetic polypeptide
  XENP019451 [CTLA-4]_H0_L0.36_Fab Light Chain
EIVLTQSPGTLSLSPGERATLSCRASQSVGSSHLAWYQQKPGQAPRLLIYGAFSRATGIPDRFSGSGSGTDFTLTISRLEPEDFAVYYCQQYGSSPWTFGQGTKVEIKRTVAAPSVFIFPPSDEQLKSGTASVVCLLNNFYPREAKVQWKVDNALQSGNSQESVTEQDSKDSTYSLSSTLTLSKADYEKHKVYACEVTHQGLSSPVTKSFNRGEC

SEQ ID NO: 9321 - protein, 108 aa, Artificial Sequence; identical to SEQ ID NO: 6409
  Description of Artificial Sequence: Synthetic polypeptide
  VL of XENP019451

SEQ ID NO: 9322 - protein, 12 aa, Artificial Sequence
  Description of Artificial Sequence: Synthetic peptide
  XENP019451 vlCDR1
RASQSVGSSHLA

SEQ ID NO: 9323 - protein, 7 aa, Artificial Sequence
  Description of Artificial Sequence: Synthetic peptide
  XENP019451 vlCDR2
GAFSRAT

SEQ ID NO: 9324 - protein, 9 aa, Artificial Sequence
  Description of Artificial Sequence: Synthetic peptide
  XENP019451 vlCDR3
QQYGSSPWT

SEQ ID NO: 9325 - protein, 221 aa, Artificial Sequence; identical to SEQ ID NO: 7595
  Description of Artificial Sequence: Synthetic polypeptide
  XENP019452 [CTLA-4]_H0_L0.37_Fab Heavy Chain

SEQ ID NO: 9326 - protein, 118 aa, Artificial Sequence; identical to SEQ ID NO: 3737
  Description of Artificial Sequence: Synthetic polypeptide
  VH of XENP019452

SEQ ID NO: 9327 - protein, 5 aa, Artificial Sequence
  Description of Artificial Sequence: Synthetic peptide
  XENP019452 vhCDR1
SYTMH

SEQ ID NO: 9328 - protein, 17 aa, Artificial Sequence
  Description of Artificial Sequence: Synthetic peptide
  XENP019452 vhCDR2
FISYDGNNKYYADSVKG

SEQ ID NO: 9329 - protein, 9 aa, Artificial Sequence
  Description of Artificial Sequence: Synthetic peptide
  XENP019452 vhCDR3
TGWLGPFDY

SEQ ID NO: 9330 - protein, 215 aa, Artificial Sequence
  Description of Artificial Sequence: Synthetic polypeptide
  XENP019452 [CTLA-4]_H0_L0.37_Fab Light Chain
EIVLTQSPGTLSLSPGERATLSCRASQSVGSSLLAWYQQKPGQAPRLLIYGAFSRATGIPDRFSGSGSGTDFTLTISRLEPEDFAVYYCQQYGSSPWTFGQGTKVEIKRTVAAPSVFIFPPSDEQLKSGTASVVCLLNNFYPREAKVQWKVDNALQSGNSQESVTEQDSKDSTYSLSSTLTLSKADYEKHKVYACEVTHQGLSSPVTKSFNRGEC

SEQ ID NO: 9331 - protein, 108 aa, Artificial Sequence; identical to SEQ ID NO: 6418
  Description of Artificial Sequence: Synthetic polypeptide
  VL of XENP019452

SEQ ID NO: 9332 - protein, 12 aa, Artificial Sequence
  Description of Artificial Sequence: Synthetic peptide
  XENP019452 vlCDR1
RASQSVGSSLLA

SEQ ID NO: 9333 - protein, 7 aa, Artificial Sequence
  Description of Artificial Sequence: Synthetic peptide
  XENP019452 vlCDR2
GAFSRAT

SEQ ID NO: 9334 - protein, 9 aa, Artificial Sequence
  Description of Artificial Sequence: Synthetic peptide
  XENP019452 vlCDR3
QQYGSSPWT

SEQ ID NO: 9335 - protein, 221 aa, Artificial Sequence; identical to SEQ ID NO: 7595
  Description of Artificial Sequence: Synthetic polypeptide
  XENP019453 [CTLA-4]_H0_L0.38_Fab Heavy Chain

SEQ ID NO: 9336 - protein, 118 aa, Artificial Sequence; identical to SEQ ID NO: 3737
  Description of Artificial Sequence: Synthetic polypeptide
  VH of XENP019453

SEQ ID NO: 9337 - protein, 5 aa, Artificial Sequence
  Description of Artificial Sequence: Synthetic peptide
  XENP019453 vhCDR1
SYTMH

SEQ ID NO: 9338 - protein, 17 aa, Artificial Sequence
  Description of Artificial Sequence: Synthetic peptide
  XENP019453 vhCDR2
FISYDGNNKYYADSVKG

SEQ ID NO: 9339 - protein, 9 aa, Artificial Sequence
  Description of Artificial Sequence: Synthetic peptide
  XENP019453 vhCDR3
TGWLGPFDY

SEQ ID NO: 9340 - protein, 215 aa, Artificial Sequence
  Description of Artificial Sequence: Synthetic polypeptide
  XENP019453 [CTLA-4]_H0_L0.38_Fab Light Chain
EIVLTQSPGTLSLSPGERATLSCRASQSVGSSNLAWYQQKPGQAPRLLIYGAFSRATGIPDRFSGSGSGTDFTLTISRLEPEDFAVYYCQQYGSSPWTFGQGTKVEIKRTVAAPSVFIFPPSDEQLKSGTASVVCLLNNFYPREAKVQWKVDNALQSGNSQESVTEQDSKDSTYSLSSTLTLSKADYEKHKVYACEVTHQGLSSPVTKSFNRGEC

SEQ ID NO: 9341 - protein, 108 aa, Artificial Sequence; identical to SEQ ID NO: 6427
  Description of Artificial Sequence: Synthetic polypeptide
  VL of XENP019453

SEQ ID NO: 9342 - protein, 12 aa, Artificial Sequence
  Description of Artificial Sequence: Synthetic peptide
  XENP019453 vlCDR1
RASQSVGSSNLA

SEQ ID NO: 9343 - protein, 7 aa, Artificial Sequence
  Description of Artificial Sequence: Synthetic peptide
  XENP019453 vlCDR2
GAFSRAT

SEQ ID NO: 9344 - protein, 9 aa, Artificial Sequence
  Description of Artificial Sequence: Synthetic peptide
  XENP019453 vlCDR3
QQYGSSPWT

SEQ ID NO: 9345 - protein, 221 aa, Artificial Sequence; identical to SEQ ID NO: 7595
  Description of Artificial Sequence: Synthetic polypeptide
  XENP019454 [CTLA-4]_H0_L0.39_Fab Heavy Chain

SEQ ID NO: 9346 - protein, 118 aa, Artificial Sequence; identical to SEQ ID NO: 3737
  Description of Artificial Sequence: Synthetic polypeptide
  VH of XENP019454

SEQ ID NO: 9347 - protein, 5 aa, Artificial Sequence
  Description of Artificial Sequence: Synthetic peptide
  XENP019454 vhCDR1
SYTMH

SEQ ID NO: 9348 - protein, 17 aa, Artificial Sequence
  Description of Artificial Sequence: Synthetic peptide
  XENP019454 vhCDR2
FISYDGNNKYYADSVKG

SEQ ID NO: 9349 - protein, 9 aa, Artificial Sequence
  Description of Artificial Sequence: Synthetic peptide
  XENP019454 vhCDR3
TGWLGPFDY

SEQ ID NO: 9350 - protein, 215 aa, Artificial Sequence
  Description of Artificial Sequence: Synthetic polypeptide
  XENP019454 [CTLA-4]_H0_L0.39_Fab Light Chain
EIVLTQSPGTLSLSPGERATLSCRASQSVGSSSLAWYQQKPGQAPRLLIYGAFSRATGIPDRFSGSGSGTDFTLTISRLEPEDFAVYYCQQYGSSPWTFGQGTKVEIKRTVAAPSVFIFPPSDEQLKSGTASVVCLLNNFYPREAKVQWKVDNALQSGNSQESVTEQDSKDSTYSLSSTLTLSKADYEKHKVYACEVTHQGLSSPVTKSFNRGEC

SEQ ID NO: 9351 - protein, 108 aa, Artificial Sequence; identical to SEQ ID NO: 6436
  Description of Artificial Sequence: Synthetic polypeptide
  VL of XENP019454

SEQ ID NO: 9352 - protein, 12 aa, Artificial Sequence
  Description of Artificial Sequence: Synthetic peptide
  XENP019454 vlCDR1
RASQSVGSSSLA

SEQ ID NO: 9353 - protein, 7 aa, Artificial Sequence
  Description of Artificial Sequence: Synthetic peptide
  XENP019454 vlCDR2
GAFSRAT

SEQ ID NO: 9354 - protein, 9 aa, Artificial Sequence
  Description of Artificial Sequence: Synthetic peptide
  XENP019454 vlCDR3
QQYGSSPWT

SEQ ID NO: 9355 - protein, 221 aa, Artificial Sequence; identical to SEQ ID NO: 7595
  Description of Artificial Sequence: Synthetic polypeptide
  XENP019455 [CTLA-4]_H0_L0.40_Fab Heavy Chain

SEQ ID NO: 9356 - protein, 118 aa, Artificial Sequence; identical to SEQ ID NO: 3737
  Description of Artificial Sequence: Synthetic polypeptide
  VH of XENP019455

SEQ ID NO: 9357 - protein, 5 aa, Artificial Sequence
  Description of Artificial Sequence: Synthetic peptide
  XENP019455 vhCDR1
SYTMH

SEQ ID NO: 9358 - protein, 17 aa, Artificial Sequence
  Description of Artificial Sequence: Synthetic peptide
  XENP019455 vhCDR2
FISYDGNNKYYADSVKG

SEQ ID NO: 9359 - protein, 9 aa, Artificial Sequence
  Description of Artificial Sequence: Synthetic peptide
  XENP019455 vhCDR3
TGWLGPFDY

SEQ ID NO: 9360 - protein, 215 aa, Artificial Sequence
  Description of Artificial Sequence: Synthetic polypeptide
  XENP019455 [CTLA-4]_H0_L0.40_Fab Light Chain
EIVLTQSPGTLSLSPGERATLSCRASQSVGSSVLAWYQQKPGQAPRLLIYGAFSRATGIPDRFSGSGSGTDFTLTISRLEPEDFAVYYCQQYGSSPWTFGQGTKVEIKRTVAAPSVFIFPPSDEQLKSGTASVVCLLNNFYPREAKVQWKVDNALQSGNSQESVTEQDSKDSTYSLSSTLTLSKADYEKHKVYACEVTHQGLSSPVTKSFNRGEC

SEQ ID NO: 9361 - protein, 108 aa, Artificial Sequence; identical to SEQ ID NO: 6445
  Description of Artificial Sequence: Synthetic polypeptide
  VL of XENP019455

SEQ ID NO: 9362 - protein, 12 aa, Artificial Sequence
  Description of Artificial Sequence: Synthetic peptide
  XENP019455 vlCDR1
RASQSVGSSVLA

SEQ ID NO: 9363 - protein, 7 aa, Artificial Sequence
  Description of Artificial Sequence: Synthetic peptide
  XENP019455 vlCDR2
GAFSRAT

SEQ ID NO: 9364 - protein, 9 aa, Artificial Sequence
  Description of Artificial Sequence: Synthetic peptide
  XENP019455 vlCDR3
QQYGSSPWT

SEQ ID NO: 9365 - protein, 221 aa, Artificial Sequence; identical to SEQ ID NO: 7595
  Description of Artificial Sequence: Synthetic polypeptide
  XENP019456 [CTLA-4]_H0_L0.41_Fab Heavy Chain

SEQ ID NO: 9366 - protein, 118 aa, Artificial Sequence; identical to SEQ ID NO: 3737
  Description of Artificial Sequence: Synthetic polypeptide
  VH of XENP019456

SEQ ID NO: 9367 - protein, 5 aa, Artificial Sequence
  Description of Artificial Sequence: Synthetic peptide
  XENP019456 vhCDR1
SYTMH

SEQ ID NO: 9368 - protein, 17 aa, Artificial Sequence
  Description of Artificial Sequence: Synthetic peptide
  XENP019456 vhCDR2
FISYDGNNKYYADSVKG

SEQ ID NO: 9369 - protein, 9 aa, Artificial Sequence
  Description of Artificial Sequence: Synthetic peptide
  XENP019456 vhCDR3
TGWLGPFDY

SEQ ID NO: 9370 - protein, 215 aa, Artificial Sequence
  Description of Artificial Sequence: Synthetic polypeptide
  XENP019456 [CTLA-4]_H0_L0.41_Fab Light Chain
EIVLTQSPGTLSLSPGERATLSCRASQSVGSSYMAWYQQKPGQAPRLLIYGAFSRATGIPDRFSGSGSGTDFTLTISRLEPEDFAVYYCQQYGSSPWTFGQGTKVEIKRTVAAPSVFIFPPSDEQLKSGTASVVCLLNNFYPREAKVQWKVDNALQSGNSQESVTEQDSKDSTYSLSSTLTLSKADYEKHKVYACEVTHQGLSSPVTKSFNRGEC

SEQ ID NO: 9371 - protein, 108 aa, Artificial Sequence; identical to SEQ ID NO: 6454
  Description of Artificial Sequence: Synthetic polypeptide
  VL of XENP019456

SEQ ID NO: 9372 - protein, 12 aa, Artificial Sequence
  Description of Artificial Sequence: Synthetic peptide
  XENP019456 vlCDR1
RASQSVGSSYMA

SEQ ID NO: 9373 - protein, 7 aa, Artificial Sequence
  Description of Artificial Sequence: Synthetic peptide
  XENP019456 vlCDR2
GAFSRAT

SEQ ID NO: 9374 - protein, 9 aa, Artificial Sequence
  Description of Artificial Sequence: Synthetic peptide
  XENP019456 vlCDR3
QQYGSSPWT

SEQ ID NO: 9375 - protein, 221 aa, Artificial Sequence; identical to SEQ ID NO: 7595
  Description of Artificial Sequence: Synthetic polypeptide
  XENP019457 [CTLA-4]_H0_L0.42_Fab Heavy Chain

SEQ ID NO: 9376 - protein, 118 aa, Artificial Sequence; identical to SEQ ID NO: 3737
  Description of Artificial Sequence: Synthetic polypeptide
  VH of XENP019457

SEQ ID NO: 9377 - protein, 5 aa, Artificial Sequence
  Description of Artificial Sequence: Synthetic peptide
  XENP019457 vhCDR1
SYTMH

SEQ ID NO: 9378 - protein, 17 aa, Artificial Sequence
  Description of Artificial Sequence: Synthetic peptide
  XENP019457 vhCDR2
FISYDGNNKYYADSVKG

SEQ ID NO: 9379 - protein, 9 aa, Artificial Sequence
  Description of Artificial Sequence: Synthetic peptide
  XENP019457 vhCDR3
TGWLGPFDY

SEQ ID NO: 9380 - protein, 215 aa, Artificial Sequence
  Description of Artificial Sequence: Synthetic polypeptide
  XENP019457 [CTLA-4]_H0_L0.42_Fab Light Chain
EIVLTQSPGTLSLSPGERATLSCRASQSVGSSYLDWYQQKPGQAPRLLIYGAFSRATGIPDRFSGSGSGTDFTLTISRLEPEDFAVYYCQQYGSSPWTFGQGTKVEIKRTVAAPSVFIFPPSDEQLKSGTASVVCLLNNFYPREAKVQWKVDNALQSGNSQESVTEQDSKDSTYSLSSTLTLSKADYEKHKVYACEVTHQGLSSPVTKSFNRGEC

SEQ ID NO: 9381 - protein, 108 aa, Artificial Sequence; identical to SEQ ID NO: 6463
  Description of Artificial Sequence: Synthetic polypeptide
  VL of XENP019457

SEQ ID NO: 9382 - protein, 12 aa, Artificial Sequence
  Description of Artificial Sequence: Synthetic peptide
  XENP019457 vlCDR1
RASQSVGSSYLD

SEQ ID NO: 9383 - protein, 7 aa, Artificial Sequence
  Description of Artificial Sequence: Synthetic peptide
  XENP019457 vlCDR2
GAFSRAT

SEQ ID NO: 9384 - protein, 9 aa, Artificial Sequence
  Description of Artificial Sequence: Synthetic peptide
  XENP019457 vlCDR3
QQYGSSPWT

SEQ ID NO: 9385 - protein, 221 aa, Artificial Sequence; identical to SEQ ID NO: 7595
  Description of Artificial Sequence: Synthetic polypeptide
  XENP019458 [CTLA-4]_H0_L0.43_Fab Heavy Chain

SEQ ID NO: 9386 - protein, 118 aa, Artificial Sequence; identical to SEQ ID NO: 3737
  Description of Artificial Sequence: Synthetic polypeptide
  VH of XENP019458

SEQ ID NO: 9387 - protein, 5 aa, Artificial Sequence
  Description of Artificial Sequence: Synthetic peptide
  XENP019458 vhCDR1
SYTMH

SEQ ID NO: 9388 - protein, 17 aa, Artificial Sequence
  Description of Artificial Sequence: Synthetic peptide
  XENP019458 vhCDR2
FISYDGNNKYYADSVKG

SEQ ID NO: 9389 - protein, 9 aa, Artificial Sequence
  Description of Artificial Sequence: Synthetic peptide
  XENP019458 vhCDR3
TGWLGPFDY

SEQ ID NO: 9390 - protein, 215 aa, Artificial Sequence
  Description of Artificial Sequence: Synthetic polypeptide
  XENP019458 [CTLA-4]_H0_L0.43_Fab Light Chain
EIVLTQSPGTLSLSPGERATLSCRASQSVGSSYLDWYQQKPGQAPRLLIYGAFSRATGIPDRFSGSGSGTDFTLTISRLEPEDFAVYYCKQYGSSPWTFGQGTKVEIKRTVAAPSVFIFPPSDEQLKSGTASVVCLLNNFYPREAKVQWKVDNALQSGNSQESVTEQDSKDSTYSLSSTLTLSKADYEKHKVYACEVTHQGLSSPVTKSFNRGEC

SEQ ID NO: 9391 - protein, 108 aa, Artificial Sequence; identical to SEQ ID NO: 6472
  Description of Artificial Sequence: Synthetic polypeptide
  VL of XENP019458

SEQ ID NO: 9392 - protein, 12 aa, Artificial Sequence
  Description of Artificial Sequence: Synthetic peptide
  XENP019458 vlCDR1
RASQSVGSSYLD

SEQ ID NO: 9393 - protein, 7 aa, Artificial Sequence
  Description of Artificial Sequence: Synthetic peptide
  XENP019458 vlCDR2
GAFSRAT

SEQ ID NO: 9394 - protein, 9 aa, Artificial Sequence
  Description of Artificial Sequence: Synthetic peptide
  XENP019458 vlCDR3
KQYGSSPWT

SEQ ID NO: 9395 - protein, 221 aa, Artificial Sequence; identical to SEQ ID NO: 7595
  Description of Artificial Sequence: Synthetic polypeptide
  XENP019459 [CTLA-4]_H0_L0.44_Fab Heavy Chain

SEQ ID NO: 9396 - protein, 118 aa, Artificial Sequence; identical to SEQ ID NO: 3737
  Description of Artificial Sequence: Synthetic polypeptide
  VH of XENP019459

SEQ ID NO: 9397 - protein, 5 aa, Artificial Sequence
  Description of Artificial Sequence: Synthetic peptide
  XENP019459 vhCDR1
SYTMH

SEQ ID NO: 9398 - protein, 17 aa, Artificial Sequence
  Description of Artificial Sequence: Synthetic peptide
  XENP019459 vhCDR2
FISYDGNNKYYADSVKG

SEQ ID NO: 9399 - protein, 9 aa, Artificial Sequence
  Description of Artificial Sequence: Synthetic peptide
  XENP019459 vhCDR3
TGWLGPFDY

SEQ ID NO: 9400 - protein, 215 aa, Artificial Sequence
  Description of Artificial Sequence: Synthetic polypeptide
  XENP019459 [CTLA-4]_H0_L0.44_Fab Light Chain
EIVLTQSPGTLSLSPGERATLSCRASQSVGSSYLSWYQQKPGQAPRLLIYGAFSRATGIPDRFSGSGSGTDFTLTISRLEPEDFAVYYCQQYGSSPWTFGQGTKVEIKRTVAAPSVFIFPPSDEQLKSGTASVVCLLNNFYPREAKVQWKVDNALQSGNSQESVTEQDSKDSTYSLSSTLTLSKADYEKHKVYACEVTHQGLSSPVTKSFNRGEC

SEQ ID NO: 9401 - protein, 108 aa, Artificial Sequence; identical to SEQ ID NO: 6481
  Description of Artificial Sequence: Synthetic polypeptide
  VL of XENP019459

SEQ ID NO: 9402 - protein, 12 aa, Artificial Sequence
  Description of Artificial Sequence: Synthetic peptide
  XENP019459 vlCDR1
RASQSVGSSYLS

SEQ ID NO: 9403 - protein, 7 aa, Artificial Sequence
  Description of Artificial Sequence: Synthetic peptide
  XENP019459 vlCDR2
GAFSRAT

SEQ ID NO: 9404 - protein, 9 aa, Artificial Sequence
  Description of Artificial Sequence: Synthetic peptide
  XENP019459 vlCDR3
QQYGSSPWT

SEQ ID NO: 9405 - protein, 221 aa, Artificial Sequence; identical to SEQ ID NO: 7595
  Description of Artificial Sequence: Synthetic polypeptide
  XENP019460 [CTLA-4]_H0_L0.45_Fab Heavy Chain

SEQ ID NO: 9406 - protein, 118 aa, Artificial Sequence; identical to SEQ ID NO: 3737
  Description of Artificial Sequence: Synthetic polypeptide
  VH of XENP019460

SEQ ID NO: 9407 - protein, 5 aa, Artificial Sequence
  Description of Artificial Sequence: Synthetic peptide
  XENP019460 vhCDR1
SYTMH

SEQ ID NO: 9408 - protein, 17 aa, Artificial Sequence
  Description of Artificial Sequence: Synthetic peptide
  XENP019460 vhCDR2
FISYDGNNKYYADSVKG

SEQ ID NO: 9409 - protein, 9 aa, Artificial Sequence
  Description of Artificial Sequence: Synthetic peptide
  XENP019460 vhCDR3
TGWLGPFDY

SEQ ID NO: 9410 - protein, 215 aa, Artificial Sequence
  Description of Artificial Sequence: Synthetic polypeptide
  XENP019460 [CTLA-4]_H0_L0.45_Fab Light Chain
EIVLTQSPGTLSLSPGERATLSCRASQSVGSSYLTWYQQKPGQAPRLLIYGAFSRATGIPDRFSGSGSGTDFTLTISRLEPEDFAVYYCQQYGSSPWTFGQGTKVEIKRTVAAPSVFIFPPSDEQLKSGTASVVCLLNNFYPREAKVQWKVDNALQSGNSQESVTEQDSKDSTYSLSSTLTLSKADYEKHKVYACEVTHQGLSSPVTKSFNRGEC

SEQ ID NO: 9411 - protein, 108 aa, Artificial Sequence; identical to SEQ ID NO: 6490
  Description of Artificial Sequence: Synthetic polypeptide
  VL of XENP019460

SEQ ID NO: 9412 - protein, 12 aa, Artificial Sequence
  Description of Artificial Sequence: Synthetic peptide
  XENP019460 vlCDR1
RASQSVGSSYLT

SEQ ID NO: 9413 - protein, 7 aa, Artificial Sequence
  Description of Artificial Sequence: Synthetic peptide
  XENP019460 vlCDR2
GAFSRAT

SEQ ID NO: 9414 - protein, 9 aa, Artificial Sequence
  Description of Artificial Sequence: Synthetic peptide
  XENP019460 vlCDR3
QQYGSSPWT

SEQ ID NO: 9415 - protein, 221 aa, Artificial Sequence; identical to SEQ ID NO: 7595
  Description of Artificial Sequence: Synthetic polypeptide
  XENP019461 [CTLA-4]_H0_L0.46_Fab Heavy Chain

SEQ ID NO: 9416 - protein, 118 aa, Artificial Sequence; identical to SEQ ID NO: 3737
  Description of Artificial Sequence: Synthetic polypeptide
  VH of XENP019461

SEQ ID NO: 9417 - protein, 5 aa, Artificial Sequence
  Description of Artificial Sequence: Synthetic peptide
  XENP019461 vhCDR1
SYTMH

SEQ ID NO: 9418 - protein, 17 aa, Artificial Sequence
  Description of Artificial Sequence: Synthetic peptide
  XENP019461 vhCDR2
FISYDGNNKYYADSVKG

SEQ ID NO: 9419 - protein, 9 aa, Artificial Sequence
  Description of Artificial Sequence: Synthetic peptide
  XENP019461 vhCDR3
TGWLGPFDY

SEQ ID NO: 9420 - protein, 215 aa, Artificial Sequence
  Description of Artificial Sequence: Synthetic polypeptide
  XENP019461 [CTLA-4]_H0_L0.46_Fab Light Chain
EIVLTQSPGTLSLSPGERATLSCRASQSVGSSYLAWYEQKPGQAPRLLIYGAFSRATGIPDRFSGSGSGTDFTLTISRLEPEDFAVYYCQQYGSSPWTFGQGTKVEIKRTVAAPSVFIFPPSDEQLKSGTASVVCLLNNFYPREAKVQWKVDNALQSGNSQESVTEQDSKDSTYSLSSTLTLSKADYEKHKVYACEVTHQGLSSPVTKSFNRGEC

SEQ ID NO: 9421 - protein, 108 aa, Artificial Sequence; identical to SEQ ID NO: 6499
  Description of Artificial Sequence: Synthetic polypeptide
  VL of XENP019461

SEQ ID NO: 9422 - protein, 12 aa, Artificial Sequence
  Description of Artificial Sequence: Synthetic peptide
  XENP019461 vlCDR1
RASQSVGSSYLA

SEQ ID NO: 9423 - protein, 7 aa, Artificial Sequence
  Description of Artificial Sequence: Synthetic peptide
  XENP019461 vlCDR2
GAFSRAT

SEQ ID NO: 9424 - protein, 9 aa, Artificial Sequence
  Description of Artificial Sequence: Synthetic peptide
  XENP019461 vlCDR3
QQYGSSPWT

SEQ ID NO: 9425 - protein, 221 aa, Artificial Sequence; identical to SEQ ID NO: 7595
  Description of Artificial Sequence: Synthetic polypeptide
  XENP019462 [CTLA-4]_H0_L0.47_Fab Heavy Chain

SEQ ID NO: 9426 - protein, 118 aa, Artificial Sequence; identical to SEQ ID NO: 3737
  Description of Artificial Sequence: Synthetic polypeptide
  VH of XENP019462

SEQ ID NO: 9427 - protein, 5 aa, Artificial Sequence
  Description of Artificial Sequence: Synthetic peptide
  XENP019462 vhCDR1
SYTMH

SEQ ID NO: 9428 - protein, 17 aa, Artificial Sequence
  Description of Artificial Sequence: Synthetic peptide
  XENP019462 vhCDR2
FISYDGNNKYYADSVKG

SEQ ID NO: 9429 - protein, 9 aa, Artificial Sequence
  Description of Artificial Sequence: Synthetic peptide
  XENP019462 vhCDR3
TGWLGPFDY

SEQ ID NO: 9430 - protein, 215 aa, Artificial Sequence
  Description of Artificial Sequence: Synthetic polypeptide
  XENP019462 [CTLA-4]_H0_L0.47_Fab Light Chain
EIVLTQSPGTLSLSPGERATLSCRASQSVGSSYLAWYLQKPGQAPRLLIYGAFSRATGIPDRFSGSGSGTDFTLTISRLEPEDFAVYYCQQYGSSPWTFGQGTKVEIKRTVAAPSVFIFPPSDEQLKSGTASVVCLLNNFYPREAKVQWKVDNALQSGNSQESVTEQDSKDSTYSLSSTLTLSKADYEKHKVYACEVTHQGLSSPVTKSFNRGEC

SEQ ID NO: 9431 - protein, 108 aa, Artificial Sequence; identical to SEQ ID NO: 6508
  Description of Artificial Sequence: Synthetic polypeptide
  VL of XENP019462

SEQ ID NO: 9432 - protein, 12 aa, Artificial Sequence
  Description of Artificial Sequence: Synthetic peptide
  XENP019462 vlCDR1
RASQSVGSSYLA

SEQ ID NO: 9433 - protein, 7 aa, Artificial Sequence
  Description of Artificial Sequence: Synthetic peptide
  XENP019462 vlCDR2
GAFSRAT

SEQ ID NO: 9434 - protein, 9 aa, Artificial Sequence
  Description of Artificial Sequence: Synthetic peptide
  XENP019462 vlCDR3
QQYGSSPWT

SEQ ID NO: 9435 - protein, 221 aa, Artificial Sequence; identical to SEQ ID NO: 7595
  Description of Artificial Sequence: Synthetic polypeptide
  XENP019463 [CTLA-4]_H0_L0.48_Fab Heavy Chain

SEQ ID NO: 9436 - protein, 118 aa, Artificial Sequence; identical to SEQ ID NO: 3737
  Description of Artificial Sequence: Synthetic polypeptide
  VH of XENP019463

SEQ ID NO: 9437 - protein, 5 aa, Artificial Sequence
  Description of Artificial Sequence: Synthetic peptide
  XENP019463 vhCDR1
SYTMH

SEQ ID NO: 9438 - protein, 17 aa, Artificial Sequence
  Description of Artificial Sequence: Synthetic peptide
  XENP019463 vhCDR2
FISYDGNNKYYADSVKG

SEQ ID NO: 9439 - protein, 9 aa, Artificial Sequence
  Description of Artificial Sequence: Synthetic peptide
  XENP019463 vhCDR3
TGWLGPFDY

SEQ ID NO: 9440 - protein, 215 aa, Artificial Sequence
  Description of Artificial Sequence: Synthetic polypeptide
  XENP019463 [CTLA-4]_H0_L0.48_Fab Light Chain
EIVLTQSPGTLSLSPGERATLSCRASQSVGSSYLAWYRQKPGQAPRLLIYGAFSRATGIPDRFSGSGSGTDFTLTISRLEPEDFAVYYCQQYGSSPWTFGQGTKVEIKRTVAAPSVFIFPPSDEQLKSGTASVVCLLNNFYPREAKVQWKVDNALQSGNSQESVTEQDSKDSTYSLSSTLTLSKADYEKHKVYACEVTHQGLSSPVTKSFNRGEC

SEQ ID NO: 9441 - protein, 108 aa, Artificial Sequence; identical to SEQ ID NO: 6517
  Description of Artificial Sequence: Synthetic polypeptide
  VL of XENP019463

SEQ ID NO: 9442 - protein, 12 aa, Artificial Sequence
  Description of Artificial Sequence: Synthetic peptide
  XENP019463 vlCDR1
RASQSVGSSYLA

SEQ ID NO: 9443 - protein, 7 aa, Artificial Sequence
  Description of Artificial Sequence: Synthetic peptide
  XENP019463 vlCDR2
GAFSRAT

SEQ ID NO: 9444 - protein, 9 aa, Artificial Sequence
  Description of Artificial Sequence: Synthetic peptide
  XENP019463 vlCDR3
QQYGSSPWT

SEQ ID NO: 9445 - protein, 221 aa, Artificial Sequence; identical to SEQ ID NO: 7595
  Description of Artificial Sequence: Synthetic polypeptide
  XENP019464 [CTLA-4]_H0_L0.49_Fab Heavy Chain

SEQ ID NO: 9446 - protein, 118 aa, Artificial Sequence; identical to SEQ ID NO: 3737
  Description of Artificial Sequence: Synthetic polypeptide
  VH of XENP019464

SEQ ID NO: 9447 - protein, 5 aa, Artificial Sequence
  Description of Artificial Sequence: Synthetic peptide
  XENP019464 vhCDR1
SYTMH

SEQ ID NO: 9448 - protein, 17 aa, Artificial Sequence
  Description of Artificial Sequence: Synthetic peptide
  XENP019464 vhCDR2
FISYDGNNKYYADSVKG

SEQ ID NO: 9449 - protein, 9 aa, Artificial Sequence
  Description of Artificial Sequence: Synthetic peptide
  XENP019464 vhCDR3
TGWLGPFDY

SEQ ID NO: 9450 - protein, 215 aa, Artificial Sequence
  Description of Artificial Sequence: Synthetic polypeptide
  XENP019464 [CTLA-4]_H0_L0.49_Fab Light Chain
EIVLTQSPGTLSLSPGERATLSCRASQSVGSSYLAWYRQKPGQAPELLIYGAFSRATGIPDRFSGSGSGTDFTLTISRLEPEDFAVYYCQQYGSSPWTFGQGTKVEIKRTVAAPSVFIFPPSDEQLKSGTASVVCLLNNFYPREAKVQWKVDNALQSGNSQESVTEQDSKDSTYSLSSTLTLSKADYEKHKVYACEVTHQGLSSPVTKSFNRGEC

SEQ ID NO: 9451 - protein, 108 aa, Artificial Sequence; identical to SEQ ID NO: 6526
  Description of Artificial Sequence: Synthetic polypeptide
  VL of XENP019464

SEQ ID NO: 9452 - protein, 12 aa, Artificial Sequence
  Description of Artificial Sequence: Synthetic peptide
  XENP019464 vlCDR1
RASQSVGSSYLA

SEQ ID NO: 9453 - protein, 7 aa, Artificial Sequence
  Description of Artificial Sequence: Synthetic peptide
  XENP019464 vlCDR2
GAFSRAT

SEQ ID NO: 9454 - protein, 9 aa, Artificial Sequence
  Description of Artificial Sequence: Synthetic peptide
  XENP019464 vlCDR3
QQYGSSPWT

SEQ ID NO: 9455 - protein, 221 aa, Artificial Sequence; identical to SEQ ID NO: 7595
  Description of Artificial Sequence: Synthetic polypeptide
  XENP019465 [CTLA-4]_H0_L0.50_Fab Heavy Chain

SEQ ID NO: 9456 - protein, 118 aa, Artificial Sequence; identical to SEQ ID NO: 3737
  Description of Artificial Sequence: Synthetic polypeptide
  VH of XENP019465

SEQ ID NO: 9457 - protein, 5 aa, Artificial Sequence
  Description of Artificial Sequence: Synthetic peptide
  XENP019465 vhCDR1
SYTMH

SEQ ID NO: 9458 - protein, 17 aa, Artificial Sequence
  Description of Artificial Sequence: Synthetic peptide
  XENP019465 vhCDR2
FISYDGNNKYYADSVKG

SEQ ID NO: 9459 - protein, 9 aa, Artificial Sequence
  Description of Artificial Sequence: Synthetic peptide
  XENP019465 vhCDR3
TGWLGPFDY

SEQ ID NO: 9460 - protein, 215 aa, Artificial Sequence
  Description of Artificial Sequence: Synthetic polypeptide
  XENP019465 [CTLA-4]_H0_L0.50_Fab Light Chain
EIVLTQSPGTLSLSPGERATLSCRASQSVGSSYLAWYQEKPGQAPRLLIYGAFSRATGIPDRFSGSGSGTDFTLTISRLEPEDFAVYYCQQYGSSPWTFGQGTKVEIKRTVAAPSVFIFPPSDEQLKSGTASVVCLLNNFYPREAKVQWKVDNALQSGNSQESVTEQDSKDSTYSLSSTLTLSKADYEKHKVYACEVTHQGLSSPVTKSFNRGEC

SEQ ID NO: 9461 - protein, 108 aa, Artificial Sequence; identical to SEQ ID NO: 4708
  Description of Artificial Sequence: Synthetic polypeptide
  VL of XENP019465

SEQ ID NO: 9462 - protein, 12 aa, Artificial Sequence
  Description of Artificial Sequence: Synthetic peptide
  XENP019465 vlCDR1
RASQSVGSSYLA

SEQ ID NO: 9463 - protein, 7 aa, Artificial Sequence
  Description of Artificial Sequence: Synthetic peptide
  XENP019465 vlCDR2
GAFSRAT

SEQ ID NO: 9464 - protein, 9 aa, Artificial Sequence
  Description of Artificial Sequence: Synthetic peptide
  XENP019465 vlCDR3
QQYGSSPWT

SEQ ID NO: 9465 - protein, 221 aa, Artificial Sequence; identical to SEQ ID NO: 7595
  Description of Artificial Sequence: Synthetic polypeptide
  XENP019466 [CTLA-4]_H0_L0.51_Fab Heavy Chain

SEQ ID NO: 9466 - protein, 118 aa, Artificial Sequence; identical to SEQ ID NO: 3737
  Description of Artificial Sequence: Synthetic polypeptide
  VH of XENP019466

SEQ ID NO: 9467 - protein, 5 aa, Artificial Sequence
  Description of Artificial Sequence: Synthetic peptide
  XENP019466 vhCDR1
SYTMH

SEQ ID NO: 9468 - protein, 17 aa, Artificial Sequence
  Description of Artificial Sequence: Synthetic peptide
  XENP019466 vhCDR2
FISYDGNNKYYADSVKG

SEQ ID NO: 9469 - protein, 9 aa, Artificial Sequence
  Description of Artificial Sequence: Synthetic peptide
  XENP019466 vhCDR3
TGWLGPFDY

SEQ ID NO: 9470 - protein, 215 aa, Artificial Sequence
  Description of Artificial Sequence: Synthetic polypeptide
  XENP019466 [CTLA-4]_H0_L0.51_Fab Light Chain
EIVLTQSPGTLSLSPGERATLSCRASQSVGSSYLAWYQQKPDQAPRLLIYGAFSRATGIPDRFSGSGSGTDFTLTISRLEPEDFAVYYCQQYGSSPWTFGQGTKVEIKRTVAAPSVFIFPPSDEQLKSGTASVVCLLNNFYPREAKVQWKVDNALQSGNSQESVTEQDSKDSTYSLSSTLTLSKADYEKHKVYACEVTHQGLSSPVTKSFNRGEC

SEQ ID NO: 9471 - protein, 108 aa, Artificial Sequence; identical to SEQ ID NO: 4717
  Description of Artificial Sequence: Synthetic polypeptide
  VL of XENP019466

SEQ ID NO: 9472 - protein, 12 aa, Artificial Sequence
  Description of Artificial Sequence: Synthetic peptide
  XENP019466 vlCDR1
RASQSVGSSYLA

SEQ ID NO: 9473 - protein, 7 aa, Artificial Sequence
  Description of Artificial Sequence: Synthetic peptide
  XENP019466 vlCDR2
GAFSRAT

SEQ ID NO: 9474 - protein, 9 aa, Artificial Sequence
  Description of Artificial Sequence: Synthetic peptide
  XENP019466 vlCDR3
QQYGSSPWT

SEQ ID NO: 9475 - protein, 221 aa, Artificial Sequence; identical to SEQ ID NO: 7595
  Description of Artificial Sequence: Synthetic polypeptide
  XENP019467 [CTLA-4]_H0_L0.52_Fab Heavy Chain

SEQ ID NO: 9476 - protein, 118 aa, Artificial Sequence; identical to SEQ ID NO: 3737
  Description of Artificial Sequence: Synthetic polypeptide
  VH of XENP019467

SEQ ID NO: 9477 - protein, 5 aa, Artificial Sequence
  Description of Artificial Sequence: Synthetic peptide
  XENP019467 vhCDR1
SYTMH

SEQ ID NO: 9478 - protein, 17 aa, Artificial Sequence
  Description of Artificial Sequence: Synthetic peptide
  XENP019467 vhCDR2
FISYDGNNKYYADSVKG

SEQ ID NO: 9479 - protein, 9 aa, Artificial Sequence
  Description of Artificial Sequence: Synthetic peptide
  XENP019467 vhCDR3
TGWLGPFDY

SEQ ID NO: 9480 - protein, 215 aa, Artificial Sequence
  Description of Artificial Sequence: Synthetic polypeptide
  XENP019467 [CTLA-4]_H0_L0.52_Fab Light Chain
EIVLTQSPGTLSLSPGERATLSCRASQSVGSSYLAWYQQKPEQAPRLLIYGAFSRATGIPDRFSGSGSGTDFTLTISRLEPEDFAVYYCQQYGSSPWTFGQGTKVEIKRTVAAPSVFIFPPSDEQLKSGTASVVCLLNNFYPREAKVQWKVDNALQSGNSQESVTEQDSKDSTYSLSSTLTLSKADYEKHKVYACEVTHQGLSSPVTKSFNRGEC

SEQ ID NO: 9481 - protein, 108 aa, Artificial Sequence; identical to SEQ ID NO: 6553
  Description of Artificial Sequence: Synthetic polypeptide
  VL of XENP019467

SEQ ID NO: 9482 - protein, 12 aa, Artificial Sequence
  Description of Artificial Sequence: Synthetic peptide
  XENP019467 vlCDR1
RASQSVGSSYLA

SEQ ID NO: 9483 - protein, 7 aa, Artificial Sequence
  Description of Artificial Sequence: Synthetic peptide
  XENP019467 vlCDR2
GAFSRAT

SEQ ID NO: 9484 - protein, 9 aa, Artificial Sequence
  Description of Artificial Sequence: Synthetic peptide
  XENP019467 vlCDR3
QQYGSSPWT

SEQ ID NO: 9485 - protein, 221 aa, Artificial Sequence; identical to SEQ ID NO: 7595
  Description of Artificial Sequence: Synthetic polypeptide
  XENP019468 [CTLA-4]_H0_L0.53_Fab Heavy Chain

SEQ ID NO: 9486 - protein, 118 aa, Artificial Sequence; identical to SEQ ID NO: 3737
  Description of Artificial Sequence: Synthetic polypeptide
  VH of XENP019468

SEQ ID NO: 9487 - protein, 5 aa, Artificial Sequence
  Description of Artificial Sequence: Synthetic peptide
  XENP019468 vhCDR1
SYTMH

SEQ ID NO: 9488 - protein, 17 aa, Artificial Sequence
  Description of Artificial Sequence: Synthetic peptide
  XENP019468 vhCDR2
FISYDGNNKYYADSVKG

SEQ ID NO: 9489 - protein, 9 aa, Artificial Sequence
  Description of Artificial Sequence: Synthetic peptide
  XENP019468 vhCDR3
TGWLGPFDY

SEQ ID NO: 9490 - protein, 215 aa, Artificial Sequence
  Description of Artificial Sequence: Synthetic polypeptide
  XENP019468 [CTLA-4]_H0_L0.53_Fab Light Chain
EIVLTQSPGTLSLSPGERATLSCRASQSVGSSYLAWYQQKPGEAPRLLIYGAFSRATGIPDRFSGSGSGTDFTLTISRLEPEDFAVYYCQQYGSSPWTFGQGTKVEIKRTVAAPSVFIFPPSDEQLKSGTASVVCLLNNFYPREAKVQWKVDNALQSGNSQESVTEQDSKDSTYSLSSTLTLSKADYEKHKVYACEVTHQGLSSPVTKSFNRGEC

SEQ ID NO: 9491 - protein, 108 aa, Artificial Sequence; identical to SEQ ID NO: 4753
  Description of Artificial Sequence: Synthetic polypeptide
  VL of XENP019468

SEQ ID NO: 9492 - protein, 12 aa, Artificial Sequence
  Description of Artificial Sequence: Synthetic peptide
  XENP019468 vlCDR1
RASQSVGSSYLA

SEQ ID NO: 9493 - protein, 7 aa, Artificial Sequence
  Description of Artificial Sequence: Synthetic peptide
  XENP019468 vlCDR2
GAFSRAT

SEQ ID NO: 9494 - protein, 9 aa, Artificial Sequence
  Description of Artificial Sequence: Synthetic peptide
  XENP019468 vlCDR3
QQYGSSPWT

SEQ ID NO: 9495 - protein, 221 aa, Artificial Sequence; identical to SEQ ID NO: 7595
  Description of Artificial Sequence: Synthetic polypeptide
  XENP019469 [CTLA-4]_H0_L0.54_Fab Heavy Chain

SEQ ID NO: 9496 - protein, 118 aa, Artificial Sequence; identical to SEQ ID NO: 3737
  Description of Artificial Sequence: Synthetic polypeptide
  VH of XENP019469

SEQ ID NO: 9497 - protein, 5 aa, Artificial Sequence
  Description of Artificial Sequence: Synthetic peptide
  XENP019469 vhCDR1
SYTMH

SEQ ID NO: 9498 - protein, 17 aa, Artificial Sequence
  Description of Artificial Sequence: Synthetic peptide
  XENP019469 vhCDR2
FISYDGNNKYYADSVKG

SEQ ID NO: 9499 - protein, 9 aa, Artificial Sequence
  Description of Artificial Sequence: Synthetic peptide
  XENP019469 vhCDR3
TGWLGPFDY

SEQ ID NO: 9500 - protein, 215 aa, Artificial Sequence
  Description of Artificial Sequence: Synthetic polypeptide
  XENP019469 [CTLA-4]_H0_L0.54_Fab Light Chain
EIVLTQSPGTLSLSPGERATLSCRASQSVGSSYLAWYQQKPGKAPRLLIYGAFSRATGIPDRFSGSGSGTDFTLTISRLEPEDFAVYYCQQYGSSPWTFGQGTKVEIKRTVAAPSVFIFPPSDEQLKSGTASVVCLLNNFYPREAKVQWKVDNALQSGNSQESVTEQDSKDSTYSLSSTLTLSKADYEKHKVYACEVTHQGLSSPVTKSFNRGEC

SEQ ID NO: 9501 - protein, 108 aa, Artificial Sequence; identical to SEQ ID NO: 6571
  Description of Artificial Sequence: Synthetic polypeptide
  VL of XENP019469

SEQ ID NO: 9502 - protein, 12 aa, Artificial Sequence
  Description of Artificial Sequence: Synthetic peptide
  XENP019469 vlCDR1
RASQSVGSSYLA

SEQ ID NO: 9503 - protein, 7 aa, Artificial Sequence
  Description of Artificial Sequence: Synthetic peptide
  XENP019469 vlCDR2
GAFSRAT

SEQ ID NO: 9504 - protein, 9 aa, Artificial Sequence
  Description of Artificial Sequence: Synthetic peptide
  XENP019469 vlCDR3
QQYGSSPWT

SEQ ID NO: 9505 - protein, 221 aa, Artificial Sequence; identical to SEQ ID NO: 7595
  Description of Artificial Sequence: Synthetic polypeptide
  XENP019470 [CTLA-4]_H0_L0.55_Fab Heavy Chain

SEQ ID NO: 9506 - protein, 118 aa, Artificial Sequence; identical to SEQ ID NO: 3737
  Description of Artificial Sequence: Synthetic polypeptide
  VH of XENP019470

SEQ ID NO: 9507 - protein, 5 aa, Artificial Sequence
  Description of Artificial Sequence: Synthetic peptide
  XENP019470 vhCDR1
SYTMH

SEQ ID NO: 9508 - protein, 17 aa, Artificial Sequence
  Description of Artificial Sequence: Synthetic peptide
  XENP019470 vhCDR2
FISYDGNNKYYADSVKG

SEQ ID NO: 9509 - protein, 9 aa, Artificial Sequence
  Description of Artificial Sequence: Synthetic peptide
  XENP019470 vhCDR3
TGWLGPFDY

SEQ ID NO: 9510 - protein, 215 aa, Artificial Sequence
  Description of Artificial Sequence: Synthetic polypeptide
  XENP019470 [CTLA-4]_H0_L0.55_Fab Light Chain
EIVLTQSPGTLSLSPGERATLSCRASQSVGSSYLAWYQQKPGKSPRLLIYGAFSRATGIPDRFSGSGSGTDFTLTISRLEPEDFAVYYCQQYGSSPWTFGQGTKVEIKRTVAAPSVFIFPPSDEQLKSGTASVVCLLNNFYPREAKVQWKVDNALQSGNSQESVTEQDSKDSTYSLSSTLTLSKADYEKHKVYACEVTHQGLSSPVTKSFNRGEC

SEQ ID NO: 9511 - protein, 108 aa, Artificial Sequence; identical to SEQ ID NO: 6580
  Description of Artificial Sequence: Synthetic polypeptide
  VL of XENP019470

SEQ ID NO: 9512 - protein, 12 aa, Artificial Sequence
  Description of Artificial Sequence: Synthetic peptide
  XENP019470 vlCDR1
RASQSVGSSYLA

SEQ ID NO: 9513 - protein, 7 aa, Artificial Sequence
  Description of Artificial Sequence: Synthetic peptide
  XENP019470 vlCDR2
GAFSRAT

SEQ ID NO: 9514 - protein, 9 aa, Artificial Sequence
  Description of Artificial Sequence: Synthetic peptide
  XENP019470 vlCDR3
QQYGSSPWT

SEQ ID NO: 9515 - protein, 221 aa, Artificial Sequence; identical to SEQ ID NO: 7595
  Description of Artificial Sequence: Synthetic polypeptide
  XENP019471 [CTLA-4]_H0_L0.56_Fab Heavy Chain

SEQ ID NO: 9516 - protein, 118 aa, Artificial Sequence; identical to SEQ ID NO: 3737
  Description of Artificial Sequence: Synthetic polypeptide
  VH of XENP019471

SEQ ID NO: 9517 - protein, 5 aa, Artificial Sequence
  Description of Artificial Sequence: Synthetic peptide
  XENP019471 vhCDR1
SYTMH

SEQ ID NO: 9518 - protein, 17 aa, Artificial Sequence
  Description of Artificial Sequence: Synthetic peptide
  XENP019471 vhCDR2
FISYDGNNKYYADSVKG

SEQ ID NO: 9519 - protein, 9 aa, Artificial Sequence
  Description of Artificial Sequence: Synthetic peptide
  XENP019471 vhCDR3
TGWLGPFDY

SEQ ID NO: 9520 - protein, 215 aa, Artificial Sequence
  Description of Artificial Sequence: Synthetic polypeptide
  XENP019471 [CTLA-4]_H0_L0.56_Fab Light Chain
EIVLTQSPGTLSLSPGERATLSCRASQSVGSSYLAWYQQKPGQSPRLLIYGAFSRATGIPDRFSGSGSGTDFTLTISRLEPEDFAVYYCQQYGSSPWTFGQGTKVEIKRTVAAPSVFIFPPSDEQLKSGTASVVCLLNNFYPREAKVQWKVDNALQSGNSQESVTEQDSKDSTYSLSSTLTLSKADYEKHKVYACEVTHQGLSSPVTKSFNRGEC

SEQ ID NO: 9521 - protein, 108 aa, Artificial Sequence; identical to SEQ ID NO: 6589
  Description of Artificial Sequence: Synthetic polypeptide
  VL of XENP019471

SEQ ID NO: 9522 - protein, 12 aa, Artificial Sequence
  Description of Artificial Sequence: Synthetic peptide
  XENP019471 vlCDR1
RASQSVGSSYLA

SEQ ID NO: 9523 - protein, 7 aa, Artificial Sequence
  Description of Artificial Sequence: Synthetic peptide
  XENP019471 vlCDR2
GAFSRAT

SEQ ID NO: 9524 - protein, 9 aa, Artificial Sequence
  Description of Artificial Sequence: Synthetic peptide
  XENP019471 vlCDR3
QQYGSSPWT

SEQ ID NO: 9525 - protein, 221 aa, Artificial Sequence; identical to SEQ ID NO: 7595
  Description of Artificial Sequence: Synthetic polypeptide
  XENP019472 [CTLA-4]_H0_L0.57_Fab Heavy Chain

SEQ ID NO: 9526 - protein, 118 aa, Artificial Sequence; identical to SEQ ID NO: 3737
  Description of Artificial Sequence: Synthetic polypeptide
  VH of XENP019472

SEQ ID NO: 9527 - protein, 5 aa, Artificial Sequence
  Description of Artificial Sequence: Synthetic peptide
  XENP019472 vhCDR1
SYTMH

SEQ ID NO: 9528 - protein, 17 aa, Artificial Sequence
  Description of Artificial Sequence: Synthetic peptide
  XENP019472 vhCDR2
FISYDGNNKYYADSVKG

SEQ ID NO: 9529 - protein, 9 aa, Artificial Sequence
  Description of Artificial Sequence: Synthetic peptide
  XENP019472 vhCDR3
TGWLGPFDY

SEQ ID NO: 9530 - protein, 215 aa, Artificial Sequence
  Description of Artificial Sequence: Synthetic polypeptide
  XENP019472 [CTLA-4]_H0_L0.57_Fab Light Chain
EIVLTQSPGTLSLSPGERATLSCRASQSVGSSYLAWYQQKPGQAPELLIYGAFSRATGIPDRFSGSGSGTDFTLTISRLEPEDFAVYYCQQYGSSPWTFGQGTKVEIKRTVAAPSVFIFPPSDEQLKSGTASVVCLLNNFYPREAKVQWKVDNALQSGNSQESVTEQDSKDSTYSLSSTLTLSKADYEKHKVYACEVTHQGLSSPVTKSFNRGEC

SEQ ID NO: 9531 - protein, 108 aa, Artificial Sequence; identical to SEQ ID NO: 4762
  Description of Artificial Sequence: Synthetic polypeptide
  VL of XENP019472

SEQ ID NO: 9532 - protein, 12 aa, Artificial Sequence
  Description of Artificial Sequence: Synthetic peptide
  XENP019472 vlCDR1
RASQSVGSSYLA

SEQ ID NO: 9533 - protein, 7 aa, Artificial Sequence
  Description of Artificial Sequence: Synthetic peptide
  XENP019472 vlCDR2
GAFSRAT

SEQ ID NO: 9534 - protein, 9 aa, Artificial Sequence
  Description of Artificial Sequence: Synthetic peptide
  XENP019472 vlCDR3
QQYGSSPWT

SEQ ID NO: 9535 - protein, 221 aa, Artificial Sequence; identical to SEQ ID NO: 7595
  Description of Artificial Sequence: Synthetic polypeptide
  XENP019473 [CTLA-4]_H0_L0.58_Fab Heavy Chain

SEQ ID NO: 9536 - protein, 118 aa, Artificial Sequence; identical to SEQ ID NO: 3737
  Description of Artificial Sequence: Synthetic polypeptide
  VH of XENP019473

SEQ ID NO: 9537 - protein, 5 aa, Artificial Sequence
  Description of Artificial Sequence: Synthetic peptide
  XENP019473 vhCDR1
SYTMH

SEQ ID NO: 9538 - protein, 17 aa, Artificial Sequence
  Description of Artificial Sequence: Synthetic peptide
  XENP019473 vhCDR2
FISYDGNNKYYADSVKG

SEQ ID NO: 9539 - protein, 9 aa, Artificial Sequence
  Description of Artificial Sequence: Synthetic peptide
  XENP019473 vhCDR3
TGWLGPFDY

SEQ ID NO: 9540 - protein, 215 aa, Artificial Sequence
  Description of Artificial Sequence: Synthetic polypeptide
  XENP019473 [CTLA-4]_H0_L0.58_Fab Light Chain
EIVLTQSPGTLSLSPGERATLSCRASQSVGSSYLAWYQQKPGQAPELLIYGAFSRATGIPDRFSGSGSGTDFTLTISRLEPQDFAVYYCQQYGSSPWTFGQGTKVEIKRTVAAPSVFIFPPSDEQLKSGTASVVCLLNNFYPREAKVQWKVDNALQSGNSQESVTEQDSKDSTYSLSSTLTLSKADYEKHKVYACEVTHQGLSSPVTKSFNRGEC

SEQ ID NO: 9541 - protein, 108 aa, Artificial Sequence; identical to SEQ ID NO: 6607
  Description of Artificial Sequence: Synthetic polypeptide
  VL of XENP019473

SEQ ID NO: 9542 - protein, 12 aa, Artificial Sequence
  Description of Artificial Sequence: Synthetic peptide
  XENP019473 vlCDR1
RASQSVGSSYLA

SEQ ID NO: 9543 - protein, 7 aa, Artificial Sequence
  Description of Artificial Sequence: Synthetic peptide
  XENP019473 vlCDR2
GAFSRAT

SEQ ID NO: 9544 - protein, 9 aa, Artificial Sequence
  Description of Artificial Sequence: Synthetic peptide
  XENP019473 vlCDR3
QQYGSSPWT

SEQ ID NO: 9545 - protein, 221 aa, Artificial Sequence; identical to SEQ ID NO: 7595
  Description of Artificial Sequence: Synthetic polypeptide
  XENP019474 [CTLA-4]_H0_L0.59_Fab Heavy Chain

SEQ ID NO: 9546 - protein, 118 aa, Artificial Sequence; identical to SEQ ID NO: 3737
  Description of Artificial Sequence: Synthetic polypeptide
  VH of XENP019474

SEQ ID NO: 9547 - protein, 5 aa, Artificial Sequence
  Description of Artificial Sequence: Synthetic peptide
  XENP019474 vhCDR1
SYTMH

SEQ ID NO: 9548 - protein, 17 aa, Artificial Sequence
  Description of Artificial Sequence: Synthetic peptide
  XENP019474 vhCDR2
FISYDGNNKYYADSVKG

SEQ ID NO: 9549 - protein, 9 aa, Artificial Sequence
  Description of Artificial Sequence: Synthetic peptide
  XENP019474 vhCDR3
TGWLGPFDY

SEQ ID NO: 9550 - protein, 215 aa, Artificial Sequence
  Description of Artificial Sequence: Synthetic polypeptide
  XENP019474 [CTLA-4]_H0_L0.59_Fab Light Chain
EIVLTQSPGTLSLSPGERATLSCRASQSVGSSYLAWYQQKPGQAPKLLIYGAFSRATGIPDRFSGSGSGTDFTLTISRLEPEDFAVYYCQQYGSSPWTFGQGTKVEIKRTVAAPSVFIFPPSDEQLKSGTASVVCLLNNFYPREAKVQWKVDNALQSGNSQESVTEQDSKDSTYSLSSTLTLSKADYEKHKVYACEVTHQGLSSPVTKSFNRGEC

SEQ ID NO: 9551 - protein, 108 aa, Artificial Sequence; identical to SEQ ID NO: 6616
  Description of Artificial Sequence: Synthetic polypeptide
  VL of XENP019474

SEQ ID NO: 9552 - protein, 12 aa, Artificial Sequence
  Description of Artificial Sequence: Synthetic peptide
  XENP019474 vlCDR1
RASQSVGSSYLA

SEQ ID NO: 9553 - protein, 7 aa, Artificial Sequence
  Description of Artificial Sequence: Synthetic peptide
  XENP019474 vlCDR2
GAFSRAT

SEQ ID NO: 9554 - protein, 9 aa, Artificial Sequence
  Description of Artificial Sequence: Synthetic peptide
  XENP019474 vlCDR3
QQYGSSPWT

SEQ ID NO: 9555 - protein, 221 aa, Artificial Sequence; identical to SEQ ID NO: 7595
  Description of Artificial Sequence: Synthetic polypeptide
  XENP019475 [CTLA-4]_H0_L0.60_Fab Heavy Chain

SEQ ID NO: 9556 - protein, 118 aa, Artificial Sequence; identical to SEQ ID NO: 3737
  Description of Artificial Sequence: Synthetic polypeptide
  VH of XENP019475

SEQ ID NO: 9557 - protein, 5 aa, Artificial Sequence
  Description of Artificial Sequence: Synthetic peptide
  XENP019475 vhCDR1
SYTMH

SEQ ID NO: 9558 - protein, 17 aa, Artificial Sequence
  Description of Artificial Sequence: Synthetic peptide
  XENP019475 vhCDR2
FISYDGNNKYYADSVKG

SEQ ID NO: 9559 - protein, 9 aa, Artificial Sequence
  Description of Artificial Sequence: Synthetic peptide
  XENP019475 vhCDR3
TGWLGPFDY

SEQ ID NO: 9560 - protein, 215 aa, Artificial Sequence
  Description of Artificial Sequence: Synthetic polypeptide
  XENP019475 [CTLA-4]_H0_L0.60_Fab Light Chain
EIVLTQSPGTLSLSPGERATLSCRASQSVGSSYLAWYQQKPGQAPRRLIYGAFSRATGIPDRFSGSGSGTDFTLTISRLEPEDFAVYYCQQYGSSPWTFGQGTKVEIKRTVAAPSVFIFPPSDEQLKSGTASVVCLLNNFYPREAKVQWKVDNALQSGNSQESVTEQDSKDSTYSLSSTLTLSKADYEKHKVYACEVTHQGLSSPVTKSFNRGEC

SEQ ID NO: 9561 - protein, 108 aa, Artificial Sequence; identical to SEQ ID NO: 6625
  Description of Artificial Sequence: Synthetic polypeptide
  VL of XENP019475

SEQ ID NO: 9562 - protein, 12 aa, Artificial Sequence
  Description of Artificial Sequence: Synthetic peptide
  XENP019475 vlCDR1
RASQSVGSSYLA

SEQ ID NO: 9563 - protein, 7 aa, Artificial Sequence
  Description of Artificial Sequence: Synthetic peptide
  XENP019475 vlCDR2
GAFSRAT

SEQ ID NO: 9564 - protein, 9 aa, Artificial Sequence
  Description of Artificial Sequence: Synthetic peptide
  XENP019475 vlCDR3
QQYGSSPWT

SEQ ID NO: 9565 - protein, 221 aa, Artificial Sequence; identical to SEQ ID NO: 7595
  Description of Artificial Sequence: Synthetic polypeptide
  XENP019476 [CTLA-4]_H0_L0.61_Fab Heavy Chain

SEQ ID NO: 9566 - protein, 118 aa, Artificial Sequence; identical to SEQ ID NO: 3737
  Description of Artificial Sequence: Synthetic polypeptide
  VH of XENP019476

SEQ ID NO: 9567 - protein, 5 aa, Artificial Sequence
  Description of Artificial Sequence: Synthetic peptide
  XENP019476 vhCDR1
SYTMH

SEQ ID NO: 9568 - protein, 17 aa, Artificial Sequence
  Description of Artificial Sequence: Synthetic peptide
  XENP019476 vhCDR2
FISYDGNNKYYADSVKG

SEQ ID NO: 9569 - protein, 9 aa, Artificial Sequence
  Description of Artificial Sequence: Synthetic peptide
  XENP019476 vhCDR3
TGWLGPFDY

SEQ ID NO: 9570 - protein, 215 aa, Artificial Sequence
  Description of Artificial Sequence: Synthetic polypeptide
  XENP019476 [CTLA-4]_H0_L0.61_Fab Light Chain
EIVLTQSPGTLSLSPGERATLSCRASQSVGSSYLAWYQQKPGQAPRRLIYGAFSRDTGIPDRFSGSGSGTDFTLTISRLEPEDFAVYYCQQYGSSPWTFGQGTKVEIKRTVAAPSVFIFPPSDEQLKSGTASVVCLLNNFYPREAKVQWKVDNALQSGNSQESVTEQDSKDSTYSLSSTLTLSKADYEKHKVYACEVTHQGLSSPVTKSFNRGEC

SEQ ID NO: 9571 - protein, 108 aa, Artificial Sequence; identical to SEQ ID NO: 6634
  Description of Artificial Sequence: Synthetic polypeptide
  VL of XENP019476

SEQ ID NO: 9572 - protein, 12 aa, Artificial Sequence
  Description of Artificial Sequence: Synthetic peptide
  XENP019476 vlCDR1
RASQSVGSSYLA

SEQ ID NO: 9573 - protein, 7 aa, Artificial Sequence
  Description of Artificial Sequence: Synthetic peptide
  XENP019476 vlCDR2
GAFSRDT

SEQ ID NO: 9574 - protein, 9 aa, Artificial Sequence
  Description of Artificial Sequence: Synthetic peptide
  XENP019476 vlCDR3
QQYGSSPWT

SEQ ID NO: 9575 - protein, 221 aa, Artificial Sequence; identical to SEQ ID NO: 7595
  Description of Artificial Sequence: Synthetic polypeptide
  XENP019477 [CTLA-4]_H0_L0.62_Fab Heavy Chain

SEQ ID NO: 9576 - protein, 118 aa, Artificial Sequence; identical to SEQ ID NO: 3737
  Description of Artificial Sequence: Synthetic polypeptide
  VH of XENP019477

SEQ ID NO: 9577 - protein, 5 aa, Artificial Sequence
  Description of Artificial Sequence: Synthetic peptide
  XENP019477 vhCDR1
SYTMH

SEQ ID NO: 9578 - protein, 17 aa, Artificial Sequence
  Description of Artificial Sequence: Synthetic peptide
  XENP019477 vhCDR2
FISYDGNNKYYADSVKG

SEQ ID NO: 9579 - protein, 9 aa, Artificial Sequence
  Description of Artificial Sequence: Synthetic peptide
  XENP019477 vhCDR3
TGWLGPFDY

SEQ ID NO: 9580 - protein, 215 aa, Artificial Sequence
  Description of Artificial Sequence: Synthetic polypeptide
  XENP019477 [CTLA-4]_H0_L0.62_Fab Light Chain
EIVLTQSPGTLSLSPGERATLSCRASQSVGSSYLAWYQQKPGQAPRLLIAGAFSRATGIPDRFSGSGSGTDFTLTISRLEPEDFAVYYCQQYGSSPWTFGQGTKVEIKRTVAAPSVFIFPPSDEQLKSGTASVVCLLNNFYPREAKVQWKVDNALQSGNSQESVTEQDSKDSTYSLSSTLTLSKADYEKHKVYACEVTHQGLSSPVTKSFNRGEC

SEQ ID NO: 9581 - protein, 108 aa, Artificial Sequence; identical to SEQ ID NO: 6643
  Description of Artificial Sequence: Synthetic polypeptide
  VL of XENP019477

SEQ ID NO: 9582 - protein, 12 aa, Artificial Sequence
  Description of Artificial Sequence: Synthetic peptide
  XENP019477 vlCDR1
RASQSVGSSYLA

SEQ ID NO: 9583 - protein, 7 aa, Artificial Sequence
  Description of Artificial Sequence: Synthetic peptide
  XENP019477 vlCDR2
GAFSRAT

SEQ ID NO: 9584 - protein, 9 aa, Artificial Sequence
  Description of Artificial Sequence: Synthetic peptide
  XENP019477 vlCDR3
QQYGSSPWT

SEQ ID NO: 9585 - protein, 221 aa, Artificial Sequence; identical to SEQ ID NO: 7595
  Description of Artificial Sequence: Synthetic polypeptide
  XENP019478 [CTLA-4]_H0_L0.63_Fab Heavy Chain

SEQ ID NO: 9586 - protein, 118 aa, Artificial Sequence; identical to SEQ ID NO: 3737
  Description of Artificial Sequence: Synthetic polypeptide
  VH of XENP019478

SEQ ID NO: 9587 - protein, 5 aa, Artificial Sequence
  Description of Artificial Sequence: Synthetic peptide
  XENP019478 vhCDR1
SYTMH

SEQ ID NO: 9588 - protein, 17 aa, Artificial Sequence
  Description of Artificial Sequence: Synthetic peptide
  XENP019478 vhCDR2
FISYDGNNKYYADSVKG

SEQ ID NO: 9589 - protein, 9 aa, Artificial Sequence
  Description of Artificial Sequence: Synthetic peptide
  XENP019478 vhCDR3
TGWLGPFDY

SEQ ID NO: 9590 - protein, 215 aa, Artificial Sequence
  Description of Artificial Sequence: Synthetic polypeptide
  XENP019478 [CTLA-4]_H0_L0.63_Fab Light Chain
EIVLTQSPGTLSLSPGERATLSCRASQSVGSSYLAWYQQKPGQAPRLLIFGAFSRATGIPDRFSGSGSGTDFTLTISRLEPEDFAVYYCQQYGSSPWTFGQGTKVEIKRTVAAPSVFIFPPSDEQLKSGTASVVCLLNNFYPREAKVQWKVDNALQSGNSQESVTEQDSKDSTYSLSSTLTLSKADYEKHKVYACEVTHQGLSSPVTKSFNRGEC

SEQ ID NO: 9591 - protein, 108 aa, Artificial Sequence; identical to SEQ ID NO: 6652
  Description of Artificial Sequence: Synthetic polypeptide
  VL of XENP019478

SEQ ID NO: 9592 - protein, 12 aa, Artificial Sequence
  Description of Artificial Sequence: Synthetic peptide
  XENP019478 vlCDR1
RASQSVGSSYLA

SEQ ID NO: 9593 - protein, 7 aa, Artificial Sequence
  Description of Artificial Sequence: Synthetic peptide
  XENP019478 vlCDR2
GAFSRAT

SEQ ID NO: 9594 - protein, 9 aa, Artificial Sequence
  Description of Artificial Sequence: Synthetic peptide
  XENP019478 vlCDR3
QQYGSSPWT

SEQ ID NO: 9595 - protein, 221 aa, Artificial Sequence; identical to SEQ ID NO: 7595
  Description of Artificial Sequence: Synthetic polypeptide
  XENP019479 [CTLA-4]_H0_L0.64_Fab Heavy Chain

SEQ ID NO: 9596 - protein, 118 aa, Artificial Sequence; identical to SEQ ID NO: 3737
  Description of Artificial Sequence: Synthetic polypeptide
  VH of XENP019479

SEQ ID NO: 9597 - protein, 5 aa, Artificial Sequence
  Description of Artificial Sequence: Synthetic peptide
  XENP019479 vhCDR1
SYTMH

SEQ ID NO: 9598 - protein, 17 aa, Artificial Sequence
  Description of Artificial Sequence: Synthetic peptide
  XENP019479 vhCDR2
FISYDGNNKYYADSVKG

SEQ ID NO: 9599 - protein, 9 aa, Artificial Sequence
  Description of Artificial Sequence: Synthetic peptide
  XENP019479 vhCDR3
TGWLGPFDY

SEQ ID NO: 9600 - protein, 215 aa, Artificial Sequence
  Description of Artificial Sequence: Synthetic polypeptide
  XENP019479 [CTLA-4]_H0_L0.64_Fab Light Chain
EIVLTQSPGTLSLSPGERATLSCRASQSVGSSYLAWYQQKPGQAPRLLIHGAFSRATGIPDRFSGSGSGTDFTLTISRLEPEDFAVYYCQQYGSSPWTFGQGTKVEIKRTVAAPSVFIFPPSDEQLKSGTASVVCLLNNFYPREAKVQWKVDNALQSGNSQESVTEQDSKDSTYSLSSTLTLSKADYEKHKVYACEVTHQGLSSPVTKSFNRGEC

SEQ ID NO: 9601 - protein, 108 aa, Artificial Sequence; identical to SEQ ID NO: 6661
  Description of Artificial Sequence: Synthetic polypeptide
  VL of XENP019479

SEQ ID NO: 9602 - protein, 12 aa, Artificial Sequence
  Description of Artificial Sequence: Synthetic peptide
  XENP019479 vlCDR1
RASQSVGSSYLA

SEQ ID NO: 9603 - protein, 7 aa, Artificial Sequence
  Description of Artificial Sequence: Synthetic peptide
  XENP019479 vlCDR2
GAFSRAT

SEQ ID NO: 9604 - protein, 9 aa, Artificial Sequence
  Description of Artificial Sequence: Synthetic peptide
  XENP019479 vlCDR3
QQYGSSPWT

SEQ ID NO: 9605 - protein, 221 aa, Artificial Sequence; identical to SEQ ID NO: 7595
  Description of Artificial Sequence: Synthetic polypeptide
  XENP019480 [CTLA-4]_H0_L0.65_Fab Heavy Chain

SEQ ID NO: 9606 - protein, 118 aa, Artificial Sequence; identical to SEQ ID NO: 3737
  Description of Artificial Sequence: Synthetic polypeptide
  VH of XENP019480

SEQ ID NO: 9607 - protein, 5 aa, Artificial Sequence
  Description of Artificial Sequence: Synthetic peptide
  XENP019480 vhCDR1
SYTMH

SEQ ID NO: 9608 - protein, 17 aa, Artificial Sequence
  Description of Artificial Sequence: Synthetic peptide
  XENP019480 vhCDR2
FISYDGNNKYYADSVKG

SEQ ID NO: 9609 - protein, 9 aa, Artificial Sequence
  Description of Artificial Sequence: Synthetic peptide
  XENP019480 vhCDR3
TGWLGPFDY

SEQ ID NO: 9610 - protein, 215 aa, Artificial Sequence
  Description of Artificial Sequence: Synthetic polypeptide
  XENP019480 [CTLA-4]_H0_L0.65_Fab Light Chain
EIVLTQSPGTLSLSPGERATLSCRASQSVGSSYLAWYQQKPGQAPRLLILGAFSRATGIPDRFSGSGSGTDFTLTISRLEPEDFAVYYCQQYGSSPWTFGQGTKVEIKRTVAAPSVFIFPPSDEQLKSGTASVVCLLNNFYPREAKVQWKVDNALQSGNSQESVTEQDSKDSTYSLSSTLTLSKADYEKHKVYACEVTHQGLSSPVTKSFNRGEC

SEQ ID NO: 9611 - protein, 108 aa, Artificial Sequence; identical to SEQ ID NO: 6670
  Description of Artificial Sequence: Synthetic polypeptide
  VL of XENP019480

SEQ ID NO: 9612 - protein, 12 aa, Artificial Sequence
  Description of Artificial Sequence: Synthetic peptide
  XENP019480 vlCDR1
RASQSVGSSYLA

SEQ ID NO: 9613 - protein, 7 aa, Artificial Sequence
  Description of Artificial Sequence: Synthetic peptide
  XENP019480 vlCDR2
GAFSRAT

SEQ ID NO: 9614 - protein, 9 aa, Artificial Sequence
  Description of Artificial Sequence: Synthetic peptide
  XENP019480 vlCDR3
QQYGSSPWT

SEQ ID NO: 9615 - protein, 221 aa, Artificial Sequence; identical to SEQ ID NO: 7595
  Description of Artificial Sequence: Synthetic polypeptide
  XENP019481 [CTLA-4]_H0_L0.66_Fab Heavy Chain

SEQ ID NO: 9616 - protein, 118 aa, Artificial Sequence; identical to SEQ ID NO: 3737
  Description of Artificial Sequence: Synthetic polypeptide
  VH of XENP019481

SEQ ID NO: 9617 - protein, 5 aa, Artificial Sequence
  Description of Artificial Sequence: Synthetic peptide
  XENP019481 vhCDR1
SYTMH

SEQ ID NO: 9618 - protein, 17 aa, Artificial Sequence
  Description of Artificial Sequence: Synthetic peptide
  XENP019481 vhCDR2
FISYDGNNKYYADSVKG

SEQ ID NO: 9619 - protein, 9 aa, Artificial Sequence
  Description of Artificial Sequence: Synthetic peptide
  XENP019481 vhCDR3
TGWLGPFDY

SEQ ID NO: 9620 - protein, 215 aa, Artificial Sequence
  Description of Artificial Sequence: Synthetic polypeptide
  XENP019481 [CTLA-4]_H0_L0.66_Fab Light Chain
EIVLTQSPGTLSLSPGERATLSCRASQSVGSSYLAWYQQKPGQAPRLLIVGAFSRATGIPDRFSGSGSGTDFTLTISRLEPEDFAVYYCQQYGSSPWTFGQGTKVEIKRTVAAPSVFIFPPSDEQLKSGTASVVCLLNNFYPREAKVQWKVDNALQSGNSQESVTEQDSKDSTYSLSSTLTLSKADYEKHKVYACEVTHQGLSSPVTKSFNRGEC

SEQ ID NO: 9621 - protein, 108 aa, Artificial Sequence; identical to SEQ ID NO: 6679
  Description of Artificial Sequence: Synthetic polypeptide
  VL of XENP019481

SEQ ID NO: 9622 - protein, 12 aa, Artificial Sequence
  Description of Artificial Sequence: Synthetic peptide
  XENP019481 vlCDR1
RASQSVGSSYLA

SEQ ID NO: 9623 - protein, 7 aa, Artificial Sequence
  Description of Artificial Sequence: Synthetic peptide
  XENP019481 vlCDR2
GAFSRAT

SEQ ID NO: 9624 - protein, 9 aa, Artificial Sequence
  Description of Artificial Sequence: Synthetic peptide
  XENP019481 vlCDR3
QQYGSSPWT

SEQ ID NO: 9625 - protein, 221 aa, Artificial Sequence; identical to SEQ ID NO: 7595
  Description of Artificial Sequence: Synthetic polypeptide
  XENP019482 [CTLA-4]_H0_L0.67_Fab Heavy Chain

SEQ ID NO: 9626 - protein, 118 aa, Artificial Sequence; identical to SEQ ID NO: 3737
  Description of Artificial Sequence: Synthetic polypeptide
  VH of XENP019482

SEQ ID NO: 9627 - protein, 5 aa, Artificial Sequence
  Description of Artificial Sequence: Synthetic peptide
  XENP019482 vhCDR1
SYTMH

SEQ ID NO: 9628 - protein, 17 aa, Artificial Sequence
  Description of Artificial Sequence: Synthetic peptide
  XENP019482 vhCDR2
FISYDGNNKYYADSVKG

SEQ ID NO: 9629 - protein, 9 aa, Artificial Sequence
  Description of Artificial Sequence: Synthetic peptide
  XENP019482 vhCDR3
TGWLGPFDY

SEQ ID NO: 9630 - protein, 215 aa, Artificial Sequence
  Description of Artificial Sequence: Synthetic polypeptide
  XENP019482 [CTLA-4]_H0_L0.67_Fab Light Chain
EIVLTQSPGTLSLSPGERATLSCRASQSVGSSYLAWYQQKPGQAPRLLIYDAFSRATGIPDRFSGSGSGTDFTLTISRLEPEDFAVYYCQQYGSSPWTFGQGTKVEIKRTVAAPSVFIFPPSDEQLKSGTASVVCLLNNFYPREAKVQWKVDNALQSGNSQESVTEQDSKDSTYSLSSTLTLSKADYEKHKVYACEVTHQGLSSPVTKSFNRGEC

SEQ ID NO: 9631 - protein, 108 aa, Artificial Sequence; identical to SEQ ID NO: 6688
  Description of Artificial Sequence: Synthetic polypeptide
  VL of XENP019482

SEQ ID NO: 9632 - protein, 12 aa, Artificial Sequence
  Description of Artificial Sequence: Synthetic peptide
  XENP019482 vlCDR1
RASQSVGSSYLA

SEQ ID NO: 9633 - protein, 7 aa, Artificial Sequence
  Description of Artificial Sequence: Synthetic peptide
  XENP019482 vlCDR2
DAFSRAT

SEQ ID NO: 9634 - protein, 9 aa, Artificial Sequence
  Description of Artificial Sequence: Synthetic peptide
  XENP019482 vlCDR3
QQYGSSPWT

SEQ ID NO: 9635 - protein, 221 aa, Artificial Sequence; identical to SEQ ID NO: 7595
  Description of Artificial Sequence: Synthetic polypeptide
  XENP019483 [CTLA-4]_H0_L0.68_Fab Heavy Chain

SEQ ID NO: 9636 - protein, 118 aa, Artificial Sequence; identical to SEQ ID NO: 3737
  Description of Artificial Sequence: Synthetic polypeptide
  VH of XENP019483

SEQ ID NO: 9637 - protein, 5 aa, Artificial Sequence
  Description of Artificial Sequence: Synthetic peptide
  XENP019483 vhCDR1
SYTMH

SEQ ID NO: 9638 - protein, 17 aa, Artificial Sequence
  Description of Artificial Sequence: Synthetic peptide
  XENP019483 vhCDR2
FISYDGNNKYYADSVKG

SEQ ID NO: 9639 - protein, 9 aa, Artificial Sequence
  Description of Artificial Sequence: Synthetic peptide
  XENP019483 vhCDR3
TGWLGPFDY

SEQ ID NO: 9640 - protein, 215 aa, Artificial Sequence
  Description of Artificial Sequence: Synthetic polypeptide
  XENP019483 [CTLA-4]_H0_L0.68_Fab Light Chain
EIVLTQSPGTLSLSPGERATLSCRASQSVGSSYLAWYQQKPGQAPRLLIYSAFSRATGIPDRFSGSGSGTDFTLTISRLEPEDFAVYYCQQYGSSPWTFGQGTKVEIKRTVAAPSVFIFPPSDEQLKSGTASVVCLLNNFYPREAKVQWKVDNALQSGNSQESVTEQDSKDSTYSLSSTLTLSKADYEKHKVYACEVTHQGLSSPVTKSFNRGEC

SEQ ID NO: 9641 - protein, 108 aa, Artificial Sequence; identical to SEQ ID NO: 6697
  Description of Artificial Sequence: Synthetic polypeptide
  VL of XENP019483

SEQ ID NO: 9642 - protein, 12 aa, Artificial Sequence
  Description of Artificial Sequence: Synthetic peptide
  XENP019483 vlCDR1
RASQSVGSSYLA

SEQ ID NO: 9643 - protein, 7 aa, Artificial Sequence
  Description of Artificial Sequence: Synthetic peptide
  XENP019483 vlCDR2
SAFSRAT

SEQ ID NO: 9644 - protein, 9 aa, Artificial Sequence
  Description of Artificial Sequence: Synthetic peptide
  XENP019483 vlCDR3
QQYGSSPWT

SEQ ID NO: 9645 - protein, 221 aa, Artificial Sequence; identical to SEQ ID NO: 7595
  Description of Artificial Sequence: Synthetic polypeptide
  XENP019484 [CTLA-4]_H0_L0.69_Fab Heavy Chain

SEQ ID NO: 9646 - protein, 118 aa, Artificial Sequence; identical to SEQ ID NO: 3737
  Description of Artificial Sequence: Synthetic polypeptide
  VH of XENP019484

SEQ ID NO: 9647 - protein, 5 aa, Artificial Sequence
  Description of Artificial Sequence: Synthetic peptide
  XENP019484 vhCDR1
SYTMH

SEQ ID NO: 9648 - protein, 17 aa, Artificial Sequence
  Description of Artificial Sequence: Synthetic peptide
  XENP019484 vhCDR2
FISYDGNNKYYADSVKG

SEQ ID NO: 9649 - protein, 9 aa, Artificial Sequence
  Description of Artificial Sequence: Synthetic peptide
  XENP019484 vhCDR3
TGWLGPFDY

SEQ ID NO: 9650 - protein, 215 aa, Artificial Sequence
  Description of Artificial Sequence: Synthetic polypeptide
  XENP019484 [CTLA-4]_H0_L0.69_Fab Light Chain
EIVLTQSPGTLSLSPGERATLSCRASQSVGSSYLAWYQQKPGQAPRLLIYGVFSRATGIPDRFSGSGSGTDFTLTISRLEPEDFAVYYCQQYGSSPWTFGQGTKVEIKRTVAAPSVFIFPPSDEQLKSGTASVVCLLNNFYPREAKVQWKVDNALQSGNSQESVTEQDSKDSTYSLSSTLTLSKADYEKHKVYACEVTHQGLSSPVTKSFNRGEC

SEQ ID NO: 9651 - protein, 108 aa, Artificial Sequence; identical to SEQ ID NO: 6706
  Description of Artificial Sequence: Synthetic polypeptide
  VL of XENP019484

SEQ ID NO: 9652 - protein, 12 aa, Artificial Sequence
  Description of Artificial Sequence: Synthetic peptide
  XENP019484 vlCDR1
RASQSVGSSYLA

SEQ ID NO: 9653 - protein, 7 aa, Artificial Sequence
  Description of Artificial Sequence: Synthetic peptide
  XENP019484 vlCDR2
GVFSRAT

SEQ ID NO: 9654 - protein, 9 aa, Artificial Sequence
  Description of Artificial Sequence: Synthetic peptide
  XENP019484 vlCDR3
QQYGSSPWT

SEQ ID NO: 9655 - protein, 221 aa, Artificial Sequence; identical to SEQ ID NO: 7595
  Description of Artificial Sequence: Synthetic polypeptide
  XENP019485 [CTLA-4]_H0_L0.70_Fab Heavy Chain

SEQ ID NO: 9656 - protein, 118 aa, Artificial Sequence; identical to SEQ ID NO: 3737
  Description of Artificial Sequence: Synthetic polypeptide
  VH of XENP019485

SEQ ID NO: 9657 - protein, 5 aa, Artificial Sequence
  Description of Artificial Sequence: Synthetic peptide
  XENP019485 vhCDR1
SYTMH

SEQ ID NO: 9658 - protein, 17 aa, Artificial Sequence
  Description of Artificial Sequence: Synthetic peptide
  XENP019485 vhCDR2
FISYDGNNKYYADSVKG

SEQ ID NO: 9659 - protein, 9 aa, Artificial Sequence
  Description of Artificial Sequence: Synthetic peptide
  XENP019485 vhCDR3
TGWLGPFDY

SEQ ID NO: 9660 - protein, 215 aa, Artificial Sequence
  Description of Artificial Sequence: Synthetic polypeptide
  XENP019485 [CTLA-4]_H0_L0.70_Fab Light Chain
EIVLTQSPGTLSLSPGERATLSCRASQSVGSSYLAWYQQKPGQAPRLLIYGAHSRATGIPDRFSGSGSGTDFTLTISRLEPEDFAVYYCQQYGSSPWTFGQGTKVEIKRTVAAPSVFIFPPSDEQLKSGTASVVCLLNNFYPREAKVQWKVDNALQSGNSQESVTEQDSKDSTYSLSSTLTLSKADYEKHKVYACEVTHQGLSSPVTKSFNRGEC

SEQ ID NO: 9661 - protein, 108 aa, Artificial Sequence; identical to SEQ ID NO: 6715
  Description of Artificial Sequence: Synthetic polypeptide
  VL of XENP019485

SEQ ID NO: 9662 - protein, 12 aa, Artificial Sequence
  Description of Artificial Sequence: Synthetic peptide
  XENP019485 vlCDR1
RASQSVGSSYLA

SEQ ID NO: 9663 - protein, 7 aa, Artificial Sequence
  Description of Artificial Sequence: Synthetic peptide
  XENP019485 vlCDR2
GAHSRAT

SEQ ID NO: 9664 - protein, 9 aa, Artificial Sequence
  Description of Artificial Sequence: Synthetic peptide
  XENP019485 vlCDR3
QQYGSSPWT

SEQ ID NO: 9665 - protein, 221 aa, Artificial Sequence; identical to SEQ ID NO: 7595
  Description of Artificial Sequence: Synthetic polypeptide
  XENP019486 [CTLA-4]_H0_L0.71_Fab Heavy Chain

SEQ ID NO: 9666 - protein, 118 aa, Artificial Sequence; identical to SEQ ID NO: 3737
  Description of Artificial Sequence: Synthetic polypeptide
  VH of XENP019486

SEQ ID NO: 9667 - protein, 5 aa, Artificial Sequence
  Description of Artificial Sequence: Synthetic peptide
  XENP019486 vhCDR1
SYTMH

SEQ ID NO: 9668 - protein, 17 aa, Artificial Sequence
  Description of Artificial Sequence: Synthetic peptide
  XENP019486 vhCDR2
FISYDGNNKYYADSVKG

SEQ ID NO: 9669 - protein, 9 aa, Artificial Sequence
  Description of Artificial Sequence: Synthetic peptide
  XENP019486 vhCDR3
TGWLGPFDY

SEQ ID NO: 9670 - protein, 215 aa, Artificial Sequence
  Description of Artificial Sequence: Synthetic polypeptide
  XENP019486 [CTLA-4]_H0_L0.71_Fab Light Chain
EIVLTQSPGTLSLSPGERATLSCRASQSVGSSYLAWYQQKPGQAPRLLIYGAISRATGIPDRFSGSGSGTDFTLTISRLEPEDFAVYYCQQYGSSPWTFGQGTKVEIKRTVAAPSVFIFPPSDEQLKSGTASVVCLLNNFYPREAKVQWKVDNALQSGNSQESVTEQDSKDSTYSLSSTLTLSKADYEKHKVYACEVTHQGLSSPVTKSFNRGEC

SEQ ID NO: 9671 - protein, 108 aa, Artificial Sequence; identical to SEQ ID NO: 6724
  Description of Artificial Sequence: Synthetic polypeptide
  VL of XENP019486

SEQ ID NO: 9672 - protein, 12 aa, Artificial Sequence
  Description of Artificial Sequence: Synthetic peptide
  XENP019486 vlCDR1
RASQSVGSSYLA

SEQ ID NO: 9673 - protein, 7 aa, Artificial Sequence
  Description of Artificial Sequence: Synthetic peptide
  XENP019486 vlCDR2
GAISRAT

SEQ ID NO: 9674 - protein, 9 aa, Artificial Sequence
  Description of Artificial Sequence: Synthetic peptide
  XENP019486 vlCDR3
QQYGSSPWT

SEQ ID NO: 9675 - protein, 221 aa, Artificial Sequence; identical to SEQ ID NO: 7595
  Description of Artificial Sequence: Synthetic polypeptide
  XENP019487 [CTLA-4]_H0_L0.72_Fab Heavy Chain

SEQ ID NO: 9676 - protein, 118 aa, Artificial Sequence; identical to SEQ ID NO: 3737
  Description of Artificial Sequence: Synthetic polypeptide
  VH of XENP019487

SEQ ID NO: 9677 - protein, 5 aa, Artificial Sequence
  Description of Artificial Sequence: Synthetic peptide
  XENP019487 vhCDR1
SYTMH

SEQ ID NO: 9678 - protein, 17 aa, Artificial Sequence
  Description of Artificial Sequence: Synthetic peptide
  XENP019487 vhCDR2
FISYDGNNKYYADSVKG

SEQ ID NO: 9679 - protein, 9 aa, Artificial Sequence
  Description of Artificial Sequence: Synthetic peptide
  XENP019487 vhCDR3
TGWLGPFDY

SEQ ID NO: 9680 - protein, 215 aa, Artificial Sequence
  Description of Artificial Sequence: Synthetic polypeptide
  XENP019487 [CTLA-4]_H0_L0.72_Fab Light Chain
EIVLTQSPGTLSLSPGERATLSCRASQSVGSSYLAWYQQKPGQAPRLLIYGALSRATGIPDRFSGSGSGTDFTLTISRLEPEDFAVYYCQQYGSSPWTFGQGTKVEIKRTVAAPSVFIFPPSDEQLKSGTASVVCLLNNFYPREAKVQWKVDNALQSGNSQESVTEQDSKDSTYSLSSTLTLSKADYEKHKVYACEVTHQGLSSPVTKSFNRGEC

SEQ ID NO: 9681 - protein, 108 aa, Artificial Sequence; identical to SEQ ID NO: 6733
  Description of Artificial Sequence: Synthetic polypeptide
  VL of XENP019487

SEQ ID NO: 9682 - protein, 12 aa, Artificial Sequence
  Description of Artificial Sequence: Synthetic peptide
  XENP019487 vlCDR1
RASQSVGSSYLA

SEQ ID NO: 9683 - protein, 7 aa, Artificial Sequence
  Description of Artificial Sequence: Synthetic peptide
  XENP019487 vlCDR2
GALSRAT

SEQ ID NO: 9684 - protein, 9 aa, Artificial Sequence
  Description of Artificial Sequence: Synthetic peptide
  XENP019487 vlCDR3
QQYGSSPWT

SEQ ID NO: 9685 - protein, 221 aa, Artificial Sequence; identical to SEQ ID NO: 7595
  Description of Artificial Sequence: Synthetic polypeptide
  XENP019488 [CTLA-4]_H0_L0.73_Fab Heavy Chain

SEQ ID NO: 9686 - protein, 118 aa, Artificial Sequence; identical to SEQ ID NO: 3737
  Description of Artificial Sequence: Synthetic polypeptide
  VH of XENP019488

SEQ ID NO: 9687 - protein, 5 aa, Artificial Sequence
  Description of Artificial Sequence: Synthetic peptide
  XENP019488 vhCDR1
SYTMH

SEQ ID NO: 9688 - protein, 17 aa, Artificial Sequence
  Description of Artificial Sequence: Synthetic peptide
  XENP019488 vhCDR2
FISYDGNNKYYADSVKG

SEQ ID NO: 9689 - protein, 9 aa, Artificial Sequence
  Description of Artificial Sequence: Synthetic peptide
  XENP019488 vhCDR3
TGWLGPFDY

SEQ ID NO: 9690 - protein, 215 aa, Artificial Sequence
  Description of Artificial Sequence: Synthetic polypeptide
  XENP019488 [CTLA-4]_H0_L0.73_Fab Light Chain
EIVLTQSPGTLSLSPGERATLSCRASQSVGSSYLAWYQQKPGQAPRLLIYGASSRATGIPDRFSGSGSGTDFTLTISRLEPEDFAVYYCQQYGSSPWTFGQGTKVEIKRTVAAPSVFIFPPSDEQLKSGTASVVCLLNNFYPREAKVQWKVDNALQSGNSQESVTEQDSKDSTYSLSSTLTLSKADYEKHKVYACEVTHQGLSSPVTKSFNRGEC

SEQ ID NO: 9691 - protein, 108 aa, Artificial Sequence; identical to SEQ ID NO: 6742
  Description of Artificial Sequence: Synthetic polypeptide
  VL of XENP019488

SEQ ID NO: 9692 - protein, 12 aa, Artificial Sequence
  Description of Artificial Sequence: Synthetic peptide
  XENP019488 vlCDR1
RASQSVGSSYLA

SEQ ID NO: 9693 - protein, 7 aa, Artificial Sequence
  Description of Artificial Sequence: Synthetic peptide
  XENP019488 vlCDR2
GASSRAT

SEQ ID NO: 9694 - protein, 9 aa, Artificial Sequence
  Description of Artificial Sequence: Synthetic peptide
  XENP019488 vlCDR3
QQYGSSPWT

SEQ ID NO: 9695 - protein, 221 aa, Artificial Sequence; identical to SEQ ID NO: 7595
  Description of Artificial Sequence: Synthetic polypeptide
  XENP019489 [CTLA-4]_H0_L0.74_Fab Heavy Chain

SEQ ID NO: 9696 - protein, 118 aa, Artificial Sequence; identical to SEQ ID NO: 3737
  Description of Artificial Sequence: Synthetic polypeptide
  VH of XENP019489

SEQ ID NO: 9697 - protein, 5 aa, Artificial Sequence
  Description of Artificial Sequence: Synthetic peptide
  XENP019489 vhCDR1
SYTMH

SEQ ID NO: 9698 - protein, 17 aa, Artificial Sequence
  Description of Artificial Sequence: Synthetic peptide
  XENP019489 vhCDR2
FISYDGNNKYYADSVKG

SEQ ID NO: 9699 - protein, 9 aa, Artificial Sequence
  Description of Artificial Sequence: Synthetic peptide
  XENP019489 vhCDR3
TGWLGPFDY

SEQ ID NO: 9700 - protein, 215 aa, Artificial Sequence
  Description of Artificial Sequence: Synthetic polypeptide
  XENP019489 [CTLA-4]_H0_L0.74_Fab Light Chain
EIVLTQSPGTLSLSPGERATLSCRASQSVGSSYLAWYQQKPGQAPRLLIYGAYSRATGIPDRFSGSGSGTDFTLTISRLEPEDFAVYYCQQYGSSPWTFGQGTKVEIKRTVAAPSVFIFPPSDEQLKSGTASVVCLLNNFYPREAKVQWKVDNALQSGNSQESVTEQDSKDSTYSLSSTLTLSKADYEKHKVYACEVTHQGLSSPVTKSFNRGEC

SEQ ID NO: 9701 - protein, 108 aa, Artificial Sequence; identical to SEQ ID NO: 6751
  Description of Artificial Sequence: Synthetic polypeptide
  VL of XENP019489

SEQ ID NO: 9702 - protein, 12 aa, Artificial Sequence
  Description of Artificial Sequence: Synthetic peptide
  XENP019489 vlCDR1
RASQSVGSSYLA

SEQ ID NO: 9703 - protein, 7 aa, Artificial Sequence
  Description of Artificial Sequence: Synthetic peptide
  XENP019489 vlCDR2
GAYSRAT

SEQ ID NO: 9704 - protein, 9 aa, Artificial Sequence
  Description of Artificial Sequence: Synthetic peptide
  XENP019489 vlCDR3
QQYGSSPWT

SEQ ID NO: 9705 - protein, 221 aa, Artificial Sequence; identical to SEQ ID NO: 7595
  Description of Artificial Sequence: Synthetic polypeptide
  XENP019490 [CTLA-4]_H0_L0.75_Fab Heavy Chain

SEQ ID NO: 9706 - protein, 118 aa, Artificial Sequence; identical to SEQ ID NO: 3737
  Description of Artificial Sequence: Synthetic polypeptide
  VH of XENP019490

SEQ ID NO: 9707 - protein, 5 aa, Artificial Sequence
  Description of Artificial Sequence: Synthetic peptide
  XENP019490 vhCDR1
SYTMH

SEQ ID NO: 9708 - protein, 17 aa, Artificial Sequence
  Description of Artificial Sequence: Synthetic peptide
  XENP019490 vhCDR2
FISYDGNNKYYADSVKG

SEQ ID NO: 9709 - protein, 9 aa, Artificial Sequence
  Description of Artificial Sequence: Synthetic peptide
  XENP019490 vhCDR3
TGWLGPFDY

SEQ ID NO: 9710 - protein, 215 aa, Artificial Sequence
  Description of Artificial Sequence: Synthetic polypeptide
  XENP019490 [CTLA-4]_H0_L0.75_Fab Light Chain
EIVLTQSPGTLSLSPGERATLSCRASQSVGSSYLAWYQQKPGQAPRLLIYGAFARATGIPDRFSGSGSGTDFTLTISRLEPEDFAVYYCQQYGSSPWTFGQGTKVEIKRTVAAPSVFIFPPSDEQLKSGTASVVCLLNNFYPREAKVQWKVDNALQSGNSQESVTEQDSKDSTYSLSSTLTLSKADYEKHKVYACEVTHQGLSSPVTKSFNRGEC

SEQ ID NO: 9711 - protein, 108 aa, Artificial Sequence; identical to SEQ ID NO: 6760
  Description of Artificial Sequence: Synthetic polypeptide
  VL of XENP019490

SEQ ID NO: 9712 - protein, 12 aa, Artificial Sequence
  Description of Artificial Sequence: Synthetic peptide
  XENP019490 vlCDR1
RASQSVGSSYLA

SEQ ID NO: 9713 - protein, 7 aa, Artificial Sequence
  Description of Artificial Sequence: Synthetic peptide
  XENP019490 vlCDR2
GAFARAT

SEQ ID NO: 9714 - protein, 9 aa, Artificial Sequence
  Description of Artificial Sequence: Synthetic peptide
  XENP019490 vlCDR3
QQYGSSPWT

SEQ ID NO: 9715 - protein, 221 aa, Artificial Sequence; identical to SEQ ID NO: 7595
  Description of Artificial Sequence: Synthetic polypeptide
  XENP019491 [CTLA-4]_H0_L0.76_Fab Heavy Chain

SEQ ID NO: 9716 - protein, 118 aa, Artificial Sequence; identical to SEQ ID NO: 3737
  Description of Artificial Sequence: Synthetic polypeptide
  VH of XENP019491

SEQ ID NO: 9717 - protein, 5 aa, Artificial Sequence
  Description of Artificial Sequence: Synthetic peptide
  XENP019491 vhCDR1
SYTMH

SEQ ID NO: 9718 - protein, 17 aa, Artificial Sequence
  Description of Artificial Sequence: Synthetic peptide
  XENP019491 vhCDR2
FISYDGNNKYYADSVKG

SEQ ID NO: 9719 - protein, 9 aa, Artificial Sequence
  Description of Artificial Sequence: Synthetic peptide
  XENP019491 vhCDR3
TGWLGPFDY

SEQ ID NO: 9720 - protein, 215 aa, Artificial Sequence
  Description of Artificial Sequence: Synthetic polypeptide
  XENP019491 [CTLA-4]_H0_L0.76_Fab Light Chain
EIVLTQSPGTLSLSPGERATLSCRASQSVGSSYLAWYQQKPGQAPRLLIYGAFGRATGIPDRFSGSGSGTDFTLTISRLEPEDFAVYYCQQYGSSPWTFGQGTKVEIKRTVAAPSVFIFPPSDEQLKSGTASVVCLLNNFYPREAKVQWKVDNALQSGNSQESVTEQDSKDSTYSLSSTLTLSKADYEKHKVYACEVTHQGLSSPVTKSFNRGEC

SEQ ID NO: 9721 - protein, 108 aa, Artificial Sequence; identical to SEQ ID NO: 6769
  Description of Artificial Sequence: Synthetic polypeptide
  VL of XENP019491

SEQ ID NO: 9722 - protein, 12 aa, Artificial Sequence
  Description of Artificial Sequence: Synthetic peptide
  XENP019491 vlCDR1
RASQSVGSSYLA

SEQ ID NO: 9723 - protein, 7 aa, Artificial Sequence
  Description of Artificial Sequence: Synthetic peptide
  XENP019491 vlCDR2
GAFGRAT

SEQ ID NO: 9724 - protein, 9 aa, Artificial Sequence
  Description of Artificial Sequence: Synthetic peptide
  XENP019491 vlCDR3
QQYGSSPWT

SEQ ID NO: 9725 - protein, 221 aa, Artificial Sequence; identical to SEQ ID NO: 7595
  Description of Artificial Sequence: Synthetic polypeptide
  XENP019492 [CTLA-4]_H0_L0.77_Fab Heavy Chain

SEQ ID NO: 9726 - protein, 118 aa, Artificial Sequence; identical to SEQ ID NO: 3737
  Description of Artificial Sequence: Synthetic polypeptide
  VH of XENP019492

SEQ ID NO: 9727 - protein, 5 aa, Artificial Sequence
  Description of Artificial Sequence: Synthetic peptide
  XENP019492 vhCDR1
SYTMH

SEQ ID NO: 9728 - protein, 17 aa, Artificial Sequence
  Description of Artificial Sequence: Synthetic peptide
  XENP019492 vhCDR2
FISYDGNNKYYADSVKG

SEQ ID NO: 9729 - protein, 9 aa, Artificial Sequence
  Description of Artificial Sequence: Synthetic peptide
  XENP019492 vhCDR3
TGWLGPFDY

SEQ ID NO: 9730 - protein, 215 aa, Artificial Sequence
  Description of Artificial Sequence: Synthetic polypeptide
  XENP019492 [CTLA-4]_H0_L0.77_Fab Light Chain
EIVLTQSPGTLSLSPGERATLSCRASQSVGSSYLAWYQQKPGQAPRLLIYGAFNRATGIPDRFSGSGSGTDFTLTISRLEPEDFAVYYCQQYGSSPWTFGQGTKVEIKRTVAAPSVFIFPPSDEQLKSGTASVVCLLNNFYPREAKVQWKVDNALQSGNSQESVTEQDSKDSTYSLSSTLTLSKADYEKHKVYACEVTHQGLSSPVTKSFNRGEC

SEQ ID NO: 9731 - protein, 108 aa, Artificial Sequence; identical to SEQ ID NO: 6778
  Description of Artificial Sequence: Synthetic polypeptide
  VL of XENP019492

SEQ ID NO: 9732 - protein, 12 aa, Artificial Sequence
  Description of Artificial Sequence: Synthetic peptide
  XENP019492 vlCDR1
RASQSVGSSYLA

SEQ ID NO: 9733 - protein, 7 aa, Artificial Sequence
  Description of Artificial Sequence: Synthetic peptide
  XENP019492 vlCDR2
GAFNRAT

SEQ ID NO: 9734 - protein, 9 aa, Artificial Sequence
  Description of Artificial Sequence: Synthetic peptide
  XENP019492 vlCDR3
QQYGSSPWT

SEQ ID NO: 9735 - protein, 221 aa, Artificial Sequence; identical to SEQ ID NO: 7595
  Description of Artificial Sequence: Synthetic polypeptide
  XENP019493 [CTLA-4]_H0_L0.78_Fab Heavy Chain

SEQ ID NO: 9736 - protein, 118 aa, Artificial Sequence; identical to SEQ ID NO: 3737
  Description of Artificial Sequence: Synthetic polypeptide
  VH of XENP019493

SEQ ID NO: 9737 - protein, 5 aa, Artificial Sequence
  Description of Artificial Sequence: Synthetic peptide
  XENP019493 vhCDR1
SYTMH

SEQ ID NO: 9738 - protein, 17 aa, Artificial Sequence
  Description of Artificial Sequence: Synthetic peptide
  XENP019493 vhCDR2
FISYDGNNKYYADSVKG

SEQ ID NO: 9739 - protein, 9 aa, Artificial Sequence
  Description of Artificial Sequence: Synthetic peptide
  XENP019493 vhCDR3
TGWLGPFDY

SEQ ID NO: 9740 - protein, 215 aa, Artificial Sequence
  Description of Artificial Sequence: Synthetic polypeptide
  XENP019493 [CTLA-4]_H0_L0.78_Fab Light Chain
EIVLTQSPGTLSLSPGERATLSCRASQSVGSSYLAWYQQKPGQAPRLLIYGAFQRATGIPDRFSGSGSGTDFTLTISRLEPEDFAVYYCQQYGSSPWTFGQGTKVEIKRTVAAPSVFIFPPSDEQLKSGTASVVCLLNNFYPREAKVQWKVDNALQSGNSQESVTEQDSKDSTYSLSSTLTLSKADYEKHKVYACEVTHQGLSSPVTKSFNRGEC

SEQ ID NO: 9741 - protein, 108 aa, Artificial Sequence; identical to SEQ ID NO: 6787
  Description of Artificial Sequence: Synthetic polypeptide
  VL of XENP019493

SEQ ID NO: 9742 - protein, 12 aa, Artificial Sequence
  Description of Artificial Sequence: Synthetic peptide
  XENP019493 vlCDR1
RASQSVGSSYLA

SEQ ID NO: 9743 - protein, 7 aa, Artificial Sequence
  Description of Artificial Sequence: Synthetic peptide
  XENP019493 vlCDR2
GAFQRAT

SEQ ID NO: 9744 - protein, 9 aa, Artificial Sequence
  Description of Artificial Sequence: Synthetic peptide
  XENP019493 vlCDR3
QQYGSSPWT

SEQ ID NO: 9745 - protein, 221 aa, Artificial Sequence; identical to SEQ ID NO: 7595
  Description of Artificial Sequence: Synthetic polypeptide
  XENP019494 [CTLA-4]_H0_L0.79_Fab Heavy Chain

SEQ ID NO: 9746 - protein, 118 aa, Artificial Sequence; identical to SEQ ID NO: 3737
  Description of Artificial Sequence: Synthetic polypeptide
  VH of XENP019494

SEQ ID NO: 9747 - protein, 5 aa, Artificial Sequence
  Description of Artificial Sequence: Synthetic peptide
  XENP019494 vhCDR1
SYTMH

SEQ ID NO: 9748 - protein, 17 aa, Artificial Sequence
  Description of Artificial Sequence: Synthetic peptide
  XENP019494 vhCDR2
FISYDGNNKYYADSVKG

SEQ ID NO: 9749 - protein, 9 aa, Artificial Sequence
  Description of Artificial Sequence: Synthetic peptide
  XENP019494 vhCDR3
TGWLGPFDY

SEQ ID NO: 9750 - protein, 215 aa, Artificial Sequence
  Description of Artificial Sequence: Synthetic polypeptide
  XENP019494 [CTLA-4]_H0_L0.79_Fab Light Chain
EIVLTQSPGTLSLSPGERATLSCRASQSVGSSYLAWYQQKPGQAPRLLIYGAFTRATGIPDRFSGSGSGTDFTLTISRLEPEDFAVYYCQQYGSSPWTFGQGTKVEIKRTVAAPSVFIFPPSDEQLKSGTASVVCLLNNFYPREAKVQWKVDNALQSGNSQESVTEQDSKDSTYSLSSTLTLSKADYEKHKVYACEVTHQGLSSPVTKSFNRGEC

SEQ ID NO: 9751 - protein, 108 aa, Artificial Sequence; identical to SEQ ID NO: 6796
  Description of Artificial Sequence: Synthetic polypeptide
  VL of XENP019494

SEQ ID NO: 9752 - protein, 12 aa, Artificial Sequence
  Description of Artificial Sequence: Synthetic peptide
  XENP019494 vlCDR1
RASQSVGSSYLA

SEQ ID NO: 9753 - protein, 7 aa, Artificial Sequence
  Description of Artificial Sequence: Synthetic peptide
  XENP019494 vlCDR2
GAFTRAT

SEQ ID NO: 9754 - protein, 9 aa, Artificial Sequence
  Description of Artificial Sequence: Synthetic peptide
  XENP019494 vlCDR3
QQYGSSPWT

SEQ ID NO: 9755 - protein, 221 aa, Artificial Sequence; identical to SEQ ID NO: 7595
  Description of Artificial Sequence: Synthetic polypeptide
  XENP019495 [CTLA-4]_H0_L0.80_Fab Heavy Chain

SEQ ID NO: 9756 - protein, 118 aa, Artificial Sequence; identical to SEQ ID NO: 3737
  Description of Artificial Sequence: Synthetic polypeptide
  VH of XENP019495

SEQ ID NO: 9757 - protein, 5 aa, Artificial Sequence
  Description of Artificial Sequence: Synthetic peptide
  XENP019495 vhCDR1
SYTMH

SEQ ID NO: 9758 - protein, 17 aa, Artificial Sequence
  Description of Artificial Sequence: Synthetic peptide
  XENP019495 vhCDR2
FISYDGNNKYYADSVKG

SEQ ID NO: 9759 - protein, 9 aa, Artificial Sequence
  Description of Artificial Sequence: Synthetic peptide
  XENP019495 vhCDR3
TGWLGPFDY

SEQ ID NO: 9760 - protein, 215 aa, Artificial Sequence
  Description of Artificial Sequence: Synthetic polypeptide
  XENP019495 [CTLA-4]_H0_L0.80_Fab Light Chain
EIVLTQSPGTLSLSPGERATLSCRASQSVGSSYLAWYQQKPGQAPRLLIYGAFSRDTGIPDRFSGSGSGTDFTLTISRLEPEDFAVYYCQQYGSSPWTFGQGTKVEIKRTVAAPSVFIFPPSDEQLKSGTASVVCLLNNFYPREAKVQWKVDNALQSGNSQESVTEQDSKDSTYSLSSTLTLSKADYEKHKVYACEVTHQGLSSPVTKSFNRGEC

SEQ ID NO: 9761 - protein, 108 aa, Artificial Sequence; identical to SEQ ID NO: 6805
  Description of Artificial Sequence: Synthetic polypeptide
  VL of XENP019495

SEQ ID NO: 9762 - protein, 12 aa, Artificial Sequence
  Description of Artificial Sequence: Synthetic peptide
  XENP019495 vlCDR1
RASQSVGSSYLA

SEQ ID NO: 9763 - protein, 7 aa, Artificial Sequence
  Description of Artificial Sequence: Synthetic peptide
  XENP019495 vlCDR2
GAFSRDT

SEQ ID NO: 9764 - protein, 9 aa, Artificial Sequence
  Description of Artificial Sequence: Synthetic peptide
  XENP019495 vlCDR3
QQYGSSPWT

SEQ ID NO: 9765 - protein, 221 aa, Artificial Sequence; identical to SEQ ID NO: 7595
  Description of Artificial Sequence: Synthetic polypeptide
  XENP019496 [CTLA-4]_H0_L0.81_Fab Heavy Chain

SEQ ID NO: 9766 - protein, 118 aa, Artificial Sequence; identical to SEQ ID NO: 3737
  Description of Artificial Sequence: Synthetic polypeptide
  VH of XENP019496

SEQ ID NO: 9767 - protein, 5 aa, Artificial Sequence
  Description of Artificial Sequence: Synthetic peptide
  XENP019496 vhCDR1
SYTMH

SEQ ID NO: 9768 - protein, 17 aa, Artificial Sequence
  Description of Artificial Sequence: Synthetic peptide
  XENP019496 vhCDR2
FISYDGNNKYYADSVKG

SEQ ID NO: 9769 - protein, 9 aa, Artificial Sequence
  Description of Artificial Sequence: Synthetic peptide
  XENP019496 vhCDR3
TGWLGPFDY

SEQ ID NO: 9770 - protein, 215 aa, Artificial Sequence
  Description of Artificial Sequence: Synthetic polypeptide
  XENP019496 [CTLA-4]_H0_L0.81_Fab Light Chain
EIVLTQSPGTLSLSPGERATLSCRASQSVGSSYLAWYQQKPGQAPRLLIYGAFSRASGIPDRFSGSGSGTDFTLTISRLEPEDFAVYYCQQYGSSPWTFGQGTKVEIKRTVAAPSVFIFPPSDEQLKSGTASVVCLLNNFYPREAKVQWKVDNALQSGNSQESVTEQDSKDSTYSLSSTLTLSKADYEKHKVYACEVTHQGLSSPVTKSFNRGEC

SEQ ID NO: 9771 - protein, 108 aa, Artificial Sequence; identical to SEQ ID NO: 6814
  Description of Artificial Sequence: Synthetic polypeptide
  VL of XENP019496

SEQ ID NO: 9772 - protein, 12 aa, Artificial Sequence
  Description of Artificial Sequence: Synthetic peptide
  XENP019496 vlCDR1
RASQSVGSSYLA

SEQ ID NO: 9773 - protein, 7 aa, Artificial Sequence
  Description of Artificial Sequence: Synthetic peptide
  XENP019496 vlCDR2
GAFSRAS

SEQ ID NO: 9774 - protein, 9 aa, Artificial Sequence
  Description of Artificial Sequence: Synthetic peptide
  XENP019496 vlCDR3
QQYGSSPWT

SEQ ID NO: 9775 - protein, 221 aa, Artificial Sequence; identical to SEQ ID NO: 7595
  Description of Artificial Sequence: Synthetic polypeptide
  XENP019501 [CTLA-4]_H0_L0.82_Fab Heavy Chain

SEQ ID NO: 9776 - protein, 118 aa, Artificial Sequence; identical to SEQ ID NO: 3737
  Description of Artificial Sequence: Synthetic polypeptide
  VH of XENP019501

SEQ ID NO: 9777 - protein, 5 aa, Artificial Sequence
  Description of Artificial Sequence: Synthetic peptide
  XENP019501 vhCDR1
SYTMH

SEQ ID NO: 9778 - protein, 17 aa, Artificial Sequence
  Description of Artificial Sequence: Synthetic peptide
  XENP019501 vhCDR2
FISYDGNNKYYADSVKG

SEQ ID NO: 9779 - protein, 9 aa, Artificial Sequence
  Description of Artificial Sequence: Synthetic peptide
  XENP019501 vhCDR3
TGWLGPFDY

SEQ ID NO: 9780 - protein, 215 aa, Artificial Sequence
  Description of Artificial Sequence: Synthetic polypeptide
  XENP019501 [CTLA-4]_H0_L0.82_Fab Light Chain
EIVLTQSPGTLSLSPGERATLSCRASQSVGSSYLAWYQQKPGQAPRLLIYGAFSRATGVPDRFSGSGSGTDFTLTISRLEPEDFAVYYCQQYGSSPWTFGQGTKVEIKRTVAAPSVFIFPPSDEQLKSGTASVVCLLNNFYPREAKVQWKVDNALQSGNSQESVTEQDSKDSTYSLSSTLTLSKADYEKHKVYACEVTHQGLSSPVTKSFNRGEC

SEQ ID NO: 9781 - protein, 108 aa, Artificial Sequence; identical to SEQ ID NO: 6823
  Description of Artificial Sequence: Synthetic polypeptide
  VL of XENP019501

SEQ ID NO: 9782 - protein, 12 aa, Artificial Sequence
  Description of Artificial Sequence: Synthetic peptide
  XENP019501 vlCDR1
RASQSVGSSYLA

SEQ ID NO: 9783 - protein, 7 aa, Artificial Sequence
  Description of Artificial Sequence: Synthetic peptide
  XENP019501 vlCDR2
GAFSRAT

SEQ ID NO: 9784 - protein, 9 aa, Artificial Sequence
  Description of Artificial Sequence: Synthetic peptide
  XENP019501 vlCDR3
QQYGSSPWT

SEQ ID NO: 9785 - protein, 221 aa, Artificial Sequence; identical to SEQ ID NO: 7595
  Description of Artificial Sequence: Synthetic polypeptide
  XENP019502 [CTLA-4]_H0_L0.83_Fab Heavy Chain

SEQ ID NO: 9786 - protein, 118 aa, Artificial Sequence; identical to SEQ ID NO: 3737
  Description of Artificial Sequence: Synthetic polypeptide
  VH of XENP019502

SEQ ID NO: 9787 - protein, 5 aa, Artificial Sequence
  Description of Artificial Sequence: Synthetic peptide
  XENP019502 vhCDR1
SYTMH

SEQ ID NO: 9788 - protein, 17 aa, Artificial Sequence
  Description of Artificial Sequence: Synthetic peptide
  XENP019502 vhCDR2
FISYDGNNKYYADSVKG

SEQ ID NO: 9789 - protein, 9 aa, Artificial Sequence
  Description of Artificial Sequence: Synthetic peptide
  XENP019502 vhCDR3
TGWLGPFDY

SEQ ID NO: 9790 - protein, 215 aa, Artificial Sequence
  Description of Artificial Sequence: Synthetic polypeptide
  XENP019502 [CTLA-4]_H0_L0.83_Fab Light Chain
EIVLTQSPGTLSLSPGERATLSCRASQSVGSSYLAWYQQKPGQAPRLLIYGAFSRATGIPARFSGSGSGTDFTLTISRLEPEDFAVYYCQQYGSSPWTFGQGTKVEIKRTVAAPSVFIFPPSDEQLKSGTASVVCLLNNFYPREAKVQWKVDNALQSGNSQESVTEQDSKDSTYSLSSTLTLSKADYEKHKVYACEVTHQGLSSPVTKSFNRGEC

SEQ ID NO: 9791 - protein, 108 aa, Artificial Sequence; identical to SEQ ID NO: 6832
  Description of Artificial Sequence: Synthetic polypeptide
  VL of XENP019502

SEQ ID NO: 9792 - protein, 12 aa, Artificial Sequence
  Description of Artificial Sequence: Synthetic peptide
  XENP019502 vlCDR1
RASQSVGSSYLA

SEQ ID NO: 9793 - protein, 7 aa, Artificial Sequence
  Description of Artificial Sequence: Synthetic peptide
  XENP019502 vlCDR2
GAFSRAT

SEQ ID NO: 9794 - protein, 9 aa, Artificial Sequence
  Description of Artificial Sequence: Synthetic peptide
  XENP019502 vlCDR3
QQYGSSPWT

SEQ ID NO: 9795 - protein, 221 aa, Artificial Sequence; identical to SEQ ID NO: 7595
  Description of Artificial Sequence: Synthetic polypeptide
  XENP019503 [CTLA-4]_H0_L0.84_Fab Heavy Chain

SEQ ID NO: 9796 - protein, 118 aa, Artificial Sequence; identical to SEQ ID NO: 3737
  Description of Artificial Sequence: Synthetic polypeptide
  VH of XENP019503

SEQ ID NO: 9797 - protein, 5 aa, Artificial Sequence
  Description of Artificial Sequence: Synthetic peptide
  XENP019503 vhCDR1
SYTMH

SEQ ID NO: 9798 - protein, 17 aa, Artificial Sequence
  Description of Artificial Sequence: Synthetic peptide
  XENP019503 vhCDR2
FISYDGNNKYYADSVKG

SEQ ID NO: 9799 - protein, 9 aa, Artificial Sequence
  Description of Artificial Sequence: Synthetic peptide
  XENP019503 vhCDR3
TGWLGPFDY

SEQ ID NO: 9800 - protein, 215 aa, Artificial Sequence
  Description of Artificial Sequence: Synthetic polypeptide
  XENP019503 [CTLA-4]_H0_L0.84_Fab Light Chain
EIVLTQSPGTLSLSPGERATLSCRASQSVGSSYLAWYQQKPGQAPRLLIYGAFSRATGIPDRFSGSGSRTDFTLTISRLEPEDFAVYYCQQYGSSPWTFGQGTKVEIKRTVAAPSVFIFPPSDEQLKSGTASVVCLLNNFYPREAKVQWKVDNALQSGNSQESVTEQDSKDSTYSLSSTLTLSKADYEKHKVYACEVTHQGLSSPVTKSFNRGEC

SEQ ID NO: 9801 - protein, 108 aa, Artificial Sequence; identical to SEQ ID NO: 6841
  Description of Artificial Sequence: Synthetic polypeptide
  VL of XENP019503

SEQ ID NO: 9802 - protein, 12 aa, Artificial Sequence
  Description of Artificial Sequence: Synthetic peptide
  XENP019503 vlCDR1
RASQSVGSSYLA

SEQ ID NO: 9803 - protein, 7 aa, Artificial Sequence
  Description of Artificial Sequence: Synthetic peptide
  XENP019503 vlCDR2
GAFSRAT

SEQ ID NO: 9804 - protein, 9 aa, Artificial Sequence
  Description of Artificial Sequence: Synthetic peptide
  XENP019503 vlCDR3
QQYGSSPWT

SEQ ID NO: 9805 - protein, 221 aa, Artificial Sequence; identical to SEQ ID NO: 7595
  Description of Artificial Sequence: Synthetic polypeptide
  XENP019504 [CTLA-4]_H0_L0.85_Fab Heavy Chain

SEQ ID NO: 9806 - protein, 118 aa, Artificial Sequence; identical to SEQ ID NO: 3737
  Description of Artificial Sequence: Synthetic polypeptide
  VH of XENP019504

SEQ ID NO: 9807 - protein, 5 aa, Artificial Sequence
  Description of Artificial Sequence: Synthetic peptide
  XENP019504 vhCDR1
SYTMH

SEQ ID NO: 9808 - protein, 17 aa, Artificial Sequence
  Description of Artificial Sequence: Synthetic peptide
  XENP019504 vhCDR2
FISYDGNNKYYADSVKG

SEQ ID NO: 9809 - protein, 9 aa, Artificial Sequence
  Description of Artificial Sequence: Synthetic peptide
  XENP019504 vhCDR3
TGWLGPFDY

SEQ ID NO: 9810 - protein, 215 aa, Artificial Sequence
  Description of Artificial Sequence: Synthetic polypeptide
  XENP019504 [CTLA-4]_H0_L0.85_Fab Light Chain
EIVLTQSPGTLSLSPGERATLSCRASQSVGSSYLAWYQQKPGQAPRLLIYGAFSRATGIPDRFSGSGSGTEFTLTISRLEPEDFAVYYCQQYGSSPWTFGQGTKVEIKRTVAAPSVFIFPPSDEQLKSGTASVVCLLNNFYPREAKVQWKVDNALQSGNSQESVTEQDSKDSTYSLSSTLTLSKADYEKHKVYACEVTHQGLSSPVTKSFNRGEC

SEQ ID NO: 9811 - protein, 108 aa, Artificial Sequence; identical to SEQ ID NO: 6850
  Description of Artificial Sequence: Synthetic polypeptide
  VL of XENP019504

SEQ ID NO: 9812 - protein, 12 aa, Artificial Sequence
  Description of Artificial Sequence: Synthetic peptide
  XENP019504 vlCDR1
RASQSVGSSYLA

SEQ ID NO: 9813 - protein, 7 aa, Artificial Sequence
  Description of Artificial Sequence: Synthetic peptide
  XENP019504 vlCDR2
GAFSRAT

SEQ ID NO: 9814 - protein, 9 aa, Artificial Sequence
  Description of Artificial Sequence: Synthetic peptide
  XENP019504 vlCDR3
QQYGSSPWT

SEQ ID NO: 9815 - protein, 221 aa, Artificial Sequence; identical to SEQ ID NO: 7595
  Description of Artificial Sequence: Synthetic polypeptide
  XENP019505 [CTLA-4]_H0_L0.86_Fab Heavy Chain

SEQ ID NO: 9816 - protein, 118 aa, Artificial Sequence; identical to SEQ ID NO: 3737
  Description of Artificial Sequence: Synthetic polypeptide
  VH of XENP019505

SEQ ID NO: 9817 - protein, 5 aa, Artificial Sequence
  Description of Artificial Sequence: Synthetic peptide
  XENP019505 vhCDR1
SYTMH

SEQ ID NO: 9818 - protein, 17 aa, Artificial Sequence
  Description of Artificial Sequence: Synthetic peptide
  XENP019505 vhCDR2
FISYDGNNKYYADSVKG

SEQ ID NO: 9819 - protein, 9 aa, Artificial Sequence
  Description of Artificial Sequence: Synthetic peptide
  XENP019505 vhCDR3
TGWLGPFDY

SEQ ID NO: 9820 - protein, 215 aa, Artificial Sequence
  Description of Artificial Sequence: Synthetic polypeptide
  XENP019505 [CTLA-4]_H0_L0.86_Fab Light Chain
EIVLTQSPGTLSLSPGERATLSCRASQSVGSSYLAWYQQKPGQAPRLLIYGAFSRATGIPDRFSGSGSGTDFTLKISRLEPEDFAVYYCQQYGSSPWTFGQGTKVEIKRTVAAPSVFIFPPSDEQLKSGTASVVCLLNNFYPREAKVQWKVDNALQSGNSQESVTEQDSKDSTYSLSSTLTLSKADYEKHKVYACEVTHQGLSSPVTKSFNRGEC

SEQ ID NO: 9821 - protein, 108 aa, Artificial Sequence; identical to SEQ ID NO: 6859
  Description of Artificial Sequence: Synthetic polypeptide
  VL of XENP019505

SEQ ID NO: 9822 - protein, 12 aa, Artificial Sequence
  Description of Artificial Sequence: Synthetic peptide
  XENP019505 vlCDR1
RASQSVGSSYLA

SEQ ID NO: 9823 - protein, 7 aa, Artificial Sequence
  Description of Artificial Sequence: Synthetic peptide
  XENP019505 vlCDR2
GAFSRAT

SEQ ID NO: 9824 - protein, 9 aa, Artificial Sequence
  Description of Artificial Sequence: Synthetic peptide
  XENP019505 vlCDR3
QQYGSSPWT

SEQ ID NO: 9825 - protein, 221 aa, Artificial Sequence; identical to SEQ ID NO: 7595
  Description of Artificial Sequence: Synthetic polypeptide
  XENP019506 [CTLA-4]_H0_L0.87_Fab Heavy Chain

SEQ ID NO: 9826 - protein, 118 aa, Artificial Sequence; identical to SEQ ID NO: 3737
  Description of Artificial Sequence: Synthetic polypeptide
  VH of XENP019506

SEQ ID NO: 9827 - protein, 5 aa, Artificial Sequence
  Description of Artificial Sequence: Synthetic peptide
  XENP019506 vhCDR1
SYTMH

SEQ ID NO: 9828 - protein, 17 aa, Artificial Sequence
  Description of Artificial Sequence: Synthetic peptide
  XENP019506 vhCDR2
FISYDGNNKYYADSVKG

SEQ ID NO: 9829 - protein, 9 aa, Artificial Sequence
  Description of Artificial Sequence: Synthetic peptide
  XENP019506 vhCDR3
TGWLGPFDY

SEQ ID NO: 9830 - protein, 215 aa, Artificial Sequence
  Description of Artificial Sequence: Synthetic polypeptide
  XENP019506 [CTLA-4]_H0_L0.87_Fab Light Chain
EIVLTQSPGTLSLSPGERATLSCRASQSVGSSYLAWYQQKPGQAPRLLIYGAFSRATGIPDRFSGSGSGTDFTLTISSLEPEDFAVYYCQQYGSSPWTFGQGTKVEIKRTVAAPSVFIFPPSDEQLKSGTASVVCLLNNFYPREAKVQWKVDNALQSGNSQESVTEQDSKDSTYSLSSTLTLSKADYEKHKVYACEVTHQGLSSPVTKSFNRGEC

SEQ ID NO: 9831 - protein, 108 aa, Artificial Sequence; identical to SEQ ID NO: 6868
  Description of Artificial Sequence: Synthetic polypeptide
  VL of XENP019506

SEQ ID NO: 9832 - protein, 12 aa, Artificial Sequence
  Description of Artificial Sequence: Synthetic peptide
  XENP019506 vlCDR1
RASQSVGSSYLA

SEQ ID NO: 9833 - protein, 7 aa, Artificial Sequence
  Description of Artificial Sequence: Synthetic peptide
  XENP019506 vlCDR2
GAFSRAT

SEQ ID NO: 9834 - protein, 9 aa, Artificial Sequence
  Description of Artificial Sequence: Synthetic peptide
  XENP019506 vlCDR3
QQYGSSPWT

SEQ ID NO: 9835 - protein, 221 aa, Artificial Sequence; identical to SEQ ID NO: 7595
  Description of Artificial Sequence: Synthetic polypeptide
  XENP019507 [CTLA-4]_H0_L0.88_Fab Heavy Chain

SEQ ID NO: 9836 - protein, 118 aa, Artificial Sequence; identical to SEQ ID NO: 3737
  Description of Artificial Sequence: Synthetic polypeptide
  VH of XENP019507

SEQ ID NO: 9837 - protein, 5 aa, Artificial Sequence
  Description of Artificial Sequence: Synthetic peptide
  XENP019507 vhCDR1
SYTMH

SEQ ID NO: 9838 - protein, 17 aa, Artificial Sequence
  Description of Artificial Sequence: Synthetic peptide
  XENP019507 vhCDR2
FISYDGNNKYYADSVKG

SEQ ID NO: 9839 - protein, 9 aa, Artificial Sequence
  Description of Artificial Sequence: Synthetic peptide
  XENP019507 vhCDR3
TGWLGPFDY

SEQ ID NO: 9840 - protein, 215 aa, Artificial Sequence
  Description of Artificial Sequence: Synthetic polypeptide
  XENP019507 [CTLA-4]_H0_L0.88_Fab Light Chain
EIVLTQSPGTLSLSPGERATLSCRASQSVGSSYLAWYQQKPGQAPRLLIYGAFSRATGIPDRFSGSGSGTDFTLTISSLQSEDFAVYYCQQYGSSPWTFGQGTKVEIKRTVAAPSVFIFPPSDEQLKSGTASVVCLLNNFYPREAKVQWKVDNALQSGNSQESVTEQDSKDSTYSLSSTLTLSKADYEKHKVYACEVTHQGLSSPVTKSFNRGEC

SEQ ID NO: 9841 - protein, 108 aa, Artificial Sequence; identical to SEQ ID NO: 6877
  Description of Artificial Sequence: Synthetic polypeptide
  VL of XENP019507

SEQ ID NO: 9842 - protein, 12 aa, Artificial Sequence
  Description of Artificial Sequence: Synthetic peptide
  XENP019507 vlCDR1
RASQSVGSSYLA

SEQ ID NO: 9843 - protein, 7 aa, Artificial Sequence
  Description of Artificial Sequence: Synthetic peptide
  XENP019507 vlCDR2
GAFSRAT

SEQ ID NO: 9844 - protein, 9 aa, Artificial Sequence
  Description of Artificial Sequence: Synthetic peptide
  XENP019507 vlCDR3
QQYGSSPWT

SEQ ID NO: 9845 - protein, 221 aa, Artificial Sequence; identical to SEQ ID NO: 7595
  Description of Artificial Sequence: Synthetic polypeptide
  XENP019508 [CTLA-4]_H0_L0.89_Fab Heavy Chain

SEQ ID NO: 9846 - protein, 118 aa, Artificial Sequence; identical to SEQ ID NO: 3737
  Description of Artificial Sequence: Synthetic polypeptide
  VH of XENP019508

SEQ ID NO: 9847 - protein, 5 aa, Artificial Sequence
  Description of Artificial Sequence: Synthetic peptide
  XENP019508 vhCDR1
SYTMH

SEQ ID NO: 9848 - protein, 17 aa, Artificial Sequence
  Description of Artificial Sequence: Synthetic peptide
  XENP019508 vhCDR2
FISYDGNNKYYADSVKG

SEQ ID NO: 9849 - protein, 9 aa, Artificial Sequence
  Description of Artificial Sequence: Synthetic peptide
  XENP019508 vhCDR3
TGWLGPFDY

SEQ ID NO: 9850 - protein, 215 aa, Artificial Sequence
  Description of Artificial Sequence: Synthetic polypeptide
  XENP019508 [CTLA-4]_H0_L0.89_Fab Light Chain
EIVLTQSPGTLSLSPGERATLSCRASQSVGSSYLAWYQQKPGQAPRLLIYGAFSRATGIPDRFSGSGSGTDFTLTISRVEPEDFAVYYCQQYGSSPWTFGQGTKVEIKRTVAAPSVFIFPPSDEQLKSGTASVVCLLNNFYPREAKVQWKVDNALQSGNSQESVTEQDSKDSTYSLSSTLTLSKADYEKHKVYACEVTHQGLSSPVTKSFNRGEC

SEQ ID NO: 9851 - protein, 108 aa, Artificial Sequence; identical to SEQ ID NO: 6886
  Description of Artificial Sequence: Synthetic polypeptide
  VL of XENP019508

SEQ ID NO: 9852 - protein, 12 aa, Artificial Sequence
  Description of Artificial Sequence: Synthetic peptide
  XENP019508 vlCDR1
RASQSVGSSYLA

SEQ ID NO: 9853 - protein, 7 aa, Artificial Sequence
  Description of Artificial Sequence: Synthetic peptide
  XENP019508 vlCDR2
GAFSRAT

SEQ ID NO: 9854 - protein, 9 aa, Artificial Sequence
  Description of Artificial Sequence: Synthetic peptide
  XENP019508 vlCDR3
QQYGSSPWT

SEQ ID NO: 9855 - protein, 221 aa, Artificial Sequence; identical to SEQ ID NO: 7595
  Description of Artificial Sequence: Synthetic polypeptide
  XENP019509 [CTLA-4]_H0_L0.90_Fab Heavy Chain

SEQ ID NO: 9856 - protein, 118 aa, Artificial Sequence; identical to SEQ ID NO: 3737
  Description of Artificial Sequence: Synthetic polypeptide
  VH of XENP019509

SEQ ID NO: 9857 - protein, 5 aa, Artificial Sequence
  Description of Artificial Sequence: Synthetic peptide
  XENP019509 vhCDR1
SYTMH

SEQ ID NO: 9858 - protein, 17 aa, Artificial Sequence
  Description of Artificial Sequence: Synthetic peptide
  XENP019509 vhCDR2
FISYDGNNKYYADSVKG

SEQ ID NO: 9859 - protein, 9 aa, Artificial Sequence
  Description of Artificial Sequence: Synthetic peptide
  XENP019509 vhCDR3
TGWLGPFDY

SEQ ID NO: 9860 - protein, 215 aa, Artificial Sequence
  Description of Artificial Sequence: Synthetic polypeptide
  XENP019509 [CTLA-4]_H0_L0.90_Fab Light Chain
EIVLTQSPGTLSLSPGERATLSCRASQSVGSSYLAWYQQKPGQAPRLLIYGAFSRATGIPDRFSGSGSGTDFTLTISRLQPEDFAVYYCQQYGSSPWTFGQGTKVEIKRTVAAPSVFIFPPSDEQLKSGTASVVCLLNNFYPREAKVQWKVDNALQSGNSQESVTEQDSKDSTYSLSSTLTLSKADYEKHKVYACEVTHQGLSSPVTKSFNRGEC

SEQ ID NO: 9861 - protein, 108 aa, Artificial Sequence; identical to SEQ ID NO: 6895
  Description of Artificial Sequence: Synthetic polypeptide
  VL of XENP019509

SEQ ID NO: 9862 - protein, 12 aa, Artificial Sequence
  Description of Artificial Sequence: Synthetic peptide
  XENP019509 vlCDR1
RASQSVGSSYLA

SEQ ID NO: 9863 - protein, 7 aa, Artificial Sequence
  Description of Artificial Sequence: Synthetic peptide
  XENP019509 vlCDR2
GAFSRAT

SEQ ID NO: 9864 - protein, 9 aa, Artificial Sequence
  Description of Artificial Sequence: Synthetic peptide
  XENP019509 vlCDR3
QQYGSSPWT

SEQ ID NO: 9865 - protein, 221 aa, Artificial Sequence; identical to SEQ ID NO: 7595
  Description of Artificial Sequence: Synthetic polypeptide
  XENP019510 [CTLA-4]_H0_L0.91_Fab Heavy Chain

SEQ ID NO: 9866 - protein, 118 aa, Artificial Sequence; identical to SEQ ID NO: 3737
  Description of Artificial Sequence: Synthetic polypeptide
  VH of XENP019510

SEQ ID NO: 9867 - protein, 5 aa, Artificial Sequence
  Description of Artificial Sequence: Synthetic peptide
  XENP019510 vhCDR1
SYTMH

SEQ ID NO: 9868 - protein, 17 aa, Artificial Sequence
  Description of Artificial Sequence: Synthetic peptide
  XENP019510 vhCDR2
FISYDGNNKYYADSVKG

SEQ ID NO: 9869 - protein, 9 aa, Artificial Sequence
  Description of Artificial Sequence: Synthetic peptide
  XENP019510 vhCDR3
TGWLGPFDY

SEQ ID NO: 9870 - protein, 215 aa, Artificial Sequence
  Description of Artificial Sequence: Synthetic polypeptide
  XENP019510 [CTLA-4]_H0_L0.91_Fab Light Chain
EIVLTQSPGTLSLSPGERATLSCRASQSVGSSYLAWYQQKPGQAPRLLIYGAFSRATGIPDRFSGSGSGTDFTLTISRLESEDFAVYYCQQYGSSPWTFGQGTKVEIKRTVAAPSVFIFPPSDEQLKSGTASVVCLLNNFYPREAKVQWKVDNALQSGNSQESVTEQDSKDSTYSLSSTLTLSKADYEKHKVYACEVTHQGLSSPVTKSFNRGEC

SEQ ID NO: 9871 - protein, 108 aa, Artificial Sequence; identical to SEQ ID NO: 6904
  Description of Artificial Sequence: Synthetic polypeptide
  VL of XENP019510

SEQ ID NO: 9872 - protein, 12 aa, Artificial Sequence
  Description of Artificial Sequence: Synthetic peptide
  XENP019510 vlCDR1
RASQSVGSSYLA

SEQ ID NO: 9873 - protein, 7 aa, Artificial Sequence
  Description of Artificial Sequence: Synthetic peptide
  XENP019510 vlCDR2
GAFSRAT

SEQ ID NO: 9874 - protein, 9 aa, Artificial Sequence
  Description of Artificial Sequence: Synthetic peptide
  XENP019510 vlCDR3
QQYGSSPWT

SEQ ID NO: 9875 - protein, 221 aa, Artificial Sequence; identical to SEQ ID NO: 7595
  Description of Artificial Sequence: Synthetic polypeptide
  XENP019511 [CTLA-4]_H0_L0.92_Fab Heavy Chain

SEQ ID NO: 9876 - protein, 118 aa, Artificial Sequence; identical to SEQ ID NO: 3737
  Description of Artificial Sequence: Synthetic polypeptide
  VH of XENP019511

SEQ ID NO: 9877 - protein, 5 aa, Artificial Sequence
  Description of Artificial Sequence: Synthetic peptide
  XENP019511 vhCDR1
SYTMH

SEQ ID NO: 9878 - protein, 17 aa, Artificial Sequence
  Description of Artificial Sequence: Synthetic peptide
  XENP019511 vhCDR2
FISYDGNNKYYADSVKG

SEQ ID NO: 9879 - protein, 9 aa, Artificial Sequence
  Description of Artificial Sequence: Synthetic peptide
  XENP019511 vhCDR3
TGWLGPFDY

SEQ ID NO: 9880 - protein, 215 aa, Artificial Sequence
  Description of Artificial Sequence: Synthetic polypeptide
  XENP019511 [CTLA-4]_H0_L0.92_Fab Light Chain
EIVLTQSPGTLSLSPGERATLSCRASQSVGSSYLAWYQQKPGQAPRLLIYGAFSRATGIPDRFSGSGSGTDFTLTISRLEPQDFAVYYCQQYGSSPWTFGQGTKVEIKRTVAAPSVFIFPPSDEQLKSGTASVVCLLNNFYPREAKVQWKVDNALQSGNSQESVTEQDSKDSTYSLSSTLTLSKADYEKHKVYACEVTHQGLSSPVTKSFNRGEC

SEQ ID NO: 9881 - protein, 108 aa, Artificial Sequence; identical to SEQ ID NO: 6913
  Description of Artificial Sequence: Synthetic polypeptide
  VL of XENP019511

SEQ ID NO: 9882 - protein, 12 aa, Artificial Sequence
  Description of Artificial Sequence: Synthetic peptide
  XENP019511 vlCDR1
RASQSVGSSYLA

SEQ ID NO: 9883 - protein, 7 aa, Artificial Sequence
  Description of Artificial Sequence: Synthetic peptide
  XENP019511 vlCDR2
GAFSRAT

SEQ ID NO: 9884 - protein, 9 aa, Artificial Sequence
  Description of Artificial Sequence: Synthetic peptide
  XENP019511 vlCDR3
QQYGSSPWT

SEQ ID NO: 9885 - protein, 221 aa, Artificial Sequence; identical to SEQ ID NO: 7595
  Description of Artificial Sequence: Synthetic polypeptide
  XENP019512 [CTLA-4]_H0_L0.93_Fab Heavy Chain

SEQ ID NO: 9886 - protein, 118 aa, Artificial Sequence; identical to SEQ ID NO: 3737
  Description of Artificial Sequence: Synthetic polypeptide
  VH of XENP019512

SEQ ID NO: 9887 - protein, 5 aa, Artificial Sequence
  Description of Artificial Sequence: Synthetic peptide
  XENP019512 vhCDR1
SYTMH

SEQ ID NO: 9888 - protein, 17 aa, Artificial Sequence
  Description of Artificial Sequence: Synthetic peptide
  XENP019512 vhCDR2
FISYDGNNKYYADSVKG

SEQ ID NO: 9889 - protein, 9 aa, Artificial Sequence
  Description of Artificial Sequence: Synthetic peptide
  XENP019512 vhCDR3
TGWLGPFDY

SEQ ID NO: 9890 - protein, 215 aa, Artificial Sequence
  Description of Artificial Sequence: Synthetic polypeptide
  XENP019512 [CTLA-4]_H0_L0.93_Fab Light Chain
EIVLTQSPGTLSLSPGERATLSCRASQSVGSSYLAWYQQKPGQAPRLLIYGAFSRATGIPDRFSGSGSGTDFTLTISRLEPEDFAVYYCKQYGSSPWTFGQGTKVEIKRTVAAPSVFIFPPSDEQLKSGTASVVCLLNNFYPREAKVQWKVDNALQSGNSQESVTEQDSKDSTYSLSSTLTLSKADYEKHKVYACEVTHQGLSSPVTKSFNRGEC

SEQ ID NO: 9891 - protein, 108 aa, Artificial Sequence; identical to SEQ ID NO: 6922
  Description of Artificial Sequence: Synthetic polypeptide
  VL of XENP019512

SEQ ID NO: 9892 - protein, 12 aa, Artificial Sequence
  Description of Artificial Sequence: Synthetic peptide
  XENP019512 vlCDR1
RASQSVGSSYLA

SEQ ID NO: 9893 - protein, 7 aa, Artificial Sequence
  Description of Artificial Sequence: Synthetic peptide
  XENP019512 vlCDR2
GAFSRAT

SEQ ID NO: 9894 - protein, 9 aa, Artificial Sequence
  Description of Artificial Sequence: Synthetic peptide
  XENP019512 vlCDR3
KQYGSSPWT

SEQ ID NO: 9895 - protein, 221 aa, Artificial Sequence; identical to SEQ ID NO: 7595
  Description of Artificial Sequence: Synthetic polypeptide
  XENP019513 [CTLA-4]_H0_L0.94_Fab Heavy Chain

SEQ ID NO: 9896 - protein, 118 aa, Artificial Sequence; identical to SEQ ID NO: 3737
  Description of Artificial Sequence: Synthetic polypeptide
  VH of XENP019513

SEQ ID NO: 9897 - protein, 5 aa, Artificial Sequence
  Description of Artificial Sequence: Synthetic peptide
  XENP019513 vhCDR1
SYTMH

SEQ ID NO: 9898 - protein, 17 aa, Artificial Sequence
  Description of Artificial Sequence: Synthetic peptide
  XENP019513 vhCDR2
FISYDGNNKYYADSVKG

SEQ ID NO: 9899 - protein, 9 aa, Artificial Sequence
  Description of Artificial Sequence: Synthetic peptide
  XENP019513 vhCDR3
TGWLGPFDY

SEQ ID NO: 9900 - protein, 215 aa, Artificial Sequence
  Description of Artificial Sequence: Synthetic polypeptide
  XENP019513 [CTLA-4]_H0_L0.94_Fab Light Chain
EIVLTQSPGTLSLSPGERATLSCRASQSVGSSYLAWYQQKPGQAPRLLIYGAFSRATGIPDRFSGSGSGTDFTLTISRLEPEDFAVYYCLQYGSSPWTFGQGTKVEIKRTVAAPSVFIFPPSDEQLKSGTASVVCLLNNFYPREAKVQWKVDNALQSGNSQESVTEQDSKDSTYSLSSTLTLSKADYEKHKVYACEVTHQGLSSPVTKSFNRGEC

SEQ ID NO: 9901 - protein, 108 aa, Artificial Sequence; identical to SEQ ID NO: 6931
  Description of Artificial Sequence: Synthetic polypeptide
  VL of XENP019513

SEQ ID NO: 9902 - protein, 12 aa, Artificial Sequence
  Description of Artificial Sequence: Synthetic peptide
  XENP019513 vlCDR1
RASQSVGSSYLA

SEQ ID NO: 9903 - protein, 7 aa, Artificial Sequence
  Description of Artificial Sequence: Synthetic peptide
  XENP019513 vlCDR2
GAFSRAT

SEQ ID NO: 9904 - protein, 9 aa, Artificial Sequence
  Description of Artificial Sequence: Synthetic peptide
  XENP019513 vlCDR3
LQYGSSPWT

SEQ ID NO: 9905 - protein, 221 aa, Artificial Sequence; identical to SEQ ID NO: 7595
  Description of Artificial Sequence: Synthetic polypeptide
  XENP019514 [CTLA-4]_H0_L0.95_Fab Heavy Chain

SEQ ID NO: 9906 - protein, 118 aa, Artificial Sequence; identical to SEQ ID NO: 3737
  Description of Artificial Sequence: Synthetic polypeptide
  VH of XENP019514

SEQ ID NO: 9907 - protein, 5 aa, Artificial Sequence
  Description of Artificial Sequence: Synthetic peptide
  XENP019514 vhCDR1
SYTMH

SEQ ID NO: 9908 - protein, 17 aa, Artificial Sequence
  Description of Artificial Sequence: Synthetic peptide
  XENP019514 vhCDR2
FISYDGNNKYYADSVKG

SEQ ID NO: 9909 - protein, 9 aa, Artificial Sequence
  Description of Artificial Sequence: Synthetic peptide
  XENP019514 vhCDR3
TGWLGPFDY

SEQ ID NO: 9910 - protein, 215 aa, Artificial Sequence
  Description of Artificial Sequence: Synthetic polypeptide
  XENP019514 [CTLA-4]_H0_L0.95_Fab Light Chain
EIVLTQSPGTLSLSPGERATLSCRASQSVGSSYLAWYQQKPGQAPRLLIYGAFSRATGIPDRFSGSGSGTDFTLTISRLEPEDFAVYYCMQYGSSPWTFGQGTKVEIKRTVAAPSVFIFPPSDEQLKSGTASVVCLLNNFYPREAKVQWKVDNALQSGNSQESVTEQDSKDSTYSLSSTLTLSKADYEKHKVYACEVTHQGLSSPVTKSFNRGEC

SEQ ID NO: 9911 - protein, 108 aa, Artificial Sequence; identical to SEQ ID NO: 6940
  Description of Artificial Sequence: Synthetic polypeptide
  VL of XENP019514

SEQ ID NO: 9912 - protein, 12 aa, Artificial Sequence
  Description of Artificial Sequence: Synthetic peptide
  XENP019514 vlCDR1
RASQSVGSSYLA

SEQ ID NO: 9913 - protein, 7 aa, Artificial Sequence
  Description of Artificial Sequence: Synthetic peptide
  XENP019514 vlCDR2
GAFSRAT

SEQ ID NO: 9914 - protein, 9 aa, Artificial Sequence
  Description of Artificial Sequence: Synthetic peptide
  XENP019514 vlCDR3
MQYGSSPWT

SEQ ID NO: 9915 - protein, 221 aa, Artificial Sequence; identical to SEQ ID NO: 7595
  Description of Artificial Sequence: Synthetic polypeptide
  XENP019515 [CTLA-4]_H0_L0.96_Fab Heavy Chain

SEQ ID NO: 9916 - protein, 118 aa, Artificial Sequence; identical to SEQ ID NO: 3737
  Description of Artificial Sequence: Synthetic polypeptide
  VH of XENP019515

SEQ ID NO: 9917 - protein, 5 aa, Artificial Sequence
  Description of Artificial Sequence: Synthetic peptide
  XENP019515 vhCDR1
SYTMH

SEQ ID NO: 9918 - protein, 17 aa, Artificial Sequence
  Description of Artificial Sequence: Synthetic peptide
  XENP019515 vhCDR2
FISYDGNNKYYADSVKG

SEQ ID NO: 9919 - protein, 9 aa, Artificial Sequence
  Description of Artificial Sequence: Synthetic peptide
  XENP019515 vhCDR3
TGWLGPFDY

SEQ ID NO: 9920 - protein, 215 aa, Artificial Sequence
  Description of Artificial Sequence: Synthetic polypeptide
  XENP019515 [CTLA-4]_H0_L0.96_Fab Light Chain
EIVLTQSPGTLSLSPGERATLSCRASQSVGSSYLAWYQQKPGQAPRLLIYGAFSRATGIPDRFSGSGSGTDFTLTISRLEPEDFAVYYCQSYGSSPWTFGQGTKVEIKRTVAAPSVFIFPPSDEQLKSGTASVVCLLNNFYPREAKVQWKVDNALQSGNSQESVTEQDSKDSTYSLSSTLTLSKADYEKHKVYACEVTHQGLSSPVTKSFNRGEC

SEQ ID NO: 9921 - protein, 108 aa, Artificial Sequence; identical to SEQ ID NO: 6949
  Description of Artificial Sequence: Synthetic polypeptide
  VL of XENP019515

SEQ ID NO: 9922 - protein, 12 aa, Artificial Sequence
  Description of Artificial Sequence: Synthetic peptide
  XENP019515 vlCDR1
RASQSVGSSYLA

SEQ ID NO: 9923 - protein, 7 aa, Artificial Sequence
  Description of Artificial Sequence: Synthetic peptide
  XENP019515 vlCDR2
GAFSRAT

SEQ ID NO: 9924 - protein, 9 aa, Artificial Sequence
  Description of Artificial Sequence: Synthetic peptide
  XENP019515 vlCDR3
QSYGSSPWT

SEQ ID NO: 9925 - protein, 221 aa, Artificial Sequence; identical to SEQ ID NO: 7595
  Description of Artificial Sequence: Synthetic polypeptide
  XENP019516 [CTLA-4]_H0_L0.97_Fab Heavy Chain

SEQ ID NO: 9926 - protein, 118 aa, Artificial Sequence; identical to SEQ ID NO: 3737
  Description of Artificial Sequence: Synthetic polypeptide
  VH of XENP019516

SEQ ID NO: 9927 - protein, 5 aa, Artificial Sequence
  Description of Artificial Sequence: Synthetic peptide
  XENP019516 vhCDR1
SYTMH

SEQ ID NO: 9928 - protein, 17 aa, Artificial Sequence
  Description of Artificial Sequence: Synthetic peptide
  XENP019516 vhCDR2
FISYDGNNKYYADSVKG

SEQ ID NO: 9929 - protein, 9 aa, Artificial Sequence
  Description of Artificial Sequence: Synthetic peptide
  XENP019516 vhCDR3
TGWLGPFDY

SEQ ID NO: 9930 - protein, 215 aa, Artificial Sequence
  Description of Artificial Sequence: Synthetic polypeptide
  XENP019516 [CTLA-4]_H0_L0.97_Fab Light Chain
EIVLTQSPGTLSLSPGERATLSCRASQSVGSSYLAWYQQKPGQAPRLLIYGAFSRATGIPDRFSGSGSGTDFTLTISRLEPEDFAVYYCQQAGSSPWTFGQGTKVEIKRTVAAPSVFIFPPSDEQLKSGTASVVCLLNNFYPREAKVQWKVDNALQSGNSQESVTEQDSKDSTYSLSSTLTLSKADYEKHKVYACEVTHQGLSSPVTKSFNRGEC

SEQ ID NO: 9931 - protein, 108 aa, Artificial Sequence; identical to SEQ ID NO: 6958
  Description of Artificial Sequence: Synthetic polypeptide
  VL of XENP019516

SEQ ID NO: 9932 - protein, 12 aa, Artificial Sequence
  Description of Artificial Sequence: Synthetic peptide
  XENP019516 vlCDR1
RASQSVGSSYLA

SEQ ID NO: 9933 - protein, 7 aa, Artificial Sequence
  Description of Artificial Sequence: Synthetic peptide
  XENP019516 vlCDR2
GAFSRAT

SEQ ID NO: 9934 - protein, 9 aa, Artificial Sequence
  Description of Artificial Sequence: Synthetic peptide
  XENP019516 vlCDR3
QQAGSSPWT

SEQ ID NO: 9935 - protein, 221 aa, Artificial Sequence; identical to SEQ ID NO: 7595
  Description of Artificial Sequence: Synthetic polypeptide
  XENP019517 [CTLA-4]_H0_L0.98_Fab Heavy Chain

SEQ ID NO: 9936 - protein, 118 aa, Artificial Sequence; identical to SEQ ID NO: 3737
  Description of Artificial Sequence: Synthetic polypeptide
  VH of XENP019517

SEQ ID NO: 9937 - protein, 5 aa, Artificial Sequence
  Description of Artificial Sequence: Synthetic peptide
  XENP019517 vhCDR1
SYTMH

SEQ ID NO: 9938 - protein, 17 aa, Artificial Sequence
  Description of Artificial Sequence: Synthetic peptide
  XENP019517 vhCDR2
FISYDGNNKYYADSVKG

SEQ ID NO: 9939 - protein, 9 aa, Artificial Sequence
  Description of Artificial Sequence: Synthetic peptide
  XENP019517 vhCDR3
TGWLGPFDY

SEQ ID NO: 9940 - protein, 215 aa, Artificial Sequence
  Description of Artificial Sequence: Synthetic polypeptide
  XENP019517 [CTLA-4]_H0_L0.98_Fab Light Chain
EIVLTQSPGTLSLSPGERATLSCRASQSVGSSYLAWYQQKPGQAPRLLIYGAFSRATGIPDRFSGSGSGTDFTLTISRLEPEDFAVYYCQQFGSSPWTFGQGTKVEIKRTVAAPSVFIFPPSDEQLKSGTASVVCLLNNFYPREAKVQWKVDNALQSGNSQESVTEQDSKDSTYSLSSTLTLSKADYEKHKVYACEVTHQGLSSPVTKSFNRGEC

SEQ ID NO: 9941 - protein, 108 aa, Artificial Sequence; identical to SEQ ID NO: 6967
  Description of Artificial Sequence: Synthetic polypeptide
  VL of XENP019517

SEQ ID NO: 9942 - protein, 12 aa, Artificial Sequence
  Description of Artificial Sequence: Synthetic peptide
  XENP019517 vlCDR1
RASQSVGSSYLA

SEQ ID NO: 9943 - protein, 7 aa, Artificial Sequence
  Description of Artificial Sequence: Synthetic peptide
  XENP019517 vlCDR2
GAFSRAT

SEQ ID NO: 9944 - protein, 9 aa, Artificial Sequence
  Description of Artificial Sequence: Synthetic peptide
  XENP019517 vlCDR3
QQFGSSPWT

SEQ ID NO: 9945 - protein, 221 aa, Artificial Sequence; identical to SEQ ID NO: 7595
  Description of Artificial Sequence: Synthetic polypeptide
  XENP019518 [CTLA-4]_H0_L0.99_Fab Heavy Chain

SEQ ID NO: 9946 - protein, 118 aa, Artificial Sequence; identical to SEQ ID NO: 3737
  Description of Artificial Sequence: Synthetic polypeptide
  VH of XENP019518

SEQ ID NO: 9947 - protein, 5 aa, Artificial Sequence
  Description of Artificial Sequence: Synthetic peptide
  XENP019518 vhCDR1
SYTMH

SEQ ID NO: 9948 - protein, 17 aa, Artificial Sequence
  Description of Artificial Sequence: Synthetic peptide
  XENP019518 vhCDR2
FISYDGNNKYYADSVKG

SEQ ID NO: 9949 - protein, 9 aa, Artificial Sequence
  Description of Artificial Sequence: Synthetic peptide
  XENP019518 vhCDR3
TGWLGPFDY

SEQ ID NO: 9950 - protein, 215 aa, Artificial Sequence
  Description of Artificial Sequence: Synthetic polypeptide
  XENP019518 [CTLA-4]_H0_L0.99_Fab Light Chain
EIVLTQSPGTLSLSPGERATLSCRASQSVGSSYLAWYQQKPGQAPRLLIYGAFSRATGIPDRFSGSGSGTDFTLTISRLEPEDFAVYYCQQHGSSPWTFGQGTKVEIKRTVAAPSVFIFPPSDEQLKSGTASVVCLLNNFYPREAKVQWKVDNALQSGNSQESVTEQDSKDSTYSLSSTLTLSKADYEKHKVYACEVTHQGLSSPVTKSFNRGEC

SEQ ID NO: 9951 - protein, 108 aa, Artificial Sequence; identical to SEQ ID NO: 6976
  Description of Artificial Sequence: Synthetic polypeptide
  VL of XENP019518

SEQ ID NO: 9952 - protein, 12 aa, Artificial Sequence
  Description of Artificial Sequence: Synthetic peptide
  XENP019518 vlCDR1
RASQSVGSSYLA

SEQ ID NO: 9953 - protein, 7 aa, Artificial Sequence
  Description of Artificial Sequence: Synthetic peptide
  XENP019518 vlCDR2
GAFSRAT

SEQ ID NO: 9954 - protein, 9 aa, Artificial Sequence
  Description of Artificial Sequence: Synthetic peptide
  XENP019518 vlCDR3
QQHGSSPWT

SEQ ID NO: 9955 - protein, 221 aa, Artificial Sequence; identical to SEQ ID NO: 7595
  Description of Artificial Sequence: Synthetic polypeptide
  XENP019519 [CTLA-4]_H0_L0.100_Fab Heavy Chain

SEQ ID NO: 9956 - protein, 118 aa, Artificial Sequence; identical to SEQ ID NO: 3737
  Description of Artificial Sequence: Synthetic polypeptide
  VH of XENP019519

SEQ ID NO: 9957 - protein, 5 aa, Artificial Sequence
  Description of Artificial Sequence: Synthetic peptide
  XENP019519 vhCDR1
SYTMH

SEQ ID NO: 9958 - protein, 17 aa, Artificial Sequence
  Description of Artificial Sequence: Synthetic peptide
  XENP019519 vhCDR2
FISYDGNNKYYADSVKG

SEQ ID NO: 9959 - protein, 9 aa, Artificial Sequence
  Description of Artificial Sequence: Synthetic peptide
  XENP019519 vhCDR3
TGWLGPFDY

SEQ ID NO: 9960 - protein, 215 aa, Artificial Sequence
  Description of Artificial Sequence: Synthetic polypeptide
  XENP019519 [CTLA-4]_H0_L0.100_Fab Light Chain
EIVLTQSPGTLSLSPGERATLSCRASQSVGSSYLAWYQQKPGQAPRLLIYGAFSRATGIPDRFSGSGSGTDFTLTISRLEPEDFAVYYCQQLGSSPWTFGQGTKVEIKRTVAAPSVFIFPPSDEQLKSGTASVVCLLNNFYPREAKVQWKVDNALQSGNSQESVTEQDSKDSTYSLSSTLTLSKADYEKHKVYACEVTHQGLSSPVTKSFNRGEC

SEQ ID NO: 9961 - protein, 108 aa, Artificial Sequence; identical to SEQ ID NO: 6985
  Description of Artificial Sequence: Synthetic polypeptide
  VL of XENP019519

SEQ ID NO: 9962 - protein, 12 aa, Artificial Sequence
  Description of Artificial Sequence: Synthetic peptide
  XENP019519 vlCDR1
RASQSVGSSYLA

SEQ ID NO: 9963 - protein, 7 aa, Artificial Sequence
  Description of Artificial Sequence: Synthetic peptide
  XENP019519 vlCDR2
GAFSRAT

SEQ ID NO: 9964 - protein, 9 aa, Artificial Sequence
  Description of Artificial Sequence: Synthetic peptide
  XENP019519 vlCDR3
QQLGSSPWT

SEQ ID NO: 9965 - protein, 221 aa, Artificial Sequence; identical to SEQ ID NO: 7595
  Description of Artificial Sequence: Synthetic polypeptide
  XENP019520 [CTLA-4]_H0_L0.101_Fab Heavy Chain

SEQ ID NO: 9966 - protein, 118 aa, Artificial Sequence; identical to SEQ ID NO: 3737
  Description of Artificial Sequence: Synthetic polypeptide
  VH of XENP019520

SEQ ID NO: 9967 - protein, 5 aa, Artificial Sequence
  Description of Artificial Sequence: Synthetic peptide
  XENP019520 vhCDR1
SYTMH

SEQ ID NO: 9968 - protein, 17 aa, Artificial Sequence
  Description of Artificial Sequence: Synthetic peptide
  XENP019520 vhCDR2
FISYDGNNKYYADSVKG

SEQ ID NO: 9969 - protein, 9 aa, Artificial Sequence
  Description of Artificial Sequence: Synthetic peptide
  XENP019520 vhCDR3
TGWLGPFDY

SEQ ID NO: 9970 - protein, 215 aa, Artificial Sequence
  Description of Artificial Sequence: Synthetic polypeptide
  XENP019520 [CTLA-4]_H0_L0.101_Fab Light Chain
EIVLTQSPGTLSLSPGERATLSCRASQSVGSSYLAWYQQKPGQAPRLLIYGAFSRATGIPDRFSGSGSGTDFTLTISRLEPEDFAVYYCQQVGSSPWTFGQGTKVEIKRTVAAPSVFIFPPSDEQLKSGTASVVCLLNNFYPREAKVQWKVDNALQSGNSQESVTEQDSKDSTYSLSSTLTLSKADYEKHKVYACEVTHQGLSSPVTKSFNRGEC

SEQ ID NO: 9971 - protein, 108 aa, Artificial Sequence; identical to SEQ ID NO: 6994
  Description of Artificial Sequence: Synthetic polypeptide
  VL of XENP019520

SEQ ID NO: 9972 - protein, 12 aa, Artificial Sequence
  Description of Artificial Sequence: Synthetic peptide
  XENP019520 vlCDR1
RASQSVGSSYLA

SEQ ID NO: 9973 - protein, 7 aa, Artificial Sequence
  Description of Artificial Sequence: Synthetic peptide
  XENP019520 vlCDR2
GAFSRAT

SEQ ID NO: 9974 - protein, 9 aa, Artificial Sequence
  Description of Artificial Sequence: Synthetic peptide
  XENP019520 vlCDR3
QQVGSSPWT

SEQ ID NO: 9975 - protein, 221 aa, Artificial Sequence; identical to SEQ ID NO: 7595
  Description of Artificial Sequence: Synthetic polypeptide
  XENP019521 [CTLA-4]_H0_L0.102_Fab Heavy Chain

SEQ ID NO: 9976 - protein, 118 aa, Artificial Sequence; identical to SEQ ID NO: 3737
  Description of Artificial Sequence: Synthetic polypeptide
  VH of XENP019521

SEQ ID NO: 9977 - protein, 5 aa, Artificial Sequence
  Description of Artificial Sequence: Synthetic peptide
  XENP019521 vhCDR1
SYTMH

SEQ ID NO: 9978 - protein, 17 aa, Artificial Sequence
  Description of Artificial Sequence: Synthetic peptide
  XENP019521 vhCDR2
FISYDGNNKYYADSVKG

SEQ ID NO: 9979 - protein, 9 aa, Artificial Sequence
  Description of Artificial Sequence: Synthetic peptide
  XENP019521 vhCDR3
TGWLGPFDY

SEQ ID NO: 9980 - protein, 215 aa, Artificial Sequence
  Description of Artificial Sequence: Synthetic polypeptide
  XENP019521 [CTLA-4]_H0_L0.102_Fab Light Chain
EIVLTQSPGTLSLSPGERATLSCRASQSVGSSYLAWYQQKPGQAPRLLIYGAFSRATGIPDRFSGSGSGTDFTLTISRLEPEDFAVYYCQQYGESPWTFGQGTKVEIKRTVAAPSVFIFPPSDEQLKSGTASVVCLLNNFYPREAKVQWKVDNALQSGNSQESVTEQDSKDSTYSLSSTLTLSKADYEKHKVYACEVTHQGLSSPVTKSFNRGEC

SEQ ID NO: 9981 - protein, 108 aa, Artificial Sequence; identical to SEQ ID NO: 7003
  Description of Artificial Sequence: Synthetic polypeptide
  VL of XENP019521

SEQ ID NO: 9982 - protein, 12 aa, Artificial Sequence
  Description of Artificial Sequence: Synthetic peptide
  XENP019521 vlCDR1
RASQSVGSSYLA

SEQ ID NO: 9983 - protein, 7 aa, Artificial Sequence
  Description of Artificial Sequence: Synthetic peptide
  XENP019521 vlCDR2
GAFSRAT

SEQ ID NO: 9984 - protein, 9 aa, Artificial Sequence
  Description of Artificial Sequence: Synthetic peptide
  XENP019521 vlCDR3
QQYGESPWT

SEQ ID NO: 9985 - protein, 221 aa, Artificial Sequence; identical to SEQ ID NO: 7595
  Description of Artificial Sequence: Synthetic polypeptide
  XENP019522 [CTLA-4]_H0_L0.103_Fab Heavy Chain

SEQ ID NO: 9986 - protein, 118 aa, Artificial Sequence; identical to SEQ ID NO: 3737
  Description of Artificial Sequence: Synthetic polypeptide
  VH of XENP019522

SEQ ID NO: 9987 - protein, 5 aa, Artificial Sequence
  Description of Artificial Sequence: Synthetic peptide
  XENP019522 vhCDR1
SYTMH

SEQ ID NO: 9988 - protein, 17 aa, Artificial Sequence
  Description of Artificial Sequence: Synthetic peptide
  XENP019522 vhCDR2
FISYDGNNKYYADSVKG

SEQ ID NO: 9989 - protein, 9 aa, Artificial Sequence
  Description of Artificial Sequence: Synthetic peptide
  XENP019522 vhCDR3
TGWLGPFDY

SEQ ID NO: 9990 - protein, 215 aa, Artificial Sequence
  Description of Artificial Sequence: Synthetic polypeptide
  XENP019522 [CTLA-4]_H0_L0.103_Fab Light Chain
EIVLTQSPGTLSLSPGERATLSCRASQSVGSSYLAWYQQKPGQAPRLLIYGAFSRATGIPDRFSGSGSGTDFTLTISRLEPEDFAVYYCQQYGKSPWTFGQGTKVEIKRTVAAPSVFIFPPSDEQLKSGTASVVCLLNNFYPREAKVQWKVDNALQSGNSQESVTEQDSKDSTYSLSSTLTLSKADYEKHKVYACEVTHQGLSSPVTKSFNRGEC

SEQ ID NO: 9991 - protein, 108 aa, Artificial Sequence; identical to SEQ ID NO: 7012
  Description of Artificial Sequence: Synthetic polypeptide
  VL of XENP019522

SEQ ID NO: 9992 - protein, 12 aa, Artificial Sequence
  Description of Artificial Sequence: Synthetic peptide
  XENP019522 vlCDR1
RASQSVGSSYLA

SEQ ID NO: 9993 - protein, 7 aa, Artificial Sequence
  Description of Artificial Sequence: Synthetic peptide
  XENP019522 vlCDR2
GAFSRAT

SEQ ID NO: 9994 - protein, 9 aa, Artificial Sequence
  Description of Artificial Sequence: Synthetic peptide
  XENP019522 vlCDR3
QQYGKSPWT

SEQ ID NO: 9995 - protein, 221 aa, Artificial Sequence; identical to SEQ ID NO: 7595
  Description of Artificial Sequence: Synthetic polypeptide
  XENP019523 [CTLA-4]_H0_L0.104_Fab Heavy Chain

SEQ ID NO: 9996 - protein, 118 aa, Artificial Sequence; identical to SEQ ID NO: 3737
  Description of Artificial Sequence: Synthetic polypeptide
  VH of XENP019523

SEQ ID NO: 9997 - protein, 5 aa, Artificial Sequence
  Description of Artificial Sequence: Synthetic peptide
  XENP019523 vhCDR1
SYTMH

SEQ ID NO: 9998 - protein, 17 aa, Artificial Sequence
  Description of Artificial Sequence: Synthetic peptide
  XENP019523 vhCDR2
FISYDGNNKYYADSVKG

SEQ ID NO: 9999 - protein, 9 aa, Artificial Sequence
  Description of Artificial Sequence: Synthetic peptide
  XENP019523 vhCDR3
TGWLGPFDY

SEQ ID NO: 10000 - protein, 215 aa, Artificial Sequence
  Description of Artificial Sequence: Synthetic polypeptide
  XENP019523 [CTLA-4]_H0_L0.104_Fab Light Chain
EIVLTQSPGTLSLSPGERATLSCRASQSVGSSYLAWYQQKPGQAPRLLIYGAFSRATGIPDRFSGSGSGTDFTLTISRLEPEDFAVYYCQQYGSYPWTFGQGTKVEIKRTVAAPSVFIFPPSDEQLKSGTASVVCLLNNFYPREAKVQWKVDNALQSGNSQESVTEQDSKDSTYSLSSTLTLSKADYEKHKVYACEVTHQGLSSPVTKSFNRGEC

SEQ ID NO: 10001 - protein, 108 aa, Artificial Sequence; identical to SEQ ID NO: 7021
  Description of Artificial Sequence: Synthetic polypeptide
  VL of XENP019523

SEQ ID NO: 10002 - protein, 12 aa, Artificial Sequence
  Description of Artificial Sequence: Synthetic peptide
  XENP019523 vlCDR1
RASQSVGSSYLA

SEQ ID NO: 10003 - protein, 7 aa, Artificial Sequence
  Description of Artificial Sequence: Synthetic peptide
  XENP019523 vlCDR2
GAFSRAT

SEQ ID NO: 10004 - protein, 9 aa, Artificial Sequence
  Description of Artificial Sequence: Synthetic peptide
  XENP019523 vlCDR3
QQYGSYPWT

SEQ ID NO: 10005 - protein, 221 aa, Artificial Sequence; identical to SEQ ID NO: 7595
  Description of Artificial Sequence: Synthetic polypeptide
  XENP019524 [CTLA-4]_H0_L0.105_Fab Heavy Chain

SEQ ID NO: 10006 - protein, 118 aa, Artificial Sequence; identical to SEQ ID NO: 3737
  Description of Artificial Sequence: Synthetic polypeptide
  VH of XENP019524

SEQ ID NO: 10007 - protein, 5 aa, Artificial Sequence
  Description of Artificial Sequence: Synthetic peptide
  XENP019524 vhCDR1
SYTMH

SEQ ID NO: 10008 - protein, 17 aa, Artificial Sequence
  Description of Artificial Sequence: Synthetic peptide
  XENP019524 vhCDR2
FISYDGNNKYYADSVKG

SEQ ID NO: 10009 - protein, 9 aa, Artificial Sequence
  Description of Artificial Sequence: Synthetic peptide
  XENP019524 vhCDR3
TGWLGPFDY

SEQ ID NO: 10010 - protein, 215 aa, Artificial Sequence
  Description of Artificial Sequence: Synthetic polypeptide
  XENP019524 [CTLA-4]_H0_L0.105_Fab Light Chain
EIVLTQSPGTLSLSPGERATLSCRASQSVGSSYLAWYQQKPGQAPRLLIYGAFSRATGIPDRFSGSGSGTDFTLTISRLEPEDFAVYYCQQYGSSHWTFGQGTKVEIKRTVAAPSVFIFPPSDEQLKSGTASVVCLLNNFYPREAKVQWKVDNALQSGNSQESVTEQDSKDSTYSLSSTLTLSKADYEKHKVYACEVTHQGLSSPVTKSFNRGEC

SEQ ID NO: 10011 - protein, 108 aa, Artificial Sequence; identical to SEQ ID NO: 7030
  Description of Artificial Sequence: Synthetic polypeptide
  VL of XENP019524

SEQ ID NO: 10012 - protein, 12 aa, Artificial Sequence
  Description of Artificial Sequence: Synthetic peptide
  XENP019524 vlCDR1
RASQSVGSSYLA

SEQ ID NO: 10013 - protein, 7 aa, Artificial Sequence
  Description of Artificial Sequence: Synthetic peptide
  XENP019524 vlCDR2
GAFSRAT

SEQ ID NO: 10014 - protein, 9 aa, Artificial Sequence
  Description of Artificial Sequence: Synthetic peptide
  XENP019524 vlCDR3
QQYGSSHWT

SEQ ID NO: 10015 - protein, 221 aa, Artificial Sequence; identical to SEQ ID NO: 7595
  Description of Artificial Sequence: Synthetic polypeptide
  XENP019525 [CTLA-4]_H0_L0.106_Fab Heavy Chain

SEQ ID NO: 10016 - protein, 118 aa, Artificial Sequence; identical to SEQ ID NO: 3737
  Description of Artificial Sequence: Synthetic polypeptide
  VH of XENP019525

SEQ ID NO: 10017 - protein, 5 aa, Artificial Sequence
  Description of Artificial Sequence: Synthetic peptide
  XENP019525 vhCDR1
SYTMH

SEQ ID NO: 10018 - protein, 17 aa, Artificial Sequence
  Description of Artificial Sequence: Synthetic peptide
  XENP019525 vhCDR2
FISYDGNNKYYADSVKG

SEQ ID NO: 10019 - protein, 9 aa, Artificial Sequence
  Description of Artificial Sequence: Synthetic peptide
  XENP019525 vhCDR3
TGWLGPFDY

SEQ ID NO: 10020 - protein, 215 aa, Artificial Sequence
  Description of Artificial Sequence: Synthetic polypeptide
  XENP019525 [CTLA-4]_H0_L0.106_Fab Light Chain
EIVLTQSPGTLSLSPGERATLSCRASQSVGSSYLAWYQQKPGQAPRLLIYGAFSRATGIPDRFSGSGSGTDFTLTISRLEPEDFAVYYCQQYGSSPFTFGQGTKVEIKRTVAAPSVFIFPPSDEQLKSGTASVVCLLNNFYPREAKVQWKVDNALQSGNSQESVTEQDSKDSTYSLSSTLTLSKADYEKHKVYACEVTHQGLSSPVTKSFNRGEC

SEQ ID NO: 10021 - protein, 108 aa, Artificial Sequence; identical to SEQ ID NO: 7039
  Description of Artificial Sequence: Synthetic polypeptide
  VL of XENP019525

SEQ ID NO: 10022 - protein, 12 aa, Artificial Sequence
  Description of Artificial Sequence: Synthetic peptide
  XENP019525 vlCDR1
RASQSVGSSYLA

SEQ ID NO: 10023 - protein, 7 aa, Artificial Sequence
  Description of Artificial Sequence: Synthetic peptide
  XENP019525 vlCDR2
GAFSRAT

SEQ ID NO: 10024 - protein, 9 aa, Artificial Sequence
  Description of Artificial Sequence: Synthetic peptide
  XENP019525 vlCDR3
QQYGSSPFT

SEQ ID NO: 10025 - protein, 221 aa, Artificial Sequence; identical to SEQ ID NO: 7595
  Description of Artificial Sequence: Synthetic polypeptide
  XENP019526 [CTLA-4]_H0_L0.107_Fab Heavy Chain

SEQ ID NO: 10026 - protein, 118 aa, Artificial Sequence; identical to SEQ ID NO: 3737
  Description of Artificial Sequence: Synthetic polypeptide
  VH of XENP019526

SEQ ID NO: 10027 - protein, 5 aa, Artificial Sequence
  Description of Artificial Sequence: Synthetic peptide
  XENP019526 vhCDR1
SYTMH

SEQ ID NO: 10028 - protein, 17 aa, Artificial Sequence
  Description of Artificial Sequence: Synthetic peptide
  XENP019526 vhCDR2
FISYDGNNKYYADSVKG

SEQ ID NO: 10029 - protein, 9 aa, Artificial Sequence
  Description of Artificial Sequence: Synthetic peptide
  XENP019526 vhCDR3
TGWLGPFDY

SEQ ID NO: 10030 - protein, 215 aa, Artificial Sequence
  Description of Artificial Sequence: Synthetic polypeptide
  XENP019526 [CTLA-4]_H0_L0.107_Fab Light Chain
EIVLTQSPGTLSLSPGERATLSCRASQSVGSSYLAWYQQKPGQAPRLLIYGAFSRATGIPDRFSGSGSGTDFTLTISRLEPEDFAVYYCQQYGSSPHTFGQGTKVEIKRTVAAPSVFIFPPSDEQLKSGTASVVCLLNNFYPREAKVQWKVDNALQSGNSQESVTEQDSKDSTYSLSSTLTLSKADYEKHKVYACEVTHQGLSSPVTKSFNRGEC

SEQ ID NO: 10031 - protein, 108 aa, Artificial Sequence; identical to SEQ ID NO: 7048
  Description of Artificial Sequence: Synthetic polypeptide
  VL of XENP019526

SEQ ID NO: 10032 - protein, 12 aa, Artificial Sequence
  Description of Artificial Sequence: Synthetic peptide
  XENP019526 vlCDR1
RASQSVGSSYLA

SEQ ID NO: 10033 - protein, 7 aa, Artificial Sequence
  Description of Artificial Sequence: Synthetic peptide
  XENP019526 vlCDR2
GAFSRAT

SEQ ID NO: 10034 - protein, 9 aa, Artificial Sequence
  Description of Artificial Sequence: Synthetic peptide
  XENP019526 vlCDR3
QQYGSSPHT

SEQ ID NO: 10035 - protein, 221 aa, Artificial Sequence; identical to SEQ ID NO: 7595
  Description of Artificial Sequence: Synthetic polypeptide
  XENP019527 [CTLA-4]_H0_L0.108_Fab Heavy Chain

SEQ ID NO: 10036 - protein, 118 aa, Artificial Sequence; identical to SEQ ID NO: 3737
  Description of Artificial Sequence: Synthetic polypeptide
  VH of XENP019527

SEQ ID NO: 10037 - protein, 5 aa, Artificial Sequence
  Description of Artificial Sequence: Synthetic peptide
  XENP019527 vhCDR1
SYTMH

SEQ ID NO: 10038 - protein, 17 aa, Artificial Sequence
  Description of Artificial Sequence: Synthetic peptide
  XENP019527 vhCDR2
FISYDGNNKYYADSVKG

SEQ ID NO: 10039 - protein, 9 aa, Artificial Sequence
  Description of Artificial Sequence: Synthetic peptide
  XENP019527 vhCDR3
TGWLGPFDY

SEQ ID NO: 10040 - protein, 215 aa, Artificial Sequence
  Description of Artificial Sequence: Synthetic polypeptide
  XENP019527 [CTLA-4]_H0_L0.108_Fab Light Chain
EIVLTQSPGTLSLSPGERATLSCRASQSVGSSYLAWYQQKPGQAPRLLIYGAFSRATGIPDRFSGSGSGTDFTLTISRLEPEDFAVYYCQQYGSSPITFGQGTKVEIKRTVAAPSVFIFPPSDEQLKSGTASVVCLLNNFYPREAKVQWKVDNALQSGNSQESVTEQDSKDSTYSLSSTLTLSKADYEKHKVYACEVTHQGLSSPVTKSFNRGEC

SEQ ID NO: 10041 - protein, 108 aa, Artificial Sequence; identical to SEQ ID NO: 7057
  Description of Artificial Sequence: Synthetic polypeptide
  VL of XENP019527

SEQ ID NO: 10042 - protein, 12 aa, Artificial Sequence
  Description of Artificial Sequence: Synthetic peptide
  XENP019527 vlCDR1
RASQSVGSSYLA

SEQ ID NO: 10043 - protein, 7 aa, Artificial Sequence
  Description of Artificial Sequence: Synthetic peptide
  XENP019527 vlCDR2
GAFSRAT

SEQ ID NO: 10044 - protein, 9 aa, Artificial Sequence
  Description of Artificial Sequence: Synthetic peptide
  XENP019527 vlCDR3
QQYGSSPIT

SEQ ID NO: 10045 - protein, 221 aa, Artificial Sequence; identical to SEQ ID NO: 7595
  Description of Artificial Sequence: Synthetic polypeptide
  XENP019528 [CTLA-4]_H0_L0.109_Fab Heavy Chain

SEQ ID NO: 10046 - protein, 118 aa, Artificial Sequence; identical to SEQ ID NO: 3737
  Description of Artificial Sequence: Synthetic polypeptide
  VH of XENP019528

SEQ ID NO: 10047 - protein, 5 aa, Artificial Sequence
  Description of Artificial Sequence: Synthetic peptide
  XENP019528 vhCDR1
SYTMH

SEQ ID NO: 10048 - protein, 17 aa, Artificial Sequence
  Description of Artificial Sequence: Synthetic peptide
  XENP019528 vhCDR2
FISYDGNNKYYADSVKG

SEQ ID NO: 10049 - protein, 9 aa, Artificial Sequence
  Description of Artificial Sequence: Synthetic peptide
  XENP019528 vhCDR3
TGWLGPFDY

SEQ ID NO: 10050 - protein, 215 aa, Artificial Sequence
  Description of Artificial Sequence: Synthetic polypeptide
  XENP019528 [CTLA-4]_H0_L0.109_Fab Light Chain
EIVLTQSPGTLSLSPGERATLSCRASQSVGSSYLAWYQQKPGQAPRLLIYGAFSRATGIPDRFSGSGSGTDFTLTISRLEPEDFAVYYCQQYGSSPLTFGQGTKVEIKRTVAAPSVFIFPPSDEQLKSGTASVVCLLNNFYPREAKVQWKVDNALQSGNSQESVTEQDSKDSTYSLSSTLTLSKADYEKHKVYACEVTHQGLSSPVTKSFNRGEC

SEQ ID NO: 10051 - protein, 108 aa, Artificial Sequence; identical to SEQ ID NO: 7066
  Description of Artificial Sequence: Synthetic polypeptide
  VL of XENP019528

SEQ ID NO: 10052 - protein, 12 aa, Artificial Sequence
  Description of Artificial Sequence: Synthetic peptide
  XENP019528 vlCDR1
RASQSVGSSYLA

SEQ ID NO: 10053 - protein, 7 aa, Artificial Sequence
  Description of Artificial Sequence: Synthetic peptide
  XENP019528 vlCDR2
GAFSRAT

SEQ ID NO: 10054 - protein, 9 aa, Artificial Sequence
  Description of Artificial Sequence: Synthetic peptide
  XENP019528 vlCDR3
QQYGSSPLT

SEQ ID NO: 10055 - protein, 221 aa, Artificial Sequence; identical to SEQ ID NO: 7595
  Description of Artificial Sequence: Synthetic polypeptide
  XENP019529 [CTLA-4]_H0_L0.110_Fab Heavy Chain

SEQ ID NO: 10056 - protein, 118 aa, Artificial Sequence; identical to SEQ ID NO: 3737
  Description of Artificial Sequence: Synthetic polypeptide
  VH of XENP019529

SEQ ID NO: 10057 - protein, 5 aa, Artificial Sequence
  Description of Artificial Sequence: Synthetic peptide
  XENP019529 vhCDR1
SYTMH

SEQ ID NO: 10058 - protein, 17 aa, Artificial Sequence
  Description of Artificial Sequence: Synthetic peptide
  XENP019529 vhCDR2
FISYDGNNKYYADSVKG

SEQ ID NO: 10059 - protein, 9 aa, Artificial Sequence
  Description of Artificial Sequence: Synthetic peptide
  XENP019529 vhCDR3
TGWLGPFDY

SEQ ID NO: 10060 - protein, 215 aa, Artificial Sequence
  Description of Artificial Sequence: Synthetic polypeptide
  XENP019529 [CTLA-4]_H0_L0.110_Fab Light Chain
EIVLTQSPGTLSLSPGERATLSCRASQSVGSSYLAWYQQKPGQAPRLLIYGAFSRATGIPDRFSGSGSGTDFTLTISRLEPEDFAVYYCQQYGSSPYTFGQGTKVEIKRTVAAPSVFIFPPSDEQLKSGTASVVCLLNNFYPREAKVQWKVDNALQSGNSQESVTEQDSKDSTYSLSSTLTLSKADYEKHKVYACEVTHQGLSSPVTKSFNRGEC

SEQ ID NO: 10061 - protein, 108 aa, Artificial Sequence; identical to SEQ ID NO: 7075
  Description of Artificial Sequence: Synthetic polypeptide
  VL of XENP019529

SEQ ID NO: 10062 - protein, 12 aa, Artificial Sequence
  Description of Artificial Sequence: Synthetic peptide
  XENP019529 vlCDR1
RASQSVGSSYLA

SEQ ID NO: 10063 - protein, 7 aa, Artificial Sequence
  Description of Artificial Sequence: Synthetic peptide
  XENP019529 vlCDR2
GAFSRAT

SEQ ID NO: 10064 - protein, 9 aa, Artificial Sequence
  Description of Artificial Sequence: Synthetic peptide
  XENP019529 vlCDR3
QQYGSSPYT

SEQ ID NO: 10065 - protein, 221 aa, Artificial Sequence; identical to SEQ ID NO: 7595
  Description of Artificial Sequence: Synthetic polypeptide
  XENP019530 [CTLA-4]_H0_L0.111_Fab Heavy Chain

SEQ ID NO: 10066 - protein, 118 aa, Artificial Sequence; identical to SEQ ID NO: 3737
  Description of Artificial Sequence: Synthetic polypeptide
  VH of XENP019530

SEQ ID NO: 10067 - protein, 5 aa, Artificial Sequence
  Description of Artificial Sequence: Synthetic peptide
  XENP019530 vhCDR1
SYTMH

SEQ ID NO: 10068 - protein, 17 aa, Artificial Sequence
  Description of Artificial Sequence: Synthetic peptide
  XENP019530 vhCDR2
FISYDGNNKYYADSVKG

SEQ ID NO: 10069 - protein, 9 aa, Artificial Sequence
  Description of Artificial Sequence: Synthetic peptide
  XENP019530 vhCDR3
TGWLGPFDY

SEQ ID NO: 10070 - protein, 215 aa, Artificial Sequence
  Description of Artificial Sequence: Synthetic polypeptide
  XENP019530 [CTLA-4]_H0_L0.111_Fab Light Chain
EIVLTQSPGTLSLSPGERATLSCRASQSVGSSYLAWYQQKPGQAPRLLIYGAFSRATGIPDRFSGSGSGTDFTLTISRLEPEDFAVYYCQQYGSSPWVFGQGTKVEIKRTVAAPSVFIFPPSDEQLKSGTASVVCLLNNFYPREAKVQWKVDNALQSGNSQESVTEQDSKDSTYSLSSTLTLSKADYEKHKVYACEVTHQGLSSPVTKSFNRGEC

SEQ ID NO: 10071 - protein, 108 aa, Artificial Sequence; identical to SEQ ID NO: 7084
  Description of Artificial Sequence: Synthetic polypeptide
  VL of XENP019530

SEQ ID NO: 10072 - protein, 12 aa, Artificial Sequence
  Description of Artificial Sequence: Synthetic peptide
  XENP019530 vlCDR1
RASQSVGSSYLA

SEQ ID NO: 10073 - protein, 7 aa, Artificial Sequence
  Description of Artificial Sequence: Synthetic peptide
  XENP019530 vlCDR2
GAFSRAT

SEQ ID NO: 10074 - protein, 9 aa, Artificial Sequence
  Description of Artificial Sequence: Synthetic peptide
  XENP019530 vlCDR3
QQYGSSPWV

SEQ ID NO: 10075 - protein, 221 aa, Artificial Sequence; identical to SEQ ID NO: 7595
  Description of Artificial Sequence: Synthetic polypeptide
  XENP019531 [CTLA-4]_H0_L0.112_Fab Heavy Chain

SEQ ID NO: 10076 - protein, 118 aa, Artificial Sequence; identical to SEQ ID NO: 3737
  Description of Artificial Sequence: Synthetic polypeptide
  VH of XENP019531

SEQ ID NO: 10077 - protein, 5 aa, Artificial Sequence
  Description of Artificial Sequence: Synthetic peptide
  XENP019531 vhCDR1
SYTMH

SEQ ID NO: 10078 - protein, 17 aa, Artificial Sequence
  Description of Artificial Sequence: Synthetic peptide
  XENP019531 vhCDR2
FISYDGNNKYYADSVKG

SEQ ID NO: 10079 - protein, 9 aa, Artificial Sequence
  Description of Artificial Sequence: Synthetic peptide
  XENP019531 vhCDR3
TGWLGPFDY

SEQ ID NO: 10080 - protein, 215 aa, Artificial Sequence
  Description of Artificial Sequence: Synthetic polypeptide
  XENP019531 [CTLA-4]_H0_L0.112_Fab Light Chain
EIVLTQSPGTLSLSPGERATLSCRASQSVGSSYLAWYQQKPGQAPRLLIYGAFSRATGIPDRFSGSGSGTDFTLTISRLEPEDFAVYYCQQYGSSPWTFGGGTKVEIKRTVAAPSVFIFPPSDEQLKSGTASVVCLLNNFYPREAKVQWKVDNALQSGNSQESVTEQDSKDSTYSLSSTLTLSKADYEKHKVYACEVTHQGLSSPVTKSFNRGEC

SEQ ID NO: 10081 - protein, 108 aa, Artificial Sequence; identical to SEQ ID NO: 7093
  Description of Artificial Sequence: Synthetic polypeptide
  VL of XENP019531

SEQ ID NO: 10082 - protein, 12 aa, Artificial Sequence
  Description of Artificial Sequence: Synthetic peptide
  XENP019531 vlCDR1
RASQSVGSSYLA

SEQ ID NO: 10083 - protein, 7 aa, Artificial Sequence
  Description of Artificial Sequence: Synthetic peptide
  XENP019531 vlCDR2
GAFSRAT

SEQ ID NO: 10084 - protein, 9 aa, Artificial Sequence
  Description of Artificial Sequence: Synthetic peptide
  XENP019531 vlCDR3
QQYGSSPWT

SEQ ID NO: 10085 - protein, 221 aa, Artificial Sequence; identical to SEQ ID NO: 7595
  Description of Artificial Sequence: Synthetic polypeptide
  XENP019532 [CTLA-4]_H0_L0.113_Fab Heavy Chain

SEQ ID NO: 10086 - protein, 118 aa, Artificial Sequence; identical to SEQ ID NO: 3737
  Description of Artificial Sequence: Synthetic polypeptide
  VH of XENP019532

SEQ ID NO: 10087 - protein, 5 aa, Artificial Sequence
  Description of Artificial Sequence: Synthetic peptide
  XENP019532 vhCDR1
SYTMH

SEQ ID NO: 10088 - protein, 17 aa, Artificial Sequence
  Description of Artificial Sequence: Synthetic peptide
  XENP019532 vhCDR2
FISYDGNNKYYADSVKG

SEQ ID NO: 10089 - protein, 9 aa, Artificial Sequence
  Description of Artificial Sequence: Synthetic peptide
  XENP019532 vhCDR3
TGWLGPFDY

SEQ ID NO: 10090 - protein, 215 aa, Artificial Sequence
  Description of Artificial Sequence: Synthetic polypeptide
  XENP019532 [CTLA-4]_H0_L0.113_Fab Light Chain
EIVLTQSPGTLSLSPGERATLSCRASQSVGSSYLAWYQQKPGQAPRLLIYGAFSRATGIPDRFSGSGSGTDFTLTISRLEPEDFAVYYCQQYGSSPWTFGEGTKVEIKRTVAAPSVFIFPPSDEQLKSGTASVVCLLNNFYPREAKVQWKVDNALQSGNSQESVTEQDSKDSTYSLSSTLTLSKADYEKHKVYACEVTHQGLSSPVTKSFNRGEC

SEQ ID NO: 10091 - protein, 108 aa, Artificial Sequence; identical to SEQ ID NO: 4735
  Description of Artificial Sequence: Synthetic polypeptide
  VL of XENP019532

SEQ ID NO: 10092 - protein, 12 aa, Artificial Sequence
  Description of Artificial Sequence: Synthetic peptide
  XENP019532 vlCDR1
RASQSVGSSYLA

SEQ ID NO: 10093 - protein, 7 aa, Artificial Sequence
  Description of Artificial Sequence: Synthetic peptide
  XENP019532 vlCDR2
GAFSRAT

SEQ ID NO: 10094 - protein, 9 aa, Artificial Sequence
  Description of Artificial Sequence: Synthetic peptide
  XENP019532 vlCDR3
QQYGSSPWT

SEQ ID NO: 10095 - protein, 221 aa, Artificial Sequence
  Description of Artificial Sequence: Synthetic polypeptide
  XENP019544 [CTLA-4]_H1_L0_Fab Heavy Chain
EVQLVESGGGLVQPGGSLRLSCAASGFTFSSYTMHWVRQAPGKGLEWVTFISYDGNNKYYVDSVKGRFTISRDNAKNSLYLQMNSLRAEDTAVYYCARTGWLGPFDYWGQGTLVTVSSASTKGPSVFPLAPSSKSTSGGTAALGCLVKDYFPEPVTVSWNSGALTSGVHTFPAVLQSSGLYSLSSVVTVPSSSLGTQTYICNVNHKPSNTKVDKKVEPKSC

SEQ ID NO: 10096 - protein, 118 aa, Artificial Sequence; identical to SEQ ID NO: 4797
  Description of Artificial Sequence: Synthetic polypeptide
  VH of XENP019544

SEQ ID NO: 10097 - protein, 5 aa, Artificial Sequence
  Description of Artificial Sequence: Synthetic peptide
  XENP019544 vhCDR1
SYTMH

SEQ ID NO: 10098 - protein, 17 aa, Artificial Sequence
  Description of Artificial Sequence: Synthetic peptide
  XENP019544 vhCDR2
FISYDGNNKYYVDSVKG

SEQ ID NO: 10099 - protein, 9 aa, Artificial Sequence
  Description of Artificial Sequence: Synthetic peptide
  XENP019544 vhCDR3
TGWLGPFDY

SEQ ID NO: 10100 - protein, 215 aa, Artificial Sequence; identical to SEQ ID NO: 7600
  Description of Artificial Sequence: Synthetic polypeptide
  XENP019544 [CTLA-4]_H1_L0_Fab Light Chain

SEQ ID NO: 10101 - protein, 108 aa, Artificial Sequence; identical to SEQ ID NO: 3741
  Description of Artificial Sequence: Synthetic polypeptide
  VL of XENP019544

SEQ ID NO: 10102 - protein, 12 aa, Artificial Sequence
  Description of Artificial Sequence: Synthetic peptide
  XENP019544 vlCDR1
RASQSVGSSYLA

SEQ ID NO: 10103 - protein, 7 aa, Artificial Sequence
  Description of Artificial Sequence: Synthetic peptide
  XENP019544 vlCDR2
GAFSRAT

SEQ ID NO: 10104 - protein, 9 aa, Artificial Sequence
  Description of Artificial Sequence: Synthetic peptide
  XENP019544 vlCDR3
QQYGSSPWT

SEQ ID NO: 10105 - protein, 221 aa, Artificial Sequence
  Description of Artificial Sequence: Synthetic polypeptide
  XENP019545 [CTLA-4]_H2_L0_Fab Heavy Chain
EVQLVESGGGLVQPGGSLRLSCAASGFTFSSYTMHWVRQAPGKGLEWVTFISYDGNNKYYPGSVKGRFTISRENAKNSLYLQMNSLRAGDTAVYYCARTGWLGPFDYWGQGTLVTVSSASTKGPSVFPLAPSSKSTSGGTAALGCLVKDYFPEPVTVSWNSGALTSGVHTFPAVLQSSGLYSLSSVVTVPSSSLGTQTYICNVNHKPSNTKVDKKVEPKSC

SEQ ID NO: 10106 - protein, 118 aa, Artificial Sequence; identical to SEQ ID NO: 4806
  Description of Artificial Sequence: Synthetic polypeptide
  VH of XENP019545

SEQ ID NO: 10107 - protein, 5 aa, Artificial Sequence
  Description of Artificial Sequence: Synthetic peptide
  XENP019545 vhCDR1
SYTMH

SEQ ID NO: 10108 - protein, 17 aa, Artificial Sequence
  Description of Artificial Sequence: Synthetic peptide
  XENP019545 vhCDR2
FISYDGNNKYYPGSVKG

SEQ ID NO: 10109 - protein, 9 aa, Artificial Sequence
  Description of Artificial Sequence: Synthetic peptide
  XENP019545 vhCDR3
TGWLGPFDY

SEQ ID NO: 10110 - protein, 215 aa, Artificial Sequence; identical to SEQ ID NO: 7600
  Description of Artificial Sequence: Synthetic polypeptide
  XENP019545 [CTLA-4]_H2_L0_Fab Light Chain

SEQ ID NO: 10111 - protein, 108 aa, Artificial Sequence; identical to SEQ ID NO: 3741
  Description of Artificial Sequence: Synthetic polypeptide
  VL of XENP019545

SEQ ID NO: 10112 - protein, 12 aa, Artificial Sequence
  Description of Artificial Sequence: Synthetic peptide
  XENP019545 vlCDR1
RASQSVGSSYLA

SEQ ID NO: 10113 - protein, 7 aa, Artificial Sequence
  Description of Artificial Sequence: Synthetic peptide
  XENP019545 vlCDR2
GAFSRAT

SEQ ID NO: 10114 - protein, 9 aa, Artificial Sequence
  Description of Artificial Sequence: Synthetic peptide
  XENP019545 vlCDR3
QQYGSSPWT

SEQ ID NO: 10115 - protein, 221 aa, Artificial Sequence
  Description of Artificial Sequence: Synthetic polypeptide
  XENP019546 [CTLA-4]_H3_L0_Fab Heavy Chain
EVQLVESGGGLVKPGGSLRLSCAASGFTFSSYTMHWVRQAPGKGLEWVSFISYDGNNKYYADSVKGRFTISRDNAKNSLYLQMNSLRAEDTAVYYCARTGWLGPFDYWGQGTLVTVSSASTKGPSVFPLAPSSKSTSGGTAALGCLVKDYFPEPVTVSWNSGALTSGVHTFPAVLQSSGLYSLSSVVTVPSSSLGTQTYICNVNHKPSNTKVDKKVEPKSC

SEQ ID NO: 10116 - protein, 118 aa, Artificial Sequence; identical to SEQ ID NO: 2405
  Description of Artificial Sequence: Synthetic polypeptide
  VH of XENP019546

SEQ ID NO: 10117 - protein, 5 aa, Artificial Sequence
  Description of Artificial Sequence: Synthetic peptide
  XENP019546 vhCDR1
SYTMH

SEQ ID NO: 10118 - protein, 17 aa, Artificial Sequence
  Description of Artificial Sequence: Synthetic peptide
  XENP019546 vhCDR2
FISYDGNNKYYADSVKG

SEQ ID NO: 10119 - protein, 9 aa, Artificial Sequence
  Description of Artificial Sequence: Synthetic peptide
  XENP019546 vhCDR3
TGWLGPFDY

SEQ ID NO: 10120 - protein, 215 aa, Artificial Sequence; identical to SEQ ID NO: 7600
  Description of Artificial Sequence: Synthetic polypeptide
  XENP019546 [CTLA-4]_H3_L0_Fab Light Chain

SEQ ID NO: 10121 - protein, 108 aa, Artificial Sequence; identical to SEQ ID NO: 3741
  Description of Artificial Sequence: Synthetic polypeptide
  VL of XENP019546

SEQ ID NO: 10122 - protein, 12 aa, Artificial Sequence
  Description of Artificial Sequence: Synthetic peptide
  XENP019546 vlCDR1
RASQSVGSSYLA

SEQ ID NO: 10123 - protein, 7 aa, Artificial Sequence
  Description of Artificial Sequence: Synthetic peptide
  XENP019546 vlCDR2
GAFSRAT

SEQ ID NO: 10124 - protein, 9 aa, Artificial Sequence
  Description of Artificial Sequence: Synthetic peptide
  XENP019546 vlCDR3
QQYGSSPWT

SEQ ID NO: 10125 - protein, 221 aa, Artificial Sequence
  Description of Artificial Sequence: Synthetic polypeptide
  XENP019547 [CTLA-4]_H4_L0_Fab Heavy Chain
EVQLVESGGGLVQPGGSLRLSCAASGFTFSSYTMHWVRQAPGKGLEYVTFISYDGNNKYYADSVKGRFTISRDNSKNTLYLQMGSLRAEDMAVYYCARTGWLGPFDYWGQGTLVTVSSASTKGPSVFPLAPSSKSTSGGTAALGCLVKDYFPEPVTVSWNSGALTSGVHTFPAVLQSSGLYSLSSVVTVPSSSLGTQTYICNVNHKPSNTKVDKKVEPKSC

SEQ ID NO: 10126 - protein, 118 aa, Artificial Sequence; identical to SEQ ID NO: 4824
  Description of Artificial Sequence: Synthetic polypeptide
  VH of XENP019547

SEQ ID NO: 10127 - protein, 5 aa, Artificial Sequence
  Description of Artificial Sequence: Synthetic peptide
  XENP019547 vhCDR1
SYTMH

SEQ ID NO: 10128 - protein, 17 aa, Artificial Sequence
  Description of Artificial Sequence: Synthetic peptide
  XENP019547 vhCDR2
FISYDGNNKYYADSVKG

SEQ ID NO: 10129 - protein, 9 aa, Artificial Sequence
  Description of Artificial Sequence: Synthetic peptide
  XENP019547 vhCDR3
TGWLGPFDY

SEQ ID NO: 10130 - protein, 215 aa, Artificial Sequence; identical to SEQ ID NO: 7600
  Description of Artificial Sequence: Synthetic polypeptide
  XENP019547 [CTLA-4]_H4_L0_Fab Light Chain

SEQ ID NO: 10131 - protein, 108 aa, Artificial Sequence; identical to SEQ ID NO: 3741
  Description of Artificial Sequence: Synthetic polypeptide
  VL of XENP019547

SEQ ID NO: 10132 - protein, 12 aa, Artificial Sequence
  Description of Artificial Sequence: Synthetic peptide
  XENP019547 vlCDR1
RASQSVGSSYLA

SEQ ID NO: 10133 - protein, 7 aa, Artificial Sequence
  Description of Artificial Sequence: Synthetic peptide
  XENP019547 vlCDR2
GAFSRAT

SEQ ID NO: 10134 - protein, 9 aa, Artificial Sequence
  Description of Artificial Sequence: Synthetic peptide
  XENP019547 vlCDR3
QQYGSSPWT

SEQ ID NO: 10135 - protein, 221 aa, Artificial Sequence; identical to SEQ ID NO: 7595
  Description of Artificial Sequence: Synthetic polypeptide
  XENP019548 [CTLA-4]_H0_L1_Fab Heavy Chain

SEQ ID NO: 10136 - protein, 118 aa, Artificial Sequence; identical to SEQ ID NO: 3737
  Description of Artificial Sequence: Synthetic polypeptide
  VH of XENP019548

SEQ ID NO: 10137 - protein, 5 aa, Artificial Sequence
  Description of Artificial Sequence: Synthetic peptide
  XENP019548 vhCDR1
SYTMH

SEQ ID NO: 10138 - protein, 17 aa, Artificial Sequence
  Description of Artificial Sequence: Synthetic peptide
  XENP019548 vhCDR2
FISYDGNNKYYADSVKG

SEQ ID NO: 10139 - protein, 9 aa, Artificial Sequence
  Description of Artificial Sequence: Synthetic peptide
  XENP019548 vhCDR3
TGWLGPFDY

SEQ ID NO: 10140 - protein, 215 aa, Artificial Sequence
  Description of Artificial Sequence: Synthetic polypeptide
  XENP019548 [CTLA-4]_H0_L1_Fab Light Chain
EIVLTQSPATLSLSPGERATLSCGASQSVGSSYLAWYQQKPGLAPRLLIYGAFSRATGIPDRFSGSGSGTDFTLTISRLEPEDFAVYYCQQYGSSPWTFGQGTKVEIKRTVAAPSVFIFPPSDEQLKSGTASVVCLLNNFYPREAKVQWKVDNALQSGNSQESVTEQDSKDSTYSLSSTLTLSKADYEKHKVYACEVTHQGLSSPVTKSFNRGEC

SEQ ID NO: 10141 - protein, 108 aa, Artificial Sequence; identical to SEQ ID NO: 4834
  Description of Artificial Sequence: Synthetic polypeptide
  VL of XENP019548

SEQ ID NO: 10142 - protein, 12 aa, Artificial Sequence
  Description of Artificial Sequence: Synthetic peptide
  XENP019548 vlCDR1
GASQSVGSSYLA

SEQ ID NO: 10143 - protein, 7 aa, Artificial Sequence
  Description of Artificial Sequence: Synthetic peptide
  XENP019548 vlCDR2
GAFSRAT

SEQ ID NO: 10144 - protein, 9 aa, Artificial Sequence
  Description of Artificial Sequence: Synthetic peptide
  XENP019548 vlCDR3
QQYGSSPWT

SEQ ID NO: 10145 - protein, 221 aa, Artificial Sequence; identical to SEQ ID NO: 7595
  Description of Artificial Sequence: Synthetic polypeptide
  XENP019549 [CTLA-4]_H0_L2_Fab Heavy Chain

SEQ ID NO: 10146 - protein, 118 aa, Artificial Sequence; identical to SEQ ID NO: 3737
  Description of Artificial Sequence: Synthetic polypeptide
  VH of XENP019549

SEQ ID NO: 10147 - protein, 5 aa, Artificial Sequence
  Description of Artificial Sequence: Synthetic peptide
  XENP019549 vhCDR1
SYTMH

SEQ ID NO: 10148 - protein, 17 aa, Artificial Sequence
  Description of Artificial Sequence: Synthetic peptide
  XENP019549 vhCDR2
FISYDGNNKYYADSVKG

SEQ ID NO: 10149 - protein, 9 aa, Artificial Sequence
  Description of Artificial Sequence: Synthetic peptide
  XENP019549 vhCDR3
TGWLGPFDY

SEQ ID NO: 10150 - protein, 215 aa, Artificial Sequence
  Description of Artificial Sequence: Synthetic polypeptide
  XENP019549 [CTLA-4]_H0_L2_Fab Light Chain
EIVMTQSPATLSVSPGERATLSCRASQSVGSSYLAWYQQKPGQAPRLLIYGAFSRATGIPARFSGSGSGTEFTLTISSLQSEDFAVYYCQQYGSSPWTFGQGTKVEIKRTVAAPSVFIFPPSDEQLKSGTASVVCLLNNFYPREAKVQWKVDNALQSGNSQESVTEQDSKDSTYSLSSTLTLSKADYEKHKVYACEVTHQGLSSPVTKSFNRGEC

SEQ ID NO: 10151 - protein, 108 aa, Artificial Sequence; identical to SEQ ID NO: 4843
  Description of Artificial Sequence: Synthetic polypeptide
  VL of XENP019549

SEQ ID NO: 10152 - protein, 12 aa, Artificial Sequence
  Description of Artificial Sequence: Synthetic peptide
  XENP019549 vlCDR1
RASQSVGSSYLA

SEQ ID NO: 10153 - protein, 7 aa, Artificial Sequence
  Description of Artificial Sequence: Synthetic peptide
  XENP019549 vlCDR2
GAFSRAT

SEQ ID NO: 10154 - protein, 9 aa, Artificial Sequence
  Description of Artificial Sequence: Synthetic peptide
  XENP019549 vlCDR3
QQYGSSPWT

SEQ ID NO: 10155 - protein, 221 aa, Artificial Sequence
  Description of Artificial Sequence: Synthetic polypeptide
  XENP019585 [CTLA-4]_H0.140_L0_Fab Heavy Chain
QVQLVESGGGVVQPGRSLRLSCAASGFTFSSYTMHWVRQAPGKGLEWVCFISYDGNNKYYADSVKGRFTCSRDNSKNTLYLQMNSLRAEDTAIYYCARTGWLGPFDYWGQGTLVTVSSASTKGPSVFPLAPSSKSTSGGTAALGCLVKDYFPEPVTVSWNSGALTSGVHTFPAVLQSSGLYSLSSVVTVPSSSLGTQTYICNVNHKPSNTKVDKKVEPKSC

SEQ ID NO: 10156 - protein, 118 aa, Artificial Sequence; identical to SEQ ID NO: 4851
  Description of Artificial Sequence: Synthetic polypeptide
  VH of XENP019585

SEQ ID NO: 10157 - protein, 5 aa, Artificial Sequence
  Description of Artificial Sequence: Synthetic peptide
  XENP019585 vhCDR1
SYTMH

SEQ ID NO: 10158 - protein, 17 aa, Artificial Sequence
  Description of Artificial Sequence: Synthetic peptide
  XENP019585 vhCDR2
FISYDGNNKYYADSVKG

SEQ ID NO: 10159 - protein, 9 aa, Artificial Sequence
  Description of Artificial Sequence: Synthetic peptide
  XENP019585 vhCDR3
TGWLGPFDY

SEQ ID NO: 10160 - protein, 215 aa, Artificial Sequence; identical to SEQ ID NO: 7600
  Description of Artificial Sequence: Synthetic polypeptide
  XENP019585 [CTLA-4]_H0.140_L0_Fab Light Chain

SEQ ID NO: 10161 - protein, 108 aa, Artificial Sequence; identical to SEQ ID NO: 3741
  Description of Artificial Sequence: Synthetic polypeptide
  VL of XENP019585

SEQ ID NO: 10162 - protein, 12 aa, Artificial Sequence
  Description of Artificial Sequence: Synthetic peptide
  XENP019585 vlCDR1
RASQSVGSSYLA

SEQ ID NO: 10163 - protein, 7 aa, Artificial Sequence
  Description of Artificial Sequence: Synthetic peptide
  XENP019585 vlCDR2
GAFSRAT

SEQ ID NO: 10164 - protein, 9 aa, Artificial Sequence
  Description of Artificial Sequence: Synthetic peptide
  XENP019585 vlCDR3
QQYGSSPWT

SEQ ID NO: 10165 - protein, 221 aa, Artificial Sequence; identical to SEQ ID NO: 7595
  Description of Artificial Sequence: Synthetic polypeptide
  XENP019586 [CTLA-4]_H0_L0.117_Fab Heavy Chain

SEQ ID NO: 10166 - protein, 118 aa, Artificial Sequence; identical to SEQ ID NO: 3737
  Description of Artificial Sequence: Synthetic polypeptide
  VH of XENP019586

SEQ ID NO: 10167 - protein, 5 aa, Artificial Sequence
  Description of Artificial Sequence: Synthetic peptide
  XENP019586 vhCDR1
SYTMH

SEQ ID NO: 10168 - protein, 17 aa, Artificial Sequence
  Description of Artificial Sequence: Synthetic peptide
  XENP019586 vhCDR2
FISYDGNNKYYADSVKG

SEQ ID NO: 10169 - protein, 9 aa, Artificial Sequence
  Description of Artificial Sequence: Synthetic peptide
  XENP019586 vhCDR3
TGWLGPFDY

SEQ ID NO: 10170 - protein, 215 aa, Artificial Sequence
  Description of Artificial Sequence: Synthetic polypeptide
  XENP019586 [CTLA-4]_H0_L0.117_Fab Light Chain
EIVLTQSPGTLSLSPGERATLSCRASQSVGSSYLAWYQQKPGQAPRLLCYGAFSRATGIPDRFSCSGSGTDFTLTISRLEPEDFAVYYCQQYGSSPWTFGQGTKVEIKRTVAAPSVFIFPPSDEQLKSGTASVVCLLNNFYPREAKVQWKVDNALQSGNSQESVTEQDSKDSTYSLSSTLTLSKADYEKHKVYACEVTHQGLSSPVTKSFNRGEC

SEQ ID NO: 10171 - protein, 108 aa, Artificial Sequence; identical to SEQ ID NO: 4861
  Description of Artificial Sequence: Synthetic polypeptide
  VL of XENP019586

SEQ ID NO: 10172 - protein, 12 aa, Artificial Sequence
  Description of Artificial Sequence: Synthetic peptide
  XENP019586 vlCDR1
RASQSVGSSYLA

SEQ ID NO: 10173 - protein, 7 aa, Artificial Sequence
  Description of Artificial Sequence: Synthetic peptide
  XENP019586 vlCDR2
GAFSRAT

SEQ ID NO: 10174 - protein, 9 aa, Artificial Sequence
  Description of Artificial Sequence: Synthetic peptide
  XENP019586 vlCDR3
QQYGSSPWT

SEQ ID NO: 10175 - protein, 221 aa, Artificial Sequence; identical to SEQ ID NO: 8935
  Description of Artificial Sequence: Synthetic polypeptide
  XENP020006 [CTLA-4]_H0.134_L0.53_Fab Heavy Chain

SEQ ID NO: 10176 - protein, 118 aa, Artificial Sequence; identical to SEQ ID NO: 4743
  Description of Artificial Sequence: Synthetic polypeptide
  VH of XENP020006

SEQ ID NO: 10177 - protein, 5 aa, Artificial Sequence
  Description of Artificial Sequence: Synthetic peptide
  XENP020006 vhCDR1
SYTMH

SEQ ID NO: 10178 - protein, 17 aa, Artificial Sequence
  Description of Artificial Sequence: Synthetic peptide
  XENP020006 vhCDR2
FISYDGNNKYYADSVKG

SEQ ID NO: 10179 - protein, 9 aa, Artificial Sequence
  Description of Artificial Sequence: Synthetic peptide
  XENP020006 vhCDR3
TGWLGPFDY

SEQ ID NO: 10180 - protein, 215 aa, Artificial Sequence; identical to SEQ ID NO: 9490
  Description of Artificial Sequence: Synthetic polypeptide
  XENP020006 [CTLA-4]_H0.134_L0.53_Fab Light Chain

SEQ ID NO: 10181 - protein, 108 aa, Artificial Sequence; identical to SEQ ID NO: 4753
  Description of Artificial Sequence: Synthetic polypeptide
  VL of XENP020006

SEQ ID NO: 10182 - protein, 12 aa, Artificial Sequence
  Description of Artificial Sequence: Synthetic peptide
  XENP020006 vlCDR1
RASQSVGSSYLA

SEQ ID NO: 10183 - protein, 7 aa, Artificial Sequence
  Description of Artificial Sequence: Synthetic peptide
  XENP020006 vlCDR2
GAFSRAT

SEQ ID NO: 10184 - protein, 9 aa, Artificial Sequence
  Description of Artificial Sequence: Synthetic peptide
  XENP020006 vlCDR3
QQYGSSPWT

SEQ ID NO: 10185 - protein, 221 aa, Artificial Sequence; identical to SEQ ID NO: 10115
  Description of Artificial Sequence: Synthetic polypeptide
  XENP020007 [CTLA-4]_H3_L1_Fab Heavy Chain

SEQ ID NO: 10186 - protein, 118 aa, Artificial Sequence; identical to SEQ ID NO: 2405
  Description of Artificial Sequence: Synthetic polypeptide
  VH of XENP020007

SEQ ID NO: 10187 - protein, 5 aa, Artificial Sequence
  Description of Artificial Sequence: Synthetic peptide
  XENP020007 vhCDR1
SYTMH

SEQ ID NO: 10188 - protein, 17 aa, Artificial Sequence
  Description of Artificial Sequence: Synthetic peptide
  XENP020007 vhCDR2
FISYDGNNKYYADSVKG

SEQ ID NO: 10189 - protein, 9 aa, Artificial Sequence
  Description of Artificial Sequence: Synthetic peptide
  XENP020007 vhCDR3
TGWLGPFDY

SEQ ID NO: 10190 - protein, 215 aa, Artificial Sequence; identical to SEQ ID NO: 10140
  Description of Artificial Sequence: Synthetic polypeptide
  XENP020007 [CTLA-4]_H3_L1_Fab Light Chain

SEQ ID NO: 10191 - protein, 108 aa, Artificial Sequence; identical to SEQ ID NO: 4834
  Description of Artificial Sequence: Synthetic polypeptide
  VL of XENP020007

SEQ ID NO: 10192 - protein, 12 aa, Artificial Sequence
  Description of Artificial Sequence: Synthetic peptide
  XENP020007 vlCDR1
GASQSVGSSYLA

SEQ ID NO: 10193 - protein, 7 aa, Artificial Sequence
  Description of Artificial Sequence: Synthetic peptide
  XENP020007 vlCDR2
GAFSRAT

SEQ ID NO: 10194 - protein, 9 aa, Artificial Sequence
  Description of Artificial Sequence: Synthetic peptide
  XENP020007 vlCDR3
QQYGSSPWT

SEQ ID NO: 10195 - protein, 221 aa, Artificial Sequence; identical to SEQ ID NO: 10115
  Description of Artificial Sequence: Synthetic polypeptide
  XENP020008 [CTLA-4]_H3_L2_Fab Heavy Chain

SEQ ID NO: 10196 - protein, 118 aa, Artificial Sequence; identical to SEQ ID NO: 2405
  Description of Artificial Sequence: Synthetic polypeptide
  VH of XENP020008

SEQ ID NO: 10197 - protein, 5 aa, Artificial Sequence
  Description of Artificial Sequence: Synthetic peptide
  XENP020008 vhCDR1
SYTMH

SEQ ID NO: 10198 - protein, 17 aa, Artificial Sequence
  Description of Artificial Sequence: Synthetic peptide
  XENP020008 vhCDR2
FISYDGNNKYYADSVKG

SEQ ID NO: 10199 - protein, 9 aa, Artificial Sequence
  Description of Artificial Sequence: Synthetic peptide
  XENP020008 vhCDR3
TGWLGPFDY

SEQ ID NO: 10200 - protein, 215 aa, Artificial Sequence; identical to SEQ ID NO: 10150
  Description of Artificial Sequence: Synthetic polypeptide
  XENP020008 [CTLA-4]_H3_L2_Fab Light Chain

SEQ ID NO: 10201 - protein, 108 aa, Artificial Sequence; identical to SEQ ID NO: 4843
  Description of Artificial Sequence: Synthetic polypeptide
  VL of XENP020008

SEQ ID NO: 10202 - protein, 12 aa, Artificial Sequence
  Description of Artificial Sequence: Synthetic peptide
  XENP020008 vlCDR1
RASQSVGSSYLA

SEQ ID NO: 10203 - protein, 7 aa, Artificial Sequence
  Description of Artificial Sequence: Synthetic peptide
  XENP020008 vlCDR2
GAFSRAT

SEQ ID NO: 10204 - protein, 9 aa, Artificial Sequence
  Description of Artificial Sequence: Synthetic peptide
  XENP020008 vlCDR3
QQYGSSPWT

SEQ ID NO: 10205 - protein, 221 aa, Artificial Sequence; identical to SEQ ID NO: 10115
  Description of Artificial Sequence: Synthetic polypeptide
  XENP020009 [CTLA-4]_H3_L0.12_Fab Heavy Chain

SEQ ID NO: 10206 - protein, 118 aa, Artificial Sequence; identical to SEQ ID NO: 2405
  Description of Artificial Sequence: Synthetic polypeptide
  VH of XENP020009

SEQ ID NO: 10207 - protein, 5 aa, Artificial Sequence
  Description of Artificial Sequence: Synthetic peptide
  XENP020009 vhCDR1
SYTMH

SEQ ID NO: 10208 - protein, 17 aa, Artificial Sequence
  Description of Artificial Sequence: Synthetic peptide
  XENP020009 vhCDR2
FISYDGNNKYYADSVKG

SEQ ID NO: 10209 - protein, 9 aa, Artificial Sequence
  Description of Artificial Sequence: Synthetic peptide
  XENP020009 vhCDR3
TGWLGPFDY

SEQ ID NO: 10210 - protein, 215 aa, Artificial Sequence; identical to SEQ ID NO: 9080
  Description of Artificial Sequence: Synthetic polypeptide
  XENP020009 [CTLA-4]_H3_L0.12_Fab Light Chain

SEQ ID NO: 10211 - protein, 108 aa, Artificial Sequence; identical to SEQ ID NO: 6193
  Description of Artificial Sequence: Synthetic polypeptide
  VL of XENP020009

SEQ ID NO: 10212 - protein, 12 aa, Artificial Sequence
  Description of Artificial Sequence: Synthetic peptide
  XENP020009 vlCDR1
RASQSVGSSYLA

SEQ ID NO: 10213 - protein, 7 aa, Artificial Sequence
  Description of Artificial Sequence: Synthetic peptide
  XENP020009 vlCDR2
GAFSRAT

SEQ ID NO: 10214 - protein, 9 aa, Artificial Sequence
  Description of Artificial Sequence: Synthetic peptide
  XENP020009 vlCDR3
QQYGSSPWT

SEQ ID NO: 10215 - protein, 221 aa, Artificial Sequence; identical to SEQ ID NO: 10115
  Description of Artificial Sequence: Synthetic polypeptide
  XENP020010 [CTLA-4]_H3_L0.18_Fab Heavy Chain

SEQ ID NO: 10216 - protein, 118 aa, Artificial Sequence; identical to SEQ ID NO: 2405
  Description of Artificial Sequence: Synthetic polypeptide
  VH of XENP020010

SEQ ID NO: 10217 - protein, 5 aa, Artificial Sequence
  Description of Artificial Sequence: Synthetic peptide
  XENP020010 vhCDR1
SYTMH

SEQ ID NO: 10218 - protein, 17 aa, Artificial Sequence
  Description of Artificial Sequence: Synthetic peptide
  XENP020010 vhCDR2
FISYDGNNKYYADSVKG

SEQ ID NO: 10219 - protein, 9 aa, Artificial Sequence
  Description of Artificial Sequence: Synthetic peptide
  XENP020010 vhCDR3
TGWLGPFDY

SEQ ID NO: 10220 - protein, 215 aa, Artificial Sequence; identical to SEQ ID NO: 9140
  Description of Artificial Sequence: Synthetic polypeptide
  XENP020010 [CTLA-4]_H3_L0.18_Fab Light Chain

SEQ ID NO: 10221 - protein, 108 aa, Artificial Sequence; identical to SEQ ID NO: 6247
  Description of Artificial Sequence: Synthetic polypeptide
  VL of XENP020010

SEQ ID NO: 10222 - protein, 12 aa, Artificial Sequence
  Description of Artificial Sequence: Synthetic peptide
  XENP020010 vlCDR1
RSSQSVGSSYLA

SEQ ID NO: 10223 - protein, 7 aa, Artificial Sequence
  Description of Artificial Sequence: Synthetic peptide
  XENP020010 vlCDR2
GAFSRAT

SEQ ID NO: 10224 - protein, 9 aa, Artificial Sequence
  Description of Artificial Sequence: Synthetic peptide
  XENP020010 vlCDR3
QQYGSSPWT

SEQ ID NO: 10225 - protein, 221 aa, Artificial Sequence; identical to SEQ ID NO: 10115
  Description of Artificial Sequence: Synthetic polypeptide
  XENP020011 [CTLA-4]_H3_L0.22_Fab Heavy Chain

SEQ ID NO: 10226 - protein, 118 aa, Artificial Sequence; identical to SEQ ID NO: 2405
  Description of Artificial Sequence: Synthetic polypeptide
  VH of XENP020011

SEQ ID NO: 10227 - protein, 5 aa, Artificial Sequence
  Description of Artificial Sequence: Synthetic peptide
  XENP020011 vhCDR1
SYTMH

SEQ ID NO: 10228 - protein, 17 aa, Artificial Sequence
  Description of Artificial Sequence: Synthetic peptide
  XENP020011 vhCDR2
FISYDGNNKYYADSVKG

SEQ ID NO: 10229 - protein, 9 aa, Artificial Sequence
  Description of Artificial Sequence: Synthetic peptide
  XENP020011 vhCDR3
TGWLGPFDY

SEQ ID NO: 10230 - protein, 215 aa, Artificial Sequence; identical to SEQ ID NO: 2410
  Description of Artificial Sequence: Synthetic polypeptide
  XENP020011 [CTLA-4]_H3_L0.22_Fab Light Chain

SEQ ID NO: 10231 - protein, 108 aa, Artificial Sequence; identical to SEQ ID NO: 2411
  Description of Artificial Sequence: Synthetic polypeptide
  VL of XENP020011

SEQ ID NO: 10232 - protein, 12 aa, Artificial Sequence
  Description of Artificial Sequence: Synthetic peptide
  XENP020011 vlCDR1
RASQSVSSSYLA

SEQ ID NO: 10233 - protein, 7 aa, Artificial Sequence
  Description of Artificial Sequence: Synthetic peptide
  XENP020011 vlCDR2
GAFSRAT

SEQ ID NO: 10234 - protein, 9 aa, Artificial Sequence
  Description of Artificial Sequence: Synthetic peptide
  XENP020011 vlCDR3
QQYGSSPWT

SEQ ID NO: 10235 - protein, 221 aa, Artificial Sequence; identical to SEQ ID NO: 10115
  Description of Artificial Sequence: Synthetic polypeptide
  XENP020012 [CTLA-4]_H3_L0.27_Fab Heavy Chain

SEQ ID NO: 10236 - protein, 118 aa, Artificial Sequence; identical to SEQ ID NO: 2405
  Description of Artificial Sequence: Synthetic polypeptide
  VH of XENP020012

SEQ ID NO: 10237 - protein, 5 aa, Artificial Sequence
  Description of Artificial Sequence: Synthetic peptide
  XENP020012 vhCDR1
SYTMH

SEQ ID NO: 10238 - protein, 17 aa, Artificial Sequence
  Description of Artificial Sequence: Synthetic peptide
  XENP020012 vhCDR2
FISYDGNNKYYADSVKG

SEQ ID NO: 10239 - protein, 9 aa, Artificial Sequence
  Description of Artificial Sequence: Synthetic peptide
  XENP020012 vhCDR3
TGWLGPFDY

SEQ ID NO: 10240 - protein, 215 aa, Artificial Sequence; identical to SEQ ID NO: 9230
  Description of Artificial Sequence: Synthetic polypeptide
  XENP020012 [CTLA-4]_H3_L0.27_Fab Light Chain

SEQ ID NO: 10241 - protein, 108 aa, Artificial Sequence; identical to SEQ ID NO: 6328
  Description of Artificial Sequence: Synthetic polypeptide
  VL of XENP020012

SEQ ID NO: 10242 - protein, 12 aa, Artificial Sequence
  Description of Artificial Sequence: Synthetic peptide
  XENP020012 vlCDR1
RASQSVGQSYLA

SEQ ID NO: 10243 - protein, 7 aa, Artificial Sequence
  Description of Artificial Sequence: Synthetic peptide
  XENP020012 vlCDR2
GAFSRAT

SEQ ID NO: 10244 - protein, 9 aa, Artificial Sequence
  Description of Artificial Sequence: Synthetic peptide
  XENP020012 vlCDR3
QQYGSSPWT

SEQ ID NO: 10245 - protein, 221 aa, Artificial Sequence; identical to SEQ ID NO: 10115
  Description of Artificial Sequence: Synthetic polypeptide
  XENP020013 [CTLA-4]_H3_L0.32_Fab Heavy Chain

SEQ ID NO: 10246 - protein, 118 aa, Artificial Sequence; identical to SEQ ID NO: 2405
  Description of Artificial Sequence: Synthetic polypeptide
  VH of XENP020013

SEQ ID NO: 10247 - protein, 5 aa, Artificial Sequence
  Description of Artificial Sequence: Synthetic peptide
  XENP020013 vhCDR1
SYTMH

SEQ ID NO: 10248 - protein, 17 aa, Artificial Sequence
  Description of Artificial Sequence: Synthetic peptide
  XENP020013 vhCDR2
FISYDGNNKYYADSVKG

SEQ ID NO: 10249 - protein, 9 aa, Artificial Sequence
  Description of Artificial Sequence: Synthetic peptide
  XENP020013 vhCDR3
TGWLGPFDY

SEQ ID NO: 10250 - protein, 215 aa, Artificial Sequence; identical to SEQ ID NO: 9280
  Description of Artificial Sequence: Synthetic polypeptide
  XENP020013 [CTLA-4]_H3_L0.32_Fab Light Chain

SEQ ID NO: 10251 - protein, 108 aa, Artificial Sequence; identical to SEQ ID NO: 6373
  Description of Artificial Sequence: Synthetic polypeptide
  VL of XENP020013

SEQ ID NO: 10252 - protein, 12 aa, Artificial Sequence
  Description of Artificial Sequence: Synthetic peptide
  XENP020013 vlCDR1
RASQSVGSQYLA

SEQ ID NO: 10253 - protein, 7 aa, Artificial Sequence
  Description of Artificial Sequence: Synthetic peptide
  XENP020013 vlCDR2
GAFSRAT

SEQ ID NO: 10254 - protein, 9 aa, Artificial Sequence
  Description of Artificial Sequence: Synthetic peptide
  XENP020013 vlCDR3
QQYGSSPWT

SEQ ID NO: 10255 - protein, 221 aa, Artificial Sequence; identical to SEQ ID NO: 10115
  Description of Artificial Sequence: Synthetic polypeptide
  XENP020014 [CTLA-4]_H3_L0.36_Fab Heavy Chain

SEQ ID NO: 10256 - protein, 118 aa, Artificial Sequence; identical to SEQ ID NO: 2405
  Description of Artificial Sequence: Synthetic polypeptide
  VH of XENP020014

SEQ ID NO: 10257 - protein, 5 aa, Artificial Sequence
  Description of Artificial Sequence: Synthetic peptide
  XENP020014 vhCDR1
SYTMH

SEQ ID NO: 10258 - protein, 17 aa, Artificial Sequence
  Description of Artificial Sequence: Synthetic peptide
  XENP020014 vhCDR2
FISYDGNNKYYADSVKG

SEQ ID NO: 10259 - protein, 9 aa, Artificial Sequence
  Description of Artificial Sequence: Synthetic peptide
  XENP020014 vhCDR3
TGWLGPFDY

SEQ ID NO: 10260 - protein, 215 aa, Artificial Sequence; identical to SEQ ID NO: 9320
  Description of Artificial Sequence: Synthetic polypeptide
  XENP020014 [CTLA-4]_H3_L0.36_Fab Light Chain

SEQ ID NO: 10261 - protein, 108 aa, Artificial Sequence; identical to SEQ ID NO: 6409
  Description of Artificial Sequence: Synthetic polypeptide
  VL of XENP020014

SEQ ID NO: 10262 - protein, 12 aa, Artificial Sequence
  Description of Artificial Sequence: Synthetic peptide
  XENP020014 vlCDR1
RASQSVGSSHLA

SEQ ID NO: 10263 - protein, 7 aa, Artificial Sequence
  Description of Artificial Sequence: Synthetic peptide
  XENP020014 vlCDR2
GAFSRAT

SEQ ID NO: 10264 - protein, 9 aa, Artificial Sequence
  Description of Artificial Sequence: Synthetic peptide
  XENP020014 vlCDR3
QQYGSSPWT

SEQ ID NO: 10265 - protein, 221 aa, Artificial Sequence; identical to SEQ ID NO: 10115
  Description of Artificial Sequence: Synthetic polypeptide
  XENP020015 [CTLA-4]_H3_L0.37_Fab Heavy Chain

SEQ ID NO: 10266 - protein, 118 aa, Artificial Sequence; identical to SEQ ID NO: 2405
  Description of Artificial Sequence: Synthetic polypeptide
  VH of XENP020015

SEQ ID NO: 10267 - protein, 5 aa, Artificial Sequence
  Description of Artificial Sequence: Synthetic peptide
  XENP020015 vhCDR1
SYTMH

SEQ ID NO: 10268 - protein, 17 aa, Artificial Sequence
  Description of Artificial Sequence: Synthetic peptide
  XENP020015 vhCDR2
FISYDGNNKYYADSVKG

SEQ ID NO: 10269 - protein, 9 aa, Artificial Sequence
  Description of Artificial Sequence: Synthetic peptide
  XENP020015 vhCDR3
TGWLGPFDY

SEQ ID NO: 10270 - protein, 215 aa, Artificial Sequence; identical to SEQ ID NO: 9330
  Description of Artificial Sequence: Synthetic polypeptide
  XENP020015 [CTLA-4]_H3_L0.37_Fab Light Chain

SEQ ID NO: 10271 - protein, 108 aa, Artificial Sequence; identical to SEQ ID NO: 6418
  Description of Artificial Sequence: Synthetic polypeptide
  VL of XENP020015

SEQ ID NO: 10272 - protein, 12 aa, Artificial Sequence
  Description of Artificial Sequence: Synthetic peptide
  XENP020015 vlCDR1
RASQSVGSSLLA

SEQ ID NO: 10273 - protein, 7 aa, Artificial Sequence
  Description of Artificial Sequence: Synthetic peptide
  XENP020015 vlCDR2
GAFSRAT

SEQ ID NO: 10274 - protein, 9 aa, Artificial Sequence
  Description of Artificial Sequence: Synthetic peptide
  XENP020015 vlCDR3
QQYGSSPWT

SEQ ID NO: 10275 - protein, 221 aa, Artificial Sequence; identical to SEQ ID NO: 10115
  Description of Artificial Sequence: Synthetic polypeptide
  XENP020016 [CTLA-4]_H3_L0.39_Fab Heavy Chain

SEQ ID NO: 10276 - protein, 118 aa, Artificial Sequence; identical to SEQ ID NO: 2405
  Description of Artificial Sequence: Synthetic polypeptide
  VH of XENP020016

SEQ ID NO: 10277 - protein, 5 aa, Artificial Sequence
  Description of Artificial Sequence: Synthetic peptide
  XENP020016 vhCDR1
SYTMH

SEQ ID NO: 10278 - protein, 17 aa, Artificial Sequence
  Description of Artificial Sequence: Synthetic peptide
  XENP020016 vhCDR2
FISYDGNNKYYADSVKG

SEQ ID NO: 10279 - protein, 9 aa, Artificial Sequence
  Description of Artificial Sequence: Synthetic peptide
  XENP020016 vhCDR3
TGWLGPFDY

SEQ ID NO: 10280 - protein, 215 aa, Artificial Sequence; identical to SEQ ID NO: 9350
  Description of Artificial Sequence: Synthetic polypeptide
  XENP020016 [CTLA-4]_H3_L0.39_Fab Light Chain

SEQ ID NO: 10281 - protein, 108 aa, Artificial Sequence; identical to SEQ ID NO: 6436
  Description of Artificial Sequence: Synthetic polypeptide
  VL of XENP020016

SEQ ID NO: 10282 - protein, 12 aa, Artificial Sequence
  Description of Artificial Sequence: Synthetic peptide
  XENP020016 vlCDR1
RASQSVGSSSLA

SEQ ID NO: 10283 - protein, 7 aa, Artificial Sequence
  Description of Artificial Sequence: Synthetic peptide
  XENP020016 vlCDR2
GAFSRAT

SEQ ID NO: 10284 - protein, 9 aa, Artificial Sequence
  Description of Artificial Sequence: Synthetic peptide
  XENP020016 vlCDR3
QQYGSSPWT

SEQ ID NO: 10285 - protein, 221 aa, Artificial Sequence; identical to SEQ ID NO: 10115
  Description of Artificial Sequence: Synthetic polypeptide
  XENP020017 [CTLA-4]_H3_L0.41_Fab Heavy Chain

SEQ ID NO: 10286 - protein, 118 aa, Artificial Sequence; identical to SEQ ID NO: 2405
  Description of Artificial Sequence: Synthetic polypeptide
  VH of XENP020017

SEQ ID NO: 10287 - protein, 5 aa, Artificial Sequence
  Description of Artificial Sequence: Synthetic peptide
  XENP020017 vhCDR1
SYTMH

SEQ ID NO: 10288 - protein, 17 aa, Artificial Sequence
  Description of Artificial Sequence: Synthetic peptide
  XENP020017 vhCDR2
FISYDGNNKYYADSVKG

SEQ ID NO: 10289 - protein, 9 aa, Artificial Sequence
  Description of Artificial Sequence: Synthetic peptide
  XENP020017 vhCDR3
TGWLGPFDY

SEQ ID NO: 10290 - protein, 215 aa, Artificial Sequence; identical to SEQ ID NO: 9370
  Description of Artificial Sequence: Synthetic polypeptide
  XENP020017 [CTLA-4]_H3_L0.41_Fab Light Chain

SEQ ID NO: 10291 - protein, 108 aa, Artificial Sequence; identical to SEQ ID NO: 6454
  Description of Artificial Sequence: Synthetic polypeptide
  VL of XENP020017

SEQ ID NO: 10292 - protein, 12 aa, Artificial Sequence
  Description of Artificial Sequence: Synthetic peptide
  XENP020017 vlCDR1
RASQSVGSSYMA

SEQ ID NO: 10293 - protein, 7 aa, Artificial Sequence
  Description of Artificial Sequence: Synthetic peptide
  XENP020017 vlCDR2
GAFSRAT

SEQ ID NO: 10294 - protein, 9 aa, Artificial Sequence
  Description of Artificial Sequence: Synthetic peptide
  XENP020017 vlCDR3
QQYGSSPWT

SEQ ID NO: 10295 - protein, 221 aa, Artificial Sequence; identical to SEQ ID NO: 10115
  Description of Artificial Sequence: Synthetic polypeptide
  XENP020018 [CTLA-4]_H3_L0.67_Fab Heavy Chain

SEQ ID NO: 10296 - protein, 118 aa, Artificial Sequence; identical to SEQ ID NO: 2405
  Description of Artificial Sequence: Synthetic polypeptide
  VH of XENP020018

SEQ ID NO: 10297 - protein, 5 aa, Artificial Sequence
  Description of Artificial Sequence: Synthetic peptide
  XENP020018 vhCDR1
SYTMH

SEQ ID NO: 10298 - protein, 17 aa, Artificial Sequence
  Description of Artificial Sequence: Synthetic peptide
  XENP020018 vhCDR2
FISYDGNNKYYADSVKG

SEQ ID NO: 10299 - protein, 9 aa, Artificial Sequence
  Description of Artificial Sequence: Synthetic peptide
  XENP020018 vhCDR3
TGWLGPFDY

SEQ ID NO: 10300 - protein, 215 aa, Artificial Sequence; identical to SEQ ID NO: 9630
  Description of Artificial Sequence: Synthetic polypeptide
  XENP020018 [CTLA-4]_H3_L0.67_Fab Light Chain

SEQ ID NO: 10301 - protein, 108 aa, Artificial Sequence; identical to SEQ ID NO: 6688
  Description of Artificial Sequence: Synthetic polypeptide
  VL of XENP020018

SEQ ID NO: 10302 - protein, 12 aa, Artificial Sequence
  Description of Artificial Sequence: Synthetic peptide
  XENP020018 vlCDR1
RASQSVGSSYLA

SEQ ID NO: 10303 - protein, 7 aa, Artificial Sequence
  Description of Artificial Sequence: Synthetic peptide
  XENP020018 vlCDR2
DAFSRAT

SEQ ID NO: 10304 - protein, 9 aa, Artificial Sequence
  Description of Artificial Sequence: Synthetic peptide
  XENP020018 vlCDR3
QQYGSSPWT

SEQ ID NO: 10305 - protein, 221 aa, Artificial Sequence; identical to SEQ ID NO: 10115
  Description of Artificial Sequence: Synthetic polypeptide
  XENP020019 [CTLA-4]_H3_L0.69_Fab Heavy Chain

SEQ ID NO: 10306 - protein, 118 aa, Artificial Sequence; identical to SEQ ID NO: 2405
  Description of Artificial Sequence: Synthetic polypeptide
  VH of XENP020019

SEQ ID NO: 10307 - protein, 5 aa, Artificial Sequence
  Description of Artificial Sequence: Synthetic peptide
  XENP020019 vhCDR1
SYTMH

SEQ ID NO: 10308 - protein, 17 aa, Artificial Sequence
  Description of Artificial Sequence: Synthetic peptide
  XENP020019 vhCDR2
FISYDGNNKYYADSVKG

SEQ ID NO: 10309 - protein, 9 aa, Artificial Sequence
  Description of Artificial Sequence: Synthetic peptide
  XENP020019 vhCDR3
TGWLGPFDY

SEQ ID NO: 10310 - protein, 215 aa, Artificial Sequence; identical to SEQ ID NO: 9650
  Description of Artificial Sequence: Synthetic polypeptide
  XENP020019 [CTLA-4]_H3_L0.69_Fab Light Chain

SEQ ID NO: 10311 - protein, 108 aa, Artificial Sequence; identical to SEQ ID NO: 6706
  Description of Artificial Sequence: Synthetic polypeptide
  VL of XENP020019

SEQ ID NO: 10312 - protein, 12 aa, Artificial Sequence
  Description of Artificial Sequence: Synthetic peptide
  XENP020019 vlCDR1
RASQSVGSSYLA

SEQ ID NO: 10313 - protein, 7 aa, Artificial Sequence
  Description of Artificial Sequence: Synthetic peptide
  XENP020019 vlCDR2
GVFSRAT

SEQ ID NO: 10314 - protein, 9 aa, Artificial Sequence
  Description of Artificial Sequence: Synthetic peptide
  XENP020019 vlCDR3
QQYGSSPWT

SEQ ID NO: 10315 - protein, 221 aa, Artificial Sequence; identical to SEQ ID NO: 10115
  Description of Artificial Sequence: Synthetic polypeptide
  XENP020020 [CTLA-4]_H3_L0.74_Fab Heavy Chain

SEQ ID NO: 10316 - protein, 118 aa, Artificial Sequence; identical to SEQ ID NO: 2405
  Description of Artificial Sequence: Synthetic polypeptide
  VH of XENP020020

SEQ ID NO: 10317 - protein, 5 aa, Artificial Sequence
  Description of Artificial Sequence: Synthetic peptide
  XENP020020 vhCDR1
SYTMH

SEQ ID NO: 10318 - protein, 17 aa, Artificial Sequence
  Description of Artificial Sequence: Synthetic peptide
  XENP020020 vhCDR2
FISYDGNNKYYADSVKG

SEQ ID NO: 10319 - protein, 9 aa, Artificial Sequence
  Description of Artificial Sequence: Synthetic peptide
  XENP020020 vhCDR3
TGWLGPFDY

SEQ ID NO: 10320 - protein, 215 aa, Artificial Sequence; identical to SEQ ID NO: 9700
  Description of Artificial Sequence: Synthetic polypeptide
  XENP020020 [CTLA-4]_H3_L0.74_Fab Light Chain

SEQ ID NO: 10321 - protein, 108 aa, Artificial Sequence; identical to SEQ ID NO: 6751
  Description of Artificial Sequence: Synthetic polypeptide
  VL of XENP020020

SEQ ID NO: 10322 - protein, 12 aa, Artificial Sequence
  Description of Artificial Sequence: Synthetic peptide
  XENP020020 vlCDR1
RASQSVGSSYLA

SEQ ID NO: 10323 - protein, 7 aa, Artificial Sequence
  Description of Artificial Sequence: Synthetic peptide
  XENP020020 vlCDR2
GAYSRAT

SEQ ID NO: 10324 - protein, 9 aa, Artificial Sequence
  Description of Artificial Sequence: Synthetic peptide
  XENP020020 vlCDR3
QQYGSSPWT

SEQ ID NO: 10325 - protein, 221 aa, Artificial Sequence; identical to SEQ ID NO: 10115
  Description of Artificial Sequence: Synthetic polypeptide
  XENP020021 [CTLA-4]_H3_L0.75_Fab Heavy Chain

SEQ ID NO: 10326 - protein, 118 aa, Artificial Sequence; identical to SEQ ID NO: 2405
  Description of Artificial Sequence: Synthetic polypeptide
  VH of XENP020021

SEQ ID NO: 10327 - protein, 5 aa, Artificial Sequence
  Description of Artificial Sequence: Synthetic peptide
  XENP020021 vhCDR1
SYTMH

SEQ ID NO: 10328 - protein, 17 aa, Artificial Sequence
  Description of Artificial Sequence: Synthetic peptide
  XENP020021 vhCDR2
FISYDGNNKYYADSVKG

SEQ ID NO: 10329 - protein, 9 aa, Artificial Sequence
  Description of Artificial Sequence: Synthetic peptide
  XENP020021 vhCDR3
TGWLGPFDY

SEQ ID NO: 10330 - protein, 215 aa, Artificial Sequence; identical to SEQ ID NO: 9710
  Description of Artificial Sequence: Synthetic polypeptide
  XENP020021 [CTLA-4]_H3_L0.75_Fab Light Chain

SEQ ID NO: 10331 - protein, 108 aa, Artificial Sequence; identical to SEQ ID NO: 6760
  Description of Artificial Sequence: Synthetic polypeptide
  VL of XENP020021

SEQ ID NO: 10332 - protein, 12 aa, Artificial Sequence
  Description of Artificial Sequence: Synthetic peptide
  XENP020021 vlCDR1
RASQSVGSSYLA

SEQ ID NO: 10333 - protein, 7 aa, Artificial Sequence
  Description of Artificial Sequence: Synthetic peptide
  XENP020021 vlCDR2
GAFARAT

SEQ ID NO: 10334 - protein, 9 aa, Artificial Sequence
  Description of Artificial Sequence: Synthetic peptide
  XENP020021 vlCDR3
QQYGSSPWT

SEQ ID NO: 10335 - protein, 221 aa, Artificial Sequence; identical to SEQ ID NO: 10115
  Description of Artificial Sequence: Synthetic polypeptide
  XENP020022 [CTLA-4]_H3_L0.103_Fab Heavy Chain

SEQ ID NO: 10336 - protein, 118 aa, Artificial Sequence; identical to SEQ ID NO: 2405
  Description of Artificial Sequence: Synthetic polypeptide
  VH of XENP020022

SEQ ID NO: 10337 - protein, 5 aa, Artificial Sequence
  Description of Artificial Sequence: Synthetic peptide
  XENP020022 vhCDR1
SYTMH

SEQ ID NO: 10338 - protein, 17 aa, Artificial Sequence
  Description of Artificial Sequence: Synthetic peptide
  XENP020022 vhCDR2
FISYDGNNKYYADSVKG

SEQ ID NO: 10339 - protein, 9 aa, Artificial Sequence
  Description of Artificial Sequence: Synthetic peptide
  XENP020022 vhCDR3
TGWLGPFDY

SEQ ID NO: 10340 - protein, 215 aa, Artificial Sequence; identical to SEQ ID NO: 9990
  Description of Artificial Sequence: Synthetic polypeptide
  XENP020022 [CTLA-4]_H3_L0.103_Fab Light Chain

SEQ ID NO: 10341 - protein, 108 aa, Artificial Sequence; identical to SEQ ID NO: 7012
  Description of Artificial Sequence: Synthetic polypeptide
  VL of XENP020022

SEQ ID NO: 10342 - protein, 12 aa, Artificial Sequence
  Description of Artificial Sequence: Synthetic peptide
  XENP020022 vlCDR1
RASQSVGSSYLA

SEQ ID NO: 10343 - protein, 7 aa, Artificial Sequence
  Description of Artificial Sequence: Synthetic peptide
  XENP020022 vlCDR2
GAFSRAT

SEQ ID NO: 10344 - protein, 9 aa, Artificial Sequence
  Description of Artificial Sequence: Synthetic peptide
  XENP020022 vlCDR3
QQYGKSPWT

SEQ ID NO: 10345 - protein, 221 aa, Artificial Sequence; identical to SEQ ID NO: 10115
  Description of Artificial Sequence: Synthetic polypeptide
  XENP020052 [CTLA-4]_H3_L0.44_Fab Heavy Chain

SEQ ID NO: 10346 - protein, 118 aa, Artificial Sequence; identical to SEQ ID NO: 2405
  Description of Artificial Sequence: Synthetic polypeptide
  VH of XENP020052

SEQ ID NO: 10347 - protein, 5 aa, Artificial Sequence
  Description of Artificial Sequence: Synthetic peptide
  XENP020052 vhCDR1
SYTMH

SEQ ID NO: 10348 - protein, 17 aa, Artificial Sequence
  Description of Artificial Sequence: Synthetic peptide
  XENP020052 vhCDR2
FISYDGNNKYYADSVKG

SEQ ID NO: 10349 - protein, 9 aa, Artificial Sequence
  Description of Artificial Sequence: Synthetic peptide
  XENP020052 vhCDR3
TGWLGPFDY

SEQ ID NO: 10350 - protein, 215 aa, Artificial Sequence; identical to SEQ ID NO: 9400
  Description of Artificial Sequence: Synthetic polypeptide
  XENP020052 [CTLA-4]_H3_L0.44_Fab Light Chain

SEQ ID NO: 10351 - protein, 108 aa, Artificial Sequence; identical to SEQ ID NO: 6481
  Description of Artificial Sequence: Synthetic polypeptide
  VL of XENP020052

SEQ ID NO: 10352 - protein, 12 aa, Artificial Sequence
  Description of Artificial Sequence: Synthetic peptide
  XENP020052 vlCDR1
RASQSVGSSYLS

SEQ ID NO: 10353 - protein, 7 aa, Artificial Sequence
  Description of Artificial Sequence: Synthetic peptide
  XENP020052 vlCDR2
GAFSRAT

SEQ ID NO: 10354 - protein, 9 aa, Artificial Sequence
  Description of Artificial Sequence: Synthetic peptide
  XENP020052 vlCDR3
QQYGSSPWT

SEQ ID NO: 10355 - protein, 221 aa, Artificial Sequence
  Description of Artificial Sequence: Synthetic polypeptide
  XENP020068 [CTLA-4]_H3.1_L0.12_Fab Heavy Chain
EVQLVESGGGLVKPGGSLRLSCAASGFTFSSYTMHWVRQAPGKGLEWVSFISYDGNHKYYADSVKGRFTISRDNAKNSLYLQMNSLRAEDTAVYYCARTGLLGPFDLWGQGTMVTVSSASTKGPSVFPLAPSSKSTSGGTAALGCLVKDYFPEPVTVSWNSGALTSGVHTFPAVLQSSGLYSLSSVVTVPSSSLGTQTYICNVNHKPSNTKVDKKVEPKSC

SEQ ID NO: 10356 - protein, 118 aa, Artificial Sequence; identical to SEQ ID NO: 7110
  Description of Artificial Sequence: Synthetic polypeptide
  VH of XENP020068

SEQ ID NO: 10357 - protein, 5 aa, Artificial Sequence
  Description of Artificial Sequence: Synthetic peptide
  XENP020068 vhCDR1
SYTMH

SEQ ID NO: 10358 - protein, 17 aa, Artificial Sequence
  Description of Artificial Sequence: Synthetic peptide
  XENP020068 vhCDR2
FISYDGNHKYYADSVKG

SEQ ID NO: 10359 - protein, 9 aa, Artificial Sequence
  Description of Artificial Sequence: Synthetic peptide
  XENP020068 vhCDR3
TGLLGPFDL

SEQ ID NO: 10360 - protein, 215 aa, Artificial Sequence; identical to SEQ ID NO: 9080
  Description of Artificial Sequence: Synthetic polypeptide
  XENP020068 [CTLA-4]_H3.1_L0.12_Fab Light Chain

SEQ ID NO: 10361 - protein, 108 aa, Artificial Sequence; identical to SEQ ID NO: 6193
  Description of Artificial Sequence: Synthetic polypeptide
  VL of XENP020068

SEQ ID NO: 10362 - protein, 12 aa, Artificial Sequence
  Description of Artificial Sequence: Synthetic peptide
  XENP020068 vlCDR1
RASQSVGSSYLA

SEQ ID NO: 10363 - protein, 7 aa, Artificial Sequence
  Description of Artificial Sequence: Synthetic peptide
  XENP020068 vlCDR2
GAFSRAT

SEQ ID NO: 10364 - protein, 9 aa, Artificial Sequence
  Description of Artificial Sequence: Synthetic peptide
  XENP020068 vlCDR3
QQYGSSPWT

SEQ ID NO: 10365 - protein, 221 aa, Artificial Sequence
  Description of Artificial Sequence: Synthetic polypeptide
  XENP020069 [CTLA-4]_H3.2_L0.12_Fab Heavy Chain
EVQLVESGGGLVKPGGSLRLSCAASGFTFSSYTMHWVRQAPGKGLEWVSFISYDGNTKYYADSVKGRFTISRDNAKNSLYLQMNSLRAEDTAVYYCARTGLLGPFDLWGQGTMVTVSSASTKGPSVFPLAPSSKSTSGGTAALGCLVKDYFPEPVTVSWNSGALTSGVHTFPAVLQSSGLYSLSSVVTVPSSSLGTQTYICNVNHKPSNTKVDKKVEPKSC

SEQ ID NO: 10366 - protein, 118 aa, Artificial Sequence; identical to SEQ ID NO: 7119
  Description of Artificial Sequence: Synthetic polypeptide
  VH of XENP020069

SEQ ID NO: 10367 - protein, 5 aa, Artificial Sequence
  Description of Artificial Sequence: Synthetic peptide
  XENP020069 vhCDR1
SYTMH

SEQ ID NO: 10368 - protein, 17 aa, Artificial Sequence
  Description of Artificial Sequence: Synthetic peptide
  XENP020069 vhCDR2
FISYDGNTKYYADSVKG

SEQ ID NO: 10369 - protein, 9 aa, Artificial Sequence
  Description of Artificial Sequence: Synthetic peptide
  XENP020069 vhCDR3
TGLLGPFDL

SEQ ID NO: 10370 - protein, 215 aa, Artificial Sequence; identical to SEQ ID NO: 9080
  Description of Artificial Sequence: Synthetic polypeptide
  XENP020069 [CTLA-4]_H3.2_L0.12_Fab Light Chain

SEQ ID NO: 10371 - protein, 108 aa, Artificial Sequence; identical to SEQ ID NO: 6193
  Description of Artificial Sequence: Synthetic polypeptide
  VL of XENP020069

SEQ ID NO: 10372 - protein, 12 aa, Artificial Sequence
  Description of Artificial Sequence: Synthetic peptide
  XENP020069 vlCDR1
RASQSVGSSYLA

SEQ ID NO: 10373 - protein, 7 aa, Artificial Sequence
  Description of Artificial Sequence: Synthetic peptide
  XENP020069 vlCDR2
GAFSRAT

SEQ ID NO: 10374 - protein, 9 aa, Artificial Sequence
  Description of Artificial Sequence: Synthetic peptide
  XENP020069 vlCDR3
QQYGSSPWT

SEQ ID NO: 10375 - protein, 221 aa, Artificial Sequence
  Description of Artificial Sequence: Synthetic polypeptide
  XENP020070 [CTLA-4]_H3.3_L0.12_Fab Heavy Chain
EVQLVESGGGLVKPGGSLRLSCAASGFTFSSYTMHWVRQAPGKGLEWVSFISYDGNQKYYADSVKGRFTISRDNAKNSLYLQMNSLRAEDTAVYYCARTGLLGPFDLWGQGTMVTVSSASTKGPSVFPLAPSSKSTSGGTAALGCLVKDYFPEPVTVSWNSGALTSGVHTFPAVLQSSGLYSLSSVVTVPSSSLGTQTYICNVNHKPSNTKVDKKVEPKSC

SEQ ID NO: 10376 - protein, 118 aa, Artificial Sequence; identical to SEQ ID NO: 7128
  Description of Artificial Sequence: Synthetic polypeptide
  VH of XENP020070

SEQ ID NO: 10377 - protein, 5 aa, Artificial Sequence
  Description of Artificial Sequence: Synthetic peptide
  XENP020070 vhCDR1
SYTMH

SEQ ID NO: 10378 - protein, 17 aa, Artificial Sequence
  Description of Artificial Sequence: Synthetic peptide
  XENP020070 vhCDR2
FISYDGNQKYYADSVKG

SEQ ID NO: 10379 - protein, 9 aa, Artificial Sequence
  Description of Artificial Sequence: Synthetic peptide
  XENP020070 vhCDR3
TGLLGPFDL

SEQ ID NO: 10380 - protein, 215 aa, Artificial Sequence; identical to SEQ ID NO: 9080
  Description of Artificial Sequence: Synthetic polypeptide
  XENP020070 [CTLA-4]_H3.3_L0.12_Fab Light Chain

SEQ ID NO: 10381 - protein, 108 aa, Artificial Sequence; identical to SEQ ID NO: 6193
  Description of Artificial Sequence: Synthetic polypeptide
  VL of XENP020070

SEQ ID NO: 10382 - protein, 12 aa, Artificial Sequence
  Description of Artificial Sequence: Synthetic peptide
  XENP020070 vlCDR1
RASQSVGSSYLA

SEQ ID NO: 10383 - protein, 7 aa, Artificial Sequence
  Description of Artificial Sequence: Synthetic peptide
  XENP020070 vlCDR2
GAFSRAT

SEQ ID NO: 10384 - protein, 9 aa, Artificial Sequence
  Description of Artificial Sequence: Synthetic peptide
  XENP020070 vlCDR3
QQYGSSPWT

SEQ ID NO: 10385 - protein, 221 aa, Artificial Sequence
  Description of Artificial Sequence: Synthetic polypeptide
  XENP020071 [CTLA-4]_H3.4_L0.12_Fab Heavy Chain
EVQLVESGGGLVKPGGSLRLSCAASGFTFSSYTMHWVRQAPGKGLEWVSFISYDGNHKYYADSVKGRFTISRDNAKNSLYLQMNSLRAEDTAVYYCARTGHLGPFDLWGQGTMVTVSSASTKGPSVFPLAPSSKSTSGGTAALGCLVKDYFPEPVTVSWNSGALTSGVHTFPAVLQSSGLYSLSSVVTVPSSSLGTQTYICNVNHKPSNTKVDKKVEPKSC

SEQ ID NO: 10386 - protein, 118 aa, Artificial Sequence; identical to SEQ ID NO: 7137
  Description of Artificial Sequence: Synthetic polypeptide
  VH of XENP020071

SEQ ID NO: 10387 - protein, 5 aa, Artificial Sequence
  Description of Artificial Sequence: Synthetic peptide
  XENP020071 vhCDR1
SYTMH

SEQ ID NO: 10388 - protein, 17 aa, Artificial Sequence
  Description of Artificial Sequence: Synthetic peptide
  XENP020071 vhCDR2
FISYDGNHKYYADSVKG

SEQ ID NO: 10389 - protein, 9 aa, Artificial Sequence
  Description of Artificial Sequence: Synthetic peptide
  XENP020071 vhCDR3
TGHLGPFDL

SEQ ID NO: 10390 - protein, 215 aa, Artificial Sequence; identical to SEQ ID NO: 9080
  Description of Artificial Sequence: Synthetic polypeptide
  XENP020071 [CTLA-4]_H3.4_L0.12_Fab Light Chain

SEQ ID NO: 10391 - protein, 108 aa, Artificial Sequence; identical to SEQ ID NO: 6193
  Description of Artificial Sequence: Synthetic polypeptide
  VL of XENP020071

SEQ ID NO: 10392 - protein, 12 aa, Artificial Sequence
  Description of Artificial Sequence: Synthetic peptide
  XENP020071 vlCDR1
RASQSVGSSYLA

SEQ ID NO: 10393 - protein, 7 aa, Artificial Sequence
  Description of Artificial Sequence: Synthetic peptide
  XENP020071 vlCDR2
GAFSRAT

SEQ ID NO: 10394 - protein, 9 aa, Artificial Sequence
  Description of Artificial Sequence: Synthetic peptide
  XENP020071 vlCDR3
QQYGSSPWT

SEQ ID NO: 10395 - protein, 221 aa, Artificial Sequence
  Description of Artificial Sequence: Synthetic polypeptide
  XENP020072 [CTLA-4]_H3.5_L0.12_Fab Heavy Chain
EVQLVESGGGLVKPGGSLRLSCAASGFTFSSYTMHWVRQAPGKGLEWVSFISYDGNTKYYADSVKGRFTISRDNAKNSLYLQMNSLRAEDTAVYYCARTGHLGPFDLWGQGTMVTVSSASTKGPSVFPLAPSSKSTSGGTAALGCLVKDYFPEPVTVSWNSGALTSGVHTFPAVLQSSGLYSLSSVVTVPSSSLGTQTYICNVNHKPSNTKVDKKVEPKSC

SEQ ID NO: 10396 - protein, 118 aa, Artificial Sequence; identical to SEQ ID NO: 7146
  Description of Artificial Sequence: Synthetic polypeptide
  VH of XENP020072

SEQ ID NO: 10397 - protein, 5 aa, Artificial Sequence
  Description of Artificial Sequence: Synthetic peptide
  XENP020072 vhCDR1
SYTMH

SEQ ID NO: 10398 - protein, 17 aa, Artificial Sequence
  Description of Artificial Sequence: Synthetic peptide
  XENP020072 vhCDR2
FISYDGNTKYYADSVKG

SEQ ID NO: 10399 - protein, 9 aa, Artificial Sequence
  Description of Artificial Sequence: Synthetic peptide
  XENP020072 vhCDR3
TGHLGPFDL

SEQ ID NO: 10400 - protein, 215 aa, Artificial Sequence; identical to SEQ ID NO: 9080
  Description of Artificial Sequence: Synthetic polypeptide
  XENP020072 [CTLA-4]_H3.5_L0.12_Fab Light Chain

SEQ ID NO: 10401 - protein, 108 aa, Artificial Sequence; identical to SEQ ID NO: 6193
  Description of Artificial Sequence: Synthetic polypeptide
  VL of XENP020072

SEQ ID NO: 10402 - protein, 12 aa, Artificial Sequence
  Description of Artificial Sequence: Synthetic peptide
  XENP020072 vlCDR1
RASQSVGSSYLA

SEQ ID NO: 10403 - protein, 7 aa, Artificial Sequence
  Description of Artificial Sequence: Synthetic peptide
  XENP020072 vlCDR2
GAFSRAT

SEQ ID NO: 10404 - protein, 9 aa, Artificial Sequence
  Description of Artificial Sequence: Synthetic peptide
  XENP020072 vlCDR3
QQYGSSPWT

SEQ ID NO: 10405 - protein, 221 aa, Artificial Sequence
  Description of Artificial Sequence: Synthetic polypeptide
  XENP020073 [CTLA-4]_H3.6_L0.12_Fab Heavy Chain
EVQLVESGGGLVKPGGSLRLSCAASGFTFSSYTMHWVRQAPGKGLEWVSFISYDGNQKYYADSVKGRFTISRDNAKNSLYLQMNSLRAEDTAVYYCARTGHLGPFDLWGQGTMVTVSSASTKGPSVFPLAPSSKSTSGGTAALGCLVKDYFPEPVTVSWNSGALTSGVHTFPAVLQSSGLYSLSSVVTVPSSSLGTQTYICNVNHKPSNTKVDKKVEPKSC

SEQ ID NO: 10406 - protein, 118 aa, Artificial Sequence; identical to SEQ ID NO: 7155
  Description of Artificial Sequence: Synthetic polypeptide
  VH of XENP020073

SEQ ID NO: 10407 - protein, 5 aa, Artificial Sequence
  Description of Artificial Sequence: Synthetic peptide
  XENP020073 vhCDR1
SYTMH

SEQ ID NO: 10408 - protein, 17 aa, Artificial Sequence
  Description of Artificial Sequence: Synthetic peptide
  XENP020073 vhCDR2
FISYDGNQKYYADSVKG

SEQ ID NO: 10409 - protein, 9 aa, Artificial Sequence
  Description of Artificial Sequence: Synthetic peptide
  XENP020073 vhCDR3
TGHLGPFDL

SEQ ID NO: 10410 - protein, 215 aa, Artificial Sequence; identical to SEQ ID NO: 9080
  Description of Artificial Sequence: Synthetic polypeptide
  XENP020073 [CTLA-4]_H3.6_L0.12_Fab Light Chain

SEQ ID NO: 10411 - protein, 108 aa, Artificial Sequence; identical to SEQ ID NO: 6193
  Description of Artificial Sequence: Synthetic polypeptide
  VL of XENP020073

SEQ ID NO: 10412 - protein, 12 aa, Artificial Sequence
  Description of Artificial Sequence: Synthetic peptide
  XENP020073 vlCDR1
RASQSVGSSYLA

SEQ ID NO: 10413 - protein, 7 aa, Artificial Sequence
  Description of Artificial Sequence: Synthetic peptide
  XENP020073 vlCDR2
GAFSRAT

SEQ ID NO: 10414 - protein, 9 aa, Artificial Sequence
  Description of Artificial Sequence: Synthetic peptide
  XENP020073 vlCDR3
QQYGSSPWT

SEQ ID NO: 10415 - protein, 221 aa, Artificial Sequence
  Description of Artificial Sequence: Synthetic polypeptide
  XENP020074 [CTLA-4]_H3.7_L0.12_Fab Heavy Chain
EVQLVESGGGLVKPGGSLRLSCAASGFTFSSYTMHWVRQAPGKGLEWVCFISYDGNNKYYADSVKGRFTCSRDNAKNSLYLQMNSLRAEDTAVYYCARTGWLGPFDYWGQGTLVTVSSASTKGPSVFPLAPSSKSTSGGTAALGCLVKDYFPEPVTVSWNSGALTSGVHTFPAVLQSSGLYSLSSVVTVPSSSLGTQTYICNVNHKPSNTKVDKKVEPKSC

SEQ ID NO: 10416 - protein, 118 aa, Artificial Sequence; identical to SEQ ID NO: 7164
  Description of Artificial Sequence: Synthetic polypeptide
  VH of XENP020074

SEQ ID NO: 10417 - protein, 5 aa, Artificial Sequence
  Description of Artificial Sequence: Synthetic peptide
  XENP020074 vhCDR1
SYTMH

SEQ ID NO: 10418 - protein, 17 aa, Artificial Sequence
  Description of Artificial Sequence: Synthetic peptide
  XENP020074 vhCDR2
FISYDGNNKYYADSVKG

SEQ ID NO: 10419 - protein, 9 aa, Artificial Sequence
  Description of Artificial Sequence: Synthetic peptide
  XENP020074 vhCDR3
TGWLGPFDY

SEQ ID NO: 10420 - protein, 215 aa, Artificial Sequence; identical to SEQ ID NO: 9080
  Description of Artificial Sequence: Synthetic polypeptide
  XENP020074 [CTLA-4]_H3.7_L0.12_Fab Light Chain

SEQ ID NO: 10421 - protein, 108 aa, Artificial Sequence; identical to SEQ ID NO: 6193
  Description of Artificial Sequence: Synthetic polypeptide
  VL of XENP020074

SEQ ID NO: 10422 - protein, 12 aa, Artificial Sequence
  Description of Artificial Sequence: Synthetic peptide
  XENP020074 vlCDR1
RASQSVGSSYLA

SEQ ID NO: 10423 - protein, 7 aa, Artificial Sequence
  Description of Artificial Sequence: Synthetic peptide
  XENP020074 vlCDR2
GAFSRAT

SEQ ID NO: 10424 - protein, 9 aa, Artificial Sequence
  Description of Artificial Sequence: Synthetic peptide
  XENP020074 vlCDR3
QQYGSSPWT

SEQ ID NO: 10425 - protein, 221 aa, Artificial Sequence
  Description of Artificial Sequence: Synthetic polypeptide
  XENP020323 [CTLA-4]_H3.9_L0.12_Fab Heavy Chain
EVQLVESGGGLVKPGGSLRLSCAASGFTFSSYTMHWVRQAPGKGLEWVSFISYDGNYKYYADSVKGRFTISRDNAKNSLYLQMNSLRAEDTAVYYCARTGHLGPFDLWGQGTMVTVSSASTKGPSVFPLAPSSKSTSGGTAALGCLVKDYFPEPVTVSWNSGALTSGVHTFPAVLQSSGLYSLSSVVTVPSSSLGTQTYICNVNHKPSNTKVDKKVEPKSC

SEQ ID NO: 10426 - protein, 118 aa, Artificial Sequence; identical to SEQ ID NO: 7182
  Description of Artificial Sequence: Synthetic polypeptide
  VH of XENP020323

SEQ ID NO: 10427 - protein, 5 aa, Artificial Sequence
  Description of Artificial Sequence: Synthetic peptide
  XENP020323 vhCDR1
SYTMH

SEQ ID NO: 10428 - protein, 17 aa, Artificial Sequence
  Description of Artificial Sequence: Synthetic peptide
  XENP020323 vhCDR2
FISYDGNYKYYADSVKG

SEQ ID NO: 10429 - protein, 9 aa, Artificial Sequence
  Description of Artificial Sequence: Synthetic peptide
  XENP020323 vhCDR3
TGHLGPFDL

SEQ ID NO: 10430 - protein, 215 aa, Artificial Sequence; identical to SEQ ID NO: 9080
  Description of Artificial Sequence: Synthetic polypeptide
  XENP020323 [CTLA-4]_H3.9_L0.12_Fab Light Chain

SEQ ID NO: 10431 - protein, 108 aa, Artificial Sequence; identical to SEQ ID NO: 6193
  Description of Artificial Sequence: Synthetic polypeptide
  VL of XENP020323

SEQ ID NO: 10432 - protein, 12 aa, Artificial Sequence
  Description of Artificial Sequence: Synthetic peptide
  XENP020323 vlCDR1
RASQSVGSSYLA

SEQ ID NO: 10433 - protein, 7 aa, Artificial Sequence
  Description of Artificial Sequence: Synthetic peptide
  XENP020323 vlCDR2
GAFSRAT

SEQ ID NO: 10434 - protein, 9 aa, Artificial Sequence
  Description of Artificial Sequence: Synthetic peptide
  XENP020323 vlCDR3
QQYGSSPWT

SEQ ID NO: 10435 - protein, 221 aa, Artificial Sequence
  Description of Artificial Sequence: Synthetic polypeptide
  XENP020324 [CTLA-4]_H3.10_L0.12_Fab Heavy Chain
EVQLVESGGGLVKPGGSLRLSCAASGFTFSSYTMHWVRQAPGKGLEWVSFISYDGNYKYYADSVKGRFTISRDNAKNSLYLQMNSLRAEDTAVYYCARTGLLGPFDLWGQGTMVTVSSASTKGPSVFPLAPSSKSTSGGTAALGCLVKDYFPEPVTVSWNSGALTSGVHTFPAVLQSSGLYSLSSVVTVPSSSLGTQTYICNVNHKPSNTKVDKKVEPKSC

SEQ ID NO: 10436 - protein, 118 aa, Artificial Sequence; identical to SEQ ID NO: 7191
  Description of Artificial Sequence: Synthetic polypeptide
  VH of XENP020324

SEQ ID NO: 10437 - protein, 5 aa, Artificial Sequence
  Description of Artificial Sequence: Synthetic peptide
  XENP020324 vhCDR1
SYTMH

SEQ ID NO: 10438 - protein, 17 aa, Artificial Sequence
  Description of Artificial Sequence: Synthetic peptide
  XENP020324 vhCDR2
FISYDGNYKYYADSVKG

SEQ ID NO: 10439 - protein, 9 aa, Artificial Sequence
  Description of Artificial Sequence: Synthetic peptide
  XENP020324 vhCDR3
TGLLGPFDL

SEQ ID NO: 10440 - protein, 215 aa, Artificial Sequence; identical to SEQ ID NO: 9080
  Description of Artificial Sequence: Synthetic polypeptide
  XENP020324 [CTLA-4]_H3.10_L0.12_Fab Light Chain

SEQ ID NO: 10441 - protein, 108 aa, Artificial Sequence; identical to SEQ ID NO: 6193
  Description of Artificial Sequence: Synthetic polypeptide
  VL of XENP020324

SEQ ID NO: 10442 - protein, 12 aa, Artificial Sequence
  Description of Artificial Sequence: Synthetic peptide
  XENP020324 vlCDR1
RASQSVGSSYLA

SEQ ID NO: 10443 - protein, 7 aa, Artificial Sequence
  Description of Artificial Sequence: Synthetic peptide
  XENP020324 vlCDR2
GAFSRAT

SEQ ID NO: 10444 - protein, 9 aa, Artificial Sequence
  Description of Artificial Sequence: Synthetic peptide
  XENP020324 vlCDR3
QQYGSSPWT

SEQ ID NO: 10445 - protein, 221 aa, Artificial Sequence
  Description of Artificial Sequence: Synthetic polypeptide
  XENP020325 [CTLA-4]_H3.11_L0.12_Fab Heavy Chain
EVQLVESGGGLVKPGGSLRLSCAASGFTFSSYTMHWVRQAPGKGLEWVSFISYDGNHKYYADSVKGRFTISRDNAKNSLYLQMNSLRAEDTAVYYCARGGHLGPFDLWGQGTMVTVSSASTKGPSVFPLAPSSKSTSGGTAALGCLVKDYFPEPVTVSWNSGALTSGVHTFPAVLQSSGLYSLSSVVTVPSSSLGTQTYICNVNHKPSNTKVDKKVEPKSC

SEQ ID NO: 10446 - protein, 118 aa, Artificial Sequence; identical to SEQ ID NO: 7200
  Description of Artificial Sequence: Synthetic polypeptide
  VH of XENP020325

SEQ ID NO: 10447 - protein, 5 aa, Artificial Sequence
  Description of Artificial Sequence: Synthetic peptide
  XENP020325 vhCDR1
SYTMH

SEQ ID NO: 10448 - protein, 17 aa, Artificial Sequence
  Description of Artificial Sequence: Synthetic peptide
  XENP020325 vhCDR2
FISYDGNHKYYADSVKG

SEQ ID NO: 10449 - protein, 9 aa, Artificial Sequence
  Description of Artificial Sequence: Synthetic peptide
  XENP020325 vhCDR3
GGHLGPFDL

SEQ ID NO: 10450 - protein, 215 aa, Artificial Sequence; identical to SEQ ID NO: 9080
  Description of Artificial Sequence: Synthetic polypeptide
  XENP020325 [CTLA-4]_H3.11_L0.12_Fab Light Chain

SEQ ID NO: 10451 - protein, 108 aa, Artificial Sequence; identical to SEQ ID NO: 6193
  Description of Artificial Sequence: Synthetic polypeptide
  VL of XENP020325

SEQ ID NO: 10452 - protein, 12 aa, Artificial Sequence
  Description of Artificial Sequence: Synthetic peptide
  XENP020325 vlCDR1
RASQSVGSSYLA

SEQ ID NO: 10453 - protein, 7 aa, Artificial Sequence
  Description of Artificial Sequence: Synthetic peptide
  XENP020325 vlCDR2
GAFSRAT

SEQ ID NO: 10454 - protein, 9 aa, Artificial Sequence
  Description of Artificial Sequence: Synthetic peptide
  XENP020325 vlCDR3
QQYGSSPWT

SEQ ID NO: 10455 - protein, 221 aa, Artificial Sequence
  Description of Artificial Sequence: Synthetic polypeptide
  XENP020326 [CTLA-4]_H3.12_L0.12_Fab Heavy Chain
EVQLVESGGGLVKPGGSLRLSCAASGFTFSSYTMHWVRQAPGKGLEWVSFISYDGNHKYYADSVKGRFTISRDNAKNSLYLQMNSLRAEDTAVYYCARTSHLGPFDLWGQGTMVTVSSASTKGPSVFPLAPSSKSTSGGTAALGCLVKDYFPEPVTVSWNSGALTSGVHTFPAVLQSSGLYSLSSVVTVPSSSLGTQTYICNVNHKPSNTKVDKKVEPKSC

SEQ ID NO: 10456 - protein, 118 aa, Artificial Sequence; identical to SEQ ID NO: 7209
  Description of Artificial Sequence: Synthetic polypeptide
  VH of XENP020326

SEQ ID NO: 10457 - protein, 5 aa, Artificial Sequence
  Description of Artificial Sequence: Synthetic peptide
  XENP020326 vhCDR1
SYTMH

SEQ ID NO: 10458 - protein, 17 aa, Artificial Sequence
  Description of Artificial Sequence: Synthetic peptide
  XENP020326 vhCDR2
FISYDGNHKYYADSVKG

SEQ ID NO: 10459 - protein, 9 aa, Artificial Sequence
  Description of Artificial Sequence: Synthetic peptide
  XENP020326 vhCDR3
TSHLGPFDL

SEQ ID NO: 10460 - protein, 215 aa, Artificial Sequence; identical to SEQ ID NO: 9080
  Description of Artificial Sequence: Synthetic polypeptide
  XENP020326 [CTLA-4]_H3.12_L0.12_Fab Light Chain

SEQ ID NO: 10461 - protein, 108 aa, Artificial Sequence; identical to SEQ ID NO: 6193
  Description of Artificial Sequence: Synthetic polypeptide
  VL of XENP020326

SEQ ID NO: 10462 - protein, 12 aa, Artificial Sequence
  Description of Artificial Sequence: Synthetic peptide
  XENP020326 vlCDR1
RASQSVGSSYLA

SEQ ID NO: 10463 - protein, 7 aa, Artificial Sequence
  Description of Artificial Sequence: Synthetic peptide
  XENP020326 vlCDR2
GAFSRAT

SEQ ID NO: 10464 - protein, 9 aa, Artificial Sequence
  Description of Artificial Sequence: Synthetic peptide
  XENP020326 vlCDR3
QQYGSSPWT

SEQ ID NO: 10465 - protein, 221 aa, Artificial Sequence
  Description of Artificial Sequence: Synthetic polypeptide
  XENP020327 [CTLA-4]_H3.13_L0.12_Fab Heavy Chain
EVQLVESGGGLVKPGGSLRLSCAASGFTFSSYTMHWVRQAPGKGLEWVSFISYDGNHKYYADSVKGRFTISRDNAKNSLYLQMNSLRAEDTAVYYCARGGLLGPFDLWGQGTMVTVSSASTKGPSVFPLAPSSKSTSGGTAALGCLVKDYFPEPVTVSWNSGALTSGVHTFPAVLQSSGLYSLSSVVTVPSSSLGTQTYICNVNHKPSNTKVDKKVEPKSC

SEQ ID NO: 10466 - protein, 118 aa, Artificial Sequence; identical to SEQ ID NO: 7218
  Description of Artificial Sequence: Synthetic polypeptide
  VH of XENP020327

SEQ ID NO: 10467 - protein, 5 aa, Artificial Sequence
  Description of Artificial Sequence: Synthetic peptide
  XENP020327 vhCDR1
SYTMH

SEQ ID NO: 10468 - protein, 17 aa, Artificial Sequence
  Description of Artificial Sequence: Synthetic peptide
  XENP020327 vhCDR2
FISYDGNHKYYADSVKG

SEQ ID NO: 10469 - protein, 9 aa, Artificial Sequence
  Description of Artificial Sequence: Synthetic peptide
  XENP020327 vhCDR3
GGLLGPFDL

SEQ ID NO: 10470 - protein, 215 aa, Artificial Sequence; identical to SEQ ID NO: 9080
  Description of Artificial Sequence: Synthetic polypeptide
  XENP020327 [CTLA-4]_H3.13_L0.12_Fab Light Chain

SEQ ID NO: 10471 - protein, 108 aa, Artificial Sequence; identical to SEQ ID NO: 6193
  Description of Artificial Sequence: Synthetic polypeptide
  VL of XENP020327

SEQ ID NO: 10472 - protein, 12 aa, Artificial Sequence
  Description of Artificial Sequence: Synthetic peptide
  XENP020327 vlCDR1
RASQSVGSSYLA

SEQ ID NO: 10473 - protein, 7 aa, Artificial Sequence
  Description of Artificial Sequence: Synthetic peptide
  XENP020327 vlCDR2
GAFSRAT

SEQ ID NO: 10474 - protein, 9 aa, Artificial Sequence
  Description of Artificial Sequence: Synthetic peptide
  XENP020327 vlCDR3
QQYGSSPWT

SEQ ID NO: 10475 - protein, 221 aa, Artificial Sequence
  Description of Artificial Sequence: Synthetic polypeptide
  XENP020328 [CTLA-4]_H3.14_L0.12_Fab Heavy Chain
EVQLVESGGGLVKPGGSLRLSCAASGFTFSSYTMHWVRQAPGKGLEWVSFISYDGNHKYYADSVKGRFTISRDNAKNSLYLQMNSLRAEDTAVYYCARTSLLGPFDLWGQGTMVTVSSASTKGPSVFPLAPSSKSTSGGTAALGCLVKDYFPEPVTVSWNSGALTSGVHTFPAVLQSSGLYSLSSVVTVPSSSLGTQTYICNVNHKPSNTKVDKKVEPKSC

SEQ ID NO: 10476 - protein, 118 aa, Artificial Sequence; identical to SEQ ID NO: 7227
  Description of Artificial Sequence: Synthetic polypeptide
  VH of XENP020328

SEQ ID NO: 10477 - protein, 5 aa, Artificial Sequence
  Description of Artificial Sequence: Synthetic peptide
  XENP020328 vhCDR1
SYTMH

SEQ ID NO: 10478 - protein, 17 aa, Artificial Sequence
  Description of Artificial Sequence: Synthetic peptide
  XENP020328 vhCDR2
FISYDGNHKYYADSVKG

SEQ ID NO: 10479 - protein, 9 aa, Artificial Sequence
  Description of Artificial Sequence: Synthetic peptide
  XENP020328 vhCDR3
TSLLGPFDL

SEQ ID NO: 10480 - protein, 215 aa, Artificial Sequence; identical to SEQ ID NO: 9080
  Description of Artificial Sequence: Synthetic polypeptide
  XENP020328 [CTLA-4]_H3.14_L0.12_Fab Light Chain

SEQ ID NO: 10481 - protein, 108 aa, Artificial Sequence; identical to SEQ ID NO: 6193
  Description of Artificial Sequence: Synthetic polypeptide
  VL of XENP020328

SEQ ID NO: 10482 - protein, 12 aa, Artificial Sequence
  Description of Artificial Sequence: Synthetic peptide
  XENP020328 vlCDR1
RASQSVGSSYLA

SEQ ID NO: 10483 - protein, 7 aa, Artificial Sequence
  Description of Artificial Sequence: Synthetic peptide
  XENP020328 vlCDR2
GAFSRAT

SEQ ID NO: 10484 - protein, 9 aa, Artificial Sequence
  Description of Artificial Sequence: Synthetic peptide
  XENP020328 vlCDR3
QQYGSSPWT

SEQ ID NO: 10485 - protein, 221 aa, Artificial Sequence
  Description of Artificial Sequence: Synthetic polypeptide
  XENP020329 [CTLA-4]_H3.15_L0.12_Fab Heavy Chain
EVQLVESGGGLVKPGGSLRLSCAASGFTFSSYTMHWVRQAPGKGLEWVSFISYDGNQKYYADSVKGRFTISRDNAKNSLYLQMNSLRAEDTAVYYCARGGHLGPFDLWGQGTMVTVSSASTKGPSVFPLAPSSKSTSGGTAALGCLVKDYFPEPVTVSWNSGALTSGVHTFPAVLQSSGLYSLSSVVTVPSSSLGTQTYICNVNHKPSNTKVDKKVEPKSC

SEQ ID NO: 10486 - protein, 118 aa, Artificial Sequence; identical to SEQ ID NO: 7236
  Description of Artificial Sequence: Synthetic polypeptide
  VH of XENP020329

SEQ ID NO: 10487 - protein, 5 aa, Artificial Sequence
  Description of Artificial Sequence: Synthetic peptide
  XENP020329 vhCDR1
SYTMH

SEQ ID NO: 10488 - protein, 17 aa, Artificial Sequence
  Description of Artificial Sequence: Synthetic peptide
  XENP020329 vhCDR2
FISYDGNQKYYADSVKG

SEQ ID NO: 10489 - protein, 9 aa, Artificial Sequence
  Description of Artificial Sequence: Synthetic peptide
  XENP020329 vhCDR3
GGHLGPFDL

SEQ ID NO: 10490 - protein, 215 aa, Artificial Sequence; identical to SEQ ID NO: 9080
  Description of Artificial Sequence: Synthetic polypeptide
  XENP020329 [CTLA-4]_H3.15_L0.12_Fab Light Chain

SEQ ID NO: 10491 - protein, 108 aa, Artificial Sequence; identical to SEQ ID NO: 6193
  Description of Artificial Sequence: Synthetic polypeptide
  VL of XENP020329

SEQ ID NO: 10492 - protein, 12 aa, Artificial Sequence
  Description of Artificial Sequence: Synthetic peptide
  XENP020329 vlCDR1
RASQSVGSSYLA

SEQ ID NO: 10493 - protein, 7 aa, Artificial Sequence
  Description of Artificial Sequence: Synthetic peptide
  XENP020329 vlCDR2
GAFSRAT

SEQ ID NO: 10494 - protein, 9 aa, Artificial Sequence
  Description of Artificial Sequence: Synthetic peptide
  XENP020329 vlCDR3
QQYGSSPWT

SEQ ID NO: 10495 - protein, 221 aa, Artificial Sequence
  Description of Artificial Sequence: Synthetic polypeptide
  XENP020330 [CTLA-4]_H3.16_L0.12_Fab Heavy Chain
EVQLVESGGGLVKPGGSLRLSCAASGFTFSSYTMHWVRQAPGKGLEWVSFISYDGNQKYYADSVKGRFTISRDNAKNSLYLQMNSLRAEDTAVYYCARTSHLGPFDLWGQGTMVTVSSASTKGPSVFPLAPSSKSTSGGTAALGCLVKDYFPEPVTVSWNSGALTSGVHTFPAVLQSSGLYSLSSVVTVPSSSLGTQTYICNVNHKPSNTKVDKKVEPKSC

SEQ ID NO: 10496 - protein, 118 aa, Artificial Sequence; identical to SEQ ID NO: 7245
  Description of Artificial Sequence: Synthetic polypeptide
  VH of XENP020330

SEQ ID NO: 10497 - protein, 5 aa, Artificial Sequence
  Description of Artificial Sequence: Synthetic peptide
  XENP020330 vhCDR1
SYTMH

SEQ ID NO: 10498 - protein, 17 aa, Artificial Sequence
  Description of Artificial Sequence: Synthetic peptide
  XENP020330 vhCDR2
FISYDGNQKYYADSVKG

SEQ ID NO: 10499 - protein, 9 aa, Artificial Sequence
  Description of Artificial Sequence: Synthetic peptide
  XENP020330 vhCDR3
TSHLGPFDL

SEQ ID NO: 10500 - protein, 215 aa, Artificial Sequence; identical to SEQ ID NO: 9080
  Description of Artificial Sequence: Synthetic polypeptide
  XENP020330 [CTLA-4]_H3.16_L0.12_Fab Light Chain

SEQ ID NO: 10501 - protein, 108 aa, Artificial Sequence; identical to SEQ ID NO: 6193
  Description of Artificial Sequence: Synthetic polypeptide
  VL of XENP020330

SEQ ID NO: 10502 - protein, 12 aa, Artificial Sequence
  Description of Artificial Sequence: Synthetic peptide
  XENP020330 vlCDR1
RASQSVGSSYLA

SEQ ID NO: 10503 - protein, 7 aa, Artificial Sequence
  Description of Artificial Sequence: Synthetic peptide
  XENP020330 vlCDR2
GAFSRAT

SEQ ID NO: 10504 - protein, 9 aa, Artificial Sequence
  Description of Artificial Sequence: Synthetic peptide
  XENP020330 vlCDR3
QQYGSSPWT

SEQ ID NO: 10505 - protein, 221 aa, Artificial Sequence
  Description of Artificial Sequence: Synthetic polypeptide
  XENP020331 [CTLA-4]_H3.17_L0.12_Fab Heavy Chain
EVQLVESGGGLVKPGGSLRLSCAASGFTFSSYTMHWVRQAPGKGLEWVSFISYDGNQKYYADSVKGRFTISRDNAKNSLYLQMNSLRAEDTAVYYCARGGLLGPFDLWGQGTMVTVSSASTKGPSVFPLAPSSKSTSGGTAALGCLVKDYFPEPVTVSWNSGALTSGVHTFPAVLQSSGLYSLSSVVTVPSSSLGTQTYICNVNHKPSNTKVDKKVEPKSC

SEQ ID NO: 10506 - protein, 118 aa, Artificial Sequence; identical to SEQ ID NO: 7254
  Description of Artificial Sequence: Synthetic polypeptide
  VH of XENP020331

SEQ ID NO: 10507 - protein, 5 aa, Artificial Sequence
  Description of Artificial Sequence: Synthetic peptide
  XENP020331 vhCDR1
SYTMH

SEQ ID NO: 10508 - protein, 17 aa, Artificial Sequence
  Description of Artificial Sequence: Synthetic peptide
  XENP020331 vhCDR2
FISYDGNQKYYADSVKG

SEQ ID NO: 10509 - protein, 9 aa, Artificial Sequence
  Description of Artificial Sequence: Synthetic peptide
  XENP020331 vhCDR3
GGLLGPFDL

SEQ ID NO: 10510 - protein, 215 aa, Artificial Sequence; identical to SEQ ID NO: 9080
  Description of Artificial Sequence: Synthetic polypeptide
  XENP020331 [CTLA-4]_H3.17_L0.12_Fab Light Chain

SEQ ID NO: 10511 - protein, 108 aa, Artificial Sequence; identical to SEQ ID NO: 6193
  Description of Artificial Sequence: Synthetic polypeptide
  VL of XENP020331

SEQ ID NO: 10512 - protein, 12 aa, Artificial Sequence
  Description of Artificial Sequence: Synthetic peptide
  XENP020331 vlCDR1
RASQSVGSSYLA

SEQ ID NO: 10513 - protein, 7 aa, Artificial Sequence
  Description of Artificial Sequence: Synthetic peptide
  XENP020331 vlCDR2
GAFSRAT

SEQ ID NO: 10514 - protein, 9 aa, Artificial Sequence
  Description of Artificial Sequence: Synthetic peptide
  XENP020331 vlCDR3
QQYGSSPWT

SEQ ID NO: 10515 - protein, 221 aa, Artificial Sequence
  Description of Artificial Sequence: Synthetic polypeptide
  XENP020332 [CTLA-4]_H3.18_L0.12_Fab Heavy Chain
EVQLVESGGGLVKPGGSLRLSCAASGFTFSSYTMHWVRQAPGKGLEWVSFISYDGNQKYYADSVKGRFTISRDNAKNSLYLQMNSLRAEDTAVYYCARTSLLGPFDLWGQGTMVTVSSASTKGPSVFPLAPSSKSTSGGTAALGCLVKDYFPEPVTVSWNSGALTSGVHTFPAVLQSSGLYSLSSVVTVPSSSLGTQTYICNVNHKPSNTKVDKKVEPKSC

SEQ ID NO: 10516 - protein, 118 aa, Artificial Sequence; identical to SEQ ID NO: 7263
  Description of Artificial Sequence: Synthetic polypeptide
  VH of XENP020332

SEQ ID NO: 10517 - protein, 5 aa, Artificial Sequence
  Description of Artificial Sequence: Synthetic peptide
  XENP020332 vhCDR1
SYTMH

SEQ ID NO: 10518 - protein, 17 aa, Artificial Sequence
  Description of Artificial Sequence: Synthetic peptide
  XENP020332 vhCDR2
FISYDGNQKYYADSVKG

SEQ ID NO: 10519 - protein, 9 aa, Artificial Sequence
  Description of Artificial Sequence: Synthetic peptide
  XENP020332 vhCDR3
TSLLGPFDL

SEQ ID NO: 10520 - protein, 215 aa, Artificial Sequence; identical to SEQ ID NO: 9080
  Description of Artificial Sequence: Synthetic polypeptide
  XENP020332 [CTLA-4]_H3.18_L0.12_Fab Light Chain

SEQ ID NO: 10521 - protein, 108 aa, Artificial Sequence; identical to SEQ ID NO: 6193
  Description of Artificial Sequence: Synthetic polypeptide
  VL of XENP020332

SEQ ID NO: 10522 - protein, 12 aa, Artificial Sequence
  Description of Artificial Sequence: Synthetic peptide
  XENP020332 vlCDR1
RASQSVGSSYLA

SEQ ID NO: 10523 - protein, 7 aa, Artificial Sequence
  Description of Artificial Sequence: Synthetic peptide
  XENP020332 vlCDR2
GAFSRAT

SEQ ID NO: 10524 - protein, 9 aa, Artificial Sequence
  Description of Artificial Sequence: Synthetic peptide
  XENP020332 vlCDR3
QQYGSSPWT

SEQ ID NO: 10525 - protein, 221 aa, Artificial Sequence
  Description of Artificial Sequence: Synthetic polypeptide
  XENP020333 [CTLA-4]_H3.19_L0.12_Fab Heavy Chain
EVQLVESGGGLVKPGGSLRLSCAASGFTFSSYTMHWVRQAPGKGLEWVSFISYDGNTKYYADSVKGRFTISRDNAKNSLYLQMNSLRAEDTAVYYCARGGHLGPFDLWGQGTMVTVSSASTKGPSVFPLAPSSKSTSGGTAALGCLVKDYFPEPVTVSWNSGALTSGVHTFPAVLQSSGLYSLSSVVTVPSSSLGTQTYICNVNHKPSNTKVDKKVEPKSC

SEQ ID NO: 10526 - protein, 118 aa, Artificial Sequence; identical to SEQ ID NO: 7272
  Description of Artificial Sequence: Synthetic polypeptide
  VH of XENP020333

SEQ ID NO: 10527 - protein, 5 aa, Artificial Sequence
  Description of Artificial Sequence: Synthetic peptide
  XENP020333 vhCDR1
SYTMH

SEQ ID NO: 10528 - protein, 17 aa, Artificial Sequence
  Description of Artificial Sequence: Synthetic peptide
  XENP020333 vhCDR2
FISYDGNTKYYADSVKG

SEQ ID NO: 10529 - protein, 9 aa, Artificial Sequence
  Description of Artificial Sequence: Synthetic peptide
  XENP020333 vhCDR3
GGHLGPFDL

SEQ ID NO: 10530 - protein, 215 aa, Artificial Sequence; identical to SEQ ID NO: 9080
  Description of Artificial Sequence: Synthetic polypeptide
  XENP020333 [CTLA-4]_H3.19_L0.12_Fab Light Chain

SEQ ID NO: 10531 - protein, 108 aa, Artificial Sequence; identical to SEQ ID NO: 6193
  Description of Artificial Sequence: Synthetic polypeptide
  VL of XENP020333

SEQ ID NO: 10532 - protein, 12 aa, Artificial Sequence
  Description of Artificial Sequence: Synthetic peptide
  XENP020333 vlCDR1
RASQSVGSSYLA

SEQ ID NO: 10533 - protein, 7 aa, Artificial Sequence
  Description of Artificial Sequence: Synthetic peptide
  XENP020333 vlCDR2
GAFSRAT

SEQ ID NO: 10534 - protein, 9 aa, Artificial Sequence
  Description of Artificial Sequence: Synthetic peptide
  XENP020333 vlCDR3
QQYGSSPWT

SEQ ID NO: 10535 - protein, 221 aa, Artificial Sequence
  Description of Artificial Sequence: Synthetic polypeptide
  XENP020334 [CTLA-4]_H3.20_L0.12_Fab Heavy Chain
EVQLVESGGGLVKPGGSLRLSCAASGFTFSSYTMHWVRQAPGKGLEWVSFISYDGNTKYYADSVKGRFTISRDNAKNSLYLQMNSLRAEDTAVYYCARTSHLGPFDLWGQGTMVTVSSASTKGPSVFPLAPSSKSTSGGTAALGCLVKDYFPEPVTVSWNSGALTSGVHTFPAVLQSSGLYSLSSVVTVPSSSLGTQTYICNVNHKPSNTKVDKKVEPKSC

SEQ ID NO: 10536 - protein, 118 aa, Artificial Sequence; identical to SEQ ID NO: 7281
  Description of Artificial Sequence: Synthetic polypeptide
  VH of XENP020334

SEQ ID NO: 10537 - protein, 5 aa, Artificial Sequence
  Description of Artificial Sequence: Synthetic peptide
  XENP020334 vhCDR1
SYTMH

SEQ ID NO: 10538 - protein, 17 aa, Artificial Sequence
  Description of Artificial Sequence: Synthetic peptide
  XENP020334 vhCDR2
FISYDGNTKYYADSVKG

SEQ ID NO: 10539 - protein, 9 aa, Artificial Sequence
  Description of Artificial Sequence: Synthetic peptide
  XENP020334 vhCDR3
TSHLGPFDL

SEQ ID NO: 10540 - protein, 215 aa, Artificial Sequence; identical to SEQ ID NO: 9080
  Description of Artificial Sequence: Synthetic polypeptide
  XENP020334 [CTLA-4]_H3.20_L0.12_Fab Light Chain

SEQ ID NO: 10541 - protein, 108 aa, Artificial Sequence; identical to SEQ ID NO: 6193
  Description of Artificial Sequence: Synthetic polypeptide
  VL of XENP020334

SEQ ID NO: 10542 - protein, 12 aa, Artificial Sequence
  Description of Artificial Sequence: Synthetic peptide
  XENP020334 vlCDR1
RASQSVGSSYLA

SEQ ID NO: 10543 - protein, 7 aa, Artificial Sequence
  Description of Artificial Sequence: Synthetic peptide
  XENP020334 vlCDR2
GAFSRAT

SEQ ID NO: 10544 - protein, 9 aa, Artificial Sequence
  Description of Artificial Sequence: Synthetic peptide
  XENP020334 vlCDR3
QQYGSSPWT

SEQ ID NO: 10545 - protein, 221 aa, Artificial Sequence
  Description of Artificial Sequence: Synthetic polypeptide
  XENP020335 [CTLA-4]_H3.21_L0.12_Fab Heavy Chain
EVQLVESGGGLVKPGGSLRLSCAASGFTFSSYTMHWVRQAPGKGLEWVSFISYDGNTKYYADSVKGRFTISRDNAKNSLYLQMNSLRAEDTAVYYCARGGLLGPFDLWGQGTMVTVSSASTKGPSVFPLAPSSKSTSGGTAALGCLVKDYFPEPVTVSWNSGALTSGVHTFPAVLQSSGLYSLSSVVTVPSSSLGTQTYICNVNHKPSNTKVDKKVEPKSC

SEQ ID NO: 10546 - protein, 118 aa, Artificial Sequence; identical to SEQ ID NO: 7290
  Description of Artificial Sequence: Synthetic polypeptide
  VH of XENP020335

SEQ ID NO: 10547 - protein, 5 aa, Artificial Sequence
  Description of Artificial Sequence: Synthetic peptide
  XENP020335 vhCDR1
SYTMH

SEQ ID NO: 10548 - protein, 17 aa, Artificial Sequence
  Description of Artificial Sequence: Synthetic peptide
  XENP020335 vhCDR2
FISYDGNTKYYADSVKG

SEQ ID NO: 10549 - protein, 9 aa, Artificial Sequence
  Description of Artificial Sequence: Synthetic peptide
  XENP020335 vhCDR3
GGLLGPFDL

SEQ ID NO: 10550 - protein, 215 aa, Artificial Sequence; identical to SEQ ID NO: 9080
  Description of Artificial Sequence: Synthetic polypeptide
  XENP020335 [CTLA-4]_H3.21_L0.12_Fab Light Chain

SEQ ID NO: 10551 - protein, 108 aa, Artificial Sequence; identical to SEQ ID NO: 6193
  Description of Artificial Sequence: Synthetic polypeptide
  VL of XENP020335

SEQ ID NO: 10552 - protein, 12 aa, Artificial Sequence
  Description of Artificial Sequence: Synthetic peptide
  XENP020335 vlCDR1
RASQSVGSSYLA

SEQ ID NO: 10553 - protein, 7 aa, Artificial Sequence
  Description of Artificial Sequence: Synthetic peptide
  XENP020335 vlCDR2
GAFSRAT

SEQ ID NO: 10554 - protein, 9 aa, Artificial Sequence
  Description of Artificial Sequence: Synthetic peptide
  XENP020335 vlCDR3
QQYGSSPWT

SEQ ID NO: 10555 - protein, 221 aa, Artificial Sequence
  Description of Artificial Sequence: Synthetic polypeptide
  XENP020336 [CTLA-4]_H3.22_L0.12_Fab Heavy Chain
EVQLVESGGGLVKPGGSLRLSCAASGFTFSSYTMHWVRQAPGKGLEWVSFISYDGNTKYYADSVKGRFTISRDNAKNSLYLQMNSLRAEDTAVYYCARTSLLGPFDLWGQGTMVTVSSASTKGPSVFPLAPSSKSTSGGTAALGCLVKDYFPEPVTVSWNSGALTSGVHTFPAVLQSSGLYSLSSVVTVPSSSLGTQTYICNVNHKPSNTKVDKKVEPKSC

SEQ ID NO: 10556 - protein, 118 aa, Artificial Sequence; identical to SEQ ID NO: 7299
  Description of Artificial Sequence: Synthetic polypeptide
  VH of XENP020336

SEQ ID NO: 10557 - protein, 5 aa, Artificial Sequence
  Description of Artificial Sequence: Synthetic peptide
  XENP020336 vhCDR1
SYTMH

SEQ ID NO: 10558 - protein, 17 aa, Artificial Sequence
  Description of Artificial Sequence: Synthetic peptide
  XENP020336 vhCDR2
FISYDGNTKYYADSVKG

SEQ ID NO: 10559 - protein, 9 aa, Artificial Sequence
  Description of Artificial Sequence: Synthetic peptide
  XENP020336 vhCDR3
TSLLGPFDL

SEQ ID NO: 10560 - protein, 215 aa, Artificial Sequence; identical to SEQ ID NO: 9080
  Description of Artificial Sequence: Synthetic polypeptide
  XENP020336 [CTLA-4]_H3.22_L0.12_Fab Light Chain

SEQ ID NO: 10561 - protein, 108 aa, Artificial Sequence; identical to SEQ ID NO: 6193
  Description of Artificial Sequence: Synthetic polypeptide
  VL of XENP020336

SEQ ID NO: 10562 - protein, 12 aa, Artificial Sequence
  Description of Artificial Sequence: Synthetic peptide
  XENP020336 vlCDR1
RASQSVGSSYLA

SEQ ID NO: 10563 - protein, 7 aa, Artificial Sequence
  Description of Artificial Sequence: Synthetic peptide
  XENP020336 vlCDR2
GAFSRAT

SEQ ID NO: 10564 - protein, 9 aa, Artificial Sequence
  Description of Artificial Sequence: Synthetic peptide
  XENP020336 vlCDR3
QQYGSSPWT

SEQ ID NO: 10565 - protein, 221 aa, Artificial Sequence
  Description of Artificial Sequence: Synthetic polypeptide
  XENP020337 [CTLA-4]_H3.23_L0.12_Fab Heavy Chain
EVQLVESGGGLVKPGGSLRLSCAASGFTFSSYTMHWVRQAPGKGLEWVSFISYDGNYKYYADSVKGRFTISRDNAKNSLYLQMNSLRAEDTAVYYCARGGHLGPFDLWGQGTMVTVSSASTKGPSVFPLAPSSKSTSGGTAALGCLVKDYFPEPVTVSWNSGALTSGVHTFPAVLQSSGLYSLSSVVTVPSSSLGTQTYICNVNHKPSNTKVDKKVEPKSC

SEQ ID NO: 10566 - protein, 118 aa, Artificial Sequence; identical to SEQ ID NO: 2395
  Description of Artificial Sequence: Synthetic polypeptide
  VH of XENP020337

SEQ ID NO: 10567 - protein, 5 aa, Artificial Sequence
  Description of Artificial Sequence: Synthetic peptide
  XENP020337 vhCDR1
SYTMH

SEQ ID NO: 10568 - protein, 17 aa, Artificial Sequence
  Description of Artificial Sequence: Synthetic peptide
  XENP020337 vhCDR2
FISYDGNYKYYADSVKG

SEQ ID NO: 10569 - protein, 9 aa, Artificial Sequence
  Description of Artificial Sequence: Synthetic peptide
  XENP020337 vhCDR3
GGHLGPFDL

SEQ ID NO: 10570 - protein, 215 aa, Artificial Sequence; identical to SEQ ID NO: 9080
  Description of Artificial Sequence: Synthetic polypeptide
  XENP020337 [CTLA-4]_H3.23_L0.12_Fab Light Chain

SEQ ID NO: 10571 - protein, 108 aa, Artificial Sequence; identical to SEQ ID NO: 6193
  Description of Artificial Sequence: Synthetic polypeptide
  VL of XENP020337

SEQ ID NO: 10572 - protein, 12 aa, Artificial Sequence
  Description of Artificial Sequence: Synthetic peptide
  XENP020337 vlCDR1
RASQSVGSSYLA

SEQ ID NO: 10573 - protein, 7 aa, Artificial Sequence
  Description of Artificial Sequence: Synthetic peptide
  XENP020337 vlCDR2
GAFSRAT

SEQ ID NO: 10574 - protein, 9 aa, Artificial Sequence
  Description of Artificial Sequence: Synthetic peptide
  XENP020337 vlCDR3
QQYGSSPWT

SEQ ID NO: 10575 - protein, 221 aa, Artificial Sequence
  Description of Artificial Sequence: Synthetic polypeptide
  XENP020338 [CTLA-4]_H3.24_L0.12_Fab Heavy Chain
EVQLVESGGGLVKPGGSLRLSCAASGFTFSSYTMHWVRQAPGKGLEWVSFISYDGNYKYYADSVKGRFTISRDNAKNSLYLQMNSLRAEDTAVYYCARTSHLGPFDLWGQGTMVTVSSASTKGPSVFPLAPSSKSTSGGTAALGCLVKDYFPEPVTVSWNSGALTSGVHTFPAVLQSSGLYSLSSVVTVPSSSLGTQTYICNVNHKPSNTKVDKKVEPKSC

SEQ ID NO: 10576 - protein, 118 aa, Artificial Sequence; identical to SEQ ID NO: 7317
  Description of Artificial Sequence: Synthetic polypeptide
  VH of XENP020338

SEQ ID NO: 10577 - protein, 5 aa, Artificial Sequence
  Description of Artificial Sequence: Synthetic peptide
  XENP020338 vhCDR1
SYTMH

SEQ ID NO: 10578 - protein, 17 aa, Artificial Sequence
  Description of Artificial Sequence: Synthetic peptide
  XENP020338 vhCDR2
FISYDGNYKYYADSVKG

SEQ ID NO: 10579 - protein, 9 aa, Artificial Sequence
  Description of Artificial Sequence: Synthetic peptide
  XENP020338 vhCDR3
TSHLGPFDL

SEQ ID NO: 10580 - protein, 215 aa, Artificial Sequence; identical to SEQ ID NO: 9080
  Description of Artificial Sequence: Synthetic polypeptide
  XENP020338 [CTLA-4]_H3.24_L0.12_Fab Light Chain

SEQ ID NO: 10581 - protein, 108 aa, Artificial Sequence; identical to SEQ ID NO: 6193
  Description of Artificial Sequence: Synthetic polypeptide
  VL of XENP020338

SEQ ID NO: 10582 - protein, 12 aa, Artificial Sequence
  Description of Artificial Sequence: Synthetic peptide
  XENP020338 vlCDR1
RASQSVGSSYLA

SEQ ID NO: 10583 - protein, 7 aa, Artificial Sequence
  Description of Artificial Sequence: Synthetic peptide
  XENP020338 vlCDR2
GAFSRAT

SEQ ID NO: 10584 - protein, 9 aa, Artificial Sequence
  Description of Artificial Sequence: Synthetic peptide
  XENP020338 vlCDR3
QQYGSSPWT

SEQ ID NO: 10585 - protein, 221 aa, Artificial Sequence
  Description of Artificial Sequence: Synthetic polypeptide
  XENP020339 [CTLA-4]_H3.25_L0.12_Fab Heavy Chain
EVQLVESGGGLVKPGGSLRLSCAASGFTFSSYTMHWVRQAPGKGLEWVSFISYDGNYKYYADSVKGRFTISRDNAKNSLYLQMNSLRAEDTAVYYCARGGLLGPFDLWGQGTMVTVSSASTKGPSVFPLAPSSKSTSGGTAALGCLVKDYFPEPVTVSWNSGALTSGVHTFPAVLQSSGLYSLSSVVTVPSSSLGTQTYICNVNHKPSNTKVDKKVEPKSC

SEQ ID NO: 10586 - protein, 118 aa, Artificial Sequence; identical to SEQ ID NO: 7326
  Description of Artificial Sequence: Synthetic polypeptide
  VH of XENP020339

SEQ ID NO: 10587 - protein, 5 aa, Artificial Sequence
  Description of Artificial Sequence: Synthetic peptide
  XENP020339 vhCDR1
SYTMH

SEQ ID NO: 10588 - protein, 17 aa, Artificial Sequence
  Description of Artificial Sequence: Synthetic peptide
  XENP020339 vhCDR2
FISYDGNYKYYADSVKG

SEQ ID NO: 10589 - protein, 9 aa, Artificial Sequence
  Description of Artificial Sequence: Synthetic peptide
  XENP020339 vhCDR3
GGLLGPFDL

SEQ ID NO: 10590 - protein, 215 aa, Artificial Sequence; identical to SEQ ID NO: 9080
  Description of Artificial Sequence: Synthetic polypeptide
  XENP020339 [CTLA-4]_H3.25_L0.12_Fab Light Chain

SEQ ID NO: 10591 - protein, 108 aa, Artificial Sequence; identical to SEQ ID NO: 6193
  Description of Artificial Sequence: Synthetic polypeptide
  VL of XENP020339

SEQ ID NO: 10592 - protein, 12 aa, Artificial Sequence
  Description of Artificial Sequence: Synthetic peptide
  XENP020339 vlCDR1
RASQSVGSSYLA

SEQ ID NO: 10593 - protein, 7 aa, Artificial Sequence
  Description of Artificial Sequence: Synthetic peptide
  XENP020339 vlCDR2
GAFSRAT

SEQ ID NO: 10594 - protein, 9 aa, Artificial Sequence
  Description of Artificial Sequence: Synthetic peptide
  XENP020339 vlCDR3
QQYGSSPWT

SEQ ID NO: 10595 - protein, 221 aa, Artificial Sequence
  Description of Artificial Sequence: Synthetic polypeptide
  XENP020340 [CTLA-4]_H3.26_L0.12_Fab Heavy Chain
EVQLVESGGGLVKPGGSLRLSCAASGFTFSSYTMHWVRQAPGKGLEWVSFISYDGNYKYYADSVKGRFTISRDNAKNSLYLQMNSLRAEDTAVYYCARTSLLGPFDLWGQGTMVTVSSASTKGPSVFPLAPSSKSTSGGTAALGCLVKDYFPEPVTVSWNSGALTSGVHTFPAVLQSSGLYSLSSVVTVPSSSLGTQTYICNVNHKPSNTKVDKKVEPKSC

SEQ ID NO: 10596 - protein, 118 aa, Artificial Sequence; identical to SEQ ID NO: 7335
  Description of Artificial Sequence: Synthetic polypeptide
  VH of XENP020340

SEQ ID NO: 10597 - protein, 5 aa, Artificial Sequence
  Description of Artificial Sequence: Synthetic peptide
  XENP020340 vhCDR1
SYTMH

SEQ ID NO: 10598 - protein, 17 aa, Artificial Sequence
  Description of Artificial Sequence: Synthetic peptide
  XENP020340 vhCDR2
FISYDGNYKYYADSVKG

SEQ ID NO: 10599 - protein, 9 aa, Artificial Sequence
  Description of Artificial Sequence: Synthetic peptide
  XENP020340 vhCDR3
TSLLGPFDL

SEQ ID NO: 10600 - protein, 215 aa, Artificial Sequence; identical to SEQ ID NO: 9080
  Description of Artificial Sequence: Synthetic polypeptide
  XENP020340 [CTLA-4]_H3.26_L0.12_Fab Light Chain

SEQ ID NO: 10601 - protein, 108 aa, Artificial Sequence; identical to SEQ ID NO: 6193
  Description of Artificial Sequence: Synthetic polypeptide
  VL of XENP020340

SEQ ID NO: 10602 - protein, 12 aa, Artificial Sequence
  Description of Artificial Sequence: Synthetic peptide
  XENP020340 vlCDR1
RASQSVGSSYLA

SEQ ID NO: 10603 - protein, 7 aa, Artificial Sequence
  Description of Artificial Sequence: Synthetic peptide
  XENP020340 vlCDR2
GAFSRAT

SEQ ID NO: 10604 - protein, 9 aa, Artificial Sequence
  Description of Artificial Sequence: Synthetic peptide
  XENP020340 vlCDR3
QQYGSSPWT

SEQ ID NO: 10605 - protein, 221 aa, Artificial Sequence; identical to SEQ ID NO: 10385
  Description of Artificial Sequence: Synthetic polypeptide
  XENP020341 [CTLA-4]_H3.4_L0.118_Fab Heavy Chain

SEQ ID NO: 10606 - protein, 118 aa, Artificial Sequence; identical to SEQ ID NO: 7137
  Description of Artificial Sequence: Synthetic polypeptide
  VH of XENP020341

SEQ ID NO: 10607 - protein, 5 aa, Artificial Sequence
  Description of Artificial Sequence: Synthetic peptide
  XENP020341 vhCDR1
SYTMH

SEQ ID NO: 10608 - protein, 17 aa, Artificial Sequence
  Description of Artificial Sequence: Synthetic peptide
  XENP020341 vhCDR2
FISYDGNHKYYADSVKG

SEQ ID NO: 10609 - protein, 9 aa, Artificial Sequence
  Description of Artificial Sequence: Synthetic peptide
  XENP020341 vhCDR3
TGHLGPFDL

SEQ ID NO: 10610 - protein, 215 aa, Artificial Sequence
  Description of Artificial Sequence: Synthetic polypeptide
  XENP020341 [CTLA-4]_H3.4_L0.118_Fab Light Chain
EIVLTQSPATLSVSPGERATLSCRASQSVGSSYLAWYQQKPGQAPRLLIYGAFSRATGIPDRFSGSGSGTDFTLTISRLEPEDFAVYYCQQYGSSPWTFGQGTKVEIKRTVAAPSVFIFPPSDEQLKSGTASVVCLLNNFYPREAKVQWKVDNALQSGNSQESVTEQDSKDSTYSLSSTLTLSKADYEKHKVYACEVTHQGLSSPVTKSFNRGEC

SEQ ID NO: 10611 - protein, 108 aa, Artificial Sequence; identical to SEQ ID NO: 7345
  Description of Artificial Sequence: Synthetic polypeptide
  VL of XENP020341

SEQ ID NO: 10612 - protein, 12 aa, Artificial Sequence
  Description of Artificial Sequence: Synthetic peptide
  XENP020341 vlCDR1
RASQSVGSSYLA

SEQ ID NO: 10613 - protein, 7 aa, Artificial Sequence
  Description of Artificial Sequence: Synthetic peptide
  XENP020341 vlCDR2
GAFSRAT

SEQ ID NO: 10614 - protein, 9 aa, Artificial Sequence
  Description of Artificial Sequence: Synthetic peptide
  XENP020341 vlCDR3
QQYGSSPWT

SEQ ID NO: 10615 - protein, 221 aa, Artificial Sequence; identical to SEQ ID NO: 10385
  Description of Artificial Sequence: Synthetic polypeptide
  XENP020342 [CTLA-4]_H3.4_L0.119_Fab Heavy Chain

SEQ ID NO: 10616 - protein, 118 aa, Artificial Sequence; identical to SEQ ID NO: 7137
  Description of Artificial Sequence: Synthetic polypeptide
  VH of XENP020342

SEQ ID NO: 10617 - protein, 5 aa, Artificial Sequence
  Description of Artificial Sequence: Synthetic peptide
  XENP020342 vhCDR1
SYTMH

SEQ ID NO: 10618 - protein, 17 aa, Artificial Sequence
  Description of Artificial Sequence: Synthetic peptide
  XENP020342 vhCDR2
FISYDGNHKYYADSVKG

SEQ ID NO: 10619 - protein, 9 aa, Artificial Sequence
  Description of Artificial Sequence: Synthetic peptide
  XENP020342 vhCDR3
TGHLGPFDL

SEQ ID NO: 10620 - protein, 215 aa, Artificial Sequence; identical to SEQ ID NO: 7600
  Description of Artificial Sequence: Synthetic polypeptide
  XENP020342 [CTLA-4]_H3.4_L0.119_Fab Light Chain

SEQ ID NO: 10621 - protein, 108 aa, Artificial Sequence; identical to SEQ ID NO: 3741
  Description of Artificial Sequence: Synthetic polypeptide
  VL of XENP020342

SEQ ID NO: 10622 - protein, 12 aa, Artificial Sequence
  Description of Artificial Sequence: Synthetic peptide
  XENP020342 vlCDR1
RASQSVGSSYLA

SEQ ID NO: 10623 - protein, 7 aa, Artificial Sequence
  Description of Artificial Sequence: Synthetic peptide
  XENP020342 vlCDR2
GAFSRAT

SEQ ID NO: 10624 - protein, 9 aa, Artificial Sequence
  Description of Artificial Sequence: Synthetic peptide
  XENP020342 vlCDR3
QQYGSSPWT

SEQ ID NO: 10625 - protein, 221 aa, Artificial Sequence; identical to SEQ ID NO: 10385
  Description of Artificial Sequence: Synthetic polypeptide
  XENP020343 [CTLA-4]_H3.4_L0.120_Fab Heavy Chain

SEQ ID NO: 10626 - protein, 118 aa, Artificial Sequence; identical to SEQ ID NO: 7137
  Description of Artificial Sequence: Synthetic polypeptide
  VH of XENP020343

SEQ ID NO: 10627 - protein, 5 aa, Artificial Sequence
  Description of Artificial Sequence: Synthetic peptide
  XENP020343 vhCDR1
SYTMH

SEQ ID NO: 10628 - protein, 17 aa, Artificial Sequence
  Description of Artificial Sequence: Synthetic peptide
  XENP020343 vhCDR2
FISYDGNHKYYADSVKG

SEQ ID NO: 10629 - protein, 9 aa, Artificial Sequence
  Description of Artificial Sequence: Synthetic peptide
  XENP020343 vhCDR3
TGHLGPFDL

SEQ ID NO: 10630 - protein, 215 aa, Artificial Sequence
  Description of Artificial Sequence: Synthetic polypeptide
  XENP020343 [CTLA-4]_H3.4_L0.120_Fab Light Chain
EIVLTQSPGTLSVSPGERATLSCRASQSVSSSYLAWYQQKPGQAPRLLIYGAFSRATGIPDRFSGSGSGTDFTLTISRLEPEDFAVYYCQQYGSSPWTFGQGTKVEIKRTVAAPSVFIFPPSDEQLKSGTASVVCLLNNFYPREAKVQWKVDNALQSGNSQESVTEQDSKDSTYSLSSTLTLSKADYEKHKVYACEVTHQGLSSPVTKSFNRGEC

SEQ ID NO: 10631 - protein, 108 aa, Artificial Sequence; identical to SEQ ID NO: 7363
  Description of Artificial Sequence: Synthetic polypeptide
  VL of XENP020343

SEQ ID NO: 10632 - protein, 12 aa, Artificial Sequence
  Description of Artificial Sequence: Synthetic peptide
  XENP020343 vlCDR1
RASQSVSSSYLA

SEQ ID NO: 10633 - protein, 7 aa, Artificial Sequence
  Description of Artificial Sequence: Synthetic peptide
  XENP020343 vlCDR2
GAFSRAT

SEQ ID NO: 10634 - protein, 9 aa, Artificial Sequence
  Description of Artificial Sequence: Synthetic peptide
  XENP020343 vlCDR3
QQYGSSPWT

SEQ ID NO: 10635 - protein, 221 aa, Artificial Sequence; identical to SEQ ID NO: 10385
  Description of Artificial Sequence: Synthetic polypeptide
  XENP020344 [CTLA-4]_H3.4_L0.121_Fab Heavy Chain

SEQ ID NO: 10636 - protein, 118 aa, Artificial Sequence; identical to SEQ ID NO: 7137
  Description of Artificial Sequence: Synthetic polypeptide
  VH of XENP020344

SEQ ID NO: 10637 - protein, 5 aa, Artificial Sequence
  Description of Artificial Sequence: Synthetic peptide
  XENP020344 vhCDR1
SYTMH

SEQ ID NO: 10638 - protein, 17 aa, Artificial Sequence
  Description of Artificial Sequence: Synthetic peptide
  XENP020344 vhCDR2
FISYDGNHKYYADSVKG

SEQ ID NO: 10639 - protein, 9 aa, Artificial Sequence
  Description of Artificial Sequence: Synthetic peptide
  XENP020344 vhCDR3
TGHLGPFDL

SEQ ID NO: 10640 - protein, 215 aa, Artificial Sequence
  Description of Artificial Sequence: Synthetic polypeptide
  XENP020344 [CTLA-4]_H3.4_L0.121_Fab Light Chain
EIVLTQSPGTLSVSPGERATLSCRASQSVGSSYLAWYQQKPGQAPRLLIYGASSRATGIPDRFSGSGSGTDFTLTISRLEPEDFAVYYCQQYGSSPWTFGQGTKVEIKRTVAAPSVFIFPPSDEQLKSGTASVVCLLNNFYPREAKVQWKVDNALQSGNSQESVTEQDSKDSTYSLSSTLTLSKADYEKHKVYACEVTHQGLSSPVTKSFNRGEC

SEQ ID NO: 10641 - protein, 108 aa, Artificial Sequence; identical to SEQ ID NO: 7372
  Description of Artificial Sequence: Synthetic polypeptide
  VL of XENP020344

SEQ ID NO: 10642 - protein, 12 aa, Artificial Sequence
  Description of Artificial Sequence: Synthetic peptide
  XENP020344 vlCDR1
RASQSVGSSYLA

SEQ ID NO: 10643 - protein, 7 aa, Artificial Sequence
  Description of Artificial Sequence: Synthetic peptide
  XENP020344 vlCDR2
GASSRAT

SEQ ID NO: 10644 - protein, 9 aa, Artificial Sequence
  Description of Artificial Sequence: Synthetic peptide
  XENP020344 vlCDR3
QQYGSSPWT

SEQ ID NO: 10645 - protein, 221 aa, Artificial Sequence; identical to SEQ ID NO: 10385
  Description of Artificial Sequence: Synthetic polypeptide
  XENP020345 [CTLA-4]_H3.4_L0.122_Fab Heavy Chain

SEQ ID NO: 10646 - protein, 118 aa, Artificial Sequence; identical to SEQ ID NO: 7137
  Description of Artificial Sequence: Synthetic polypeptide
  VH of XENP020345

SEQ ID NO: 10647 - protein, 5 aa, Artificial Sequence
  Description of Artificial Sequence: Synthetic peptide
  XENP020345 vhCDR1
SYTMH

SEQ ID NO: 10648 - protein, 17 aa, Artificial Sequence
  Description of Artificial Sequence: Synthetic peptide
  XENP020345 vhCDR2
FISYDGNHKYYADSVKG

SEQ ID NO: 10649 - protein, 9 aa, Artificial Sequence
  Description of Artificial Sequence: Synthetic peptide
  XENP020345 vhCDR3
TGHLGPFDL

SEQ ID NO: 10650 - protein, 215 aa, Artificial Sequence; identical to SEQ ID NO: 9040
  Description of Artificial Sequence: Synthetic polypeptide
  XENP020345 [CTLA-4]_H3.4_L0.122_Fab Light Chain

SEQ ID NO: 10651 - protein, 108 aa, Artificial Sequence; identical to SEQ ID NO: 6157
  Description of Artificial Sequence: Synthetic polypeptide
  VL of XENP020345

SEQ ID NO: 10652 - protein, 12 aa, Artificial Sequence
  Description of Artificial Sequence: Synthetic peptide
  XENP020345 vlCDR1
RASQSVGSSYLA

SEQ ID NO: 10653 - protein, 7 aa, Artificial Sequence
  Description of Artificial Sequence: Synthetic peptide
  XENP020345 vlCDR2
GAFSRAT

SEQ ID NO: 10654 - protein, 9 aa, Artificial Sequence
  Description of Artificial Sequence: Synthetic peptide
  XENP020345 vlCDR3
QQYGSSPWT

SEQ ID NO: 10655 - protein, 221 aa, Artificial Sequence; identical to SEQ ID NO: 10385
  Description of Artificial Sequence: Synthetic polypeptide
  XENP020346 [CTLA-4]_H3.4_L0.123_Fab Heavy Chain

SEQ ID NO: 10656 - protein, 118 aa, Artificial Sequence; identical to SEQ ID NO: 7137
  Description of Artificial Sequence: Synthetic polypeptide
  VH of XENP020346

SEQ ID NO: 10657 - protein, 5 aa, Artificial Sequence
  Description of Artificial Sequence: Synthetic peptide
  XENP020346 vhCDR1
SYTMH

SEQ ID NO: 10658 - protein, 17 aa, Artificial Sequence
  Description of Artificial Sequence: Synthetic peptide
  XENP020346 vhCDR2
FISYDGNHKYYADSVKG

SEQ ID NO: 10659 - protein, 9 aa, Artificial Sequence
  Description of Artificial Sequence: Synthetic peptide
  XENP020346 vhCDR3
TGHLGPFDL

SEQ ID NO: 10660 - protein, 215 aa, Artificial Sequence
  Description of Artificial Sequence: Synthetic polypeptide
  XENP020346 [CTLA-4]_H3.4_L0.123_Fab Light Chain
EIVLTQSPATLSVSPGERATLSCRASQSVSSSYLAWYQQKPGQAPRLLIYGAFSRATGIPDRFSGSGSGTDFTLTISRLEPEDFAVYYCQQYGSSPWTFGQGTKVEIKRTVAAPSVFIFPPSDEQLKSGTASVVCLLNNFYPREAKVQWKVDNALQSGNSQESVTEQDSKDSTYSLSSTLTLSKADYEKHKVYACEVTHQGLSSPVTKSFNRGEC

SEQ ID NO: 10661 - protein, 108 aa, Artificial Sequence; identical to SEQ ID NO: 7390
  Description of Artificial Sequence: Synthetic polypeptide
  VL of XENP020346

SEQ ID NO: 10662 - protein, 12 aa, Artificial Sequence
  Description of Artificial Sequence: Synthetic peptide
  XENP020346 vlCDR1
RASQSVSSSYLA

SEQ ID NO: 10663 - protein, 7 aa, Artificial Sequence
  Description of Artificial Sequence: Synthetic peptide
  XENP020346 vlCDR2
GAFSRAT

SEQ ID NO: 10664 - protein, 9 aa, Artificial Sequence
  Description of Artificial Sequence: Synthetic peptide
  XENP020346 vlCDR3
QQYGSSPWT

SEQ ID NO: 10665 - protein, 221 aa, Artificial Sequence; identical to SEQ ID NO: 10385
  Description of Artificial Sequence: Synthetic polypeptide
  XENP020347 [CTLA-4]_H3.4_L0.124_Fab Heavy Chain

SEQ ID NO: 10666 - protein, 118 aa, Artificial Sequence; identical to SEQ ID NO: 7137
  Description of Artificial Sequence: Synthetic polypeptide
  VH of XENP020347

SEQ ID NO: 10667 - protein, 5 aa, Artificial Sequence
  Description of Artificial Sequence: Synthetic peptide
  XENP020347 vhCDR1
SYTMH

SEQ ID NO: 10668 - protein, 17 aa, Artificial Sequence
  Description of Artificial Sequence: Synthetic peptide
  XENP020347 vhCDR2
FISYDGNHKYYADSVKG

SEQ ID NO: 10669 - protein, 9 aa, Artificial Sequence
  Description of Artificial Sequence: Synthetic peptide
  XENP020347 vhCDR3
TGHLGPFDL

SEQ ID NO: 10670 - protein, 215 aa, Artificial Sequence
  Description of Artificial Sequence: Synthetic polypeptide
  XENP020347 [CTLA-4]_H3.4_L0.124_Fab Light Chain
EIVLTQSPATLSVSPGERATLSCRASQSVGSSYLAWYQQKPGQAPRLLIYGASSRATGIPDRFSGSGSGTDFTLTISRLEPEDFAVYYCQQYGSSPWTFGQGTKVEIKRTVAAPSVFIFPPSDEQLKSGTASVVCLLNNFYPREAKVQWKVDNALQSGNSQESVTEQDSKDSTYSLSSTLTLSKADYEKHKVYACEVTHQGLSSPVTKSFNRGEC

SEQ ID NO: 10671 - protein, 108 aa, Artificial Sequence; identical to SEQ ID NO: 7399
  Description of Artificial Sequence: Synthetic polypeptide
  VL of XENP020347

SEQ ID NO: 10672 - protein, 12 aa, Artificial Sequence
  Description of Artificial Sequence: Synthetic peptide
  XENP020347 vlCDR1
RASQSVGSSYLA

SEQ ID NO: 10673 - protein, 7 aa, Artificial Sequence
  Description of Artificial Sequence: Synthetic peptide
  XENP020347 vlCDR2
GASSRAT

SEQ ID NO: 10674 - protein, 9 aa, Artificial Sequence
  Description of Artificial Sequence: Synthetic peptide
  XENP020347 vlCDR3
QQYGSSPWT

SEQ ID NO: 10675 - protein, 221 aa, Artificial Sequence; identical to SEQ ID NO: 10385
  Description of Artificial Sequence: Synthetic polypeptide
  XENP020348 [CTLA-4]_H3.4_L0.125_Fab Heavy Chain

SEQ ID NO: 10676 - protein, 118 aa, Artificial Sequence; identical to SEQ ID NO: 7137
  Description of Artificial Sequence: Synthetic polypeptide
  VH of XENP020348

SEQ ID NO: 10677 - protein, 5 aa, Artificial Sequence
  Description of Artificial Sequence: Synthetic peptide
  XENP020348 vhCDR1
SYTMH

SEQ ID NO: 10678 - protein, 17 aa, Artificial Sequence
  Description of Artificial Sequence: Synthetic peptide
  XENP020348 vhCDR2
FISYDGNHKYYADSVKG

SEQ ID NO: 10679 - protein, 9 aa, Artificial Sequence
  Description of Artificial Sequence: Synthetic peptide
  XENP020348 vhCDR3
TGHLGPFDL

SEQ ID NO: 10680 - protein, 215 aa, Artificial Sequence; identical to SEQ ID NO: 2410
  Description of Artificial Sequence: Synthetic polypeptide
  XENP020348 [CTLA-4]_H3.4_L0.125_Fab Light Chain

SEQ ID NO: 10681 - protein, 108 aa, Artificial Sequence; identical to SEQ ID NO: 2411
  Description of Artificial Sequence: Synthetic polypeptide
  VL of XENP020348

SEQ ID NO: 10682 - protein, 12 aa, Artificial Sequence
  Description of Artificial Sequence: Synthetic peptide
  XENP020348 vlCDR1
RASQSVSSSYLA

SEQ ID NO: 10683 - protein, 7 aa, Artificial Sequence
  Description of Artificial Sequence: Synthetic peptide
  XENP020348 vlCDR2
GAFSRAT

SEQ ID NO: 10684 - protein, 9 aa, Artificial Sequence
  Description of Artificial Sequence: Synthetic peptide
  XENP020348 vlCDR3
QQYGSSPWT

SEQ ID NO: 10685 - protein, 221 aa, Artificial Sequence; identical to SEQ ID NO: 10385
  Description of Artificial Sequence: Synthetic polypeptide
  XENP020349 [CTLA-4]_H3.4_L0.126_Fab Heavy Chain

SEQ ID NO: 10686 - protein, 118 aa, Artificial Sequence; identical to SEQ ID NO: 7137
  Description of Artificial Sequence: Synthetic polypeptide
  VH of XENP020349

SEQ ID NO: 10687 - protein, 5 aa, Artificial Sequence
  Description of Artificial Sequence: Synthetic peptide
  XENP020349 vhCDR1
SYTMH

SEQ ID NO: 10688 - protein, 17 aa, Artificial Sequence
  Description of Artificial Sequence: Synthetic peptide
  XENP020349 vhCDR2
FISYDGNHKYYADSVKG

SEQ ID NO: 10689 - protein, 9 aa, Artificial Sequence
  Description of Artificial Sequence: Synthetic peptide
  XENP020349 vhCDR3
TGHLGPFDL

SEQ ID NO: 10690 - protein, 215 aa, Artificial Sequence; identical to SEQ ID NO: 9690
  Description of Artificial Sequence: Synthetic polypeptide
  XENP020349 [CTLA-4]_H3.4_L0.126_Fab Light Chain

SEQ ID NO: 10691 - protein, 108 aa, Artificial Sequence; identical to SEQ ID NO: 6742
  Description of Artificial Sequence: Synthetic polypeptide
  VL of XENP020349

SEQ ID NO: 10692 - protein, 12 aa, Artificial Sequence
  Description of Artificial Sequence: Synthetic peptide
  XENP020349 vlCDR1
RASQSVGSSYLA

SEQ ID NO: 10693 - protein, 7 aa, Artificial Sequence
  Description of Artificial Sequence: Synthetic peptide
  XENP020349 vlCDR2
GASSRAT

SEQ ID NO: 10694 - protein, 9 aa, Artificial Sequence
  Description of Artificial Sequence: Synthetic peptide
  XENP020349 vlCDR3
QQYGSSPWT

SEQ ID NO: 10695 - protein, 221 aa, Artificial Sequence; identical to SEQ ID NO: 10385
  Description of Artificial Sequence: Synthetic polypeptide
  XENP020350 [CTLA-4]_H3.4_L0.127_Fab Heavy Chain

SEQ ID NO: 10696 - protein, 118 aa, Artificial Sequence; identical to SEQ ID NO: 7137
  Description of Artificial Sequence: Synthetic polypeptide
  VH of XENP020350

SEQ ID NO: 10697 - protein, 5 aa, Artificial Sequence
  Description of Artificial Sequence: Synthetic peptide
  XENP020350 vhCDR1
SYTMH

SEQ ID NO: 10698 - protein, 17 aa, Artificial Sequence
  Description of Artificial Sequence: Synthetic peptide
  XENP020350 vhCDR2
FISYDGNHKYYADSVKG

SEQ ID NO: 10699 - protein, 9 aa, Artificial Sequence
  Description of Artificial Sequence: Synthetic peptide
  XENP020350 vhCDR3
TGHLGPFDL

SEQ ID NO: 10700 - protein, 215 aa, Artificial Sequence
  Description of Artificial Sequence: Synthetic polypeptide
  XENP020350 [CTLA-4]_H3.4_L0.127_Fab Light Chain
EIVLTQSPGTLSVSPGERATLSCRASQSVSSSYLAWYQQKPGQAPRLLIYGASSRATGIPDRFSGSGSGTDFTLTISRLEPEDFAVYYCQQYGSSPWTFGQGTKVEIKRTVAAPSVFIFPPSDEQLKSGTASVVCLLNNFYPREAKVQWKVDNALQSGNSQESVTEQDSKDSTYSLSSTLTLSKADYEKHKVYACEVTHQGLSSPVTKSFNRGEC

SEQ ID NO: 10701 - protein, 108 aa, Artificial Sequence; identical to SEQ ID NO: 7426
  Description of Artificial Sequence: Synthetic polypeptide
  VL of XENP020350

SEQ ID NO: 10702 - protein, 12 aa, Artificial Sequence
  Description of Artificial Sequence: Synthetic peptide
  XENP020350 vlCDR1
RASQSVSSSYLA

SEQ ID NO: 10703 - protein, 7 aa, Artificial Sequence
  Description of Artificial Sequence: Synthetic peptide
  XENP020350 vlCDR2
GASSRAT

SEQ ID NO: 10704 - protein, 9 aa, Artificial Sequence
  Description of Artificial Sequence: Synthetic peptide
  XENP020350 vlCDR3
QQYGSSPWT

SEQ ID NO: 10705 - protein, 221 aa, Artificial Sequence; identical to SEQ ID NO: 10385
  Description of Artificial Sequence: Synthetic polypeptide
  XENP020351 [CTLA-4]_H3.4_L0.128_Fab Heavy Chain

SEQ ID NO: 10706 - protein, 118 aa, Artificial Sequence; identical to SEQ ID NO: 7137
  Description of Artificial Sequence: Synthetic polypeptide
  VH of XENP020351

SEQ ID NO: 10707 - protein, 5 aa, Artificial Sequence
  Description of Artificial Sequence: Synthetic peptide
  XENP020351 vhCDR1
SYTMH

SEQ ID NO: 10708 - protein, 17 aa, Artificial Sequence
  Description of Artificial Sequence: Synthetic peptide
  XENP020351 vhCDR2
FISYDGNHKYYADSVKG

SEQ ID NO: 10709 - protein, 9 aa, Artificial Sequence
  Description of Artificial Sequence: Synthetic peptide
  XENP020351 vhCDR3
TGHLGPFDL

SEQ ID NO: 10710 - protein, 215 aa, Artificial Sequence
  Description of Artificial Sequence: Synthetic polypeptide
  XENP020351 [CTLA-4]_H3.4_L0.128_Fab Light Chain
EIVLTQSPATLSLSPGERATLSCRASQSVSSSYLAWYQQKPGQAPRLLIYGAFSRATGIPDRFSGSGSGTDFTLTISRLEPEDFAVYYCQQYGSSPWTFGQGTKVEIKRTVAAPSVFIFPPSDEQLKSGTASVVCLLNNFYPREAKVQWKVDNALQSGNSQESVTEQDSKDSTYSLSSTLTLSKADYEKHKVYACEVTHQGLSSPVTKSFNRGEC

SEQ ID NO: 10711 - protein, 108 aa, Artificial Sequence; identical to SEQ ID NO: 7435
  Description of Artificial Sequence: Synthetic polypeptide
  VL of XENP020351

SEQ ID NO: 10712 - protein, 12 aa, Artificial Sequence
  Description of Artificial Sequence: Synthetic peptide
  XENP020351 vlCDR1
RASQSVSSSYLA

SEQ ID NO: 10713 - protein, 7 aa, Artificial Sequence
  Description of Artificial Sequence: Synthetic peptide
  XENP020351 vlCDR2
GAFSRAT

SEQ ID NO: 10714 - protein, 9 aa, Artificial Sequence
  Description of Artificial Sequence: Synthetic peptide
  XENP020351 vlCDR3
QQYGSSPWT

SEQ ID NO: 10715 - protein, 221 aa, Artificial Sequence; identical to SEQ ID NO: 10385
  Description of Artificial Sequence: Synthetic polypeptide
  XENP020352 [CTLA-4]_H3.4_L0.129_Fab Heavy Chain

SEQ ID NO: 10716 - protein, 118 aa, Artificial Sequence; identical to SEQ ID NO: 7137
  Description of Artificial Sequence: Synthetic polypeptide
  VH of XENP020352

SEQ ID NO: 10717 - protein, 5 aa, Artificial Sequence
  Description of Artificial Sequence: Synthetic peptide
  XENP020352 vhCDR1
SYTMH

SEQ ID NO: 10718 - protein, 17 aa, Artificial Sequence
  Description of Artificial Sequence: Synthetic peptide
  XENP020352 vhCDR2
FISYDGNHKYYADSVKG

SEQ ID NO: 10719 - protein, 9 aa, Artificial Sequence
  Description of Artificial Sequence: Synthetic peptide
  XENP020352 vhCDR3
TGHLGPFDL

SEQ ID NO: 10720 - protein, 215 aa, Artificial Sequence
  Description of Artificial Sequence: Synthetic polypeptide
  XENP020352 [CTLA-4]_H3.4_L0.129_Fab Light Chain
EIVLTQSPATLSLSPGERATLSCRASQSVGSSYLAWYQQKPGQAPRLLIYGASSRATGIPDRFSGSGSGTDFTLTISRLEPEDFAVYYCQQYGSSPWTFGQGTKVEIKRTVAAPSVFIFPPSDEQLKSGTASVVCLLNNFYPREAKVQWKVDNALQSGNSQESVTEQDSKDSTYSLSSTLTLSKADYEKHKVYACEVTHQGLSSPVTKSFNRGEC

SEQ ID NO: 10721 - protein, 108 aa, Artificial Sequence; identical to SEQ ID NO: 2396
  Description of Artificial Sequence: Synthetic polypeptide
  VL of XENP020352

SEQ ID NO: 10722 - protein, 12 aa, Artificial Sequence
  Description of Artificial Sequence: Synthetic peptide
  XENP020352 vlCDR1
RASQSVGSSYLA

SEQ ID NO: 10723 - protein, 7 aa, Artificial Sequence
  Description of Artificial Sequence: Synthetic peptide
  XENP020352 vlCDR2
GASSRAT

SEQ ID NO: 10724 - protein, 9 aa, Artificial Sequence
  Description of Artificial Sequence: Synthetic peptide
  XENP020352 vlCDR3
QQYGSSPWT

SEQ ID NO: 10725 - protein, 221 aa, Artificial Sequence; identical to SEQ ID NO: 10385
  Description of Artificial Sequence: Synthetic polypeptide
  XENP020353 [CTLA-4]_H3.4_L0.130_Fab Heavy Chain

SEQ ID NO: 10726 - protein, 118 aa, Artificial Sequence; identical to SEQ ID NO: 7137
  Description of Artificial Sequence: Synthetic polypeptide
  VH of XENP020353

SEQ ID NO: 10727 - protein, 5 aa, Artificial Sequence
  Description of Artificial Sequence: Synthetic peptide
  XENP020353 vhCDR1
SYTMH

SEQ ID NO: 10728 - protein, 17 aa, Artificial Sequence
  Description of Artificial Sequence: Synthetic peptide
  XENP020353 vhCDR2
FISYDGNHKYYADSVKG

SEQ ID NO: 10729 - protein, 9 aa, Artificial Sequence
  Description of Artificial Sequence: Synthetic peptide
  XENP020353 vhCDR3
TGHLGPFDL

SEQ ID NO: 10730 - protein, 215 aa, Artificial Sequence
  Description of Artificial Sequence: Synthetic polypeptide
  XENP020353 [CTLA-4]_H3.4_L0.130_Fab Light Chain
EIVLTQSPATLSVSPGERATLSCRASQSVSSSYLAWYQQKPGQAPRLLIYGASSRATGIPDRFSGSGSGTDFTLTISRLEPEDFAVYYCQQYGSSPWTFGQGTKVEIKRTVAAPSVFIFPPSDEQLKSGTASVVCLLNNFYPREAKVQWKVDNALQSGNSQESVTEQDSKDSTYSLSSTLTLSKADYEKHKVYACEVTHQGLSSPVTKSFNRGEC

SEQ ID NO: 10731 - protein, 108 aa, Artificial Sequence; identical to SEQ ID NO: 7453
  Description of Artificial Sequence: Synthetic polypeptide
  VL of XENP020353

SEQ ID NO: 10732 - protein, 12 aa, Artificial Sequence
  Description of Artificial Sequence: Synthetic peptide
  XENP020353 vlCDR1
RASQSVSSSYLA

SEQ ID NO: 10733 - protein, 7 aa, Artificial Sequence
  Description of Artificial Sequence: Synthetic peptide
  XENP020353 vlCDR2
GASSRAT

SEQ ID NO: 10734 - protein, 9 aa, Artificial Sequence
  Description of Artificial Sequence: Synthetic peptide
  XENP020353 vlCDR3
QQYGSSPWT

SEQ ID NO: 10735 - protein, 221 aa, Artificial Sequence; identical to SEQ ID NO: 10385
  Description of Artificial Sequence: Synthetic polypeptide
  XENP020354 [CTLA-4]_H3.4_L0.131_Fab Heavy Chain

SEQ ID NO: 10736 - protein, 118 aa, Artificial Sequence; identical to SEQ ID NO: 7137
  Description of Artificial Sequence: Synthetic polypeptide
  VH of XENP020354

SEQ ID NO: 10737 - protein, 5 aa, Artificial Sequence
  Description of Artificial Sequence: Synthetic peptide
  XENP020354 vhCDR1
SYTMH

SEQ ID NO: 10738 - protein, 17 aa, Artificial Sequence
  Description of Artificial Sequence: Synthetic peptide
  XENP020354 vhCDR2
FISYDGNHKYYADSVKG

SEQ ID NO: 10739 - protein, 9 aa, Artificial Sequence
  Description of Artificial Sequence: Synthetic peptide
  XENP020354 vhCDR3
TGHLGPFDL

SEQ ID NO: 10740 - protein, 215 aa, Artificial Sequence
  Description of Artificial Sequence: Synthetic polypeptide
  XENP020354 [CTLA-4]_H3.4_L0.131_Fab Light Chain
EIVLTQSPGTLSLSPGERATLSCRASQSVSSSYLAWYQQKPGQAPRLLIYGASSRATGIPDRFSGSGSGTDFTLTISRLEPEDFAVYYCQQYGSSPWTFGQGTKVEIKRTVAAPSVFIFPPSDEQLKSGTASVVCLLNNFYPREAKVQWKVDNALQSGNSQESVTEQDSKDSTYSLSSTLTLSKADYEKHKVYACEVTHQGLSSPVTKSFNRGEC

SEQ ID NO: 10741 - protein, 108 aa, Artificial Sequence; identical to SEQ ID NO: 7462
  Description of Artificial Sequence: Synthetic polypeptide
  VL of XENP020354

SEQ ID NO: 10742 - protein, 12 aa, Artificial Sequence
  Description of Artificial Sequence: Synthetic peptide
  XENP020354 vlCDR1
RASQSVSSSYLA

SEQ ID NO: 10743 - protein, 7 aa, Artificial Sequence
  Description of Artificial Sequence: Synthetic peptide
  XENP020354 vlCDR2
GASSRAT

SEQ ID NO: 10744 - protein, 9 aa, Artificial Sequence
  Description of Artificial Sequence: Synthetic peptide
  XENP020354 vlCDR3
QQYGSSPWT

SEQ ID NO: 10745 - protein, 221 aa, Artificial Sequence; identical to SEQ ID NO: 10385
  Description of Artificial Sequence: Synthetic polypeptide
  XENP020355 [CTLA-4]_H3.4_L0.132_Fab Heavy Chain

SEQ ID NO: 10746 - protein, 118 aa, Artificial Sequence; identical to SEQ ID NO: 7137
  Description of Artificial Sequence: Synthetic polypeptide
  VH of XENP020355

SEQ ID NO: 10747 - protein, 5 aa, Artificial Sequence
  Description of Artificial Sequence: Synthetic peptide
  XENP020355 vhCDR1
SYTMH

SEQ ID NO: 10748 - protein, 17 aa, Artificial Sequence
  Description of Artificial Sequence: Synthetic peptide
  XENP020355 vhCDR2
FISYDGNHKYYADSVKG

SEQ ID NO: 10749 - protein, 9 aa, Artificial Sequence
  Description of Artificial Sequence: Synthetic peptide
  XENP020355 vhCDR3
TGHLGPFDL

SEQ ID NO: 10750 - protein, 215 aa, Artificial Sequence
  Description of Artificial Sequence: Synthetic polypeptide
  XENP020355 [CTLA-4]_H3.4_L0.132_Fab Light Chain
EIVLTQSPATLSLSPGERATLSCRASQSVSSSYLAWYQQKPGQAPRLLIYGASSRATGIPDRFSGSGSGTDFTLTISRLEPEDFAVYYCQQYGSSPWTFGQGTKVEIKRTVAAPSVFIFPPSDEQLKSGTASVVCLLNNFYPREAKVQWKVDNALQSGNSQESVTEQDSKDSTYSLSSTLTLSKADYEKHKVYACEVTHQGLSSPVTKSFNRGEC

SEQ ID NO: 10751 - protein, 108 aa, Artificial Sequence; identical to SEQ ID NO: 7471
  Description of Artificial Sequence: Synthetic polypeptide
  VL of XENP020355

SEQ ID NO: 10752 - protein, 12 aa, Artificial Sequence
  Description of Artificial Sequence: Synthetic peptide
  XENP020355 vlCDR1
RASQSVSSSYLA

SEQ ID NO: 10753 - protein, 7 aa, Artificial Sequence
  Description of Artificial Sequence: Synthetic peptide
  XENP020355 vlCDR2
GASSRAT

SEQ ID NO: 10754 - protein, 9 aa, Artificial Sequence
  Description of Artificial Sequence: Synthetic peptide
  XENP020355 vlCDR3
QQYGSSPWT

SEQ ID NO: 10755 - protein, 221 aa, Artificial Sequence; identical to SEQ ID NO: 10395
  Description of Artificial Sequence: Synthetic polypeptide
  XENP020356 [CTLA-4]_H3.5_L2_Fab Heavy Chain

SEQ ID NO: 10756 - protein, 118 aa, Artificial Sequence; identical to SEQ ID NO: 7146
  Description of Artificial Sequence: Synthetic polypeptide
  VH of XENP020356

SEQ ID NO: 10757 - protein, 5 aa, Artificial Sequence
  Description of Artificial Sequence: Synthetic peptide
  XENP020356 vhCDR1
SYTMH

SEQ ID NO: 10758 - protein, 17 aa, Artificial Sequence
  Description of Artificial Sequence: Synthetic peptide
  XENP020356 vhCDR2
FISYDGNTKYYADSVKG

SEQ ID NO: 10759 - protein, 9 aa, Artificial Sequence
  Description of Artificial Sequence: Synthetic peptide
  XENP020356 vhCDR3
TGHLGPFDL

SEQ ID NO: 10760 - protein, 215 aa, Artificial Sequence; identical to SEQ ID NO: 10150
  Description of Artificial Sequence: Synthetic polypeptide
  XENP020356 [CTLA-4]_H3.5_L2_Fab Light Chain

SEQ ID NO: 10761 - protein, 108 aa, Artificial Sequence; identical to SEQ ID NO: 4843
  Description of Artificial Sequence: Synthetic polypeptide
  VL of XENP020356

SEQ ID NO: 10762 - protein, 12 aa, Artificial Sequence
  Description of Artificial Sequence: Synthetic peptide
  XENP020356 vlCDR1
RASQSVGSSYLA

SEQ ID NO: 10763 - protein, 7 aa, Artificial Sequence
  Description of Artificial Sequence: Synthetic peptide
  XENP020356 vlCDR2
GAFSRAT

SEQ ID NO: 10764 - protein, 9 aa, Artificial Sequence
  Description of Artificial Sequence: Synthetic peptide
  XENP020356 vlCDR3
QQYGSSPWT

SEQ ID NO: 10765 - protein, 221 aa, Artificial Sequence; identical to SEQ ID NO: 10395
  Description of Artificial Sequence: Synthetic polypeptide
  XENP020357 [CTLA-4]_H3.5_L2.1_Fab Heavy Chain

SEQ ID NO: 10766 - protein, 118 aa, Artificial Sequence; identical to SEQ ID NO: 7146
  Description of Artificial Sequence: Synthetic polypeptide
  VH of XENP020357

SEQ ID NO: 10767 - protein, 5 aa, Artificial Sequence
  Description of Artificial Sequence: Synthetic peptide
  XENP020357 vhCDR1
SYTMH

SEQ ID NO: 10768 - protein, 17 aa, Artificial Sequence
  Description of Artificial Sequence: Synthetic peptide
  XENP020357 vhCDR2
FISYDGNTKYYADSVKG

SEQ ID NO: 10769 - protein, 9 aa, Artificial Sequence
  Description of Artificial Sequence: Synthetic peptide
  XENP020357 vhCDR3
TGHLGPFDL

SEQ ID NO: 10770 - protein, 215 aa, Artificial Sequence
  Description of Artificial Sequence: Synthetic polypeptide
  XENP020357 [CTLA-4]_H3.5_L2.1_Fab Light Chain
EIVMTQSPATLSVSPGERATLSCRASQSVSSSYLAWYQQKPGQAPRLLIYGAFSRATGIPARFSGSGSGTEFTLTISSLQSEDFAVYYCQQYGSSPWTFGQGTKVEIKRTVAAPSVFIFPPSDEQLKSGTASVVCLLNNFYPREAKVQWKVDNALQSGNSQESVTEQDSKDSTYSLSSTLTLSKADYEKHKVYACEVTHQGLSSPVTKSFNRGEC

SEQ ID NO: 10771 - protein, 108 aa, Artificial Sequence; identical to SEQ ID NO: 7489
  Description of Artificial Sequence: Synthetic polypeptide
  VL of XENP020357

SEQ ID NO: 10772 - protein, 12 aa, Artificial Sequence
  Description of Artificial Sequence: Synthetic peptide
  XENP020357 vlCDR1
RASQSVSSSYLA

SEQ ID NO: 10773 - protein, 7 aa, Artificial Sequence
  Description of Artificial Sequence: Synthetic peptide
  XENP020357 vlCDR2
GAFSRAT

SEQ ID NO: 10774 - protein, 9 aa, Artificial Sequence
  Description of Artificial Sequence: Synthetic peptide
  XENP020357 vlCDR3
QQYGSSPWT

SEQ ID NO: 10775 - protein, 221 aa, Artificial Sequence; identical to SEQ ID NO: 10395
  Description of Artificial Sequence: Synthetic polypeptide
  XENP020358 [CTLA-4]_H3.5_L2.2_Fab Heavy Chain

SEQ ID NO: 10776 - protein, 118 aa, Artificial Sequence; identical to SEQ ID NO: 7146
  Description of Artificial Sequence: Synthetic polypeptide
  VH of XENP020358

SEQ ID NO: 10777 - protein, 5 aa, Artificial Sequence
  Description of Artificial Sequence: Synthetic peptide
  XENP020358 vhCDR1
SYTMH

SEQ ID NO: 10778 - protein, 17 aa, Artificial Sequence
  Description of Artificial Sequence: Synthetic peptide
  XENP020358 vhCDR2
FISYDGNTKYYADSVKG

SEQ ID NO: 10779 - protein, 9 aa, Artificial Sequence
  Description of Artificial Sequence: Synthetic peptide
  XENP020358 vhCDR3
TGHLGPFDL

SEQ ID NO: 10780 - protein, 215 aa, Artificial Sequence
  Description of Artificial Sequence: Synthetic polypeptide
  XENP020358 [CTLA-4]_H3.5_L2.2_Fab Light Chain
EIVMTQSPATLSVSPGERATLSCRASQSVGSSYLAWYQQKPGQAPRLLIYGASSRATGIPARFSGSGSGTEFTLTISSLQSEDFAVYYCQQYGSSPWTFGQGTKVEIKRTVAAPSVFIFPPSDEQLKSGTASVVCLLNNFYPREAKVQWKVDNALQSGNSQESVTEQDSKDSTYSLSSTLTLSKADYEKHKVYACEVTHQGLSSPVTKSFNRGEC

SEQ ID NO: 10781 - protein, 108 aa, Artificial Sequence; identical to SEQ ID NO: 7498
  Description of Artificial Sequence: Synthetic polypeptide
  VL of XENP020358

SEQ ID NO: 10782 - protein, 12 aa, Artificial Sequence
  Description of Artificial Sequence: Synthetic peptide
  XENP020358 vlCDR1
RASQSVGSSYLA

SEQ ID NO: 10783 - protein, 7 aa, Artificial Sequence
  Description of Artificial Sequence: Synthetic peptide
  XENP020358 vlCDR2
GASSRAT

SEQ ID NO: 10784 - protein, 9 aa, Artificial Sequence
  Description of Artificial Sequence: Synthetic peptide
  XENP020358 vlCDR3
QQYGSSPWT

SEQ ID NO: 10785 - protein, 221 aa, Artificial Sequence; identical to SEQ ID NO: 10395
  Description of Artificial Sequence: Synthetic polypeptide
  XENP020359 [CTLA-4]_H3.5_L2.3_Fab Heavy Chain

SEQ ID NO: 10786 - protein, 118 aa, Artificial Sequence; identical to SEQ ID NO: 7146
  Description of Artificial Sequence: Synthetic polypeptide
  VH of XENP020359

SEQ ID NO: 10787 - protein, 5 aa, Artificial Sequence
  Description of Artificial Sequence: Synthetic peptide
  XENP020359 vhCDR1
SYTMH

SEQ ID NO: 10788 - protein, 17 aa, Artificial Sequence
  Description of Artificial Sequence: Synthetic peptide
  XENP020359 vhCDR2
FISYDGNTKYYADSVKG

SEQ ID NO: 10789 - protein, 9 aa, Artificial Sequence
  Description of Artificial Sequence: Synthetic peptide
  XENP020359 vhCDR3
TGHLGPFDL

SEQ ID NO: 10790 - protein, 215 aa, Artificial Sequence
  Description of Artificial Sequence: Synthetic polypeptide
  XENP020359 [CTLA-4]_H3.5_L2.3_Fab Light Chain
EIVMTQSPATLSVSPGERATLSCRASQSVSSSYLAWYQQKPGQAPRLLIYGASSRATGIPARFSGSGSGTEFTLTISSLQSEDFAVYYCQQYGSSPWTFGQGTKVEIKRTVAAPSVFIFPPSDEQLKSGTASVVCLLNNFYPREAKVQWKVDNALQSGNSQESVTEQDSKDSTYSLSSTLTLSKADYEKHKVYACEVTHQGLSSPVTKSFNRGEC

SEQ ID NO: 10791 - protein, 108 aa, Artificial Sequence; identical to SEQ ID NO: 7507
  Description of Artificial Sequence: Synthetic polypeptide
  VL of XENP020359

SEQ ID NO: 10792 - protein, 12 aa, Artificial Sequence
  Description of Artificial Sequence: Synthetic peptide
  XENP020359 vlCDR1
RASQSVSSSYLA

SEQ ID NO: 10793 - protein, 7 aa, Artificial Sequence
  Description of Artificial Sequence: Synthetic peptide
  XENP020359 vlCDR2
GASSRAT

SEQ ID NO: 10794 - protein, 9 aa, Artificial Sequence
  Description of Artificial Sequence: Synthetic peptide
  XENP020359 vlCDR3
QQYGSSPWT

SEQ ID NO: 10795 - protein, 221 aa, Artificial Sequence; identical to SEQ ID NO: 10545
  Description of Artificial Sequence: Synthetic polypeptide
  XENP020422 [CTLA-4]_H3.21_L0.124_Fab Heavy Chain

SEQ ID NO: 10796 - protein, 118 aa, Artificial Sequence; identical to SEQ ID NO: 7290
  Description of Artificial Sequence: Synthetic polypeptide
  VH of XENP020422

SEQ ID NO: 10797 - protein, 5 aa, Artificial Sequence
  Description of Artificial Sequence: Synthetic peptide
  XENP020422 vhCDR1
SYTMH

SEQ ID NO: 10798 - protein, 17 aa, Artificial Sequence
  Description of Artificial Sequence: Synthetic peptide
  XENP020422 vhCDR2
FISYDGNTKYYADSVKG

SEQ ID NO: 10799 - protein, 9 aa, Artificial Sequence
  Description of Artificial Sequence: Synthetic peptide
  XENP020422 vhCDR3
GGLLGPFDL

SEQ ID NO: 10800 - protein, 215 aa, Artificial Sequence; identical to SEQ ID NO: 10670
  Description of Artificial Sequence: Synthetic polypeptide
  XENP020422 [CTLA-4]_H3.21_L0.124_Fab Light Chain

SEQ ID NO: 10801 - protein, 108 aa, Artificial Sequence; identical to SEQ ID NO: 7399
  Description of Artificial Sequence: Synthetic polypeptide
  VL of XENP020422

SEQ ID NO: 10802 - protein, 12 aa, Artificial Sequence
  Description of Artificial Sequence: Synthetic peptide
  XENP020422 vlCDR1
RASQSVGSSYLA

SEQ ID NO: 10803 - protein, 7 aa, Artificial Sequence
  Description of Artificial Sequence: Synthetic peptide
  XENP020422 vlCDR2
GASSRAT

SEQ ID NO: 10804 - protein, 9 aa, Artificial Sequence
  Description of Artificial Sequence: Synthetic peptide
  XENP020422 vlCDR3
QQYGSSPWT

SEQ ID NO: 10805 - protein, 221 aa, Artificial Sequence; identical to SEQ ID NO: 10545
  Description of Artificial Sequence: Synthetic polypeptide
  XENP020423 [CTLA-4]_H3.21_L0.129_Fab Heavy Chain

SEQ ID NO: 10806 - protein, 118 aa, Artificial Sequence; identical to SEQ ID NO: 7290
  Description of Artificial Sequence: Synthetic polypeptide
  VH of XENP020423

SEQ ID NO: 10807 - protein, 5 aa, Artificial Sequence
  Description of Artificial Sequence: Synthetic peptide
  XENP020423 vhCDR1
SYTMH

SEQ ID NO: 10808 - protein, 17 aa, Artificial Sequence
  Description of Artificial Sequence: Synthetic peptide
  XENP020423 vhCDR2
FISYDGNTKYYADSVKG

SEQ ID NO: 10809 - protein, 9 aa, Artificial Sequence
  Description of Artificial Sequence: Synthetic peptide
  XENP020423 vhCDR3
GGLLGPFDL

SEQ ID NO: 10810 - protein, 215 aa, Artificial Sequence; identical to SEQ ID NO: 10720
  Description of Artificial Sequence: Synthetic polypeptide
  XENP020423 [CTLA-4]_H3.21_L0.129_Fab Light Chain

SEQ ID NO: 10811 - protein, 108 aa, Artificial Sequence; identical to SEQ ID NO: 2396
  Description of Artificial Sequence: Synthetic polypeptide
  VL of XENP020423

SEQ ID NO: 10812 - protein, 12 aa, Artificial Sequence
  Description of Artificial Sequence: Synthetic peptide
  XENP020423 vlCDR1
RASQSVGSSYLA

SEQ ID NO: 10813 - protein, 7 aa, Artificial Sequence
  Description of Artificial Sequence: Synthetic peptide
  XENP020423 vlCDR2
GASSRAT

SEQ ID NO: 10814 - protein, 9 aa, Artificial Sequence
  Description of Artificial Sequence: Synthetic peptide
  XENP020423 vlCDR3
QQYGSSPWT

SEQ ID NO: 10815 - protein, 221 aa, Artificial Sequence; identical to SEQ ID NO: 10545
  Description of Artificial Sequence: Synthetic polypeptide
  XENP020424 [CTLA-4]_H3.21_L0.132_Fab Heavy Chain

SEQ ID NO: 10816 - protein, 118 aa, Artificial Sequence; identical to SEQ ID NO: 7290
  Description of Artificial Sequence: Synthetic polypeptide
  VH of XENP020424

SEQ ID NO: 10817 - protein, 5 aa, Artificial Sequence
  Description of Artificial Sequence: Synthetic peptide
  XENP020424 vhCDR1
SYTMH

SEQ ID NO: 10818 - protein, 17 aa, Artificial Sequence
  Description of Artificial Sequence: Synthetic peptide
  XENP020424 vhCDR2
FISYDGNTKYYADSVKG

SEQ ID NO: 10819 - protein, 9 aa, Artificial Sequence
  Description of Artificial Sequence: Synthetic peptide
  XENP020424 vhCDR3
GGLLGPFDL

SEQ ID NO: 10820 - protein, 215 aa, Artificial Sequence; identical to SEQ ID NO: 10750
  Description of Artificial Sequence: Synthetic polypeptide
  XENP020424 [CTLA-4]_H3.21_L0.132_Fab Light Chain

SEQ ID NO: 10821 - protein, 108 aa, Artificial Sequence; identical to SEQ ID NO: 7471
  Description of Artificial Sequence: Synthetic polypeptide
  VL of XENP020424

SEQ ID NO: 10822 - protein, 12 aa, Artificial Sequence
  Description of Artificial Sequence: Synthetic peptide
  XENP020424 vlCDR1
RASQSVSSSYLA

SEQ ID NO: 10823 - protein, 7 aa, Artificial Sequence
  Description of Artificial Sequence: Synthetic peptide
  XENP020424 vlCDR2
GASSRAT

SEQ ID NO: 10824 - protein, 9 aa, Artificial Sequence
  Description of Artificial Sequence: Synthetic peptide
  XENP020424 vlCDR3
QQYGSSPWT

SEQ ID NO: 10825 - protein, 221 aa, Artificial Sequence; identical to SEQ ID NO: 10565
  Description of Artificial Sequence: Synthetic polypeptide
  XENP020425 [CTLA-4]_H3.23_L0.124_Fab Heavy Chain

SEQ ID NO: 10826 - protein, 118 aa, Artificial Sequence; identical to SEQ ID NO: 2395
  Description of Artificial Sequence: Synthetic polypeptide
  VH of XENP020425

SEQ ID NO: 10827 - protein, 5 aa, Artificial Sequence
  Description of Artificial Sequence: Synthetic peptide
  XENP020425 vhCDR1
SYTMH

SEQ ID NO: 10828 - protein, 17 aa, Artificial Sequence
  Description of Artificial Sequence: Synthetic peptide
  XENP020425 vhCDR2
FISYDGNYKYYADSVKG

SEQ ID NO: 10829 - protein, 9 aa, Artificial Sequence
  Description of Artificial Sequence: Synthetic peptide
  XENP020425 vhCDR3
GGHLGPFDL

SEQ ID NO: 10830 - protein, 215 aa, Artificial Sequence; identical to SEQ ID NO: 10670
  Description of Artificial Sequence: Synthetic polypeptide
  XENP020425 [CTLA-4]_H3.23_L0.124_Fab Light Chain

SEQ ID NO: 10831 - protein, 108 aa, Artificial Sequence; identical to SEQ ID NO: 7399
  Description of Artificial Sequence: Synthetic polypeptide
  VL of XENP020425

SEQ ID NO: 10832 - protein, 12 aa, Artificial Sequence
  Description of Artificial Sequence: Synthetic peptide
  XENP020425 vlCDR1
RASQSVGSSYLA

SEQ ID NO: 10833 - protein, 7 aa, Artificial Sequence
  Description of Artificial Sequence: Synthetic peptide
  XENP020425 vlCDR2
GASSRAT

SEQ ID NO: 10834 - protein, 9 aa, Artificial Sequence
  Description of Artificial Sequence: Synthetic peptide
  XENP020425 vlCDR3
QQYGSSPWT

SEQ ID NO: 10835 - protein, 221 aa, Artificial Sequence; identical to SEQ ID NO: 10565
  Description of Artificial Sequence: Synthetic polypeptide
  XENP020426 [CTLA-4]_H3.23_L0.129_Fab Heavy Chain

SEQ ID NO: 10836 - protein, 118 aa, Artificial Sequence; identical to SEQ ID NO: 2395
  Description of Artificial Sequence: Synthetic polypeptide
  VH of XENP020426

SEQ ID NO: 10837 - protein, 5 aa, Artificial Sequence
  Description of Artificial Sequence: Synthetic peptide
  XENP020426 vhCDR1
SYTMH

SEQ ID NO: 10838 - protein, 17 aa, Artificial Sequence
  Description of Artificial Sequence: Synthetic peptide
  XENP020426 vhCDR2
FISYDGNYKYYADSVKG

SEQ ID NO: 10839 - protein, 9 aa, Artificial Sequence
  Description of Artificial Sequence: Synthetic peptide
  XENP020426 vhCDR3
GGHLGPFDL

SEQ ID NO: 10840 - protein, 215 aa, Artificial Sequence; identical to SEQ ID NO: 10720
  Description of Artificial Sequence: Synthetic polypeptide
  XENP020426 [CTLA-4]_H3.23_L0.129_Fab Light Chain

SEQ ID NO: 10841 - protein, 108 aa, Artificial Sequence; identical to SEQ ID NO: 2396
  Description of Artificial Sequence: Synthetic polypeptide
  VL of XENP020426

SEQ ID NO: 10842 - protein, 12 aa, Artificial Sequence
  Description of Artificial Sequence: Synthetic peptide
  XENP020426 vlCDR1
RASQSVGSSYLA

SEQ ID NO: 10843 - protein, 7 aa, Artificial Sequence
  Description of Artificial Sequence: Synthetic peptide
  XENP020426 vlCDR2
GASSRAT

SEQ ID NO: 10844 - protein, 9 aa, Artificial Sequence
  Description of Artificial Sequence: Synthetic peptide
  XENP020426 vlCDR3
QQYGSSPWT

SEQ ID NO: 10845 - protein, 221 aa, Artificial Sequence; identical to SEQ ID NO: 10565
  Description of Artificial Sequence: Synthetic polypeptide
  XENP020427 [CTLA-4]_H3.23_L0.132_Fab Heavy Chain

SEQ ID NO: 10846 - protein, 118 aa, Artificial Sequence; identical to SEQ ID NO: 2395
  Description of Artificial Sequence: Synthetic polypeptide
  VH of XENP020427

SEQ ID NO: 10847 - protein, 5 aa, Artificial Sequence
  Description of Artificial Sequence: Synthetic peptide
  XENP020427 vhCDR1
SYTMH

SEQ ID NO: 10848 - protein, 17 aa, Artificial Sequence
  Description of Artificial Sequence: Synthetic peptide
  XENP020427 vhCDR2
FISYDGNYKYYADSVKG

SEQ ID NO: 10849 - protein, 9 aa, Artificial Sequence
  Description of Artificial Sequence: Synthetic peptide
  XENP020427 vhCDR3
GGHLGPFDL

SEQ ID NO: 10850 - protein, 215 aa, Artificial Sequence; identical to SEQ ID NO: 10750
  Description of Artificial Sequence: Synthetic polypeptide
  XENP020427 [CTLA-4]_H3.23_L0.132_Fab Light Chain

SEQ ID NO: 10851 - protein, 108 aa, Artificial Sequence; identical to SEQ ID NO: 7471
  Description of Artificial Sequence: Synthetic polypeptide
  VL of XENP020427

SEQ ID NO: 10852 - protein, 12 aa, Artificial Sequence
  Description of Artificial Sequence: Synthetic peptide
  XENP020427 vlCDR1
RASQSVSSSYLA

SEQ ID NO: 10853 - protein, 7 aa, Artificial Sequence
  Description of Artificial Sequence: Synthetic peptide
  XENP020427 vlCDR2
GASSRAT

SEQ ID NO: 10854 - protein, 9 aa, Artificial Sequence
  Description of Artificial Sequence: Synthetic peptide
  XENP020427 vlCDR3
QQYGSSPWT

SEQ ID NO: 10855 - protein, 221 aa, Artificial Sequence; identical to SEQ ID NO: 10585
  Description of Artificial Sequence: Synthetic polypeptide
  XENP020428 [CTLA-4]_H3.25_L0.124_Fab Heavy Chain

SEQ ID NO: 10856 - protein, 118 aa, Artificial Sequence; identical to SEQ ID NO: 7326
  Description of Artificial Sequence: Synthetic polypeptide
  VH of XENP020428

SEQ ID NO: 10857 - protein, 5 aa, Artificial Sequence
  Description of Artificial Sequence: Synthetic peptide
  XENP020428 vhCDR1
SYTMH

SEQ ID NO: 10858 - protein, 17 aa, Artificial Sequence
  Description of Artificial Sequence: Synthetic peptide
  XENP020428 vhCDR2
FISYDGNYKYYADSVKG

SEQ ID NO: 10859 - protein, 9 aa, Artificial Sequence
  Description of Artificial Sequence: Synthetic peptide
  XENP020428 vhCDR3
GGLLGPFDL

SEQ ID NO: 10860 - protein, 215 aa, Artificial Sequence; identical to SEQ ID NO: 10670
  Description of Artificial Sequence: Synthetic polypeptide
  XENP020428 [CTLA-4]_H3.25_L0.124_Fab Light Chain

SEQ ID NO: 10861 - protein, 108 aa, Artificial Sequence; identical to SEQ ID NO: 7399
  Description of Artificial Sequence: Synthetic polypeptide
  VL of XENP020428

SEQ ID NO: 10862 - protein, 12 aa, Artificial Sequence
  Description of Artificial Sequence: Synthetic peptide
  XENP020428 vlCDR1
RASQSVGSSYLA

SEQ ID NO: 10863 - protein, 7 aa, Artificial Sequence
  Description of Artificial Sequence: Synthetic peptide
  XENP020428 vlCDR2
GASSRAT

SEQ ID NO: 10864 - protein, 9 aa, Artificial Sequence
  Description of Artificial Sequence: Synthetic peptide
  XENP020428 vlCDR3
QQYGSSPWT

SEQ ID NO: 10865 - protein, 221 aa, Artificial Sequence; identical to SEQ ID NO: 10585
  Description of Artificial Sequence: Synthetic polypeptide
  XENP020429 [CTLA-4]_H3.25_L0.129_Fab Heavy Chain

SEQ ID NO: 10866 - protein, 118 aa, Artificial Sequence; identical to SEQ ID NO: 7326
  Description of Artificial Sequence: Synthetic polypeptide
  VH of XENP020429

SEQ ID NO: 10867 - protein, 5 aa, Artificial Sequence
  Description of Artificial Sequence: Synthetic peptide
  XENP020429 vhCDR1
SYTMH

SEQ ID NO: 10868 - protein, 17 aa, Artificial Sequence
  Description of Artificial Sequence: Synthetic peptide
  XENP020429 vhCDR2
FISYDGNYKYYADSVKG

SEQ ID NO: 10869 - protein, 9 aa, Artificial Sequence
  Description of Artificial Sequence: Synthetic peptide
  XENP020429 vhCDR3
GGLLGPFDL

SEQ ID NO: 10870 - protein, 215 aa, Artificial Sequence; identical to SEQ ID NO: 10720
  Description of Artificial Sequence: Synthetic polypeptide
  XENP020429 [CTLA-4]_H3.25_L0.129_Fab Light Chain

SEQ ID NO: 10871 - protein, 108 aa, Artificial Sequence; identical to SEQ ID NO: 2396
  Description of Artificial Sequence: Synthetic polypeptide
  VL of XENP020429

SEQ ID NO: 10872 - protein, 12 aa, Artificial Sequence
  Description of Artificial Sequence: Synthetic peptide
  XENP020429 vlCDR1
RASQSVGSSYLA

SEQ ID NO: 10873 - protein, 7 aa, Artificial Sequence
  Description of Artificial Sequence: Synthetic peptide
  XENP020429 vlCDR2
GASSRAT

SEQ ID NO: 10874 - protein, 9 aa, Artificial Sequence
  Description of Artificial Sequence: Synthetic peptide
  XENP020429 vlCDR3
QQYGSSPWT

SEQ ID NO: 10875 - protein, 221 aa, Artificial Sequence; identical to SEQ ID NO: 10585
  Description of Artificial Sequence: Synthetic polypeptide
  XENP020430 [CTLA-4]_H3.25_L0.132_Fab Heavy Chain

SEQ ID NO: 10876 - protein, 118 aa, Artificial Sequence; identical to SEQ ID NO: 7326
  Description of Artificial Sequence: Synthetic polypeptide
  VH of XENP020430

SEQ ID NO: 10877 - protein, 5 aa, Artificial Sequence
  Description of Artificial Sequence: Synthetic peptide
  XENP020430 vhCDR1
SYTMH

SEQ ID NO: 10878 - protein, 17 aa, Artificial Sequence
  Description of Artificial Sequence: Synthetic peptide
  XENP020430 vhCDR2
FISYDGNYKYYADSVKG

SEQ ID NO: 10879 - protein, 9 aa, Artificial Sequence
  Description of Artificial Sequence: Synthetic peptide
  XENP020430 vhCDR3
GGLLGPFDL

SEQ ID NO: 10880 - protein, 215 aa, Artificial Sequence; identical to SEQ ID NO: 10750
  Description of Artificial Sequence: Synthetic polypeptide
  XENP020430 [CTLA-4]_H3.25_L0.132_Fab Light Chain

SEQ ID NO: 10881 - protein, 108 aa, Artificial Sequence; identical to SEQ ID NO: 7471
  Description of Artificial Sequence: Synthetic polypeptide
  VL of XENP020430

SEQ ID NO: 10882 - protein, 12 aa, Artificial Sequence
  Description of Artificial Sequence: Synthetic peptide
  XENP020430 vlCDR1
RASQSVSSSYLA

SEQ ID NO: 10883 - protein, 7 aa, Artificial Sequence
  Description of Artificial Sequence: Synthetic peptide
  XENP020430 vlCDR2
GASSRAT

SEQ ID NO: 10884 - protein, 9 aa, Artificial Sequence
  Description of Artificial Sequence: Synthetic peptide
  XENP020430 vlCDR3
QQYGSSPWT

SEQ ID NO: 10885 - protein, 240 aa, Artificial Sequence
  Description of Artificial Sequence: Synthetic polypeptide
  XENP016402 nivolumab_H0.1_L0_scFv(GKPGS)4
QVQLVESGGGVVQPGRSLRLSCKASGITFSNSGMHWVRQAPGKGLEWVAVIWYDGSKRYYADSVKGRFTISRDNSKNTLFLQMNSLRAEDTAVYYCATNDDYWGQGTLVTVSSGKPGSGKPGSGKPGSGKPGSEIVLTQSPATLSLSPGERATLSCRASQSVSSYLAWYQQKPGQAPRLLIYDASNRATGIPARFSGSGSGTDFTLTISSLEPEDFAVYYCQQSSNWPRTFGQGTKVEIK

SEQ ID NO: 10886 - protein, 113 aa, Artificial Sequence
  Description of Artificial Sequence: Synthetic polypeptide
  VH of XENP016402
QVQLVESGGGVVQPGRSLRLSCKASGITFSNSGMHWVRQAPGKGLEWVAVIWYDGSKRYYADSVKGRFTISRDNSKNTLFLQMNSLRAEDTAVYYCATNDDYWGQGTLVTVSS

SEQ ID NO: 10887 - protein, 107 aa, Artificial Sequence [sequence omitted]

SEQ ID NO: 10888 - protein, 5 aa, Artificial Sequence
  Description of Artificial Sequence: Synthetic peptide
  XENP016402 vhCDR1
NSGMH

SEQ ID NO: 10889 - protein, 17 aa, Artificial Sequence
  Description of Artificial Sequence: Synthetic peptide
  XENP016402 vhCDR2
VIWYDGSKRYYADSVKG

SEQ ID NO: 10890 - protein, 4 aa, Artificial Sequence
  Description of Artificial Sequence: Synthetic peptide
  XENP016402 vhCDR3
NDDY

SEQ ID NO: 10891 - protein, 11 aa, Artificial Sequence
  Description of Artificial Sequence: Synthetic peptide
  XENP016402 vlCDR1
RASQSVSSYLA

SEQ ID NO: 10892 - protein, 7 aa, Artificial Sequence
  Description of Artificial Sequence: Synthetic peptide
  XENP016402 vlCDR2
DASNRAT

SEQ ID NO: 10893 - protein, 9 aa, Artificial Sequence
  Description of Artificial Sequence: Synthetic peptide
  XENP016402 vlCDR3
QQSSNWPRT

SEQ ID NO: 10894 - protein, 246 aa, Artificial Sequence
  Description of Artificial Sequence: Synthetic polypeptide
  XENP017919 1A2_H1L1_scFv(GKPGS)4
QIQLVQSGAEVKKPGASVKVSCKASGYTFTDYSMHWVRQAPGQGLEWMGWINTETGEPTYADKFQGRVTMTLDTSTSTAYMELSSLRSEDTAVYFCASSPLDYWGQGTLVTVSSGKPGSGKPGSGKPGSGKPGSDLLLTQSPLSLPVTPGEPASISCRSSQSIVHSNGNTYLEWFLQKPGQSPQLLIYKVFNRFSGVPDRFSGSGSGTDFTLKISRVEAEDVGVYYCFQGSHVPFTFGSGTKLEIK

SEQ ID NO: 10895 - protein, 114 aa, Artificial Sequence
  Description of Artificial Sequence: Synthetic polypeptide
  VH of XENP017919
QIQLVQSGAEVKKPGASVKVSCKASGYTFTDYSMHWVRQAPGQGLEWMGWINTETGEPTYADKFQGRVTMTLDTSTSTAYMELSSLRSEDTAVYFCASSPLDYWGQGTLVTVSS

SEQ ID NO: 10896 - protein, 112 aa, Artificial Sequence
  Description of Artificial Sequence: Synthetic polypeptide
  VL of XENP017919
DLLLTQSPLSLPVTPGEPASISCRSSQSIVHSNGNTYLEWFLQKPGQSPQLLIYKVFNRFSGVPDRFSGSGSGTDFTLKISRVEAEDVGVYYCFQGSHVPFTFGSGTKLEIK

SEQ ID NO: 10897 - protein, 5 aa, Artificial Sequence
  Description of Artificial Sequence: Synthetic peptide
  XENP017919 vhCDR1
DYSMH

SEQ ID NO: 10898 - protein, 17 aa, Artificial Sequence
  Description of Artificial Sequence: Synthetic peptide
  XENP017919 vhCDR2
WINTETGEPTYADKFQG

SEQ ID NO: 10899 - protein, 5 aa, Artificial Sequence
  Description of Artificial Sequence: Synthetic peptide
  XENP017919 vhCDR3
SPLDY

SEQ ID NO: 10900 - protein, 16 aa, Artificial Sequence
  Description of Artificial Sequence: Synthetic peptide
  XENP017919 vlCDR1
RSSQSIVHSNGNTYLE

SEQ ID NO: 10901 - protein, 7 aa, Artificial Sequence
  Description of Artificial Sequence: Synthetic peptide
  XENP017919 vlCDR2
KVFNRFS

SEQ ID NO: 10902 - protein, 9 aa, Artificial Sequence
  Description of Artificial Sequence: Synthetic peptide
  XENP017919 vlCDR3
FQGSHVPFT

SEQ ID NO: 10903 - protein, 251 aa, Artificial Sequence
  Description of Artificial Sequence: Synthetic polypeptide
  XENP017920 1C7_H1L1_scFv(GKPGS)4
EVQLLESGGGLVQPGGSLRLSCAASGFAFSSYDMSWVRQAPGKRLEWVSYISSGGGSTYYPDSVKGRFTISRDNSKNTLYLQMNSLRAEDTAVYYCARPLDDYYAPFAYWGQGTLVTVSSGKPGSGKPGSGKPGSGKPGSDIVLTQSPSSLSASVGDRVTITCRASESVDNDGISFMNWFQQKPGKPPKLLIYAASNQGSGVPARFSGSGSGTDFTLTISSLQPEDFATYFCQQSKEVPWTFGGGTKVEIK

SEQ ID NO: 10904 - protein, 120 aa, Artificial Sequence
  Description of Artificial Sequence: Synthetic polypeptide
  VH of XENP017920
EVQLLESGGGLVQPGGSLRLSCAASGFAFSSYDMSWVRQAPGKRLEWVSYISSGGGSTYYPDSVKGRFTISRDNSKNTLYLQMNSLRAEDTAVYYCARPLDDYYAPFAYWGQGTLVTVSS

SEQ ID NO: 10905 - protein, 111 aa, Artificial Sequence
  Description of Artificial Sequence: Synthetic polypeptide
  VL of XENP017920
DIVLTQSPSSLSASVGDRVTITCRASESVDNDGISFMNWFQQKPGKPPKLLIYAASNQGSGVPARFSGSGSGTDFTLTISSLQPEDFATYFCQQSKEVPWTFGGGTKVEIK

SEQ ID NO: 10906 - protein, 5 aa, Artificial Sequence
  Description of Artificial Sequence: Synthetic peptide
  XENP017920 vhCDR1
SYDMS

SEQ ID NO: 10907 - protein, 17 aa, Artificial Sequence
  Description of Artificial Sequence: Synthetic peptide
  XENP017920 vhCDR2
YISSGGGSTYYPDSVKG

SEQ ID NO: 10908 - protein, 11 aa, Artificial Sequence
  Description of Artificial Sequence: Synthetic peptide
  XENP017920 vhCDR3
PLDDYYAPFAY

SEQ ID NO: 10909 - protein, 15 aa, Artificial Sequence
  Description of Artificial Sequence: Synthetic peptide
  XENP017920 vlCDR1
RASESVDNDGISFMN

SEQ ID NO: 10910 - protein, 7 aa, Artificial Sequence
  Description of Artificial Sequence: Synthetic peptide
  XENP017920 vlCDR2
AASNQGS

SEQ ID NO: 10911 - protein, 9 aa, Artificial Sequence
  Description of Artificial Sequence: Synthetic peptide
  XENP017920 vlCDR3
QQSKEVPWT

SEQ ID NO: 10912 - protein, 246 aa, Artificial Sequence
  Description of Artificial Sequence: Synthetic polypeptide
  XENP017921 1G2_H1L1_scFv(GKPGS)4
QVQLVQSGAEVKKPGASVKVSCKVSGFSLTDYGVNWVRQAPGQGLEWMGMIWGDGSTDYNSKFQGRVTMTKDISTSTVYMELSSLRSEDTAVYYCAREYAMDYWGQGTLVTVSSGKPGSGKPGSGKPGSGKPGSDIVMTQSPDSLAVSLGERATINCKSSQSLLNSRTRKNYLAWYQQKPGQSPKLLIFWASTRESGVPDRFTGSGSGTDFTLTISSLQAEDVAVYYCKQSYNLRTFGGGTKVEIK

SEQ ID NO: 10913 - protein, 114 aa, Artificial Sequence
  Description of Artificial Sequence: Synthetic polypeptide
  VH of XENP017921
QVQLVQSGAEVKKPGASVKVSCKVSGFSLTDYGVNWVRQAPGQGLEWMGMIWGDGSTDYNSKFQGRVTMTKDISTSTVYMELSSLRSEDTAVYYCAREYAMDYWGQGTLVTVSS

SEQ ID NO: 10914 - protein, 112 aa, Artificial Sequence
  Description of Artificial Sequence: Synthetic polypeptide
  VL of XENP017921
DIVMTQSPDSLAVSLGERATINCKSSQSLLNSRTRKNYLAWYQQKPGQSPKLLIFWASTRESGVPDRFTGSGSGTDFTLTISSLQAEDVAVYYCKQSYNLRTFGGGTKVEIK

SEQ ID NO: 10915 - protein, 5 aa, Artificial Sequence
  Description of Artificial Sequence: Synthetic peptide
  XENP017921 vhCDR1
DYGVN

SEQ ID NO: 10916 - protein, 16 aa, Artificial Sequence
  Description of Artificial Sequence: Synthetic peptide
  XENP017921 vhCDR2
MIWGDGSTDYNSKFQG

SEQ ID NO: 10917 - protein, 6 aa, Artificial Sequence
  Description of Artificial Sequence: Synthetic peptide
  XENP017921 vhCDR3
EYAMDY

SEQ ID NO: 10918 - protein, 17 aa, Artificial Sequence
  Description of Artificial Sequence: Synthetic peptide
  XENP017921 vlCDR1
KSSQSLLNSRTRKNYLA

SEQ ID NO: 10919 - protein, 7 aa, Artificial Sequence
  Description of Artificial Sequence: Synthetic peptide
  XENP017921 vlCDR2
WASTRES

SEQ ID NO: 10920 - protein, 8 aa, Artificial Sequence
  Description of Artificial Sequence: Synthetic peptide
  XENP017921 vlCDR3
KQSYNLRT

SEQ ID NO: 10921 - protein, 249 aa, Artificial Sequence
  Description of Artificial Sequence: Synthetic polypeptide
  XENP017922 1G6_H1L1_scFv(GKPGS)4
EVQLVESGGGLVKPGGSLRLSCAASGFTFSNYWMNWVRQAPGKGLEWVGEIRLKSNNYATHYAEPVKGRFTISRDDSKSTVYLQMNSLKTEDTAVYYCTRYYGNYGGYFDVWGAGTLVTVSSGKPGSGKPGSGKPGSGKPGSSIVMTQSPATLSVSPGERATLSCRASQSVSNDVAWYQQKPGQSPRLLINYASHRYTGVPDRFTGSGYGTEFTLTISSLQSEDFAVYFCQQDYSSPRTFGGGTKVEIK

SEQ ID NO: 10922 - protein, 122 aa, Artificial Sequence
  Description of Artificial Sequence: Synthetic polypeptide
  VH of XENP017922
EVQLVESGGGLVKPGGSLRLSCAASGFTFSNYWMNWVRQAPGKGLEWVGEIRLKSNNYATHYAEPVKGRFTISRDDSKSTVYLQMNSLKTEDTAVYYCTRYYGNYGGYFDVWGAGTLVTVSS

SEQ ID NO: 10923 - protein, 107 aa, Artificial Sequence
  Description of Artificial Sequence: Synthetic polypeptide
  VL of XENP017922
SIVMTQSPATLSVSPGERATLSCRASQSVSNDVAWYQQKPGQSPRLLINYASHRYTGVPDRFTGSGYGTEFTLTISSLQSEDFAVYFCQQDYSSPRTFGGGTKVEIK

SEQ ID NO: 10924 - protein, 5 aa, Artificial Sequence
  Description of Artificial Sequence: Synthetic peptide
  XENP017922 vhCDR1
NYWMN

SEQ ID NO: 10925 - protein, 19 aa, Artificial Sequence
  Description of Artificial Sequence: Synthetic peptide
  XENP017922 vhCDR2
EIRLKSNNYATHYAEPVKG

SEQ ID NO: 10926 - protein, 11 aa, Artificial Sequence
  Description of Artificial Sequence: Synthetic peptide
  XENP017922 vhCDR3
YYGNYGGYFDV

SEQ ID NO: 10927 - protein, 11 aa, Artificial Sequence
  Description of Artificial Sequence: Synthetic peptide
  XENP017922 vlCDR1
RASQSVSNDVA

SEQ ID NO: 10928 - protein, 7 aa, Artificial Sequence
  Description of Artificial Sequence: Synthetic peptide
  XENP017922 vlCDR2
YASHRYT

SEQ ID NO: 10929 - protein, 9 aa, Artificial Sequence
  Description of Artificial Sequence: Synthetic peptide
  XENP017922 vlCDR3
QQDYSSPRT

SEQ ID NO: 10930 - protein, 249 aa, Artificial Sequence
  Description of Artificial Sequence: Synthetic polypeptide
  XENP017923 1G6_H1L2_scFv(GKPGS)4
EVQLVESGGGLVKPGGSLRLSCAASGFTFSNYWMNWVRQAPGKGLEWVGEIRLKSNNYATHYAEPVKGRFTISRDDSKSTVYLQMNSLKTEDTAVYYCTRYYGNYGGYFDVWGAGTLVTVSSGKPGSGKPGSGKPGSGKPGSSIVMTQSPSSLSASVGDRVTITCRASQSVSNDVAWYQQKPGKSPKLLINYASHRYTGVPDRFTGSGYGTDFTLTISSLQPEDFATYFCQQDYSSPRTFGGGTKVEIK

SEQ ID NO: 10931 - protein, 122 aa, Artificial Sequence; identical to SEQ ID NO: 10922
  Description of Artificial Sequence: Synthetic polypeptide
  VH of XENP017923

SEQ ID NO: 10932 - protein, 107 aa, Artificial Sequence
  Description of Artificial Sequence: Synthetic polypeptide
  VL of XENP017923
SIVMTQSPSSLSASVGDRVTITCRASQSVSNDVAWYQQKPGKSPKLLINYASHRYTGVPDRFTGSGYGTDFTLTISSLQPEDFATYFCQQDYSSPRTFGGGTKVEIK

SEQ ID NO: 10933 - protein, 5 aa, Artificial Sequence
  Description of Artificial Sequence: Synthetic peptide
  XENP017923 vhCDR1
NYWMN

SEQ ID NO: 10934 - protein, 19 aa, Artificial Sequence
  Description of Artificial Sequence: Synthetic peptide
  XENP017923 vhCDR2
EIRLKSNNYATHYAEPVKG

SEQ ID NO: 10935 - protein, 11 aa, Artificial Sequence
  Description of Artificial Sequence: Synthetic peptide
  XENP017923 vhCDR3
YYGNYGGYFDV

SEQ ID NO: 10936 - protein, 11 aa, Artificial Sequence
  Description of Artificial Sequence: Synthetic peptide
  XENP017923 vlCDR1
RASQSVSNDVA

SEQ ID NO: 10937 - protein, 7 aa, Artificial Sequence
  Description of Artificial Sequence: Synthetic peptide
  XENP017923 vlCDR2
YASHRYT

SEQ ID NO: 10938 - protein, 9 aa, Artificial Sequence
  Description of Artificial Sequence: Synthetic peptide
  XENP017923 vlCDR3
QQDYSSPRT

SEQ ID NO: 10939 - protein, 242 aa, Artificial Sequence
  Description of Artificial Sequence: Synthetic polypeptide
  XENP017924 2A2_H1L1_scFv(GKPGS)4
QVQLVQSGAEVKKPGASVKVSCKASGYTFTNYWMHWVRQAPGQGLEWMGYINPSTGYTEYNQKFQGRVTMTADKSTSTAYMELSSLRSEDTAVYYCATGNYFAYWGQGTLVTVSSGKPGSGKPGSGKPGSGKPGSDIQMTQSPSSLSASVGDRVTITCRPSESLYSYLAWYQQKPGKSPKLLVYNAKTLVEGVPSRFSGSGSGTDFTLTISSLQPEDFATYYCQHHYGTPFTFGSGTKLEIK

SEQ ID NO: 10940 - protein, 115 aa, Artificial Sequence
  Description of Artificial Sequence: Synthetic polypeptide
  VH of XENP017924
QVQLVQSGAEVKKPGASVKVSCKASGYTFTNYWMHWVRQAPGQGLEWMGYINPSTGYTEYNQKFQGRVTMTADKSTSTAYMELSSLRSEDTAVYYCATGNYFAYWGQGTLVTVSS

SEQ ID NO: 10941 - protein, 107 aa, Artificial Sequence
  Description of Artificial Sequence: Synthetic polypeptide
  VL of XENP017924
DIQMTQSPSSLSASVGDRVTITCRPSESLYSYLAWYQQKPGKSPKLLVYNAKTLVEGVPSRFSGSGSGTDFTLTISSLQPEDFATYYCQHHYGTPFTFGSGTKLEIK

SEQ ID NO: 10942 - protein, 5 aa, Artificial Sequence
  Description of Artificial Sequence: Synthetic peptide
  XENP017924 vhCDR1
NYWMH

SEQ ID NO: 10943 - protein, 17 aa, Artificial Sequence
  Description of Artificial Sequence: Synthetic peptide
  XENP017924 vhCDR2
YINPSTGYTEYNQKFQG

SEQ ID NO: 10944 - protein, 6 aa, Artificial Sequence
  Description of Artificial Sequence: Synthetic peptide
  XENP017924 vhCDR3
GNYFAY

SEQ ID NO: 10945 - protein, 11 aa, Artificial Sequence
  Description of Artificial Sequence: Synthetic peptide
  XENP017924 vlCDR1
RPSESLYSYLA

SEQ ID NO: 10946 - protein, 7 aa, Artificial Sequence
  Description of Artificial Sequence: Synthetic peptide
  XENP017924 vlCDR2
NAKTLVE

SEQ ID NO: 10947 - protein, 9 aa, Artificial Sequence
  Description of Artificial Sequence: Synthetic peptide
  XENP017924 vlCDR3
QHHYGTPFT

SEQ ID NO: 10948 - protein, 252 aa, Artificial Sequence
  Description of Artificial Sequence: Synthetic polypeptide
  XENP017925 2F11_H1L1_scFv(GKPGS)4
QVQLVQSGAEVKKPGASVKVSCKGSGYTFTDYVMHWVRQAPGQSLEWMGVISTYYGDASYNQKFQGRVTMTVDKSTSTAYMELSSLRSEDTAVYYCAREGYDGYLYFDVWGAGTLVTVSSGKPGSGKPGSGKPGSGKPGSDVLMTQTPLSSPVTLGQPASISCRSSQSIVHSNGNTYLEWYQQRPGQSPRLLIYKVSNRFSGVPDRFSGSGSGTDFTLKISRVEAEDVGVYYCFQGSHVPYTFGGGTKVEIK

SEQ ID NO: 10949 - protein, 120 aa, Artificial Sequence
  Description of Artificial Sequence: Synthetic polypeptide
  VH of XENP017925
QVQLVQSGAEVKKPGASVKVSCKGSGYTFTDYVMHWVRQAPGQSLEWMGVISTYYGDASYNQKFQGRVTMTVDKSTSTAYMELSSLRSEDTAVYYCAREGYDGYLYFDVWGAGTLVTVSS

SEQ ID NO: 10950 - protein, 112 aa, Artificial Sequence
  Description of Artificial Sequence: Synthetic polypeptide
  VL of XENP017925
DVLMTQTPLSSPVTLGQPASISCRSSQSIVHSNGNTYLEWYQQRPGQSPRLLIYKVSNRFSGVPDRFSGSGSGTDFTLKISRVEAEDVGVYYCFQGSHVPYTFGGGTKVEIK

SEQ ID NO: 10951 - protein, 5 aa, Artificial Sequence
  Description of Artificial Sequence: Synthetic peptide
  XENP017925 vhCDR1
DYVMH

SEQ ID NO: 10952 - protein, 17 aa, Artificial Sequence
  Description of Artificial Sequence: Synthetic peptide
  XENP017925 vhCDR2
VISTYYGDASYNQKFQG

SEQ ID NO: 10953 - protein, 11 aa, Artificial Sequence
  Description of Artificial Sequence: Synthetic peptide
  XENP017925 vhCDR3
EGYDGYLYFDV

SEQ ID NO: 10954 - protein, 16 aa, Artificial Sequence
  Description of Artificial Sequence: Synthetic peptide
  XENP017925 vlCDR1
RSSQSIVHSNGNTYLE

SEQ ID NO: 10955 - protein, 7 aa, Artificial Sequence
  Description of Artificial Sequence: Synthetic peptide
  XENP017925 vlCDR2
KVSNRFS

SEQ ID NO: 10956 - protein, 9 aa, Artificial Sequence
  Description of Artificial Sequence: Synthetic peptide
  XENP017925 vlCDR3
FQGSHVPYT

SEQ ID NO: 10957 - protein, 252 aa, Artificial Sequence
  Description of Artificial Sequence: Synthetic polypeptide
  XENP017926 5H1_H1L1_scFv(GKPGS)4
QVQLVQSGAEVKKPGASVKVSCKGSGYTFTDYVMHWVRQAPGQSLEWMGVISIHYGDGRYNQKFQGRVTMTVDKSTSTAYMELSSLRSEDTAVYYCAREVYDGYLYFDVWGAGTLVTVSSGKPGSGKPGSGKPGSGKPGSDVLMTQSPLSLPVTPGEPASISCRSSQSIVHSNGNTYLEWYLQKPGQSPQLLIYKVSNRFSGVPDRFGGRGSGTDFTLKISRVEAEDVGVYYCFQGSHVPYTFGGGTKVEIK

SEQ ID NO: 10958 - protein, 120 aa, Artificial Sequence
  Description of Artificial Sequence: Synthetic polypeptide
  VH of XENP017926
QVQLVQSGAEVKKPGASVKVSCKGSGYTFTDYVMHWVRQAPGQSLEWMGVISIHYGDGRYNQKFQGRVTMTVDKSTSTAYMELSSLRSEDTAVYYCAREVYDGYLYFDVWGAGTLVTVSS

SEQ ID NO: 10959 - protein, 112 aa, Artificial Sequence
  Description of Artificial Sequence: Synthetic polypeptide
  VL of XENP017926
DVLMTQSPLSLPVTPGEPASISCRSSQSIVHSNGNTYLEWYLQKPGQSPQLLIYKVSNRFSGVPDRFGGRGSGTDFTLKISRVEAEDVGVYYCFQGSHVPYTFGGGTKVEIK

SEQ ID NO: 10960 - protein, 5 aa, Artificial Sequence
  Description of Artificial Sequence: Synthetic peptide
  XENP017926 vhCDR1
DYVMH

SEQ ID NO: 10961 - protein, 17 aa, Artificial Sequence
  Description of Artificial Sequence: Synthetic peptide
  XENP017926 vhCDR2
VISIHYGDGRYNQKFQG

SEQ ID NO: 10962 - protein, 11 aa, Artificial Sequence
  Description of Artificial Sequence: Synthetic peptide
  XENP017926 vhCDR3
EVYDGYLYFDV

SEQ ID NO: 10963 - protein, 16 aa, Artificial Sequence
  Description of Artificial Sequence: Synthetic peptide
  XENP017926 vlCDR1
RSSQSIVHSNGNTYLE

SEQ ID NO: 10964 - protein, 7 aa, Artificial Sequence
  Description of Artificial Sequence: Synthetic peptide
  XENP017926 vlCDR2
KVSNRFS

SEQ ID NO: 10965 - protein, 9 aa, Artificial Sequence
  Description of Artificial Sequence: Synthetic peptide
  XENP017926 vlCDR3
FQGSHVPYT

SEQ ID NO: 10966 - protein, 252 aa, Artificial Sequence
  Description of Artificial Sequence: Synthetic polypeptide
  XENP017927 5H1_H1L2_scFv(GKPGS)4
QVQLVQSGAEVKKPGASVKVSCKGSGYTFTDYVMHWVRQAPGQSLEWMGVISIHYGDGRYNQKFQGRVTMTVDKSTSTAYMELSSLRSEDTAVYYCAREVYDGYLYFDVWGAGTLVTVSSGKPGSGKPGSGKPGSGKPGSDVLMTQSPLSLPVTLGQPASISCRSSQSIVHSNGNTYLEWYQQRPGQSPRLLIYKVSNRFSGVPDRFGGRGSGTDFTLKISRVEAEDVGVYYCFQGSHVPYTFGGGTKVEIK

SEQ ID NO: 10967 - protein, 120 aa, Artificial Sequence; identical to SEQ ID NO: 10958
  Description of Artificial Sequence: Synthetic polypeptide
  VH of XENP017927

SEQ ID NO: 10968 - protein, 112 aa, Artificial Sequence
  Description of Artificial Sequence: Synthetic polypeptide
  VL of XENP017927
DVLMTQSPLSLPVTLGQPASISCRSSQSIVHSNGNTYLEWYQQRPGQSPRLLIYKVSNRFSGVPDRFGGRGSGTDFTLKISRVEAEDVGVYYCFQGSHVPYTFGGGTKVEIK

SEQ ID NO: 10969 - protein, 5 aa, Artificial Sequence
  Description of Artificial Sequence: Synthetic peptide
  XENP017927 vhCDR1
DYVMH

SEQ ID NO: 10970 - protein, 17 aa, Artificial Sequence
  Description of Artificial Sequence: Synthetic peptide
  XENP017927 vhCDR2
VISIHYGDGRYNQKFQG

SEQ ID NO: 10971 - protein, 11 aa, Artificial Sequence
  Description of Artificial Sequence: Synthetic peptide
  XENP017927 vhCDR3
EVYDGYLYFDV

SEQ ID NO: 10972 - protein, 16 aa, Artificial Sequence
  Description of Artificial Sequence: Synthetic peptide
  XENP017927 vlCDR1
RSSQSIVHSNGNTYLE

SEQ ID NO: 10973 - protein, 7 aa, Artificial Sequence
  Description of Artificial Sequence: Synthetic peptide
  XENP017927 vlCDR2
KVSNRFS

SEQ ID NO: 10974 - protein, 9 aa, Artificial Sequence
  Description of Artificial Sequence: Synthetic peptide
  XENP017927 vlCDR3
FQGSHVPYT

SEQ ID NO: 10975 - protein, 247 aa, Artificial Sequence
  Description of Artificial Sequence: Synthetic polypeptide
  XENP017928 10E4_H1L1_scFv(GKPGS)4
QVQLVQSGAEVKKPGASVKVSCKASGYSFTSYWMHWVRQAPGQGLEWMGAIYPGNSDTSYNQKFQGRVTMTADTSTSTAYMELSSLRSEDTAVYYCTRDGNYVRYYFDYWGQGTLVTVSSGKPGSGKPGSGKPGSGKPGSDIQMTQSPSSLSASVGDRVTITCRASQDIGSNLNWLQQKPGKTIKRLIYATSNLDSGVPKRFSGRRSGSDYTLTISSLQPEDFATYYCLQYASSPLTFGTGTKLEIK

SEQ ID NO: 10976 - protein, 120 aa, Artificial Sequence
  Description of Artificial Sequence: Synthetic polypeptide
  VH of XENP017928
QVQLVQSGAEVKKPGASVKVSCKASGYSFTSYWMHWVRQAPGQGLEWMGAIYPGNSDTSYNQKFQGRVTMTADTSTSTAYMELSSLRSEDTAVYYCTRDGNYVRYYFDYWGQGTLVTVSS

SEQ ID NO: 10977 - protein, 107 aa, Artificial Sequence
  Description of Artificial Sequence: Synthetic polypeptide
  VL of XENP017928
DIQMTQSPSSLSASVGDRVTITCRASQDIGSNLNWLQQKPGKTIKRLIYATSNLDSGVPKRFSGRRSGSDYTLTISSLQPEDFATYYCLQYASSPLTFGTGTKLEIK

SEQ ID NO: 10978 - protein, 5 aa, Artificial Sequence
  Description of Artificial Sequence: Synthetic peptide
  XENP017928 vhCDR1
SYWMH

SEQ ID NO: 10979 - protein, 17 aa, Artificial Sequence
  Description of Artificial Sequence: Synthetic peptide
  XENP017928 vhCDR2
AIYPGNSDTSYNQKFQG

SEQ ID NO: 10980 - protein, 11 aa, Artificial Sequence
  Description of Artificial Sequence: Synthetic peptide
  XENP017928 vhCDR3
DGNYVRYYFDY

SEQ ID NO: 10981 - protein, 11 aa, Artificial Sequence
  Description of Artificial Sequence: Synthetic peptide
  XENP017928 vlCDR1
RASQDIGSNLN

SEQ ID NO: 10982 - protein, 7 aa, Artificial Sequence
  Description of Artificial Sequence: Synthetic peptide
  XENP017928 vlCDR2
ATSNLDS

SEQ ID NO: 10983 - protein, 9 aa, Artificial Sequence
  Description of Artificial Sequence: Synthetic peptide
  XENP017928 vlCDR3
LQYASSPLT

SEQ ID NO: 10984 - protein, 247 aa, Artificial Sequence
  Description of Artificial Sequence: Synthetic polypeptide
  XENP017929 4C11_H1L1_scFv(GKPGS)4
QIQLVQSGAEVKKPGASVKVSCKASGYTFTSYWMHWVRQAPGQGLEWMGAIYPGNSDTSYNQKFQGRVTMTADTSTSTAYMELSSLRSEDTAVYYCTNLYYGSSFAMDYWGQGTLVTVSSGKPGSGKPGSGKPGSGKPGSDIKMTQSPSSLSASVGDRVTITCRASQDINTYLSWFQQKPGKSPKTLIYRANRLVDGVPSRFSGSGSGQDYTLTISSLQPEDFATYYCLHYDDFPYTFGGGTKVEIK

SEQ ID NO: 10985 - protein, 120 aa, Artificial Sequence
  Description of Artificial Sequence: Synthetic polypeptide
  VH of XENP017929
QIQLVQSGAEVKKPGASVKVSCKASGYTFTSYWMHWVRQAPGQGLEWMGAIYPGNSDTSYNQKFQGRVTMTADTSTSTAYMELSSLRSEDTAVYYCTNLYYGSSFAMDYWGQGTLVTVSS

SEQ ID NO: 10986 - protein, 107 aa, Artificial Sequence
  Description of Artificial Sequence: Synthetic polypeptide
  VL of XENP017929
DIKMTQSPSSLSASVGDRVTITCRASQDINTYLSWFQQKPGKSPKTLIYRANRLVDGVPSRFSGSGSGQDYTLTISSLQPEDFATYYCLHYDDFPYTFGGGTKVEIK

SEQ ID NO: 10987 - protein, 5 aa, Artificial Sequence
  Description of Artificial Sequence: Synthetic peptide
  XENP017929 vhCDR1
SYWMH

SEQ ID NO: 10988 - protein, 17 aa, Artificial Sequence
  Description of Artificial Sequence: Synthetic peptide
  XENP017929 vhCDR2
AIYPGNSDTSYNQKFQG

SEQ ID NO: 10989 - protein, 11 aa, Artificial Sequence
  Description of Artificial Sequence: Synthetic peptide
  XENP017929 vhCDR3
LYYGSSFAMDY

SEQ ID NO: 10990 - protein, 11 aa, Artificial Sequence
  Description of Artificial Sequence: Synthetic peptide
  XENP017929 vlCDR1
RASQDINTYLS

SEQ ID NO: 10991 - protein, 7 aa, Artificial Sequence
  Description of Artificial Sequence: Synthetic peptide
  XENP017929 vlCDR2
RANRLVD

SEQ ID NO: 10992 - protein, 9 aa, Artificial Sequence
  Description of Artificial Sequence: Synthetic peptide
  XENP017929 vlCDR3
LHYDDFPYT

SEQ ID NO: 10993 - protein, 244 aa, Artificial Sequence
  Description of Artificial Sequence: Synthetic polypeptide
  XENP017930 6A3_H1L1_scFv(GKPGS)4
EVQLLESGGGLVQPGGSLRLSCAASGFTFSSYGMSWVRQAPGKRLEWVSTISGGGRYTYYPDSVKGRFTISRDNSKNTLYLQMNSLRAEDTAVYYCASYYDSSFDYWGQGTLVTVSSGKPGSGKPGSGKPGSGKPGSDIVMTQSPDSLAVSLGERATINCKASQDVGTAVAWYQQKPGQSPKLLIYWASTRHTGVPDRFTGSGSGTDFTLTISSLQAEDVAVYFCQHYSIYPWTFGGGTKVEIK

SEQ ID NO: 10994 - protein, 117 aa, Artificial Sequence
  Description of Artificial Sequence: Synthetic polypeptide
  VH of XENP017930
EVQLLESGGGLVQPGGSLRLSCAASGFTFSSYGMSWVRQAPGKRLEWVSTISGGGRYTYYPDSVKGRFTISRDNSKNTLYLQMNSLRAEDTAVYYCASYYDSSFDYWGQGTLVTVSS

SEQ ID NO: 10995 - protein, 107 aa, Artificial Sequence
  Description of Artificial Sequence: Synthetic polypeptide
  VL of XENP017930
DIVMTQSPDSLAVSLGERATINCKASQDVGTAVAWYQQKPGQSPKLLIYWASTRHTGVPDRFTGSGSGTDFTLTISSLQAEDVAVYFCQHYSIYPWTFGGGTKVEIK

SEQ ID NO: 10996 - protein, 5 aa, Artificial Sequence
  Description of Artificial Sequence: Synthetic peptide
  XENP017930 vhCDR1
SYGMS

SEQ ID NO: 10997 - protein, 17 aa, Artificial Sequence
  Description of Artificial Sequence: Synthetic peptide
  XENP017930 vhCDR2
TISGGGRYTYYPDSVKG

SEQ ID NO: 10998 - protein, 8 aa, Artificial Sequence
  Description of Artificial Sequence: Synthetic peptide
  XENP017930 vhCDR3
YYDSSFDY

SEQ ID NO: 10999 - protein, 11 aa, Artificial Sequence
  Description of Artificial Sequence: Synthetic peptide
  XENP017930 vlCDR1
KASQDVGTAVA

SEQ ID NO: 11000 - protein, 7 aa, Artificial Sequence
  Description of Artificial Sequence: Synthetic peptide
  XENP017930 vlCDR2
WASTRHT

SEQ ID NO: 11001 - protein, 9 aa, Artificial Sequence
  Description of Artificial Sequence: Synthetic peptide
  XENP017930 vlCDR3
QHYSIYPWT

SEQ ID NO: 11002 - protein, 244 aa, Artificial Sequence
  Description of Artificial Sequence: Synthetic polypeptide
  XENP017931 6A3_H1L2_scFv(GKPGS)4
EVQLLESGGGLVQPGGSLRLSCAASGFTFSSYGMSWVRQAPGKRLEWVSTISGGGRYTYYPDSVKGRFTISRDNSKNTLYLQMNSLRAEDTAVYYCASYYDSSFDYWGQGTLVTVSSGKPGSGKPGSGKPGSGKPGSDIVMTQSPATLSVSPGERATLSCRASQDVGTAVAWYQQKPGQSPRLLIYWASTRHTGVPDRFTGSGSGTEFTLTISSLQSEDFAVYFCQHYSIYPWTFGGGTKVEIK

SEQ ID NO: 11003 - protein, 117 aa, Artificial Sequence; identical to SEQ ID NO: 10994
  Description of Artificial Sequence: Synthetic polypeptide
  VH of XENP017931

SEQ ID NO: 11004 - protein, 107 aa, Artificial Sequence
  Description of Artificial Sequence: Synthetic polypeptide
  VL of XENP017931
DIVMTQSPATLSVSPGERATLSCRASQDVGTAVAWYQQKPGQSPRLLIYWASTRHTGVPDRFTGSGSGTEFTLTISSLQSEDFAVYFCQHYSIYPWTFGGGTKVEIK

SEQ ID NO: 11005 - protein, 5 aa, Artificial Sequence
  Description of Artificial Sequence: Synthetic peptide
  XENP017931 vhCDR1
SYGMS

SEQ ID NO: 11006 - protein, 17 aa, Artificial Sequence
  Description of Artificial Sequence: Synthetic peptide
  XENP017931 vhCDR2
TISGGGRYTYYPDSVKG

SEQ ID NO: 11007 - protein, 8 aa, Artificial Sequence
  Description of Artificial Sequence: Synthetic peptide
  XENP017931 vhCDR3
YYDSSFDY

SEQ ID NO: 11008 - protein, 11 aa, Artificial Sequence
  Description of Artificial Sequence: Synthetic peptide
  XENP017931 vlCDR1
RASQDVGTAVA

SEQ ID NO: 11009 - protein, 7 aa, Artificial Sequence
  Description of Artificial Sequence: Synthetic peptide
  XENP017931 vlCDR2
WASTRHT

SEQ ID NO: 11010 - protein, 9 aa, Artificial Sequence
  Description of Artificial Sequence: Synthetic peptide
  XENP017931 vlCDR3
QHYSIYPWT

SEQ ID NO: 11011 - protein, 244 aa, Artificial Sequence
  Description of Artificial Sequence: Synthetic polypeptide
  XENP017932 6A3_H1L3_scFv(GKPGS)4
EVQLLESGGGLVQPGGSLRLSCAASGFTFSSYGMSWVRQAPGKRLEWVSTISGGGRYTYYPDSVKGRFTISRDNSKNTLYLQMNSLRAEDTAVYYCASYYDSSFDYWGQGTLVTVSSGKPGSGKPGSGKPGSGKPGSDIVMTQSPSSLSASVGDRVTITCRASQDVGTAVAWYQQKPGKSPKLLIYWASTRHTGVPDRFTGSGSGTDFTLTISSLQPEDFATYFCQHYSIYPWTFGGGTKVEIK

SEQ ID NO: 11012 - protein, 117 aa, Artificial Sequence; identical to SEQ ID NO: 10994
  Description of Artificial Sequence: Synthetic polypeptide
  VH of XENP017932

SEQ ID NO: 11013 - protein, 107 aa, Artificial Sequence
  Description of Artificial Sequence: Synthetic polypeptide
  VL of XENP017932
DIVMTQSPSSLSASVGDRVTITCRASQDVGTAVAWYQQKPGKSPKLLIYWASTRHTGVPDRFTGSGSGTDFTLTISSLQPEDFATYFCQHYSIYPWTFGGGTKVEIK

SEQ ID NO: 11014 - protein, 5 aa, Artificial Sequence
  Description of Artificial Sequence: Synthetic peptide
  XENP017932 vhCDR1
SYGMS

SEQ ID NO: 11015 - protein, 17 aa, Artificial Sequence
  Description of Artificial Sequence: Synthetic peptide
  XENP017932 vhCDR2
TISGGGRYTYYPDSVKG

SEQ ID NO: 11016 - protein, 8 aa, Artificial Sequence
  Description of Artificial Sequence: Synthetic peptide
  XENP017932 vhCDR3
YYDSSFDY

SEQ ID NO: 11017 - protein, 11 aa, Artificial Sequence
  Description of Artificial Sequence: Synthetic peptide
  XENP017932 vlCDR1
RASQDVGTAVA

SEQ ID NO: 11018 - protein, 7 aa, Artificial Sequence
  Description of Artificial Sequence: Synthetic peptide
  XENP017932 vlCDR2
WASTRHT

SEQ ID NO: 11019 - protein, 9 aa, Artificial Sequence
  Description of Artificial Sequence: Synthetic peptide
  XENP017932 vlCDR3
QHYSIYPWT

SEQ ID NO: 11020 - protein, 244 aa, Artificial Sequence
  Description of Artificial Sequence: Synthetic polypeptide
  XENP017933 6A3_H2L3_scFv(GKPGS)4
QVQLVESGGGLVKPGGSLRLSCAASGFTFSSYGMSWVRQAPGKRLEWVSTISGGGRYTYYPDSVKGRFTISRDNAKNSLYLQMNSLRAEDTAVYYCASYYDSSFDYWGQGTLVTVSSGKPGSGKPGSGKPGSGKPGSDIVMTQSPSSLSASVGDRVTITCRASQDVGTAVAWYQQKPGKSPKLLIYWASTRHTGVPDRFTGSGSGTDFTLTISSLQPEDFATYFCQHYSIYPWTFGGGTKVEIK

SEQ ID NO: 11021 - protein, 117 aa, Artificial Sequence
  Description of Artificial Sequence: Synthetic polypeptide
  VH of XENP017933
QVQLVESGGGLVKPGGSLRLSCAASGFTFSSYGMSWVRQAPGKRLEWVSTISGGGRYTYYPDSVKGRFTISRDNAKNSLYLQMNSLRAEDTAVYYCASYYDSSFDYWGQGTLVTVSS

SEQ ID NO: 11022 - protein, 107 aa, Artificial Sequence; identical to SEQ ID NO: 11013
  Description of Artificial Sequence: Synthetic polypeptide
  VL of XENP017933

SEQ ID NO: 11023 - protein, 5 aa, Artificial Sequence
  Description of Artificial Sequence: Synthetic peptide
  XENP017933 vhCDR1
SYGMS

SEQ ID NO: 11024 - protein, 17 aa, Artificial Sequence
  Description of Artificial Sequence: Synthetic peptide
  XENP017933 vhCDR2
TISGGGRYTYYPDSVKG

SEQ ID NO: 11025 - protein, 8 aa, Artificial Sequence
  Description of Artificial Sequence: Synthetic peptide
  XENP017933 vhCDR3
YYDSSFDY

SEQ ID NO: 11026 - protein, 11 aa, Artificial Sequence
  Description of Artificial Sequence: Synthetic peptide
  XENP017933 vlCDR1
RASQDVGTAVA

SEQ ID NO: 11027 - protein, 7 aa, Artificial Sequence
  Description of Artificial Sequence: Synthetic peptide
  XENP017933 vlCDR2
WASTRHT

SEQ ID NO: 11028 - protein, 9 aa, Artificial Sequence
  Description of Artificial Sequence: Synthetic peptide
  XENP017933 vlCDR3
QHYSIYPWT

SEQ ID NO: 11029 - protein, 244 aa, Artificial Sequence
  Description of Artificial Sequence: Synthetic polypeptide
  XENP017934 6A3_H1.1_L3_scFv(GKPGS)4
EVQLLESGGGLVQPGGSLRLSCAASGFTFSSYGMSWVRQAPGKGLEWVSTISGGGRYTYYPDSVKGRFTISRDNSKNTLYLQMNSLRAEDTAVYYCASYYDSSFDYWGQGTLVTVSSGKPGSGKPGSGKPGSGKPGSDIVMTQSPSSLSASVGDRVTITCRASQDVGTAVAWYQQKPGKSPKLLIYWASTRHTGVPDRFTGSGSGTDFTLTISSLQPEDFATYFCQHYSIYPWTFGGGTKVEIK

SEQ ID NO: 11030 - protein, 117 aa, Artificial Sequence
  Description of Artificial Sequence: Synthetic polypeptide
  VH of XENP017934
EVQLLESGGGLVQPGGSLRLSCAASGFTFSSYGMSWVRQAPGKGLEWVSTISGGGRYTYYPDSVKGRFTISRDNSKNTLYLQMNSLRAEDTAVYYCASYYDSSFDYWGQGTLVTVSS

SEQ ID NO: 11031 - protein, 107 aa, Artificial Sequence; identical to SEQ ID NO: 11013
  Description of Artificial Sequence: Synthetic polypeptide
  VL of XENP017934

SEQ ID NO: 11032 - protein, 5 aa, Artificial Sequence
  Description of Artificial Sequence: Synthetic peptide
  XENP017934 vhCDR1
SYGMS

SEQ ID NO: 11033 - protein, 17 aa, Artificial Sequence
  Description of Artificial Sequence: Synthetic peptide
  XENP017934 vhCDR2
TISGGGRYTYYPDSVKG

SEQ ID NO: 11034 - protein, 8 aa, Artificial Sequence
  Description of Artificial Sequence: Synthetic peptide
  XENP017934 vhCDR3
YYDSSFDY

SEQ ID NO: 11035 - protein, 11 aa, Artificial Sequence
  Description of Artificial Sequence: Synthetic peptide
  XENP017934 vlCDR1
RASQDVGTAVA

SEQ ID NO: 11036 - protein, 7 aa, Artificial Sequence
  Description of Artificial Sequence: Synthetic peptide
  XENP017934 vlCDR2
WASTRHT

SEQ ID NO: 11037 - protein, 9 aa, Artificial Sequence
  Description of Artificial Sequence: Synthetic peptide
  XENP017934 vlCDR3
QHYSIYPWT

SEQ ID NO: 11038 - protein, 249 aa, Artificial Sequence
  Description of Artificial Sequence: Synthetic polypeptide
  XENP018493 1G6_H1.1_L1_scFv(GKPGS)4
QVQLVESGGGLVKPGGSLRLSCAASGFTFSNYWMNWVRQAPGKGLEWVGEIRLKSNNYATHYAEPVKGRFTISRDDSKSTVYLQMNSLKTEDTAVYYCTRYYGNYGGYFDVWGAGTLVTVSSGKPGSGKPGSGKPGSGKPGSSIVMTQSPATLSVSPGERATLSCRASQSVSNDVAWYQQKPGQSPRLLINYASHRYTGVPDRFTGSGYGTEFTLTISSLQSEDFAVYFCQQDYSSPRTFGGGTKVEIK

SEQ ID NO: 11039 - protein, 122 aa, Artificial Sequence
  Description of Artificial Sequence: Synthetic polypeptide
  VH of XENP018493
QVQLVESGGGLVKPGGSLRLSCAASGFTFSNYWMNWVRQAPGKGLEWVGEIRLKSNNYATHYAEPVKGRFTISRDDSKSTVYLQMNSLKTEDTAVYYCTRYYGNYGGYFDVWGAGTLVTVSS

SEQ ID NO: 11040 - protein, 107 aa, Artificial Sequence; identical to SEQ ID NO: 10923
  Description of Artificial Sequence: Synthetic polypeptide
  VL of XENP018493

SEQ ID NO: 11041 - protein, 5 aa, Artificial Sequence
  Description of Artificial Sequence: Synthetic peptide
  XENP018493 vhCDR1
NYWMN

SEQ ID NO: 11042 - protein, 19 aa, Artificial Sequence
  Description of Artificial Sequence: Synthetic peptide
  XENP018493 vhCDR2
EIRLKSNNYATHYAEPVKG

SEQ ID NO: 11043 - protein, 11 aa, Artificial Sequence
  Description of Artificial Sequence: Synthetic peptide
  XENP018493 vhCDR3
YYGNYGGYFDV

SEQ ID NO: 11044 - protein, 11 aa, Artificial Sequence
  Description of Artificial Sequence: Synthetic peptide
  XENP018493 vlCDR1
RASQSVSNDVA

SEQ ID NO: 11045 - protein, 7 aa, Artificial Sequence
  Description of Artificial Sequence: Synthetic peptide
  XENP018493 vlCDR2
YASHRYT

SEQ ID NO: 11046 - protein, 9 aa, Artificial Sequence
  Description of Artificial Sequence: Synthetic peptide
  XENP018493 vlCDR3
QQDYSSPRT

SEQ ID NO: 11047 - protein, 249 aa, Artificial Sequence
  Description of Artificial Sequence: Synthetic polypeptide
  XENP018494 1G6_H1.2_L1_scFv(GKPGS)4
EVKLVESGGGLVKPGGSLRLSCAASGFTFSNYWMNWVRQAPGKGLEWVGEIRLKSNNYATHYAEPVKGRFTISRDDSKSTVYLQMNSLKTEDTAVYYCTRYYGNYGGYFDVWGAGTLVTVSSGKPGSGKPGSGKPGSGKPGSSIVMTQSPATLSVSPGERATLSCRASQSVSNDVAWYQQKPGQSPRLLINYASHRYTGVPDRFTGSGYGTEFTLTISSLQSEDFAVYFCQQDYSSPRTFGGGTKVEIK

SEQ ID NO: 11048 - protein, 122 aa, Artificial Sequence
  Description of Artificial Sequence: Synthetic polypeptide
  VH of XENP018494
EVKLVESGGGLVKPGGSLRLSCAASGFTFSNYWMNWVRQAPGKGLEWVGEIRLKSNNYATHYAEPVKGRFTISRDDSKSTVYLQMNSLKTEDTAVYYCTRYYGNYGGYFDVWGAGTLVTVSS

SEQ ID NO: 11049 - protein, 107 aa, Artificial Sequence; identical to SEQ ID NO: 10923
  Description of Artificial Sequence: Synthetic polypeptide
  VL of XENP018494

SEQ ID NO: 11050 - protein, 5 aa, Artificial Sequence
  Description of Artificial Sequence: Synthetic peptide
  XENP018494 vhCDR1
NYWMN

SEQ ID NO: 11051 - protein, 19 aa, Artificial Sequence
  Description of Artificial Sequence: Synthetic peptide
  XENP018494 vhCDR2
EIRLKSNNYATHYAEPVKG

SEQ ID NO: 11052 - protein, 11 aa, Artificial Sequence
  Description of Artificial Sequence: Synthetic peptide
  XENP018494 vhCDR3
YYGNYGGYFDV

SEQ ID NO: 11053 - protein, 11 aa, Artificial Sequence
  Description of Artificial Sequence: Synthetic peptide
  XENP018494 vlCDR1
RASQSVSNDVA

SEQ ID NO: 11054 - protein, 7 aa, Artificial Sequence
  Description of Artificial Sequence: Synthetic peptide
  XENP018494 vlCDR2
YASHRYT

SEQ ID NO: 11055 - protein, 9 aa, Artificial Sequence
  Description of Artificial Sequence: Synthetic peptide
  XENP018494 vlCDR3
QQDYSSPRT

SEQ ID NO: 11056 - protein, 249 aa, Artificial Sequence
  Description of Artificial Sequence: Synthetic polypeptide
  XENP018495 1G6_H1.3_L1_scFv(GKPGS)4
EVQLEESGGGLVKPGGSLRLSCAASGFTFSNYWMNWVRQAPGKGLEWVGEIRLKSNNYATHYAEPVKGRFTISRDDSKSTVYLQMNSLKTEDTAVYYCTRYYGNYGGYFDVWGAGTLVTVSSGKPGSGKPGSGKPGSGKPGSSIVMTQSPATLSVSPGERATLSCRASQSVSNDVAWYQQKPGQSPRLLINYASHRYTGVPDRFTGSGYGTEFTLTISSLQSEDFAVYFCQQDYSSPRTFGGGTKVEIK

SEQ ID NO: 11057 - protein, 122 aa, Artificial Sequence
  Description of Artificial Sequence: Synthetic polypeptide
  VH of XENP018495
EVQLEESGGGLVKPGGSLRLSCAASGFTFSNYWMNWVRQAPGKGLEWVGEIRLKSNNYATHYAEPVKGRFTISRDDSKSTVYLQMNSLKTEDTAVYYCTRYYGNYGGYFDVWGAGTLVTVSS

SEQ ID NO: 11058 - protein, 107 aa, Artificial Sequence; identical to SEQ ID NO: 10923
  Description of Artificial Sequence: Synthetic polypeptide
  VL of XENP018495

SEQ ID NO: 11059 - protein, 5 aa, Artificial Sequence
  Description of Artificial Sequence: Synthetic peptide
  XENP018495 vhCDR1
NYWMN

SEQ ID NO: 11060 - protein, 19 aa, Artificial Sequence
  Description of Artificial Sequence: Synthetic peptide
  XENP018495 vhCDR2
EIRLKSNNYATHYAEPVKG

SEQ ID NO: 11061 - protein, 11 aa, Artificial Sequence
  Description of Artificial Sequence: Synthetic peptide
  XENP018495 vhCDR3
YYGNYGGYFDV

SEQ ID NO: 11062 - protein, 11 aa, Artificial Sequence
  Description of Artificial Sequence: Synthetic peptide
  XENP018495 vlCDR1
RASQSVSNDVA

SEQ ID NO: 11063 - protein, 7 aa, Artificial Sequence
  Description of Artificial Sequence: Synthetic peptide
  XENP018495 vlCDR2
YASHRYT

SEQ ID NO: 11064 - protein, 9 aa, Artificial Sequence
  Description of Artificial Sequence: Synthetic peptide
  XENP018495 vlCDR3
QQDYSSPRT

SEQ ID NO: 11065 - protein, 249 aa, Artificial Sequence
  Description of Artificial Sequence: Synthetic polypeptide
  XENP018496 1G6_H1.4_L1_scFv(GKPGS)4
EVQLVESGGGLVQPGGSLRLSCAASGFTFSNYWMNWVRQAPGKGLEWVGEIRLKSNNYATHYAEPVKGRFTISRDDSKSTVYLQMNSLKTEDTAVYYCTRYYGNYGGYFDVWGAGTLVTVSSGKPGSGKPGSGKPGSGKPGSSIVMTQSPATLSVSPGERATLSCRASQSVSNDVAWYQQKPGQSPRLLINYASHRYTGVPDRFTGSGYGTEFTLTISSLQSEDFAVYFCQQDYSSPRTFGGGTKVEIK

SEQ ID NO: 11066 - protein, 122 aa, Artificial Sequence
  Description of Artificial Sequence: Synthetic polypeptide
  VH of XENP018496
EVQLVESGGGLVQPGGSLRLSCAASGFTFSNYWMNWVRQAPGKGLEWVGEIRLKSNNYATHYAEPVKGRFTISRDDSKSTVYLQMNSLKTEDTAVYYCTRYYGNYGGYFDVWGAGTLVTVSS

SEQ ID NO: 11067 - protein, 107 aa, Artificial Sequence; identical to SEQ ID NO: 10923
  Description of Artificial Sequence: Synthetic polypeptide
  VL of XENP018496

SEQ ID NO: 11068 - protein, 5 aa, Artificial Sequence
  Description of Artificial Sequence: Synthetic peptide
  XENP018496 vhCDR1
NYWMN

SEQ ID NO: 11069 - protein, 19 aa, Artificial Sequence
  Description of Artificial Sequence: Synthetic peptide
  XENP018496 vhCDR2
EIRLKSNNYATHYAEPVKG

SEQ ID NO: 11070 - protein, 11 aa, Artificial Sequence
  Description of Artificial Sequence: Synthetic peptide
  XENP018496 vhCDR3
YYGNYGGYFDV

SEQ ID NO: 11071 - protein, 11 aa, Artificial Sequence
  Description of Artificial Sequence: Synthetic peptide
  XENP018496 vlCDR1
RASQSVSNDVA

SEQ ID NO: 11072 - protein, 7 aa, Artificial Sequence
  Description of Artificial Sequence: Synthetic peptide
  XENP018496 vlCDR2
YASHRYT

SEQ ID NO: 11073 - protein, 9 aa, Artificial Sequence
  Description of Artificial Sequence: Synthetic peptide
  XENP018496 vlCDR3
QQDYSSPRT

SEQ ID NO: 11074 - protein, 249 aa, Artificial Sequence
  Description of Artificial Sequence: Synthetic polypeptide
  XENP018501 1G6_H1.5_L1_scFv(GKPGS)4
EVQLVESGGGLVRPGGSLRLSCAASGFTFSNYWMNWVRQAPGKGLEWVGEIRLKSNNYATHYAEPVKGRFTISRDDSKSTVYLQMNSLKTEDTAVYYCTRYYGNYGGYFDVWGAGTLVTVSSGKPGSGKPGSGKPGSGKPGSSIVMTQSPATLSVSPGERATLSCRASQSVSNDVAWYQQKPGQSPRLLINYASHRYTGVPDRFTGSGYGTEFTLTISSLQSEDFAVYFCQQDYSSPRTFGGGTKVEIK

SEQ ID NO: 11075 - protein, 122 aa, Artificial Sequence
  Description of Artificial Sequence: Synthetic polypeptide
  VH of XENP018501
EVQLVESGGGLVRPGGSLRLSCAASGFTFSNYWMNWVRQAPGKGLEWVGEIRLKSNNYATHYAEPVKGRFTISRDDSKSTVYLQMNSLKTEDTAVYYCTRYYGNYGGYFDVWGAGTLVTVSS

SEQ ID NO: 11076 - protein, 107 aa, Artificial Sequence; identical to SEQ ID NO: 10923
  Description of Artificial Sequence: Synthetic polypeptide
  VL of XENP018501

SEQ ID NO: 11077 - protein, 5 aa, Artificial Sequence
  Description of Artificial Sequence: Synthetic peptide
  XENP018501 vhCDR1
NYWMN

SEQ ID NO: 11078 - protein, 19 aa, Artificial Sequence
  Description of Artificial Sequence: Synthetic peptide
  XENP018501 vhCDR2
EIRLKSNNYATHYAEPVKG

SEQ ID NO: 11079 - protein, 11 aa, Artificial Sequence
  Description of Artificial Sequence: Synthetic peptide
  XENP018501 vhCDR3
YYGNYGGYFDV

SEQ ID NO: 11080 - protein, 11 aa, Artificial Sequence
  Description of Artificial Sequence: Synthetic peptide
  XENP018501 vlCDR1
RASQSVSNDVA

SEQ ID NO: 11081 - protein, 7 aa, Artificial Sequence
  Description of Artificial Sequence: Synthetic peptide
  XENP018501 vlCDR2
YASHRYT

SEQ ID NO: 11082 - protein, 9 aa, Artificial Sequence
  Description of Artificial Sequence: Synthetic peptide
  XENP018501 vlCDR3
QQDYSSPRT

SEQ ID NO: 11083 - protein, 249 aa, Artificial Sequence
  Description of Artificial Sequence: Synthetic polypeptide
  XENP018502 1G6_H1.6_L1_scFv(GKPGS)4
EVQLVESGGGLVKPGGSMRLSCAASGFTFSNYWMNWVRQAPGKGLEWVGEIRLKSNNYATHYAEPVKGRFTISRDDSKSTVYLQMNSLKTEDTAVYYCTRYYGNYGGYFDVWGAGTLVTVSSGKPGSGKPGSGKPGSGKPGSSIVMTQSPATLSVSPGERATLSCRASQSVSNDVAWYQQKPGQSPRLLINYASHRYTGVPDRFTGSGYGTEFTLTISSLQSEDFAVYFCQQDYSSPRTFGGGTKVEIK

SEQ ID NO: 11084 - protein, 122 aa, Artificial Sequence
  Description of Artificial Sequence: Synthetic polypeptide
  VH of XENP018502
EVQLVESGGGLVKPGGSMRLSCAASGFTFSNYWMNWVRQAPGKGLEWVGEIRLKSNNYATHYAEPVKGRFTISRDDSKSTVYLQMNSLKTEDTAVYYCTRYYGNYGGYFDVWGAGTLVTVSS

SEQ ID NO: 11085 - protein, 107 aa, Artificial Sequence; identical to SEQ ID NO: 10923
  Description of Artificial Sequence: Synthetic polypeptide
  VL of XENP018502

SEQ ID NO: 11086 - protein, 5 aa, Artificial Sequence
  Description of Artificial Sequence: Synthetic peptide
  XENP018502 vhCDR1
NYWMN

SEQ ID NO: 11087 - protein, 19 aa, Artificial Sequence
  Description of Artificial Sequence: Synthetic peptide
  XENP018502 vhCDR2
EIRLKSNNYATHYAEPVKG

SEQ ID NO: 11088 - protein, 11 aa, Artificial Sequence
  Description of Artificial Sequence: Synthetic peptide
  XENP018502 vhCDR3
YYGNYGGYFDV

SEQ ID NO: 11089 - protein, 11 aa, Artificial Sequence
  Description of Artificial Sequence: Synthetic peptide
  XENP018502 vlCDR1
RASQSVSNDVA

SEQ ID NO: 11090 - protein, 7 aa, Artificial Sequence
  Description of Artificial Sequence: Synthetic peptide
  XENP018502 vlCDR2
YASHRYT

SEQ ID NO: 11091 - protein, 9 aa, Artificial Sequence
  Description of Artificial Sequence: Synthetic peptide
  XENP018502 vlCDR3
QQDYSSPRT

SEQ ID NO: 11092 - protein, 249 aa, Artificial Sequence
  Description of Artificial Sequence: Synthetic polypeptide
  XENP018503 1G6_H1.7_L1_scFv(GKPGS)4
EVQLVESGGGLVKPGGSLKLSCAASGFTFSNYWMNWVRQAPGKGLEWVGEIRLKSNNYATHYAEPVKGRFTISRDDSKSTVYLQMNSLKTEDTAVYYCTRYYGNYGGYFDVWGAGTLVTVSSGKPGSGKPGSGKPGSGKPGSSIVMTQSPATLSVSPGERATLSCRASQSVSNDVAWYQQKPGQSPRLLINYASHRYTGVPDRFTGSGYGTEFTLTISSLQSEDFAVYFCQQDYSSPRTFGGGTKVEIK

SEQ ID NO: 11093 - protein, 122 aa, Artificial Sequence
  Description of Artificial Sequence: Synthetic polypeptide
  VH of XENP018503
EVQLVESGGGLVKPGGSLKLSCAASGFTFSNYWMNWVRQAPGKGLEWVGEIRLKSNNYATHYAEPVKGRFTISRDDSKSTVYLQMNSLKTEDTAVYYCTRYYGNYGGYFDVWGAGTLVTVSS

SEQ ID NO: 11094 - protein, 107 aa, Artificial Sequence; identical to SEQ ID NO: 10923
  Description of Artificial Sequence: Synthetic polypeptide
  VL of XENP018503

SEQ ID NO: 11095 - protein, 5 aa, Artificial Sequence
  Description of Artificial Sequence: Synthetic peptide
  XENP018503 vhCDR1
NYWMN

SEQ ID NO: 11096 - protein, 19 aa, Artificial Sequence
  Description of Artificial Sequence: Synthetic peptide
  XENP018503 vhCDR2
EIRLKSNNYATHYAEPVKG

SEQ ID NO: 11097 - protein, 11 aa, Artificial Sequence
  Description of Artificial Sequence: Synthetic peptide
  XENP018503 vhCDR3
YYGNYGGYFDV

SEQ ID NO: 11098 - protein, 11 aa, Artificial Sequence
  Description of Artificial Sequence: Synthetic peptide
  XENP018503 vlCDR1
RASQSVSNDVA

SEQ ID NO: 11099 - protein, 7 aa, Artificial Sequence
  Description of Artificial Sequence: Synthetic peptide
  XENP018503 vlCDR2
YASHRYT

SEQ ID NO: 11100 - protein, 9 aa, Artificial Sequence
  Description of Artificial Sequence: Synthetic peptide
  XENP018503 vlCDR3
QQDYSSPRT

SEQ ID NO: 11101 - protein, 249 aa, Artificial Sequence
  Description of Artificial Sequence: Synthetic polypeptide
  XENP018504 1G6_H1.8_L1_scFv(GKPGS)4
EVQLVESGGGLVKPGGSLRLSCVASGFTFSNYWMNWVRQAPGKGLEWVGEIRLKSNNYATHYAEPVKGRFTISRDDSKSTVYLQMNSLKTEDTAVYYCTRYYGNYGGYFDVWGAGTLVTVSSGKPGSGKPGSGKPGSGKPGSSIVMTQSPATLSVSPGERATLSCRASQSVSNDVAWYQQKPGQSPRLLINYASHRYTGVPDRFTGSGYGTEFTLTISSLQSEDFAVYFCQQDYSSPRTFGGGTKVEIK

SEQ ID NO: 11102 - protein, 122 aa, Artificial Sequence
  Description of Artificial Sequence: Synthetic polypeptide
  VH of XENP018504
EVQLVESGGGLVKPGGSLRLSCVASGFTFSNYWMNWVRQAPGKGLEWVGEIRLKSNNYATHYAEPVKGRFTISRDDSKSTVYLQMNSLKTEDTAVYYCTRYYGNYGGYFDVWGAGTLVTVSS

SEQ ID NO: 11103 - protein, 107 aa, Artificial Sequence; identical to SEQ ID NO: 10923
  Description of Artificial Sequence: Synthetic polypeptide
  VL of XENP018504

SEQ ID NO: 11104 - protein, 5 aa, Artificial Sequence
  Description of Artificial Sequence: Synthetic peptide
  XENP018504 vhCDR1
NYWMN

SEQ ID NO: 11105 - protein, 19 aa, Artificial Sequence
  Description of Artificial Sequence: Synthetic peptide
  XENP018504 vhCDR2
EIRLKSNNYATHYAEPVKG

SEQ ID NO: 11106 - protein, 11 aa, Artificial Sequence
  Description of Artificial Sequence: Synthetic peptide
  XENP018504 vhCDR3
YYGNYGGYFDV

SEQ ID NO: 11107 - protein, 11 aa, Artificial Sequence
  Description of Artificial Sequence: Synthetic peptide
  XENP018504 vlCDR1
RASQSVSNDVA

SEQ ID NO: 11108 - protein, 7 aa, Artificial Sequence
  Description of Artificial Sequence: Synthetic peptide
  XENP018504 vlCDR2
YASHRYT

SEQ ID NO: 11109 - protein, 9 aa, Artificial Sequence
  Description of Artificial Sequence: Synthetic peptide
  XENP018504 vlCDR3
QQDYSSPRT

SEQ ID NO: 11110 - protein, 249 aa, Artificial Sequence
  Description of Artificial Sequence: Synthetic polypeptide
  XENP018505 1G6_H1.9_L1_scFv(GKPGS)4
EVQLVESGGGLVKPGGSLRLSCAASGFTVSNYWMNWVRQAPGKGLEWVGEIRLKSNNYATHYAEPVKGRFTISRDDSKSTVYLQMNSLKTEDTAVYYCTRYYGNYGGYFDVWGAGTLVTVSSGKPGSGKPGSGKPGSGKPGSSIVMTQSPATLSVSPGERATLSCRASQSVSNDVAWYQQKPGQSPRLLINYASHRYTGVPDRFTGSGYGTEFTLTISSLQSEDFAVYFCQQDYSSPRTFGGGTKVEIK

SEQ ID NO: 11111 - protein, 122 aa, Artificial Sequence
  Description of Artificial Sequence: Synthetic polypeptide
  VH of XENP018505
EVQLVESGGGLVKPGGSLRLSCAASGFTVSNYWMNWVRQAPGKGLEWVGEIRLKSNNYATHYAEPVKGRFTISRDDSKSTVYLQMNSLKTEDTAVYYCTRYYGNYGGYFDVWGAGTLVTVSS

SEQ ID NO: 11112 - protein, 107 aa, Artificial Sequence; identical to SEQ ID NO: 10923
  Description of Artificial Sequence: Synthetic polypeptide
  VL of XENP018505

SEQ ID NO: 11113 - protein, 5 aa, Artificial Sequence
  Description of Artificial Sequence: Synthetic peptide
  XENP018505 vhCDR1
NYWMN

SEQ ID NO: 11114 - protein, 19 aa, Artificial Sequence
  Description of Artificial Sequence: Synthetic peptide
  XENP018505 vhCDR2
EIRLKSNNYATHYAEPVKG

SEQ ID NO: 11115 - protein, 11 aa, Artificial Sequence
  Description of Artificial Sequence: Synthetic peptide
  XENP018505 vhCDR3
YYGNYGGYFDV

SEQ ID NO: 11116 - protein, 11 aa, Artificial Sequence
  Description of Artificial Sequence: Synthetic peptide
  XENP018505 vlCDR1
RASQSVSNDVA

SEQ ID NO: 11117 - protein, 7 aa, Artificial Sequence
  Description of Artificial Sequence: Synthetic peptide
  XENP018505 vlCDR2
YASHRYT

SEQ ID NO: 11118 - protein, 9 aa, Artificial Sequence
  Description of Artificial Sequence: Synthetic peptide
  XENP018505 vlCDR3
QQDYSSPRT

SEQ ID NO: 11119 - protein, 249 aa, Artificial Sequence
  Description of Artificial Sequence: Synthetic polypeptide
  XENP018506 1G6_H1.10_L1_scFv(GKPGS)4
EVQLVESGGGLVKPGGSLRLSCAASGFTFTNYWMNWVRQAPGKGLEWVGEIRLKSNNYATHYAEPVKGRFTISRDDSKSTVYLQMNSLKTEDTAVYYCTRYYGNYGGYFDVWGAGTLVTVSSGKPGSGKPGSGKPGSGKPGSSIVMTQSPATLSVSPGERATLSCRASQSVSNDVAWYQQKPGQSPRLLINYASHRYTGVPDRFTGSGYGTEFTLTISSLQSEDFAVYFCQQDYSSPRTFGGGTKVEIK

SEQ ID NO: 11120 - protein, 122 aa, Artificial Sequence
  Description of Artificial Sequence: Synthetic polypeptide
  VH of XENP018506
EVQLVESGGGLVKPGGSLRLSCAASGFTFTNYWMNWVRQAPGKGLEWVGEIRLKSNNYATHYAEPVKGRFTISRDDSKSTVYLQMNSLKTEDTAVYYCTRYYGNYGGYFDVWGAGTLVTVSS

SEQ ID NO: 11121 - protein, 107 aa, Artificial Sequence; identical to SEQ ID NO: 10923
  Description of Artificial Sequence: Synthetic polypeptide
  VL of XENP018506

SEQ ID NO: 11122 - protein, 5 aa, Artificial Sequence
  Description of Artificial Sequence: Synthetic peptide
  XENP018506 vhCDR1
NYWMN

SEQ ID NO: 11123 - protein, 19 aa, Artificial Sequence
  Description of Artificial Sequence: Synthetic peptide
  XENP018506 vhCDR2
EIRLKSNNYATHYAEPVKG

SEQ ID NO: 11124 - protein, 11 aa, Artificial Sequence
  Description of Artificial Sequence: Synthetic peptide
  XENP018506 vhCDR3
YYGNYGGYFDV

SEQ ID NO: 11125 - protein, 11 aa, Artificial Sequence
  Description of Artificial Sequence: Synthetic peptide
  XENP018506 vlCDR1
RASQSVSNDVA

SEQ ID NO: 11126 - protein, 7 aa, Artificial Sequence
  Description of Artificial Sequence: Synthetic peptide
  XENP018506 vlCDR2
YASHRYT

SEQ ID NO: 11127 - protein, 9 aa, Artificial Sequence
  Description of Artificial Sequence: Synthetic peptide
  XENP018506 vlCDR3
QQDYSSPRT

SEQ ID NO: 11128 - protein, 249 aa, Artificial Sequence
  Description of Artificial Sequence: Synthetic polypeptide
  XENP018507 1G6_H1.11_L1_scFv(GKPGS)4
EVQLVESGGGLVKPGGSLRLSCAASGFTFANYWMNWVRQAPGKGLEWVGEIRLKSNNYATHYAEPVKGRFTISRDDSKSTVYLQMNSLKTEDTAVYYCTRYYGNYGGYFDVWGAGTLVTVSSGKPGSGKPGSGKPGSGKPGSSIVMTQSPATLSVSPGERATLSCRASQSVSNDVAWYQQKPGQSPRLLINYASHRYTGVPDRFTGSGYGTEFTLTISSLQSEDFAVYFCQQDYSSPRTFGGGTKVEIK

SEQ ID NO: 11129 - protein, 122 aa, Artificial Sequence
  Description of Artificial Sequence: Synthetic polypeptide
  VH of XENP018507
EVQLVESGGGLVKPGGSLRLSCAASGFTFANYWMNWVRQAPGKGLEWVGEIRLKSNNYATHYAEPVKGRFTISRDDSKSTVYLQMNSLKTEDTAVYYCTRYYGNYGGYFDVWGAGTLVTVSS

SEQ ID NO: 11130 - protein, 107 aa, Artificial Sequence; identical to SEQ ID NO: 10923
  Description of Artificial Sequence: Synthetic polypeptide
  VL of XENP018507

SEQ ID NO: 11131 - protein, 5 aa, Artificial Sequence
  Description of Artificial Sequence: Synthetic peptide
  XENP018507 vhCDR1
NYWMN

SEQ ID NO: 11132 - protein, 19 aa, Artificial Sequence
  Description of Artificial Sequence: Synthetic peptide
  XENP018507 vhCDR2
EIRLKSNNYATHYAEPVKG

SEQ ID NO: 11133 - protein, 11 aa, Artificial Sequence
  Description of Artificial Sequence: Synthetic peptide
  XENP018507 vhCDR3
YYGNYGGYFDV

SEQ ID NO: 11134 - protein, 11 aa, Artificial Sequence
  Description of Artificial Sequence: Synthetic peptide
  XENP018507 vlCDR1
RASQSVSNDVA

SEQ ID NO: 11135 - protein, 7 aa, Artificial Sequence
  Description of Artificial Sequence: Synthetic peptide
  XENP018507 vlCDR2
YASHRYT

SEQ ID NO: 11136 - protein, 9 aa, Artificial Sequence
  Description of Artificial Sequence: Synthetic peptide
  XENP018507 vlCDR3
QQDYSSPRT

SEQ ID NO: 11137 - protein, 249 aa, Artificial Sequence
  Description of Artificial Sequence: Synthetic polypeptide
  XENP018508 1G6_H1.12_L1_scFv(GKPGS)4
EVQLVESGGGLVKPGGSLRLSCAASGFTFQNYWMNWVRQAPGKGLEWVGEIRLKSNNYATHYAEPVKGRFTISRDDSKSTVYLQMNSLKTEDTAVYYCTRYYGNYGGYFDVWGAGTLVTVSSGKPGSGKPGSGKPGSGKPGSSIVMTQSPATLSVSPGERATLSCRASQSVSNDVAWYQQKPGQSPRLLINYASHRYTGVPDRFTGSGYGTEFTLTISSLQSEDFAVYFCQQDYSSPRTFGGGTKVEIK

SEQ ID NO: 11138 - protein, 122 aa, Artificial Sequence
  Description of Artificial Sequence: Synthetic polypeptide
  VH of XENP018508
EVQLVESGGGLVKPGGSLRLSCAASGFTFQNYWMNWVRQAPGKGLEWVGEIRLKSNNYATHYAEPVKGRFTISRDDSKSTVYLQMNSLKTEDTAVYYCTRYYGNYGGYFDVWGAGTLVTVSS

SEQ ID NO: 11139 - protein, 107 aa, Artificial Sequence; identical to SEQ ID NO: 10923
  Description of Artificial Sequence: Synthetic polypeptide
  VL of XENP018508

SEQ ID NO: 11140 - protein, 5 aa, Artificial Sequence
  Description of Artificial Sequence: Synthetic peptide
  XENP018508 vhCDR1
NYWMN

SEQ ID NO: 11141 - protein, 19 aa, Artificial Sequence
  Description of Artificial Sequence: Synthetic peptide
  XENP018508 vhCDR2
EIRLKSNNYATHYAEPVKG

SEQ ID NO: 11142 - protein, 11 aa, Artificial Sequence
  Description of Artificial Sequence: Synthetic peptide
  XENP018508 vhCDR3
YYGNYGGYFDV

SEQ ID NO: 11143 - protein, 11 aa, Artificial Sequence
  Description of Artificial Sequence: Synthetic peptide
  XENP018508 vlCDR1
RASQSVSNDVA

SEQ ID NO: 11144 - protein, 7 aa, Artificial Sequence
  Description of Artificial Sequence: Synthetic peptide
  XENP018508 vlCDR2
YASHRYT

SEQ ID NO: 11145 - protein, 9 aa, Artificial Sequence
  Description of Artificial Sequence: Synthetic peptide
  XENP018508 vlCDR3
QQDYSSPRT

SEQ ID NO: 11146 - protein, 249 aa, Artificial Sequence
  Description of Artificial Sequence: Synthetic polypeptide
  XENP018509 1G6_H1.13_L1_scFv(GKPGS)4
EVQLVESGGGLVKPGGSLRLSCAASGFTFGNYWMNWVRQAPGKGLEWVGEIRLKSNNYATHYAEPVKGRFTISRDDSKSTVYLQMNSLKTEDTAVYYCTRYYGNYGGYFDVWGAGTLVTVSSGKPGSGKPGSGKPGSGKPGSSIVMTQSPATLSVSPGERATLSCRASQSVSNDVAWYQQKPGQSPRLLINYASHRYTGVPDRFTGSGYGTEFTLTISSLQSEDFAVYFCQQDYSSPRTFGGGTKVEIK

SEQ ID NO: 11147 - protein, 122 aa, Artificial Sequence
  Description of Artificial Sequence: Synthetic polypeptide
  VH of XENP018509
EVQLVESGGGLVKPGGSLRLSCAASGFTFGNYWMNWVRQAPGKGLEWVGEIRLKSNNYATHYAEPVKGRFTISRDDSKSTVYLQMNSLKTEDTAVYYCTRYYGNYGGYFDVWGAGTLVTVSS

SEQ ID NO: 11148 - protein, 107 aa, Artificial Sequence; identical to SEQ ID NO: 10923
  Description of Artificial Sequence: Synthetic polypeptide
  VL of XENP018509

SEQ ID NO: 11149 - protein, 5 aa, Artificial Sequence
  Description of Artificial Sequence: Synthetic peptide
  XENP018509 vhCDR1
NYWMN

SEQ ID NO: 11150 - protein, 19 aa, Artificial Sequence
  Description of Artificial Sequence: Synthetic peptide
  XENP018509 vhCDR2
EIRLKSNNYATHYAEPVKG

SEQ ID NO: 11151 - protein, 11 aa, Artificial Sequence
  Description of Artificial Sequence: Synthetic peptide
  XENP018509 vhCDR3
YYGNYGGYFDV

SEQ ID NO: 11152 - protein, 11 aa, Artificial Sequence
  Description of Artificial Sequence: Synthetic peptide
  XENP018509 vlCDR1
RASQSVSNDVA

SEQ ID NO: 11153 - protein, 7 aa, Artificial Sequence
  Description of Artificial Sequence: Synthetic peptide
  XENP018509 vlCDR2
YASHRYT

SEQ ID NO: 11154 - protein, 9 aa, Artificial Sequence
  Description of Artificial Sequence: Synthetic peptide
  XENP018509 vlCDR3
QQDYSSPRT

SEQ ID NO: 11155 - protein, 249 aa, Artificial Sequence
  Description of Artificial Sequence: Synthetic polypeptide
  XENP018510 1G6_H1.14_L1_scFv(GKPGS)4
EVQLVESGGGLVKPGGSLRLSCAASGFTFVNYWMNWVRQAPGKGLEWVGEIRLKSNNYATHYAEPVKGRFTISRDDSKSTVYLQMNSLKTEDTAVYYCTRYYGNYGGYFDVWGAGTLVTVSSGKPGSGKPGSGKPGSGKPGSSIVMTQSPATLSVSPGERATLSCRASQSVSNDVAWYQQKPGQSPRLLINYASHRYTGVPDRFTGSGYGTEFTLTISSLQSEDFAVYFCQQDYSSPRTFGGGTKVEIK

SEQ ID NO: 11156 - protein, 122 aa, Artificial Sequence
  Description of Artificial Sequence: Synthetic polypeptide
  VH of XENP018510
EVQLVESGGGLVKPGGSLRLSCAASGFTFVNYWMNWVRQAPGKGLEWVGEIRLKSNNYATHYAEPVKGRFTISRDDSKSTVYLQMNSLKTEDTAVYYCTRYYGNYGGYFDVWGAGTLVTVSS

SEQ ID NO: 11157 - protein, 107 aa, Artificial Sequence; identical to SEQ ID NO: 10923
  Description of Artificial Sequence: Synthetic polypeptide
  VL of XENP018510

SEQ ID NO: 11158 - protein, 5 aa, Artificial Sequence
  Description of Artificial Sequence: Synthetic peptide
  XENP018510 vhCDR1
NYWMN

SEQ ID NO: 11159 - protein, 19 aa, Artificial Sequence
  Description of Artificial Sequence: Synthetic peptide
  XENP018510 vhCDR2
EIRLKSNNYATHYAEPVKG

SEQ ID NO: 11160 - protein, 11 aa, Artificial Sequence
  Description of Artificial Sequence: Synthetic peptide
  XENP018510 vhCDR3
YYGNYGGYFDV

SEQ ID NO: 11161 - protein, 11 aa, Artificial Sequence
  Description of Artificial Sequence: Synthetic peptide
  XENP018510 vlCDR1
RASQSVSNDVA

SEQ ID NO: 11162 - protein, 7 aa, Artificial Sequence
  Description of Artificial Sequence: Synthetic peptide
  XENP018510 vlCDR2
YASHRYT

SEQ ID NO: 11163 - protein, 9 aa, Artificial Sequence
  Description of Artificial Sequence: Synthetic peptide
  XENP018510 vlCDR3
QQDYSSPRT

SEQ ID NO: 11164 - protein, 249 aa, Artificial Sequence
  Description of Artificial Sequence: Synthetic polypeptide
  XENP018511 1G6_H1.15_L1_scFv(GKPGS)4
EVQLVESGGGLVKPGGSLRLSCAASGFTFHNYWMNWVRQAPGKGLEWVGEIRLKSNNYATHYAEPVKGRFTISRDDSKSTVYLQMNSLKTEDTAVYYCTRYYGNYGGYFDVWGAGTLVTVSSGKPGSGKPGSGKPGSGKPGSSIVMTQSPATLSVSPGERATLSCRASQSVSNDVAWYQQKPGQSPRLLINYASHRYTGVPDRFTGSGYGTEFTLTISSLQSEDFAVYFCQQDYSSPRTFGGGTKVEIK

SEQ ID NO: 11165 - protein, 122 aa, Artificial Sequence
  Description of Artificial Sequence: Synthetic polypeptide
  VH of XENP018511
EVQLVESGGGLVKPGGSLRLSCAASGFTFHNYWMNWVRQAPGKGLEWVGEIRLKSNNYATHYAEPVKGRFTISRDDSKSTVYLQMNSLKTEDTAVYYCTRYYGNYGGYFDVWGAGTLVTVSS

SEQ ID NO: 11166 - protein, 107 aa, Artificial Sequence; identical to SEQ ID NO: 10923
  Description of Artificial Sequence: Synthetic polypeptide
  VL of XENP018511

SEQ ID NO: 11167 - protein, 5 aa, Artificial Sequence
  Description of Artificial Sequence: Synthetic peptide
  XENP018511 vhCDR1
NYWMN

SEQ ID NO: 11168 - protein, 19 aa, Artificial Sequence
  Description of Artificial Sequence: Synthetic peptide
  XENP018511 vhCDR2
EIRLKSNNYATHYAEPVKG

SEQ ID NO: 11169 - protein, 11 aa, Artificial Sequence
  Description of Artificial Sequence: Synthetic peptide
  XENP018511 vhCDR3
YYGNYGGYFDV

SEQ ID NO: 11170 - protein, 11 aa, Artificial Sequence
  Description of Artificial Sequence: Synthetic peptide
  XENP018511 vlCDR1
RASQSVSNDVA

SEQ ID NO: 11171 - protein, 7 aa, Artificial Sequence
  Description of Artificial Sequence: Synthetic peptide
  XENP018511 vlCDR2
YASHRYT

SEQ ID NO: 11172 - protein, 9 aa, Artificial Sequence
  Description of Artificial Sequence: Synthetic peptide
  XENP018511 vlCDR3
QQDYSSPRT

SEQ ID NO: 11173 - protein, 249 aa, Artificial Sequence
  Description of Artificial Sequence: Synthetic polypeptide
  XENP018512 1G6_H1.16_L1_scFv(GKPGS)4
EVQLVESGGGLVKPGGSLRLSCAASGFTFDNYWMNWVRQAPGKGLEWVGEIRLKSNNYATHYAEPVKGRFTISRDDSKSTVYLQMNSLKTEDTAVYYCTRYYGNYGGYFDVWGAGTLVTVSSGKPGSGKPGSGKPGSGKPGSSIVMTQSPATLSVSPGERATLSCRASQSVSNDVAWYQQKPGQSPRLLINYASHRYTGVPDRFTGSGYGTEFTLTISSLQSEDFAVYFCQQDYSSPRTFGGGTKVEIK

SEQ ID NO: 11174 - protein, 122 aa, Artificial Sequence
  Description of Artificial Sequence: Synthetic polypeptide
  VH of XENP018512
EVQLVESGGGLVKPGGSLRLSCAASGFTFDNYWMNWVRQAPGKGLEWVGEIRLKSNNYATHYAEPVKGRFTISRDDSKSTVYLQMNSLKTEDTAVYYCTRYYGNYGGYFDVWGAGTLVTVSS

SEQ ID NO: 11175 - protein, 107 aa, Artificial Sequence; identical to SEQ ID NO: 10923
  Description of Artificial Sequence: Synthetic polypeptide
  VL of XENP018512

SEQ ID NO: 11176 - protein, 5 aa, Artificial Sequence
  Description of Artificial Sequence: Synthetic peptide
  XENP018512 vhCDR1
NYWMN

SEQ ID NO: 11177 - protein, 19 aa, Artificial Sequence
  Description of Artificial Sequence: Synthetic peptide
  XENP018512 vhCDR2
EIRLKSNNYATHYAEPVKG

SEQ ID NO: 11178 - protein, 11 aa, Artificial Sequence
  Description of Artificial Sequence: Synthetic peptide
  XENP018512 vhCDR3
YYGNYGGYFDV

SEQ ID NO: 11179 - protein, 11 aa, Artificial Sequence
  Description of Artificial Sequence: Synthetic peptide
  XENP018512 vlCDR1
RASQSVSNDVA

SEQ ID NO: 11180 - protein, 7 aa, Artificial Sequence
  Description of Artificial Sequence: Synthetic peptide
  XENP018512 vlCDR2
YASHRYT

SEQ ID NO: 11181 - protein, 9 aa, Artificial Sequence
  Description of Artificial Sequence: Synthetic peptide
  XENP018512 vlCDR3
QQDYSSPRT

SEQ ID NO: 11182 - protein, 249 aa, Artificial Sequence
  Description of Artificial Sequence: Synthetic polypeptide
  XENP018513 1G6_H1.17_L1_scFv(GKPGS)4
EVQLVESGGGLVKPGGSLRLSCAASGFTFKNYWMNWVRQAPGKGLEWVGEIRLKSNNYATHYAEPVKGRFTISRDDSKSTVYLQMNSLKTEDTAVYYCTRYYGNYGGYFDVWGAGTLVTVSSGKPGSGKPGSGKPGSGKPGSSIVMTQSPATLSVSPGERATLSCRASQSVSNDVAWYQQKPGQSPRLLINYASHRYTGVPDRFTGSGYGTEFTLTISSLQSEDFAVYFCQQDYSSPRTFGGGTKVEIK

SEQ ID NO: 11183 - protein, 122 aa, Artificial Sequence
  Description of Artificial Sequence: Synthetic polypeptide
  VH of XENP018513
EVQLVESGGGLVKPGGSLRLSCAASGFTFKNYWMNWVRQAPGKGLEWVGEIRLKSNNYATHYAEPVKGRFTISRDDSKSTVYLQMNSLKTEDTAVYYCTRYYGNYGGYFDVWGAGTLVTVSS

SEQ ID NO: 11184 - protein, 107 aa, Artificial Sequence; identical to SEQ ID NO: 10923
  Description of Artificial Sequence: Synthetic polypeptide
  VL of XENP018513

SEQ ID NO: 11185 - protein, 5 aa, Artificial Sequence
  Description of Artificial Sequence: Synthetic peptide
  XENP018513 vhCDR1
NYWMN

SEQ ID NO: 11186 - protein, 19 aa, Artificial Sequence
  Description of Artificial Sequence: Synthetic peptide
  XENP018513 vhCDR2
EIRLKSNNYATHYAEPVKG

SEQ ID NO: 11187 - protein, 11 aa, Artificial Sequence
  Description of Artificial Sequence: Synthetic peptide
  XENP018513 vhCDR3
YYGNYGGYFDV

SEQ ID NO: 11188 - protein, 11 aa, Artificial Sequence
  Description of Artificial Sequence: Synthetic peptide
  XENP018513 vlCDR1
RASQSVSNDVA

SEQ ID NO: 11189 - protein, 7 aa, Artificial Sequence
  Description of Artificial Sequence: Synthetic peptide
  XENP018513 vlCDR2
YASHRYT

SEQ ID NO: 11190 - protein, 9 aa, Artificial Sequence
  Description of Artificial Sequence: Synthetic peptide
  XENP018513 vlCDR3
QQDYSSPRT

SEQ ID NO: 11191 - protein, 249 aa, Artificial Sequence
  Description of Artificial Sequence: Synthetic polypeptide
  XENP018514 1G6_H1.18_L1_scFv(GKPGS)4
EVQLVESGGGLVKPGGSLRLSCAASGFTFYNYWMNWVRQAPGKGLEWVGEIRLKSNNYATHYAEPVKGRFTISRDDSKSTVYLQMNSLKTEDTAVYYCTRYYGNYGGYFDVWGAGTLVTVSSGKPGSGKPGSGKPGSGKPGSSIVMTQSPATLSVSPGERATLSCRASQSVSNDVAWYQQKPGQSPRLLINYASHRYTGVPDRFTGSGYGTEFTLTISSLQSEDFAVYFCQQDYSSPRTFGGGTKVEIK

SEQ ID NO: 11192 - protein, 122 aa, Artificial Sequence
  Description of Artificial Sequence: Synthetic polypeptide
  VH of XENP018514
EVQLVESGGGLVKPGGSLRLSCAASGFTFYNYWMNWVRQAPGKGLEWVGEIRLKSNNYATHYAEPVKGRFTISRDDSKSTVYLQMNSLKTEDTAVYYCTRYYGNYGGYFDVWGAGTLVTVSS

SEQ ID NO: 11193 - protein, 107 aa, Artificial Sequence; identical to SEQ ID NO: 10923
  Description of Artificial Sequence: Synthetic polypeptide
  VL of XENP018514

SEQ ID NO: 11194 - protein, 5 aa, Artificial Sequence
  Description of Artificial Sequence: Synthetic peptide
  XENP018514 vhCDR1
NYWMN

SEQ ID NO: 11195 - protein, 19 aa, Artificial Sequence
  Description of Artificial Sequence: Synthetic peptide
  XENP018514 vhCDR2
EIRLKSNNYATHYAEPVKG

SEQ ID NO: 11196 - protein, 11 aa, Artificial Sequence
  Description of Artificial Sequence: Synthetic peptide
  XENP018514 vhCDR3
YYGNYGGYFDV

SEQ ID NO: 11197 - protein, 11 aa, Artificial Sequence
  Description of Artificial Sequence: Synthetic peptide
  XENP018514 vlCDR1
RASQSVSNDVA

SEQ ID NO: 11198 - protein, 7 aa, Artificial Sequence
  Description of Artificial Sequence: Synthetic peptide
  XENP018514 vlCDR2
YASHRYT

SEQ ID NO: 11199 - protein, 9 aa, Artificial Sequence
  Description of Artificial Sequence: Synthetic peptide
  XENP018514 vlCDR3
QQDYSSPRT

SEQ ID NO: 11200 - protein, 249 aa, Artificial Sequence
  Description of Artificial Sequence: Synthetic polypeptide
  XENP018515 1G6_H1.19_L1_scFv(GKPGS)4
EVQLVESGGGLVKPGGSLRLSCAASGFTFSDYWMNWVRQAPGKGLEWVGEIRLKSNNYATHYAEPVKGRFTISRDDSKSTVYLQMNSLKTEDTAVYYCTRYYGNYGGYFDVWGAGTLVTVSSGKPGSGKPGSGKPGSGKPGSSIVMTQSPATLSVSPGERATLSCRASQSVSNDVAWYQQKPGQSPRLLINYASHRYTGVPDRFTGSGYGTEFTLTISSLQSEDFAVYFCQQDYSSPRTFGGGTKVEIK

SEQ ID NO: 11201 - protein, 122 aa, Artificial Sequence
  Description of Artificial Sequence: Synthetic polypeptide
  VH of XENP018515
EVQLVESGGGLVKPGGSLRLSCAASGFTFSDYWMNWVRQAPGKGLEWVGEIRLKSNNYATHYAEPVKGRFTISRDDSKSTVYLQMNSLKTEDTAVYYCTRYYGNYGGYFDVWGAGTLVTVSS

SEQ ID NO: 11202 - protein, 107 aa, Artificial Sequence; identical to SEQ ID NO: 10923
  Description of Artificial Sequence: Synthetic polypeptide
  VL of XENP018515

SEQ ID NO: 11203 - protein, 5 aa, Artificial Sequence
  Description of Artificial Sequence: Synthetic peptide
  XENP018515 vhCDR1
DYWMN

SEQ ID NO: 11204 - protein, 19 aa, Artificial Sequence
  Description of Artificial Sequence: Synthetic peptide
  XENP018515 vhCDR2
EIRLKSNNYATHYAEPVKG

SEQ ID NO: 11205 - protein, 11 aa, Artificial Sequence
  Description of Artificial Sequence: Synthetic peptide
  XENP018515 vhCDR3
YYGNYGGYFDV

SEQ ID NO: 11206 - protein, 11 aa, Artificial Sequence
  Description of Artificial Sequence: Synthetic peptide
  XENP018515 vlCDR1
RASQSVSNDVA

SEQ ID NO: 11207 - protein, 7 aa, Artificial Sequence
  Description of Artificial Sequence: Synthetic peptide
  XENP018515 vlCDR2
YASHRYT

SEQ ID NO: 11208 - protein, 9 aa, Artificial Sequence
  Description of Artificial Sequence: Synthetic peptide
  XENP018515 vlCDR3
QQDYSSPRT

SEQ ID NO: 11209 - protein, 249 aa, Artificial Sequence
  Description of Artificial Sequence: Synthetic polypeptide
  XENP018516 1G6_H1.20_L1_scFv(GKPGS)4
EVQLVESGGGLVKPGGSLRLSCAASGFTFSHYWMNWVRQAPGKGLEWVGEIRLKSNNYATHYAEPVKGRFTISRDDSKSTVYLQMNSLKTEDTAVYYCTRYYGNYGGYFDVWGAGTLVTVSSGKPGSGKPGSGKPGSGKPGSSIVMTQSPATLSVSPGERATLSCRASQSVSNDVAWYQQKPGQSPRLLINYASHRYTGVPDRFTGSGYGTEFTLTISSLQSEDFAVYFCQQDYSSPRTFGGGTKVEIK

SEQ ID NO: 11210 - protein, 122 aa, Artificial Sequence
  Description of Artificial Sequence: Synthetic polypeptide
  VH of XENP018516
EVQLVESGGGLVKPGGSLRLSCAASGFTFSHYWMNWVRQAPGKGLEWVGEIRLKSNNYATHYAEPVKGRFTISRDDSKSTVYLQMNSLKTEDTAVYYCTRYYGNYGGYFDVWGAGTLVTVSS

SEQ ID NO: 11211 - protein, 107 aa, Artificial Sequence; identical to SEQ ID NO: 10923
  Description of Artificial Sequence: Synthetic polypeptide
  VL of XENP018516

SEQ ID NO: 11212 - protein, 5 aa, Artificial Sequence
  Description of Artificial Sequence: Synthetic peptide
  XENP018516 vhCDR1
HYWMN

SEQ ID NO: 11213 - protein, 19 aa, Artificial Sequence
  Description of Artificial Sequence: Synthetic peptide
  XENP018516 vhCDR2
EIRLKSNNYATHYAEPVKG

SEQ ID NO: 11214 - protein, 11 aa, Artificial Sequence
  Description of Artificial Sequence: Synthetic peptide
  XENP018516 vhCDR3
YYGNYGGYFDV

SEQ ID NO: 11215 - protein, 11 aa, Artificial Sequence
  Description of Artificial Sequence: Synthetic peptide
  XENP018516 vlCDR1
RASQSVSNDVA

SEQ ID NO: 11216 - protein, 7 aa, Artificial Sequence
  Description of Artificial Sequence: Synthetic peptide
  XENP018516 vlCDR2
YASHRYT

SEQ ID NO: 11217 - protein, 9 aa, Artificial Sequence
  Description of Artificial Sequence: Synthetic peptide
  XENP018516 vlCDR3
QQDYSSPRT

SEQ ID NO: 11218 - protein, 249 aa, Artificial Sequence
  Description of Artificial Sequence: Synthetic polypeptide
  XENP018517 1G6_H1.21_L1_scFv(GKPGS)4
EVQLVESGGGLVKPGGSLRLSCAASGFTFSEYWMNWVRQAPGKGLEWVGEIRLKSNNYATHYAEPVKGRFTISRDDSKSTVYLQMNSLKTEDTAVYYCTRYYGNYGGYFDVWGAGTLVTVSSGKPGSGKPGSGKPGSGKPGSSIVMTQSPATLSVSPGERATLSCRASQSVSNDVAWYQQKPGQSPRLLINYASHRYTGVPDRFTGSGYGTEFTLTISSLQSEDFAVYFCQQDYSSPRTFGGGTKVEIK

SEQ ID NO: 11219 - protein, 122 aa, Artificial Sequence
  Description of Artificial Sequence: Synthetic polypeptide
  VH of XENP018517
EVQLVESGGGLVKPGGSLRLSCAASGFTFSEYWMNWVRQAPGKGLEWVGEIRLKSNNYATHYAEPVKGRFTISRDDSKSTVYLQMNSLKTEDTAVYYCTRYYGNYGGYFDVWGAGTLVTVSS

SEQ ID NO: 11220 - protein, 107 aa, Artificial Sequence; identical to SEQ ID NO: 10923
  Description of Artificial Sequence: Synthetic polypeptide
  VL of XENP018517

SEQ ID NO: 11221 - protein, 5 aa, Artificial Sequence
  Description of Artificial Sequence: Synthetic peptide
  XENP018517 vhCDR1
EYWMN

SEQ ID NO: 11222 - protein, 19 aa, Artificial Sequence
  Description of Artificial Sequence: Synthetic peptide
  XENP018517 vhCDR2
EIRLKSNNYATHYAEPVKG

SEQ ID NO: 11223 - protein, 11 aa, Artificial Sequence
  Description of Artificial Sequence: Synthetic peptide
  XENP018517 vhCDR3
YYGNYGGYFDV

SEQ ID NO: 11224 - protein, 11 aa, Artificial Sequence
  Description of Artificial Sequence: Synthetic peptide
  XENP018517 vlCDR1
RASQSVSNDVA

SEQ ID NO: 11225 - protein, 7 aa, Artificial Sequence
  Description of Artificial Sequence: Synthetic peptide
  XENP018517 vlCDR2
YASHRYT

SEQ ID NO: 11226 - protein, 9 aa, Artificial Sequence
  Description of Artificial Sequence: Synthetic peptide
  XENP018517 vlCDR3
QQDYSSPRT

SEQ ID NO: 11227 - protein, 249 aa, Artificial Sequence
  Description of Artificial Sequence: Synthetic polypeptide
  XENP018518 1G6_H1.22_L1_scFv(GKPGS)4
EVQLVESGGGLVKPGGSLRLSCAASGFTFSSYWMNWVRQAPGKGLEWVGEIRLKSNNYATHYAEPVKGRFTISRDDSKSTVYLQMNSLKTEDTAVYYCTRYYGNYGGYFDVWGAGTLVTVSSGKPGSGKPGSGKPGSGKPGSSIVMTQSPATLSVSPGERATLSCRASQSVSNDVAWYQQKPGQSPRLLINYASHRYTGVPDRFTGSGYGTEFTLTISSLQSEDFAVYFCQQDYSSPRTFGGGTKVEIK

SEQ ID NO: 11228 - protein, 122 aa, Artificial Sequence
  Description of Artificial Sequence: Synthetic polypeptide
  VH of XENP018518
EVQLVESGGGLVKPGGSLRLSCAASGFTFSSYWMNWVRQAPGKGLEWVGEIRLKSNNYATHYAEPVKGRFTISRDDSKSTVYLQMNSLKTEDTAVYYCTRYYGNYGGYFDVWGAGTLVTVSS

SEQ ID NO: 11229 - protein, 107 aa, Artificial Sequence; identical to SEQ ID NO: 10923
  Description of Artificial Sequence: Synthetic polypeptide
  VL of XENP018518

SEQ ID NO: 11230 - protein, 5 aa, Artificial Sequence
  Description of Artificial Sequence: Synthetic peptide
  XENP018518 vhCDR1
SYWMN

SEQ ID NO: 11231 - protein, 19 aa, Artificial Sequence
  Description of Artificial Sequence: Synthetic peptide
  XENP018518 vhCDR2
EIRLKSNNYATHYAEPVKG

SEQ ID NO: 11232 - protein, 11 aa, Artificial Sequence
  Description of Artificial Sequence: Synthetic peptide
  XENP018518 vhCDR3
YYGNYGGYFDV

SEQ ID NO: 11233 - protein, 11 aa, Artificial Sequence
  Description of Artificial Sequence: Synthetic peptide
  XENP018518 vlCDR1
RASQSVSNDVA

SEQ ID NO: 11234 - protein, 7 aa, Artificial Sequence
  Description of Artificial Sequence: Synthetic peptide
  XENP018518 vlCDR2
YASHRYT

SEQ ID NO: 11235 - protein, 9 aa, Artificial Sequence
  Description of Artificial Sequence: Synthetic peptide
  XENP018518 vlCDR3
QQDYSSPRT

SEQ ID NO: 11236 - protein, 249 aa, Artificial Sequence
  Description of Artificial Sequence: Synthetic polypeptide
  XENP018519 1G6_H1.23_L1_scFv(GKPGS)4
EVQLVESGGGLVKPGGSLRLSCAASGFTFSRYWMNWVRQAPGKGLEWVGEIRLKSNNYATHYAEPVKGRFTISRDDSKSTVYLQMNSLKTEDTAVYYCTRYYGNYGGYFDVWGAGTLVTVSSGKPGSGKPGSGKPGSGKPGSSIVMTQSPATLSVSPGERATLSCRASQSVSNDVAWYQQKPGQSPRLLINYASHRYTGVPDRFTGSGYGTEFTLTISSLQSEDFAVYFCQQDYSSPRTFGGGTKVEIK

SEQ ID NO: 11237 - protein, 122 aa, Artificial Sequence
  Description of Artificial Sequence: Synthetic polypeptide
  VH of XENP018519
EVQLVESGGGLVKPGGSLRLSCAASGFTFSRYWMNWVRQAPGKGLEWVGEIRLKSNNYATHYAEPVKGRFTISRDDSKSTVYLQMNSLKTEDTAVYYCTRYYGNYGGYFDVWGAGTLVTVSS

SEQ ID NO: 11238 - protein, 107 aa, Artificial Sequence; identical to SEQ ID NO: 10923
  Description of Artificial Sequence: Synthetic polypeptide
  VL of XENP018519

SEQ ID NO: 11239 - protein, 5 aa, Artificial Sequence
  Description of Artificial Sequence: Synthetic peptide
  XENP018519 vhCDR1
RYWMN

SEQ ID NO: 11240 - protein, 19 aa, Artificial Sequence
  Description of Artificial Sequence: Synthetic peptide
  XENP018519 vhCDR2
EIRLKSNNYATHYAEPVKG

SEQ ID NO: 11241 - protein, 11 aa, Artificial Sequence
  Description of Artificial Sequence: Synthetic peptide
  XENP018519 vhCDR3
YYGNYGGYFDV

SEQ ID NO: 11242 - protein, 11 aa, Artificial Sequence
  Description of Artificial Sequence: Synthetic peptide
  XENP018519 vlCDR1
RASQSVSNDVA

SEQ ID NO: 11243 - protein, 7 aa, Artificial Sequence
  Description of Artificial Sequence: Synthetic peptide
  XENP018519 vlCDR2
YASHRYT

SEQ ID NO: 11244 - protein, 9 aa, Artificial Sequence
  Description of Artificial Sequence: Synthetic peptide
  XENP018519 vlCDR3
QQDYSSPRT

SEQ ID NO: 11245 - protein, 249 aa, Artificial Sequence
  Description of Artificial Sequence: Synthetic polypeptide
  XENP018520 1G6_H1.24_L1_scFv(GKPGS)4
EVQLVESGGGLVKPGGSLRLSCAASGFTFSLYWMNWVRQAPGKGLEWVGEIRLKSNNYATHYAEPVKGRFTISRDDSKSTVYLQMNSLKTEDTAVYYCTRYYGNYGGYFDVWGAGTLVTVSSGKPGSGKPGSGKPGSGKPGSSIVMTQSPATLSVSPGERATLSCRASQSVSNDVAWYQQKPGQSPRLLINYASHRYTGVPDRFTGSGYGTEFTLTISSLQSEDFAVYFCQQDYSSPRTFGGGTKVEIK

SEQ ID NO: 11246 - protein, 122 aa, Artificial Sequence
  Description of Artificial Sequence: Synthetic polypeptide
  VH of XENP018520
EVQLVESGGGLVKPGGSLRLSCAASGFTFSLYWMNWVRQAPGKGLEWVGEIRLKSNNYATHYAEPVKGRFTISRDDSKSTVYLQMNSLKTEDTAVYYCTRYYGNYGGYFDVWGAGTLVTVSS

SEQ ID NO: 11247 - protein, 107 aa, Artificial Sequence; identical to SEQ ID NO: 10923
  Description of Artificial Sequence: Synthetic polypeptide
  VL of XENP018520

SEQ ID NO: 11248 - protein, 5 aa, Artificial Sequence
  Description of Artificial Sequence: Synthetic peptide
  XENP018520 vhCDR1
LYWMN

SEQ ID NO: 11249 - protein, 19 aa, Artificial Sequence
  Description of Artificial Sequence: Synthetic peptide
  XENP018520 vhCDR2
EIRLKSNNYATHYAEPVKG

SEQ ID NO: 11250 - protein, 11 aa, Artificial Sequence
  Description of Artificial Sequence: Synthetic peptide
  XENP018520 vhCDR3
YYGNYGGYFDV

SEQ ID NO: 11251 - protein, 11 aa, Artificial Sequence
  Description of Artificial Sequence: Synthetic peptide
  XENP018520 vlCDR1
RASQSVSNDVA

SEQ ID NO: 11252 - protein, 7 aa, Artificial Sequence
  Description of Artificial Sequence: Synthetic peptide
  XENP018520 vlCDR2
YASHRYT

SEQ ID NO: 11253 - protein, 9 aa, Artificial Sequence
  Description of Artificial Sequence: Synthetic peptide
  XENP018520 vlCDR3
QQDYSSPRT

SEQ ID NO: 11254 - protein, 249 aa, Artificial Sequence
  Description of Artificial Sequence: Synthetic polypeptide
  XENP018521 1G6_H1.25_L1_scFv(GKPGS)4
EVQLVESGGGLVKPGGSLRLSCAASGFTFSTYWMNWVRQAPGKGLEWVGEIRLKSNNYATHYAEPVKGRFTISRDDSKSTVYLQMNSLKTEDTAVYYCTRYYGNYGGYFDVWGAGTLVTVSSGKPGSGKPGSGKPGSGKPGSSIVMTQSPATLSVSPGERATLSCRASQSVSNDVAWYQQKPGQSPRLLINYASHRYTGVPDRFTGSGYGTEFTLTISSLQSEDFAVYFCQQDYSSPRTFGGGTKVEIK

SEQ ID NO: 11255 - protein, 122 aa, Artificial Sequence
  Description of Artificial Sequence: Synthetic polypeptide
  VH of XENP018521
EVQLVESGGGLVKPGGSLRLSCAASGFTFSTYWMNWVRQAPGKGLEWVGEIRLKSNNYATHYAEPVKGRFTISRDDSKSTVYLQMNSLKTEDTAVYYCTRYYGNYGGYFDVWGAGTLVTVSS

SEQ ID NO: 11256 - protein, 107 aa, Artificial Sequence; identical to SEQ ID NO: 10923
  Description of Artificial Sequence: Synthetic polypeptide
  VL of XENP018521

SEQ ID NO: 11257 - protein, 5 aa, Artificial Sequence
  Description of Artificial Sequence: Synthetic peptide
  XENP018521 vhCDR1
TYWMN

SEQ ID NO: 11258 - protein, 19 aa, Artificial Sequence
  Description of Artificial Sequence: Synthetic peptide
  XENP018521 vhCDR2
EIRLKSNNYATHYAEPVKG

SEQ ID NO: 11259 - protein, 11 aa, Artificial Sequence
  Description of Artificial Sequence: Synthetic peptide
  XENP018521 vhCDR3
YYGNYGGYFDV

SEQ ID NO: 11260 - protein, 11 aa, Artificial Sequence
  Description of Artificial Sequence: Synthetic peptide
  XENP018521 vlCDR1
RASQSVSNDVA

SEQ ID NO: 11261 - protein, 7 aa, Artificial Sequence
  Description of Artificial Sequence: Synthetic peptide
  XENP018521 vlCDR2
YASHRYT

SEQ ID NO: 11262 - protein, 9 aa, Artificial Sequence
  Description of Artificial Sequence: Synthetic peptide
  XENP018521 vlCDR3
QQDYSSPRT

SEQ ID NO: 11263 - protein, 249 aa, Artificial Sequence
  Description of Artificial Sequence: Synthetic polypeptide
  XENP018522 1G6_H1.26_L1_scFv(GKPGS)4
EVQLVESGGGLVKPGGSLRLSCAASGFTFSGYWMNWVRQAPGKGLEWVGEIRLKSNNYATHYAEPVKGRFTISRDDSKSTVYLQMNSLKTEDTAVYYCTRYYGNYGGYFDVWGAGTLVTVSSGKPGSGKPGSGKPGSGKPGSSIVMTQSPATLSVSPGERATLSCRASQSVSNDVAWYQQKPGQSPRLLINYASHRYTGVPDRFTGSGYGTEFTLTISSLQSEDFAVYFCQQDYSSPRTFGGGTKVEIK

SEQ ID NO: 11264 - protein, 122 aa, Artificial Sequence
  Description of Artificial Sequence: Synthetic polypeptide
  VH of XENP018522
EVQLVESGGGLVKPGGSLRLSCAASGFTFSGYWMNWVRQAPGKGLEWVGEIRLKSNNYATHYAEPVKGRFTISRDDSKSTVYLQMNSLKTEDTAVYYCTRYYGNYGGYFDVWGAGTLVTVSS

SEQ ID NO: 11265 - protein, 107 aa, Artificial Sequence; identical to SEQ ID NO: 10923
  Description of Artificial Sequence: Synthetic polypeptide
  VL of XENP018522

SEQ ID NO: 11266 - protein, 5 aa, Artificial Sequence
  Description of Artificial Sequence: Synthetic peptide
  XENP018522 vhCDR1
GYWMN

SEQ ID NO: 11267 - protein, 19 aa, Artificial Sequence
  Description of Artificial Sequence: Synthetic peptide
  XENP018522 vhCDR2
EIRLKSNNYATHYAEPVKG

SEQ ID NO: 11268 - protein, 11 aa, Artificial Sequence
  Description of Artificial Sequence: Synthetic peptide
  XENP018522 vhCDR3
YYGNYGGYFDV

SEQ ID NO: 11269 - protein, 11 aa, Artificial Sequence
  Description of Artificial Sequence: Synthetic peptide
  XENP018522 vlCDR1
RASQSVSNDVA

SEQ ID NO: 11270 - protein, 7 aa, Artificial Sequence
  Description of Artificial Sequence: Synthetic peptide
  XENP018522 vlCDR2
YASHRYT

SEQ ID NO: 11271 - protein, 9 aa, Artificial Sequence
  Description of Artificial Sequence: Synthetic peptide
  XENP018522 vlCDR3
QQDYSSPRT

SEQ ID NO: 11272 - protein, 249 aa, Artificial Sequence
  Description of Artificial Sequence: Synthetic polypeptide
  XENP018523 1G6_H1.27_L1_scFv(GKPGS)4
EVQLVESGGGLVKPGGSLRLSCAASGFTFSYYWMNWVRQAPGKGLEWVGEIRLKSNNYATHYAEPVKGRFTISRDDSKSTVYLQMNSLKTEDTAVYYCTRYYGNYGGYFDVWGAGTLVTVSSGKPGSGKPGSGKPGSGKPGSSIVMTQSPATLSVSPGERATLSCRASQSVSNDVAWYQQKPGQSPRLLINYASHRYTGVPDRFTGSGYGTEFTLTISSLQSEDFAVYFCQQDYSSPRTFGGGTKVEIK

SEQ ID NO: 11273 - protein, 122 aa, Artificial Sequence
  Description of Artificial Sequence: Synthetic polypeptide
  VH of XENP018523
EVQLVESGGGLVKPGGSLRLSCAASGFTFSYYWMNWVRQAPGKGLEWVGEIRLKSNNYATHYAEPVKGRFTISRDDSKSTVYLQMNSLKTEDTAVYYCTRYYGNYGGYFDVWGAGTLVTVSS

SEQ ID NO: 11274 - protein, 107 aa, Artificial Sequence; identical to SEQ ID NO: 10923
  Description of Artificial Sequence: Synthetic polypeptide
  VL of XENP018523

SEQ ID NO: 11275 - protein, 5 aa, Artificial Sequence
  Description of Artificial Sequence: Synthetic peptide
  XENP018523 vhCDR1
YYWMN

SEQ ID NO: 11276 - protein, 19 aa, Artificial Sequence
  Description of Artificial Sequence: Synthetic peptide
  XENP018523 vhCDR2
EIRLKSNNYATHYAEPVKG

SEQ ID NO: 11277 - protein, 11 aa, Artificial Sequence
  Description of Artificial Sequence: Synthetic peptide
  XENP018523 vhCDR3
YYGNYGGYFDV

SEQ ID NO: 11278 - protein, 11 aa, Artificial Sequence
  Description of Artificial Sequence: Synthetic peptide
  XENP018523 vlCDR1
RASQSVSNDVA

SEQ ID NO: 11279 - protein, 7 aa, Artificial Sequence
  Description of Artificial Sequence: Synthetic peptide
  XENP018523 vlCDR2
YASHRYT

SEQ ID NO: 11280 - protein, 9 aa, Artificial Sequence
  Description of Artificial Sequence: Synthetic peptide
  XENP018523 vlCDR3
QQDYSSPRT

SEQ ID NO: 11281 - protein, 249 aa, Artificial Sequence
  Description of Artificial Sequence: Synthetic polypeptide
  XENP018524 1G6_H1.28_L1_scFv(GKPGS)4
EVQLVESGGGLVKPGGSLRLSCAASGFTFSNFWMNWVRQAPGKGLEWVGEIRLKSNNYATHYAEPVKGRFTISRDDSKSTVYLQMNSLKTEDTAVYYCTRYYGNYGGYFDVWGAGTLVTVSSGKPGSGKPGSGKPGSGKPGSSIVMTQSPATLSVSPGERATLSCRASQSVSNDVAWYQQKPGQSPRLLINYASHRYTGVPDRFTGSGYGTEFTLTISSLQSEDFAVYFCQQDYSSPRTFGGGTKVEIK

SEQ ID NO: 11282 - protein, 122 aa, Artificial Sequence
  Description of Artificial Sequence: Synthetic polypeptide
  VH of XENP018524
EVQLVESGGGLVKPGGSLRLSCAASGFTFSNFWMNWVRQAPGKGLEWVGEIRLKSNNYATHYAEPVKGRFTISRDDSKSTVYLQMNSLKTEDTAVYYCTRYYGNYGGYFDVWGAGTLVTVSS

SEQ ID NO: 11283 - protein, 107 aa, Artificial Sequence; identical to SEQ ID NO: 10923
  Description of Artificial Sequence: Synthetic polypeptide
  VL of XENP018524

SEQ ID NO: 11284 - protein, 5 aa, Artificial Sequence
  Description of Artificial Sequence: Synthetic peptide
  XENP018524 vhCDR1
NFWMN

SEQ ID NO: 11285 - protein, 19 aa, Artificial Sequence
  Description of Artificial Sequence: Synthetic peptide
  XENP018524 vhCDR2
EIRLKSNNYATHYAEPVKG

SEQ ID NO: 11286 - protein, 11 aa, Artificial Sequence
  Description of Artificial Sequence: Synthetic peptide
  XENP018524 vhCDR3
YYGNYGGYFDV

SEQ ID NO: 11287 - protein, 11 aa, Artificial Sequence
  Description of Artificial Sequence: Synthetic peptide
  XENP018524 vlCDR1
RASQSVSNDVA

SEQ ID NO: 11288 - protein, 7 aa, Artificial Sequence
  Description of Artificial Sequence: Synthetic peptide
  XENP018524 vlCDR2
YASHRYT

SEQ ID NO: 11289 - protein, 9 aa, Artificial Sequence
  Description of Artificial Sequence: Synthetic peptide
  XENP018524 vlCDR3
QQDYSSPRT

SEQ ID NO: 11290 - protein, 249 aa, Artificial Sequence
  Description of Artificial Sequence: Synthetic polypeptide
  XENP018525 1G6_H1.29_L1_scFv(GKPGS)4
EVQLVESGGGLVKPGGSLRLSCAASGFTFSNHWMNWVRQAPGKGLEWVGEIRLKSNNYATHYAEPVKGRFTISRDDSKSTVYLQMNSLKTEDTAVYYCTRYYGNYGGYFDVWGAGTLVTVSSGKPGSGKPGSGKPGSGKPGSSIVMTQSPATLSVSPGERATLSCRASQSVSNDVAWYQQKPGQSPRLLINYASHRYTGVPDRFTGSGYGTEFTLTISSLQSEDFAVYFCQQDYSSPRTFGGGTKVEIK

SEQ ID NO: 11291 - protein, 122 aa, Artificial Sequence
  Description of Artificial Sequence: Synthetic polypeptide
  VH of XENP018525
EVQLVESGGGLVKPGGSLRLSCAASGFTFSNHWMNWVRQAPGKGLEWVGEIRLKSNNYATHYAEPVKGRFTISRDDSKSTVYLQMNSLKTEDTAVYYCTRYYGNYGGYFDVWGAGTLVTVSS

SEQ ID NO: 11292 - protein, 107 aa, Artificial Sequence; identical to SEQ ID NO: 10923
  Description of Artificial Sequence: Synthetic polypeptide
  VL of XENP018525

SEQ ID NO: 11293 - protein, 5 aa, Artificial Sequence
  Description of Artificial Sequence: Synthetic peptide
  XENP018525 vhCDR1
NHWMN

SEQ ID NO: 11294 - protein, 19 aa, Artificial Sequence
  Description of Artificial Sequence: Synthetic peptide
  XENP018525 vhCDR2
EIRLKSNNYATHYAEPVKG

SEQ ID NO: 11295 - protein, 11 aa, Artificial Sequence
  Description of Artificial Sequence: Synthetic peptide
  XENP018525 vhCDR3
YYGNYGGYFDV

SEQ ID NO: 11296 - protein, 11 aa, Artificial Sequence
  Description of Artificial Sequence: Synthetic peptide
  XENP018525 vlCDR1
RASQSVSNDVA

SEQ ID NO: 11297 - protein, 7 aa, Artificial Sequence
  Description of Artificial Sequence: Synthetic peptide
  XENP018525 vlCDR2
YASHRYT

SEQ ID NO: 11298 - protein, 9 aa, Artificial Sequence
  Description of Artificial Sequence: Synthetic peptide
  XENP018525 vlCDR3
QQDYSSPRT

SEQ ID NO: 11299 - protein, 249 aa, Artificial Sequence
  Description of Artificial Sequence: Synthetic polypeptide
  XENP018526 1G6_H1.30_L1_scFv(GKPGS)4
EVQLVESGGGLVKPGGSLRLSCAASGFTFSNLWMNWVRQAPGKGLEWVGEIRLKSNNYATHYAEPVKGRFTISRDDSKSTVYLQMNSLKTEDTAVYYCTRYYGNYGGYFDVWGAGTLVTVSSGKPGSGKPGSGKPGSGKPGSSIVMTQSPATLSVSPGERATLSCRASQSVSNDVAWYQQKPGQSPRLLINYASHRYTGVPDRFTGSGYGTEFTLTISSLQSEDFAVYFCQQDYSSPRTFGGGTKVEIK

SEQ ID NO: 11300 - protein, 122 aa, Artificial Sequence
  Description of Artificial Sequence: Synthetic polypeptide
  VH of XENP018526
EVQLVESGGGLVKPGGSLRLSCAASGFTFSNLWMNWVRQAPGKGLEWVGEIRLKSNNYATHYAEPVKGRFTISRDDSKSTVYLQMNSLKTEDTAVYYCTRYYGNYGGYFDVWGAGTLVTVSS

SEQ ID NO: 11301 - protein, 107 aa, Artificial Sequence; identical to SEQ ID NO: 10923
  Description of Artificial Sequence: Synthetic polypeptide
  VL of XENP018526

SEQ ID NO: 11302 - protein, 5 aa, Artificial Sequence
  Description of Artificial Sequence: Synthetic peptide
  XENP018526 vhCDR1
NLWMN

SEQ ID NO: 11303 - protein, 19 aa, Artificial Sequence
  Description of Artificial Sequence: Synthetic peptide
  XENP018526 vhCDR2
EIRLKSNNYATHYAEPVKG

SEQ ID NO: 11304 - protein, 11 aa, Artificial Sequence
  Description of Artificial Sequence: Synthetic peptide
  XENP018526 vhCDR3
YYGNYGGYFDV

SEQ ID NO: 11305 - protein, 11 aa, Artificial Sequence
  Description of Artificial Sequence: Synthetic peptide
  XENP018526 vlCDR1
RASQSVSNDVA

SEQ ID NO: 11306 - protein, 7 aa, Artificial Sequence
  Description of Artificial Sequence: Synthetic peptide
  XENP018526 vlCDR2
YASHRYT

SEQ ID NO: 11307 - protein, 9 aa, Artificial Sequence
  Description of Artificial Sequence: Synthetic peptide
  XENP018526 vlCDR3
QQDYSSPRT

SEQ ID NO: 11308 - protein, 249 aa, Artificial Sequence
  Description of Artificial Sequence: Synthetic polypeptide
  XENP018527 1G6_H1.31_L1_scFv(GKPGS)4
EVQLVESGGGLVKPGGSLRLSCAASGFTFSNWWMNWVRQAPGKGLEWVGEIRLKSNNYATHYAEPVKGRFTISRDDSKSTVYLQMNSLKTEDTAVYYCTRYYGNYGGYFDVWGAGTLVTVSSGKPGSGKPGSGKPGSGKPGSSIVMTQSPATLSVSPGERATLSCRASQSVSNDVAWYQQKPGQSPRLLINYASHRYTGVPDRFTGSGYGTEFTLTISSLQSEDFAVYFCQQDYSSPRTFGGGTKVEIK

SEQ ID NO: 11309 - protein, 122 aa, Artificial Sequence
  Description of Artificial Sequence: Synthetic polypeptide
  VH of XENP018527
EVQLVESGGGLVKPGGSLRLSCAASGFTFSNWWMNWVRQAPGKGLEWVGEIRLKSNNYATHYAEPVKGRFTISRDDSKSTVYLQMNSLKTEDTAVYYCTRYYGNYGGYFDVWGAGTLVTVSS

SEQ ID NO: 11310 - protein, 107 aa, Artificial Sequence; identical to SEQ ID NO: 10923
  Description of Artificial Sequence: Synthetic polypeptide
  VL of XENP018527

SEQ ID NO: 11311 - protein, 5 aa, Artificial Sequence
  Description of Artificial Sequence: Synthetic peptide
  XENP018527 vhCDR1
NWWMN

SEQ ID NO: 11312 - protein, 19 aa, Artificial Sequence
  Description of Artificial Sequence: Synthetic peptide
  XENP018527 vhCDR2
EIRLKSNNYATHYAEPVKG

SEQ ID NO: 11313 - protein, 11 aa, Artificial Sequence
  Description of Artificial Sequence: Synthetic peptide
  XENP018527 vhCDR3
YYGNYGGYFDV

SEQ ID NO: 11314 - protein, 11 aa, Artificial Sequence
  Description of Artificial Sequence: Synthetic peptide
  XENP018527 vlCDR1
RASQSVSNDVA

SEQ ID NO: 11315 - protein, 7 aa, Artificial Sequence
  Description of Artificial Sequence: Synthetic peptide
  XENP018527 vlCDR2
YASHRYT

SEQ ID NO: 11316 - protein, 9 aa, Artificial Sequence
  Description of Artificial Sequence: Synthetic peptide
  XENP018527 vlCDR3
QQDYSSPRT

SEQ ID NO: 11317 - protein, 249 aa, Artificial Sequence
  Description of Artificial Sequence: Synthetic polypeptide
  XENP018528 1G6_H1.32_L1_scFv(GKPGS)4
EVQLVESGGGLVKPGGSLRLSCAASGFTFSNVWMNWVRQAPGKGLEWVGEIRLKSNNYATHYAEPVKGRFTISRDDSKSTVYLQMNSLKTEDTAVYYCTRYYGNYGGYFDVWGAGTLVTVSSGKPGSGKPGSGKPGSGKPGSSIVMTQSPATLSVSPGERATLSCRASQSVSNDVAWYQQKPGQSPRLLINYASHRYTGVPDRFTGSGYGTEFTLTISSLQSEDFAVYFCQQDYSSPRTFGGGTKVEIK

SEQ ID NO: 11318 - protein, 122 aa, Artificial Sequence
  Description of Artificial Sequence: Synthetic polypeptide
  VH of XENP018528
EVQLVESGGGLVKPGGSLRLSCAASGFTFSNVWMNWVRQAPGKGLEWVGEIRLKSNNYATHYAEPVKGRFTISRDDSKSTVYLQMNSLKTEDTAVYYCTRYYGNYGGYFDVWGAGTLVTVSS

SEQ ID NO: 11319 - protein, 107 aa, Artificial Sequence; identical to SEQ ID NO: 10923
  Description of Artificial Sequence: Synthetic polypeptide
  VL of XENP018528

SEQ ID NO: 11320 - protein, 5 aa, Artificial Sequence
  Description of Artificial Sequence: Synthetic peptide
  XENP018528 vhCDR1
NVWMN

SEQ ID NO: 11321 - protein, 19 aa, Artificial Sequence
  Description of Artificial Sequence: Synthetic peptide
  XENP018528 vhCDR2
EIRLKSNNYATHYAEPVKG

SEQ ID NO: 11322 - protein, 11 aa, Artificial Sequence
  Description of Artificial Sequence: Synthetic peptide
  XENP018528 vhCDR3
YYGNYGGYFDV

SEQ ID NO: 11323 - protein, 11 aa, Artificial Sequence
  Description of Artificial Sequence: Synthetic peptide
  XENP018528 vlCDR1
RASQSVSNDVA

SEQ ID NO: 11324 - protein, 7 aa, Artificial Sequence
  Description of Artificial Sequence: Synthetic peptide
  XENP018528 vlCDR2
YASHRYT

SEQ ID NO: 11325 - protein, 9 aa, Artificial Sequence
  Description of Artificial Sequence: Synthetic peptide
  XENP018528 vlCDR3
QQDYSSPRT

SEQ ID NO: 11326 - protein, 249 aa, Artificial Sequence
  Description of Artificial Sequence: Synthetic polypeptide
  XENP018529 1G6_H1.33_L1_scFv(GKPGS)4
EVQLVESGGGLVKPGGSLRLSCAASGFTFSNAWMNWVRQAPGKGLEWVGEIRLKSNNYATHYAEPVKGRFTISRDDSKSTVYLQMNSLKTEDTAVYYCTRYYGNYGGYFDVWGAGTLVTVSSGKPGSGKPGSGKPGSGKPGSSIVMTQSPATLSVSPGERATLSCRASQSVSNDVAWYQQKPGQSPRLLINYASHRYTGVPDRFTGSGYGTEFTLTISSLQSEDFAVYFCQQDYSSPRTFGGGTKVEIK

SEQ ID NO: 11327 - protein, 122 aa, Artificial Sequence
  Description of Artificial Sequence: Synthetic polypeptide
  VH of XENP018529
EVQLVESGGGLVKPGGSLRLSCAASGFTFSNAWMNWVRQAPGKGLEWVGEIRLKSNNYATHYAEPVKGRFTISRDDSKSTVYLQMNSLKTEDTAVYYCTRYYGNYGGYFDVWGAGTLVTVSS

SEQ ID NO: 11328 - protein, 107 aa, Artificial Sequence; identical to SEQ ID NO: 10923
  Description of Artificial Sequence: Synthetic polypeptide
  VL of XENP018529

SEQ ID NO: 11329 - protein, 5 aa, Artificial Sequence
  Description of Artificial Sequence: Synthetic peptide
  XENP018529 vhCDR1
NAWMN

SEQ ID NO: 11330 - protein, 19 aa, Artificial Sequence
  Description of Artificial Sequence: Synthetic peptide
  XENP018529 vhCDR2
EIRLKSNNYATHYAEPVKG

SEQ ID NO: 11331 - protein, 11 aa, Artificial Sequence
  Description of Artificial Sequence: Synthetic peptide
  XENP018529 vhCDR3
YYGNYGGYFDV

SEQ ID NO: 11332 - protein, 11 aa, Artificial Sequence
  Description of Artificial Sequence: Synthetic peptide
  XENP018529 vlCDR1
RASQSVSNDVA

SEQ ID NO: 11333 - protein, 7 aa, Artificial Sequence
  Description of Artificial Sequence: Synthetic peptide
  XENP018529 vlCDR2
YASHRYT

SEQ ID NO: 11334 - protein, 9 aa, Artificial Sequence
  Description of Artificial Sequence: Synthetic peptide
  XENP018529 vlCDR3
QQDYSSPRT

SEQ ID NO: 11335 - protein, 249 aa, Artificial Sequence
  Description of Artificial Sequence: Synthetic polypeptide
  XENP018530 1G6_H1.34_L1_scFv(GKPGS)4
EVQLVESGGGLVKPGGSLRLSCAASGFTFSNQWMNWVRQAPGKGLEWVGEIRLKSNNYATHYAEPVKGRFTISRDDSKSTVYLQMNSLKTEDTAVYYCTRYYGNYGGYFDVWGAGTLVTVSSGKPGSGKPGSGKPGSGKPGSSIVMTQSPATLSVSPGERATLSCRASQSVSNDVAWYQQKPGQSPRLLINYASHRYTGVPDRFTGSGYGTEFTLTISSLQSEDFAVYFCQQDYSSPRTFGGGTKVEIK

SEQ ID NO: 11336 - protein, 122 aa, Artificial Sequence
  Description of Artificial Sequence: Synthetic polypeptide
  VH of XENP018530
EVQLVESGGGLVKPGGSLRLSCAASGFTFSNQWMNWVRQAPGKGLEWVGEIRLKSNNYATHYAEPVKGRFTISRDDSKSTVYLQMNSLKTEDTAVYYCTRYYGNYGGYFDVWGAGTLVTVSS

SEQ ID NO: 11337 - protein, 107 aa, Artificial Sequence; identical to SEQ ID NO: 10923
  Description of Artificial Sequence: Synthetic polypeptide
  VL of XENP018530

SEQ ID NO: 11338 - protein, 5 aa, Artificial Sequence
  Description of Artificial Sequence: Synthetic peptide
  XENP018530 vhCDR1
NQWMN

SEQ ID NO: 11339 - protein, 19 aa, Artificial Sequence
  Description of Artificial Sequence: Synthetic peptide
  XENP018530 vhCDR2
EIRLKSNNYATHYAEPVKG

SEQ ID NO: 11340 - protein, 11 aa, Artificial Sequence
  Description of Artificial Sequence: Synthetic peptide
  XENP018530 vhCDR3
YYGNYGGYFDV

SEQ ID NO: 11341 - protein, 11 aa, Artificial Sequence
  Description of Artificial Sequence: Synthetic peptide
  XENP018530 vlCDR1
RASQSVSNDVA

SEQ ID NO: 11342 - protein, 7 aa, Artificial Sequence
  Description of Artificial Sequence: Synthetic peptide
  XENP018530 vlCDR2
YASHRYT

SEQ ID NO: 11343 - protein, 9 aa, Artificial Sequence
  Description of Artificial Sequence: Synthetic peptide
  XENP018530 vlCDR3
QQDYSSPRT

SEQ ID NO: 11344 - protein, 249 aa, Artificial Sequence
  Description of Artificial Sequence: Synthetic polypeptide
  XENP018531 1G6_H1.35_L1_scFv(GKPGS)4
EVQLVESGGGLVKPGGSLRLSCAASGFTFSNDWMNWVRQAPGKGLEWVGEIRLKSNNYATHYAEPVKGRFTISRDDSKSTVYLQMNSLKTEDTAVYYCTRYYGNYGGYFDVWGAGTLVTVSSGKPGSGKPGSGKPGSGKPGSSIVMTQSPATLSVSPGERATLSCRASQSVSNDVAWYQQKPGQSPRLLINYASHRYTGVPDRFTGSGYGTEFTLTISSLQSEDFAVYFCQQDYSSPRTFGGGTKVEIK

SEQ ID NO: 11345 - protein, 122 aa, Artificial Sequence
  Description of Artificial Sequence: Synthetic polypeptide
  VH of XENP018531
EVQLVESGGGLVKPGGSLRLSCAASGFTFSNDWMNWVRQAPGKGLEWVGEIRLKSNNYATHYAEPVKGRFTISRDDSKSTVYLQMNSLKTEDTAVYYCTRYYGNYGGYFDVWGAGTLVTVSS

SEQ ID NO: 11346 - protein, 107 aa, Artificial Sequence; identical to SEQ ID NO: 10923
  Description of Artificial Sequence: Synthetic polypeptide
  VL of XENP018531

SEQ ID NO: 11347 - protein, 5 aa, Artificial Sequence
  Description of Artificial Sequence: Synthetic peptide
  XENP018531 vhCDR1
NDWMN

SEQ ID NO: 11348 - protein, 19 aa, Artificial Sequence
  Description of Artificial Sequence: Synthetic peptide
  XENP018531 vhCDR2
EIRLKSNNYATHYAEPVKG

SEQ ID NO: 11349 - protein, 11 aa, Artificial Sequence
  Description of Artificial Sequence: Synthetic peptide
  XENP018531 vhCDR3
YYGNYGGYFDV

SEQ ID NO: 11350 - protein, 11 aa, Artificial Sequence
  Description of Artificial Sequence: Synthetic peptide
  XENP018531 vlCDR1
RASQSVSNDVA

SEQ ID NO: 11351 - protein, 7 aa, Artificial Sequence
  Description of Artificial Sequence: Synthetic peptide
  XENP018531 vlCDR2
YASHRYT

SEQ ID NO: 11352 - protein, 9 aa, Artificial Sequence
  Description of Artificial Sequence: Synthetic peptide
  XENP018531 vlCDR3
QQDYSSPRT

SEQ ID NO: 11353 - protein, 249 aa, Artificial Sequence
  Description of Artificial Sequence: Synthetic polypeptide
  XENP018532 1G6_H1.36_L1_scFv(GKPGS)4
EVQLVESGGGLVKPGGSLRLSCAASGFTFSNKWMNWVRQAPGKGLEWVGEIRLKSNNYATHYAEPVKGRFTISRDDSKSTVYLQMNSLKTEDTAVYYCTRYYGNYGGYFDVWGAGTLVTVSSGKPGSGKPGSGKPGSGKPGSSIVMTQSPATLSVSPGERATLSCRASQSVSNDVAWYQQKPGQSPRLLINYASHRYTGVPDRFTGSGYGTEFTLTISSLQSEDFAVYFCQQDYSSPRTFGGGTKVEIK

SEQ ID NO: 11354 - protein, 122 aa, Artificial Sequence
  Description of Artificial Sequence: Synthetic polypeptide
  VH of XENP018532
EVQLVESGGGLVKPGGSLRLSCAASGFTFSNKWMNWVRQAPGKGLEWVGEIRLKSNNYATHYAEPVKGRFTISRDDSKSTVYLQMNSLKTEDTAVYYCTRYYGNYGGYFDVWGAGTLVTVSS

SEQ ID NO: 11355 - protein, 107 aa, Artificial Sequence; identical to SEQ ID NO: 10923
  Description of Artificial Sequence: Synthetic polypeptide
  VL of XENP018532

SEQ ID NO: 11356 - protein, 5 aa, Artificial Sequence
  Description of Artificial Sequence: Synthetic peptide
  XENP018532 vhCDR1
NKWMN

SEQ ID NO: 11357 - protein, 19 aa, Artificial Sequence
  Description of Artificial Sequence: Synthetic peptide
  XENP018532 vhCDR2
EIRLKSNNYATHYAEPVKG

SEQ ID NO: 11358 - protein, 11 aa, Artificial Sequence
  Description of Artificial Sequence: Synthetic peptide
  XENP018532 vhCDR3
YYGNYGGYFDV

SEQ ID NO: 11359 - protein, 11 aa, Artificial Sequence
  Description of Artificial Sequence: Synthetic peptide
  XENP018532 vlCDR1
RASQSVSNDVA

SEQ ID NO: 11360 - protein, 7 aa, Artificial Sequence
  Description of Artificial Sequence: Synthetic peptide
  XENP018532 vlCDR2
YASHRYT

SEQ ID NO: 11361 - protein, 9 aa, Artificial Sequence
  Description of Artificial Sequence: Synthetic peptide
  XENP018532 vlCDR3
QQDYSSPRT

SEQ ID NO: 11362 - protein, 249 aa, Artificial Sequence
  Description of Artificial Sequence: Synthetic polypeptide
  XENP018533 1G6_H1.37_L1_scFv(GKPGS)4
EVQLVESGGGLVKPGGSLRLSCAASGFTFSNYGMNWVRQAPGKGLEWVGEIRLKSNNYATHYAEPVKGRFTISRDDSKSTVYLQMNSLKTEDTAVYYCTRYYGNYGGYFDVWGAGTLVTVSSGKPGSGKPGSGKPGSGKPGSSIVMTQSPATLSVSPGERATLSCRASQSVSNDVAWYQQKPGQSPRLLINYASHRYTGVPDRFTGSGYGTEFTLTISSLQSEDFAVYFCQQDYSSPRTFGGGTKVEIK

SEQ ID NO: 11363 - protein, 122 aa, Artificial Sequence
  Description of Artificial Sequence: Synthetic polypeptide
  VH of XENP018533
EVQLVESGGGLVKPGGSLRLSCAASGFTFSNYGMNWVRQAPGKGLEWVGEIRLKSNNYATHYAEPVKGRFTISRDDSKSTVYLQMNSLKTEDTAVYYCTRYYGNYGGYFDVWGAGTLVTVSS

SEQ ID NO: 11364 - protein, 107 aa, Artificial Sequence; identical to SEQ ID NO: 10923
  Description of Artificial Sequence: Synthetic polypeptide
  VL of XENP018533

SEQ ID NO: 11365 - protein, 5 aa, Artificial Sequence
  Description of Artificial Sequence: Synthetic peptide
  XENP018533 vhCDR1
NYGMN

SEQ ID NO: 11366 - protein, 19 aa, Artificial Sequence
  Description of Artificial Sequence: Synthetic peptide
  XENP018533 vhCDR2
EIRLKSNNYATHYAEPVKG

SEQ ID NO: 11367 - protein, 11 aa, Artificial Sequence
  Description of Artificial Sequence: Synthetic peptide
  XENP018533 vhCDR3
YYGNYGGYFDV

SEQ ID NO: 11368 - protein, 11 aa, Artificial Sequence
  Description of Artificial Sequence: Synthetic peptide
  XENP018533 vlCDR1
RASQSVSNDVA

SEQ ID NO: 11369 - protein, 7 aa, Artificial Sequence
  Description of Artificial Sequence: Synthetic peptide
  XENP018533 vlCDR2
YASHRYT

SEQ ID NO: 11370 - protein, 9 aa, Artificial Sequence
  Description of Artificial Sequence: Synthetic peptide
  XENP018533 vlCDR3
QQDYSSPRT

SEQ ID NO: 11371 - protein, 249 aa, Artificial Sequence
  Description of Artificial Sequence: Synthetic polypeptide
  XENP018534 1G6_H1.38_L1_scFv(GKPGS)4
EVQLVESGGGLVKPGGSLRLSCAASGFTFSNYAMNWVRQAPGKGLEWVGEIRLKSNNYATHYAEPVKGRFTISRDDSKSTVYLQMNSLKTEDTAVYYCTRYYGNYGGYFDVWGAGTLVTVSSGKPGSGKPGSGKPGSGKPGSSIVMTQSPATLSVSPGERATLSCRASQSVSNDVAWYQQKPGQSPRLLINYASHRYTGVPDRFTGSGYGTEFTLTISSLQSEDFAVYFCQQDYSSPRTFGGGTKVEIK

SEQ ID NO: 11372 - protein, 122 aa, Artificial Sequence
  Description of Artificial Sequence: Synthetic polypeptide
  VH of XENP018534
EVQLVESGGGLVKPGGSLRLSCAASGFTFSNYAMNWVRQAPGKGLEWVGEIRLKSNNYATHYAEPVKGRFTISRDDSKSTVYLQMNSLKTEDTAVYYCTRYYGNYGGYFDVWGAGTLVTVSS

SEQ ID NO: 11373 - protein, 107 aa, Artificial Sequence; identical to SEQ ID NO: 10923
  Description of Artificial Sequence: Synthetic polypeptide
  VL of XENP018534

SEQ ID NO: 11374 - protein, 5 aa, Artificial Sequence
  Description of Artificial Sequence: Synthetic peptide
  XENP018534 vhCDR1
NYAMN

SEQ ID NO: 11375 - protein, 19 aa, Artificial Sequence
  Description of Artificial Sequence: Synthetic peptide
  XENP018534 vhCDR2
EIRLKSNNYATHYAEPVKG

SEQ ID NO: 11376 - protein, 11 aa, Artificial Sequence
  Description of Artificial Sequence: Synthetic peptide
  XENP018534 vhCDR3
YYGNYGGYFDV

SEQ ID NO: 11377 - protein, 11 aa, Artificial Sequence
  Description of Artificial Sequence: Synthetic peptide
  XENP018534 vlCDR1
RASQSVSNDVA

SEQ ID NO: 11378 - protein, 7 aa, Artificial Sequence
  Description of Artificial Sequence: Synthetic peptide
  XENP018534 vlCDR2
YASHRYT

SEQ ID NO: 11379 - protein, 9 aa, Artificial Sequence
  Description of Artificial Sequence: Synthetic peptide
  XENP018534 vlCDR3
QQDYSSPRT

SEQ ID NO: 11380 - protein, 249 aa, Artificial Sequence
  Description of Artificial Sequence: Synthetic polypeptide
  XENP018535 1G6_H1.39_L1_scFv(GKPGS)4
EVQLVESGGGLVKPGGSLRLSCAASGFTFSNYYMNWVRQAPGKGLEWVGEIRLKSNNYATHYAEPVKGRFTISRDDSKSTVYLQMNSLKTEDTAVYYCTRYYGNYGGYFDVWGAGTLVTVSSGKPGSGKPGSGKPGSGKPGSSIVMTQSPATLSVSPGERATLSCRASQSVSNDVAWYQQKPGQSPRLLINYASHRYTGVPDRFTGSGYGTEFTLTISSLQSEDFAVYFCQQDYSSPRTFGGGTKVEIK

SEQ ID NO: 11381 - protein, 122 aa, Artificial Sequence
  Description of Artificial Sequence: Synthetic polypeptide
  VH of XENP018535
EVQLVESGGGLVKPGGSLRLSCAASGFTFSNYYMNWVRQAPGKGLEWVGEIRLKSNNYATHYAEPVKGRFTISRDDSKSTVYLQMNSLKTEDTAVYYCTRYYGNYGGYFDVWGAGTLVTVSS

SEQ ID NO: 11382 - protein, 107 aa, Artificial Sequence; identical to SEQ ID NO: 10923
  Description of Artificial Sequence: Synthetic polypeptide
  VL of XENP018535

SEQ ID NO: 11383 - protein, 5 aa, Artificial Sequence
  Description of Artificial Sequence: Synthetic peptide
  XENP018535 vhCDR1
NYYMN

SEQ ID NO: 11384 - protein, 19 aa, Artificial Sequence
  Description of Artificial Sequence: Synthetic peptide
  XENP018535 vhCDR2
EIRLKSNNYATHYAEPVKG

SEQ ID NO: 11385 - protein, 11 aa, Artificial Sequence
  Description of Artificial Sequence: Synthetic peptide
  XENP018535 vhCDR3
YYGNYGGYFDV

SEQ ID NO: 11386 - protein, 11 aa, Artificial Sequence
  Description of Artificial Sequence: Synthetic peptide
  XENP018535 vlCDR1
RASQSVSNDVA

SEQ ID NO: 11387 - protein, 7 aa, Artificial Sequence
  Description of Artificial Sequence: Synthetic peptide
  XENP018535 vlCDR2
YASHRYT

SEQ ID NO: 11388 - protein, 9 aa, Artificial Sequence
  Description of Artificial Sequence: Synthetic peptide
  XENP018535 vlCDR3
QQDYSSPRT

SEQ ID NO: 11389 - protein, 249 aa, Artificial Sequence
  Description of Artificial Sequence: Synthetic polypeptide
  XENP018536 1G6_H1.40_L1_scFv(GKPGS)4
EVQLVESGGGLVKPGGSLRLSCAASGFTFSNYDMNWVRQAPGKGLEWVGEIRLKSNNYATHYAEPVKGRFTISRDDSKSTVYLQMNSLKTEDTAVYYCTRYYGNYGGYFDVWGAGTLVTVSSGKPGSGKPGSGKPGSGKPGSSIVMTQSPATLSVSPGERATLSCRASQSVSNDVAWYQQKPGQSPRLLINYASHRYTGVPDRFTGSGYGTEFTLTISSLQSEDFAVYFCQQDYSSPRTFGGGTKVEIK

SEQ ID NO: 11390 - protein, 122 aa, Artificial Sequence
  Description of Artificial Sequence: Synthetic polypeptide
  VH of XENP018536
EVQLVESGGGLVKPGGSLRLSCAASGFTFSNYDMNWVRQAPGKGLEWVGEIRLKSNNYATHYAEPVKGRFTISRDDSKSTVYLQMNSLKTEDTAVYYCTRYYGNYGGYFDVWGAGTLVTVSS

SEQ ID NO: 11391 - protein, 107 aa, Artificial Sequence; identical to SEQ ID NO: 10923
  Description of Artificial Sequence: Synthetic polypeptide
  VL of XENP018536

SEQ ID NO: 11392 - protein, 5 aa, Artificial Sequence
  Description of Artificial Sequence: Synthetic peptide
  XENP018536 vhCDR1
NYDMN

SEQ ID NO: 11393 - protein, 19 aa, Artificial Sequence
  Description of Artificial Sequence: Synthetic peptide
  XENP018536 vhCDR2
EIRLKSNNYATHYAEPVKG

SEQ ID NO: 11394 - protein, 11 aa, Artificial Sequence
  Description of Artificial Sequence: Synthetic peptide
  XENP018536 vhCDR3
YYGNYGGYFDV

SEQ ID NO: 11395 - protein, 11 aa, Artificial Sequence
  Description of Artificial Sequence: Synthetic peptide
  XENP018536 vlCDR1
RASQSVSNDVA

SEQ ID NO: 11396 - protein, 7 aa, Artificial Sequence
  Description of Artificial Sequence: Synthetic peptide
  XENP018536 vlCDR2
YASHRYT

SEQ ID NO: 11397 - protein, 9 aa, Artificial Sequence
  Description of Artificial Sequence: Synthetic peptide
  XENP018536 vlCDR3
QQDYSSPRT

SEQ ID NO: 11398 - protein, 249 aa, Artificial Sequence
  Description of Artificial Sequence: Synthetic polypeptide
  XENP018537 1G6_H1.41_L1_scFv(GKPGS)4
EVQLVESGGGLVKPGGSLRLSCAASGFTFSNYWMSWVRQAPGKGLEWVGEIRLKSNNYATHYAEPVKGRFTISRDDSKSTVYLQMNSLKTEDTAVYYCTRYYGNYGGYFDVWGAGTLVTVSSGKPGSGKPGSGKPGSGKPGSSIVMTQSPATLSVSPGERATLSCRASQSVSNDVAWYQQKPGQSPRLLINYASHRYTGVPDRFTGSGYGTEFTLTISSLQSEDFAVYFCQQDYSSPRTFGGGTKVEIK

SEQ ID NO: 11399 - protein, 122 aa, Artificial Sequence
  Description of Artificial Sequence: Synthetic polypeptide
  VH of XENP018537
EVQLVESGGGLVKPGGSLRLSCAASGFTFSNYWMSWVRQAPGKGLEWVGEIRLKSNNYATHYAEPVKGRFTISRDDSKSTVYLQMNSLKTEDTAVYYCTRYYGNYGGYFDVWGAGTLVTVSS

SEQ ID NO: 11400 - protein, 107 aa, Artificial Sequence; identical to SEQ ID NO: 10923
  Description of Artificial Sequence: Synthetic polypeptide
  VL of XENP018537

SEQ ID NO: 11401 - protein, 5 aa, Artificial Sequence
  Description of Artificial Sequence: Synthetic peptide
  XENP018537 vhCDR1
NYWMS

SEQ ID NO: 11402 - protein, 19 aa, Artificial Sequence
  Description of Artificial Sequence: Synthetic peptide
  XENP018537 vhCDR2
EIRLKSNNYATHYAEPVKG

SEQ ID NO: 11403 - protein, 11 aa, Artificial Sequence
  Description of Artificial Sequence: Synthetic peptide
  XENP018537 vhCDR3
YYGNYGGYFDV

SEQ ID NO: 11404 - protein, 11 aa, Artificial Sequence
  Description of Artificial Sequence: Synthetic peptide
  XENP018537 vlCDR1
RASQSVSNDVA

SEQ ID NO: 11405 - protein, 7 aa, Artificial Sequence
  Description of Artificial Sequence: Synthetic peptide
  XENP018537 vlCDR2
YASHRYT

SEQ ID NO: 11406 - protein, 9 aa, Artificial Sequence
  Description of Artificial Sequence: Synthetic peptide
  XENP018537 vlCDR3
QQDYSSPRT

SEQ ID NO: 11407 - protein, 249 aa, Artificial Sequence
  Description of Artificial Sequence: Synthetic polypeptide
  XENP018538 1G6_H1.42_L1_scFv(GKPGS)4
EVQLVESGGGLVKPGGSLRLSCAASGFTFSNYWMHWVRQAPGKGLEWVGEIRLKSNNYATHYAEPVKGRFTISRDDSKSTVYLQMNSLKTEDTAVYYCTRYYGNYGGYFDVWGAGTLVTVSSGKPGSGKPGSGKPGSGKPGSSIVMTQSPATLSVSPGERATLSCRASQSVSNDVAWYQQKPGQSPRLLINYASHRYTGVPDRFTGSGYGTEFTLTISSLQSEDFAVYFCQQDYSSPRTFGGGTKVEIK

SEQ ID NO: 11408 - protein, 122 aa, Artificial Sequence
  Description of Artificial Sequence: Synthetic polypeptide
  VH of XENP018538
EVQLVESGGGLVKPGGSLRLSCAASGFTFSNYWMHWVRQAPGKGLEWVGEIRLKSNNYATHYAEPVKGRFTISRDDSKSTVYLQMNSLKTEDTAVYYCTRYYGNYGGYFDVWGAGTLVTVSS

SEQ ID NO: 11409 - protein, 107 aa, Artificial Sequence; identical to SEQ ID NO: 10923
  Description of Artificial Sequence: Synthetic polypeptide
  VL of XENP018538

SEQ ID NO: 11410 - protein, 5 aa, Artificial Sequence
  Description of Artificial Sequence: Synthetic peptide
  XENP018538 vhCDR1
NYWMH

SEQ ID NO: 11411 - protein, 19 aa, Artificial Sequence
  Description of Artificial Sequence: Synthetic peptide
  XENP018538 vhCDR2
EIRLKSNNYATHYAEPVKG

SEQ ID NO: 11412 - protein, 11 aa, Artificial Sequence
  Description of Artificial Sequence: Synthetic peptide
  XENP018538 vhCDR3
YYGNYGGYFDV

SEQ ID NO: 11413 - protein, 11 aa, Artificial Sequence
  Description of Artificial Sequence: Synthetic peptide
  XENP018538 vlCDR1
RASQSVSNDVA

SEQ ID NO: 11414 - protein, 7 aa, Artificial Sequence
  Description of Artificial Sequence: Synthetic peptide
  XENP018538 vlCDR2
YASHRYT

SEQ ID NO: 11415 - protein, 9 aa, Artificial Sequence
  Description of Artificial Sequence: Synthetic peptide
  XENP018538 vlCDR3
QQDYSSPRT

SEQ ID NO: 11416 - protein, 249 aa, Artificial Sequence
  Description of Artificial Sequence: Synthetic polypeptide
  XENP018539 1G6_H1.43_L1_scFv(GKPGS)4
EVQLVESGGGLVKPGGSLRLSCAASGFTFSNYWMDWVRQAPGKGLEWVGEIRLKSNNYATHYAEPVKGRFTISRDDSKSTVYLQMNSLKTEDTAVYYCTRYYGNYGGYFDVWGAGTLVTVSSGKPGSGKPGSGKPGSGKPGSSIVMTQSPATLSVSPGERATLSCRASQSVSNDVAWYQQKPGQSPRLLINYASHRYTGVPDRFTGSGYGTEFTLTISSLQSEDFAVYFCQQDYSSPRTFGGGTKVEIK

SEQ ID NO: 11417 - protein, 122 aa, Artificial Sequence
  Description of Artificial Sequence: Synthetic polypeptide
  VH of XENP018539
EVQLVESGGGLVKPGGSLRLSCAASGFTFSNYWMDWVRQAPGKGLEWVGEIRLKSNNYATHYAEPVKGRFTISRDDSKSTVYLQMNSLKTEDTAVYYCTRYYGNYGGYFDVWGAGTLVTVSS

SEQ ID NO: 11418 - protein, 107 aa, Artificial Sequence; identical to SEQ ID NO: 10923
  Description of Artificial Sequence: Synthetic polypeptide
  VL of XENP018539

SEQ ID NO: 11419 - protein, 5 aa, Artificial Sequence
  Description of Artificial Sequence: Synthetic peptide
  XENP018539 vhCDR1
NYWMD

SEQ ID NO: 11420 - protein, 19 aa, Artificial Sequence
  Description of Artificial Sequence: Synthetic peptide
  XENP018539 vhCDR2
EIRLKSNNYATHYAEPVKG

SEQ ID NO: 11421 - protein, 11 aa, Artificial Sequence
  Description of Artificial Sequence: Synthetic peptide
  XENP018539 vhCDR3
YYGNYGGYFDV

SEQ ID NO: 11422 - protein, 11 aa, Artificial Sequence
  Description of Artificial Sequence: Synthetic peptide
  XENP018539 vlCDR1
RASQSVSNDVA

SEQ ID NO: 11423 - protein, 7 aa, Artificial Sequence
  Description of Artificial Sequence: Synthetic peptide
  XENP018539 vlCDR2
YASHRYT

SEQ ID NO: 11424 - protein, 9 aa, Artificial Sequence
  Description of Artificial Sequence: Synthetic peptide
  XENP018539 vlCDR3
QQDYSSPRT

SEQ ID NO: 11425 - protein, 249 aa, Artificial Sequence
  Description of Artificial Sequence: Synthetic polypeptide
  XENP018540 1G6_H1.44_L1_scFv(GKPGS)4
EVQLVESGGGLVKPGGSLRLSCAASGFTFSNYWMGWVRQAPGKGLEWVGEIRLKSNNYATHYAEPVKGRFTISRDDSKSTVYLQMNSLKTEDTAVYYCTRYYGNYGGYFDVWGAGTLVTVSSGKPGSGKPGSGKPGSGKPGSSIVMTQSPATLSVSPGERATLSCRASQSVSNDVAWYQQKPGQSPRLLINYASHRYTGVPDRFTGSGYGTEFTLTISSLQSEDFAVYFCQQDYSSPRTFGGGTKVEIK

SEQ ID NO: 11426 - protein, 122 aa, Artificial Sequence
  Description of Artificial Sequence: Synthetic polypeptide
  VH of XENP018540
EVQLVESGGGLVKPGGSLRLSCAASGFTFSNYWMGWVRQAPGKGLEWVGEIRLKSNNYATHYAEPVKGRFTISRDDSKSTVYLQMNSLKTEDTAVYYCTRYYGNYGGYFDVWGAGTLVTVSS

SEQ ID NO: 11427 - protein, 107 aa, Artificial Sequence; identical to SEQ ID NO: 10923
  Description of Artificial Sequence: Synthetic polypeptide
  VL of XENP018540

SEQ ID NO: 11428 - protein, 5 aa, Artificial Sequence
  Description of Artificial Sequence: Synthetic peptide
  XENP018540 vhCDR1
NYWMG

SEQ ID NO: 11429 - protein, 19 aa, Artificial Sequence
  Description of Artificial Sequence: Synthetic peptide
  XENP018540 vhCDR2
EIRLKSNNYATHYAEPVKG

SEQ ID NO: 11430 - protein, 11 aa, Artificial Sequence
  Description of Artificial Sequence: Synthetic peptide
  XENP018540 vhCDR3
YYGNYGGYFDV

SEQ ID NO: 11431 - protein, 11 aa, Artificial Sequence
  Description of Artificial Sequence: Synthetic peptide
  XENP018540 vlCDR1
RASQSVSNDVA

SEQ ID NO: 11432 - protein, 7 aa, Artificial Sequence
  Description of Artificial Sequence: Synthetic peptide
  XENP018540 vlCDR2
YASHRYT

SEQ ID NO: 11433 - protein, 9 aa, Artificial Sequence
  Description of Artificial Sequence: Synthetic peptide
  XENP018540 vlCDR3
QQDYSSPRT

SEQ ID NO: 11434 - protein, 249 aa, Artificial Sequence
  Description of Artificial Sequence: Synthetic polypeptide
  XENP018541 1G6_H1.45_L1_scFv(GKPGS)4
EVQLVESGGGLVKPGGSLRLSCAASGFTFSNYWMNWARQAPGKGLEWVGEIRLKSNNYATHYAEPVKGRFTISRDDSKSTVYLQMNSLKTEDTAVYYCTRYYGNYGGYFDVWGAGTLVTVSSGKPGSGKPGSGKPGSGKPGSSIVMTQSPATLSVSPGERATLSCRASQSVSNDVAWYQQKPGQSPRLLINYASHRYTGVPDRFTGSGYGTEFTLTISSLQSEDFAVYFCQQDYSSPRTFGGGTKVEIK

SEQ ID NO: 11435 - protein, 122 aa, Artificial Sequence
  Description of Artificial Sequence: Synthetic polypeptide
  VH of XENP018541
EVQLVESGGGLVKPGGSLRLSCAASGFTFSNYWMNWARQAPGKGLEWVGEIRLKSNNYATHYAEPVKGRFTISRDDSKSTVYLQMNSLKTEDTAVYYCTRYYGNYGGYFDVWGAGTLVTVSS

SEQ ID NO: 11436 - protein, 107 aa, Artificial Sequence; identical to SEQ ID NO: 10923
  Description of Artificial Sequence: Synthetic polypeptide
  VL of XENP018541

SEQ ID NO: 11437 - protein, 5 aa, Artificial Sequence
  Description of Artificial Sequence: Synthetic peptide
  XENP018541 vhCDR1
NYWMN

SEQ ID NO: 11438 - protein, 19 aa, Artificial Sequence
  Description of Artificial Sequence: Synthetic peptide
  XENP018541 vhCDR2
EIRLKSNNYATHYAEPVKG

SEQ ID NO: 11439 - protein, 11 aa, Artificial Sequence
  Description of Artificial Sequence: Synthetic peptide
  XENP018541 vhCDR3
YYGNYGGYFDV

SEQ ID NO: 11440 - protein, 11 aa, Artificial Sequence
  Description of Artificial Sequence: Synthetic peptide
  XENP018541 vlCDR1
RASQSVSNDVA

SEQ ID NO: 11441 - protein, 7 aa, Artificial Sequence
  Description of Artificial Sequence: Synthetic peptide
  XENP018541 vlCDR2
YASHRYT

SEQ ID NO: 11442 - protein, 9 aa, Artificial Sequence
  Description of Artificial Sequence: Synthetic peptide
  XENP018541 vlCDR3
QQDYSSPRT

SEQ ID NO: 11443 - protein, 249 aa, Artificial Sequence
  Description of Artificial Sequence: Synthetic polypeptide
  XENP018542 1G6_H1.46_L1_scFv(GKPGS)4
EVQLVESGGGLVKPGGSLRLSCAASGFTFSNYWMNWIRQAPGKGLEWVGEIRLKSNNYATHYAEPVKGRFTISRDDSKSTVYLQMNSLKTEDTAVYYCTRYYGNYGGYFDVWGAGTLVTVSSGKPGSGKPGSGKPGSGKPGSSIVMTQSPATLSVSPGERATLSCRASQSVSNDVAWYQQKPGQSPRLLINYASHRYTGVPDRFTGSGYGTEFTLTISSLQSEDFAVYFCQQDYSSPRTFGGGTKVEIK

SEQ ID NO: 11444 - protein, 122 aa, Artificial Sequence
  Description of Artificial Sequence: Synthetic polypeptide
  VH of XENP018542
EVQLVESGGGLVKPGGSLRLSCAASGFTFSNYWMNWIRQAPGKGLEWVGEIRLKSNNYATHYAEPVKGRFTISRDDSKSTVYLQMNSLKTEDTAVYYCTRYYGNYGGYFDVWGAGTLVTVSS

SEQ ID NO: 11445 - protein, 107 aa, Artificial Sequence; identical to SEQ ID NO: 10923
  Description of Artificial Sequence: Synthetic polypeptide
  VL of XENP018542

SEQ ID NO: 11446 - protein, 5 aa, Artificial Sequence
  Description of Artificial Sequence: Synthetic peptide
  XENP018542 vhCDR1
NYWMN

SEQ ID NO: 11447 - protein, 19 aa, Artificial Sequence
  Description of Artificial Sequence: Synthetic peptide
  XENP018542 vhCDR2
EIRLKSNNYATHYAEPVKG

SEQ ID NO: 11448 - protein, 11 aa, Artificial Sequence
  Description of Artificial Sequence: Synthetic peptide
  XENP018542 vhCDR3
YYGNYGGYFDV

SEQ ID NO: 11449 - protein, 11 aa, Artificial Sequence
  Description of Artificial Sequence: Synthetic peptide
  XENP018542 vlCDR1
RASQSVSNDVA

SEQ ID NO: 11450 - protein, 7 aa, Artificial Sequence
  Description of Artificial Sequence: Synthetic peptide
  XENP018542 vlCDR2
YASHRYT

SEQ ID NO: 11451 - protein, 9 aa, Artificial Sequence
  Description of Artificial Sequence: Synthetic peptide
  XENP018542 vlCDR3
QQDYSSPRT

SEQ ID NO: 11452 - protein, 249 aa, Artificial Sequence
  Description of Artificial Sequence: Synthetic polypeptide
  XENP018543 1G6_H1.47_L1_scFv(GKPGS)4
EVQLVESGGGLVKPGGSLRLSCAASGFTFSNYWMNWFRQAPGKGLEWVGEIRLKSNNYATHYAEPVKGRFTISRDDSKSTVYLQMNSLKTEDTAVYYCTRYYGNYGGYFDVWGAGTLVTVSSGKPGSGKPGSGKPGSGKPGSSIVMTQSPATLSVSPGERATLSCRASQSVSNDVAWYQQKPGQSPRLLINYASHRYTGVPDRFTGSGYGTEFTLTISSLQSEDFAVYFCQQDYSSPRTFGGGTKVEIK

SEQ ID NO: 11453 - protein, 122 aa, Artificial Sequence
  Description of Artificial Sequence: Synthetic polypeptide
  VH of XENP018543
EVQLVESGGGLVKPGGSLRLSCAASGFTFSNYWMNWFRQAPGKGLEWVGEIRLKSNNYATHYAEPVKGRFTISRDDSKSTVYLQMNSLKTEDTAVYYCTRYYGNYGGYFDVWGAGTLVTVSS

SEQ ID NO: 11454 - protein, 107 aa, Artificial Sequence; identical to SEQ ID NO: 10923
  Description of Artificial Sequence: Synthetic polypeptide
  VL of XENP018543

SEQ ID NO: 11455 - protein, 5 aa, Artificial Sequence
  Description of Artificial Sequence: Synthetic peptide
  XENP018543 vhCDR1
NYWMN

SEQ ID NO: 11456 - protein, 19 aa, Artificial Sequence
  Description of Artificial Sequence: Synthetic peptide
  XENP018543 vhCDR2
EIRLKSNNYATHYAEPVKG

SEQ ID NO: 11457 - protein, 11 aa, Artificial Sequence
  Description of Artificial Sequence: Synthetic peptide
  XENP018543 vhCDR3
YYGNYGGYFDV

SEQ ID NO: 11458 - protein, 11 aa, Artificial Sequence
  Description of Artificial Sequence: Synthetic peptide
  XENP018543 vlCDR1
RASQSVSNDVA

SEQ ID NO: 11459 - protein, 7 aa, Artificial Sequence
  Description of Artificial Sequence: Synthetic peptide
  XENP018543 vlCDR2
YASHRYT

SEQ ID NO: 11460 - protein, 9 aa, Artificial Sequence
  Description of Artificial Sequence: Synthetic peptide
  XENP018543 vlCDR3
QQDYSSPRT

SEQ ID NO: 11461 - protein, 249 aa, Artificial Sequence
  Description of Artificial Sequence: Synthetic polypeptide
  XENP018544 1G6_H1.48_L1_scFv(GKPGS)4
EVQLVESGGGLVKPGGSLRLSCAASGFTFSNYWMNWVRKAPGKGLEWVGEIRLKSNNYATHYAEPVKGRFTISRDDSKSTVYLQMNSLKTEDTAVYYCTRYYGNYGGYFDVWGAGTLVTVSSGKPGSGKPGSGKPGSGKPGSSIVMTQSPATLSVSPGERATLSCRASQSVSNDVAWYQQKPGQSPRLLINYASHRYTGVPDRFTGSGYGTEFTLTISSLQSEDFAVYFCQQDYSSPRTFGGGTKVEIK

SEQ ID NO: 11462 - protein, 122 aa, Artificial Sequence
  Description of Artificial Sequence: Synthetic polypeptide
  VH of XENP018544
EVQLVESGGGLVKPGGSLRLSCAASGFTFSNYWMNWVRKAPGKGLEWVGEIRLKSNNYATHYAEPVKGRFTISRDDSKSTVYLQMNSLKTEDTAVYYCTRYYGNYGGYFDVWGAGTLVTVSS

SEQ ID NO: 11463 - protein, 107 aa, Artificial Sequence; identical to SEQ ID NO: 10923
  Description of Artificial Sequence: Synthetic polypeptide
  VL of XENP018544

SEQ ID NO: 11464 - protein, 11 aa, Artificial Sequence
  Description of Artificial Sequence: Synthetic peptide
  XENP018544 vlCDR1
RASQSVSNDVA

SEQ ID NO: 11465 - protein, 7 aa, Artificial Sequence
  Description of Artificial Sequence: Synthetic peptide
  XENP018544 vlCDR2
YASHRYT

SEQ ID NO: 11466 - protein, 9 aa, Artificial Sequence
  Description of Artificial Sequence: Synthetic peptide
  XENP018544 vlCDR3
QQDYSSPRT

SEQ ID NO: 11467 - protein, 249 aa, Artificial Sequence
  Description of Artificial Sequence: Synthetic polypeptide
  XENP018545 1G6_H1.49_L1_scFv(GKPGS)4
EVQLVESGGGLVKPGGSLRLSCAASGFTFSNYWMNWVRQSPGKGLEWVGEIRLKSNNYATHYAEPVKGRFTISRDDSKSTVYLQMNSLKTEDTAVYYCTRYYGNYGGYFDVWGAGTLVTVSSGKPGSGKPGSGKPGSGKPGSSIVMTQSPATLSVSPGERATLSCRASQSVSNDVAWYQQKPGQSPRLLINYASHRYTGVPDRFTGSGYGTEFTLTISSLQSEDFAVYFCQQDYSSPRTFGGGTKVEIK

SEQ ID NO: 11468 - protein, 122 aa, Artificial Sequence
  Description of Artificial Sequence: Synthetic polypeptide
  VH of XENP018545
EVQLVESGGGLVKPGGSLRLSCAASGFTFSNYWMNWVRQSPGKGLEWVGEIRLKSNNYATHYAEPVKGRFTISRDDSKSTVYLQMNSLKTEDTAVYYCTRYYGNYGGYFDVWGAGTLVTVSS

SEQ ID NO: 11469 - protein, 107 aa, Artificial Sequence; identical to SEQ ID NO: 10923
  Description of Artificial Sequence: Synthetic polypeptide
  VL of XENP018545

SEQ ID NO: 11470 - protein, 5 aa, Artificial Sequence
  Description of Artificial Sequence: Synthetic peptide
  XENP018545 vhCDR1
NYWMN

SEQ ID NO: 11471 - protein, 19 aa, Artificial Sequence
  Description of Artificial Sequence: Synthetic peptide
  XENP018545 vhCDR2
EIRLKSNNYATHYAEPVKG

SEQ ID NO: 11472 - protein, 11 aa, Artificial Sequence
  Description of Artificial Sequence: Synthetic peptide
  XENP018545 vhCDR3
YYGNYGGYFDV

SEQ ID NO: 11473 - protein, 11 aa, Artificial Sequence
  Description of Artificial Sequence: Synthetic peptide
  XENP018545 vlCDR1
RASQSVSNDVA

SEQ ID NO: 11474 - protein, 7 aa, Artificial Sequence
  Description of Artificial Sequence: Synthetic peptide
  XENP018545 vlCDR2
YASHRYT

SEQ ID NO: 11475 - protein, 9 aa, Artificial Sequence
  Description of Artificial Sequence: Synthetic peptide
  XENP018545 vlCDR3
QQDYSSPRT

SEQ ID NO: 11476 - protein, 249 aa, Artificial Sequence
  Description of Artificial Sequence: Synthetic polypeptide
  XENP018546 1G6_H1.50_L1_scFv(GKPGS)4
EVQLVESGGGLVKPGGSLRLSCAASGFTFSNYWMNWVRQAPEKGLEWVGEIRLKSNNYATHYAEPVKGRFTISRDDSKSTVYLQMNSLKTEDTAVYYCTRYYGNYGGYFDVWGAGTLVTVSSGKPGSGKPGSGKPGSGKPGSSIVMTQSPATLSVSPGERATLSCRASQSVSNDVAWYQQKPGQSPRLLINYASHRYTGVPDRFTGSGYGTEFTLTISSLQSEDFAVYFCQQDYSSPRTFGGGTKVEIK

SEQ ID NO: 11477 - protein, 122 aa, Artificial Sequence
  Description of Artificial Sequence: Synthetic polypeptide
  VH of XENP018546
EVQLVESGGGLVKPGGSLRLSCAASGFTFSNYWMNWVRQAPEKGLEWVGEIRLKSNNYATHYAEPVKGRFTISRDDSKSTVYLQMNSLKTEDTAVYYCTRYYGNYGGYFDVWGAGTLVTVSS

SEQ ID NO: 11478 - protein, 107 aa, Artificial Sequence; identical to SEQ ID NO: 10923
  Description of Artificial Sequence: Synthetic polypeptide
  VL of XENP018546

SEQ ID NO: 11479 - protein, 5 aa, Artificial Sequence
  Description of Artificial Sequence: Synthetic peptide
  XENP018546 vhCDR1
NYWMN

SEQ ID NO: 11480 - protein, 19 aa, Artificial Sequence
  Description of Artificial Sequence: Synthetic peptide
  XENP018546 vhCDR2
EIRLKSNNYATHYAEPVKG

SEQ ID NO: 11481 - protein, 11 aa, Artificial Sequence
  Description of Artificial Sequence: Synthetic peptide
  XENP018546 vhCDR3
YYGNYGGYFDV

SEQ ID NO: 11482 - protein, 11 aa, Artificial Sequence
  Description of Artificial Sequence: Synthetic peptide
  XENP018546 vlCDR1
RASQSVSNDVA

SEQ ID NO: 11483 - protein, 7 aa, Artificial Sequence
  Description of Artificial Sequence: Synthetic peptide
  XENP018546 vlCDR2
YASHRYT

SEQ ID NO: 11484 - protein, 9 aa, Artificial Sequence
  Description of Artificial Sequence: Synthetic peptide
  XENP018546 vlCDR3
QQDYSSPRT

SEQ ID NO: 11485 - protein, 249 aa, Artificial Sequence
  Description of Artificial Sequence: Synthetic polypeptide
  XENP018547 1G6_H1.51_L1_scFv(GKPGS)4
EVQLVESGGGLVKPGGSLRLSCAASGFTFSNYWMNWVRQAPGKGLEYVGEIRLKSNNYATHYAEPVKGRFTISRDDSKSTVYLQMNSLKTEDTAVYYCTRYYGNYGGYFDVWGAGTLVTVSSGKPGSGKPGSGKPGSGKPGSSIVMTQSPATLSVSPGERATLSCRASQSVSNDVAWYQQKPGQSPRLLINYASHRYTGVPDRFTGSGYGTEFTLTISSLQSEDFAVYFCQQDYSSPRTFGGGTKVEIK

SEQ ID NO: 11486 - protein, 122 aa, Artificial Sequence
  Description of Artificial Sequence: Synthetic polypeptide
  VH of XENP018547
EVQLVESGGGLVKPGGSLRLSCAASGFTFSNYWMNWVRQAPGKGLEYVGEIRLKSNNYATHYAEPVKGRFTISRDDSKSTVYLQMNSLKTEDTAVYYCTRYYGNYGGYFDVWGAGTLVTVSS

SEQ ID NO: 11487 - protein, 107 aa, Artificial Sequence; identical to SEQ ID NO: 10923
  Description of Artificial Sequence: Synthetic polypeptide
  VL of XENP018547

SEQ ID NO: 11488 - protein, 5 aa, Artificial Sequence
  Description of Artificial Sequence: Synthetic peptide
  XENP018547 vhCDR1
NYWMN

SEQ ID NO: 11489 - protein, 19 aa, Artificial Sequence
  Description of Artificial Sequence: Synthetic peptide
  XENP018547 vhCDR2
EIRLKSNNYATHYAEPVKG

SEQ ID NO: 11490 - protein, 11 aa, Artificial Sequence
  Description of Artificial Sequence: Synthetic peptide
  XENP018547 vhCDR3
YYGNYGGYFDV

SEQ ID NO: 11491 - protein, 11 aa, Artificial Sequence
  Description of Artificial Sequence: Synthetic peptide
  XENP018547 vlCDR1
RASQSVSNDVA

SEQ ID NO: 11492 - protein, 7 aa, Artificial Sequence
  Description of Artificial Sequence: Synthetic peptide
  XENP018547 vlCDR2
YASHRYT

SEQ ID NO: 11493 - protein, 9 aa, Artificial Sequence
  Description of Artificial Sequence: Synthetic peptide
  XENP018547 vlCDR3
QQDYSSPRT

SEQ ID NO: 11494 - protein, 249 aa, Artificial Sequence
  Description of Artificial Sequence: Synthetic polypeptide
  XENP018548 1G6_H1.52_L1_scFv(GKPGS)4
EVQLVESGGGLVKPGGSLRLSCAASGFTFSNYWMNWVRQAPGKGLEWVAEIRLKSNNYATHYAEPVKGRFTISRDDSKSTVYLQMNSLKTEDTAVYYCTRYYGNYGGYFDVWGAGTLVTVSSGKPGSGKPGSGKPGSGKPGSSIVMTQSPATLSVSPGERATLSCRASQSVSNDVAWYQQKPGQSPRLLINYASHRYTGVPDRFTGSGYGTEFTLTISSLQSEDFAVYFCQQDYSSPRTFGGGTKVEIK

SEQ ID NO: 11495 - protein, 122 aa, Artificial Sequence
  Description of Artificial Sequence: Synthetic polypeptide
  VH of XENP018548
EVQLVESGGGLVKPGGSLRLSCAASGFTFSNYWMNWVRQAPGKGLEWVAEIRLKSNNYATHYAEPVKGRFTISRDDSKSTVYLQMNSLKTEDTAVYYCTRYYGNYGGYFDVWGAGTLVTVSS

SEQ ID NO: 11496 - protein, 107 aa, Artificial Sequence; identical to SEQ ID NO: 10923
  Description of Artificial Sequence: Synthetic polypeptide
  VL of XENP018548

SEQ ID NO: 11497 - protein, 5 aa, Artificial Sequence
  Description of Artificial Sequence: Synthetic peptide
  XENP018548 vhCDR1
NYWMN

SEQ ID NO: 11498 - protein, 19 aa, Artificial Sequence
  Description of Artificial Sequence: Synthetic peptide
  XENP018548 vhCDR2
EIRLKSNNYATHYAEPVKG

SEQ ID NO: 11499 - protein, 11 aa, Artificial Sequence
  Description of Artificial Sequence: Synthetic peptide
  XENP018548 vhCDR3
YYGNYGGYFDV

SEQ ID NO: 11500 - protein, 11 aa, Artificial Sequence
  Description of Artificial Sequence: Synthetic peptide
  XENP018548 vlCDR1
RASQSVSNDVA

SEQ ID NO: 11501 - protein, 7 aa, Artificial Sequence
  Description of Artificial Sequence: Synthetic peptide
  XENP018548 vlCDR2
YASHRYT

SEQ ID NO: 11502 - protein, 9 aa, Artificial Sequence
  Description of Artificial Sequence: Synthetic peptide
  XENP018548 vlCDR3
QQDYSSPRT

SEQ ID NO: 11503 - protein, 249 aa, Artificial Sequence
  Description of Artificial Sequence: Synthetic polypeptide
  XENP018549 1G6_H1.53_L1_scFv(GKPGS)4
EVQLVESGGGLVKPGGSLRLSCAASGFTFSNYWMNWVRQAPGKGLEWVSEIRLKSNNYATHYAEPVKGRFTISRDDSKSTVYLQMNSLKTEDTAVYYCTRYYGNYGGYFDVWGAGTLVTVSSGKPGSGKPGSGKPGSGKPGSSIVMTQSPATLSVSPGERATLSCRASQSVSNDVAWYQQKPGQSPRLLINYASHRYTGVPDRFTGSGYGTEFTLTISSLQSEDFAVYFCQQDYSSPRTFGGGTKVEIK

SEQ ID NO: 11504 - protein, 122 aa, Artificial Sequence
  Description of Artificial Sequence: Synthetic polypeptide
  VH of XENP018549
EVQLVESGGGLVKPGGSLRLSCAASGFTFSNYWMNWVRQAPGKGLEWVSEIRLKSNNYATHYAEPVKGRFTISRDDSKSTVYLQMNSLKTEDTAVYYCTRYYGNYGGYFDVWGAGTLVTVSS

SEQ ID NO: 11505 - protein, 107 aa, Artificial Sequence; identical to SEQ ID NO: 10923
  Description of Artificial Sequence: Synthetic polypeptide
  VL of XENP018549

SEQ ID NO: 11506 - protein, 5 aa, Artificial Sequence
  Description of Artificial Sequence: Synthetic peptide
  XENP018549 vhCDR1
NYWMN

SEQ ID NO: 11507 - protein, 19 aa, Artificial Sequence
  Description of Artificial Sequence: Synthetic peptide
  XENP018549 vhCDR2
EIRLKSNNYATHYAEPVKG

SEQ ID NO: 11508 - protein, 11 aa, Artificial Sequence
  Description of Artificial Sequence: Synthetic peptide
  XENP018549 vhCDR3
YYGNYGGYFDV

SEQ ID NO: 11509 - protein, 11 aa, Artificial Sequence
  Description of Artificial Sequence: Synthetic peptide
  XENP018549 vlCDR1
RASQSVSNDVA

SEQ ID NO: 11510 - protein, 7 aa, Artificial Sequence
  Description of Artificial Sequence: Synthetic peptide
  XENP018549 vlCDR2
YASHRYT

SEQ ID NO: 11511 - protein, 9 aa, Artificial Sequence
  Description of Artificial Sequence: Synthetic peptide
  XENP018549 vlCDR3
QQDYSSPRT

SEQ ID NO: 11512 - protein, 249 aa, Artificial Sequence
  Description of Artificial Sequence: Synthetic polypeptide
  XENP018550 1G6_H1.54_L1_scFv(GKPGS)4
EVQLVESGGGLVKPGGSLRLSCAASGFTFSNYWMNWVRQAPGKGLEWVGQIRLKSNNYATHYAEPVKGRFTISRDDSKSTVYLQMNSLKTEDTAVYYCTRYYGNYGGYFDVWGAGTLVTVSSGKPGSGKPGSGKPGSGKPGSSIVMTQSPATLSVSPGERATLSCRASQSVSNDVAWYQQKPGQSPRLLINYASHRYTGVPDRFTGSGYGTEFTLTISSLQSEDFAVYFCQQDYSSPRTFGGGTKVEIK

SEQ ID NO: 11513 - protein, 122 aa, Artificial Sequence
  Description of Artificial Sequence: Synthetic polypeptide
  VH of XENP018550
EVQLVESGGGLVKPGGSLRLSCAASGFTFSNYWMNWVRQAPGKGLEWVGQIRLKSNNYATHYAEPVKGRFTISRDDSKSTVYLQMNSLKTEDTAVYYCTRYYGNYGGYFDVWGAGTLVTVSS

SEQ ID NO: 11514 - protein, 107 aa, Artificial Sequence; identical to SEQ ID NO: 10923
  Description of Artificial Sequence: Synthetic polypeptide
  VL of XENP018550

SEQ ID NO: 11515 - protein, 5 aa, Artificial Sequence
  Description of Artificial Sequence: Synthetic peptide
  XENP018550 vhCDR1
NYWMN

SEQ ID NO: 11516 - protein, 19 aa, Artificial Sequence
  Description of Artificial Sequence: Synthetic peptide
  XENP018550 vhCDR2
QIRLKSNNYATHYAEPVKG

SEQ ID NO: 11517 - protein, 11 aa, Artificial Sequence
  Description of Artificial Sequence: Synthetic peptide
  XENP018550 vhCDR3
YYGNYGGYFDV

SEQ ID NO: 11518 - protein, 11 aa, Artificial Sequence
  Description of Artificial Sequence: Synthetic peptide
  XENP018550 vlCDR1
RASQSVSNDVA

SEQ ID NO: 11519 - protein, 7 aa, Artificial Sequence
  Description of Artificial Sequence: Synthetic peptide
  XENP018550 vlCDR2
YASHRYT

SEQ ID NO: 11520 - protein, 9 aa, Artificial Sequence
  Description of Artificial Sequence: Synthetic peptide
  XENP018550 vlCDR3
QQDYSSPRT

SEQ ID NO: 11521 - protein, 249 aa, Artificial Sequence
  Description of Artificial Sequence: Synthetic polypeptide
  XENP018551 1G6_H1.55_L1_scFv(GKPGS)4
EVQLVESGGGLVKPGGSLRLSCAASGFTFSNYWMNWVRQAPGKGLEWVGDIRLKSNNYATHYAEPVKGRFTISRDDSKSTVYLQMNSLKTEDTAVYYCTRYYGNYGGYFDVWGAGTLVTVSSGKPGSGKPGSGKPGSGKPGSSIVMTQSPATLSVSPGERATLSCRASQSVSNDVAWYQQKPGQSPRLLINYASHRYTGVPDRFTGSGYGTEFTLTISSLQSEDFAVYFCQQDYSSPRTFGGGTKVEIK

SEQ ID NO: 11522 - protein, 122 aa, Artificial Sequence
  Description of Artificial Sequence: Synthetic polypeptide
  VH of XENP018551
EVQLVESGGGLVKPGGSLRLSCAASGFTFSNYWMNWVRQAPGKGLEWVGDIRLKSNNYATHYAEPVKGRFTISRDDSKSTVYLQMNSLKTEDTAVYYCTRYYGNYGGYFDVWGAGTLVTVSS

SEQ ID NO: 11523 - protein, 107 aa, Artificial Sequence; identical to SEQ ID NO: 10923
  Description of Artificial Sequence: Synthetic polypeptide
  VL of XENP018551

SEQ ID NO: 11524 - protein, 5 aa, Artificial Sequence
  Description of Artificial Sequence: Synthetic peptide
  XENP018551 vhCDR1
NYWMN

SEQ ID NO: 11525 - protein, 19 aa, Artificial Sequence
  Description of Artificial Sequence: Synthetic peptide
  XENP018551 vhCDR2
DIRLKSNNYATHYAEPVKG

SEQ ID NO: 11526 - protein, 11 aa, Artificial Sequence
  Description of Artificial Sequence: Synthetic peptide
  XENP018551 vhCDR3
YYGNYGGYFDV

SEQ ID NO: 11527 - protein, 11 aa, Artificial Sequence
  Description of Artificial Sequence: Synthetic peptide
  XENP018551 vlCDR1
RASQSVSNDVA

SEQ ID NO: 11528 - protein, 7 aa, Artificial Sequence
  Description of Artificial Sequence: Synthetic peptide
  XENP018551 vlCDR2
YASHRYT

SEQ ID NO: 11529 - protein, 9 aa, Artificial Sequence
  Description of Artificial Sequence: Synthetic peptide
  XENP018551 vlCDR3
QQDYSSPRT

SEQ ID NO: 11530 - protein, 249 aa, Artificial Sequence
  Description of Artificial Sequence: Synthetic polypeptide
  XENP018552 1G6_H1.56_L1_scFv(GKPGS)4
EVQLVESGGGLVKPGGSLRLSCAASGFTFSNYWMNWVRQAPGKGLEWVGKIRLKSNNYATHYAEPVKGRFTISRDDSKSTVYLQMNSLKTEDTAVYYCTRYYGNYGGYFDVWGAGTLVTVSSGKPGSGKPGSGKPGSGKPGSSIVMTQSPATLSVSPGERATLSCRASQSVSNDVAWYQQKPGQSPRLLINYASHRYTGVPDRFTGSGYGTEFTLTISSLQSEDFAVYFCQQDYSSPRTFGGGTKVEIK

SEQ ID NO: 11531 - protein, 122 aa, Artificial Sequence
  Description of Artificial Sequence: Synthetic polypeptide
  VH of XENP018552
EVQLVESGGGLVKPGGSLRLSCAASGFTFSNYWMNWVRQAPGKGLEWVGKIRLKSNNYATHYAEPVKGRFTISRDDSKSTVYLQMNSLKTEDTAVYYCTRYYGNYGGYFDVWGAGTLVTVSS

SEQ ID NO: 11532 - protein, 107 aa, Artificial Sequence; identical to SEQ ID NO: 10923
  Description of Artificial Sequence: Synthetic polypeptide
  VL of XENP018552

SEQ ID NO: 11533 - protein, 5 aa, Artificial Sequence
  Description of Artificial Sequence: Synthetic peptide
  XENP018552 vhCDR1
NYWMN

SEQ ID NO: 11534 - protein, 19 aa, Artificial Sequence
  Description of Artificial Sequence: Synthetic peptide
  XENP018552 vhCDR2
KIRLKSNNYATHYAEPVKG

SEQ ID NO: 11535 - protein, 11 aa, Artificial Sequence
  Description of Artificial Sequence: Synthetic peptide
  XENP018552 vhCDR3
YYGNYGGYFDV

SEQ ID NO: 11536 - protein, 11 aa, Artificial Sequence
  Description of Artificial Sequence: Synthetic peptide
  XENP018552 vlCDR1
RASQSVSNDVA

SEQ ID NO: 11537 - protein, 7 aa, Artificial Sequence
  Description of Artificial Sequence: Synthetic peptide
  XENP018552 vlCDR2
YASHRYT

SEQ ID NO: 11538 - protein, 9 aa, Artificial Sequence
  Description of Artificial Sequence: Synthetic peptide
  XENP018552 vlCDR3
QQDYSSPRT

SEQ ID NO: 11539 - protein, 249 aa, Artificial Sequence
  Description of Artificial Sequence: Synthetic polypeptide
  XENP018553 1G6_H1.57_L1_scFv(GKPGS)4
EVQLVESGGGLVKPGGSLRLSCAASGFTFSNYWMNWVRQAPGKGLEWVGSIRLKSNNYATHYAEPVKGRFTISRDDSKSTVYLQMNSLKTEDTAVYYCTRYYGNYGGYFDVWGAGTLVTVSSGKPGSGKPGSGKPGSGKPGSSIVMTQSPATLSVSPGERATLSCRASQSVSNDVAWYQQKPGQSPRLLINYASHRYTGVPDRFTGSGYGTEFTLTISSLQSEDFAVYFCQQDYSSPRTFGGGTKVEIK

SEQ ID NO: 11540 - protein, 122 aa, Artificial Sequence
  Description of Artificial Sequence: Synthetic polypeptide
  VH of XENP018553
EVQLVESGGGLVKPGGSLRLSCAASGFTFSNYWMNWVRQAPGKGLEWVGSIRLKSNNYATHYAEPVKGRFTISRDDSKSTVYLQMNSLKTEDTAVYYCTRYYGNYGGYFDVWGAGTLVTVSS

SEQ ID NO: 11541 - protein, 107 aa, Artificial Sequence; identical to SEQ ID NO: 10923
  Description of Artificial Sequence: Synthetic polypeptide
  VL of XENP018553

SEQ ID NO: 11542 - protein, 5 aa, Artificial Sequence
  Description of Artificial Sequence: Synthetic peptide
  XENP018553 vhCDR1
NYWMN

SEQ ID NO: 11543 - protein, 19 aa, Artificial Sequence
  Description of Artificial Sequence: Synthetic peptide
  XENP018553 vhCDR2
SIRLKSNNYATHYAEPVKG

SEQ ID NO: 11544 - protein, 11 aa, Artificial Sequence
  Description of Artificial Sequence: Synthetic peptide
  XENP018553 vhCDR3
YYGNYGGYFDV

SEQ ID NO: 11545 - protein, 11 aa, Artificial Sequence
  Description of Artificial Sequence: Synthetic peptide
  XENP018553 vlCDR1
RASQSVSNDVA

SEQ ID NO: 11546 - protein, 7 aa, Artificial Sequence
  Description of Artificial Sequence: Synthetic peptide
  XENP018553 vlCDR2
YASHRYT

SEQ ID NO: 11547 - protein, 9 aa, Artificial Sequence
  Description of Artificial Sequence: Synthetic peptide
  XENP018553 vlCDR3
QQDYSSPRT

SEQ ID NO: 11548 - protein, 249 aa, Artificial Sequence
  Description of Artificial Sequence: Synthetic polypeptide
  XENP018554 1G6_H1.58_L1_scFv(GKPGS)4
EVQLVESGGGLVKPGGSLRLSCAASGFTFSNYWMNWVRQAPGKGLEWVGHIRLKSNNYATHYAEPVKGRFTISRDDSKSTVYLQMNSLKTEDTAVYYCTRYYGNYGGYFDVWGAGTLVTVSSGKPGSGKPGSGKPGSGKPGSSIVMTQSPATLSVSPGERATLSCRASQSVSNDVAWYQQKPGQSPRLLINYASHRYTGVPDRFTGSGYGTEFTLTISSLQSEDFAVYFCQQDYSSPRTFGGGTKVEIK

SEQ ID NO: 11549 - protein, 122 aa, Artificial Sequence
  Description of Artificial Sequence: Synthetic polypeptide
  VH of XENP018554
EVQLVESGGGLVKPGGSLRLSCAASGFTFSNYWMNWVRQAPGKGLEWVGHIRLKSNNYATHYAEPVKGRFTISRDDSKSTVYLQMNSLKTEDTAVYYCTRYYGNYGGYFDVWGAGTLVTVSS

SEQ ID NO: 11550 - protein, 107 aa, Artificial Sequence; identical to SEQ ID NO: 10923
  Description of Artificial Sequence: Synthetic polypeptide
  VL of XENP018554

SEQ ID NO: 11551 - protein, 5 aa, Artificial Sequence
  Description of Artificial Sequence: Synthetic peptide
  XENP018554 vhCDR1
NYWMN

SEQ ID NO: 11552 - protein, 19 aa, Artificial Sequence
  Description of Artificial Sequence: Synthetic peptide
  XENP018554 vhCDR2
HIRLKSNNYATHYAEPVKG

SEQ ID NO: 11553 - protein, 11 aa, Artificial Sequence
  Description of Artificial Sequence: Synthetic peptide
  XENP018554 vhCDR3
YYGNYGGYFDV

SEQ ID NO: 11554 - protein, 11 aa, Artificial Sequence
  Description of Artificial Sequence: Synthetic peptide
  XENP018554 vlCDR1
RASQSVSNDVA

SEQ ID NO: 11555 - protein, 7 aa, Artificial Sequence
  Description of Artificial Sequence: Synthetic peptide
  XENP018554 vlCDR2
YASHRYT

SEQ ID NO: 11556 - protein, 9 aa, Artificial Sequence
  Description of Artificial Sequence: Synthetic peptide
  XENP018554 vlCDR3
QQDYSSPRT

SEQ ID NO: 11557 - protein, 249 aa, Artificial Sequence
  Description of Artificial Sequence: Synthetic polypeptide
  XENP018555 1G6_H1.59_L1_scFv(GKPGS)4
EVQLVESGGGLVKPGGSLRLSCAASGFTFSNYWMNWVRQAPGKGLEWVGAIRLKSNNYATHYAEPVKGRFTISRDDSKSTVYLQMNSLKTEDTAVYYCTRYYGNYGGYFDVWGAGTLVTVSSGKPGSGKPGSGKPGSGKPGSSIVMTQSPATLSVSPGERATLSCRASQSVSNDVAWYQQKPGQSPRLLINYASHRYTGVPDRFTGSGYGTEFTLTISSLQSEDFAVYFCQQDYSSPRTFGGGTKVEIK

SEQ ID NO: 11558 - protein, 122 aa, Artificial Sequence
  Description of Artificial Sequence: Synthetic polypeptide
  VH of XENP018555
EVQLVESGGGLVKPGGSLRLSCAASGFTFSNYWMNWVRQAPGKGLEWVGAIRLKSNNYATHYAEPVKGRFTISRDDSKSTVYLQMNSLKTEDTAVYYCTRYYGNYGGYFDVWGAGTLVTVSS

SEQ ID NO: 11559 - protein, 107 aa, Artificial Sequence; identical to SEQ ID NO: 10923
  Description of Artificial Sequence: Synthetic polypeptide
  VL of XENP018555

SEQ ID NO: 11560 - protein, 5 aa, Artificial Sequence
  Description of Artificial Sequence: Synthetic peptide
  XENP018555 vhCDR1
NYWMN

SEQ ID NO: 11561 - protein, 19 aa, Artificial Sequence
  Description of Artificial Sequence: Synthetic peptide
  XENP018555 vhCDR2
AIRLKSNNYATHYAEPVKG

SEQ ID NO: 11562 - protein, 11 aa, Artificial Sequence
  Description of Artificial Sequence: Synthetic peptide
  XENP018555 vhCDR3
YYGNYGGYFDV

SEQ ID NO: 11563 - protein, 11 aa, Artificial Sequence
  Description of Artificial Sequence: Synthetic peptide
  XENP018555 vlCDR1
RASQSVSNDVA

SEQ ID NO: 11564 - protein, 7 aa, Artificial Sequence
  Description of Artificial Sequence: Synthetic peptide
  XENP018555 vlCDR2
YASHRYT

SEQ ID NO: 11565 - protein, 9 aa, Artificial Sequence
  Description of Artificial Sequence: Synthetic peptide
  XENP018555 vlCDR3
QQDYSSPRT

SEQ ID NO: 11566 - protein, 249 aa, Artificial Sequence
  Description of Artificial Sequence: Synthetic polypeptide
  XENP018556 1G6_H1.60_L1_scFv(GKPGS)4
EVQLVESGGGLVKPGGSLRLSCAASGFTFSNYWMNWVRQAPGKGLEWVGGIRLKSNNYATHYAEPVKGRFTISRDDSKSTVYLQMNSLKTEDTAVYYCTRYYGNYGGYFDVWGAGTLVTVSSGKPGSGKPGSGKPGSGKPGSSIVMTQSPATLSVSPGERATLSCRASQSVSNDVAWYQQKPGQSPRLLINYASHRYTGVPDRFTGSGYGTEFTLTISSLQSEDFAVYFCQQDYSSPRTFGGGTKVEIK

SEQ ID NO: 11567 - protein, 122 aa, Artificial Sequence
  Description of Artificial Sequence: Synthetic polypeptide
  VH of XENP018556
EVQLVESGGGLVKPGGSLRLSCAASGFTFSNYWMNWVRQAPGKGLEWVGGIRLKSNNYATHYAEPVKGRFTISRDDSKSTVYLQMNSLKTEDTAVYYCTRYYGNYGGYFDVWGAGTLVTVSS

SEQ ID NO: 11568 - protein, 107 aa, Artificial Sequence; identical to SEQ ID NO: 10923
  Description of Artificial Sequence: Synthetic polypeptide
  VL of XENP018556

SEQ ID NO: 11569 - protein, 5 aa, Artificial Sequence
  Description of Artificial Sequence: Synthetic peptide
  XENP018556 vhCDR1
NYWMN

SEQ ID NO: 11570 - protein, 19 aa, Artificial Sequence
  Description of Artificial Sequence: Synthetic peptide
  XENP018556 vhCDR2
GIRLKSNNYATHYAEPVKG

SEQ ID NO: 11571 - protein, 11 aa, Artificial Sequence
  Description of Artificial Sequence: Synthetic peptide
  XENP018556 vhCDR3
YYGNYGGYFDV

SEQ ID NO: 11572 - protein, 11 aa, Artificial Sequence
  Description of Artificial Sequence: Synthetic peptide
  XENP018556 vlCDR1
RASQSVSNDVA

SEQ ID NO: 11573 - protein, 7 aa, Artificial Sequence
  Description of Artificial Sequence: Synthetic peptide
  XENP018556 vlCDR2
YASHRYT

SEQ ID NO: 11574 - protein, 9 aa, Artificial Sequence
  Description of Artificial Sequence: Synthetic peptide
  XENP018556 vlCDR3
QQDYSSPRT

SEQ ID NO: 11575 - protein, 249 aa, Artificial Sequence
  Description of Artificial Sequence: Synthetic polypeptide
  XENP018557 1G6_H1.61_L1_scFv(GKPGS)4
EVQLVESGGGLVKPGGSLRLSCAASGFTFSNYWMNWVRQAPGKGLEWVGYIRLKSNNYATHYAEPVKGRFTISRDDSKSTVYLQMNSLKTEDTAVYYCTRYYGNYGGYFDVWGAGTLVTVSSGKPGSGKPGSGKPGSGKPGSSIVMTQSPATLSVSPGERATLSCRASQSVSNDVAWYQQKPGQSPRLLINYASHRYTGVPDRFTGSGYGTEFTLTISSLQSEDFAVYFCQQDYSSPRTFGGGTKVEIK

SEQ ID NO: 11576 - protein, 122 aa, Artificial Sequence
  Description of Artificial Sequence: Synthetic polypeptide
  VH of XENP018557
EVQLVESGGGLVKPGGSLRLSCAASGFTFSNYWMNWVRQAPGKGLEWVGYIRLKSNNYATHYAEPVKGRFTISRDDSKSTVYLQMNSLKTEDTAVYYCTRYYGNYGGYFDVWGAGTLVTVSS

SEQ ID NO: 11577 - protein, 107 aa, Artificial Sequence; identical to SEQ ID NO: 10923
  Description of Artificial Sequence: Synthetic polypeptide
  VL of XENP018557

SEQ ID NO: 11578 - protein, 5 aa, Artificial Sequence
  Description of Artificial Sequence: Synthetic peptide
  XENP018557 vhCDR1
NYWMN

SEQ ID NO: 11579 - protein, 19 aa, Artificial Sequence
  Description of Artificial Sequence: Synthetic peptide
  XENP018557 vhCDR2
YIRLKSNNYATHYAEPVKG

SEQ ID NO: 11580 - protein, 11 aa, Artificial Sequence
  Description of Artificial Sequence: Synthetic peptide
  XENP018557 vhCDR3
YYGNYGGYFDV

SEQ ID NO: 11581 - protein, 11 aa, Artificial Sequence
  Description of Artificial Sequence: Synthetic peptide
  XENP018557 vlCDR1
RASQSVSNDVA

SEQ ID NO: 11582 - protein, 7 aa, Artificial Sequence
  Description of Artificial Sequence: Synthetic peptide
  XENP018557 vlCDR2
YASHRYT

SEQ ID NO: 11583 - protein, 9 aa, Artificial Sequence
  Description of Artificial Sequence: Synthetic peptide
  XENP018557 vlCDR3
QQDYSSPRT

SEQ ID NO: 11584 - protein, 249 aa, Artificial Sequence
  Description of Artificial Sequence: Synthetic polypeptide
  XENP018558 1G6_H1.62_L1_scFv(GKPGS)4
EVQLVESGGGLVKPGGSLRLSCAASGFTFSNYWMNWVRQAPGKGLEWVGIIRLKSNNYATHYAEPVKGRFTISRDDSKSTVYLQMNSLKTEDTAVYYCTRYYGNYGGYFDVWGAGTLVTVSSGKPGSGKPGSGKPGSGKPGSSIVMTQSPATLSVSPGERATLSCRASQSVSNDVAWYQQKPGQSPRLLINYASHRYTGVPDRFTGSGYGTEFTLTISSLQSEDFAVYFCQQDYSSPRTFGGGTKVEIK

SEQ ID NO: 11585 - protein, 122 aa, Artificial Sequence
  Description of Artificial Sequence: Synthetic polypeptide
  VH of XENP018558
EVQLVESGGGLVKPGGSLRLSCAASGFTFSNYWMNWVRQAPGKGLEWVGIIRLKSNNYATHYAEPVKGRFTISRDDSKSTVYLQMNSLKTEDTAVYYCTRYYGNYGGYFDVWGAGTLVTVSS

SEQ ID NO: 11586 - protein, 107 aa, Artificial Sequence; identical to SEQ ID NO: 10923
  Description of Artificial Sequence: Synthetic polypeptide
  VL of XENP018558

SEQ ID NO: 11587 - protein, 5 aa, Artificial Sequence
  Description of Artificial Sequence: Synthetic peptide
  XENP018558 vhCDR1
NYWMN

SEQ ID NO: 11588 - protein, 19 aa, Artificial Sequence
  Description of Artificial Sequence: Synthetic peptide
  XENP018558 vhCDR2
IIRLKSNNYATHYAEPVKG

SEQ ID NO: 11589 - protein, 11 aa, Artificial Sequence
  Description of Artificial Sequence: Synthetic peptide
  XENP018558 vhCDR3
YYGNYGGYFDV

SEQ ID NO: 11590 - protein, 11 aa, Artificial Sequence
  Description of Artificial Sequence: Synthetic peptide
  XENP018558 vlCDR1
RASQSVSNDVA

SEQ ID NO: 11591 - protein, 7 aa, Artificial Sequence
  Description of Artificial Sequence: Synthetic peptide
  XENP018558 vlCDR2
YASHRYT

SEQ ID NO: 11592 - protein, 9 aa, Artificial Sequence
  Description of Artificial Sequence: Synthetic peptide
  XENP018558 vlCDR3
QQDYSSPRT

SEQ ID NO: 11593 - protein, 249 aa, Artificial Sequence
  Description of Artificial Sequence: Synthetic polypeptide
  XENP018559 1G6_H1.63_L1_scFv(GKPGS)4
EVQLVESGGGLVKPGGSLRLSCAASGFTFSNYWMNWVRQAPGKGLEWVGEVRLKSNNYATHYAEPVKGRFTISRDDSKSTVYLQMNSLKTEDTAVYYCTRYYGNYGGYFDVWGAGTLVTVSSGKPGSGKPGSGKPGSGKPGSSIVMTQSPATLSVSPGERATLSCRASQSVSNDVAWYQQKPGQSPRLLINYASHRYTGVPDRFTGSGYGTEFTLTISSLQSEDFAVYFCQQDYSSPRTFGGGTKVEIK

SEQ ID NO: 11594 - protein, 122 aa, Artificial Sequence
  Description of Artificial Sequence: Synthetic polypeptide
  VH of XENP018559
EVQLVESGGGLVKPGGSLRLSCAASGFTFSNYWMNWVRQAPGKGLEWVGEVRLKSNNYATHYAEPVKGRFTISRDDSKSTVYLQMNSLKTEDTAVYYCTRYYGNYGGYFDVWGAGTLVTVSS

SEQ ID NO: 11595 - protein, 107 aa, Artificial Sequence; identical to SEQ ID NO: 10923
  Description of Artificial Sequence: Synthetic polypeptide
  VL of XENP018559

SEQ ID NO: 11596 - protein, 5 aa, Artificial Sequence
  Description of Artificial Sequence: Synthetic peptide
  XENP018559 vhCDR1
NYWMN

SEQ ID NO: 11597 - protein, 19 aa, Artificial Sequence
  Description of Artificial Sequence: Synthetic peptide
  XENP018559 vhCDR2
EVRLKSNNYATHYAEPVKG

SEQ ID NO: 11598 - protein, 11 aa, Artificial Sequence
  Description of Artificial Sequence: Synthetic peptide
  XENP018559 vhCDR3
YYGNYGGYFDV

SEQ ID NO: 11599 - protein, 11 aa, Artificial Sequence
  Description of Artificial Sequence: Synthetic peptide
  XENP018559 vlCDR1
RASQSVSNDVA

SEQ ID NO: 11600 - protein, 7 aa, Artificial Sequence
  Description of Artificial Sequence: Synthetic peptide
  XENP018559 vlCDR2
YASHRYT

SEQ ID NO: 11601 - protein, 9 aa, Artificial Sequence
  Description of Artificial Sequence: Synthetic peptide
  XENP018559 vlCDR3
QQDYSSPRT

SEQ ID NO: 11602 - protein, 249 aa, Artificial Sequence
  Description of Artificial Sequence: Synthetic polypeptide
  XENP018560 1G6_H1.64_L1_scFv(GKPGS)4
EVQLVESGGGLVKPGGSLRLSCAASGFTFSNYWMNWVRQAPGKGLEWVGEITLKSNNYATHYAEPVKGRFTISRDDSKSTVYLQMNSLKTEDTAVYYCTRYYGNYGGYFDVWGAGTLVTVSSGKPGSGKPGSGKPGSGKPGSSIVMTQSPATLSVSPGERATLSCRASQSVSNDVAWYQQKPGQSPRLLINYASHRYTGVPDRFTGSGYGTEFTLTISSLQSEDFAVYFCQQDYSSPRTFGGGTKVEIK

SEQ ID NO: 11603 - protein, 122 aa, Artificial Sequence
  Description of Artificial Sequence: Synthetic polypeptide
  VH of XENP018560
EVQLVESGGGLVKPGGSLRLSCAASGFTFSNYWMNWVRQAPGKGLEWVGEITLKSNNYATHYAEPVKGRFTISRDDSKSTVYLQMNSLKTEDTAVYYCTRYYGNYGGYFDVWGAGTLVTVSS

SEQ ID NO: 11604 - protein, 107 aa, Artificial Sequence; identical to SEQ ID NO: 10923
  Description of Artificial Sequence: Synthetic polypeptide
  VL of XENP018560

SEQ ID NO: 11605 - protein, 5 aa, Artificial Sequence
  Description of Artificial Sequence: Synthetic peptide
  XENP018560 vhCDR1
NYWMN

SEQ ID NO: 11606 - protein, 19 aa, Artificial Sequence
  Description of Artificial Sequence: Synthetic peptide
  XENP018560 vhCDR2
EITLKSNNYATHYAEPVKG

SEQ ID NO: 11607 - protein, 11 aa, Artificial Sequence
  Description of Artificial Sequence: Synthetic peptide
  XENP018560 vhCDR3
YYGNYGGYFDV

SEQ ID NO: 11608 - protein, 11 aa, Artificial Sequence
  Description of Artificial Sequence: Synthetic peptide
  XENP018560 vlCDR1
RASQSVSNDVA

SEQ ID NO: 11609 - protein, 7 aa, Artificial Sequence
  Description of Artificial Sequence: Synthetic peptide
  XENP018560 vlCDR2
YASHRYT

SEQ ID NO: 11610 - protein, 9 aa, Artificial Sequence
  Description of Artificial Sequence: Synthetic peptide
  XENP018560 vlCDR3
QQDYSSPRT

SEQ ID NO: 11611 - protein, 249 aa, Artificial Sequence
  Description of Artificial Sequence: Synthetic polypeptide
  XENP018561 1G6_H1.65_L1_scFv(GKPGS)4
EVQLVESGGGLVKPGGSLRLSCAASGFTFSNYWMNWVRQAPGKGLEWVGEIKLKSNNYATHYAEPVKGRFTISRDDSKSTVYLQMNSLKTEDTAVYYCTRYYGNYGGYFDVWGAGTLVTVSSGKPGSGKPGSGKPGSGKPGSSIVMTQSPATLSVSPGERATLSCRASQSVSNDVAWYQQKPGQSPRLLINYASHRYTGVPDRFTGSGYGTEFTLTISSLQSEDFAVYFCQQDYSSPRTFGGGTKVEIK

SEQ ID NO: 11612 - protein, 122 aa, Artificial Sequence
  Description of Artificial Sequence: Synthetic polypeptide
  VH of XENP018561
EVQLVESGGGLVKPGGSLRLSCAASGFTFSNYWMNWVRQAPGKGLEWVGEIKLKSNNYATHYAEPVKGRFTISRDDSKSTVYLQMNSLKTEDTAVYYCTRYYGNYGGYFDVWGAGTLVTVSS

SEQ ID NO: 11613 - protein, 107 aa, Artificial Sequence; identical to SEQ ID NO: 10923
  Description of Artificial Sequence: Synthetic polypeptide
  VL of XENP018561

SEQ ID NO: 11614 - protein, 5 aa, Artificial Sequence
  Description of Artificial Sequence: Synthetic peptide
  XENP018561 vhCDR1
NYWMN

SEQ ID NO: 11615 - protein, 19 aa, Artificial Sequence
  Description of Artificial Sequence: Synthetic peptide
  XENP018561 vhCDR2
EIKLKSNNYATHYAEPVKG

SEQ ID NO: 11616 - protein, 11 aa, Artificial Sequence
  Description of Artificial Sequence: Synthetic peptide
  XENP018561 vhCDR3
YYGNYGGYFDV

SEQ ID NO: 11617 - protein, 11 aa, Artificial Sequence
  Description of Artificial Sequence: Synthetic peptide
  XENP018561 vlCDR1
RASQSVSNDVA

SEQ ID NO: 11618 - protein, 7 aa, Artificial Sequence
  Description of Artificial Sequence: Synthetic peptide
  XENP018561 vlCDR2
YASHRYT

SEQ ID NO: 11619 - protein, 9 aa, Artificial Sequence
  Description of Artificial Sequence: Synthetic peptide
  XENP018561 vlCDR3
QQDYSSPRT

SEQ ID NO: 11620 - protein, 249 aa, Artificial Sequence
  Description of Artificial Sequence: Synthetic polypeptide
  XENP018562 1G6_H1.66_L1_scFv(GKPGS)4
EVQLVESGGGLVKPGGSLRLSCAASGFTFSNYWMNWVRQAPGKGLEWVGEIELKSNNYATHYAEPVKGRFTISRDDSKSTVYLQMNSLKTEDTAVYYCTRYYGNYGGYFDVWGAGTLVTVSSGKPGSGKPGSGKPGSGKPGSSIVMTQSPATLSVSPGERATLSCRASQSVSNDVAWYQQKPGQSPRLLINYASHRYTGVPDRFTGSGYGTEFTLTISSLQSEDFAVYFCQQDYSSPRTFGGGTKVEIK

SEQ ID NO: 11621 - protein, 122 aa, Artificial Sequence
  Description of Artificial Sequence: Synthetic polypeptide
  VH of XENP018562
EVQLVESGGGLVKPGGSLRLSCAASGFTFSNYWMNWVRQAPGKGLEWVGEIELKSNNYATHYAEPVKGRFTISRDDSKSTVYLQMNSLKTEDTAVYYCTRYYGNYGGYFDVWGAGTLVTVSS

SEQ ID NO: 11622 - protein, 107 aa, Artificial Sequence; identical to SEQ ID NO: 10923
  Description of Artificial Sequence: Synthetic polypeptide
  VL of XENP018562

SEQ ID NO: 11623 - protein, 5 aa, Artificial Sequence
  Description of Artificial Sequence: Synthetic peptide
  XENP018562 vhCDR1
NYWMN

SEQ ID NO: 11624 - protein, 19 aa, Artificial Sequence
  Description of Artificial Sequence: Synthetic peptide
  XENP018562 vhCDR2
EIELKSNNYATHYAEPVKG

SEQ ID NO: 11625 - protein, 11 aa, Artificial Sequence
  Description of Artificial Sequence: Synthetic peptide
  XENP018562 vhCDR3
YYGNYGGYFDV

SEQ ID NO: 11626 - protein, 11 aa, Artificial Sequence
  Description of Artificial Sequence: Synthetic peptide
  XENP018562 vlCDR1
RASQSVSNDVA

SEQ ID NO: 11627 - protein, 7 aa, Artificial Sequence
  Description of Artificial Sequence: Synthetic peptide
  XENP018562 vlCDR2
YASHRYT

SEQ ID NO: 11628 - protein, 9 aa, Artificial Sequence
  Description of Artificial Sequence: Synthetic peptide
  XENP018562 vlCDR3
QQDYSSPRT

SEQ ID NO: 11629 - protein, 249 aa, Artificial Sequence
  Description of Artificial Sequence: Synthetic polypeptide
  XENP018563 1G6_H1.67_L1_scFv(GKPGS)4
EVQLVESGGGLVKPGGSLRLSCAASGFTFSNYWMNWVRQAPGKGLEWVGEIDLKSNNYATHYAEPVKGRFTISRDDSKSTVYLQMNSLKTEDTAVYYCTRYYGNYGGYFDVWGAGTLVTVSSGKPGSGKPGSGKPGSGKPGSSIVMTQSPATLSVSPGERATLSCRASQSVSNDVAWYQQKPGQSPRLLINYASHRYTGVPDRFTGSGYGTEFTLTISSLQSEDFAVYFCQQDYSSPRTFGGGTKVEIK

SEQ ID NO: 11630 - protein, 122 aa, Artificial Sequence
  Description of Artificial Sequence: Synthetic polypeptide
  VH of XENP018563
EVQLVESGGGLVKPGGSLRLSCAASGFTFSNYWMNWVRQAPGKGLEWVGEIDLKSNNYATHYAEPVKGRFTISRDDSKSTVYLQMNSLKTEDTAVYYCTRYYGNYGGYFDVWGAGTLVTVSS

SEQ ID NO: 11631 - protein, 107 aa, Artificial Sequence; identical to SEQ ID NO: 10923
  Description of Artificial Sequence: Synthetic polypeptide
  VL of XENP018563

SEQ ID NO: 11632 - protein, 5 aa, Artificial Sequence
  Description of Artificial Sequence: Synthetic peptide
  XENP018563 vhCDR1
NYWMN

SEQ ID NO: 11633 - protein, 19 aa, Artificial Sequence
  Description of Artificial Sequence: Synthetic peptide
  XENP018563 vhCDR2
EIDLKSNNYATHYAEPVKG

SEQ ID NO: 11634 - protein, 11 aa, Artificial Sequence
  Description of Artificial Sequence: Synthetic peptide
  XENP018563 vhCDR3
YYGNYGGYFDV

SEQ ID NO: 11635 - protein, 11 aa, Artificial Sequence
  Description of Artificial Sequence: Synthetic peptide
  XENP018563 vlCDR1
RASQSVSNDVA

SEQ ID NO: 11636 - protein, 7 aa, Artificial Sequence
  Description of Artificial Sequence: Synthetic peptide
  XENP018563 vlCDR2
YASHRYT

SEQ ID NO: 11637 - protein, 9 aa, Artificial Sequence
  Description of Artificial Sequence: Synthetic peptide
  XENP018563 vlCDR3
QQDYSSPRT

SEQ ID NO: 11638 - protein, 249 aa, Artificial Sequence
  Description of Artificial Sequence: Synthetic polypeptide
  XENP018564 1G6_H1.68_L1_scFv(GKPGS)4
EVQLVESGGGLVKPGGSLRLSCAASGFTFSNYWMNWVRQAPGKGLEWVGEIHLKSNNYATHYAEPVKGRFTISRDDSKSTVYLQMNSLKTEDTAVYYCTRYYGNYGGYFDVWGAGTLVTVSSGKPGSGKPGSGKPGSGKPGSSIVMTQSPATLSVSPGERATLSCRASQSVSNDVAWYQQKPGQSPRLLINYASHRYTGVPDRFTGSGYGTEFTLTISSLQSEDFAVYFCQQDYSSPRTFGGGTKVEIK

SEQ ID NO: 11639 - protein, 122 aa, Artificial Sequence
  Description of Artificial Sequence: Synthetic polypeptide
  VH of XENP018564
EVQLVESGGGLVKPGGSLRLSCAASGFTFSNYWMNWVRQAPGKGLEWVGEIHLKSNNYATHYAEPVKGRFTISRDDSKSTVYLQMNSLKTEDTAVYYCTRYYGNYGGYFDVWGAGTLVTVSS

SEQ ID NO: 11640 - protein, 107 aa, Artificial Sequence; identical to SEQ ID NO: 10923
  Description of Artificial Sequence: Synthetic polypeptide
  VL of XENP018564

SEQ ID NO: 11641 - protein, 5 aa, Artificial Sequence
  Description of Artificial Sequence: Synthetic peptide
  XENP018564 vhCDR1
NYWMN

SEQ ID NO: 11642 - protein, 19 aa, Artificial Sequence
  Description of Artificial Sequence: Synthetic peptide
  XENP018564 vhCDR2
EIHLKSNNYATHYAEPVKG

SEQ ID NO: 11643 - protein, 11 aa, Artificial Sequence
  Description of Artificial Sequence: Synthetic peptide
  XENP018564 vhCDR3
YYGNYGGYFDV

SEQ ID NO: 11644 - protein, 11 aa, Artificial Sequence
  Description of Artificial Sequence: Synthetic peptide
  XENP018564 vlCDR1
RASQSVSNDVA

SEQ ID NO: 11645 - protein, 7 aa, Artificial Sequence
  Description of Artificial Sequence: Synthetic peptide
  XENP018564 vlCDR2
YASHRYT

SEQ ID NO: 11646 - protein, 9 aa, Artificial Sequence
  Description of Artificial Sequence: Synthetic peptide
  XENP018564 vlCDR3
QQDYSSPRT

SEQ ID NO: 11647 - protein, 249 aa, Artificial Sequence
  Description of Artificial Sequence: Synthetic polypeptide
  XENP018565 1G6_H1.69_L1_scFv(GKPGS)4
EVQLVESGGGLVKPGGSLRLSCAASGFTFSNYWMNWVRQAPGKGLEWVGEISLKSNNYATHYAEPVKGRFTISRDDSKSTVYLQMNSLKTEDTAVYYCTRYYGNYGGYFDVWGAGTLVTVSSGKPGSGKPGSGKPGSGKPGSSIVMTQSPATLSVSPGERATLSCRASQSVSNDVAWYQQKPGQSPRLLINYASHRYTGVPDRFTGSGYGTEFTLTISSLQSEDFAVYFCQQDYSSPRTFGGGTKVEIK

SEQ ID NO: 11648 - protein, 122 aa, Artificial Sequence
  Description of Artificial Sequence: Synthetic polypeptide
  VH of XENP018565
EVQLVESGGGLVKPGGSLRLSCAASGFTFSNYWMNWVRQAPGKGLEWVGEISLKSNNYATHYAEPVKGRFTISRDDSKSTVYLQMNSLKTEDTAVYYCTRYYGNYGGYFDVWGAGTLVTVSS

SEQ ID NO: 11649 - protein, 107 aa, Artificial Sequence; identical to SEQ ID NO: 10923
  Description of Artificial Sequence: Synthetic polypeptide
  VL of XENP018565

SEQ ID NO: 11650 - protein, 5 aa, Artificial Sequence
  Description of Artificial Sequence: Synthetic peptide
  XENP018565 vhCDR1
NYWMN

SEQ ID NO: 11651 - protein, 19 aa, Artificial Sequence
  Description of Artificial Sequence: Synthetic peptide
  XENP018565 vhCDR2
EISLKSNNYATHYAEPVKG

SEQ ID NO: 11652 - protein, 11 aa, Artificial Sequence
  Description of Artificial Sequence: Synthetic peptide
  XENP018565 vhCDR3
YYGNYGGYFDV

SEQ ID NO: 11653 - protein, 11 aa, Artificial Sequence
  Description of Artificial Sequence: Synthetic peptide
  XENP018565 vlCDR1
RASQSVSNDVA

SEQ ID NO: 11654 - protein, 7 aa, Artificial Sequence
  Description of Artificial Sequence: Synthetic peptide
  XENP018565 vlCDR2
YASHRYT

SEQ ID NO: 11655 - protein, 9 aa, Artificial Sequence
  Description of Artificial Sequence: Synthetic peptide
  XENP018565 vlCDR3
QQDYSSPRT

SEQ ID NO: 11656 - protein, 249 aa, Artificial Sequence
  Description of Artificial Sequence: Synthetic polypeptide
  XENP018566 1G6_H1.70_L1_scFv(GKPGS)4
EVQLVESGGGLVKPGGSLRLSCAASGFTFSNYWMNWVRQAPGKGLEWVGEIGLKSNNYATHYAEPVKGRFTISRDDSKSTVYLQMNSLKTEDTAVYYCTRYYGNYGGYFDVWGAGTLVTVSSGKPGSGKPGSGKPGSGKPGSSIVMTQSPATLSVSPGERATLSCRASQSVSNDVAWYQQKPGQSPRLLINYASHRYTGVPDRFTGSGYGTEFTLTISSLQSEDFAVYFCQQDYSSPRTFGGGTKVEIK

SEQ ID NO: 11657 - protein, 122 aa, Artificial Sequence
  Description of Artificial Sequence: Synthetic polypeptide
  VH of XENP018566
EVQLVESGGGLVKPGGSLRLSCAASGFTFSNYWMNWVRQAPGKGLEWVGEIGLKSNNYATHYAEPVKGRFTISRDDSKSTVYLQMNSLKTEDTAVYYCTRYYGNYGGYFDVWGAGTLVTVSS

SEQ ID NO: 11658 - protein, 107 aa, Artificial Sequence; identical to SEQ ID NO: 10923
  Description of Artificial Sequence: Synthetic polypeptide
  VL of XENP018566

SEQ ID NO: 11659 - protein, 5 aa, Artificial Sequence
  Description of Artificial Sequence: Synthetic peptide
  XENP018566 vhCDR1
NYWMN

SEQ ID NO: 11660 - protein, 19 aa, Artificial Sequence
  Description of Artificial Sequence: Synthetic peptide
  XENP018566 vhCDR2
EIGLKSNNYATHYAEPVKG

SEQ ID NO: 11661 - protein, 11 aa, Artificial Sequence
  Description of Artificial Sequence: Synthetic peptide
  XENP018566 vhCDR3
YYGNYGGYFDV

SEQ ID NO: 11662 - protein, 11 aa, Artificial Sequence
  Description of Artificial Sequence: Synthetic peptide
  XENP018566 vlCDR1
RASQSVSNDVA

SEQ ID NO: 11663 - protein, 7 aa, Artificial Sequence
  Description of Artificial Sequence: Synthetic peptide
  XENP018566 vlCDR2
YASHRYT

SEQ ID NO: 11664 - protein, 9 aa, Artificial Sequence
  Description of Artificial Sequence: Synthetic peptide
  XENP018566 vlCDR3
QQDYSSPRT

SEQ ID NO: 11665 - protein, 249 aa, Artificial Sequence
  Description of Artificial Sequence: Synthetic polypeptide
  XENP018567 1G6_H1.71_L1_scFv(GKPGS)4
EVQLVESGGGLVKPGGSLRLSCAASGFTFSNYWMNWVRQAPGKGLEWVGEIYLKSNNYATHYAEPVKGRFTISRDDSKSTVYLQMNSLKTEDTAVYYCTRYYGNYGGYFDVWGAGTLVTVSSGKPGSGKPGSGKPGSGKPGSSIVMTQSPATLSVSPGERATLSCRASQSVSNDVAWYQQKPGQSPRLLINYASHRYTGVPDRFTGSGYGTEFTLTISSLQSEDFAVYFCQQDYSSPRTFGGGTKVEIK

SEQ ID NO: 11666 - protein, 122 aa, Artificial Sequence
  Description of Artificial Sequence: Synthetic polypeptide
  VH of XENP018567
EVQLVESGGGLVKPGGSLRLSCAASGFTFSNYWMNWVRQAPGKGLEWVGEIYLKSNNYATHYAEPVKGRFTISRDDSKSTVYLQMNSLKTEDTAVYYCTRYYGNYGGYFDVWGAGTLVTVSS

SEQ ID NO: 11667 - protein, 107 aa, Artificial Sequence; identical to SEQ ID NO: 10923
  Description of Artificial Sequence: Synthetic polypeptide
  VL of XENP018567

SEQ ID NO: 11668 - protein, 5 aa, Artificial Sequence
  Description of Artificial Sequence: Synthetic peptide
  XENP018567 vhCDR1
NYWMN

SEQ ID NO: 11669 - protein, 19 aa, Artificial Sequence
  Description of Artificial Sequence: Synthetic peptide
  XENP018567 vhCDR2
EIYLKSNNYATHYAEPVKG

SEQ ID NO: 11670 - protein, 11 aa, Artificial Sequence
  Description of Artificial Sequence: Synthetic peptide
  XENP018567 vhCDR3
YYGNYGGYFDV

SEQ ID NO: 11671 - protein, 11 aa, Artificial Sequence
  Description of Artificial Sequence: Synthetic peptide
  XENP018567 vlCDR1
RASQSVSNDVA

SEQ ID NO: 11672 - protein, 7 aa, Artificial Sequence
  Description of Artificial Sequence: Synthetic peptide
  XENP018567 vlCDR2
YASHRYT

SEQ ID NO: 11673 - protein, 9 aa, Artificial Sequence
  Description of Artificial Sequence: Synthetic peptide
  XENP018567 vlCDR3
QQDYSSPRT

SEQ ID NO: 11674 - protein, 249 aa, Artificial Sequence
  Description of Artificial Sequence: Synthetic polypeptide
  XENP018568 1G6_H1.72_L1_scFv(GKPGS)4
EVQLVESGGGLVKPGGSLRLSCAASGFTFSNYWMNWVRQAPGKGLEWVGEIILKSNNYATHYAEPVKGRFTISRDDSKSTVYLQMNSLKTEDTAVYYCTRYYGNYGGYFDVWGAGTLVTVSSGKPGSGKPGSGKPGSGKPGSSIVMTQSPATLSVSPGERATLSCRASQSVSNDVAWYQQKPGQSPRLLINYASHRYTGVPDRFTGSGYGTEFTLTISSLQSEDFAVYFCQQDYSSPRTFGGGTKVEIK

SEQ ID NO: 11675 - protein, 122 aa, Artificial Sequence
  Description of Artificial Sequence: Synthetic polypeptide
  VH of XENP018568
EVQLVESGGGLVKPGGSLRLSCAASGFTFSNYWMNWVRQAPGKGLEWVGEIILKSNNYATHYAEPVKGRFTISRDDSKSTVYLQMNSLKTEDTAVYYCTRYYGNYGGYFDVWGAGTLVTVSS

SEQ ID NO: 11676 - protein, 107 aa, Artificial Sequence; identical to SEQ ID NO: 10923
  Description of Artificial Sequence: Synthetic polypeptide
  VL of XENP018568

SEQ ID NO: 11677 - protein, 5 aa, Artificial Sequence
  Description of Artificial Sequence: Synthetic peptide
  XENP018568 vhCDR1
NYWMN

SEQ ID NO: 11678 - protein, 19 aa, Artificial Sequence
  Description of Artificial Sequence: Synthetic peptide
  XENP018568 vhCDR2
EIILKSNNYATHYAEPVKG

SEQ ID NO: 11679 - protein, 11 aa, Artificial Sequence
  Description of Artificial Sequence: Synthetic peptide
  XENP018568 vhCDR3
YYGNYGGYFDV

SEQ ID NO: 11680 - protein, 11 aa, Artificial Sequence
  Description of Artificial Sequence: Synthetic peptide
  XENP018568 vlCDR1
RASQSVSNDVA

SEQ ID NO: 11681 - protein, 7 aa, Artificial Sequence
  Description of Artificial Sequence: Synthetic peptide
  XENP018568 vlCDR2
YASHRYT

SEQ ID NO: 11682 - protein, 9 aa, Artificial Sequence
  Description of Artificial Sequence: Synthetic peptide
  XENP018568 vlCDR3
QQDYSSPRT

SEQ ID NO: 11683 - protein, 249 aa, Artificial Sequence
  Description of Artificial Sequence: Synthetic polypeptide
  XENP018569 1G6_H1.73_L1_scFv(GKPGS)4
EVQLVESGGGLVKPGGSLRLSCAASGFTFSNYWMNWVRQAPGKGLEWVGEIWLKSNNYATHYAEPVKGRFTISRDDSKSTVYLQMNSLKTEDTAVYYCTRYYGNYGGYFDVWGAGTLVTVSSGKPGSGKPGSGKPGSGKPGSSIVMTQSPATLSVSPGERATLSCRASQSVSNDVAWYQQKPGQSPRLLINYASHRYTGVPDRFTGSGYGTEFTLTISSLQSEDFAVYFCQQDYSSPRTFGGGTKVEIK

SEQ ID NO: 11684 - protein, 122 aa, Artificial Sequence
  Description of Artificial Sequence: Synthetic polypeptide
  VH of XENP018569
EVQLVESGGGLVKPGGSLRLSCAASGFTFSNYWMNWVRQAPGKGLEWVGEIWLKSNNYATHYAEPVKGRFTISRDDSKSTVYLQMNSLKTEDTAVYYCTRYYGNYGGYFDVWGAGTLVTVSS

SEQ ID NO: 11685 - protein, 107 aa, Artificial Sequence; identical to SEQ ID NO: 10923
  Description of Artificial Sequence: Synthetic polypeptide
  VL of XENP018569

SEQ ID NO: 11686 - protein, 5 aa, Artificial Sequence
  Description of Artificial Sequence: Synthetic peptide
  XENP018569 vhCDR1
NYWMN

SEQ ID NO: 11687 - protein, 19 aa, Artificial Sequence
  Description of Artificial Sequence: Synthetic peptide
  XENP018569 vhCDR2
EIWLKSNNYATHYAEPVKG

SEQ ID NO: 11688 - protein, 11 aa, Artificial Sequence
  Description of Artificial Sequence: Synthetic peptide
  XENP018569 vhCDR3
YYGNYGGYFDV

SEQ ID NO: 11689 - protein, 11 aa, Artificial Sequence
  Description of Artificial Sequence: Synthetic peptide
  XENP018569 vlCDR1
RASQSVSNDVA

SEQ ID NO: 11690 - protein, 7 aa, Artificial Sequence
  Description of Artificial Sequence: Synthetic peptide
  XENP018569 vlCDR2
YASHRYT

SEQ ID NO: 11691 - protein, 9 aa, Artificial Sequence
  Description of Artificial Sequence: Synthetic peptide
  XENP018569 vlCDR3
QQDYSSPRT

SEQ ID NO: 11692 - protein, 249 aa, Artificial Sequence
  Description of Artificial Sequence: Synthetic polypeptide
  XENP018570 1G6_H1.74_L1_scFv(GKPGS)4
EVQLVESGGGLVKPGGSLRLSCAASGFTFSNYWMNWVRQAPGKGLEWVGEIRIKSNNYATHYAEPVKGRFTISRDDSKSTVYLQMNSLKTEDTAVYYCTRYYGNYGGYFDVWGAGTLVTVSSGKPGSGKPGSGKPGSGKPGSSIVMTQSPATLSVSPGERATLSCRASQSVSNDVAWYQQKPGQSPRLLINYASHRYTGVPDRFTGSGYGTEFTLTISSLQSEDFAVYFCQQDYSSPRTFGGGTKVEIK

SEQ ID NO: 11693 - protein, 122 aa, Artificial Sequence
  Description of Artificial Sequence: Synthetic polypeptide
  VH of XENP018570
EVQLVESGGGLVKPGGSLRLSCAASGFTFSNYWMNWVRQAPGKGLEWVGEIRIKSNNYATHYAEPVKGRFTISRDDSKSTVYLQMNSLKTEDTAVYYCTRYYGNYGGYFDVWGAGTLVTVSS

SEQ ID NO: 11694 - protein, 107 aa, Artificial Sequence; identical to SEQ ID NO: 10923
  Description of Artificial Sequence: Synthetic polypeptide
  VL of XENP018570

SEQ ID NO: 11695 - protein, 5 aa, Artificial Sequence
  Description of Artificial Sequence: Synthetic peptide
  XENP018570 vhCDR1
NYWMN

SEQ ID NO: 11696 - protein, 19 aa, Artificial Sequence
  Description of Artificial Sequence: Synthetic peptide
  XENP018570 vhCDR2
EIRIKSNNYATHYAEPVKG

SEQ ID NO: 11697 - protein, 11 aa, Artificial Sequence
  Description of Artificial Sequence: Synthetic peptide
  XENP018570 vhCDR3
YYGNYGGYFDV

SEQ ID NO: 11698 - protein, 11 aa, Artificial Sequence
  Description of Artificial Sequence: Synthetic peptide
  XENP018570 vlCDR1
RASQSVSNDVA

SEQ ID NO: 11699 - protein, 7 aa, Artificial Sequence
  Description of Artificial Sequence: Synthetic peptide
  XENP018570 vlCDR2
YASHRYT

SEQ ID NO: 11700 - protein, 9 aa, Artificial Sequence
  Description of Artificial Sequence: Synthetic peptide
  XENP018570 vlCDR3
QQDYSSPRT

SEQ ID NO: 11701 - protein, 249 aa, Artificial Sequence
  Description of Artificial Sequence: Synthetic polypeptide
  XENP018571 1G6_H1.75_L1_scFv(GKPGS)4
EVQLVESGGGLVKPGGSLRLSCAASGFTFSNYWMNWVRQAPGKGLEWVGEIRFKSNNYATHYAEPVKGRFTISRDDSKSTVYLQMNSLKTEDTAVYYCTRYYGNYGGYFDVWGAGTLVTVSSGKPGSGKPGSGKPGSGKPGSSIVMTQSPATLSVSPGERATLSCRASQSVSNDVAWYQQKPGQSPRLLINYASHRYTGVPDRFTGSGYGTEFTLTISSLQSEDFAVYFCQQDYSSPRTFGGGTKVEIK

SEQ ID NO: 11702 - protein, 122 aa, Artificial Sequence
  Description of Artificial Sequence: Synthetic polypeptide
  VH of XENP018571
EVQLVESGGGLVKPGGSLRLSCAASGFTFSNYWMNWVRQAPGKGLEWVGEIRFKSNNYATHYAEPVKGRFTISRDDSKSTVYLQMNSLKTEDTAVYYCTRYYGNYGGYFDVWGAGTLVTVSS

SEQ ID NO: 11703 - protein, 107 aa, Artificial Sequence; identical to SEQ ID NO: 10923
  Description of Artificial Sequence: Synthetic polypeptide
  VL of XENP018571

SEQ ID NO: 11704 - protein, 5 aa, Artificial Sequence
  Description of Artificial Sequence: Synthetic peptide
  XENP018571 vhCDR1
NYWMN

SEQ ID NO: 11705 - protein, 19 aa, Artificial Sequence
  Description of Artificial Sequence: Synthetic peptide
  XENP018571 vhCDR2
EIRFKSNNYATHYAEPVKG

SEQ ID NO: 11706 - protein, 11 aa, Artificial Sequence
  Description of Artificial Sequence: Synthetic peptide
  XENP018571 vhCDR3
YYGNYGGYFDV

SEQ ID NO: 11707 - protein, 11 aa, Artificial Sequence
  Description of Artificial Sequence: Synthetic peptide
  XENP018571 vlCDR1
RASQSVSNDVA

SEQ ID NO: 11708 - protein, 7 aa, Artificial Sequence
  Description of Artificial Sequence: Synthetic peptide
  XENP018571 vlCDR2
YASHRYT

SEQ ID NO: 11709 - protein, 9 aa, Artificial Sequence
  Description of Artificial Sequence: Synthetic peptide
  XENP018571 vlCDR3
QQDYSSPRT

SEQ ID NO: 11710 - protein, 249 aa, Artificial Sequence
  Description of Artificial Sequence: Synthetic polypeptide
  XENP018572 1G6_H1.76_L1_scFv(GKPGS)4
EVQLVESGGGLVKPGGSLRLSCAASGFTFSNYWMNWVRQAPGKGLEWVGEIRVKSNNYATHYAEPVKGRFTISRDDSKSTVYLQMNSLKTEDTAVYYCTRYYGNYGGYFDVWGAGTLVTVSSGKPGSGKPGSGKPGSGKPGSSIVMTQSPATLSVSPGERATLSCRASQSVSNDVAWYQQKPGQSPRLLINYASHRYTGVPDRFTGSGYGTEFTLTISSLQSEDFAVYFCQQDYSSPRTFGGGTKVEIK

SEQ ID NO: 11711 - protein, 122 aa, Artificial Sequence
  Description of Artificial Sequence: Synthetic polypeptide
  VH of XENP018572
EVQLVESGGGLVKPGGSLRLSCAASGFTFSNYWMNWVRQAPGKGLEWVGEIRVKSNNYATHYAEPVKGRFTISRDDSKSTVYLQMNSLKTEDTAVYYCTRYYGNYGGYFDVWGAGTLVTVSS

SEQ ID NO: 11712 - protein, 107 aa, Artificial Sequence; identical to SEQ ID NO: 10923
  Description of Artificial Sequence: Synthetic polypeptide
  VL of XENP018572

SEQ ID NO: 11713 - protein, 5 aa, Artificial Sequence
  Description of Artificial Sequence: Synthetic peptide
  XENP018572 vhCDR1
NYWMN

SEQ ID NO: 11714 - protein, 19 aa, Artificial Sequence
  Description of Artificial Sequence: Synthetic peptide
  XENP018572 vhCDR2
EIRVKSNNYATHYAEPVKG

SEQ ID NO: 11715 - protein, 11 aa, Artificial Sequence
  Description of Artificial Sequence: Synthetic peptide
  XENP018572 vhCDR3
YYGNYGGYFDV

SEQ ID NO: 11716 - protein, 11 aa, Artificial Sequence
  Description of Artificial Sequence: Synthetic peptide
  XENP018572 vlCDR1
RASQSVSNDVA

SEQ ID NO: 11717 - protein, 7 aa, Artificial Sequence
  Description of Artificial Sequence: Synthetic peptide
  XENP018572 vlCDR2
YASHRYT

SEQ ID NO: 11718 - protein, 9 aa, Artificial Sequence
  Description of Artificial Sequence: Synthetic peptide
  XENP018572 vlCDR3
QQDYSSPRT

SEQ ID NO: 11719 - protein, 249 aa, Artificial Sequence
  Description of Artificial Sequence: Synthetic polypeptide
  XENP018573 1G6_H1.77_L1_scFv(GKPGS)4
EVQLVESGGGLVKPGGSLRLSCAASGFTFSNYWMNWVRQAPGKGLEWVGEIRYKSNNYATHYAEPVKGRFTISRDDSKSTVYLQMNSLKTEDTAVYYCTRYYGNYGGYFDVWGAGTLVTVSSGKPGSGKPGSGKPGSGKPGSSIVMTQSPATLSVSPGERATLSCRASQSVSNDVAWYQQKPGQSPRLLINYASHRYTGVPDRFTGSGYGTEFTLTISSLQSEDFAVYFCQQDYSSPRTFGGGTKVEIK

SEQ ID NO: 11720 - protein, 122 aa, Artificial Sequence
  Description of Artificial Sequence: Synthetic polypeptide
  VH of XENP018573
EVQLVESGGGLVKPGGSLRLSCAASGFTFSNYWMNWVRQAPGKGLEWVGEIRYKSNNYATHYAEPVKGRFTISRDDSKSTVYLQMNSLKTEDTAVYYCTRYYGNYGGYFDVWGAGTLVTVSS

SEQ ID NO: 11721 - protein, 107 aa, Artificial Sequence; identical to SEQ ID NO: 10923
  Description of Artificial Sequence: Synthetic polypeptide
  VL of XENP018573

SEQ ID NO: 11722 - protein, 5 aa, Artificial Sequence
  Description of Artificial Sequence: Synthetic peptide
  XENP018573 vhCDR1
NYWMN

SEQ ID NO: 11723 - protein, 19 aa, Artificial Sequence
  Description of Artificial Sequence: Synthetic peptide
  XENP018573 vhCDR2
EIRYKSNNYATHYAEPVKG

SEQ ID NO: 11724 - protein, 11 aa, Artificial Sequence
  Description of Artificial Sequence: Synthetic peptide
  XENP018573 vhCDR3
YYGNYGGYFDV

SEQ ID NO: 11725 - protein, 11 aa, Artificial Sequence
  Description of Artificial Sequence: Synthetic peptide
  XENP018573 vlCDR1
RASQSVSNDVA

SEQ ID NO: 11726 - protein, 7 aa, Artificial Sequence
  Description of Artificial Sequence: Synthetic peptide
  XENP018573 vlCDR2
YASHRYT

SEQ ID NO: 11727 - protein, 9 aa, Artificial Sequence
  Description of Artificial Sequence: Synthetic peptide
  XENP018573 vlCDR3
QQDYSSPRT

SEQ ID NO: 11728 - protein, 249 aa, Artificial Sequence
  Description of Artificial Sequence: Synthetic polypeptide
  XENP018574 1G6_H1.78_L1_scFv(GKPGS)4
EVQLVESGGGLVKPGGSLRLSCAASGFTFSNYWMNWVRQAPGKGLEWVGEIRWKSNNYATHYAEPVKGRFTISRDDSKSTVYLQMNSLKTEDTAVYYCTRYYGNYGGYFDVWGAGTLVTVSSGKPGSGKPGSGKPGSGKPGSSIVMTQSPATLSVSPGERATLSCRASQSVSNDVAWYQQKPGQSPRLLINYASHRYTGVPDRFTGSGYGTEFTLTISSLQSEDFAVYFCQQDYSSPRTFGGGTKVEIK

SEQ ID NO: 11729 - protein, 122 aa, Artificial Sequence
  Description of Artificial Sequence: Synthetic polypeptide
  VH of XENP018574
EVQLVESGGGLVKPGGSLRLSCAASGFTFSNYWMNWVRQAPGKGLEWVGEIRWKSNNYATHYAEPVKGRFTISRDDSKSTVYLQMNSLKTEDTAVYYCTRYYGNYGGYFDVWGAGTLVTVSS

SEQ ID NO: 11730 - protein, 107 aa, Artificial Sequence; identical to SEQ ID NO: 10923
  Description of Artificial Sequence: Synthetic polypeptide
  VL of XENP018574

SEQ ID NO: 11731 - protein, 5 aa, Artificial Sequence
  Description of Artificial Sequence: Synthetic peptide
  XENP018574 vhCDR1
NYWMN

SEQ ID NO: 11732 - protein, 19 aa, Artificial Sequence
  Description of Artificial Sequence: Synthetic peptide
  XENP018574 vhCDR2
EIRWKSNNYATHYAEPVKG

SEQ ID NO: 11733 - protein, 11 aa, Artificial Sequence
  Description of Artificial Sequence: Synthetic peptide
  XENP018574 vhCDR3
YYGNYGGYFDV

SEQ ID NO: 11734 - protein, 11 aa, Artificial Sequence
  Description of Artificial Sequence: Synthetic peptide
  XENP018574 vlCDR1
RASQSVSNDVA

SEQ ID NO: 11735 - protein, 7 aa, Artificial Sequence
  Description of Artificial Sequence: Synthetic peptide
  XENP018574 vlCDR2
YASHRYT

SEQ ID NO: 11736 - protein, 9 aa, Artificial Sequence
  Description of Artificial Sequence: Synthetic peptide
  XENP018574 vlCDR3
QQDYSSPRT

SEQ ID NO: 11737 - protein, 249 aa, Artificial Sequence
  Description of Artificial Sequence: Synthetic polypeptide
  XENP018575 1G6_H1.79_L1_scFv(GKPGS)4
EVQLVESGGGLVKPGGSLRLSCAASGFTFSNYWMNWVRQAPGKGLEWVGEIRDKSNNYATHYAEPVKGRFTISRDDSKSTVYLQMNSLKTEDTAVYYCTRYYGNYGGYFDVWGAGTLVTVSSGKPGSGKPGSGKPGSGKPGSSIVMTQSPATLSVSPGERATLSCRASQSVSNDVAWYQQKPGQSPRLLINYASHRYTGVPDRFTGSGYGTEFTLTISSLQSEDFAVYFCQQDYSSPRTFGGGTKVEIK

SEQ ID NO: 11738 - protein, 122 aa, Artificial Sequence
  Description of Artificial Sequence: Synthetic polypeptide
  VH of XENP018575
EVQLVESGGGLVKPGGSLRLSCAASGFTFSNYWMNWVRQAPGKGLEWVGEIRDKSNNYATHYAEPVKGRFTISRDDSKSTVYLQMNSLKTEDTAVYYCTRYYGNYGGYFDVWGAGTLVTVSS

SEQ ID NO: 11739 - protein, 107 aa, Artificial Sequence; identical to SEQ ID NO: 10923
  Description of Artificial Sequence: Synthetic polypeptide
  VL of XENP018575

SEQ ID NO: 11740 - protein, 5 aa, Artificial Sequence
  Description of Artificial Sequence: Synthetic peptide
  XENP018575 vhCDR1
NYWMN

SEQ ID NO: 11741 - protein, 19 aa, Artificial Sequence
  Description of Artificial Sequence: Synthetic peptide
  XENP018575 vhCDR2
EIRDKSNNYATHYAEPVKG

SEQ ID NO: 11742 - protein, 11 aa, Artificial Sequence
  Description of Artificial Sequence: Synthetic peptide
  XENP018575 vhCDR3
YYGNYGGYFDV

SEQ ID NO: 11743 - protein, 11 aa, Artificial Sequence
  Description of Artificial Sequence: Synthetic peptide
  XENP018575 vlCDR1
RASQSVSNDVA

SEQ ID NO: 11744 - protein, 7 aa, Artificial Sequence
  Description of Artificial Sequence: Synthetic peptide
  XENP018575 vlCDR2
YASHRYT

SEQ ID NO: 11745 - protein, 9 aa, Artificial Sequence
  Description of Artificial Sequence: Synthetic peptide
  XENP018575 vlCDR3
QQDYSSPRT

SEQ ID NO: 11746 - protein, 249 aa, Artificial Sequence
  Description of Artificial Sequence: Synthetic polypeptide
  XENP018576 1G6_H1.80_L1_scFv(GKPGS)4
EVQLVESGGGLVKPGGSLRLSCAASGFTFSNYWMNWVRQAPGKGLEWVGEIRAKSNNYATHYAEPVKGRFTISRDDSKSTVYLQMNSLKTEDTAVYYCTRYYGNYGGYFDVWGAGTLVTVSSGKPGSGKPGSGKPGSGKPGSSIVMTQSPATLSVSPGERATLSCRASQSVSNDVAWYQQKPGQSPRLLINYASHRYTGVPDRFTGSGYGTEFTLTISSLQSEDFAVYFCQQDYSSPRTFGGGTKVEIK

SEQ ID NO: 11747 - protein, 122 aa, Artificial Sequence
  Description of Artificial Sequence: Synthetic polypeptide
  VH of XENP018576
EVQLVESGGGLVKPGGSLRLSCAASGFTFSNYWMNWVRQAPGKGLEWVGEIRAKSNNYATHYAEPVKGRFTISRDDSKSTVYLQMNSLKTEDTAVYYCTRYYGNYGGYFDVWGAGTLVTVSS

SEQ ID NO: 11748 - protein, 107 aa, Artificial Sequence; identical to SEQ ID NO: 10923
  Description of Artificial Sequence: Synthetic polypeptide
  VL of XENP018576

SEQ ID NO: 11749 - protein, 5 aa, Artificial Sequence
  Description of Artificial Sequence: Synthetic peptide
  XENP018576 vhCDR1
NYWMN

SEQ ID NO: 11750 - protein, 19 aa, Artificial Sequence
  Description of Artificial Sequence: Synthetic peptide
  XENP018576 vhCDR2
EIRAKSNNYATHYAEPVKG

SEQ ID NO: 11751 - protein, 11 aa, Artificial Sequence
  Description of Artificial Sequence: Synthetic peptide
  XENP018576 vhCDR3
YYGNYGGYFDV

SEQ ID NO: 11752 - protein, 11 aa, Artificial Sequence
  Description of Artificial Sequence: Synthetic peptide
  XENP018576 vlCDR1
RASQSVSNDVA

SEQ ID NO: 11753 - protein, 7 aa, Artificial Sequence
  Description of Artificial Sequence: Synthetic peptide
  XENP018576 vlCDR2
YASHRYT

SEQ ID NO: 11754 - protein, 9 aa, Artificial Sequence
  Description of Artificial Sequence: Synthetic peptide
  XENP018576 vlCDR3
QQDYSSPRT

SEQ ID NO: 11755 - protein, 249 aa, Artificial Sequence
  Description of Artificial Sequence: Synthetic polypeptide
  XENP018577 1G6_H1.81_L1_scFv(GKPGS)4
EVQLVESGGGLVKPGGSLRLSCAASGFTFSNYWMNWVRQAPGKGLEWVGEIRQKSNNYATHYAEPVKGRFTISRDDSKSTVYLQMNSLKTEDTAVYYCTRYYGNYGGYFDVWGAGTLVTVSSGKPGSGKPGSGKPGSGKPGSSIVMTQSPATLSVSPGERATLSCRASQSVSNDVAWYQQKPGQSPRLLINYASHRYTGVPDRFTGSGYGTEFTLTISSLQSEDFAVYFCQQDYSSPRTFGGGTKVEIK

SEQ ID NO: 11756 - protein, 122 aa, Artificial Sequence
  Description of Artificial Sequence: Synthetic polypeptide
  VH of XENP018577
EVQLVESGGGLVKPGGSLRLSCAASGFTFSNYWMNWVRQAPGKGLEWVGEIRQKSNNYATHYAEPVKGRFTISRDDSKSTVYLQMNSLKTEDTAVYYCTRYYGNYGGYFDVWGAGTLVTVSS

SEQ ID NO: 11757 - protein, 107 aa, Artificial Sequence; identical to SEQ ID NO: 10923
  Description of Artificial Sequence: Synthetic polypeptide
  VL of XENP018577

SEQ ID NO: 11758 - protein, 5 aa, Artificial Sequence
  Description of Artificial Sequence: Synthetic peptide
  XENP018577 vhCDR1
NYWMN

SEQ ID NO: 11759 - protein, 19 aa, Artificial Sequence
  Description of Artificial Sequence: Synthetic peptide
  XENP018577 vhCDR2
EIRQKSNNYATHYAEPVKG

SEQ ID NO: 11760 - protein, 11 aa, Artificial Sequence
  Description of Artificial Sequence: Synthetic peptide
  XENP018577 vhCDR3
YYGNYGGYFDV

SEQ ID NO: 11761 - protein, 11 aa, Artificial Sequence
  Description of Artificial Sequence: Synthetic peptide
  XENP018577 vlCDR1
RASQSVSNDVA

SEQ ID NO: 11762 - protein, 7 aa, Artificial Sequence
  Description of Artificial Sequence: Synthetic peptide
  XENP018577 vlCDR2
YASHRYT

SEQ ID NO: 11763 - protein, 9 aa, Artificial Sequence
  Description of Artificial Sequence: Synthetic peptide
  XENP018577 vlCDR3
QQDYSSPRT

SEQ ID NO: 11764 - protein, 249 aa, Artificial Sequence
  Description of Artificial Sequence: Synthetic polypeptide
  XENP018578 1G6_H1.82_L1_scFv(GKPGS)4
EVQLVESGGGLVKPGGSLRLSCAASGFTFSNYWMNWVRQAPGKGLEWVGEIRKKSNNYATHYAEPVKGRFTISRDDSKSTVYLQMNSLKTEDTAVYYCTRYYGNYGGYFDVWGAGTLVTVSSGKPGSGKPGSGKPGSGKPGSSIVMTQSPATLSVSPGERATLSCRASQSVSNDVAWYQQKPGQSPRLLINYASHRYTGVPDRFTGSGYGTEFTLTISSLQSEDFAVYFCQQDYSSPRTFGGGTKVEIK

SEQ ID NO: 11765 - protein, 122 aa, Artificial Sequence
  Description of Artificial Sequence: Synthetic polypeptide
  VH of XENP018578
EVQLVESGGGLVKPGGSLRLSCAASGFTFSNYWMNWVRQAPGKGLEWVGEIRKKSNNYATHYAEPVKGRFTISRDDSKSTVYLQMNSLKTEDTAVYYCTRYYGNYGGYFDVWGAGTLVTVSS

SEQ ID NO: 11766 - protein, 107 aa, Artificial Sequence; identical to SEQ ID NO: 10923
  Description of Artificial Sequence: Synthetic polypeptide
  VL of XENP018578

SEQ ID NO: 11767 - protein, 5 aa, Artificial Sequence
  Description of Artificial Sequence: Synthetic peptide
  XENP018578 vhCDR1
NYWMN

SEQ ID NO: 11768 - protein, 19 aa, Artificial Sequence
  Description of Artificial Sequence: Synthetic peptide
  XENP018578 vhCDR2
EIRKKSNNYATHYAEPVKG

SEQ ID NO: 11769 - protein, 11 aa, Artificial Sequence
  Description of Artificial Sequence: Synthetic peptide
  XENP018578 vhCDR3
YYGNYGGYFDV

SEQ ID NO: 11770 - protein, 11 aa, Artificial Sequence
  Description of Artificial Sequence: Synthetic peptide
  XENP018578 vlCDR1
RASQSVSNDVA

SEQ ID NO: 11771 - protein, 7 aa, Artificial Sequence
  Description of Artificial Sequence: Synthetic peptide
  XENP018578 vlCDR2
YASHRYT

SEQ ID NO: 11772 - protein, 9 aa, Artificial Sequence
  Description of Artificial Sequence: Synthetic peptide
  XENP018578 vlCDR3
QQDYSSPRT

SEQ ID NO: 11773 - protein, 249 aa, Artificial Sequence
  Description of Artificial Sequence: Synthetic polypeptide
  XENP018579 1G6_H1.83_L1_scFv(GKPGS)4
EVQLVESGGGLVKPGGSLRLSCAASGFTFSNYWMNWVRQAPGKGLEWVGEIRLRSNNYATHYAEPVKGRFTISRDDSKSTVYLQMNSLKTEDTAVYYCTRYYGNYGGYFDVWGAGTLVTVSSGKPGSGKPGSGKPGSGKPGSSIVMTQSPATLSVSPGERATLSCRASQSVSNDVAWYQQKPGQSPRLLINYASHRYTGVPDRFTGSGYGTEFTLTISSLQSEDFAVYFCQQDYSSPRTFGGGTKVEIK

SEQ ID NO: 11774 - protein, 122 aa, Artificial Sequence
  Description of Artificial Sequence: Synthetic polypeptide
  VH of XENP018579
EVQLVESGGGLVKPGGSLRLSCAASGFTFSNYWMNWVRQAPGKGLEWVGEIRLRSNNYATHYAEPVKGRFTISRDDSKSTVYLQMNSLKTEDTAVYYCTRYYGNYGGYFDVWGAGTLVTVSS

SEQ ID NO: 11775 - protein, 107 aa, Artificial Sequence; identical to SEQ ID NO: 10923
  Description of Artificial Sequence: Synthetic polypeptide
  VL of XENP018579

SEQ ID NO: 11776 - protein, 5 aa, Artificial Sequence
  Description of Artificial Sequence: Synthetic peptide
  XENP018579 vhCDR1
NYWMN

SEQ ID NO: 11777 - protein, 19 aa, Artificial Sequence
  Description of Artificial Sequence: Synthetic peptide
  XENP018579 vhCDR2
EIRLRSNNYATHYAEPVKG

SEQ ID NO: 11778 - protein, 11 aa, Artificial Sequence
  Description of Artificial Sequence: Synthetic peptide
  XENP018579 vhCDR3
YYGNYGGYFDV

SEQ ID NO: 11779 - protein, 11 aa, Artificial Sequence
  Description of Artificial Sequence: Synthetic peptide
  XENP018579 vlCDR1
RASQSVSNDVA

SEQ ID NO: 11780 - protein, 7 aa, Artificial Sequence
  Description of Artificial Sequence: Synthetic peptide
  XENP018579 vlCDR2
YASHRYT

SEQ ID NO: 11781 - protein, 9 aa, Artificial Sequence
  Description of Artificial Sequence: Synthetic peptide
  XENP018579 vlCDR3
QQDYSSPRT

SEQ ID NO: 11782 - protein, 249 aa, Artificial Sequence
  Description of Artificial Sequence: Synthetic polypeptide
  XENP018580 1G6_H1.84_L1_scFv(GKPGS)4
EVQLVESGGGLVKPGGSLRLSCAASGFTFSNYWMNWVRQAPGKGLEWVGEIRLESNNYATHYAEPVKGRFTISRDDSKSTVYLQMNSLKTEDTAVYYCTRYYGNYGGYFDVWGAGTLVTVSSGKPGSGKPGSGKPGSGKPGSSIVMTQSPATLSVSPGERATLSCRASQSVSNDVAWYQQKPGQSPRLLINYASHRYTGVPDRFTGSGYGTEFTLTISSLQSEDFAVYFCQQDYSSPRTFGGGTKVEIK

SEQ ID NO: 11783 - protein, 122 aa, Artificial Sequence
  Description of Artificial Sequence: Synthetic polypeptide
  VH of XENP018580
EVQLVESGGGLVKPGGSLRLSCAASGFTFSNYWMNWVRQAPGKGLEWVGEIRLESNNYATHYAEPVKGRFTISRDDSKSTVYLQMNSLKTEDTAVYYCTRYYGNYGGYFDVWGAGTLVTVSS

SEQ ID NO: 11784 - protein, 107 aa, Artificial Sequence; identical to SEQ ID NO: 10923
  Description of Artificial Sequence: Synthetic polypeptide
  VL of XENP018580

SEQ ID NO: 11785 - protein, 5 aa, Artificial Sequence
  Description of Artificial Sequence: Synthetic peptide
  XENP018580 vhCDR1
NYWMN

SEQ ID NO: 11786 - protein, 19 aa, Artificial Sequence
  Description of Artificial Sequence: Synthetic peptide
  XENP018580 vhCDR2
EIRLESNNYATHYAEPVKG

SEQ ID NO: 11787 - protein, 11 aa, Artificial Sequence
  Description of Artificial Sequence: Synthetic peptide
  XENP018580 vhCDR3
YYGNYGGYFDV

SEQ ID NO: 11788 - protein, 11 aa, Artificial Sequence
  Description of Artificial Sequence: Synthetic peptide
  XENP018580 vlCDR1
RASQSVSNDVA

SEQ ID NO: 11789 - protein, 7 aa, Artificial Sequence
  Description of Artificial Sequence: Synthetic peptide
  XENP018580 vlCDR2
YASHRYT

SEQ ID NO: 11790 - protein, 9 aa, Artificial Sequence
  Description of Artificial Sequence: Synthetic peptide
  XENP018580 vlCDR3
QQDYSSPRT

SEQ ID NO: 11791 - protein, 249 aa, Artificial Sequence
  Description of Artificial Sequence: Synthetic polypeptide
  XENP018581 1G6_H1.85_L1_scFv(GKPGS)4
EVQLVESGGGLVKPGGSLRLSCAASGFTFSNYWMNWVRQAPGKGLEWVGEIRLHSNNYATHYAEPVKGRFTISRDDSKSTVYLQMNSLKTEDTAVYYCTRYYGNYGGYFDVWGAGTLVTVSSGKPGSGKPGSGKPGSGKPGSSIVMTQSPATLSVSPGERATLSCRASQSVSNDVAWYQQKPGQSPRLLINYASHRYTGVPDRFTGSGYGTEFTLTISSLQSEDFAVYFCQQDYSSPRTFGGGTKVEIK

SEQ ID NO: 11792 - protein, 122 aa, Artificial Sequence
  Description of Artificial Sequence: Synthetic polypeptide
  VH of XENP018581
EVQLVESGGGLVKPGGSLRLSCAASGFTFSNYWMNWVRQAPGKGLEWVGEIRLHSNNYATHYAEPVKGRFTISRDDSKSTVYLQMNSLKTEDTAVYYCTRYYGNYGGYFDVWGAGTLVTVSS

SEQ ID NO: 11793 - protein, 107 aa, Artificial Sequence; identical to SEQ ID NO: 10923
  Description of Artificial Sequence: Synthetic polypeptide
  VL of XENP018581

SEQ ID NO: 11794 - protein, 5 aa, Artificial Sequence
  Description of Artificial Sequence: Synthetic peptide
  XENP018581 vhCDR1
NYWMN

SEQ ID NO: 11795 - protein, 19 aa, Artificial Sequence
  Description of Artificial Sequence: Synthetic peptide
  XENP018581 vhCDR2
EIRLHSNNYATHYAEPVKG

SEQ ID NO: 11796 - protein, 11 aa, Artificial Sequence
  Description of Artificial Sequence: Synthetic peptide
  XENP018581 vhCDR3
YYGNYGGYFDV

SEQ ID NO: 11797 - protein, 11 aa, Artificial Sequence
  Description of Artificial Sequence: Synthetic peptide
  XENP018581 vlCDR1
RASQSVSNDVA

SEQ ID NO: 11798 - protein, 7 aa, Artificial Sequence
  Description of Artificial Sequence: Synthetic peptide
  XENP018581 vlCDR2
YASHRYT

SEQ ID NO: 11799 - protein, 9 aa, Artificial Sequence
  Description of Artificial Sequence: Synthetic peptide
  XENP018581 vlCDR3
QQDYSSPRT

SEQ ID NO: 11800 - protein, 249 aa, Artificial Sequence
  Description of Artificial Sequence: Synthetic polypeptide
  XENP018582 1G6_H1.86_L1_scFv(GKPGS)4
EVQLVESGGGLVKPGGSLRLSCAASGFTFSNYWMNWVRQAPGKGLEWVGEIRLSSNNYATHYAEPVKGRFTISRDDSKSTVYLQMNSLKTEDTAVYYCTRYYGNYGGYFDVWGAGTLVTVSSGKPGSGKPGSGKPGSGKPGSSIVMTQSPATLSVSPGERATLSCRASQSVSNDVAWYQQKPGQSPRLLINYASHRYTGVPDRFTGSGYGTEFTLTISSLQSEDFAVYFCQQDYSSPRTFGGGTKVEIK

SEQ ID NO: 11801 - protein, 122 aa, Artificial Sequence
  Description of Artificial Sequence: Synthetic polypeptide
  VH of XENP018582
EVQLVESGGGLVKPGGSLRLSCAASGFTFSNYWMNWVRQAPGKGLEWVGEIRLSSNNYATHYAEPVKGRFTISRDDSKSTVYLQMNSLKTEDTAVYYCTRYYGNYGGYFDVWGAGTLVTVSS

SEQ ID NO: 11802 - protein, 107 aa, Artificial Sequence; identical to SEQ ID NO: 10923
  Description of Artificial Sequence: Synthetic polypeptide
  VL of XENP018582

SEQ ID NO: 11803 - protein, 5 aa, Artificial Sequence
  Description of Artificial Sequence: Synthetic peptide
  XENP018582 vhCDR1
NYWMN

SEQ ID NO: 11804 - protein, 19 aa, Artificial Sequence
  Description of Artificial Sequence: Synthetic peptide
  XENP018582 vhCDR2
EIRLSSNNYATHYAEPVKG

SEQ ID NO: 11805 - protein, 11 aa, Artificial Sequence
  Description of Artificial Sequence: Synthetic peptide
  XENP018582 vhCDR3
YYGNYGGYFDV

SEQ ID NO: 11806 - protein, 11 aa, Artificial Sequence
  Description of Artificial Sequence: Synthetic peptide
  XENP018582 vlCDR1
RASQSVSNDVA

SEQ ID NO: 11807 - protein, 7 aa, Artificial Sequence
  Description of Artificial Sequence: Synthetic peptide
  XENP018582 vlCDR2
YASHRYT

SEQ ID NO: 11808 - protein, 9 aa, Artificial Sequence
  Description of Artificial Sequence: Synthetic peptide
  XENP018582 vlCDR3
QQDYSSPRT

SEQ ID NO: 11809 - protein, 249 aa, Artificial Sequence
  Description of Artificial Sequence: Synthetic polypeptide
  XENP018583 1G6_H1.87_L1_scFv(GKPGS)4
EVQLVESGGGLVKPGGSLRLSCAASGFTFSNYWMNWVRQAPGKGLEWVGEIRLDSNNYATHYAEPVKGRFTISRDDSKSTVYLQMNSLKTEDTAVYYCTRYYGNYGGYFDVWGAGTLVTVSSGKPGSGKPGSGKPGSGKPGSSIVMTQSPATLSVSPGERATLSCRASQSVSNDVAWYQQKPGQSPRLLINYASHRYTGVPDRFTGSGYGTEFTLTISSLQSEDFAVYFCQQDYSSPRTFGGGTKVEIK

SEQ ID NO: 11810 - protein, 122 aa, Artificial Sequence
  Description of Artificial Sequence: Synthetic polypeptide
  VH of XENP018583
EVQLVESGGGLVKPGGSLRLSCAASGFTFSNYWMNWVRQAPGKGLEWVGEIRLDSNNYATHYAEPVKGRFTISRDDSKSTVYLQMNSLKTEDTAVYYCTRYYGNYGGYFDVWGAGTLVTVSS

SEQ ID NO: 11811 - protein, 107 aa, Artificial Sequence; identical to SEQ ID NO: 10923
  Description of Artificial Sequence: Synthetic polypeptide
  VL of XENP018583

SEQ ID NO: 11812 - protein, 5 aa, Artificial Sequence
  Description of Artificial Sequence: Synthetic peptide
  XENP018583 vhCDR1
NYWMN

SEQ ID NO: 11813 - protein, 19 aa, Artificial Sequence
  Description of Artificial Sequence: Synthetic peptide
  XENP018583 vhCDR2
EIRLDSNNYATHYAEPVKG

SEQ ID NO: 11814 - protein, 11 aa, Artificial Sequence
  Description of Artificial Sequence: Synthetic peptide
  XENP018583 vhCDR3
YYGNYGGYFDV

SEQ ID NO: 11815 - protein, 11 aa, Artificial Sequence
  Description of Artificial Sequence: Synthetic peptide
  XENP018583 vlCDR1
RASQSVSNDVA

SEQ ID NO: 11816 - protein, 7 aa, Artificial Sequence
  Description of Artificial Sequence: Synthetic peptide
  XENP018583 vlCDR2
YASHRYT

SEQ ID NO: 11817 - protein, 9 aa, Artificial Sequence
  Description of Artificial Sequence: Synthetic peptide
  XENP018583 vlCDR3
QQDYSSPRT

SEQ ID NO: 11818 - protein, 249 aa, Artificial Sequence
  Description of Artificial Sequence: Synthetic polypeptide
  XENP018584 1G6_H1.88_L1_scFv(GKPGS)4
EVQLVESGGGLVKPGGSLRLSCAASGFTFSNYWMNWVRQAPGKGLEWVGEIRLASNNYATHYAEPVKGRFTISRDDSKSTVYLQMNSLKTEDTAVYYCTRYYGNYGGYFDVWGAGTLVTVSSGKPGSGKPGSGKPGSGKPGSSIVMTQSPATLSVSPGERATLSCRASQSVSNDVAWYQQKPGQSPRLLINYASHRYTGVPDRFTGSGYGTEFTLTISSLQSEDFAVYFCQQDYSSPRTFGGGTKVEIK

SEQ ID NO: 11819 - protein, 122 aa, Artificial Sequence
  Description of Artificial Sequence: Synthetic polypeptide
  VH of XENP018584
EVQLVESGGGLVKPGGSLRLSCAASGFTFSNYWMNWVRQAPGKGLEWVGEIRLASNNYATHYAEPVKGRFTISRDDSKSTVYLQMNSLKTEDTAVYYCTRYYGNYGGYFDVWGAGTLVTVSS

SEQ ID NO: 11820 - protein, 107 aa, Artificial Sequence; identical to SEQ ID NO: 10923
  Description of Artificial Sequence: Synthetic polypeptide
  VL of XENP018584

SEQ ID NO: 11821 - protein, 5 aa, Artificial Sequence
  Description of Artificial Sequence: Synthetic peptide
  XENP018584 vhCDR1
NYWMN

SEQ ID NO: 11822 - protein, 19 aa, Artificial Sequence
  Description of Artificial Sequence: Synthetic peptide
  XENP018584 vhCDR2
EIRLASNNYATHYAEPVKG

SEQ ID NO: 11823 - protein, 11 aa, Artificial Sequence
  Description of Artificial Sequence: Synthetic peptide
  XENP018584 vhCDR3
YYGNYGGYFDV

SEQ ID NO: 11824 - protein, 11 aa, Artificial Sequence
  Description of Artificial Sequence: Synthetic peptide
  XENP018584 vlCDR1
RASQSVSNDVA

SEQ ID NO: 11825 - protein, 7 aa, Artificial Sequence
  Description of Artificial Sequence: Synthetic peptide
  XENP018584 vlCDR2
YASHRYT

SEQ ID NO: 11826 - protein, 9 aa, Artificial Sequence
  Description of Artificial Sequence: Synthetic peptide
  XENP018584 vlCDR3
QQDYSSPRT

SEQ ID NO: 11827 - protein, 249 aa, Artificial Sequence
  Description of Artificial Sequence: Synthetic polypeptide
  XENP018585 1G6_H1.89_L1_scFv(GKPGS)4
EVQLVESGGGLVKPGGSLRLSCAASGFTFSNYWMNWVRQAPGKGLEWVGEIRLGSNNYATHYAEPVKGRFTISRDDSKSTVYLQMNSLKTEDTAVYYCTRYYGNYGGYFDVWGAGTLVTVSSGKPGSGKPGSGKPGSGKPGSSIVMTQSPATLSVSPGERATLSCRASQSVSNDVAWYQQKPGQSPRLLINYASHRYTGVPDRFTGSGYGTEFTLTISSLQSEDFAVYFCQQDYSSPRTFGGGTKVEIK

SEQ ID NO: 11828 - protein, 122 aa, Artificial Sequence
  Description of Artificial Sequence: Synthetic polypeptide
  VH of XENP018585
EVQLVESGGGLVKPGGSLRLSCAASGFTFSNYWMNWVRQAPGKGLEWVGEIRLGSNNYATHYAEPVKGRFTISRDDSKSTVYLQMNSLKTEDTAVYYCTRYYGNYGGYFDVWGAGTLVTVSS

SEQ ID NO: 11829 - protein, 107 aa, Artificial Sequence; identical to SEQ ID NO: 10923
  Description of Artificial Sequence: Synthetic polypeptide
  VL of XENP018585

SEQ ID NO: 11830 - protein, 5 aa, Artificial Sequence
  Description of Artificial Sequence: Synthetic peptide
  XENP018585 vhCDR1
NYWMN

SEQ ID NO: 11831 - protein, 19 aa, Artificial Sequence
  Description of Artificial Sequence: Synthetic peptide
  XENP018585 vhCDR2
EIRLGSNNYATHYAEPVKG

SEQ ID NO: 11832 - protein, 11 aa, Artificial Sequence
  Description of Artificial Sequence: Synthetic peptide
  XENP018585 vhCDR3
YYGNYGGYFDV

SEQ ID NO: 11833 - protein, 11 aa, Artificial Sequence
  Description of Artificial Sequence: Synthetic peptide
  XENP018585 vlCDR1
RASQSVSNDVA

SEQ ID NO: 11834 - protein, 7 aa, Artificial Sequence
  Description of Artificial Sequence: Synthetic peptide
  XENP018585 vlCDR2
YASHRYT

SEQ ID NO: 11835 - protein, 9 aa, Artificial Sequence
  Description of Artificial Sequence: Synthetic peptide
  XENP018585 vlCDR3
QQDYSSPRT

SEQ ID NO: 11836 - protein, 249 aa, Artificial Sequence
  Description of Artificial Sequence: Synthetic polypeptide
  XENP018586 1G6_H1.90_L1_scFv(GKPGS)4
EVQLVESGGGLVKPGGSLRLSCAASGFTFSNYWMNWVRQAPGKGLEWVGEIRLYSNNYATHYAEPVKGRFTISRDDSKSTVYLQMNSLKTEDTAVYYCTRYYGNYGGYFDVWGAGTLVTVSSGKPGSGKPGSGKPGSGKPGSSIVMTQSPATLSVSPGERATLSCRASQSVSNDVAWYQQKPGQSPRLLINYASHRYTGVPDRFTGSGYGTEFTLTISSLQSEDFAVYFCQQDYSSPRTFGGGTKVEIK

SEQ ID NO: 11837 - protein, 122 aa, Artificial Sequence
  Description of Artificial Sequence: Synthetic polypeptide
  VH of XENP018586
EVQLVESGGGLVKPGGSLRLSCAASGFTFSNYWMNWVRQAPGKGLEWVGEIRLYSNNYATHYAEPVKGRFTISRDDSKSTVYLQMNSLKTEDTAVYYCTRYYGNYGGYFDVWGAGTLVTVSS

SEQ ID NO: 11838 - protein, 107 aa, Artificial Sequence; identical to SEQ ID NO: 10923
  Description of Artificial Sequence: Synthetic polypeptide
  VL of XENP018586

SEQ ID NO: 11839 - protein, 5 aa, Artificial Sequence
  Description of Artificial Sequence: Synthetic peptide
  XENP018586 vhCDR1
NYWMN

SEQ ID NO: 11840 - protein, 19 aa, Artificial Sequence
  Description of Artificial Sequence: Synthetic peptide
  XENP018586 vhCDR2
EIRLYSNNYATHYAEPVKG

SEQ ID NO: 11841 - protein, 11 aa, Artificial Sequence
  Description of Artificial Sequence: Synthetic peptide
  XENP018586 vhCDR3
YYGNYGGYFDV

SEQ ID NO: 11842 - protein, 11 aa, Artificial Sequence
  Description of Artificial Sequence: Synthetic peptide
  XENP018586 vlCDR1
RASQSVSNDVA

SEQ ID NO: 11843 - protein, 7 aa, Artificial Sequence
  Description of Artificial Sequence: Synthetic peptide
  XENP018586 vlCDR2
YASHRYT

SEQ ID NO: 11844 - protein, 9 aa, Artificial Sequence
  Description of Artificial Sequence: Synthetic peptide
  XENP018586 vlCDR3
QQDYSSPRT

SEQ ID NO: 11845 - protein, 249 aa, Artificial Sequence
  Description of Artificial Sequence: Synthetic polypeptide
  XENP018587 1G6_H1.91_L1_scFv(GKPGS)4
EVQLVESGGGLVKPGGSLRLSCAASGFTFSNYWMNWVRQAPGKGLEWVGEIRLISNNYATHYAEPVKGRFTISRDDSKSTVYLQMNSLKTEDTAVYYCTRYYGNYGGYFDVWGAGTLVTVSSGKPGSGKPGSGKPGSGKPGSSIVMTQSPATLSVSPGERATLSCRASQSVSNDVAWYQQKPGQSPRLLINYASHRYTGVPDRFTGSGYGTEFTLTISSLQSEDFAVYFCQQDYSSPRTFGGGTKVEIK

SEQ ID NO: 11846 - protein, 122 aa, Artificial Sequence
  Description of Artificial Sequence: Synthetic polypeptide
  VH of XENP018587
EVQLVESGGGLVKPGGSLRLSCAASGFTFSNYWMNWVRQAPGKGLEWVGEIRLISNNYATHYAEPVKGRFTISRDDSKSTVYLQMNSLKTEDTAVYYCTRYYGNYGGYFDVWGAGTLVTVSS

SEQ ID NO: 11847 - protein, 107 aa, Artificial Sequence; identical to SEQ ID NO: 10923
  Description of Artificial Sequence: Synthetic polypeptide
  VL of XENP018587

SEQ ID NO: 11848 - protein, 5 aa, Artificial Sequence
  Description of Artificial Sequence: Synthetic peptide
  XENP018587 vhCDR1
NYWMN

SEQ ID NO: 11849 - protein, 19 aa, Artificial Sequence
  Description of Artificial Sequence: Synthetic peptide
  XENP018587 vhCDR2
EIRLISNNYATHYAEPVKG

SEQ ID NO: 11850 - protein, 11 aa, Artificial Sequence
  Description of Artificial Sequence: Synthetic peptide
  XENP018587 vhCDR3
YYGNYGGYFDV

SEQ ID NO: 11851 - protein, 11 aa, Artificial Sequence
  Description of Artificial Sequence: Synthetic peptide
  XENP018587 vlCDR1
RASQSVSNDVA

SEQ ID NO: 11852 - protein, 7 aa, Artificial Sequence
  Description of Artificial Sequence: Synthetic peptide
  XENP018587 vlCDR2
YASHRYT

SEQ ID NO: 11853 - protein, 9 aa, Artificial Sequence
  Description of Artificial Sequence: Synthetic peptide
  XENP018587 vlCDR3
QQDYSSPRT

SEQ ID NO: 11854 - protein, 249 aa, Artificial Sequence
  Description of Artificial Sequence: Synthetic polypeptide
  XENP018588 1G6_H1.92_L1_scFv(GKPGS)4
EVQLVESGGGLVKPGGSLRLSCAASGFTFSNYWMNWVRQAPGKGLEWVGEIRLKTNNYATHYAEPVKGRFTISRDDSKSTVYLQMNSLKTEDTAVYYCTRYYGNYGGYFDVWGAGTLVTVSSGKPGSGKPGSGKPGSGKPGSSIVMTQSPATLSVSPGERATLSCRASQSVSNDVAWYQQKPGQSPRLLINYASHRYTGVPDRFTGSGYGTEFTLTISSLQSEDFAVYFCQQDYSSPRTFGGGTKVEIK

SEQ ID NO: 11855 - protein, 122 aa, Artificial Sequence
  Description of Artificial Sequence: Synthetic polypeptide
  VH of XENP018588
EVQLVESGGGLVKPGGSLRLSCAASGFTFSNYWMNWVRQAPGKGLEWVGEIRLKTNNYATHYAEPVKGRFTISRDDSKSTVYLQMNSLKTEDTAVYYCTRYYGNYGGYFDVWGAGTLVTVSS

SEQ ID NO: 11856 - protein, 107 aa, Artificial Sequence; identical to SEQ ID NO: 10923
  Description of Artificial Sequence: Synthetic polypeptide
  VL of XENP018588

SEQ ID NO: 11857 - protein, 5 aa, Artificial Sequence
  Description of Artificial Sequence: Synthetic peptide
  XENP018588 vhCDR1
NYWMN

SEQ ID NO: 11858 - protein, 19 aa, Artificial Sequence
  Description of Artificial Sequence: Synthetic peptide
  XENP018588 vhCDR2
EIRLKTNNYATHYAEPVKG

SEQ ID NO: 11859 - protein, 11 aa, Artificial Sequence
  Description of Artificial Sequence: Synthetic peptide
  XENP018588 vhCDR3
YYGNYGGYFDV

SEQ ID NO: 11860 - protein, 11 aa, Artificial Sequence
  Description of Artificial Sequence: Synthetic peptide
  XENP018588 vlCDR1
RASQSVSNDVA

SEQ ID NO: 11861 - protein, 7 aa, Artificial Sequence
  Description of Artificial Sequence: Synthetic peptide
  XENP018588 vlCDR2
YASHRYT

SEQ ID NO: 11862 - protein, 9 aa, Artificial Sequence
  Description of Artificial Sequence: Synthetic peptide
  XENP018588 vlCDR3
QQDYSSPRT

SEQ ID NO: 11863 - protein, 249 aa, Artificial Sequence
  Description of Artificial Sequence: Synthetic polypeptide
  XENP018589 1G6_H1.93_L1_scFv(GKPGS)4
EVQLVESGGGLVKPGGSLRLSCAASGFTFSNYWMNWVRQAPGKGLEWVGEIRLKANNYATHYAEPVKGRFTISRDDSKSTVYLQMNSLKTEDTAVYYCTRYYGNYGGYFDVWGAGTLVTVSSGKPGSGKPGSGKPGSGKPGSSIVMTQSPATLSVSPGERATLSCRASQSVSNDVAWYQQKPGQSPRLLINYASHRYTGVPDRFTGSGYGTEFTLTISSLQSEDFAVYFCQQDYSSPRTFGGGTKVEIK

SEQ ID NO: 11864 - protein, 122 aa, Artificial Sequence
  Description of Artificial Sequence: Synthetic polypeptide
  VH of XENP018589
EVQLVESGGGLVKPGGSLRLSCAASGFTFSNYWMNWVRQAPGKGLEWVGEIRLKANNYATHYAEPVKGRFTISRDDSKSTVYLQMNSLKTEDTAVYYCTRYYGNYGGYFDVWGAGTLVTVSS

SEQ ID NO: 11865 - protein, 107 aa, Artificial Sequence; identical to SEQ ID NO: 10923
  Description of Artificial Sequence: Synthetic polypeptide
  VL of XENP018589

SEQ ID NO: 11866 - protein, 5 aa, Artificial Sequence
  Description of Artificial Sequence: Synthetic peptide
  XENP018589 vhCDR1
NYWMN

SEQ ID NO: 11867 - protein, 19 aa, Artificial Sequence
  Description of Artificial Sequence: Synthetic peptide
  XENP018589 vhCDR2
EIRLKANNYATHYAEPVKG

SEQ ID NO: 11868 - protein, 11 aa, Artificial Sequence
  Description of Artificial Sequence: Synthetic peptide
  XENP018589 vhCDR3
YYGNYGGYFDV

SEQ ID NO: 11869 - protein, 11 aa, Artificial Sequence
  Description of Artificial Sequence: Synthetic peptide
  XENP018589 vlCDR1
RASQSVSNDVA

SEQ ID NO: 11870 - protein, 7 aa, Artificial Sequence
  Description of Artificial Sequence: Synthetic peptide
  XENP018589 vlCDR2
YASHRYT

SEQ ID NO: 11871 - protein, 9 aa, Artificial Sequence
  Description of Artificial Sequence: Synthetic peptide
  XENP018589 vlCDR3
QQDYSSPRT

SEQ ID NO: 11872 - protein, 249 aa, Artificial Sequence
  Description of Artificial Sequence: Synthetic polypeptide
  XENP018590 1G6_H1.94_L1_scFv(GKPGS)4
EVQLVESGGGLVKPGGSLRLSCAASGFTFSNYWMNWVRQAPGKGLEWVGEIRLKQNNYATHYAEPVKGRFTISRDDSKSTVYLQMNSLKTEDTAVYYCTRYYGNYGGYFDVWGAGTLVTVSSGKPGSGKPGSGKPGSGKPGSSIVMTQSPATLSVSPGERATLSCRASQSVSNDVAWYQQKPGQSPRLLINYASHRYTGVPDRFTGSGYGTEFTLTISSLQSEDFAVYFCQQDYSSPRTFGGGTKVEIK

SEQ ID NO: 11873 - protein, 122 aa, Artificial Sequence
  Description of Artificial Sequence: Synthetic polypeptide
  VH of XENP018590
EVQLVESGGGLVKPGGSLRLSCAASGFTFSNYWMNWVRQAPGKGLEWVGEIRLKQNNYATHYAEPVKGRFTISRDDSKSTVYLQMNSLKTEDTAVYYCTRYYGNYGGYFDVWGAGTLVTVSS

SEQ ID NO: 11874 - protein, 107 aa, Artificial Sequence; identical to SEQ ID NO: 10923
  Description of Artificial Sequence: Synthetic polypeptide
  VL of XENP018590

SEQ ID NO: 11875 - protein, 5 aa, Artificial Sequence
  Description of Artificial Sequence: Synthetic peptide
  XENP018590 vhCDR1
NYWMN

SEQ ID NO: 11876 - protein, 19 aa, Artificial Sequence
  Description of Artificial Sequence: Synthetic peptide
  XENP018590 vhCDR2
EIRLKQNNYATHYAEPVKG

SEQ ID NO: 11877 - protein, 11 aa, Artificial Sequence
  Description of Artificial Sequence: Synthetic peptide
  XENP018590 vhCDR3
YYGNYGGYFDV

SEQ ID NO: 11878 - protein, 11 aa, Artificial Sequence
  Description of Artificial Sequence: Synthetic peptide
  XENP018590 vlCDR1
RASQSVSNDVA

SEQ ID NO: 11879 - protein, 7 aa, Artificial Sequence
  Description of Artificial Sequence: Synthetic peptide
  XENP018590 vlCDR2
YASHRYT

SEQ ID NO: 11880 - protein, 9 aa, Artificial Sequence
  Description of Artificial Sequence: Synthetic peptide
  XENP018590 vlCDR3
QQDYSSPRT

SEQ ID NO: 11881 - protein, 249 aa, Artificial Sequence
  Description of Artificial Sequence: Synthetic polypeptide
  XENP018591 1G6_H1.95_L1_scFv(GKPGS)4
EVQLVESGGGLVKPGGSLRLSCAASGFTFSNYWMNWVRQAPGKGLEWVGEIRLKGNNYATHYAEPVKGRFTISRDDSKSTVYLQMNSLKTEDTAVYYCTRYYGNYGGYFDVWGAGTLVTVSSGKPGSGKPGSGKPGSGKPGSSIVMTQSPATLSVSPGERATLSCRASQSVSNDVAWYQQKPGQSPRLLINYASHRYTGVPDRFTGSGYGTEFTLTISSLQSEDFAVYFCQQDYSSPRTFGGGTKVEIK

SEQ ID NO: 11882 - protein, 122 aa, Artificial Sequence
  Description of Artificial Sequence: Synthetic polypeptide
  VH of XENP018591
EVQLVESGGGLVKPGGSLRLSCAASGFTFSNYWMNWVRQAPGKGLEWVGEIRLKGNNYATHYAEPVKGRFTISRDDSKSTVYLQMNSLKTEDTAVYYCTRYYGNYGGYFDVWGAGTLVTVSS

SEQ ID NO: 11883 - protein, 107 aa, Artificial Sequence; identical to SEQ ID NO: 10923
  Description of Artificial Sequence: Synthetic polypeptide
  VL of XENP018591

SEQ ID NO: 11884 - protein, 5 aa, Artificial Sequence
  Description of Artificial Sequence: Synthetic peptide
  XENP018591 vhCDR1
NYWMN

SEQ ID NO: 11885 - protein, 19 aa, Artificial Sequence
  Description of Artificial Sequence: Synthetic peptide
  XENP018591 vhCDR2
EIRLKGNNYATHYAEPVKG

SEQ ID NO: 11886 - protein, 11 aa, Artificial Sequence
  Description of Artificial Sequence: Synthetic peptide
  XENP018591 vhCDR3
YYGNYGGYFDV

SEQ ID NO: 11887 - protein, 11 aa, Artificial Sequence
  Description of Artificial Sequence: Synthetic peptide
  XENP018591 vlCDR1
RASQSVSNDVA

SEQ ID NO: 11888 - protein, 7 aa, Artificial Sequence
  Description of Artificial Sequence: Synthetic peptide
  XENP018591 vlCDR2
YASHRYT

SEQ ID NO: 11889 - protein, 9 aa, Artificial Sequence
  Description of Artificial Sequence: Synthetic peptide
  XENP018591 vlCDR3
QQDYSSPRT

SEQ ID NO: 11890 - protein, 249 aa, Artificial Sequence
  Description of Artificial Sequence: Synthetic polypeptide
  XENP018592 1G6_H1.96_L1_scFv(GKPGS)4
EVQLVESGGGLVKPGGSLRLSCAASGFTFSNYWMNWVRQAPGKGLEWVGEIRLKVNNYATHYAEPVKGRFTISRDDSKSTVYLQMNSLKTEDTAVYYCTRYYGNYGGYFDVWGAGTLVTVSSGKPGSGKPGSGKPGSGKPGSSIVMTQSPATLSVSPGERATLSCRASQSVSNDVAWYQQKPGQSPRLLINYASHRYTGVPDRFTGSGYGTEFTLTISSLQSEDFAVYFCQQDYSSPRTFGGGTKVEIK

SEQ ID NO: 11891 - protein, 122 aa, Artificial Sequence
  Description of Artificial Sequence: Synthetic polypeptide
  VH of XENP018592
EVQLVESGGGLVKPGGSLRLSCAASGFTFSNYWMNWVRQAPGKGLEWVGEIRLKVNNYATHYAEPVKGRFTISRDDSKSTVYLQMNSLKTEDTAVYYCTRYYGNYGGYFDVWGAGTLVTVSS

SEQ ID NO: 11892 - protein, 107 aa, Artificial Sequence; identical to SEQ ID NO: 10923
  Description of Artificial Sequence: Synthetic polypeptide
  VL of XENP018592

SEQ ID NO: 11893 - protein, 5 aa, Artificial Sequence
  Description of Artificial Sequence: Synthetic peptide
  XENP018592 vhCDR1
NYWMN

SEQ ID NO: 11894 - protein, 19 aa, Artificial Sequence
  Description of Artificial Sequence: Synthetic peptide
  XENP018592 vhCDR2
EIRLKVNNYATHYAEPVKG

SEQ ID NO: 11895 - protein, 11 aa, Artificial Sequence
  Description of Artificial Sequence: Synthetic peptide
  XENP018592 vhCDR3
YYGNYGGYFDV

SEQ ID NO: 11896 - protein, 11 aa, Artificial Sequence
  Description of Artificial Sequence: Synthetic peptide
  XENP018592 vlCDR1
RASQSVSNDVA

SEQ ID NO: 11897 - protein, 7 aa, Artificial Sequence
  Description of Artificial Sequence: Synthetic peptide
  XENP018592 vlCDR2
YASHRYT

SEQ ID NO: 11898 - protein, 9 aa, Artificial Sequence
  Description of Artificial Sequence: Synthetic peptide
  XENP018592 vlCDR3
QQDYSSPRT

SEQ ID NO: 11899 - protein, 249 aa, Artificial Sequence
  Description of Artificial Sequence: Synthetic polypeptide
  XENP018593 1G6_H1.97_L1_scFv(GKPGS)4
EVQLVESGGGLVKPGGSLRLSCAASGFTFSNYWMNWVRQAPGKGLEWVGEIRLKHNNYATHYAEPVKGRFTISRDDSKSTVYLQMNSLKTEDTAVYYCTRYYGNYGGYFDVWGAGTLVTVSSGKPGSGKPGSGKPGSGKPGSSIVMTQSPATLSVSPGERATLSCRASQSVSNDVAWYQQKPGQSPRLLINYASHRYTGVPDRFTGSGYGTEFTLTISSLQSEDFAVYFCQQDYSSPRTFGGGTKVEIK

SEQ ID NO: 11900 - protein, 122 aa, Artificial Sequence
  Description of Artificial Sequence: Synthetic polypeptide
  VH of XENP018593
EVQLVESGGGLVKPGGSLRLSCAASGFTFSNYWMNWVRQAPGKGLEWVGEIRLKHNNYATHYAEPVKGRFTISRDDSKSTVYLQMNSLKTEDTAVYYCTRYYGNYGGYFDVWGAGTLVTVSS

SEQ ID NO: 11901 - protein, 107 aa, Artificial Sequence; identical to SEQ ID NO: 10923
  Description of Artificial Sequence: Synthetic polypeptide
  VL of XENP018593

SEQ ID NO: 11902 - protein, 5 aa, Artificial Sequence
  Description of Artificial Sequence: Synthetic peptide
  XENP018593 vhCDR1
NYWMN

SEQ ID NO: 11903 - protein, 19 aa, Artificial Sequence
  Description of Artificial Sequence: Synthetic peptide
  XENP018593 vhCDR2
EIRLKHNNYATHYAEPVKG

SEQ ID NO: 11904 - protein, 11 aa, Artificial Sequence
  Description of Artificial Sequence: Synthetic peptide
  XENP018593 vhCDR3
YYGNYGGYFDV

SEQ ID NO: 11905 - protein, 11 aa, Artificial Sequence
  Description of Artificial Sequence: Synthetic peptide
  XENP018593 vlCDR1
RASQSVSNDVA

SEQ ID NO: 11906 - protein, 7 aa, Artificial Sequence
  Description of Artificial Sequence: Synthetic peptide
  XENP018593 vlCDR2
YASHRYT

SEQ ID NO: 11907 - protein, 9 aa, Artificial Sequence
  Description of Artificial Sequence: Synthetic peptide
  XENP018593 vlCDR3
QQDYSSPRT

SEQ ID NO: 11908 - protein, 249 aa, Artificial Sequence
  Description of Artificial Sequence: Synthetic polypeptide
  XENP018594 1G6_H1.98_L1_scFv(GKPGS)4
EVQLVESGGGLVKPGGSLRLSCAASGFTFSNYWMNWVRQAPGKGLEWVGEIRLKDNNYATHYAEPVKGRFTISRDDSKSTVYLQMNSLKTEDTAVYYCTRYYGNYGGYFDVWGAGTLVTVSSGKPGSGKPGSGKPGSGKPGSSIVMTQSPATLSVSPGERATLSCRASQSVSNDVAWYQQKPGQSPRLLINYASHRYTGVPDRFTGSGYGTEFTLTISSLQSEDFAVYFCQQDYSSPRTFGGGTKVEIK

SEQ ID NO: 11909 - protein, 122 aa, Artificial Sequence
  Description of Artificial Sequence: Synthetic polypeptide
  VH of XENP018594
EVQLVESGGGLVKPGGSLRLSCAASGFTFSNYWMNWVRQAPGKGLEWVGEIRLKDNNYATHYAEPVKGRFTISRDDSKSTVYLQMNSLKTEDTAVYYCTRYYGNYGGYFDVWGAGTLVTVSS

SEQ ID NO: 11910 - protein, 107 aa, Artificial Sequence; identical to SEQ ID NO: 10923
  Description of Artificial Sequence: Synthetic polypeptide
  VL of XENP018594

SEQ ID NO: 11911 - protein, 5 aa, Artificial Sequence
  Description of Artificial Sequence: Synthetic peptide
  XENP018594 vhCDR1
NYWMN

SEQ ID NO: 11912 - protein, 19 aa, Artificial Sequence
  Description of Artificial Sequence: Synthetic peptide
  XENP018594 vhCDR2
EIRLKDNNYATHYAEPVKG

SEQ ID NO: 11913 - protein, 11 aa, Artificial Sequence
  Description of Artificial Sequence: Synthetic peptide
  XENP018594 vhCDR3
YYGNYGGYFDV

SEQ ID NO: 11914 - protein, 11 aa, Artificial Sequence
  Description of Artificial Sequence: Synthetic peptide
  XENP018594 vlCDR1
RASQSVSNDVA

SEQ ID NO: 11915 - protein, 7 aa, Artificial Sequence
  Description of Artificial Sequence: Synthetic peptide
  XENP018594 vlCDR2
YASHRYT

SEQ ID NO: 11916 - protein, 9 aa, Artificial Sequence
  Description of Artificial Sequence: Synthetic peptide
  XENP018594 vlCDR3
QQDYSSPRT

SEQ ID NO: 11917 - protein, 249 aa, Artificial Sequence
  Description of Artificial Sequence: Synthetic polypeptide
  XENP018595 1G6_H1.99_L1_scFv(GKPGS)4
EVQLVESGGGLVKPGGSLRLSCAASGFTFSNYWMNWVRQAPGKGLEWVGEIRLKKNNYATHYAEPVKGRFTISRDDSKSTVYLQMNSLKTEDTAVYYCTRYYGNYGGYFDVWGAGTLVTVSSGKPGSGKPGSGKPGSGKPGSSIVMTQSPATLSVSPGERATLSCRASQSVSNDVAWYQQKPGQSPRLLINYASHRYTGVPDRFTGSGYGTEFTLTISSLQSEDFAVYFCQQDYSSPRTFGGGTKVEIK

SEQ ID NO: 11918 - protein, 122 aa, Artificial Sequence
  Description of Artificial Sequence: Synthetic polypeptide
  VH of XENP018595
EVQLVESGGGLVKPGGSLRLSCAASGFTFSNYWMNWVRQAPGKGLEWVGEIRLKKNNYATHYAEPVKGRFTISRDDSKSTVYLQMNSLKTEDTAVYYCTRYYGNYGGYFDVWGAGTLVTVSS

SEQ ID NO: 11919 - protein, 107 aa, Artificial Sequence; identical to SEQ ID NO: 10923
  Description of Artificial Sequence: Synthetic polypeptide
  VL of XENP018595

SEQ ID NO: 11920 - protein, 5 aa, Artificial Sequence
  Description of Artificial Sequence: Synthetic peptide
  XENP018595 vhCDR1
NYWMN

SEQ ID NO: 11921 - protein, 19 aa, Artificial Sequence
  Description of Artificial Sequence: Synthetic peptide
  XENP018595 vhCDR2
EIRLKKNNYATHYAEPVKG

SEQ ID NO: 11922 - protein, 11 aa, Artificial Sequence
  Description of Artificial Sequence: Synthetic peptide
  XENP018595 vhCDR3
YYGNYGGYFDV

SEQ ID NO: 11923 - protein, 11 aa, Artificial Sequence
  Description of Artificial Sequence: Synthetic peptide
  XENP018595 vlCDR1
RASQSVSNDVA

SEQ ID NO: 11924 - protein, 7 aa, Artificial Sequence
  Description of Artificial Sequence: Synthetic peptide
  XENP018595 vlCDR2
YASHRYT

SEQ ID NO: 11925 - protein, 9 aa, Artificial Sequence
  Description of Artificial Sequence: Synthetic peptide
  XENP018595 vlCDR3
QQDYSSPRT

SEQ ID NO: 11926 - protein, 249 aa, Artificial Sequence
  Description of Artificial Sequence: Synthetic polypeptide
  XENP018596 1G6_H1.100_L1_scFv(GKPGS)4
EVQLVESGGGLVKPGGSLRLSCAASGFTFSNYWMNWVRQAPGKGLEWVGEIRLKYNNYATHYAEPVKGRFTISRDDSKSTVYLQMNSLKTEDTAVYYCTRYYGNYGGYFDVWGAGTLVTVSSGKPGSGKPGSGKPGSGKPGSSIVMTQSPATLSVSPGERATLSCRASQSVSNDVAWYQQKPGQSPRLLINYASHRYTGVPDRFTGSGYGTEFTLTISSLQSEDFAVYFCQQDYSSPRTFGGGTKVEIK

SEQ ID NO: 11927 - protein, 122 aa, Artificial Sequence
  Description of Artificial Sequence: Synthetic polypeptide
  VH of XENP018596
EVQLVESGGGLVKPGGSLRLSCAASGFTFSNYWMNWVRQAPGKGLEWVGEIRLKYNNYATHYAEPVKGRFTISRDDSKSTVYLQMNSLKTEDTAVYYCTRYYGNYGGYFDVWGAGTLVTVSS

SEQ ID NO: 11928 - protein, 107 aa, Artificial Sequence; identical to SEQ ID NO: 10923
  Description of Artificial Sequence: Synthetic polypeptide
  VL of XENP018596

SEQ ID NO: 11929 - protein, 5 aa, Artificial Sequence
  Description of Artificial Sequence: Synthetic peptide
  XENP018596 vhCDR1
NYWMN

SEQ ID NO: 11930 - protein, 19 aa, Artificial Sequence
  Description of Artificial Sequence: Synthetic peptide
  XENP018596 vhCDR2
EIRLKYNNYATHYAEPVKG

SEQ ID NO: 11931 - protein, 11 aa, Artificial Sequence
  Description of Artificial Sequence: Synthetic peptide
  XENP018596 vhCDR3
YYGNYGGYFDV

SEQ ID NO: 11932 - protein, 11 aa, Artificial Sequence
  Description of Artificial Sequence: Synthetic peptide
  XENP018596 vlCDR1
RASQSVSNDVA

SEQ ID NO: 11933 - protein, 7 aa, Artificial Sequence
  Description of Artificial Sequence: Synthetic peptide
  XENP018596 vlCDR2
YASHRYT

SEQ ID NO: 11934 - protein, 9 aa, Artificial Sequence
  Description of Artificial Sequence: Synthetic peptide
  XENP018596 vlCDR3
QQDYSSPRT

SEQ ID NO: 11935 - protein, 249 aa, Artificial Sequence
  Description of Artificial Sequence: Synthetic polypeptide
  XENP018601 1G6_H1.101_L1_scFv(GKPGS)4
EVQLVESGGGLVKPGGSLRLSCAASGFTFSNYWMNWVRQAPGKGLEWVGEIRLKSDNYATHYAEPVKGRFTISRDDSKSTVYLQMNSLKTEDTAVYYCTRYYGNYGGYFDVWGAGTLVTVSSGKPGSGKPGSGKPGSGKPGSSIVMTQSPATLSVSPGERATLSCRASQSVSNDVAWYQQKPGQSPRLLINYASHRYTGVPDRFTGSGYGTEFTLTISSLQSEDFAVYFCQQDYSSPRTFGGGTKVEIK

SEQ ID NO: 11936 - protein, 122 aa, Artificial Sequence
  Description of Artificial Sequence: Synthetic polypeptide
  VH of XENP018601
EVQLVESGGGLVKPGGSLRLSCAASGFTFSNYWMNWVRQAPGKGLEWVGEIRLKSDNYATHYAEPVKGRFTISRDDSKSTVYLQMNSLKTEDTAVYYCTRYYGNYGGYFDVWGAGTLVTVSS

SEQ ID NO: 11937 - protein, 107 aa, Artificial Sequence; identical to SEQ ID NO: 10923
  Description of Artificial Sequence: Synthetic polypeptide
  VL of XENP018601

SEQ ID NO: 11938 - protein, 5 aa, Artificial Sequence
  Description of Artificial Sequence: Synthetic peptide
  XENP018601 vhCDR1
NYWMN

SEQ ID NO: 11939 - protein, 19 aa, Artificial Sequence
  Description of Artificial Sequence: Synthetic peptide
  XENP018601 vhCDR2
EIRLKSDNYATHYAEPVKG

SEQ ID NO: 11940 - protein, 11 aa, Artificial Sequence
  Description of Artificial Sequence: Synthetic peptide
  XENP018601 vhCDR3
YYGNYGGYFDV

SEQ ID NO: 11941 - protein, 11 aa, Artificial Sequence
  Description of Artificial Sequence: Synthetic peptide
  XENP018601 vlCDR1
RASQSVSNDVA

SEQ ID NO: 11942 - protein, 7 aa, Artificial Sequence
  Description of Artificial Sequence: Synthetic peptide
  XENP018601 vlCDR2
YASHRYT

SEQ ID NO: 11943 - protein, 9 aa, Artificial Sequence
  Description of Artificial Sequence: Synthetic peptide
  XENP018601 vlCDR3
QQDYSSPRT

SEQ ID NO: 11944 - protein, 249 aa, Artificial Sequence
  Description of Artificial Sequence: Synthetic polypeptide
  XENP018602 1G6_H1.102_L1_scFv(GKPGS)4
EVQLVESGGGLVKPGGSLRLSCAASGFTFSNYWMNWVRQAPGKGLEWVGEIRLKSHNYATHYAEPVKGRFTISRDDSKSTVYLQMNSLKTEDTAVYYCTRYYGNYGGYFDVWGAGTLVTVSSGKPGSGKPGSGKPGSGKPGSSIVMTQSPATLSVSPGERATLSCRASQSVSNDVAWYQQKPGQSPRLLINYASHRYTGVPDRFTGSGYGTEFTLTISSLQSEDFAVYFCQQDYSSPRTFGGGTKVEIK

SEQ ID NO: 11945 - protein, 122 aa, Artificial Sequence
  Description of Artificial Sequence: Synthetic polypeptide
  VH of XENP018602
EVQLVESGGGLVKPGGSLRLSCAASGFTFSNYWMNWVRQAPGKGLEWVGEIRLKSHNYATHYAEPVKGRFTISRDDSKSTVYLQMNSLKTEDTAVYYCTRYYGNYGGYFDVWGAGTLVTVSS

SEQ ID NO: 11946 - protein, 107 aa, Artificial Sequence; identical to SEQ ID NO: 10923
  Description of Artificial Sequence: Synthetic polypeptide
  VL of XENP018602

SEQ ID NO: 11947 - protein, 5 aa, Artificial Sequence
  Description of Artificial Sequence: Synthetic peptide
  XENP018602 vhCDR1
NYWMN

SEQ ID NO: 11948 - protein, 19 aa, Artificial Sequence
  Description of Artificial Sequence: Synthetic peptide
  XENP018602 vhCDR2
EIRLKSHNYATHYAEPVKG

SEQ ID NO: 11949 - protein, 11 aa, Artificial Sequence
  Description of Artificial Sequence: Synthetic peptide
  XENP018602 vhCDR3
YYGNYGGYFDV

SEQ ID NO: 11950 - protein, 11 aa, Artificial Sequence
  Description of Artificial Sequence: Synthetic peptide
  XENP018602 vlCDR1
RASQSVSNDVA

SEQ ID NO: 11951 - protein, 7 aa, Artificial Sequence
  Description of Artificial Sequence: Synthetic peptide
  XENP018602 vlCDR2
YASHRYT

SEQ ID NO: 11952 - protein, 9 aa, Artificial Sequence
  Description of Artificial Sequence: Synthetic peptide
  XENP018602 vlCDR3
QQDYSSPRT

SEQ ID NO: 11953 - protein, 249 aa, Artificial Sequence
  Description of Artificial Sequence: Synthetic polypeptide
  XENP018603 1G6_H1.103_L1_scFv(GKPGS)4
EVQLVESGGGLVKPGGSLRLSCAASGFTFSNYWMNWVRQAPGKGLEWVGEIRLKSENYATHYAEPVKGRFTISRDDSKSTVYLQMNSLKTEDTAVYYCTRYYGNYGGYFDVWGAGTLVTVSSGKPGSGKPGSGKPGSGKPGSSIVMTQSPATLSVSPGERATLSCRASQSVSNDVAWYQQKPGQSPRLLINYASHRYTGVPDRFTGSGYGTEFTLTISSLQSEDFAVYFCQQDYSSPRTFGGGTKVEIK

SEQ ID NO: 11954 - protein, 122 aa, Artificial Sequence
  Description of Artificial Sequence: Synthetic polypeptide
  VH of XENP018603
EVQLVESGGGLVKPGGSLRLSCAASGFTFSNYWMNWVRQAPGKGLEWVGEIRLKSENYATHYAEPVKGRFTISRDDSKSTVYLQMNSLKTEDTAVYYCTRYYGNYGGYFDVWGAGTLVTVSS

SEQ ID NO: 11955 - protein, 107 aa, Artificial Sequence; identical to SEQ ID NO: 10923
  Description of Artificial Sequence: Synthetic polypeptide
  VL of XENP018603

SEQ ID NO: 11956 - protein, 5 aa, Artificial Sequence
  Description of Artificial Sequence: Synthetic peptide
  XENP018603 vhCDR1
NYWMN

SEQ ID NO: 11957 - protein, 19 aa, Artificial Sequence
  Description of Artificial Sequence: Synthetic peptide
  XENP018603 vhCDR2
EIRLKSENYATHYAEPVKG

SEQ ID NO: 11958 - protein, 11 aa, Artificial Sequence
  Description of Artificial Sequence: Synthetic peptide
  XENP018603 vhCDR3
YYGNYGGYFDV

SEQ ID NO: 11959 - protein, 11 aa, Artificial Sequence
  Description of Artificial Sequence: Synthetic peptide
  XENP018603 vlCDR1
RASQSVSNDVA

SEQ ID NO: 11960 - protein, 7 aa, Artificial Sequence
  Description of Artificial Sequence: Synthetic peptide
  XENP018603 vlCDR2
YASHRYT

SEQ ID NO: 11961 - protein, 9 aa, Artificial Sequence
  Description of Artificial Sequence: Synthetic peptide
  XENP018603 vlCDR3
QQDYSSPRT

SEQ ID NO: 11962 - protein, 249 aa, Artificial Sequence
  Description of Artificial Sequence: Synthetic polypeptide
  XENP018604 1G6_H1.104_L1_scFv(GKPGS)4
EVQLVESGGGLVKPGGSLRLSCAASGFTFSNYWMNWVRQAPGKGLEWVGEIRLKSSNYATHYAEPVKGRFTISRDDSKSTVYLQMNSLKTEDTAVYYCTRYYGNYGGYFDVWGAGTLVTVSSGKPGSGKPGSGKPGSGKPGSSIVMTQSPATLSVSPGERATLSCRASQSVSNDVAWYQQKPGQSPRLLINYASHRYTGVPDRFTGSGYGTEFTLTISSLQSEDFAVYFCQQDYSSPRTFGGGTKVEIK

SEQ ID NO: 11963 - protein, 122 aa, Artificial Sequence
  Description of Artificial Sequence: Synthetic polypeptide
  VH of XENP018604
EVQLVESGGGLVKPGGSLRLSCAASGFTFSNYWMNWVRQAPGKGLEWVGEIRLKSSNYATHYAEPVKGRFTISRDDSKSTVYLQMNSLKTEDTAVYYCTRYYGNYGGYFDVWGAGTLVTVSS

SEQ ID NO: 11964 - protein, 107 aa, Artificial Sequence; identical to SEQ ID NO: 10923
  Description of Artificial Sequence: Synthetic polypeptide
  VL of XENP018604

SEQ ID NO: 11965 - protein, 5 aa, Artificial Sequence
  Description of Artificial Sequence: Synthetic peptide
  XENP018604 vhCDR1
NYWMN

SEQ ID NO: 11966 - protein, 19 aa, Artificial Sequence
  Description of Artificial Sequence: Synthetic peptide
  XENP018604 vhCDR2
EIRLKSSNYATHYAEPVKG

SEQ ID NO: 11967 - protein, 11 aa, Artificial Sequence
  Description of Artificial Sequence: Synthetic peptide
  XENP018604 vhCDR3
YYGNYGGYFDV

SEQ ID NO: 11968 - protein, 11 aa, Artificial Sequence
  Description of Artificial Sequence: Synthetic peptide
  XENP018604 vlCDR1
RASQSVSNDVA

SEQ ID NO: 11969 - protein, 7 aa, Artificial Sequence
  Description of Artificial Sequence: Synthetic peptide
  XENP018604 vlCDR2
YASHRYT

SEQ ID NO: 11970 - protein, 9 aa, Artificial Sequence
  Description of Artificial Sequence: Synthetic peptide
  XENP018604 vlCDR3
QQDYSSPRT

SEQ ID NO: 11971 - protein, 249 aa, Artificial Sequence
  Description of Artificial Sequence: Synthetic polypeptide
  XENP018605 1G6_H1.105_L1_scFv(GKPGS)4
EVQLVESGGGLVKPGGSLRLSCAASGFTFSNYWMNWVRQAPGKGLEWVGEIRLKSRNYATHYAEPVKGRFTISRDDSKSTVYLQMNSLKTEDTAVYYCTRYYGNYGGYFDVWGAGTLVTVSSGKPGSGKPGSGKPGSGKPGSSIVMTQSPATLSVSPGERATLSCRASQSVSNDVAWYQQKPGQSPRLLINYASHRYTGVPDRFTGSGYGTEFTLTISSLQSEDFAVYFCQQDYSSPRTFGGGTKVEIK

SEQ ID NO: 11972 - protein, 122 aa, Artificial Sequence
  Description of Artificial Sequence: Synthetic polypeptide
  VH of XENP018605
EVQLVESGGGLVKPGGSLRLSCAASGFTFSNYWMNWVRQAPGKGLEWVGEIRLKSRNYATHYAEPVKGRFTISRDDSKSTVYLQMNSLKTEDTAVYYCTRYYGNYGGYFDVWGAGTLVTVSS

SEQ ID NO: 11973 - protein, 107 aa, Artificial Sequence; identical to SEQ ID NO: 10923
  Description of Artificial Sequence: Synthetic polypeptide
  VL of XENP018605

SEQ ID NO: 11974 - protein, 5 aa, Artificial Sequence
  Description of Artificial Sequence: Synthetic peptide
  XENP018605 vhCDR1
NYWMN

SEQ ID NO: 11975 - protein, 19 aa, Artificial Sequence
  Description of Artificial Sequence: Synthetic peptide
  XENP018605 vhCDR2
EIRLKSRNYATHYAEPVKG

SEQ ID NO: 11976 - protein, 11 aa, Artificial Sequence
  Description of Artificial Sequence: Synthetic peptide
  XENP018605 vhCDR3
YYGNYGGYFDV

SEQ ID NO: 11977 - protein, 11 aa, Artificial Sequence
  Description of Artificial Sequence: Synthetic peptide
  XENP018605 vlCDR1
RASQSVSNDVA

SEQ ID NO: 11978 - protein, 7 aa, Artificial Sequence
  Description of Artificial Sequence: Synthetic peptide
  XENP018605 vlCDR2
YASHRYT

SEQ ID NO: 11979 - protein, 9 aa, Artificial Sequence
  Description of Artificial Sequence: Synthetic peptide
  XENP018605 vlCDR3
QQDYSSPRT

SEQ ID NO: 11980 - protein, 249 aa, Artificial Sequence
  Description of Artificial Sequence: Synthetic polypeptide
  XENP018606 1G6_H1.106_L1_scFv(GKPGS)4
EVQLVESGGGLVKPGGSLRLSCAASGFTFSNYWMNWVRQAPGKGLEWVGEIRLKSLNYATHYAEPVKGRFTISRDDSKSTVYLQMNSLKTEDTAVYYCTRYYGNYGGYFDVWGAGTLVTVSSGKPGSGKPGSGKPGSGKPGSSIVMTQSPATLSVSPGERATLSCRASQSVSNDVAWYQQKPGQSPRLLINYASHRYTGVPDRFTGSGYGTEFTLTISSLQSEDFAVYFCQQDYSSPRTFGGGTKVEIK

SEQ ID NO: 11981 - protein, 122 aa, Artificial Sequence
  Description of Artificial Sequence: Synthetic polypeptide
  VH of XENP018606
EVQLVESGGGLVKPGGSLRLSCAASGFTFSNYWMNWVRQAPGKGLEWVGEIRLKSLNYATHYAEPVKGRFTISRDDSKSTVYLQMNSLKTEDTAVYYCTRYYGNYGGYFDVWGAGTLVTVSS

SEQ ID NO: 11982 - protein, 107 aa, Artificial Sequence; identical to SEQ ID NO: 10923
  Description of Artificial Sequence: Synthetic polypeptide
  VL of XENP018606

SEQ ID NO: 11983 - protein, 5 aa, Artificial Sequence
  Description of Artificial Sequence: Synthetic peptide
  XENP018606 vhCDR1
NYWMN

SEQ ID NO: 11984 - protein, 19 aa, Artificial Sequence
  Description of Artificial Sequence: Synthetic peptide
  XENP018606 vhCDR2
EIRLKSLNYATHYAEPVKG

SEQ ID NO: 11985 - protein, 11 aa, Artificial Sequence
  Description of Artificial Sequence: Synthetic peptide
  XENP018606 vhCDR3
YYGNYGGYFDV

SEQ ID NO: 11986 - protein, 11 aa, Artificial Sequence
  Description of Artificial Sequence: Synthetic peptide
  XENP018606 vlCDR1
RASQSVSNDVA

SEQ ID NO: 11987 - protein, 7 aa, Artificial Sequence
  Description of Artificial Sequence: Synthetic peptide
  XENP018606 vlCDR2
YASHRYT

SEQ ID NO: 11988 - protein, 9 aa, Artificial Sequence
  Description of Artificial Sequence: Synthetic peptide
  XENP018606 vlCDR3
QQDYSSPRT

SEQ ID NO: 11989 - protein, 249 aa, Artificial Sequence
  Description of Artificial Sequence: Synthetic polypeptide
  XENP018607 1G6_H1.107_L1_scFv(GKPGS)4
EVQLVESGGGLVKPGGSLRLSCAASGFTFSNYWMNWVRQAPGKGLEWVGEIRLKSTNYATHYAEPVKGRFTISRDDSKSTVYLQMNSLKTEDTAVYYCTRYYGNYGGYFDVWGAGTLVTVSSGKPGSGKPGSGKPGSGKPGSSIVMTQSPATLSVSPGERATLSCRASQSVSNDVAWYQQKPGQSPRLLINYASHRYTGVPDRFTGSGYGTEFTLTISSLQSEDFAVYFCQQDYSSPRTFGGGTKVEIK

SEQ ID NO: 11990 - protein, 122 aa, Artificial Sequence
  Description of Artificial Sequence: Synthetic polypeptide
  VH of XENP018607
EVQLVESGGGLVKPGGSLRLSCAASGFTFSNYWMNWVRQAPGKGLEWVGEIRLKSTNYATHYAEPVKGRFTISRDDSKSTVYLQMNSLKTEDTAVYYCTRYYGNYGGYFDVWGAGTLVTVSS

SEQ ID NO: 11991 - protein, 107 aa, Artificial Sequence; identical to SEQ ID NO: 10923
  Description of Artificial Sequence: Synthetic polypeptide
  VL of XENP018607

SEQ ID NO: 11992 - protein, 5 aa, Artificial Sequence
  Description of Artificial Sequence: Synthetic peptide
  XENP018607 vhCDR1
NYWMN

SEQ ID NO: 11993 - protein, 19 aa, Artificial Sequence
  Description of Artificial Sequence: Synthetic peptide
  XENP018607 vhCDR2
EIRLKSTNYATHYAEPVKG

SEQ ID NO: 11994 - protein, 11 aa, Artificial Sequence
  Description of Artificial Sequence: Synthetic peptide
  XENP018607 vhCDR3
YYGNYGGYFDV

SEQ ID NO: 11995 - protein, 11 aa, Artificial Sequence
  Description of Artificial Sequence: Synthetic peptide
  XENP018607 vlCDR1
RASQSVSNDVA

SEQ ID NO: 11996 - protein, 7 aa, Artificial Sequence
  Description of Artificial Sequence: Synthetic peptide
  XENP018607 vlCDR2
YASHRYT

SEQ ID NO: 11997 - protein, 9 aa, Artificial Sequence
  Description of Artificial Sequence: Synthetic peptide
  XENP018607 vlCDR3
QQDYSSPRT

SEQ ID NO: 11998 - protein, 249 aa, Artificial Sequence
  Description of Artificial Sequence: Synthetic polypeptide
  XENP018608 1G6_H1.108_L1_scFv(GKPGS)4
EVQLVESGGGLVKPGGSLRLSCAASGFTFSNYWMNWVRQAPGKGLEWVGEIRLKSGNYATHYAEPVKGRFTISRDDSKSTVYLQMNSLKTEDTAVYYCTRYYGNYGGYFDVWGAGTLVTVSSGKPGSGKPGSGKPGSGKPGSSIVMTQSPATLSVSPGERATLSCRASQSVSNDVAWYQQKPGQSPRLLINYASHRYTGVPDRFTGSGYGTEFTLTISSLQSEDFAVYFCQQDYSSPRTFGGGTKVEIK

SEQ ID NO: 11999 - protein, 122 aa, Artificial Sequence
  Description of Artificial Sequence: Synthetic polypeptide
  VH of XENP018608
EVQLVESGGGLVKPGGSLRLSCAASGFTFSNYWMNWVRQAPGKGLEWVGEIRLKSGNYATHYAEPVKGRFTISRDDSKSTVYLQMNSLKTEDTAVYYCTRYYGNYGGYFDVWGAGTLVTVSS

SEQ ID NO: 12000 - protein, 107 aa, Artificial Sequence; identical to SEQ ID NO: 10923
  Description of Artificial Sequence: Synthetic polypeptide
  VL of XENP018608

SEQ ID NO: 12001 - protein, 5 aa, Artificial Sequence
  Description of Artificial Sequence: Synthetic peptide
  XENP018608 vhCDR1
NYWMN

SEQ ID NO: 12002 - protein, 19 aa, Artificial Sequence
  Description of Artificial Sequence: Synthetic peptide
  XENP018608 vhCDR2
EIRLKSGNYATHYAEPVKG

SEQ ID NO: 12003 - protein, 11 aa, Artificial Sequence
  Description of Artificial Sequence: Synthetic peptide
  XENP018608 vhCDR3
YYGNYGGYFDV

SEQ ID NO: 12004 - protein, 11 aa, Artificial Sequence
  Description of Artificial Sequence: Synthetic peptide
  XENP018608 vlCDR1
RASQSVSNDVA

SEQ ID NO: 12005 - protein, 7 aa, Artificial Sequence
  Description of Artificial Sequence: Synthetic peptide
  XENP018608 vlCDR2
YASHRYT

SEQ ID NO: 12006 - protein, 9 aa, Artificial Sequence
  Description of Artificial Sequence: Synthetic peptide
  XENP018608 vlCDR3
QQDYSSPRT

SEQ ID NO: 12007 - protein, 249 aa, Artificial Sequence
  Description of Artificial Sequence: Synthetic polypeptide
  XENP018609 1G6_H1.109_L1_scFv(GKPGS)4
EVQLVESGGGLVKPGGSLRLSCAASGFTFSNYWMNWVRQAPGKGLEWVGEIRLKSYNYATHYAEPVKGRFTISRDDSKSTVYLQMNSLKTEDTAVYYCTRYYGNYGGYFDVWGAGTLVTVSSGKPGSGKPGSGKPGSGKPGSSIVMTQSPATLSVSPGERATLSCRASQSVSNDVAWYQQKPGQSPRLLINYASHRYTGVPDRFTGSGYGTEFTLTISSLQSEDFAVYFCQQDYSSPRTFGGGTKVEIK

SEQ ID NO: 12008 - protein, 122 aa, Artificial Sequence
  Description of Artificial Sequence: Synthetic polypeptide
  VH of XENP018609
EVQLVESGGGLVKPGGSLRLSCAASGFTFSNYWMNWVRQAPGKGLEWVGEIRLKSYNYATHYAEPVKGRFTISRDDSKSTVYLQMNSLKTEDTAVYYCTRYYGNYGGYFDVWGAGTLVTVSS

SEQ ID NO: 12009 - protein, 107 aa, Artificial Sequence; identical to SEQ ID NO: 10923
  Description of Artificial Sequence: Synthetic polypeptide
  VL of XENP018609

SEQ ID NO: 12010 - protein, 5 aa, Artificial Sequence
  Description of Artificial Sequence: Synthetic peptide
  XENP018609 vhCDR1
NYWMN

SEQ ID NO: 12011 - protein, 19 aa, Artificial Sequence
  Description of Artificial Sequence: Synthetic peptide
  XENP018609 vhCDR2
EIRLKSYNYATHYAEPVKG

SEQ ID NO: 12012 - protein, 11 aa, Artificial Sequence
  Description of Artificial Sequence: Synthetic peptide
  XENP018609 vhCDR3
YYGNYGGYFDV

SEQ ID NO: 12013 - protein, 11 aa, Artificial Sequence
  Description of Artificial Sequence: Synthetic peptide
  XENP018609 vlCDR1
RASQSVSNDVA

SEQ ID NO: 12014 - protein, 7 aa, Artificial Sequence
  Description of Artificial Sequence: Synthetic peptide
  XENP018609 vlCDR2
YASHRYT

SEQ ID NO: 12015 - protein, 9 aa, Artificial Sequence
  Description of Artificial Sequence: Synthetic peptide
  XENP018609 vlCDR3
QQDYSSPRT

SEQ ID NO: 12016 - protein, 249 aa, Artificial Sequence
  Description of Artificial Sequence: Synthetic polypeptide
  XENP018610 1G6_H1.110_L1_scFv(GKPGS)4
EVQLVESGGGLVKPGGSLRLSCAASGFTFSNYWMNWVRQAPGKGLEWVGEIRLKSNDYATHYAEPVKGRFTISRDDSKSTVYLQMNSLKTEDTAVYYCTRYYGNYGGYFDVWGAGTLVTVSSGKPGSGKPGSGKPGSGKPGSSIVMTQSPATLSVSPGERATLSCRASQSVSNDVAWYQQKPGQSPRLLINYASHRYTGVPDRFTGSGYGTEFTLTISSLQSEDFAVYFCQQDYSSPRTFGGGTKVEIK

SEQ ID NO: 12017 - protein, 122 aa, Artificial Sequence
  Description of Artificial Sequence: Synthetic polypeptide
  VH of XENP018610
EVQLVESGGGLVKPGGSLRLSCAASGFTFSNYWMNWVRQAPGKGLEWVGEIRLKSNDYATHYAEPVKGRFTISRDDSKSTVYLQMNSLKTEDTAVYYCTRYYGNYGGYFDVWGAGTLVTVSS

SEQ ID NO: 12018 - protein, 107 aa, Artificial Sequence; identical to SEQ ID NO: 10923
  Description of Artificial Sequence: Synthetic polypeptide
  VL of XENP018610

SEQ ID NO: 12019 - protein, 5 aa, Artificial Sequence
  Description of Artificial Sequence: Synthetic peptide
  XENP018610 vhCDR1
NYWMN

SEQ ID NO: 12020 - protein, 19 aa, Artificial Sequence
  Description of Artificial Sequence: Synthetic peptide
  XENP018610 vhCDR2
EIRLKSNDYATHYAEPVKG

SEQ ID NO: 12021 - protein, 11 aa, Artificial Sequence
  Description of Artificial Sequence: Synthetic peptide
  XENP018610 vhCDR3
YYGNYGGYFDV

SEQ ID NO: 12022 - protein, 11 aa, Artificial Sequence
  Description of Artificial Sequence: Synthetic peptide
  XENP018610 vlCDR1
RASQSVSNDVA

SEQ ID NO: 12023 - protein, 7 aa, Artificial Sequence
  Description of Artificial Sequence: Synthetic peptide
  XENP018610 vlCDR2
YASHRYT

SEQ ID NO: 12024 - protein, 9 aa, Artificial Sequence
  Description of Artificial Sequence: Synthetic peptide
  XENP018610 vlCDR3
QQDYSSPRT

SEQ ID NO: 12025 - protein, 249 aa, Artificial Sequence
  Description of Artificial Sequence: Synthetic polypeptide
  XENP018611 1G6_H1.111_L1_scFv(GKPGS)4
EVQLVESGGGLVKPGGSLRLSCAASGFTFSNYWMNWVRQAPGKGLEWVGEIRLKSNHYATHYAEPVKGRFTISRDDSKSTVYLQMNSLKTEDTAVYYCTRYYGNYGGYFDVWGAGTLVTVSSGKPGSGKPGSGKPGSGKPGSSIVMTQSPATLSVSPGERATLSCRASQSVSNDVAWYQQKPGQSPRLLINYASHRYTGVPDRFTGSGYGTEFTLTISSLQSEDFAVYFCQQDYSSPRTFGGGTKVEIK

SEQ ID NO: 12026 - protein, 122 aa, Artificial Sequence
  Description of Artificial Sequence: Synthetic polypeptide
  VH of XENP018611
EVQLVESGGGLVKPGGSLRLSCAASGFTFSNYWMNWVRQAPGKGLEWVGEIRLKSNHYATHYAEPVKGRFTISRDDSKSTVYLQMNSLKTEDTAVYYCTRYYGNYGGYFDVWGAGTLVTVSS

SEQ ID NO: 12027 - protein, 107 aa, Artificial Sequence; identical to SEQ ID NO: 10923
  Description of Artificial Sequence: Synthetic polypeptide
  VL of XENP018611

SEQ ID NO: 12028 - protein, 5 aa, Artificial Sequence
  Description of Artificial Sequence: Synthetic peptide
  XENP018611 vhCDR1
NYWMN

SEQ ID NO: 12029 - protein, 19 aa, Artificial Sequence
  Description of Artificial Sequence: Synthetic peptide
  XENP018611 vhCDR2
EIRLKSNHYATHYAEPVKG

SEQ ID NO: 12030 - protein, 11 aa, Artificial Sequence
  Description of Artificial Sequence: Synthetic peptide
  XENP018611 vhCDR3
YYGNYGGYFDV

SEQ ID NO: 12031 - protein, 11 aa, Artificial Sequence
  Description of Artificial Sequence: Synthetic peptide
  XENP018611 vlCDR1
RASQSVSNDVA

SEQ ID NO: 12032 - protein, 7 aa, Artificial Sequence
  Description of Artificial Sequence: Synthetic peptide
  XENP018611 vlCDR2
YASHRYT

SEQ ID NO: 12033 - protein, 9 aa, Artificial Sequence
  Description of Artificial Sequence: Synthetic peptide
  XENP018611 vlCDR3
QQDYSSPRT

SEQ ID NO: 12034 - protein, 249 aa, Artificial Sequence
  Description of Artificial Sequence: Synthetic polypeptide
  XENP018612 1G6_H1.112_L1_scFv(GKPGS)4
EVQLVESGGGLVKPGGSLRLSCAASGFTFSNYWMNWVRQAPGKGLEWVGEIRLKSNEYATHYAEPVKGRFTISRDDSKSTVYLQMNSLKTEDTAVYYCTRYYGNYGGYFDVWGAGTLVTVSSGKPGSGKPGSGKPGSGKPGSSIVMTQSPATLSVSPGERATLSCRASQSVSNDVAWYQQKPGQSPRLLINYASHRYTGVPDRFTGSGYGTEFTLTISSLQSEDFAVYFCQQDYSSPRTFGGGTKVEIK

SEQ ID NO: 12035 - protein, 122 aa, Artificial Sequence
  Description of Artificial Sequence: Synthetic polypeptide
  VH of XENP018612
EVQLVESGGGLVKPGGSLRLSCAASGFTFSNYWMNWVRQAPGKGLEWVGEIRLKSNEYATHYAEPVKGRFTISRDDSKSTVYLQMNSLKTEDTAVYYCTRYYGNYGGYFDVWGAGTLVTVSS

SEQ ID NO: 12036 - protein, 107 aa, Artificial Sequence; identical to SEQ ID NO: 10923
  Description of Artificial Sequence: Synthetic polypeptide
  VL of XENP018612

SEQ ID NO: 12037 - protein, 5 aa, Artificial Sequence
  Description of Artificial Sequence: Synthetic peptide
  XENP018612 vhCDR1
NYWMN

SEQ ID NO: 12038 - protein, 19 aa, Artificial Sequence
  Description of Artificial Sequence: Synthetic peptide
  XENP018612 vhCDR2
EIRLKSNEYATHYAEPVKG

SEQ ID NO: 12039 - protein, 11 aa, Artificial Sequence
  Description of Artificial Sequence: Synthetic peptide
  XENP018612 vhCDR3
YYGNYGGYFDV

SEQ ID NO: 12040 - protein, 11 aa, Artificial Sequence
  Description of Artificial Sequence: Synthetic peptide
  XENP018612 vlCDR1
RASQSVSNDVA

SEQ ID NO: 12041 - protein, 7 aa, Artificial Sequence
  Description of Artificial Sequence: Synthetic peptide
  XENP018612 vlCDR2
YASHRYT

SEQ ID NO: 12042 - protein, 9 aa, Artificial Sequence
  Description of Artificial Sequence: Synthetic peptide
  XENP018612 vlCDR3
QQDYSSPRT

SEQ ID NO: 12043 - protein, 249 aa, Artificial Sequence
  Description of Artificial Sequence: Synthetic polypeptide
  XENP018613 1G6_H1.113_L1_scFv(GKPGS)4
EVQLVESGGGLVKPGGSLRLSCAASGFTFSNYWMNWVRQAPGKGLEWVGEIRLKSNSYATHYAEPVKGRFTISRDDSKSTVYLQMNSLKTEDTAVYYCTRYYGNYGGYFDVWGAGTLVTVSSGKPGSGKPGSGKPGSGKPGSSIVMTQSPATLSVSPGERATLSCRASQSVSNDVAWYQQKPGQSPRLLINYASHRYTGVPDRFTGSGYGTEFTLTISSLQSEDFAVYFCQQDYSSPRTFGGGTKVEIK

SEQ ID NO: 12044 - protein, 122 aa, Artificial Sequence
  Description of Artificial Sequence: Synthetic polypeptide
  VH of XENP018613
EVQLVESGGGLVKPGGSLRLSCAASGFTFSNYWMNWVRQAPGKGLEWVGEIRLKSNSYATHYAEPVKGRFTISRDDSKSTVYLQMNSLKTEDTAVYYCTRYYGNYGGYFDVWGAGTLVTVSS

SEQ ID NO: 12045 - protein, 107 aa, Artificial Sequence; identical to SEQ ID NO: 10923
  Description of Artificial Sequence: Synthetic polypeptide
  VL of XENP018613

SEQ ID NO: 12046 - protein, 5 aa, Artificial Sequence
  Description of Artificial Sequence: Synthetic peptide
  XENP018613 vhCDR1
NYWMN

SEQ ID NO: 12047 - protein, 19 aa, Artificial Sequence
  Description of Artificial Sequence: Synthetic peptide
  XENP018613 vhCDR2
EIRLKSNSYATHYAEPVKG

SEQ ID NO: 12048 - protein, 11 aa, Artificial Sequence
  Description of Artificial Sequence: Synthetic peptide
  XENP018613 vhCDR3
YYGNYGGYFDV

SEQ ID NO: 12049 - protein, 11 aa, Artificial Sequence
  Description of Artificial Sequence: Synthetic peptide
  XENP018613 vlCDR1
RASQSVSNDVA

SEQ ID NO: 12050 - protein, 7 aa, Artificial Sequence
  Description of Artificial Sequence: Synthetic peptide
  XENP018613 vlCDR2
YASHRYT

SEQ ID NO: 12051 - protein, 9 aa, Artificial Sequence
  Description of Artificial Sequence: Synthetic peptide
  XENP018613 vlCDR3
QQDYSSPRT

SEQ ID NO: 12052 - protein, 249 aa, Artificial Sequence
  Description of Artificial Sequence: Synthetic polypeptide
  XENP018614 1G6_H1.114_L1_scFv(GKPGS)4
EVQLVESGGGLVKPGGSLRLSCAASGFTFSNYWMNWVRQAPGKGLEWVGEIRLKSNRYATHYAEPVKGRFTISRDDSKSTVYLQMNSLKTEDTAVYYCTRYYGNYGGYFDVWGAGTLVTVSSGKPGSGKPGSGKPGSGKPGSSIVMTQSPATLSVSPGERATLSCRASQSVSNDVAWYQQKPGQSPRLLINYASHRYTGVPDRFTGSGYGTEFTLTISSLQSEDFAVYFCQQDYSSPRTFGGGTKVEIK

SEQ ID NO: 12053 - protein, 122 aa, Artificial Sequence
  Description of Artificial Sequence: Synthetic polypeptide
  VH of XENP018614
EVQLVESGGGLVKPGGSLRLSCAASGFTFSNYWMNWVRQAPGKGLEWVGEIRLKSNRYATHYAEPVKGRFTISRDDSKSTVYLQMNSLKTEDTAVYYCTRYYGNYGGYFDVWGAGTLVTVSS

SEQ ID NO: 12054 - protein, 107 aa, Artificial Sequence; identical to SEQ ID NO: 10923
  Description of Artificial Sequence: Synthetic polypeptide
  VL of XENP018614

SEQ ID NO: 12055 - protein, 5 aa, Artificial Sequence
  Description of Artificial Sequence: Synthetic peptide
  XENP018614 vhCDR1
NYWMN

SEQ ID NO: 12056 - protein, 19 aa, Artificial Sequence
  Description of Artificial Sequence: Synthetic peptide
  XENP018614 vhCDR2
EIRLKSNRYATHYAEPVKG

SEQ ID NO: 12057 - protein, 11 aa, Artificial Sequence
  Description of Artificial Sequence: Synthetic peptide
  XENP018614 vhCDR3
YYGNYGGYFDV

SEQ ID NO: 12058 - protein, 11 aa, Artificial Sequence
  Description of Artificial Sequence: Synthetic peptide
  XENP018614 vlCDR1
RASQSVSNDVA

SEQ ID NO: 12059 - protein, 7 aa, Artificial Sequence
  Description of Artificial Sequence: Synthetic peptide
  XENP018614 vlCDR2
YASHRYT

SEQ ID NO: 12060 - protein, 9 aa, Artificial Sequence
  Description of Artificial Sequence: Synthetic peptide
  XENP018614 vlCDR3
QQDYSSPRT

SEQ ID NO: 12061 - protein, 249 aa, Artificial Sequence
  Description of Artificial Sequence: Synthetic polypeptide
  XENP018615 1G6_H1.115_L1_scFv(GKPGS)4
EVQLVESGGGLVKPGGSLRLSCAASGFTFSNYWMNWVRQAPGKGLEWVGEIRLKSNLYATHYAEPVKGRFTISRDDSKSTVYLQMNSLKTEDTAVYYCTRYYGNYGGYFDVWGAGTLVTVSSGKPGSGKPGSGKPGSGKPGSSIVMTQSPATLSVSPGERATLSCRASQSVSNDVAWYQQKPGQSPRLLINYASHRYTGVPDRFTGSGYGTEFTLTISSLQSEDFAVYFCQQDYSSPRTFGGGTKVEIK

SEQ ID NO: 12062 - protein, 122 aa, Artificial Sequence
  Description of Artificial Sequence: Synthetic polypeptide
  VH of XENP018615
EVQLVESGGGLVKPGGSLRLSCAASGFTFSNYWMNWVRQAPGKGLEWVGEIRLKSNLYATHYAEPVKGRFTISRDDSKSTVYLQMNSLKTEDTAVYYCTRYYGNYGGYFDVWGAGTLVTVSS

SEQ ID NO: 12063 - protein, 107 aa, Artificial Sequence; identical to SEQ ID NO: 10923
  Description of Artificial Sequence: Synthetic polypeptide
  VL of XENP018615

SEQ ID NO: 12064 - protein, 5 aa, Artificial Sequence
  Description of Artificial Sequence: Synthetic peptide
  XENP018615 vhCDR1
NYWMN

SEQ ID NO: 12065 - protein, 19 aa, Artificial Sequence
  Description of Artificial Sequence: Synthetic peptide
  XENP018615 vhCDR2
EIRLKSNLYATHYAEPVKG

SEQ ID NO: 12066 - protein, 11 aa, Artificial Sequence
  Description of Artificial Sequence: Synthetic peptide
  XENP018615 vhCDR3
YYGNYGGYFDV

SEQ ID NO: 12067 - protein, 11 aa, Artificial Sequence
  Description of Artificial Sequence: Synthetic peptide
  XENP018615 vlCDR1
RASQSVSNDVA

SEQ ID NO: 12068 - protein, 7 aa, Artificial Sequence
  Description of Artificial Sequence: Synthetic peptide
  XENP018615 vlCDR2
YASHRYT

SEQ ID NO: 12069 - protein, 9 aa, Artificial Sequence
  Description of Artificial Sequence: Synthetic peptide
  XENP018615 vlCDR3
QQDYSSPRT

SEQ ID NO: 12070 - protein, 249 aa, Artificial Sequence
  Description of Artificial Sequence: Synthetic polypeptide
  XENP018616 1G6_H1.116_L1_scFv(GKPGS)4
EVQLVESGGGLVKPGGSLRLSCAASGFTFSNYWMNWVRQAPGKGLEWVGEIRLKSNTYATHYAEPVKGRFTISRDDSKSTVYLQMNSLKTEDTAVYYCTRYYGNYGGYFDVWGAGTLVTVSSGKPGSGKPGSGKPGSGKPGSSIVMTQSPATLSVSPGERATLSCRASQSVSNDVAWYQQKPGQSPRLLINYASHRYTGVPDRFTGSGYGTEFTLTISSLQSEDFAVYFCQQDYSSPRTFGGGTKVEIK

SEQ ID NO: 12071 - protein, 122 aa, Artificial Sequence
  Description of Artificial Sequence: Synthetic polypeptide
  VH of XENP018616
EVQLVESGGGLVKPGGSLRLSCAASGFTFSNYWMNWVRQAPGKGLEWVGEIRLKSNTYATHYAEPVKGRFTISRDDSKSTVYLQMNSLKTEDTAVYYCTRYYGNYGGYFDVWGAGTLVTVSS

SEQ ID NO: 12072 - protein, 107 aa, Artificial Sequence; identical to SEQ ID NO: 10923
  Description of Artificial Sequence: Synthetic polypeptide
  VL of XENP018616

SEQ ID NO: 12073 - protein, 5 aa, Artificial Sequence
  Description of Artificial Sequence: Synthetic peptide
  XENP018616 vhCDR1
NYWMN

SEQ ID NO: 12074 - protein, 19 aa, Artificial Sequence
  Description of Artificial Sequence: Synthetic peptide
  XENP018616 vhCDR2
EIRLKSNTYATHYAEPVKG

SEQ ID NO: 12075 - protein, 11 aa, Artificial Sequence
  Description of Artificial Sequence: Synthetic peptide
  XENP018616 vhCDR3
YYGNYGGYFDV

SEQ ID NO: 12076 - protein, 11 aa, Artificial Sequence
  Description of Artificial Sequence: Synthetic peptide
  XENP018616 vlCDR1
RASQSVSNDVA

SEQ ID NO: 12077 - protein, 7 aa, Artificial Sequence
  Description of Artificial Sequence: Synthetic peptide
  XENP018616 vlCDR2
YASHRYT

SEQ ID NO: 12078 - protein, 9 aa, Artificial Sequence
  Description of Artificial Sequence: Synthetic peptide
  XENP018616 vlCDR3
QQDYSSPRT

SEQ ID NO: 12079 - protein, 249 aa, Artificial Sequence
  Description of Artificial Sequence: Synthetic polypeptide
  XENP018617 1G6_H1.117_L1_scFv(GKPGS)4
EVQLVESGGGLVKPGGSLRLSCAASGFTFSNYWMNWVRQAPGKGLEWVGEIRLKSNGYATHYAEPVKGRFTISRDDSKSTVYLQMNSLKTEDTAVYYCTRYYGNYGGYFDVWGAGTLVTVSSGKPGSGKPGSGKPGSGKPGSSIVMTQSPATLSVSPGERATLSCRASQSVSNDVAWYQQKPGQSPRLLINYASHRYTGVPDRFTGSGYGTEFTLTISSLQSEDFAVYFCQQDYSSPRTFGGGTKVEIK

SEQ ID NO: 12080 - protein, 122 aa, Artificial Sequence
  Description of Artificial Sequence: Synthetic polypeptide
  VH of XENP018617
EVQLVESGGGLVKPGGSLRLSCAASGFTFSNYWMNWVRQAPGKGLEWVGEIRLKSNGYATHYAEPVKGRFTISRDDSKSTVYLQMNSLKTEDTAVYYCTRYYGNYGGYFDVWGAGTLVTVSS

SEQ ID NO: 12081 - protein, 107 aa, Artificial Sequence; identical to SEQ ID NO: 10923
  Description of Artificial Sequence: Synthetic polypeptide
  VL of XENP018617

SEQ ID NO: 12082 - protein, 5 aa, Artificial Sequence
  Description of Artificial Sequence: Synthetic peptide
  XENP018617 vhCDR1
NYWMN

SEQ ID NO: 12083 - protein, 19 aa, Artificial Sequence
  Description of Artificial Sequence: Synthetic peptide
  XENP018617 vhCDR2
EIRLKSNGYATHYAEPVKG

SEQ ID NO: 12084 - protein, 11 aa, Artificial Sequence
  Description of Artificial Sequence: Synthetic peptide
  XENP018617 vhCDR3
YYGNYGGYFDV

SEQ ID NO: 12085 - protein, 11 aa, Artificial Sequence
  Description of Artificial Sequence: Synthetic peptide
  XENP018617 vlCDR1
RASQSVSNDVA

SEQ ID NO: 12086 - protein, 7 aa, Artificial Sequence
  Description of Artificial Sequence: Synthetic peptide
  XENP018617 vlCDR2
YASHRYT

SEQ ID NO: 12087 - protein, 9 aa, Artificial Sequence
  Description of Artificial Sequence: Synthetic peptide
  XENP018617 vlCDR3
QQDYSSPRT

SEQ ID NO: 12088 - protein, 249 aa, Artificial Sequence
  Description of Artificial Sequence: Synthetic polypeptide
  XENP018618 1G6_H1.118_L1_scFv(GKPGS)4
EVQLVESGGGLVKPGGSLRLSCAASGFTFSNYWMNWVRQAPGKGLEWVGEIRLKSNYYATHYAEPVKGRFTISRDDSKSTVYLQMNSLKTEDTAVYYCTRYYGNYGGYFDVWGAGTLVTVSSGKPGSGKPGSGKPGSGKPGSSIVMTQSPATLSVSPGERATLSCRASQSVSNDVAWYQQKPGQSPRLLINYASHRYTGVPDRFTGSGYGTEFTLTISSLQSEDFAVYFCQQDYSSPRTFGGGTKVEIK

SEQ ID NO: 12089 - protein, 122 aa, Artificial Sequence
  Description of Artificial Sequence: Synthetic polypeptide
  VH of XENP018618
EVQLVESGGGLVKPGGSLRLSCAASGFTFSNYWMNWVRQAPGKGLEWVGEIRLKSNYYATHYAEPVKGRFTISRDDSKSTVYLQMNSLKTEDTAVYYCTRYYGNYGGYFDVWGAGTLVTVSS

SEQ ID NO: 12090 - protein, 107 aa, Artificial Sequence; identical to SEQ ID NO: 10923
  Description of Artificial Sequence: Synthetic polypeptide
  VL of XENP018618

SEQ ID NO: 12091 - protein, 5 aa, Artificial Sequence
  Description of Artificial Sequence: Synthetic peptide
  XENP018618 vhCDR1
NYWMN

SEQ ID NO: 12092 - protein, 19 aa, Artificial Sequence
  Description of Artificial Sequence: Synthetic peptide
  XENP018618 vhCDR2
EIRLKSNYYATHYAEPVKG

SEQ ID NO: 12093 - protein, 11 aa, Artificial Sequence
  Description of Artificial Sequence: Synthetic peptide
  XENP018618 vhCDR3
YYGNYGGYFDV

SEQ ID NO: 12094 - protein, 11 aa, Artificial Sequence
  Description of Artificial Sequence: Synthetic peptide
  XENP018618 vlCDR1
RASQSVSNDVA

SEQ ID NO: 12095 - protein, 7 aa, Artificial Sequence
  Description of Artificial Sequence: Synthetic peptide
  XENP018618 vlCDR2
YASHRYT

SEQ ID NO: 12096 - protein, 9 aa, Artificial Sequence
  Description of Artificial Sequence: Synthetic peptide
  XENP018618 vlCDR3
QQDYSSPRT

SEQ ID NO: 12097 - protein, 249 aa, Artificial Sequence
  Description of Artificial Sequence: Synthetic polypeptide
  XENP018619 1G6_H1.119_L1_scFv(GKPGS)4
EVQLVESGGGLVKPGGSLRLSCAASGFTFSNYWMNWVRQAPGKGLEWVGEIRLKSNNFATHYAEPVKGRFTISRDDSKSTVYLQMNSLKTEDTAVYYCTRYYGNYGGYFDVWGAGTLVTVSSGKPGSGKPGSGKPGSGKPGSSIVMTQSPATLSVSPGERATLSCRASQSVSNDVAWYQQKPGQSPRLLINYASHRYTGVPDRFTGSGYGTEFTLTISSLQSEDFAVYFCQQDYSSPRTFGGGTKVEIK

SEQ ID NO: 12098 - protein, 122 aa, Artificial Sequence
  Description of Artificial Sequence: Synthetic polypeptide
  VH of XENP018619
EVQLVESGGGLVKPGGSLRLSCAASGFTFSNYWMNWVRQAPGKGLEWVGEIRLKSNNFATHYAEPVKGRFTISRDDSKSTVYLQMNSLKTEDTAVYYCTRYYGNYGGYFDVWGAGTLVTVSS

SEQ ID NO: 12099 - protein, 107 aa, Artificial Sequence; identical to SEQ ID NO: 10923
  Description of Artificial Sequence: Synthetic polypeptide
  VL of XENP018619

SEQ ID NO: 12100 - protein, 5 aa, Artificial Sequence
  Description of Artificial Sequence: Synthetic peptide
  XENP018619 vhCDR1
NYWMN

SEQ ID NO: 12101 - protein, 19 aa, Artificial Sequence
  Description of Artificial Sequence: Synthetic peptide
  XENP018619 vhCDR2
EIRLKSNNFATHYAEPVKG

SEQ ID NO: 12102 - protein, 11 aa, Artificial Sequence
  Description of Artificial Sequence: Synthetic peptide
  XENP018619 vhCDR3
YYGNYGGYFDV

SEQ ID NO: 12103 - protein, 11 aa, Artificial Sequence
  Description of Artificial Sequence: Synthetic peptide
  XENP018619 vlCDR1
RASQSVSNDVA

SEQ ID NO: 12104 - protein, 7 aa, Artificial Sequence
  Description of Artificial Sequence: Synthetic peptide
  XENP018619 vlCDR2
YASHRYT

SEQ ID NO: 12105 - protein, 9 aa, Artificial Sequence
  Description of Artificial Sequence: Synthetic peptide
  XENP018619 vlCDR3
QQDYSSPRT

SEQ ID NO: 12106 - protein, 249 aa, Artificial Sequence
  Description of Artificial Sequence: Synthetic polypeptide
  XENP018620 1G6_H1.120_L1_scFv(GKPGS)4
EVQLVESGGGLVKPGGSLRLSCAASGFTFSNYWMNWVRQAPGKGLEWVGEIRLKSNNHATHYAEPVKGRFTISRDDSKSTVYLQMNSLKTEDTAVYYCTRYYGNYGGYFDVWGAGTLVTVSSGKPGSGKPGSGKPGSGKPGSSIVMTQSPATLSVSPGERATLSCRASQSVSNDVAWYQQKPGQSPRLLINYASHRYTGVPDRFTGSGYGTEFTLTISSLQSEDFAVYFCQQDYSSPRTFGGGTKVEIK

SEQ ID NO: 12107 - protein, 122 aa, Artificial Sequence
  Description of Artificial Sequence: Synthetic polypeptide
  VH of XENP018620
EVQLVESGGGLVKPGGSLRLSCAASGFTFSNYWMNWVRQAPGKGLEWVGEIRLKSNNHATHYAEPVKGRFTISRDDSKSTVYLQMNSLKTEDTAVYYCTRYYGNYGGYFDVWGAGTLVTVSS

SEQ ID NO: 12108 - protein, 107 aa, Artificial Sequence; identical to SEQ ID NO: 10923
  Description of Artificial Sequence: Synthetic polypeptide
  VL of XENP018620

SEQ ID NO: 12109 - protein, 5 aa, Artificial Sequence
  Description of Artificial Sequence: Synthetic peptide
  XENP018620 vhCDR1
NYWMN

SEQ ID NO: 12110 - protein, 19 aa, Artificial Sequence
  Description of Artificial Sequence: Synthetic peptide
  XENP018620 vhCDR2
EIRLKSNNHATHYAEPVKG

SEQ ID NO: 12111 - protein, 11 aa, Artificial Sequence
  Description of Artificial Sequence: Synthetic peptide
  XENP018620 vhCDR3
YYGNYGGYFDV

SEQ ID NO: 12112 - protein, 11 aa, Artificial Sequence
  Description of Artificial Sequence: Synthetic peptide
  XENP018620 vlCDR1
RASQSVSNDVA

SEQ ID NO: 12113 - protein, 7 aa, Artificial Sequence
  Description of Artificial Sequence: Synthetic peptide
  XENP018620 vlCDR2
YASHRYT

SEQ ID NO: 12114 - protein, 9 aa, Artificial Sequence
  Description of Artificial Sequence: Synthetic peptide
  XENP018620 vlCDR3
QQDYSSPRT

SEQ ID NO: 12115 - protein, 249 aa, Artificial Sequence
  Description of Artificial Sequence: Synthetic polypeptide
  XENP018621 1G6_H1.121_L1_scFv(GKPGS)4
EVQLVESGGGLVKPGGSLRLSCAASGFTFSNYWMNWVRQAPGKGLEWVGEIRLKSNNLATHYAEPVKGRFTISRDDSKSTVYLQMNSLKTEDTAVYYCTRYYGNYGGYFDVWGAGTLVTVSSGKPGSGKPGSGKPGSGKPGSSIVMTQSPATLSVSPGERATLSCRASQSVSNDVAWYQQKPGQSPRLLINYASHRYTGVPDRFTGSGYGTEFTLTISSLQSEDFAVYFCQQDYSSPRTFGGGTKVEIK

SEQ ID NO: 12116 - protein, 122 aa, Artificial Sequence
  Description of Artificial Sequence: Synthetic polypeptide
  VH of XENP018621
EVQLVESGGGLVKPGGSLRLSCAASGFTFSNYWMNWVRQAPGKGLEWVGEIRLKSNNLATHYAEPVKGRFTISRDDSKSTVYLQMNSLKTEDTAVYYCTRYYGNYGGYFDVWGAGTLVTVSS

SEQ ID NO: 12117 - protein, 107 aa, Artificial Sequence; identical to SEQ ID NO: 10923
  Description of Artificial Sequence: Synthetic polypeptide
  VL of XENP018621

SEQ ID NO: 12118 - protein, 5 aa, Artificial Sequence
  Description of Artificial Sequence: Synthetic peptide
  XENP018621 vhCDR1
NYWMN

SEQ ID NO: 12119 - protein, 19 aa, Artificial Sequence
  Description of Artificial Sequence: Synthetic peptide
  XENP018621 vhCDR2
EIRLKSNNLATHYAEPVKG

SEQ ID NO: 12120 - protein, 11 aa, Artificial Sequence
  Description of Artificial Sequence: Synthetic peptide
  XENP018621 vhCDR3
YYGNYGGYFDV

SEQ ID NO: 12121 - protein, 11 aa, Artificial Sequence
  Description of Artificial Sequence: Synthetic peptide
  XENP018621 vlCDR1
RASQSVSNDVA

SEQ ID NO: 12122 - protein, 7 aa, Artificial Sequence
  Description of Artificial Sequence: Synthetic peptide
  XENP018621 vlCDR2
YASHRYT

SEQ ID NO: 12123 - protein, 9 aa, Artificial Sequence
  Description of Artificial Sequence: Synthetic peptide
  XENP018621 vlCDR3
QQDYSSPRT

SEQ ID NO: 12124 - protein, 249 aa, Artificial Sequence
  Description of Artificial Sequence: Synthetic polypeptide
  XENP018622 1G6_H1.122_L1_scFv(GKPGS)4
EVQLVESGGGLVKPGGSLRLSCAASGFTFSNYWMNWVRQAPGKGLEWVGEIRLKSNNWATHYAEPVKGRFTISRDDSKSTVYLQMNSLKTEDTAVYYCTRYYGNYGGYFDVWGAGTLVTVSSGKPGSGKPGSGKPGSGKPGSSIVMTQSPATLSVSPGERATLSCRASQSVSNDVAWYQQKPGQSPRLLINYASHRYTGVPDRFTGSGYGTEFTLTISSLQSEDFAVYFCQQDYSSPRTFGGGTKVEIK

SEQ ID NO: 12125 - protein, 122 aa, Artificial Sequence
  Description of Artificial Sequence: Synthetic polypeptide
  VH of XENP018622
EVQLVESGGGLVKPGGSLRLSCAASGFTFSNYWMNWVRQAPGKGLEWVGEIRLKSNNWATHYAEPVKGRFTISRDDSKSTVYLQMNSLKTEDTAVYYCTRYYGNYGGYFDVWGAGTLVTVSS

SEQ ID NO: 12126 - protein, 107 aa, Artificial Sequence; identical to SEQ ID NO: 10923
  Description of Artificial Sequence: Synthetic polypeptide
  VL of XENP018622

SEQ ID NO: 12127 - protein, 5 aa, Artificial Sequence
  Description of Artificial Sequence: Synthetic peptide
  XENP018622 vhCDR1
NYWMN

SEQ ID NO: 12128 - protein, 19 aa, Artificial Sequence
  Description of Artificial Sequence: Synthetic peptide
  XENP018622 vhCDR2
EIRLKSNNWATHYAEPVKG

SEQ ID NO: 12129 - protein, 11 aa, Artificial Sequence
  Description of Artificial Sequence: Synthetic peptide
  XENP018622 vhCDR3
YYGNYGGYFDV

SEQ ID NO: 12130 - protein, 11 aa, Artificial Sequence
  Description of Artificial Sequence: Synthetic peptide
  XENP018622 vlCDR1
RASQSVSNDVA

SEQ ID NO: 12131 - protein, 7 aa, Artificial Sequence
  Description of Artificial Sequence: Synthetic peptide
  XENP018622 vlCDR2
YASHRYT

SEQ ID NO: 12132 - protein, 9 aa, Artificial Sequence
  Description of Artificial Sequence: Synthetic peptide
  XENP018622 vlCDR3
QQDYSSPRT

SEQ ID NO: 12133 - protein, 249 aa, Artificial Sequence
  Description of Artificial Sequence: Synthetic polypeptide
  XENP018623 1G6_H1.123_L1_scFv(GKPGS)4
EVQLVESGGGLVKPGGSLRLSCAASGFTFSNYWMNWVRQAPGKGLEWVGEIRLKSNNVATHYAEPVKGRFTISRDDSKSTVYLQMNSLKTEDTAVYYCTRYYGNYGGYFDVWGAGTLVTVSSGKPGSGKPGSGKPGSGKPGSSIVMTQSPATLSVSPGERATLSCRASQSVSNDVAWYQQKPGQSPRLLINYASHRYTGVPDRFTGSGYGTEFTLTISSLQSEDFAVYFCQQDYSSPRTFGGGTKVEIK

SEQ ID NO: 12134 - protein, 122 aa, Artificial Sequence
  Description of Artificial Sequence: Synthetic polypeptide
  VH of XENP018623
EVQLVESGGGLVKPGGSLRLSCAASGFTFSNYWMNWVRQAPGKGLEWVGEIRLKSNNVATHYAEPVKGRFTISRDDSKSTVYLQMNSLKTEDTAVYYCTRYYGNYGGYFDVWGAGTLVTVSS

SEQ ID NO: 12135 - protein, 107 aa, Artificial Sequence; identical to SEQ ID NO: 10923
  Description of Artificial Sequence: Synthetic polypeptide
  VL of XENP018623

SEQ ID NO: 12136 - protein, 5 aa, Artificial Sequence
  Description of Artificial Sequence: Synthetic peptide
  XENP018623 vhCDR1
NYWMN

SEQ ID NO: 12137 - protein, 19 aa, Artificial Sequence
  Description of Artificial Sequence: Synthetic peptide
  XENP018623 vhCDR2
EIRLKSNNVATHYAEPVKG

SEQ ID NO: 12138 - protein, 11 aa, Artificial Sequence
  Description of Artificial Sequence: Synthetic peptide
  XENP018623 vhCDR3
YYGNYGGYFDV

SEQ ID NO: 12139 - protein, 11 aa, Artificial Sequence
  Description of Artificial Sequence: Synthetic peptide
  XENP018623 vlCDR1
RASQSVSNDVA

SEQ ID NO: 12140 - protein, 7 aa, Artificial Sequence
  Description of Artificial Sequence: Synthetic peptide
  XENP018623 vlCDR2
YASHRYT

SEQ ID NO: 12141 - protein, 9 aa, Artificial Sequence
  Description of Artificial Sequence: Synthetic peptide
  XENP018623 vlCDR3
QQDYSSPRT

SEQ ID NO: 12142 - protein, 249 aa, Artificial Sequence
  Description of Artificial Sequence: Synthetic polypeptide
  XENP018624 1G6_H1.124_L1_scFv(GKPGS)4
EVQLVESGGGLVKPGGSLRLSCAASGFTFSNYWMNWVRQAPGKGLEWVGEIRLKSNNAATHYAEPVKGRFTISRDDSKSTVYLQMNSLKTEDTAVYYCTRYYGNYGGYFDVWGAGTLVTVSSGKPGSGKPGSGKPGSGKPGSSIVMTQSPATLSVSPGERATLSCRASQSVSNDVAWYQQKPGQSPRLLINYASHRYTGVPDRFTGSGYGTEFTLTISSLQSEDFAVYFCQQDYSSPRTFGGGTKVEIK

SEQ ID NO: 12143 - protein, 122 aa, Artificial Sequence
  Description of Artificial Sequence: Synthetic polypeptide
  VH of XENP018624
EVQLVESGGGLVKPGGSLRLSCAASGFTFSNYWMNWVRQAPGKGLEWVGEIRLKSNNAATHYAEPVKGRFTISRDDSKSTVYLQMNSLKTEDTAVYYCTRYYGNYGGYFDVWGAGTLVTVSS

SEQ ID NO: 12144 - protein, 107 aa, Artificial Sequence; identical to SEQ ID NO: 10923
  Description of Artificial Sequence: Synthetic polypeptide
  VL of XENP018624

SEQ ID NO: 12145 - protein, 5 aa, Artificial Sequence
  Description of Artificial Sequence: Synthetic peptide
  XENP018624 vhCDR1
NYWMN

SEQ ID NO: 12146 - protein, 19 aa, Artificial Sequence
  Description of Artificial Sequence: Synthetic peptide
  XENP018624 vhCDR2
EIRLKSNNAATHYAEPVKG

SEQ ID NO: 12147 - protein, 11 aa, Artificial Sequence
  Description of Artificial Sequence: Synthetic peptide
  XENP018624 vhCDR3
YYGNYGGYFDV

SEQ ID NO: 12148 - protein, 11 aa, Artificial Sequence
  Description of Artificial Sequence: Synthetic peptide
  XENP018624 vlCDR1
RASQSVSNDVA

SEQ ID NO: 12149 - protein, 7 aa, Artificial Sequence
  Description of Artificial Sequence: Synthetic peptide
  XENP018624 vlCDR2
YASHRYT

SEQ ID NO: 12150 - protein, 9 aa, Artificial Sequence
  Description of Artificial Sequence: Synthetic peptide
  XENP018624 vlCDR3
QQDYSSPRT

SEQ ID NO: 12151 - protein, 249 aa, Artificial Sequence
  Description of Artificial Sequence: Synthetic polypeptide
  XENP018625 1G6_H1.125_L1_scFv(GKPGS)4
EVQLVESGGGLVKPGGSLRLSCAASGFTFSNYWMNWVRQAPGKGLEWVGEIRLKSNNQATHYAEPVKGRFTISRDDSKSTVYLQMNSLKTEDTAVYYCTRYYGNYGGYFDVWGAGTLVTVSSGKPGSGKPGSGKPGSGKPGSSIVMTQSPATLSVSPGERATLSCRASQSVSNDVAWYQQKPGQSPRLLINYASHRYTGVPDRFTGSGYGTEFTLTISSLQSEDFAVYFCQQDYSSPRTFGGGTKVEIK

SEQ ID NO: 12152 - protein, 122 aa, Artificial Sequence
  Description of Artificial Sequence: Synthetic polypeptide
  VH of XENP018625
EVQLVESGGGLVKPGGSLRLSCAASGFTFSNYWMNWVRQAPGKGLEWVGEIRLKSNNQATHYAEPVKGRFTISRDDSKSTVYLQMNSLKTEDTAVYYCTRYYGNYGGYFDVWGAGTLVTVSS

SEQ ID NO: 12153 - protein, 107 aa, Artificial Sequence; identical to SEQ ID NO: 10923
  Description of Artificial Sequence: Synthetic polypeptide
  VL of XENP018625

SEQ ID NO: 12154 - protein, 5 aa, Artificial Sequence
  Description of Artificial Sequence: Synthetic peptide
  XENP018625 vhCDR1
NYWMN

SEQ ID NO: 12155 - protein, 19 aa, Artificial Sequence
  Description of Artificial Sequence: Synthetic peptide
  XENP018625 vhCDR2
EIRLKSNNQATHYAEPVKG

SEQ ID NO: 12156 - protein, 11 aa, Artificial Sequence
  Description of Artificial Sequence: Synthetic peptide
  XENP018625 vhCDR3
YYGNYGGYFDV

SEQ ID NO: 12157 - protein, 11 aa, Artificial Sequence
  Description of Artificial Sequence: Synthetic peptide
  XENP018625 vlCDR1
RASQSVSNDVA

SEQ ID NO: 12158 - protein, 7 aa, Artificial Sequence
  Description of Artificial Sequence: Synthetic peptide
  XENP018625 vlCDR2
YASHRYT

SEQ ID NO: 12159 - protein, 9 aa, Artificial Sequence
  Description of Artificial Sequence: Synthetic peptide
  XENP018625 vlCDR3
QQDYSSPRT

SEQ ID NO: 12160 - protein, 249 aa, Artificial Sequence
  Description of Artificial Sequence: Synthetic polypeptide
  XENP018626 1G6_H1.126_L1_scFv(GKPGS)4
EVQLVESGGGLVKPGGSLRLSCAASGFTFSNYWMNWVRQAPGKGLEWVGEIRLKSNNDATHYAEPVKGRFTISRDDSKSTVYLQMNSLKTEDTAVYYCTRYYGNYGGYFDVWGAGTLVTVSSGKPGSGKPGSGKPGSGKPGSSIVMTQSPATLSVSPGERATLSCRASQSVSNDVAWYQQKPGQSPRLLINYASHRYTGVPDRFTGSGYGTEFTLTISSLQSEDFAVYFCQQDYSSPRTFGGGTKVEIK

SEQ ID NO: 12161 - protein, 122 aa, Artificial Sequence
  Description of Artificial Sequence: Synthetic polypeptide
  VH of XENP018626
EVQLVESGGGLVKPGGSLRLSCAASGFTFSNYWMNWVRQAPGKGLEWVGEIRLKSNNDATHYAEPVKGRFTISRDDSKSTVYLQMNSLKTEDTAVYYCTRYYGNYGGYFDVWGAGTLVTVSS

SEQ ID NO: 12162 - protein, 107 aa, Artificial Sequence; identical to SEQ ID NO: 10923
  Description of Artificial Sequence: Synthetic polypeptide
  VL of XENP018626

SEQ ID NO: 12163 - protein, 5 aa, Artificial Sequence
  Description of Artificial Sequence: Synthetic peptide
  XENP018626 vhCDR1
NYWMN

SEQ ID NO: 12164 - protein, 19 aa, Artificial Sequence
  Description of Artificial Sequence: Synthetic peptide
  XENP018626 vhCDR2
EIRLKSNNDATHYAEPVKG

SEQ ID NO: 12165 - protein, 11 aa, Artificial Sequence
  Description of Artificial Sequence: Synthetic peptide
  XENP018626 vhCDR3
YYGNYGGYFDV

SEQ ID NO: 12166 - protein, 11 aa, Artificial Sequence
  Description of Artificial Sequence: Synthetic peptide
  XENP018626 vlCDR1
RASQSVSNDVA

SEQ ID NO: 12167 - protein, 7 aa, Artificial Sequence
  Description of Artificial Sequence: Synthetic peptide
  XENP018626 vlCDR2
YASHRYT

SEQ ID NO: 12168 - protein, 9 aa, Artificial Sequence
  Description of Artificial Sequence: Synthetic peptide
  XENP018626 vlCDR3
QQDYSSPRT

SEQ ID NO: 12169 - protein, 249 aa, Artificial Sequence
  Description of Artificial Sequence: Synthetic polypeptide
  XENP018627 1G6_H1.127_L1_scFv(GKPGS)4
EVQLVESGGGLVKPGGSLRLSCAASGFTFSNYWMNWVRQAPGKGLEWVGEIRLKSNNKATHYAEPVKGRFTISRDDSKSTVYLQMNSLKTEDTAVYYCTRYYGNYGGYFDVWGAGTLVTVSSGKPGSGKPGSGKPGSGKPGSSIVMTQSPATLSVSPGERATLSCRASQSVSNDVAWYQQKPGQSPRLLINYASHRYTGVPDRFTGSGYGTEFTLTISSLQSEDFAVYFCQQDYSSPRTFGGGTKVEIK

SEQ ID NO: 12170 - protein, 122 aa, Artificial Sequence
  Description of Artificial Sequence: Synthetic polypeptide
  VH of XENP018627
EVQLVESGGGLVKPGGSLRLSCAASGFTFSNYWMNWVRQAPGKGLEWVGEIRLKSNNKATHYAEPVKGRFTISRDDSKSTVYLQMNSLKTEDTAVYYCTRYYGNYGGYFDVWGAGTLVTVSS

SEQ ID NO: 12171 - protein, 107 aa, Artificial Sequence; identical to SEQ ID NO: 10923
  Description of Artificial Sequence: Synthetic polypeptide
  VL of XENP018627

SEQ ID NO: 12172 - protein, 5 aa, Artificial Sequence
  Description of Artificial Sequence: Synthetic peptide
  XENP018627 vhCDR1
NYWMN

SEQ ID NO: 12173 - protein, 19 aa, Artificial Sequence
  Description of Artificial Sequence: Synthetic peptide
  XENP018627 vhCDR2
EIRLKSNNKATHYAEPVKG

SEQ ID NO: 12174 - protein, 11 aa, Artificial Sequence
  Description of Artificial Sequence: Synthetic peptide
  XENP018627 vhCDR3
YYGNYGGYFDV

SEQ ID NO: 12175 - protein, 11 aa, Artificial Sequence
  Description of Artificial Sequence: Synthetic peptide
  XENP018627 vlCDR1
RASQSVSNDVA

SEQ ID NO: 12176 - protein, 7 aa, Artificial Sequence
  Description of Artificial Sequence: Synthetic peptide
  XENP018627 vlCDR2
YASHRYT

SEQ ID NO: 12177 - protein, 9 aa, Artificial Sequence
  Description of Artificial Sequence: Synthetic peptide
  XENP018627 vlCDR3
QQDYSSPRT

SEQ ID NO: 12178 - protein, 249 aa, Artificial Sequence
  Description of Artificial Sequence: Synthetic polypeptide
  XENP018628 1G6_H1.128_L1_scFv(GKPGS)4
EVQLVESGGGLVKPGGSLRLSCAASGFTFSNYWMNWVRQAPGKGLEWVGEIRLKSNNYGTHYAEPVKGRFTISRDDSKSTVYLQMNSLKTEDTAVYYCTRYYGNYGGYFDVWGAGTLVTVSSGKPGSGKPGSGKPGSGKPGSSIVMTQSPATLSVSPGERATLSCRASQSVSNDVAWYQQKPGQSPRLLINYASHRYTGVPDRFTGSGYGTEFTLTISSLQSEDFAVYFCQQDYSSPRTFGGGTKVEIK

SEQ ID NO: 12179 - protein, 122 aa, Artificial Sequence
  Description of Artificial Sequence: Synthetic polypeptide
  VH of XENP018628
EVQLVESGGGLVKPGGSLRLSCAASGFTFSNYWMNWVRQAPGKGLEWVGEIRLKSNNYGTHYAEPVKGRFTISRDDSKSTVYLQMNSLKTEDTAVYYCTRYYGNYGGYFDVWGAGTLVTVSS

SEQ ID NO: 12180 - protein, 107 aa, Artificial Sequence; identical to SEQ ID NO: 10923
  Description of Artificial Sequence: Synthetic polypeptide
  VL of XENP018628

SEQ ID NO: 12181 - protein, 5 aa, Artificial Sequence
  Description of Artificial Sequence: Synthetic peptide
  XENP018628 vhCDR1
NYWMN

SEQ ID NO: 12182 - protein, 19 aa, Artificial Sequence
  Description of Artificial Sequence: Synthetic peptide
  XENP018628 vhCDR2
EIRLKSNNYGTHYAEPVKG

SEQ ID NO: 12183 - protein, 11 aa, Artificial Sequence
  Description of Artificial Sequence: Synthetic peptide
  XENP018628 vhCDR3
YYGNYGGYFDV

SEQ ID NO: 12184 - protein, 11 aa, Artificial Sequence
  Description of Artificial Sequence: Synthetic peptide
  XENP018628 vlCDR1
RASQSVSNDVA

SEQ ID NO: 12185 - protein, 7 aa, Artificial Sequence
  Description of Artificial Sequence: Synthetic peptide
  XENP018628 vlCDR2
YASHRYT

SEQ ID NO: 12186 - protein, 9 aa, Artificial Sequence
  Description of Artificial Sequence: Synthetic peptide
  XENP018628 vlCDR3
QQDYSSPRT

SEQ ID NO: 12187 - protein, 249 aa, Artificial Sequence
  Description of Artificial Sequence: Synthetic polypeptide
  XENP018629 1G6_H1.129_L1_scFv(GKPGS)4
EVQLVESGGGLVKPGGSLRLSCAASGFTFSNYWMNWVRQAPGKGLEWVGEIRLKSNNYHTHYAEPVKGRFTISRDDSKSTVYLQMNSLKTEDTAVYYCTRYYGNYGGYFDVWGAGTLVTVSSGKPGSGKPGSGKPGSGKPGSSIVMTQSPATLSVSPGERATLSCRASQSVSNDVAWYQQKPGQSPRLLINYASHRYTGVPDRFTGSGYGTEFTLTISSLQSEDFAVYFCQQDYSSPRTFGGGTKVEIK

SEQ ID NO: 12188 - protein, 122 aa, Artificial Sequence
  Description of Artificial Sequence: Synthetic polypeptide
  VH of XENP018629
EVQLVESGGGLVKPGGSLRLSCAASGFTFSNYWMNWVRQAPGKGLEWVGEIRLKSNNYHTHYAEPVKGRFTISRDDSKSTVYLQMNSLKTEDTAVYYCTRYYGNYGGYFDVWGAGTLVTVSS

SEQ ID NO: 12189 - protein, 107 aa, Artificial Sequence; identical to SEQ ID NO: 10923
  Description of Artificial Sequence: Synthetic polypeptide
  VL of XENP018629

SEQ ID NO: 12190 - protein, 5 aa, Artificial Sequence
  Description of Artificial Sequence: Synthetic peptide
  XENP018629 vhCDR1
NYWMN

SEQ ID NO: 12191 - protein, 19 aa, Artificial Sequence
  Description of Artificial Sequence: Synthetic peptide
  XENP018629 vhCDR2
EIRLKSNNYHTHYAEPVKG

SEQ ID NO: 12192 - protein, 11 aa, Artificial Sequence
  Description of Artificial Sequence: Synthetic peptide
  XENP018629 vhCDR3
YYGNYGGYFDV

SEQ ID NO: 12193 - protein, 11 aa, Artificial Sequence
  Description of Artificial Sequence: Synthetic peptide
  XENP018629 vlCDR1
RASQSVSNDVA

SEQ ID NO: 12194 - protein, 7 aa, Artificial Sequence
  Description of Artificial Sequence: Synthetic peptide
  XENP018629 vlCDR2
YASHRYT

SEQ ID NO: 12195 - protein, 9 aa, Artificial Sequence
  Description of Artificial Sequence: Synthetic peptide
  XENP018629 vlCDR3
QQDYSSPRT

SEQ ID NO: 12196 - protein, 249 aa, Artificial Sequence
  Description of Artificial Sequence: Synthetic polypeptide
  XENP018630 1G6_H1.130_L1_scFv(GKPGS)4
EVQLVESGGGLVKPGGSLRLSCAASGFTFSNYWMNWVRQAPGKGLEWVGEIRLKSNNYQTHYAEPVKGRFTISRDDSKSTVYLQMNSLKTEDTAVYYCTRYYGNYGGYFDVWGAGTLVTVSSGKPGSGKPGSGKPGSGKPGSSIVMTQSPATLSVSPGERATLSCRASQSVSNDVAWYQQKPGQSPRLLINYASHRYTGVPDRFTGSGYGTEFTLTISSLQSEDFAVYFCQQDYSSPRTFGGGTKVEIK

SEQ ID NO: 12197 - protein, 122 aa, Artificial Sequence
  Description of Artificial Sequence: Synthetic polypeptide
  VH of XENP018630
EVQLVESGGGLVKPGGSLRLSCAASGFTFSNYWMNWVRQAPGKGLEWVGEIRLKSNNYQTHYAEPVKGRFTISRDDSKSTVYLQMNSLKTEDTAVYYCTRYYGNYGGYFDVWGAGTLVTVSS

SEQ ID NO: 12198 - protein, 107 aa, Artificial Sequence; identical to SEQ ID NO: 10923
  Description of Artificial Sequence: Synthetic polypeptide
  VL of XENP018630

SEQ ID NO: 12199 - protein, 5 aa, Artificial Sequence
  Description of Artificial Sequence: Synthetic peptide
  XENP018630 vhCDR1
NYWMN

SEQ ID NO: 12200 - protein, 19 aa, Artificial Sequence
  Description of Artificial Sequence: Synthetic peptide
  XENP018630 vhCDR2
EIRLKSNNYQTHYAEPVKG

SEQ ID NO: 12201 - protein, 11 aa, Artificial Sequence
  Description of Artificial Sequence: Synthetic peptide
  XENP018630 vhCDR3
YYGNYGGYFDV

SEQ ID NO: 12202 - protein, 11 aa, Artificial Sequence
  Description of Artificial Sequence: Synthetic peptide
  XENP018630 vlCDR1
RASQSVSNDVA

SEQ ID NO: 12203 - protein, 7 aa, Artificial Sequence
  Description of Artificial Sequence: Synthetic peptide
  XENP018630 vlCDR2
YASHRYT

SEQ ID NO: 12204 - protein, 9 aa, Artificial Sequence
  Description of Artificial Sequence: Synthetic peptide
  XENP018630 vlCDR3
QQDYSSPRT

SEQ ID NO: 12205 - protein, 249 aa, Artificial Sequence
  Description of Artificial Sequence: Synthetic polypeptide
  XENP018631 1G6_H1.131_L1_scFv(GKPGS)4
EVQLVESGGGLVKPGGSLRLSCAASGFTFSNYWMNWVRQAPGKGLEWVGEIRLKSNNYDTHYAEPVKGRFTISRDDSKSTVYLQMNSLKTEDTAVYYCTRYYGNYGGYFDVWGAGTLVTVSSGKPGSGKPGSGKPGSGKPGSSIVMTQSPATLSVSPGERATLSCRASQSVSNDVAWYQQKPGQSPRLLINYASHRYTGVPDRFTGSGYGTEFTLTISSLQSEDFAVYFCQQDYSSPRTFGGGTKVEIK

SEQ ID NO: 12206 - protein, 122 aa, Artificial Sequence
  Description of Artificial Sequence: Synthetic polypeptide
  VH of XENP018631
EVQLVESGGGLVKPGGSLRLSCAASGFTFSNYWMNWVRQAPGKGLEWVGEIRLKSNNYDTHYAEPVKGRFTISRDDSKSTVYLQMNSLKTEDTAVYYCTRYYGNYGGYFDVWGAGTLVTVSS

SEQ ID NO: 12207 - protein, 107 aa, Artificial Sequence; identical to SEQ ID NO: 10923
  Description of Artificial Sequence: Synthetic polypeptide
  VL of XENP018631

SEQ ID NO: 12208 - protein, 5 aa, Artificial Sequence
  Description of Artificial Sequence: Synthetic peptide
  XENP018631 vhCDR1
NYWMN

SEQ ID NO: 12209 - protein, 19 aa, Artificial Sequence
  Description of Artificial Sequence: Synthetic peptide
  XENP018631 vhCDR2
EIRLKSNNYDTHYAEPVKG

SEQ ID NO: 12210 - protein, 11 aa, Artificial Sequence
  Description of Artificial Sequence: Synthetic peptide
  XENP018631 vhCDR3
YYGNYGGYFDV

SEQ ID NO: 12211 - protein, 11 aa, Artificial Sequence
  Description of Artificial Sequence: Synthetic peptide
  XENP018631 vlCDR1
RASQSVSNDVA

SEQ ID NO: 12212 - protein, 7 aa, Artificial Sequence
  Description of Artificial Sequence: Synthetic peptide
  XENP018631 vlCDR2
YASHRYT

SEQ ID NO: 12213 - protein, 9 aa, Artificial Sequence
  Description of Artificial Sequence: Synthetic peptide
  XENP018631 vlCDR3
QQDYSSPRT

SEQ ID NO: 12214 - protein, 249 aa, Artificial Sequence
  Description of Artificial Sequence: Synthetic polypeptide
  XENP018632 1G6_H1.132_L1_scFv(GKPGS)4
EVQLVESGGGLVKPGGSLRLSCAASGFTFSNYWMNWVRQAPGKGLEWVGEIRLKSNNYLTHYAEPVKGRFTISRDDSKSTVYLQMNSLKTEDTAVYYCTRYYGNYGGYFDVWGAGTLVTVSSGKPGSGKPGSGKPGSGKPGSSIVMTQSPATLSVSPGERATLSCRASQSVSNDVAWYQQKPGQSPRLLINYASHRYTGVPDRFTGSGYGTEFTLTISSLQSEDFAVYFCQQDYSSPRTFGGGTKVEIK

SEQ ID NO: 12215 - protein, 122 aa, Artificial Sequence
  Description of Artificial Sequence: Synthetic polypeptide
  VH of XENP018632
EVQLVESGGGLVKPGGSLRLSCAASGFTFSNYWMNWVRQAPGKGLEWVGEIRLKSNNYLTHYAEPVKGRFTISRDDSKSTVYLQMNSLKTEDTAVYYCTRYYGNYGGYFDVWGAGTLVTVSS

SEQ ID NO: 12216 - protein, 107 aa, Artificial Sequence; identical to SEQ ID NO: 10923
  Description of Artificial Sequence: Synthetic polypeptide
  VL of XENP018632

SEQ ID NO: 12217 - protein, 5 aa, Artificial Sequence
  Description of Artificial Sequence: Synthetic peptide
  XENP018632 vhCDR1
NYWMN

SEQ ID NO: 12218 - protein, 19 aa, Artificial Sequence
  Description of Artificial Sequence: Synthetic peptide
  XENP018632 vhCDR2
EIRLKSNNYLTHYAEPVKG

SEQ ID NO: 12219 - protein, 11 aa, Artificial Sequence
  Description of Artificial Sequence: Synthetic peptide
  XENP018632 vhCDR3
YYGNYGGYFDV

SEQ ID NO: 12220 - protein, 11 aa, Artificial Sequence
  Description of Artificial Sequence: Synthetic peptide
  XENP018632 vlCDR1
RASQSVSNDVA

SEQ ID NO: 12221 - protein, 7 aa, Artificial Sequence
  Description of Artificial Sequence: Synthetic peptide
  XENP018632 vlCDR2
YASHRYT

SEQ ID NO: 12222 - protein, 9 aa, Artificial Sequence
  Description of Artificial Sequence: Synthetic peptide
  XENP018632 vlCDR3
QQDYSSPRT

SEQ ID NO: 12223 - protein, 249 aa, Artificial Sequence
  Description of Artificial Sequence: Synthetic polypeptide
  XENP018633 1G6_H1.133_L1_scFv(GKPGS)4
EVQLVESGGGLVKPGGSLRLSCAASGFTFSNYWMNWVRQAPGKGLEWVGEIRLKSNNYKTHYAEPVKGRFTISRDDSKSTVYLQMNSLKTEDTAVYYCTRYYGNYGGYFDVWGAGTLVTVSSGKPGSGKPGSGKPGSGKPGSSIVMTQSPATLSVSPGERATLSCRASQSVSNDVAWYQQKPGQSPRLLINYASHRYTGVPDRFTGSGYGTEFTLTISSLQSEDFAVYFCQQDYSSPRTFGGGTKVEIK

SEQ ID NO: 12224 - protein, 122 aa, Artificial Sequence
  Description of Artificial Sequence: Synthetic polypeptide
  VH of XENP018633
EVQLVESGGGLVKPGGSLRLSCAASGFTFSNYWMNWVRQAPGKGLEWVGEIRLKSNNYKTHYAEPVKGRFTISRDDSKSTVYLQMNSLKTEDTAVYYCTRYYGNYGGYFDVWGAGTLVTVSS

SEQ ID NO: 12225 - protein, 107 aa, Artificial Sequence; identical to SEQ ID NO: 10923
  Description of Artificial Sequence: Synthetic polypeptide
  VL of XENP018633

SEQ ID NO: 12226 - protein, 5 aa, Artificial Sequence
  Description of Artificial Sequence: Synthetic peptide
  XENP018633 vhCDR1
NYWMN

SEQ ID NO: 12227 - protein, 19 aa, Artificial Sequence
  Description of Artificial Sequence: Synthetic peptide
  XENP018633 vhCDR2
EIRLKSNNYKTHYAEPVKG

SEQ ID NO: 12228 - protein, 11 aa, Artificial Sequence
  Description of Artificial Sequence: Synthetic peptide
  XENP018633 vhCDR3
YYGNYGGYFDV

SEQ ID NO: 12229 - protein, 11 aa, Artificial Sequence
  Description of Artificial Sequence: Synthetic peptide
  XENP018633 vlCDR1
RASQSVSNDVA

SEQ ID NO: 12230 - protein, 7 aa, Artificial Sequence
  Description of Artificial Sequence: Synthetic peptide
  XENP018633 vlCDR2
YASHRYT

SEQ ID NO: 12231 - protein, 9 aa, Artificial Sequence
  Description of Artificial Sequence: Synthetic peptide
  XENP018633 vlCDR3
QQDYSSPRT

SEQ ID NO: 12232 - protein, 249 aa, Artificial Sequence
  Description of Artificial Sequence: Synthetic polypeptide
  XENP018634 1G6_H1.134_L1_scFv(GKPGS)4
EVQLVESGGGLVKPGGSLRLSCAASGFTFSNYWMNWVRQAPGKGLEWVGEIRLKSNNYYTHYAEPVKGRFTISRDDSKSTVYLQMNSLKTEDTAVYYCTRYYGNYGGYFDVWGAGTLVTVSSGKPGSGKPGSGKPGSGKPGSSIVMTQSPATLSVSPGERATLSCRASQSVSNDVAWYQQKPGQSPRLLINYASHRYTGVPDRFTGSGYGTEFTLTISSLQSEDFAVYFCQQDYSSPRTFGGGTKVEIK

SEQ ID NO: 12233 - protein, 122 aa, Artificial Sequence
  Description of Artificial Sequence: Synthetic polypeptide
  VH of XENP018634
EVQLVESGGGLVKPGGSLRLSCAASGFTFSNYWMNWVRQAPGKGLEWVGEIRLKSNNYYTHYAEPVKGRFTISRDDSKSTVYLQMNSLKTEDTAVYYCTRYYGNYGGYFDVWGAGTLVTVSS

SEQ ID NO: 12234 - protein, 107 aa, Artificial Sequence; identical to SEQ ID NO: 10923
  Description of Artificial Sequence: Synthetic polypeptide
  VL of XENP018634

SEQ ID NO: 12235 - protein, 5 aa, Artificial Sequence
  Description of Artificial Sequence: Synthetic peptide
  XENP018634 vhCDR1
NYWMN

SEQ ID NO: 12236 - protein, 19 aa, Artificial Sequence
  Description of Artificial Sequence: Synthetic peptide
  XENP018634 vhCDR2
EIRLKSNNYYTHYAEPVKG

SEQ ID NO: 12237 - protein, 11 aa, Artificial Sequence
  Description of Artificial Sequence: Synthetic peptide
  XENP018634 vhCDR3
YYGNYGGYFDV

SEQ ID NO: 12238 - protein, 11 aa, Artificial Sequence
  Description of Artificial Sequence: Synthetic peptide
  XENP018634 vlCDR1
RASQSVSNDVA

SEQ ID NO: 12239 - protein, 7 aa, Artificial Sequence
  Description of Artificial Sequence: Synthetic peptide
  XENP018634 vlCDR2
YASHRYT

SEQ ID NO: 12240 - protein, 9 aa, Artificial Sequence
  Description of Artificial Sequence: Synthetic peptide
  XENP018634 vlCDR3
QQDYSSPRT

SEQ ID NO: 12241 - protein, 249 aa, Artificial Sequence
  Description of Artificial Sequence: Synthetic polypeptide
  XENP018635 1G6_H1.135_L1_scFv(GKPGS)4
EVQLVESGGGLVKPGGSLRLSCAASGFTFSNYWMNWVRQAPGKGLEWVGEIRLKSNNYAKHYAEPVKGRFTISRDDSKSTVYLQMNSLKTEDTAVYYCTRYYGNYGGYFDVWGAGTLVTVSSGKPGSGKPGSGKPGSGKPGSSIVMTQSPATLSVSPGERATLSCRASQSVSNDVAWYQQKPGQSPRLLINYASHRYTGVPDRFTGSGYGTEFTLTISSLQSEDFAVYFCQQDYSSPRTFGGGTKVEIK

SEQ ID NO: 12242 - protein, 122 aa, Artificial Sequence
  Description of Artificial Sequence: Synthetic polypeptide
  VH of XENP018635
EVQLVESGGGLVKPGGSLRLSCAASGFTFSNYWMNWVRQAPGKGLEWVGEIRLKSNNYAKHYAEPVKGRFTISRDDSKSTVYLQMNSLKTEDTAVYYCTRYYGNYGGYFDVWGAGTLVTVSS

SEQ ID NO: 12243 - protein, 107 aa, Artificial Sequence; identical to SEQ ID NO: 10923
  Description of Artificial Sequence: Synthetic polypeptide
  VL of XENP018635

SEQ ID NO: 12244 - protein, 5 aa, Artificial Sequence
  Description of Artificial Sequence: Synthetic peptide
  XENP018635 vhCDR1
NYWMN

SEQ ID NO: 12245 - protein, 19 aa, Artificial Sequence
  Description of Artificial Sequence: Synthetic peptide
  XENP018635 vhCDR2
EIRLKSNNYAKHYAEPVKG

SEQ ID NO: 12246 - protein, 11 aa, Artificial Sequence
  Description of Artificial Sequence: Synthetic peptide
  XENP018635 vhCDR3
YYGNYGGYFDV

SEQ ID NO: 12247 - protein, 11 aa, Artificial Sequence
  Description of Artificial Sequence: Synthetic peptide
  XENP018635 vlCDR1
RASQSVSNDVA

SEQ ID NO: 12248 - protein, 7 aa, Artificial Sequence
  Description of Artificial Sequence: Synthetic peptide
  XENP018635 vlCDR2
YASHRYT

SEQ ID NO: 12249 - protein, 9 aa, Artificial Sequence
  Description of Artificial Sequence: Synthetic peptide
  XENP018635 vlCDR3
QQDYSSPRT

SEQ ID NO: 12250 - protein, 249 aa, Artificial Sequence
  Description of Artificial Sequence: Synthetic polypeptide
  XENP018636 1G6_H1.136_L1_scFv(GKPGS)4
EVQLVESGGGLVKPGGSLRLSCAASGFTFSNYWMNWVRQAPGKGLEWVGEIRLKSNNYAIHYAEPVKGRFTISRDDSKSTVYLQMNSLKTEDTAVYYCTRYYGNYGGYFDVWGAGTLVTVSSGKPGSGKPGSGKPGSGKPGSSIVMTQSPATLSVSPGERATLSCRASQSVSNDVAWYQQKPGQSPRLLINYASHRYTGVPDRFTGSGYGTEFTLTISSLQSEDFAVYFCQQDYSSPRTFGGGTKVEIK

SEQ ID NO: 12251 - protein, 122 aa, Artificial Sequence
  Description of Artificial Sequence: Synthetic polypeptide
  VH of XENP018636
EVQLVESGGGLVKPGGSLRLSCAASGFTFSNYWMNWVRQAPGKGLEWVGEIRLKSNNYAIHYAEPVKGRFTISRDDSKSTVYLQMNSLKTEDTAVYYCTRYYGNYGGYFDVWGAGTLVTVSS

SEQ ID NO: 12252 - protein, 107 aa, Artificial Sequence; identical to SEQ ID NO: 10923
  Description of Artificial Sequence: Synthetic polypeptide
  VL of XENP018636

SEQ ID NO: 12253 - protein, 5 aa, Artificial Sequence
  Description of Artificial Sequence: Synthetic peptide
  XENP018636 vhCDR1
NYWMN

SEQ ID NO: 12254 - protein, 19 aa, Artificial Sequence
  Description of Artificial Sequence: Synthetic peptide
  XENP018636 vhCDR2
EIRLKSNNYAIHYAEPVKG

SEQ ID NO: 12255 - protein, 11 aa, Artificial Sequence
  Description of Artificial Sequence: Synthetic peptide
  XENP018636 vhCDR3
YYGNYGGYFDV

SEQ ID NO: 12256 - protein, 11 aa, Artificial Sequence
  Description of Artificial Sequence: Synthetic peptide
  XENP018636 vlCDR1
RASQSVSNDVA

SEQ ID NO: 12257 - protein, 7 aa, Artificial Sequence
  Description of Artificial Sequence: Synthetic peptide
  XENP018636 vlCDR2
YASHRYT

SEQ ID NO: 12258 - protein, 9 aa, Artificial Sequence
  Description of Artificial Sequence: Synthetic peptide
  XENP018636 vlCDR3
QQDYSSPRT

SEQ ID NO: 12259 - protein, 249 aa, Artificial Sequence
  Description of Artificial Sequence: Synthetic polypeptide
  XENP018637 1G6_H1.137_L1_scFv(GKPGS)4
EVQLVESGGGLVKPGGSLRLSCAASGFTFSNYWMNWVRQAPGKGLEWVGEIRLKSNNYATYYAEPVKGRFTISRDDSKSTVYLQMNSLKTEDTAVYYCTRYYGNYGGYFDVWGAGTLVTVSSGKPGSGKPGSGKPGSGKPGSSIVMTQSPATLSVSPGERATLSCRASQSVSNDVAWYQQKPGQSPRLLINYASHRYTGVPDRFTGSGYGTEFTLTISSLQSEDFAVYFCQQDYSSPRTFGGGTKVEIK

SEQ ID NO: 12260 - protein, 122 aa, Artificial Sequence
  Description of Artificial Sequence: Synthetic polypeptide
  VH of XENP018637
EVQLVESGGGLVKPGGSLRLSCAASGFTFSNYWMNWVRQAPGKGLEWVGEIRLKSNNYATYYAEPVKGRFTISRDDSKSTVYLQMNSLKTEDTAVYYCTRYYGNYGGYFDVWGAGTLVTVSS

SEQ ID NO: 12261 - protein, 107 aa, Artificial Sequence; identical to SEQ ID NO: 10923
  Description of Artificial Sequence: Synthetic polypeptide
  VL of XENP018637

SEQ ID NO: 12262 - protein, 5 aa, Artificial Sequence
  Description of Artificial Sequence: Synthetic peptide
  XENP018637 vhCDR1
NYWMN

SEQ ID NO: 12263 - protein, 19 aa, Artificial Sequence
  Description of Artificial Sequence: Synthetic peptide
  XENP018637 vhCDR2
EIRLKSNNYATYYAEPVKG

SEQ ID NO: 12264 - protein, 11 aa, Artificial Sequence
  Description of Artificial Sequence: Synthetic peptide
  XENP018637 vhCDR3
YYGNYGGYFDV

SEQ ID NO: 12265 - protein, 11 aa, Artificial Sequence
  Description of Artificial Sequence: Synthetic peptide
  XENP018637 vlCDR1
RASQSVSNDVA

SEQ ID NO: 12266 - protein, 7 aa, Artificial Sequence
  Description of Artificial Sequence: Synthetic peptide
  XENP018637 vlCDR2
YASHRYT

SEQ ID NO: 12267 - protein, 9 aa, Artificial Sequence
  Description of Artificial Sequence: Synthetic peptide
  XENP018637 vlCDR3
QQDYSSPRT

SEQ ID NO: 12268 - protein, 249 aa, Artificial Sequence
  Description of Artificial Sequence: Synthetic polypeptide
  XENP018638 1G6_H1.138_L1_scFv(GKPGS)4
EVQLVESGGGLVKPGGSLRLSCAASGFTFSNYWMNWVRQAPGKGLEWVGEIRLKSNNYATQYAEPVKGRFTISRDDSKSTVYLQMNSLKTEDTAVYYCTRYYGNYGGYFDVWGAGTLVTVSSGKPGSGKPGSGKPGSGKPGSSIVMTQSPATLSVSPGERATLSCRASQSVSNDVAWYQQKPGQSPRLLINYASHRYTGVPDRFTGSGYGTEFTLTISSLQSEDFAVYFCQQDYSSPRTFGGGTKVEIK

SEQ ID NO: 12269 - protein, 122 aa, Artificial Sequence
  Description of Artificial Sequence: Synthetic polypeptide
  VH of XENP018638
EVQLVESGGGLVKPGGSLRLSCAASGFTFSNYWMNWVRQAPGKGLEWVGEIRLKSNNYATQYAEPVKGRFTISRDDSKSTVYLQMNSLKTEDTAVYYCTRYYGNYGGYFDVWGAGTLVTVSS

SEQ ID NO: 12270 - protein, 107 aa, Artificial Sequence; identical to SEQ ID NO: 10923
  Description of Artificial Sequence: Synthetic polypeptide
  VL of XENP018638

SEQ ID NO: 12271 - protein, 5 aa, Artificial Sequence
  Description of Artificial Sequence: Synthetic peptide
  XENP018638 vhCDR1
NYWMN

SEQ ID NO: 12272 - protein, 19 aa, Artificial Sequence
  Description of Artificial Sequence: Synthetic peptide
  XENP018638 vhCDR2
EIRLKSNNYATQYAEPVKG

SEQ ID NO: 12273 - protein, 11 aa, Artificial Sequence
  Description of Artificial Sequence: Synthetic peptide
  XENP018638 vhCDR3
YYGNYGGYFDV

SEQ ID NO: 12274 - protein, 11 aa, Artificial Sequence
  Description of Artificial Sequence: Synthetic peptide
  XENP018638 vlCDR1
RASQSVSNDVA

SEQ ID NO: 12275 - protein, 7 aa, Artificial Sequence
  Description of Artificial Sequence: Synthetic peptide
  XENP018638 vlCDR2
YASHRYT

SEQ ID NO: 12276 - protein, 9 aa, Artificial Sequence
  Description of Artificial Sequence: Synthetic peptide
  XENP018638 vlCDR3
QQDYSSPRT

SEQ ID NO: 12277 - protein, 249 aa, Artificial Sequence
  Description of Artificial Sequence: Synthetic polypeptide
  XENP018639 1G6_H1.139_L1_scFv(GKPGS)4
EVQLVESGGGLVKPGGSLRLSCAASGFTFSNYWMNWVRQAPGKGLEWVGEIRLKSNNYATDYAEPVKGRFTISRDDSKSTVYLQMNSLKTEDTAVYYCTRYYGNYGGYFDVWGAGTLVTVSSGKPGSGKPGSGKPGSGKPGSSIVMTQSPATLSVSPGERATLSCRASQSVSNDVAWYQQKPGQSPRLLINYASHRYTGVPDRFTGSGYGTEFTLTISSLQSEDFAVYFCQQDYSSPRTFGGGTKVEIK

SEQ ID NO: 12278 - protein, 122 aa, Artificial Sequence
  Description of Artificial Sequence: Synthetic polypeptide
  VH of XENP018639
EVQLVESGGGLVKPGGSLRLSCAASGFTFSNYWMNWVRQAPGKGLEWVGEIRLKSNNYATDYAEPVKGRFTISRDDSKSTVYLQMNSLKTEDTAVYYCTRYYGNYGGYFDVWGAGTLVTVSS

SEQ ID NO: 12279 - protein, 107 aa, Artificial Sequence; identical to SEQ ID NO: 10923
  Description of Artificial Sequence: Synthetic polypeptide
  VL of XENP018639

SEQ ID NO: 12280 - protein, 5 aa, Artificial Sequence
  Description of Artificial Sequence: Synthetic peptide
  XENP018639 vhCDR1
NYWMN

SEQ ID NO: 12281 - protein, 19 aa, Artificial Sequence
  Description of Artificial Sequence: Synthetic peptide
  XENP018639 vhCDR2
EIRLKSNNYATDYAEPVKG

SEQ ID NO: 12282 - protein, 11 aa, Artificial Sequence
  Description of Artificial Sequence: Synthetic peptide
  XENP018639 vhCDR3
YYGNYGGYFDV

SEQ ID NO: 12283 - protein, 11 aa, Artificial Sequence
  Description of Artificial Sequence: Synthetic peptide
  XENP018639 vlCDR1
RASQSVSNDVA

SEQ ID NO: 12284 - protein, 7 aa, Artificial Sequence
  Description of Artificial Sequence: Synthetic peptide
  XENP018639 vlCDR2
YASHRYT

SEQ ID NO: 12285 - protein, 9 aa, Artificial Sequence
  Description of Artificial Sequence: Synthetic peptide
  XENP018639 vlCDR3
QQDYSSPRT

SEQ ID NO: 12286 - protein, 249 aa, Artificial Sequence
  Description of Artificial Sequence: Synthetic polypeptide
  XENP018640 1G6_H1.140_L1_scFv(GKPGS)4
EVQLVESGGGLVKPGGSLRLSCAASGFTFSNYWMNWVRQAPGKGLEWVGEIRLKSNNYATFYAEPVKGRFTISRDDSKSTVYLQMNSLKTEDTAVYYCTRYYGNYGGYFDVWGAGTLVTVSSGKPGSGKPGSGKPGSGKPGSSIVMTQSPATLSVSPGERATLSCRASQSVSNDVAWYQQKPGQSPRLLINYASHRYTGVPDRFTGSGYGTEFTLTISSLQSEDFAVYFCQQDYSSPRTFGGGTKVEIK

SEQ ID NO: 12287 - protein, 122 aa, Artificial Sequence
  Description of Artificial Sequence: Synthetic polypeptide
  VH of XENP018640
EVQLVESGGGLVKPGGSLRLSCAASGFTFSNYWMNWVRQAPGKGLEWVGEIRLKSNNYATFYAEPVKGRFTISRDDSKSTVYLQMNSLKTEDTAVYYCTRYYGNYGGYFDVWGAGTLVTVSS

SEQ ID NO: 12288 - protein, 107 aa, Artificial Sequence; identical to SEQ ID NO: 10923
  Description of Artificial Sequence: Synthetic polypeptide
  VL of XENP018640

SEQ ID NO: 12289 - protein, 5 aa, Artificial Sequence
  Description of Artificial Sequence: Synthetic peptide
  XENP018640 vhCDR1
NYWMN

SEQ ID NO: 12290 - protein, 19 aa, Artificial Sequence
  Description of Artificial Sequence: Synthetic peptide
  XENP018640 vhCDR2
EIRLKSNNYATFYAEPVKG

SEQ ID NO: 12291 - protein, 11 aa, Artificial Sequence
  Description of Artificial Sequence: Synthetic peptide
  XENP018640 vhCDR3
YYGNYGGYFDV

SEQ ID NO: 12292 - protein, 11 aa, Artificial Sequence
  Description of Artificial Sequence: Synthetic peptide
  XENP018640 vlCDR1
RASQSVSNDVA

SEQ ID NO: 12293 - protein, 7 aa, Artificial Sequence
  Description of Artificial Sequence: Synthetic peptide
  XENP018640 vlCDR2
YASHRYT

SEQ ID NO: 12294 - protein, 9 aa, Artificial Sequence
  Description of Artificial Sequence: Synthetic peptide
  XENP018640 vlCDR3
QQDYSSPRT

SEQ ID NO: 12295 - protein, 249 aa, Artificial Sequence
  Description of Artificial Sequence: Synthetic polypeptide
  XENP018641 1G6_H1.141_L1_scFv(GKPGS)4
EVQLVESGGGLVKPGGSLRLSCAASGFTFSNYWMNWVRQAPGKGLEWVGEIRLKSNNYATAYAEPVKGRFTISRDDSKSTVYLQMNSLKTEDTAVYYCTRYYGNYGGYFDVWGAGTLVTVSSGKPGSGKPGSGKPGSGKPGSSIVMTQSPATLSVSPGERATLSCRASQSVSNDVAWYQQKPGQSPRLLINYASHRYTGVPDRFTGSGYGTEFTLTISSLQSEDFAVYFCQQDYSSPRTFGGGTKVEIK

SEQ ID NO: 12296 - protein, 122 aa, Artificial Sequence
  Description of Artificial Sequence: Synthetic polypeptide
  VH of XENP018641
EVQLVESGGGLVKPGGSLRLSCAASGFTFSNYWMNWVRQAPGKGLEWVGEIRLKSNNYATAYAEPVKGRFTISRDDSKSTVYLQMNSLKTEDTAVYYCTRYYGNYGGYFDVWGAGTLVTVSS

SEQ ID NO: 12297 - protein, 107 aa, Artificial Sequence; identical to SEQ ID NO: 10923
  Description of Artificial Sequence: Synthetic polypeptide
  VL of XENP018641

SEQ ID NO: 12298 - protein, 5 aa, Artificial Sequence
  Description of Artificial Sequence: Synthetic peptide
  XENP018641 vhCDR1
NYWMN

SEQ ID NO: 12299 - protein, 19 aa, Artificial Sequence
  Description of Artificial Sequence: Synthetic peptide
  XENP018641 vhCDR2
EIRLKSNNYATAYAEPVKG

SEQ ID NO: 12300 - protein, 11 aa, Artificial Sequence
  Description of Artificial Sequence: Synthetic peptide
  XENP018641 vhCDR3
YYGNYGGYFDV

SEQ ID NO: 12301 - protein, 11 aa, Artificial Sequence
  Description of Artificial Sequence: Synthetic peptide
  XENP018641 vlCDR1
RASQSVSNDVA

SEQ ID NO: 12302 - protein, 7 aa, Artificial Sequence
  Description of Artificial Sequence: Synthetic peptide
  XENP018641 vlCDR2
YASHRYT

SEQ ID NO: 12303 - protein, 9 aa, Artificial Sequence
  Description of Artificial Sequence: Synthetic peptide
  XENP018641 vlCDR3
QQDYSSPRT

SEQ ID NO: 12304 - protein, 249 aa, Artificial Sequence
  Description of Artificial Sequence: Synthetic polypeptide
  XENP018642 1G6_H1.142_L1_scFv(GKPGS)4
EVQLVESGGGLVKPGGSLRLSCAASGFTFSNYWMNWVRQAPGKGLEWVGEIRLKSNNYATTYAEPVKGRFTISRDDSKSTVYLQMNSLKTEDTAVYYCTRYYGNYGGYFDVWGAGTLVTVSSGKPGSGKPGSGKPGSGKPGSSIVMTQSPATLSVSPGERATLSCRASQSVSNDVAWYQQKPGQSPRLLINYASHRYTGVPDRFTGSGYGTEFTLTISSLQSEDFAVYFCQQDYSSPRTFGGGTKVEIK

SEQ ID NO: 12305 - protein, 122 aa, Artificial Sequence
  Description of Artificial Sequence: Synthetic polypeptide
  VH of XENP018642
EVQLVESGGGLVKPGGSLRLSCAASGFTFSNYWMNWVRQAPGKGLEWVGEIRLKSNNYATTYAEPVKGRFTISRDDSKSTVYLQMNSLKTEDTAVYYCTRYYGNYGGYFDVWGAGTLVTVSS

SEQ ID NO: 12306 - protein, 107 aa, Artificial Sequence; identical to SEQ ID NO: 10923
  Description of Artificial Sequence: Synthetic polypeptide
  VL of XENP018642

SEQ ID NO: 12307 - protein, 5 aa, Artificial Sequence
  Description of Artificial Sequence: Synthetic peptide
  XENP018642 vhCDR1
NYWMN

SEQ ID NO: 12308 - protein, 19 aa, Artificial Sequence
  Description of Artificial Sequence: Synthetic peptide
  XENP018642 vhCDR2
EIRLKSNNYATTYAEPVKG

SEQ ID NO: 12309 - protein, 11 aa, Artificial Sequence
  Description of Artificial Sequence: Synthetic peptide
  XENP018642 vhCDR3
YYGNYGGYFDV

SEQ ID NO: 12310 - protein, 11 aa, Artificial Sequence
  Description of Artificial Sequence: Synthetic peptide
  XENP018642 vlCDR1
RASQSVSNDVA

SEQ ID NO: 12311 - protein, 7 aa, Artificial Sequence
  Description of Artificial Sequence: Synthetic peptide
  XENP018642 vlCDR2
YASHRYT

SEQ ID NO: 12312 - protein, 9 aa, Artificial Sequence
  Description of Artificial Sequence: Synthetic peptide
  XENP018642 vlCDR3
QQDYSSPRT

SEQ ID NO: 12313 - protein, 249 aa, Artificial Sequence
  Description of Artificial Sequence: Synthetic polypeptide
  XENP018643 1G6_H1.143_L1_scFv(GKPGS)4
EVQLVESGGGLVKPGGSLRLSCAASGFTFSNYWMNWVRQAPGKGLEWVGEIRLKSNNYATKYAEPVKGRFTISRDDSKSTVYLQMNSLKTEDTAVYYCTRYYGNYGGYFDVWGAGTLVTVSSGKPGSGKPGSGKPGSGKPGSSIVMTQSPATLSVSPGERATLSCRASQSVSNDVAWYQQKPGQSPRLLINYASHRYTGVPDRFTGSGYGTEFTLTISSLQSEDFAVYFCQQDYSSPRTFGGGTKVEIK

SEQ ID NO: 12314 - protein, 122 aa, Artificial Sequence
  Description of Artificial Sequence: Synthetic polypeptide
  VH of XENP018643
EVQLVESGGGLVKPGGSLRLSCAASGFTFSNYWMNWVRQAPGKGLEWVGEIRLKSNNYATKYAEPVKGRFTISRDDSKSTVYLQMNSLKTEDTAVYYCTRYYGNYGGYFDVWGAGTLVTVSS

SEQ ID NO: 12315 - protein, 107 aa, Artificial Sequence; identical to SEQ ID NO: 10923
  Description of Artificial Sequence: Synthetic polypeptide
  VL of XENP018643

SEQ ID NO: 12316 - protein, 5 aa, Artificial Sequence
  Description of Artificial Sequence: Synthetic peptide
  XENP018643 vhCDR1
NYWMN

SEQ ID NO: 12317 - protein, 19 aa, Artificial Sequence
  Description of Artificial Sequence: Synthetic peptide
  XENP018643 vhCDR2
EIRLKSNNYATKYAEPVKG

SEQ ID NO: 12318 - protein, 11 aa, Artificial Sequence
  Description of Artificial Sequence: Synthetic peptide
  XENP018643 vhCDR3
YYGNYGGYFDV

SEQ ID NO: 12319 - protein, 11 aa, Artificial Sequence
  Description of Artificial Sequence: Synthetic peptide
  XENP018643 vlCDR1
RASQSVSNDVA

SEQ ID NO: 12320 - protein, 7 aa, Artificial Sequence
  Description of Artificial Sequence: Synthetic peptide
  XENP018643 vlCDR2
YASHRYT

SEQ ID NO: 12321 - protein, 9 aa, Artificial Sequence
  Description of Artificial Sequence: Synthetic peptide
  XENP018643 vlCDR3
QQDYSSPRT

SEQ ID NO: 12322 - protein, 249 aa, Artificial Sequence
  Description of Artificial Sequence: Synthetic polypeptide
  XENP018644 1G6_H1.144_L1_scFv(GKPGS)4
EVQLVESGGGLVKPGGSLRLSCAASGFTFSNYWMNWVRQAPGKGLEWVGEIRLKSNNYATGYAEPVKGRFTISRDDSKSTVYLQMNSLKTEDTAVYYCTRYYGNYGGYFDVWGAGTLVTVSSGKPGSGKPGSGKPGSGKPGSSIVMTQSPATLSVSPGERATLSCRASQSVSNDVAWYQQKPGQSPRLLINYASHRYTGVPDRFTGSGYGTEFTLTISSLQSEDFAVYFCQQDYSSPRTFGGGTKVEIK

SEQ ID NO: 12323 - protein, 122 aa, Artificial Sequence
  Description of Artificial Sequence: Synthetic polypeptide
  VH of XENP018644
EVQLVESGGGLVKPGGSLRLSCAASGFTFSNYWMNWVRQAPGKGLEWVGEIRLKSNNYATGYAEPVKGRFTISRDDSKSTVYLQMNSLKTEDTAVYYCTRYYGNYGGYFDVWGAGTLVTVSS

SEQ ID NO: 12324 - protein, 107 aa, Artificial Sequence; identical to SEQ ID NO: 10923
  Description of Artificial Sequence: Synthetic polypeptide
  VL of XENP018644

SEQ ID NO: 12325 - protein, 5 aa, Artificial Sequence
  Description of Artificial Sequence: Synthetic peptide
  XENP018644 vhCDR1
NYWMN

SEQ ID NO: 12326 - protein, 19 aa, Artificial Sequence
  Description of Artificial Sequence: Synthetic peptide
  XENP018644 vhCDR2
EIRLKSNNYATGYAEPVKG

SEQ ID NO: 12327 - protein, 11 aa, Artificial Sequence
  Description of Artificial Sequence: Synthetic peptide
  XENP018644 vhCDR3
YYGNYGGYFDV

SEQ ID NO: 12328 - protein, 11 aa, Artificial Sequence
  Description of Artificial Sequence: Synthetic peptide
  XENP018644 vlCDR1
RASQSVSNDVA

SEQ ID NO: 12329 - protein, 7 aa, Artificial Sequence
  Description of Artificial Sequence: Synthetic peptide
  XENP018644 vlCDR2
YASHRYT

SEQ ID NO: 12330 - protein, 9 aa, Artificial Sequence
  Description of Artificial Sequence: Synthetic peptide
  XENP018644 vlCDR3
QQDYSSPRT

SEQ ID NO: 12331 - protein, 249 aa, Artificial Sequence
  Description of Artificial Sequence: Synthetic polypeptide
  XENP018645 1G6_H1.145_L1_scFv(GKPGS)4
EVQLVESGGGLVKPGGSLRLSCAASGFTFSNYWMNWVRQAPGKGLEWVGEIRLKSNNYATLYAEPVKGRFTISRDDSKSTVYLQMNSLKTEDTAVYYCTRYYGNYGGYFDVWGAGTLVTVSSGKPGSGKPGSGKPGSGKPGSSIVMTQSPATLSVSPGERATLSCRASQSVSNDVAWYQQKPGQSPRLLINYASHRYTGVPDRFTGSGYGTEFTLTISSLQSEDFAVYFCQQDYSSPRTFGGGTKVEIK

SEQ ID NO: 12332 - protein, 122 aa, Artificial Sequence
  Description of Artificial Sequence: Synthetic polypeptide
  VH of XENP018645
EVQLVESGGGLVKPGGSLRLSCAASGFTFSNYWMNWVRQAPGKGLEWVGEIRLKSNNYATLYAEPVKGRFTISRDDSKSTVYLQMNSLKTEDTAVYYCTRYYGNYGGYFDVWGAGTLVTVSS

SEQ ID NO: 12333 - protein, 107 aa, Artificial Sequence; identical to SEQ ID NO: 10923
  Description of Artificial Sequence: Synthetic polypeptide
  VL of XENP018645

SEQ ID NO: 12334 - protein, 5 aa, Artificial Sequence
  Description of Artificial Sequence: Synthetic peptide
  XENP018645 vhCDR1
NYWMN

SEQ ID NO: 12335 - protein, 19 aa, Artificial Sequence
  Description of Artificial Sequence: Synthetic peptide
  XENP018645 vhCDR2
EIRLKSNNYATLYAEPVKG

SEQ ID NO: 12336 - protein, 11 aa, Artificial Sequence
  Description of Artificial Sequence: Synthetic peptide
  XENP018645 vhCDR3
YYGNYGGYFDV

SEQ ID NO: 12337 - protein, 11 aa, Artificial Sequence
  Description of Artificial Sequence: Synthetic peptide
  XENP018645 vlCDR1
RASQSVSNDVA

SEQ ID NO: 12338 - protein, 7 aa, Artificial Sequence
  Description of Artificial Sequence: Synthetic peptide
  XENP018645 vlCDR2
YASHRYT

SEQ ID NO: 12339 - protein, 9 aa, Artificial Sequence
  Description of Artificial Sequence: Synthetic peptide
  XENP018645 vlCDR3
QQDYSSPRT

SEQ ID NO: 12340 - protein, 249 aa, Artificial Sequence
  Description of Artificial Sequence: Synthetic polypeptide
  XENP018646 1G6_H1.146_L1_scFv(GKPGS)4
EVQLVESGGGLVKPGGSLRLSCAASGFTFSNYWMNWVRQAPGKGLEWVGEIRLKSNNYATHYPEPVKGRFTISRDDSKSTVYLQMNSLKTEDTAVYYCTRYYGNYGGYFDVWGAGTLVTVSSGKPGSGKPGSGKPGSGKPGSSIVMTQSPATLSVSPGERATLSCRASQSVSNDVAWYQQKPGQSPRLLINYASHRYTGVPDRFTGSGYGTEFTLTISSLQSEDFAVYFCQQDYSSPRTFGGGTKVEIK

SEQ ID NO: 12341 - protein, 122 aa, Artificial Sequence
  Description of Artificial Sequence: Synthetic polypeptide
  VH of XENP018646
EVQLVESGGGLVKPGGSLRLSCAASGFTFSNYWMNWVRQAPGKGLEWVGEIRLKSNNYATHYPEPVKGRFTISRDDSKSTVYLQMNSLKTEDTAVYYCTRYYGNYGGYFDVWGAGTLVTVSS

SEQ ID NO: 12342 - protein, 107 aa, Artificial Sequence; identical to SEQ ID NO: 10923
  Description of Artificial Sequence: Synthetic polypeptide
  VL of XENP018646

SEQ ID NO: 12343 - protein, 5 aa, Artificial Sequence
  Description of Artificial Sequence: Synthetic peptide
  XENP018646 vhCDR1
NYWMN

SEQ ID NO: 12344 - protein, 19 aa, Artificial Sequence
  Description of Artificial Sequence: Synthetic peptide
  XENP018646 vhCDR2
EIRLKSNNYATHYPEPVKG

SEQ ID NO: 12345 - protein, 11 aa, Artificial Sequence
  Description of Artificial Sequence: Synthetic peptide
  XENP018646 vhCDR3
YYGNYGGYFDV

SEQ ID NO: 12346 - protein, 11 aa, Artificial Sequence
  Description of Artificial Sequence: Synthetic peptide
  XENP018646 vlCDR1
RASQSVSNDVA

SEQ ID NO: 12347 - protein, 7 aa, Artificial Sequence
  Description of Artificial Sequence: Synthetic peptide
  XENP018646 vlCDR2
YASHRYT

SEQ ID NO: 12348 - protein, 9 aa, Artificial Sequence
  Description of Artificial Sequence: Synthetic peptide
  XENP018646 vlCDR3
QQDYSSPRT

SEQ ID NO: 12349 - protein, 249 aa, Artificial Sequence
  Description of Artificial Sequence: Synthetic polypeptide
  XENP018647 1G6_H1.147_L1_scFv(GKPGS)4
EVQLVESGGGLVKPGGSLRLSCAASGFTFSNYWMNWVRQAPGKGLEWVGEIRLKSNNYATHYVEPVKGRFTISRDDSKSTVYLQMNSLKTEDTAVYYCTRYYGNYGGYFDVWGAGTLVTVSSGKPGSGKPGSGKPGSGKPGSSIVMTQSPATLSVSPGERATLSCRASQSVSNDVAWYQQKPGQSPRLLINYASHRYTGVPDRFTGSGYGTEFTLTISSLQSEDFAVYFCQQDYSSPRTFGGGTKVEIK

SEQ ID NO: 12350 - protein, 122 aa, Artificial Sequence
  Description of Artificial Sequence: Synthetic polypeptide
  VH of XENP018647
EVQLVESGGGLVKPGGSLRLSCAASGFTFSNYWMNWVRQAPGKGLEWVGEIRLKSNNYATHYVEPVKGRFTISRDDSKSTVYLQMNSLKTEDTAVYYCTRYYGNYGGYFDVWGAGTLVTVSS

SEQ ID NO: 12351 - protein, 107 aa, Artificial Sequence; identical to SEQ ID NO: 10923
  Description of Artificial Sequence: Synthetic polypeptide
  VL of XENP018647

SEQ ID NO: 12352 - protein, 5 aa, Artificial Sequence
  Description of Artificial Sequence: Synthetic peptide
  XENP018647 vhCDR1
NYWMN

SEQ ID NO: 12353 - protein, 19 aa, Artificial Sequence
  Description of Artificial Sequence: Synthetic peptide
  XENP018647 vhCDR2
EIRLKSNNYATHYVEPVKG

SEQ ID NO: 12354 - protein, 11 aa, Artificial Sequence
  Description of Artificial Sequence: Synthetic peptide
  XENP018647 vhCDR3
YYGNYGGYFDV

SEQ ID NO: 12355 - protein, 11 aa, Artificial Sequence
  Description of Artificial Sequence: Synthetic peptide
  XENP018647 vlCDR1
RASQSVSNDVA

SEQ ID NO: 12356 - protein, 7 aa, Artificial Sequence
  Description of Artificial Sequence: Synthetic peptide
  XENP018647 vlCDR2
YASHRYT

SEQ ID NO: 12357 - protein, 9 aa, Artificial Sequence
  Description of Artificial Sequence: Synthetic peptide
  XENP018647 vlCDR3
QQDYSSPRT

SEQ ID NO: 12358 - protein, 249 aa, Artificial Sequence
  Description of Artificial Sequence: Synthetic polypeptide
  XENP018648 1G6_H1.148_L1_scFv(GKPGS)4
EVQLVESGGGLVKPGGSLRLSCAASGFTFSNYWMNWVRQAPGKGLEWVGEIRLKSNNYATHYADPVKGRFTISRDDSKSTVYLQMNSLKTEDTAVYYCTRYYGNYGGYFDVWGAGTLVTVSSGKPGSGKPGSGKPGSGKPGSSIVMTQSPATLSVSPGERATLSCRASQSVSNDVAWYQQKPGQSPRLLINYASHRYTGVPDRFTGSGYGTEFTLTISSLQSEDFAVYFCQQDYSSPRTFGGGTKVEIK

SEQ ID NO: 12359 - protein, 122 aa, Artificial Sequence
  Description of Artificial Sequence: Synthetic polypeptide
  VH of XENP018648
EVQLVESGGGLVKPGGSLRLSCAASGFTFSNYWMNWVRQAPGKGLEWVGEIRLKSNNYATHYADPVKGRFTISRDDSKSTVYLQMNSLKTEDTAVYYCTRYYGNYGGYFDVWGAGTLVTVSS

SEQ ID NO: 12360 - protein, 107 aa, Artificial Sequence; identical to SEQ ID NO: 10923
  Description of Artificial Sequence: Synthetic polypeptide
  VL of XENP018648

SEQ ID NO: 12361 - protein, 5 aa, Artificial Sequence
  Description of Artificial Sequence: Synthetic peptide
  XENP018648 vhCDR1
NYWMN

SEQ ID NO: 12362 - protein, 19 aa, Artificial Sequence
  Description of Artificial Sequence: Synthetic peptide
  XENP018648 vhCDR2
EIRLKSNNYATHYADPVKG

SEQ ID NO: 12363 - protein, 11 aa, Artificial Sequence
  Description of Artificial Sequence: Synthetic peptide
  XENP018648 vhCDR3
YYGNYGGYFDV

SEQ ID NO: 12364 - protein, 11 aa, Artificial Sequence
  Description of Artificial Sequence: Synthetic peptide
  XENP018648 vlCDR1
RASQSVSNDVA

SEQ ID NO: 12365 - protein, 7 aa, Artificial Sequence
  Description of Artificial Sequence: Synthetic peptide
  XENP018648 vlCDR2
YASHRYT

SEQ ID NO: 12366 - protein, 9 aa, Artificial Sequence
  Description of Artificial Sequence: Synthetic peptide
  XENP018648 vlCDR3
QQDYSSPRT

SEQ ID NO: 12367 - protein, 249 aa, Artificial Sequence
  Description of Artificial Sequence: Synthetic polypeptide
  XENP018649 1G6_H1.149_L1_scFv(GKPGS)4
EVQLVESGGGLVKPGGSLRLSCAASGFTFSNYWMNWVRQAPGKGLEWVGEIRLKSNNYATHYAGPVKGRFTISRDDSKSTVYLQMNSLKTEDTAVYYCTRYYGNYGGYFDVWGAGTLVTVSSGKPGSGKPGSGKPGSGKPGSSIVMTQSPATLSVSPGERATLSCRASQSVSNDVAWYQQKPGQSPRLLINYASHRYTGVPDRFTGSGYGTEFTLTISSLQSEDFAVYFCQQDYSSPRTFGGGTKVEIK

SEQ ID NO: 12368 - protein, 122 aa, Artificial Sequence
  Description of Artificial Sequence: Synthetic polypeptide
  VH of XENP018649
EVQLVESGGGLVKPGGSLRLSCAASGFTFSNYWMNWVRQAPGKGLEWVGEIRLKSNNYATHYAGPVKGRFTISRDDSKSTVYLQMNSLKTEDTAVYYCTRYYGNYGGYFDVWGAGTLVTVSS

SEQ ID NO: 12369 - protein, 107 aa, Artificial Sequence; identical to SEQ ID NO: 10923
  Description of Artificial Sequence: Synthetic polypeptide
  VL of XENP018649

SEQ ID NO: 12370 - protein, 5 aa, Artificial Sequence
  Description of Artificial Sequence: Synthetic peptide
  XENP018649 vhCDR1
NYWMN

SEQ ID NO: 12371 - protein, 19 aa, Artificial Sequence
  Description of Artificial Sequence: Synthetic peptide
  XENP018649 vhCDR2
EIRLKSNNYATHYAGPVKG

SEQ ID NO: 12372 - protein, 11 aa, Artificial Sequence
  Description of Artificial Sequence: Synthetic peptide
  XENP018649 vhCDR3
YYGNYGGYFDV

SEQ ID NO: 12373 - protein, 11 aa, Artificial Sequence
  Description of Artificial Sequence: Synthetic peptide
  XENP018649 vlCDR1
RASQSVSNDVA

SEQ ID NO: 12374 - protein, 7 aa, Artificial Sequence
  Description of Artificial Sequence: Synthetic peptide
  XENP018649 vlCDR2
YASHRYT

SEQ ID NO: 12375 - protein, 9 aa, Artificial Sequence
  Description of Artificial Sequence: Synthetic peptide
  XENP018649 vlCDR3
QQDYSSPRT

SEQ ID NO: 12376 - protein, 249 aa, Artificial Sequence
  Description of Artificial Sequence: Synthetic polypeptide
  XENP018650 1G6_H1.150_L1_scFv(GKPGS)4
EVQLVESGGGLVKPGGSLRLSCAASGFTFSNYWMNWVRQAPGKGLEWVGEIRLKSNNYATHYAAPVKGRFTISRDDSKSTVYLQMNSLKTEDTAVYYCTRYYGNYGGYFDVWGAGTLVTVSSGKPGSGKPGSGKPGSGKPGSSIVMTQSPATLSVSPGERATLSCRASQSVSNDVAWYQQKPGQSPRLLINYASHRYTGVPDRFTGSGYGTEFTLTISSLQSEDFAVYFCQQDYSSPRTFGGGTKVEIK

SEQ ID NO: 12377 - protein, 122 aa, Artificial Sequence
  Description of Artificial Sequence: Synthetic polypeptide
  VH of XENP018650
EVQLVESGGGLVKPGGSLRLSCAASGFTFSNYWMNWVRQAPGKGLEWVGEIRLKSNNYATHYAAPVKGRFTISRDDSKSTVYLQMNSLKTEDTAVYYCTRYYGNYGGYFDVWGAGTLVTVSS

SEQ ID NO: 12378 - protein, 107 aa, Artificial Sequence; identical to SEQ ID NO: 10923
  Description of Artificial Sequence: Synthetic polypeptide
  VL of XENP018650

SEQ ID NO: 12379 - protein, 5 aa, Artificial Sequence
  Description of Artificial Sequence: Synthetic peptide
  XENP018650 vhCDR1
NYWMN

SEQ ID NO: 12380 - protein, 19 aa, Artificial Sequence
  Description of Artificial Sequence: Synthetic peptide
  XENP018650 vhCDR2
EIRLKSNNYATHYAAPVKG

SEQ ID NO: 12381 - protein, 11 aa, Artificial Sequence
  Description of Artificial Sequence: Synthetic peptide
  XENP018650 vhCDR3
YYGNYGGYFDV

SEQ ID NO: 12382 - protein, 11 aa, Artificial Sequence
  Description of Artificial Sequence: Synthetic peptide
  XENP018650 vlCDR1
RASQSVSNDVA

SEQ ID NO: 12383 - protein, 7 aa, Artificial Sequence
  Description of Artificial Sequence: Synthetic peptide
  XENP018650 vlCDR2
YASHRYT

SEQ ID NO: 12384 - protein, 9 aa, Artificial Sequence
  Description of Artificial Sequence: Synthetic peptide
  XENP018650 vlCDR3
QQDYSSPRT

SEQ ID NO: 12385 - protein, 249 aa, Artificial Sequence
  Description of Artificial Sequence: Synthetic polypeptide
  XENP018651 1G6_H1.151_L1_scFv(GKPGS)4
EVQLVESGGGLVKPGGSLRLSCAASGFTFSNYWMNWVRQAPGKGLEWVGEIRLKSNNYATHYAESVKGRFTISRDDSKSTVYLQMNSLKTEDTAVYYCTRYYGNYGGYFDVWGAGTLVTVSSGKPGSGKPGSGKPGSGKPGSSIVMTQSPATLSVSPGERATLSCRASQSVSNDVAWYQQKPGQSPRLLINYASHRYTGVPDRFTGSGYGTEFTLTISSLQSEDFAVYFCQQDYSSPRTFGGGTKVEIK

SEQ ID NO: 12386 - protein, 122 aa, Artificial Sequence
  Description of Artificial Sequence: Synthetic polypeptide
  VH of XENP018651
EVQLVESGGGLVKPGGSLRLSCAASGFTFSNYWMNWVRQAPGKGLEWVGEIRLKSNNYATHYAESVKGRFTISRDDSKSTVYLQMNSLKTEDTAVYYCTRYYGNYGGYFDVWGAGTLVTVSS

SEQ ID NO: 12387 - protein, 107 aa, Artificial Sequence; identical to SEQ ID NO: 10923
  Description of Artificial Sequence: Synthetic polypeptide
  VL of XENP018651

SEQ ID NO: 12388 - protein, 5 aa, Artificial Sequence
  Description of Artificial Sequence: Synthetic peptide
  XENP018651 vhCDR1
NYWMN

SEQ ID NO: 12389 - protein, 19 aa, Artificial Sequence
  Description of Artificial Sequence: Synthetic peptide
  XENP018651 vhCDR2
EIRLKSNNYATHYAESVKG

SEQ ID NO: 12390 - protein, 11 aa, Artificial Sequence
  Description of Artificial Sequence: Synthetic peptide
  XENP018651 vhCDR3
YYGNYGGYFDV

SEQ ID NO: 12391 - protein, 11 aa, Artificial Sequence
  Description of Artificial Sequence: Synthetic peptide
  XENP018651 vlCDR1
RASQSVSNDVA

SEQ ID NO: 12392 - protein, 7 aa, Artificial Sequence
  Description of Artificial Sequence: Synthetic peptide
  XENP018651 vlCDR2
YASHRYT

SEQ ID NO: 12393 - protein, 9 aa, Artificial Sequence
  Description of Artificial Sequence: Synthetic peptide
  XENP018651 vlCDR3
QQDYSSPRT

SEQ ID NO: 12394 - protein, 249 aa, Artificial Sequence
  Description of Artificial Sequence: Synthetic polypeptide
  XENP018652 1G6_H1.152_L1_scFv(GKPGS)4
EVQLVESGGGLVKPGGSLRLSCAASGFTFSNYWMNWVRQAPGKGLEWVGEIRLKSNNYATHYAEPVKGRFTISRDNSKSTVYLQMNSLKTEDTAVYYCTRYYGNYGGYFDVWGAGTLVTVSSGKPGSGKPGSGKPGSGKPGSSIVMTQSPATLSVSPGERATLSCRASQSVSNDVAWYQQKPGQSPRLLINYASHRYTGVPDRFTGSGYGTEFTLTISSLQSEDFAVYFCQQDYSSPRTFGGGTKVEIK

SEQ ID NO: 12395 - protein, 122 aa, Artificial Sequence
  Description of Artificial Sequence: Synthetic polypeptide
  VH of XENP018652
EVQLVESGGGLVKPGGSLRLSCAASGFTFSNYWMNWVRQAPGKGLEWVGEIRLKSNNYATHYAEPVKGRFTISRDNSKSTVYLQMNSLKTEDTAVYYCTRYYGNYGGYFDVWGAGTLVTVSS

SEQ ID NO: 12396 - protein, 107 aa, Artificial Sequence; identical to SEQ ID NO: 10923
  Description of Artificial Sequence: Synthetic polypeptide
  VL of XENP018652

SEQ ID NO: 12397 - protein, 5 aa, Artificial Sequence
  Description of Artificial Sequence: Synthetic peptide
  XENP018652 vhCDR1
NYWMN

SEQ ID NO: 12398 - protein, 19 aa, Artificial Sequence
  Description of Artificial Sequence: Synthetic peptide
  XENP018652 vhCDR2
EIRLKSNNYATHYAEPVKG

SEQ ID NO: 12399 - protein, 11 aa, Artificial Sequence
  Description of Artificial Sequence: Synthetic peptide
  XENP018652 vhCDR3
YYGNYGGYFDV

SEQ ID NO: 12400 - protein, 11 aa, Artificial Sequence
  Description of Artificial Sequence: Synthetic peptide
  XENP018652 vlCDR1
RASQSVSNDVA

SEQ ID NO: 12401 - protein, 7 aa, Artificial Sequence
  Description of Artificial Sequence: Synthetic peptide
  XENP018652 vlCDR2
YASHRYT

SEQ ID NO: 12402 - protein, 9 aa, Artificial Sequence
  Description of Artificial Sequence: Synthetic peptide
  XENP018652 vlCDR3
QQDYSSPRT

SEQ ID NO: 12403 - protein, 249 aa, Artificial Sequence
  Description of Artificial Sequence: Synthetic polypeptide
  XENP018653 1G6_H1.153_L1_scFv(GKPGS)4
EVQLVESGGGLVKPGGSLRLSCAASGFTFSNYWMNWVRQAPGKGLEWVGEIRLKSNNYATHYAEPVKGRFTISRDDSKNTVYLQMNSLKTEDTAVYYCTRYYGNYGGYFDVWGAGTLVTVSSGKPGSGKPGSGKPGSGKPGSSIVMTQSPATLSVSPGERATLSCRASQSVSNDVAWYQQKPGQSPRLLINYASHRYTGVPDRFTGSGYGTEFTLTISSLQSEDFAVYFCQQDYSSPRTFGGGTKVEIK

SEQ ID NO: 12404 - protein, 122 aa, Artificial Sequence
  Description of Artificial Sequence: Synthetic polypeptide
  VH of XENP018653
EVQLVESGGGLVKPGGSLRLSCAASGFTFSNYWMNWVRQAPGKGLEWVGEIRLKSNNYATHYAEPVKGRFTISRDDSKNTVYLQMNSLKTEDTAVYYCTRYYGNYGGYFDVWGAGTLVTVSS

SEQ ID NO: 12405 - protein, 107 aa, Artificial Sequence; identical to SEQ ID NO: 10923
  Description of Artificial Sequence: Synthetic polypeptide
  VL of XENP018653

SEQ ID NO: 12406 - protein, 5 aa, Artificial Sequence
  Description of Artificial Sequence: Synthetic peptide
  XENP018653 vhCDR1
NYWMN

SEQ ID NO: 12407 - protein, 19 aa, Artificial Sequence
  Description of Artificial Sequence: Synthetic peptide
  XENP018653 vhCDR2
EIRLKSNNYATHYAEPVKG

SEQ ID NO: 12408 - protein, 11 aa, Artificial Sequence
  Description of Artificial Sequence: Synthetic peptide
  XENP018653 vhCDR3
YYGNYGGYFDV

SEQ ID NO: 12409 - protein, 11 aa, Artificial Sequence
  Description of Artificial Sequence: Synthetic peptide
  XENP018653 vlCDR1
RASQSVSNDVA

SEQ ID NO: 12410 - protein, 7 aa, Artificial Sequence
  Description of Artificial Sequence: Synthetic peptide
  XENP018653 vlCDR2
YASHRYT

SEQ ID NO: 12411 - protein, 9 aa, Artificial Sequence
  Description of Artificial Sequence: Synthetic peptide
  XENP018653 vlCDR3
QQDYSSPRT

SEQ ID NO: 12412 - protein, 249 aa, Artificial Sequence
  Description of Artificial Sequence: Synthetic polypeptide
  XENP018654 1G6_H1.154_L1_scFv(GKPGS)4
EVQLVESGGGLVKPGGSLRLSCAASGFTFSNYWMNWVRQAPGKGLEWVGEIRLKSNNYATHYAEPVKGRFTISRDDSKSSVYLQMNSLKTEDTAVYYCTRYYGNYGGYFDVWGAGTLVTVSSGKPGSGKPGSGKPGSGKPGSSIVMTQSPATLSVSPGERATLSCRASQSVSNDVAWYQQKPGQSPRLLINYASHRYTGVPDRFTGSGYGTEFTLTISSLQSEDFAVYFCQQDYSSPRTFGGGTKVEIK

SEQ ID NO: 12413 - protein, 122 aa, Artificial Sequence
  Description of Artificial Sequence: Synthetic polypeptide
  VH of XENP018654
EVQLVESGGGLVKPGGSLRLSCAASGFTFSNYWMNWVRQAPGKGLEWVGEIRLKSNNYATHYAEPVKGRFTISRDDSKSSVYLQMNSLKTEDTAVYYCTRYYGNYGGYFDVWGAGTLVTVSS

SEQ ID NO: 12414 - protein, 107 aa, Artificial Sequence; identical to SEQ ID NO: 10923
  Description of Artificial Sequence: Synthetic polypeptide
  VL of XENP018654

SEQ ID NO: 12415 - protein, 5 aa, Artificial Sequence
  Description of Artificial Sequence: Synthetic peptide
  XENP018654 vhCDR1
NYWMN

SEQ ID NO: 12416 - protein, 19 aa, Artificial Sequence
  Description of Artificial Sequence: Synthetic peptide
  XENP018654 vhCDR2
EIRLKSNNYATHYAEPVKG

SEQ ID NO: 12417 - protein, 11 aa, Artificial Sequence
  Description of Artificial Sequence: Synthetic peptide
  XENP018654 vhCDR3
YYGNYGGYFDV

SEQ ID NO: 12418 - protein, 11 aa, Artificial Sequence
  Description of Artificial Sequence: Synthetic peptide
  XENP018654 vlCDR1
RASQSVSNDVA

SEQ ID NO: 12419 - protein, 7 aa, Artificial Sequence
  Description of Artificial Sequence: Synthetic peptide
  XENP018654 vlCDR2
YASHRYT

SEQ ID NO: 12420 - protein, 9 aa, Artificial Sequence
  Description of Artificial Sequence: Synthetic peptide
  XENP018654 vlCDR3
QQDYSSPRT

SEQ ID NO: 12421 - protein, 249 aa, Artificial Sequence
  Description of Artificial Sequence: Synthetic polypeptide
  XENP018655 1G6_H1.155_L1_scFv(GKPGS)4
EVQLVESGGGLVKPGGSLRLSCAASGFTFSNYWMNWVRQAPGKGLEWVGEIRLKSNNYATHYAEPVKGRFTISRDDSKSTLYLQMNSLKTEDTAVYYCTRYYGNYGGYFDVWGAGTLVTVSSGKPGSGKPGSGKPGSGKPGSSIVMTQSPATLSVSPGERATLSCRASQSVSNDVAWYQQKPGQSPRLLINYASHRYTGVPDRFTGSGYGTEFTLTISSLQSEDFAVYFCQQDYSSPRTFGGGTKVEIK

SEQ ID NO: 12422 - protein, 122 aa, Artificial Sequence
  Description of Artificial Sequence: Synthetic polypeptide
  VH of XENP018655
EVQLVESGGGLVKPGGSLRLSCAASGFTFSNYWMNWVRQAPGKGLEWVGEIRLKSNNYATHYAEPVKGRFTISRDDSKSTLYLQMNSLKTEDTAVYYCTRYYGNYGGYFDVWGAGTLVTVSS

SEQ ID NO: 12423 - protein, 107 aa, Artificial Sequence; identical to SEQ ID NO: 10923
  Description of Artificial Sequence: Synthetic polypeptide
  VL of XENP018655

SEQ ID NO: 12424 - protein, 5 aa, Artificial Sequence
  Description of Artificial Sequence: Synthetic peptide
  XENP018655 vhCDR1
NYWMN

SEQ ID NO: 12425 - protein, 19 aa, Artificial Sequence
  Description of Artificial Sequence: Synthetic peptide
  XENP018655 vhCDR2
EIRLKSNNYATHYAEPVKG

SEQ ID NO: 12426 - protein, 11 aa, Artificial Sequence
  Description of Artificial Sequence: Synthetic peptide
  XENP018655 vhCDR3
YYGNYGGYFDV

SEQ ID NO: 12427 - protein, 11 aa, Artificial Sequence
  Description of Artificial Sequence: Synthetic peptide
  XENP018655 vlCDR1
RASQSVSNDVA

SEQ ID NO: 12428 - protein, 7 aa, Artificial Sequence
  Description of Artificial Sequence: Synthetic peptide
  XENP018655 vlCDR2
YASHRYT

SEQ ID NO: 12429 - protein, 9 aa, Artificial Sequence
  Description of Artificial Sequence: Synthetic peptide
  XENP018655 vlCDR3
QQDYSSPRT

SEQ ID NO: 12430 - protein, 249 aa, Artificial Sequence
  Description of Artificial Sequence: Synthetic polypeptide
  XENP018656 1G6_H1.156_L1_scFv(GKPGS)4
EVQLVESGGGLVKPGGSLRLSCAASGFTFSNYWMNWVRQAPGKGLEWVGEIRLKSNNYATHYAEPVKGRFTISRDDSKSTAYLQMNSLKTEDTAVYYCTRYYGNYGGYFDVWGAGTLVTVSSGKPGSGKPGSGKPGSGKPGSSIVMTQSPATLSVSPGERATLSCRASQSVSNDVAWYQQKPGQSPRLLINYASHRYTGVPDRFTGSGYGTEFTLTISSLQSEDFAVYFCQQDYSSPRTFGGGTKVEIK

SEQ ID NO: 12431 - protein, 122 aa, Artificial Sequence
  Description of Artificial Sequence: Synthetic polypeptide
  VH of XENP018656
EVQLVESGGGLVKPGGSLRLSCAASGFTFSNYWMNWVRQAPGKGLEWVGEIRLKSNNYATHYAEPVKGRFTISRDDSKSTAYLQMNSLKTEDTAVYYCTRYYGNYGGYFDVWGAGTLVTVSS

SEQ ID NO: 12432 - protein, 107 aa, Artificial Sequence; identical to SEQ ID NO: 10923
  Description of Artificial Sequence: Synthetic polypeptide
  VL of XENP018656

SEQ ID NO: 12433 - protein, 5 aa, Artificial Sequence
  Description of Artificial Sequence: Synthetic peptide
  XENP018656 vhCDR1
NYWMN

SEQ ID NO: 12434 - protein, 19 aa, Artificial Sequence
  Description of Artificial Sequence: Synthetic peptide
  XENP018656 vhCDR2
EIRLKSNNYATHYAEPVKG

SEQ ID NO: 12435 - protein, 11 aa, Artificial Sequence
  Description of Artificial Sequence: Synthetic peptide
  XENP018656 vhCDR3
YYGNYGGYFDV

SEQ ID NO: 12436 - protein, 11 aa, Artificial Sequence
  Description of Artificial Sequence: Synthetic peptide
  XENP018656 vlCDR1
RASQSVSNDVA

SEQ ID NO: 12437 - protein, 7 aa, Artificial Sequence
  Description of Artificial Sequence: Synthetic peptide
  XENP018656 vlCDR2
YASHRYT

SEQ ID NO: 12438 - protein, 9 aa, Artificial Sequence
  Description of Artificial Sequence: Synthetic peptide
  XENP018656 vlCDR3
QQDYSSPRT

SEQ ID NO: 12439 - protein, 249 aa, Artificial Sequence
  Description of Artificial Sequence: Synthetic polypeptide
  XENP018657 1G6_H1.157_L1_scFv(GKPGS)4
EVQLVESGGGLVKPGGSLRLSCAASGFTFSNYWMNWVRQAPGKGLEWVGEIRLKSNNYATHYAEPVKGRFTISRDDSKSTVYLQMNNLKTEDTAVYYCTRYYGNYGGYFDVWGAGTLVTVSSGKPGSGKPGSGKPGSGKPGSSIVMTQSPATLSVSPGERATLSCRASQSVSNDVAWYQQKPGQSPRLLINYASHRYTGVPDRFTGSGYGTEFTLTISSLQSEDFAVYFCQQDYSSPRTFGGGTKVEIK

SEQ ID NO: 12440 - protein, 122 aa, Artificial Sequence
  Description of Artificial Sequence: Synthetic polypeptide
  VH of XENP018657
EVQLVESGGGLVKPGGSLRLSCAASGFTFSNYWMNWVRQAPGKGLEWVGEIRLKSNNYATHYAEPVKGRFTISRDDSKSTVYLQMNNLKTEDTAVYYCTRYYGNYGGYFDVWGAGTLVTVSS

SEQ ID NO: 12441 - protein, 107 aa, Artificial Sequence; identical to SEQ ID NO: 10923
  Description of Artificial Sequence: Synthetic polypeptide
  VL of XENP018657

SEQ ID NO: 12442 - protein, 5 aa, Artificial Sequence
  Description of Artificial Sequence: Synthetic peptide
  XENP018657 vhCDR1
NYWMN

SEQ ID NO: 12443 - protein, 19 aa, Artificial Sequence
  Description of Artificial Sequence: Synthetic peptide
  XENP018657 vhCDR2
EIRLKSNNYATHYAEPVKG

SEQ ID NO: 12444 - protein, 11 aa, Artificial Sequence
  Description of Artificial Sequence: Synthetic peptide
  XENP018657 vhCDR3
YYGNYGGYFDV

SEQ ID NO: 12445 - protein, 11 aa, Artificial Sequence
  Description of Artificial Sequence: Synthetic peptide
  XENP018657 vlCDR1
RASQSVSNDVA

SEQ ID NO: 12446 - protein, 7 aa, Artificial Sequence
  Description of Artificial Sequence: Synthetic peptide
  XENP018657 vlCDR2
YASHRYT

SEQ ID NO: 12447 - protein, 9 aa, Artificial Sequence
  Description of Artificial Sequence: Synthetic peptide
  XENP018657 vlCDR3
QQDYSSPRT

SEQ ID NO: 12448 - protein, 249 aa, Artificial Sequence
  Description of Artificial Sequence: Synthetic polypeptide
  XENP018658 1G6_H1.158_L1_scFv(GKPGS)4
EVQLVESGGGLVKPGGSLRLSCAASGFTFSNYWMNWVRQAPGKGLEWVGEIRLKSNNYATHYAEPVKGRFTISRDDSKSTVYLQMNSLRTEDTAVYYCTRYYGNYGGYFDVWGAGTLVTVSSGKPGSGKPGSGKPGSGKPGSSIVMTQSPATLSVSPGERATLSCRASQSVSNDVAWYQQKPGQSPRLLINYASHRYTGVPDRFTGSGYGTEFTLTISSLQSEDFAVYFCQQDYSSPRTFGGGTKVEIK

SEQ ID NO: 12449 - protein, 122 aa, Artificial Sequence
  Description of Artificial Sequence: Synthetic polypeptide
  VH of XENP018658
EVQLVESGGGLVKPGGSLRLSCAASGFTFSNYWMNWVRQAPGKGLEWVGEIRLKSNNYATHYAEPVKGRFTISRDDSKSTVYLQMNSLRTEDTAVYYCTRYYGNYGGYFDVWGAGTLVTVSS

SEQ ID NO: 12450 - protein, 107 aa, Artificial Sequence; identical to SEQ ID NO: 10923
  Description of Artificial Sequence: Synthetic polypeptide
  VL of XENP018658

SEQ ID NO: 12451 - protein, 5 aa, Artificial Sequence
  Description of Artificial Sequence: Synthetic peptide
  XENP018658 vhCDR1
NYWMN

SEQ ID NO: 12452 - protein, 19 aa, Artificial Sequence
  Description of Artificial Sequence: Synthetic peptide
  XENP018658 vhCDR2
EIRLKSNNYATHYAEPVKG

SEQ ID NO: 12453 - protein, 11 aa, Artificial Sequence
  Description of Artificial Sequence: Synthetic peptide
  XENP018658 vhCDR3
YYGNYGGYFDV

SEQ ID NO: 12454 - protein, 11 aa, Artificial Sequence
  Description of Artificial Sequence: Synthetic peptide
  XENP018658 vlCDR1
RASQSVSNDVA

SEQ ID NO: 12455 - protein, 7 aa, Artificial Sequence
  Description of Artificial Sequence: Synthetic peptide
  XENP018658 vlCDR2
YASHRYT

SEQ ID NO: 12456 - protein, 9 aa, Artificial Sequence
  Description of Artificial Sequence: Synthetic peptide
  XENP018658 vlCDR3
QQDYSSPRT

SEQ ID NO: 12457 - protein, 249 aa, Artificial Sequence
  Description of Artificial Sequence: Synthetic polypeptide
  XENP018659 1G6_H1.159_L1_scFv(GKPGS)4
EVQLVESGGGLVKPGGSLRLSCAASGFTFSNYWMNWVRQAPGKGLEWVGEIRLKSNNYATHYAEPVKGRFTISRDDSKSTVYLQMNSLKAEDTAVYYCTRYYGNYGGYFDVWGAGTLVTVSSGKPGSGKPGSGKPGSGKPGSSIVMTQSPATLSVSPGERATLSCRASQSVSNDVAWYQQKPGQSPRLLINYASHRYTGVPDRFTGSGYGTEFTLTISSLQSEDFAVYFCQQDYSSPRTFGGGTKVEIK

SEQ ID NO: 12458 - protein, 122 aa, Artificial Sequence
  Description of Artificial Sequence: Synthetic polypeptide
  VH of XENP018659
EVQLVESGGGLVKPGGSLRLSCAASGFTFSNYWMNWVRQAPGKGLEWVGEIRLKSNNYATHYAEPVKGRFTISRDDSKSTVYLQMNSLKAEDTAVYYCTRYYGNYGGYFDVWGAGTLVTVSS

SEQ ID NO: 12459 - protein, 107 aa, Artificial Sequence; identical to SEQ ID NO: 10923
  Description of Artificial Sequence: Synthetic polypeptide
  VL of XENP018659

SEQ ID NO: 12460 - protein, 5 aa, Artificial Sequence
  Description of Artificial Sequence: Synthetic peptide
  XENP018659 vhCDR1
NYWMN

SEQ ID NO: 12461 - protein, 19 aa, Artificial Sequence
  Description of Artificial Sequence: Synthetic peptide
  XENP018659 vhCDR2
EIRLKSNNYATHYAEPVKG

SEQ ID NO: 12462 - protein, 11 aa, Artificial Sequence
  Description of Artificial Sequence: Synthetic peptide
  XENP018659 vhCDR3
YYGNYGGYFDV

SEQ ID NO: 12463 - protein, 11 aa, Artificial Sequence
  Description of Artificial Sequence: Synthetic peptide
  XENP018659 vlCDR1
RASQSVSNDVA

SEQ ID NO: 12464 - protein, 7 aa, Artificial Sequence
  Description of Artificial Sequence: Synthetic peptide
  XENP018659 vlCDR2
YASHRYT

SEQ ID NO: 12465 - protein, 9 aa, Artificial Sequence
  Description of Artificial Sequence: Synthetic peptide
  XENP018659 vlCDR3
QQDYSSPRT

SEQ ID NO: 12466 - protein, 249 aa, Artificial Sequence
  Description of Artificial Sequence: Synthetic polypeptide
  XENP018660 1G6_H1.160_L1_scFv(GKPGS)4
EVQLVESGGGLVKPGGSLRLSCAASGFTFSNYWMNWVRQAPGKGLEWVGEIRLKSNNYATHYAEPVKGRFTISRDDSKSTVYLQMNSLKTEDTGVYYCTRYYGNYGGYFDVWGAGTLVTVSSGKPGSGKPGSGKPGSGKPGSSIVMTQSPATLSVSPGERATLSCRASQSVSNDVAWYQQKPGQSPRLLINYASHRYTGVPDRFTGSGYGTEFTLTISSLQSEDFAVYFCQQDYSSPRTFGGGTKVEIK

SEQ ID NO: 12467 - protein, 122 aa, Artificial Sequence
  Description of Artificial Sequence: Synthetic polypeptide
  VH of XENP018660
EVQLVESGGGLVKPGGSLRLSCAASGFTFSNYWMNWVRQAPGKGLEWVGEIRLKSNNYATHYAEPVKGRFTISRDDSKSTVYLQMNSLKTEDTGVYYCTRYYGNYGGYFDVWGAGTLVTVSS

SEQ ID NO: 12468 - protein, 107 aa, Artificial Sequence; identical to SEQ ID NO: 10923
  Description of Artificial Sequence: Synthetic polypeptide
  VL of XENP018660

SEQ ID NO: 12469 - protein, 5 aa, Artificial Sequence
  Description of Artificial Sequence: Synthetic peptide
  XENP018660 vhCDR1
NYWMN

SEQ ID NO: 12470 - protein, 19 aa, Artificial Sequence
  Description of Artificial Sequence: Synthetic peptide
  XENP018660 vhCDR2
EIRLKSNNYATHYAEPVKG

SEQ ID NO: 12471 - protein, 11 aa, Artificial Sequence
  Description of Artificial Sequence: Synthetic peptide
  XENP018660 vhCDR3
YYGNYGGYFDV

SEQ ID NO: 12472 - protein, 11 aa, Artificial Sequence
  Description of Artificial Sequence: Synthetic peptide
  XENP018660 vlCDR1
RASQSVSNDVA

SEQ ID NO: 12473 - protein, 7 aa, Artificial Sequence
  Description of Artificial Sequence: Synthetic peptide
  XENP018660 vlCDR2
YASHRYT

SEQ ID NO: 12474 - protein, 9 aa, Artificial Sequence
  Description of Artificial Sequence: Synthetic peptide
  XENP018660 vlCDR3
QQDYSSPRT

SEQ ID NO: 12475 - protein, 249 aa, Artificial Sequence
  Description of Artificial Sequence: Synthetic polypeptide
  XENP018661 1G6_H1.161_L1_scFv(GKPGS)4
EVQLVESGGGLVKPGGSLRLSCAASGFTFSNYWMNWVRQAPGKGLEWVGEIRLKSNNYATHYAEPVKGRFTISRDDSKSTVYLQMNSLKTEDTAIYYCTRYYGNYGGYFDVWGAGTLVTVSSGKPGSGKPGSGKPGSGKPGSSIVMTQSPATLSVSPGERATLSCRASQSVSNDVAWYQQKPGQSPRLLINYASHRYTGVPDRFTGSGYGTEFTLTISSLQSEDFAVYFCQQDYSSPRTFGGGTKVEIK

SEQ ID NO: 12476 - protein, 122 aa, Artificial Sequence
  Description of Artificial Sequence: Synthetic polypeptide
  VH of XENP018661
EVQLVESGGGLVKPGGSLRLSCAASGFTFSNYWMNWVRQAPGKGLEWVGEIRLKSNNYATHYAEPVKGRFTISRDDSKSTVYLQMNSLKTEDTAIYYCTRYYGNYGGYFDVWGAGTLVTVSS

SEQ ID NO: 12477 - protein, 107 aa, Artificial Sequence; identical to SEQ ID NO: 10923
  Description of Artificial Sequence: Synthetic polypeptide
  VL of XENP018661

SEQ ID NO: 12478 - protein, 5 aa, Artificial Sequence
  Description of Artificial Sequence: Synthetic peptide
  XENP018661 vhCDR1
NYWMN

SEQ ID NO: 12479 - protein, 19 aa, Artificial Sequence
  Description of Artificial Sequence: Synthetic peptide
  XENP018661 vhCDR2
EIRLKSNNYATHYAEPVKG

SEQ ID NO: 12480 - protein, 11 aa, Artificial Sequence
  Description of Artificial Sequence: Synthetic peptide
  XENP018661 vhCDR3
YYGNYGGYFDV

SEQ ID NO: 12481 - protein, 11 aa, Artificial Sequence
  Description of Artificial Sequence: Synthetic peptide
  XENP018661 vlCDR1
RASQSVSNDVA

SEQ ID NO: 12482 - protein, 7 aa, Artificial Sequence
  Description of Artificial Sequence: Synthetic peptide
  XENP018661 vlCDR2
YASHRYT

SEQ ID NO: 12483 - protein, 9 aa, Artificial Sequence
  Description of Artificial Sequence: Synthetic peptide
  XENP018661 vlCDR3
QQDYSSPRT

SEQ ID NO: 12484 - protein, 249 aa, Artificial Sequence
  Description of Artificial Sequence: Synthetic polypeptide
  XENP018662 1G6_H1.162_L1_scFv(GKPGS)4
EVQLVESGGGLVKPGGSLRLSCAASGFTFSNYWMNWVRQAPGKGLEWVGEIRLKSNNYATHYAEPVKGRFTISRDDSKSTVYLQMNSLKTEDTAVYHCTRYYGNYGGYFDVWGAGTLVTVSSGKPGSGKPGSGKPGSGKPGSSIVMTQSPATLSVSPGERATLSCRASQSVSNDVAWYQQKPGQSPRLLINYASHRYTGVPDRFTGSGYGTEFTLTISSLQSEDFAVYFCQQDYSSPRTFGGGTKVEIK

SEQ ID NO: 12485 - protein, 122 aa, Artificial Sequence
  Description of Artificial Sequence: Synthetic polypeptide
  VH of XENP018662
EVQLVESGGGLVKPGGSLRLSCAASGFTFSNYWMNWVRQAPGKGLEWVGEIRLKSNNYATHYAEPVKGRFTISRDDSKSTVYLQMNSLKTEDTAVYHCTRYYGNYGGYFDVWGAGTLVTVSS

SEQ ID NO: 12486 - protein, 107 aa, Artificial Sequence; identical to SEQ ID NO: 10923
  Description of Artificial Sequence: Synthetic polypeptide
  VL of XENP018662

SEQ ID NO: 12487 - protein, 5 aa, Artificial Sequence
  Description of Artificial Sequence: Synthetic peptide
  XENP018662 vhCDR1
NYWMN

SEQ ID NO: 12488 - protein, 19 aa, Artificial Sequence
  Description of Artificial Sequence: Synthetic peptide
  XENP018662 vhCDR2
EIRLKSNNYATHYAEPVKG

SEQ ID NO: 12489 - protein, 11 aa, Artificial Sequence
  Description of Artificial Sequence: Synthetic peptide
  XENP018662 vhCDR3
YYGNYGGYFDV

SEQ ID NO: 12490 - protein, 11 aa, Artificial Sequence
  Description of Artificial Sequence: Synthetic peptide
  XENP018662 vlCDR1
RASQSVSNDVA

SEQ ID NO: 12491 - protein, 7 aa, Artificial Sequence
  Description of Artificial Sequence: Synthetic peptide
  XENP018662 vlCDR2
YASHRYT

SEQ ID NO: 12492 - protein, 9 aa, Artificial Sequence
  Description of Artificial Sequence: Synthetic peptide
  XENP018662 vlCDR3
QQDYSSPRT

SEQ ID NO: 12493 - protein, 249 aa, Artificial Sequence
  Description of Artificial Sequence: Synthetic polypeptide
  XENP018663 1G6_H1.163_L1_scFv(GKPGS)4
EVQLVESGGGLVKPGGSLRLSCAASGFTFSNYWMNWVRQAPGKGLEWVGEIRLKSNNYATHYAEPVKGRFTISRDDSKSTVYLQMNSLKTEDTAVYYCARYYGNYGGYFDVWGAGTLVTVSSGKPGSGKPGSGKPGSGKPGSSIVMTQSPATLSVSPGERATLSCRASQSVSNDVAWYQQKPGQSPRLLINYASHRYTGVPDRFTGSGYGTEFTLTISSLQSEDFAVYFCQQDYSSPRTFGGGTKVEIK

SEQ ID NO: 12494 - protein, 122 aa, Artificial Sequence
  Description of Artificial Sequence: Synthetic polypeptide
  VH of XENP018663
EVQLVESGGGLVKPGGSLRLSCAASGFTFSNYWMNWVRQAPGKGLEWVGEIRLKSNNYATHYAEPVKGRFTISRDDSKSTVYLQMNSLKTEDTAVYYCARYYGNYGGYFDVWGAGTLVTVSS

SEQ ID NO: 12495 - protein, 107 aa, Artificial Sequence; identical to SEQ ID NO: 10923
  Description of Artificial Sequence: Synthetic polypeptide
  VL of XENP018663

SEQ ID NO: 12496 - protein, 5 aa, Artificial Sequence
  Description of Artificial Sequence: Synthetic peptide
  XENP018663 vhCDR1
NYWMN

SEQ ID NO: 12497 - protein, 19 aa, Artificial Sequence
  Description of Artificial Sequence: Synthetic peptide
  XENP018663 vhCDR2
EIRLKSNNYATHYAEPVKG

SEQ ID NO: 12498 - protein, 11 aa, Artificial Sequence
  Description of Artificial Sequence: Synthetic peptide
  XENP018663 vhCDR3
YYGNYGGYFDV

SEQ ID NO: 12499 - protein, 11 aa, Artificial Sequence
  Description of Artificial Sequence: Synthetic peptide
  XENP018663 vlCDR1
RASQSVSNDVA

SEQ ID NO: 12500 - protein, 7 aa, Artificial Sequence
  Description of Artificial Sequence: Synthetic peptide
  XENP018663 vlCDR2
YASHRYT

SEQ ID NO: 12501 - protein, 9 aa, Artificial Sequence
  Description of Artificial Sequence: Synthetic peptide
  XENP018663 vlCDR3
QQDYSSPRT

SEQ ID NO: 12502 - protein, 249 aa, Artificial Sequence
  Description of Artificial Sequence: Synthetic polypeptide
  XENP018664 1G6_H1.164_L1_scFv(GKPGS)4
EVQLVESGGGLVKPGGSLRLSCAASGFTFSNYWMNWVRQAPGKGLEWVGEIRLKSNNYATHYAEPVKGRFTISRDDSKSTVYLQMNSLKTEDTAVYYCVRYYGNYGGYFDVWGAGTLVTVSSGKPGSGKPGSGKPGSGKPGSSIVMTQSPATLSVSPGERATLSCRASQSVSNDVAWYQQKPGQSPRLLINYASHRYTGVPDRFTGSGYGTEFTLTISSLQSEDFAVYFCQQDYSSPRTFGGGTKVEIK

SEQ ID NO: 12503 - protein, 122 aa, Artificial Sequence
  Description of Artificial Sequence: Synthetic polypeptide
  VH of XENP018664
EVQLVESGGGLVKPGGSLRLSCAASGFTFSNYWMNWVRQAPGKGLEWVGEIRLKSNNYATHYAEPVKGRFTISRDDSKSTVYLQMNSLKTEDTAVYYCVRYYGNYGGYFDVWGAGTLVTVSS

SEQ ID NO: 12504 - protein, 107 aa, Artificial Sequence; identical to SEQ ID NO: 10923
  Description of Artificial Sequence: Synthetic polypeptide
  VL of XENP018664

SEQ ID NO: 12505 - protein, 5 aa, Artificial Sequence
  Description of Artificial Sequence: Synthetic peptide
  XENP018664 vhCDR1
NYWMN

SEQ ID NO: 12506 - protein, 19 aa, Artificial Sequence
  Description of Artificial Sequence: Synthetic peptide
  XENP018664 vhCDR2
EIRLKSNNYATHYAEPVKG

SEQ ID NO: 12507 - protein, 11 aa, Artificial Sequence
  Description of Artificial Sequence: Synthetic peptide
  XENP018664 vhCDR3
YYGNYGGYFDV

SEQ ID NO: 12508 - protein, 11 aa, Artificial Sequence
  Description of Artificial Sequence: Synthetic peptide
  XENP018664 vlCDR1
RASQSVSNDVA

SEQ ID NO: 12509 - protein, 7 aa, Artificial Sequence
  Description of Artificial Sequence: Synthetic peptide
  XENP018664 vlCDR2
YASHRYT

SEQ ID NO: 12510 - protein, 9 aa, Artificial Sequence
  Description of Artificial Sequence: Synthetic peptide
  XENP018664 vlCDR3
QQDYSSPRT

SEQ ID NO: 12511 - protein, 249 aa, Artificial Sequence
  Description of Artificial Sequence: Synthetic polypeptide
  XENP018665 1G6_H1.165_L1_scFv(GKPGS)4
EVQLVESGGGLVKPGGSLRLSCAASGFTFSNYWMNWVRQAPGKGLEWVGEIRLKSNNYATHYAEPVKGRFTISRDDSKSTVYLQMNSLKTEDTAVYYCTTYYGNYGGYFDVWGAGTLVTVSSGKPGSGKPGSGKPGSGKPGSSIVMTQSPATLSVSPGERATLSCRASQSVSNDVAWYQQKPGQSPRLLINYASHRYTGVPDRFTGSGYGTEFTLTISSLQSEDFAVYFCQQDYSSPRTFGGGTKVEIK

SEQ ID NO: 12512 - protein, 122 aa, Artificial Sequence
  Description of Artificial Sequence: Synthetic polypeptide
  VH of XENP018665
EVQLVESGGGLVKPGGSLRLSCAASGFTFSNYWMNWVRQAPGKGLEWVGEIRLKSNNYATHYAEPVKGRFTISRDDSKSTVYLQMNSLKTEDTAVYYCTTYYGNYGGYFDVWGAGTLVTVSS

SEQ ID NO: 12513 - protein, 107 aa, Artificial Sequence; identical to SEQ ID NO: 10923
  Description of Artificial Sequence: Synthetic polypeptide
  VL of XENP018665

SEQ ID NO: 12514 - protein, 5 aa, Artificial Sequence
  Description of Artificial Sequence: Synthetic peptide
  XENP018665 vhCDR1
NYWMN

SEQ ID NO: 12515 - protein, 19 aa, Artificial Sequence
  Description of Artificial Sequence: Synthetic peptide
  XENP018665 vhCDR2
EIRLKSNNYATHYAEPVKG

SEQ ID NO: 12516 - protein, 11 aa, Artificial Sequence
  Description of Artificial Sequence: Synthetic peptide
  XENP018665 vhCDR3
YYGNYGGYFDV

SEQ ID NO: 12517 - protein, 11 aa, Artificial Sequence
  Description of Artificial Sequence: Synthetic peptide
  XENP018665 vlCDR1
RASQSVSNDVA

SEQ ID NO: 12518 - protein, 7 aa, Artificial Sequence
  Description of Artificial Sequence: Synthetic peptide
  XENP018665 vlCDR2
YASHRYT

SEQ ID NO: 12519 - protein, 9 aa, Artificial Sequence
  Description of Artificial Sequence: Synthetic peptide
  XENP018665 vlCDR3
QQDYSSPRT

SEQ ID NO: 12520 - protein, 249 aa, Artificial Sequence
  Description of Artificial Sequence: Synthetic polypeptide
  XENP018666 1G6_H1.166_L1_scFv(GKPGS)4
EVQLVESGGGLVKPGGSLRLSCAASGFTFSNYWMNWVRQAPGKGLEWVGEIRLKSNNYATHYAEPVKGRFTISRDDSKSTVYLQMNSLKTEDTAVYYCTKYYGNYGGYFDVWGAGTLVTVSSGKPGSGKPGSGKPGSGKPGSSIVMTQSPATLSVSPGERATLSCRASQSVSNDVAWYQQKPGQSPRLLINYASHRYTGVPDRFTGSGYGTEFTLTISSLQSEDFAVYFCQQDYSSPRTFGGGTKVEIK

SEQ ID NO: 12521 - protein, 122 aa, Artificial Sequence
  Description of Artificial Sequence: Synthetic polypeptide
  VH of XENP018666
EVQLVESGGGLVKPGGSLRLSCAASGFTFSNYWMNWVRQAPGKGLEWVGEIRLKSNNYATHYAEPVKGRFTISRDDSKSTVYLQMNSLKTEDTAVYYCTKYYGNYGGYFDVWGAGTLVTVSS

SEQ ID NO: 12522 - protein, 107 aa, Artificial Sequence; identical to SEQ ID NO: 10923
  Description of Artificial Sequence: Synthetic polypeptide
  VL of XENP018666

SEQ ID NO: 12523 - protein, 5 aa, Artificial Sequence
  Description of Artificial Sequence: Synthetic peptide
  XENP018666 vhCDR1
NYWMN

SEQ ID NO: 12524 - protein, 19 aa, Artificial Sequence
  Description of Artificial Sequence: Synthetic peptide
  XENP018666 vhCDR2
EIRLKSNNYATHYAEPVKG

SEQ ID NO: 12525 - protein, 11 aa, Artificial Sequence
  Description of Artificial Sequence: Synthetic peptide
  XENP018666 vhCDR3
YYGNYGGYFDV

SEQ ID NO: 12526 - protein, 11 aa, Artificial Sequence
  Description of Artificial Sequence: Synthetic peptide
  XENP018666 vlCDR1
RASQSVSNDVA

SEQ ID NO: 12527 - protein, 7 aa, Artificial Sequence
  Description of Artificial Sequence: Synthetic peptide
  XENP018666 vlCDR2
YASHRYT

SEQ ID NO: 12528 - protein, 9 aa, Artificial Sequence
  Description of Artificial Sequence: Synthetic peptide
  XENP018666 vlCDR3
QQDYSSPRT

SEQ ID NO: 12529 - protein, 249 aa, Artificial Sequence
  Description of Artificial Sequence: Synthetic polypeptide
  XENP018667 1G6_H1.167_L1_scFv(GKPGS)4
EVQLVESGGGLVKPGGSLRLSCAASGFTFSNYWMNWVRQAPGKGLEWVGEIRLKSNNYATHYAEPVKGRFTISRDDSKSTVYLQMNSLKTEDTAVYYCTRFYGNYGGYFDVWGAGTLVTVSSGKPGSGKPGSGKPGSGKPGSSIVMTQSPATLSVSPGERATLSCRASQSVSNDVAWYQQKPGQSPRLLINYASHRYTGVPDRFTGSGYGTEFTLTISSLQSEDFAVYFCQQDYSSPRTFGGGTKVEIK

SEQ ID NO: 12530 - protein, 122 aa, Artificial Sequence
  Description of Artificial Sequence: Synthetic polypeptide
  VH of XENP018667
EVQLVESGGGLVKPGGSLRLSCAASGFTFSNYWMNWVRQAPGKGLEWVGEIRLKSNNYATHYAEPVKGRFTISRDDSKSTVYLQMNSLKTEDTAVYYCTRFYGNYGGYFDVWGAGTLVTVSS

SEQ ID NO: 12531 - protein, 107 aa, Artificial Sequence; identical to SEQ ID NO: 10923
  Description of Artificial Sequence: Synthetic polypeptide
  VL of XENP018667

SEQ ID NO: 12532 - protein, 5 aa, Artificial Sequence
  Description of Artificial Sequence: Synthetic peptide
  XENP018667 vhCDR1
NYWMN

SEQ ID NO: 12533 - protein, 19 aa, Artificial Sequence
  Description of Artificial Sequence: Synthetic peptide
  XENP018667 vhCDR2
EIRLKSNNYATHYAEPVKG

SEQ ID NO: 12534 - protein, 11 aa, Artificial Sequence
  Description of Artificial Sequence: Synthetic peptide
  XENP018667 vhCDR3
FYGNYGGYFDV

SEQ ID NO: 12535 - protein, 11 aa, Artificial Sequence
  Description of Artificial Sequence: Synthetic peptide
  XENP018667 vlCDR1
RASQSVSNDVA

SEQ ID NO: 12536 - protein, 7 aa, Artificial Sequence
  Description of Artificial Sequence: Synthetic peptide
  XENP018667 vlCDR2
YASHRYT

SEQ ID NO: 12537 - protein, 9 aa, Artificial Sequence
  Description of Artificial Sequence: Synthetic peptide
  XENP018667 vlCDR3
QQDYSSPRT

SEQ ID NO: 12538 - protein, 249 aa, Artificial Sequence
  Description of Artificial Sequence: Synthetic polypeptide
  XENP018668 1G6_H1.168_L1_scFv(GKPGS)4
EVQLVESGGGLVKPGGSLRLSCAASGFTFSNYWMNWVRQAPGKGLEWVGEIRLKSNNYATHYAEPVKGRFTISRDDSKSTVYLQMNSLKTEDTAVYYCTRHYGNYGGYFDVWGAGTLVTVSSGKPGSGKPGSGKPGSGKPGSSIVMTQSPATLSVSPGERATLSCRASQSVSNDVAWYQQKPGQSPRLLINYASHRYTGVPDRFTGSGYGTEFTLTISSLQSEDFAVYFCQQDYSSPRTFGGGTKVEIK

SEQ ID NO: 12539 - protein, 122 aa, Artificial Sequence
  Description of Artificial Sequence: Synthetic polypeptide
  VH of XENP018668
EVQLVESGGGLVKPGGSLRLSCAASGFTFSNYWMNWVRQAPGKGLEWVGEIRLKSNNYATHYAEPVKGRFTISRDDSKSTVYLQMNSLKTEDTAVYYCTRHYGNYGGYFDVWGAGTLVTVSS

SEQ ID NO: 12540 - protein, 107 aa, Artificial Sequence; identical to SEQ ID NO: 10923
  Description of Artificial Sequence: Synthetic polypeptide
  VL of XENP018668

SEQ ID NO: 12541 - protein, 5 aa, Artificial Sequence
  Description of Artificial Sequence: Synthetic peptide
  XENP018668 vhCDR1
NYWMN

SEQ ID NO: 12542 - protein, 19 aa, Artificial Sequence
  Description of Artificial Sequence: Synthetic peptide
  XENP018668 vhCDR2
EIRLKSNNYATHYAEPVKG

SEQ ID NO: 12543 - protein, 11 aa, Artificial Sequence
  Description of Artificial Sequence: Synthetic peptide
  XENP018668 vhCDR3
HYGNYGGYFDV

SEQ ID NO: 12544 - protein, 11 aa, Artificial Sequence
  Description of Artificial Sequence: Synthetic peptide
  XENP018668 vlCDR1
RASQSVSNDVA

SEQ ID NO: 12545 - protein, 7 aa, Artificial Sequence
  Description of Artificial Sequence: Synthetic peptide
  XENP018668 vlCDR2
YASHRYT

SEQ ID NO: 12546 - protein, 9 aa, Artificial Sequence
  Description of Artificial Sequence: Synthetic peptide
  XENP018668 vlCDR3
QQDYSSPRT

SEQ ID NO: 12547 - protein, 249 aa, Artificial Sequence
  Description of Artificial Sequence: Synthetic polypeptide
  XENP018669 1G6_H1.169_L1_scFv(GKPGS)4
EVQLVESGGGLVKPGGSLRLSCAASGFTFSNYWMNWVRQAPGKGLEWVGEIRLKSNNYATHYAEPVKGRFTISRDDSKSTVYLQMNSLKTEDTAVYYCTRLYGNYGGYFDVWGAGTLVTVSSGKPGSGKPGSGKPGSGKPGSSIVMTQSPATLSVSPGERATLSCRASQSVSNDVAWYQQKPGQSPRLLINYASHRYTGVPDRFTGSGYGTEFTLTISSLQSEDFAVYFCQQDYSSPRTFGGGTKVEIK

SEQ ID NO: 12548 - protein, 122 aa, Artificial Sequence
  Description of Artificial Sequence: Synthetic polypeptide
  VH of XENP018669
EVQLVESGGGLVKPGGSLRLSCAASGFTFSNYWMNWVRQAPGKGLEWVGEIRLKSNNYATHYAEPVKGRFTISRDDSKSTVYLQMNSLKTEDTAVYYCTRLYGNYGGYFDVWGAGTLVTVSS

SEQ ID NO: 12549 - protein, 107 aa, Artificial Sequence; identical to SEQ ID NO: 10923
  Description of Artificial Sequence: Synthetic polypeptide
  VL of XENP018669

SEQ ID NO: 12550 - protein, 5 aa, Artificial Sequence
  Description of Artificial Sequence: Synthetic peptide
  XENP018669 vhCDR1
NYWMN

SEQ ID NO: 12551 - protein, 19 aa, Artificial Sequence
  Description of Artificial Sequence: Synthetic peptide
  XENP018669 vhCDR2
EIRLKSNNYATHYAEPVKG

SEQ ID NO: 12552 - protein, 11 aa, Artificial Sequence
  Description of Artificial Sequence: Synthetic peptide
  XENP018669 vhCDR3
LYGNYGGYFDV

SEQ ID NO: 12553 - protein, 11 aa, Artificial Sequence
  Description of Artificial Sequence: Synthetic peptide
  XENP018669 vlCDR1
RASQSVSNDVA

SEQ ID NO: 12554 - protein, 7 aa, Artificial Sequence
  Description of Artificial Sequence: Synthetic peptide
  XENP018669 vlCDR2
YASHRYT

SEQ ID NO: 12555 - protein, 9 aa, Artificial Sequence
  Description of Artificial Sequence: Synthetic peptide
  XENP018669 vlCDR3
QQDYSSPRT

SEQ ID NO: 12556 - protein, 249 aa, Artificial Sequence
  Description of Artificial Sequence: Synthetic polypeptide
  XENP018670 1G6_H1.170_L1_scFv(GKPGS)4
EVQLVESGGGLVKPGGSLRLSCAASGFTFSNYWMNWVRQAPGKGLEWVGEIRLKSNNYATHYAEPVKGRFTISRDDSKSTVYLQMNSLKTEDTAVYYCTRWYGNYGGYFDVWGAGTLVTVSSGKPGSGKPGSGKPGSGKPGSSIVMTQSPATLSVSPGERATLSCRASQSVSNDVAWYQQKPGQSPRLLINYASHRYTGVPDRFTGSGYGTEFTLTISSLQSEDFAVYFCQQDYSSPRTFGGGTKVEIK

SEQ ID NO: 12557 - protein, 122 aa, Artificial Sequence
  Description of Artificial Sequence: Synthetic polypeptide
  VH of XENP018670
EVQLVESGGGLVKPGGSLRLSCAASGFTFSNYWMNWVRQAPGKGLEWVGEIRLKSNNYATHYAEPVKGRFTISRDDSKSTVYLQMNSLKTEDTAVYYCTRWYGNYGGYFDVWGAGTLVTVSS

SEQ ID NO: 12558 - protein, 107 aa, Artificial Sequence; identical to SEQ ID NO: 10923
  Description of Artificial Sequence: Synthetic polypeptide
  VL of XENP018670

SEQ ID NO: 12559 - protein, 5 aa, Artificial Sequence
  Description of Artificial Sequence: Synthetic peptide
  XENP018670 vhCDR1
NYWMN

SEQ ID NO: 12560 - protein, 19 aa, Artificial Sequence
  Description of Artificial Sequence: Synthetic peptide
  XENP018670 vhCDR2
EIRLKSNNYATHYAEPVKG

SEQ ID NO: 12561 - protein, 11 aa, Artificial Sequence
  Description of Artificial Sequence: Synthetic peptide
  XENP018670 vhCDR3
WYGNYGGYFDV

SEQ ID NO: 12562 - protein, 11 aa, Artificial Sequence
  Description of Artificial Sequence: Synthetic peptide
  XENP018670 vlCDR1
RASQSVSNDVA

SEQ ID NO: 12563 - protein, 7 aa, Artificial Sequence
  Description of Artificial Sequence: Synthetic peptide
  XENP018670 vlCDR2
YASHRYT

SEQ ID NO: 12564 - protein, 9 aa, Artificial Sequence
  Description of Artificial Sequence: Synthetic peptide
  XENP018670 vlCDR3
QQDYSSPRT

SEQ ID NO: 12565 - protein, 249 aa, Artificial Sequence
  Description of Artificial Sequence: Synthetic polypeptide
  XENP018671 1G6_H1.171_L1_scFv(GKPGS)4
EVQLVESGGGLVKPGGSLRLSCAASGFTFSNYWMNWVRQAPGKGLEWVGEIRLKSNNYATHYAEPVKGRFTISRDDSKSTVYLQMNSLKTEDTAVYYCTRVYGNYGGYFDVWGAGTLVTVSSGKPGSGKPGSGKPGSGKPGSSIVMTQSPATLSVSPGERATLSCRASQSVSNDVAWYQQKPGQSPRLLINYASHRYTGVPDRFTGSGYGTEFTLTISSLQSEDFAVYFCQQDYSSPRTFGGGTKVEIK

SEQ ID NO: 12566 - protein, 122 aa, Artificial Sequence
  Description of Artificial Sequence: Synthetic polypeptide
  VH of XENP018671
EVQLVESGGGLVKPGGSLRLSCAASGFTFSNYWMNWVRQAPGKGLEWVGEIRLKSNNYATHYAEPVKGRFTISRDDSKSTVYLQMNSLKTEDTAVYYCTRVYGNYGGYFDVWGAGTLVTVSS

SEQ ID NO: 12567 - protein, 107 aa, Artificial Sequence; identical to SEQ ID NO: 10923
  Description of Artificial Sequence: Synthetic polypeptide
  VL of XENP018671

SEQ ID NO: 12568 - protein, 5 aa, Artificial Sequence
  Description of Artificial Sequence: Synthetic peptide
  XENP018671 vhCDR1
NYWMN

SEQ ID NO: 12569 - protein, 19 aa, Artificial Sequence
  Description of Artificial Sequence: Synthetic peptide
  XENP018671 vhCDR2
EIRLKSNNYATHYAEPVKG

SEQ ID NO: 12570 - protein, 11 aa, Artificial Sequence
  Description of Artificial Sequence: Synthetic peptide
  XENP018671 vhCDR3
VYGNYGGYFDV

SEQ ID NO: 12571 - protein, 11 aa, Artificial Sequence
  Description of Artificial Sequence: Synthetic peptide
  XENP018671 vlCDR1
RASQSVSNDVA

SEQ ID NO: 12572 - protein, 7 aa, Artificial Sequence
  Description of Artificial Sequence: Synthetic peptide
  XENP018671 vlCDR2
YASHRYT

SEQ ID NO: 12573 - protein, 9 aa, Artificial Sequence
  Description of Artificial Sequence: Synthetic peptide
  XENP018671 vlCDR3
QQDYSSPRT

SEQ ID NO: 12574 - protein, 249 aa, Artificial Sequence
  Description of Artificial Sequence: Synthetic polypeptide
  XENP018672 1G6_H1.172_L1_scFv(GKPGS)4
EVQLVESGGGLVKPGGSLRLSCAASGFTFSNYWMNWVRQAPGKGLEWVGEIRLKSNNYATHYAEPVKGRFTISRDDSKSTVYLQMNSLKTEDTAVYYCTRAYGNYGGYFDVWGAGTLVTVSSGKPGSGKPGSGKPGSGKPGSSIVMTQSPATLSVSPGERATLSCRASQSVSNDVAWYQQKPGQSPRLLINYASHRYTGVPDRFTGSGYGTEFTLTISSLQSEDFAVYFCQQDYSSPRTFGGGTKVEIK

SEQ ID NO: 12575 - protein, 122 aa, Artificial Sequence
  Description of Artificial Sequence: Synthetic polypeptide
  VH of XENP018672
EVQLVESGGGLVKPGGSLRLSCAASGFTFSNYWMNWVRQAPGKGLEWVGEIRLKSNNYATHYAEPVKGRFTISRDDSKSTVYLQMNSLKTEDTAVYYCTRAYGNYGGYFDVWGAGTLVTVSS

SEQ ID NO: 12576 - protein, 107 aa, Artificial Sequence; identical to SEQ ID NO: 10923
  Description of Artificial Sequence: Synthetic polypeptide
  VL of XENP018672

SEQ ID NO: 12577 - protein, 5 aa, Artificial Sequence
  Description of Artificial Sequence: Synthetic peptide
  XENP018672 vhCDR1
NYWMN

SEQ ID NO: 12578 - protein, 19 aa, Artificial Sequence
  Description of Artificial Sequence: Synthetic peptide
  XENP018672 vhCDR2
EIRLKSNNYATHYAEPVKG

SEQ ID NO: 12579 - protein, 11 aa, Artificial Sequence
  Description of Artificial Sequence: Synthetic peptide
  XENP018672 vhCDR3
AYGNYGGYFDV

SEQ ID NO: 12580 - protein, 11 aa, Artificial Sequence
  Description of Artificial Sequence: Synthetic peptide
  XENP018672 vlCDR1
RASQSVSNDVA

SEQ ID NO: 12581 - protein, 7 aa, Artificial Sequence
  Description of Artificial Sequence: Synthetic peptide
  XENP018672 vlCDR2
YASHRYT

SEQ ID NO: 12582 - protein, 9 aa, Artificial Sequence
  Description of Artificial Sequence: Synthetic peptide
  XENP018672 vlCDR3
QQDYSSPRT

SEQ ID NO: 12583 - protein, 249 aa, Artificial Sequence
  Description of Artificial Sequence: Synthetic polypeptide
  XENP018673 1G6_H1.173_L1_scFv(GKPGS)4
EVQLVESGGGLVKPGGSLRLSCAASGFTFSNYWMNWVRQAPGKGLEWVGEIRLKSNNYATHYAEPVKGRFTISRDDSKSTVYLQMNSLKTEDTAVYYCTRQYGNYGGYFDVWGAGTLVTVSSGKPGSGKPGSGKPGSGKPGSSIVMTQSPATLSVSPGERATLSCRASQSVSNDVAWYQQKPGQSPRLLINYASHRYTGVPDRFTGSGYGTEFTLTISSLQSEDFAVYFCQQDYSSPRTFGGGTKVEIK

SEQ ID NO: 12584 - protein, 122 aa, Artificial Sequence
  Description of Artificial Sequence: Synthetic polypeptide
  VH of XENP018673
EVQLVESGGGLVKPGGSLRLSCAASGFTFSNYWMNWVRQAPGKGLEWVGEIRLKSNNYATHYAEPVKGRFTISRDDSKSTVYLQMNSLKTEDTAVYYCTRQYGNYGGYFDVWGAGTLVTVSS

SEQ ID NO: 12585 - protein, 107 aa, Artificial Sequence; identical to SEQ ID NO: 10923
  Description of Artificial Sequence: Synthetic polypeptide
  VL of XENP018673

SEQ ID NO: 12586 - protein, 5 aa, Artificial Sequence
  Description of Artificial Sequence: Synthetic peptide
  XENP018673 vhCDR1
NYWMN

SEQ ID NO: 12587 - protein, 19 aa, Artificial Sequence
  Description of Artificial Sequence: Synthetic peptide
  XENP018673 vhCDR2
EIRLKSNNYATHYAEPVKG

SEQ ID NO: 12588 - protein, 11 aa, Artificial Sequence
  Description of Artificial Sequence: Synthetic peptide
  XENP018673 vhCDR3
QYGNYGGYFDV

SEQ ID NO: 12589 - protein, 11 aa, Artificial Sequence
  Description of Artificial Sequence: Synthetic peptide
  XENP018673 vlCDR1
RASQSVSNDVA

SEQ ID NO: 12590 - protein, 7 aa, Artificial Sequence
  Description of Artificial Sequence: Synthetic peptide
  XENP018673 vlCDR2
YASHRYT

SEQ ID NO: 12591 - protein, 9 aa, Artificial Sequence
  Description of Artificial Sequence: Synthetic peptide
  XENP018673 vlCDR3
QQDYSSPRT

SEQ ID NO: 12592 - protein, 249 aa, Artificial Sequence
  Description of Artificial Sequence: Synthetic polypeptide
  XENP018674 1G6_H1.174_L1_scFv(GKPGS)4
EVQLVESGGGLVKPGGSLRLSCAASGFTFSNYWMNWVRQAPGKGLEWVGEIRLKSNNYATHYAEPVKGRFTISRDDSKSTVYLQMNSLKTEDTAVYYCTRDYGNYGGYFDVWGAGTLVTVSSGKPGSGKPGSGKPGSGKPGSSIVMTQSPATLSVSPGERATLSCRASQSVSNDVAWYQQKPGQSPRLLINYASHRYTGVPDRFTGSGYGTEFTLTISSLQSEDFAVYFCQQDYSSPRTFGGGTKVEIK

SEQ ID NO: 12593 - protein, 122 aa, Artificial Sequence
  Description of Artificial Sequence: Synthetic polypeptide
  VH of XENP018674
EVQLVESGGGLVKPGGSLRLSCAASGFTFSNYWMNWVRQAPGKGLEWVGEIRLKSNNYATHYAEPVKGRFTISRDDSKSTVYLQMNSLKTEDTAVYYCTRDYGNYGGYFDVWGAGTLVTVSS

SEQ ID NO: 12594 - protein, 107 aa, Artificial Sequence; identical to SEQ ID NO: 10923
  Description of Artificial Sequence: Synthetic polypeptide
  VL of XENP018674

SEQ ID NO: 12595 - protein, 5 aa, Artificial Sequence
  Description of Artificial Sequence: Synthetic peptide
  XENP018674 vhCDR1
NYWMN

SEQ ID NO: 12596 - protein, 19 aa, Artificial Sequence
  Description of Artificial Sequence: Synthetic peptide
  XENP018674 vhCDR2
EIRLKSNNYATHYAEPVKG

SEQ ID NO: 12597 - protein, 11 aa, Artificial Sequence
  Description of Artificial Sequence: Synthetic peptide
  XENP018674 vhCDR3
DYGNYGGYFDV

SEQ ID NO: 12598 - protein, 11 aa, Artificial Sequence
  Description of Artificial Sequence: Synthetic peptide
  XENP018674 vlCDR1
RASQSVSNDVA

SEQ ID NO: 12599 - protein, 7 aa, Artificial Sequence
  Description of Artificial Sequence: Synthetic peptide
  XENP018674 vlCDR2
YASHRYT

SEQ ID NO: 12600 - protein, 9 aa, Artificial Sequence
  Description of Artificial Sequence: Synthetic peptide
  XENP018674 vlCDR3
QQDYSSPRT

SEQ ID NO: 12601 - protein, 249 aa, Artificial Sequence
  Description of Artificial Sequence: Synthetic polypeptide
  XENP018675 1G6_H1.175_L1_scFv(GKPGS)4
EVQLVESGGGLVKPGGSLRLSCAASGFTFSNYWMNWVRQAPGKGLEWVGEIRLKSNNYATHYAEPVKGRFTISRDDSKSTVYLQMNSLKTEDTAVYYCTRKYGNYGGYFDVWGAGTLVTVSSGKPGSGKPGSGKPGSGKPGSSIVMTQSPATLSVSPGERATLSCRASQSVSNDVAWYQQKPGQSPRLLINYASHRYTGVPDRFTGSGYGTEFTLTISSLQSEDFAVYFCQQDYSSPRTFGGGTKVEIK

SEQ ID NO: 12602 - protein, 122 aa, Artificial Sequence
  Description of Artificial Sequence: Synthetic polypeptide
  VH of XENP018675
EVQLVESGGGLVKPGGSLRLSCAASGFTFSNYWMNWVRQAPGKGLEWVGEIRLKSNNYATHYAEPVKGRFTISRDDSKSTVYLQMNSLKTEDTAVYYCTRKYGNYGGYFDVWGAGTLVTVSS

SEQ ID NO: 12603 - protein, 107 aa, Artificial Sequence; identical to SEQ ID NO: 10923
  Description of Artificial Sequence: Synthetic polypeptide
  VL of XENP018675

SEQ ID NO: 12604 - protein, 5 aa, Artificial Sequence
  Description of Artificial Sequence: Synthetic peptide
  XENP018675 vhCDR1
NYWMN

SEQ ID NO: 12605 - protein, 19 aa, Artificial Sequence
  Description of Artificial Sequence: Synthetic peptide
  XENP018675 vhCDR2
EIRLKSNNYATHYAEPVKG

SEQ ID NO: 12606 - protein, 11 aa, Artificial Sequence
  Description of Artificial Sequence: Synthetic peptide
  XENP018675 vhCDR3
KYGNYGGYFDV

SEQ ID NO: 12607 - protein, 11 aa, Artificial Sequence
  Description of Artificial Sequence: Synthetic peptide
  XENP018675 vlCDR1
RASQSVSNDVA

SEQ ID NO: 12608 - protein, 7 aa, Artificial Sequence
  Description of Artificial Sequence: Synthetic peptide
  XENP018675 vlCDR2
YASHRYT

SEQ ID NO: 12609 - protein, 9 aa, Artificial Sequence
  Description of Artificial Sequence: Synthetic peptide
  XENP018675 vlCDR3
QQDYSSPRT

SEQ ID NO: 12610 - protein, 249 aa, Artificial Sequence
  Description of Artificial Sequence: Synthetic polypeptide
  XENP018676 1G6_H1.176_L1_scFv(GKPGS)4
EVQLVESGGGLVKPGGSLRLSCAASGFTFSNYWMNWVRQAPGKGLEWVGEIRLKSNNYATHYAEPVKGRFTISRDDSKSTVYLQMNSLKTEDTAVYYCTRYFGNYGGYFDVWGAGTLVTVSSGKPGSGKPGSGKPGSGKPGSSIVMTQSPATLSVSPGERATLSCRASQSVSNDVAWYQQKPGQSPRLLINYASHRYTGVPDRFTGSGYGTEFTLTISSLQSEDFAVYFCQQDYSSPRTFGGGTKVEIK

SEQ ID NO: 12611 - protein, 122 aa, Artificial Sequence
  Description of Artificial Sequence: Synthetic polypeptide
  VH of XENP018676
EVQLVESGGGLVKPGGSLRLSCAASGFTFSNYWMNWVRQAPGKGLEWVGEIRLKSNNYATHYAEPVKGRFTISRDDSKSTVYLQMNSLKTEDTAVYYCTRYFGNYGGYFDVWGAGTLVTVSS

SEQ ID NO: 12612 - protein, 107 aa, Artificial Sequence; identical to SEQ ID NO: 10923
  Description of Artificial Sequence: Synthetic polypeptide
  VL of XENP018676

SEQ ID NO: 12613 - protein, 5 aa, Artificial Sequence
  Description of Artificial Sequence: Synthetic peptide
  XENP018676 vhCDR1
NYWMN

SEQ ID NO: 12614 - protein, 19 aa, Artificial Sequence
  Description of Artificial Sequence: Synthetic peptide
  XENP018676 vhCDR2
EIRLKSNNYATHYAEPVKG

SEQ ID NO: 12615 - protein, 11 aa, Artificial Sequence
  Description of Artificial Sequence: Synthetic peptide
  XENP018676 vhCDR3
YFGNYGGYFDV

SEQ ID NO: 12616 - protein, 11 aa, Artificial Sequence
  Description of Artificial Sequence: Synthetic peptide
  XENP018676 vlCDR1
RASQSVSNDVA

SEQ ID NO: 12617 - protein, 7 aa, Artificial Sequence
  Description of Artificial Sequence: Synthetic peptide
  XENP018676 vlCDR2
YASHRYT

SEQ ID NO: 12618 - protein, 9 aa, Artificial Sequence
  Description of Artificial Sequence: Synthetic peptide
  XENP018676 vlCDR3
QQDYSSPRT

SEQ ID NO: 12619 - protein, 249 aa, Artificial Sequence
  Description of Artificial Sequence: Synthetic polypeptide
  XENP018677 1G6_H1.177_L1_scFv(GKPGS)4
EVQLVESGGGLVKPGGSLRLSCAASGFTFSNYWMNWVRQAPGKGLEWVGEIRLKSNNYATHYAEPVKGRFTISRDDSKSTVYLQMNSLKTEDTAVYYCTRYHGNYGGYFDVWGAGTLVTVSSGKPGSGKPGSGKPGSGKPGSSIVMTQSPATLSVSPGERATLSCRASQSVSNDVAWYQQKPGQSPRLLINYASHRYTGVPDRFTGSGYGTEFTLTISSLQSEDFAVYFCQQDYSSPRTFGGGTKVEIK

SEQ ID NO: 12620 - protein, 122 aa, Artificial Sequence
  Description of Artificial Sequence: Synthetic polypeptide
  VH of XENP018677
EVQLVESGGGLVKPGGSLRLSCAASGFTFSNYWMNWVRQAPGKGLEWVGEIRLKSNNYATHYAEPVKGRFTISRDDSKSTVYLQMNSLKTEDTAVYYCTRYHGNYGGYFDVWGAGTLVTVSS

SEQ ID NO: 12621 - protein, 107 aa, Artificial Sequence; identical to SEQ ID NO: 10923
  Description of Artificial Sequence: Synthetic polypeptide
  VL of XENP018677

SEQ ID NO: 12622 - protein, 5 aa, Artificial Sequence
  Description of Artificial Sequence: Synthetic peptide
  XENP018677 vhCDR1
NYWMN

SEQ ID NO: 12623 - protein, 19 aa, Artificial Sequence
  Description of Artificial Sequence: Synthetic peptide
  XENP018677 vhCDR2
EIRLKSNNYATHYAEPVKG

SEQ ID NO: 12624 - protein, 11 aa, Artificial Sequence
  Description of Artificial Sequence: Synthetic peptide
  XENP018677 vhCDR3
YHGNYGGYFDV

SEQ ID NO: 12625 - protein, 11 aa, Artificial Sequence
  Description of Artificial Sequence: Synthetic peptide
  XENP018677 vlCDR1
RASQSVSNDVA

SEQ ID NO: 12626 - protein, 7 aa, Artificial Sequence
  Description of Artificial Sequence: Synthetic peptide
  XENP018677 vlCDR2
YASHRYT

SEQ ID NO: 12627 - protein, 9 aa, Artificial Sequence
  Description of Artificial Sequence: Synthetic peptide
  XENP018677 vlCDR3
QQDYSSPRT

SEQ ID NO: 12628 - protein, 249 aa, Artificial Sequence
  Description of Artificial Sequence: Synthetic polypeptide
  XENP018678 1G6_H1.178_L1_scFv(GKPGS)4
EVQLVESGGGLVKPGGSLRLSCAASGFTFSNYWMNWVRQAPGKGLEWVGEIRLKSNNYATHYAEPVKGRFTISRDDSKSTVYLQMNSLKTEDTAVYYCTRYLGNYGGYFDVWGAGTLVTVSSGKPGSGKPGSGKPGSGKPGSSIVMTQSPATLSVSPGERATLSCRASQSVSNDVAWYQQKPGQSPRLLINYASHRYTGVPDRFTGSGYGTEFTLTISSLQSEDFAVYFCQQDYSSPRTFGGGTKVEIK

SEQ ID NO: 12629 - protein, 122 aa, Artificial Sequence
  Description of Artificial Sequence: Synthetic polypeptide
  VH of XENP018678
EVQLVESGGGLVKPGGSLRLSCAASGFTFSNYWMNWVRQAPGKGLEWVGEIRLKSNNYATHYAEPVKGRFTISRDDSKSTVYLQMNSLKTEDTAVYYCTRYLGNYGGYFDVWGAGTLVTVSS

SEQ ID NO: 12630 - protein, 107 aa, Artificial Sequence; identical to SEQ ID NO: 10923
  Description of Artificial Sequence: Synthetic polypeptide
  VL of XENP018678

SEQ ID NO: 12631 - protein, 5 aa, Artificial Sequence
  Description of Artificial Sequence: Synthetic peptide
  XENP018678 vhCDR1
NYWMN

SEQ ID NO: 12632 - protein, 19 aa, Artificial Sequence
  Description of Artificial Sequence: Synthetic peptide
  XENP018678 vhCDR2
EIRLKSNNYATHYAEPVKG

SEQ ID NO: 12633 - protein, 11 aa, Artificial Sequence
  Description of Artificial Sequence: Synthetic peptide
  XENP018678 vhCDR3
YLGNYGGYFDV

SEQ ID NO: 12634 - protein, 11 aa, Artificial Sequence
  Description of Artificial Sequence: Synthetic peptide
  XENP018678 vlCDR1
RASQSVSNDVA

SEQ ID NO: 12635 - protein, 7 aa, Artificial Sequence
  Description of Artificial Sequence: Synthetic peptide
  XENP018678 vlCDR2
YASHRYT

SEQ ID NO: 12636 - protein, 9 aa, Artificial Sequence
  Description of Artificial Sequence: Synthetic peptide
  XENP018678 vlCDR3
QQDYSSPRT

SEQ ID NO: 12637 - protein, 249 aa, Artificial Sequence
  Description of Artificial Sequence: Synthetic polypeptide
  XENP018679 1G6_H1.179_L1_scFv(GKPGS)4
EVQLVESGGGLVKPGGSLRLSCAASGFTFSNYWMNWVRQAPGKGLEWVGEIRLKSNNYATHYAEPVKGRFTISRDDSKSTVYLQMNSLKTEDTAVYYCTRYWGNYGGYFDVWGAGTLVTVSSGKPGSGKPGSGKPGSGKPGSSIVMTQSPATLSVSPGERATLSCRASQSVSNDVAWYQQKPGQSPRLLINYASHRYTGVPDRFTGSGYGTEFTLTISSLQSEDFAVYFCQQDYSSPRTFGGGTKVEIK

SEQ ID NO: 12638 - protein, 122 aa, Artificial Sequence
  Description of Artificial Sequence: Synthetic polypeptide
  VH of XENP018679
EVQLVESGGGLVKPGGSLRLSCAASGFTFSNYWMNWVRQAPGKGLEWVGEIRLKSNNYATHYAEPVKGRFTISRDDSKSTVYLQMNSLKTEDTAVYYCTRYWGNYGGYFDVWGAGTLVTVSS

SEQ ID NO: 12639 - protein, 107 aa, Artificial Sequence; identical to SEQ ID NO: 10923
  Description of Artificial Sequence: Synthetic polypeptide
  VL of XENP018679

SEQ ID NO: 12640 - protein, 5 aa, Artificial Sequence
  Description of Artificial Sequence: Synthetic peptide
  XENP018679 vhCDR1
NYWMN

SEQ ID NO: 12641 - protein, 19 aa, Artificial Sequence
  Description of Artificial Sequence: Synthetic peptide
  XENP018679 vhCDR2
EIRLKSNNYATHYAEPVKG

SEQ ID NO: 12642 - protein, 11 aa, Artificial Sequence
  Description of Artificial Sequence: Synthetic peptide
  XENP018679 vhCDR3
YWGNYGGYFDV

SEQ ID NO: 12643 - protein, 11 aa, Artificial Sequence
  Description of Artificial Sequence: Synthetic peptide
  XENP018679 vlCDR1
RASQSVSNDVA

SEQ ID NO: 12644 - protein, 7 aa, Artificial Sequence
  Description of Artificial Sequence: Synthetic peptide
  XENP018679 vlCDR2
YASHRYT

SEQ ID NO: 12645 - protein, 9 aa, Artificial Sequence
  Description of Artificial Sequence: Synthetic peptide
  XENP018679 vlCDR3
QQDYSSPRT

SEQ ID NO: 12646 - protein, 249 aa, Artificial Sequence
  Description of Artificial Sequence: Synthetic polypeptide
  XENP018680 1G6_H1.180_L1_scFv(GKPGS)4
EVQLVESGGGLVKPGGSLRLSCAASGFTFSNYWMNWVRQAPGKGLEWVGEIRLKSNNYATHYAEPVKGRFTISRDDSKSTVYLQMNSLKTEDTAVYYCTRYVGNYGGYFDVWGAGTLVTVSSGKPGSGKPGSGKPGSGKPGSSIVMTQSPATLSVSPGERATLSCRASQSVSNDVAWYQQKPGQSPRLLINYASHRYTGVPDRFTGSGYGTEFTLTISSLQSEDFAVYFCQQDYSSPRTFGGGTKVEIK

SEQ ID NO: 12647 - protein, 122 aa, Artificial Sequence
  Description of Artificial Sequence: Synthetic polypeptide
  VH of XENP018680
EVQLVESGGGLVKPGGSLRLSCAASGFTFSNYWMNWVRQAPGKGLEWVGEIRLKSNNYATHYAEPVKGRFTISRDDSKSTVYLQMNSLKTEDTAVYYCTRYVGNYGGYFDVWGAGTLVTVSS

SEQ ID NO: 12648 - protein, 107 aa, Artificial Sequence; identical to SEQ ID NO: 10923
  Description of Artificial Sequence: Synthetic polypeptide
  VL of XENP018680

SEQ ID NO: 12649 - protein, 5 aa, Artificial Sequence
  Description of Artificial Sequence: Synthetic peptide
  XENP018680 vhCDR1
NYWMN

SEQ ID NO: 12650 - protein, 19 aa, Artificial Sequence
  Description of Artificial Sequence: Synthetic peptide
  XENP018680 vhCDR2
EIRLKSNNYATHYAEPVKG

SEQ ID NO: 12651 - protein, 11 aa, Artificial Sequence
  Description of Artificial Sequence: Synthetic peptide
  XENP018680 vhCDR3
YVGNYGGYFDV

SEQ ID NO: 12652 - protein, 11 aa, Artificial Sequence
  Description of Artificial Sequence: Synthetic peptide
  XENP018680 vlCDR1
RASQSVSNDVA

SEQ ID NO: 12653 - protein, 7 aa, Artificial Sequence
  Description of Artificial Sequence: Synthetic peptide
  XENP018680 vlCDR2
YASHRYT

SEQ ID NO: 12654 - protein, 9 aa, Artificial Sequence
  Description of Artificial Sequence: Synthetic peptide
  XENP018680 vlCDR3
QQDYSSPRT

SEQ ID NO: 12655 - protein, 249 aa, Artificial Sequence
  Description of Artificial Sequence: Synthetic polypeptide
  XENP018681 1G6_H1.181_L1_scFv(GKPGS)4
EVQLVESGGGLVKPGGSLRLSCAASGFTFSNYWMNWVRQAPGKGLEWVGEIRLKSNNYATHYAEPVKGRFTISRDDSKSTVYLQMNSLKTEDTAVYYCTRYAGNYGGYFDVWGAGTLVTVSSGKPGSGKPGSGKPGSGKPGSSIVMTQSPATLSVSPGERATLSCRASQSVSNDVAWYQQKPGQSPRLLINYASHRYTGVPDRFTGSGYGTEFTLTISSLQSEDFAVYFCQQDYSSPRTFGGGTKVEIK

SEQ ID NO: 12656 - protein, 122 aa, Artificial Sequence
  Description of Artificial Sequence: Synthetic polypeptide
  VH of XENP018681
EVQLVESGGGLVKPGGSLRLSCAASGFTFSNYWMNWVRQAPGKGLEWVGEIRLKSNNYATHYAEPVKGRFTISRDDSKSTVYLQMNSLKTEDTAVYYCTRYAGNYGGYFDVWGAGTLVTVSS

SEQ ID NO: 12657 - protein, 107 aa, Artificial Sequence; identical to SEQ ID NO: 10923
  Description of Artificial Sequence: Synthetic polypeptide
  VL of XENP018681

SEQ ID NO: 12658 - protein, 5 aa, Artificial Sequence
  Description of Artificial Sequence: Synthetic peptide
  XENP018681 vhCDR1
NYWMN

SEQ ID NO: 12659 - protein, 19 aa, Artificial Sequence
  Description of Artificial Sequence: Synthetic peptide
  XENP018681 vhCDR2
EIRLKSNNYATHYAEPVKG

SEQ ID NO: 12660 - protein, 11 aa, Artificial Sequence
  Description of Artificial Sequence: Synthetic peptide
  XENP018681 vhCDR3
YAGNYGGYFDV

SEQ ID NO: 12661 - protein, 11 aa, Artificial Sequence
  Description of Artificial Sequence: Synthetic peptide
  XENP018681 vlCDR1
RASQSVSNDVA

SEQ ID NO: 12662 - protein, 7 aa, Artificial Sequence
  Description of Artificial Sequence: Synthetic peptide
  XENP018681 vlCDR2
YASHRYT

SEQ ID NO: 12663 - protein, 9 aa, Artificial Sequence
  Description of Artificial Sequence: Synthetic peptide
  XENP018681 vlCDR3
QQDYSSPRT

SEQ ID NO: 12664 - protein, 249 aa, Artificial Sequence
  Description of Artificial Sequence: Synthetic polypeptide
  XENP018682 1G6_H1.182_L1_scFv(GKPGS)4
EVQLVESGGGLVKPGGSLRLSCAASGFTFSNYWMNWVRQAPGKGLEWVGEIRLKSNNYATHYAEPVKGRFTISRDDSKSTVYLQMNSLKTEDTAVYYCTRYQGNYGGYFDVWGAGTLVTVSSGKPGSGKPGSGKPGSGKPGSSIVMTQSPATLSVSPGERATLSCRASQSVSNDVAWYQQKPGQSPRLLINYASHRYTGVPDRFTGSGYGTEFTLTISSLQSEDFAVYFCQQDYSSPRTFGGGTKVEIK

SEQ ID NO: 12665 - protein, 122 aa, Artificial Sequence
  Description of Artificial Sequence: Synthetic polypeptide
  VH of XENP018682
EVQLVESGGGLVKPGGSLRLSCAASGFTFSNYWMNWVRQAPGKGLEWVGEIRLKSNNYATHYAEPVKGRFTISRDDSKSTVYLQMNSLKTEDTAVYYCTRYQGNYGGYFDVWGAGTLVTVSS

SEQ ID NO: 12666 - protein, 107 aa, Artificial Sequence; identical to SEQ ID NO: 10923
  Description of Artificial Sequence: Synthetic polypeptide
  VL of XENP018682

SEQ ID NO: 12667 - protein, 5 aa, Artificial Sequence
  Description of Artificial Sequence: Synthetic peptide
  XENP018682 vhCDR1
NYWMN

SEQ ID NO: 12668 - protein, 19 aa, Artificial Sequence
  Description of Artificial Sequence: Synthetic peptide
  XENP018682 vhCDR2
EIRLKSNNYATHYAEPVKG

SEQ ID NO: 12669 - protein, 11 aa, Artificial Sequence
  Description of Artificial Sequence: Synthetic peptide
  XENP018682 vhCDR3
YQGNYGGYFDV

SEQ ID NO: 12670 - protein, 11 aa, Artificial Sequence
  Description of Artificial Sequence: Synthetic peptide
  XENP018682 vlCDR1
RASQSVSNDVA

SEQ ID NO: 12671 - protein, 7 aa, Artificial Sequence
  Description of Artificial Sequence: Synthetic peptide
  XENP018682 vlCDR2
YASHRYT

SEQ ID NO: 12672 - protein, 9 aa, Artificial Sequence
  Description of Artificial Sequence: Synthetic peptide
  XENP018682 vlCDR3
QQDYSSPRT

SEQ ID NO: 12673 - protein, 249 aa, Artificial Sequence
  Description of Artificial Sequence: Synthetic polypeptide
  XENP018683 1G6_H1.183_L1_scFv(GKPGS)4
EVQLVESGGGLVKPGGSLRLSCAASGFTFSNYWMNWVRQAPGKGLEWVGEIRLKSNNYATHYAEPVKGRFTISRDDSKSTVYLQMNSLKTEDTAVYYCTRYDGNYGGYFDVWGAGTLVTVSSGKPGSGKPGSGKPGSGKPGSSIVMTQSPATLSVSPGERATLSCRASQSVSNDVAWYQQKPGQSPRLLINYASHRYTGVPDRFTGSGYGTEFTLTISSLQSEDFAVYFCQQDYSSPRTFGGGTKVEIK

SEQ ID NO: 12674 - protein, 122 aa, Artificial Sequence
  Description of Artificial Sequence: Synthetic polypeptide
  VH of XENP018683
EVQLVESGGGLVKPGGSLRLSCAASGFTFSNYWMNWVRQAPGKGLEWVGEIRLKSNNYATHYAEPVKGRFTISRDDSKSTVYLQMNSLKTEDTAVYYCTRYDGNYGGYFDVWGAGTLVTVSS

SEQ ID NO: 12675 - protein, 107 aa, Artificial Sequence; identical to SEQ ID NO: 10923
  Description of Artificial Sequence: Synthetic polypeptide
  VL of XENP018683

SEQ ID NO: 12676 - protein, 5 aa, Artificial Sequence
  Description of Artificial Sequence: Synthetic peptide
  XENP018683 vhCDR1
NYWMN

SEQ ID NO: 12677 - protein, 19 aa, Artificial Sequence
  Description of Artificial Sequence: Synthetic peptide
  XENP018683 vhCDR2
EIRLKSNNYATHYAEPVKG

SEQ ID NO: 12678 - protein, 11 aa, Artificial Sequence
  Description of Artificial Sequence: Synthetic peptide
  XENP018683 vhCDR3
YDGNYGGYFDV

SEQ ID NO: 12679 - protein, 11 aa, Artificial Sequence
  Description of Artificial Sequence: Synthetic peptide
  XENP018683 vlCDR1
RASQSVSNDVA

SEQ ID NO: 12680 - protein, 7 aa, Artificial Sequence
  Description of Artificial Sequence: Synthetic peptide
  XENP018683 vlCDR2
YASHRYT

SEQ ID NO: 12681 - protein, 9 aa, Artificial Sequence
  Description of Artificial Sequence: Synthetic peptide
  XENP018683 vlCDR3
QQDYSSPRT

SEQ ID NO: 12682 - protein, 249 aa, Artificial Sequence
  Description of Artificial Sequence: Synthetic polypeptide
  XENP018684 1G6_H1.184_L1_scFv(GKPGS)4
EVQLVESGGGLVKPGGSLRLSCAASGFTFSNYWMNWVRQAPGKGLEWVGEIRLKSNNYATHYAEPVKGRFTISRDDSKSTVYLQMNSLKTEDTAVYYCTRYKGNYGGYFDVWGAGTLVTVSSGKPGSGKPGSGKPGSGKPGSSIVMTQSPATLSVSPGERATLSCRASQSVSNDVAWYQQKPGQSPRLLINYASHRYTGVPDRFTGSGYGTEFTLTISSLQSEDFAVYFCQQDYSSPRTFGGGTKVEIK

SEQ ID NO: 12683 - protein, 122 aa, Artificial Sequence
  Description of Artificial Sequence: Synthetic polypeptide
  VH of XENP018684
EVQLVESGGGLVKPGGSLRLSCAASGFTFSNYWMNWVRQAPGKGLEWVGEIRLKSNNYATHYAEPVKGRFTISRDDSKSTVYLQMNSLKTEDTAVYYCTRYKGNYGGYFDVWGAGTLVTVSS

SEQ ID NO: 12684 - protein, 107 aa, Artificial Sequence; identical to SEQ ID NO: 10923
  Description of Artificial Sequence: Synthetic polypeptide
  VL of XENP018684

SEQ ID NO: 12685 - protein, 5 aa, Artificial Sequence
  Description of Artificial Sequence: Synthetic peptide
  XENP018684 vhCDR1
NYWMN

SEQ ID NO: 12686 - protein, 19 aa, Artificial Sequence
  Description of Artificial Sequence: Synthetic peptide
  XENP018684 vhCDR2
EIRLKSNNYATHYAEPVKG

SEQ ID NO: 12687 - protein, 11 aa, Artificial Sequence
  Description of Artificial Sequence: Synthetic peptide
  XENP018684 vhCDR3
YKGNYGGYFDV

SEQ ID NO: 12688 - protein, 11 aa, Artificial Sequence
  Description of Artificial Sequence: Synthetic peptide
  XENP018684 vlCDR1
RASQSVSNDVA

SEQ ID NO: 12689 - protein, 7 aa, Artificial Sequence
  Description of Artificial Sequence: Synthetic peptide
  XENP018684 vlCDR2
YASHRYT

SEQ ID NO: 12690 - protein, 9 aa, Artificial Sequence
  Description of Artificial Sequence: Synthetic peptide
  XENP018684 vlCDR3
QQDYSSPRT

SEQ ID NO: 12691 - protein, 249 aa, Artificial Sequence
  Description of Artificial Sequence: Synthetic polypeptide
  XENP018685 1G6_H1.185_L1_scFv(GKPGS)4
EVQLVESGGGLVKPGGSLRLSCAASGFTFSNYWMNWVRQAPGKGLEWVGEIRLKSNNYATHYAEPVKGRFTISRDDSKSTVYLQMNSLKTEDTAVYYCTRYYANYGGYFDVWGAGTLVTVSSGKPGSGKPGSGKPGSGKPGSSIVMTQSPATLSVSPGERATLSCRASQSVSNDVAWYQQKPGQSPRLLINYASHRYTGVPDRFTGSGYGTEFTLTISSLQSEDFAVYFCQQDYSSPRTFGGGTKVEIK

SEQ ID NO: 12692 - protein, 122 aa, Artificial Sequence
  Description of Artificial Sequence: Synthetic polypeptide
  VH of XENP018685
EVQLVESGGGLVKPGGSLRLSCAASGFTFSNYWMNWVRQAPGKGLEWVGEIRLKSNNYATHYAEPVKGRFTISRDDSKSTVYLQMNSLKTEDTAVYYCTRYYANYGGYFDVWGAGTLVTVSS

SEQ ID NO: 12693 - protein, 107 aa, Artificial Sequence; identical to SEQ ID NO: 10923
  Description of Artificial Sequence: Synthetic polypeptide
  VL of XENP018685

SEQ ID NO: 12694 - protein, 5 aa, Artificial Sequence
  Description of Artificial Sequence: Synthetic peptide
  XENP018685 vhCDR1
NYWMN

SEQ ID NO: 12695 - protein, 19 aa, Artificial Sequence
  Description of Artificial Sequence: Synthetic peptide
  XENP018685 vhCDR2
EIRLKSNNYATHYAEPVKG

SEQ ID NO: 12696 - protein, 11 aa, Artificial Sequence
  Description of Artificial Sequence: Synthetic peptide
  XENP018685 vhCDR3
YYANYGGYFDV

SEQ ID NO: 12697 - protein, 11 aa, Artificial Sequence
  Description of Artificial Sequence: Synthetic peptide
  XENP018685 vlCDR1
RASQSVSNDVA

SEQ ID NO: 12698 - protein, 7 aa, Artificial Sequence
  Description of Artificial Sequence: Synthetic peptide
  XENP018685 vlCDR2
YASHRYT

SEQ ID NO: 12699 - protein, 9 aa, Artificial Sequence
  Description of Artificial Sequence: Synthetic peptide
  XENP018685 vlCDR3
QQDYSSPRT

SEQ ID NO: 12700 - protein, 249 aa, Artificial Sequence
  Description of Artificial Sequence: Synthetic polypeptide
  XENP018686 1G6_H1.186_L1_scFv(GKPGS)4
EVQLVESGGGLVKPGGSLRLSCAASGFTFSNYWMNWVRQAPGKGLEWVGEIRLKSNNYATHYAEPVKGRFTISRDDSKSTVYLQMNSLKTEDTAVYYCTRYYSNYGGYFDVWGAGTLVTVSSGKPGSGKPGSGKPGSGKPGSSIVMTQSPATLSVSPGERATLSCRASQSVSNDVAWYQQKPGQSPRLLINYASHRYTGVPDRFTGSGYGTEFTLTISSLQSEDFAVYFCQQDYSSPRTFGGGTKVEIK

SEQ ID NO: 12701 - protein, 122 aa, Artificial Sequence
  Description of Artificial Sequence: Synthetic polypeptide
  VH of XENP018686
EVQLVESGGGLVKPGGSLRLSCAASGFTFSNYWMNWVRQAPGKGLEWVGEIRLKSNNYATHYAEPVKGRFTISRDDSKSTVYLQMNSLKTEDTAVYYCTRYYSNYGGYFDVWGAGTLVTVSS

SEQ ID NO: 12702 - protein, 107 aa, Artificial Sequence; identical to SEQ ID NO: 10923
  Description of Artificial Sequence: Synthetic polypeptide
  VL of XENP018686

SEQ ID NO: 12703 - protein, 5 aa, Artificial Sequence
  Description of Artificial Sequence: Synthetic peptide
  XENP018686 vhCDR1
NYWMN

SEQ ID NO: 12704 - protein, 19 aa, Artificial Sequence
  Description of Artificial Sequence: Synthetic peptide
  XENP018686 vhCDR2
EIRLKSNNYATHYAEPVKG

SEQ ID NO: 12705 - protein, 11 aa, Artificial Sequence
  Description of Artificial Sequence: Synthetic peptide
  XENP018686 vhCDR3
YYSNYGGYFDV

SEQ ID NO: 12706 - protein, 11 aa, Artificial Sequence
  Description of Artificial Sequence: Synthetic peptide
  XENP018686 vlCDR1
RASQSVSNDVA

SEQ ID NO: 12707 - protein, 7 aa, Artificial Sequence
  Description of Artificial Sequence: Synthetic peptide
  XENP018686 vlCDR2
YASHRYT

SEQ ID NO: 12708 - protein, 9 aa, Artificial Sequence
  Description of Artificial Sequence: Synthetic peptide
  XENP018686 vlCDR3
QQDYSSPRT

SEQ ID NO: 12709 - protein, 249 aa, Artificial Sequence
  Description of Artificial Sequence: Synthetic polypeptide
  XENP018687 1G6_H1.187_L1_scFv(GKPGS)4
EVQLVESGGGLVKPGGSLRLSCAASGFTFSNYWMNWVRQAPGKGLEWVGEIRLKSNNYATHYAEPVKGRFTISRDDSKSTVYLQMNSLKTEDTAVYYCTRYYTNYGGYFDVWGAGTLVTVSSGKPGSGKPGSGKPGSGKPGSSIVMTQSPATLSVSPGERATLSCRASQSVSNDVAWYQQKPGQSPRLLINYASHRYTGVPDRFTGSGYGTEFTLTISSLQSEDFAVYFCQQDYSSPRTFGGGTKVEIK

SEQ ID NO: 12710 - protein, 122 aa, Artificial Sequence
  Description of Artificial Sequence: Synthetic polypeptide
  VH of XENP018687
EVQLVESGGGLVKPGGSLRLSCAASGFTFSNYWMNWVRQAPGKGLEWVGEIRLKSNNYATHYAEPVKGRFTISRDDSKSTVYLQMNSLKTEDTAVYYCTRYYTNYGGYFDVWGAGTLVTVSS

SEQ ID NO: 12711 - protein, 107 aa, Artificial Sequence; identical to SEQ ID NO: 10923
  Description of Artificial Sequence: Synthetic polypeptide
  VL of XENP018687

SEQ ID NO: 12712 - protein, 5 aa, Artificial Sequence
  Description of Artificial Sequence: Synthetic peptide
  XENP018687 vhCDR1
NYWMN

SEQ ID NO: 12713 - protein, 19 aa, Artificial Sequence
  Description of Artificial Sequence: Synthetic peptide
  XENP018687 vhCDR2
EIRLKSNNYATHYAEPVKG

SEQ ID NO: 12714 - protein, 11 aa, Artificial Sequence
  Description of Artificial Sequence: Synthetic peptide
  XENP018687 vhCDR3
YYTNYGGYFDV

SEQ ID NO: 12715 - protein, 11 aa, Artificial Sequence
  Description of Artificial Sequence: Synthetic peptide
  XENP018687 vlCDR1
RASQSVSNDVA

SEQ ID NO: 12716 - protein, 7 aa, Artificial Sequence
  Description of Artificial Sequence: Synthetic peptide
  XENP018687 vlCDR2
YASHRYT

SEQ ID NO: 12717 - protein, 9 aa, Artificial Sequence
  Description of Artificial Sequence: Synthetic peptide
  XENP018687 vlCDR3
QQDYSSPRT

SEQ ID NO: 12718 - protein, 249 aa, Artificial Sequence
  Description of Artificial Sequence: Synthetic polypeptide
  XENP018688 1G6_H1.188_L1_scFv(GKPGS)4
EVQLVESGGGLVKPGGSLRLSCAASGFTFSNYWMNWVRQAPGKGLEWVGEIRLKSNNYATHYAEPVKGRFTISRDDSKSTVYLQMNSLKTEDTAVYYCTRYYQNYGGYFDVWGAGTLVTVSSGKPGSGKPGSGKPGSGKPGSSIVMTQSPATLSVSPGERATLSCRASQSVSNDVAWYQQKPGQSPRLLINYASHRYTGVPDRFTGSGYGTEFTLTISSLQSEDFAVYFCQQDYSSPRTFGGGTKVEIK

SEQ ID NO: 12719 - protein, 122 aa, Artificial Sequence
  Description of Artificial Sequence: Synthetic polypeptide
  VH of XENP018688
EVQLVESGGGLVKPGGSLRLSCAASGFTFSNYWMNWVRQAPGKGLEWVGEIRLKSNNYATHYAEPVKGRFTISRDDSKSTVYLQMNSLKTEDTAVYYCTRYYQNYGGYFDVWGAGTLVTVSS

SEQ ID NO: 12720 - protein, 107 aa, Artificial Sequence; identical to SEQ ID NO: 10923
  Description of Artificial Sequence: Synthetic polypeptide
  VL of XENP018688

SEQ ID NO: 12721 - protein, 5 aa, Artificial Sequence
  Description of Artificial Sequence: Synthetic peptide
  XENP018688 vhCDR1
NYWMN

SEQ ID NO: 12722 - protein, 19 aa, Artificial Sequence
  Description of Artificial Sequence: Synthetic peptide
  XENP018688 vhCDR2
EIRLKSNNYATHYAEPVKG

SEQ ID NO: 12723 - protein, 11 aa, Artificial Sequence
  Description of Artificial Sequence: Synthetic peptide
  XENP018688 vhCDR3
YYQNYGGYFDV

SEQ ID NO: 12724 - protein, 11 aa, Artificial Sequence
  Description of Artificial Sequence: Synthetic peptide
  XENP018688 vlCDR1
RASQSVSNDVA

SEQ ID NO: 12725 - protein, 7 aa, Artificial Sequence
  Description of Artificial Sequence: Synthetic peptide
  XENP018688 vlCDR2
YASHRYT

SEQ ID NO: 12726 - protein, 9 aa, Artificial Sequence
  Description of Artificial Sequence: Synthetic peptide
  XENP018688 vlCDR3
QQDYSSPRT

SEQ ID NO: 12727 - protein, 249 aa, Artificial Sequence
  Description of Artificial Sequence: Synthetic polypeptide
  XENP018689 1G6_H1.189_L1_scFv(GKPGS)4
EVQLVESGGGLVKPGGSLRLSCAASGFTFSNYWMNWVRQAPGKGLEWVGEIRLKSNNYATHYAEPVKGRFTISRDDSKSTVYLQMNSLKTEDTAVYYCTRYYHNYGGYFDVWGAGTLVTVSSGKPGSGKPGSGKPGSGKPGSSIVMTQSPATLSVSPGERATLSCRASQSVSNDVAWYQQKPGQSPRLLINYASHRYTGVPDRFTGSGYGTEFTLTISSLQSEDFAVYFCQQDYSSPRTFGGGTKVEIK

SEQ ID NO: 12728 - protein, 122 aa, Artificial Sequence
  Description of Artificial Sequence: Synthetic polypeptide
  VH of XENP018689
EVQLVESGGGLVKPGGSLRLSCAASGFTFSNYWMNWVRQAPGKGLEWVGEIRLKSNNYATHYAEPVKGRFTISRDDSKSTVYLQMNSLKTEDTAVYYCTRYYHNYGGYFDVWGAGTLVTVSS

SEQ ID NO: 12729 - protein, 107 aa, Artificial Sequence; identical to SEQ ID NO: 10923
  Description of Artificial Sequence: Synthetic polypeptide
  VL of XENP018689

SEQ ID NO: 12730 - protein, 5 aa, Artificial Sequence
  Description of Artificial Sequence: Synthetic peptide
  XENP018689 vhCDR1
NYWMN

SEQ ID NO: 12731 - protein, 19 aa, Artificial Sequence
  Description of Artificial Sequence: Synthetic peptide
  XENP018689 vhCDR2
EIRLKSNNYATHYAEPVKG

SEQ ID NO: 12732 - protein, 11 aa, Artificial Sequence
  Description of Artificial Sequence: Synthetic peptide
  XENP018689 vhCDR3
YYHNYGGYFDV

SEQ ID NO: 12733 - protein, 11 aa, Artificial Sequence
  Description of Artificial Sequence: Synthetic peptide
  XENP018689 vlCDR1
RASQSVSNDVA

SEQ ID NO: 12734 - protein, 7 aa, Artificial Sequence
  Description of Artificial Sequence: Synthetic peptide
  XENP018689 vlCDR2
YASHRYT

SEQ ID NO: 12735 - protein, 9 aa, Artificial Sequence
  Description of Artificial Sequence: Synthetic peptide
  XENP018689 vlCDR3
QQDYSSPRT

SEQ ID NO: 12736 - protein, 249 aa, Artificial Sequence
  Description of Artificial Sequence: Synthetic polypeptide
  XENP018690 1G6_H1.190_L1_scFv(GKPGS)4
EVQLVESGGGLVKPGGSLRLSCAASGFTFSNYWMNWVRQAPGKGLEWVGEIRLKSNNYATHYAEPVKGRFTISRDDSKSTVYLQMNSLKTEDTAVYYCTRYYDNYGGYFDVWGAGTLVTVSSGKPGSGKPGSGKPGSGKPGSSIVMTQSPATLSVSPGERATLSCRASQSVSNDVAWYQQKPGQSPRLLINYASHRYTGVPDRFTGSGYGTEFTLTISSLQSEDFAVYFCQQDYSSPRTFGGGTKVEIK

SEQ ID NO: 12737 - protein, 122 aa, Artificial Sequence
  Description of Artificial Sequence: Synthetic polypeptide
  VH of XENP018690
EVQLVESGGGLVKPGGSLRLSCAASGFTFSNYWMNWVRQAPGKGLEWVGEIRLKSNNYATHYAEPVKGRFTISRDDSKSTVYLQMNSLKTEDTAVYYCTRYYDNYGGYFDVWGAGTLVTVSS

SEQ ID NO: 12738 - protein, 107 aa, Artificial Sequence; identical to SEQ ID NO: 10923
  Description of Artificial Sequence: Synthetic polypeptide
  VL of XENP018690

SEQ ID NO: 12739 - protein, 5 aa, Artificial Sequence
  Description of Artificial Sequence: Synthetic peptide
  XENP018690 vhCDR1
NYWMN

SEQ ID NO: 12740 - protein, 19 aa, Artificial Sequence
  Description of Artificial Sequence: Synthetic peptide
  XENP018690 vhCDR2
EIRLKSNNYATHYAEPVKG

SEQ ID NO: 12741 - protein, 11 aa, Artificial Sequence
  Description of Artificial Sequence: Synthetic peptide
  XENP018690 vhCDR3
YYDNYGGYFDV

SEQ ID NO: 12742 - protein, 11 aa, Artificial Sequence
  Description of Artificial Sequence: Synthetic peptide
  XENP018690 vlCDR1
RASQSVSNDVA

SEQ ID NO: 12743 - protein, 7 aa, Artificial Sequence
  Description of Artificial Sequence: Synthetic peptide
  XENP018690 vlCDR2
YASHRYT

SEQ ID NO: 12744 - protein, 9 aa, Artificial Sequence
  Description of Artificial Sequence: Synthetic peptide
  XENP018690 vlCDR3
QQDYSSPRT

SEQ ID NO: 12745 - protein, 249 aa, Artificial Sequence
  Description of Artificial Sequence: Synthetic polypeptide
  XENP018691 1G6_H1.191_L1_scFv(GKPGS)4
EVQLVESGGGLVKPGGSLRLSCAASGFTFSNYWMNWVRQAPGKGLEWVGEIRLKSNNYATHYAEPVKGRFTISRDDSKSTVYLQMNSLKTEDTAVYYCTRYYKNYGGYFDVWGAGTLVTVSSGKPGSGKPGSGKPGSGKPGSSIVMTQSPATLSVSPGERATLSCRASQSVSNDVAWYQQKPGQSPRLLINYASHRYTGVPDRFTGSGYGTEFTLTISSLQSEDFAVYFCQQDYSSPRTFGGGTKVEIK

SEQ ID NO: 12746 - protein, 122 aa, Artificial Sequence
  Description of Artificial Sequence: Synthetic polypeptide
  VH of XENP018691
EVQLVESGGGLVKPGGSLRLSCAASGFTFSNYWMNWVRQAPGKGLEWVGEIRLKSNNYATHYAEPVKGRFTISRDDSKSTVYLQMNSLKTEDTAVYYCTRYYKNYGGYFDVWGAGTLVTVSS

SEQ ID NO: 12747 - protein, 107 aa, Artificial Sequence; identical to SEQ ID NO: 10923
  Description of Artificial Sequence: Synthetic polypeptide
  VL of XENP018691

SEQ ID NO: 12748 - protein, 5 aa, Artificial Sequence
  Description of Artificial Sequence: Synthetic peptide
  XENP018691 vhCDR1
NYWMN

SEQ ID NO: 12749 - protein, 19 aa, Artificial Sequence
  Description of Artificial Sequence: Synthetic peptide
  XENP018691 vhCDR2
EIRLKSNNYATHYAEPVKG

SEQ ID NO: 12750 - protein, 11 aa, Artificial Sequence
  Description of Artificial Sequence: Synthetic peptide
  XENP018691 vhCDR3
YYKNYGGYFDV

SEQ ID NO: 12751 - protein, 11 aa, Artificial Sequence
  Description of Artificial Sequence: Synthetic peptide
  XENP018691 vlCDR1
RASQSVSNDVA

SEQ ID NO: 12752 - protein, 7 aa, Artificial Sequence
  Description of Artificial Sequence: Synthetic peptide
  XENP018691 vlCDR2
YASHRYT

SEQ ID NO: 12753 - protein, 9 aa, Artificial Sequence
  Description of Artificial Sequence: Synthetic peptide
  XENP018691 vlCDR3
QQDYSSPRT

SEQ ID NO: 12754 - protein, 249 aa, Artificial Sequence
  Description of Artificial Sequence: Synthetic polypeptide
  XENP018692 1G6_H1.192_L1_scFv(GKPGS)4
EVQLVESGGGLVKPGGSLRLSCAASGFTFSNYWMNWVRQAPGKGLEWVGEIRLKSNNYATHYAEPVKGRFTISRDDSKSTVYLQMNSLKTEDTAVYYCTRYYLNYGGYFDVWGAGTLVTVSSGKPGSGKPGSGKPGSGKPGSSIVMTQSPATLSVSPGERATLSCRASQSVSNDVAWYQQKPGQSPRLLINYASHRYTGVPDRFTGSGYGTEFTLTISSLQSEDFAVYFCQQDYSSPRTFGGGTKVEIK

SEQ ID NO: 12755 - protein, 122 aa, Artificial Sequence
  Description of Artificial Sequence: Synthetic polypeptide
  VH of XENP018692
EVQLVESGGGLVKPGGSLRLSCAASGFTFSNYWMNWVRQAPGKGLEWVGEIRLKSNNYATHYAEPVKGRFTISRDDSKSTVYLQMNSLKTEDTAVYYCTRYYLNYGGYFDVWGAGTLVTVSS

SEQ ID NO: 12756 - protein, 107 aa, Artificial Sequence; identical to SEQ ID NO: 10923
  Description of Artificial Sequence: Synthetic polypeptide
  VL of XENP018692

SEQ ID NO: 12757 - protein, 5 aa, Artificial Sequence
  Description of Artificial Sequence: Synthetic peptide
  XENP018692 vhCDR1
NYWMN

SEQ ID NO: 12758 - protein, 19 aa, Artificial Sequence
  Description of Artificial Sequence: Synthetic peptide
  XENP018692 vhCDR2
EIRLKSNNYATHYAEPVKG

SEQ ID NO: 12759 - protein, 11 aa, Artificial Sequence
  Description of Artificial Sequence: Synthetic peptide
  XENP018692 vhCDR3
YYLNYGGYFDV

SEQ ID NO: 12760 - protein, 11 aa, Artificial Sequence
  Description of Artificial Sequence: Synthetic peptide
  XENP018692 vlCDR1
RASQSVSNDVA

SEQ ID NO: 12761 - protein, 7 aa, Artificial Sequence
  Description of Artificial Sequence: Synthetic peptide
  XENP018692 vlCDR2
YASHRYT

SEQ ID NO: 12762 - protein, 9 aa, Artificial Sequence
  Description of Artificial Sequence: Synthetic peptide
  XENP018692 vlCDR3
QQDYSSPRT

SEQ ID NO: 12763 - protein, 249 aa, Artificial Sequence
  Description of Artificial Sequence: Synthetic polypeptide
  XENP018693 1G6_H1.193_L1_scFv(GKPGS)4
EVQLVESGGGLVKPGGSLRLSCAASGFTFSNYWMNWVRQAPGKGLEWVGEIRLKSNNYATHYAEPVKGRFTISRDDSKSTVYLQMNSLKTEDTAVYYCTRYYFNYGGYFDVWGAGTLVTVSSGKPGSGKPGSGKPGSGKPGSSIVMTQSPATLSVSPGERATLSCRASQSVSNDVAWYQQKPGQSPRLLINYASHRYTGVPDRFTGSGYGTEFTLTISSLQSEDFAVYFCQQDYSSPRTFGGGTKVEIK

SEQ ID NO: 12764 - protein, 122 aa, Artificial Sequence
  Description of Artificial Sequence: Synthetic polypeptide
  VH of XENP018693
EVQLVESGGGLVKPGGSLRLSCAASGFTFSNYWMNWVRQAPGKGLEWVGEIRLKSNNYATHYAEPVKGRFTISRDDSKSTVYLQMNSLKTEDTAVYYCTRYYFNYGGYFDVWGAGTLVTVSS

SEQ ID NO: 12765 - protein, 107 aa, Artificial Sequence; identical to SEQ ID NO: 10923
  Description of Artificial Sequence: Synthetic polypeptide
  VL of XENP018693

SEQ ID NO: 12766 - protein, 5 aa, Artificial Sequence
  Description of Artificial Sequence: Synthetic peptide
  XENP018693 vhCDR1
NYWMN

SEQ ID NO: 12767 - protein, 19 aa, Artificial Sequence
  Description of Artificial Sequence: Synthetic peptide
  XENP018693 vhCDR2
EIRLKSNNYATHYAEPVKG

SEQ ID NO: 12768 - protein, 11 aa, Artificial Sequence
  Description of Artificial Sequence: Synthetic peptide
  XENP018693 vhCDR3
YYFNYGGYFDV

SEQ ID NO: 12769 - protein, 11 aa, Artificial Sequence
  Description of Artificial Sequence: Synthetic peptide
  XENP018693 vlCDR1
RASQSVSNDVA

SEQ ID NO: 12770 - protein, 7 aa, Artificial Sequence
  Description of Artificial Sequence: Synthetic peptide
  XENP018693 vlCDR2
YASHRYT

SEQ ID NO: 12771 - protein, 9 aa, Artificial Sequence
  Description of Artificial Sequence: Synthetic peptide
  XENP018693 vlCDR3
QQDYSSPRT

SEQ ID NO: 12772 - protein, 249 aa, Artificial Sequence
  Description of Artificial Sequence: Synthetic polypeptide
  XENP018694 1G6_H1.194_L1_scFv(GKPGS)4
EVQLVESGGGLVKPGGSLRLSCAASGFTFSNYWMNWVRQAPGKGLEWVGEIRLKSNNYATHYAEPVKGRFTISRDDSKSTVYLQMNSLKTEDTAVYYCTRYYGDYGGYFDVWGAGTLVTVSSGKPGSGKPGSGKPGSGKPGSSIVMTQSPATLSVSPGERATLSCRASQSVSNDVAWYQQKPGQSPRLLINYASHRYTGVPDRFTGSGYGTEFTLTISSLQSEDFAVYFCQQDYSSPRTFGGGTKVEIK

SEQ ID NO: 12773 - protein, 122 aa, Artificial Sequence
  Description of Artificial Sequence: Synthetic polypeptide
  VH of XENP018694
EVQLVESGGGLVKPGGSLRLSCAASGFTFSNYWMNWVRQAPGKGLEWVGEIRLKSNNYATHYAEPVKGRFTISRDDSKSTVYLQMNSLKTEDTAVYYCTRYYGDYGGYFDVWGAGTLVTVSS

SEQ ID NO: 12774 - protein, 107 aa, Artificial Sequence; identical to SEQ ID NO: 10923
  Description of Artificial Sequence: Synthetic polypeptide
  VL of XENP018694

SEQ ID NO: 12775 - protein, 5 aa, Artificial Sequence
  Description of Artificial Sequence: Synthetic peptide
  XENP018694 vhCDR1
NYWMN

SEQ ID NO: 12776 - protein, 19 aa, Artificial Sequence
  Description of Artificial Sequence: Synthetic peptide
  XENP018694 vhCDR2
EIRLKSNNYATHYAEPVKG

SEQ ID NO: 12777 - protein, 11 aa, Artificial Sequence
  Description of Artificial Sequence: Synthetic peptide
  XENP018694 vhCDR3
YYGDYGGYFDV

SEQ ID NO: 12778 - protein, 11 aa, Artificial Sequence
  Description of Artificial Sequence: Synthetic peptide
  XENP018694 vlCDR1
RASQSVSNDVA

SEQ ID NO: 12779 - protein, 7 aa, Artificial Sequence
  Description of Artificial Sequence: Synthetic peptide
  XENP018694 vlCDR2
YASHRYT

SEQ ID NO: 12780 - protein, 9 aa, Artificial Sequence
  Description of Artificial Sequence: Synthetic peptide
  XENP018694 vlCDR3
QQDYSSPRT

SEQ ID NO: 12781 - protein, 249 aa, Artificial Sequence
  Description of Artificial Sequence: Synthetic polypeptide
  XENP018695 1G6_H1.195_L1_scFv(GKPGS)4
EVQLVESGGGLVKPGGSLRLSCAASGFTFSNYWMNWVRQAPGKGLEWVGEIRLKSNNYATHYAEPVKGRFTISRDDSKSTVYLQMNSLKTEDTAVYYCTRYYGHYGGYFDVWGAGTLVTVSSGKPGSGKPGSGKPGSGKPGSSIVMTQSPATLSVSPGERATLSCRASQSVSNDVAWYQQKPGQSPRLLINYASHRYTGVPDRFTGSGYGTEFTLTISSLQSEDFAVYFCQQDYSSPRTFGGGTKVEIK

SEQ ID NO: 12782 - protein, 122 aa, Artificial Sequence
  Description of Artificial Sequence: Synthetic polypeptide
  VH of XENP018695
EVQLVESGGGLVKPGGSLRLSCAASGFTFSNYWMNWVRQAPGKGLEWVGEIRLKSNNYATHYAEPVKGRFTISRDDSKSTVYLQMNSLKTEDTAVYYCTRYYGHYGGYFDVWGAGTLVTVSS

SEQ ID NO: 12783 - protein, 107 aa, Artificial Sequence; identical to SEQ ID NO: 10923
  Description of Artificial Sequence: Synthetic polypeptide
  VL of XENP018695

SEQ ID NO: 12784 - protein, 5 aa, Artificial Sequence
  Description of Artificial Sequence: Synthetic peptide
  XENP018695 vhCDR1
NYWMN

SEQ ID NO: 12785 - protein, 19 aa, Artificial Sequence
  Description of Artificial Sequence: Synthetic peptide
  XENP018695 vhCDR2
EIRLKSNNYATHYAEPVKG

SEQ ID NO: 12786 - protein, 11 aa, Artificial Sequence
  Description of Artificial Sequence: Synthetic peptide
  XENP018695 vhCDR3
YYGHYGGYFDV

SEQ ID NO: 12787 - protein, 11 aa, Artificial Sequence
  Description of Artificial Sequence: Synthetic peptide
  XENP018695 vlCDR1
RASQSVSNDVA

SEQ ID NO: 12788 - protein, 7 aa, Artificial Sequence
  Description of Artificial Sequence: Synthetic peptide
  XENP018695 vlCDR2
YASHRYT

SEQ ID NO: 12789 - protein, 9 aa, Artificial Sequence
  Description of Artificial Sequence: Synthetic peptide
  XENP018695 vlCDR3
QQDYSSPRT

SEQ ID NO: 12790 - protein, 249 aa, Artificial Sequence
  Description of Artificial Sequence: Synthetic polypeptide
  XENP018696 1G6_H1.196_L1_scFv(GKPGS)4
EVQLVESGGGLVKPGGSLRLSCAASGFTFSNYWMNWVRQAPGKGLEWVGEIRLKSNNYATHYAEPVKGRFTISRDDSKSTVYLQMNSLKTEDTAVYYCTRYYGEYGGYFDVWGAGTLVTVSSGKPGSGKPGSGKPGSGKPGSSIVMTQSPATLSVSPGERATLSCRASQSVSNDVAWYQQKPGQSPRLLINYASHRYTGVPDRFTGSGYGTEFTLTISSLQSEDFAVYFCQQDYSSPRTFGGGTKVEIK

SEQ ID NO: 12791 - protein, 122 aa, Artificial Sequence
  Description of Artificial Sequence: Synthetic polypeptide
  VH of XENP018696
EVQLVESGGGLVKPGGSLRLSCAASGFTFSNYWMNWVRQAPGKGLEWVGEIRLKSNNYATHYAEPVKGRFTISRDDSKSTVYLQMNSLKTEDTAVYYCTRYYGEYGGYFDVWGAGTLVTVSS

SEQ ID NO: 12792 - protein, 107 aa, Artificial Sequence; identical to SEQ ID NO: 10923
  Description of Artificial Sequence: Synthetic polypeptide
  VL of XENP018696

SEQ ID NO: 12793 - protein, 5 aa, Artificial Sequence
  Description of Artificial Sequence: Synthetic peptide
  XENP018696 vhCDR1
NYWMN

SEQ ID NO: 12794 - protein, 19 aa, Artificial Sequence
  Description of Artificial Sequence: Synthetic peptide
  XENP018696 vhCDR2
EIRLKSNNYATHYAEPVKG

SEQ ID NO: 12795 - protein, 11 aa, Artificial Sequence
  Description of Artificial Sequence: Synthetic peptide
  XENP018696 vhCDR3
YYGEYGGYFDV

SEQ ID NO: 12796 - protein, 11 aa, Artificial Sequence
  Description of Artificial Sequence: Synthetic peptide
  XENP018696 vlCDR1
RASQSVSNDVA

SEQ ID NO: 12797 - protein, 7 aa, Artificial Sequence
  Description of Artificial Sequence: Synthetic peptide
  XENP018696 vlCDR2
YASHRYT

SEQ ID NO: 12798 - protein, 9 aa, Artificial Sequence
  Description of Artificial Sequence: Synthetic peptide
  XENP018696 vlCDR3
QQDYSSPRT

SEQ ID NO: 12799 - protein, 249 aa, Artificial Sequence
  Description of Artificial Sequence: Synthetic polypeptide
  XENP018701 1G6_H1.197_L1_scFv(GKPGS)4
EVQLVESGGGLVKPGGSLRLSCAASGFTFSNYWMNWVRQAPGKGLEWVGEIRLKSNNYATHYAEPVKGRFTISRDDSKSTVYLQMNSLKTEDTAVYYCTRYYGSYGGYFDVWGAGTLVTVSSGKPGSGKPGSGKPGSGKPGSSIVMTQSPATLSVSPGERATLSCRASQSVSNDVAWYQQKPGQSPRLLINYASHRYTGVPDRFTGSGYGTEFTLTISSLQSEDFAVYFCQQDYSSPRTFGGGTKVEIK

SEQ ID NO: 12800 - protein, 122 aa, Artificial Sequence
  Description of Artificial Sequence: Synthetic polypeptide
  VH of XENP018701
EVQLVESGGGLVKPGGSLRLSCAASGFTFSNYWMNWVRQAPGKGLEWVGEIRLKSNNYATHYAEPVKGRFTISRDDSKSTVYLQMNSLKTEDTAVYYCTRYYGSYGGYFDVWGAGTLVTVSS

SEQ ID NO: 12801 - protein, 107 aa, Artificial Sequence; identical to SEQ ID NO: 10923
  Description of Artificial Sequence: Synthetic polypeptide
  VL of XENP018701

SEQ ID NO: 12802 - protein, 5 aa, Artificial Sequence
  Description of Artificial Sequence: Synthetic peptide
  XENP018701 vhCDR1
NYWMN

SEQ ID NO: 12803 - protein, 19 aa, Artificial Sequence
  Description of Artificial Sequence: Synthetic peptide
  XENP018701 vhCDR2
EIRLKSNNYATHYAEPVKG

SEQ ID NO: 12804 - protein, 11 aa, Artificial Sequence
  Description of Artificial Sequence: Synthetic peptide
  XENP018701 vhCDR3
YYGSYGGYFDV

SEQ ID NO: 12805 - protein, 11 aa, Artificial Sequence
  Description of Artificial Sequence: Synthetic peptide
  XENP018701 vlCDR1
RASQSVSNDVA

SEQ ID NO: 12806 - protein, 7 aa, Artificial Sequence
  Description of Artificial Sequence: Synthetic peptide
  XENP018701 vlCDR2
YASHRYT

SEQ ID NO: 12807 - protein, 9 aa, Artificial Sequence
  Description of Artificial Sequence: Synthetic peptide
  XENP018701 vlCDR3
QQDYSSPRT

SEQ ID NO: 12808 - protein, 249 aa, Artificial Sequence
  Description of Artificial Sequence: Synthetic polypeptide
  XENP018702 1G6_H1.198_L1_scFv(GKPGS)4
EVQLVESGGGLVKPGGSLRLSCAASGFTFSNYWMNWVRQAPGKGLEWVGEIRLKSNNYATHYAEPVKGRFTISRDDSKSTVYLQMNSLKTEDTAVYYCTRYYGRYGGYFDVWGAGTLVTVSSGKPGSGKPGSGKPGSGKPGSSIVMTQSPATLSVSPGERATLSCRASQSVSNDVAWYQQKPGQSPRLLINYASHRYTGVPDRFTGSGYGTEFTLTISSLQSEDFAVYFCQQDYSSPRTFGGGTKVEIK

SEQ ID NO: 12809 - protein, 122 aa, Artificial Sequence
  Description of Artificial Sequence: Synthetic polypeptide
  VH of XENP018702
EVQLVESGGGLVKPGGSLRLSCAASGFTFSNYWMNWVRQAPGKGLEWVGEIRLKSNNYATHYAEPVKGRFTISRDDSKSTVYLQMNSLKTEDTAVYYCTRYYGRYGGYFDVWGAGTLVTVSS

SEQ ID NO: 12810 - protein, 107 aa, Artificial Sequence; identical to SEQ ID NO: 10923
  Description of Artificial Sequence: Synthetic polypeptide
  VL of XENP018702

SEQ ID NO: 12811 - protein, 5 aa, Artificial Sequence
  Description of Artificial Sequence: Synthetic peptide
  XENP018702 vhCDR1
NYWMN

SEQ ID NO: 12812 - protein, 19 aa, Artificial Sequence
  Description of Artificial Sequence: Synthetic peptide
  XENP018702 vhCDR2
EIRLKSNNYATHYAEPVKG

SEQ ID NO: 12813 - protein, 11 aa, Artificial Sequence
  Description of Artificial Sequence: Synthetic peptide
  XENP018702 vhCDR3
YYGRYGGYFDV

SEQ ID NO: 12814 - protein, 11 aa, Artificial Sequence
  Description of Artificial Sequence: Synthetic peptide
  XENP018702 vlCDR1
RASQSVSNDVA

SEQ ID NO: 12815 - protein, 7 aa, Artificial Sequence
  Description of Artificial Sequence: Synthetic peptide
  XENP018702 vlCDR2
YASHRYT

SEQ ID NO: 12816 - protein, 9 aa, Artificial Sequence
  Description of Artificial Sequence: Synthetic peptide
  XENP018702 vlCDR3
QQDYSSPRT

SEQ ID NO: 12817 - protein, 249 aa, Artificial Sequence
  Description of Artificial Sequence: Synthetic polypeptide
  XENP018703 1G6_H1.199_L1_scFv(GKPGS)4
EVQLVESGGGLVKPGGSLRLSCAASGFTFSNYWMNWVRQAPGKGLEWVGEIRLKSNNYATHYAEPVKGRFTISRDDSKSTVYLQMNSLKTEDTAVYYCTRYYGLYGGYFDVWGAGTLVTVSSGKPGSGKPGSGKPGSGKPGSSIVMTQSPATLSVSPGERATLSCRASQSVSNDVAWYQQKPGQSPRLLINYASHRYTGVPDRFTGSGYGTEFTLTISSLQSEDFAVYFCQQDYSSPRTFGGGTKVEIK

SEQ ID NO: 12818 - protein, 122 aa, Artificial Sequence
  Description of Artificial Sequence: Synthetic polypeptide
  VH of XENP018703
EVQLVESGGGLVKPGGSLRLSCAASGFTFSNYWMNWVRQAPGKGLEWVGEIRLKSNNYATHYAEPVKGRFTISRDDSKSTVYLQMNSLKTEDTAVYYCTRYYGLYGGYFDVWGAGTLVTVSS

SEQ ID NO: 12819 - protein, 107 aa, Artificial Sequence; identical to SEQ ID NO: 10923
  Description of Artificial Sequence: Synthetic polypeptide
  VL of XENP018703

SEQ ID NO: 12820 - protein, 5 aa, Artificial Sequence
  Description of Artificial Sequence: Synthetic peptide
  XENP018703 vhCDR1
NYWMN

SEQ ID NO: 12821 - protein, 19 aa, Artificial Sequence
  Description of Artificial Sequence: Synthetic peptide
  XENP018703 vhCDR2
EIRLKSNNYATHYAEPVKG

SEQ ID NO: 12822 - protein, 11 aa, Artificial Sequence
  Description of Artificial Sequence: Synthetic peptide
  XENP018703 vhCDR3
YYGLYGGYFDV

SEQ ID NO: 12823 - protein, 11 aa, Artificial Sequence
  Description of Artificial Sequence: Synthetic peptide
  XENP018703 vlCDR1
RASQSVSNDVA

SEQ ID NO: 12824 - protein, 7 aa, Artificial Sequence
  Description of Artificial Sequence: Synthetic peptide
  XENP018703 vlCDR2
YASHRYT

SEQ ID NO: 12825 - protein, 9 aa, Artificial Sequence
  Description of Artificial Sequence: Synthetic peptide
  XENP018703 vlCDR3
QQDYSSPRT

SEQ ID NO: 12826 - protein, 249 aa, Artificial Sequence
  Description of Artificial Sequence: Synthetic polypeptide
  XENP018704 1G6_H1.200_L1_scFv(GKPGS)4
EVQLVESGGGLVKPGGSLRLSCAASGFTFSNYWMNWVRQAPGKGLEWVGEIRLKSNNYATHYAEPVKGRFTISRDDSKSTVYLQMNSLKTEDTAVYYCTRYYGTYGGYFDVWGAGTLVTVSSGKPGSGKPGSGKPGSGKPGSSIVMTQSPATLSVSPGERATLSCRASQSVSNDVAWYQQKPGQSPRLLINYASHRYTGVPDRFTGSGYGTEFTLTISSLQSEDFAVYFCQQDYSSPRTFGGGTKVEIK

SEQ ID NO: 12827 - protein, 122 aa, Artificial Sequence
  Description of Artificial Sequence: Synthetic polypeptide
  VH of XENP018704
EVQLVESGGGLVKPGGSLRLSCAASGFTFSNYWMNWVRQAPGKGLEWVGEIRLKSNNYATHYAEPVKGRFTISRDDSKSTVYLQMNSLKTEDTAVYYCTRYYGTYGGYFDVWGAGTLVTVSS

SEQ ID NO: 12828 - protein, 107 aa, Artificial Sequence; identical to SEQ ID NO: 10923
  Description of Artificial Sequence: Synthetic polypeptide
  VL of XENP018704

SEQ ID NO: 12829 - protein, 5 aa, Artificial Sequence
  Description of Artificial Sequence: Synthetic peptide
  XENP018704 vhCDR1
NYWMN

SEQ ID NO: 12830 - protein, 19 aa, Artificial Sequence
  Description of Artificial Sequence: Synthetic peptide
  XENP018704 vhCDR2
EIRLKSNNYATHYAEPVKG

SEQ ID NO: 12831 - protein, 11 aa, Artificial Sequence
  Description of Artificial Sequence: Synthetic peptide
  XENP018704 vhCDR3
YYGTYGGYFDV

SEQ ID NO: 12832 - protein, 11 aa, Artificial Sequence
  Description of Artificial Sequence: Synthetic peptide
  XENP018704 vlCDR1
RASQSVSNDVA

SEQ ID NO: 12833 - protein, 7 aa, Artificial Sequence
  Description of Artificial Sequence: Synthetic peptide
  XENP018704 vlCDR2
YASHRYT

SEQ ID NO: 12834 - protein, 9 aa, Artificial Sequence
  Description of Artificial Sequence: Synthetic peptide
  XENP018704 vlCDR3
QQDYSSPRT

SEQ ID NO: 12835 - protein, 249 aa, Artificial Sequence
  Description of Artificial Sequence: Synthetic polypeptide
  XENP018705 1G6_H1.201_L1_scFv(GKPGS)4
EVQLVESGGGLVKPGGSLRLSCAASGFTFSNYWMNWVRQAPGKGLEWVGEIRLKSNNYATHYAEPVKGRFTISRDDSKSTVYLQMNSLKTEDTAVYYCTRYYGGYGGYFDVWGAGTLVTVSSGKPGSGKPGSGKPGSGKPGSSIVMTQSPATLSVSPGERATLSCRASQSVSNDVAWYQQKPGQSPRLLINYASHRYTGVPDRFTGSGYGTEFTLTISSLQSEDFAVYFCQQDYSSPRTFGGGTKVEIK

SEQ ID NO: 12836 - protein, 122 aa, Artificial Sequence
  Description of Artificial Sequence: Synthetic polypeptide
  VH of XENP018705
EVQLVESGGGLVKPGGSLRLSCAASGFTFSNYWMNWVRQAPGKGLEWVGEIRLKSNNYATHYAEPVKGRFTISRDDSKSTVYLQMNSLKTEDTAVYYCTRYYGGYGGYFDVWGAGTLVTVSS

SEQ ID NO: 12837 - protein, 107 aa, Artificial Sequence; identical to SEQ ID NO: 10923
  Description of Artificial Sequence: Synthetic polypeptide
  VL of XENP018705

SEQ ID NO: 12838 - protein, 5 aa, Artificial Sequence
  Description of Artificial Sequence: Synthetic peptide
  XENP018705 vhCDR1
NYWMN

SEQ ID NO: 12839 - protein, 19 aa, Artificial Sequence
  Description of Artificial Sequence: Synthetic peptide
  XENP018705 vhCDR2
EIRLKSNNYATHYAEPVKG

SEQ ID NO: 12840 - protein, 11 aa, Artificial Sequence
  Description of Artificial Sequence: Synthetic peptide
  XENP018705 vhCDR3
YYGGYGGYFDV

SEQ ID NO: 12841 - protein, 11 aa, Artificial Sequence
  Description of Artificial Sequence: Synthetic peptide
  XENP018705 vlCDR1
RASQSVSNDVA

SEQ ID NO: 12842 - protein, 7 aa, Artificial Sequence
  Description of Artificial Sequence: Synthetic peptide
  XENP018705 vlCDR2
YASHRYT

SEQ ID NO: 12843 - protein, 9 aa, Artificial Sequence
  Description of Artificial Sequence: Synthetic peptide
  XENP018705 vlCDR3
QQDYSSPRT

SEQ ID NO: 12844 - protein, 249 aa, Artificial Sequence
  Description of Artificial Sequence: Synthetic polypeptide
  XENP018706 1G6_H1.202_L1_scFv(GKPGS)4
EVQLVESGGGLVKPGGSLRLSCAASGFTFSNYWMNWVRQAPGKGLEWVGEIRLKSNNYATHYAEPVKGRFTISRDDSKSTVYLQMNSLKTEDTAVYYCTRYYGFYGGYFDVWGAGTLVTVSSGKPGSGKPGSGKPGSGKPGSSIVMTQSPATLSVSPGERATLSCRASQSVSNDVAWYQQKPGQSPRLLINYASHRYTGVPDRFTGSGYGTEFTLTISSLQSEDFAVYFCQQDYSSPRTFGGGTKVEIK

SEQ ID NO: 12845 - protein, 122 aa, Artificial Sequence
  Description of Artificial Sequence: Synthetic polypeptide
  VH of XENP018706
EVQLVESGGGLVKPGGSLRLSCAASGFTFSNYWMNWVRQAPGKGLEWVGEIRLKSNNYATHYAEPVKGRFTISRDDSKSTVYLQMNSLKTEDTAVYYCTRYYGFYGGYFDVWGAGTLVTVSS

SEQ ID NO: 12846 - protein, 107 aa, Artificial Sequence; identical to SEQ ID NO: 10923
  Description of Artificial Sequence: Synthetic polypeptide
  VL of XENP018706

SEQ ID NO: 12847 - protein, 5 aa, Artificial Sequence
  Description of Artificial Sequence: Synthetic peptide
  XENP018706 vhCDR1
NYWMN

SEQ ID NO: 12848 - protein, 19 aa, Artificial Sequence
  Description of Artificial Sequence: Synthetic peptide
  XENP018706 vhCDR2
EIRLKSNNYATHYAEPVKG

SEQ ID NO: 12849 - protein, 11 aa, Artificial Sequence
  Description of Artificial Sequence: Synthetic peptide
  XENP018706 vhCDR3
YYGFYGGYFDV

SEQ ID NO: 12850 - protein, 11 aa, Artificial Sequence
  Description of Artificial Sequence: Synthetic peptide
  XENP018706 vlCDR1
RASQSVSNDVA

SEQ ID NO: 12851 - protein, 7 aa, Artificial Sequence
  Description of Artificial Sequence: Synthetic peptide
  XENP018706 vlCDR2
YASHRYT

SEQ ID NO: 12852 - protein, 9 aa, Artificial Sequence
  Description of Artificial Sequence: Synthetic peptide
  XENP018706 vlCDR3
QQDYSSPRT

SEQ ID NO: 12853 - protein, 249 aa, Artificial Sequence
  Description of Artificial Sequence: Synthetic polypeptide
  XENP018707 1G6_H1.203_L1_scFv(GKPGS)4
EVQLVESGGGLVKPGGSLRLSCAASGFTFSNYWMNWVRQAPGKGLEWVGEIRLKSNNYATHYAEPVKGRFTISRDDSKSTVYLQMNSLKTEDTAVYYCTRYYGNFGGYFDVWGAGTLVTVSSGKPGSGKPGSGKPGSGKPGSSIVMTQSPATLSVSPGERATLSCRASQSVSNDVAWYQQKPGQSPRLLINYASHRYTGVPDRFTGSGYGTEFTLTISSLQSEDFAVYFCQQDYSSPRTFGGGTKVEIK

SEQ ID NO: 12854 - protein, 122 aa, Artificial Sequence
  Description of Artificial Sequence: Synthetic polypeptide
  VH of XENP018707
EVQLVESGGGLVKPGGSLRLSCAASGFTFSNYWMNWVRQAPGKGLEWVGEIRLKSNNYATHYAEPVKGRFTISRDDSKSTVYLQMNSLKTEDTAVYYCTRYYGNFGGYFDVWGAGTLVTVSS

SEQ ID NO: 12855 - protein, 107 aa, Artificial Sequence; identical to SEQ ID NO: 10923
  Description of Artificial Sequence: Synthetic polypeptide
  VL of XENP018707

SEQ ID NO: 12856 - protein, 5 aa, Artificial Sequence
  Description of Artificial Sequence: Synthetic peptide
  XENP018707 vhCDR1
NYWMN

SEQ ID NO: 12857 - protein, 19 aa, Artificial Sequence
  Description of Artificial Sequence: Synthetic peptide
  XENP018707 vhCDR2
EIRLKSNNYATHYAEPVKG

SEQ ID NO: 12858 - protein, 11 aa, Artificial Sequence
  Description of Artificial Sequence: Synthetic peptide
  XENP018707 vhCDR3
YYGNFGGYFDV

SEQ ID NO: 12859 - protein, 11 aa, Artificial Sequence
  Description of Artificial Sequence: Synthetic peptide
  XENP018707 vlCDR1
RASQSVSNDVA

SEQ ID NO: 12860 - protein, 7 aa, Artificial Sequence
  Description of Artificial Sequence: Synthetic peptide
  XENP018707 vlCDR2
YASHRYT

SEQ ID NO: 12861 - protein, 9 aa, Artificial Sequence
  Description of Artificial Sequence: Synthetic peptide
  XENP018707 vlCDR3
QQDYSSPRT

SEQ ID NO: 12862 - protein, 249 aa, Artificial Sequence
  Description of Artificial Sequence: Synthetic polypeptide
  XENP018708 1G6_H1.204_L1_scFv(GKPGS)4
EVQLVESGGGLVKPGGSLRLSCAASGFTFSNYWMNWVRQAPGKGLEWVGEIRLKSNNYATHYAEPVKGRFTISRDDSKSTVYLQMNSLKTEDTAVYYCTRYYGNHGGYFDVWGAGTLVTVSSGKPGSGKPGSGKPGSGKPGSSIVMTQSPATLSVSPGERATLSCRASQSVSNDVAWYQQKPGQSPRLLINYASHRYTGVPDRFTGSGYGTEFTLTISSLQSEDFAVYFCQQDYSSPRTFGGGTKVEIK

SEQ ID NO: 12863 - protein, 122 aa, Artificial Sequence
  Description of Artificial Sequence: Synthetic polypeptide
  VH of XENP018708
EVQLVESGGGLVKPGGSLRLSCAASGFTFSNYWMNWVRQAPGKGLEWVGEIRLKSNNYATHYAEPVKGRFTISRDDSKSTVYLQMNSLKTEDTAVYYCTRYYGNHGGYFDVWGAGTLVTVSS

SEQ ID NO: 12864 - protein, 107 aa, Artificial Sequence; identical to SEQ ID NO: 10923
  Description of Artificial Sequence: Synthetic polypeptide
  VL of XENP018708

SEQ ID NO: 12865 - protein, 5 aa, Artificial Sequence
  Description of Artificial Sequence: Synthetic peptide
  XENP018708 vhCDR1
NYWMN

SEQ ID NO: 12866 - protein, 19 aa, Artificial Sequence
  Description of Artificial Sequence: Synthetic peptide
  XENP018708 vhCDR2
EIRLKSNNYATHYAEPVKG

SEQ ID NO: 12867 - protein, 11 aa, Artificial Sequence
  Description of Artificial Sequence: Synthetic peptide
  XENP018708 vhCDR3
YYGNHGGYFDV

SEQ ID NO: 12868 - protein, 11 aa, Artificial Sequence
  Description of Artificial Sequence: Synthetic peptide
  XENP018708 vlCDR1
RASQSVSNDVA

SEQ ID NO: 12869 - protein, 7 aa, Artificial Sequence
  Description of Artificial Sequence: Synthetic peptide
  XENP018708 vlCDR2
YASHRYT

SEQ ID NO: 12870 - protein, 9 aa, Artificial Sequence
  Description of Artificial Sequence: Synthetic peptide
  XENP018708 vlCDR3
QQDYSSPRT

SEQ ID NO: 12871 - protein, 249 aa, Artificial Sequence
  Description of Artificial Sequence: Synthetic polypeptide
  XENP018709 1G6_H1.205_L1_scFv(GKPGS)4
EVQLVESGGGLVKPGGSLRLSCAASGFTFSNYWMNWVRQAPGKGLEWVGEIRLKSNNYATHYAEPVKGRFTISRDDSKSTVYLQMNSLKTEDTAVYYCTRYYGNLGGYFDVWGAGTLVTVSSGKPGSGKPGSGKPGSGKPGSSIVMTQSPATLSVSPGERATLSCRASQSVSNDVAWYQQKPGQSPRLLINYASHRYTGVPDRFTGSGYGTEFTLTISSLQSEDFAVYFCQQDYSSPRTFGGGTKVEIK

SEQ ID NO: 12872 - protein, 122 aa, Artificial Sequence
  Description of Artificial Sequence: Synthetic polypeptide
  VH of XENP018709
EVQLVESGGGLVKPGGSLRLSCAASGFTFSNYWMNWVRQAPGKGLEWVGEIRLKSNNYATHYAEPVKGRFTISRDDSKSTVYLQMNSLKTEDTAVYYCTRYYGNLGGYFDVWGAGTLVTVSS

SEQ ID NO: 12873 - protein, 107 aa, Artificial Sequence; identical to SEQ ID NO: 10923
  Description of Artificial Sequence: Synthetic polypeptide
  VL of XENP018709

SEQ ID NO: 12874 - protein, 5 aa, Artificial Sequence
  Description of Artificial Sequence: Synthetic peptide
  XENP018709 vhCDR1
NYWMN

SEQ ID NO: 12875 - protein, 19 aa, Artificial Sequence
  Description of Artificial Sequence: Synthetic peptide
  XENP018709 vhCDR2
EIRLKSNNYATHYAEPVKG

SEQ ID NO: 12876 - protein, 11 aa, Artificial Sequence
  Description of Artificial Sequence: Synthetic peptide
  XENP018709 vhCDR3
YYGNLGGYFDV

SEQ ID NO: 12877 - protein, 11 aa, Artificial Sequence
  Description of Artificial Sequence: Synthetic peptide
  XENP018709 vlCDR1
RASQSVSNDVA

SEQ ID NO: 12878 - protein, 7 aa, Artificial Sequence
  Description of Artificial Sequence: Synthetic peptide
  XENP018709 vlCDR2
YASHRYT

SEQ ID NO: 12879 - protein, 9 aa, Artificial Sequence
  Description of Artificial Sequence: Synthetic peptide
  XENP018709 vlCDR3
QQDYSSPRT

SEQ ID NO: 12880 - protein, 249 aa, Artificial Sequence
  Description of Artificial Sequence: Synthetic polypeptide
  XENP018710 1G6_H1.206_L1_scFv(GKPGS)4
EVQLVESGGGLVKPGGSLRLSCAASGFTFSNYWMNWVRQAPGKGLEWVGEIRLKSNNYATHYAEPVKGRFTISRDDSKSTVYLQMNSLKTEDTAVYYCTRYYGNWGGYFDVWGAGTLVTVSSGKPGSGKPGSGKPGSGKPGSSIVMTQSPATLSVSPGERATLSCRASQSVSNDVAWYQQKPGQSPRLLINYASHRYTGVPDRFTGSGYGTEFTLTISSLQSEDFAVYFCQQDYSSPRTFGGGTKVEIK

SEQ ID NO: 12881 - protein, 122 aa, Artificial Sequence
  Description of Artificial Sequence: Synthetic polypeptide
  VH of XENP018710
EVQLVESGGGLVKPGGSLRLSCAASGFTFSNYWMNWVRQAPGKGLEWVGEIRLKSNNYATHYAEPVKGRFTISRDDSKSTVYLQMNSLKTEDTAVYYCTRYYGNWGGYFDVWGAGTLVTVSS

SEQ ID NO: 12882 - protein, 107 aa, Artificial Sequence; identical to SEQ ID NO: 10923
  Description of Artificial Sequence: Synthetic polypeptide
  VL of XENP018710

SEQ ID NO: 12883 - protein, 5 aa, Artificial Sequence
  Description of Artificial Sequence: Synthetic peptide
  XENP018710 vhCDR1
NYWMN

SEQ ID NO: 12884 - protein, 19 aa, Artificial Sequence
  Description of Artificial Sequence: Synthetic peptide
  XENP018710 vhCDR2
EIRLKSNNYATHYAEPVKG

SEQ ID NO: 12885 - protein, 11 aa, Artificial Sequence
  Description of Artificial Sequence: Synthetic peptide
  XENP018710 vhCDR3
YYGNWGGYFDV

SEQ ID NO: 12886 - protein, 11 aa, Artificial Sequence
  Description of Artificial Sequence: Synthetic peptide
  XENP018710 vlCDR1
RASQSVSNDVA

SEQ ID NO: 12887 - protein, 7 aa, Artificial Sequence
  Description of Artificial Sequence: Synthetic peptide
  XENP018710 vlCDR2
YASHRYT

SEQ ID NO: 12888 - protein, 9 aa, Artificial Sequence
  Description of Artificial Sequence: Synthetic peptide
  XENP018710 vlCDR3
QQDYSSPRT

SEQ ID NO: 12889 - protein, 249 aa, Artificial Sequence
  Description of Artificial Sequence: Synthetic polypeptide
  XENP018711 1G6_H1.207_L1_scFv(GKPGS)4
EVQLVESGGGLVKPGGSLRLSCAASGFTFSNYWMNWVRQAPGKGLEWVGEIRLKSNNYATHYAEPVKGRFTISRDDSKSTVYLQMNSLKTEDTAVYYCTRYYGNVGGYFDVWGAGTLVTVSSGKPGSGKPGSGKPGSGKPGSSIVMTQSPATLSVSPGERATLSCRASQSVSNDVAWYQQKPGQSPRLLINYASHRYTGVPDRFTGSGYGTEFTLTISSLQSEDFAVYFCQQDYSSPRTFGGGTKVEIK

SEQ ID NO: 12890 - protein, 122 aa, Artificial Sequence
  Description of Artificial Sequence: Synthetic polypeptide
  VH of XENP018711
EVQLVESGGGLVKPGGSLRLSCAASGFTFSNYWMNWVRQAPGKGLEWVGEIRLKSNNYATHYAEPVKGRFTISRDDSKSTVYLQMNSLKTEDTAVYYCTRYYGNVGGYFDVWGAGTLVTVSS

SEQ ID NO: 12891 - protein, 107 aa, Artificial Sequence; identical to SEQ ID NO: 10923
  Description of Artificial Sequence: Synthetic polypeptide
  VL of XENP018711

SEQ ID NO: 12892 - protein, 5 aa, Artificial Sequence
  Description of Artificial Sequence: Synthetic peptide
  XENP018711 vhCDR1
NYWMN

SEQ ID NO: 12893 - protein, 19 aa, Artificial Sequence
  Description of Artificial Sequence: Synthetic peptide
  XENP018711 vhCDR2
EIRLKSNNYATHYAEPVKG

SEQ ID NO: 12894 - protein, 11 aa, Artificial Sequence
  Description of Artificial Sequence: Synthetic peptide
  XENP018711 vhCDR3
YYGNVGGYFDV

SEQ ID NO: 12895 - protein, 11 aa, Artificial Sequence
  Description of Artificial Sequence: Synthetic peptide
  XENP018711 vlCDR1
RASQSVSNDVA

SEQ ID NO: 12896 - protein, 7 aa, Artificial Sequence
  Description of Artificial Sequence: Synthetic peptide
  XENP018711 vlCDR2
YASHRYT

SEQ ID NO: 12897 - protein, 9 aa, Artificial Sequence
  Description of Artificial Sequence: Synthetic peptide
  XENP018711 vlCDR3
QQDYSSPRT

SEQ ID NO: 12898 - protein, 249 aa, Artificial Sequence
  Description of Artificial Sequence: Synthetic polypeptide
  XENP018712 1G6_H1.208_L1_scFv(GKPGS)4
EVQLVESGGGLVKPGGSLRLSCAASGFTFSNYWMNWVRQAPGKGLEWVGEIRLKSNNYATHYAEPVKGRFTISRDDSKSTVYLQMNSLKTEDTAVYYCTRYYGNAGGYFDVWGAGTLVTVSSGKPGSGKPGSGKPGSGKPGSSIVMTQSPATLSVSPGERATLSCRASQSVSNDVAWYQQKPGQSPRLLINYASHRYTGVPDRFTGSGYGTEFTLTISSLQSEDFAVYFCQQDYSSPRTFGGGTKVEIK

SEQ ID NO: 12899 - protein, 122 aa, Artificial Sequence
  Description of Artificial Sequence: Synthetic polypeptide
  VH of XENP018712
EVQLVESGGGLVKPGGSLRLSCAASGFTFSNYWMNWVRQAPGKGLEWVGEIRLKSNNYATHYAEPVKGRFTISRDDSKSTVYLQMNSLKTEDTAVYYCTRYYGNAGGYFDVWGAGTLVTVSS

SEQ ID NO: 12900 - protein, 107 aa, Artificial Sequence; identical to SEQ ID NO: 10923
  Description of Artificial Sequence: Synthetic polypeptide
  VL of XENP018712

SEQ ID NO: 12901 - protein, 5 aa, Artificial Sequence
  Description of Artificial Sequence: Synthetic peptide
  XENP018712 vhCDR1
NYWMN

SEQ ID NO: 12902 - protein, 19 aa, Artificial Sequence
  Description of Artificial Sequence: Synthetic peptide
  XENP018712 vhCDR2
EIRLKSNNYATHYAEPVKG

SEQ ID NO: 12903 - protein, 11 aa, Artificial Sequence
  Description of Artificial Sequence: Synthetic peptide
  XENP018712 vhCDR3
YYGNAGGYFDV

SEQ ID NO: 12904 - protein, 11 aa, Artificial Sequence
  Description of Artificial Sequence: Synthetic peptide
  XENP018712 vlCDR1
RASQSVSNDVA

SEQ ID NO: 12905 - protein, 7 aa, Artificial Sequence
  Description of Artificial Sequence: Synthetic peptide
  XENP018712 vlCDR2
YASHRYT

SEQ ID NO: 12906 - protein, 9 aa, Artificial Sequence
  Description of Artificial Sequence: Synthetic peptide
  XENP018712 vlCDR3
QQDYSSPRT

SEQ ID NO: 12907 - protein, 249 aa, Artificial Sequence
  Description of Artificial Sequence: Synthetic polypeptide
  XENP018713 1G6_H1.209_L1_scFv(GKPGS)4
EVQLVESGGGLVKPGGSLRLSCAASGFTFSNYWMNWVRQAPGKGLEWVGEIRLKSNNYATHYAEPVKGRFTISRDDSKSTVYLQMNSLKTEDTAVYYCTRYYGNQGGYFDVWGAGTLVTVSSGKPGSGKPGSGKPGSGKPGSSIVMTQSPATLSVSPGERATLSCRASQSVSNDVAWYQQKPGQSPRLLINYASHRYTGVPDRFTGSGYGTEFTLTISSLQSEDFAVYFCQQDYSSPRTFGGGTKVEIK

SEQ ID NO: 12908 - protein, 122 aa, Artificial Sequence
  Description of Artificial Sequence: Synthetic polypeptide
  VH of XENP018713
EVQLVESGGGLVKPGGSLRLSCAASGFTFSNYWMNWVRQAPGKGLEWVGEIRLKSNNYATHYAEPVKGRFTISRDDSKSTVYLQMNSLKTEDTAVYYCTRYYGNQGGYFDVWGAGTLVTVSS

SEQ ID NO: 12909 - protein, 107 aa, Artificial Sequence; identical to SEQ ID NO: 10923
  Description of Artificial Sequence: Synthetic polypeptide
  VL of XENP018713

SEQ ID NO: 12910 - protein, 5 aa, Artificial Sequence
  Description of Artificial Sequence: Synthetic peptide
  XENP018713 vhCDR1
NYWMN

SEQ ID NO: 12911 - protein, 19 aa, Artificial Sequence
  Description of Artificial Sequence: Synthetic peptide
  XENP018713 vhCDR2
EIRLKSNNYATHYAEPVKG

SEQ ID NO: 12912 - protein, 11 aa, Artificial Sequence
  Description of Artificial Sequence: Synthetic peptide
  XENP018713 vhCDR3
YYGNQGGYFDV

SEQ ID NO: 12913 - protein, 11 aa, Artificial Sequence
  Description of Artificial Sequence: Synthetic peptide
  XENP018713 vlCDR1
RASQSVSNDVA

SEQ ID NO: 12914 - protein, 7 aa, Artificial Sequence
  Description of Artificial Sequence: Synthetic peptide
  XENP018713 vlCDR2
YASHRYT

SEQ ID NO: 12915 - protein, 9 aa, Artificial Sequence
  Description of Artificial Sequence: Synthetic peptide
  XENP018713 vlCDR3
QQDYSSPRT

SEQ ID NO: 12916 - protein, 249 aa, Artificial Sequence
  Description of Artificial Sequence: Synthetic polypeptide
  XENP018714 1G6_H1.210_L1_scFv(GKPGS)4
EVQLVESGGGLVKPGGSLRLSCAASGFTFSNYWMNWVRQAPGKGLEWVGEIRLKSNNYATHYAEPVKGRFTISRDDSKSTVYLQMNSLKTEDTAVYYCTRYYGNEGGYFDVWGAGTLVTVSSGKPGSGKPGSGKPGSGKPGSSIVMTQSPATLSVSPGERATLSCRASQSVSNDVAWYQQKPGQSPRLLINYASHRYTGVPDRFTGSGYGTEFTLTISSLQSEDFAVYFCQQDYSSPRTFGGGTKVEIK

SEQ ID NO: 12917 - protein, 122 aa, Artificial Sequence
  Description of Artificial Sequence: Synthetic polypeptide
  VH of XENP018714
EVQLVESGGGLVKPGGSLRLSCAASGFTFSNYWMNWVRQAPGKGLEWVGEIRLKSNNYATHYAEPVKGRFTISRDDSKSTVYLQMNSLKTEDTAVYYCTRYYGNEGGYFDVWGAGTLVTVSS

SEQ ID NO: 12918 - protein, 107 aa, Artificial Sequence; identical to SEQ ID NO: 10923
  Description of Artificial Sequence: Synthetic polypeptide
  VL of XENP018714

SEQ ID NO: 12919 - protein, 5 aa, Artificial Sequence
  Description of Artificial Sequence: Synthetic peptide
  XENP018714 vhCDR1
NYWMN

SEQ ID NO: 12920 - protein, 19 aa, Artificial Sequence
  Description of Artificial Sequence: Synthetic peptide
  XENP018714 vhCDR2
EIRLKSNNYATHYAEPVKG

SEQ ID NO: 12921 - protein, 11 aa, Artificial Sequence
  Description of Artificial Sequence: Synthetic peptide
  XENP018714 vhCDR3
YYGNEGGYFDV

SEQ ID NO: 12922 - protein, 11 aa, Artificial Sequence
  Description of Artificial Sequence: Synthetic peptide
  XENP018714 vlCDR1
RASQSVSNDVA

SEQ ID NO: 12923 - protein, 7 aa, Artificial Sequence
  Description of Artificial Sequence: Synthetic peptide
  XENP018714 vlCDR2
YASHRYT

SEQ ID NO: 12924 - protein, 9 aa, Artificial Sequence
  Description of Artificial Sequence: Synthetic peptide
  XENP018714 vlCDR3
QQDYSSPRT

SEQ ID NO: 12925 - protein, 249 aa, Artificial Sequence
  Description of Artificial Sequence: Synthetic polypeptide
  XENP018715 1G6_H1.211_L1_scFv(GKPGS)4
EVQLVESGGGLVKPGGSLRLSCAASGFTFSNYWMNWVRQAPGKGLEWVGEIRLKSNNYATHYAEPVKGRFTISRDDSKSTVYLQMNSLKTEDTAVYYCTRYYGNKGGYFDVWGAGTLVTVSSGKPGSGKPGSGKPGSGKPGSSIVMTQSPATLSVSPGERATLSCRASQSVSNDVAWYQQKPGQSPRLLINYASHRYTGVPDRFTGSGYGTEFTLTISSLQSEDFAVYFCQQDYSSPRTFGGGTKVEIK

SEQ ID NO: 12926 - protein, 122 aa, Artificial Sequence
  Description of Artificial Sequence: Synthetic polypeptide
  VH of XENP018715
EVQLVESGGGLVKPGGSLRLSCAASGFTFSNYWMNWVRQAPGKGLEWVGEIRLKSNNYATHYAEPVKGRFTISRDDSKSTVYLQMNSLKTEDTAVYYCTRYYGNKGGYFDVWGAGTLVTVSS

SEQ ID NO: 12927 - protein, 107 aa, Artificial Sequence; identical to SEQ ID NO: 10923
  Description of Artificial Sequence: Synthetic polypeptide
  VL of XENP018715

SEQ ID NO: 12928 - protein, 5 aa, Artificial Sequence
  Description of Artificial Sequence: Synthetic peptide
  XENP018715 vhCDR1
NYWMN

SEQ ID NO: 12929 - protein, 19 aa, Artificial Sequence
  Description of Artificial Sequence: Synthetic peptide
  XENP018715 vhCDR2
EIRLKSNNYATHYAEPVKG

SEQ ID NO: 12930 - protein, 11 aa, Artificial Sequence
  Description of Artificial Sequence: Synthetic peptide
  XENP018715 vhCDR3
YYGNKGGYFDV

SEQ ID NO: 12931 - protein, 11 aa, Artificial Sequence
  Description of Artificial Sequence: Synthetic peptide
  XENP018715 vlCDR1
RASQSVSNDVA

SEQ ID NO: 12932 - protein, 7 aa, Artificial Sequence
  Description of Artificial Sequence: Synthetic peptide
  XENP018715 vlCDR2
YASHRYT

SEQ ID NO: 12933 - protein, 9 aa, Artificial Sequence
  Description of Artificial Sequence: Synthetic peptide
  XENP018715 vlCDR3
QQDYSSPRT

SEQ ID NO: 12934 - protein, 249 aa, Artificial Sequence
  Description of Artificial Sequence: Synthetic polypeptide
  XENP018716 1G6_H1.212_L1_scFv(GKPGS)4
EVQLVESGGGLVKPGGSLRLSCAASGFTFSNYWMNWVRQAPGKGLEWVGEIRLKSNNYATHYAEPVKGRFTISRDDSKSTVYLQMNSLKTEDTAVYYCTRYYGNYAGYFDVWGAGTLVTVSSGKPGSGKPGSGKPGSGKPGSSIVMTQSPATLSVSPGERATLSCRASQSVSNDVAWYQQKPGQSPRLLINYASHRYTGVPDRFTGSGYGTEFTLTISSLQSEDFAVYFCQQDYSSPRTFGGGTKVEIK

SEQ ID NO: 12935 - protein, 122 aa, Artificial Sequence
  Description of Artificial Sequence: Synthetic polypeptide
  VH of XENP018716
EVQLVESGGGLVKPGGSLRLSCAASGFTFSNYWMNWVRQAPGKGLEWVGEIRLKSNNYATHYAEPVKGRFTISRDDSKSTVYLQMNSLKTEDTAVYYCTRYYGNYAGYFDVWGAGTLVTVSS

SEQ ID NO: 12936 - protein, 107 aa, Artificial Sequence; identical to SEQ ID NO: 10923
  Description of Artificial Sequence: Synthetic polypeptide
  VL of XENP018716

SEQ ID NO: 12937 - protein, 5 aa, Artificial Sequence
  Description of Artificial Sequence: Synthetic peptide
  XENP018716 vhCDR1
NYWMN

SEQ ID NO: 12938 - protein, 19 aa, Artificial Sequence
  Description of Artificial Sequence: Synthetic peptide
  XENP018716 vhCDR2
EIRLKSNNYATHYAEPVKG

SEQ ID NO: 12939 - protein, 11 aa, Artificial Sequence
  Description of Artificial Sequence: Synthetic peptide
  XENP018716 vhCDR3
YYGNYAGYFDV

SEQ ID NO: 12940 - protein, 11 aa, Artificial Sequence
  Description of Artificial Sequence: Synthetic peptide
  XENP018716 vlCDR1
RASQSVSNDVA

SEQ ID NO: 12941 - protein, 7 aa, Artificial Sequence
  Description of Artificial Sequence: Synthetic peptide
  XENP018716 vlCDR2
YASHRYT

SEQ ID NO: 12942 - protein, 9 aa, Artificial Sequence
  Description of Artificial Sequence: Synthetic peptide
  XENP018716 vlCDR3
QQDYSSPRT

SEQ ID NO: 12943 - protein, 249 aa, Artificial Sequence
  Description of Artificial Sequence: Synthetic polypeptide
  XENP018717 1G6_H1.213_L1_scFv(GKPGS)4
EVQLVESGGGLVKPGGSLRLSCAASGFTFSNYWMNWVRQAPGKGLEWVGEIRLKSNNYATHYAEPVKGRFTISRDDSKSTVYLQMNSLKTEDTAVYYCTRYYGNYQGYFDVWGAGTLVTVSSGKPGSGKPGSGKPGSGKPGSSIVMTQSPATLSVSPGERATLSCRASQSVSNDVAWYQQKPGQSPRLLINYASHRYTGVPDRFTGSGYGTEFTLTISSLQSEDFAVYFCQQDYSSPRTFGGGTKVEIK

SEQ ID NO: 12944 - protein, 122 aa, Artificial Sequence
  Description of Artificial Sequence: Synthetic polypeptide
  VH of XENP018717
EVQLVESGGGLVKPGGSLRLSCAASGFTFSNYWMNWVRQAPGKGLEWVGEIRLKSNNYATHYAEPVKGRFTISRDDSKSTVYLQMNSLKTEDTAVYYCTRYYGNYQGYFDVWGAGTLVTVSS

SEQ ID NO: 12945 - protein, 107 aa, Artificial Sequence; identical to SEQ ID NO: 10923
  Description of Artificial Sequence: Synthetic polypeptide
  VL of XENP018717

SEQ ID NO: 12946 - protein, 5 aa, Artificial Sequence
  Description of Artificial Sequence: Synthetic peptide
  XENP018717 vhCDR1
NYWMN

SEQ ID NO: 12947 - protein, 19 aa, Artificial Sequence
  Description of Artificial Sequence: Synthetic peptide
  XENP018717 vhCDR2
EIRLKSNNYATHYAEPVKG

SEQ ID NO: 12948 - protein, 11 aa, Artificial Sequence
  Description of Artificial Sequence: Synthetic peptide
  XENP018717 vhCDR3
YYGNYQGYFDV

SEQ ID NO: 12949 - protein, 11 aa, Artificial Sequence
  Description of Artificial Sequence: Synthetic peptide
  XENP018717 vlCDR1
RASQSVSNDVA

SEQ ID NO: 12950 - protein, 7 aa, Artificial Sequence
  Description of Artificial Sequence: Synthetic peptide
  XENP018717 vlCDR2
YASHRYT

SEQ ID NO: 12951 - protein, 9 aa, Artificial Sequence
  Description of Artificial Sequence: Synthetic peptide
  XENP018717 vlCDR3
QQDYSSPRT

SEQ ID NO: 12952 - protein, 249 aa, Artificial Sequence
  Description of Artificial Sequence: Synthetic polypeptide
  XENP018718 1G6_H1.214_L1_scFv(GKPGS)4
EVQLVESGGGLVKPGGSLRLSCAASGFTFSNYWMNWVRQAPGKGLEWVGEIRLKSNNYATHYAEPVKGRFTISRDDSKSTVYLQMNSLKTEDTAVYYCTRYYGNYHGYFDVWGAGTLVTVSSGKPGSGKPGSGKPGSGKPGSSIVMTQSPATLSVSPGERATLSCRASQSVSNDVAWYQQKPGQSPRLLINYASHRYTGVPDRFTGSGYGTEFTLTISSLQSEDFAVYFCQQDYSSPRTFGGGTKVEIK

SEQ ID NO: 12953 - protein, 122 aa, Artificial Sequence
  Description of Artificial Sequence: Synthetic polypeptide
  VH of XENP018718
EVQLVESGGGLVKPGGSLRLSCAASGFTFSNYWMNWVRQAPGKGLEWVGEIRLKSNNYATHYAEPVKGRFTISRDDSKSTVYLQMNSLKTEDTAVYYCTRYYGNYHGYFDVWGAGTLVTVSS

SEQ ID NO: 12954 - protein, 107 aa, Artificial Sequence; identical to SEQ ID NO: 10923
  Description of Artificial Sequence: Synthetic polypeptide
  VL of XENP018718

SEQ ID NO: 12955 - protein, 5 aa, Artificial Sequence
  Description of Artificial Sequence: Synthetic peptide
  XENP018718 vhCDR1
NYWMN

SEQ ID NO: 12956 - protein, 19 aa, Artificial Sequence
  Description of Artificial Sequence: Synthetic peptide
  XENP018718 vhCDR2
EIRLKSNNYATHYAEPVKG

SEQ ID NO: 12957 - protein, 11 aa, Artificial Sequence
  Description of Artificial Sequence: Synthetic peptide
  XENP018718 vhCDR3
YYGNYHGYFDV

SEQ ID NO: 12958 - protein, 11 aa, Artificial Sequence
  Description of Artificial Sequence: Synthetic peptide
  XENP018718 vlCDR1
RASQSVSNDVA

SEQ ID NO: 12959 - protein, 7 aa, Artificial Sequence
  Description of Artificial Sequence: Synthetic peptide
  XENP018718 vlCDR2
YASHRYT

SEQ ID NO: 12960 - protein, 9 aa, Artificial Sequence
  Description of Artificial Sequence: Synthetic peptide
  XENP018718 vlCDR3
QQDYSSPRT

SEQ ID NO: 12961 - protein, 249 aa, Artificial Sequence
  Description of Artificial Sequence: Synthetic polypeptide
  XENP018719 1G6_H1.215_L1_scFv(GKPGS)4
EVQLVESGGGLVKPGGSLRLSCAASGFTFSNYWMNWVRQAPGKGLEWVGEIRLKSNNYATHYAEPVKGRFTISRDDSKSTVYLQMNSLKTEDTAVYYCTRYYGNYDGYFDVWGAGTLVTVSSGKPGSGKPGSGKPGSGKPGSSIVMTQSPATLSVSPGERATLSCRASQSVSNDVAWYQQKPGQSPRLLINYASHRYTGVPDRFTGSGYGTEFTLTISSLQSEDFAVYFCQQDYSSPRTFGGGTKVEIK

SEQ ID NO: 12962 - protein, 122 aa, Artificial Sequence
  Description of Artificial Sequence: Synthetic polypeptide
  VH of XENP018719
EVQLVESGGGLVKPGGSLRLSCAASGFTFSNYWMNWVRQAPGKGLEWVGEIRLKSNNYATHYAEPVKGRFTISRDDSKSTVYLQMNSLKTEDTAVYYCTRYYGNYDGYFDVWGAGTLVTVSS

SEQ ID NO: 12963 - protein, 107 aa, Artificial Sequence; identical to SEQ ID NO: 10923
  Description of Artificial Sequence: Synthetic polypeptide
  VL of XENP018719

SEQ ID NO: 12964 - protein, 5 aa, Artificial Sequence
  Description of Artificial Sequence: Synthetic peptide
  XENP018719 vhCDR1
NYWMN

SEQ ID NO: 12965 - protein, 19 aa, Artificial Sequence
  Description of Artificial Sequence: Synthetic peptide
  XENP018719 vhCDR2
EIRLKSNNYATHYAEPVKG

SEQ ID NO: 12966 - protein, 11 aa, Artificial Sequence
  Description of Artificial Sequence: Synthetic peptide
  XENP018719 vhCDR3
YYGNYDGYFDV

SEQ ID NO: 12967 - protein, 11 aa, Artificial Sequence
  Description of Artificial Sequence: Synthetic peptide
  XENP018719 vlCDR1
RASQSVSNDVA

SEQ ID NO: 12968 - protein, 7 aa, Artificial Sequence
  Description of Artificial Sequence: Synthetic peptide
  XENP018719 vlCDR2
YASHRYT

SEQ ID NO: 12969 - protein, 9 aa, Artificial Sequence
  Description of Artificial Sequence: Synthetic peptide
  XENP018719 vlCDR3
QQDYSSPRT

SEQ ID NO: 12970 - protein, 249 aa, Artificial Sequence
  Description of Artificial Sequence: Synthetic polypeptide
  XENP018720 1G6_H1.216_L1_scFv(GKPGS)4
EVQLVESGGGLVKPGGSLRLSCAASGFTFSNYWMNWVRQAPGKGLEWVGEIRLKSNNYATHYAEPVKGRFTISRDDSKSTVYLQMNSLKTEDTAVYYCTRYYGNYKGYFDVWGAGTLVTVSSGKPGSGKPGSGKPGSGKPGSSIVMTQSPATLSVSPGERATLSCRASQSVSNDVAWYQQKPGQSPRLLINYASHRYTGVPDRFTGSGYGTEFTLTISSLQSEDFAVYFCQQDYSSPRTFGGGTKVEIK

SEQ ID NO: 12971 - protein, 122 aa, Artificial Sequence
  Description of Artificial Sequence: Synthetic polypeptide
  VH of XENP018720
EVQLVESGGGLVKPGGSLRLSCAASGFTFSNYWMNWVRQAPGKGLEWVGEIRLKSNNYATHYAEPVKGRFTISRDDSKSTVYLQMNSLKTEDTAVYYCTRYYGNYKGYFDVWGAGTLVTVSS

SEQ ID NO: 12972 - protein, 107 aa, Artificial Sequence; identical to SEQ ID NO: 10923
  Description of Artificial Sequence: Synthetic polypeptide
  VL of XENP018720

SEQ ID NO: 12973 - protein, 5 aa, Artificial Sequence
  Description of Artificial Sequence: Synthetic peptide
  XENP018720 vhCDR1
NYWMN

SEQ ID NO: 12974 - protein, 19 aa, Artificial Sequence
  Description of Artificial Sequence: Synthetic peptide
  XENP018720 vhCDR2
EIRLKSNNYATHYAEPVKG

SEQ ID NO: 12975 - protein, 11 aa, Artificial Sequence
  Description of Artificial Sequence: Synthetic peptide
  XENP018720 vhCDR3
YYGNYKGYFDV

SEQ ID NO: 12976 - protein, 11 aa, Artificial Sequence
  Description of Artificial Sequence: Synthetic peptide
  XENP018720 vlCDR1
RASQSVSNDVA

SEQ ID NO: 12977 - protein, 7 aa, Artificial Sequence
  Description of Artificial Sequence: Synthetic peptide
  XENP018720 vlCDR2
YASHRYT

SEQ ID NO: 12978 - protein, 9 aa, Artificial Sequence
  Description of Artificial Sequence: Synthetic peptide
  XENP018720 vlCDR3
QQDYSSPRT

SEQ ID NO: 12979 - protein, 249 aa, Artificial Sequence
  Description of Artificial Sequence: Synthetic polypeptide
  XENP018721 1G6_H1.217_L1_scFv(GKPGS)4
EVQLVESGGGLVKPGGSLRLSCAASGFTFSNYWMNWVRQAPGKGLEWVGEIRLKSNNYATHYAEPVKGRFTISRDDSKSTVYLQMNSLKTEDTAVYYCTRYYGNYLGYFDVWGAGTLVTVSSGKPGSGKPGSGKPGSGKPGSSIVMTQSPATLSVSPGERATLSCRASQSVSNDVAWYQQKPGQSPRLLINYASHRYTGVPDRFTGSGYGTEFTLTISSLQSEDFAVYFCQQDYSSPRTFGGGTKVEIK

SEQ ID NO: 12980 - protein, 122 aa, Artificial Sequence
  Description of Artificial Sequence: Synthetic polypeptide
  VH of XENP018721
EVQLVESGGGLVKPGGSLRLSCAASGFTFSNYWMNWVRQAPGKGLEWVGEIRLKSNNYATHYAEPVKGRFTISRDDSKSTVYLQMNSLKTEDTAVYYCTRYYGNYLGYFDVWGAGTLVTVSS

SEQ ID NO: 12981 - protein, 107 aa, Artificial Sequence; identical to SEQ ID NO: 10923
  Description of Artificial Sequence: Synthetic polypeptide
  VL of XENP018721

SEQ ID NO: 12982 - protein, 5 aa, Artificial Sequence
  Description of Artificial Sequence: Synthetic peptide
  XENP018721 vhCDR1
NYWMN

SEQ ID NO: 12983 - protein, 19 aa, Artificial Sequence
  Description of Artificial Sequence: Synthetic peptide
  XENP018721 vhCDR2
EIRLKSNNYATHYAEPVKG

SEQ ID NO: 12984 - protein, 11 aa, Artificial Sequence
  Description of Artificial Sequence: Synthetic peptide
  XENP018721 vhCDR3
YYGNYLGYFDV

SEQ ID NO: 12985 - protein, 11 aa, Artificial Sequence
  Description of Artificial Sequence: Synthetic peptide
  XENP018721 vlCDR1
RASQSVSNDVA

SEQ ID NO: 12986 - protein, 7 aa, Artificial Sequence
  Description of Artificial Sequence: Synthetic peptide
  XENP018721 vlCDR2
YASHRYT

SEQ ID NO: 12987 - protein, 9 aa, Artificial Sequence
  Description of Artificial Sequence: Synthetic peptide
  XENP018721 vlCDR3
QQDYSSPRT

SEQ ID NO: 12988 - protein, 249 aa, Artificial Sequence
  Description of Artificial Sequence: Synthetic polypeptide
  XENP018722 1G6_H1.218_L1_scFv(GKPGS)4
EVQLVESGGGLVKPGGSLRLSCAASGFTFSNYWMNWVRQAPGKGLEWVGEIRLKSNNYATHYAEPVKGRFTISRDDSKSTVYLQMNSLKTEDTAVYYCTRYYGNYFGYFDVWGAGTLVTVSSGKPGSGKPGSGKPGSGKPGSSIVMTQSPATLSVSPGERATLSCRASQSVSNDVAWYQQKPGQSPRLLINYASHRYTGVPDRFTGSGYGTEFTLTISSLQSEDFAVYFCQQDYSSPRTFGGGTKVEIK

SEQ ID NO: 12989 - protein, 122 aa, Artificial Sequence
  Description of Artificial Sequence: Synthetic polypeptide
  VH of XENP018722
EVQLVESGGGLVKPGGSLRLSCAASGFTFSNYWMNWVRQAPGKGLEWVGEIRLKSNNYATHYAEPVKGRFTISRDDSKSTVYLQMNSLKTEDTAVYYCTRYYGNYFGYFDVWGAGTLVTVSS

SEQ ID NO: 12990 - protein, 107 aa, Artificial Sequence; identical to SEQ ID NO: 10923
  Description of Artificial Sequence: Synthetic polypeptide
  VL of XENP018722

SEQ ID NO: 12991 - protein, 5 aa, Artificial Sequence
  Description of Artificial Sequence: Synthetic peptide
  XENP018722 vhCDR1
NYWMN

SEQ ID NO: 12992 - protein, 19 aa, Artificial Sequence
  Description of Artificial Sequence: Synthetic peptide
  XENP018722 vhCDR2
EIRLKSNNYATHYAEPVKG

SEQ ID NO: 12993 - protein, 11 aa, Artificial Sequence
  Description of Artificial Sequence: Synthetic peptide
  XENP018722 vhCDR3
YYGNYFGYFDV

SEQ ID NO: 12994 - protein, 11 aa, Artificial Sequence
  Description of Artificial Sequence: Synthetic peptide
  XENP018722 vlCDR1
RASQSVSNDVA

SEQ ID NO: 12995 - protein, 7 aa, Artificial Sequence
  Description of Artificial Sequence: Synthetic peptide
  XENP018722 vlCDR2
YASHRYT

SEQ ID NO: 12996 - protein, 9 aa, Artificial Sequence
  Description of Artificial Sequence: Synthetic peptide
  XENP018722 vlCDR3
QQDYSSPRT

SEQ ID NO: 12997 - protein, 249 aa, Artificial Sequence
  Description of Artificial Sequence: Synthetic polypeptide
  XENP018723 1G6_H1.219_L1_scFv(GKPGS)4
EVQLVESGGGLVKPGGSLRLSCAASGFTFSNYWMNWVRQAPGKGLEWVGEIRLKSNNYATHYAEPVKGRFTISRDDSKSTVYLQMNSLKTEDTAVYYCTRYYGNYGAYFDVWGAGTLVTVSSGKPGSGKPGSGKPGSGKPGSSIVMTQSPATLSVSPGERATLSCRASQSVSNDVAWYQQKPGQSPRLLINYASHRYTGVPDRFTGSGYGTEFTLTISSLQSEDFAVYFCQQDYSSPRTFGGGTKVEIK

SEQ ID NO: 12998 - protein, 122 aa, Artificial Sequence
  Description of Artificial Sequence: Synthetic polypeptide
  VH of XENP018723
EVQLVESGGGLVKPGGSLRLSCAASGFTFSNYWMNWVRQAPGKGLEWVGEIRLKSNNYATHYAEPVKGRFTISRDDSKSTVYLQMNSLKTEDTAVYYCTRYYGNYGAYFDVWGAGTLVTVSS

SEQ ID NO: 12999 - protein, 107 aa, Artificial Sequence; identical to SEQ ID NO: 10923
  Description of Artificial Sequence: Synthetic polypeptide
  VL of XENP018723

SEQ ID NO: 13000 - protein, 5 aa, Artificial Sequence
  Description of Artificial Sequence: Synthetic peptide
  XENP018723 vhCDR1
NYWMN

SEQ ID NO: 13001 - protein, 19 aa, Artificial Sequence
  Description of Artificial Sequence: Synthetic peptide
  XENP018723 vhCDR2
EIRLKSNNYATHYAEPVKG

SEQ ID NO: 13002 - protein, 11 aa, Artificial Sequence
  Description of Artificial Sequence: Synthetic peptide
  XENP018723 vhCDR3
YYGNYGAYFDV

SEQ ID NO: 13003 - protein, 11 aa, Artificial Sequence
  Description of Artificial Sequence: Synthetic peptide
  XENP018723 vlCDR1
RASQSVSNDVA

SEQ ID NO: 13004 - protein, 7 aa, Artificial Sequence
  Description of Artificial Sequence: Synthetic peptide
  XENP018723 vlCDR2
YASHRYT

SEQ ID NO: 13005 - protein, 9 aa, Artificial Sequence
  Description of Artificial Sequence: Synthetic peptide
  XENP018723 vlCDR3
QQDYSSPRT

SEQ ID NO: 13006 - protein, 249 aa, Artificial Sequence
  Description of Artificial Sequence: Synthetic polypeptide
  XENP018724 1G6_H1.220_L1_scFv(GKPGS)4
EVQLVESGGGLVKPGGSLRLSCAASGFTFSNYWMNWVRQAPGKGLEWVGEIRLKSNNYATHYAEPVKGRFTISRDDSKSTVYLQMNSLKTEDTAVYYCTRYYGNYGSYFDVWGAGTLVTVSSGKPGSGKPGSGKPGSGKPGSSIVMTQSPATLSVSPGERATLSCRASQSVSNDVAWYQQKPGQSPRLLINYASHRYTGVPDRFTGSGYGTEFTLTISSLQSEDFAVYFCQQDYSSPRTFGGGTKVEIK

SEQ ID NO: 13007 - protein, 122 aa, Artificial Sequence
  Description of Artificial Sequence: Synthetic polypeptide
  VH of XENP018724
EVQLVESGGGLVKPGGSLRLSCAASGFTFSNYWMNWVRQAPGKGLEWVGEIRLKSNNYATHYAEPVKGRFTISRDDSKSTVYLQMNSLKTEDTAVYYCTRYYGNYGSYFDVWGAGTLVTVSS

SEQ ID NO: 13008 - protein, 107 aa, Artificial Sequence; identical to SEQ ID NO: 10923
  Description of Artificial Sequence: Synthetic polypeptide
  VL of XENP018724

SEQ ID NO: 13009 - protein, 5 aa, Artificial Sequence
  Description of Artificial Sequence: Synthetic peptide
  XENP018724 vhCDR1
NYWMN

SEQ ID NO: 13010 - protein, 19 aa, Artificial Sequence
  Description of Artificial Sequence: Synthetic peptide
  XENP018724 vhCDR2
EIRLKSNNYATHYAEPVKG

SEQ ID NO: 13011 - protein, 11 aa, Artificial Sequence
  Description of Artificial Sequence: Synthetic peptide
  XENP018724 vhCDR3
YYGNYGSYFDV

SEQ ID NO: 13012 - protein, 11 aa, Artificial Sequence
  Description of Artificial Sequence: Synthetic peptide
  XENP018724 vlCDR1
RASQSVSNDVA

SEQ ID NO: 13013 - protein, 7 aa, Artificial Sequence
  Description of Artificial Sequence: Synthetic peptide
  XENP018724 vlCDR2
YASHRYT

SEQ ID NO: 13014 - protein, 9 aa, Artificial Sequence
  Description of Artificial Sequence: Synthetic peptide
  XENP018724 vlCDR3
QQDYSSPRT

SEQ ID NO: 13015 - protein, 249 aa, Artificial Sequence
  Description of Artificial Sequence: Synthetic polypeptide
  XENP018725 1G6_H1.221_L1_scFv(GKPGS)4
EVQLVESGGGLVKPGGSLRLSCAASGFTFSNYWMNWVRQAPGKGLEWVGEIRLKSNNYATHYAEPVKGRFTISRDDSKSTVYLQMNSLKTEDTAVYYCTRYYGNYGTYFDVWGAGTLVTVSSGKPGSGKPGSGKPGSGKPGSSIVMTQSPATLSVSPGERATLSCRASQSVSNDVAWYQQKPGQSPRLLINYASHRYTGVPDRFTGSGYGTEFTLTISSLQSEDFAVYFCQQDYSSPRTFGGGTKVEIK

SEQ ID NO: 13016 - protein, 122 aa, Artificial Sequence
  Description of Artificial Sequence: Synthetic polypeptide
  VH of XENP018725
EVQLVESGGGLVKPGGSLRLSCAASGFTFSNYWMNWVRQAPGKGLEWVGEIRLKSNNYATHYAEPVKGRFTISRDDSKSTVYLQMNSLKTEDTAVYYCTRYYGNYGTYFDVWGAGTLVTVSS

SEQ ID NO: 13017 - protein, 107 aa, Artificial Sequence; identical to SEQ ID NO: 10923
  Description of Artificial Sequence: Synthetic polypeptide
  VL of XENP018725

SEQ ID NO: 13018 - protein, 5 aa, Artificial Sequence
  Description of Artificial Sequence: Synthetic peptide
  XENP018725 vhCDR1
NYWMN

SEQ ID NO: 13019 - protein, 19 aa, Artificial Sequence
  Description of Artificial Sequence: Synthetic peptide
  XENP018725 vhCDR2
EIRLKSNNYATHYAEPVKG

SEQ ID NO: 13020 - protein, 11 aa, Artificial Sequence
  Description of Artificial Sequence: Synthetic peptide
  XENP018725 vhCDR3
YYGNYGTYFDV

SEQ ID NO: 13021 - protein, 11 aa, Artificial Sequence
  Description of Artificial Sequence: Synthetic peptide
  XENP018725 vlCDR1
RASQSVSNDVA

SEQ ID NO: 13022 - protein, 7 aa, Artificial Sequence
  Description of Artificial Sequence: Synthetic peptide
  XENP018725 vlCDR2
YASHRYT

SEQ ID NO: 13023 - protein, 9 aa, Artificial Sequence
  Description of Artificial Sequence: Synthetic peptide
  XENP018725 vlCDR3
QQDYSSPRT

SEQ ID NO: 13024 - protein, 249 aa, Artificial Sequence
  Description of Artificial Sequence: Synthetic polypeptide
  XENP018726 1G6_H1.222_L1_scFv(GKPGS)4
EVQLVESGGGLVKPGGSLRLSCAASGFTFSNYWMNWVRQAPGKGLEWVGEIRLKSNNYATHYAEPVKGRFTISRDDSKSTVYLQMNSLKTEDTAVYYCTRYYGNYGNYFDVWGAGTLVTVSSGKPGSGKPGSGKPGSGKPGSSIVMTQSPATLSVSPGERATLSCRASQSVSNDVAWYQQKPGQSPRLLINYASHRYTGVPDRFTGSGYGTEFTLTISSLQSEDFAVYFCQQDYSSPRTFGGGTKVEIK

SEQ ID NO: 13025 - protein, 122 aa, Artificial Sequence
  Description of Artificial Sequence: Synthetic polypeptide
  VH of XENP018726
EVQLVESGGGLVKPGGSLRLSCAASGFTFSNYWMNWVRQAPGKGLEWVGEIRLKSNNYATHYAEPVKGRFTISRDDSKSTVYLQMNSLKTEDTAVYYCTRYYGNYGNYFDVWGAGTLVTVSS

SEQ ID NO: 13026 - protein, 107 aa, Artificial Sequence; identical to SEQ ID NO: 10923
  Description of Artificial Sequence: Synthetic polypeptide
  VL of XENP018726

SEQ ID NO: 13027 - protein, 5 aa, Artificial Sequence
  Description of Artificial Sequence: Synthetic peptide
  XENP018726 vhCDR1
NYWMN

SEQ ID NO: 13028 - protein, 19 aa, Artificial Sequence
  Description of Artificial Sequence: Synthetic peptide
  XENP018726 vhCDR2
EIRLKSNNYATHYAEPVKG

SEQ ID NO: 13029 - protein, 11 aa, Artificial Sequence
  Description of Artificial Sequence: Synthetic peptide
  XENP018726 vhCDR3
YYGNYGNYFDV

SEQ ID NO: 13030 - protein, 11 aa, Artificial Sequence
  Description of Artificial Sequence: Synthetic peptide
  XENP018726 vlCDR1
RASQSVSNDVA

SEQ ID NO: 13031 - protein, 7 aa, Artificial Sequence
  Description of Artificial Sequence: Synthetic peptide
  XENP018726 vlCDR2
YASHRYT

SEQ ID NO: 13032 - protein, 9 aa, Artificial Sequence
  Description of Artificial Sequence: Synthetic peptide
  XENP018726 vlCDR3
QQDYSSPRT

SEQ ID NO: 13033 - protein, 249 aa, Artificial Sequence
  Description of Artificial Sequence: Synthetic polypeptide
  XENP018727 1G6_H1.223_L1_scFv(GKPGS)4
EVQLVESGGGLVKPGGSLRLSCAASGFTFSNYWMNWVRQAPGKGLEWVGEIRLKSNNYATHYAEPVKGRFTISRDDSKSTVYLQMNSLKTEDTAVYYCTRYYGNYGHYFDVWGAGTLVTVSSGKPGSGKPGSGKPGSGKPGSSIVMTQSPATLSVSPGERATLSCRASQSVSNDVAWYQQKPGQSPRLLINYASHRYTGVPDRFTGSGYGTEFTLTISSLQSEDFAVYFCQQDYSSPRTFGGGTKVEIK

SEQ ID NO: 13034 - protein, 122 aa, Artificial Sequence
  Description of Artificial Sequence: Synthetic polypeptide
  VH of XENP018727
EVQLVESGGGLVKPGGSLRLSCAASGFTFSNYWMNWVRQAPGKGLEWVGEIRLKSNNYATHYAEPVKGRFTISRDDSKSTVYLQMNSLKTEDTAVYYCTRYYGNYGHYFDVWGAGTLVTVSS

SEQ ID NO: 13035 - protein, 107 aa, Artificial Sequence; identical to SEQ ID NO: 10923
  Description of Artificial Sequence: Synthetic polypeptide
  VL of XENP018727

SEQ ID NO: 13036 - protein, 5 aa, Artificial Sequence
  Description of Artificial Sequence: Synthetic peptide
  XENP018727 vhCDR1
NYWMN

SEQ ID NO: 13037 - protein, 19 aa, Artificial Sequence
  Description of Artificial Sequence: Synthetic peptide
  XENP018727 vhCDR2
EIRLKSNNYATHYAEPVKG

SEQ ID NO: 13038 - protein, 11 aa, Artificial Sequence
  Description of Artificial Sequence: Synthetic peptide
  XENP018727 vhCDR3
YYGNYGHYFDV

SEQ ID NO: 13039 - protein, 11 aa, Artificial Sequence
  Description of Artificial Sequence: Synthetic peptide
  XENP018727 vlCDR1
RASQSVSNDVA

SEQ ID NO: 13040 - protein, 7 aa, Artificial Sequence
  Description of Artificial Sequence: Synthetic peptide
  XENP018727 vlCDR2
YASHRYT

SEQ ID NO: 13041 - protein, 9 aa, Artificial Sequence
  Description of Artificial Sequence: Synthetic peptide
  XENP018727 vlCDR3
QQDYSSPRT

SEQ ID NO: 13042 - protein, 249 aa, Artificial Sequence
  Description of Artificial Sequence: Synthetic polypeptide
  XENP018728 1G6_H1.224_L1_scFv(GKPGS)4
EVQLVESGGGLVKPGGSLRLSCAASGFTFSNYWMNWVRQAPGKGLEWVGEIRLKSNNYATHYAEPVKGRFTISRDDSKSTVYLQMNSLKTEDTAVYYCTRYYGNYGDYFDVWGAGTLVTVSSGKPGSGKPGSGKPGSGKPGSSIVMTQSPATLSVSPGERATLSCRASQSVSNDVAWYQQKPGQSPRLLINYASHRYTGVPDRFTGSGYGTEFTLTISSLQSEDFAVYFCQQDYSSPRTFGGGTKVEIK

SEQ ID NO: 13043 - protein, 122 aa, Artificial Sequence
  Description of Artificial Sequence: Synthetic polypeptide
  VH of XENP018728
EVQLVESGGGLVKPGGSLRLSCAASGFTFSNYWMNWVRQAPGKGLEWVGEIRLKSNNYATHYAEPVKGRFTISRDDSKSTVYLQMNSLKTEDTAVYYCTRYYGNYGDYFDVWGAGTLVTVSS

SEQ ID NO: 13044 - protein, 107 aa, Artificial Sequence; identical to SEQ ID NO: 10923
  Description of Artificial Sequence: Synthetic polypeptide
  VL of XENP018728

SEQ ID NO: 13045 - protein, 5 aa, Artificial Sequence
  Description of Artificial Sequence: Synthetic peptide
  XENP018728 vhCDR1
NYWMN

SEQ ID NO: 13046 - protein, 19 aa, Artificial Sequence
  Description of Artificial Sequence: Synthetic peptide
  XENP018728 vhCDR2
EIRLKSNNYATHYAEPVKG

SEQ ID NO: 13047 - protein, 11 aa, Artificial Sequence
  Description of Artificial Sequence: Synthetic peptide
  XENP018728 vhCDR3
YYGNYGDYFDV

SEQ ID NO: 13048 - protein, 11 aa, Artificial Sequence
  Description of Artificial Sequence: Synthetic peptide
  XENP018728 vlCDR1
RASQSVSNDVA

SEQ ID NO: 13049 - protein, 7 aa, Artificial Sequence
  Description of Artificial Sequence: Synthetic peptide
  XENP018728 vlCDR2
YASHRYT

SEQ ID NO: 13050 - protein, 9 aa, Artificial Sequence
  Description of Artificial Sequence: Synthetic peptide
  XENP018728 vlCDR3
QQDYSSPRT

SEQ ID NO: 13051 - protein, 249 aa, Artificial Sequence
  Description of Artificial Sequence: Synthetic polypeptide
  XENP018729 1G6_H1.225_L1_scFv(GKPGS)4
EVQLVESGGGLVKPGGSLRLSCAASGFTFSNYWMNWVRQAPGKGLEWVGEIRLKSNNYATHYAEPVKGRFTISRDDSKSTVYLQMNSLKTEDTAVYYCTRYYGNYGKYFDVWGAGTLVTVSSGKPGSGKPGSGKPGSGKPGSSIVMTQSPATLSVSPGERATLSCRASQSVSNDVAWYQQKPGQSPRLLINYASHRYTGVPDRFTGSGYGTEFTLTISSLQSEDFAVYFCQQDYSSPRTFGGGTKVEIK

SEQ ID NO: 13052 - protein, 122 aa, Artificial Sequence
  Description of Artificial Sequence: Synthetic polypeptide
  VH of XENP018729
EVQLVESGGGLVKPGGSLRLSCAASGFTFSNYWMNWVRQAPGKGLEWVGEIRLKSNNYATHYAEPVKGRFTISRDDSKSTVYLQMNSLKTEDTAVYYCTRYYGNYGKYFDVWGAGTLVTVSS

SEQ ID NO: 13053 - protein, 107 aa, Artificial Sequence; identical to SEQ ID NO: 10923
  Description of Artificial Sequence: Synthetic polypeptide
  VL of XENP018729

SEQ ID NO: 13054 - protein, 5 aa, Artificial Sequence
  Description of Artificial Sequence: Synthetic peptide
  XENP018729 vhCDR1
NYWMN

SEQ ID NO: 13055 - protein, 19 aa, Artificial Sequence
  Description of Artificial Sequence: Synthetic peptide
  XENP018729 vhCDR2
EIRLKSNNYATHYAEPVKG

SEQ ID NO: 13056 - protein, 11 aa, Artificial Sequence
  Description of Artificial Sequence: Synthetic peptide
  XENP018729 vhCDR3
YYGNYGKYFDV

SEQ ID NO: 13057 - protein, 11 aa, Artificial Sequence
  Description of Artificial Sequence: Synthetic peptide
  XENP018729 vlCDR1
RASQSVSNDVA

SEQ ID NO: 13058 - protein, 7 aa, Artificial Sequence
  Description of Artificial Sequence: Synthetic peptide
  XENP018729 vlCDR2
YASHRYT

SEQ ID NO: 13059 - protein, 9 aa, Artificial Sequence
  Description of Artificial Sequence: Synthetic peptide
  XENP018729 vlCDR3
QQDYSSPRT

SEQ ID NO: 13060 - protein, 249 aa, Artificial Sequence
  Description of Artificial Sequence: Synthetic polypeptide
  XENP018730 1G6_H1.226_L1_scFv(GKPGS)4
EVQLVESGGGLVKPGGSLRLSCAASGFTFSNYWMNWVRQAPGKGLEWVGEIRLKSNNYATHYAEPVKGRFTISRDDSKSTVYLQMNSLKTEDTAVYYCTRYYGNYGLYFDVWGAGTLVTVSSGKPGSGKPGSGKPGSGKPGSSIVMTQSPATLSVSPGERATLSCRASQSVSNDVAWYQQKPGQSPRLLINYASHRYTGVPDRFTGSGYGTEFTLTISSLQSEDFAVYFCQQDYSSPRTFGGGTKVEIK

SEQ ID NO: 13061 - protein, 122 aa, Artificial Sequence
  Description of Artificial Sequence: Synthetic polypeptide
  VH of XENP018730
EVQLVESGGGLVKPGGSLRLSCAASGFTFSNYWMNWVRQAPGKGLEWVGEIRLKSNNYATHYAEPVKGRFTISRDDSKSTVYLQMNSLKTEDTAVYYCTRYYGNYGLYFDVWGAGTLVTVSS

SEQ ID NO: 13062 - protein, 107 aa, Artificial Sequence; identical to SEQ ID NO: 10923
  Description of Artificial Sequence: Synthetic polypeptide
  VL of XENP018730

SEQ ID NO: 13063 - protein, 5 aa, Artificial Sequence
  Description of Artificial Sequence: Synthetic peptide
  XENP018730 vhCDR1
NYWMN

SEQ ID NO: 13064 - protein, 19 aa, Artificial Sequence
  Description of Artificial Sequence: Synthetic peptide
  XENP018730 vhCDR2
EIRLKSNNYATHYAEPVKG

SEQ ID NO: 13065 - protein, 11 aa, Artificial Sequence
  Description of Artificial Sequence: Synthetic peptide
  XENP018730 vhCDR3
YYGNYGLYFDV

SEQ ID NO: 13066 - protein, 11 aa, Artificial Sequence
  Description of Artificial Sequence: Synthetic peptide
  XENP018730 vlCDR1
RASQSVSNDVA

SEQ ID NO: 13067 - protein, 7 aa, Artificial Sequence
  Description of Artificial Sequence: Synthetic peptide
  XENP018730 vlCDR2
YASHRYT

SEQ ID NO: 13068 - protein, 9 aa, Artificial Sequence
  Description of Artificial Sequence: Synthetic peptide
  XENP018730 vlCDR3
QQDYSSPRT

SEQ ID NO: 13069 - protein, 249 aa, Artificial Sequence
  Description of Artificial Sequence: Synthetic polypeptide
  XENP018731 1G6_H1.227_L1_scFv(GKPGS)4
EVQLVESGGGLVKPGGSLRLSCAASGFTFSNYWMNWVRQAPGKGLEWVGEIRLKSNNYATHYAEPVKGRFTISRDDSKSTVYLQMNSLKTEDTAVYYCTRYYGNYGFYFDVWGAGTLVTVSSGKPGSGKPGSGKPGSGKPGSSIVMTQSPATLSVSPGERATLSCRASQSVSNDVAWYQQKPGQSPRLLINYASHRYTGVPDRFTGSGYGTEFTLTISSLQSEDFAVYFCQQDYSSPRTFGGGTKVEIK

SEQ ID NO: 13070 - protein, 122 aa, Artificial Sequence
  Description of Artificial Sequence: Synthetic polypeptide
  VH of XENP018731
EVQLVESGGGLVKPGGSLRLSCAASGFTFSNYWMNWVRQAPGKGLEWVGEIRLKSNNYATHYAEPVKGRFTISRDDSKSTVYLQMNSLKTEDTAVYYCTRYYGNYGFYFDVWGAGTLVTVSS

SEQ ID NO: 13071 - protein, 107 aa, Artificial Sequence; identical to SEQ ID NO: 10923
  Description of Artificial Sequence: Synthetic polypeptide
  VL of XENP018731

SEQ ID NO: 13072 - protein, 5 aa, Artificial Sequence
  Description of Artificial Sequence: Synthetic peptide
  XENP018731 vhCDR1
NYWMN

SEQ ID NO: 13073 - protein, 19 aa, Artificial Sequence
  Description of Artificial Sequence: Synthetic peptide
  XENP018731 vhCDR2
EIRLKSNNYATHYAEPVKG

SEQ ID NO: 13074 - protein, 11 aa, Artificial Sequence
  Description of Artificial Sequence: Synthetic peptide
  XENP018731 vhCDR3
YYGNYGFYFDV

SEQ ID NO: 13075 - protein, 11 aa, Artificial Sequence
  Description of Artificial Sequence: Synthetic peptide
  XENP018731 vlCDR1
RASQSVSNDVA

SEQ ID NO: 13076 - protein, 7 aa, Artificial Sequence
  Description of Artificial Sequence: Synthetic peptide
  XENP018731 vlCDR2
YASHRYT

SEQ ID NO: 13077 - protein, 9 aa, Artificial Sequence
  Description of Artificial Sequence: Synthetic peptide
  XENP018731 vlCDR3
QQDYSSPRT

SEQ ID NO: 13078 - protein, 249 aa, Artificial Sequence
  Description of Artificial Sequence: Synthetic polypeptide
  XENP018732 1G6_H1.228_L1_scFv(GKPGS)4
EVQLVESGGGLVKPGGSLRLSCAASGFTFSNYWMNWVRQAPGKGLEWVGEIRLKSNNYATHYAEPVKGRFTISRDDSKSTVYLQMNSLKTEDTAVYYCTRYYGNYGGFFDVWGAGTLVTVSSGKPGSGKPGSGKPGSGKPGSSIVMTQSPATLSVSPGERATLSCRASQSVSNDVAWYQQKPGQSPRLLINYASHRYTGVPDRFTGSGYGTEFTLTISSLQSEDFAVYFCQQDYSSPRTFGGGTKVEIK

SEQ ID NO: 13079 - protein, 122 aa, Artificial Sequence
  Description of Artificial Sequence: Synthetic polypeptide
  VH of XENP018732
EVQLVESGGGLVKPGGSLRLSCAASGFTFSNYWMNWVRQAPGKGLEWVGEIRLKSNNYATHYAEPVKGRFTISRDDSKSTVYLQMNSLKTEDTAVYYCTRYYGNYGGFFDVWGAGTLVTVSS

SEQ ID NO: 13080 - protein, 107 aa, Artificial Sequence; identical to SEQ ID NO: 10923
  Description of Artificial Sequence: Synthetic polypeptide
  VL of XENP018732

SEQ ID NO: 13081 - protein, 5 aa, Artificial Sequence
  Description of Artificial Sequence: Synthetic peptide
  XENP018732 vhCDR1
NYWMN

SEQ ID NO: 13082 - protein, 19 aa, Artificial Sequence
  Description of Artificial Sequence: Synthetic peptide
  XENP018732 vhCDR2
EIRLKSNNYATHYAEPVKG

SEQ ID NO: 13083 - protein, 11 aa, Artificial Sequence
  Description of Artificial Sequence: Synthetic peptide
  XENP018732 vhCDR3
YYGNYGGFFDV

SEQ ID NO: 13084 - protein, 11 aa, Artificial Sequence
  Description of Artificial Sequence: Synthetic peptide
  XENP018732 vlCDR1
RASQSVSNDVA

SEQ ID NO: 13085 - protein, 7 aa, Artificial Sequence
  Description of Artificial Sequence: Synthetic peptide
  XENP018732 vlCDR2
YASHRYT

SEQ ID NO: 13086 - protein, 9 aa, Artificial Sequence
  Description of Artificial Sequence: Synthetic peptide
  XENP018732 vlCDR3
QQDYSSPRT

SEQ ID NO: 13087 - protein, 249 aa, Artificial Sequence
  Description of Artificial Sequence: Synthetic polypeptide
  XENP018733 1G6_H1.229_L1_scFv(GKPGS)4
EVQLVESGGGLVKPGGSLRLSCAASGFTFSNYWMNWVRQAPGKGLEWVGEIRLKSNNYATHYAEPVKGRFTISRDDSKSTVYLQMNSLKTEDTAVYYCTRYYGNYGGHFDVWGAGTLVTVSSGKPGSGKPGSGKPGSGKPGSSIVMTQSPATLSVSPGERATLSCRASQSVSNDVAWYQQKPGQSPRLLINYASHRYTGVPDRFTGSGYGTEFTLTISSLQSEDFAVYFCQQDYSSPRTFGGGTKVEIK

SEQ ID NO: 13088 - protein, 122 aa, Artificial Sequence
  Description of Artificial Sequence: Synthetic polypeptide
  VH of XENP018733
EVQLVESGGGLVKPGGSLRLSCAASGFTFSNYWMNWVRQAPGKGLEWVGEIRLKSNNYATHYAEPVKGRFTISRDDSKSTVYLQMNSLKTEDTAVYYCTRYYGNYGGHFDVWGAGTLVTVSS

SEQ ID NO: 13089 - protein, 107 aa, Artificial Sequence; identical to SEQ ID NO: 10923
  Description of Artificial Sequence: Synthetic polypeptide
  VL of XENP018733

SEQ ID NO: 13090 - protein, 5 aa, Artificial Sequence
  Description of Artificial Sequence: Synthetic peptide
  XENP018733 vhCDR1
NYWMN

SEQ ID NO: 13091 - protein, 19 aa, Artificial Sequence
  Description of Artificial Sequence: Synthetic peptide
  XENP018733 vhCDR2
EIRLKSNNYATHYAEPVKG

SEQ ID NO: 13092 - protein, 11 aa, Artificial Sequence
  Description of Artificial Sequence: Synthetic peptide
  XENP018733 vhCDR3
YYGNYGGHFDV

SEQ ID NO: 13093 - protein, 11 aa, Artificial Sequence
  Description of Artificial Sequence: Synthetic peptide
  XENP018733 vlCDR1
RASQSVSNDVA

SEQ ID NO: 13094 - protein, 7 aa, Artificial Sequence
  Description of Artificial Sequence: Synthetic peptide
  XENP018733 vlCDR2
YASHRYT

SEQ ID NO: 13095 - protein, 9 aa, Artificial Sequence
  Description of Artificial Sequence: Synthetic peptide
  XENP018733 vlCDR3
QQDYSSPRT

SEQ ID NO: 13096 - protein, 249 aa, Artificial Sequence
  Description of Artificial Sequence: Synthetic polypeptide
  XENP018734 1G6_H1.230_L1_scFv(GKPGS)4
EVQLVESGGGLVKPGGSLRLSCAASGFTFSNYWMNWVRQAPGKGLEWVGEIRLKSNNYATHYAEPVKGRFTISRDDSKSTVYLQMNSLKTEDTAVYYCTRYYGNYGGLFDVWGAGTLVTVSSGKPGSGKPGSGKPGSGKPGSSIVMTQSPATLSVSPGERATLSCRASQSVSNDVAWYQQKPGQSPRLLINYASHRYTGVPDRFTGSGYGTEFTLTISSLQSEDFAVYFCQQDYSSPRTFGGGTKVEIK

SEQ ID NO: 13097 - protein, 122 aa, Artificial Sequence
  Description of Artificial Sequence: Synthetic polypeptide
  VH of XENP018734
EVQLVESGGGLVKPGGSLRLSCAASGFTFSNYWMNWVRQAPGKGLEWVGEIRLKSNNYATHYAEPVKGRFTISRDDSKSTVYLQMNSLKTEDTAVYYCTRYYGNYGGLFDVWGAGTLVTVSS

SEQ ID NO: 13098 - protein, 107 aa, Artificial Sequence; identical to SEQ ID NO: 10923
  Description of Artificial Sequence: Synthetic polypeptide
  VL of XENP018734

SEQ ID NO: 13099 - protein, 5 aa, Artificial Sequence
  Description of Artificial Sequence: Synthetic peptide
  XENP018734 vhCDR1
NYWMN

SEQ ID NO: 13100 - protein, 19 aa, Artificial Sequence
  Description of Artificial Sequence: Synthetic peptide
  XENP018734 vhCDR2
EIRLKSNNYATHYAEPVKG

SEQ ID NO: 13101 - protein, 11 aa, Artificial Sequence
  Description of Artificial Sequence: Synthetic peptide
  XENP018734 vhCDR3
YYGNYGGLFDV

SEQ ID NO: 13102 - protein, 11 aa, Artificial Sequence
  Description of Artificial Sequence: Synthetic peptide
  XENP018734 vlCDR1
RASQSVSNDVA

SEQ ID NO: 13103 - protein, 7 aa, Artificial Sequence
  Description of Artificial Sequence: Synthetic peptide
  XENP018734 vlCDR2
YASHRYT

SEQ ID NO: 13104 - protein, 9 aa, Artificial Sequence
  Description of Artificial Sequence: Synthetic peptide
  XENP018734 vlCDR3
QQDYSSPRT

SEQ ID NO: 13105 - protein, 249 aa, Artificial Sequence
  Description of Artificial Sequence: Synthetic polypeptide
  XENP018735 1G6_H1.231_L1_scFv(GKPGS)4
EVQLVESGGGLVKPGGSLRLSCAASGFTFSNYWMNWVRQAPGKGLEWVGEIRLKSNNYATHYAEPVKGRFTISRDDSKSTVYLQMNSLKTEDTAVYYCTRYYGNYGGWFDVWGAGTLVTVSSGKPGSGKPGSGKPGSGKPGSSIVMTQSPATLSVSPGERATLSCRASQSVSNDVAWYQQKPGQSPRLLINYASHRYTGVPDRFTGSGYGTEFTLTISSLQSEDFAVYFCQQDYSSPRTFGGGTKVEIK

SEQ ID NO: 13106 - protein, 122 aa, Artificial Sequence
  Description of Artificial Sequence: Synthetic polypeptide
  VH of XENP018735
EVQLVESGGGLVKPGGSLRLSCAASGFTFSNYWMNWVRQAPGKGLEWVGEIRLKSNNYATHYAEPVKGRFTISRDDSKSTVYLQMNSLKTEDTAVYYCTRYYGNYGGWFDVWGAGTLVTVSS

SEQ ID NO: 13107 - protein, 107 aa, Artificial Sequence; identical to SEQ ID NO: 10923
  Description of Artificial Sequence: Synthetic polypeptide
  VL of XENP018735

SEQ ID NO: 13108 - protein, 5 aa, Artificial Sequence
  Description of Artificial Sequence: Synthetic peptide
  XENP018735 vhCDR1
NYWMN

SEQ ID NO: 13109 - protein, 19 aa, Artificial Sequence
  Description of Artificial Sequence: Synthetic peptide
  XENP018735 vhCDR2
EIRLKSNNYATHYAEPVKG

SEQ ID NO: 13110 - protein, 11 aa, Artificial Sequence
  Description of Artificial Sequence: Synthetic peptide
  XENP018735 vhCDR3
YYGNYGGWFDV

SEQ ID NO: 13111 - protein, 11 aa, Artificial Sequence
  Description of Artificial Sequence: Synthetic peptide
  XENP018735 vlCDR1
RASQSVSNDVA

SEQ ID NO: 13112 - protein, 7 aa, Artificial Sequence
  Description of Artificial Sequence: Synthetic peptide
  XENP018735 vlCDR2
YASHRYT

SEQ ID NO: 13113 - protein, 9 aa, Artificial Sequence
  Description of Artificial Sequence: Synthetic peptide
  XENP018735 vlCDR3
QQDYSSPRT

SEQ ID NO: 13114 - protein, 249 aa, Artificial Sequence
  Description of Artificial Sequence: Synthetic polypeptide
  XENP018736 1G6_H1.232_L1_scFv(GKPGS)4
EVQLVESGGGLVKPGGSLRLSCAASGFTFSNYWMNWVRQAPGKGLEWVGEIRLKSNNYATHYAEPVKGRFTISRDDSKSTVYLQMNSLKTEDTAVYYCTRYYGNYGGVFDVWGAGTLVTVSSGKPGSGKPGSGKPGSGKPGSSIVMTQSPATLSVSPGERATLSCRASQSVSNDVAWYQQKPGQSPRLLINYASHRYTGVPDRFTGSGYGTEFTLTISSLQSEDFAVYFCQQDYSSPRTFGGGTKVEIK

SEQ ID NO: 13115 - protein, 122 aa, Artificial Sequence
  Description of Artificial Sequence: Synthetic polypeptide
  VH of XENP018736
EVQLVESGGGLVKPGGSLRLSCAASGFTFSNYWMNWVRQAPGKGLEWVGEIRLKSNNYATHYAEPVKGRFTISRDDSKSTVYLQMNSLKTEDTAVYYCTRYYGNYGGVFDVWGAGTLVTVSS

SEQ ID NO: 13116 - protein, 107 aa, Artificial Sequence; identical to SEQ ID NO: 10923
  Description of Artificial Sequence: Synthetic polypeptide
  VL of XENP018736

SEQ ID NO: 13117 - protein, 5 aa, Artificial Sequence
  Description of Artificial Sequence: Synthetic peptide
  XENP018736 vhCDR1
NYWMN

SEQ ID NO: 13118 - protein, 19 aa, Artificial Sequence
  Description of Artificial Sequence: Synthetic peptide
  XENP018736 vhCDR2
EIRLKSNNYATHYAEPVKG

SEQ ID NO: 13119 - protein, 11 aa, Artificial Sequence
  Description of Artificial Sequence: Synthetic peptide
  XENP018736 vhCDR3
YYGNYGGVFDV

SEQ ID NO: 13120 - protein, 11 aa, Artificial Sequence
  Description of Artificial Sequence: Synthetic peptide
  XENP018736 vlCDR1
RASQSVSNDVA

SEQ ID NO: 13121 - protein, 7 aa, Artificial Sequence
  Description of Artificial Sequence: Synthetic peptide
  XENP018736 vlCDR2
YASHRYT

SEQ ID NO: 13122 - protein, 9 aa, Artificial Sequence
  Description of Artificial Sequence: Synthetic peptide
  XENP018736 vlCDR3
QQDYSSPRT

SEQ ID NO: 13123 - protein, 249 aa, Artificial Sequence
  Description of Artificial Sequence: Synthetic polypeptide
  XENP018737 1G6_H1.233_L1_scFv(GKPGS)4
EVQLVESGGGLVKPGGSLRLSCAASGFTFSNYWMNWVRQAPGKGLEWVGEIRLKSNNYATHYAEPVKGRFTISRDDSKSTVYLQMNSLKTEDTAVYYCTRYYGNYGGAFDVWGAGTLVTVSSGKPGSGKPGSGKPGSGKPGSSIVMTQSPATLSVSPGERATLSCRASQSVSNDVAWYQQKPGQSPRLLINYASHRYTGVPDRFTGSGYGTEFTLTISSLQSEDFAVYFCQQDYSSPRTFGGGTKVEIK

SEQ ID NO: 13124 - protein, 122 aa, Artificial Sequence
  Description of Artificial Sequence: Synthetic polypeptide
  VH of XENP018737
EVQLVESGGGLVKPGGSLRLSCAASGFTFSNYWMNWVRQAPGKGLEWVGEIRLKSNNYATHYAEPVKGRFTISRDDSKSTVYLQMNSLKTEDTAVYYCTRYYGNYGGAFDVWGAGTLVTVSS

SEQ ID NO: 13125 - protein, 107 aa, Artificial Sequence; identical to SEQ ID NO: 10923
  Description of Artificial Sequence: Synthetic polypeptide
  VL of XENP018737

SEQ ID NO: 13126 - protein, 5 aa, Artificial Sequence
  Description of Artificial Sequence: Synthetic peptide
  XENP018737 vhCDR1
NYWMN

SEQ ID NO: 13127 - protein, 19 aa, Artificial Sequence
  Description of Artificial Sequence: Synthetic peptide
  XENP018737 vhCDR2
EIRLKSNNYATHYAEPVKG

SEQ ID NO: 13128 - protein, 11 aa, Artificial Sequence
  Description of Artificial Sequence: Synthetic peptide
  XENP018737 vhCDR3
YYGNYGGAFDV

SEQ ID NO: 13129 - protein, 11 aa, Artificial Sequence
  Description of Artificial Sequence: Synthetic peptide
  XENP018737 vlCDR1
RASQSVSNDVA

SEQ ID NO: 13130 - protein, 7 aa, Artificial Sequence
  Description of Artificial Sequence: Synthetic peptide
  XENP018737 vlCDR2
YASHRYT

SEQ ID NO: 13131 - protein, 9 aa, Artificial Sequence
  Description of Artificial Sequence: Synthetic peptide
  XENP018737 vlCDR3
QQDYSSPRT

SEQ ID NO: 13132 - protein, 249 aa, Artificial Sequence
  Description of Artificial Sequence: Synthetic polypeptide
  XENP018738 1G6_H1.234_L1_scFv(GKPGS)4
EVQLVESGGGLVKPGGSLRLSCAASGFTFSNYWMNWVRQAPGKGLEWVGEIRLKSNNYATHYAEPVKGRFTISRDDSKSTVYLQMNSLKTEDTAVYYCTRYYGNYGGQFDVWGAGTLVTVSSGKPGSGKPGSGKPGSGKPGSSIVMTQSPATLSVSPGERATLSCRASQSVSNDVAWYQQKPGQSPRLLINYASHRYTGVPDRFTGSGYGTEFTLTISSLQSEDFAVYFCQQDYSSPRTFGGGTKVEIK

SEQ ID NO: 13133 - protein, 122 aa, Artificial Sequence
  Description of Artificial Sequence: Synthetic polypeptide
  VH of XENP018738
EVQLVESGGGLVKPGGSLRLSCAASGFTFSNYWMNWVRQAPGKGLEWVGEIRLKSNNYATHYAEPVKGRFTISRDDSKSTVYLQMNSLKTEDTAVYYCTRYYGNYGGQFDVWGAGTLVTVSS

SEQ ID NO: 13134 - protein, 107 aa, Artificial Sequence; identical to SEQ ID NO: 10923
  Description of Artificial Sequence: Synthetic polypeptide
  VL of XENP018738

SEQ ID NO: 13135 - protein, 5 aa, Artificial Sequence
  Description of Artificial Sequence: Synthetic peptide
  XENP018738 vhCDR1
NYWMN

SEQ ID NO: 13136 - protein, 19 aa, Artificial Sequence
  Description of Artificial Sequence: Synthetic peptide
  XENP018738 vhCDR2
EIRLKSNNYATHYAEPVKG

SEQ ID NO: 13137 - protein, 11 aa, Artificial Sequence
  Description of Artificial Sequence: Synthetic peptide
  XENP018738 vhCDR3
YYGNYGGQFDV

SEQ ID NO: 13138 - protein, 11 aa, Artificial Sequence
  Description of Artificial Sequence: Synthetic peptide
  XENP018738 vlCDR1
RASQSVSNDVA

SEQ ID NO: 13139 - protein, 7 aa, Artificial Sequence
  Description of Artificial Sequence: Synthetic peptide
  XENP018738 vlCDR2
YASHRYT

SEQ ID NO: 13140 - protein, 9 aa, Artificial Sequence
  Description of Artificial Sequence: Synthetic peptide
  XENP018738 vlCDR3
QQDYSSPRT

SEQ ID NO: 13141 - protein, 249 aa, Artificial Sequence
  Description of Artificial Sequence: Synthetic polypeptide
  XENP018739 1G6_H1.235_L1_scFv(GKPGS)4
EVQLVESGGGLVKPGGSLRLSCAASGFTFSNYWMNWVRQAPGKGLEWVGEIRLKSNNYATHYAEPVKGRFTISRDDSKSTVYLQMNSLKTEDTAVYYCTRYYGNYGGDFDVWGAGTLVTVSSGKPGSGKPGSGKPGSGKPGSSIVMTQSPATLSVSPGERATLSCRASQSVSNDVAWYQQKPGQSPRLLINYASHRYTGVPDRFTGSGYGTEFTLTISSLQSEDFAVYFCQQDYSSPRTFGGGTKVEIK

SEQ ID NO: 13142 - protein, 122 aa, Artificial Sequence
  Description of Artificial Sequence: Synthetic polypeptide
  VH of XENP018739
EVQLVESGGGLVKPGGSLRLSCAASGFTFSNYWMNWVRQAPGKGLEWVGEIRLKSNNYATHYAEPVKGRFTISRDDSKSTVYLQMNSLKTEDTAVYYCTRYYGNYGGDFDVWGAGTLVTVSS

SEQ ID NO: 13143 - protein, 107 aa, Artificial Sequence; identical to SEQ ID NO: 10923
  Description of Artificial Sequence: Synthetic polypeptide
  VL of XENP018739

SEQ ID NO: 13144 - protein, 5 aa, Artificial Sequence
  Description of Artificial Sequence: Synthetic peptide
  XENP018739 vhCDR1
NYWMN

SEQ ID NO: 13145 - protein, 19 aa, Artificial Sequence
  Description of Artificial Sequence: Synthetic peptide
  XENP018739 vhCDR2
EIRLKSNNYATHYAEPVKG

SEQ ID NO: 13146 - protein, 11 aa, Artificial Sequence
  Description of Artificial Sequence: Synthetic peptide
  XENP018739 vhCDR3
YYGNYGGDFDV

SEQ ID NO: 13147 - protein, 11 aa, Artificial Sequence
  Description of Artificial Sequence: Synthetic peptide
  XENP018739 vlCDR1
RASQSVSNDVA

SEQ ID NO: 13148 - protein, 7 aa, Artificial Sequence
  Description of Artificial Sequence: Synthetic peptide
  XENP018739 vlCDR2
YASHRYT

SEQ ID NO: 13149 - protein, 9 aa, Artificial Sequence
  Description of Artificial Sequence: Synthetic peptide
  XENP018739 vlCDR3
QQDYSSPRT

SEQ ID NO: 13150 - protein, 249 aa, Artificial Sequence
  Description of Artificial Sequence: Synthetic polypeptide
  XENP018740 1G6_H1.236_L1_scFv(GKPGS)4
EVQLVESGGGLVKPGGSLRLSCAASGFTFSNYWMNWVRQAPGKGLEWVGEIRLKSNNYATHYAEPVKGRFTISRDDSKSTVYLQMNSLKTEDTAVYYCTRYYGNYGGKFDVWGAGTLVTVSSGKPGSGKPGSGKPGSGKPGSSIVMTQSPATLSVSPGERATLSCRASQSVSNDVAWYQQKPGQSPRLLINYASHRYTGVPDRFTGSGYGTEFTLTISSLQSEDFAVYFCQQDYSSPRTFGGGTKVEIK

SEQ ID NO: 13151 - protein, 122 aa, Artificial Sequence
  Description of Artificial Sequence: Synthetic polypeptide
  VH of XENP018740
EVQLVESGGGLVKPGGSLRLSCAASGFTFSNYWMNWVRQAPGKGLEWVGEIRLKSNNYATHYAEPVKGRFTISRDDSKSTVYLQMNSLKTEDTAVYYCTRYYGNYGGKFDVWGAGTLVTVSS

SEQ ID NO: 13152 - protein, 107 aa, Artificial Sequence; identical to SEQ ID NO: 10923
  Description of Artificial Sequence: Synthetic polypeptide
  VL of XENP018740

SEQ ID NO: 13153 - protein, 5 aa, Artificial Sequence
  Description of Artificial Sequence: Synthetic peptide
  XENP018740 vhCDR1
NYWMN

SEQ ID NO: 13154 - protein, 19 aa, Artificial Sequence
  Description of Artificial Sequence: Synthetic peptide
  XENP018740 vhCDR2
EIRLKSNNYATHYAEPVKG

SEQ ID NO: 13155 - protein, 11 aa, Artificial Sequence
  Description of Artificial Sequence: Synthetic peptide
  XENP018740 vhCDR3
YYGNYGGKFDV

SEQ ID NO: 13156 - protein, 11 aa, Artificial Sequence
  Description of Artificial Sequence: Synthetic peptide
  XENP018740 vlCDR1
RASQSVSNDVA

SEQ ID NO: 13157 - protein, 7 aa, Artificial Sequence
  Description of Artificial Sequence: Synthetic peptide
  XENP018740 vlCDR2
YASHRYT

SEQ ID NO: 13158 - protein, 9 aa, Artificial Sequence
  Description of Artificial Sequence: Synthetic peptide
  XENP018740 vlCDR3
QQDYSSPRT

SEQ ID NO: 13159 - protein, 249 aa, Artificial Sequence
  Description of Artificial Sequence: Synthetic polypeptide
  XENP018741 1G6_H1.237_L1_scFv(GKPGS)4
EVQLVESGGGLVKPGGSLRLSCAASGFTFSNYWMNWVRQAPGKGLEWVGEIRLKSNNYATHYAEPVKGRFTISRDDSKSTVYLQMNSLKTEDTAVYYCTRYYGNYGGYFDYWGAGTLVTVSSGKPGSGKPGSGKPGSGKPGSSIVMTQSPATLSVSPGERATLSCRASQSVSNDVAWYQQKPGQSPRLLINYASHRYTGVPDRFTGSGYGTEFTLTISSLQSEDFAVYFCQQDYSSPRTFGGGTKVEIK

SEQ ID NO: 13160 - protein, 122 aa, Artificial Sequence
  Description of Artificial Sequence: Synthetic polypeptide
  VH of XENP018741
EVQLVESGGGLVKPGGSLRLSCAASGFTFSNYWMNWVRQAPGKGLEWVGEIRLKSNNYATHYAEPVKGRFTISRDDSKSTVYLQMNSLKTEDTAVYYCTRYYGNYGGYFDYWGAGTLVTVSS

SEQ ID NO: 13161 - protein, 107 aa, Artificial Sequence; identical to SEQ ID NO: 10923
  Description of Artificial Sequence: Synthetic polypeptide
  VL of XENP018741

SEQ ID NO: 13162 - protein, 5 aa, Artificial Sequence
  Description of Artificial Sequence: Synthetic peptide
  XENP018741 vhCDR1
NYWMN

SEQ ID NO: 13163 - protein, 19 aa, Artificial Sequence
  Description of Artificial Sequence: Synthetic peptide
  XENP018741 vhCDR2
EIRLKSNNYATHYAEPVKG

SEQ ID NO: 13164 - protein, 11 aa, Artificial Sequence
  Description of Artificial Sequence: Synthetic peptide
  XENP018741 vhCDR3
YYGNYGGYFDY

SEQ ID NO: 13165 - protein, 11 aa, Artificial Sequence
  Description of Artificial Sequence: Synthetic peptide
  XENP018741 vlCDR1
RASQSVSNDVA

SEQ ID NO: 13166 - protein, 7 aa, Artificial Sequence
  Description of Artificial Sequence: Synthetic peptide
  XENP018741 vlCDR2
YASHRYT

SEQ ID NO: 13167 - protein, 9 aa, Artificial Sequence
  Description of Artificial Sequence: Synthetic peptide
  XENP018741 vlCDR3
QQDYSSPRT

SEQ ID NO: 13168 - protein, 249 aa, Artificial Sequence
  Description of Artificial Sequence: Synthetic polypeptide
  XENP018742 1G6_H1.238_L1_scFv(GKPGS)4
EVQLVESGGGLVKPGGSLRLSCAASGFTFSNYWMNWVRQAPGKGLEWVGEIRLKSNNYATHYAEPVKGRFTISRDDSKSTVYLQMNSLKTEDTAVYYCTRYYGNYGGYFDVWGQGTLVTVSSGKPGSGKPGSGKPGSGKPGSSIVMTQSPATLSVSPGERATLSCRASQSVSNDVAWYQQKPGQSPRLLINYASHRYTGVPDRFTGSGYGTEFTLTISSLQSEDFAVYFCQQDYSSPRTFGGGTKVEIK

SEQ ID NO: 13169 - protein, 122 aa, Artificial Sequence
  Description of Artificial Sequence: Synthetic polypeptide
  VH of XENP018742
EVQLVESGGGLVKPGGSLRLSCAASGFTFSNYWMNWVRQAPGKGLEWVGEIRLKSNNYATHYAEPVKGRFTISRDDSKSTVYLQMNSLKTEDTAVYYCTRYYGNYGGYFDVWGQGTLVTVSS

SEQ ID NO: 13170 - protein, 107 aa, Artificial Sequence; identical to SEQ ID NO: 10923
  Description of Artificial Sequence: Synthetic polypeptide
  VL of XENP018742

SEQ ID NO: 13171 - protein, 5 aa, Artificial Sequence
  Description of Artificial Sequence: Synthetic peptide
  XENP018742 vhCDR1
NYWMN

SEQ ID NO: 13172 - protein, 19 aa, Artificial Sequence
  Description of Artificial Sequence: Synthetic peptide
  XENP018742 vhCDR2
EIRLKSNNYATHYAEPVKG

SEQ ID NO: 13173 - protein, 11 aa, Artificial Sequence
  Description of Artificial Sequence: Synthetic peptide
  XENP018742 vhCDR3
YYGNYGGYFDV

SEQ ID NO: 13174 - protein, 11 aa, Artificial Sequence
  Description of Artificial Sequence: Synthetic peptide
  XENP018742 vlCDR1
RASQSVSNDVA

SEQ ID NO: 13175 - protein, 7 aa, Artificial Sequence
  Description of Artificial Sequence: Synthetic peptide
  XENP018742 vlCDR2
YASHRYT

SEQ ID NO: 13176 - protein, 9 aa, Artificial Sequence
  Description of Artificial Sequence: Synthetic peptide
  XENP018742 vlCDR3
QQDYSSPRT

SEQ ID NO: 13177 - protein, 249 aa, Artificial Sequence
  Description of Artificial Sequence: Synthetic polypeptide
  XENP018743 1G6_H1_L1.1_scFv(GKPGS)4
EVQLVESGGGLVKPGGSLRLSCAASGFTFSNYWMNWVRQAPGKGLEWVGEIRLKSNNYATHYAEPVKGRFTISRDDSKSTVYLQMNSLKTEDTAVYYCTRYYGNYGGYFDVWGAGTLVTVSSGKPGSGKPGSGKPGSGKPGSEIVMTQSPATLSVSPGERATLSCRASQSVSNDVAWYQQKPGQSPRLLINYASHRYTGVPDRFTGSGYGTEFTLTISSLQSEDFAVYFCQQDYSSPRTFGGGTKVEIK

SEQ ID NO: 13178 - protein, 122 aa, Artificial Sequence; identical to SEQ ID NO: 10922
  Description of Artificial Sequence: Synthetic polypeptide
  VH of XENP018743

SEQ ID NO: 13179 - protein, 107 aa, Artificial Sequence
  Description of Artificial Sequence: Synthetic polypeptide
  VL of XENP018743
EIVMTQSPATLSVSPGERATLSCRASQSVSNDVAWYQQKPGQSPRLLINYASHRYTGVPDRFTGSGYGTEFTLTISSLQSEDFAVYFCQQDYSSPRTFGGGTKVEIK

SEQ ID NO: 13180 - protein, 5 aa, Artificial Sequence
  Description of Artificial Sequence: Synthetic peptide
  XENP018743 vhCDR1
NYWMN

SEQ ID NO: 13181 - protein, 19 aa, Artificial Sequence
  Description of Artificial Sequence: Synthetic peptide
  XENP018743 vhCDR2
EIRLKSNNYATHYAEPVKG

SEQ ID NO: 13182 - protein, 11 aa, Artificial Sequence
  Description of Artificial Sequence: Synthetic peptide
  XENP018743 vhCDR3
YYGNYGGYFDV

SEQ ID NO: 13183 - protein, 11 aa, Artificial Sequence
  Description of Artificial Sequence: Synthetic peptide
  XENP018743 vlCDR1
RASQSVSNDVA

SEQ ID NO: 13184 - protein, 7 aa, Artificial Sequence
  Description of Artificial Sequence: Synthetic peptide
  XENP018743 vlCDR2
YASHRYT

SEQ ID NO: 13185 - protein, 9 aa, Artificial Sequence
  Description of Artificial Sequence: Synthetic peptide
  XENP018743 vlCDR3
QQDYSSPRT

SEQ ID NO: 13186 - protein, 249 aa, Artificial Sequence
  Description of Artificial Sequence: Synthetic polypeptide
  XENP018744 1G6_H1_L1.2_scFv(GKPGS)4
EVQLVESGGGLVKPGGSLRLSCAASGFTFSNYWMNWVRQAPGKGLEWVGEIRLKSNNYATHYAEPVKGRFTISRDDSKSTVYLQMNSLKTEDTAVYYCTRYYGNYGGYFDVWGAGTLVTVSSGKPGSGKPGSGKPGSGKPGSDIVMTQSPATLSVSPGERATLSCRASQSVSNDVAWYQQKPGQSPRLLINYASHRYTGVPDRFTGSGYGTEFTLTISSLQSEDFAVYFCQQDYSSPRTFGGGTKVEIK

SEQ ID NO: 13187 - protein, 122 aa, Artificial Sequence; identical to SEQ ID NO: 10922
  Description of Artificial Sequence: Synthetic polypeptide
  VH of XENP018744

SEQ ID NO: 13188 - protein, 107 aa, Artificial Sequence
  Description of Artificial Sequence: Synthetic polypeptide
  VL of XENP018744
DIVMTQSPATLSVSPGERATLSCRASQSVSNDVAWYQQKPGQSPRLLINYASHRYTGVPDRFTGSGYGTEFTLTISSLQSEDFAVYFCQQDYSSPRTFGGGTKVEIK

SEQ ID NO: 13189 - protein, 5 aa, Artificial Sequence
  Description of Artificial Sequence: Synthetic peptide
  XENP018744 vhCDR1
NYWMN

SEQ ID NO: 13190 - protein, 19 aa, Artificial Sequence
  Description of Artificial Sequence: Synthetic peptide
  XENP018744 vhCDR2
EIRLKSNNYATHYAEPVKG

SEQ ID NO: 13191 - protein, 11 aa, Artificial Sequence
  Description of Artificial Sequence: Synthetic peptide
  XENP018744 vhCDR3
YYGNYGGYFDV

SEQ ID NO: 13192 - protein, 11 aa, Artificial Sequence
  Description of Artificial Sequence: Synthetic peptide
  XENP018744 vlCDR1
RASQSVSNDVA

SEQ ID NO: 13193 - protein, 7 aa, Artificial Sequence
  Description of Artificial Sequence: Synthetic peptide
  XENP018744 vlCDR2
YASHRYT

SEQ ID NO: 13194 - protein, 9 aa, Artificial Sequence
  Description of Artificial Sequence: Synthetic peptide
  XENP018744 vlCDR3
QQDYSSPRT

SEQ ID NO: 13195 - protein, 249 aa, Artificial Sequence
  Description of Artificial Sequence: Synthetic polypeptide
  XENP018745 1G6_H1_L1.3_scFv(GKPGS)4
EVQLVESGGGLVKPGGSLRLSCAASGFTFSNYWMNWVRQAPGKGLEWVGEIRLKSNNYATHYAEPVKGRFTISRDDSKSTVYLQMNSLKTEDTAVYYCTRYYGNYGGYFDVWGAGTLVTVSSGKPGSGKPGSGKPGSGKPGSSVVMTQSPATLSVSPGERATLSCRASQSVSNDVAWYQQKPGQSPRLLINYASHRYTGVPDRFTGSGYGTEFTLTISSLQSEDFAVYFCQQDYSSPRTFGGGTKVEIK

SEQ ID NO: 13196 - protein, 122 aa, Artificial Sequence; identical to SEQ ID NO: 10922
  Description of Artificial Sequence: Synthetic polypeptide
  VH of XENP018745

SEQ ID NO: 13197 - protein, 107 aa, Artificial Sequence
  Description of Artificial Sequence: Synthetic polypeptide
  VL of XENP018745
SVVMTQSPATLSVSPGERATLSCRASQSVSNDVAWYQQKPGQSPRLLINYASHRYTGVPDRFTGSGYGTEFTLTISSLQSEDFAVYFCQQDYSSPRTFGGGTKVEIK

SEQ ID NO: 13198 - protein, 5 aa, Artificial Sequence
  Description of Artificial Sequence: Synthetic peptide
  XENP018745 vhCDR1
NYWMN

SEQ ID NO: 13199 - protein, 19 aa, Artificial Sequence
  Description of Artificial Sequence: Synthetic peptide
  XENP018745 vhCDR2
EIRLKSNNYATHYAEPVKG

SEQ ID NO: 13200 - protein, 11 aa, Artificial Sequence
  Description of Artificial Sequence: Synthetic peptide
  XENP018745 vhCDR3
YYGNYGGYFDV

SEQ ID NO: 13201 - protein, 11 aa, Artificial Sequence
  Description of Artificial Sequence: Synthetic peptide
  XENP018745 vlCDR1
RASQSVSNDVA

SEQ ID NO: 13202 - protein, 7 aa, Artificial Sequence
  Description of Artificial Sequence: Synthetic peptide
  XENP018745 vlCDR2
YASHRYT

SEQ ID NO: 13203 - protein, 9 aa, Artificial Sequence
  Description of Artificial Sequence: Synthetic peptide
  XENP018745 vlCDR3
QQDYSSPRT

SEQ ID NO: 13204 - protein, 249 aa, Artificial Sequence
  Description of Artificial Sequence: Synthetic polypeptide
  XENP018746 1G6_H1_L1.4_scFv(GKPGS)4
EVQLVESGGGLVKPGGSLRLSCAASGFTFSNYWMNWVRQAPGKGLEWVGEIRLKSNNYATHYAEPVKGRFTISRDDSKSTVYLQMNSLKTEDTAVYYCTRYYGNYGGYFDVWGAGTLVTVSSGKPGSGKPGSGKPGSGKPGSSIVLTQSPATLSVSPGERATLSCRASQSVSNDVAWYQQKPGQSPRLLINYASHRYTGVPDRFTGSGYGTEFTLTISSLQSEDFAVYFCQQDYSSPRTFGGGTKVEIK

SEQ ID NO: 13205 - protein, 122 aa, Artificial Sequence; identical to SEQ ID NO: 10922
  Description of Artificial Sequence: Synthetic polypeptide
  VH of XENP018746

SEQ ID NO: 13206 - protein, 107 aa, Artificial Sequence
  Description of Artificial Sequence: Synthetic polypeptide
  VL of XENP018746
SIVLTQSPATLSVSPGERATLSCRASQSVSNDVAWYQQKPGQSPRLLINYASHRYTGVPDRFTGSGYGTEFTLTISSLQSEDFAVYFCQQDYSSPRTFGGGTKVEIK

SEQ ID NO: 13207 - protein, 5 aa, Artificial Sequence
  Description of Artificial Sequence: Synthetic peptide
  XENP018746 vhCDR1
NYWMN

SEQ ID NO: 13208 - protein, 19 aa, Artificial Sequence
  Description of Artificial Sequence: Synthetic peptide
  XENP018746 vhCDR2
EIRLKSNNYATHYAEPVKG

SEQ ID NO: 13209 - protein, 11 aa, Artificial Sequence
  Description of Artificial Sequence: Synthetic peptide
  XENP018746 vhCDR3
YYGNYGGYFDV

SEQ ID NO: 13210 - protein, 11 aa, Artificial Sequence
  Description of Artificial Sequence: Synthetic peptide
  XENP018746 vlCDR1
RASQSVSNDVA

SEQ ID NO: 13211 - protein, 7 aa, Artificial Sequence
  Description of Artificial Sequence: Synthetic peptide
  XENP018746 vlCDR2
YASHRYT

SEQ ID NO: 13212 - protein, 9 aa, Artificial Sequence
  Description of Artificial Sequence: Synthetic peptide
  XENP018746 vlCDR3
QQDYSSPRT

SEQ ID NO: 13213 - protein, 249 aa, Artificial Sequence
  Description of Artificial Sequence: Synthetic polypeptide
  XENP018747 1G6_H1_L1.5_scFv(GKPGS)4
EVQLVESGGGLVKPGGSLRLSCAASGFTFSNYWMNWVRQAPGKGLEWVGEIRLKSNNYATHYAEPVKGRFTISRDDSKSTVYLQMNSLKTEDTAVYYCTRYYGNYGGYFDVWGAGTLVTVSSGKPGSGKPGSGKPGSGKPGSSIVMTQTPATLSVSPGERATLSCRASQSVSNDVAWYQQKPGQSPRLLINYASHRYTGVPDRFTGSGYGTEFTLTISSLQSEDFAVYFCQQDYSSPRTFGGGTKVEIK

SEQ ID NO: 13214 - protein, 122 aa, Artificial Sequence; identical to SEQ ID NO: 10922
  Description of Artificial Sequence: Synthetic polypeptide
  VH of XENP018747

SEQ ID NO: 13215 - protein, 107 aa, Artificial Sequence
  Description of Artificial Sequence: Synthetic polypeptide
  VL of XENP018747
SIVMTQTPATLSVSPGERATLSCRASQSVSNDVAWYQQKPGQSPRLLINYASHRYTGVPDRFTGSGYGTEFTLTISSLQSEDFAVYFCQQDYSSPRTFGGGTKVEIK

SEQ ID NO: 13216 - protein, 5 aa, Artificial Sequence
  Description of Artificial Sequence: Synthetic peptide
  XENP018747 vhCDR1
NYWMN

SEQ ID NO: 13217 - protein, 19 aa, Artificial Sequence
  Description of Artificial Sequence: Synthetic peptide
  XENP018747 vhCDR2
EIRLKSNNYATHYAEPVKG

SEQ ID NO: 13218 - protein, 11 aa, Artificial Sequence
  Description of Artificial Sequence: Synthetic peptide
  XENP018747 vhCDR3
YYGNYGGYFDV

SEQ ID NO: 13219 - protein, 11 aa, Artificial Sequence
  Description of Artificial Sequence: Synthetic peptide
  XENP018747 vlCDR1
RASQSVSNDVA

SEQ ID NO: 13220 - protein, 7 aa, Artificial Sequence
  Description of Artificial Sequence: Synthetic peptide
  XENP018747 vlCDR2
YASHRYT

SEQ ID NO: 13221 - protein, 9 aa, Artificial Sequence
  Description of Artificial Sequence: Synthetic peptide
  XENP018747 vlCDR3
QQDYSSPRT

SEQ ID NO: 13222 - protein, 249 aa, Artificial Sequence
  Description of Artificial Sequence: Synthetic polypeptide
  XENP018748 1G6_H1_L1.6_scFv(GKPGS)4
EVQLVESGGGLVKPGGSLRLSCAASGFTFSNYWMNWVRQAPGKGLEWVGEIRLKSNNYATHYAEPVKGRFTISRDDSKSTVYLQMNSLKTEDTAVYYCTRYYGNYGGYFDVWGAGTLVTVSSGKPGSGKPGSGKPGSGKPGSSIVMTQSPKTLSVSPGERATLSCRASQSVSNDVAWYQQKPGQSPRLLINYASHRYTGVPDRFTGSGYGTEFTLTISSLQSEDFAVYFCQQDYSSPRTFGGGTKVEIK

SEQ ID NO: 13223 - protein, 122 aa, Artificial Sequence; identical to SEQ ID NO: 10922
  Description of Artificial Sequence: Synthetic polypeptide
  VH of XENP018748

SEQ ID NO: 13224 - protein, 107 aa, Artificial Sequence
  Description of Artificial Sequence: Synthetic polypeptide
  VL of XENP018748
SIVMTQSPKTLSVSPGERATLSCRASQSVSNDVAWYQQKPGQSPRLLINYASHRYTGVPDRFTGSGYGTEFTLTISSLQSEDFAVYFCQQDYSSPRTFGGGTKVEIK

SEQ ID NO: 13225 - protein, 5 aa, Artificial Sequence
  Description of Artificial Sequence: Synthetic peptide
  XENP018748 vhCDR1
NYWMN

SEQ ID NO: 13226 - protein, 19 aa, Artificial Sequence
  Description of Artificial Sequence: Synthetic peptide
  XENP018748 vhCDR2
EIRLKSNNYATHYAEPVKG

SEQ ID NO: 13227 - protein, 11 aa, Artificial Sequence
  Description of Artificial Sequence: Synthetic peptide
  XENP018748 vhCDR3
YYGNYGGYFDV

SEQ ID NO: 13228 - protein, 11 aa, Artificial Sequence
  Description of Artificial Sequence: Synthetic peptide
  XENP018748 vlCDR1
RASQSVSNDVA

SEQ ID NO: 13229 - protein, 7 aa, Artificial Sequence
  Description of Artificial Sequence: Synthetic peptide
  XENP018748 vlCDR2
YASHRYT

SEQ ID NO: 13230 - protein, 9 aa, Artificial Sequence
  Description of Artificial Sequence: Synthetic peptide
  XENP018748 vlCDR3
QQDYSSPRT

SEQ ID NO: 13231 - protein, 249 aa, Artificial Sequence
  Description of Artificial Sequence: Synthetic polypeptide
  XENP018749 1G6_H1_L1.7_scFv(GKPGS)4
EVQLVESGGGLVKPGGSLRLSCAASGFTFSNYWMNWVRQAPGKGLEWVGEIRLKSNNYATHYAEPVKGRFTISRDDSKSTVYLQMNSLKTEDTAVYYCTRYYGNYGGYFDVWGAGTLVTVSSGKPGSGKPGSGKPGSGKPGSSIVMTQSPASLSVSPGERATLSCRASQSVSNDVAWYQQKPGQSPRLLINYASHRYTGVPDRFTGSGYGTEFTLTISSLQSEDFAVYFCQQDYSSPRTFGGGTKVEIK

SEQ ID NO: 13232 - protein, 122 aa, Artificial Sequence; identical to SEQ ID NO: 10922
  Description of Artificial Sequence: Synthetic polypeptide
  VH of XENP018749

SEQ ID NO: 13233 - protein, 107 aa, Artificial Sequence
  Description of Artificial Sequence: Synthetic polypeptide
  VL of XENP018749
SIVMTQSPASLSVSPGERATLSCRASQSVSNDVAWYQQKPGQSPRLLINYASHRYTGVPDRFTGSGYGTEFTLTISSLQSEDFAVYFCQQDYSSPRTFGGGTKVEIK

SEQ ID NO: 13234 - protein, 5 aa, Artificial Sequence
  Description of Artificial Sequence: Synthetic peptide
  XENP018749 vhCDR1
NYWMN

SEQ ID NO: 13235 - protein, 19 aa, Artificial Sequence
  Description of Artificial Sequence: Synthetic peptide
  XENP018749 vhCDR2
EIRLKSNNYATHYAEPVKG

SEQ ID NO: 13236 - protein, 11 aa, Artificial Sequence
  Description of Artificial Sequence: Synthetic peptide
  XENP018749 vhCDR3
YYGNYGGYFDV

SEQ ID NO: 13237 - protein, 11 aa, Artificial Sequence
  Description of Artificial Sequence: Synthetic peptide
  XENP018749 vlCDR1
RASQSVSNDVA

SEQ ID NO: 13238 - protein, 7 aa, Artificial Sequence
  Description of Artificial Sequence: Synthetic peptide
  XENP018749 vlCDR2
YASHRYT

SEQ ID NO: 13239 - protein, 9 aa, Artificial Sequence
  Description of Artificial Sequence: Synthetic peptide
  XENP018749 vlCDR3
QQDYSSPRT

SEQ ID NO: 13240 - protein, 249 aa, Artificial Sequence
  Description of Artificial Sequence: Synthetic polypeptide
  XENP018750 1G6_H1_L1.8_scFv(GKPGS)4
EVQLVESGGGLVKPGGSLRLSCAASGFTFSNYWMNWVRQAPGKGLEWVGEIRLKSNNYATHYAEPVKGRFTISRDDSKSTVYLQMNSLKTEDTAVYYCTRYYGNYGGYFDVWGAGTLVTVSSGKPGSGKPGSGKPGSGKPGSSIVMTQSPAFLSVSPGERATLSCRASQSVSNDVAWYQQKPGQSPRLLINYASHRYTGVPDRFTGSGYGTEFTLTISSLQSEDFAVYFCQQDYSSPRTFGGGTKVEIK

SEQ ID NO: 13241 - protein, 122 aa, Artificial Sequence; identical to SEQ ID NO: 10922
  Description of Artificial Sequence: Synthetic polypeptide
  VH of XENP018750

SEQ ID NO: 13242 - protein, 107 aa, Artificial Sequence
  Description of Artificial Sequence: Synthetic polypeptide
  VL of XENP018750
SIVMTQSPAFLSVSPGERATLSCRASQSVSNDVAWYQQKPGQSPRLLINYASHRYTGVPDRFTGSGYGTEFTLTISSLQSEDFAVYFCQQDYSSPRTFGGGTKVEIK

SEQ ID NO: 13243 - protein, 5 aa, Artificial Sequence
  Description of Artificial Sequence: Synthetic peptide
  XENP018750 vhCDR1
NYWMN

SEQ ID NO: 13244 - protein, 19 aa, Artificial Sequence
  Description of Artificial Sequence: Synthetic peptide
  XENP018750 vhCDR2
EIRLKSNNYATHYAEPVKG

SEQ ID NO: 13245 - protein, 11 aa, Artificial Sequence
  Description of Artificial Sequence: Synthetic peptide
  XENP018750 vhCDR3
YYGNYGGYFDV

SEQ ID NO: 13246 - protein, 11 aa, Artificial Sequence
  Description of Artificial Sequence: Synthetic peptide
  XENP018750 vlCDR1
RASQSVSNDVA

SEQ ID NO: 13247 - protein, 7 aa, Artificial Sequence
  Description of Artificial Sequence: Synthetic peptide
  XENP018750 vlCDR2
YASHRYT

SEQ ID NO: 13248 - protein, 9 aa, Artificial Sequence
  Description of Artificial Sequence: Synthetic peptide
  XENP018750 vlCDR3
QQDYSSPRT

SEQ ID NO: 13249 - protein, 249 aa, Artificial Sequence
  Description of Artificial Sequence: Synthetic polypeptide
  XENP018751 1G6_H1_L1.9_scFv(GKPGS)4
EVQLVESGGGLVKPGGSLRLSCAASGFTFSNYWMNWVRQAPGKGLEWVGEIRLKSNNYATHYAEPVKGRFTISRDDSKSTVYLQMNSLKTEDTAVYYCTRYYGNYGGYFDVWGAGTLVTVSSGKPGSGKPGSGKPGSGKPGSSIVMTQSPATLLVSPGERATLSCRASQSVSNDVAWYQQKPGQSPRLLINYASHRYTGVPDRFTGSGYGTEFTLTISSLQSEDFAVYFCQQDYSSPRTFGGGTKVEIK

SEQ ID NO: 13250 - protein, 122 aa, Artificial Sequence; identical to SEQ ID NO: 10922
  Description of Artificial Sequence: Synthetic polypeptide
  VH of XENP018751

SEQ ID NO: 13251 - protein, 107 aa, Artificial Sequence
  Description of Artificial Sequence: Synthetic polypeptide
  VL of XENP018751
SIVMTQSPATLLVSPGERATLSCRASQSVSNDVAWYQQKPGQSPRLLINYASHRYTGVPDRFTGSGYGTEFTLTISSLQSEDFAVYFCQQDYSSPRTFGGGTKVEIK

SEQ ID NO: 13252 - protein, 5 aa, Artificial Sequence
  Description of Artificial Sequence: Synthetic peptide
  XENP018751 vhCDR1
NYWMN

SEQ ID NO: 13253 - protein, 19 aa, Artificial Sequence
  Description of Artificial Sequence: Synthetic peptide
  XENP018751 vhCDR2
EIRLKSNNYATHYAEPVKG

SEQ ID NO: 13254 - protein, 11 aa, Artificial Sequence
  Description of Artificial Sequence: Synthetic peptide
  XENP018751 vhCDR3
YYGNYGGYFDV

SEQ ID NO: 13255 - protein, 11 aa, Artificial Sequence
  Description of Artificial Sequence: Synthetic peptide
  XENP018751 vlCDR1
RASQSVSNDVA

SEQ ID NO: 13256 - protein, 7 aa, Artificial Sequence
  Description of Artificial Sequence: Synthetic peptide
  XENP018751 vlCDR2
YASHRYT

SEQ ID NO: 13257 - protein, 9 aa, Artificial Sequence
  Description of Artificial Sequence: Synthetic peptide
  XENP018751 vlCDR3
QQDYSSPRT

SEQ ID NO: 13258 - protein, 249 aa, Artificial Sequence
  Description of Artificial Sequence: Synthetic polypeptide
  XENP018752 1G6_H1_L1.10_scFv(GKPGS)4
EVQLVESGGGLVKPGGSLRLSCAASGFTFSNYWMNWVRQAPGKGLEWVGEIRLKSNNYATHYAEPVKGRFTISRDDSKSTVYLQMNSLKTEDTAVYYCTRYYGNYGGYFDVWGAGTLVTVSSGKPGSGKPGSGKPGSGKPGSSIVMTQSPATLSVSAGERATLSCRASQSVSNDVAWYQQKPGQSPRLLINYASHRYTGVPDRFTGSGYGTEFTLTISSLQSEDFAVYFCQQDYSSPRTFGGGTKVEIK

SEQ ID NO: 13259 - protein, 122 aa, Artificial Sequence; identical to SEQ ID NO: 10922
  Description of Artificial Sequence: Synthetic polypeptide
  VH of XENP018752

SEQ ID NO: 13260 - protein, 107 aa, Artificial Sequence
  Description of Artificial Sequence: Synthetic polypeptide
  VL of XENP018752
SIVMTQSPATLSVSAGERATLSCRASQSVSNDVAWYQQKPGQSPRLLINYASHRYTGVPDRFTGSGYGTEFTLTISSLQSEDFAVYFCQQDYSSPRTFGGGTKVEIK

SEQ ID NO: 13261 - protein, 5 aa, Artificial Sequence
  Description of Artificial Sequence: Synthetic peptide
  XENP018752 vhCDR1
NYWMN

SEQ ID NO: 13262 - protein, 19 aa, Artificial Sequence
  Description of Artificial Sequence: Synthetic peptide
  XENP018752 vhCDR2
EIRLKSNNYATHYAEPVKG

SEQ ID NO: 13263 - protein, 11 aa, Artificial Sequence
  Description of Artificial Sequence: Synthetic peptide
  XENP018752 vhCDR3
YYGNYGGYFDV

SEQ ID NO: 13264 - protein, 11 aa, Artificial Sequence
  Description of Artificial Sequence: Synthetic peptide
  XENP018752 vlCDR1
RASQSVSNDVA

SEQ ID NO: 13265 - protein, 7 aa, Artificial Sequence
  Description of Artificial Sequence: Synthetic peptide
  XENP018752 vlCDR2
YASHRYT

SEQ ID NO: 13266 - protein, 9 aa, Artificial Sequence
  Description of Artificial Sequence: Synthetic peptide
  XENP018752 vlCDR3
QQDYSSPRT

SEQ ID NO: 13267 - protein, 249 aa, Artificial Sequence
  Description of Artificial Sequence: Synthetic polypeptide
  XENP018753 1G6_H1_L1.11_scFv(GKPGS)4
EVQLVESGGGLVKPGGSLRLSCAASGFTFSNYWMNWVRQAPGKGLEWVGEIRLKSNNYATHYAEPVKGRFTISRDDSKSTVYLQMNSLKTEDTAVYYCTRYYGNYGGYFDVWGAGTLVTVSSGKPGSGKPGSGKPGSGKPGSSIVMTQSPATLSVSPGDRATLSCRASQSVSNDVAWYQQKPGQSPRLLINYASHRYTGVPDRFTGSGYGTEFTLTISSLQSEDFAVYFCQQDYSSPRTFGGGTKVEIK

SEQ ID NO: 13268 - protein, 122 aa, Artificial Sequence; identical to SEQ ID NO: 10922
  Description of Artificial Sequence: Synthetic polypeptide
  VH of XENP018753

SEQ ID NO: 13269 - protein, 107 aa, Artificial Sequence
  Description of Artificial Sequence: Synthetic polypeptide
  VL of XENP018753
SIVMTQSPATLSVSPGDRATLSCRASQSVSNDVAWYQQKPGQSPRLLINYASHRYTGVPDRFTGSGYGTEFTLTISSLQSEDFAVYFCQQDYSSPRTFGGGTKVEIK

SEQ ID NO: 13270 - protein, 5 aa, Artificial Sequence
  Description of Artificial Sequence: Synthetic peptide
  XENP018753 vhCDR1
NYWMN

SEQ ID NO: 13271 - protein, 19 aa, Artificial Sequence
  Description of Artificial Sequence: Synthetic peptide
  XENP018753 vhCDR2
EIRLKSNNYATHYAEPVKG

SEQ ID NO: 13272 - protein, 11 aa, Artificial Sequence
  Description of Artificial Sequence: Synthetic peptide
  XENP018753 vhCDR3
YYGNYGGYFDV

SEQ ID NO: 13273 - protein, 11 aa, Artificial Sequence
  Description of Artificial Sequence: Synthetic peptide
  XENP018753 vlCDR1
RASQSVSNDVA

SEQ ID NO: 13274 - protein, 7 aa, Artificial Sequence
  Description of Artificial Sequence: Synthetic peptide
  XENP018753 vlCDR2
YASHRYT

SEQ ID NO: 13275 - protein, 9 aa, Artificial Sequence
  Description of Artificial Sequence: Synthetic peptide
  XENP018753 vlCDR3
QQDYSSPRT

SEQ ID NO: 13276 - protein, 249 aa, Artificial Sequence
  Description of Artificial Sequence: Synthetic polypeptide
  XENP018754 1G6_H1_L1.12_scFv(GKPGS)4
EVQLVESGGGLVKPGGSLRLSCAASGFTFSNYWMNWVRQAPGKGLEWVGEIRLKSNNYATHYAEPVKGRFTISRDDSKSTVYLQMNSLKTEDTAVYYCTRYYGNYGGYFDVWGAGTLVTVSSGKPGSGKPGSGKPGSGKPGSSIVMTQSPATLSVSPGERVTLSCRASQSVSNDVAWYQQKPGQSPRLLINYASHRYTGVPDRFTGSGYGTEFTLTISSLQSEDFAVYFCQQDYSSPRTFGGGTKVEIK

SEQ ID NO: 13277 - protein, 122 aa, Artificial Sequence; identical to SEQ ID NO: 10922
  Description of Artificial Sequence: Synthetic polypeptide
  VH of XENP018754

SEQ ID NO: 13278 - protein, 107 aa, Artificial Sequence
  Description of Artificial Sequence: Synthetic polypeptide
  VL of XENP018754
SIVMTQSPATLSVSPGERVTLSCRASQSVSNDVAWYQQKPGQSPRLLINYASHRYTGVPDRFTGSGYGTEFTLTISSLQSEDFAVYFCQQDYSSPRTFGGGTKVEIK

SEQ ID NO: 13279 - protein, 5 aa, Artificial Sequence
  Description of Artificial Sequence: Synthetic peptide
  XENP018754 vhCDR1
NYWMN

SEQ ID NO: 13280 - protein, 19 aa, Artificial Sequence
  Description of Artificial Sequence: Synthetic peptide
  XENP018754 vhCDR2
EIRLKSNNYATHYAEPVKG

SEQ ID NO: 13281 - protein, 11 aa, Artificial Sequence
  Description of Artificial Sequence: Synthetic peptide
  XENP018754 vhCDR3
YYGNYGGYFDV

SEQ ID NO: 13282 - protein, 11 aa, Artificial Sequence
  Description of Artificial Sequence: Synthetic peptide
  XENP018754 vlCDR1
RASQSVSNDVA

SEQ ID NO: 13283 - protein, 7 aa, Artificial Sequence
  Description of Artificial Sequence: Synthetic peptide
  XENP018754 vlCDR2
YASHRYT

SEQ ID NO: 13284 - protein, 9 aa, Artificial Sequence
  Description of Artificial Sequence: Synthetic peptide
  XENP018754 vlCDR3
QQDYSSPRT

SEQ ID NO: 13285 - protein, 249 aa, Artificial Sequence
  Description of Artificial Sequence: Synthetic polypeptide
  XENP018755 1G6_H1_L1.13_scFv(GKPGS)4
EVQLVESGGGLVKPGGSLRLSCAASGFTFSNYWMNWVRQAPGKGLEWVGEIRLKSNNYATHYAEPVKGRFTISRDDSKSTVYLQMNSLKTEDTAVYYCTRYYGNYGGYFDVWGAGTLVTVSSGKPGSGKPGSGKPGSGKPGSSIVMTQSPATLSVSPGERATISCRASQSVSNDVAWYQQKPGQSPRLLINYASHRYTGVPDRFTGSGYGTEFTLTISSLQSEDFAVYFCQQDYSSPRTFGGGTKVEIK

SEQ ID NO: 13286 - protein, 122 aa, Artificial Sequence; identical to SEQ ID NO: 10922
  Description of Artificial Sequence: Synthetic polypeptide
  VH of XENP018755

SEQ ID NO: 13287 - protein, 107 aa, Artificial Sequence
  Description of Artificial Sequence: Synthetic polypeptide
  VL of XENP018755
SIVMTQSPATLSVSPGERATISCRASQSVSNDVAWYQQKPGQSPRLLINYASHRYTGVPDRFTGSGYGTEFTLTISSLQSEDFAVYFCQQDYSSPRTFGGGTKVEIK

SEQ ID NO: 13288 - protein, 5 aa, Artificial Sequence
  Description of Artificial Sequence: Synthetic peptide
  XENP018755 vhCDR1
NYWMN

SEQ ID NO: 13289 - protein, 19 aa, Artificial Sequence
  Description of Artificial Sequence: Synthetic peptide
  XENP018755 vhCDR2
EIRLKSNNYATHYAEPVKG

SEQ ID NO: 13290 - protein, 11 aa, Artificial Sequence
  Description of Artificial Sequence: Synthetic peptide
  XENP018755 vhCDR3
YYGNYGGYFDV

SEQ ID NO: 13291 - protein, 11 aa, Artificial Sequence
  Description of Artificial Sequence: Synthetic peptide
  XENP018755 vlCDR1
RASQSVSNDVA

SEQ ID NO: 13292 - protein, 7 aa, Artificial Sequence
  Description of Artificial Sequence: Synthetic peptide
  XENP018755 vlCDR2
YASHRYT

SEQ ID NO: 13293 - protein, 9 aa, Artificial Sequence
  Description of Artificial Sequence: Synthetic peptide
  XENP018755 vlCDR3
QQDYSSPRT

SEQ ID NO: 13294 - protein, 249 aa, Artificial Sequence
  Description of Artificial Sequence: Synthetic polypeptide
  XENP018756 1G6_H1_L1.14_scFv(GKPGS)4
EVQLVESGGGLVKPGGSLRLSCAASGFTFSNYWMNWVRQAPGKGLEWVGEIRLKSNNYATHYAEPVKGRFTISRDDSKSTVYLQMNSLKTEDTAVYYCTRYYGNYGGYFDVWGAGTLVTVSSGKPGSGKPGSGKPGSGKPGSSIVMTQSPATLSVSPGERATLTCRASQSVSNDVAWYQQKPGQSPRLLINYASHRYTGVPDRFTGSGYGTEFTLTISSLQSEDFAVYFCQQDYSSPRTFGGGTKVEIK

SEQ ID NO: 13295 - protein, 122 aa, Artificial Sequence; identical to SEQ ID NO: 10922
  Description of Artificial Sequence: Synthetic polypeptide
  VH of XENP018756

SEQ ID NO: 13296 - protein, 107 aa, Artificial Sequence
  Description of Artificial Sequence: Synthetic polypeptide
  VL of XENP018756
SIVMTQSPATLSVSPGERATLTCRASQSVSNDVAWYQQKPGQSPRLLINYASHRYTGVPDRFTGSGYGTEFTLTISSLQSEDFAVYFCQQDYSSPRTFGGGTKVEIK

SEQ ID NO: 13297 - protein, 5 aa, Artificial Sequence
  Description of Artificial Sequence: Synthetic peptide
  XENP018756 vhCDR1
NYWMN

SEQ ID NO: 13298 - protein, 19 aa, Artificial Sequence
  Description of Artificial Sequence: Synthetic peptide
  XENP018756 vhCDR2
EIRLKSNNYATHYAEPVKG

SEQ ID NO: 13299 - protein, 11 aa, Artificial Sequence
  Description of Artificial Sequence: Synthetic peptide
  XENP018756 vhCDR3
YYGNYGGYFDV

SEQ ID NO: 13300 - protein, 11 aa, Artificial Sequence
  Description of Artificial Sequence: Synthetic peptide
  XENP018756 vlCDR1
RASQSVSNDVA

SEQ ID NO: 13301 - protein, 7 aa, Artificial Sequence
  Description of Artificial Sequence: Synthetic peptide
  XENP018756 vlCDR2
YASHRYT

SEQ ID NO: 13302 - protein, 9 aa, Artificial Sequence
  Description of Artificial Sequence: Synthetic peptide
  XENP018756 vlCDR3
QQDYSSPRT

SEQ ID NO: 13303 - protein, 249 aa, Artificial Sequence
  Description of Artificial Sequence: Synthetic polypeptide
  XENP018757 1G6_H1_L1.15_scFv(GKPGS)4
EVQLVESGGGLVKPGGSLRLSCAASGFTFSNYWMNWVRQAPGKGLEWVGEIRLKSNNYATHYAEPVKGRFTISRDDSKSTVYLQMNSLKTEDTAVYYCTRYYGNYGGYFDVWGAGTLVTVSSGKPGSGKPGSGKPGSGKPGSSIVMTQSPATLSVSPGERATLSCKASQSVSNDVAWYQQKPGQSPRLLINYASHRYTGVPDRFTGSGYGTEFTLTISSLQSEDFAVYFCQQDYSSPRTFGGGTKVEIK

SEQ ID NO: 13304 - protein, 122 aa, Artificial Sequence; identical to SEQ ID NO: 10922
  Description of Artificial Sequence: Synthetic polypeptide
  VH of XENP018757

SEQ ID NO: 13305 - protein, 107 aa, Artificial Sequence
  Description of Artificial Sequence: Synthetic polypeptide
  VL of XENP018757
SIVMTQSPATLSVSPGERATLSCKASQSVSNDVAWYQQKPGQSPRLLINYASHRYTGVPDRFTGSGYGTEFTLTISSLQSEDFAVYFCQQDYSSPRTFGGGTKVEIK

SEQ ID NO: 13306 - protein, 5 aa, Artificial Sequence
  Description of Artificial Sequence: Synthetic peptide
  XENP018757 vhCDR1
NYWMN

SEQ ID NO: 13307 - protein, 19 aa, Artificial Sequence
  Description of Artificial Sequence: Synthetic peptide
  XENP018757 vhCDR2
EIRLKSNNYATHYAEPVKG

SEQ ID NO: 13308 - protein, 11 aa, Artificial Sequence
  Description of Artificial Sequence: Synthetic peptide
  XENP018757 vhCDR3
YYGNYGGYFDV

SEQ ID NO: 13309 - protein, 11 aa, Artificial Sequence
  Description of Artificial Sequence: Synthetic peptide
  XENP018757 vlCDR1
KASQSVSNDVA

SEQ ID NO: 13310 - protein, 7 aa, Artificial Sequence
  Description of Artificial Sequence: Synthetic peptide
  XENP018757 vlCDR2
YASHRYT

SEQ ID NO: 13311 - protein, 9 aa, Artificial Sequence
  Description of Artificial Sequence: Synthetic peptide
  XENP018757 vlCDR3
QQDYSSPRT

SEQ ID NO: 13312 - protein, 249 aa, Artificial Sequence
  Description of Artificial Sequence: Synthetic polypeptide
  XENP018758 1G6_H1_L1.16_scFv(GKPGS)4
EVQLVESGGGLVKPGGSLRLSCAASGFTFSNYWMNWVRQAPGKGLEWVGEIRLKSNNYATHYAEPVKGRFTISRDDSKSTVYLQMNSLKTEDTAVYYCTRYYGNYGGYFDVWGAGTLVTVSSGKPGSGKPGSGKPGSGKPGSSIVMTQSPATLSVSPGERATLSCRASQDVSNDVAWYQQKPGQSPRLLINYASHRYTGVPDRFTGSGYGTEFTLTISSLQSEDFAVYFCQQDYSSPRTFGGGTKVEIK

SEQ ID NO: 13313 - protein, 122 aa, Artificial Sequence; identical to SEQ ID NO: 10922
  Description of Artificial Sequence: Synthetic polypeptide
  VH of XENP018758

SEQ ID NO: 13314 - protein, 107 aa, Artificial Sequence
  Description of Artificial Sequence: Synthetic polypeptide
  VL of XENP018758
SIVMTQSPATLSVSPGERATLSCRASQDVSNDVAWYQQKPGQSPRLLINYASHRYTGVPDRFTGSGYGTEFTLTISSLQSEDFAVYFCQQDYSSPRTFGGGTKVEIK

SEQ ID NO: 13315 - protein, 5 aa, Artificial Sequence
  Description of Artificial Sequence: Synthetic peptide
  XENP018758 vhCDR1
NYWMN

SEQ ID NO: 13316 - protein, 19 aa, Artificial Sequence
  Description of Artificial Sequence: Synthetic peptide
  XENP018758 vhCDR2
EIRLKSNNYATHYAEPVKG

SEQ ID NO: 13317 - protein, 11 aa, Artificial Sequence
  Description of Artificial Sequence: Synthetic peptide
  XENP018758 vhCDR3
YYGNYGGYFDV

SEQ ID NO: 13318 - protein, 11 aa, Artificial Sequence
  Description of Artificial Sequence: Synthetic peptide
  XENP018758 vlCDR1
RASQDVSNDVA

SEQ ID NO: 13319 - protein, 7 aa, Artificial Sequence
  Description of Artificial Sequence: Synthetic peptide
  XENP018758 vlCDR2
YASHRYT

SEQ ID NO: 13320 - protein, 9 aa, Artificial Sequence
  Description of Artificial Sequence: Synthetic peptide
  XENP018758 vlCDR3
QQDYSSPRT

SEQ ID NO: 13321 - protein, 249 aa, Artificial Sequence
  Description of Artificial Sequence: Synthetic polypeptide
  XENP018759 1G6_H1_L1.17_scFv(GKPGS)4
EVQLVESGGGLVKPGGSLRLSCAASGFTFSNYWMNWVRQAPGKGLEWVGEIRLKSNNYATHYAEPVKGRFTISRDDSKSTVYLQMNSLKTEDTAVYYCTRYYGNYGGYFDVWGAGTLVTVSSGKPGSGKPGSGKPGSGKPGSSIVMTQSPATLSVSPGERATLSCRASQGVSNDVAWYQQKPGQSPRLLINYASHRYTGVPDRFTGSGYGTEFTLTISSLQSEDFAVYFCQQDYSSPRTFGGGTKVEIK

SEQ ID NO: 13322 - protein, 122 aa, Artificial Sequence; identical to SEQ ID NO: 10922
  Description of Artificial Sequence: Synthetic polypeptide
  VH of XENP018759

SEQ ID NO: 13323 - protein, 107 aa, Artificial Sequence
  Description of Artificial Sequence: Synthetic polypeptide
  VL of XENP018759
SIVMTQSPATLSVSPGERATLSCRASQGVSNDVAWYQQKPGQSPRLLINYASHRYTGVPDRFTGSGYGTEFTLTISSLQSEDFAVYFCQQDYSSPRTFGGGTKVEIK

SEQ ID NO: 13324 - protein, 5 aa, Artificial Sequence
  Description of Artificial Sequence: Synthetic peptide
  XENP018759 vhCDR1
NYWMN

SEQ ID NO: 13325 - protein, 19 aa, Artificial Sequence
  Description of Artificial Sequence: Synthetic peptide
  XENP018759 vhCDR2
EIRLKSNNYATHYAEPVKG

SEQ ID NO: 13326 - protein, 11 aa, Artificial Sequence
  Description of Artificial Sequence: Synthetic peptide
  XENP018759 vhCDR3
YYGNYGGYFDV

SEQ ID NO: 13327 - protein, 11 aa, Artificial Sequence
  Description of Artificial Sequence: Synthetic peptide
  XENP018759 vlCDR1
RASQGVSNDVA

SEQ ID NO: 13328 - protein, 7 aa, Artificial Sequence
  Description of Artificial Sequence: Synthetic peptide
  XENP018759 vlCDR2
YASHRYT

SEQ ID NO: 13329 - protein, 9 aa, Artificial Sequence
  Description of Artificial Sequence: Synthetic peptide
  XENP018759 vlCDR3
QQDYSSPRT

SEQ ID NO: 13330 - protein, 249 aa, Artificial Sequence
  Description of Artificial Sequence: Synthetic polypeptide
  XENP018760 1G6_H1_L1.18_scFv(GKPGS)4
EVQLVESGGGLVKPGGSLRLSCAASGFTFSNYWMNWVRQAPGKGLEWVGEIRLKSNNYATHYAEPVKGRFTISRDDSKSTVYLQMNSLKTEDTAVYYCTRYYGNYGGYFDVWGAGTLVTVSSGKPGSGKPGSGKPGSGKPGSSIVMTQSPATLSVSPGERATLSCRASQSISNDVAWYQQKPGQSPRLLINYASHRYTGVPDRFTGSGYGTEFTLTISSLQSEDFAVYFCQQDYSSPRTFGGGTKVEIK

SEQ ID NO: 13331 - protein, 122 aa, Artificial Sequence; identical to SEQ ID NO: 10922
  Description of Artificial Sequence: Synthetic polypeptide
  VH of XENP018760

SEQ ID NO: 13332 - protein, 107 aa, Artificial Sequence
  Description of Artificial Sequence: Synthetic polypeptide
  VL of XENP018760
SIVMTQSPATLSVSPGERATLSCRASQSISNDVAWYQQKPGQSPRLLINYASHRYTGVPDRFTGSGYGTEFTLTISSLQSEDFAVYFCQQDYSSPRTFGGGTKVEIK

SEQ ID NO: 13333 - protein, 5 aa, Artificial Sequence
  Description of Artificial Sequence: Synthetic peptide
  XENP018760 vhCDR1
NYWMN

SEQ ID NO: 13334 - protein, 19 aa, Artificial Sequence
  Description of Artificial Sequence: Synthetic peptide
  XENP018760 vhCDR2
EIRLKSNNYATHYAEPVKG

SEQ ID NO: 13335 - protein, 11 aa, Artificial Sequence
  Description of Artificial Sequence: Synthetic peptide
  XENP018760 vhCDR3
YYGNYGGYFDV

SEQ ID NO: 13336 - protein, 11 aa, Artificial Sequence
  Description of Artificial Sequence: Synthetic peptide
  XENP018760 vlCDR1
RASQSISNDVA

SEQ ID NO: 13337 - protein, 7 aa, Artificial Sequence
  Description of Artificial Sequence: Synthetic peptide
  XENP018760 vlCDR2
YASHRYT

SEQ ID NO: 13338 - protein, 9 aa, Artificial Sequence
  Description of Artificial Sequence: Synthetic peptide
  XENP018760 vlCDR3
QQDYSSPRT

SEQ ID NO: 13339 - protein, 249 aa, Artificial Sequence
  Description of Artificial Sequence: Synthetic polypeptide
  XENP018761 1G6_H1_L1.19_scFv(GKPGS)4
EVQLVESGGGLVKPGGSLRLSCAASGFTFSNYWMNWVRQAPGKGLEWVGEIRLKSNNYATHYAEPVKGRFTISRDDSKSTVYLQMNSLKTEDTAVYYCTRYYGNYGGYFDVWGAGTLVTVSSGKPGSGKPGSGKPGSGKPGSSIVMTQSPATLSVSPGERATLSCRASQSLSNDVAWYQQKPGQSPRLLINYASHRYTGVPDRFTGSGYGTEFTLTISSLQSEDFAVYFCQQDYSSPRTFGGGTKVEIK

SEQ ID NO: 13340 - protein, 122 aa, Artificial Sequence; identical to SEQ ID NO: 10922
  Description of Artificial Sequence: Synthetic polypeptide
  VH of XENP018761

SEQ ID NO: 13341 - protein, 107 aa, Artificial Sequence
  Description of Artificial Sequence: Synthetic polypeptide
  VL of XENP018761
SIVMTQSPATLSVSPGERATLSCRASQSLSNDVAWYQQKPGQSPRLLINYASHRYTGVPDRFTGSGYGTEFTLTISSLQSEDFAVYFCQQDYSSPRTFGGGTKVEIK

SEQ ID NO: 13342 - protein, 5 aa, Artificial Sequence
  Description of Artificial Sequence: Synthetic peptide
  XENP018761 vhCDR1
NYWMN

SEQ ID NO: 13343 - protein, 19 aa, Artificial Sequence
  Description of Artificial Sequence: Synthetic peptide
  XENP018761 vhCDR2
EIRLKSNNYATHYAEPVKG

SEQ ID NO: 13344 - protein, 11 aa, Artificial Sequence
  Description of Artificial Sequence: Synthetic peptide
  XENP018761 vhCDR3
YYGNYGGYFDV

SEQ ID NO: 13345 - protein, 11 aa, Artificial Sequence
  Description of Artificial Sequence: Synthetic peptide
  XENP018761 vlCDR1
RASQSLSNDVA

SEQ ID NO: 13346 - protein, 7 aa, Artificial Sequence
  Description of Artificial Sequence: Synthetic peptide
  XENP018761 vlCDR2
YASHRYT

SEQ ID NO: 13347 - protein, 9 aa, Artificial Sequence
  Description of Artificial Sequence: Synthetic peptide
  XENP018761 vlCDR3
QQDYSSPRT

SEQ ID NO: 13348 - protein, 249 aa, Artificial Sequence
  Description of Artificial Sequence: Synthetic polypeptide
  XENP018762 1G6_H1_L1.20_scFv(GKPGS)4
EVQLVESGGGLVKPGGSLRLSCAASGFTFSNYWMNWVRQAPGKGLEWVGEIRLKSNNYATHYAEPVKGRFTISRDDSKSTVYLQMNSLKTEDTAVYYCTRYYGNYGGYFDVWGAGTLVTVSSGKPGSGKPGSGKPGSGKPGSSIVMTQSPATLSVSPGERATLSCRASQSVTNDVAWYQQKPGQSPRLLINYASHRYTGVPDRFTGSGYGTEFTLTISSLQSEDFAVYFCQQDYSSPRTFGGGTKVEIK

SEQ ID NO: 13349 - protein, 122 aa, Artificial Sequence; identical to SEQ ID NO: 10922
  Description of Artificial Sequence: Synthetic polypeptide
  VH of XENP018762

SEQ ID NO: 13350 - protein, 107 aa, Artificial Sequence
  Description of Artificial Sequence: Synthetic polypeptide
  VL of XENP018762
SIVMTQSPATLSVSPGERATLSCRASQSVTNDVAWYQQKPGQSPRLLINYASHRYTGVPDRFTGSGYGTEFTLTISSLQSEDFAVYFCQQDYSSPRTFGGGTKVEIK

SEQ ID NO: 13351 - protein, 5 aa, Artificial Sequence
  Description of Artificial Sequence: Synthetic peptide
  XENP018762 vhCDR1
NYWMN

SEQ ID NO: 13352 - protein, 19 aa, Artificial Sequence
  Description of Artificial Sequence: Synthetic peptide
  XENP018762 vhCDR2
EIRLKSNNYATHYAEPVKG

SEQ ID NO: 13353 - protein, 11 aa, Artificial Sequence
  Description of Artificial Sequence: Synthetic peptide
  XENP018762 vhCDR3
YYGNYGGYFDV

SEQ ID NO: 13354 - protein, 11 aa, Artificial Sequence
  Description of Artificial Sequence: Synthetic peptide
  XENP018762 vlCDR1
RASQSVTNDVA

SEQ ID NO: 13355 - protein, 7 aa, Artificial Sequence
  Description of Artificial Sequence: Synthetic peptide
  XENP018762 vlCDR2
YASHRYT

SEQ ID NO: 13356 - protein, 9 aa, Artificial Sequence
  Description of Artificial Sequence: Synthetic peptide
  XENP018762 vlCDR3
QQDYSSPRT

SEQ ID NO: 13357 - protein, 249 aa, Artificial Sequence
  Description of Artificial Sequence: Synthetic polypeptide
  XENP018763 1G6_H1_L1.21_scFv(GKPGS)4
EVQLVESGGGLVKPGGSLRLSCAASGFTFSNYWMNWVRQAPGKGLEWVGEIRLKSNNYATHYAEPVKGRFTISRDDSKSTVYLQMNSLKTEDTAVYYCTRYYGNYGGYFDVWGAGTLVTVSSGKPGSGKPGSGKPGSGKPGSSIVMTQSPATLSVSPGERATLSCRASQSVANDVAWYQQKPGQSPRLLINYASHRYTGVPDRFTGSGYGTEFTLTISSLQSEDFAVYFCQQDYSSPRTFGGGTKVEIK

SEQ ID NO: 13358 - protein, 122 aa, Artificial Sequence; identical to SEQ ID NO: 10922
  Description of Artificial Sequence: Synthetic polypeptide
  VH of XENP018763

SEQ ID NO: 13359 - protein, 107 aa, Artificial Sequence
  Description of Artificial Sequence: Synthetic polypeptide
  VL of XENP018763
SIVMTQSPATLSVSPGERATLSCRASQSVANDVAWYQQKPGQSPRLLINYASHRYTGVPDRFTGSGYGTEFTLTISSLQSEDFAVYFCQQDYSSPRTFGGGTKVEIK

SEQ ID NO: 13360 - protein, 5 aa, Artificial Sequence
  Description of Artificial Sequence: Synthetic peptide
  XENP018763 vhCDR1
NYWMN

SEQ ID NO: 13361 - protein, 19 aa, Artificial Sequence
  Description of Artificial Sequence: Synthetic peptide
  XENP018763 vhCDR2
EIRLKSNNYATHYAEPVKG

SEQ ID NO: 13362 - protein, 11 aa, Artificial Sequence
  Description of Artificial Sequence: Synthetic peptide
  XENP018763 vhCDR3
YYGNYGGYFDV

SEQ ID NO: 13363 - protein, 11 aa, Artificial Sequence
  Description of Artificial Sequence: Synthetic peptide
  XENP018763 vlCDR1
RASQSVANDVA

SEQ ID NO: 13364 - protein, 7 aa, Artificial Sequence
  Description of Artificial Sequence: Synthetic peptide
  XENP018763 vlCDR2
YASHRYT

SEQ ID NO: 13365 - protein, 9 aa, Artificial Sequence
  Description of Artificial Sequence: Synthetic peptide
  XENP018763 vlCDR3
QQDYSSPRT

SEQ ID NO: 13366 - protein, 249 aa, Artificial Sequence
  Description of Artificial Sequence: Synthetic polypeptide
  XENP018764 1G6_H1_L1.22_scFv(GKPGS)4
EVQLVESGGGLVKPGGSLRLSCAASGFTFSNYWMNWVRQAPGKGLEWVGEIRLKSNNYATHYAEPVKGRFTISRDDSKSTVYLQMNSLKTEDTAVYYCTRYYGNYGGYFDVWGAGTLVTVSSGKPGSGKPGSGKPGSGKPGSSIVMTQSPATLSVSPGERATLSCRASQSVQNDVAWYQQKPGQSPRLLINYASHRYTGVPDRFTGSGYGTEFTLTISSLQSEDFAVYFCQQDYSSPRTFGGGTKVEIK

SEQ ID NO: 13367 - protein, 122 aa, Artificial Sequence; identical to SEQ ID NO: 10922
  Description of Artificial Sequence: Synthetic polypeptide
  VH of XENP018764

SEQ ID NO: 13368 - protein, 107 aa, Artificial Sequence
  Description of Artificial Sequence: Synthetic polypeptide
  VL of XENP018764
SIVMTQSPATLSVSPGERATLSCRASQSVQNDVAWYQQKPGQSPRLLINYASHRYTGVPDRFTGSGYGTEFTLTISSLQSEDFAVYFCQQDYSSPRTFGGGTKVEIK

SEQ ID NO: 13369 - protein, 5 aa, Artificial Sequence
  Description of Artificial Sequence: Synthetic peptide
  XENP018764 vhCDR1
NYWMN

SEQ ID NO: 13370 - protein, 19 aa, Artificial Sequence
  Description of Artificial Sequence: Synthetic peptide
  XENP018764 vhCDR2
EIRLKSNNYATHYAEPVKG

SEQ ID NO: 13371 - protein, 11 aa, Artificial Sequence
  Description of Artificial Sequence: Synthetic peptide
  XENP018764 vhCDR3
YYGNYGGYFDV

SEQ ID NO: 13372 - protein, 11 aa, Artificial Sequence
  Description of Artificial Sequence: Synthetic peptide
  XENP018764 vlCDR1
RASQSVQNDVA

SEQ ID NO: 13373 - protein, 7 aa, Artificial Sequence
  Description of Artificial Sequence: Synthetic peptide
  XENP018764 vlCDR2
YASHRYT

SEQ ID NO: 13374 - protein, 9 aa, Artificial Sequence
  Description of Artificial Sequence: Synthetic peptide
  XENP018764 vlCDR3
QQDYSSPRT

SEQ ID NO: 13375 - protein, 249 aa, Artificial Sequence
  Description of Artificial Sequence: Synthetic polypeptide
  XENP018765 1G6_H1_L1.23_scFv(GKPGS)4
EVQLVESGGGLVKPGGSLRLSCAASGFTFSNYWMNWVRQAPGKGLEWVGEIRLKSNNYATHYAEPVKGRFTISRDDSKSTVYLQMNSLKTEDTAVYYCTRYYGNYGGYFDVWGAGTLVTVSSGKPGSGKPGSGKPGSGKPGSSIVMTQSPATLSVSPGERATLSCRASQSVGNDVAWYQQKPGQSPRLLINYASHRYTGVPDRFTGSGYGTEFTLTISSLQSEDFAVYFCQQDYSSPRTFGGGTKVEIK

SEQ ID NO: 13376 - protein, 122 aa, Artificial Sequence; identical to SEQ ID NO: 10922
  Description of Artificial Sequence: Synthetic polypeptide
  VH of XENP018765

SEQ ID NO: 13377 - protein, 107 aa, Artificial Sequence
  Description of Artificial Sequence: Synthetic polypeptide
  VL of XENP018765
SIVMTQSPATLSVSPGERATLSCRASQSVGNDVAWYQQKPGQSPRLLINYASHRYTGVPDRFTGSGYGTEFTLTISSLQSEDFAVYFCQQDYSSPRTFGGGTKVEIK

SEQ ID NO: 13378 - protein, 5 aa, Artificial Sequence
  Description of Artificial Sequence: Synthetic peptide
  XENP018765 vhCDR1
NYWMN

SEQ ID NO: 13379 - protein, 19 aa, Artificial Sequence
  Description of Artificial Sequence: Synthetic peptide
  XENP018765 vhCDR2
EIRLKSNNYATHYAEPVKG

SEQ ID NO: 13380 - protein, 11 aa, Artificial Sequence
  Description of Artificial Sequence: Synthetic peptide
  XENP018765 vhCDR3
YYGNYGGYFDV

SEQ ID NO: 13381 - protein, 11 aa, Artificial Sequence
  Description of Artificial Sequence: Synthetic peptide
  XENP018765 vlCDR1
RASQSVGNDVA

SEQ ID NO: 13382 - protein, 7 aa, Artificial Sequence
  Description of Artificial Sequence: Synthetic peptide
  XENP018765 vlCDR2
YASHRYT

SEQ ID NO: 13383 - protein, 9 aa, Artificial Sequence
  Description of Artificial Sequence: Synthetic peptide
  XENP018765 vlCDR3
QQDYSSPRT

SEQ ID NO: 13384 - protein, 249 aa, Artificial Sequence
  Description of Artificial Sequence: Synthetic polypeptide
  XENP018766 1G6_H1_L1.24_scFv(GKPGS)4
EVQLVESGGGLVKPGGSLRLSCAASGFTFSNYWMNWVRQAPGKGLEWVGEIRLKSNNYATHYAEPVKGRFTISRDDSKSTVYLQMNSLKTEDTAVYYCTRYYGNYGGYFDVWGAGTLVTVSSGKPGSGKPGSGKPGSGKPGSSIVMTQSPATLSVSPGERATLSCRASQSVVNDVAWYQQKPGQSPRLLINYASHRYTGVPDRFTGSGYGTEFTLTISSLQSEDFAVYFCQQDYSSPRTFGGGTKVEIK

SEQ ID NO: 13385 - protein, 122 aa, Artificial Sequence; identical to SEQ ID NO: 10922
  Description of Artificial Sequence: Synthetic polypeptide
  VH of XENP018766

SEQ ID NO: 13386 - protein, 107 aa, Artificial Sequence
  Description of Artificial Sequence: Synthetic polypeptide
  VL of XENP018766
SIVMTQSPATLSVSPGERATLSCRASQSVVNDVAWYQQKPGQSPRLLINYASHRYTGVPDRFTGSGYGTEFTLTISSLQSEDFAVYFCQQDYSSPRTFGGGTKVEIK

SEQ ID NO: 13387 - protein, 5 aa, Artificial Sequence
  Description of Artificial Sequence: Synthetic peptide
  XENP018766 vhCDR1
NYWMN

SEQ ID NO: 13388 - protein, 19 aa, Artificial Sequence
  Description of Artificial Sequence: Synthetic peptide
  XENP018766 vhCDR2
EIRLKSNNYATHYAEPVKG

SEQ ID NO: 13389 - protein, 11 aa, Artificial Sequence
  Description of Artificial Sequence: Synthetic peptide
  XENP018766 vhCDR3
YYGNYGGYFDV

SEQ ID NO: 13390 - protein, 11 aa, Artificial Sequence
  Description of Artificial Sequence: Synthetic peptide
  XENP018766 vlCDR1
RASQSVVNDVA

SEQ ID NO: 13391 - protein, 7 aa, Artificial Sequence
  Description of Artificial Sequence: Synthetic peptide
  XENP018766 vlCDR2
YASHRYT

SEQ ID NO: 13392 - protein, 9 aa, Artificial Sequence
  Description of Artificial Sequence: Synthetic peptide
  XENP018766 vlCDR3
QQDYSSPRT

SEQ ID NO: 13393 - protein, 249 aa, Artificial Sequence
  Description of Artificial Sequence: Synthetic polypeptide
  XENP018767 1G6_H1_L1.25_scFv(GKPGS)4
EVQLVESGGGLVKPGGSLRLSCAASGFTFSNYWMNWVRQAPGKGLEWVGEIRLKSNNYATHYAEPVKGRFTISRDDSKSTVYLQMNSLKTEDTAVYYCTRYYGNYGGYFDVWGAGTLVTVSSGKPGSGKPGSGKPGSGKPGSSIVMTQSPATLSVSPGERATLSCRASQSVHNDVAWYQQKPGQSPRLLINYASHRYTGVPDRFTGSGYGTEFTLTISSLQSEDFAVYFCQQDYSSPRTFGGGTKVEIK

SEQ ID NO: 13394 - protein, 122 aa, Artificial Sequence; identical to SEQ ID NO: 10922
  Description of Artificial Sequence: Synthetic polypeptide
  VH of XENP018767

SEQ ID NO: 13395 - protein, 107 aa, Artificial Sequence
  Description of Artificial Sequence: Synthetic polypeptide
  VL of XENP018767
SIVMTQSPATLSVSPGERATLSCRASQSVHNDVAWYQQKPGQSPRLLINYASHRYTGVPDRFTGSGYGTEFTLTISSLQSEDFAVYFCQQDYSSPRTFGGGTKVEIK

SEQ ID NO: 13396 - protein, 5 aa, Artificial Sequence
  Description of Artificial Sequence: Synthetic peptide
  XENP018767 vhCDR1
NYWMN

SEQ ID NO: 13397 - protein, 19 aa, Artificial Sequence
  Description of Artificial Sequence: Synthetic peptide
  XENP018767 vhCDR2
EIRLKSNNYATHYAEPVKG

SEQ ID NO: 13398 - protein, 11 aa, Artificial Sequence
  Description of Artificial Sequence: Synthetic peptide
  XENP018767 vhCDR3
YYGNYGGYFDV

SEQ ID NO: 13399 - protein, 11 aa, Artificial Sequence
  Description of Artificial Sequence: Synthetic peptide
  XENP018767 vlCDR1
RASQSVHNDVA

SEQ ID NO: 13400 - protein, 7 aa, Artificial Sequence
  Description of Artificial Sequence: Synthetic peptide
  XENP018767 vlCDR2
YASHRYT

SEQ ID NO: 13401 - protein, 9 aa, Artificial Sequence
  Description of Artificial Sequence: Synthetic peptide
  XENP018767 vlCDR3
QQDYSSPRT

SEQ ID NO: 13402 - protein, 249 aa, Artificial Sequence
  Description of Artificial Sequence: Synthetic polypeptide
  XENP018768 1G6_H1_L1.26_scFv(GKPGS)4
EVQLVESGGGLVKPGGSLRLSCAASGFTFSNYWMNWVRQAPGKGLEWVGEIRLKSNNYATHYAEPVKGRFTISRDDSKSTVYLQMNSLKTEDTAVYYCTRYYGNYGGYFDVWGAGTLVTVSSGKPGSGKPGSGKPGSGKPGSSIVMTQSPATLSVSPGERATLSCRASQSVDNDVAWYQQKPGQSPRLLINYASHRYTGVPDRFTGSGYGTEFTLTISSLQSEDFAVYFCQQDYSSPRTFGGGTKVEIK

SEQ ID NO: 13403 - protein, 122 aa, Artificial Sequence; identical to SEQ ID NO: 10922
  Description of Artificial Sequence: Synthetic polypeptide
  VH of XENP018768

SEQ ID NO: 13404 - protein, 107 aa, Artificial Sequence
  Description of Artificial Sequence: Synthetic polypeptide
  VL of XENP018768
SIVMTQSPATLSVSPGERATLSCRASQSVDNDVAWYQQKPGQSPRLLINYASHRYTGVPDRFTGSGYGTEFTLTISSLQSEDFAVYFCQQDYSSPRTFGGGTKVEIK

SEQ ID NO: 13405 - protein, 5 aa, Artificial Sequence
  Description of Artificial Sequence: Synthetic peptide
  XENP018768 vhCDR1
NYWMN

SEQ ID NO: 13406 - protein, 19 aa, Artificial Sequence
  Description of Artificial Sequence: Synthetic peptide
  XENP018768 vhCDR2
EIRLKSNNYATHYAEPVKG

SEQ ID NO: 13407 - protein, 11 aa, Artificial Sequence
  Description of Artificial Sequence: Synthetic peptide
  XENP018768 vhCDR3
YYGNYGGYFDV

SEQ ID NO: 13408 - protein, 11 aa, Artificial Sequence
  Description of Artificial Sequence: Synthetic peptide
  XENP018768 vlCDR1
RASQSVDNDVA

SEQ ID NO: 13409 - protein, 7 aa, Artificial Sequence
  Description of Artificial Sequence: Synthetic peptide
  XENP018768 vlCDR2
YASHRYT

SEQ ID NO: 13410 - protein, 9 aa, Artificial Sequence
  Description of Artificial Sequence: Synthetic peptide
  XENP018768 vlCDR3
QQDYSSPRT

SEQ ID NO: 13411 - protein, 249 aa, Artificial Sequence
  Description of Artificial Sequence: Synthetic polypeptide
  XENP018769 1G6_H1_L1.27_scFv(GKPGS)4
EVQLVESGGGLVKPGGSLRLSCAASGFTFSNYWMNWVRQAPGKGLEWVGEIRLKSNNYATHYAEPVKGRFTISRDDSKSTVYLQMNSLKTEDTAVYYCTRYYGNYGGYFDVWGAGTLVTVSSGKPGSGKPGSGKPGSGKPGSSIVMTQSPATLSVSPGERATLSCRASQSVKNDVAWYQQKPGQSPRLLINYASHRYTGVPDRFTGSGYGTEFTLTISSLQSEDFAVYFCQQDYSSPRTFGGGTKVEIK

SEQ ID NO: 13412 - protein, 122 aa, Artificial Sequence; identical to SEQ ID NO: 10922
  Description of Artificial Sequence: Synthetic polypeptide
  VH of XENP018769

SEQ ID NO: 13413 - protein, 107 aa, Artificial Sequence
  Description of Artificial Sequence: Synthetic polypeptide
  VL of XENP018769
SIVMTQSPATLSVSPGERATLSCRASQSVKNDVAWYQQKPGQSPRLLINYASHRYTGVPDRFTGSGYGTEFTLTISSLQSEDFAVYFCQQDYSSPRTFGGGTKVEIK

SEQ ID NO: 13414 - protein, 5 aa, Artificial Sequence
  Description of Artificial Sequence: Synthetic peptide
  XENP018769 vhCDR1
NYWMN

SEQ ID NO: 13415 - protein, 19 aa, Artificial Sequence
  Description of Artificial Sequence: Synthetic peptide
  XENP018769 vhCDR2
EIRLKSNNYATHYAEPVKG

SEQ ID NO: 13416 - protein, 11 aa, Artificial Sequence
  Description of Artificial Sequence: Synthetic peptide
  XENP018769 vhCDR3
YYGNYGGYFDV

SEQ ID NO: 13417 - protein, 11 aa, Artificial Sequence
  Description of Artificial Sequence: Synthetic peptide
  XENP018769 vlCDR1
RASQSVKNDVA

SEQ ID NO: 13418 - protein, 7 aa, Artificial Sequence
  Description of Artificial Sequence: Synthetic peptide
  XENP018769 vlCDR2
YASHRYT

SEQ ID NO: 13419 - protein, 9 aa, Artificial Sequence
  Description of Artificial Sequence: Synthetic peptide
  XENP018769 vlCDR3
QQDYSSPRT

SEQ ID NO: 13420 - protein, 249 aa, Artificial Sequence
  Description of Artificial Sequence: Synthetic polypeptide
  XENP018770 1G6_H1_L1.28_scFv(GKPGS)4
EVQLVESGGGLVKPGGSLRLSCAASGFTFSNYWMNWVRQAPGKGLEWVGEIRLKSNNYATHYAEPVKGRFTISRDDSKSTVYLQMNSLKTEDTAVYYCTRYYGNYGGYFDVWGAGTLVTVSSGKPGSGKPGSGKPGSGKPGSSIVMTQSPATLSVSPGERATLSCRASQSVYNDVAWYQQKPGQSPRLLINYASHRYTGVPDRFTGSGYGTEFTLTISSLQSEDFAVYFCQQDYSSPRTFGGGTKVEIK

SEQ ID NO: 13421 - protein, 122 aa, Artificial Sequence; identical to SEQ ID NO: 10922
  Description of Artificial Sequence: Synthetic polypeptide
  VH of XENP018770

SEQ ID NO: 13422 - protein, 107 aa, Artificial Sequence
  Description of Artificial Sequence: Synthetic polypeptide
  VL of XENP018770
SIVMTQSPATLSVSPGERATLSCRASQSVYNDVAWYQQKPGQSPRLLINYASHRYTGVPDRFTGSGYGTEFTLTISSLQSEDFAVYFCQQDYSSPRTFGGGTKVEIK

SEQ ID NO: 13423 - protein, 5 aa, Artificial Sequence
  Description of Artificial Sequence: Synthetic peptide
  XENP018770 vhCDR1
NYWMN

SEQ ID NO: 13424 - protein, 19 aa, Artificial Sequence
  Description of Artificial Sequence: Synthetic peptide
  XENP018770 vhCDR2
EIRLKSNNYATHYAEPVKG

SEQ ID NO: 13425 - protein, 11 aa, Artificial Sequence
  Description of Artificial Sequence: Synthetic peptide
  XENP018770 vhCDR3
YYGNYGGYFDV

SEQ ID NO: 13426 - protein, 11 aa, Artificial Sequence
  Description of Artificial Sequence: Synthetic peptide
  XENP018770 vlCDR1
RASQSVYNDVA

SEQ ID NO: 13427 - protein, 7 aa, Artificial Sequence
  Description of Artificial Sequence: Synthetic peptide
  XENP018770 vlCDR2
YASHRYT

SEQ ID NO: 13428 - protein, 9 aa, Artificial Sequence
  Description of Artificial Sequence: Synthetic peptide
  XENP018770 vlCDR3
QQDYSSPRT

SEQ ID NO: 13429 - protein, 249 aa, Artificial Sequence
  Description of Artificial Sequence: Synthetic polypeptide
  XENP018771 1G6_H1_L1.29_scFv(GKPGS)4
EVQLVESGGGLVKPGGSLRLSCAASGFTFSNYWMNWVRQAPGKGLEWVGEIRLKSNNYATHYAEPVKGRFTISRDDSKSTVYLQMNSLKTEDTAVYYCTRYYGNYGGYFDVWGAGTLVTVSSGKPGSGKPGSGKPGSGKPGSSIVMTQSPATLSVSPGERATLSCRASQSVSDDVAWYQQKPGQSPRLLINYASHRYTGVPDRFTGSGYGTEFTLTISSLQSEDFAVYFCQQDYSSPRTFGGGTKVEIK

SEQ ID NO: 13430 - protein, 122 aa, Artificial Sequence; identical to SEQ ID NO: 10922
  Description of Artificial Sequence: Synthetic polypeptide
  VH of XENP018771

SEQ ID NO: 13431 - protein, 107 aa, Artificial Sequence
  Description of Artificial Sequence: Synthetic polypeptide
  VL of XENP018771
SIVMTQSPATLSVSPGERATLSCRASQSVSDDVAWYQQKPGQSPRLLINYASHRYTGVPDRFTGSGYGTEFTLTISSLQSEDFAVYFCQQDYSSPRTFGGGTKVEIK

SEQ ID NO: 13432 - protein, 5 aa, Artificial Sequence
  Description of Artificial Sequence: Synthetic peptide
  XENP018771 vhCDR1
NYWMN

SEQ ID NO: 13433 - protein, 19 aa, Artificial Sequence
  Description of Artificial Sequence: Synthetic peptide
  XENP018771 vhCDR2
EIRLKSNNYATHYAEPVKG

SEQ ID NO: 13434 - protein, 11 aa, Artificial Sequence
  Description of Artificial Sequence: Synthetic peptide
  XENP018771 vhCDR3
YYGNYGGYFDV

SEQ ID NO: 13435 - protein, 11 aa, Artificial Sequence
  Description of Artificial Sequence: Synthetic peptide
  XENP018771 vlCDR1
RASQSVSDDVA

SEQ ID NO: 13436 - protein, 7 aa, Artificial Sequence
  Description of Artificial Sequence: Synthetic peptide
  XENP018771 vlCDR2
YASHRYT

SEQ ID NO: 13437 - protein, 9 aa, Artificial Sequence
  Description of Artificial Sequence: Synthetic peptide
  XENP018771 vlCDR3
QQDYSSPRT

SEQ ID NO: 13438 - protein, 249 aa, Artificial Sequence
  Description of Artificial Sequence: Synthetic polypeptide
  XENP018772 1G6_H1_L1.30_scFv(GKPGS)4
EVQLVESGGGLVKPGGSLRLSCAASGFTFSNYWMNWVRQAPGKGLEWVGEIRLKSNNYATHYAEPVKGRFTISRDDSKSTVYLQMNSLKTEDTAVYYCTRYYGNYGGYFDVWGAGTLVTVSSGKPGSGKPGSGKPGSGKPGSSIVMTQSPATLSVSPGERATLSCRASQSVSHDVAWYQQKPGQSPRLLINYASHRYTGVPDRFTGSGYGTEFTLTISSLQSEDFAVYFCQQDYSSPRTFGGGTKVEIK

SEQ ID NO: 13439 - protein, 122 aa, Artificial Sequence; identical to SEQ ID NO: 10922
  Description of Artificial Sequence: Synthetic polypeptide
  VH of XENP018772

SEQ ID NO: 13440 - protein, 107 aa, Artificial Sequence
  Description of Artificial Sequence: Synthetic polypeptide
  VL of XENP018772
SIVMTQSPATLSVSPGERATLSCRASQSVSHDVAWYQQKPGQSPRLLINYASHRYTGVPDRFTGSGYGTEFTLTISSLQSEDFAVYFCQQDYSSPRTFGGGTKVEIK

SEQ ID NO: 13441 - protein, 5 aa, Artificial Sequence
  Description of Artificial Sequence: Synthetic peptide
  XENP018772 vhCDR1
NYWMN

SEQ ID NO: 13442 - protein, 19 aa, Artificial Sequence
  Description of Artificial Sequence: Synthetic peptide
  XENP018772 vhCDR2
EIRLKSNNYATHYAEPVKG

SEQ ID NO: 13443 - protein, 11 aa, Artificial Sequence
  Description of Artificial Sequence: Synthetic peptide
  XENP018772 vhCDR3
YYGNYGGYFDV

SEQ ID NO: 13444 - protein, 11 aa, Artificial Sequence
  Description of Artificial Sequence: Synthetic peptide
  XENP018772 vlCDR1
RASQSVSHDVA

SEQ ID NO: 13445 - protein, 7 aa, Artificial Sequence
  Description of Artificial Sequence: Synthetic peptide
  XENP018772 vlCDR2
YASHRYT

SEQ ID NO: 13446 - protein, 9 aa, Artificial Sequence
  Description of Artificial Sequence: Synthetic peptide
  XENP018772 vlCDR3
QQDYSSPRT

SEQ ID NO: 13447 - protein, 249 aa, Artificial Sequence
  Description of Artificial Sequence: Synthetic polypeptide
  XENP018773 1G6_H1_L1.31_scFv(GKPGS)4
EVQLVESGGGLVKPGGSLRLSCAASGFTFSNYWMNWVRQAPGKGLEWVGEIRLKSNNYATHYAEPVKGRFTISRDDSKSTVYLQMNSLKTEDTAVYYCTRYYGNYGGYFDVWGAGTLVTVSSGKPGSGKPGSGKPGSGKPGSSIVMTQSPATLSVSPGERATLSCRASQSVSEDVAWYQQKPGQSPRLLINYASHRYTGVPDRFTGSGYGTEFTLTISSLQSEDFAVYFCQQDYSSPRTFGGGTKVEIK

SEQ ID NO: 13448 - protein, 122 aa, Artificial Sequence; identical to SEQ ID NO: 10922
  Description of Artificial Sequence: Synthetic polypeptide
  VH of XENP018773

SEQ ID NO: 13449 - protein, 107 aa, Artificial Sequence
  Description of Artificial Sequence: Synthetic polypeptide
  VL of XENP018773
SIVMTQSPATLSVSPGERATLSCRASQSVSEDVAWYQQKPGQSPRLLINYASHRYTGVPDRFTGSGYGTEFTLTISSLQSEDFAVYFCQQDYSSPRTFGGGTKVEIK

SEQ ID NO: 13450 - protein, 5 aa, Artificial Sequence
  Description of Artificial Sequence: Synthetic peptide
  XENP018773 vhCDR1
NYWMN

SEQ ID NO: 13451 - protein, 19 aa, Artificial Sequence
  Description of Artificial Sequence: Synthetic peptide
  XENP018773 vhCDR2
EIRLKSNNYATHYAEPVKG

SEQ ID NO: 13452 - protein, 11 aa, Artificial Sequence
  Description of Artificial Sequence: Synthetic peptide
  XENP018773 vhCDR3
YYGNYGGYFDV

SEQ ID NO: 13453 - protein, 11 aa, Artificial Sequence
  Description of Artificial Sequence: Synthetic peptide
  XENP018773 vlCDR1
RASQSVSEDVA

SEQ ID NO: 13454 - protein, 7 aa, Artificial Sequence
  Description of Artificial Sequence: Synthetic peptide
  XENP018773 vlCDR2
YASHRYT

SEQ ID NO: 13455 - protein, 9 aa, Artificial Sequence
  Description of Artificial Sequence: Synthetic peptide
  XENP018773 vlCDR3
QQDYSSPRT

SEQ ID NO: 13456 - protein, 249 aa, Artificial Sequence
  Description of Artificial Sequence: Synthetic polypeptide
  XENP018774 1G6_H1_L1.32_scFv(GKPGS)4
EVQLVESGGGLVKPGGSLRLSCAASGFTFSNYWMNWVRQAPGKGLEWVGEIRLKSNNYATHYAEPVKGRFTISRDDSKSTVYLQMNSLKTEDTAVYYCTRYYGNYGGYFDVWGAGTLVTVSSGKPGSGKPGSGKPGSGKPGSSIVMTQSPATLSVSPGERATLSCRASQSVSSDVAWYQQKPGQSPRLLINYASHRYTGVPDRFTGSGYGTEFTLTISSLQSEDFAVYFCQQDYSSPRTFGGGTKVEIK

SEQ ID NO: 13457 - protein, 122 aa, Artificial Sequence; identical to SEQ ID NO: 10922
  Description of Artificial Sequence: Synthetic polypeptide
  VH of XENP018774

SEQ ID NO: 13458 - protein, 107 aa, Artificial Sequence
  Description of Artificial Sequence: Synthetic polypeptide
  VL of XENP018774
SIVMTQSPATLSVSPGERATLSCRASQSVSSDVAWYQQKPGQSPRLLINYASHRYTGVPDRFTGSGYGTEFTLTISSLQSEDFAVYFCQQDYSSPRTFGGGTKVEIK

SEQ ID NO: 13459 - protein, 5 aa, Artificial Sequence
  Description of Artificial Sequence: Synthetic peptide
  XENP018774 vhCDR1
NYWMN

SEQ ID NO: 13460 - protein, 19 aa, Artificial Sequence
  Description of Artificial Sequence: Synthetic peptide
  XENP018774 vhCDR2
EIRLKSNNYATHYAEPVKG

SEQ ID NO: 13461 - protein, 11 aa, Artificial Sequence
  Description of Artificial Sequence: Synthetic peptide
  XENP018774 vhCDR3
YYGNYGGYFDV

SEQ ID NO: 13462 - protein, 11 aa, Artificial Sequence
  Description of Artificial Sequence: Synthetic peptide
  XENP018774 vlCDR1
RASQSVSSDVA

SEQ ID NO: 13463 - protein, 7 aa, Artificial Sequence
  Description of Artificial Sequence: Synthetic peptide
  XENP018774 vlCDR2
YASHRYT

SEQ ID NO: 13464 - protein, 9 aa, Artificial Sequence
  Description of Artificial Sequence: Synthetic peptide
  XENP018774 vlCDR3
QQDYSSPRT

SEQ ID NO: 13465 - protein, 249 aa, Artificial Sequence
  Description of Artificial Sequence: Synthetic polypeptide
  XENP018775 1G6_H1_L1.33_scFv(GKPGS)4
EVQLVESGGGLVKPGGSLRLSCAASGFTFSNYWMNWVRQAPGKGLEWVGEIRLKSNNYATHYAEPVKGRFTISRDDSKSTVYLQMNSLKTEDTAVYYCTRYYGNYGGYFDVWGAGTLVTVSSGKPGSGKPGSGKPGSGKPGSSIVMTQSPATLSVSPGERATLSCRASQSVSRDVAWYQQKPGQSPRLLINYASHRYTGVPDRFTGSGYGTEFTLTISSLQSEDFAVYFCQQDYSSPRTFGGGTKVEIK

SEQ ID NO: 13466 - protein, 122 aa, Artificial Sequence; identical to SEQ ID NO: 10922
  Description of Artificial Sequence: Synthetic polypeptide
  VH of XENP018775

SEQ ID NO: 13467 - protein, 107 aa, Artificial Sequence
  Description of Artificial Sequence: Synthetic polypeptide
  VL of XENP018775
SIVMTQSPATLSVSPGERATLSCRASQSVSRDVAWYQQKPGQSPRLLINYASHRYTGVPDRFTGSGYGTEFTLTISSLQSEDFAVYFCQQDYSSPRTFGGGTKVEIK

SEQ ID NO: 13468 - protein, 5 aa, Artificial Sequence
  Description of Artificial Sequence: Synthetic peptide
  XENP018775 vhCDR1
NYWMN

SEQ ID NO: 13469 - protein, 19 aa, Artificial Sequence
  Description of Artificial Sequence: Synthetic peptide
  XENP018775 vhCDR2
EIRLKSNNYATHYAEPVKG

SEQ ID NO: 13470 - protein, 11 aa, Artificial Sequence
  Description of Artificial Sequence: Synthetic peptide
  XENP018775 vhCDR3
YYGNYGGYFDV

SEQ ID NO: 13471 - protein, 11 aa, Artificial Sequence
  Description of Artificial Sequence: Synthetic peptide
  XENP018775 vlCDR1
RASQSVSRDVA

SEQ ID NO: 13472 - protein, 7 aa, Artificial Sequence
  Description of Artificial Sequence: Synthetic peptide
  XENP018775 vlCDR2
YASHRYT

SEQ ID NO: 13473 - protein, 9 aa, Artificial Sequence
  Description of Artificial Sequence: Synthetic peptide
  XENP018775 vlCDR3
QQDYSSPRT

SEQ ID NO: 13474 - protein, 249 aa, Artificial Sequence
  Description of Artificial Sequence: Synthetic polypeptide
  XENP018776 1G6_H1_L1.34_scFv(GKPGS)4
EVQLVESGGGLVKPGGSLRLSCAASGFTFSNYWMNWVRQAPGKGLEWVGEIRLKSNNYATHYAEPVKGRFTISRDDSKSTVYLQMNSLKTEDTAVYYCTRYYGNYGGYFDVWGAGTLVTVSSGKPGSGKPGSGKPGSGKPGSSIVMTQSPATLSVSPGERATLSCRASQSVSLDVAWYQQKPGQSPRLLINYASHRYTGVPDRFTGSGYGTEFTLTISSLQSEDFAVYFCQQDYSSPRTFGGGTKVEIK

SEQ ID NO: 13475 - protein, 122 aa, Artificial Sequence; identical to SEQ ID NO: 10922
  Description of Artificial Sequence: Synthetic polypeptide
  VH of XENP018776

SEQ ID NO: 13476 - protein, 107 aa, Artificial Sequence
  Description of Artificial Sequence: Synthetic polypeptide
  VL of XENP018776
SIVMTQSPATLSVSPGERATLSCRASQSVSLDVAWYQQKPGQSPRLLINYASHRYTGVPDRFTGSGYGTEFTLTISSLQSEDFAVYFCQQDYSSPRTFGGGTKVEIK

SEQ ID NO: 13477 - protein, 5 aa, Artificial Sequence
  Description of Artificial Sequence: Synthetic peptide
  XENP018776 vhCDR1
NYWMN

SEQ ID NO: 13478 - protein, 19 aa, Artificial Sequence
  Description of Artificial Sequence: Synthetic peptide
  XENP018776 vhCDR2
EIRLKSNNYATHYAEPVKG

SEQ ID NO: 13479 - protein, 11 aa, Artificial Sequence
  Description of Artificial Sequence: Synthetic peptide
  XENP018776 vhCDR3
YYGNYGGYFDV

SEQ ID NO: 13480 - protein, 11 aa, Artificial Sequence
  Description of Artificial Sequence: Synthetic peptide
  XENP018776 vlCDR1
RASQSVSLDVA

SEQ ID NO: 13481 - protein, 7 aa, Artificial Sequence
  Description of Artificial Sequence: Synthetic peptide
  XENP018776 vlCDR2
YASHRYT

SEQ ID NO: 13482 - protein, 9 aa, Artificial Sequence
  Description of Artificial Sequence: Synthetic peptide
  XENP018776 vlCDR3
QQDYSSPRT

SEQ ID NO: 13483 - protein, 249 aa, Artificial Sequence
  Description of Artificial Sequence: Synthetic polypeptide
  XENP018777 1G6_H1_L1.35_scFv(GKPGS)4
EVQLVESGGGLVKPGGSLRLSCAASGFTFSNYWMNWVRQAPGKGLEWVGEIRLKSNNYATHYAEPVKGRFTISRDDSKSTVYLQMNSLKTEDTAVYYCTRYYGNYGGYFDVWGAGTLVTVSSGKPGSGKPGSGKPGSGKPGSSIVMTQSPATLSVSPGERATLSCRASQSVSTDVAWYQQKPGQSPRLLINYASHRYTGVPDRFTGSGYGTEFTLTISSLQSEDFAVYFCQQDYSSPRTFGGGTKVEIK

SEQ ID NO: 13484 - protein, 122 aa, Artificial Sequence; identical to SEQ ID NO: 10922
  Description of Artificial Sequence: Synthetic polypeptide
  VH of XENP018777

SEQ ID NO: 13485 - protein, 107 aa, Artificial Sequence
  Description of Artificial Sequence: Synthetic polypeptide
  VL of XENP018777
SIVMTQSPATLSVSPGERATLSCRASQSVSTDVAWYQQKPGQSPRLLINYASHRYTGVPDRFTGSGYGTEFTLTISSLQSEDFAVYFCQQDYSSPRTFGGGTKVEIK

SEQ ID NO: 13486 - protein, 5 aa, Artificial Sequence
  Description of Artificial Sequence: Synthetic peptide
  XENP018777 vhCDR1
NYWMN

SEQ ID NO: 13487 - protein, 19 aa, Artificial Sequence
  Description of Artificial Sequence: Synthetic peptide
  XENP018777 vhCDR2
EIRLKSNNYATHYAEPVKG

SEQ ID NO: 13488 - protein, 11 aa, Artificial Sequence
  Description of Artificial Sequence: Synthetic peptide
  XENP018777 vhCDR3
YYGNYGGYFDV

SEQ ID NO: 13489 - protein, 11 aa, Artificial Sequence
  Description of Artificial Sequence: Synthetic peptide
  XENP018777 vlCDR1
RASQSVSTDVA

SEQ ID NO: 13490 - protein, 7 aa, Artificial Sequence
  Description of Artificial Sequence: Synthetic peptide
  XENP018777 vlCDR2
YASHRYT

SEQ ID NO: 13491 - protein, 9 aa, Artificial Sequence
  Description of Artificial Sequence: Synthetic peptide
  XENP018777 vlCDR3
QQDYSSPRT

SEQ ID NO: 13492 - protein, 249 aa, Artificial Sequence
  Description of Artificial Sequence: Synthetic polypeptide
  XENP018778 1G6_H1_L1.36_scFv(GKPGS)4
EVQLVESGGGLVKPGGSLRLSCAASGFTFSNYWMNWVRQAPGKGLEWVGEIRLKSNNYATHYAEPVKGRFTISRDDSKSTVYLQMNSLKTEDTAVYYCTRYYGNYGGYFDVWGAGTLVTVSSGKPGSGKPGSGKPGSGKPGSSIVMTQSPATLSVSPGERATLSCRASQSVSGDVAWYQQKPGQSPRLLINYASHRYTGVPDRFTGSGYGTEFTLTISSLQSEDFAVYFCQQDYSSPRTFGGGTKVEIK

SEQ ID NO: 13493 - protein, 122 aa, Artificial Sequence; identical to SEQ ID NO: 10922
  Description of Artificial Sequence: Synthetic polypeptide
  VH of XENP018778

SEQ ID NO: 13494 - protein, 107 aa, Artificial Sequence
  Description of Artificial Sequence: Synthetic polypeptide
  VL of XENP018778
SIVMTQSPATLSVSPGERATLSCRASQSVSGDVAWYQQKPGQSPRLLINYASHRYTGVPDRFTGSGYGTEFTLTISSLQSEDFAVYFCQQDYSSPRTFGGGTKVEIK

SEQ ID NO: 13495 - protein, 5 aa, Artificial Sequence
  Description of Artificial Sequence: Synthetic peptide
  XENP018778 vhCDR1
NYWMN

SEQ ID NO: 13496 - protein, 19 aa, Artificial Sequence
  Description of Artificial Sequence: Synthetic peptide
  XENP018778 vhCDR2
EIRLKSNNYATHYAEPVKG

SEQ ID NO: 13497 - protein, 11 aa, Artificial Sequence
  Description of Artificial Sequence: Synthetic peptide
  XENP018778 vhCDR3
YYGNYGGYFDV

SEQ ID NO: 13498 - protein, 11 aa, Artificial Sequence
  Description of Artificial Sequence: Synthetic peptide
  XENP018778 vlCDR1
RASQSVSGDVA

SEQ ID NO: 13499 - protein, 7 aa, Artificial Sequence
  Description of Artificial Sequence: Synthetic peptide
  XENP018778 vlCDR2
YASHRYT

SEQ ID NO: 13500 - protein, 9 aa, Artificial Sequence
  Description of Artificial Sequence: Synthetic peptide
  XENP018778 vlCDR3
QQDYSSPRT

SEQ ID NO: 13501 - protein, 249 aa, Artificial Sequence
  Description of Artificial Sequence: Synthetic polypeptide
  XENP018779 1G6_H1_L1.37_scFv(GKPGS)4
EVQLVESGGGLVKPGGSLRLSCAASGFTFSNYWMNWVRQAPGKGLEWVGEIRLKSNNYATHYAEPVKGRFTISRDDSKSTVYLQMNSLKTEDTAVYYCTRYYGNYGGYFDVWGAGTLVTVSSGKPGSGKPGSGKPGSGKPGSSIVMTQSPATLSVSPGERATLSCRASQSVSYDVAWYQQKPGQSPRLLINYASHRYTGVPDRFTGSGYGTEFTLTISSLQSEDFAVYFCQQDYSSPRTFGGGTKVEIK

SEQ ID NO: 13502 - protein, 122 aa, Artificial Sequence; identical to SEQ ID NO: 10922
  Description of Artificial Sequence: Synthetic polypeptide
  VH of XENP018779

SEQ ID NO: 13503 - protein, 107 aa, Artificial Sequence
  Description of Artificial Sequence: Synthetic polypeptide
  VL of XENP018779
SIVMTQSPATLSVSPGERATLSCRASQSVSYDVAWYQQKPGQSPRLLINYASHRYTGVPDRFTGSGYGTEFTLTISSLQSEDFAVYFCQQDYSSPRTFGGGTKVEIK

SEQ ID NO: 13504 - protein, 5 aa, Artificial Sequence
  Description of Artificial Sequence: Synthetic peptide
  XENP018779 vhCDR1
NYWMN

SEQ ID NO: 13505 - protein, 19 aa, Artificial Sequence
  Description of Artificial Sequence: Synthetic peptide
  XENP018779 vhCDR2
EIRLKSNNYATHYAEPVKG

SEQ ID NO: 13506 - protein, 11 aa, Artificial Sequence
  Description of Artificial Sequence: Synthetic peptide
  XENP018779 vhCDR3
YYGNYGGYFDV

SEQ ID NO: 13507 - protein, 11 aa, Artificial Sequence
  Description of Artificial Sequence: Synthetic peptide
  XENP018779 vlCDR1
RASQSVSYDVA

SEQ ID NO: 13508 - protein, 7 aa, Artificial Sequence
  Description of Artificial Sequence: Synthetic peptide
  XENP018779 vlCDR2
YASHRYT

SEQ ID NO: 13509 - protein, 9 aa, Artificial Sequence
  Description of Artificial Sequence: Synthetic peptide
  XENP018779 vlCDR3
QQDYSSPRT

SEQ ID NO: 13510 - protein, 249 aa, Artificial Sequence
  Description of Artificial Sequence: Synthetic polypeptide
  XENP018780 1G6_H1_L1.38_scFv(GKPGS)4
EVQLVESGGGLVKPGGSLRLSCAASGFTFSNYWMNWVRQAPGKGLEWVGEIRLKSNNYATHYAEPVKGRFTISRDDSKSTVYLQMNSLKTEDTAVYYCTRYYGNYGGYFDVWGAGTLVTVSSGKPGSGKPGSGKPGSGKPGSSIVMTQSPATLSVSPGERATLSCRASQSVSNNVAWYQQKPGQSPRLLINYASHRYTGVPDRFTGSGYGTEFTLTISSLQSEDFAVYFCQQDYSSPRTFGGGTKVEIK

SEQ ID NO: 13511 - protein, 122 aa, Artificial Sequence; identical to SEQ ID NO: 10922
  Description of Artificial Sequence: Synthetic polypeptide
  VH of XENP018780

SEQ ID NO: 13512 - protein, 107 aa, Artificial Sequence
  Description of Artificial Sequence: Synthetic polypeptide
  VL of XENP018780
SIVMTQSPATLSVSPGERATLSCRASQSVSNNVAWYQQKPGQSPRLLINYASHRYTGVPDRFTGSGYGTEFTLTISSLQSEDFAVYFCQQDYSSPRTFGGGTKVEIK

SEQ ID NO: 13513 - protein, 5 aa, Artificial Sequence
  Description of Artificial Sequence: Synthetic peptide
  XENP018780 vhCDR1
NYWMN

SEQ ID NO: 13514 - protein, 19 aa, Artificial Sequence
  Description of Artificial Sequence: Synthetic peptide
  XENP018780 vhCDR2
EIRLKSNNYATHYAEPVKG

SEQ ID NO: 13515 - protein, 11 aa, Artificial Sequence
  Description of Artificial Sequence: Synthetic peptide
  XENP018780 vhCDR3
YYGNYGGYFDV

SEQ ID NO: 13516 - protein, 11 aa, Artificial Sequence
  Description of Artificial Sequence: Synthetic peptide
  XENP018780 vlCDR1
RASQSVSNNVA

SEQ ID NO: 13517 - protein, 7 aa, Artificial Sequence
  Description of Artificial Sequence: Synthetic peptide
  XENP018780 vlCDR2
YASHRYT

SEQ ID NO: 13518 - protein, 9 aa, Artificial Sequence
  Description of Artificial Sequence: Synthetic peptide
  XENP018780 vlCDR3
QQDYSSPRT

SEQ ID NO: 13519 - protein, 249 aa, Artificial Sequence
  Description of Artificial Sequence: Synthetic polypeptide
  XENP018781 1G6_H1_L1.39_scFv(GKPGS)4
EVQLVESGGGLVKPGGSLRLSCAASGFTFSNYWMNWVRQAPGKGLEWVGEIRLKSNNYATHYAEPVKGRFTISRDDSKSTVYLQMNSLKTEDTAVYYCTRYYGNYGGYFDVWGAGTLVTVSSGKPGSGKPGSGKPGSGKPGSSIVMTQSPATLSVSPGERATLSCRASQSVSNEVAWYQQKPGQSPRLLINYASHRYTGVPDRFTGSGYGTEFTLTISSLQSEDFAVYFCQQDYSSPRTFGGGTKVEIK

SEQ ID NO: 13520 - protein, 122 aa, Artificial Sequence; identical to SEQ ID NO: 10922
  Description of Artificial Sequence: Synthetic polypeptide
  VH of XENP018781

SEQ ID NO: 13521 - protein, 107 aa, Artificial Sequence
  Description of Artificial Sequence: Synthetic polypeptide
  VL of XENP018781
SIVMTQSPATLSVSPGERATLSCRASQSVSNEVAWYQQKPGQSPRLLINYASHRYTGVPDRFTGSGYGTEFTLTISSLQSEDFAVYFCQQDYSSPRTFGGGTKVEIK

SEQ ID NO: 13522 - protein, 5 aa, Artificial Sequence
  Description of Artificial Sequence: Synthetic peptide
  XENP018781 vhCDR1
NYWMN

SEQ ID NO: 13523 - protein, 19 aa, Artificial Sequence
  Description of Artificial Sequence: Synthetic peptide
  XENP018781 vhCDR2
EIRLKSNNYATHYAEPVKG

SEQ ID NO: 13524 - protein, 11 aa, Artificial Sequence
  Description of Artificial Sequence: Synthetic peptide
  XENP018781 vhCDR3
YYGNYGGYFDV

SEQ ID NO: 13525 - protein, 11 aa, Artificial Sequence
  Description of Artificial Sequence: Synthetic peptide
  XENP018781 vlCDR1
RASQSVSNEVA

SEQ ID NO: 13526 - protein, 7 aa, Artificial Sequence
  Description of Artificial Sequence: Synthetic peptide
  XENP018781 vlCDR2
YASHRYT

SEQ ID NO: 13527 - protein, 9 aa, Artificial Sequence
  Description of Artificial Sequence: Synthetic peptide
  XENP018781 vlCDR3
QQDYSSPRT

SEQ ID NO: 13528 - protein, 249 aa, Artificial Sequence
  Description of Artificial Sequence: Synthetic polypeptide
  XENP018782 1G6_H1_L1.40_scFv(GKPGS)4
EVQLVESGGGLVKPGGSLRLSCAASGFTFSNYWMNWVRQAPGKGLEWVGEIRLKSNNYATHYAEPVKGRFTISRDDSKSTVYLQMNSLKTEDTAVYYCTRYYGNYGGYFDVWGAGTLVTVSSGKPGSGKPGSGKPGSGKPGSSIVMTQSPATLSVSPGERATLSCRASQSVSNHVAWYQQKPGQSPRLLINYASHRYTGVPDRFTGSGYGTEFTLTISSLQSEDFAVYFCQQDYSSPRTFGGGTKVEIK

SEQ ID NO: 13529 - protein, 122 aa, Artificial Sequence; identical to SEQ ID NO: 10922
  Description of Artificial Sequence: Synthetic polypeptide
  VH of XENP018782

SEQ ID NO: 13530 - protein, 107 aa, Artificial Sequence
  Description of Artificial Sequence: Synthetic polypeptide
  VL of XENP018782
SIVMTQSPATLSVSPGERATLSCRASQSVSNHVAWYQQKPGQSPRLLINYASHRYTGVPDRFTGSGYGTEFTLTISSLQSEDFAVYFCQQDYSSPRTFGGGTKVEIK

SEQ ID NO: 13531 - protein, 5 aa, Artificial Sequence
  Description of Artificial Sequence: Synthetic peptide
  XENP018782 vhCDR1
NYWMN

SEQ ID NO: 13532 - protein, 19 aa, Artificial Sequence
  Description of Artificial Sequence: Synthetic peptide
  XENP018782 vhCDR2
EIRLKSNNYATHYAEPVKG

SEQ ID NO: 13533 - protein, 11 aa, Artificial Sequence
  Description of Artificial Sequence: Synthetic peptide
  XENP018782 vhCDR3
YYGNYGGYFDV

SEQ ID NO: 13534 - protein, 11 aa, Artificial Sequence
  Description of Artificial Sequence: Synthetic peptide
  XENP018782 vlCDR1
RASQSVSNHVA

SEQ ID NO: 13535 - protein, 7 aa, Artificial Sequence
  Description of Artificial Sequence: Synthetic peptide
  XENP018782 vlCDR2
YASHRYT

SEQ ID NO: 13536 - protein, 9 aa, Artificial Sequence
  Description of Artificial Sequence: Synthetic peptide
  XENP018782 vlCDR3
QQDYSSPRT

SEQ ID NO: 13537 - protein, 249 aa, Artificial Sequence
  Description of Artificial Sequence: Synthetic polypeptide
  XENP018783 1G6_H1_L1.41_scFv(GKPGS)4
EVQLVESGGGLVKPGGSLRLSCAASGFTFSNYWMNWVRQAPGKGLEWVGEIRLKSNNYATHYAEPVKGRFTISRDDSKSTVYLQMNSLKTEDTAVYYCTRYYGNYGGYFDVWGAGTLVTVSSGKPGSGKPGSGKPGSGKPGSSIVMTQSPATLSVSPGERATLSCRASQSVSNSVAWYQQKPGQSPRLLINYASHRYTGVPDRFTGSGYGTEFTLTISSLQSEDFAVYFCQQDYSSPRTFGGGTKVEIK

SEQ ID NO: 13538 - protein, 122 aa, Artificial Sequence; identical to SEQ ID NO: 10922
  Description of Artificial Sequence: Synthetic polypeptide
  VH of XENP018783

SEQ ID NO: 13539 - protein, 107 aa, Artificial Sequence
  Description of Artificial Sequence: Synthetic polypeptide
  VL of XENP018783
SIVMTQSPATLSVSPGERATLSCRASQSVSNSVAWYQQKPGQSPRLLINYASHRYTGVPDRFTGSGYGTEFTLTISSLQSEDFAVYFCQQDYSSPRTFGGGTKVEIK

SEQ ID NO: 13540 - protein, 5 aa, Artificial Sequence
  Description of Artificial Sequence: Synthetic peptide
  XENP018783 vhCDR1
NYWMN

SEQ ID NO: 13541 - protein, 19 aa, Artificial Sequence
  Description of Artificial Sequence: Synthetic peptide
  XENP018783 vhCDR2
EIRLKSNNYATHYAEPVKG

SEQ ID NO: 13542 - protein, 11 aa, Artificial Sequence
  Description of Artificial Sequence: Synthetic peptide
  XENP018783 vhCDR3
YYGNYGGYFDV

SEQ ID NO: 13543 - protein, 11 aa, Artificial Sequence
  Description of Artificial Sequence: Synthetic peptide
  XENP018783 vlCDR1
RASQSVSNSVA

SEQ ID NO: 13544 - protein, 7 aa, Artificial Sequence
  Description of Artificial Sequence: Synthetic peptide
  XENP018783 vlCDR2
YASHRYT

SEQ ID NO: 13545 - protein, 9 aa, Artificial Sequence
  Description of Artificial Sequence: Synthetic peptide
  XENP018783 vlCDR3
QQDYSSPRT

SEQ ID NO: 13546 - protein, 249 aa, Artificial Sequence
  Description of Artificial Sequence: Synthetic polypeptide
  XENP018784 1G6_H1_L1.42_scFv(GKPGS)4
EVQLVESGGGLVKPGGSLRLSCAASGFTFSNYWMNWVRQAPGKGLEWVGEIRLKSNNYATHYAEPVKGRFTISRDDSKSTVYLQMNSLKTEDTAVYYCTRYYGNYGGYFDVWGAGTLVTVSSGKPGSGKPGSGKPGSGKPGSSIVMTQSPATLSVSPGERATLSCRASQSVSNRVAWYQQKPGQSPRLLINYASHRYTGVPDRFTGSGYGTEFTLTISSLQSEDFAVYFCQQDYSSPRTFGGGTKVEIK

SEQ ID NO: 13547 - protein, 122 aa, Artificial Sequence; identical to SEQ ID NO: 10922
  Description of Artificial Sequence: Synthetic polypeptide
  VH of XENP018784

SEQ ID NO: 13548 - protein, 107 aa, Artificial Sequence
  Description of Artificial Sequence: Synthetic polypeptide
  VL of XENP018784
SIVMTQSPATLSVSPGERATLSCRASQSVSNRVAWYQQKPGQSPRLLINYASHRYTGVPDRFTGSGYGTEFTLTISSLQSEDFAVYFCQQDYSSPRTFGGGTKVEIK

SEQ ID NO: 13549 - protein, 5 aa, Artificial Sequence
  Description of Artificial Sequence: Synthetic peptide
  XENP018784 vhCDR1
NYWMN

SEQ ID NO: 13550 - protein, 19 aa, Artificial Sequence
  Description of Artificial Sequence: Synthetic peptide
  XENP018784 vhCDR2
EIRLKSNNYATHYAEPVKG

SEQ ID NO: 13551 - protein, 11 aa, Artificial Sequence
  Description of Artificial Sequence: Synthetic peptide
  XENP018784 vhCDR3
YYGNYGGYFDV

SEQ ID NO: 13552 - protein, 11 aa, Artificial Sequence
  Description of Artificial Sequence: Synthetic peptide
  XENP018784 vlCDR1
RASQSVSNRVA

SEQ ID NO: 13553 - protein, 7 aa, Artificial Sequence
  Description of Artificial Sequence: Synthetic peptide
  XENP018784 vlCDR2
YASHRYT

SEQ ID NO: 13554 - protein, 9 aa, Artificial Sequence
  Description of Artificial Sequence: Synthetic peptide
  XENP018784 vlCDR3
QQDYSSPRT

SEQ ID NO: 13555 - protein, 249 aa, Artificial Sequence
  Description of Artificial Sequence: Synthetic polypeptide
  XENP018785 1G6_H1_L1.43_scFv(GKPGS)4
EVQLVESGGGLVKPGGSLRLSCAASGFTFSNYWMNWVRQAPGKGLEWVGEIRLKSNNYATHYAEPVKGRFTISRDDSKSTVYLQMNSLKTEDTAVYYCTRYYGNYGGYFDVWGAGTLVTVSSGKPGSGKPGSGKPGSGKPGSSIVMTQSPATLSVSPGERATLSCRASQSVSNLVAWYQQKPGQSPRLLINYASHRYTGVPDRFTGSGYGTEFTLTISSLQSEDFAVYFCQQDYSSPRTFGGGTKVEIK

SEQ ID NO: 13556 - protein, 122 aa, Artificial Sequence; identical to SEQ ID NO: 10922
  Description of Artificial Sequence: Synthetic polypeptide
  VH of XENP018785

SEQ ID NO: 13557 - protein, 107 aa, Artificial Sequence
  Description of Artificial Sequence: Synthetic polypeptide
  VL of XENP018785
SIVMTQSPATLSVSPGERATLSCRASQSVSNLVAWYQQKPGQSPRLLINYASHRYTGVPDRFTGSGYGTEFTLTISSLQSEDFAVYFCQQDYSSPRTFGGGTKVEIK

SEQ ID NO: 13558 - protein, 5 aa, Artificial Sequence
  Description of Artificial Sequence: Synthetic peptide
  XENP018785 vhCDR1
NYWMN

SEQ ID NO: 13559 - protein, 19 aa, Artificial Sequence
  Description of Artificial Sequence: Synthetic peptide
  XENP018785 vhCDR2
EIRLKSNNYATHYAEPVKG

SEQ ID NO: 13560 - protein, 11 aa, Artificial Sequence
  Description of Artificial Sequence: Synthetic peptide
  XENP018785 vhCDR3
YYGNYGGYFDV

SEQ ID NO: 13561 - protein, 11 aa, Artificial Sequence
  Description of Artificial Sequence: Synthetic peptide
  XENP018785 vlCDR1
RASQSVSNLVA

SEQ ID NO: 13562 - protein, 7 aa, Artificial Sequence
  Description of Artificial Sequence: Synthetic peptide
  XENP018785 vlCDR2
YASHRYT

SEQ ID NO: 13563 - protein, 9 aa, Artificial Sequence
  Description of Artificial Sequence: Synthetic peptide
  XENP018785 vlCDR3
QQDYSSPRT

SEQ ID NO: 13564 - protein, 249 aa, Artificial Sequence
  Description of Artificial Sequence: Synthetic polypeptide
  XENP018786 1G6_H1_L1.44_scFv(GKPGS)4
EVQLVESGGGLVKPGGSLRLSCAASGFTFSNYWMNWVRQAPGKGLEWVGEIRLKSNNYATHYAEPVKGRFTISRDDSKSTVYLQMNSLKTEDTAVYYCTRYYGNYGGYFDVWGAGTLVTVSSGKPGSGKPGSGKPGSGKPGSSIVMTQSPATLSVSPGERATLSCRASQSVSNTVAWYQQKPGQSPRLLINYASHRYTGVPDRFTGSGYGTEFTLTISSLQSEDFAVYFCQQDYSSPRTFGGGTKVEIK

SEQ ID NO: 13565 - protein, 122 aa, Artificial Sequence; identical to SEQ ID NO: 10922
  Description of Artificial Sequence: Synthetic polypeptide
  VH of XENP018786

SEQ ID NO: 13566 - protein, 107 aa, Artificial Sequence
  Description of Artificial Sequence: Synthetic polypeptide
  VL of XENP018786
SIVMTQSPATLSVSPGERATLSCRASQSVSNTVAWYQQKPGQSPRLLINYASHRYTGVPDRFTGSGYGTEFTLTISSLQSEDFAVYFCQQDYSSPRTFGGGTKVEIK

SEQ ID NO: 13567 - protein, 5 aa, Artificial Sequence
  Description of Artificial Sequence: Synthetic peptide
  XENP018786 vhCDR1
NYWMN

SEQ ID NO: 13568 - protein, 19 aa, Artificial Sequence
  Description of Artificial Sequence: Synthetic peptide
  XENP018786 vhCDR2
EIRLKSNNYATHYAEPVKG

SEQ ID NO: 13569 - protein, 11 aa, Artificial Sequence
  Description of Artificial Sequence: Synthetic peptide
  XENP018786 vhCDR3
YYGNYGGYFDV

SEQ ID NO: 13570 - protein, 11 aa, Artificial Sequence
  Description of Artificial Sequence: Synthetic peptide
  XENP018786 vlCDR1
RASQSVSNTVA

SEQ ID NO: 13571 - protein, 7 aa, Artificial Sequence
  Description of Artificial Sequence: Synthetic peptide
  XENP018786 vlCDR2
YASHRYT

SEQ ID NO: 13572 - protein, 9 aa, Artificial Sequence
  Description of Artificial Sequence: Synthetic peptide
  XENP018786 vlCDR3
QQDYSSPRT

SEQ ID NO: 13573 - protein, 249 aa, Artificial Sequence
  Description of Artificial Sequence: Synthetic polypeptide
  XENP018787 1G6_H1_L1.45_scFv(GKPGS)4
EVQLVESGGGLVKPGGSLRLSCAASGFTFSNYWMNWVRQAPGKGLEWVGEIRLKSNNYATHYAEPVKGRFTISRDDSKSTVYLQMNSLKTEDTAVYYCTRYYGNYGGYFDVWGAGTLVTVSSGKPGSGKPGSGKPGSGKPGSSIVMTQSPATLSVSPGERATLSCRASQSVSNGVAWYQQKPGQSPRLLINYASHRYTGVPDRFTGSGYGTEFTLTISSLQSEDFAVYFCQQDYSSPRTFGGGTKVEIK

SEQ ID NO: 13574 - protein, 122 aa, Artificial Sequence; identical to SEQ ID NO: 10922
  Description of Artificial Sequence: Synthetic polypeptide
  VH of XENP018787

SEQ ID NO: 13575 - protein, 107 aa, Artificial Sequence
  Description of Artificial Sequence: Synthetic polypeptide
  VL of XENP018787
SIVMTQSPATLSVSPGERATLSCRASQSVSNGVAWYQQKPGQSPRLLINYASHRYTGVPDRFTGSGYGTEFTLTISSLQSEDFAVYFCQQDYSSPRTFGGGTKVEIK

SEQ ID NO: 13576 - protein, 5 aa, Artificial Sequence
  Description of Artificial Sequence: Synthetic peptide
  XENP018787 vhCDR1
NYWMN

SEQ ID NO: 13577 - protein, 19 aa, Artificial Sequence
  Description of Artificial Sequence: Synthetic peptide
  XENP018787 vhCDR2
EIRLKSNNYATHYAEPVKG

SEQ ID NO: 13578 - protein, 11 aa, Artificial Sequence
  Description of Artificial Sequence: Synthetic peptide
  XENP018787 vhCDR3
YYGNYGGYFDV

SEQ ID NO: 13579 - protein, 11 aa, Artificial Sequence
  Description of Artificial Sequence: Synthetic peptide
  XENP018787 vlCDR1
RASQSVSNGVA

SEQ ID NO: 13580 - protein, 7 aa, Artificial Sequence
  Description of Artificial Sequence: Synthetic peptide
  XENP018787 vlCDR2
YASHRYT

SEQ ID NO: 13581 - protein, 9 aa, Artificial Sequence
  Description of Artificial Sequence: Synthetic peptide
  XENP018787 vlCDR3
QQDYSSPRT

SEQ ID NO: 13582 - protein, 249 aa, Artificial Sequence
  Description of Artificial Sequence: Synthetic polypeptide
  XENP018788 1G6_H1_L1.46_scFv(GKPGS)4
EVQLVESGGGLVKPGGSLRLSCAASGFTFSNYWMNWVRQAPGKGLEWVGEIRLKSNNYATHYAEPVKGRFTISRDDSKSTVYLQMNSLKTEDTAVYYCTRYYGNYGGYFDVWGAGTLVTVSSGKPGSGKPGSGKPGSGKPGSSIVMTQSPATLSVSPGERATLSCRASQSVSNYVAWYQQKPGQSPRLLINYASHRYTGVPDRFTGSGYGTEFTLTISSLQSEDFAVYFCQQDYSSPRTFGGGTKVEIK

SEQ ID NO: 13583 - protein, 122 aa, Artificial Sequence; identical to SEQ ID NO: 10922
  Description of Artificial Sequence: Synthetic polypeptide
  VH of XENP018788

SEQ ID NO: 13584 - protein, 107 aa, Artificial Sequence
  Description of Artificial Sequence: Synthetic polypeptide
  VL of XENP018788
SIVMTQSPATLSVSPGERATLSCRASQSVSNYVAWYQQKPGQSPRLLINYASHRYTGVPDRFTGSGYGTEFTLTISSLQSEDFAVYFCQQDYSSPRTFGGGTKVEIK

SEQ ID NO: 13585 - protein, 5 aa, Artificial Sequence
  Description of Artificial Sequence: Synthetic peptide
  XENP018788 vhCDR1
NYWMN

SEQ ID NO: 13586 - protein, 19 aa, Artificial Sequence
  Description of Artificial Sequence: Synthetic peptide
  XENP018788 vhCDR2
EIRLKSNNYATHYAEPVKG

SEQ ID NO: 13587 - protein, 11 aa, Artificial Sequence
  Description of Artificial Sequence: Synthetic peptide
  XENP018788 vhCDR3
YYGNYGGYFDV

SEQ ID NO: 13588 - protein, 11 aa, Artificial Sequence
  Description of Artificial Sequence: Synthetic peptide
  XENP018788 vlCDR1
RASQSVSNYVA

SEQ ID NO: 13589 - protein, 7 aa, Artificial Sequence
  Description of Artificial Sequence: Synthetic peptide
  XENP018788 vlCDR2
YASHRYT

SEQ ID NO: 13590 - protein, 9 aa, Artificial Sequence
  Description of Artificial Sequence: Synthetic peptide
  XENP018788 vlCDR3
QQDYSSPRT

SEQ ID NO: 13591 - protein, 249 aa, Artificial Sequence
  Description of Artificial Sequence: Synthetic polypeptide
  XENP018789 1G6_H1_L1.47_scFv(GKPGS)4
EVQLVESGGGLVKPGGSLRLSCAASGFTFSNYWMNWVRQAPGKGLEWVGEIRLKSNNYATHYAEPVKGRFTISRDDSKSTVYLQMNSLKTEDTAVYYCTRYYGNYGGYFDVWGAGTLVTVSSGKPGSGKPGSGKPGSGKPGSSIVMTQSPATLSVSPGERATLSCRASQSVSNDLAWYQQKPGQSPRLLINYASHRYTGVPDRFTGSGYGTEFTLTISSLQSEDFAVYFCQQDYSSPRTFGGGTKVEIK

SEQ ID NO: 13592 - protein, 122 aa, Artificial Sequence; identical to SEQ ID NO: 10922
  Description of Artificial Sequence: Synthetic polypeptide
  VH of XENP018789

SEQ ID NO: 13593 - protein, 107 aa, Artificial Sequence
  Description of Artificial Sequence: Synthetic polypeptide
  VL of XENP018789
SIVMTQSPATLSVSPGERATLSCRASQSVSNDLAWYQQKPGQSPRLLINYASHRYTGVPDRFTGSGYGTEFTLTISSLQSEDFAVYFCQQDYSSPRTFGGGTKVEIK

SEQ ID NO: 13594 - protein, 5 aa, Artificial Sequence
  Description of Artificial Sequence: Synthetic peptide
  XENP018789 vhCDR1
NYWMN

SEQ ID NO: 13595 - protein, 19 aa, Artificial Sequence
  Description of Artificial Sequence: Synthetic peptide
  XENP018789 vhCDR2
EIRLKSNNYATHYAEPVKG

SEQ ID NO: 13596 - protein, 11 aa, Artificial Sequence
  Description of Artificial Sequence: Synthetic peptide
  XENP018789 vhCDR3
YYGNYGGYFDV

SEQ ID NO: 13597 - protein, 11 aa, Artificial Sequence
  Description of Artificial Sequence: Synthetic peptide
  XENP018789 vlCDR1
RASQSVSNDLA

SEQ ID NO: 13598 - protein, 7 aa, Artificial Sequence
  Description of Artificial Sequence: Synthetic peptide
  XENP018789 vlCDR2
YASHRYT

SEQ ID NO: 13599 - protein, 9 aa, Artificial Sequence
  Description of Artificial Sequence: Synthetic peptide
  XENP018789 vlCDR3
QQDYSSPRT

SEQ ID NO: 13600 - protein, 249 aa, Artificial Sequence
  Description of Artificial Sequence: Synthetic polypeptide
  XENP018790 1G6_H1_L1.48_scFv(GKPGS)4
EVQLVESGGGLVKPGGSLRLSCAASGFTFSNYWMNWVRQAPGKGLEWVGEIRLKSNNYATHYAEPVKGRFTISRDDSKSTVYLQMNSLKTEDTAVYYCTRYYGNYGGYFDVWGAGTLVTVSSGKPGSGKPGSGKPGSGKPGSSIVMTQSPATLSVSPGERATLSCRASQSVSNDVSWYQQKPGQSPRLLINYASHRYTGVPDRFTGSGYGTEFTLTISSLQSEDFAVYFCQQDYSSPRTFGGGTKVEIK

SEQ ID NO: 13601 - protein, 122 aa, Artificial Sequence; identical to SEQ ID NO: 10922
  Description of Artificial Sequence: Synthetic polypeptide
  VH of XENP018790

SEQ ID NO: 13602 - protein, 107 aa, Artificial Sequence
  Description of Artificial Sequence: Synthetic polypeptide
  VL of XENP018790
SIVMTQSPATLSVSPGERATLSCRASQSVSNDVSWYQQKPGQSPRLLINYASHRYTGVPDRFTGSGYGTEFTLTISSLQSEDFAVYFCQQDYSSPRTFGGGTKVEIK

SEQ ID NO: 13603 - protein, 5 aa, Artificial Sequence
  Description of Artificial Sequence: Synthetic peptide
  XENP018790 vhCDR1
NYWMN

SEQ ID NO: 13604 - protein, 19 aa, Artificial Sequence
  Description of Artificial Sequence: Synthetic peptide
  XENP018790 vhCDR2
EIRLKSNNYATHYAEPVKG

SEQ ID NO: 13605 - protein, 11 aa, Artificial Sequence
  Description of Artificial Sequence: Synthetic peptide
  XENP018790 vhCDR3
YYGNYGGYFDV

SEQ ID NO: 13606 - protein, 11 aa, Artificial Sequence
  Description of Artificial Sequence: Synthetic peptide
  XENP018790 vlCDR1
RASQSVSNDVS

SEQ ID NO: 13607 - protein, 7 aa, Artificial Sequence
  Description of Artificial Sequence: Synthetic peptide
  XENP018790 vlCDR2
YASHRYT

SEQ ID NO: 13608 - protein, 9 aa, Artificial Sequence
  Description of Artificial Sequence: Synthetic peptide
  XENP018790 vlCDR3
QQDYSSPRT

SEQ ID NO: 13609 - protein, 249 aa, Artificial Sequence
  Description of Artificial Sequence: Synthetic polypeptide
  XENP018791 1G6_H1_L1.49_scFv(GKPGS)4
EVQLVESGGGLVKPGGSLRLSCAASGFTFSNYWMNWVRQAPGKGLEWVGEIRLKSNNYATHYAEPVKGRFTISRDDSKSTVYLQMNSLKTEDTAVYYCTRYYGNYGGYFDVWGAGTLVTVSSGKPGSGKPGSGKPGSGKPGSSIVMTQSPATLSVSPGERATLSCRASQSVSNDVTWYQQKPGQSPRLLINYASHRYTGVPDRFTGSGYGTEFTLTISSLQSEDFAVYFCQQDYSSPRTFGGGTKVEIK

SEQ ID NO: 13610 - protein, 122 aa, Artificial Sequence; identical to SEQ ID NO: 10922
  Description of Artificial Sequence: Synthetic polypeptide
  VH of XENP018791

SEQ ID NO: 13611 - protein, 107 aa, Artificial Sequence
  Description of Artificial Sequence: Synthetic polypeptide
  VL of XENP018791
SIVMTQSPATLSVSPGERATLSCRASQSVSNDVTWYQQKPGQSPRLLINYASHRYTGVPDRFTGSGYGTEFTLTISSLQSEDFAVYFCQQDYSSPRTFGGGTKVEIK

SEQ ID NO: 13612 - protein, 5 aa, Artificial Sequence
  Description of Artificial Sequence: Synthetic peptide
  XENP018791 vhCDR1
NYWMN

SEQ ID NO: 13613 - protein, 19 aa, Artificial Sequence
  Description of Artificial Sequence: Synthetic peptide
  XENP018791 vhCDR2
EIRLKSNNYATHYAEPVKG

SEQ ID NO: 13614 - protein, 11 aa, Artificial Sequence
  Description of Artificial Sequence: Synthetic peptide
  XENP018791 vhCDR3
YYGNYGGYFDV

SEQ ID NO: 13615 - protein, 11 aa, Artificial Sequence
  Description of Artificial Sequence: Synthetic peptide
  XENP018791 vlCDR1
RASQSVSNDVT

SEQ ID NO: 13616 - protein, 7 aa, Artificial Sequence
  Description of Artificial Sequence: Synthetic peptide
  XENP018791 vlCDR2
YASHRYT

SEQ ID NO: 13617 - protein, 9 aa, Artificial Sequence
  Description of Artificial Sequence: Synthetic peptide
  XENP018791 vlCDR3
QQDYSSPRT

SEQ ID NO: 13618 - protein, 249 aa, Artificial Sequence
  Description of Artificial Sequence: Synthetic polypeptide
  XENP018792 1G6_H1_L1.50_scFv(GKPGS)4
EVQLVESGGGLVKPGGSLRLSCAASGFTFSNYWMNWVRQAPGKGLEWVGEIRLKSNNYATHYAEPVKGRFTISRDDSKSTVYLQMNSLKTEDTAVYYCTRYYGNYGGYFDVWGAGTLVTVSSGKPGSGKPGSGKPGSGKPGSSIVMTQSPATLSVSPGERATLSCRASQSVSNDVAWYQQKPGQAPRLLINYASHRYTGVPDRFTGSGYGTEFTLTISSLQSEDFAVYFCQQDYSSPRTFGGGTKVEIK

SEQ ID NO: 13619 - protein, 122 aa, Artificial Sequence; identical to SEQ ID NO: 10922
  Description of Artificial Sequence: Synthetic polypeptide
  VH of XENP018792

SEQ ID NO: 13620 - protein, 107 aa, Artificial Sequence
  Description of Artificial Sequence: Synthetic polypeptide
  VL of XENP018792
SIVMTQSPATLSVSPGERATLSCRASQSVSNDVAWYQQKPGQAPRLLINYASHRYTGVPDRFTGSGYGTEFTLTISSLQSEDFAVYFCQQDYSSPRTFGGGTKVEIK

SEQ ID NO: 13621 - protein, 5 aa, Artificial Sequence
  Description of Artificial Sequence: Synthetic peptide
  XENP018792 vhCDR1
NYWMN

SEQ ID NO: 13622 - protein, 19 aa, Artificial Sequence
  Description of Artificial Sequence: Synthetic peptide
  XENP018792 vhCDR2
EIRLKSNNYATHYAEPVKG

SEQ ID NO: 13623 - protein, 11 aa, Artificial Sequence
  Description of Artificial Sequence: Synthetic peptide
  XENP018792 vhCDR3
YYGNYGGYFDV

SEQ ID NO: 13624 - protein, 11 aa, Artificial Sequence
  Description of Artificial Sequence: Synthetic peptide
  XENP018792 vlCDR1
RASQSVSNDVA

SEQ ID NO: 13625 - protein, 7 aa, Artificial Sequence
  Description of Artificial Sequence: Synthetic peptide
  XENP018792 vlCDR2
YASHRYT

SEQ ID NO: 13626 - protein, 9 aa, Artificial Sequence
  Description of Artificial Sequence: Synthetic peptide
  XENP018792 vlCDR3
QQDYSSPRT

SEQ ID NO: 13627 - protein, 249 aa, Artificial Sequence
  Description of Artificial Sequence: Synthetic polypeptide
  XENP018793 1G6_H1_L1.51_scFv(GKPGS)4
EVQLVESGGGLVKPGGSLRLSCAASGFTFSNYWMNWVRQAPGKGLEWVGEIRLKSNNYATHYAEPVKGRFTISRDDSKSTVYLQMNSLKTEDTAVYYCTRYYGNYGGYFDVWGAGTLVTVSSGKPGSGKPGSGKPGSGKPGSSIVMTQSPATLSVSPGERATLSCRASQSVSNDVAWYQQKPGQSPKLLINYASHRYTGVPDRFTGSGYGTEFTLTISSLQSEDFAVYFCQQDYSSPRTFGGGTKVEIK

SEQ ID NO: 13628 - protein, 122 aa, Artificial Sequence; identical to SEQ ID NO: 10922
  Description of Artificial Sequence: Synthetic polypeptide
  VH of XENP018793

SEQ ID NO: 13629 - protein, 107 aa, Artificial Sequence
  Description of Artificial Sequence: Synthetic polypeptide
  VL of XENP018793
SIVMTQSPATLSVSPGERATLSCRASQSVSNDVAWYQQKPGQSPKLLINYASHRYTGVPDRFTGSGYGTEFTLTISSLQSEDFAVYFCQQDYSSPRTFGGGTKVEIK

SEQ ID NO: 13630 - protein, 5 aa, Artificial Sequence
  Description of Artificial Sequence: Synthetic peptide
  XENP018793 vhCDR1
NYWMN

SEQ ID NO: 13631 - protein, 19 aa, Artificial Sequence
  Description of Artificial Sequence: Synthetic peptide
  XENP018793 vhCDR2
EIRLKSNNYATHYAEPVKG

SEQ ID NO: 13632 - protein, 11 aa, Artificial Sequence
  Description of Artificial Sequence: Synthetic peptide
  XENP018793 vhCDR3
YYGNYGGYFDV

SEQ ID NO: 13633 - protein, 11 aa, Artificial Sequence
  Description of Artificial Sequence: Synthetic peptide
  XENP018793 vlCDR1
RASQSVSNDVA

SEQ ID NO: 13634 - protein, 7 aa, Artificial Sequence
  Description of Artificial Sequence: Synthetic peptide
  XENP018793 vlCDR2
YASHRYT

SEQ ID NO: 13635 - protein, 9 aa, Artificial Sequence
  Description of Artificial Sequence: Synthetic peptide
  XENP018793 vlCDR3
QQDYSSPRT

SEQ ID NO: 13636 - protein, 249 aa, Artificial Sequence
  Description of Artificial Sequence: Synthetic polypeptide
  XENP018794 1G6_H1_L1.52_scFv(GKPGS)4
EVQLVESGGGLVKPGGSLRLSCAASGFTFSNYWMNWVRQAPGKGLEWVGEIRLKSNNYATHYAEPVKGRFTISRDDSKSTVYLQMNSLKTEDTAVYYCTRYYGNYGGYFDVWGAGTLVTVSSGKPGSGKPGSGKPGSGKPGSSIVMTQSPATLSVSPGERATLSCRASQSVSNDVAWYQQKPGQSPQLLINYASHRYTGVPDRFTGSGYGTEFTLTISSLQSEDFAVYFCQQDYSSPRTFGGGTKVEIK

SEQ ID NO: 13637 - protein, 122 aa, Artificial Sequence; identical to SEQ ID NO: 10922
  Description of Artificial Sequence: Synthetic polypeptide
  VH of XENP018794

SEQ ID NO: 13638 - protein, 107 aa, Artificial Sequence
  Description of Artificial Sequence: Synthetic polypeptide
  VL of XENP018794
SIVMTQSPATLSVSPGERATLSCRASQSVSNDVAWYQQKPGQSPQLLINYASHRYTGVPDRFTGSGYGTEFTLTISSLQSEDFAVYFCQQDYSSPRTFGGGTKVEIK

SEQ ID NO: 13639 - protein, 5 aa, Artificial Sequence
  Description of Artificial Sequence: Synthetic peptide
  XENP018794 vhCDR1
NYWMN

SEQ ID NO: 13640 - protein, 19 aa, Artificial Sequence
  Description of Artificial Sequence: Synthetic peptide
  XENP018794 vhCDR2
EIRLKSNNYATHYAEPVKG

SEQ ID NO: 13641 - protein, 11 aa, Artificial Sequence
  Description of Artificial Sequence: Synthetic peptide
  XENP018794 vhCDR3
YYGNYGGYFDV

SEQ ID NO: 13642 - protein, 11 aa, Artificial Sequence
  Description of Artificial Sequence: Synthetic peptide
  XENP018794 vlCDR1
RASQSVSNDVA

SEQ ID NO: 13643 - protein, 7 aa, Artificial Sequence
  Description of Artificial Sequence: Synthetic peptide
  XENP018794 vlCDR2
YASHRYT

SEQ ID NO: 13644 - protein, 9 aa, Artificial Sequence
  Description of Artificial Sequence: Synthetic peptide
  XENP018794 vlCDR3
QQDYSSPRT

SEQ ID NO: 13645 - protein, 249 aa, Artificial Sequence
  Description of Artificial Sequence: Synthetic polypeptide
  XENP018795 1G6_H1_L1.53_scFv(GKPGS)4
EVQLVESGGGLVKPGGSLRLSCAASGFTFSNYWMNWVRQAPGKGLEWVGEIRLKSNNYATHYAEPVKGRFTISRDDSKSTVYLQMNSLKTEDTAVYYCTRYYGNYGGYFDVWGAGTLVTVSSGKPGSGKPGSGKPGSGKPGSSIVMTQSPATLSVSPGERATLSCRASQSVSNDVAWYQQKPGQSPILLINYASHRYTGVPDRFTGSGYGTEFTLTISSLQSEDFAVYFCQQDYSSPRTFGGGTKVEIK

SEQ ID NO: 13646 - protein, 122 aa, Artificial Sequence; identical to SEQ ID NO: 10922
  Description of Artificial Sequence: Synthetic polypeptide
  VH of XENP018795

SEQ ID NO: 13647 - protein, 107 aa, Artificial Sequence
  Description of Artificial Sequence: Synthetic polypeptide
  VL of XENP018795
SIVMTQSPATLSVSPGERATLSCRASQSVSNDVAWYQQKPGQSPILLINYASHRYTGVPDRFTGSGYGTEFTLTISSLQSEDFAVYFCQQDYSSPRTFGGGTKVEIK

SEQ ID NO: 13648 - protein, 5 aa, Artificial Sequence
  Description of Artificial Sequence: Synthetic peptide
  XENP018795 vhCDR1
NYWMN

SEQ ID NO: 13649 - protein, 19 aa, Artificial Sequence
  Description of Artificial Sequence: Synthetic peptide
  XENP018795 vhCDR2
EIRLKSNNYATHYAEPVKG

SEQ ID NO: 13650 - protein, 11 aa, Artificial Sequence
  Description of Artificial Sequence: Synthetic peptide
  XENP018795 vhCDR3
YYGNYGGYFDV

SEQ ID NO: 13651 - protein, 11 aa, Artificial Sequence
  Description of Artificial Sequence: Synthetic peptide
  XENP018795 vlCDR1
RASQSVSNDVA

SEQ ID NO: 13652 - protein, 7 aa, Artificial Sequence
  Description of Artificial Sequence: Synthetic peptide
  XENP018795 vlCDR2
YASHRYT

SEQ ID NO: 13653 - protein, 9 aa, Artificial Sequence
  Description of Artificial Sequence: Synthetic peptide
  XENP018795 vlCDR3
QQDYSSPRT

SEQ ID NO: 13654 - protein, 249 aa, Artificial Sequence
  Description of Artificial Sequence: Synthetic polypeptide
  XENP018796 1G6_H1_L1.54_scFv(GKPGS)4
EVQLVESGGGLVKPGGSLRLSCAASGFTFSNYWMNWVRQAPGKGLEWVGEIRLKSNNYATHYAEPVKGRFTISRDDSKSTVYLQMNSLKTEDTAVYYCTRYYGNYGGYFDVWGAGTLVTVSSGKPGSGKPGSGKPGSGKPGSSIVMTQSPATLSVSPGERATLSCRASQSVSNDVAWYQQKPGQSPRLLIYYASHRYTGVPDRFTGSGYGTEFTLTISSLQSEDFAVYFCQQDYSSPRTFGGGTKVEIK

SEQ ID NO: 13655 - protein, 122 aa, Artificial Sequence; identical to SEQ ID NO: 10922
  Description of Artificial Sequence: Synthetic polypeptide
  VH of XENP018796

SEQ ID NO: 13656 - protein, 107 aa, Artificial Sequence
  Description of Artificial Sequence: Synthetic polypeptide
  VL of XENP018796
SIVMTQSPATLSVSPGERATLSCRASQSVSNDVAWYQQKPGQSPRLLIYYASHRYTGVPDRFTGSGYGTEFTLTISSLQSEDFAVYFCQQDYSSPRTFGGGTKVEIK

SEQ ID NO: 13657 - protein, 5 aa, Artificial Sequence
  Description of Artificial Sequence: Synthetic peptide
  XENP018796 vhCDR1
NYWMN

SEQ ID NO: 13658 - protein, 19 aa, Artificial Sequence
  Description of Artificial Sequence: Synthetic peptide
  XENP018796 vhCDR2
EIRLKSNNYATHYAEPVKG

SEQ ID NO: 13659 - protein, 11 aa, Artificial Sequence
  Description of Artificial Sequence: Synthetic peptide
  XENP018796 vhCDR3
YYGNYGGYFDV

SEQ ID NO: 13660 - protein, 11 aa, Artificial Sequence
  Description of Artificial Sequence: Synthetic peptide
  XENP018796 vlCDR1
RASQSVSNDVA

SEQ ID NO: 13661 - protein, 7 aa, Artificial Sequence
  Description of Artificial Sequence: Synthetic peptide
  XENP018796 vlCDR2
YASHRYT

SEQ ID NO: 13662 - protein, 9 aa, Artificial Sequence
  Description of Artificial Sequence: Synthetic peptide
  XENP018796 vlCDR3
QQDYSSPRT

SEQ ID NO: 13663 - protein, 249 aa, Artificial Sequence
  Description of Artificial Sequence: Synthetic polypeptide
  XENP018801 1G6_H1_L1.55_scFv(GKPGS)4
EVQLVESGGGLVKPGGSLRLSCAASGFTFSNYWMNWVRQAPGKGLEWVGEIRLKSNNYATHYAEPVKGRFTISRDDSKSTVYLQMNSLKTEDTAVYYCTRYYGNYGGYFDVWGAGTLVTVSSGKPGSGKPGSGKPGSGKPGSSIVMTQSPATLSVSPGERATLSCRASQSVSNDVAWYQQKPGQSPRLLINFASHRYTGVPDRFTGSGYGTEFTLTISSLQSEDFAVYFCQQDYSSPRTFGGGTKVEIK

SEQ ID NO: 13664 - protein, 122 aa, Artificial Sequence; identical to SEQ ID NO: 10922
  Description of Artificial Sequence: Synthetic polypeptide
  VH of XENP018801

SEQ ID NO: 13665 - protein, 107 aa, Artificial Sequence
  Description of Artificial Sequence: Synthetic polypeptide
  VL of XENP018801
SIVMTQSPATLSVSPGERATLSCRASQSVSNDVAWYQQKPGQSPRLLINFASHRYTGVPDRFTGSGYGTEFTLTISSLQSEDFAVYFCQQDYSSPRTFGGGTKVEIK

SEQ ID NO: 13666 - protein, 5 aa, Artificial Sequence
  Description of Artificial Sequence: Synthetic peptide
  XENP018801 vhCDR1
NYWMN

SEQ ID NO: 13667 - protein, 19 aa, Artificial Sequence
  Description of Artificial Sequence: Synthetic peptide
  XENP018801 vhCDR2
EIRLKSNNYATHYAEPVKG

SEQ ID NO: 13668 - protein, 11 aa, Artificial Sequence
  Description of Artificial Sequence: Synthetic peptide
  XENP018801 vhCDR3
YYGNYGGYFDV

SEQ ID NO: 13669 - protein, 11 aa, Artificial Sequence
  Description of Artificial Sequence: Synthetic peptide
  XENP018801 vlCDR1
RASQSVSNDVA

SEQ ID NO: 13670 - protein, 7 aa, Artificial Sequence
  Description of Artificial Sequence: Synthetic peptide
  XENP018801 vlCDR2
FASHRYT

SEQ ID NO: 13671 - protein, 9 aa, Artificial Sequence
  Description of Artificial Sequence: Synthetic peptide
  XENP018801 vlCDR3
QQDYSSPRT

SEQ ID NO: 13672 - protein, 249 aa, Artificial Sequence
  Description of Artificial Sequence: Synthetic polypeptide
  XENP018802 1G6_H1_L1.56_scFv(GKPGS)4
EVQLVESGGGLVKPGGSLRLSCAASGFTFSNYWMNWVRQAPGKGLEWVGEIRLKSNNYATHYAEPVKGRFTISRDDSKSTVYLQMNSLKTEDTAVYYCTRYYGNYGGYFDVWGAGTLVTVSSGKPGSGKPGSGKPGSGKPGSSIVMTQSPATLSVSPGERATLSCRASQSVSNDVAWYQQKPGQSPRLLINHASHRYTGVPDRFTGSGYGTEFTLTISSLQSEDFAVYFCQQDYSSPRTFGGGTKVEIK

SEQ ID NO: 13673 - protein, 122 aa, Artificial Sequence; identical to SEQ ID NO: 10922
  Description of Artificial Sequence: Synthetic polypeptide
  VH of XENP018802

SEQ ID NO: 13674 - protein, 107 aa, Artificial Sequence
  Description of Artificial Sequence: Synthetic polypeptide
  VL of XENP018802
SIVMTQSPATLSVSPGERATLSCRASQSVSNDVAWYQQKPGQSPRLLINHASHRYTGVPDRFTGSGYGTEFTLTISSLQSEDFAVYFCQQDYSSPRTFGGGTKVEIK

SEQ ID NO: 13675 - protein, 5 aa, Artificial Sequence
  Description of Artificial Sequence: Synthetic peptide
  XENP018802 vhCDR1
NYWMN

SEQ ID NO: 13676 - protein, 19 aa, Artificial Sequence
  Description of Artificial Sequence: Synthetic peptide
  XENP018802 vhCDR2
EIRLKSNNYATHYAEPVKG

SEQ ID NO: 13677 - protein, 11 aa, Artificial Sequence
  Description of Artificial Sequence: Synthetic peptide
  XENP018802 vhCDR3
YYGNYGGYFDV

SEQ ID NO: 13678 - protein, 11 aa, Artificial Sequence
  Description of Artificial Sequence: Synthetic peptide
  XENP018802 vlCDR1
RASQSVSNDVA

SEQ ID NO: 13679 - protein, 7 aa, Artificial Sequence
  Description of Artificial Sequence: Synthetic peptide
  XENP018802 vlCDR2
HASHRYT

SEQ ID NO: 13680 - protein, 9 aa, Artificial Sequence
  Description of Artificial Sequence: Synthetic peptide
  XENP018802 vlCDR3
QQDYSSPRT

SEQ ID NO: 13681 - protein, 249 aa, Artificial Sequence
  Description of Artificial Sequence: Synthetic polypeptide
  XENP018803 1G6_H1_L1.57_scFv(GKPGS)4
EVQLVESGGGLVKPGGSLRLSCAASGFTFSNYWMNWVRQAPGKGLEWVGEIRLKSNNYATHYAEPVKGRFTISRDDSKSTVYLQMNSLKTEDTAVYYCTRYYGNYGGYFDVWGAGTLVTVSSGKPGSGKPGSGKPGSGKPGSSIVMTQSPATLSVSPGERATLSCRASQSVSNDVAWYQQKPGQSPRLLINLASHRYTGVPDRFTGSGYGTEFTLTISSLQSEDFAVYFCQQDYSSPRTFGGGTKVEIK

SEQ ID NO: 13682 - protein, 122 aa, Artificial Sequence; identical to SEQ ID NO: 10922
  Description of Artificial Sequence: Synthetic polypeptide
  VH of XENP018803

SEQ ID NO: 13683 - protein, 107 aa, Artificial Sequence
  Description of Artificial Sequence: Synthetic polypeptide
  VL of XENP018803
SIVMTQSPATLSVSPGERATLSCRASQSVSNDVAWYQQKPGQSPRLLINLASHRYTGVPDRFTGSGYGTEFTLTISSLQSEDFAVYFCQQDYSSPRTFGGGTKVEIK

SEQ ID NO: 13684 - protein, 5 aa, Artificial Sequence
  Description of Artificial Sequence: Synthetic peptide
  XENP018803 vhCDR1
NYWMN

SEQ ID NO: 13685 - protein, 19 aa, Artificial Sequence
  Description of Artificial Sequence: Synthetic peptide
  XENP018803 vhCDR2
EIRLKSNNYATHYAEPVKG

SEQ ID NO: 13686 - protein, 11 aa, Artificial Sequence
  Description of Artificial Sequence: Synthetic peptide
  XENP018803 vhCDR3
YYGNYGGYFDV

SEQ ID NO: 13687 - protein, 11 aa, Artificial Sequence
  Description of Artificial Sequence: Synthetic peptide
  XENP018803 vlCDR1
RASQSVSNDVA

SEQ ID NO: 13688 - protein, 7 aa, Artificial Sequence
  Description of Artificial Sequence: Synthetic peptide
  XENP018803 vlCDR2
LASHRYT

SEQ ID NO: 13689 - protein, 9 aa, Artificial Sequence
  Description of Artificial Sequence: Synthetic peptide
  XENP018803 vlCDR3
QQDYSSPRT

SEQ ID NO: 13690 - protein, 249 aa, Artificial Sequence
  Description of Artificial Sequence: Synthetic polypeptide
  XENP018804 1G6_H1_L1.58_scFv(GKPGS)4
EVQLVESGGGLVKPGGSLRLSCAASGFTFSNYWMNWVRQAPGKGLEWVGEIRLKSNNYATHYAEPVKGRFTISRDDSKSTVYLQMNSLKTEDTAVYYCTRYYGNYGGYFDVWGAGTLVTVSSGKPGSGKPGSGKPGSGKPGSSIVMTQSPATLSVSPGERATLSCRASQSVSNDVAWYQQKPGQSPRLLINWASHRYTGVPDRFTGSGYGTEFTLTISSLQSEDFAVYFCQQDYSSPRTFGGGTKVEIK

SEQ ID NO: 13691 - protein, 122 aa, Artificial Sequence; identical to SEQ ID NO: 10922
  Description of Artificial Sequence: Synthetic polypeptide
  VH of XENP018804

SEQ ID NO: 13692 - protein, 107 aa, Artificial Sequence
  Description of Artificial Sequence: Synthetic polypeptide
  VL of XENP018804
SIVMTQSPATLSVSPGERATLSCRASQSVSNDVAWYQQKPGQSPRLLINWASHRYTGVPDRFTGSGYGTEFTLTISSLQSEDFAVYFCQQDYSSPRTFGGGTKVEIK

SEQ ID NO: 13693 - protein, 5 aa, Artificial Sequence
  Description of Artificial Sequence: Synthetic peptide
  XENP018804 vhCDR1
NYWMN

SEQ ID NO: 13694 - protein, 19 aa, Artificial Sequence
  Description of Artificial Sequence: Synthetic peptide
  XENP018804 vhCDR2
EIRLKSNNYATHYAEPVKG

SEQ ID NO: 13695 - protein, 11 aa, Artificial Sequence
  Description of Artificial Sequence: Synthetic peptide
  XENP018804 vhCDR3
YYGNYGGYFDV

SEQ ID NO: 13696 - protein, 11 aa, Artificial Sequence
  Description of Artificial Sequence: Synthetic peptide
  XENP018804 vlCDR1
RASQSVSNDVA

SEQ ID NO: 13697 - protein, 7 aa, Artificial Sequence
  Description of Artificial Sequence: Synthetic peptide
  XENP018804 vlCDR2
WASHRYT

SEQ ID NO: 13698 - protein, 9 aa, Artificial Sequence
  Description of Artificial Sequence: Synthetic peptide
  XENP018804 vlCDR3
QQDYSSPRT

SEQ ID NO: 13699 - protein, 249 aa, Artificial Sequence
  Description of Artificial Sequence: Synthetic polypeptide
  XENP018805 1G6_H1_L1.59_scFv(GKPGS)4
EVQLVESGGGLVKPGGSLRLSCAASGFTFSNYWMNWVRQAPGKGLEWVGEIRLKSNNYATHYAEPVKGRFTISRDDSKSTVYLQMNSLKTEDTAVYYCTRYYGNYGGYFDVWGAGTLVTVSSGKPGSGKPGSGKPGSGKPGSSIVMTQSPATLSVSPGERATLSCRASQSVSNDVAWYQQKPGQSPRLLINVASHRYTGVPDRFTGSGYGTEFTLTISSLQSEDFAVYFCQQDYSSPRTFGGGTKVEIK

SEQ ID NO: 13700 - protein, 122 aa, Artificial Sequence; identical to SEQ ID NO: 10922
  Description of Artificial Sequence: Synthetic polypeptide
  VH of XENP018805

SEQ ID NO: 13701 - protein, 107 aa, Artificial Sequence
  Description of Artificial Sequence: Synthetic polypeptide
  VL of XENP018805
SIVMTQSPATLSVSPGERATLSCRASQSVSNDVAWYQQKPGQSPRLLINVASHRYTGVPDRFTGSGYGTEFTLTISSLQSEDFAVYFCQQDYSSPRTFGGGTKVEIK

SEQ ID NO: 13702 - protein, 5 aa, Artificial Sequence
  Description of Artificial Sequence: Synthetic peptide
  XENP018805 vhCDR1
NYWMN

SEQ ID NO: 13703 - protein, 19 aa, Artificial Sequence
  Description of Artificial Sequence: Synthetic peptide
  XENP018805 vhCDR2
EIRLKSNNYATHYAEPVKG

SEQ ID NO: 13704 - protein, 11 aa, Artificial Sequence
  Description of Artificial Sequence: Synthetic peptide
  XENP018805 vhCDR3
YYGNYGGYFDV

SEQ ID NO: 13705 - protein, 11 aa, Artificial Sequence
  Description of Artificial Sequence: Synthetic peptide
  XENP018805 vlCDR1
RASQSVSNDVA

SEQ ID NO: 13706 - protein, 7 aa, Artificial Sequence
  Description of Artificial Sequence: Synthetic peptide
  XENP018805 vlCDR2
VASHRYT

SEQ ID NO: 13707 - protein, 9 aa, Artificial Sequence
  Description of Artificial Sequence: Synthetic peptide
  XENP018805 vlCDR3
QQDYSSPRT

SEQ ID NO: 13708 - protein, 249 aa, Artificial Sequence
  Description of Artificial Sequence: Synthetic polypeptide
  XENP018806 1G6_H1_L1.60_scFv(GKPGS)4
EVQLVESGGGLVKPGGSLRLSCAASGFTFSNYWMNWVRQAPGKGLEWVGEIRLKSNNYATHYAEPVKGRFTISRDDSKSTVYLQMNSLKTEDTAVYYCTRYYGNYGGYFDVWGAGTLVTVSSGKPGSGKPGSGKPGSGKPGSSIVMTQSPATLSVSPGERATLSCRASQSVSNDVAWYQQKPGQSPRLLINAASHRYTGVPDRFTGSGYGTEFTLTISSLQSEDFAVYFCQQDYSSPRTFGGGTKVEIK

SEQ ID NO: 13709 - protein, 122 aa, Artificial Sequence; identical to SEQ ID NO: 10922
  Description of Artificial Sequence: Synthetic polypeptide
  VH of XENP018806

SEQ ID NO: 13710 - protein, 107 aa, Artificial Sequence
  Description of Artificial Sequence: Synthetic polypeptide
  VL of XENP018806
SIVMTQSPATLSVSPGERATLSCRASQSVSNDVAWYQQKPGQSPRLLINAASHRYTGVPDRFTGSGYGTEFTLTISSLQSEDFAVYFCQQDYSSPRTFGGGTKVEIK

SEQ ID NO: 13711 - protein, 5 aa, Artificial Sequence
  Description of Artificial Sequence: Synthetic peptide
  XENP018806 vhCDR1
NYWMN

SEQ ID NO: 13712 - protein, 19 aa, Artificial Sequence
  Description of Artificial Sequence: Synthetic peptide
  XENP018806 vhCDR2
EIRLKSNNYATHYAEPVKG

SEQ ID NO: 13713 - protein, 11 aa, Artificial Sequence
  Description of Artificial Sequence: Synthetic peptide
  XENP018806 vhCDR3
YYGNYGGYFDV

SEQ ID NO: 13714 - protein, 11 aa, Artificial Sequence
  Description of Artificial Sequence: Synthetic peptide
  XENP018806 vlCDR1
RASQSVSNDVA

SEQ ID NO: 13715 - protein, 7 aa, Artificial Sequence
  Description of Artificial Sequence: Synthetic peptide
  XENP018806 vlCDR2
AASHRYT

SEQ ID NO: 13716 - protein, 9 aa, Artificial Sequence
  Description of Artificial Sequence: Synthetic peptide
  XENP018806 vlCDR3
QQDYSSPRT

SEQ ID NO: 13717 - protein, 249 aa, Artificial Sequence
  Description of Artificial Sequence: Synthetic polypeptide
  XENP018807 1G6_H1_L1.61_scFv(GKPGS)4
EVQLVESGGGLVKPGGSLRLSCAASGFTFSNYWMNWVRQAPGKGLEWVGEIRLKSNNYATHYAEPVKGRFTISRDDSKSTVYLQMNSLKTEDTAVYYCTRYYGNYGGYFDVWGAGTLVTVSSGKPGSGKPGSGKPGSGKPGSSIVMTQSPATLSVSPGERATLSCRASQSVSNDVAWYQQKPGQSPRLLINQASHRYTGVPDRFTGSGYGTEFTLTISSLQSEDFAVYFCQQDYSSPRTFGGGTKVEIK

SEQ ID NO: 13718 - protein, 122 aa, Artificial Sequence; identical to SEQ ID NO: 10922
  Description of Artificial Sequence: Synthetic polypeptide
  VH of XENP018807

SEQ ID NO: 13719 - protein, 107 aa, Artificial Sequence
  Description of Artificial Sequence: Synthetic polypeptide
  VL of XENP018807
SIVMTQSPATLSVSPGERATLSCRASQSVSNDVAWYQQKPGQSPRLLINQASHRYTGVPDRFTGSGYGTEFTLTISSLQSEDFAVYFCQQDYSSPRTFGGGTKVEIK

SEQ ID NO: 13720 - protein, 5 aa, Artificial Sequence
  Description of Artificial Sequence: Synthetic peptide
  XENP018807 vhCDR1
NYWMN

SEQ ID NO: 13721 - protein, 19 aa, Artificial Sequence
  Description of Artificial Sequence: Synthetic peptide
  XENP018807 vhCDR2
EIRLKSNNYATHYAEPVKG

SEQ ID NO: 13722 - protein, 11 aa, Artificial Sequence
  Description of Artificial Sequence: Synthetic peptide
  XENP018807 vhCDR3
YYGNYGGYFDV

SEQ ID NO: 13723 - protein, 11 aa, Artificial Sequence
  Description of Artificial Sequence: Synthetic peptide
  XENP018807 vlCDR1
RASQSVSNDVA

SEQ ID NO: 13724 - protein, 7 aa, Artificial Sequence
  Description of Artificial Sequence: Synthetic peptide
  XENP018807 vlCDR2
QASHRYT

SEQ ID NO: 13725 - protein, 9 aa, Artificial Sequence
  Description of Artificial Sequence: Synthetic peptide
  XENP018807 vlCDR3
QQDYSSPRT

SEQ ID NO: 13726 - protein, 249 aa, Artificial Sequence
  Description of Artificial Sequence: Synthetic polypeptide
  XENP018808 1G6_H1_L1.62_scFv(GKPGS)4
EVQLVESGGGLVKPGGSLRLSCAASGFTFSNYWMNWVRQAPGKGLEWVGEIRLKSNNYATHYAEPVKGRFTISRDDSKSTVYLQMNSLKTEDTAVYYCTRYYGNYGGYFDVWGAGTLVTVSSGKPGSGKPGSGKPGSGKPGSSIVMTQSPATLSVSPGERATLSCRASQSVSNDVAWYQQKPGQSPRLLINDASHRYTGVPDRFTGSGYGTEFTLTISSLQSEDFAVYFCQQDYSSPRTFGGGTKVEIK

SEQ ID NO: 13727 - protein, 122 aa, Artificial Sequence; identical to SEQ ID NO: 10922
  Description of Artificial Sequence: Synthetic polypeptide
  VH of XENP018808

SEQ ID NO: 13728 - protein, 107 aa, Artificial Sequence
  Description of Artificial Sequence: Synthetic polypeptide
  VL of XENP018808
SIVMTQSPATLSVSPGERATLSCRASQSVSNDVAWYQQKPGQSPRLLINDASHRYTGVPDRFTGSGYGTEFTLTISSLQSEDFAVYFCQQDYSSPRTFGGGTKVEIK

SEQ ID NO: 13729 - protein, 5 aa, Artificial Sequence
  Description of Artificial Sequence: Synthetic peptide
  XENP018808 vhCDR1
NYWMN

SEQ ID NO: 13730 - protein, 19 aa, Artificial Sequence
  Description of Artificial Sequence: Synthetic peptide
  XENP018808 vhCDR2
EIRLKSNNYATHYAEPVKG

SEQ ID NO: 13731 - protein, 11 aa, Artificial Sequence
  Description of Artificial Sequence: Synthetic peptide
  XENP018808 vhCDR3
YYGNYGGYFDV

SEQ ID NO: 13732 - protein, 11 aa, Artificial Sequence
  Description of Artificial Sequence: Synthetic peptide
  XENP018808 vlCDR1
RASQSVSNDVA

SEQ ID NO: 13733 - protein, 7 aa, Artificial Sequence
  Description of Artificial Sequence: Synthetic peptide
  XENP018808 vlCDR2
DASHRYT

SEQ ID NO: 13734 - protein, 9 aa, Artificial Sequence
  Description of Artificial Sequence: Synthetic peptide
  XENP018808 vlCDR3
QQDYSSPRT

SEQ ID NO: 13735 - protein, 249 aa, Artificial Sequence
  Description of Artificial Sequence: Synthetic polypeptide
  XENP018809 1G6_H1_L1.63_scFv(GKPGS)4
EVQLVESGGGLVKPGGSLRLSCAASGFTFSNYWMNWVRQAPGKGLEWVGEIRLKSNNYATHYAEPVKGRFTISRDDSKSTVYLQMNSLKTEDTAVYYCTRYYGNYGGYFDVWGAGTLVTVSSGKPGSGKPGSGKPGSGKPGSSIVMTQSPATLSVSPGERATLSCRASQSVSNDVAWYQQKPGQSPRLLINKASHRYTGVPDRFTGSGYGTEFTLTISSLQSEDFAVYFCQQDYSSPRTFGGGTKVEIK

SEQ ID NO: 13736 - protein, 122 aa, Artificial Sequence; identical to SEQ ID NO: 10922
  Description of Artificial Sequence: Synthetic polypeptide
  VH of XENP018809

SEQ ID NO: 13737 - protein, 107 aa, Artificial Sequence
  Description of Artificial Sequence: Synthetic polypeptide
  VL of XENP018809
SIVMTQSPATLSVSPGERATLSCRASQSVSNDVAWYQQKPGQSPRLLINKASHRYTGVPDRFTGSGYGTEFTLTISSLQSEDFAVYFCQQDYSSPRTFGGGTKVEIK

SEQ ID NO: 13738 - protein, 5 aa, Artificial Sequence
  Description of Artificial Sequence: Synthetic peptide
  XENP018809 vhCDR1
NYWMN

SEQ ID NO: 13739 - protein, 19 aa, Artificial Sequence
  Description of Artificial Sequence: Synthetic peptide
  XENP018809 vhCDR2
EIRLKSNNYATHYAEPVKG

SEQ ID NO: 13740 - protein, 11 aa, Artificial Sequence
  Description of Artificial Sequence: Synthetic peptide
  XENP018809 vhCDR3
YYGNYGGYFDV

SEQ ID NO: 13741 - protein, 11 aa, Artificial Sequence
  Description of Artificial Sequence: Synthetic peptide
  XENP018809 vlCDR1
RASQSVSNDVA

SEQ ID NO: 13742 - protein, 7 aa, Artificial Sequence
  Description of Artificial Sequence: Synthetic peptide
  XENP018809 vlCDR2
KASHRYT

SEQ ID NO: 13743 - protein, 9 aa, Artificial Sequence
  Description of Artificial Sequence: Synthetic peptide
  XENP018809 vlCDR3
QQDYSSPRT

SEQ ID NO: 13744 - protein, 249 aa, Artificial Sequence
  Description of Artificial Sequence: Synthetic polypeptide
  XENP018810 1G6_H1_L1.64_scFv(GKPGS)4
EVQLVESGGGLVKPGGSLRLSCAASGFTFSNYWMNWVRQAPGKGLEWVGEIRLKSNNYATHYAEPVKGRFTISRDDSKSTVYLQMNSLKTEDTAVYYCTRYYGNYGGYFDVWGAGTLVTVSSGKPGSGKPGSGKPGSGKPGSSIVMTQSPATLSVSPGERATLSCRASQSVSNDVAWYQQKPGQSPRLLINYASYRYTGVPDRFTGSGYGTEFTLTISSLQSEDFAVYFCQQDYSSPRTFGGGTKVEIK

SEQ ID NO: 13745 - protein, 122 aa, Artificial Sequence; identical to SEQ ID NO: 10922
  Description of Artificial Sequence: Synthetic polypeptide
  VH of XENP018810

SEQ ID NO: 13746 - protein, 107 aa, Artificial Sequence
  Description of Artificial Sequence: Synthetic polypeptide
  VL of XENP018810
SIVMTQSPATLSVSPGERATLSCRASQSVSNDVAWYQQKPGQSPRLLINYASYRYTGVPDRFTGSGYGTEFTLTISSLQSEDFAVYFCQQDYSSPRTFGGGTKVEIK

SEQ ID NO: 13747 - protein, 5 aa, Artificial Sequence
  Description of Artificial Sequence: Synthetic peptide
  XENP018810 vhCDR1
NYWMN

SEQ ID NO: 13748 - protein, 19 aa, Artificial Sequence
  Description of Artificial Sequence: Synthetic peptide
  XENP018810 vhCDR2
EIRLKSNNYATHYAEPVKG

SEQ ID NO: 13749 - protein, 11 aa, Artificial Sequence
  Description of Artificial Sequence: Synthetic peptide
  XENP018810 vhCDR3
YYGNYGGYFDV

SEQ ID NO: 13750 - protein, 11 aa, Artificial Sequence
  Description of Artificial Sequence: Synthetic peptide
  XENP018810 vlCDR1
RASQSVSNDVA

SEQ ID NO: 13751 - protein, 7 aa, Artificial Sequence
  Description of Artificial Sequence: Synthetic peptide
  XENP018810 vlCDR2
YASYRYT

SEQ ID NO: 13752 - protein, 9 aa, Artificial Sequence
  Description of Artificial Sequence: Synthetic peptide
  XENP018810 vlCDR3
QQDYSSPRT

SEQ ID NO: 13753 - protein, 249 aa, Artificial Sequence
  Description of Artificial Sequence: Synthetic polypeptide
  XENP018811 1G6_H1_L1.65_scFv(GKPGS)4
EVQLVESGGGLVKPGGSLRLSCAASGFTFSNYWMNWVRQAPGKGLEWVGEIRLKSNNYATHYAEPVKGRFTISRDDSKSTVYLQMNSLKTEDTAVYYCTRYYGNYGGYFDVWGAGTLVTVSSGKPGSGKPGSGKPGSGKPGSSIVMTQSPATLSVSPGERATLSCRASQSVSNDVAWYQQKPGQSPRLLINYASQRYTGVPDRFTGSGYGTEFTLTISSLQSEDFAVYFCQQDYSSPRTFGGGTKVEIK

SEQ ID NO: 13754 - protein, 122 aa, Artificial Sequence; identical to SEQ ID NO: 10922
  Description of Artificial Sequence: Synthetic polypeptide
  VH of XENP018811

SEQ ID NO: 13755 - protein, 107 aa, Artificial Sequence
  Description of Artificial Sequence: Synthetic polypeptide
  VL of XENP018811
SIVMTQSPATLSVSPGERATLSCRASQSVSNDVAWYQQKPGQSPRLLINYASQRYTGVPDRFTGSGYGTEFTLTISSLQSEDFAVYFCQQDYSSPRTFGGGTKVEIK

SEQ ID NO: 13756 - protein, 5 aa, Artificial Sequence
  Description of Artificial Sequence: Synthetic peptide
  XENP018811 vhCDR1
NYWMN

SEQ ID NO: 13757 - protein, 19 aa, Artificial Sequence
  Description of Artificial Sequence: Synthetic peptide
  XENP018811 vhCDR2
EIRLKSNNYATHYAEPVKG

SEQ ID NO: 13758 - protein, 11 aa, Artificial Sequence
  Description of Artificial Sequence: Synthetic peptide
  XENP018811 vhCDR3
YYGNYGGYFDV

SEQ ID NO: 13759 - protein, 11 aa, Artificial Sequence
  Description of Artificial Sequence: Synthetic peptide
  XENP018811 vlCDR1
RASQSVSNDVA

SEQ ID NO: 13760 - protein, 7 aa, Artificial Sequence
  Description of Artificial Sequence: Synthetic peptide
  XENP018811 vlCDR2
YASQRYT

SEQ ID NO: 13761 - protein, 9 aa, Artificial Sequence
  Description of Artificial Sequence: Synthetic peptide
  XENP018811 vlCDR3
QQDYSSPRT

SEQ ID NO: 13762 - protein, 249 aa, Artificial Sequence
  Description of Artificial Sequence: Synthetic polypeptide
  XENP018812 1G6_H1_L1.66_scFv(GKPGS)4
EVQLVESGGGLVKPGGSLRLSCAASGFTFSNYWMNWVRQAPGKGLEWVGEIRLKSNNYATHYAEPVKGRFTISRDDSKSTVYLQMNSLKTEDTAVYYCTRYYGNYGGYFDVWGAGTLVTVSSGKPGSGKPGSGKPGSGKPGSSIVMTQSPATLSVSPGERATLSCRASQSVSNDVAWYQQKPGQSPRLLINYASDRYTGVPDRFTGSGYGTEFTLTISSLQSEDFAVYFCQQDYSSPRTFGGGTKVEIK

SEQ ID NO: 13763 - protein, 122 aa, Artificial Sequence; identical to SEQ ID NO: 10922
  Description of Artificial Sequence: Synthetic polypeptide
  VH of XENP018812

SEQ ID NO: 13764 - protein, 107 aa, Artificial Sequence
  Description of Artificial Sequence: Synthetic polypeptide
  VL of XENP018812
SIVMTQSPATLSVSPGERATLSCRASQSVSNDVAWYQQKPGQSPRLLINYASDRYTGVPDRFTGSGYGTEFTLTISSLQSEDFAVYFCQQDYSSPRTFGGGTKVEIK

SEQ ID NO: 13765 - protein, 5 aa, Artificial Sequence
  Description of Artificial Sequence: Synthetic peptide
  XENP018812 vhCDR1
NYWMN

SEQ ID NO: 13766 - protein, 19 aa, Artificial Sequence
  Description of Artificial Sequence: Synthetic peptide
  XENP018812 vhCDR2
EIRLKSNNYATHYAEPVKG

SEQ ID NO: 13767 - protein, 11 aa, Artificial Sequence
  Description of Artificial Sequence: Synthetic peptide
  XENP018812 vhCDR3
YYGNYGGYFDV

SEQ ID NO: 13768 - protein, 11 aa, Artificial Sequence
  Description of Artificial Sequence: Synthetic peptide
  XENP018812 vlCDR1
RASQSVSNDVA

SEQ ID NO: 13769 - protein, 7 aa, Artificial Sequence
  Description of Artificial Sequence: Synthetic peptide
  XENP018812 vlCDR2
YASDRYT

SEQ ID NO: 13770 - protein, 9 aa, Artificial Sequence
  Description of Artificial Sequence: Synthetic peptide
  XENP018812 vlCDR3
QQDYSSPRT

SEQ ID NO: 13771 - protein, 249 aa, Artificial Sequence
  Description of Artificial Sequence: Synthetic polypeptide
  XENP018813 1G6_H1_L1.67_scFv(GKPGS)4
EVQLVESGGGLVKPGGSLRLSCAASGFTFSNYWMNWVRQAPGKGLEWVGEIRLKSNNYATHYAEPVKGRFTISRDDSKSTVYLQMNSLKTEDTAVYYCTRYYGNYGGYFDVWGAGTLVTVSSGKPGSGKPGSGKPGSGKPGSSIVMTQSPATLSVSPGERATLSCRASQSVSNDVAWYQQKPGQSPRLLINYASWRYTGVPDRFTGSGYGTEFTLTISSLQSEDFAVYFCQQDYSSPRTFGGGTKVEIK

SEQ ID NO: 13772 - protein, 122 aa, Artificial Sequence; identical to SEQ ID NO: 10922
  Description of Artificial Sequence: Synthetic polypeptide
  VH of XENP018813

SEQ ID NO: 13773 - protein, 107 aa, Artificial Sequence
  Description of Artificial Sequence: Synthetic polypeptide
  VL of XENP018813
SIVMTQSPATLSVSPGERATLSCRASQSVSNDVAWYQQKPGQSPRLLINYASWRYTGVPDRFTGSGYGTEFTLTISSLQSEDFAVYFCQQDYSSPRTFGGGTKVEIK

SEQ ID NO: 13774 - protein, 5 aa, Artificial Sequence
  Description of Artificial Sequence: Synthetic peptide
  XENP018813 vhCDR1
NYWMN

SEQ ID NO: 13775 - protein, 19 aa, Artificial Sequence
  Description of Artificial Sequence: Synthetic peptide
  XENP018813 vhCDR2
EIRLKSNNYATHYAEPVKG

SEQ ID NO: 13776 - protein, 11 aa, Artificial Sequence
  Description of Artificial Sequence: Synthetic peptide
  XENP018813 vhCDR3
YYGNYGGYFDV

SEQ ID NO: 13777 - protein, 11 aa, Artificial Sequence
  Description of Artificial Sequence: Synthetic peptide
  XENP018813 vlCDR1
RASQSVSNDVA

SEQ ID NO: 13778 - protein, 7 aa, Artificial Sequence
  Description of Artificial Sequence: Synthetic peptide
  XENP018813 vlCDR2
YASWRYT

SEQ ID NO: 13779 - protein, 9 aa, Artificial Sequence
  Description of Artificial Sequence: Synthetic peptide
  XENP018813 vlCDR3
QQDYSSPRT

SEQ ID NO: 13780 - protein, 249 aa, Artificial Sequence
  Description of Artificial Sequence: Synthetic polypeptide
  XENP018814 1G6_H1_L1.68_scFv(GKPGS)4
EVQLVESGGGLVKPGGSLRLSCAASGFTFSNYWMNWVRQAPGKGLEWVGEIRLKSNNYATHYAEPVKGRFTISRDDSKSTVYLQMNSLKTEDTAVYYCTRYYGNYGGYFDVWGAGTLVTVSSGKPGSGKPGSGKPGSGKPGSSIVMTQSPATLSVSPGERATLSCRASQSVSNDVAWYQQKPGQSPRLLINYASARYTGVPDRFTGSGYGTEFTLTISSLQSEDFAVYFCQQDYSSPRTFGGGTKVEIK

SEQ ID NO: 13781 - protein, 122 aa, Artificial Sequence; identical to SEQ ID NO: 10922
  Description of Artificial Sequence: Synthetic polypeptide
  VH of XENP018814

SEQ ID NO: 13782 - protein, 107 aa, Artificial Sequence
  Description of Artificial Sequence: Synthetic polypeptide
  VL of XENP018814
SIVMTQSPATLSVSPGERATLSCRASQSVSNDVAWYQQKPGQSPRLLINYASARYTGVPDRFTGSGYGTEFTLTISSLQSEDFAVYFCQQDYSSPRTFGGGTKVEIK

SEQ ID NO: 13783 - protein, 5 aa, Artificial Sequence
  Description of Artificial Sequence: Synthetic peptide
  XENP018814 vhCDR1
NYWMN

SEQ ID NO: 13784 - protein, 19 aa, Artificial Sequence
  Description of Artificial Sequence: Synthetic peptide
  XENP018814 vhCDR2
EIRLKSNNYATHYAEPVKG

SEQ ID NO: 13785 - protein, 11 aa, Artificial Sequence
  Description of Artificial Sequence: Synthetic peptide
  XENP018814 vhCDR3
YYGNYGGYFDV

SEQ ID NO: 13786 - protein, 11 aa, Artificial Sequence
  Description of Artificial Sequence: Synthetic peptide
  XENP018814 vlCDR1
RASQSVSNDVA

SEQ ID NO: 13787 - protein, 7 aa, Artificial Sequence
  Description of Artificial Sequence: Synthetic peptide
  XENP018814 vlCDR2
YASARYT

SEQ ID NO: 13788 - protein, 9 aa, Artificial Sequence
  Description of Artificial Sequence: Synthetic peptide
  XENP018814 vlCDR3
QQDYSSPRT

SEQ ID NO: 13789 - protein, 249 aa, Artificial Sequence
  Description of Artificial Sequence: Synthetic polypeptide
  XENP018815 1G6_H1_L1.69_scFv(GKPGS)4
EVQLVESGGGLVKPGGSLRLSCAASGFTFSNYWMNWVRQAPGKGLEWVGEIRLKSNNYATHYAEPVKGRFTISRDDSKSTVYLQMNSLKTEDTAVYYCTRYYGNYGGYFDVWGAGTLVTVSSGKPGSGKPGSGKPGSGKPGSSIVMTQSPATLSVSPGERATLSCRASQSVSNDVAWYQQKPGQSPRLLINYASTRYTGVPDRFTGSGYGTEFTLTISSLQSEDFAVYFCQQDYSSPRTFGGGTKVEIK

SEQ ID NO: 13790 - protein, 122 aa, Artificial Sequence; identical to SEQ ID NO: 10922
  Description of Artificial Sequence: Synthetic polypeptide
  VH of XENP018815

SEQ ID NO: 13791 - protein, 107 aa, Artificial Sequence
  Description of Artificial Sequence: Synthetic polypeptide
  VL of XENP018815
SIVMTQSPATLSVSPGERATLSCRASQSVSNDVAWYQQKPGQSPRLLINYASTRYTGVPDRFTGSGYGTEFTLTISSLQSEDFAVYFCQQDYSSPRTFGGGTKVEIK

SEQ ID NO: 13792 - protein, 5 aa, Artificial Sequence
  Description of Artificial Sequence: Synthetic peptide
  XENP018815 vhCDR1
NYWMN

SEQ ID NO: 13793 - protein, 19 aa, Artificial Sequence
  Description of Artificial Sequence: Synthetic peptide
  XENP018815 vhCDR2
EIRLKSNNYATHYAEPVKG

SEQ ID NO: 13794 - protein, 11 aa, Artificial Sequence
  Description of Artificial Sequence: Synthetic peptide
  XENP018815 vhCDR3
YYGNYGGYFDV

SEQ ID NO: 13795 - protein, 11 aa, Artificial Sequence
  Description of Artificial Sequence: Synthetic peptide
  XENP018815 vlCDR1
RASQSVSNDVA

SEQ ID NO: 13796 - protein, 7 aa, Artificial Sequence
  Description of Artificial Sequence: Synthetic peptide
  XENP018815 vlCDR2
YASTRYT

SEQ ID NO: 13797 - protein, 9 aa, Artificial Sequence
  Description of Artificial Sequence: Synthetic peptide
  XENP018815 vlCDR3
QQDYSSPRT

SEQ ID NO: 13798 - protein, 249 aa, Artificial Sequence
  Description of Artificial Sequence: Synthetic polypeptide
  XENP018816 1G6_H1_L1.70_scFv(GKPGS)4
EVQLVESGGGLVKPGGSLRLSCAASGFTFSNYWMNWVRQAPGKGLEWVGEIRLKSNNYATHYAEPVKGRFTISRDDSKSTVYLQMNSLKTEDTAVYYCTRYYGNYGGYFDVWGAGTLVTVSSGKPGSGKPGSGKPGSGKPGSSIVMTQSPATLSVSPGERATLSCRASQSVSNDVAWYQQKPGQSPRLLINYASKRYTGVPDRFTGSGYGTEFTLTISSLQSEDFAVYFCQQDYSSPRTFGGGTKVEIK

SEQ ID NO: 13799 - protein, 122 aa, Artificial Sequence; identical to SEQ ID NO: 10922
  Description of Artificial Sequence: Synthetic polypeptide
  VH of XENP018816

SEQ ID NO: 13800 - protein, 107 aa, Artificial Sequence
  Description of Artificial Sequence: Synthetic polypeptide
  VL of XENP018816
SIVMTQSPATLSVSPGERATLSCRASQSVSNDVAWYQQKPGQSPRLLINYASKRYTGVPDRFTGSGYGTEFTLTISSLQSEDFAVYFCQQDYSSPRTFGGGTKVEIK

SEQ ID NO: 13801 - protein, 5 aa, Artificial Sequence
  Description of Artificial Sequence: Synthetic peptide
  XENP018816 vhCDR1
NYWMN

SEQ ID NO: 13802 - protein, 19 aa, Artificial Sequence
  Description of Artificial Sequence: Synthetic peptide
  XENP018816 vhCDR2
EIRLKSNNYATHYAEPVKG

SEQ ID NO: 13803 - protein, 11 aa, Artificial Sequence
  Description of Artificial Sequence: Synthetic peptide
  XENP018816 vhCDR3
YYGNYGGYFDV

SEQ ID NO: 13804 - protein, 11 aa, Artificial Sequence
  Description of Artificial Sequence: Synthetic peptide
  XENP018816 vlCDR1
RASQSVSNDVA

SEQ ID NO: 13805 - protein, 7 aa, Artificial Sequence
  Description of Artificial Sequence: Synthetic peptide
  XENP018816 vlCDR2
YASKRYT

SEQ ID NO: 13806 - protein, 9 aa, Artificial Sequence
  Description of Artificial Sequence: Synthetic peptide
  XENP018816 vlCDR3
QQDYSSPRT

SEQ ID NO: 13807 - protein, 249 aa, Artificial Sequence
  Description of Artificial Sequence: Synthetic polypeptide
  XENP018817 1G6_H1_L1.71_scFv(GKPGS)4
EVQLVESGGGLVKPGGSLRLSCAASGFTFSNYWMNWVRQAPGKGLEWVGEIRLKSNNYATHYAEPVKGRFTISRDDSKSTVYLQMNSLKTEDTAVYYCTRYYGNYGGYFDVWGAGTLVTVSSGKPGSGKPGSGKPGSGKPGSSIVMTQSPATLSVSPGERATLSCRASQSVSNDVAWYQQKPGQSPRLLINYASGRYTGVPDRFTGSGYGTEFTLTISSLQSEDFAVYFCQQDYSSPRTFGGGTKVEIK

SEQ ID NO: 13808 - protein, 122 aa, Artificial Sequence; identical to SEQ ID NO: 10922
  Description of Artificial Sequence: Synthetic polypeptide
  VH of XENP018817

SEQ ID NO: 13809 - protein, 107 aa, Artificial Sequence
  Description of Artificial Sequence: Synthetic polypeptide
  VL of XENP018817
SIVMTQSPATLSVSPGERATLSCRASQSVSNDVAWYQQKPGQSPRLLINYASGRYTGVPDRFTGSGYGTEFTLTISSLQSEDFAVYFCQQDYSSPRTFGGGTKVEIK

SEQ ID NO: 13810 - protein, 5 aa, Artificial Sequence
  Description of Artificial Sequence: Synthetic peptide
  XENP018817 vhCDR1
NYWMN

SEQ ID NO: 13811 - protein, 19 aa, Artificial Sequence
  Description of Artificial Sequence: Synthetic peptide
  XENP018817 vhCDR2
EIRLKSNNYATHYAEPVKG

SEQ ID NO: 13812 - protein, 11 aa, Artificial Sequence
  Description of Artificial Sequence: Synthetic peptide
  XENP018817 vhCDR3
YYGNYGGYFDV

SEQ ID NO: 13813 - protein, 11 aa, Artificial Sequence
  Description of Artificial Sequence: Synthetic peptide
  XENP018817 vlCDR1
RASQSVSNDVA

SEQ ID NO: 13814 - protein, 7 aa, Artificial Sequence
  Description of Artificial Sequence: Synthetic peptide
  XENP018817 vlCDR2
YASGRYT

SEQ ID NO: 13815 - protein, 9 aa, Artificial Sequence
  Description of Artificial Sequence: Synthetic peptide
  XENP018817 vlCDR3
QQDYSSPRT

SEQ ID NO: 13816 - protein, 249 aa, Artificial Sequence
  Description of Artificial Sequence: Synthetic polypeptide
  XENP018818 1G6_H1_L1.72_scFv(GKPGS)4
EVQLVESGGGLVKPGGSLRLSCAASGFTFSNYWMNWVRQAPGKGLEWVGEIRLKSNNYATHYAEPVKGRFTISRDDSKSTVYLQMNSLKTEDTAVYYCTRYYGNYGGYFDVWGAGTLVTVSSGKPGSGKPGSGKPGSGKPGSSIVMTQSPATLSVSPGERATLSCRASQSVSNDVAWYQQKPGQSPRLLINYASLRYTGVPDRFTGSGYGTEFTLTISSLQSEDFAVYFCQQDYSSPRTFGGGTKVEIK

SEQ ID NO: 13817 - protein, 122 aa, Artificial Sequence; identical to SEQ ID NO: 10922
  Description of Artificial Sequence: Synthetic polypeptide
  VH of XENP018818

SEQ ID NO: 13818 - protein, 107 aa, Artificial Sequence
  Description of Artificial Sequence: Synthetic polypeptide
  VL of XENP018818
SIVMTQSPATLSVSPGERATLSCRASQSVSNDVAWYQQKPGQSPRLLINYASLRYTGVPDRFTGSGYGTEFTLTISSLQSEDFAVYFCQQDYSSPRTFGGGTKVEIK

SEQ ID NO: 13819 - protein, 5 aa, Artificial Sequence
  Description of Artificial Sequence: Synthetic peptide
  XENP018818 vhCDR1
NYWMN

SEQ ID NO: 13820 - protein, 19 aa, Artificial Sequence
  Description of Artificial Sequence: Synthetic peptide
  XENP018818 vhCDR2
EIRLKSNNYATHYAEPVKG

SEQ ID NO: 13821 - protein, 11 aa, Artificial Sequence
  Description of Artificial Sequence: Synthetic peptide
  XENP018818 vhCDR3
YYGNYGGYFDV

SEQ ID NO: 13822 - protein, 11 aa, Artificial Sequence
  Description of Artificial Sequence: Synthetic peptide
  XENP018818 vlCDR1
RASQSVSNDVA

SEQ ID NO: 13823 - protein, 7 aa, Artificial Sequence
  Description of Artificial Sequence: Synthetic peptide
  XENP018818 vlCDR2
YASLRYT

SEQ ID NO: 13824 - protein, 9 aa, Artificial Sequence
  Description of Artificial Sequence: Synthetic peptide
  XENP018818 vlCDR3
QQDYSSPRT

SEQ ID NO: 13825 - protein, 249 aa, Artificial Sequence
  Description of Artificial Sequence: Synthetic polypeptide
  XENP018819 1G6_H1_L1.73_scFv(GKPGS)4
EVQLVESGGGLVKPGGSLRLSCAASGFTFSNYWMNWVRQAPGKGLEWVGEIRLKSNNYATHYAEPVKGRFTISRDDSKSTVYLQMNSLKTEDTAVYYCTRYYGNYGGYFDVWGAGTLVTVSSGKPGSGKPGSGKPGSGKPGSSIVMTQSPATLSVSPGERATLSCRASQSVSNDVAWYQQKPGQSPRLLINYASHLYTGVPDRFTGSGYGTEFTLTISSLQSEDFAVYFCQQDYSSPRTFGGGTKVEIK

SEQ ID NO: 13826 - protein, 122 aa, Artificial Sequence; identical to SEQ ID NO: 10922
  Description of Artificial Sequence: Synthetic polypeptide
  VH of XENP018819

SEQ ID NO: 13827 - protein, 107 aa, Artificial Sequence
  Description of Artificial Sequence: Synthetic polypeptide
  VL of XENP018819
SIVMTQSPATLSVSPGERATLSCRASQSVSNDVAWYQQKPGQSPRLLINYASHLYTGVPDRFTGSGYGTEFTLTISSLQSEDFAVYFCQQDYSSPRTFGGGTKVEIK

SEQ ID NO: 13828 - protein, 5 aa, Artificial Sequence
  Description of Artificial Sequence: Synthetic peptide
  XENP018819 vhCDR1
NYWMN

SEQ ID NO: 13829 - protein, 19 aa, Artificial Sequence
  Description of Artificial Sequence: Synthetic peptide
  XENP018819 vhCDR2
EIRLKSNNYATHYAEPVKG

SEQ ID NO: 13830 - protein, 11 aa, Artificial Sequence
  Description of Artificial Sequence: Synthetic peptide
  XENP018819 vhCDR3
YYGNYGGYFDV

SEQ ID NO: 13831 - protein, 11 aa, Artificial Sequence
  Description of Artificial Sequence: Synthetic peptide
  XENP018819 vlCDR1
RASQSVSNDVA

SEQ ID NO: 13832 - protein, 7 aa, Artificial Sequence
  Description of Artificial Sequence: Synthetic peptide
  XENP018819 vlCDR2
YASHLYT

SEQ ID NO: 13833 - protein, 9 aa, Artificial Sequence
  Description of Artificial Sequence: Synthetic peptide
  XENP018819 vlCDR3
QQDYSSPRT

SEQ ID NO: 13834 - protein, 249 aa, Artificial Sequence
  Description of Artificial Sequence: Synthetic polypeptide
  XENP018820 1G6_H1_L1.74_scFv(GKPGS)4
EVQLVESGGGLVKPGGSLRLSCAASGFTFSNYWMNWVRQAPGKGLEWVGEIRLKSNNYATHYAEPVKGRFTISRDDSKSTVYLQMNSLKTEDTAVYYCTRYYGNYGGYFDVWGAGTLVTVSSGKPGSGKPGSGKPGSGKPGSSIVMTQSPATLSVSPGERATLSCRASQSVSNDVAWYQQKPGQSPRLLINYASHWYTGVPDRFTGSGYGTEFTLTISSLQSEDFAVYFCQQDYSSPRTFGGGTKVEIK

SEQ ID NO: 13835 - protein, 122 aa, Artificial Sequence; identical to SEQ ID NO: 10922
  Description of Artificial Sequence: Synthetic polypeptide
  VH of XENP018820

SEQ ID NO: 13836 - protein, 107 aa, Artificial Sequence
  Description of Artificial Sequence: Synthetic polypeptide
  VL of XENP018820
SIVMTQSPATLSVSPGERATLSCRASQSVSNDVAWYQQKPGQSPRLLINYASHWYTGVPDRFTGSGYGTEFTLTISSLQSEDFAVYFCQQDYSSPRTFGGGTKVEIK

SEQ ID NO: 13837 - protein, 5 aa, Artificial Sequence
  Description of Artificial Sequence: Synthetic peptide
  XENP018820 vhCDR1
NYWMN

SEQ ID NO: 13838 - protein, 19 aa, Artificial Sequence
  Description of Artificial Sequence: Synthetic peptide
  XENP018820 vhCDR2
EIRLKSNNYATHYAEPVKG

SEQ ID NO: 13839 - protein, 11 aa, Artificial Sequence
  Description of Artificial Sequence: Synthetic peptide
  XENP018820 vhCDR3
YYGNYGGYFDV

SEQ ID NO: 13840 - protein, 11 aa, Artificial Sequence
  Description of Artificial Sequence: Synthetic peptide
  XENP018820 vlCDR1
RASQSVSNDVA

SEQ ID NO: 13841 - protein, 7 aa, Artificial Sequence
  Description of Artificial Sequence: Synthetic peptide
  XENP018820 vlCDR2
YASHWYT

SEQ ID NO: 13842 - protein, 9 aa, Artificial Sequence
  Description of Artificial Sequence: Synthetic peptide
  XENP018820 vlCDR3
QQDYSSPRT

SEQ ID NO: 13843 - protein, 249 aa, Artificial Sequence
  Description of Artificial Sequence: Synthetic polypeptide
  XENP018821 1G6_H1_L1.75_scFv(GKPGS)4
EVQLVESGGGLVKPGGSLRLSCAASGFTFSNYWMNWVRQAPGKGLEWVGEIRLKSNNYATHYAEPVKGRFTISRDDSKSTVYLQMNSLKTEDTAVYYCTRYYGNYGGYFDVWGAGTLVTVSSGKPGSGKPGSGKPGSGKPGSSIVMTQSPATLSVSPGERATLSCRASQSVSNDVAWYQQKPGQSPRLLINYASHSYTGVPDRFTGSGYGTEFTLTISSLQSEDFAVYFCQQDYSSPRTFGGGTKVEIK

SEQ ID NO: 13844 - protein, 122 aa, Artificial Sequence; identical to SEQ ID NO: 10922
  Description of Artificial Sequence: Synthetic polypeptide
  VH of XENP018821

SEQ ID NO: 13845 - protein, 107 aa, Artificial Sequence
  Description of Artificial Sequence: Synthetic polypeptide
  VL of XENP018821
SIVMTQSPATLSVSPGERATLSCRASQSVSNDVAWYQQKPGQSPRLLINYASHSYTGVPDRFTGSGYGTEFTLTISSLQSEDFAVYFCQQDYSSPRTFGGGTKVEIK

SEQ ID NO: 13846 - protein, 5 aa, Artificial Sequence
  Description of Artificial Sequence: Synthetic peptide
  XENP018821 vhCDR1
NYWMN

SEQ ID NO: 13847 - protein, 19 aa, Artificial Sequence
  Description of Artificial Sequence: Synthetic peptide
  XENP018821 vhCDR2
EIRLKSNNYATHYAEPVKG

SEQ ID NO: 13848 - protein, 11 aa, Artificial Sequence
  Description of Artificial Sequence: Synthetic peptide
  XENP018821 vhCDR3
YYGNYGGYFDV

SEQ ID NO: 13849 - protein, 11 aa, Artificial Sequence
  Description of Artificial Sequence: Synthetic peptide
  XENP018821 vlCDR1
RASQSVSNDVA

SEQ ID NO: 13850 - protein, 7 aa, Artificial Sequence
  Description of Artificial Sequence: Synthetic peptide
  XENP018821 vlCDR2
YASHSYT

SEQ ID NO: 13851 - protein, 9 aa, Artificial Sequence
  Description of Artificial Sequence: Synthetic peptide
  XENP018821 vlCDR3
QQDYSSPRT

SEQ ID NO: 13852 - protein, 249 aa, Artificial Sequence
  Description of Artificial Sequence: Synthetic polypeptide
  XENP018822 1G6_H1_L1.76_scFv(GKPGS)4
EVQLVESGGGLVKPGGSLRLSCAASGFTFSNYWMNWVRQAPGKGLEWVGEIRLKSNNYATHYAEPVKGRFTISRDDSKSTVYLQMNSLKTEDTAVYYCTRYYGNYGGYFDVWGAGTLVTVSSGKPGSGKPGSGKPGSGKPGSSIVMTQSPATLSVSPGERATLSCRASQSVSNDVAWYQQKPGQSPRLLINYASHRFTGVPDRFTGSGYGTEFTLTISSLQSEDFAVYFCQQDYSSPRTFGGGTKVEIK

SEQ ID NO: 13853 - protein, 122 aa, Artificial Sequence; identical to SEQ ID NO: 10922
  Description of Artificial Sequence: Synthetic polypeptide
  VH of XENP018822

SEQ ID NO: 13854 - protein, 107 aa, Artificial Sequence
  Description of Artificial Sequence: Synthetic polypeptide
  VL of XENP018822
SIVMTQSPATLSVSPGERATLSCRASQSVSNDVAWYQQKPGQSPRLLINYASHRFTGVPDRFTGSGYGTEFTLTISSLQSEDFAVYFCQQDYSSPRTFGGGTKVEIK

SEQ ID NO: 13855 - protein, 5 aa, Artificial Sequence
  Description of Artificial Sequence: Synthetic peptide
  XENP018822 vhCDR1
NYWMN

SEQ ID NO: 13856 - protein, 19 aa, Artificial Sequence
  Description of Artificial Sequence: Synthetic peptide
  XENP018822 vhCDR2
EIRLKSNNYATHYAEPVKG

SEQ ID NO: 13857 - protein, 11 aa, Artificial Sequence
  Description of Artificial Sequence: Synthetic peptide
  XENP018822 vhCDR3
YYGNYGGYFDV

SEQ ID NO: 13858 - protein, 11 aa, Artificial Sequence
  Description of Artificial Sequence: Synthetic peptide
  XENP018822 vlCDR1
RASQSVSNDVA

SEQ ID NO: 13859 - protein, 7 aa, Artificial Sequence
  Description of Artificial Sequence: Synthetic peptide
  XENP018822 vlCDR2
YASHRFT

SEQ ID NO: 13860 - protein, 9 aa, Artificial Sequence
  Description of Artificial Sequence: Synthetic peptide
  XENP018822 vlCDR3
QQDYSSPRT

SEQ ID NO: 13861 - protein, 249 aa, Artificial Sequence
  Description of Artificial Sequence: Synthetic polypeptide
  XENP018823 1G6_H1_L1.77_scFv(GKPGS)4
EVQLVESGGGLVKPGGSLRLSCAASGFTFSNYWMNWVRQAPGKGLEWVGEIRLKSNNYATHYAEPVKGRFTISRDDSKSTVYLQMNSLKTEDTAVYYCTRYYGNYGGYFDVWGAGTLVTVSSGKPGSGKPGSGKPGSGKPGSSIVMTQSPATLSVSPGERATLSCRASQSVSNDVAWYQQKPGQSPRLLINYASHRHTGVPDRFTGSGYGTEFTLTISSLQSEDFAVYFCQQDYSSPRTFGGGTKVEIK

SEQ ID NO: 13862 - protein, 122 aa, Artificial Sequence; identical to SEQ ID NO: 10922
  Description of Artificial Sequence: Synthetic polypeptide
  VH of XENP018823

SEQ ID NO: 13863 - protein, 107 aa, Artificial Sequence
  Description of Artificial Sequence: Synthetic polypeptide
  VL of XENP018823
SIVMTQSPATLSVSPGERATLSCRASQSVSNDVAWYQQKPGQSPRLLINYASHRHTGVPDRFTGSGYGTEFTLTISSLQSEDFAVYFCQQDYSSPRTFGGGTKVEIK

SEQ ID NO: 13864 - protein, 5 aa, Artificial Sequence
  Description of Artificial Sequence: Synthetic peptide
  XENP018823 vhCDR1
NYWMN

SEQ ID NO: 13865 - protein, 19 aa, Artificial Sequence
  Description of Artificial Sequence: Synthetic peptide
  XENP018823 vhCDR2
EIRLKSNNYATHYAEPVKG

SEQ ID NO: 13866 - protein, 11 aa, Artificial Sequence
  Description of Artificial Sequence: Synthetic peptide
  XENP018823 vhCDR3
YYGNYGGYFDV

SEQ ID NO: 13867 - protein, 11 aa, Artificial Sequence
  Description of Artificial Sequence: Synthetic peptide
  XENP018823 vlCDR1
RASQSVSNDVA

SEQ ID NO: 13868 - protein, 7 aa, Artificial Sequence
  Description of Artificial Sequence: Synthetic peptide
  XENP018823 vlCDR2
YASHRHT

SEQ ID NO: 13869 - protein, 9 aa, Artificial Sequence
  Description of Artificial Sequence: Synthetic peptide
  XENP018823 vlCDR3
QQDYSSPRT

SEQ ID NO: 13870 - protein, 249 aa, Artificial Sequence
  Description of Artificial Sequence: Synthetic polypeptide
  XENP018824 1G6_H1_L1.78_scFv(GKPGS)4
EVQLVESGGGLVKPGGSLRLSCAASGFTFSNYWMNWVRQAPGKGLEWVGEIRLKSNNYATHYAEPVKGRFTISRDDSKSTVYLQMNSLKTEDTAVYYCTRYYGNYGGYFDVWGAGTLVTVSSGKPGSGKPGSGKPGSGKPGSSIVMTQSPATLSVSPGERATLSCRASQSVSNDVAWYQQKPGQSPRLLINYASHRLTGVPDRFTGSGYGTEFTLTISSLQSEDFAVYFCQQDYSSPRTFGGGTKVEIK

SEQ ID NO: 13871 - protein, 122 aa, Artificial Sequence; identical to SEQ ID NO: 10922
  Description of Artificial Sequence: Synthetic polypeptide
  VH of XENP018824

SEQ ID NO: 13872 - protein, 107 aa, Artificial Sequence
  Description of Artificial Sequence: Synthetic polypeptide
  VL of XENP018824
SIVMTQSPATLSVSPGERATLSCRASQSVSNDVAWYQQKPGQSPRLLINYASHRLTGVPDRFTGSGYGTEFTLTISSLQSEDFAVYFCQQDYSSPRTFGGGTKVEIK

SEQ ID NO: 13873 - protein, 5 aa, Artificial Sequence
  Description of Artificial Sequence: Synthetic peptide
  XENP018824 vhCDR1
NYWMN

SEQ ID NO: 13874 - protein, 19 aa, Artificial Sequence
  Description of Artificial Sequence: Synthetic peptide
  XENP018824 vhCDR2
EIRLKSNNYATHYAEPVKG

SEQ ID NO: 13875 - protein, 11 aa, Artificial Sequence
  Description of Artificial Sequence: Synthetic peptide
  XENP018824 vhCDR3
YYGNYGGYFDV

SEQ ID NO: 13876 - protein, 11 aa, Artificial Sequence
  Description of Artificial Sequence: Synthetic peptide
  XENP018824 vlCDR1
RASQSVSNDVA

SEQ ID NO: 13877 - protein, 7 aa, Artificial Sequence
  Description of Artificial Sequence: Synthetic peptide
  XENP018824 vlCDR2
YASHRLT

SEQ ID NO: 13878 - protein, 9 aa, Artificial Sequence
  Description of Artificial Sequence: Synthetic peptide
  XENP018824 vlCDR3
QQDYSSPRT

SEQ ID NO: 13879 - protein, 249 aa, Artificial Sequence
  Description of Artificial Sequence: Synthetic polypeptide
  XENP018825 1G6_H1_L1.79_scFv(GKPGS)4
EVQLVESGGGLVKPGGSLRLSCAASGFTFSNYWMNWVRQAPGKGLEWVGEIRLKSNNYATHYAEPVKGRFTISRDDSKSTVYLQMNSLKTEDTAVYYCTRYYGNYGGYFDVWGAGTLVTVSSGKPGSGKPGSGKPGSGKPGSSIVMTQSPATLSVSPGERATLSCRASQSVSNDVAWYQQKPGQSPRLLINYASHRWTGVPDRFTGSGYGTEFTLTISSLQSEDFAVYFCQQDYSSPRTFGGGTKVEIK

SEQ ID NO: 13880 - protein, 122 aa, Artificial Sequence; identical to SEQ ID NO: 10922
  Description of Artificial Sequence: Synthetic polypeptide
  VH of XENP018825

SEQ ID NO: 13881 - protein, 107 aa, Artificial Sequence
  Description of Artificial Sequence: Synthetic polypeptide
  VL of XENP018825
SIVMTQSPATLSVSPGERATLSCRASQSVSNDVAWYQQKPGQSPRLLINYASHRWTGVPDRFTGSGYGTEFTLTISSLQSEDFAVYFCQQDYSSPRTFGGGTKVEIK

SEQ ID NO: 13882 - protein, 5 aa, Artificial Sequence
  Description of Artificial Sequence: Synthetic peptide
  XENP018825 vhCDR1
NYWMN

SEQ ID NO: 13883 - protein, 19 aa, Artificial Sequence
  Description of Artificial Sequence: Synthetic peptide
  XENP018825 vhCDR2
EIRLKSNNYATHYAEPVKG

SEQ ID NO: 13884 - protein, 11 aa, Artificial Sequence
  Description of Artificial Sequence: Synthetic peptide
  XENP018825 vhCDR3
YYGNYGGYFDV

SEQ ID NO: 13885 - protein, 11 aa, Artificial Sequence
  Description of Artificial Sequence: Synthetic peptide
  XENP018825 vlCDR1
RASQSVSNDVA

SEQ ID NO: 13886 - protein, 7 aa, Artificial Sequence
  Description of Artificial Sequence: Synthetic peptide
  XENP018825 vlCDR2
YASHRWT

SEQ ID NO: 13887 - protein, 9 aa, Artificial Sequence
  Description of Artificial Sequence: Synthetic peptide
  XENP018825 vlCDR3
QQDYSSPRT

SEQ ID NO: 13888 - protein, 249 aa, Artificial Sequence
  Description of Artificial Sequence: Synthetic polypeptide
  XENP018826 1G6_H1_L1.80_scFv(GKPGS)4
EVQLVESGGGLVKPGGSLRLSCAASGFTFSNYWMNWVRQAPGKGLEWVGEIRLKSNNYATHYAEPVKGRFTISRDDSKSTVYLQMNSLKTEDTAVYYCTRYYGNYGGYFDVWGAGTLVTVSSGKPGSGKPGSGKPGSGKPGSSIVMTQSPATLSVSPGERATLSCRASQSVSNDVAWYQQKPGQSPRLLINYASHRVTGVPDRFTGSGYGTEFTLTISSLQSEDFAVYFCQQDYSSPRTFGGGTKVEIK

SEQ ID NO: 13889 - protein, 122 aa, Artificial Sequence; identical to SEQ ID NO: 10922
  Description of Artificial Sequence: Synthetic polypeptide
  VH of XENP018826

SEQ ID NO: 13890 - protein, 107 aa, Artificial Sequence
  Description of Artificial Sequence: Synthetic polypeptide
  VL of XENP018826
SIVMTQSPATLSVSPGERATLSCRASQSVSNDVAWYQQKPGQSPRLLINYASHRVTGVPDRFTGSGYGTEFTLTISSLQSEDFAVYFCQQDYSSPRTFGGGTKVEIK

SEQ ID NO: 13891 - protein, 5 aa, Artificial Sequence
  Description of Artificial Sequence: Synthetic peptide
  XENP018826 vhCDR1
NYWMN

SEQ ID NO: 13892 - protein, 19 aa, Artificial Sequence
  Description of Artificial Sequence: Synthetic peptide
  XENP018826 vhCDR2
EIRLKSNNYATHYAEPVKG

SEQ ID NO: 13893 - protein, 11 aa, Artificial Sequence
  Description of Artificial Sequence: Synthetic peptide
  XENP018826 vhCDR3
YYGNYGGYFDV

SEQ ID NO: 13894 - protein, 11 aa, Artificial Sequence
  Description of Artificial Sequence: Synthetic peptide
  XENP018826 vlCDR1
RASQSVSNDVA

SEQ ID NO: 13895 - protein, 7 aa, Artificial Sequence
  Description of Artificial Sequence: Synthetic peptide
  XENP018826 vlCDR2
YASHRVT

SEQ ID NO: 13896 - protein, 9 aa, Artificial Sequence
  Description of Artificial Sequence: Synthetic peptide
  XENP018826 vlCDR3
QQDYSSPRT

SEQ ID NO: 13897 - protein, 249 aa, Artificial Sequence
  Description of Artificial Sequence: Synthetic polypeptide
  XENP018827 1G6_H1_L1.81_scFv(GKPGS)4
EVQLVESGGGLVKPGGSLRLSCAASGFTFSNYWMNWVRQAPGKGLEWVGEIRLKSNNYATHYAEPVKGRFTISRDDSKSTVYLQMNSLKTEDTAVYYCTRYYGNYGGYFDVWGAGTLVTVSSGKPGSGKPGSGKPGSGKPGSSIVMTQSPATLSVSPGERATLSCRASQSVSNDVAWYQQKPGQSPRLLINYASHRATGVPDRFTGSGYGTEFTLTISSLQSEDFAVYFCQQDYSSPRTFGGGTKVEIK

SEQ ID NO: 13898 - protein, 122 aa, Artificial Sequence; identical to SEQ ID NO: 10922
  Description of Artificial Sequence: Synthetic polypeptide
  VH of XENP018827

SEQ ID NO: 13899 - protein, 107 aa, Artificial Sequence
  Description of Artificial Sequence: Synthetic polypeptide
  VL of XENP018827
SIVMTQSPATLSVSPGERATLSCRASQSVSNDVAWYQQKPGQSPRLLINYASHRATGVPDRFTGSGYGTEFTLTISSLQSEDFAVYFCQQDYSSPRTFGGGTKVEIK

SEQ ID NO: 13900 - protein, 5 aa, Artificial Sequence
  Description of Artificial Sequence: Synthetic peptide
  XENP018827 vhCDR1
NYWMN

SEQ ID NO: 13901 - protein, 19 aa, Artificial Sequence
  Description of Artificial Sequence: Synthetic peptide
  XENP018827 vhCDR2
EIRLKSNNYATHYAEPVKG

SEQ ID NO: 13902 - protein, 11 aa, Artificial Sequence
  Description of Artificial Sequence: Synthetic peptide
  XENP018827 vhCDR3
YYGNYGGYFDV

SEQ ID NO: 13903 - protein, 11 aa, Artificial Sequence
  Description of Artificial Sequence: Synthetic peptide
  XENP018827 vlCDR1
RASQSVSNDVA

SEQ ID NO: 13904 - protein, 7 aa, Artificial Sequence
  Description of Artificial Sequence: Synthetic peptide
  XENP018827 vlCDR2
YASHRAT

SEQ ID NO: 13905 - protein, 9 aa, Artificial Sequence
  Description of Artificial Sequence: Synthetic peptide
  XENP018827 vlCDR3
QQDYSSPRT

SEQ ID NO: 13906 - protein, 249 aa, Artificial Sequence
  Description of Artificial Sequence: Synthetic polypeptide
  XENP018828 1G6_H1_L1.82_scFv(GKPGS)4
EVQLVESGGGLVKPGGSLRLSCAASGFTFSNYWMNWVRQAPGKGLEWVGEIRLKSNNYATHYAEPVKGRFTISRDDSKSTVYLQMNSLKTEDTAVYYCTRYYGNYGGYFDVWGAGTLVTVSSGKPGSGKPGSGKPGSGKPGSSIVMTQSPATLSVSPGERATLSCRASQSVSNDVAWYQQKPGQSPRLLINYASHRQTGVPDRFTGSGYGTEFTLTISSLQSEDFAVYFCQQDYSSPRTFGGGTKVEIK

SEQ ID NO: 13907 - protein, 122 aa, Artificial Sequence; identical to SEQ ID NO: 10922
  Description of Artificial Sequence: Synthetic polypeptide
  VH of XENP018828

SEQ ID NO: 13908 - protein, 107 aa, Artificial Sequence
  Description of Artificial Sequence: Synthetic polypeptide
  VL of XENP018828
SIVMTQSPATLSVSPGERATLSCRASQSVSNDVAWYQQKPGQSPRLLINYASHRQTGVPDRFTGSGYGTEFTLTISSLQSEDFAVYFCQQDYSSPRTFGGGTKVEIK

SEQ ID NO: 13909 - protein, 5 aa, Artificial Sequence
  Description of Artificial Sequence: Synthetic peptide
  XENP018828 vhCDR1
NYWMN

SEQ ID NO: 13910 - protein, 19 aa, Artificial Sequence
  Description of Artificial Sequence: Synthetic peptide
  XENP018828 vhCDR2
EIRLKSNNYATHYAEPVKG

SEQ ID NO: 13911 - protein, 11 aa, Artificial Sequence
  Description of Artificial Sequence: Synthetic peptide
  XENP018828 vhCDR3
YYGNYGGYFDV

SEQ ID NO: 13912 - protein, 11 aa, Artificial Sequence
  Description of Artificial Sequence: Synthetic peptide
  XENP018828 vlCDR1
RASQSVSNDVA

SEQ ID NO: 13913 - protein, 7 aa, Artificial Sequence
  Description of Artificial Sequence: Synthetic peptide
  XENP018828 vlCDR2
YASHRQT

SEQ ID NO: 13914 - protein, 9 aa, Artificial Sequence
  Description of Artificial Sequence: Synthetic peptide
  XENP018828 vlCDR3
QQDYSSPRT

SEQ ID NO: 13915 - protein, 249 aa, Artificial Sequence
  Description of Artificial Sequence: Synthetic polypeptide
  XENP018829 1G6_H1_L1.83_scFv(GKPGS)4
EVQLVESGGGLVKPGGSLRLSCAASGFTFSNYWMNWVRQAPGKGLEWVGEIRLKSNNYATHYAEPVKGRFTISRDDSKSTVYLQMNSLKTEDTAVYYCTRYYGNYGGYFDVWGAGTLVTVSSGKPGSGKPGSGKPGSGKPGSSIVMTQSPATLSVSPGERATLSCRASQSVSNDVAWYQQKPGQSPRLLINYASHRDTGVPDRFTGSGYGTEFTLTISSLQSEDFAVYFCQQDYSSPRTFGGGTKVEIK

SEQ ID NO: 13916 - protein, 122 aa, Artificial Sequence; identical to SEQ ID NO: 10922
  Description of Artificial Sequence: Synthetic polypeptide
  VH of XENP018829

SEQ ID NO: 13917 - protein, 107 aa, Artificial Sequence
  Description of Artificial Sequence: Synthetic polypeptide
  VL of XENP018829
SIVMTQSPATLSVSPGERATLSCRASQSVSNDVAWYQQKPGQSPRLLINYASHRDTGVPDRFTGSGYGTEFTLTISSLQSEDFAVYFCQQDYSSPRTFGGGTKVEIK

SEQ ID NO: 13918 - protein, 5 aa, Artificial Sequence
  Description of Artificial Sequence: Synthetic peptide
  XENP018829 vhCDR1
NYWMN

SEQ ID NO: 13919 - protein, 19 aa, Artificial Sequence
  Description of Artificial Sequence: Synthetic peptide
  XENP018829 vhCDR2
EIRLKSNNYATHYAEPVKG

SEQ ID NO: 13920 - protein, 11 aa, Artificial Sequence
  Description of Artificial Sequence: Synthetic peptide
  XENP018829 vhCDR3
YYGNYGGYFDV

SEQ ID NO: 13921 - protein, 11 aa, Artificial Sequence
  Description of Artificial Sequence: Synthetic peptide
  XENP018829 vlCDR1
RASQSVSNDVA

SEQ ID NO: 13922 - protein, 7 aa, Artificial Sequence
  Description of Artificial Sequence: Synthetic peptide
  XENP018829 vlCDR2
YASHRDT

SEQ ID NO: 13923 - protein, 9 aa, Artificial Sequence
  Description of Artificial Sequence: Synthetic peptide
  XENP018829 vlCDR3
QQDYSSPRT

SEQ ID NO: 13924 - protein, 249 aa, Artificial Sequence
  Description of Artificial Sequence: Synthetic polypeptide
  XENP018830 1G6_H1_L1.84_scFv(GKPGS)4
EVQLVESGGGLVKPGGSLRLSCAASGFTFSNYWMNWVRQAPGKGLEWVGEIRLKSNNYATHYAEPVKGRFTISRDDSKSTVYLQMNSLKTEDTAVYYCTRYYGNYGGYFDVWGAGTLVTVSSGKPGSGKPGSGKPGSGKPGSSIVMTQSPATLSVSPGERATLSCRASQSVSNDVAWYQQKPGQSPRLLINYASHRKTGVPDRFTGSGYGTEFTLTISSLQSEDFAVYFCQQDYSSPRTFGGGTKVEIK

SEQ ID NO: 13925 - protein, 122 aa, Artificial Sequence; identical to SEQ ID NO: 10922
  Description of Artificial Sequence: Synthetic polypeptide
  VH of XENP018830

SEQ ID NO: 13926 - protein, 107 aa, Artificial Sequence
  Description of Artificial Sequence: Synthetic polypeptide
  VL of XENP018830
SIVMTQSPATLSVSPGERATLSCRASQSVSNDVAWYQQKPGQSPRLLINYASHRKTGVPDRFTGSGYGTEFTLTISSLQSEDFAVYFCQQDYSSPRTFGGGTKVEIK

SEQ ID NO: 13927 - protein, 5 aa, Artificial Sequence
  Description of Artificial Sequence: Synthetic peptide
  XENP018830 vhCDR1
NYWMN

SEQ ID NO: 13928 - protein, 19 aa, Artificial Sequence
  Description of Artificial Sequence: Synthetic peptide
  XENP018830 vhCDR2
EIRLKSNNYATHYAEPVKG

SEQ ID NO: 13929 - protein, 11 aa, Artificial Sequence
  Description of Artificial Sequence: Synthetic peptide
  XENP018830 vhCDR3
YYGNYGGYFDV

SEQ ID NO: 13930 - protein, 11 aa, Artificial Sequence
  Description of Artificial Sequence: Synthetic peptide
  XENP018830 vlCDR1
RASQSVSNDVA

SEQ ID NO: 13931 - protein, 7 aa, Artificial Sequence
  Description of Artificial Sequence: Synthetic peptide
  XENP018830 vlCDR2
YASHRKT

SEQ ID NO: 13932 - protein, 9 aa, Artificial Sequence
  Description of Artificial Sequence: Synthetic peptide
  XENP018830 vlCDR3
QQDYSSPRT

SEQ ID NO: 13933 - protein, 249 aa, Artificial Sequence
  Description of Artificial Sequence: Synthetic polypeptide
  XENP018831 1G6_H1_L1.85_scFv(GKPGS)4
EVQLVESGGGLVKPGGSLRLSCAASGFTFSNYWMNWVRQAPGKGLEWVGEIRLKSNNYATHYAEPVKGRFTISRDDSKSTVYLQMNSLKTEDTAVYYCTRYYGNYGGYFDVWGAGTLVTVSSGKPGSGKPGSGKPGSGKPGSSIVMTQSPATLSVSPGERATLSCRASQSVSNDVAWYQQKPGQSPRLLINYASHRYVGVPDRFTGSGYGTEFTLTISSLQSEDFAVYFCQQDYSSPRTFGGGTKVEIK

SEQ ID NO: 13934 - protein, 122 aa, Artificial Sequence; identical to SEQ ID NO: 10922
  Description of Artificial Sequence: Synthetic polypeptide
  VH of XENP018831

SEQ ID NO: 13935 - protein, 107 aa, Artificial Sequence
  Description of Artificial Sequence: Synthetic polypeptide
  VL of XENP018831
SIVMTQSPATLSVSPGERATLSCRASQSVSNDVAWYQQKPGQSPRLLINYASHRYVGVPDRFTGSGYGTEFTLTISSLQSEDFAVYFCQQDYSSPRTFGGGTKVEIK

SEQ ID NO: 13936 - protein, 5 aa, Artificial Sequence
  Description of Artificial Sequence: Synthetic peptide
  XENP018831 vhCDR1
NYWMN

SEQ ID NO: 13937 - protein, 19 aa, Artificial Sequence
  Description of Artificial Sequence: Synthetic peptide
  XENP018831 vhCDR2
EIRLKSNNYATHYAEPVKG

SEQ ID NO: 13938 - protein, 11 aa, Artificial Sequence
  Description of Artificial Sequence: Synthetic peptide
  XENP018831 vhCDR3
YYGNYGGYFDV

SEQ ID NO: 13939 - protein, 11 aa, Artificial Sequence
  Description of Artificial Sequence: Synthetic peptide
  XENP018831 vlCDR1
RASQSVSNDVA

SEQ ID NO: 13940 - protein, 7 aa, Artificial Sequence
  Description of Artificial Sequence: Synthetic peptide
  XENP018831 vlCDR2
YASHRYV

SEQ ID NO: 13941 - protein, 9 aa, Artificial Sequence
  Description of Artificial Sequence: Synthetic peptide
  XENP018831 vlCDR3
QQDYSSPRT

SEQ ID NO: 13942 - protein, 249 aa, Artificial Sequence
  Description of Artificial Sequence: Synthetic polypeptide
  XENP018832 1G6_H1_L1.86_scFv(GKPGS)4
EVQLVESGGGLVKPGGSLRLSCAASGFTFSNYWMNWVRQAPGKGLEWVGEIRLKSNNYATHYAEPVKGRFTISRDDSKSTVYLQMNSLKTEDTAVYYCTRYYGNYGGYFDVWGAGTLVTVSSGKPGSGKPGSGKPGSGKPGSSIVMTQSPATLSVSPGERATLSCRASQSVSNDVAWYQQKPGQSPRLLINYASHRYSGVPDRFTGSGYGTEFTLTISSLQSEDFAVYFCQQDYSSPRTFGGGTKVEIK

SEQ ID NO: 13943 - protein, 122 aa, Artificial Sequence; identical to SEQ ID NO: 10922
  Description of Artificial Sequence: Synthetic polypeptide
  VH of XENP018832

SEQ ID NO: 13944 - protein, 107 aa, Artificial Sequence
  Description of Artificial Sequence: Synthetic polypeptide
  VL of XENP018832
SIVMTQSPATLSVSPGERATLSCRASQSVSNDVAWYQQKPGQSPRLLINYASHRYSGVPDRFTGSGYGTEFTLTISSLQSEDFAVYFCQQDYSSPRTFGGGTKVEIK

SEQ ID NO: 13945 - protein, 5 aa, Artificial Sequence
  Description of Artificial Sequence: Synthetic peptide
  XENP018832 vhCDR1
NYWMN

SEQ ID NO: 13946 - protein, 19 aa, Artificial Sequence
  Description of Artificial Sequence: Synthetic peptide
  XENP018832 vhCDR2
EIRLKSNNYATHYAEPVKG

SEQ ID NO: 13947 - protein, 11 aa, Artificial Sequence
  Description of Artificial Sequence: Synthetic peptide
  XENP018832 vhCDR3
YYGNYGGYFDV

SEQ ID NO: 13948 - protein, 11 aa, Artificial Sequence
  Description of Artificial Sequence: Synthetic peptide
  XENP018832 vlCDR1
RASQSVSNDVA

SEQ ID NO: 13949 - protein, 7 aa, Artificial Sequence
  Description of Artificial Sequence: Synthetic peptide
  XENP018832 vlCDR2
YASHRYS

SEQ ID NO: 13950 - protein, 9 aa, Artificial Sequence
  Description of Artificial Sequence: Synthetic peptide
  XENP018832 vlCDR3
QQDYSSPRT

SEQ ID NO: 13951 - protein, 249 aa, Artificial Sequence
  Description of Artificial Sequence: Synthetic polypeptide
  XENP018833 1G6_H1_L1.87_scFv(GKPGS)4
EVQLVESGGGLVKPGGSLRLSCAASGFTFSNYWMNWVRQAPGKGLEWVGEIRLKSNNYATHYAEPVKGRFTISRDDSKSTVYLQMNSLKTEDTAVYYCTRYYGNYGGYFDVWGAGTLVTVSSGKPGSGKPGSGKPGSGKPGSSIVMTQSPATLSVSPGERATLSCRASQSVSNDVAWYQQKPGQSPRLLINYASHRYAGVPDRFTGSGYGTEFTLTISSLQSEDFAVYFCQQDYSSPRTFGGGTKVEIK

SEQ ID NO: 13952 - protein, 122 aa, Artificial Sequence; identical to SEQ ID NO: 10922
  Description of Artificial Sequence: Synthetic polypeptide
  VH of XENP018833

SEQ ID NO: 13953 - protein, 107 aa, Artificial Sequence
  Description of Artificial Sequence: Synthetic polypeptide
  VL of XENP018833
SIVMTQSPATLSVSPGERATLSCRASQSVSNDVAWYQQKPGQSPRLLINYASHRYAGVPDRFTGSGYGTEFTLTISSLQSEDFAVYFCQQDYSSPRTFGGGTKVEIK

SEQ ID NO: 13954 - protein, 5 aa, Artificial Sequence
  Description of Artificial Sequence: Synthetic peptide
  XENP018833 vhCDR1
NYWMN

SEQ ID NO: 13955 - protein, 19 aa, Artificial Sequence
  Description of Artificial Sequence: Synthetic peptide
  XENP018833 vhCDR2
EIRLKSNNYATHYAEPVKG

SEQ ID NO: 13956 - protein, 11 aa, Artificial Sequence
  Description of Artificial Sequence: Synthetic peptide
  XENP018833 vhCDR3
YYGNYGGYFDV

SEQ ID NO: 13957 - protein, 11 aa, Artificial Sequence
  Description of Artificial Sequence: Synthetic peptide
  XENP018833 vlCDR1
RASQSVSNDVA

SEQ ID NO: 13958 - protein, 7 aa, Artificial Sequence
  Description of Artificial Sequence: Synthetic peptide
  XENP018833 vlCDR2
YASHRYA

SEQ ID NO: 13959 - protein, 9 aa, Artificial Sequence
  Description of Artificial Sequence: Synthetic peptide
  XENP018833 vlCDR3
QQDYSSPRT

SEQ ID NO: 13960 - protein, 249 aa, Artificial Sequence
  Description of Artificial Sequence: Synthetic polypeptide
  XENP018834 1G6_H1_L1.88_scFv(GKPGS)4
EVQLVESGGGLVKPGGSLRLSCAASGFTFSNYWMNWVRQAPGKGLEWVGEIRLKSNNYATHYAEPVKGRFTISRDDSKSTVYLQMNSLKTEDTAVYYCTRYYGNYGGYFDVWGAGTLVTVSSGKPGSGKPGSGKPGSGKPGSSIVMTQSPATLSVSPGERATLSCRASQSVSNDVAWYQQKPGQSPRLLINYASHRYIGVPDRFTGSGYGTEFTLTISSLQSEDFAVYFCQQDYSSPRTFGGGTKVEIK

SEQ ID NO: 13961 - protein, 122 aa, Artificial Sequence; identical to SEQ ID NO: 10922
  Description of Artificial Sequence: Synthetic polypeptide
  VH of XENP018834

SEQ ID NO: 13962 - protein, 107 aa, Artificial Sequence
  Description of Artificial Sequence: Synthetic polypeptide
  VL of XENP018834
SIVMTQSPATLSVSPGERATLSCRASQSVSNDVAWYQQKPGQSPRLLINYASHRYIGVPDRFTGSGYGTEFTLTISSLQSEDFAVYFCQQDYSSPRTFGGGTKVEIK

SEQ ID NO: 13963 - protein, 5 aa, Artificial Sequence
  Description of Artificial Sequence: Synthetic peptide
  XENP018834 vhCDR1
NYWMN

SEQ ID NO: 13964 - protein, 19 aa, Artificial Sequence
  Description of Artificial Sequence: Synthetic peptide
  XENP018834 vhCDR2
EIRLKSNNYATHYAEPVKG

SEQ ID NO: 13965 - protein, 11 aa, Artificial Sequence
  Description of Artificial Sequence: Synthetic peptide
  XENP018834 vhCDR3
YYGNYGGYFDV

SEQ ID NO: 13966 - protein, 11 aa, Artificial Sequence
  Description of Artificial Sequence: Synthetic peptide
  XENP018834 vlCDR1
RASQSVSNDVA

SEQ ID NO: 13967 - protein, 7 aa, Artificial Sequence
  Description of Artificial Sequence: Synthetic peptide
  XENP018834 vlCDR2
YASHRYI

SEQ ID NO: 13968 - protein, 9 aa, Artificial Sequence
  Description of Artificial Sequence: Synthetic peptide
  XENP018834 vlCDR3
QQDYSSPRT

SEQ ID NO: 13969 - protein, 249 aa, Artificial Sequence
  Description of Artificial Sequence: Synthetic polypeptide
  XENP018835 1G6_H1_L1.89_scFv(GKPGS)4
EVQLVESGGGLVKPGGSLRLSCAASGFTFSNYWMNWVRQAPGKGLEWVGEIRLKSNNYATHYAEPVKGRFTISRDDSKSTVYLQMNSLKTEDTAVYYCTRYYGNYGGYFDVWGAGTLVTVSSGKPGSGKPGSGKPGSGKPGSSIVMTQSPATLSVSPGERATLSCRASQSVSNDVAWYQQKPGQSPRLLINYASHRYQGVPDRFTGSGYGTEFTLTISSLQSEDFAVYFCQQDYSSPRTFGGGTKVEIK

SEQ ID NO: 13970 - protein, 122 aa, Artificial Sequence; identical to SEQ ID NO: 10922
  Description of Artificial Sequence: Synthetic polypeptide
  VH of XENP018835

SEQ ID NO: 13971 - protein, 107 aa, Artificial Sequence
  Description of Artificial Sequence: Synthetic polypeptide
  VL of XENP018835
SIVMTQSPATLSVSPGERATLSCRASQSVSNDVAWYQQKPGQSPRLLINYASHRYQGVPDRFTGSGYGTEFTLTISSLQSEDFAVYFCQQDYSSPRTFGGGTKVEIK

SEQ ID NO: 13972 - protein, 5 aa, Artificial Sequence
  Description of Artificial Sequence: Synthetic peptide
  XENP018835 vhCDR1
NYWMN

SEQ ID NO: 13973 - protein, 19 aa, Artificial Sequence
  Description of Artificial Sequence: Synthetic peptide
  XENP018835 vhCDR2
EIRLKSNNYATHYAEPVKG

SEQ ID NO: 13974 - protein, 11 aa, Artificial Sequence
  Description of Artificial Sequence: Synthetic peptide
  XENP018835 vhCDR3
YYGNYGGYFDV

SEQ ID NO: 13975 - protein, 11 aa, Artificial Sequence
  Description of Artificial Sequence: Synthetic peptide
  XENP018835 vlCDR1
RASQSVSNDVA

SEQ ID NO: 13976 - protein, 7 aa, Artificial Sequence
  Description of Artificial Sequence: Synthetic peptide
  XENP018835 vlCDR2
YASHRYQ

SEQ ID NO: 13977 - protein, 9 aa, Artificial Sequence
  Description of Artificial Sequence: Synthetic peptide
  XENP018835 vlCDR3
QQDYSSPRT

SEQ ID NO: 13978 - protein, 249 aa, Artificial Sequence
  Description of Artificial Sequence: Synthetic polypeptide
  XENP018836 1G6_H1_L1.90_scFv(GKPGS)4
EVQLVESGGGLVKPGGSLRLSCAASGFTFSNYWMNWVRQAPGKGLEWVGEIRLKSNNYATHYAEPVKGRFTISRDDSKSTVYLQMNSLKTEDTAVYYCTRYYGNYGGYFDVWGAGTLVTVSSGKPGSGKPGSGKPGSGKPGSSIVMTQSPATLSVSPGERATLSCRASQSVSNDVAWYQQKPGQSPRLLINYASHRYHGVPDRFTGSGYGTEFTLTISSLQSEDFAVYFCQQDYSSPRTFGGGTKVEIK

SEQ ID NO: 13979 - protein, 122 aa, Artificial Sequence; identical to SEQ ID NO: 10922
  Description of Artificial Sequence: Synthetic polypeptide
  VH of XENP018836

SEQ ID NO: 13980 - protein, 107 aa, Artificial Sequence
  Description of Artificial Sequence: Synthetic polypeptide
  VL of XENP018836
SIVMTQSPATLSVSPGERATLSCRASQSVSNDVAWYQQKPGQSPRLLINYASHRYHGVPDRFTGSGYGTEFTLTISSLQSEDFAVYFCQQDYSSPRTFGGGTKVEIK

SEQ ID NO: 13981 - protein, 5 aa, Artificial Sequence
  Description of Artificial Sequence: Synthetic peptide
  XENP018836 vhCDR1
NYWMN

SEQ ID NO: 13982 - protein, 19 aa, Artificial Sequence
  Description of Artificial Sequence: Synthetic peptide
  XENP018836 vhCDR2
EIRLKSNNYATHYAEPVKG

SEQ ID NO: 13983 - protein, 11 aa, Artificial Sequence
  Description of Artificial Sequence: Synthetic peptide
  XENP018836 vhCDR3
YYGNYGGYFDV

SEQ ID NO: 13984 - protein, 11 aa, Artificial Sequence
  Description of Artificial Sequence: Synthetic peptide
  XENP018836 vlCDR1
RASQSVSNDVA

SEQ ID NO: 13985 - protein, 7 aa, Artificial Sequence
  Description of Artificial Sequence: Synthetic peptide
  XENP018836 vlCDR2
YASHRYH

SEQ ID NO: 13986 - protein, 9 aa, Artificial Sequence
  Description of Artificial Sequence: Synthetic peptide
  XENP018836 vlCDR3
QQDYSSPRT

SEQ ID NO: 13987 - protein, 249 aa, Artificial Sequence
  Description of Artificial Sequence: Synthetic polypeptide
  XENP018837 1G6_H1_L1.91_scFv(GKPGS)4
EVQLVESGGGLVKPGGSLRLSCAASGFTFSNYWMNWVRQAPGKGLEWVGEIRLKSNNYATHYAEPVKGRFTISRDDSKSTVYLQMNSLKTEDTAVYYCTRYYGNYGGYFDVWGAGTLVTVSSGKPGSGKPGSGKPGSGKPGSSIVMTQSPATLSVSPGERATLSCRASQSVSNDVAWYQQKPGQSPRLLINYASHRYDGVPDRFTGSGYGTEFTLTISSLQSEDFAVYFCQQDYSSPRTFGGGTKVEIK

SEQ ID NO: 13988 - protein, 122 aa, Artificial Sequence; identical to SEQ ID NO: 10922
  Description of Artificial Sequence: Synthetic polypeptide
  VH of XENP018837

SEQ ID NO: 13989 - protein, 107 aa, Artificial Sequence
  Description of Artificial Sequence: Synthetic polypeptide
  VL of XENP018837
SIVMTQSPATLSVSPGERATLSCRASQSVSNDVAWYQQKPGQSPRLLINYASHRYDGVPDRFTGSGYGTEFTLTISSLQSEDFAVYFCQQDYSSPRTFGGGTKVEIK

SEQ ID NO: 13990 - protein, 5 aa, Artificial Sequence
  Description of Artificial Sequence: Synthetic peptide
  XENP018837 vhCDR1
NYWMN

SEQ ID NO: 13991 - protein, 19 aa, Artificial Sequence
  Description of Artificial Sequence: Synthetic peptide
  XENP018837 vhCDR2
EIRLKSNNYATHYAEPVKG

SEQ ID NO: 13992 - protein, 11 aa, Artificial Sequence
  Description of Artificial Sequence: Synthetic peptide
  XENP018837 vhCDR3
YYGNYGGYFDV

SEQ ID NO: 13993 - protein, 11 aa, Artificial Sequence
  Description of Artificial Sequence: Synthetic peptide
  XENP018837 vlCDR1
RASQSVSNDVA

SEQ ID NO: 13994 - protein, 7 aa, Artificial Sequence
  Description of Artificial Sequence: Synthetic peptide
  XENP018837 vlCDR2
YASHRYD

SEQ ID NO: 13995 - protein, 9 aa, Artificial Sequence
  Description of Artificial Sequence: Synthetic peptide
  XENP018837 vlCDR3
QQDYSSPRT

SEQ ID NO: 13996 - protein, 249 aa, Artificial Sequence
  Description of Artificial Sequence: Synthetic polypeptide
  XENP018838 1G6_H1_L1.92_scFv(GKPGS)4
EVQLVESGGGLVKPGGSLRLSCAASGFTFSNYWMNWVRQAPGKGLEWVGEIRLKSNNYATHYAEPVKGRFTISRDDSKSTVYLQMNSLKTEDTAVYYCTRYYGNYGGYFDVWGAGTLVTVSSGKPGSGKPGSGKPGSGKPGSSIVMTQSPATLSVSPGERATLSCRASQSVSNDVAWYQQKPGQSPRLLINYASHRYKGVPDRFTGSGYGTEFTLTISSLQSEDFAVYFCQQDYSSPRTFGGGTKVEIK

SEQ ID NO: 13997 - protein, 122 aa, Artificial Sequence; identical to SEQ ID NO: 10922
  Description of Artificial Sequence: Synthetic polypeptide
  VH of XENP018838

SEQ ID NO: 13998 - protein, 107 aa, Artificial Sequence
  Description of Artificial Sequence: Synthetic polypeptide
  VL of XENP018838
SIVMTQSPATLSVSPGERATLSCRASQSVSNDVAWYQQKPGQSPRLLINYASHRYKGVPDRFTGSGYGTEFTLTISSLQSEDFAVYFCQQDYSSPRTFGGGTKVEIK

SEQ ID NO: 13999 - protein, 5 aa, Artificial Sequence
  Description of Artificial Sequence: Synthetic peptide
  XENP018838 vhCDR1
NYWMN

SEQ ID NO: 14000 - protein, 19 aa, Artificial Sequence
  Description of Artificial Sequence: Synthetic peptide
  XENP018838 vhCDR2
EIRLKSNNYATHYAEPVKG

SEQ ID NO: 14001 - protein, 11 aa, Artificial Sequence
  Description of Artificial Sequence: Synthetic peptide
  XENP018838 vhCDR3
YYGNYGGYFDV

SEQ ID NO: 14002 - protein, 11 aa, Artificial Sequence
  Description of Artificial Sequence: Synthetic peptide
  XENP018838 vlCDR1
RASQSVSNDVA

SEQ ID NO: 14003 - protein, 7 aa, Artificial Sequence
  Description of Artificial Sequence: Synthetic peptide
  XENP018838 vlCDR2
YASHRYK

SEQ ID NO: 14004 - protein, 9 aa, Artificial Sequence
  Description of Artificial Sequence: Synthetic peptide
  XENP018838 vlCDR3
QQDYSSPRT

SEQ ID NO: 14005 - protein, 249 aa, Artificial Sequence
  Description of Artificial Sequence: Synthetic polypeptide
  XENP018839 1G6_H1_L1.93_scFv(GKPGS)4
EVQLVESGGGLVKPGGSLRLSCAASGFTFSNYWMNWVRQAPGKGLEWVGEIRLKSNNYATHYAEPVKGRFTISRDDSKSTVYLQMNSLKTEDTAVYYCTRYYGNYGGYFDVWGAGTLVTVSSGKPGSGKPGSGKPGSGKPGSSIVMTQSPATLSVSPGERATLSCRASQSVSNDVAWYQQKPGQSPRLLINYASHRYYGVPDRFTGSGYGTEFTLTISSLQSEDFAVYFCQQDYSSPRTFGGGTKVEIK

SEQ ID NO: 14006 - protein, 122 aa, Artificial Sequence; identical to SEQ ID NO: 10922
  Description of Artificial Sequence: Synthetic polypeptide
  VH of XENP018839

SEQ ID NO: 14007 - protein, 107 aa, Artificial Sequence
  Description of Artificial Sequence: Synthetic polypeptide
  VL of XENP018839
SIVMTQSPATLSVSPGERATLSCRASQSVSNDVAWYQQKPGQSPRLLINYASHRYYGVPDRFTGSGYGTEFTLTISSLQSEDFAVYFCQQDYSSPRTFGGGTKVEIK

SEQ ID NO: 14008 - protein, 5 aa, Artificial Sequence
  Description of Artificial Sequence: Synthetic peptide
  XENP018839 vhCDR1
NYWMN

SEQ ID NO: 14009 - protein, 19 aa, Artificial Sequence
  Description of Artificial Sequence: Synthetic peptide
  XENP018839 vhCDR2
EIRLKSNNYATHYAEPVKG

SEQ ID NO: 14010 - protein, 11 aa, Artificial Sequence
  Description of Artificial Sequence: Synthetic peptide
  XENP018839 vhCDR3
YYGNYGGYFDV

SEQ ID NO: 14011 - protein, 11 aa, Artificial Sequence
  Description of Artificial Sequence: Synthetic peptide
  XENP018839 vlCDR1
RASQSVSNDVA

SEQ ID NO: 14012 - protein, 7 aa, Artificial Sequence
  Description of Artificial Sequence: Synthetic peptide
  XENP018839 vlCDR2
YASHRYY

SEQ ID NO: 14013 - protein, 9 aa, Artificial Sequence
  Description of Artificial Sequence: Synthetic peptide
  XENP018839 vlCDR3
QQDYSSPRT

SEQ ID NO: 14014 - protein, 249 aa, Artificial Sequence
  Description of Artificial Sequence: Synthetic polypeptide
  XENP018840 1G6_H1_L1.94_scFv(GKPGS)4
EVQLVESGGGLVKPGGSLRLSCAASGFTFSNYWMNWVRQAPGKGLEWVGEIRLKSNNYATHYAEPVKGRFTISRDDSKSTVYLQMNSLKTEDTAVYYCTRYYGNYGGYFDVWGAGTLVTVSSGKPGSGKPGSGKPGSGKPGSSIVMTQSPATLSVSPGERATLSCRASQSVSNDVAWYQQKPGQSPRLLINYASHRYTSVPDRFTGSGYGTEFTLTISSLQSEDFAVYFCQQDYSSPRTFGGGTKVEIK

SEQ ID NO: 14015 - protein, 122 aa, Artificial Sequence; identical to SEQ ID NO: 10922
  Description of Artificial Sequence: Synthetic polypeptide
  VH of XENP018840

SEQ ID NO: 14016 - protein, 107 aa, Artificial Sequence
  Description of Artificial Sequence: Synthetic polypeptide
  VL of XENP018840
SIVMTQSPATLSVSPGERATLSCRASQSVSNDVAWYQQKPGQSPRLLINYASHRYTSVPDRFTGSGYGTEFTLTISSLQSEDFAVYFCQQDYSSPRTFGGGTKVEIK

SEQ ID NO: 14017 - protein, 5 aa, Artificial Sequence
  Description of Artificial Sequence: Synthetic peptide
  XENP018840 vhCDR1
NYWMN

SEQ ID NO: 14018 - protein, 19 aa, Artificial Sequence
  Description of Artificial Sequence: Synthetic peptide
  XENP018840 vhCDR2
EIRLKSNNYATHYAEPVKG

SEQ ID NO: 14019 - protein, 11 aa, Artificial Sequence
  Description of Artificial Sequence: Synthetic peptide
  XENP018840 vhCDR3
YYGNYGGYFDV

SEQ ID NO: 14020 - protein, 11 aa, Artificial Sequence
  Description of Artificial Sequence: Synthetic peptide
  XENP018840 vlCDR1
RASQSVSNDVA

SEQ ID NO: 14021 - protein, 7 aa, Artificial Sequence
  Description of Artificial Sequence: Synthetic peptide
  XENP018840 vlCDR2
YASHRYT

SEQ ID NO: 14022 - protein, 9 aa, Artificial Sequence
  Description of Artificial Sequence: Synthetic peptide
  XENP018840 vlCDR3
QQDYSSPRT

SEQ ID NO: 14023 - protein, 249 aa, Artificial Sequence
  Description of Artificial Sequence: Synthetic polypeptide
  XENP018841 1G6_H1_L1.95_scFv(GKPGS)4
EVQLVESGGGLVKPGGSLRLSCAASGFTFSNYWMNWVRQAPGKGLEWVGEIRLKSNNYATHYAEPVKGRFTISRDDSKSTVYLQMNSLKTEDTAVYYCTRYYGNYGGYFDVWGAGTLVTVSSGKPGSGKPGSGKPGSGKPGSSIVMTQSPATLSVSPGERATLSCRASQSVSNDVAWYQQKPGQSPRLLINYASHRYTGIPDRFTGSGYGTEFTLTISSLQSEDFAVYFCQQDYSSPRTFGGGTKVEIK

SEQ ID NO: 14024 - protein, 122 aa, Artificial Sequence; identical to SEQ ID NO: 10922
  Description of Artificial Sequence: Synthetic polypeptide
  VH of XENP018841

SEQ ID NO: 14025 - protein, 107 aa, Artificial Sequence
  Description of Artificial Sequence: Synthetic polypeptide
  VL of XENP018841
SIVMTQSPATLSVSPGERATLSCRASQSVSNDVAWYQQKPGQSPRLLINYASHRYTGIPDRFTGSGYGTEFTLTISSLQSEDFAVYFCQQDYSSPRTFGGGTKVEIK

SEQ ID NO: 14026 - protein, 5 aa, Artificial Sequence
  Description of Artificial Sequence: Synthetic peptide
  XENP018841 vhCDR1
NYWMN

SEQ ID NO: 14027 - protein, 19 aa, Artificial Sequence
  Description of Artificial Sequence: Synthetic peptide
  XENP018841 vhCDR2
EIRLKSNNYATHYAEPVKG

SEQ ID NO: 14028 - protein, 11 aa, Artificial Sequence
  Description of Artificial Sequence: Synthetic peptide
  XENP018841 vhCDR3
YYGNYGGYFDV

SEQ ID NO: 14029 - protein, 11 aa, Artificial Sequence
  Description of Artificial Sequence: Synthetic peptide
  XENP018841 vlCDR1
RASQSVSNDVA

SEQ ID NO: 14030 - protein, 7 aa, Artificial Sequence
  Description of Artificial Sequence: Synthetic peptide
  XENP018841 vlCDR2
YASHRYT

SEQ ID NO: 14031 - protein, 9 aa, Artificial Sequence
  Description of Artificial Sequence: Synthetic peptide
  XENP018841 vlCDR3
QQDYSSPRT

SEQ ID NO: 14032 - protein, 249 aa, Artificial Sequence
  Description of Artificial Sequence: Synthetic polypeptide
  XENP018842 1G6_H1_L1.96_scFv(GKPGS)4
EVQLVESGGGLVKPGGSLRLSCAASGFTFSNYWMNWVRQAPGKGLEWVGEIRLKSNNYATHYAEPVKGRFTISRDDSKSTVYLQMNSLKTEDTAVYYCTRYYGNYGGYFDVWGAGTLVTVSSGKPGSGKPGSGKPGSGKPGSSIVMTQSPATLSVSPGERATLSCRASQSVSNDVAWYQQKPGQSPRLLINYASHRYTGVPARFTGSGYGTEFTLTISSLQSEDFAVYFCQQDYSSPRTFGGGTKVEIK

SEQ ID NO: 14033 - protein, 122 aa, Artificial Sequence; identical to SEQ ID NO: 10922
  Description of Artificial Sequence: Synthetic polypeptide
  VH of XENP018842

SEQ ID NO: 14034 - protein, 107 aa, Artificial Sequence
  Description of Artificial Sequence: Synthetic polypeptide
  VL of XENP018842
SIVMTQSPATLSVSPGERATLSCRASQSVSNDVAWYQQKPGQSPRLLINYASHRYTGVPARFTGSGYGTEFTLTISSLQSEDFAVYFCQQDYSSPRTFGGGTKVEIK

SEQ ID NO: 14035 - protein, 5 aa, Artificial Sequence
  Description of Artificial Sequence: Synthetic peptide
  XENP018842 vhCDR1
NYWMN

SEQ ID NO: 14036 - protein, 19 aa, Artificial Sequence
  Description of Artificial Sequence: Synthetic peptide
  XENP018842 vhCDR2
EIRLKSNNYATHYAEPVKG

SEQ ID NO: 14037 - protein, 11 aa, Artificial Sequence
  Description of Artificial Sequence: Synthetic peptide
  XENP018842 vhCDR3
YYGNYGGYFDV

SEQ ID NO: 14038 - protein, 11 aa, Artificial Sequence
  Description of Artificial Sequence: Synthetic peptide
  XENP018842 vlCDR1
RASQSVSNDVA

SEQ ID NO: 14039 - protein, 7 aa, Artificial Sequence
  Description of Artificial Sequence: Synthetic peptide
  XENP018842 vlCDR2
YASHRYT

SEQ ID NO: 14040 - protein, 9 aa, Artificial Sequence
  Description of Artificial Sequence: Synthetic peptide
  XENP018842 vlCDR3
QQDYSSPRT

SEQ ID NO: 14041 - protein, 249 aa, Artificial Sequence
  Description of Artificial Sequence: Synthetic polypeptide
  XENP018843 1G6_H1_L1.97_scFv(GKPGS)4
EVQLVESGGGLVKPGGSLRLSCAASGFTFSNYWMNWVRQAPGKGLEWVGEIRLKSNNYATHYAEPVKGRFTISRDDSKSTVYLQMNSLKTEDTAVYYCTRYYGNYGGYFDVWGAGTLVTVSSGKPGSGKPGSGKPGSGKPGSSIVMTQSPATLSVSPGERATLSCRASQSVSNDVAWYQQKPGQSPRLLINYASHRYTGVPDRFSGSGYGTEFTLTISSLQSEDFAVYFCQQDYSSPRTFGGGTKVEIK

SEQ ID NO: 14042 - protein, 122 aa, Artificial Sequence; identical to SEQ ID NO: 10922
  Description of Artificial Sequence: Synthetic polypeptide
  VH of XENP018843

SEQ ID NO: 14043 - protein, 107 aa, Artificial Sequence
  Description of Artificial Sequence: Synthetic polypeptide
  VL of XENP018843
SIVMTQSPATLSVSPGERATLSCRASQSVSNDVAWYQQKPGQSPRLLINYASHRYTGVPDRFSGSGYGTEFTLTISSLQSEDFAVYFCQQDYSSPRTFGGGTKVEIK

SEQ ID NO: 14044 - protein, 5 aa, Artificial Sequence
  Description of Artificial Sequence: Synthetic peptide
  XENP018843 vhCDR1
NYWMN

SEQ ID NO: 14045 - protein, 19 aa, Artificial Sequence
  Description of Artificial Sequence: Synthetic peptide
  XENP018843 vhCDR2
EIRLKSNNYATHYAEPVKG

SEQ ID NO: 14046 - protein, 11 aa, Artificial Sequence
  Description of Artificial Sequence: Synthetic peptide
  XENP018843 vhCDR3
YYGNYGGYFDV

SEQ ID NO: 14047 - protein, 11 aa, Artificial Sequence
  Description of Artificial Sequence: Synthetic peptide
  XENP018843 vlCDR1
RASQSVSNDVA

SEQ ID NO: 14048 - protein, 7 aa, Artificial Sequence
  Description of Artificial Sequence: Synthetic peptide
  XENP018843 vlCDR2
YASHRYT

SEQ ID NO: 14049 - protein, 9 aa, Artificial Sequence
  Description of Artificial Sequence: Synthetic peptide
  XENP018843 vlCDR3
QQDYSSPRT

SEQ ID NO: 14050 - protein, 249 aa, Artificial Sequence
  Description of Artificial Sequence: Synthetic polypeptide
  XENP018844 1G6_H1_L1.98_scFv(GKPGS)4
EVQLVESGGGLVKPGGSLRLSCAASGFTFSNYWMNWVRQAPGKGLEWVGEIRLKSNNYATHYAEPVKGRFTISRDDSKSTVYLQMNSLKTEDTAVYYCTRYYGNYGGYFDVWGAGTLVTVSSGKPGSGKPGSGKPGSGKPGSSIVMTQSPATLSVSPGERATLSCRASQSVSNDVAWYQQKPGQSPRLLINYASHRYTGVPDRFTGSGSGTEFTLTISSLQSEDFAVYFCQQDYSSPRTFGGGTKVEIK

SEQ ID NO: 14051 - protein, 122 aa, Artificial Sequence; identical to SEQ ID NO: 10922
  Description of Artificial Sequence: Synthetic polypeptide
  VH of XENP018844

SEQ ID NO: 14052 - protein, 107 aa, Artificial Sequence
  Description of Artificial Sequence: Synthetic polypeptide
  VL of XENP018844
SIVMTQSPATLSVSPGERATLSCRASQSVSNDVAWYQQKPGQSPRLLINYASHRYTGVPDRFTGSGSGTEFTLTISSLQSEDFAVYFCQQDYSSPRTFGGGTKVEIK

SEQ ID NO: 14053 - protein, 5 aa, Artificial Sequence
  Description of Artificial Sequence: Synthetic peptide
  XENP018844 vhCDR1
NYWMN

SEQ ID NO: 14054 - protein, 19 aa, Artificial Sequence
  Description of Artificial Sequence: Synthetic peptide
  XENP018844 vhCDR2
EIRLKSNNYATHYAEPVKG

SEQ ID NO: 14055 - protein, 11 aa, Artificial Sequence
  Description of Artificial Sequence: Synthetic peptide
  XENP018844 vhCDR3
YYGNYGGYFDV

SEQ ID NO: 14056 - protein, 11 aa, Artificial Sequence
  Description of Artificial Sequence: Synthetic peptide
  XENP018844 vlCDR1
RASQSVSNDVA

SEQ ID NO: 14057 - protein, 7 aa, Artificial Sequence
  Description of Artificial Sequence: Synthetic peptide
  XENP018844 vlCDR2
YASHRYT

SEQ ID NO: 14058 - protein, 9 aa, Artificial Sequence
  Description of Artificial Sequence: Synthetic peptide
  XENP018844 vlCDR3
QQDYSSPRT

SEQ ID NO: 14059 - protein, 249 aa, Artificial Sequence
  Description of Artificial Sequence: Synthetic polypeptide
  XENP018845 1G6_H1_L1.99_scFv(GKPGS)4
EVQLVESGGGLVKPGGSLRLSCAASGFTFSNYWMNWVRQAPGKGLEWVGEIRLKSNNYATHYAEPVKGRFTISRDDSKSTVYLQMNSLKTEDTAVYYCTRYYGNYGGYFDVWGAGTLVTVSSGKPGSGKPGSGKPGSGKPGSSIVMTQSPATLSVSPGERATLSCRASQSVSNDVAWYQQKPGQSPRLLINYASHRYTGVPDRFTGSGPGTEFTLTISSLQSEDFAVYFCQQDYSSPRTFGGGTKVEIK

SEQ ID NO: 14060 - protein, 122 aa, Artificial Sequence; identical to SEQ ID NO: 10922
  Description of Artificial Sequence: Synthetic polypeptide
  VH of XENP018845

SEQ ID NO: 14061 - protein, 107 aa, Artificial Sequence
  Description of Artificial Sequence: Synthetic polypeptide
  VL of XENP018845
SIVMTQSPATLSVSPGERATLSCRASQSVSNDVAWYQQKPGQSPRLLINYASHRYTGVPDRFTGSGPGTEFTLTISSLQSEDFAVYFCQQDYSSPRTFGGGTKVEIK

SEQ ID NO: 14062 - protein, 5 aa, Artificial Sequence
  Description of Artificial Sequence: Synthetic peptide
  XENP018845 vhCDR1
NYWMN

SEQ ID NO: 14063 - protein, 19 aa, Artificial Sequence
  Description of Artificial Sequence: Synthetic peptide
  XENP018845 vhCDR2
EIRLKSNNYATHYAEPVKG

SEQ ID NO: 14064 - protein, 11 aa, Artificial Sequence
  Description of Artificial Sequence: Synthetic peptide
  XENP018845 vhCDR3
YYGNYGGYFDV

SEQ ID NO: 14065 - protein, 11 aa, Artificial Sequence
  Description of Artificial Sequence: Synthetic peptide
  XENP018845 vlCDR1
RASQSVSNDVA

SEQ ID NO: 14066 - protein, 7 aa, Artificial Sequence
  Description of Artificial Sequence: Synthetic peptide
  XENP018845 vlCDR2
YASHRYT

SEQ ID NO: 14067 - protein, 9 aa, Artificial Sequence
  Description of Artificial Sequence: Synthetic peptide
  XENP018845 vlCDR3
QQDYSSPRT

SEQ ID NO: 14068 - protein, 249 aa, Artificial Sequence
  Description of Artificial Sequence: Synthetic polypeptide
  XENP018846 1G6_H1_L1.100_scFv(GKPGS)4
EVQLVESGGGLVKPGGSLRLSCAASGFTFSNYWMNWVRQAPGKGLEWVGEIRLKSNNYATHYAEPVKGRFTISRDDSKSTVYLQMNSLKTEDTAVYYCTRYYGNYGGYFDVWGAGTLVTVSSGKPGSGKPGSGKPGSGKPGSSIVMTQSPATLSVSPGERATLSCRASQSVSNDVAWYQQKPGQSPRLLINYASHRYTGVPDRFTGSGYGTDFTLTISSLQSEDFAVYFCQQDYSSPRTFGGGTKVEIK

SEQ ID NO: 14069 - protein, 122 aa, Artificial Sequence; identical to SEQ ID NO: 10922
  Description of Artificial Sequence: Synthetic polypeptide
  VH of XENP018846

SEQ ID NO: 14070 - protein, 107 aa, Artificial Sequence
  Description of Artificial Sequence: Synthetic polypeptide
  VL of XENP018846
SIVMTQSPATLSVSPGERATLSCRASQSVSNDVAWYQQKPGQSPRLLINYASHRYTGVPDRFTGSGYGTDFTLTISSLQSEDFAVYFCQQDYSSPRTFGGGTKVEIK

SEQ ID NO: 14071 - protein, 5 aa, Artificial Sequence
  Description of Artificial Sequence: Synthetic peptide
  XENP018846 vhCDR1
NYWMN

SEQ ID NO: 14072 - protein, 19 aa, Artificial Sequence
  Description of Artificial Sequence: Synthetic peptide
  XENP018846 vhCDR2
EIRLKSNNYATHYAEPVKG

SEQ ID NO: 14073 - protein, 11 aa, Artificial Sequence
  Description of Artificial Sequence: Synthetic peptide
  XENP018846 vhCDR3
YYGNYGGYFDV

SEQ ID NO: 14074 - protein, 11 aa, Artificial Sequence
  Description of Artificial Sequence: Synthetic peptide
  XENP018846 vlCDR1
RASQSVSNDVA

SEQ ID NO: 14075 - protein, 7 aa, Artificial Sequence
  Description of Artificial Sequence: Synthetic peptide
  XENP018846 vlCDR2
YASHRYT

SEQ ID NO: 14076 - protein, 9 aa, Artificial Sequence
  Description of Artificial Sequence: Synthetic peptide
  XENP018846 vlCDR3
QQDYSSPRT

SEQ ID NO: 14077 - protein, 249 aa, Artificial Sequence
  Description of Artificial Sequence: Synthetic polypeptide
  XENP018847 1G6_H1_L1.101_scFv(GKPGS)4
EVQLVESGGGLVKPGGSLRLSCAASGFTFSNYWMNWVRQAPGKGLEWVGEIRLKSNNYATHYAEPVKGRFTISRDDSKSTVYLQMNSLKTEDTAVYYCTRYYGNYGGYFDVWGAGTLVTVSSGKPGSGKPGSGKPGSGKPGSSIVMTQSPATLSVSPGERATLSCRASQSVSNDVAWYQQKPGQSPRLLINYASHRYTGVPDRFTGSGYGTEFTFTISSLQSEDFAVYFCQQDYSSPRTFGGGTKVEIK

SEQ ID NO: 14078 - protein, 122 aa, Artificial Sequence; identical to SEQ ID NO: 10922
  Description of Artificial Sequence: Synthetic polypeptide
  VH of XENP018847

SEQ ID NO: 14079 - protein, 107 aa, Artificial Sequence
  Description of Artificial Sequence: Synthetic polypeptide
  VL of XENP018847
SIVMTQSPATLSVSPGERATLSCRASQSVSNDVAWYQQKPGQSPRLLINYASHRYTGVPDRFTGSGYGTEFTFTISSLQSEDFAVYFCQQDYSSPRTFGGGTKVEIK

SEQ ID NO: 14080 - protein, 5 aa, Artificial Sequence
  Description of Artificial Sequence: Synthetic peptide
  XENP018847 vhCDR1
NYWMN

SEQ ID NO: 14081 - protein, 19 aa, Artificial Sequence
  Description of Artificial Sequence: Synthetic peptide
  XENP018847 vhCDR2
EIRLKSNNYATHYAEPVKG

SEQ ID NO: 14082 - protein, 11 aa, Artificial Sequence
  Description of Artificial Sequence: Synthetic peptide
  XENP018847 vhCDR3
YYGNYGGYFDV

SEQ ID NO: 14083 - protein, 11 aa, Artificial Sequence
  Description of Artificial Sequence: Synthetic peptide
  XENP018847 vlCDR1
RASQSVSNDVA

SEQ ID NO: 14084 - protein, 7 aa, Artificial Sequence
  Description of Artificial Sequence: Synthetic peptide
  XENP018847 vlCDR2
YASHRYT

SEQ ID NO: 14085 - protein, 9 aa, Artificial Sequence
  Description of Artificial Sequence: Synthetic peptide
  XENP018847 vlCDR3
QQDYSSPRT

SEQ ID NO: 14086 - protein, 249 aa, Artificial Sequence
  Description of Artificial Sequence: Synthetic polypeptide
  XENP018848 1G6_H1_L1.102_scFv(GKPGS)4
EVQLVESGGGLVKPGGSLRLSCAASGFTFSNYWMNWVRQAPGKGLEWVGEIRLKSNNYATHYAEPVKGRFTISRDDSKSTVYLQMNSLKTEDTAVYYCTRYYGNYGGYFDVWGAGTLVTVSSGKPGSGKPGSGKPGSGKPGSSIVMTQSPATLSVSPGERATLSCRASQSVSNDVAWYQQKPGQSPRLLINYASHRYTGVPDRFTGSGYGTEFTLTISTLQSEDFAVYFCQQDYSSPRTFGGGTKVEIK

SEQ ID NO: 14087 - protein, 122 aa, Artificial Sequence; identical to SEQ ID NO: 10922
  Description of Artificial Sequence: Synthetic polypeptide
  VH of XENP018848

SEQ ID NO: 14088 - protein, 107 aa, Artificial Sequence
  Description of Artificial Sequence: Synthetic polypeptide
  VL of XENP018848
SIVMTQSPATLSVSPGERATLSCRASQSVSNDVAWYQQKPGQSPRLLINYASHRYTGVPDRFTGSGYGTEFTLTISTLQSEDFAVYFCQQDYSSPRTFGGGTKVEIK

SEQ ID NO: 14089 - protein, 5 aa, Artificial Sequence
  Description of Artificial Sequence: Synthetic peptide
  XENP018848 vhCDR1
NYWMN

SEQ ID NO: 14090 - protein, 19 aa, Artificial Sequence
  Description of Artificial Sequence: Synthetic peptide
  XENP018848 vhCDR2
EIRLKSNNYATHYAEPVKG

SEQ ID NO: 14091 - protein, 11 aa, Artificial Sequence
  Description of Artificial Sequence: Synthetic peptide
  XENP018848 vhCDR3
YYGNYGGYFDV

SEQ ID NO: 14092 - protein, 11 aa, Artificial Sequence
  Description of Artificial Sequence: Synthetic peptide
  XENP018848 vlCDR1
RASQSVSNDVA

SEQ ID NO: 14093 - protein, 7 aa, Artificial Sequence
  Description of Artificial Sequence: Synthetic peptide
  XENP018848 vlCDR2
YASHRYT

SEQ ID NO: 14094 - protein, 9 aa, Artificial Sequence
  Description of Artificial Sequence: Synthetic peptide
  XENP018848 vlCDR3
QQDYSSPRT

SEQ ID NO: 14095 - protein, 249 aa, Artificial Sequence
  Description of Artificial Sequence: Synthetic polypeptide
  XENP018849 1G6_H1_L1.103_scFv(GKPGS)4
EVQLVESGGGLVKPGGSLRLSCAASGFTFSNYWMNWVRQAPGKGLEWVGEIRLKSNNYATHYAEPVKGRFTISRDDSKSTVYLQMNSLKTEDTAVYYCTRYYGNYGGYFDVWGAGTLVTVSSGKPGSGKPGSGKPGSGKPGSSIVMTQSPATLSVSPGERATLSCRASQSVSNDVAWYQQKPGQSPRLLINYASHRYTGVPDRFTGSGYGTEFTLTISSVQSEDFAVYFCQQDYSSPRTFGGGTKVEIK

SEQ ID NO: 14096 - protein, 122 aa, Artificial Sequence; identical to SEQ ID NO: 10922
  Description of Artificial Sequence: Synthetic polypeptide
  VH of XENP018849

SEQ ID NO: 14097 - protein, 107 aa, Artificial Sequence
  Description of Artificial Sequence: Synthetic polypeptide
  VL of XENP018849
SIVMTQSPATLSVSPGERATLSCRASQSVSNDVAWYQQKPGQSPRLLINYASHRYTGVPDRFTGSGYGTEFTLTISSVQSEDFAVYFCQQDYSSPRTFGGGTKVEIK

SEQ ID NO: 14098 - protein, 5 aa, Artificial Sequence
  Description of Artificial Sequence: Synthetic peptide
  XENP018849 vhCDR1
NYWMN

SEQ ID NO: 14099 - protein, 19 aa, Artificial Sequence
  Description of Artificial Sequence: Synthetic peptide
  XENP018849 vhCDR2
EIRLKSNNYATHYAEPVKG

SEQ ID NO: 14100 - protein, 11 aa, Artificial Sequence
  Description of Artificial Sequence: Synthetic peptide
  XENP018849 vhCDR3
YYGNYGGYFDV

SEQ ID NO: 14101 - protein, 11 aa, Artificial Sequence
  Description of Artificial Sequence: Synthetic peptide
  XENP018849 vlCDR1
RASQSVSNDVA

SEQ ID NO: 14102 - protein, 7 aa, Artificial Sequence
  Description of Artificial Sequence: Synthetic peptide
  XENP018849 vlCDR2
YASHRYT

SEQ ID NO: 14103 - protein, 9 aa, Artificial Sequence
  Description of Artificial Sequence: Synthetic peptide
  XENP018849 vlCDR3
QQDYSSPRT

SEQ ID NO: 14104 - protein, 249 aa, Artificial Sequence
  Description of Artificial Sequence: Synthetic polypeptide
  XENP018850 1G6_H1_L1.104_scFv(GKPGS)4
EVQLVESGGGLVKPGGSLRLSCAASGFTFSNYWMNWVRQAPGKGLEWVGEIRLKSNNYATHYAEPVKGRFTISRDDSKSTVYLQMNSLKTEDTAVYYCTRYYGNYGGYFDVWGAGTLVTVSSGKPGSGKPGSGKPGSGKPGSSIVMTQSPATLSVSPGERATLSCRASQSVSNDVAWYQQKPGQSPRLLINYASHRYTGVPDRFTGSGYGTEFTLTISSLQAEDFAVYFCQQDYSSPRTFGGGTKVEIK

SEQ ID NO: 14105 - protein, 122 aa, Artificial Sequence; identical to SEQ ID NO: 10922
  Description of Artificial Sequence: Synthetic polypeptide
  VH of XENP018850

SEQ ID NO: 14106 - protein, 107 aa, Artificial Sequence
  Description of Artificial Sequence: Synthetic polypeptide
  VL of XENP018850
SIVMTQSPATLSVSPGERATLSCRASQSVSNDVAWYQQKPGQSPRLLINYASHRYTGVPDRFTGSGYGTEFTLTISSLQAEDFAVYFCQQDYSSPRTFGGGTKVEIK

SEQ ID NO: 14107 - protein, 5 aa, Artificial Sequence
  Description of Artificial Sequence: Synthetic peptide
  XENP018850 vhCDR1
NYWMN

SEQ ID NO: 14108 - protein, 19 aa, Artificial Sequence
  Description of Artificial Sequence: Synthetic peptide
  XENP018850 vhCDR2
EIRLKSNNYATHYAEPVKG

SEQ ID NO: 14109 - protein, 11 aa, Artificial Sequence
  Description of Artificial Sequence: Synthetic peptide
  XENP018850 vhCDR3
YYGNYGGYFDV

SEQ ID NO: 14110 - protein, 11 aa, Artificial Sequence
  Description of Artificial Sequence: Synthetic peptide
  XENP018850 vlCDR1
RASQSVSNDVA

SEQ ID NO: 14111 - protein, 7 aa, Artificial Sequence
  Description of Artificial Sequence: Synthetic peptide
  XENP018850 vlCDR2
YASHRYT

SEQ ID NO: 14112 - protein, 9 aa, Artificial Sequence
  Description of Artificial Sequence: Synthetic peptide
  XENP018850 vlCDR3
QQDYSSPRT

SEQ ID NO: 14113 - protein, 249 aa, Artificial Sequence
  Description of Artificial Sequence: Synthetic polypeptide
  XENP018851 1G6_H1_L1.105_scFv(GKPGS)4
EVQLVESGGGLVKPGGSLRLSCAASGFTFSNYWMNWVRQAPGKGLEWVGEIRLKSNNYATHYAEPVKGRFTISRDDSKSTVYLQMNSLKTEDTAVYYCTRYYGNYGGYFDVWGAGTLVTVSSGKPGSGKPGSGKPGSGKPGSSIVMTQSPATLSVSPGERATLSCRASQSVSNDVAWYQQKPGQSPRLLINYASHRYTGVPDRFTGSGYGTEFTLTISSLQSEDLAVYFCQQDYSSPRTFGGGTKVEIK

SEQ ID NO: 14114 - protein, 122 aa, Artificial Sequence; identical to SEQ ID NO: 10922
  Description of Artificial Sequence: Synthetic polypeptide
  VH of XENP018851

SEQ ID NO: 14115 - protein, 107 aa, Artificial Sequence
  Description of Artificial Sequence: Synthetic polypeptide
  VL of XENP018851
SIVMTQSPATLSVSPGERATLSCRASQSVSNDVAWYQQKPGQSPRLLINYASHRYTGVPDRFTGSGYGTEFTLTISSLQSEDLAVYFCQQDYSSPRTFGGGTKVEIK

SEQ ID NO: 14116 - protein, 5 aa, Artificial Sequence
  Description of Artificial Sequence: Synthetic peptide
  XENP018851 vhCDR1
NYWMN

SEQ ID NO: 14117 - protein, 19 aa, Artificial Sequence
  Description of Artificial Sequence: Synthetic peptide
  XENP018851 vhCDR2
EIRLKSNNYATHYAEPVKG

SEQ ID NO: 14118 - protein, 11 aa, Artificial Sequence
  Description of Artificial Sequence: Synthetic peptide
  XENP018851 vhCDR3
YYGNYGGYFDV

SEQ ID NO: 14119 - protein, 11 aa, Artificial Sequence
  Description of Artificial Sequence: Synthetic peptide
  XENP018851 vlCDR1
RASQSVSNDVA

SEQ ID NO: 14120 - protein, 7 aa, Artificial Sequence
  Description of Artificial Sequence: Synthetic peptide
  XENP018851 vlCDR2
YASHRYT

SEQ ID NO: 14121 - protein, 9 aa, Artificial Sequence
  Description of Artificial Sequence: Synthetic peptide
  XENP018851 vlCDR3
QQDYSSPRT

SEQ ID NO: 14122 - protein, 249 aa, Artificial Sequence
  Description of Artificial Sequence: Synthetic polypeptide
  XENP018852 1G6_H1_L1.106_scFv(GKPGS)4
EVQLVESGGGLVKPGGSLRLSCAASGFTFSNYWMNWVRQAPGKGLEWVGEIRLKSNNYATHYAEPVKGRFTISRDDSKSTVYLQMNSLKTEDTAVYYCTRYYGNYGGYFDVWGAGTLVTVSSGKPGSGKPGSGKPGSGKPGSSIVMTQSPATLSVSPGERATLSCRASQSVSNDVAWYQQKPGQSPRLLINYASHRYTGVPDRFTGSGYGTEFTLTISSLQSEDFAVYYCQQDYSSPRTFGGGTKVEIK

SEQ ID NO: 14123 - protein, 122 aa, Artificial Sequence; identical to SEQ ID NO: 10922
  Description of Artificial Sequence: Synthetic polypeptide
  VH of XENP018852

SEQ ID NO: 14124 - protein, 107 aa, Artificial Sequence
  Description of Artificial Sequence: Synthetic polypeptide
  VL of XENP018852
SIVMTQSPATLSVSPGERATLSCRASQSVSNDVAWYQQKPGQSPRLLINYASHRYTGVPDRFTGSGYGTEFTLTISSLQSEDFAVYYCQQDYSSPRTFGGGTKVEIK

SEQ ID NO: 14125 - protein, 5 aa, Artificial Sequence
  Description of Artificial Sequence: Synthetic peptide
  XENP018852 vhCDR1
NYWMN

SEQ ID NO: 14126 - protein, 19 aa, Artificial Sequence
  Description of Artificial Sequence: Synthetic peptide
  XENP018852 vhCDR2
EIRLKSNNYATHYAEPVKG

SEQ ID NO: 14127 - protein, 11 aa, Artificial Sequence
  Description of Artificial Sequence: Synthetic peptide
  XENP018852 vhCDR3
YYGNYGGYFDV

SEQ ID NO: 14128 - protein, 11 aa, Artificial Sequence
  Description of Artificial Sequence: Synthetic peptide
  XENP018852 vlCDR1
RASQSVSNDVA

SEQ ID NO: 14129 - protein, 7 aa, Artificial Sequence
  Description of Artificial Sequence: Synthetic peptide
  XENP018852 vlCDR2
YASHRYT

SEQ ID NO: 14130 - protein, 9 aa, Artificial Sequence
  Description of Artificial Sequence: Synthetic peptide
  XENP018852 vlCDR3
QQDYSSPRT

SEQ ID NO: 14131 - protein, 249 aa, Artificial Sequence
  Description of Artificial Sequence: Synthetic polypeptide
  XENP018853 1G6_H1_L1.107_scFv(GKPGS)4
EVQLVESGGGLVKPGGSLRLSCAASGFTFSNYWMNWVRQAPGKGLEWVGEIRLKSNNYATHYAEPVKGRFTISRDDSKSTVYLQMNSLKTEDTAVYYCTRYYGNYGGYFDVWGAGTLVTVSSGKPGSGKPGSGKPGSGKPGSSIVMTQSPATLSVSPGERATLSCRASQSVSNDVAWYQQKPGQSPRLLINYASHRYTGVPDRFTGSGYGTEFTLTISSLQSEDFAVYFCQQQYSSPRTFGGGTKVEIK

SEQ ID NO: 14132 - protein, 122 aa, Artificial Sequence; identical to SEQ ID NO: 10922
  Description of Artificial Sequence: Synthetic polypeptide
  VH of XENP018853

SEQ ID NO: 14133 - protein, 107 aa, Artificial Sequence
  Description of Artificial Sequence: Synthetic polypeptide
  VL of XENP018853
SIVMTQSPATLSVSPGERATLSCRASQSVSNDVAWYQQKPGQSPRLLINYASHRYTGVPDRFTGSGYGTEFTLTISSLQSEDFAVYFCQQQYSSPRTFGGGTKVEIK

SEQ ID NO: 14134 - protein, 5 aa, Artificial Sequence
  Description of Artificial Sequence: Synthetic peptide
  XENP018853 vhCDR1
NYWMN

SEQ ID NO: 14135 - protein, 19 aa, Artificial Sequence
  Description of Artificial Sequence: Synthetic peptide
  XENP018853 vhCDR2
EIRLKSNNYATHYAEPVKG

SEQ ID NO: 14136 - protein, 11 aa, Artificial Sequence
  Description of Artificial Sequence: Synthetic peptide
  XENP018853 vhCDR3
YYGNYGGYFDV

SEQ ID NO: 14137 - protein, 11 aa, Artificial Sequence
  Description of Artificial Sequence: Synthetic peptide
  XENP018853 vlCDR1
RASQSVSNDVA

SEQ ID NO: 14138 - protein, 7 aa, Artificial Sequence
  Description of Artificial Sequence: Synthetic peptide
  XENP018853 vlCDR2
YASHRYT

SEQ ID NO: 14139 - protein, 9 aa, Artificial Sequence
  Description of Artificial Sequence: Synthetic peptide
  XENP018853 vlCDR3
QQQYSSPRT

SEQ ID NO: 14140 - protein, 249 aa, Artificial Sequence
  Description of Artificial Sequence: Synthetic polypeptide
  XENP018854 1G6_H1_L1.108_scFv(GKPGS)4
EVQLVESGGGLVKPGGSLRLSCAASGFTFSNYWMNWVRQAPGKGLEWVGEIRLKSNNYATHYAEPVKGRFTISRDDSKSTVYLQMNSLKTEDTAVYYCTRYYGNYGGYFDVWGAGTLVTVSSGKPGSGKPGSGKPGSGKPGSSIVMTQSPATLSVSPGERATLSCRASQSVSNDVAWYQQKPGQSPRLLINYASHRYTGVPDRFTGSGYGTEFTLTISSLQSEDFAVYFCQQEYSSPRTFGGGTKVEIK

SEQ ID NO: 14141 - protein, 122 aa, Artificial Sequence; identical to SEQ ID NO: 10922
  Description of Artificial Sequence: Synthetic polypeptide
  VH of XENP018854

SEQ ID NO: 14142 - protein, 107 aa, Artificial Sequence
  Description of Artificial Sequence: Synthetic polypeptide
  VL of XENP018854
SIVMTQSPATLSVSPGERATLSCRASQSVSNDVAWYQQKPGQSPRLLINYASHRYTGVPDRFTGSGYGTEFTLTISSLQSEDFAVYFCQQEYSSPRTFGGGTKVEIK

SEQ ID NO: 14143 - protein, 5 aa, Artificial Sequence
  Description of Artificial Sequence: Synthetic peptide
  XENP018854 vhCDR1
NYWMN

SEQ ID NO: 14144 - protein, 19 aa, Artificial Sequence
  Description of Artificial Sequence: Synthetic peptide
  XENP018854 vhCDR2
EIRLKSNNYATHYAEPVKG

SEQ ID NO: 14145 - protein, 11 aa, Artificial Sequence
  Description of Artificial Sequence: Synthetic peptide
  XENP018854 vhCDR3
YYGNYGGYFDV

SEQ ID NO: 14146 - protein, 11 aa, Artificial Sequence
  Description of Artificial Sequence: Synthetic peptide
  XENP018854 vlCDR1
RASQSVSNDVA

SEQ ID NO: 14147 - protein, 7 aa, Artificial Sequence
  Description of Artificial Sequence: Synthetic peptide
  XENP018854 vlCDR2
YASHRYT

SEQ ID NO: 14148 - protein, 9 aa, Artificial Sequence
  Description of Artificial Sequence: Synthetic peptide
  XENP018854 vlCDR3
QQEYSSPRT

SEQ ID NO: 14149 - protein, 249 aa, Artificial Sequence
  Description of Artificial Sequence: Synthetic polypeptide
  XENP018855 1G6_H1_L1.109_scFv(GKPGS)4
EVQLVESGGGLVKPGGSLRLSCAASGFTFSNYWMNWVRQAPGKGLEWVGEIRLKSNNYATHYAEPVKGRFTISRDDSKSTVYLQMNSLKTEDTAVYYCTRYYGNYGGYFDVWGAGTLVTVSSGKPGSGKPGSGKPGSGKPGSSIVMTQSPATLSVSPGERATLSCRASQSVSNDVAWYQQKPGQSPRLLINYASHRYTGVPDRFTGSGYGTEFTLTISSLQSEDFAVYFCQQHYSSPRTFGGGTKVEIK

SEQ ID NO: 14150 - protein, 122 aa, Artificial Sequence; identical to SEQ ID NO: 10922
  Description of Artificial Sequence: Synthetic polypeptide
  VH of XENP018855

SEQ ID NO: 14151 - protein, 107 aa, Artificial Sequence
  Description of Artificial Sequence: Synthetic polypeptide
  VL of XENP018855
SIVMTQSPATLSVSPGERATLSCRASQSVSNDVAWYQQKPGQSPRLLINYASHRYTGVPDRFTGSGYGTEFTLTISSLQSEDFAVYFCQQHYSSPRTFGGGTKVEIK

SEQ ID NO: 14152 - protein, 5 aa, Artificial Sequence
  Description of Artificial Sequence: Synthetic peptide
  XENP018855 vhCDR1
NYWMN

SEQ ID NO: 14153 - protein, 19 aa, Artificial Sequence
  Description of Artificial Sequence: Synthetic peptide
  XENP018855 vhCDR2
EIRLKSNNYATHYAEPVKG

SEQ ID NO: 14154 - protein, 11 aa, Artificial Sequence
  Description of Artificial Sequence: Synthetic peptide
  XENP018855 vhCDR3
YYGNYGGYFDV

SEQ ID NO: 14155 - protein, 11 aa, Artificial Sequence
  Description of Artificial Sequence: Synthetic peptide
  XENP018855 vlCDR1
RASQSVSNDVA

SEQ ID NO: 14156 - protein, 7 aa, Artificial Sequence
  Description of Artificial Sequence: Synthetic peptide
  XENP018855 vlCDR2
YASHRYT

SEQ ID NO: 14157 - protein, 9 aa, Artificial Sequence
  Description of Artificial Sequence: Synthetic peptide
  XENP018855 vlCDR3
QQHYSSPRT

SEQ ID NO: 14158 - protein, 249 aa, Artificial Sequence
  Description of Artificial Sequence: Synthetic polypeptide
  XENP018856 1G6_H1_L1.110_scFv(GKPGS)4
EVQLVESGGGLVKPGGSLRLSCAASGFTFSNYWMNWVRQAPGKGLEWVGEIRLKSNNYATHYAEPVKGRFTISRDDSKSTVYLQMNSLKTEDTAVYYCTRYYGNYGGYFDVWGAGTLVTVSSGKPGSGKPGSGKPGSGKPGSSIVMTQSPATLSVSPGERATLSCRASQSVSNDVAWYQQKPGQSPRLLINYASHRYTGVPDRFTGSGYGTEFTLTISSLQSEDFAVYFCQQSYSSPRTFGGGTKVEIK

SEQ ID NO: 14159 - protein, 122 aa, Artificial Sequence; identical to SEQ ID NO: 10922
  Description of Artificial Sequence: Synthetic polypeptide
  VH of XENP018856

SEQ ID NO: 14160 - protein, 107 aa, Artificial Sequence
  Description of Artificial Sequence: Synthetic polypeptide
  VL of XENP018856
SIVMTQSPATLSVSPGERATLSCRASQSVSNDVAWYQQKPGQSPRLLINYASHRYTGVPDRFTGSGYGTEFTLTISSLQSEDFAVYFCQQSYSSPRTFGGGTKVEIK

SEQ ID NO: 14161 - protein, 5 aa, Artificial Sequence
  Description of Artificial Sequence: Synthetic peptide
  XENP018856 vhCDR1
NYWMN

SEQ ID NO: 14162 - protein, 19 aa, Artificial Sequence
  Description of Artificial Sequence: Synthetic peptide
  XENP018856 vhCDR2
EIRLKSNNYATHYAEPVKG

SEQ ID NO: 14163 - protein, 11 aa, Artificial Sequence
  Description of Artificial Sequence: Synthetic peptide
  XENP018856 vhCDR3
YYGNYGGYFDV

SEQ ID NO: 14164 - protein, 11 aa, Artificial Sequence
  Description of Artificial Sequence: Synthetic peptide
  XENP018856 vlCDR1
RASQSVSNDVA

SEQ ID NO: 14165 - protein, 7 aa, Artificial Sequence
  Description of Artificial Sequence: Synthetic peptide
  XENP018856 vlCDR2
YASHRYT

SEQ ID NO: 14166 - protein, 9 aa, Artificial Sequence
  Description of Artificial Sequence: Synthetic peptide
  XENP018856 vlCDR3
QQSYSSPRT

SEQ ID NO: 14167 - protein, 249 aa, Artificial Sequence
  Description of Artificial Sequence: Synthetic polypeptide
  XENP018857 1G6_H1_L1.111_scFv(GKPGS)4
EVQLVESGGGLVKPGGSLRLSCAASGFTFSNYWMNWVRQAPGKGLEWVGEIRLKSNNYATHYAEPVKGRFTISRDDSKSTVYLQMNSLKTEDTAVYYCTRYYGNYGGYFDVWGAGTLVTVSSGKPGSGKPGSGKPGSGKPGSSIVMTQSPATLSVSPGERATLSCRASQSVSNDVAWYQQKPGQSPRLLINYASHRYTGVPDRFTGSGYGTEFTLTISSLQSEDFAVYFCQQRYSSPRTFGGGTKVEIK

SEQ ID NO: 14168 - protein, 122 aa, Artificial Sequence; identical to SEQ ID NO: 10922
  Description of Artificial Sequence: Synthetic polypeptide
  VH of XENP018857

SEQ ID NO: 14169 - protein, 107 aa, Artificial Sequence
  Description of Artificial Sequence: Synthetic polypeptide
  VL of XENP018857
SIVMTQSPATLSVSPGERATLSCRASQSVSNDVAWYQQKPGQSPRLLINYASHRYTGVPDRFTGSGYGTEFTLTISSLQSEDFAVYFCQQRYSSPRTFGGGTKVEIK

SEQ ID NO: 14170 - protein, 5 aa, Artificial Sequence
  Description of Artificial Sequence: Synthetic peptide
  XENP018857 vhCDR1
NYWMN

SEQ ID NO: 14171 - protein, 19 aa, Artificial Sequence
  Description of Artificial Sequence: Synthetic peptide
  XENP018857 vhCDR2
EIRLKSNNYATHYAEPVKG

SEQ ID NO: 14172 - protein, 11 aa, Artificial Sequence
  Description of Artificial Sequence: Synthetic peptide
  XENP018857 vhCDR3
YYGNYGGYFDV

SEQ ID NO: 14173 - protein, 11 aa, Artificial Sequence
  Description of Artificial Sequence: Synthetic peptide
  XENP018857 vlCDR1
RASQSVSNDVA

SEQ ID NO: 14174 - protein, 7 aa, Artificial Sequence
  Description of Artificial Sequence: Synthetic peptide
  XENP018857 vlCDR2
YASHRYT

SEQ ID NO: 14175 - protein, 9 aa, Artificial Sequence
  Description of Artificial Sequence: Synthetic peptide
  XENP018857 vlCDR3
QQRYSSPRT

SEQ ID NO: 14176 - protein, 249 aa, Artificial Sequence
  Description of Artificial Sequence: Synthetic polypeptide
  XENP018858 1G6_H1_L1.112_scFv(GKPGS)4
EVQLVESGGGLVKPGGSLRLSCAASGFTFSNYWMNWVRQAPGKGLEWVGEIRLKSNNYATHYAEPVKGRFTISRDDSKSTVYLQMNSLKTEDTAVYYCTRYYGNYGGYFDVWGAGTLVTVSSGKPGSGKPGSGKPGSGKPGSSIVMTQSPATLSVSPGERATLSCRASQSVSNDVAWYQQKPGQSPRLLINYASHRYTGVPDRFTGSGYGTEFTLTISSLQSEDFAVYFCQQLYSSPRTFGGGTKVEIK

SEQ ID NO: 14177 - protein, 122 aa, Artificial Sequence; identical to SEQ ID NO: 10922
  Description of Artificial Sequence: Synthetic polypeptide
  VH of XENP018858

SEQ ID NO: 14178 - protein, 107 aa, Artificial Sequence
  Description of Artificial Sequence: Synthetic polypeptide
  VL of XENP018858
SIVMTQSPATLSVSPGERATLSCRASQSVSNDVAWYQQKPGQSPRLLINYASHRYTGVPDRFTGSGYGTEFTLTISSLQSEDFAVYFCQQLYSSPRTFGGGTKVEIK

SEQ ID NO: 14179 - protein, 5 aa, Artificial Sequence
  Description of Artificial Sequence: Synthetic peptide
  XENP018858 vhCDR1
NYWMN

SEQ ID NO: 14180 - protein, 19 aa, Artificial Sequence
  Description of Artificial Sequence: Synthetic peptide
  XENP018858 vhCDR2
EIRLKSNNYATHYAEPVKG

SEQ ID NO: 14181 - protein, 11 aa, Artificial Sequence
  Description of Artificial Sequence: Synthetic peptide
  XENP018858 vhCDR3
YYGNYGGYFDV

SEQ ID NO: 14182 - protein, 11 aa, Artificial Sequence
  Description of Artificial Sequence: Synthetic peptide
  XENP018858 vlCDR1
RASQSVSNDVA

SEQ ID NO: 14183 - protein, 7 aa, Artificial Sequence
  Description of Artificial Sequence: Synthetic peptide
  XENP018858 vlCDR2
YASHRYT

SEQ ID NO: 14184 - protein, 9 aa, Artificial Sequence
  Description of Artificial Sequence: Synthetic peptide
  XENP018858 vlCDR3
QQLYSSPRT

SEQ ID NO: 14185 - protein, 249 aa, Artificial Sequence
  Description of Artificial Sequence: Synthetic polypeptide
  XENP018859 1G6_H1_L1.113_scFv(GKPGS)4
EVQLVESGGGLVKPGGSLRLSCAASGFTFSNYWMNWVRQAPGKGLEWVGEIRLKSNNYATHYAEPVKGRFTISRDDSKSTVYLQMNSLKTEDTAVYYCTRYYGNYGGYFDVWGAGTLVTVSSGKPGSGKPGSGKPGSGKPGSSIVMTQSPATLSVSPGERATLSCRASQSVSNDVAWYQQKPGQSPRLLINYASHRYTGVPDRFTGSGYGTEFTLTISSLQSEDFAVYFCQQTYSSPRTFGGGTKVEIK

SEQ ID NO: 14186 - protein, 122 aa, Artificial Sequence; identical to SEQ ID NO: 10922
  Description of Artificial Sequence: Synthetic polypeptide
  VH of XENP018859

SEQ ID NO: 14187 - protein, 107 aa, Artificial Sequence
  Description of Artificial Sequence: Synthetic polypeptide
  VL of XENP018859
SIVMTQSPATLSVSPGERATLSCRASQSVSNDVAWYQQKPGQSPRLLINYASHRYTGVPDRFTGSGYGTEFTLTISSLQSEDFAVYFCQQTYSSPRTFGGGTKVEIK

SEQ ID NO: 14188 - protein, 5 aa, Artificial Sequence
  Description of Artificial Sequence: Synthetic peptide
  XENP018859 vhCDR1
NYWMN

SEQ ID NO: 14189 - protein, 19 aa, Artificial Sequence
  Description of Artificial Sequence: Synthetic peptide
  XENP018859 vhCDR2
EIRLKSNNYATHYAEPVKG

SEQ ID NO: 14190 - protein, 11 aa, Artificial Sequence
  Description of Artificial Sequence: Synthetic peptide
  XENP018859 vhCDR3
YYGNYGGYFDV

SEQ ID NO: 14191 - protein, 11 aa, Artificial Sequence
  Description of Artificial Sequence: Synthetic peptide
  XENP018859 vlCDR1
RASQSVSNDVA

SEQ ID NO: 14192 - protein, 7 aa, Artificial Sequence
  Description of Artificial Sequence: Synthetic peptide
  XENP018859 vlCDR2
YASHRYT

SEQ ID NO: 14193 - protein, 9 aa, Artificial Sequence
  Description of Artificial Sequence: Synthetic peptide
  XENP018859 vlCDR3
QQTYSSPRT

SEQ ID NO: 14194 - protein, 249 aa, Artificial Sequence
  Description of Artificial Sequence: Synthetic polypeptide
  XENP018860 1G6_H1_L1.114_scFv(GKPGS)4
EVQLVESGGGLVKPGGSLRLSCAASGFTFSNYWMNWVRQAPGKGLEWVGEIRLKSNNYATHYAEPVKGRFTISRDDSKSTVYLQMNSLKTEDTAVYYCTRYYGNYGGYFDVWGAGTLVTVSSGKPGSGKPGSGKPGSGKPGSSIVMTQSPATLSVSPGERATLSCRASQSVSNDVAWYQQKPGQSPRLLINYASHRYTGVPDRFTGSGYGTEFTLTISSLQSEDFAVYFCQQGYSSPRTFGGGTKVEIK

SEQ ID NO: 14195 - protein, 122 aa, Artificial Sequence; identical to SEQ ID NO: 10922
  Description of Artificial Sequence: Synthetic polypeptide
  VH of XENP018860

SEQ ID NO: 14196 - protein, 107 aa, Artificial Sequence
  Description of Artificial Sequence: Synthetic polypeptide
  VL of XENP018860
SIVMTQSPATLSVSPGERATLSCRASQSVSNDVAWYQQKPGQSPRLLINYASHRYTGVPDRFTGSGYGTEFTLTISSLQSEDFAVYFCQQGYSSPRTFGGGTKVEIK

SEQ ID NO: 14197 - protein, 5 aa, Artificial Sequence
  Description of Artificial Sequence: Synthetic peptide
  XENP018860 vhCDR1
NYWMN

SEQ ID NO: 14198 - protein, 19 aa, Artificial Sequence
  Description of Artificial Sequence: Synthetic peptide
  XENP018860 vhCDR2
EIRLKSNNYATHYAEPVKG

SEQ ID NO: 14199 - protein, 11 aa, Artificial Sequence
  Description of Artificial Sequence: Synthetic peptide
  XENP018860 vhCDR3
YYGNYGGYFDV

SEQ ID NO: 14200 - protein, 11 aa, Artificial Sequence
  Description of Artificial Sequence: Synthetic peptide
  XENP018860 vlCDR1
RASQSVSNDVA

SEQ ID NO: 14201 - protein, 7 aa, Artificial Sequence
  Description of Artificial Sequence: Synthetic peptide
  XENP018860 vlCDR2
YASHRYT

SEQ ID NO: 14202 - protein, 9 aa, Artificial Sequence
  Description of Artificial Sequence: Synthetic peptide
  XENP018860 vlCDR3
QQGYSSPRT

SEQ ID NO: 14203 - protein, 249 aa, Artificial Sequence
  Description of Artificial Sequence: Synthetic polypeptide
  XENP018861 1G6_H1_L1.115_scFv(GKPGS)4
EVQLVESGGGLVKPGGSLRLSCAASGFTFSNYWMNWVRQAPGKGLEWVGEIRLKSNNYATHYAEPVKGRFTISRDDSKSTVYLQMNSLKTEDTAVYYCTRYYGNYGGYFDVWGAGTLVTVSSGKPGSGKPGSGKPGSGKPGSSIVMTQSPATLSVSPGERATLSCRASQSVSNDVAWYQQKPGQSPRLLINYASHRYTGVPDRFTGSGYGTEFTLTISSLQSEDFAVYFCQQYYSSPRTFGGGTKVEIK

SEQ ID NO: 14204 - protein, 122 aa, Artificial Sequence; identical to SEQ ID NO: 10922
  Description of Artificial Sequence: Synthetic polypeptide
  VH of XENP018861

SEQ ID NO: 14205 - protein, 107 aa, Artificial Sequence
  Description of Artificial Sequence: Synthetic polypeptide
  VL of XENP018861
SIVMTQSPATLSVSPGERATLSCRASQSVSNDVAWYQQKPGQSPRLLINYASHRYTGVPDRFTGSGYGTEFTLTISSLQSEDFAVYFCQQYYSSPRTFGGGTKVEIK

SEQ ID NO: 14206 - protein, 5 aa, Artificial Sequence
  Description of Artificial Sequence: Synthetic peptide
  XENP018861 vhCDR1
NYWMN

SEQ ID NO: 14207 - protein, 19 aa, Artificial Sequence
  Description of Artificial Sequence: Synthetic peptide
  XENP018861 vhCDR2
EIRLKSNNYATHYAEPVKG

SEQ ID NO: 14208 - protein, 11 aa, Artificial Sequence
  Description of Artificial Sequence: Synthetic peptide
  XENP018861 vhCDR3
YYGNYGGYFDV

SEQ ID NO: 14209 - protein, 11 aa, Artificial Sequence
  Description of Artificial Sequence: Synthetic peptide
  XENP018861 vlCDR1
RASQSVSNDVA

SEQ ID NO: 14210 - protein, 7 aa, Artificial Sequence
  Description of Artificial Sequence: Synthetic peptide
  XENP018861 vlCDR2
YASHRYT

SEQ ID NO: 14211 - protein, 9 aa, Artificial Sequence
  Description of Artificial Sequence: Synthetic peptide
  XENP018861 vlCDR3
QQYYSSPRT

SEQ ID NO: 14212 - protein, 249 aa, Artificial Sequence
  Description of Artificial Sequence: Synthetic polypeptide
  XENP018862 1G6_H1_L1.116_scFv(GKPGS)4
EVQLVESGGGLVKPGGSLRLSCAASGFTFSNYWMNWVRQAPGKGLEWVGEIRLKSNNYATHYAEPVKGRFTISRDDSKSTVYLQMNSLKTEDTAVYYCTRYYGNYGGYFDVWGAGTLVTVSSGKPGSGKPGSGKPGSGKPGSSIVMTQSPATLSVSPGERATLSCRASQSVSNDVAWYQQKPGQSPRLLINYASHRYTGVPDRFTGSGYGTEFTLTISSLQSEDFAVYFCQQDFSSPRTFGGGTKVEIK

SEQ ID NO: 14213 - protein, 122 aa, Artificial Sequence; identical to SEQ ID NO: 10922
  Description of Artificial Sequence: Synthetic polypeptide
  VH of XENP018862

SEQ ID NO: 14214 - protein, 107 aa, Artificial Sequence
  Description of Artificial Sequence: Synthetic polypeptide
  VL of XENP018862
SIVMTQSPATLSVSPGERATLSCRASQSVSNDVAWYQQKPGQSPRLLINYASHRYTGVPDRFTGSGYGTEFTLTISSLQSEDFAVYFCQQDFSSPRTFGGGTKVEIK

SEQ ID NO: 14215 - protein, 5 aa, Artificial Sequence
  Description of Artificial Sequence: Synthetic peptide
  XENP018862 vhCDR1
NYWMN

SEQ ID NO: 14216 - protein, 19 aa, Artificial Sequence
  Description of Artificial Sequence: Synthetic peptide
  XENP018862 vhCDR2
EIRLKSNNYATHYAEPVKG

SEQ ID NO: 14217 - protein, 11 aa, Artificial Sequence
  Description of Artificial Sequence: Synthetic peptide
  XENP018862 vhCDR3
YYGNYGGYFDV

SEQ ID NO: 14218 - protein, 11 aa, Artificial Sequence
  Description of Artificial Sequence: Synthetic peptide
  XENP018862 vlCDR1
RASQSVSNDVA

SEQ ID NO: 14219 - protein, 7 aa, Artificial Sequence
  Description of Artificial Sequence: Synthetic peptide
  XENP018862 vlCDR2
YASHRYT

SEQ ID NO: 14220 - protein, 9 aa, Artificial Sequence
  Description of Artificial Sequence: Synthetic peptide
  XENP018862 vlCDR3
QQDFSSPRT

SEQ ID NO: 14221 - protein, 249 aa, Artificial Sequence
  Description of Artificial Sequence: Synthetic polypeptide
  XENP018863 1G6_H1_L1.117_scFv(GKPGS)4
EVQLVESGGGLVKPGGSLRLSCAASGFTFSNYWMNWVRQAPGKGLEWVGEIRLKSNNYATHYAEPVKGRFTISRDDSKSTVYLQMNSLKTEDTAVYYCTRYYGNYGGYFDVWGAGTLVTVSSGKPGSGKPGSGKPGSGKPGSSIVMTQSPATLSVSPGERATLSCRASQSVSNDVAWYQQKPGQSPRLLINYASHRYTGVPDRFTGSGYGTEFTLTISSLQSEDFAVYFCQQDHSSPRTFGGGTKVEIK

SEQ ID NO: 14222 - protein, 122 aa, Artificial Sequence; identical to SEQ ID NO: 10922
  Description of Artificial Sequence: Synthetic polypeptide
  VH of XENP018863

SEQ ID NO: 14223 - protein, 107 aa, Artificial Sequence
  Description of Artificial Sequence: Synthetic polypeptide
  VL of XENP018863
SIVMTQSPATLSVSPGERATLSCRASQSVSNDVAWYQQKPGQSPRLLINYASHRYTGVPDRFTGSGYGTEFTLTISSLQSEDFAVYFCQQDHSSPRTFGGGTKVEIK

SEQ ID NO: 14224 - protein, 5 aa, Artificial Sequence
  Description of Artificial Sequence: Synthetic peptide
  XENP018863 vhCDR1
NYWMN

SEQ ID NO: 14225 - protein, 19 aa, Artificial Sequence
  Description of Artificial Sequence: Synthetic peptide
  XENP018863 vhCDR2
EIRLKSNNYATHYAEPVKG

SEQ ID NO: 14226 - protein, 11 aa, Artificial Sequence
  Description of Artificial Sequence: Synthetic peptide
  XENP018863 vhCDR3
YYGNYGGYFDV

SEQ ID NO: 14227 - protein, 11 aa, Artificial Sequence
  Description of Artificial Sequence: Synthetic peptide
  XENP018863 vlCDR1
RASQSVSNDVA

SEQ ID NO: 14228 - protein, 7 aa, Artificial Sequence
  Description of Artificial Sequence: Synthetic peptide
  XENP018863 vlCDR2
YASHRYT

SEQ ID NO: 14229 - protein, 9 aa, Artificial Sequence
  Description of Artificial Sequence: Synthetic peptide
  XENP018863 vlCDR3
QQDHSSPRT

SEQ ID NO: 14230 - protein, 249 aa, Artificial Sequence
  Description of Artificial Sequence: Synthetic polypeptide
  XENP018864 1G6_H1_L1.118_scFv(GKPGS)4
EVQLVESGGGLVKPGGSLRLSCAASGFTFSNYWMNWVRQAPGKGLEWVGEIRLKSNNYATHYAEPVKGRFTISRDDSKSTVYLQMNSLKTEDTAVYYCTRYYGNYGGYFDVWGAGTLVTVSSGKPGSGKPGSGKPGSGKPGSSIVMTQSPATLSVSPGERATLSCRASQSVSNDVAWYQQKPGQSPRLLINYASHRYTGVPDRFTGSGYGTEFTLTISSLQSEDFAVYFCQQDLSSPRTFGGGTKVEIK

SEQ ID NO: 14231 - protein, 122 aa, Artificial Sequence; identical to SEQ ID NO: 10922
  Description of Artificial Sequence: Synthetic polypeptide
  VH of XENP018864

SEQ ID NO: 14232 - protein, 107 aa, Artificial Sequence
  Description of Artificial Sequence: Synthetic polypeptide
  VL of XENP018864
SIVMTQSPATLSVSPGERATLSCRASQSVSNDVAWYQQKPGQSPRLLINYASHRYTGVPDRFTGSGYGTEFTLTISSLQSEDFAVYFCQQDLSSPRTFGGGTKVEIK

SEQ ID NO: 14233 - protein, 5 aa, Artificial Sequence
  Description of Artificial Sequence: Synthetic peptide
  XENP018864 vhCDR1
NYWMN

SEQ ID NO: 14234 - protein, 19 aa, Artificial Sequence
  Description of Artificial Sequence: Synthetic peptide
  XENP018864 vhCDR2
EIRLKSNNYATHYAEPVKG

SEQ ID NO: 14235 - protein, 11 aa, Artificial Sequence
  Description of Artificial Sequence: Synthetic peptide
  XENP018864 vhCDR3
YYGNYGGYFDV

SEQ ID NO: 14236 - protein, 11 aa, Artificial Sequence
  Description of Artificial Sequence: Synthetic peptide
  XENP018864 vlCDR1
RASQSVSNDVA

SEQ ID NO: 14237 - protein, 7 aa, Artificial Sequence
  Description of Artificial Sequence: Synthetic peptide
  XENP018864 vlCDR2
YASHRYT

SEQ ID NO: 14238 - protein, 9 aa, Artificial Sequence
  Description of Artificial Sequence: Synthetic peptide
  XENP018864 vlCDR3
QQDLSSPRT

SEQ ID NO: 14239 - protein, 249 aa, Artificial Sequence
  Description of Artificial Sequence: Synthetic polypeptide
  XENP018865 1G6_H1_L1.119_scFv(GKPGS)4
EVQLVESGGGLVKPGGSLRLSCAASGFTFSNYWMNWVRQAPGKGLEWVGEIRLKSNNYATHYAEPVKGRFTISRDDSKSTVYLQMNSLKTEDTAVYYCTRYYGNYGGYFDVWGAGTLVTVSSGKPGSGKPGSGKPGSGKPGSSIVMTQSPATLSVSPGERATLSCRASQSVSNDVAWYQQKPGQSPRLLINYASHRYTGVPDRFTGSGYGTEFTLTISSLQSEDFAVYFCQQDWSSPRTFGGGTKVEIK

SEQ ID NO: 14240 - protein, 122 aa, Artificial Sequence; identical to SEQ ID NO: 10922
  Description of Artificial Sequence: Synthetic polypeptide
  VH of XENP018865

SEQ ID NO: 14241 - protein, 107 aa, Artificial Sequence
  Description of Artificial Sequence: Synthetic polypeptide
  VL of XENP018865
SIVMTQSPATLSVSPGERATLSCRASQSVSNDVAWYQQKPGQSPRLLINYASHRYTGVPDRFTGSGYGTEFTLTISSLQSEDFAVYFCQQDWSSPRTFGGGTKVEIK

SEQ ID NO: 14242 - protein, 5 aa, Artificial Sequence
  Description of Artificial Sequence: Synthetic peptide
  XENP018865 vhCDR1
NYWMN

SEQ ID NO: 14243 - protein, 19 aa, Artificial Sequence
  Description of Artificial Sequence: Synthetic peptide
  XENP018865 vhCDR2
EIRLKSNNYATHYAEPVKG

SEQ ID NO: 14244 - protein, 11 aa, Artificial Sequence
  Description of Artificial Sequence: Synthetic peptide
  XENP018865 vhCDR3
YYGNYGGYFDV

SEQ ID NO: 14245 - protein, 11 aa, Artificial Sequence
  Description of Artificial Sequence: Synthetic peptide
  XENP018865 vlCDR1
RASQSVSNDVA

SEQ ID NO: 14246 - protein, 7 aa, Artificial Sequence
  Description of Artificial Sequence: Synthetic peptide
  XENP018865 vlCDR2
YASHRYT

SEQ ID NO: 14247 - protein, 9 aa, Artificial Sequence
  Description of Artificial Sequence: Synthetic peptide
  XENP018865 vlCDR3
QQDWSSPRT

SEQ ID NO: 14248 - protein, 249 aa, Artificial Sequence
  Description of Artificial Sequence: Synthetic polypeptide
  XENP018866 1G6_H1_L1.120_scFv(GKPGS)4
EVQLVESGGGLVKPGGSLRLSCAASGFTFSNYWMNWVRQAPGKGLEWVGEIRLKSNNYATHYAEPVKGRFTISRDDSKSTVYLQMNSLKTEDTAVYYCTRYYGNYGGYFDVWGAGTLVTVSSGKPGSGKPGSGKPGSGKPGSSIVMTQSPATLSVSPGERATLSCRASQSVSNDVAWYQQKPGQSPRLLINYASHRYTGVPDRFTGSGYGTEFTLTISSLQSEDFAVYFCQQDVSSPRTFGGGTKVEIK

SEQ ID NO: 14249 - protein, 122 aa, Artificial Sequence; identical to SEQ ID NO: 10922
  Description of Artificial Sequence: Synthetic polypeptide
  VH of XENP018866

SEQ ID NO: 14250 - protein, 107 aa, Artificial Sequence
  Description of Artificial Sequence: Synthetic polypeptide
  VL of XENP018866
SIVMTQSPATLSVSPGERATLSCRASQSVSNDVAWYQQKPGQSPRLLINYASHRYTGVPDRFTGSGYGTEFTLTISSLQSEDFAVYFCQQDVSSPRTFGGGTKVEIK

SEQ ID NO: 14251 - protein, 5 aa, Artificial Sequence
  Description of Artificial Sequence: Synthetic peptide
  XENP018866 vhCDR1
NYWMN

SEQ ID NO: 14252 - protein, 19 aa, Artificial Sequence
  Description of Artificial Sequence: Synthetic peptide
  XENP018866 vhCDR2
EIRLKSNNYATHYAEPVKG

SEQ ID NO: 14253 - protein, 11 aa, Artificial Sequence
  Description of Artificial Sequence: Synthetic peptide
  XENP018866 vhCDR3
YYGNYGGYFDV

SEQ ID NO: 14254 - protein, 11 aa, Artificial Sequence
  Description of Artificial Sequence: Synthetic peptide
  XENP018866 vlCDR1
RASQSVSNDVA

SEQ ID NO: 14255 - protein, 7 aa, Artificial Sequence
  Description of Artificial Sequence: Synthetic peptide
  XENP018866 vlCDR2
YASHRYT

SEQ ID NO: 14256 - protein, 9 aa, Artificial Sequence
  Description of Artificial Sequence: Synthetic peptide
  XENP018866 vlCDR3
QQDVSSPRT

SEQ ID NO: 14257 - protein, 249 aa, Artificial Sequence
  Description of Artificial Sequence: Synthetic polypeptide
  XENP018867 1G6_H1_L1.121_scFv(GKPGS)4
EVQLVESGGGLVKPGGSLRLSCAASGFTFSNYWMNWVRQAPGKGLEWVGEIRLKSNNYATHYAEPVKGRFTISRDDSKSTVYLQMNSLKTEDTAVYYCTRYYGNYGGYFDVWGAGTLVTVSSGKPGSGKPGSGKPGSGKPGSSIVMTQSPATLSVSPGERATLSCRASQSVSNDVAWYQQKPGQSPRLLINYASHRYTGVPDRFTGSGYGTEFTLTISSLQSEDFAVYFCQQDASSPRTFGGGTKVEIK

SEQ ID NO: 14258 - protein, 122 aa, Artificial Sequence; identical to SEQ ID NO: 10922
  Description of Artificial Sequence: Synthetic polypeptide
  VH of XENP018867

SEQ ID NO: 14259 - protein, 107 aa, Artificial Sequence
  Description of Artificial Sequence: Synthetic polypeptide
  VL of XENP018867
SIVMTQSPATLSVSPGERATLSCRASQSVSNDVAWYQQKPGQSPRLLINYASHRYTGVPDRFTGSGYGTEFTLTISSLQSEDFAVYFCQQDASSPRTFGGGTKVEIK

SEQ ID NO: 14260 - protein, 5 aa, Artificial Sequence
  Description of Artificial Sequence: Synthetic peptide
  XENP018867 vhCDR1
NYWMN

SEQ ID NO: 14261 - protein, 19 aa, Artificial Sequence
  Description of Artificial Sequence: Synthetic peptide
  XENP018867 vhCDR2
EIRLKSNNYATHYAEPVKG

SEQ ID NO: 14262 - protein, 11 aa, Artificial Sequence
  Description of Artificial Sequence: Synthetic peptide
  XENP018867 vhCDR3
YYGNYGGYFDV

SEQ ID NO: 14263 - protein, 11 aa, Artificial Sequence
  Description of Artificial Sequence: Synthetic peptide
  XENP018867 vlCDR1
RASQSVSNDVA

SEQ ID NO: 14264 - protein, 7 aa, Artificial Sequence
  Description of Artificial Sequence: Synthetic peptide
  XENP018867 vlCDR2
YASHRYT

SEQ ID NO: 14265 - protein, 9 aa, Artificial Sequence
  Description of Artificial Sequence: Synthetic peptide
  XENP018867 vlCDR3
QQDASSPRT

SEQ ID NO: 14266 - protein, 249 aa, Artificial Sequence
  Description of Artificial Sequence: Synthetic polypeptide
  XENP018868 1G6_H1_L1.122_scFv(GKPGS)4
EVQLVESGGGLVKPGGSLRLSCAASGFTFSNYWMNWVRQAPGKGLEWVGEIRLKSNNYATHYAEPVKGRFTISRDDSKSTVYLQMNSLKTEDTAVYYCTRYYGNYGGYFDVWGAGTLVTVSSGKPGSGKPGSGKPGSGKPGSSIVMTQSPATLSVSPGERATLSCRASQSVSNDVAWYQQKPGQSPRLLINYASHRYTGVPDRFTGSGYGTEFTLTISSLQSEDFAVYFCQQDQSSPRTFGGGTKVEIK

SEQ ID NO: 14267 - protein, 122 aa, Artificial Sequence; identical to SEQ ID NO: 10922
  Description of Artificial Sequence: Synthetic polypeptide
  VH of XENP018868

SEQ ID NO: 14268 - protein, 107 aa, Artificial Sequence
  Description of Artificial Sequence: Synthetic polypeptide
  VL of XENP018868
SIVMTQSPATLSVSPGERATLSCRASQSVSNDVAWYQQKPGQSPRLLINYASHRYTGVPDRFTGSGYGTEFTLTISSLQSEDFAVYFCQQDQSSPRTFGGGTKVEIK

SEQ ID NO: 14269 - protein, 5 aa, Artificial Sequence
  Description of Artificial Sequence: Synthetic peptide
  XENP018868 vhCDR1
NYWMN

SEQ ID NO: 14270 - protein, 19 aa, Artificial Sequence
  Description of Artificial Sequence: Synthetic peptide
  XENP018868 vhCDR2
EIRLKSNNYATHYAEPVKG

SEQ ID NO: 14271 - protein, 11 aa, Artificial Sequence
  Description of Artificial Sequence: Synthetic peptide
  XENP018868 vhCDR3
YYGNYGGYFDV

SEQ ID NO: 14272 - protein, 11 aa, Artificial Sequence
  Description of Artificial Sequence: Synthetic peptide
  XENP018868 vlCDR1
RASQSVSNDVA

SEQ ID NO: 14273 - protein, 7 aa, Artificial Sequence
  Description of Artificial Sequence: Synthetic peptide
  XENP018868 vlCDR2
YASHRYT

SEQ ID NO: 14274 - protein, 9 aa, Artificial Sequence
  Description of Artificial Sequence: Synthetic peptide
  XENP018868 vlCDR3
QQDQSSPRT

SEQ ID NO: 14275 - protein, 249 aa, Artificial Sequence
  Description of Artificial Sequence: Synthetic polypeptide
  XENP018869 1G6_H1_L1.123_scFv(GKPGS)4
EVQLVESGGGLVKPGGSLRLSCAASGFTFSNYWMNWVRQAPGKGLEWVGEIRLKSNNYATHYAEPVKGRFTISRDDSKSTVYLQMNSLKTEDTAVYYCTRYYGNYGGYFDVWGAGTLVTVSSGKPGSGKPGSGKPGSGKPGSSIVMTQSPATLSVSPGERATLSCRASQSVSNDVAWYQQKPGQSPRLLINYASHRYTGVPDRFTGSGYGTEFTLTISSLQSEDFAVYFCQQDDSSPRTFGGGTKVEIK

SEQ ID NO: 14276 - protein, 122 aa, Artificial Sequence; identical to SEQ ID NO: 10922
  Description of Artificial Sequence: Synthetic polypeptide
  VH of XENP018869

SEQ ID NO: 14277 - protein, 107 aa, Artificial Sequence
  Description of Artificial Sequence: Synthetic polypeptide
  VL of XENP018869
SIVMTQSPATLSVSPGERATLSCRASQSVSNDVAWYQQKPGQSPRLLINYASHRYTGVPDRFTGSGYGTEFTLTISSLQSEDFAVYFCQQDDSSPRTFGGGTKVEIK

SEQ ID NO: 14278 - protein, 5 aa, Artificial Sequence
  Description of Artificial Sequence: Synthetic peptide
  XENP018869 vhCDR1
NYWMN

SEQ ID NO: 14279 - protein, 19 aa, Artificial Sequence
  Description of Artificial Sequence: Synthetic peptide
  XENP018869 vhCDR2
EIRLKSNNYATHYAEPVKG

SEQ ID NO: 14280 - protein, 11 aa, Artificial Sequence
  Description of Artificial Sequence: Synthetic peptide
  XENP018869 vhCDR3
YYGNYGGYFDV

SEQ ID NO: 14281 - protein, 11 aa, Artificial Sequence
  Description of Artificial Sequence: Synthetic peptide
  XENP018869 vlCDR1
RASQSVSNDVA

SEQ ID NO: 14282 - protein, 7 aa, Artificial Sequence
  Description of Artificial Sequence: Synthetic peptide
  XENP018869 vlCDR2
YASHRYT

SEQ ID NO: 14283 - protein, 9 aa, Artificial Sequence
  Description of Artificial Sequence: Synthetic peptide
  XENP018869 vlCDR3
QQDDSSPRT

SEQ ID NO: 14284 - protein, 249 aa, Artificial Sequence
  Description of Artificial Sequence: Synthetic polypeptide
  XENP018870 1G6_H1_L1.124_scFv(GKPGS)4
EVQLVESGGGLVKPGGSLRLSCAASGFTFSNYWMNWVRQAPGKGLEWVGEIRLKSNNYATHYAEPVKGRFTISRDDSKSTVYLQMNSLKTEDTAVYYCTRYYGNYGGYFDVWGAGTLVTVSSGKPGSGKPGSGKPGSGKPGSSIVMTQSPATLSVSPGERATLSCRASQSVSNDVAWYQQKPGQSPRLLINYASHRYTGVPDRFTGSGYGTEFTLTISSLQSEDFAVYFCQQDKSSPRTFGGGTKVEIK

SEQ ID NO: 14285 - protein, 122 aa, Artificial Sequence; identical to SEQ ID NO: 10922
  Description of Artificial Sequence: Synthetic polypeptide
  VH of XENP018870

SEQ ID NO: 14286 - protein, 107 aa, Artificial Sequence
  Description of Artificial Sequence: Synthetic polypeptide
  VL of XENP018870
SIVMTQSPATLSVSPGERATLSCRASQSVSNDVAWYQQKPGQSPRLLINYASHRYTGVPDRFTGSGYGTEFTLTISSLQSEDFAVYFCQQDKSSPRTFGGGTKVEIK

SEQ ID NO: 14287 - protein, 5 aa, Artificial Sequence
  Description of Artificial Sequence: Synthetic peptide
  XENP018870 vhCDR1
NYWMN

SEQ ID NO: 14288 - protein, 19 aa, Artificial Sequence
  Description of Artificial Sequence: Synthetic peptide
  XENP018870 vhCDR2
EIRLKSNNYATHYAEPVKG

SEQ ID NO: 14289 - protein, 11 aa, Artificial Sequence
  Description of Artificial Sequence: Synthetic peptide
  XENP018870 vhCDR3
YYGNYGGYFDV

SEQ ID NO: 14290 - protein, 11 aa, Artificial Sequence
  Description of Artificial Sequence: Synthetic peptide
  XENP018870 vlCDR1
RASQSVSNDVA

SEQ ID NO: 14291 - protein, 7 aa, Artificial Sequence
  Description of Artificial Sequence: Synthetic peptide
  XENP018870 vlCDR2
YASHRYT

SEQ ID NO: 14292 - protein, 9 aa, Artificial Sequence
  Description of Artificial Sequence: Synthetic peptide
  XENP018870 vlCDR3
QQDKSSPRT

SEQ ID NO: 14293 - protein, 249 aa, Artificial Sequence
  Description of Artificial Sequence: Synthetic polypeptide
  XENP018871 1G6_H1_L1.125_scFv(GKPGS)4
EVQLVESGGGLVKPGGSLRLSCAASGFTFSNYWMNWVRQAPGKGLEWVGEIRLKSNNYATHYAEPVKGRFTISRDDSKSTVYLQMNSLKTEDTAVYYCTRYYGNYGGYFDVWGAGTLVTVSSGKPGSGKPGSGKPGSGKPGSSIVMTQSPATLSVSPGERATLSCRASQSVSNDVAWYQQKPGQSPRLLINYASHRYTGVPDRFTGSGYGTEFTLTISSLQSEDFAVYFCQQDSSSPRTFGGGTKVEIK

SEQ ID NO: 14294 - protein, 122 aa, Artificial Sequence; identical to SEQ ID NO: 10922
  Description of Artificial Sequence: Synthetic polypeptide
  VH of XENP018871

SEQ ID NO: 14295 - protein, 107 aa, Artificial Sequence
  Description of Artificial Sequence: Synthetic polypeptide
  VL of XENP018871
SIVMTQSPATLSVSPGERATLSCRASQSVSNDVAWYQQKPGQSPRLLINYASHRYTGVPDRFTGSGYGTEFTLTISSLQSEDFAVYFCQQDSSSPRTFGGGTKVEIK

SEQ ID NO: 14296 - protein, 5 aa, Artificial Sequence
  Description of Artificial Sequence: Synthetic peptide
  XENP018871 vhCDR1
NYWMN

SEQ ID NO: 14297 - protein, 19 aa, Artificial Sequence
  Description of Artificial Sequence: Synthetic peptide
  XENP018871 vhCDR2
EIRLKSNNYATHYAEPVKG

SEQ ID NO: 14298 - protein, 11 aa, Artificial Sequence
  Description of Artificial Sequence: Synthetic peptide
  XENP018871 vhCDR3
YYGNYGGYFDV

SEQ ID NO: 14299 - protein, 11 aa, Artificial Sequence
  Description of Artificial Sequence: Synthetic peptide
  XENP018871 vlCDR1
RASQSVSNDVA

SEQ ID NO: 14300 - protein, 7 aa, Artificial Sequence
  Description of Artificial Sequence: Synthetic peptide
  XENP018871 vlCDR2
YASHRYT

SEQ ID NO: 14301 - protein, 9 aa, Artificial Sequence
  Description of Artificial Sequence: Synthetic peptide
  XENP018871 vlCDR3
QQDSSSPRT

SEQ ID NO: 14302 - protein, 249 aa, Artificial Sequence
  Description of Artificial Sequence: Synthetic polypeptide
  XENP018872 1G6_H1_L1.126_scFv(GKPGS)4
EVQLVESGGGLVKPGGSLRLSCAASGFTFSNYWMNWVRQAPGKGLEWVGEIRLKSNNYATHYAEPVKGRFTISRDDSKSTVYLQMNSLKTEDTAVYYCTRYYGNYGGYFDVWGAGTLVTVSSGKPGSGKPGSGKPGSGKPGSSIVMTQSPATLSVSPGERATLSCRASQSVSNDVAWYQQKPGQSPRLLINYASHRYTGVPDRFTGSGYGTEFTLTISSLQSEDFAVYFCQQDGSSPRTFGGGTKVEIK

SEQ ID NO: 14303 - protein, 122 aa, Artificial Sequence; identical to SEQ ID NO: 10922
  Description of Artificial Sequence: Synthetic polypeptide
  VH of XENP018872

SEQ ID NO: 14304 - protein, 107 aa, Artificial Sequence
  Description of Artificial Sequence: Synthetic polypeptide
  VL of XENP018872
SIVMTQSPATLSVSPGERATLSCRASQSVSNDVAWYQQKPGQSPRLLINYASHRYTGVPDRFTGSGYGTEFTLTISSLQSEDFAVYFCQQDGSSPRTFGGGTKVEIK

SEQ ID NO: 14305 - protein, 5 aa, Artificial Sequence
  Description of Artificial Sequence: Synthetic peptide
  XENP018872 vhCDR1
NYWMN

SEQ ID NO: 14306 - protein, 19 aa, Artificial Sequence
  Description of Artificial Sequence: Synthetic peptide
  XENP018872 vhCDR2
EIRLKSNNYATHYAEPVKG

SEQ ID NO: 14307 - protein, 11 aa, Artificial Sequence
  Description of Artificial Sequence: Synthetic peptide
  XENP018872 vhCDR3
YYGNYGGYFDV

SEQ ID NO: 14308 - protein, 11 aa, Artificial Sequence
  Description of Artificial Sequence: Synthetic peptide
  XENP018872 vlCDR1
RASQSVSNDVA

SEQ ID NO: 14309 - protein, 7 aa, Artificial Sequence
  Description of Artificial Sequence: Synthetic peptide
  XENP018872 vlCDR2
YASHRYT

SEQ ID NO: 14310 - protein, 9 aa, Artificial Sequence
  Description of Artificial Sequence: Synthetic peptide
  XENP018872 vlCDR3
QQDGSSPRT

SEQ ID NO: 14311 - protein, 249 aa, Artificial Sequence
  Description of Artificial Sequence: Synthetic polypeptide
  XENP018873 1G6_H1_L1.127_scFv(GKPGS)4
EVQLVESGGGLVKPGGSLRLSCAASGFTFSNYWMNWVRQAPGKGLEWVGEIRLKSNNYATHYAEPVKGRFTISRDDSKSTVYLQMNSLKTEDTAVYYCTRYYGNYGGYFDVWGAGTLVTVSSGKPGSGKPGSGKPGSGKPGSSIVMTQSPATLSVSPGERATLSCRASQSVSNDVAWYQQKPGQSPRLLINYASHRYTGVPDRFTGSGYGTEFTLTISSLQSEDFAVYFCQQDYTSPRTFGGGTKVEIK

SEQ ID NO: 14312 - protein, 122 aa, Artificial Sequence; identical to SEQ ID NO: 10922
  Description of Artificial Sequence: Synthetic polypeptide
  VH of XENP018873

SEQ ID NO: 14313 - protein, 107 aa, Artificial Sequence
  Description of Artificial Sequence: Synthetic polypeptide
  VL of XENP018873
SIVMTQSPATLSVSPGERATLSCRASQSVSNDVAWYQQKPGQSPRLLINYASHRYTGVPDRFTGSGYGTEFTLTISSLQSEDFAVYFCQQDYTSPRTFGGGTKVEIK

SEQ ID NO: 14314 - protein, 5 aa, Artificial Sequence
  Description of Artificial Sequence: Synthetic peptide
  XENP018873 vhCDR1
NYWMN

SEQ ID NO: 14315 - protein, 19 aa, Artificial Sequence
  Description of Artificial Sequence: Synthetic peptide
  XENP018873 vhCDR2
EIRLKSNNYATHYAEPVKG

SEQ ID NO: 14316 - protein, 11 aa, Artificial Sequence
  Description of Artificial Sequence: Synthetic peptide
  XENP018873 vhCDR3
YYGNYGGYFDV

SEQ ID NO: 14317 - protein, 11 aa, Artificial Sequence
  Description of Artificial Sequence: Synthetic peptide
  XENP018873 vlCDR1
RASQSVSNDVA

SEQ ID NO: 14318 - protein, 7 aa, Artificial Sequence
  Description of Artificial Sequence: Synthetic peptide
  XENP018873 vlCDR2
YASHRYT

SEQ ID NO: 14319 - protein, 9 aa, Artificial Sequence
  Description of Artificial Sequence: Synthetic peptide
  XENP018873 vlCDR3
QQDYTSPRT

SEQ ID NO: 14320 - protein, 249 aa, Artificial Sequence
  Description of Artificial Sequence: Synthetic polypeptide
  XENP018874 1G6_H1_L1.128_scFv(GKPGS)4
EVQLVESGGGLVKPGGSLRLSCAASGFTFSNYWMNWVRQAPGKGLEWVGEIRLKSNNYATHYAEPVKGRFTISRDDSKSTVYLQMNSLKTEDTAVYYCTRYYGNYGGYFDVWGAGTLVTVSSGKPGSGKPGSGKPGSGKPGSSIVMTQSPATLSVSPGERATLSCRASQSVSNDVAWYQQKPGQSPRLLINYASHRYTGVPDRFTGSGYGTEFTLTISSLQSEDFAVYFCQQDYASPRTFGGGTKVEIK

SEQ ID NO: 14321 - protein, 122 aa, Artificial Sequence; identical to SEQ ID NO: 10922
  Description of Artificial Sequence: Synthetic polypeptide
  VH of XENP018874

SEQ ID NO: 14322 - protein, 107 aa, Artificial Sequence
  Description of Artificial Sequence: Synthetic polypeptide
  VL of XENP018874
SIVMTQSPATLSVSPGERATLSCRASQSVSNDVAWYQQKPGQSPRLLINYASHRYTGVPDRFTGSGYGTEFTLTISSLQSEDFAVYFCQQDYASPRTFGGGTKVEIK

SEQ ID NO: 14323 - protein, 5 aa, Artificial Sequence
  Description of Artificial Sequence: Synthetic peptide
  XENP018874 vhCDR1
NYWMN

SEQ ID NO: 14324 - protein, 19 aa, Artificial Sequence
  Description of Artificial Sequence: Synthetic peptide
  XENP018874 vhCDR2
EIRLKSNNYATHYAEPVKG

SEQ ID NO: 14325 - protein, 11 aa, Artificial Sequence
  Description of Artificial Sequence: Synthetic peptide
  XENP018874 vhCDR3
YYGNYGGYFDV

SEQ ID NO: 14326 - protein, 11 aa, Artificial Sequence
  Description of Artificial Sequence: Synthetic peptide
  XENP018874 vlCDR1
RASQSVSNDVA

SEQ ID NO: 14327 - protein, 7 aa, Artificial Sequence
  Description of Artificial Sequence: Synthetic peptide
  XENP018874 vlCDR2
YASHRYT

SEQ ID NO: 14328 - protein, 9 aa, Artificial Sequence
  Description of Artificial Sequence: Synthetic peptide
  XENP018874 vlCDR3
QQDYASPRT

SEQ ID NO: 14329 - protein, 249 aa, Artificial Sequence
  Description of Artificial Sequence: Synthetic polypeptide
  XENP018875 1G6_H1_L1.129_scFv(GKPGS)4
EVQLVESGGGLVKPGGSLRLSCAASGFTFSNYWMNWVRQAPGKGLEWVGEIRLKSNNYATHYAEPVKGRFTISRDDSKSTVYLQMNSLKTEDTAVYYCTRYYGNYGGYFDVWGAGTLVTVSSGKPGSGKPGSGKPGSGKPGSSIVMTQSPATLSVSPGERATLSCRASQSVSNDVAWYQQKPGQSPRLLINYASHRYTGVPDRFTGSGYGTEFTLTISSLQSEDFAVYFCQQDYQSPRTFGGGTKVEIK

SEQ ID NO: 14330 - protein, 122 aa, Artificial Sequence; identical to SEQ ID NO: 10922
  Description of Artificial Sequence: Synthetic polypeptide
  VH of XENP018875

SEQ ID NO: 14331 - protein, 107 aa, Artificial Sequence
  Description of Artificial Sequence: Synthetic polypeptide
  VL of XENP018875
SIVMTQSPATLSVSPGERATLSCRASQSVSNDVAWYQQKPGQSPRLLINYASHRYTGVPDRFTGSGYGTEFTLTISSLQSEDFAVYFCQQDYQSPRTFGGGTKVEIK

SEQ ID NO: 14332 - protein, 5 aa, Artificial Sequence
  Description of Artificial Sequence: Synthetic peptide
  XENP018875 vhCDR1
NYWMN

SEQ ID NO: 14333 - protein, 19 aa, Artificial Sequence
  Description of Artificial Sequence: Synthetic peptide
  XENP018875 vhCDR2
EIRLKSNNYATHYAEPVKG

SEQ ID NO: 14334 - protein, 11 aa, Artificial Sequence
  Description of Artificial Sequence: Synthetic peptide
  XENP018875 vhCDR3
YYGNYGGYFDV

SEQ ID NO: 14335 - protein, 11 aa, Artificial Sequence
  Description of Artificial Sequence: Synthetic peptide
  XENP018875 vlCDR1
RASQSVSNDVA

SEQ ID NO: 14336 - protein, 7 aa, Artificial Sequence
  Description of Artificial Sequence: Synthetic peptide
  XENP018875 vlCDR2
YASHRYT

SEQ ID NO: 14337 - protein, 9 aa, Artificial Sequence
  Description of Artificial Sequence: Synthetic peptide
  XENP018875 vlCDR3
QQDYQSPRT

SEQ ID NO: 14338 - protein, 249 aa, Artificial Sequence
  Description of Artificial Sequence: Synthetic polypeptide
  XENP018876 1G6_H1_L1.130_scFv(GKPGS)4
EVQLVESGGGLVKPGGSLRLSCAASGFTFSNYWMNWVRQAPGKGLEWVGEIRLKSNNYATHYAEPVKGRFTISRDDSKSTVYLQMNSLKTEDTAVYYCTRYYGNYGGYFDVWGAGTLVTVSSGKPGSGKPGSGKPGSGKPGSSIVMTQSPATLSVSPGERATLSCRASQSVSNDVAWYQQKPGQSPRLLINYASHRYTGVPDRFTGSGYGTEFTLTISSLQSEDFAVYFCQQDYGSPRTFGGGTKVEIK

SEQ ID NO: 14339 - protein, 122 aa, Artificial Sequence; identical to SEQ ID NO: 10922
  Description of Artificial Sequence: Synthetic polypeptide
  VH of XENP018876

SEQ ID NO: 14340 - protein, 107 aa, Artificial Sequence
  Description of Artificial Sequence: Synthetic polypeptide
  VL of XENP018876
SIVMTQSPATLSVSPGERATLSCRASQSVSNDVAWYQQKPGQSPRLLINYASHRYTGVPDRFTGSGYGTEFTLTISSLQSEDFAVYFCQQDYGSPRTFGGGTKVEIK

SEQ ID NO: 14341 - protein, 5 aa, Artificial Sequence
  Description of Artificial Sequence: Synthetic peptide
  XENP018876 vhCDR1
NYWMN

SEQ ID NO: 14342 - protein, 19 aa, Artificial Sequence
  Description of Artificial Sequence: Synthetic peptide
  XENP018876 vhCDR2
EIRLKSNNYATHYAEPVKG

SEQ ID NO: 14343 - protein, 11 aa, Artificial Sequence
  Description of Artificial Sequence: Synthetic peptide
  XENP018876 vhCDR3
YYGNYGGYFDV

SEQ ID NO: 14344 - protein, 11 aa, Artificial Sequence
  Description of Artificial Sequence: Synthetic peptide
  XENP018876 vlCDR1
RASQSVSNDVA

SEQ ID NO: 14345 - protein, 7 aa, Artificial Sequence
  Description of Artificial Sequence: Synthetic peptide
  XENP018876 vlCDR2
YASHRYT

SEQ ID NO: 14346 - protein, 9 aa, Artificial Sequence
  Description of Artificial Sequence: Synthetic peptide
  XENP018876 vlCDR3
QQDYGSPRT

SEQ ID NO: 14347 - protein, 249 aa, Artificial Sequence
  Description of Artificial Sequence: Synthetic polypeptide
  XENP018877 1G6_H1_L1.131_scFv(GKPGS)4
EVQLVESGGGLVKPGGSLRLSCAASGFTFSNYWMNWVRQAPGKGLEWVGEIRLKSNNYATHYAEPVKGRFTISRDDSKSTVYLQMNSLKTEDTAVYYCTRYYGNYGGYFDVWGAGTLVTVSSGKPGSGKPGSGKPGSGKPGSSIVMTQSPATLSVSPGERATLSCRASQSVSNDVAWYQQKPGQSPRLLINYASHRYTGVPDRFTGSGYGTEFTLTISSLQSEDFAVYFCQQDYVSPRTFGGGTKVEIK

SEQ ID NO: 14348 - protein, 122 aa, Artificial Sequence; identical to SEQ ID NO: 10922
  Description of Artificial Sequence: Synthetic polypeptide
  VH of XENP018877

SEQ ID NO: 14349 - protein, 107 aa, Artificial Sequence
  Description of Artificial Sequence: Synthetic polypeptide
  VL of XENP018877
SIVMTQSPATLSVSPGERATLSCRASQSVSNDVAWYQQKPGQSPRLLINYASHRYTGVPDRFTGSGYGTEFTLTISSLQSEDFAVYFCQQDYVSPRTFGGGTKVEIK

SEQ ID NO: 14350 - protein, 5 aa, Artificial Sequence
  Description of Artificial Sequence: Synthetic peptide
  XENP018877 vhCDR1
NYWMN

SEQ ID NO: 14351 - protein, 19 aa, Artificial Sequence
  Description of Artificial Sequence: Synthetic peptide
  XENP018877 vhCDR2
EIRLKSNNYATHYAEPVKG

SEQ ID NO: 14352 - protein, 11 aa, Artificial Sequence
  Description of Artificial Sequence: Synthetic peptide
  XENP018877 vhCDR3
YYGNYGGYFDV

SEQ ID NO: 14353 - protein, 11 aa, Artificial Sequence
  Description of Artificial Sequence: Synthetic peptide
  XENP018877 vlCDR1
RASQSVSNDVA

SEQ ID NO: 14354 - protein, 7 aa, Artificial Sequence
  Description of Artificial Sequence: Synthetic peptide
  XENP018877 vlCDR2
YASHRYT

SEQ ID NO: 14355 - protein, 9 aa, Artificial Sequence
  Description of Artificial Sequence: Synthetic peptide
  XENP018877 vlCDR3
QQDYVSPRT

SEQ ID NO: 14356 - protein, 249 aa, Artificial Sequence
  Description of Artificial Sequence: Synthetic polypeptide
  XENP018878 1G6_H1_L1.132_scFv(GKPGS)4
EVQLVESGGGLVKPGGSLRLSCAASGFTFSNYWMNWVRQAPGKGLEWVGEIRLKSNNYATHYAEPVKGRFTISRDDSKSTVYLQMNSLKTEDTAVYYCTRYYGNYGGYFDVWGAGTLVTVSSGKPGSGKPGSGKPGSGKPGSSIVMTQSPATLSVSPGERATLSCRASQSVSNDVAWYQQKPGQSPRLLINYASHRYTGVPDRFTGSGYGTEFTLTISSLQSEDFAVYFCQQDYHSPRTFGGGTKVEIK

SEQ ID NO: 14357 - protein, 122 aa, Artificial Sequence; identical to SEQ ID NO: 10922
  Description of Artificial Sequence: Synthetic polypeptide
  VH of XENP018878

SEQ ID NO: 14358 - protein, 107 aa, Artificial Sequence
  Description of Artificial Sequence: Synthetic polypeptide
  VL of XENP018878
SIVMTQSPATLSVSPGERATLSCRASQSVSNDVAWYQQKPGQSPRLLINYASHRYTGVPDRFTGSGYGTEFTLTISSLQSEDFAVYFCQQDYHSPRTFGGGTKVEIK

SEQ ID NO: 14359 - protein, 5 aa, Artificial Sequence
  Description of Artificial Sequence: Synthetic peptide
  XENP018878 vhCDR1
NYWMN

SEQ ID NO: 14360 - protein, 19 aa, Artificial Sequence
  Description of Artificial Sequence: Synthetic peptide
  XENP018878 vhCDR2
EIRLKSNNYATHYAEPVKG

SEQ ID NO: 14361 - protein, 11 aa, Artificial Sequence
  Description of Artificial Sequence: Synthetic peptide
  XENP018878 vhCDR3
YYGNYGGYFDV

SEQ ID NO: 14362 - protein, 11 aa, Artificial Sequence
  Description of Artificial Sequence: Synthetic peptide
  XENP018878 vlCDR1
RASQSVSNDVA

SEQ ID NO: 14363 - protein, 7 aa, Artificial Sequence
  Description of Artificial Sequence: Synthetic peptide
  XENP018878 vlCDR2
YASHRYT

SEQ ID NO: 14364 - protein, 9 aa, Artificial Sequence
  Description of Artificial Sequence: Synthetic peptide
  XENP018878 vlCDR3
QQDYHSPRT

SEQ ID NO: 14365 - protein, 249 aa, Artificial Sequence
  Description of Artificial Sequence: Synthetic polypeptide
  XENP018879 1G6_H1_L1.133_scFv(GKPGS)4
EVQLVESGGGLVKPGGSLRLSCAASGFTFSNYWMNWVRQAPGKGLEWVGEIRLKSNNYATHYAEPVKGRFTISRDDSKSTVYLQMNSLKTEDTAVYYCTRYYGNYGGYFDVWGAGTLVTVSSGKPGSGKPGSGKPGSGKPGSSIVMTQSPATLSVSPGERATLSCRASQSVSNDVAWYQQKPGQSPRLLINYASHRYTGVPDRFTGSGYGTEFTLTISSLQSEDFAVYFCQQDYDSPRTFGGGTKVEIK

SEQ ID NO: 14366 - protein, 122 aa, Artificial Sequence; identical to SEQ ID NO: 10922
  Description of Artificial Sequence: Synthetic polypeptide
  VH of XENP018879

SEQ ID NO: 14367 - protein, 107 aa, Artificial Sequence
  Description of Artificial Sequence: Synthetic polypeptide
  VL of XENP018879
SIVMTQSPATLSVSPGERATLSCRASQSVSNDVAWYQQKPGQSPRLLINYASHRYTGVPDRFTGSGYGTEFTLTISSLQSEDFAVYFCQQDYDSPRTFGGGTKVEIK

SEQ ID NO: 14368 - protein, 5 aa, Artificial Sequence
  Description of Artificial Sequence: Synthetic peptide
  XENP018879 vhCDR1
NYWMN

SEQ ID NO: 14369 - protein, 19 aa, Artificial Sequence
  Description of Artificial Sequence: Synthetic peptide
  XENP018879 vhCDR2
EIRLKSNNYATHYAEPVKG

SEQ ID NO: 14370 - protein, 11 aa, Artificial Sequence
  Description of Artificial Sequence: Synthetic peptide
  XENP018879 vhCDR3
YYGNYGGYFDV

SEQ ID NO: 14371 - protein, 11 aa, Artificial Sequence
  Description of Artificial Sequence: Synthetic peptide
  XENP018879 vlCDR1
RASQSVSNDVA

SEQ ID NO: 14372 - protein, 7 aa, Artificial Sequence
  Description of Artificial Sequence: Synthetic peptide
  XENP018879 vlCDR2
YASHRYT

SEQ ID NO: 14373 - protein, 9 aa, Artificial Sequence
  Description of Artificial Sequence: Synthetic peptide
  XENP018879 vlCDR3
QQDYDSPRT

SEQ ID NO: 14374 - protein, 249 aa, Artificial Sequence
  Description of Artificial Sequence: Synthetic polypeptide
  XENP018880 1G6_H1_L1.134_scFv(GKPGS)4
EVQLVESGGGLVKPGGSLRLSCAASGFTFSNYWMNWVRQAPGKGLEWVGEIRLKSNNYATHYAEPVKGRFTISRDDSKSTVYLQMNSLKTEDTAVYYCTRYYGNYGGYFDVWGAGTLVTVSSGKPGSGKPGSGKPGSGKPGSSIVMTQSPATLSVSPGERATLSCRASQSVSNDVAWYQQKPGQSPRLLINYASHRYTGVPDRFTGSGYGTEFTLTISSLQSEDFAVYFCQQDYKSPRTFGGGTKVEIK

SEQ ID NO: 14375 - protein, 122 aa, Artificial Sequence; identical to SEQ ID NO: 10922
  Description of Artificial Sequence: Synthetic polypeptide
  VH of XENP018880

SEQ ID NO: 14376 - protein, 107 aa, Artificial Sequence
  Description of Artificial Sequence: Synthetic polypeptide
  VL of XENP018880
SIVMTQSPATLSVSPGERATLSCRASQSVSNDVAWYQQKPGQSPRLLINYASHRYTGVPDRFTGSGYGTEFTLTISSLQSEDFAVYFCQQDYKSPRTFGGGTKVEIK

SEQ ID NO: 14377 - protein, 5 aa, Artificial Sequence
  Description of Artificial Sequence: Synthetic peptide
  XENP018880 vhCDR1
NYWMN

SEQ ID NO: 14378 - protein, 19 aa, Artificial Sequence
  Description of Artificial Sequence: Synthetic peptide
  XENP018880 vhCDR2
EIRLKSNNYATHYAEPVKG

SEQ ID NO: 14379 - protein, 11 aa, Artificial Sequence
  Description of Artificial Sequence: Synthetic peptide
  XENP018880 vhCDR3
YYGNYGGYFDV

SEQ ID NO: 14380 - protein, 11 aa, Artificial Sequence
  Description of Artificial Sequence: Synthetic peptide
  XENP018880 vlCDR1
RASQSVSNDVA

SEQ ID NO: 14381 - protein, 7 aa, Artificial Sequence
  Description of Artificial Sequence: Synthetic peptide
  XENP018880 vlCDR2
YASHRYT

SEQ ID NO: 14382 - protein, 9 aa, Artificial Sequence
  Description of Artificial Sequence: Synthetic peptide
  XENP018880 vlCDR3
QQDYKSPRT

SEQ ID NO: 14383 - protein, 249 aa, Artificial Sequence
  Description of Artificial Sequence: Synthetic polypeptide
  XENP018881 1G6_H1_L1.135_scFv(GKPGS)4
EVQLVESGGGLVKPGGSLRLSCAASGFTFSNYWMNWVRQAPGKGLEWVGEIRLKSNNYATHYAEPVKGRFTISRDDSKSTVYLQMNSLKTEDTAVYYCTRYYGNYGGYFDVWGAGTLVTVSSGKPGSGKPGSGKPGSGKPGSSIVMTQSPATLSVSPGERATLSCRASQSVSNDVAWYQQKPGQSPRLLINYASHRYTGVPDRFTGSGYGTEFTLTISSLQSEDFAVYFCQQDYFSPRTFGGGTKVEIK

SEQ ID NO: 14384 - protein, 122 aa, Artificial Sequence; identical to SEQ ID NO: 10922
  Description of Artificial Sequence: Synthetic polypeptide
  VH of XENP018881

SEQ ID NO: 14385 - protein, 107 aa, Artificial Sequence
  Description of Artificial Sequence: Synthetic polypeptide
  VL of XENP018881
SIVMTQSPATLSVSPGERATLSCRASQSVSNDVAWYQQKPGQSPRLLINYASHRYTGVPDRFTGSGYGTEFTLTISSLQSEDFAVYFCQQDYFSPRTFGGGTKVEIK

SEQ ID NO: 14386 - protein, 5 aa, Artificial Sequence
  Description of Artificial Sequence: Synthetic peptide
  XENP018881 vhCDR1
NYWMN

SEQ ID NO: 14387 - protein, 19 aa, Artificial Sequence
  Description of Artificial Sequence: Synthetic peptide
  XENP018881 vhCDR2
EIRLKSNNYATHYAEPVKG

SEQ ID NO: 14388 - protein, 11 aa, Artificial Sequence
  Description of Artificial Sequence: Synthetic peptide
  XENP018881 vhCDR3
YYGNYGGYFDV

SEQ ID NO: 14389 - protein, 11 aa, Artificial Sequence
  Description of Artificial Sequence: Synthetic peptide
  XENP018881 vlCDR1
RASQSVSNDVA

SEQ ID NO: 14390 - protein, 7 aa, Artificial Sequence
  Description of Artificial Sequence: Synthetic peptide
  XENP018881 vlCDR2
YASHRYT

SEQ ID NO: 14391 - protein, 9 aa, Artificial Sequence
  Description of Artificial Sequence: Synthetic peptide
  XENP018881 vlCDR3
QQDYFSPRT

SEQ ID NO: 14392 - protein, 249 aa, Artificial Sequence
  Description of Artificial Sequence: Synthetic polypeptide
  XENP018882 1G6_H1_L1.136_scFv(GKPGS)4
EVQLVESGGGLVKPGGSLRLSCAASGFTFSNYWMNWVRQAPGKGLEWVGEIRLKSNNYATHYAEPVKGRFTISRDDSKSTVYLQMNSLKTEDTAVYYCTRYYGNYGGYFDVWGAGTLVTVSSGKPGSGKPGSGKPGSGKPGSSIVMTQSPATLSVSPGERATLSCRASQSVSNDVAWYQQKPGQSPRLLINYASHRYTGVPDRFTGSGYGTEFTLTISSLQSEDFAVYFCQQDYSTPRTFGGGTKVEIK

SEQ ID NO: 14393 - protein, 122 aa, Artificial Sequence; identical to SEQ ID NO: 10922
  Description of Artificial Sequence: Synthetic polypeptide
  VH of XENP018882

SEQ ID NO: 14394 - protein, 107 aa, Artificial Sequence
  Description of Artificial Sequence: Synthetic polypeptide
  VL of XENP018882
SIVMTQSPATLSVSPGERATLSCRASQSVSNDVAWYQQKPGQSPRLLINYASHRYTGVPDRFTGSGYGTEFTLTISSLQSEDFAVYFCQQDYSTPRTFGGGTKVEIK

SEQ ID NO: 14395 - protein, 5 aa, Artificial Sequence
  Description of Artificial Sequence: Synthetic peptide
  XENP018882 vhCDR1
NYWMN

SEQ ID NO: 14396 - protein, 19 aa, Artificial Sequence
  Description of Artificial Sequence: Synthetic peptide
  XENP018882 vhCDR2
EIRLKSNNYATHYAEPVKG

SEQ ID NO: 14397 - protein, 11 aa, Artificial Sequence
  Description of Artificial Sequence: Synthetic peptide
  XENP018882 vhCDR3
YYGNYGGYFDV

SEQ ID NO: 14398 - protein, 11 aa, Artificial Sequence
  Description of Artificial Sequence: Synthetic peptide
  XENP018882 vlCDR1
RASQSVSNDVA

SEQ ID NO: 14399 - protein, 7 aa, Artificial Sequence
  Description of Artificial Sequence: Synthetic peptide
  XENP018882 vlCDR2
YASHRYT

SEQ ID NO: 14400 - protein, 9 aa, Artificial Sequence
  Description of Artificial Sequence: Synthetic peptide
  XENP018882 vlCDR3
QQDYSTPRT

SEQ ID NO: 14401 - protein, 249 aa, Artificial Sequence
  Description of Artificial Sequence: Synthetic polypeptide
  XENP018883 1G6_H1_L1.137_scFv(GKPGS)4
EVQLVESGGGLVKPGGSLRLSCAASGFTFSNYWMNWVRQAPGKGLEWVGEIRLKSNNYATHYAEPVKGRFTISRDDSKSTVYLQMNSLKTEDTAVYYCTRYYGNYGGYFDVWGAGTLVTVSSGKPGSGKPGSGKPGSGKPGSSIVMTQSPATLSVSPGERATLSCRASQSVSNDVAWYQQKPGQSPRLLINYASHRYTGVPDRFTGSGYGTEFTLTISSLQSEDFAVYFCQQDYSAPRTFGGGTKVEIK

SEQ ID NO: 14402 - protein, 122 aa, Artificial Sequence; identical to SEQ ID NO: 10922
  Description of Artificial Sequence: Synthetic polypeptide
  VH of XENP018883

SEQ ID NO: 14403 - protein, 107 aa, Artificial Sequence
  Description of Artificial Sequence: Synthetic polypeptide
  VL of XENP018883
SIVMTQSPATLSVSPGERATLSCRASQSVSNDVAWYQQKPGQSPRLLINYASHRYTGVPDRFTGSGYGTEFTLTISSLQSEDFAVYFCQQDYSAPRTFGGGTKVEIK

SEQ ID NO: 14404 - protein, 5 aa, Artificial Sequence
  Description of Artificial Sequence: Synthetic peptide
  XENP018883 vhCDR1
NYWMN

SEQ ID NO: 14405 - protein, 19 aa, Artificial Sequence
  Description of Artificial Sequence: Synthetic peptide
  XENP018883 vhCDR2
EIRLKSNNYATHYAEPVKG

SEQ ID NO: 14406 - protein, 11 aa, Artificial Sequence
  Description of Artificial Sequence: Synthetic peptide
  XENP018883 vhCDR3
YYGNYGGYFDV

SEQ ID NO: 14407 - protein, 11 aa, Artificial Sequence
  Description of Artificial Sequence: Synthetic peptide
  XENP018883 vlCDR1
RASQSVSNDVA

SEQ ID NO: 14408 - protein, 7 aa, Artificial Sequence
  Description of Artificial Sequence: Synthetic peptide
  XENP018883 vlCDR2
YASHRYT

SEQ ID NO: 14409 - protein, 9 aa, Artificial Sequence
  Description of Artificial Sequence: Synthetic peptide
  XENP018883 vlCDR3
QQDYSAPRT

SEQ ID NO: 14410 - protein, 249 aa, Artificial Sequence
  Description of Artificial Sequence: Synthetic polypeptide
  XENP018884 1G6_H1_L1.138_scFv(GKPGS)4
EVQLVESGGGLVKPGGSLRLSCAASGFTFSNYWMNWVRQAPGKGLEWVGEIRLKSNNYATHYAEPVKGRFTISRDDSKSTVYLQMNSLKTEDTAVYYCTRYYGNYGGYFDVWGAGTLVTVSSGKPGSGKPGSGKPGSGKPGSSIVMTQSPATLSVSPGERATLSCRASQSVSNDVAWYQQKPGQSPRLLINYASHRYTGVPDRFTGSGYGTEFTLTISSLQSEDFAVYFCQQDYSNPRTFGGGTKVEIK

SEQ ID NO: 14411 - protein, 122 aa, Artificial Sequence; identical to SEQ ID NO: 10922
  Description of Artificial Sequence: Synthetic polypeptide
  VH of XENP018884

SEQ ID NO: 14412 - protein, 107 aa, Artificial Sequence
  Description of Artificial Sequence: Synthetic polypeptide
  VL of XENP018884
SIVMTQSPATLSVSPGERATLSCRASQSVSNDVAWYQQKPGQSPRLLINYASHRYTGVPDRFTGSGYGTEFTLTISSLQSEDFAVYFCQQDYSNPRTFGGGTKVEIK

SEQ ID NO: 14413 - protein, 5 aa, Artificial Sequence
  Description of Artificial Sequence: Synthetic peptide
  XENP018884 vhCDR1
NYWMN

SEQ ID NO: 14414 - protein, 19 aa, Artificial Sequence
  Description of Artificial Sequence: Synthetic peptide
  XENP018884 vhCDR2
EIRLKSNNYATHYAEPVKG

SEQ ID NO: 14415 - protein, 11 aa, Artificial Sequence
  Description of Artificial Sequence: Synthetic peptide
  XENP018884 vhCDR3
YYGNYGGYFDV

SEQ ID NO: 14416 - protein, 11 aa, Artificial Sequence
  Description of Artificial Sequence: Synthetic peptide
  XENP018884 vlCDR1
RASQSVSNDVA

SEQ ID NO: 14417 - protein, 7 aa, Artificial Sequence
  Description of Artificial Sequence: Synthetic peptide
  XENP018884 vlCDR2
YASHRYT

SEQ ID NO: 14418 - protein, 9 aa, Artificial Sequence
  Description of Artificial Sequence: Synthetic peptide
  XENP018884 vlCDR3
QQDYSNPRT

SEQ ID NO: 14419 - protein, 249 aa, Artificial Sequence
  Description of Artificial Sequence: Synthetic polypeptide
  XENP018885 1G6_H1_L1.139_scFv(GKPGS)4
EVQLVESGGGLVKPGGSLRLSCAASGFTFSNYWMNWVRQAPGKGLEWVGEIRLKSNNYATHYAEPVKGRFTISRDDSKSTVYLQMNSLKTEDTAVYYCTRYYGNYGGYFDVWGAGTLVTVSSGKPGSGKPGSGKPGSGKPGSSIVMTQSPATLSVSPGERATLSCRASQSVSNDVAWYQQKPGQSPRLLINYASHRYTGVPDRFTGSGYGTEFTLTISSLQSEDFAVYFCQQDYSGPRTFGGGTKVEIK

SEQ ID NO: 14420 - protein, 122 aa, Artificial Sequence; identical to SEQ ID NO: 10922
  Description of Artificial Sequence: Synthetic polypeptide
  VH of XENP018885

SEQ ID NO: 14421 - protein, 107 aa, Artificial Sequence
  Description of Artificial Sequence: Synthetic polypeptide
  VL of XENP018885
SIVMTQSPATLSVSPGERATLSCRASQSVSNDVAWYQQKPGQSPRLLINYASHRYTGVPDRFTGSGYGTEFTLTISSLQSEDFAVYFCQQDYSGPRTFGGGTKVEIK

SEQ ID NO: 14422 - protein, 5 aa, Artificial Sequence
  Description of Artificial Sequence: Synthetic peptide
  XENP018885 vhCDR1
NYWMN

SEQ ID NO: 14423 - protein, 19 aa, Artificial Sequence
  Description of Artificial Sequence: Synthetic peptide
  XENP018885 vhCDR2
EIRLKSNNYATHYAEPVKG

SEQ ID NO: 14424 - protein, 11 aa, Artificial Sequence
  Description of Artificial Sequence: Synthetic peptide
  XENP018885 vhCDR3
YYGNYGGYFDV

SEQ ID NO: 14425 - protein, 11 aa, Artificial Sequence
  Description of Artificial Sequence: Synthetic peptide
  XENP018885 vlCDR1
RASQSVSNDVA

SEQ ID NO: 14426 - protein, 7 aa, Artificial Sequence
  Description of Artificial Sequence: Synthetic peptide
  XENP018885 vlCDR2
YASHRYT

SEQ ID NO: 14427 - protein, 9 aa, Artificial Sequence
  Description of Artificial Sequence: Synthetic peptide
  XENP018885 vlCDR3
QQDYSGPRT

SEQ ID NO: 14428 - protein, 249 aa, Artificial Sequence
  Description of Artificial Sequence: Synthetic polypeptide
  XENP018886 1G6_H1_L1.140_scFv(GKPGS)4
EVQLVESGGGLVKPGGSLRLSCAASGFTFSNYWMNWVRQAPGKGLEWVGEIRLKSNNYATHYAEPVKGRFTISRDDSKSTVYLQMNSLKTEDTAVYYCTRYYGNYGGYFDVWGAGTLVTVSSGKPGSGKPGSGKPGSGKPGSSIVMTQSPATLSVSPGERATLSCRASQSVSNDVAWYQQKPGQSPRLLINYASHRYTGVPDRFTGSGYGTEFTLTISSLQSEDFAVYFCQQDYSVPRTFGGGTKVEIK

SEQ ID NO: 14429 - protein, 122 aa, Artificial Sequence; identical to SEQ ID NO: 10922
  Description of Artificial Sequence: Synthetic polypeptide
  VH of XENP018886

SEQ ID NO: 14430 - protein, 107 aa, Artificial Sequence
  Description of Artificial Sequence: Synthetic polypeptide
  VL of XENP018886
SIVMTQSPATLSVSPGERATLSCRASQSVSNDVAWYQQKPGQSPRLLINYASHRYTGVPDRFTGSGYGTEFTLTISSLQSEDFAVYFCQQDYSVPRTFGGGTKVEIK

SEQ ID NO: 14431 - protein, 5 aa, Artificial Sequence
  Description of Artificial Sequence: Synthetic peptide
  XENP018886 vhCDR1
NYWMN

SEQ ID NO: 14432 - protein, 19 aa, Artificial Sequence
  Description of Artificial Sequence: Synthetic peptide
  XENP018886 vhCDR2
EIRLKSNNYATHYAEPVKG

SEQ ID NO: 14433 - protein, 11 aa, Artificial Sequence
  Description of Artificial Sequence: Synthetic peptide
  XENP018886 vhCDR3
YYGNYGGYFDV

SEQ ID NO: 14434 - protein, 11 aa, Artificial Sequence
  Description of Artificial Sequence: Synthetic peptide
  XENP018886 vlCDR1
RASQSVSNDVA

SEQ ID NO: 14435 - protein, 7 aa, Artificial Sequence
  Description of Artificial Sequence: Synthetic peptide
  XENP018886 vlCDR2
YASHRYT

SEQ ID NO: 14436 - protein, 9 aa, Artificial Sequence
  Description of Artificial Sequence: Synthetic peptide
  XENP018886 vlCDR3
QQDYSVPRT

SEQ ID NO: 14437 - protein, 249 aa, Artificial Sequence
  Description of Artificial Sequence: Synthetic polypeptide
  XENP018887 1G6_H1_L1.141_scFv(GKPGS)4
EVQLVESGGGLVKPGGSLRLSCAASGFTFSNYWMNWVRQAPGKGLEWVGEIRLKSNNYATHYAEPVKGRFTISRDDSKSTVYLQMNSLKTEDTAVYYCTRYYGNYGGYFDVWGAGTLVTVSSGKPGSGKPGSGKPGSGKPGSSIVMTQSPATLSVSPGERATLSCRASQSVSNDVAWYQQKPGQSPRLLINYASHRYTGVPDRFTGSGYGTEFTLTISSLQSEDFAVYFCQQDYSHPRTFGGGTKVEIK

SEQ ID NO: 14438 - protein, 122 aa, Artificial Sequence; identical to SEQ ID NO: 10922
  Description of Artificial Sequence: Synthetic polypeptide
  VH of XENP018887

SEQ ID NO: 14439 - protein, 107 aa, Artificial Sequence
  Description of Artificial Sequence: Synthetic polypeptide
  VL of XENP018887
SIVMTQSPATLSVSPGERATLSCRASQSVSNDVAWYQQKPGQSPRLLINYASHRYTGVPDRFTGSGYGTEFTLTISSLQSEDFAVYFCQQDYSHPRTFGGGTKVEIK

SEQ ID NO: 14440 - protein, 5 aa, Artificial Sequence
  Description of Artificial Sequence: Synthetic peptide
  XENP018887 vhCDR1
NYWMN

SEQ ID NO: 14441 - protein, 19 aa, Artificial Sequence
  Description of Artificial Sequence: Synthetic peptide
  XENP018887 vhCDR2
EIRLKSNNYATHYAEPVKG

SEQ ID NO: 14442 - protein, 11 aa, Artificial Sequence
  Description of Artificial Sequence: Synthetic peptide
  XENP018887 vhCDR3
YYGNYGGYFDV

SEQ ID NO: 14443 - protein, 11 aa, Artificial Sequence
  Description of Artificial Sequence: Synthetic peptide
  XENP018887 vlCDR1
RASQSVSNDVA

SEQ ID NO: 14444 - protein, 7 aa, Artificial Sequence
  Description of Artificial Sequence: Synthetic peptide
  XENP018887 vlCDR2
YASHRYT

SEQ ID NO: 14445 - protein, 9 aa, Artificial Sequence
  Description of Artificial Sequence: Synthetic peptide
  XENP018887 vlCDR3
QQDYSHPRT

SEQ ID NO: 14446 - protein, 249 aa, Artificial Sequence
  Description of Artificial Sequence: Synthetic polypeptide
  XENP018888 1G6_H1_L1.142_scFv(GKPGS)4
EVQLVESGGGLVKPGGSLRLSCAASGFTFSNYWMNWVRQAPGKGLEWVGEIRLKSNNYATHYAEPVKGRFTISRDDSKSTVYLQMNSLKTEDTAVYYCTRYYGNYGGYFDVWGAGTLVTVSSGKPGSGKPGSGKPGSGKPGSSIVMTQSPATLSVSPGERATLSCRASQSVSNDVAWYQQKPGQSPRLLINYASHRYTGVPDRFTGSGYGTEFTLTISSLQSEDFAVYFCQQDYSDPRTFGGGTKVEIK

SEQ ID NO: 14447 - protein, 122 aa, Artificial Sequence; identical to SEQ ID NO: 10922
  Description of Artificial Sequence: Synthetic polypeptide
  VH of XENP018888

SEQ ID NO: 14448 - protein, 107 aa, Artificial Sequence
  Description of Artificial Sequence: Synthetic polypeptide
  VL of XENP018888
SIVMTQSPATLSVSPGERATLSCRASQSVSNDVAWYQQKPGQSPRLLINYASHRYTGVPDRFTGSGYGTEFTLTISSLQSEDFAVYFCQQDYSDPRTFGGGTKVEIK

SEQ ID NO: 14449 - protein, 5 aa, Artificial Sequence
  Description of Artificial Sequence: Synthetic peptide
  XENP018888 vhCDR1
NYWMN

SEQ ID NO: 14450 - protein, 19 aa, Artificial Sequence
  Description of Artificial Sequence: Synthetic peptide
  XENP018888 vhCDR2
EIRLKSNNYATHYAEPVKG

SEQ ID NO: 14451 - protein, 11 aa, Artificial Sequence
  Description of Artificial Sequence: Synthetic peptide
  XENP018888 vhCDR3
YYGNYGGYFDV

SEQ ID NO: 14452 - protein, 11 aa, Artificial Sequence
  Description of Artificial Sequence: Synthetic peptide
  XENP018888 vlCDR1
RASQSVSNDVA

SEQ ID NO: 14453 - protein, 7 aa, Artificial Sequence
  Description of Artificial Sequence: Synthetic peptide
  XENP018888 vlCDR2
YASHRYT

SEQ ID NO: 14454 - protein, 9 aa, Artificial Sequence
  Description of Artificial Sequence: Synthetic peptide
  XENP018888 vlCDR3
QQDYSDPRT

SEQ ID NO: 14455 - protein, 249 aa, Artificial Sequence
  Description of Artificial Sequence: Synthetic polypeptide
  XENP018889 1G6_H1_L1.143_scFv(GKPGS)4
EVQLVESGGGLVKPGGSLRLSCAASGFTFSNYWMNWVRQAPGKGLEWVGEIRLKSNNYATHYAEPVKGRFTISRDDSKSTVYLQMNSLKTEDTAVYYCTRYYGNYGGYFDVWGAGTLVTVSSGKPGSGKPGSGKPGSGKPGSSIVMTQSPATLSVSPGERATLSCRASQSVSNDVAWYQQKPGQSPRLLINYASHRYTGVPDRFTGSGYGTEFTLTISSLQSEDFAVYFCQQDYSKPRTFGGGTKVEIK

SEQ ID NO: 14456 - protein, 122 aa, Artificial Sequence; identical to SEQ ID NO: 10922
  Description of Artificial Sequence: Synthetic polypeptide
  VH of XENP018889

SEQ ID NO: 14457 - protein, 107 aa, Artificial Sequence
  Description of Artificial Sequence: Synthetic polypeptide
  VL of XENP018889
SIVMTQSPATLSVSPGERATLSCRASQSVSNDVAWYQQKPGQSPRLLINYASHRYTGVPDRFTGSGYGTEFTLTISSLQSEDFAVYFCQQDYSKPRTFGGGTKVEIK

SEQ ID NO: 14458 - protein, 5 aa, Artificial Sequence
  Description of Artificial Sequence: Synthetic peptide
  XENP018889 vhCDR1
NYWMN

SEQ ID NO: 14459 - protein, 19 aa, Artificial Sequence
  Description of Artificial Sequence: Synthetic peptide
  XENP018889 vhCDR2
EIRLKSNNYATHYAEPVKG

SEQ ID NO: 14460 - protein, 11 aa, Artificial Sequence
  Description of Artificial Sequence: Synthetic peptide
  XENP018889 vhCDR3
YYGNYGGYFDV

SEQ ID NO: 14461 - protein, 11 aa, Artificial Sequence
  Description of Artificial Sequence: Synthetic peptide
  XENP018889 vlCDR1
RASQSVSNDVA

SEQ ID NO: 14462 - protein, 7 aa, Artificial Sequence
  Description of Artificial Sequence: Synthetic peptide
  XENP018889 vlCDR2
YASHRYT

SEQ ID NO: 14463 - protein, 9 aa, Artificial Sequence
  Description of Artificial Sequence: Synthetic peptide
  XENP018889 vlCDR3
QQDYSKPRT

SEQ ID NO: 14464 - protein, 249 aa, Artificial Sequence
  Description of Artificial Sequence: Synthetic polypeptide
  XENP018890 1G6_H1_L1.144_scFv(GKPGS)4
EVQLVESGGGLVKPGGSLRLSCAASGFTFSNYWMNWVRQAPGKGLEWVGEIRLKSNNYATHYAEPVKGRFTISRDDSKSTVYLQMNSLKTEDTAVYYCTRYYGNYGGYFDVWGAGTLVTVSSGKPGSGKPGSGKPGSGKPGSSIVMTQSPATLSVSPGERATLSCRASQSVSNDVAWYQQKPGQSPRLLINYASHRYTGVPDRFTGSGYGTEFTLTISSLQSEDFAVYFCQQDYSFPRTFGGGTKVEIK

SEQ ID NO: 14465 - protein, 122 aa, Artificial Sequence; identical to SEQ ID NO: 10922
  Description of Artificial Sequence: Synthetic polypeptide
  VH of XENP018890

SEQ ID NO: 14466 - protein, 107 aa, Artificial Sequence
  Description of Artificial Sequence: Synthetic polypeptide
  VL of XENP018890
SIVMTQSPATLSVSPGERATLSCRASQSVSNDVAWYQQKPGQSPRLLINYASHRYTGVPDRFTGSGYGTEFTLTISSLQSEDFAVYFCQQDYSFPRTFGGGTKVEIK

SEQ ID NO: 14467 - protein, 5 aa, Artificial Sequence
  Description of Artificial Sequence: Synthetic peptide
  XENP018890 vhCDR1
NYWMN

SEQ ID NO: 14468 - protein, 19 aa, Artificial Sequence
  Description of Artificial Sequence: Synthetic peptide
  XENP018890 vhCDR2
EIRLKSNNYATHYAEPVKG

SEQ ID NO: 14469 - protein, 11 aa, Artificial Sequence
  Description of Artificial Sequence: Synthetic peptide
  XENP018890 vhCDR3
YYGNYGGYFDV

SEQ ID NO: 14470 - protein, 11 aa, Artificial Sequence
  Description of Artificial Sequence: Synthetic peptide
  XENP018890 vlCDR1
RASQSVSNDVA

SEQ ID NO: 14471 - protein, 7 aa, Artificial Sequence
  Description of Artificial Sequence: Synthetic peptide
  XENP018890 vlCDR2
YASHRYT

SEQ ID NO: 14472 - protein, 9 aa, Artificial Sequence
  Description of Artificial Sequence: Synthetic peptide
  XENP018890 vlCDR3
QQDYSFPRT

SEQ ID NO: 14473 - protein, 249 aa, Artificial Sequence
  Description of Artificial Sequence: Synthetic polypeptide
  XENP018891 1G6_H1_L1.145_scFv(GKPGS)4
EVQLVESGGGLVKPGGSLRLSCAASGFTFSNYWMNWVRQAPGKGLEWVGEIRLKSNNYATHYAEPVKGRFTISRDDSKSTVYLQMNSLKTEDTAVYYCTRYYGNYGGYFDVWGAGTLVTVSSGKPGSGKPGSGKPGSGKPGSSIVMTQSPATLSVSPGERATLSCRASQSVSNDVAWYQQKPGQSPRLLINYASHRYTGVPDRFTGSGYGTEFTLTISSLQSEDFAVYFCQQDYSSPRTFGGGTKLEIK

SEQ ID NO: 14474 - protein, 122 aa, Artificial Sequence; identical to SEQ ID NO: 10922
  Description of Artificial Sequence: Synthetic polypeptide
  VH of XENP018891

SEQ ID NO: 14475 - protein, 107 aa, Artificial Sequence
  Description of Artificial Sequence: Synthetic polypeptide
  VL of XENP018891
SIVMTQSPATLSVSPGERATLSCRASQSVSNDVAWYQQKPGQSPRLLINYASHRYTGVPDRFTGSGYGTEFTLTISSLQSEDFAVYFCQQDYSSPRTFGGGTKLEIK

SEQ ID NO: 14476 - protein, 5 aa, Artificial Sequence
  Description of Artificial Sequence: Synthetic peptide
  XENP018891 vhCDR1
NYWMN

SEQ ID NO: 14477 - protein, 19 aa, Artificial Sequence
  Description of Artificial Sequence: Synthetic peptide
  XENP018891 vhCDR2
EIRLKSNNYATHYAEPVKG

SEQ ID NO: 14478 - protein, 11 aa, Artificial Sequence
  Description of Artificial Sequence: Synthetic peptide
  XENP018891 vhCDR3
YYGNYGGYFDV

SEQ ID NO: 14479 - protein, 11 aa, Artificial Sequence
  Description of Artificial Sequence: Synthetic peptide
  XENP018891 vlCDR1
RASQSVSNDVA

SEQ ID NO: 14480 - protein, 7 aa, Artificial Sequence
  Description of Artificial Sequence: Synthetic peptide
  XENP018891 vlCDR2
YASHRYT

SEQ ID NO: 14481 - protein, 9 aa, Artificial Sequence
  Description of Artificial Sequence: Synthetic peptide
  XENP018891 vlCDR3
QQDYSSPRT

SEQ ID NO: 14482 - protein, 249 aa, Artificial Sequence
  Description of Artificial Sequence: Synthetic polypeptide
  XENP018895 1G6_H0L0_scFv(GKPGS)4
EVKLEESGGGLVQPGGSMKLSCVASGFTFSNYWMNWVRQSPEKGLEWVAEIRLKSNNYATHYAESVKGRFTISRDDSKSSVYLQMNNLRAEDTGIYYCTRYYGNYGGYFDVWGAGTTVTVSSGKPGSGKPGSGKPGSGKPGSSIVMTQTPKFLLVSAGDRVTITCKASQSVSNDVAWYQQKPGQSPKLLINYASHRYTGVPDRFTGSGYGTDFTFTISTVQAEDLAVYFCQQDYSSPRTFGGGTKLEIK

SEQ ID NO: 14483 - protein, 122 aa, Artificial Sequence
  Description of Artificial Sequence: Synthetic polypeptide
  VH of XENP018895
EVKLEESGGGLVQPGGSMKLSCVASGFTFSNYWMNWVRQSPEKGLEWVAEIRLKSNNYATHYAESVKGRFTISRDDSKSSVYLQMNNLRAEDTGIYYCTRYYGNYGGYFDVWGAGTTVTVSS

SEQ ID NO: 14484 - protein, 107 aa, Artificial Sequence
  Description of Artificial Sequence: Synthetic polypeptide
  VL of XENP018895
SIVMTQTPKFLLVSAGDRVTITCKASQSVSNDVAWYQQKPGQSPKLLINYASHRYTGVPDRFTGSGYGTDFTFTISTVQAEDLAVYFCQQDYSSPRTFGGGTKLEIK

SEQ ID NO: 14485 - protein, 5 aa, Artificial Sequence
  Description of Artificial Sequence: Synthetic peptide
  XENP018895 vhCDR1
NYWMN

SEQ ID NO: 14486 - protein, 19 aa, Artificial Sequence
  Description of Artificial Sequence: Synthetic peptide
  XENP018895 vhCDR2
EIRLKSNNYATHYAESVKG

SEQ ID NO: 14487 - protein, 11 aa, Artificial Sequence
  Description of Artificial Sequence: Synthetic peptide
  XENP018895 vhCDR3
YYGNYGGYFDV

SEQ ID NO: 14488 - protein, 11 aa, Artificial Sequence
  Description of Artificial Sequence: Synthetic peptide
  XENP018895 vlCDR1
KASQSVSNDVA

SEQ ID NO: 14489 - protein, 7 aa, Artificial Sequence
  Description of Artificial Sequence: Synthetic peptide
  XENP018895 vlCDR2
YASHRYT

SEQ ID NO: 14490 - protein, 9 aa, Artificial Sequence
  Description of Artificial Sequence: Synthetic peptide
  XENP018895 vlCDR3
QQDYSSPRT

SEQ ID NO: 14491 - protein, 249 aa, Artificial Sequence
  Description of Artificial Sequence: Synthetic polypeptide
  XENP018896 1G6_L1H1_scFv(GKPGS)4
SIVMTQSPATLSVSPGERATLSCRASQSVSNDVAWYQQKPGQSPRLLINYASHRYTGVPDRFTGSGYGTEFTLTISSLQSEDFAVYFCQQDYSSPRTFGGGTKVEIKGKPGSGKPGSGKPGSGKPGSEVQLVESGGGLVKPGGSLRLSCAASGFTFSNYWMNWVRQAPGKGLEWVGEIRLKSNNYATHYAEPVKGRFTISRDDSKSTVYLQMNSLKTEDTAVYYCTRYYGNYGGYFDVWGAGTLVTVSS

SEQ ID NO: 14492 - protein, 107 aa, Artificial Sequence; identical to SEQ ID NO: 10923
  Description of Artificial Sequence: Synthetic polypeptide
  VH of XENP018896

SEQ ID NO: 14493 - protein, 122 aa, Artificial Sequence; identical to SEQ ID NO: 10922
  Description of Artificial Sequence: Synthetic polypeptide
  VL of XENP018896

SEQ ID NO: 14494 - protein, 11 aa, Artificial Sequence
  Description of Artificial Sequence: Synthetic peptide
  XENP018896 vhCDR1
RASQSVSNDVA

SEQ ID NO: 14495 - protein, 7 aa, Artificial Sequence
  Description of Artificial Sequence: Synthetic peptide
  XENP018896 vhCDR2
YASHRYT

SEQ ID NO: 14496 - protein, 9 aa, Artificial Sequence
  Description of Artificial Sequence: Synthetic peptide
  XENP018896 vhCDR3
QQDYSSPRT

SEQ ID NO: 14497 - protein, 5 aa, Artificial Sequence
  Description of Artificial Sequence: Synthetic peptide
  XENP018896 vlCDR1
NYWMN

SEQ ID NO: 14498 - protein, 19 aa, Artificial Sequence
  Description of Artificial Sequence: Synthetic peptide
  XENP018896 vlCDR2
EIRLKSNNYATHYAEPVKG

SEQ ID NO: 14499 - protein, 11 aa, Artificial Sequence
  Description of Artificial Sequence: Synthetic peptide
  XENP018896 vlCDR3
YYGNYGGYFDV

SEQ ID NO: 14500 - protein, 244 aa, Artificial Sequence
  Description of Artificial Sequence: Synthetic polypeptide
  XENP018901 6A3_H0L0_scFv(GKPGS)4
EVKLVESGGGLVKPGGSLKLSCAASGFTFSSYGMSWVRQTPEKRLEWVATISGGGRYTYYPDSVKGRFTISRDNAKNNLYLQMSSLRSEDTALYYCASYYDSSFDYWGQGTTLTVSSGKPGSGKPGSGKPGSGKPGSDIVMTQSHKFMSTSVGDRVSITCKASQDVGTAVAWYQQKPGQSPKLLIYWASTRHTGVPDRFTGSGSGTDFTLTISNVQSEDLADYFCQHYSIYPWTFGGGTKLEIK

SEQ ID NO: 14501 - protein, 117 aa, Artificial Sequence
  Description of Artificial Sequence: Synthetic polypeptide
  VH of XENP018901
EVKLVESGGGLVKPGGSLKLSCAASGFTFSSYGMSWVRQTPEKRLEWVATISGGGRYTYYPDSVKGRFTISRDNAKNNLYLQMSSLRSEDTALYYCASYYDSSFDYWGQGTTLTVSS

SEQ ID NO: 14502 - protein, 107 aa, Artificial Sequence
  Description of Artificial Sequence: Synthetic polypeptide
  VL of XENP018901
DIVMTQSHKFMSTSVGDRVSITCKASQDVGTAVAWYQQKPGQSPKLLIYWASTRHTGVPDRFTGSGSGTDFTLTISNVQSEDLADYFCQHYSIYPWTFGGGTKLEIK

SEQ ID NO: 14503 - protein, 5 aa, Artificial Sequence
  Description of Artificial Sequence: Synthetic peptide
  XENP018901 vhCDR1
SYGMS

SEQ ID NO: 14504 - protein, 17 aa, Artificial Sequence
  Description of Artificial Sequence: Synthetic peptide
  XENP018901 vhCDR2
TISGGGRYTYYPDSVKG

SEQ ID NO: 14505 - protein, 8 aa, Artificial Sequence
  Description of Artificial Sequence: Synthetic peptide
  XENP018901 vhCDR3
YYDSSFDY

SEQ ID NO: 14506 - protein, 11 aa, Artificial Sequence
  Description of Artificial Sequence: Synthetic peptide
  XENP018901 vlCDR1
KASQDVGTAVA

SEQ ID NO: 14507 - protein, 7 aa, Artificial Sequence
  Description of Artificial Sequence: Synthetic peptide
  XENP018901 vlCDR2
WASTRHT

SEQ ID NO: 14508 - protein, 9 aa, Artificial Sequence
  Description of Artificial Sequence: Synthetic peptide
  XENP018901 vlCDR3
QHYSIYPWT

SEQ ID NO: 14509 - protein, 244 aa, Artificial Sequence
  Description of Artificial Sequence: Synthetic polypeptide
  XENP018902 6A3_L3_H1.1_scFv(GKPGS)4
DIVMTQSPSSLSASVGDRVTITCRASQDVGTAVAWYQQKPGKSPKLLIYWASTRHTGVPDRFTGSGSGTDFTLTISSLQPEDFATYFCQHYSIYPWTFGGGTKVEIKGKPGSGKPGSGKPGSGKPGSEVQLLESGGGLVQPGGSLRLSCAASGFTFSSYGMSWVRQAPGKGLEWVSTISGGGRYTYYPDSVKGRFTISRDNSKNTLYLQMNSLRAEDTAVYYCASYYDSSFDYWGQGTLVTVSS

SEQ ID NO: 14510 - protein, 107 aa, Artificial Sequence; identical to SEQ ID NO: 11013
  Description of Artificial Sequence: Synthetic polypeptide
  VH of XENP018902

SEQ ID NO: 14511 - protein, 117 aa, Artificial Sequence; identical to SEQ ID NO: 11030
  Description of Artificial Sequence: Synthetic polypeptide
  VL of XENP018902

SEQ ID NO: 14512 - protein, 11 aa, Artificial Sequence
  Description of Artificial Sequence: Synthetic peptide
  XENP018902 vhCDR1
RASQDVGTAVA

SEQ ID NO: 14513 - protein, 7 aa, Artificial Sequence
  Description of Artificial Sequence: Synthetic peptide
  XENP018902 vhCDR2
WASTRHT

SEQ ID NO: 14514 - protein, 9 aa, Artificial Sequence
  Description of Artificial Sequence: Synthetic peptide
  XENP018902 vhCDR3
QHYSIYPWT

SEQ ID NO: 14515 - protein, 5 aa, Artificial Sequence
  Description of Artificial Sequence: Synthetic peptide
  XENP018902 vlCDR1
SYGMS

SEQ ID NO: 14516 - protein, 17 aa, Artificial Sequence
  Description of Artificial Sequence: Synthetic peptide
  XENP018902 vlCDR2
TISGGGRYTYYPDSVKG

SEQ ID NO: 14517 - protein, 9 aa, Artificial Sequence
  Description of Artificial Sequence: Synthetic peptide
  XENP018902 vlCDR3
SYYDSSFDY

SEQ ID NO: 14518 - protein, 249 aa, Artificial Sequence
  Description of Artificial Sequence: Synthetic polypeptide
  XENP018921 1G6_H1L3_scFv(GKPGS)4
EVQLVESGGGLVKPGGSLRLSCAASGFTFSNYWMNWVRQAPGKGLEWVGEIRLKSNNYATHYAEPVKGRFTISRDDSKSTVYLQMNSLKTEDTAVYYCTRYYGNYGGYFDVWGAGTLVTVSSGKPGSGKPGSGKPGSGKPGSSIVMTQSPLSLPVTPGEPASISCRASQSVSNDVAWYLQKPGQSPQLLINYASHRYTGVPDRFTGSGYGTDFTLKISRVEAEDVGVYFCQQDYSSPRTFGGGTKVEIK

SEQ ID NO: 14519 - protein, 122 aa, Artificial Sequence; identical to SEQ ID NO: 10922
  Description of Artificial Sequence: Synthetic polypeptide
  VH of XENP018921

SEQ ID NO: 14520 - protein, 107 aa, Artificial Sequence
  Description of Artificial Sequence: Synthetic polypeptide
  VL of XENP018921
SIVMTQSPLSLPVTPGEPASISCRASQSVSNDVAWYLQKPGQSPQLLINYASHRYTGVPDRFTGSGYGTDFTLKISRVEAEDVGVYFCQQDYSSPRTFGGGTKVEIK

SEQ ID NO: 14521 - protein, 5 aa, Artificial Sequence
  Description of Artificial Sequence: Synthetic peptide
  XENP018921 vhCDR1
NYWMN

SEQ ID NO: 14522 - protein, 19 aa, Artificial Sequence
  Description of Artificial Sequence: Synthetic peptide
  XENP018921 vhCDR2
EIRLKSNNYATHYAEPVKG

SEQ ID NO: 14523 - protein, 11 aa, Artificial Sequence
  Description of Artificial Sequence: Synthetic peptide
  XENP018921 vhCDR3
YYGNYGGYFDV

SEQ ID NO: 14524 - protein, 11 aa, Artificial Sequence
  Description of Artificial Sequence: Synthetic peptide
  XENP018921 vlCDR1
RASQSVSNDVA

SEQ ID NO: 14525 - protein, 7 aa, Artificial Sequence
  Description of Artificial Sequence: Synthetic peptide
  XENP018921 vlCDR2
YASHRYT

SEQ ID NO: 14526 - protein, 9 aa, Artificial Sequence
  Description of Artificial Sequence: Synthetic peptide
  XENP018921 vlCDR3
QQDYSSPRT

SEQ ID NO: 14527 - protein, 249 aa, Artificial Sequence
  Description of Artificial Sequence: Synthetic polypeptide
  XENP018922 1G6_H1L4_scFv(GKPGS)4
EVQLVESGGGLVKPGGSLRLSCAASGFTFSNYWMNWVRQAPGKGLEWVGEIRLKSNNYATHYAEPVKGRFTISRDDSKSTVYLQMNSLKTEDTAVYYCTRYYGNYGGYFDVWGAGTLVTVSSGKPGSGKPGSGKPGSGKPGSSIVMTQSPGTLSLSPGERATLSCRASQSVSNDVAWYQQKPGQSPRLLINYASHRYTGVPDRFTGSGYGTDFTLTISRLEPEDFAVYFCQQDYSSPRTFGGGTKVEIK

SEQ ID NO: 14528 - protein, 122 aa, Artificial Sequence; identical to SEQ ID NO: 10922
  Description of Artificial Sequence: Synthetic polypeptide
  VH of XENP018922

SEQ ID NO: 14529 - protein, 107 aa, Artificial Sequence
  Description of Artificial Sequence: Synthetic polypeptide
  VL of XENP018922
SIVMTQSPGTLSLSPGERATLSCRASQSVSNDVAWYQQKPGQSPRLLINYASHRYTGVPDRFTGSGYGTDFTLTISRLEPEDFAVYFCQQDYSSPRTFGGGTKVEIK

SEQ ID NO: 14530 - protein, 5 aa, Artificial Sequence
  Description of Artificial Sequence: Synthetic peptide
  XENP018922 vhCDR1
NYWMN

SEQ ID NO: 14531 - protein, 19 aa, Artificial Sequence
  Description of Artificial Sequence: Synthetic peptide
  XENP018922 vhCDR2
EIRLKSNNYATHYAEPVKG

SEQ ID NO: 14532 - protein, 11 aa, Artificial Sequence
  Description of Artificial Sequence: Synthetic peptide
  XENP018922 vhCDR3
YYGNYGGYFDV

SEQ ID NO: 14533 - protein, 11 aa, Artificial Sequence
  Description of Artificial Sequence: Synthetic peptide
  XENP018922 vlCDR1
RASQSVSNDVA

SEQ ID NO: 14534 - protein, 7 aa, Artificial Sequence
  Description of Artificial Sequence: Synthetic peptide
  XENP018922 vlCDR2
YASHRYT

SEQ ID NO: 14535 - protein, 9 aa, Artificial Sequence
  Description of Artificial Sequence: Synthetic peptide
  XENP018922 vlCDR3
QQDYSSPRT

SEQ ID NO: 14536 - protein, 249 aa, Artificial Sequence
  Description of Artificial Sequence: Synthetic polypeptide
  XENP018923 1G6_H1L5_scFv(GKPGS)4
EVQLVESGGGLVKPGGSLRLSCAASGFTFSNYWMNWVRQAPGKGLEWVGEIRLKSNNYATHYAEPVKGRFTISRDDSKSTVYLQMNSLKTEDTAVYYCTRYYGNYGGYFDVWGAGTLVTVSSGKPGSGKPGSGKPGSGKPGSSIVMTQSPDSLAVSLGERATINCKASQSVSNDVAWYQQKPGQSPKLLINYASHRYTGVPDRFTGSGYGTDFTLTISSLQAEDVAVYFCQQDYSSPRTFGGGTKVEIK

SEQ ID NO: 14537 - protein, 122 aa, Artificial Sequence; identical to SEQ ID NO: 10922
  Description of Artificial Sequence: Synthetic polypeptide
  VH of XENP018923

SEQ ID NO: 14538 - protein, 107 aa, Artificial Sequence
  Description of Artificial Sequence: Synthetic polypeptide
  VL of XENP018923
SIVMTQSPDSLAVSLGERATINCKASQSVSNDVAWYQQKPGQSPKLLINYASHRYTGVPDRFTGSGYGTDFTLTISSLQAEDVAVYFCQQDYSSPRTFGGGTKVEIK

SEQ ID NO: 14539 - protein, 5 aa, Artificial Sequence
  Description of Artificial Sequence: Synthetic peptide
  XENP018923 vhCDR1
NYWMN

SEQ ID NO: 14540 - protein, 19 aa, Artificial Sequence
  Description of Artificial Sequence: Synthetic peptide
  XENP018923 vhCDR2
EIRLKSNNYATHYAEPVKG

SEQ ID NO: 14541 - protein, 11 aa, Artificial Sequence
  Description of Artificial Sequence: Synthetic peptide
  XENP018923 vhCDR3
YYGNYGGYFDV

SEQ ID NO: 14542 - protein, 11 aa, Artificial Sequence
  Description of Artificial Sequence: Synthetic peptide
  XENP018923 vlCDR1
KASQSVSNDVA

SEQ ID NO: 14543 - protein, 7 aa, Artificial Sequence
  Description of Artificial Sequence: Synthetic peptide
  XENP018923 vlCDR2
YASHRYT

SEQ ID NO: 14544 - protein, 9 aa, Artificial Sequence
  Description of Artificial Sequence: Synthetic peptide
  XENP018923 vlCDR3
QQDYSSPRT

SEQ ID NO: 14545 - protein, 249 aa, Artificial Sequence
  Description of Artificial Sequence: Synthetic polypeptide
  XENP018924 1G6_H2L1_scFv(GKPGS)4
QVQLVQSGAEVKKPGASVKVSCKASGFTFSNYWMNWVRQAPGQGLEWMGEIRLKSNNYATHYAEKFQGRVTMTRDDSTSTVYMELSSLRSEDTAVYYCTRYYGNYGGYFDVWGAGTLVTVSSGKPGSGKPGSGKPGSGKPGSSIVMTQSPATLSVSPGERATLSCRASQSVSNDVAWYQQKPGQSPRLLINYASHRYTGVPDRFTGSGYGTEFTLTISSLQSEDFAVYFCQQDYSSPRTFGGGTKVEIK

SEQ ID NO: 14546 - protein, 122 aa, Artificial Sequence
  Description of Artificial Sequence: Synthetic polypeptide
  VH of XENP018924
QVQLVQSGAEVKKPGASVKVSCKASGFTFSNYWMNWVRQAPGQGLEWMGEIRLKSNNYATHYAEKFQGRVTMTRDDSTSTVYMELSSLRSEDTAVYYCTRYYGNYGGYFDVWGAGTLVTVSS

SEQ ID NO: 14547 - protein, 107 aa, Artificial Sequence; identical to SEQ ID NO: 10923
  Description of Artificial Sequence: Synthetic polypeptide
  VL of XENP018924

SEQ ID NO: 14548 - protein, 5 aa, Artificial Sequence
  Description of Artificial Sequence: Synthetic peptide
  XENP018924 vhCDR1
NYWMN

SEQ ID NO: 14549 - protein, 19 aa, Artificial Sequence
  Description of Artificial Sequence: Synthetic peptide
  XENP018924 vhCDR2
EIRLKSNNYATHYAEKFQG

SEQ ID NO: 14550 - protein, 11 aa, Artificial Sequence
  Description of Artificial Sequence: Synthetic peptide
  XENP018924 vhCDR3
YYGNYGGYFDV

SEQ ID NO: 14551 - protein, 11 aa, Artificial Sequence
  Description of Artificial Sequence: Synthetic peptide
  XENP018924 vlCDR1
RASQSVSNDVA

SEQ ID NO: 14552 - protein, 7 aa, Artificial Sequence
  Description of Artificial Sequence: Synthetic peptide
  XENP018924 vlCDR2
YASHRYT

SEQ ID NO: 14553 - protein, 9 aa, Artificial Sequence
  Description of Artificial Sequence: Synthetic peptide
  XENP018924 vlCDR3
QQDYSSPRT

SEQ ID NO: 14554 - protein, 249 aa, Artificial Sequence
  Description of Artificial Sequence: Synthetic polypeptide
  XENP018925 1G6_H2L2_scFv(GKPGS)4
QVQLVQSGAEVKKPGASVKVSCKASGFTFSNYWMNWVRQAPGQGLEWMGEIRLKSNNYATHYAEKFQGRVTMTRDDSTSTVYMELSSLRSEDTAVYYCTRYYGNYGGYFDVWGAGTLVTVSSGKPGSGKPGSGKPGSGKPGSSIVMTQSPSSLSASVGDRVTITCRASQSVSNDVAWYQQKPGKSPKLLINYASHRYTGVPDRFTGSGYGTDFTLTISSLQPEDFATYFCQQDYSSPRTFGGGTKVEIK

SEQ ID NO: 14555 - protein, 122 aa, Artificial Sequence; identical to SEQ ID NO: 14546
  Description of Artificial Sequence: Synthetic polypeptide
  VH of XENP018925

SEQ ID NO: 14556 - protein, 107 aa, Artificial Sequence; identical to SEQ ID NO: 10932
  Description of Artificial Sequence: Synthetic polypeptide
  VL of XENP018925

SEQ ID NO: 14557 - protein, 5 aa, Artificial Sequence
  Description of Artificial Sequence: Synthetic peptide
  XENP018925 vhCDR1
NYWMN

SEQ ID NO: 14558 - protein, 19 aa, Artificial Sequence
  Description of Artificial Sequence: Synthetic peptide
  XENP018925 vhCDR2
EIRLKSNNYATHYAEKFQG

SEQ ID NO: 14559 - protein, 11 aa, Artificial Sequence
  Description of Artificial Sequence: Synthetic peptide
  XENP018925 vhCDR3
YYGNYGGYFDV

SEQ ID NO: 14560 - protein, 11 aa, Artificial Sequence
  Description of Artificial Sequence: Synthetic peptide
  XENP018925 vlCDR1
RASQSVSNDVA

SEQ ID NO: 14561 - protein, 7 aa, Artificial Sequence
  Description of Artificial Sequence: Synthetic peptide
  XENP018925 vlCDR2
YASHRYT

SEQ ID NO: 14562 - protein, 9 aa, Artificial Sequence
  Description of Artificial Sequence: Synthetic peptide
  XENP018925 vlCDR3
QQDYSSPRT

SEQ ID NO: 14563 - protein, 249 aa, Artificial Sequence
  Description of Artificial Sequence: Synthetic polypeptide
  XENP018926 1G6_H2L3_scFv(GKPGS)4
QVQLVQSGAEVKKPGASVKVSCKASGFTFSNYWMNWVRQAPGQGLEWMGEIRLKSNNYATHYAEKFQGRVTMTRDDSTSTVYMELSSLRSEDTAVYYCTRYYGNYGGYFDVWGAGTLVTVSSGKPGSGKPGSGKPGSGKPGSSIVMTQSPLSLPVTPGEPASISCRASQSVSNDVAWYLQKPGQSPQLLINYASHRYTGVPDRFTGSGYGTDFTLKISRVEAEDVGVYFCQQDYSSPRTFGGGTKVEIK

SEQ ID NO: 14564 - protein, 122 aa, Artificial Sequence; identical to SEQ ID NO: 14546
  Description of Artificial Sequence: Synthetic polypeptide
  VH of XENP018926

SEQ ID NO: 14565 - protein, 107 aa, Artificial Sequence; identical to SEQ ID NO: 14520
  Description of Artificial Sequence: Synthetic polypeptide
  VL of XENP018926

SEQ ID NO: 14566 - protein, 5 aa, Artificial Sequence
  Description of Artificial Sequence: Synthetic peptide
  XENP018926 vhCDR1
NYWMN

SEQ ID NO: 14567 - protein, 19 aa, Artificial Sequence
  Description of Artificial Sequence: Synthetic peptide
  XENP018926 vhCDR2
EIRLKSNNYATHYAEKFQG

SEQ ID NO: 14568 - protein, 11 aa, Artificial Sequence
  Description of Artificial Sequence: Synthetic peptide
  XENP018926 vhCDR3
YYGNYGGYFDV

SEQ ID NO: 14569 - protein, 11 aa, Artificial Sequence
  Description of Artificial Sequence: Synthetic peptide
  XENP018926 vlCDR1
RASQSVSNDVA

SEQ ID NO: 14570 - protein, 7 aa, Artificial Sequence
  Description of Artificial Sequence: Synthetic peptide
  XENP018926 vlCDR2
YASHRYT

SEQ ID NO: 14571 - protein, 9 aa, Artificial Sequence
  Description of Artificial Sequence: Synthetic peptide
  XENP018926 vlCDR3
QQDYSSPRT

SEQ ID NO: 14572 - protein, 249 aa, Artificial Sequence
  Description of Artificial Sequence: Synthetic polypeptide
  XENP018927 1G6_H2L4_scFv(GKPGS)4
QVQLVQSGAEVKKPGASVKVSCKASGFTFSNYWMNWVRQAPGQGLEWMGEIRLKSNNYATHYAEKFQGRVTMTRDDSTSTVYMELSSLRSEDTAVYYCTRYYGNYGGYFDVWGAGTLVTVSSGKPGSGKPGSGKPGSGKPGSSIVMTQSPGTLSLSPGERATLSCRASQSVSNDVAWYQQKPGQSPRLLINYASHRYTGVPDRFTGSGYGTDFTLTISRLEPEDFAVYFCQQDYSSPRTFGGGTKVEIK

SEQ ID NO: 14573 - protein, 122 aa, Artificial Sequence; identical to SEQ ID NO: 14546
  Description of Artificial Sequence: Synthetic polypeptide
  VH of XENP018927

SEQ ID NO: 14574 - protein, 107 aa, Artificial Sequence; identical to SEQ ID NO: 14529
  Description of Artificial Sequence: Synthetic polypeptide
  VL of XENP018927

SEQ ID NO: 14575 - protein, 5 aa, Artificial Sequence
  Description of Artificial Sequence: Synthetic peptide
  XENP018927 vhCDR1
NYWMN

SEQ ID NO: 14576 - protein, 19 aa, Artificial Sequence
  Description of Artificial Sequence: Synthetic peptide
  XENP018927 vhCDR2
EIRLKSNNYATHYAEKFQG

SEQ ID NO: 14577 - protein, 11 aa, Artificial Sequence
  Description of Artificial Sequence: Synthetic peptide
  XENP018927 vhCDR3
YYGNYGGYFDV

SEQ ID NO: 14578 - protein, 11 aa, Artificial Sequence
  Description of Artificial Sequence: Synthetic peptide
  XENP018927 vlCDR1
RASQSVSNDVA

SEQ ID NO: 14579 - protein, 7 aa, Artificial Sequence
  Description of Artificial Sequence: Synthetic peptide
  XENP018927 vlCDR2
YASHRYT

SEQ ID NO: 14580 - protein, 9 aa, Artificial Sequence
  Description of Artificial Sequence: Synthetic peptide
  XENP018927 vlCDR3
QQDYSSPRT

SEQ ID NO: 14581 - protein, 249 aa, Artificial Sequence
  Description of Artificial Sequence: Synthetic polypeptide
  XENP018928 1G6_H2L5_scFv(GKPGS)4
QVQLVQSGAEVKKPGASVKVSCKASGFTFSNYWMNWVRQAPGQGLEWMGEIRLKSNNYATHYAEKFQGRVTMTRDDSTSTVYMELSSLRSEDTAVYYCTRYYGNYGGYFDVWGAGTLVTVSSGKPGSGKPGSGKPGSGKPGSSIVMTQSPDSLAVSLGERATINCKASQSVSNDVAWYQQKPGQSPKLLINYASHRYTGVPDRFTGSGYGTDFTLTISSLQAEDVAVYFCQQDYSSPRTFGGGTKVEIK

SEQ ID NO: 14582 - protein, 122 aa, Artificial Sequence; identical to SEQ ID NO: 14546
  Description of Artificial Sequence: Synthetic polypeptide
  VH of XENP018928

SEQ ID NO: 14583 - protein, 107 aa, Artificial Sequence; identical to SEQ ID NO: 14538
  Description of Artificial Sequence: Synthetic polypeptide
  VL of XENP018928

SEQ ID NO: 14584 - protein, 5 aa, Artificial Sequence
  Description of Artificial Sequence: Synthetic peptide
  XENP018928 vhCDR1
NYWMN

SEQ ID NO: 14585 - protein, 19 aa, Artificial Sequence
  Description of Artificial Sequence: Synthetic peptide
  XENP018928 vhCDR2
EIRLKSNNYATHYAEKFQG

SEQ ID NO: 14586 - protein, 11 aa, Artificial Sequence
  Description of Artificial Sequence: Synthetic peptide
  XENP018928 vhCDR3
YYGNYGGYFDV

SEQ ID NO: 14587 - protein, 11 aa, Artificial Sequence
  Description of Artificial Sequence: Synthetic peptide
  XENP018928 vlCDR1
KASQSVSNDVA

SEQ ID NO: 14588 - protein, 7 aa, Artificial Sequence
  Description of Artificial Sequence: Synthetic peptide
  XENP018928 vlCDR2
YASHRYT

SEQ ID NO: 14589 - protein, 9 aa, Artificial Sequence
  Description of Artificial Sequence: Synthetic peptide
  XENP018928 vlCDR3
QQDYSSPRT

SEQ ID NO: 14590 - protein, 249 aa, Artificial Sequence
  Description of Artificial Sequence: Synthetic polypeptide
  XENP018929 1G6_H3L1_scFv(GKPGS)4
EVQLLESGGGLVQPGGSLRLSCAASGFTFSNYWMNWVRQAPGKGLEWVSEIRLKSNNYATHYAESVKGRFTISRDDSKSTVYLQMNSLRAEDTAVYYCTRYYGNYGGYFDVWGAGTLVTVSSGKPGSGKPGSGKPGSGKPGSSIVMTQSPATLSVSPGERATLSCRASQSVSNDVAWYQQKPGQSPRLLINYASHRYTGVPDRFTGSGYGTEFTLTISSLQSEDFAVYFCQQDYSSPRTFGGGTKVEIK

SEQ ID NO: 14591 - protein, 122 aa, Artificial Sequence
  Description of Artificial Sequence: Synthetic polypeptide
  VH of XENP018929
EVQLLESGGGLVQPGGSLRLSCAASGFTFSNYWMNWVRQAPGKGLEWVSEIRLKSNNYATHYAESVKGRFTISRDDSKSTVYLQMNSLRAEDTAVYYCTRYYGNYGGYFDVWGAGTLVTVSS

SEQ ID NO: 14592 - protein, 107 aa, Artificial Sequence; identical to SEQ ID NO: 10923
  Description of Artificial Sequence: Synthetic polypeptide
  VL of XENP018929

SEQ ID NO: 14593 - protein, 5 aa, Artificial Sequence
  Description of Artificial Sequence: Synthetic peptide
  XENP018929 vhCDR1
NYWMN

SEQ ID NO: 14594 - protein, 19 aa, Artificial Sequence
  Description of Artificial Sequence: Synthetic peptide
  XENP018929 vhCDR2
EIRLKSNNYATHYAESVKG

SEQ ID NO: 14595 - protein, 11 aa, Artificial Sequence
  Description of Artificial Sequence: Synthetic peptide
  XENP018929 vhCDR3
YYGNYGGYFDV

SEQ ID NO: 14596 - protein, 11 aa, Artificial Sequence
  Description of Artificial Sequence: Synthetic peptide
  XENP018929 vlCDR1
RASQSVSNDVA

SEQ ID NO: 14597 - protein, 7 aa, Artificial Sequence
  Description of Artificial Sequence: Synthetic peptide
  XENP018929 vlCDR2
YASHRYT

SEQ ID NO: 14598 - protein, 9 aa, Artificial Sequence
  Description of Artificial Sequence: Synthetic peptide
  XENP018929 vlCDR3
QQDYSSPRT

SEQ ID NO: 14599 - protein, 249 aa, Artificial Sequence
  Description of Artificial Sequence: Synthetic polypeptide
  XENP018930 1G6_H3L2_scFv(GKPGS)4
EVQLLESGGGLVQPGGSLRLSCAASGFTFSNYWMNWVRQAPGKGLEWVSEIRLKSNNYATHYAESVKGRFTISRDDSKSTVYLQMNSLRAEDTAVYYCTRYYGNYGGYFDVWGAGTLVTVSSGKPGSGKPGSGKPGSGKPGSSIVMTQSPSSLSASVGDRVTITCRASQSVSNDVAWYQQKPGKSPKLLINYASHRYTGVPDRFTGSGYGTDFTLTISSLQPEDFATYFCQQDYSSPRTFGGGTKVEIK

SEQ ID NO: 14600 - protein, 122 aa, Artificial Sequence; identical to SEQ ID NO: 14591
  Description of Artificial Sequence: Synthetic polypeptide
  VH of XENP018930

SEQ ID NO: 14601 - protein, 107 aa, Artificial Sequence; identical to SEQ ID NO: 10932
  Description of Artificial Sequence: Synthetic polypeptide
  VL of XENP018930

SEQ ID NO: 14602 - protein, 5 aa, Artificial Sequence
  Description of Artificial Sequence: Synthetic peptide
  XENP018930 vhCDR1
NYWMN

SEQ ID NO: 14603 - protein, 19 aa, Artificial Sequence
  Description of Artificial Sequence: Synthetic peptide
  XENP018930 vhCDR2
EIRLKSNNYATHYAESVKG

SEQ ID NO: 14604 - protein, 11 aa, Artificial Sequence
  Description of Artificial Sequence: Synthetic peptide
  XENP018930 vhCDR3
YYGNYGGYFDV

SEQ ID NO: 14605 - protein, 11 aa, Artificial Sequence
  Description of Artificial Sequence: Synthetic peptide
  XENP018930 vlCDR1
RASQSVSNDVA

SEQ ID NO: 14606 - protein, 7 aa, Artificial Sequence
  Description of Artificial Sequence: Synthetic peptide
  XENP018930 vlCDR2
YASHRYT

SEQ ID NO: 14607 - protein, 9 aa, Artificial Sequence
  Description of Artificial Sequence: Synthetic peptide
  XENP018930 vlCDR3
QQDYSSPRT

SEQ ID NO: 14608 - protein, 249 aa, Artificial Sequence
  Description of Artificial Sequence: Synthetic polypeptide
  XENP018931 1G6_H3L3_scFv(GKPGS)4
EVQLLESGGGLVQPGGSLRLSCAASGFTFSNYWMNWVRQAPGKGLEWVSEIRLKSNNYATHYAESVKGRFTISRDDSKSTVYLQMNSLRAEDTAVYYCTRYYGNYGGYFDVWGAGTLVTVSSGKPGSGKPGSGKPGSGKPGSSIVMTQSPLSLPVTPGEPASISCRASQSVSNDVAWYLQKPGQSPQLLINYASHRYTGVPDRFTGSGYGTDFTLKISRVEAEDVGVYFCQQDYSSPRTFGGGTKVEIK

SEQ ID NO: 14609 - protein, 122 aa, Artificial Sequence; identical to SEQ ID NO: 14591
  Description of Artificial Sequence: Synthetic polypeptide
  VH of XENP018931

SEQ ID NO: 14610 - protein, 107 aa, Artificial Sequence; identical to SEQ ID NO: 14520
  Description of Artificial Sequence: Synthetic polypeptide
  VL of XENP018931

SEQ ID NO: 14611 - protein, 5 aa, Artificial Sequence
  Description of Artificial Sequence: Synthetic peptide
  XENP018931 vhCDR1
NYWMN

SEQ ID NO: 14612 - protein, 19 aa, Artificial Sequence
  Description of Artificial Sequence: Synthetic peptide
  XENP018931 vhCDR2
EIRLKSNNYATHYAESVKG

SEQ ID NO: 14613 - protein, 11 aa, Artificial Sequence
  Description of Artificial Sequence: Synthetic peptide
  XENP018931 vhCDR3
YYGNYGGYFDV

SEQ ID NO: 14614 - protein, 11 aa, Artificial Sequence
  Description of Artificial Sequence: Synthetic peptide
  XENP018931 vlCDR1
RASQSVSNDVA

SEQ ID NO: 14615 - protein, 7 aa, Artificial Sequence
  Description of Artificial Sequence: Synthetic peptide
  XENP018931 vlCDR2
YASHRYT

SEQ ID NO: 14616 - protein, 9 aa, Artificial Sequence
  Description of Artificial Sequence: Synthetic peptide
  XENP018931 vlCDR3
QQDYSSPRT

SEQ ID NO: 14617 - protein, 249 aa, Artificial Sequence
  Description of Artificial Sequence: Synthetic polypeptide
  XENP018932 1G6_H3L4_scFv(GKPGS)4
EVQLLESGGGLVQPGGSLRLSCAASGFTFSNYWMNWVRQAPGKGLEWVSEIRLKSNNYATHYAESVKGRFTISRDDSKSTVYLQMNSLRAEDTAVYYCTRYYGNYGGYFDVWGAGTLVTVSSGKPGSGKPGSGKPGSGKPGSSIVMTQSPGTLSLSPGERATLSCRASQSVSNDVAWYQQKPGQSPRLLINYASHRYTGVPDRFTGSGYGTDFTLTISRLEPEDFAVYFCQQDYSSPRTFGGGTKVEIK

SEQ ID NO: 14618 - protein, 122 aa, Artificial Sequence; identical to SEQ ID NO: 14591
  Description of Artificial Sequence: Synthetic polypeptide
  VH of XENP018932

SEQ ID NO: 14619 - protein, 107 aa, Artificial Sequence; identical to SEQ ID NO: 14529
  Description of Artificial Sequence: Synthetic polypeptide
  VL of XENP018932

SEQ ID NO: 14620 - protein, 5 aa, Artificial Sequence
  Description of Artificial Sequence: Synthetic peptide
  XENP018932 vhCDR1
NYWMN

SEQ ID NO: 14621 - protein, 19 aa, Artificial Sequence
  Description of Artificial Sequence: Synthetic peptide
  XENP018932 vhCDR2
EIRLKSNNYATHYAESVKG

SEQ ID NO: 14622 - protein, 11 aa, Artificial Sequence
  Description of Artificial Sequence: Synthetic peptide
  XENP018932 vhCDR3
YYGNYGGYFDV

SEQ ID NO: 14623 - protein, 11 aa, Artificial Sequence
  Description of Artificial Sequence: Synthetic peptide
  XENP018932 vlCDR1
RASQSVSNDVA

SEQ ID NO: 14624 - protein, 7 aa, Artificial Sequence
  Description of Artificial Sequence: Synthetic peptide
  XENP018932 vlCDR2
YASHRYT

SEQ ID NO: 14625 - protein, 9 aa, Artificial Sequence
  Description of Artificial Sequence: Synthetic peptide
  XENP018932 vlCDR3
QQDYSSPRT

SEQ ID NO: 14626 - protein, 249 aa, Artificial Sequence
  Description of Artificial Sequence: Synthetic polypeptide
  XENP018933 1G6_H3L5_scFv(GKPGS)4
EVQLLESGGGLVQPGGSLRLSCAASGFTFSNYWMNWVRQAPGKGLEWVSEIRLKSNNYATHYAESVKGRFTISRDDSKSTVYLQMNSLRAEDTAVYYCTRYYGNYGGYFDVWGAGTLVTVSSGKPGSGKPGSGKPGSGKPGSSIVMTQSPDSLAVSLGERATINCKASQSVSNDVAWYQQKPGQSPKLLINYASHRYTGVPDRFTGSGYGTDFTLTISSLQAEDVAVYFCQQDYSSPRTFGGGTKVEIK

SEQ ID NO: 14627 - protein, 122 aa, Artificial Sequence; identical to SEQ ID NO: 14591
  Description of Artificial Sequence: Synthetic polypeptide
  VH of XENP018933

SEQ ID NO: 14628 - protein, 107 aa, Artificial Sequence; identical to SEQ ID NO: 14538
  Description of Artificial Sequence: Synthetic polypeptide
  VL of XENP018933

SEQ ID NO: 14629 - protein, 5 aa, Artificial Sequence
  Description of Artificial Sequence: Synthetic peptide
  XENP018933 vhCDR1
NYWMN

SEQ ID NO: 14630 - protein, 19 aa, Artificial Sequence
  Description of Artificial Sequence: Synthetic peptide
  XENP018933 vhCDR2
EIRLKSNNYATHYAESVKG

SEQ ID NO: 14631 - protein, 11 aa, Artificial Sequence
  Description of Artificial Sequence: Synthetic peptide
  XENP018933 vhCDR3
YYGNYGGYFDV

SEQ ID NO: 14632 - protein, 11 aa, Artificial Sequence
  Description of Artificial Sequence: Synthetic peptide
  XENP018933 vlCDR1
KASQSVSNDVA

SEQ ID NO: 14633 - protein, 7 aa, Artificial Sequence
  Description of Artificial Sequence: Synthetic peptide
  XENP018933 vlCDR2
YASHRYT

SEQ ID NO: 14634 - protein, 9 aa, Artificial Sequence
  Description of Artificial Sequence: Synthetic peptide
  XENP018933 vlCDR3
QQDYSSPRT

SEQ ID NO: 14635 - protein, 249 aa, Artificial Sequence
  Description of Artificial Sequence: Synthetic polypeptide
  XENP018934 1G6_H4L1_scFv(GKPGS)4
EVQLVESGGGLVQPGGSLKLSCAASGFTFSNYWMNWVRQASGKGLEWVGEIRLKSNNYATHYAESVKGRFTISRDDSKSTVYLQMNSLKTEDTAVYYCTRYYGNYGGYFDVWGAGTLVTVSSGKPGSGKPGSGKPGSGKPGSSIVMTQSPATLSVSPGERATLSCRASQSVSNDVAWYQQKPGQSPRLLINYASHRYTGVPDRFTGSGYGTEFTLTISSLQSEDFAVYFCQQDYSSPRTFGGGTKVEIK

SEQ ID NO: 14636 - protein, 122 aa, Artificial Sequence
  Description of Artificial Sequence: Synthetic polypeptide
  VH of XENP018934
EVQLVESGGGLVQPGGSLKLSCAASGFTFSNYWMNWVRQASGKGLEWVGEIRLKSNNYATHYAESVKGRFTISRDDSKSTVYLQMNSLKTEDTAVYYCTRYYGNYGGYFDVWGAGTLVTVSS

SEQ ID NO: 14637 - protein, 107 aa, Artificial Sequence; identical to SEQ ID NO: 10923
  Description of Artificial Sequence: Synthetic polypeptide
  VL of XENP018934

SEQ ID NO: 14638 - protein, 5 aa, Artificial Sequence
  Description of Artificial Sequence: Synthetic peptide
  XENP018934 vhCDR1
NYWMN

SEQ ID NO: 14639 - protein, 19 aa, Artificial Sequence
  Description of Artificial Sequence: Synthetic peptide
  XENP018934 vhCDR2
EIRLKSNNYATHYAESVKG

SEQ ID NO: 14640 - protein, 11 aa, Artificial Sequence
  Description of Artificial Sequence: Synthetic peptide
  XENP018934 vhCDR3
YYGNYGGYFDV

SEQ ID NO: 14641 - protein, 11 aa, Artificial Sequence
  Description of Artificial Sequence: Synthetic peptide
  XENP018934 vlCDR1
RASQSVSNDVA

SEQ ID NO: 14642 - protein, 7 aa, Artificial Sequence
  Description of Artificial Sequence: Synthetic peptide
  XENP018934 vlCDR2
YASHRYT

SEQ ID NO: 14643 - protein, 9 aa, Artificial Sequence
  Description of Artificial Sequence: Synthetic peptide
  XENP018934 vlCDR3
QQDYSSPRT

SEQ ID NO: 14644 - protein, 249 aa, Artificial Sequence
  Description of Artificial Sequence: Synthetic polypeptide
  XENP018935 1G6_H4L2_scFv(GKPGS)4
EVQLVESGGGLVQPGGSLKLSCAASGFTFSNYWMNWVRQASGKGLEWVGEIRLKSNNYATHYAESVKGRFTISRDDSKSTVYLQMNSLKTEDTAVYYCTRYYGNYGGYFDVWGAGTLVTVSSGKPGSGKPGSGKPGSGKPGSSIVMTQSPSSLSASVGDRVTITCRASQSVSNDVAWYQQKPGKSPKLLINYASHRYTGVPDRFTGSGYGTDFTLTISSLQPEDFATYFCQQDYSSPRTFGGGTKVEIK

SEQ ID NO: 14645 - protein, 122 aa, Artificial Sequence; identical to SEQ ID NO: 14636
  Description of Artificial Sequence: Synthetic polypeptide
  VH of XENP018935

SEQ ID NO: 14646 - protein, 107 aa, Artificial Sequence; identical to SEQ ID NO: 10932
  Description of Artificial Sequence: Synthetic polypeptide
  VL of XENP018935

SEQ ID NO: 14647 - protein, 5 aa, Artificial Sequence
  Description of Artificial Sequence: Synthetic peptide
  XENP018935 vhCDR1
NYWMN

SEQ ID NO: 14648 - protein, 19 aa, Artificial Sequence
  Description of Artificial Sequence: Synthetic peptide
  XENP018935 vhCDR2
EIRLKSNNYATHYAESVKG

SEQ ID NO: 14649 - protein, 11 aa, Artificial Sequence
  Description of Artificial Sequence: Synthetic peptide
  XENP018935 vhCDR3
YYGNYGGYFDV

SEQ ID NO: 14650 - protein, 11 aa, Artificial Sequence
  Description of Artificial Sequence: Synthetic peptide
  XENP018935 vlCDR1
RASQSVSNDVA

SEQ ID NO: 14651 - protein, 7 aa, Artificial Sequence
  Description of Artificial Sequence: Synthetic peptide
  XENP018935 vlCDR2
YASHRYT

SEQ ID NO: 14652 - protein, 9 aa, Artificial Sequence
  Description of Artificial Sequence: Synthetic peptide
  XENP018935 vlCDR3
QQDYSSPRT

SEQ ID NO: 14653 - protein, 249 aa, Artificial Sequence
  Description of Artificial Sequence: Synthetic polypeptide
  XENP018936 1G6_H4L3_scFv(GKPGS)4
EVQLVESGGGLVQPGGSLKLSCAASGFTFSNYWMNWVRQASGKGLEWVGEIRLKSNNYATHYAESVKGRFTISRDDSKSTVYLQMNSLKTEDTAVYYCTRYYGNYGGYFDVWGAGTLVTVSSGKPGSGKPGSGKPGSGKPGSSIVMTQSPLSLPVTPGEPASISCRASQSVSNDVAWYLQKPGQSPQLLINYASHRYTGVPDRFTGSGYGTDFTLKISRVEAEDVGVYFCQQDYSSPRTFGGGTKVEIK

SEQ ID NO: 14654 - protein, 122 aa, Artificial Sequence; identical to SEQ ID NO: 14636
  Description of Artificial Sequence: Synthetic polypeptide
  VH of XENP018936

SEQ ID NO: 14655 - protein, 107 aa, Artificial Sequence; identical to SEQ ID NO: 14520
  Description of Artificial Sequence: Synthetic polypeptide
  VL of XENP018936

SEQ ID NO: 14656 - protein, 5 aa, Artificial Sequence
  Description of Artificial Sequence: Synthetic peptide
  XENP018936 vhCDR1
NYWMN

SEQ ID NO: 14657 - protein, 19 aa, Artificial Sequence
  Description of Artificial Sequence: Synthetic peptide
  XENP018936 vhCDR2
EIRLKSNNYATHYAESVKG

SEQ ID NO: 14658 - protein, 11 aa, Artificial Sequence
  Description of Artificial Sequence: Synthetic peptide
  XENP018936 vhCDR3
YYGNYGGYFDV

SEQ ID NO: 14659 - protein, 11 aa, Artificial Sequence
  Description of Artificial Sequence: Synthetic peptide
  XENP018936 vlCDR1
RASQSVSNDVA

SEQ ID NO: 14660 - protein, 7 aa, Artificial Sequence
  Description of Artificial Sequence: Synthetic peptide
  XENP018936 vlCDR2
YASHRYT

SEQ ID NO: 14661 - protein, 9 aa, Artificial Sequence
  Description of Artificial Sequence: Synthetic peptide
  XENP018936 vlCDR3
QQDYSSPRT

SEQ ID NO: 14662 - protein, 249 aa, Artificial Sequence
  Description of Artificial Sequence: Synthetic polypeptide
  XENP018937 1G6_H4L4_scFv(GKPGS)4
EVQLVESGGGLVQPGGSLKLSCAASGFTFSNYWMNWVRQASGKGLEWVGEIRLKSNNYATHYAESVKGRFTISRDDSKSTVYLQMNSLKTEDTAVYYCTRYYGNYGGYFDVWGAGTLVTVSSGKPGSGKPGSGKPGSGKPGSSIVMTQSPGTLSLSPGERATLSCRASQSVSNDVAWYQQKPGQSPRLLINYASHRYTGVPDRFTGSGYGTDFTLTISRLEPEDFAVYFCQQDYSSPRTFGGGTKVEIK

SEQ ID NO: 14663 - protein, 122 aa, Artificial Sequence; identical to SEQ ID NO: 14636
  Description of Artificial Sequence: Synthetic polypeptide
  VH of XENP018937

SEQ ID NO: 14664 - protein, 107 aa, Artificial Sequence; identical to SEQ ID NO: 14529
  Description of Artificial Sequence: Synthetic polypeptide
  VL of XENP018937

SEQ ID NO: 14665 - protein, 5 aa, Artificial Sequence
  Description of Artificial Sequence: Synthetic peptide
  XENP018937 vhCDR1
NYWMN

SEQ ID NO: 14666 - protein, 19 aa, Artificial Sequence
  Description of Artificial Sequence: Synthetic peptide
  XENP018937 vhCDR2
EIRLKSNNYATHYAESVKG

SEQ ID NO: 14667 - protein, 11 aa, Artificial Sequence
  Description of Artificial Sequence: Synthetic peptide
  XENP018937 vhCDR3
YYGNYGGYFDV

SEQ ID NO: 14668 - protein, 11 aa, Artificial Sequence
  Description of Artificial Sequence: Synthetic peptide
  XENP018937 vlCDR1
RASQSVSNDVA

SEQ ID NO: 14669 - protein, 7 aa, Artificial Sequence
  Description of Artificial Sequence: Synthetic peptide
  XENP018937 vlCDR2
YASHRYT

SEQ ID NO: 14670 - protein, 9 aa, Artificial Sequence
  Description of Artificial Sequence: Synthetic peptide
  XENP018937 vlCDR3
QQDYSSPRT

SEQ ID NO: 14671 - protein, 249 aa, Artificial Sequence
  Description of Artificial Sequence: Synthetic polypeptide
  XENP018938 1G6_H4L5_scFv(GKPGS)4
EVQLVESGGGLVQPGGSLKLSCAASGFTFSNYWMNWVRQASGKGLEWVGEIRLKSNNYATHYAESVKGRFTISRDDSKSTVYLQMNSLKTEDTAVYYCTRYYGNYGGYFDVWGAGTLVTVSSGKPGSGKPGSGKPGSGKPGSSIVMTQSPDSLAVSLGERATINCKASQSVSNDVAWYQQKPGQSPKLLINYASHRYTGVPDRFTGSGYGTDFTLTISSLQAEDVAVYFCQQDYSSPRTFGGGTKVEIK

SEQ ID NO: 14672 - protein, 122 aa, Artificial Sequence; identical to SEQ ID NO: 14636
  Description of Artificial Sequence: Synthetic polypeptide
  VH of XENP018938

SEQ ID NO: 14673 - protein, 107 aa, Artificial Sequence; identical to SEQ ID NO: 14538
  Description of Artificial Sequence: Synthetic polypeptide
  VL of XENP018938

SEQ ID NO: 14674 - protein, 5 aa, Artificial Sequence
  Description of Artificial Sequence: Synthetic peptide
  XENP018938 vhCDR1
NYWMN

SEQ ID NO: 14675 - protein, 19 aa, Artificial Sequence
  Description of Artificial Sequence: Synthetic peptide
  XENP018938 vhCDR2
EIRLKSNNYATHYAESVKG

SEQ ID NO: 14676 - protein, 11 aa, Artificial Sequence
  Description of Artificial Sequence: Synthetic peptide
  XENP018938 vhCDR3
YYGNYGGYFDV

SEQ ID NO: 14677 - protein, 11 aa, Artificial Sequence
  Description of Artificial Sequence: Synthetic peptide
  XENP018938 vlCDR1
KASQSVSNDVA

SEQ ID NO: 14678 - protein, 7 aa, Artificial Sequence
  Description of Artificial Sequence: Synthetic peptide
  XENP018938 vlCDR2
YASHRYT

SEQ ID NO: 14679 - protein, 9 aa, Artificial Sequence
  Description of Artificial Sequence: Synthetic peptide
  XENP018938 vlCDR3
QQDYSSPRT

SEQ ID NO: 14680 - protein, 249 aa, Artificial Sequence
  Description of Artificial Sequence: Synthetic polypeptide
  XENP019064 1G6_H1.239_L1_scFv(GKPGS)4
EVQLKESGGGLVKPGGSLRLSCAASGFTFSNYWMNWVRQAPGKGLEWVGEIRLKSNNYATHYAEPVKGRFTISRDDSKSTVYLQMNSLKTEDTAVYYCTRYYGNYGGYFDVWGAGTLVTVSSGKPGSGKPGSGKPGSGKPGSSIVMTQSPATLSVSPGERATLSCRASQSVSNDVAWYQQKPGQSPRLLINYASHRYTGVPDRFTGSGYGTEFTLTISSLQSEDFAVYFCQQDYSSPRTFGGGTKVEIK

SEQ ID NO: 14681 - protein, 122 aa, Artificial Sequence
  Description of Artificial Sequence: Synthetic polypeptide
  VH of XENP019064
EVQLKESGGGLVKPGGSLRLSCAASGFTFSNYWMNWVRQAPGKGLEWVGEIRLKSNNYATHYAEPVKGRFTISRDDSKSTVYLQMNSLKTEDTAVYYCTRYYGNYGGYFDVWGAGTLVTVSS

SEQ ID NO: 14682 - protein, 107 aa, Artificial Sequence; identical to SEQ ID NO: 10923
  Description of Artificial Sequence: Synthetic polypeptide
  VL of XENP019064

SEQ ID NO: 14683 - protein, 5 aa, Artificial Sequence
  Description of Artificial Sequence: Synthetic peptide
  XENP019064 vhCDR1
NYWMN

SEQ ID NO: 14684 - protein, 19 aa, Artificial Sequence
  Description of Artificial Sequence: Synthetic peptide
  XENP019064 vhCDR2
EIRLKSNNYATHYAEPVKG

SEQ ID NO: 14685 - protein, 11 aa, Artificial Sequence
  Description of Artificial Sequence: Synthetic peptide
  XENP019064 vhCDR3
YYGNYGGYFDV

SEQ ID NO: 14686 - protein, 11 aa, Artificial Sequence
  Description of Artificial Sequence: Synthetic peptide
  XENP019064 vlCDR1
RASQSVSNDVA

SEQ ID NO: 14687 - protein, 7 aa, Artificial Sequence
  Description of Artificial Sequence: Synthetic peptide
  XENP019064 vlCDR2
YASHRYT

SEQ ID NO: 14688 - protein, 9 aa, Artificial Sequence
  Description of Artificial Sequence: Synthetic peptide
  XENP019064 vlCDR3
QQDYSSPRT

SEQ ID NO: 14689 - protein, 249 aa, Artificial Sequence
  Description of Artificial Sequence: Synthetic polypeptide
  XENP019065 1G6_H1.240_L1_scFv(GKPGS)4
EVQLVESGGGLVKPGESLRLSCAASGFTFSNYWMNWVRQAPGKGLEWVGEIRLKSNNYATHYAEPVKGRFTISRDDSKSTVYLQMNSLKTEDTAVYYCTRYYGNYGGYFDVWGAGTLVTVSSGKPGSGKPGSGKPGSGKPGSSIVMTQSPATLSVSPGERATLSCRASQSVSNDVAWYQQKPGQSPRLLINYASHRYTGVPDRFTGSGYGTEFTLTISSLQSEDFAVYFCQQDYSSPRTFGGGTKVEIK

SEQ ID NO: 14690 - protein, 122 aa, Artificial Sequence
  Description of Artificial Sequence: Synthetic polypeptide
  VH of XENP019065
EVQLVESGGGLVKPGESLRLSCAASGFTFSNYWMNWVRQAPGKGLEWVGEIRLKSNNYATHYAEPVKGRFTISRDDSKSTVYLQMNSLKTEDTAVYYCTRYYGNYGGYFDVWGAGTLVTVSS

SEQ ID NO: 14691 - protein, 107 aa, Artificial Sequence; identical to SEQ ID NO: 10923
  Description of Artificial Sequence: Synthetic polypeptide
  VL of XENP019065

SEQ ID NO: 14692 - protein, 5 aa, Artificial Sequence
  Description of Artificial Sequence: Synthetic peptide
  XENP019065 vhCDR1
NYWMN

SEQ ID NO: 14693 - protein, 19 aa, Artificial Sequence
  Description of Artificial Sequence: Synthetic peptide
  XENP019065 vhCDR2
EIRLKSNNYATHYAEPVKG

SEQ ID NO: 14694 - protein, 11 aa, Artificial Sequence
  Description of Artificial Sequence: Synthetic peptide
  XENP019065 vhCDR3
YYGNYGGYFDV

SEQ ID NO: 14695 - protein, 11 aa, Artificial Sequence
  Description of Artificial Sequence: Synthetic peptide
  XENP019065 vlCDR1
RASQSVSNDVA

SEQ ID NO: 14696 - protein, 7 aa, Artificial Sequence
  Description of Artificial Sequence: Synthetic peptide
  XENP019065 vlCDR2
YASHRYT

SEQ ID NO: 14697 - protein, 9 aa, Artificial Sequence
  Description of Artificial Sequence: Synthetic peptide
  XENP019065 vlCDR3
QQDYSSPRT

SEQ ID NO: 14698 - protein, 249 aa, Artificial Sequence
  Description of Artificial Sequence: Synthetic polypeptide
  XENP019066 1G6_H1.241_L1_scFv(GKPGS)4
EVQLVESGGGLVKPGGSLRLTCAASGFTFSNYWMNWVRQAPGKGLEWVGEIRLKSNNYATHYAEPVKGRFTISRDDSKSTVYLQMNSLKTEDTAVYYCTRYYGNYGGYFDVWGAGTLVTVSSGKPGSGKPGSGKPGSGKPGSSIVMTQSPATLSVSPGERATLSCRASQSVSNDVAWYQQKPGQSPRLLINYASHRYTGVPDRFTGSGYGTEFTLTISSLQSEDFAVYFCQQDYSSPRTFGGGTKVEIK

SEQ ID NO: 14699 - protein, 122 aa, Artificial Sequence
  Description of Artificial Sequence: Synthetic polypeptide
  VH of XENP019066
EVQLVESGGGLVKPGGSLRLTCAASGFTFSNYWMNWVRQAPGKGLEWVGEIRLKSNNYATHYAEPVKGRFTISRDDSKSTVYLQMNSLKTEDTAVYYCTRYYGNYGGYFDVWGAGTLVTVSS

SEQ ID NO: 14700 - protein, 107 aa, Artificial Sequence; identical to SEQ ID NO: 10923
  Description of Artificial Sequence: Synthetic polypeptide
  VL of XENP019066

SEQ ID NO: 14701 - protein, 5 aa, Artificial Sequence
  Description of Artificial Sequence: Synthetic peptide
  XENP019066 vhCDR1
NYWMN

SEQ ID NO: 14702 - protein, 19 aa, Artificial Sequence
  Description of Artificial Sequence: Synthetic peptide
  XENP019066 vhCDR2
EIRLKSNNYATHYAEPVKG

SEQ ID NO: 14703 - protein, 11 aa, Artificial Sequence
  Description of Artificial Sequence: Synthetic peptide
  XENP019066 vhCDR3
YYGNYGGYFDV

SEQ ID NO: 14704 - protein, 11 aa, Artificial Sequence
  Description of Artificial Sequence: Synthetic peptide
  XENP019066 vlCDR1
RASQSVSNDVA

SEQ ID NO: 14705 - protein, 7 aa, Artificial Sequence
  Description of Artificial Sequence: Synthetic peptide
  XENP019066 vlCDR2
YASHRYT

SEQ ID NO: 14706 - protein, 9 aa, Artificial Sequence
  Description of Artificial Sequence: Synthetic peptide
  XENP019066 vlCDR3
QQDYSSPRT

SEQ ID NO: 14707 - protein, 249 aa, Artificial Sequence
  Description of Artificial Sequence: Synthetic polypeptide
  XENP019067 1G6_H1.242_L1_scFv(GKPGS)4
EVQLVESGGGLVKPGGSLRLVCAASGFTFSNYWMNWVRQAPGKGLEWVGEIRLKSNNYATHYAEPVKGRFTISRDDSKSTVYLQMNSLKTEDTAVYYCTRYYGNYGGYFDVWGAGTLVTVSSGKPGSGKPGSGKPGSGKPGSSIVMTQSPATLSVSPGERATLSCRASQSVSNDVAWYQQKPGQSPRLLINYASHRYTGVPDRFTGSGYGTEFTLTISSLQSEDFAVYFCQQDYSSPRTFGGGTKVEIK

SEQ ID NO: 14708 - protein, 122 aa, Artificial Sequence
  Description of Artificial Sequence: Synthetic polypeptide
  VH of XENP019067
EVQLVESGGGLVKPGGSLRLVCAASGFTFSNYWMNWVRQAPGKGLEWVGEIRLKSNNYATHYAEPVKGRFTISRDDSKSTVYLQMNSLKTEDTAVYYCTRYYGNYGGYFDVWGAGTLVTVSS

SEQ ID NO: 14709 - protein, 107 aa, Artificial Sequence; identical to SEQ ID NO: 10923
  Description of Artificial Sequence: Synthetic polypeptide
  VL of XENP019067

SEQ ID NO: 14710 - protein, 5 aa, Artificial Sequence
  Description of Artificial Sequence: Synthetic peptide
  XENP019067 vhCDR1
NYWMN

SEQ ID NO: 14711 - protein, 19 aa, Artificial Sequence
  Description of Artificial Sequence: Synthetic peptide
  XENP019067 vhCDR2
EIRLKSNNYATHYAEPVKG

SEQ ID NO: 14712 - protein, 11 aa, Artificial Sequence
  Description of Artificial Sequence: Synthetic peptide
  XENP019067 vhCDR3
YYGNYGGYFDV

SEQ ID NO: 14713 - protein, 11 aa, Artificial Sequence
  Description of Artificial Sequence: Synthetic peptide
  XENP019067 vlCDR1
RASQSVSNDVA

SEQ ID NO: 14714 - protein, 7 aa, Artificial Sequence
  Description of Artificial Sequence: Synthetic peptide
  XENP019067 vlCDR2
YASHRYT

SEQ ID NO: 14715 - protein, 9 aa, Artificial Sequence
  Description of Artificial Sequence: Synthetic peptide
  XENP019067 vlCDR3
QQDYSSPRT

SEQ ID NO: 14716 - protein, 249 aa, Artificial Sequence
  Description of Artificial Sequence: Synthetic polypeptide
  XENP019068 1G6_H1.243_L1_scFv(GKPGS)4
EVQLVESGGGLVKPGGSLRLSCAASGFTLSNYWMNWVRQAPGKGLEWVGEIRLKSNNYATHYAEPVKGRFTISRDDSKSTVYLQMNSLKTEDTAVYYCTRYYGNYGGYFDVWGAGTLVTVSSGKPGSGKPGSGKPGSGKPGSSIVMTQSPATLSVSPGERATLSCRASQSVSNDVAWYQQKPGQSPRLLINYASHRYTGVPDRFTGSGYGTEFTLTISSLQSEDFAVYFCQQDYSSPRTFGGGTKVEIK

SEQ ID NO: 14717 - protein, 122 aa, Artificial Sequence
  Description of Artificial Sequence: Synthetic polypeptide
  VH of XENP019068
EVQLVESGGGLVKPGGSLRLSCAASGFTLSNYWMNWVRQAPGKGLEWVGEIRLKSNNYATHYAEPVKGRFTISRDDSKSTVYLQMNSLKTEDTAVYYCTRYYGNYGGYFDVWGAGTLVTVSS

SEQ ID NO: 14718 - protein, 107 aa, Artificial Sequence; identical to SEQ ID NO: 10923
  Description of Artificial Sequence: Synthetic polypeptide
  VL of XENP019068

SEQ ID NO: 14719 - protein, 5 aa, Artificial Sequence
  Description of Artificial Sequence: Synthetic peptide
  XENP019068 vhCDR1
NYWMN

SEQ ID NO: 14720 - protein, 19 aa, Artificial Sequence
  Description of Artificial Sequence: Synthetic peptide
  XENP019068 vhCDR2
EIRLKSNNYATHYAEPVKG

SEQ ID NO: 14721 - protein, 11 aa, Artificial Sequence
  Description of Artificial Sequence: Synthetic peptide
  XENP019068 vhCDR3
YYGNYGGYFDV

SEQ ID NO: 14722 - protein, 11 aa, Artificial Sequence
  Description of Artificial Sequence: Synthetic peptide
  XENP019068 vlCDR1
RASQSVSNDVA

SEQ ID NO: 14723 - protein, 7 aa, Artificial Sequence
  Description of Artificial Sequence: Synthetic peptide
  XENP019068 vlCDR2
YASHRYT

SEQ ID NO: 14724 - protein, 9 aa, Artificial Sequence
  Description of Artificial Sequence: Synthetic peptide
  XENP019068 vlCDR3
QQDYSSPRT

SEQ ID NO: 14725 - protein, 249 aa, Artificial Sequence
  Description of Artificial Sequence: Synthetic polypeptide
  XENP019069 1G6_H1.244_L1_scFv(GKPGS)4
EVQLVESGGGLVKPGGSLRLSCAASGFTFSNYWMNWVRQAPGKGLQWVGEIRLKSNNYATHYAEPVKGRFTISRDDSKSTVYLQMNSLKTEDTAVYYCTRYYGNYGGYFDVWGAGTLVTVSSGKPGSGKPGSGKPGSGKPGSSIVMTQSPATLSVSPGERATLSCRASQSVSNDVAWYQQKPGQSPRLLINYASHRYTGVPDRFTGSGYGTEFTLTISSLQSEDFAVYFCQQDYSSPRTFGGGTKVEIK

SEQ ID NO: 14726 - protein, 122 aa, Artificial Sequence
  Description of Artificial Sequence: Synthetic polypeptide
  VH of XENP019069
EVQLVESGGGLVKPGGSLRLSCAASGFTFSNYWMNWVRQAPGKGLQWVGEIRLKSNNYATHYAEPVKGRFTISRDDSKSTVYLQMNSLKTEDTAVYYCTRYYGNYGGYFDVWGAGTLVTVSS

SEQ ID NO: 14727 - protein, 107 aa, Artificial Sequence; identical to SEQ ID NO: 10923
  Description of Artificial Sequence: Synthetic polypeptide
  VL of XENP019069

SEQ ID NO: 14728 - protein, 5 aa, Artificial Sequence
  Description of Artificial Sequence: Synthetic peptide
  XENP019069 vhCDR1
NYWMN

SEQ ID NO: 14729 - protein, 19 aa, Artificial Sequence
  Description of Artificial Sequence: Synthetic peptide
  XENP019069 vhCDR2
EIRLKSNNYATHYAEPVKG

SEQ ID NO: 14730 - protein, 11 aa, Artificial Sequence
  Description of Artificial Sequence: Synthetic peptide
  XENP019069 vhCDR3
YYGNYGGYFDV

SEQ ID NO: 14731 - protein, 11 aa, Artificial Sequence
  Description of Artificial Sequence: Synthetic peptide
  XENP019069 vlCDR1
RASQSVSNDVA

SEQ ID NO: 14732 - protein, 7 aa, Artificial Sequence
  Description of Artificial Sequence: Synthetic peptide
  XENP019069 vlCDR2
YASHRYT

SEQ ID NO: 14733 - protein, 9 aa, Artificial Sequence
  Description of Artificial Sequence: Synthetic peptide
  XENP019069 vlCDR3
QQDYSSPRT

SEQ ID NO: 14734 - protein, 249 aa, Artificial Sequence
  Description of Artificial Sequence: Synthetic polypeptide
  XENP019070 1G6_H1.245_L1_scFv(GKPGS)4
EVQLVESGGGLVKPGGSLRLSCAASGFTFSNYWMNWVRQAPGKGLEWIGEIRLKSNNYATHYAEPVKGRFTISRDDSKSTVYLQMNSLKTEDTAVYYCTRYYGNYGGYFDVWGAGTLVTVSSGKPGSGKPGSGKPGSGKPGSSIVMTQSPATLSVSPGERATLSCRASQSVSNDVAWYQQKPGQSPRLLINYASHRYTGVPDRFTGSGYGTEFTLTISSLQSEDFAVYFCQQDYSSPRTFGGGTKVEIK

SEQ ID NO: 14735 - protein, 122 aa, Artificial Sequence
  Description of Artificial Sequence: Synthetic polypeptide
  VH of XENP019070
EVQLVESGGGLVKPGGSLRLSCAASGFTFSNYWMNWVRQAPGKGLEWIGEIRLKSNNYATHYAEPVKGRFTISRDDSKSTVYLQMNSLKTEDTAVYYCTRYYGNYGGYFDVWGAGTLVTVSS

SEQ ID NO: 14736 - protein, 107 aa, Artificial Sequence; identical to SEQ ID NO: 10923
  Description of Artificial Sequence: Synthetic polypeptide
  VL of XENP019070

SEQ ID NO: 14737 - protein, 5 aa, Artificial Sequence
  Description of Artificial Sequence: Synthetic peptide
  XENP019070 vhCDR1
NYWMN

SEQ ID NO: 14738 - protein, 19 aa, Artificial Sequence
  Description of Artificial Sequence: Synthetic peptide
  XENP019070 vhCDR2
EIRLKSNNYATHYAEPVKG

SEQ ID NO: 14739 - protein, 11 aa, Artificial Sequence
  Description of Artificial Sequence: Synthetic peptide
  XENP019070 vhCDR3
YYGNYGGYFDV

SEQ ID NO: 14740 - protein, 11 aa, Artificial Sequence
  Description of Artificial Sequence: Synthetic peptide
  XENP019070 vlCDR1
RASQSVSNDVA

SEQ ID NO: 14741 - protein, 7 aa, Artificial Sequence
  Description of Artificial Sequence: Synthetic peptide
  XENP019070 vlCDR2
YASHRYT

SEQ ID NO: 14742 - protein, 9 aa, Artificial Sequence
  Description of Artificial Sequence: Synthetic peptide
  XENP019070 vlCDR3
QQDYSSPRT

SEQ ID NO: 14743 - protein, 249 aa, Artificial Sequence
  Description of Artificial Sequence: Synthetic polypeptide
  XENP019071 1G6_H1.246_L1_scFv(GKPGS)4
EVQLVESGGGLVKPGGSLRLSCAASGFTFSNYWMNWVRQAPGKGLEWMGEIRLKSNNYATHYAEPVKGRFTISRDDSKSTVYLQMNSLKTEDTAVYYCTRYYGNYGGYFDVWGAGTLVTVSSGKPGSGKPGSGKPGSGKPGSSIVMTQSPATLSVSPGERATLSCRASQSVSNDVAWYQQKPGQSPRLLINYASHRYTGVPDRFTGSGYGTEFTLTISSLQSEDFAVYFCQQDYSSPRTFGGGTKVEIK

SEQ ID NO: 14744 - protein, 122 aa, Artificial Sequence
  Description of Artificial Sequence: Synthetic polypeptide
  VH of XENP019071
EVQLVESGGGLVKPGGSLRLSCAASGFTFSNYWMNWVRQAPGKGLEWMGEIRLKSNNYATHYAEPVKGRFTISRDDSKSTVYLQMNSLKTEDTAVYYCTRYYGNYGGYFDVWGAGTLVTVSS

SEQ ID NO: 14745 - protein, 107 aa, Artificial Sequence; identical to SEQ ID NO: 10923
  Description of Artificial Sequence: Synthetic polypeptide
  VL of XENP019071

SEQ ID NO: 14746 - protein, 5 aa, Artificial Sequence
  Description of Artificial Sequence: Synthetic peptide
  XENP019071 vhCDR1
NYWMN

SEQ ID NO: 14747 - protein, 19 aa, Artificial Sequence
  Description of Artificial Sequence: Synthetic peptide
  XENP019071 vhCDR2
EIRLKSNNYATHYAEPVKG

SEQ ID NO: 14748 - protein, 11 aa, Artificial Sequence
  Description of Artificial Sequence: Synthetic peptide
  XENP019071 vhCDR3
YYGNYGGYFDV

SEQ ID NO: 14749 - protein, 11 aa, Artificial Sequence
  Description of Artificial Sequence: Synthetic peptide
  XENP019071 vlCDR1
RASQSVSNDVA

SEQ ID NO: 14750 - protein, 7 aa, Artificial Sequence
  Description of Artificial Sequence: Synthetic peptide
  XENP019071 vlCDR2
YASHRYT

SEQ ID NO: 14751 - protein, 9 aa, Artificial Sequence
  Description of Artificial Sequence: Synthetic peptide
  XENP019071 vlCDR3
QQDYSSPRT

SEQ ID NO: 14752 - protein, 249 aa, Artificial Sequence
  Description of Artificial Sequence: Synthetic polypeptide
  XENP019072 1G6_H1.247_L1_scFv(GKPGS)4
EVQLVESGGGLVKPGGSLRLSCAASGFTFSNYWMNWVRQAPGKGLEWVGEIRLKSNNYATHYAEPFKGRFTISRDDSKSTVYLQMNSLKTEDTAVYYCTRYYGNYGGYFDVWGAGTLVTVSSGKPGSGKPGSGKPGSGKPGSSIVMTQSPATLSVSPGERATLSCRASQSVSNDVAWYQQKPGQSPRLLINYASHRYTGVPDRFTGSGYGTEFTLTISSLQSEDFAVYFCQQDYSSPRTFGGGTKVEIK

SEQ ID NO: 14753 - protein, 122 aa, Artificial Sequence
  Description of Artificial Sequence: Synthetic polypeptide
  VH of XENP019072
EVQLVESGGGLVKPGGSLRLSCAASGFTFSNYWMNWVRQAPGKGLEWVGEIRLKSNNYATHYAEPFKGRFTISRDDSKSTVYLQMNSLKTEDTAVYYCTRYYGNYGGYFDVWGAGTLVTVSS

SEQ ID NO: 14754 - protein, 107 aa, Artificial Sequence; identical to SEQ ID NO: 10923
  Description of Artificial Sequence: Synthetic polypeptide
  VL of XENP019072

SEQ ID NO: 14755 - protein, 5 aa, Artificial Sequence
  Description of Artificial Sequence: Synthetic peptide
  XENP019072 vhCDR1
NYWMN

SEQ ID NO: 14756 - protein, 19 aa, Artificial Sequence
  Description of Artificial Sequence: Synthetic peptide
  XENP019072 vhCDR2
EIRLKSNNYATHYAEPFKG

SEQ ID NO: 14757 - protein, 11 aa, Artificial Sequence
  Description of Artificial Sequence: Synthetic peptide
  XENP019072 vhCDR3
YYGNYGGYFDV

SEQ ID NO: 14758 - protein, 11 aa, Artificial Sequence
  Description of Artificial Sequence: Synthetic peptide
  XENP019072 vlCDR1
RASQSVSNDVA

SEQ ID NO: 14759 - protein, 7 aa, Artificial Sequence
  Description of Artificial Sequence: Synthetic peptide
  XENP019072 vlCDR2
YASHRYT

SEQ ID NO: 14760 - protein, 9 aa, Artificial Sequence
  Description of Artificial Sequence: Synthetic peptide
  XENP019072 vlCDR3
QQDYSSPRT

SEQ ID NO: 14761 - protein, 249 aa, Artificial Sequence
  Description of Artificial Sequence: Synthetic polypeptide
  XENP019073 1G6_H1.248_L1_scFv(GKPGS)4
EVQLVESGGGLVKPGGSLRLSCAASGFTFSNYWMNWVRQAPGKGLEWVGEIRLKSNNYATHYAEPVKGRATISRDDSKSTVYLQMNSLKTEDTAVYYCTRYYGNYGGYFDVWGAGTLVTVSSGKPGSGKPGSGKPGSGKPGSSIVMTQSPATLSVSPGERATLSCRASQSVSNDVAWYQQKPGQSPRLLINYASHRYTGVPDRFTGSGYGTEFTLTISSLQSEDFAVYFCQQDYSSPRTFGGGTKVEIK

SEQ ID NO: 14762 - protein, 122 aa, Artificial Sequence
  Description of Artificial Sequence: Synthetic polypeptide
  VH of XENP019073
EVQLVESGGGLVKPGGSLRLSCAASGFTFSNYWMNWVRQAPGKGLEWVGEIRLKSNNYATHYAEPVKGRATISRDDSKSTVYLQMNSLKTEDTAVYYCTRYYGNYGGYFDVWGAGTLVTVSS

SEQ ID NO: 14763 - protein, 107 aa, Artificial Sequence; identical to SEQ ID NO: 10923
  Description of Artificial Sequence: Synthetic polypeptide
  VL of XENP019073

SEQ ID NO: 14764 - protein, 5 aa, Artificial Sequence
  Description of Artificial Sequence: Synthetic peptide
  XENP019073 vhCDR1
NYWMN

SEQ ID NO: 14765 - protein, 19 aa, Artificial Sequence
  Description of Artificial Sequence: Synthetic peptide
  XENP019073 vhCDR2
EIRLKSNNYATHYAEPVKG

SEQ ID NO: 14766 - protein, 11 aa, Artificial Sequence
  Description of Artificial Sequence: Synthetic peptide
  XENP019073 vhCDR3
YYGNYGGYFDV

SEQ ID NO: 14767 - protein, 11 aa, Artificial Sequence
  Description of Artificial Sequence: Synthetic peptide
  XENP019073 vlCDR1
RASQSVSNDVA

SEQ ID NO: 14768 - protein, 7 aa, Artificial Sequence
  Description of Artificial Sequence: Synthetic peptide
  XENP019073 vlCDR2
YASHRYT

SEQ ID NO: 14769 - protein, 9 aa, Artificial Sequence
  Description of Artificial Sequence: Synthetic peptide
  XENP019073 vlCDR3
QQDYSSPRT

SEQ ID NO: 14770 - protein, 249 aa, Artificial Sequence
  Description of Artificial Sequence: Synthetic polypeptide
  XENP019074 1G6_H1.249_L1_scFv(GKPGS)4
EVQLVESGGGLVKPGGSLRLSCAASGFTFSNYWMNWVRQAPGKGLEWVGEIRLKSNNYATHYAEPVKGRVTISRDDSKSTVYLQMNSLKTEDTAVYYCTRYYGNYGGYFDVWGAGTLVTVSSGKPGSGKPGSGKPGSGKPGSSIVMTQSPATLSVSPGERATLSCRASQSVSNDVAWYQQKPGQSPRLLINYASHRYTGVPDRFTGSGYGTEFTLTISSLQSEDFAVYFCQQDYSSPRTFGGGTKVEIK

SEQ ID NO: 14771 - protein, 122 aa, Artificial Sequence
  Description of Artificial Sequence: Synthetic polypeptide
  VH of XENP019074
EVQLVESGGGLVKPGGSLRLSCAASGFTFSNYWMNWVRQAPGKGLEWVGEIRLKSNNYATHYAEPVKGRVTISRDDSKSTVYLQMNSLKTEDTAVYYCTRYYGNYGGYFDVWGAGTLVTVSS

SEQ ID NO: 14772 - protein, 107 aa, Artificial Sequence; identical to SEQ ID NO: 10923
  Description of Artificial Sequence: Synthetic polypeptide
  VL of XENP019074

SEQ ID NO: 14773 - protein, 5 aa, Artificial Sequence
  Description of Artificial Sequence: Synthetic peptide
  XENP019074 vhCDR1
NYWMN

SEQ ID NO: 14774 - protein, 19 aa, Artificial Sequence
  Description of Artificial Sequence: Synthetic peptide
  XENP019074 vhCDR2
EIRLKSNNYATHYAEPVKG

SEQ ID NO: 14775 - protein, 11 aa, Artificial Sequence
  Description of Artificial Sequence: Synthetic peptide
  XENP019074 vhCDR3
YYGNYGGYFDV

SEQ ID NO: 14776 - protein, 11 aa, Artificial Sequence
  Description of Artificial Sequence: Synthetic peptide
  XENP019074 vlCDR1
RASQSVSNDVA

SEQ ID NO: 14777 - protein, 7 aa, Artificial Sequence
  Description of Artificial Sequence: Synthetic peptide
  XENP019074 vlCDR2
YASHRYT

SEQ ID NO: 14778 - protein, 9 aa, Artificial Sequence
  Description of Artificial Sequence: Synthetic peptide
  XENP019074 vlCDR3
QQDYSSPRT

SEQ ID NO: 14779 - protein, 249 aa, Artificial Sequence
  Description of Artificial Sequence: Synthetic polypeptide
  XENP019075 1G6_H1.250_L1_scFv(GKPGS)4
EVQLVESGGGLVKPGGSLRLSCAASGFTFSNYWMNWVRQAPGKGLEWVGEIRLKSNNYATHYAEPVKGRFTISRDDSSSTVYLQMNSLKTEDTAVYYCTRYYGNYGGYFDVWGAGTLVTVSSGKPGSGKPGSGKPGSGKPGSSIVMTQSPATLSVSPGERATLSCRASQSVSNDVAWYQQKPGQSPRLLINYASHRYTGVPDRFTGSGYGTEFTLTISSLQSEDFAVYFCQQDYSSPRTFGGGTKVEIK

SEQ ID NO: 14780 - protein, 122 aa, Artificial Sequence
  Description of Artificial Sequence: Synthetic polypeptide
  VH of XENP019075
EVQLVESGGGLVKPGGSLRLSCAASGFTFSNYWMNWVRQAPGKGLEWVGEIRLKSNNYATHYAEPVKGRFTISRDDSSSTVYLQMNSLKTEDTAVYYCTRYYGNYGGYFDVWGAGTLVTVSS

SEQ ID NO: 14781 - protein, 107 aa, Artificial Sequence; identical to SEQ ID NO: 10923
  Description of Artificial Sequence: Synthetic polypeptide
  VL of XENP019075

SEQ ID NO: 14782 - protein, 5 aa, Artificial Sequence
  Description of Artificial Sequence: Synthetic peptide
  XENP019075 vhCDR1
NYWMN

SEQ ID NO: 14783 - protein, 19 aa, Artificial Sequence
  Description of Artificial Sequence: Synthetic peptide
  XENP019075 vhCDR2
EIRLKSNNYATHYAEPVKG

SEQ ID NO: 14784 - protein, 11 aa, Artificial Sequence
  Description of Artificial Sequence: Synthetic peptide
  XENP019075 vhCDR3
YYGNYGGYFDV

SEQ ID NO: 14785 - protein, 11 aa, Artificial Sequence
  Description of Artificial Sequence: Synthetic peptide
  XENP019075 vlCDR1
RASQSVSNDVA

SEQ ID NO: 14786 - protein, 7 aa, Artificial Sequence
  Description of Artificial Sequence: Synthetic peptide
  XENP019075 vlCDR2
YASHRYT

SEQ ID NO: 14787 - protein, 9 aa, Artificial Sequence
  Description of Artificial Sequence: Synthetic peptide
  XENP019075 vlCDR3
QQDYSSPRT

SEQ ID NO: 14788 - protein, 249 aa, Artificial Sequence
  Description of Artificial Sequence: Synthetic polypeptide
  XENP019076 1G6_H1.251_L1_scFv(GKPGS)4
EVQLVESGGGLVKPGGSLRLSCAASGFTFSNYWMNWVRQAPGKGLEWVGEIRLKSNNYATHYAEPVKGRFTISRDDSKSMVYLQMNSLKTEDTAVYYCTRYYGNYGGYFDVWGAGTLVTVSSGKPGSGKPGSGKPGSGKPGSSIVMTQSPATLSVSPGERATLSCRASQSVSNDVAWYQQKPGQSPRLLINYASHRYTGVPDRFTGSGYGTEFTLTISSLQSEDFAVYFCQQDYSSPRTFGGGTKVEIK

SEQ ID NO: 14789 - protein, 122 aa, Artificial Sequence
  Description of Artificial Sequence: Synthetic polypeptide
  VH of XENP019076
EVQLVESGGGLVKPGGSLRLSCAASGFTFSNYWMNWVRQAPGKGLEWVGEIRLKSNNYATHYAEPVKGRFTISRDDSKSMVYLQMNSLKTEDTAVYYCTRYYGNYGGYFDVWGAGTLVTVSS

SEQ ID NO: 14790 - protein, 107 aa, Artificial Sequence; identical to SEQ ID NO: 10923
  Description of Artificial Sequence: Synthetic polypeptide
  VL of XENP019076

SEQ ID NO: 14791 - protein, 5 aa, Artificial Sequence
  Description of Artificial Sequence: Synthetic peptide
  XENP019076 vhCDR1
NYWMN

SEQ ID NO: 14792 - protein, 19 aa, Artificial Sequence
  Description of Artificial Sequence: Synthetic peptide
  XENP019076 vhCDR2
EIRLKSNNYATHYAEPVKG

SEQ ID NO: 14793 - protein, 11 aa, Artificial Sequence
  Description of Artificial Sequence: Synthetic peptide
  XENP019076 vhCDR3
YYGNYGGYFDV

SEQ ID NO: 14794 - protein, 11 aa, Artificial Sequence
  Description of Artificial Sequence: Synthetic peptide
  XENP019076 vlCDR1
RASQSVSNDVA

SEQ ID NO: 14795 - protein, 7 aa, Artificial Sequence
  Description of Artificial Sequence: Synthetic peptide
  XENP019076 vlCDR2
YASHRYT

SEQ ID NO: 14796 - protein, 9 aa, Artificial Sequence
  Description of Artificial Sequence: Synthetic peptide
  XENP019076 vlCDR3
QQDYSSPRT

SEQ ID NO: 14797 - protein, 249 aa, Artificial Sequence
  Description of Artificial Sequence: Synthetic polypeptide
  XENP019077 1G6_H1.252_L1_scFv(GKPGS)4
EVQLVESGGGLVKPGGSLRLSCAASGFTFSNYWMNWVRQAPGKGLEWVGEIRLKSNNYATHYAEPVKGRFTISRDDSKSQVYLQMNSLKTEDTAVYYCTRYYGNYGGYFDVWGAGTLVTVSSGKPGSGKPGSGKPGSGKPGSSIVMTQSPATLSVSPGERATLSCRASQSVSNDVAWYQQKPGQSPRLLINYASHRYTGVPDRFTGSGYGTEFTLTISSLQSEDFAVYFCQQDYSSPRTFGGGTKVEIK

SEQ ID NO: 14798 - protein, 122 aa, Artificial Sequence
  Description of Artificial Sequence: Synthetic polypeptide
  VH of XENP019077
EVQLVESGGGLVKPGGSLRLSCAASGFTFSNYWMNWVRQAPGKGLEWVGEIRLKSNNYATHYAEPVKGRFTISRDDSKSQVYLQMNSLKTEDTAVYYCTRYYGNYGGYFDVWGAGTLVTVSS

SEQ ID NO: 14799 - protein, 107 aa, Artificial Sequence; identical to SEQ ID NO: 10923
  Description of Artificial Sequence: Synthetic polypeptide
  VL of XENP019077

SEQ ID NO: 14800 - protein, 5 aa, Artificial Sequence
  Description of Artificial Sequence: Synthetic peptide
  XENP019077 vhCDR1
NYWMN

SEQ ID NO: 14801 - protein, 19 aa, Artificial Sequence
  Description of Artificial Sequence: Synthetic peptide
  XENP019077 vhCDR2
EIRLKSNNYATHYAEPVKG

SEQ ID NO: 14802 - protein, 11 aa, Artificial Sequence
  Description of Artificial Sequence: Synthetic peptide
  XENP019077 vhCDR3
YYGNYGGYFDV

SEQ ID NO: 14803 - protein, 11 aa, Artificial Sequence
  Description of Artificial Sequence: Synthetic peptide
  XENP019077 vlCDR1
RASQSVSNDVA

SEQ ID NO: 14804 - protein, 7 aa, Artificial Sequence
  Description of Artificial Sequence: Synthetic peptide
  XENP019077 vlCDR2
YASHRYT

SEQ ID NO: 14805 - protein, 9 aa, Artificial Sequence
  Description of Artificial Sequence: Synthetic peptide
  XENP019077 vlCDR3
QQDYSSPRT

SEQ ID NO: 14806 - protein, 249 aa, Artificial Sequence
  Description of Artificial Sequence: Synthetic polypeptide
  XENP019078 1G6_H1.253_L1_scFv(GKPGS)4
EVQLVESGGGLVKPGGSLRLSCAASGFTFSNYWMNWVRQAPGKGLEWVGEIRLKSNNYATHYAEPVKGRFTISRDDSKSTVVLQMNSLKTEDTAVYYCTRYYGNYGGYFDVWGAGTLVTVSSGKPGSGKPGSGKPGSGKPGSSIVMTQSPATLSVSPGERATLSCRASQSVSNDVAWYQQKPGQSPRLLINYASHRYTGVPDRFTGSGYGTEFTLTISSLQSEDFAVYFCQQDYSSPRTFGGGTKVEIK

SEQ ID NO: 14807 - protein, 122 aa, Artificial Sequence
  Description of Artificial Sequence: Synthetic polypeptide
  VH of XENP019078
EVQLVESGGGLVKPGGSLRLSCAASGFTFSNYWMNWVRQAPGKGLEWVGEIRLKSNNYATHYAEPVKGRFTISRDDSKSTVVLQMNSLKTEDTAVYYCTRYYGNYGGYFDVWGAGTLVTVSS

SEQ ID NO: 14808 - protein, 107 aa, Artificial Sequence; identical to SEQ ID NO: 10923
  Description of Artificial Sequence: Synthetic polypeptide
  VL of XENP019078

SEQ ID NO: 14809 - protein, 5 aa, Artificial Sequence
  Description of Artificial Sequence: Synthetic peptide
  XENP019078 vhCDR1
NYWMN

SEQ ID NO: 14810 - protein, 19 aa, Artificial Sequence
  Description of Artificial Sequence: Synthetic peptide
  XENP019078 vhCDR2
EIRLKSNNYATHYAEPVKG

SEQ ID NO: 14811 - protein, 11 aa, Artificial Sequence
  Description of Artificial Sequence: Synthetic peptide
  XENP019078 vhCDR3
YYGNYGGYFDV

SEQ ID NO: 14812 - protein, 11 aa, Artificial Sequence
  Description of Artificial Sequence: Synthetic peptide
  XENP019078 vlCDR1
RASQSVSNDVA

SEQ ID NO: 14813 - protein, 7 aa, Artificial Sequence
  Description of Artificial Sequence: Synthetic peptide
  XENP019078 vlCDR2
YASHRYT

SEQ ID NO: 14814 - protein, 9 aa, Artificial Sequence
  Description of Artificial Sequence: Synthetic peptide
  XENP019078 vlCDR3
QQDYSSPRT

SEQ ID NO: 14815 - protein, 249 aa, Artificial Sequence
  Description of Artificial Sequence: Synthetic polypeptide
  XENP019079 1G6_H1.254_L1_scFv(GKPGS)4
EVQLVESGGGLVKPGGSLRLSCAASGFTFSNYWMNWVRQAPGKGLEWVGEIRLKSNNYATHYAEPVKGRFTISRDDSKSTVYLEMNSLKTEDTAVYYCTRYYGNYGGYFDVWGAGTLVTVSSGKPGSGKPGSGKPGSGKPGSSIVMTQSPATLSVSPGERATLSCRASQSVSNDVAWYQQKPGQSPRLLINYASHRYTGVPDRFTGSGYGTEFTLTISSLQSEDFAVYFCQQDYSSPRTFGGGTKVEIK

SEQ ID NO: 14816 - protein, 122 aa, Artificial Sequence
  Description of Artificial Sequence: Synthetic polypeptide
  VH of XENP019079
EVQLVESGGGLVKPGGSLRLSCAASGFTFSNYWMNWVRQAPGKGLEWVGEIRLKSNNYATHYAEPVKGRFTISRDDSKSTVYLEMNSLKTEDTAVYYCTRYYGNYGGYFDVWGAGTLVTVSS

SEQ ID NO: 14817 - protein, 107 aa, Artificial Sequence; identical to SEQ ID NO: 10923
  Description of Artificial Sequence: Synthetic polypeptide
  VL of XENP019079

SEQ ID NO: 14818 - protein, 5 aa, Artificial Sequence
  Description of Artificial Sequence: Synthetic peptide
  XENP019079 vhCDR1
NYWMN

SEQ ID NO: 14819 - protein, 19 aa, Artificial Sequence
  Description of Artificial Sequence: Synthetic peptide
  XENP019079 vhCDR2
EIRLKSNNYATHYAEPVKG

SEQ ID NO: 14820 - protein, 11 aa, Artificial Sequence
  Description of Artificial Sequence: Synthetic peptide
  XENP019079 vhCDR3
YYGNYGGYFDV

SEQ ID NO: 14821 - protein, 11 aa, Artificial Sequence
  Description of Artificial Sequence: Synthetic peptide
  XENP019079 vlCDR1
RASQSVSNDVA

SEQ ID NO: 14822 - protein, 7 aa, Artificial Sequence
  Description of Artificial Sequence: Synthetic peptide
  XENP019079 vlCDR2
YASHRYT

SEQ ID NO: 14823 - protein, 9 aa, Artificial Sequence
  Description of Artificial Sequence: Synthetic peptide
  XENP019079 vlCDR3
QQDYSSPRT

SEQ ID NO: 14824 - protein, 249 aa, Artificial Sequence
  Description of Artificial Sequence: Synthetic polypeptide
  XENP019080 1G6_H1.255_L1_scFv(GKPGS)4
EVQLVESGGGLVKPGGSLRLSCAASGFTFSNYWMNWVRQAPGKGLEWVGEIRLKSNNYATHYAEPVKGRFTISRDDSKSTVYLQMNSEKTEDTAVYYCTRYYGNYGGYFDVWGAGTLVTVSSGKPGSGKPGSGKPGSGKPGSSIVMTQSPATLSVSPGERATLSCRASQSVSNDVAWYQQKPGQSPRLLINYASHRYTGVPDRFTGSGYGTEFTLTISSLQSEDFAVYFCQQDYSSPRTFGGGTKVEIK

SEQ ID NO: 14825 - protein, 122 aa, Artificial Sequence
  Description of Artificial Sequence: Synthetic polypeptide
  VH of XENP019080
EVQLVESGGGLVKPGGSLRLSCAASGFTFSNYWMNWVRQAPGKGLEWVGEIRLKSNNYATHYAEPVKGRFTISRDDSKSTVYLQMNSEKTEDTAVYYCTRYYGNYGGYFDVWGAGTLVTVSS

SEQ ID NO: 14826 - protein, 107 aa, Artificial Sequence; identical to SEQ ID NO: 10923
  Description of Artificial Sequence: Synthetic polypeptide
  VL of XENP019080

SEQ ID NO: 14827 - protein, 5 aa, Artificial Sequence
  Description of Artificial Sequence: Synthetic peptide
  XENP019080 vhCDR1
NYWMN

SEQ ID NO: 14828 - protein, 19 aa, Artificial Sequence
  Description of Artificial Sequence: Synthetic peptide
  XENP019080 vhCDR2
EIRLKSNNYATHYAEPVKG

SEQ ID NO: 14829 - protein, 11 aa, Artificial Sequence
  Description of Artificial Sequence: Synthetic peptide
  XENP019080 vhCDR3
YYGNYGGYFDV

SEQ ID NO: 14830 - protein, 11 aa, Artificial Sequence
  Description of Artificial Sequence: Synthetic peptide
  XENP019080 vlCDR1
RASQSVSNDVA

SEQ ID NO: 14831 - protein, 7 aa, Artificial Sequence
  Description of Artificial Sequence: Synthetic peptide
  XENP019080 vlCDR2
YASHRYT

SEQ ID NO: 14832 - protein, 9 aa, Artificial Sequence
  Description of Artificial Sequence: Synthetic peptide
  XENP019080 vlCDR3
QQDYSSPRT

SEQ ID NO: 14833 - protein, 249 aa, Artificial Sequence
  Description of Artificial Sequence: Synthetic polypeptide
  XENP019081 1G6_H1.256_L1_scFv(GKPGS)4
EVQLVESGGGLVKPGGSLRLSCAASGFTFSNYWMNWVRQAPGKGLEWVGEIRLKSNNYATHYAEPVKGRFTISRDDSKSTVYLQMNSVKTEDTAVYYCTRYYGNYGGYFDVWGAGTLVTVSSGKPGSGKPGSGKPGSGKPGSSIVMTQSPATLSVSPGERATLSCRASQSVSNDVAWYQQKPGQSPRLLINYASHRYTGVPDRFTGSGYGTEFTLTISSLQSEDFAVYFCQQDYSSPRTFGGGTKVEIK

SEQ ID NO: 14834 - protein, 122 aa, Artificial Sequence
  Description of Artificial Sequence: Synthetic polypeptide
  VH of XENP019081
EVQLVESGGGLVKPGGSLRLSCAASGFTFSNYWMNWVRQAPGKGLEWVGEIRLKSNNYATHYAEPVKGRFTISRDDSKSTVYLQMNSVKTEDTAVYYCTRYYGNYGGYFDVWGAGTLVTVSS

SEQ ID NO: 14835 - protein, 107 aa, Artificial Sequence; identical to SEQ ID NO: 10923
  Description of Artificial Sequence: Synthetic polypeptide
  VL of XENP019081

SEQ ID NO: 14836 - protein, 5 aa, Artificial Sequence
  Description of Artificial Sequence: Synthetic peptide
  XENP019081 vhCDR1
NYWMN

SEQ ID NO: 14837 - protein, 19 aa, Artificial Sequence
  Description of Artificial Sequence: Synthetic peptide
  XENP019081 vhCDR2
EIRLKSNNYATHYAEPVKG

SEQ ID NO: 14838 - protein, 11 aa, Artificial Sequence
  Description of Artificial Sequence: Synthetic peptide
  XENP019081 vhCDR3
YYGNYGGYFDV

SEQ ID NO: 14839 - protein, 11 aa, Artificial Sequence
  Description of Artificial Sequence: Synthetic peptide
  XENP019081 vlCDR1
RASQSVSNDVA

SEQ ID NO: 14840 - protein, 7 aa, Artificial Sequence
  Description of Artificial Sequence: Synthetic peptide
  XENP019081 vlCDR2
YASHRYT

SEQ ID NO: 14841 - protein, 9 aa, Artificial Sequence
  Description of Artificial Sequence: Synthetic peptide
  XENP019081 vlCDR3
QQDYSSPRT

SEQ ID NO: 14842 - protein, 249 aa, Artificial Sequence
  Description of Artificial Sequence: Synthetic polypeptide
  XENP019082 1G6_H1.257_L1_scFv(GKPGS)4
EVQLVESGGGLVKPGGSLRLSCAASGFTFSNYWMNWVRQAPGKGLEWVGEIRLKSNNYATHYAEPVKGRFTISRDDSKSTVYLQMNSLKTEDTAVYYCTRYYGNYGGYFDVWGRGTLVTVSSGKPGSGKPGSGKPGSGKPGSSIVMTQSPATLSVSPGERATLSCRASQSVSNDVAWYQQKPGQSPRLLINYASHRYTGVPDRFTGSGYGTEFTLTISSLQSEDFAVYFCQQDYSSPRTFGGGTKVEIK

SEQ ID NO: 14843 - protein, 122 aa, Artificial Sequence
  Description of Artificial Sequence: Synthetic polypeptide
  VH of XENP019082
EVQLVESGGGLVKPGGSLRLSCAASGFTFSNYWMNWVRQAPGKGLEWVGEIRLKSNNYATHYAEPVKGRFTISRDDSKSTVYLQMNSLKTEDTAVYYCTRYYGNYGGYFDVWGRGTLVTVSS

SEQ ID NO: 14844 - protein, 107 aa, Artificial Sequence; identical to SEQ ID NO: 10923
  Description of Artificial Sequence: Synthetic polypeptide
  VL of XENP019082

SEQ ID NO: 14845 - protein, 5 aa, Artificial Sequence
  Description of Artificial Sequence: Synthetic peptide
  XENP019082 vhCDR1
NYWMN

SEQ ID NO: 14846 - protein, 19 aa, Artificial Sequence
  Description of Artificial Sequence: Synthetic peptide
  XENP019082 vhCDR2
EIRLKSNNYATHYAEPVKG

SEQ ID NO: 14847 - protein, 11 aa, Artificial Sequence
  Description of Artificial Sequence: Synthetic peptide
  XENP019082 vhCDR3
YYGNYGGYFDV

SEQ ID NO: 14848 - protein, 11 aa, Artificial Sequence
  Description of Artificial Sequence: Synthetic peptide
  XENP019082 vlCDR1
RASQSVSNDVA

SEQ ID NO: 14849 - protein, 7 aa, Artificial Sequence
  Description of Artificial Sequence: Synthetic peptide
  XENP019082 vlCDR2
YASHRYT

SEQ ID NO: 14850 - protein, 9 aa, Artificial Sequence
  Description of Artificial Sequence: Synthetic peptide
  XENP019082 vlCDR3
QQDYSSPRT

SEQ ID NO: 14851 - protein, 249 aa, Artificial Sequence
  Description of Artificial Sequence: Synthetic polypeptide
  XENP019083 1G6_H1.258_L1_scFv(GKPGS)4
EVQLVESGGGLKKPGESLRLSCAASGFTFSNYWMNWVRQAPGKGLEWVGEIRLKSNNYATHYAEPVKGRFTISRDDSKSTVYLQMNSLKTEDTAVYYCTRYYGNYGGYFDVWGAGTLVTVSSGKPGSGKPGSGKPGSGKPGSSIVMTQSPATLSVSPGERATLSCRASQSVSNDVAWYQQKPGQSPRLLINYASHRYTGVPDRFTGSGYGTEFTLTISSLQSEDFAVYFCQQDYSSPRTFGGGTKVEIK

SEQ ID NO: 14852 - protein, 122 aa, Artificial Sequence
  Description of Artificial Sequence: Synthetic polypeptide
  VH of XENP019083
EVQLVESGGGLKKPGESLRLSCAASGFTFSNYWMNWVRQAPGKGLEWVGEIRLKSNNYATHYAEPVKGRFTISRDDSKSTVYLQMNSLKTEDTAVYYCTRYYGNYGGYFDVWGAGTLVTVSS

SEQ ID NO: 14853 - protein, 107 aa, Artificial Sequence; identical to SEQ ID NO: 10923
  Description of Artificial Sequence: Synthetic polypeptide
  VL of XENP019083

SEQ ID NO: 14854 - protein, 5 aa, Artificial Sequence
  Description of Artificial Sequence: Synthetic peptide
  XENP019083 vhCDR1
NYWMN

SEQ ID NO: 14855 - protein, 19 aa, Artificial Sequence
  Description of Artificial Sequence: Synthetic peptide
  XENP019083 vhCDR2
EIRLKSNNYATHYAEPVKG

SEQ ID NO: 14856 - protein, 11 aa, Artificial Sequence
  Description of Artificial Sequence: Synthetic peptide
  XENP019083 vhCDR3
YYGNYGGYFDV

SEQ ID NO: 14857 - protein, 11 aa, Artificial Sequence
  Description of Artificial Sequence: Synthetic peptide
  XENP019083 vlCDR1
RASQSVSNDVA

SEQ ID NO: 14858 - protein, 7 aa, Artificial Sequence
  Description of Artificial Sequence: Synthetic peptide
  XENP019083 vlCDR2
YASHRYT

SEQ ID NO: 14859 - protein, 9 aa, Artificial Sequence
  Description of Artificial Sequence: Synthetic peptide
  XENP019083 vlCDR3
QQDYSSPRT

SEQ ID NO: 14860 - protein, 249 aa, Artificial Sequence
  Description of Artificial Sequence: Synthetic polypeptide
  XENP019084 1G6_H1.259_L1_scFv(GKPGS)4
EVQLVESGGGLVKPGGSLRLSCAASGFTFSNYWMDWVRQAPGKGLEWVGEIRLKSNNYATHYAEPVKGRFTISRDDSKSTVYLQMNSLKTEDTAVYYCKRYYGNYGGYFDVWGAGTLVTVSSGKPGSGKPGSGKPGSGKPGSSIVMTQSPATLSVSPGERATLSCRASQSVSNDVAWYQQKPGQSPRLLINYASHRYTGVPDRFTGSGYGTEFTLTISSLQSEDFAVYFCQQDYSSPRTFGGGTKVEIK

SEQ ID NO: 14861 - protein, 122 aa, Artificial Sequence
  Description of Artificial Sequence: Synthetic polypeptide
  VH of XENP019084
EVQLVESGGGLVKPGGSLRLSCAASGFTFSNYWMDWVRQAPGKGLEWVGEIRLKSNNYATHYAEPVKGRFTISRDDSKSTVYLQMNSLKTEDTAVYYCKRYYGNYGGYFDVWGAGTLVTVSS

SEQ ID NO: 14862 - protein, 107 aa, Artificial Sequence; identical to SEQ ID NO: 10923
  Description of Artificial Sequence: Synthetic polypeptide
  VL of XENP019084

SEQ ID NO: 14863 - protein, 5 aa, Artificial Sequence
  Description of Artificial Sequence: Synthetic peptide
  XENP019084 vhCDR1
NYWMD

SEQ ID NO: 14864 - protein, 19 aa, Artificial Sequence
  Description of Artificial Sequence: Synthetic peptide
  XENP019084 vhCDR2
EIRLKSNNYATHYAEPVKG

SEQ ID NO: 14865 - protein, 11 aa, Artificial Sequence
  Description of Artificial Sequence: Synthetic peptide
  XENP019084 vhCDR3
YYGNYGGYFDV

SEQ ID NO: 14866 - protein, 11 aa, Artificial Sequence
  Description of Artificial Sequence: Synthetic peptide
  XENP019084 vlCDR1
RASQSVSNDVA

SEQ ID NO: 14867 - protein, 7 aa, Artificial Sequence
  Description of Artificial Sequence: Synthetic peptide
  XENP019084 vlCDR2
YASHRYT

SEQ ID NO: 14868 - protein, 9 aa, Artificial Sequence
  Description of Artificial Sequence: Synthetic peptide
  XENP019084 vlCDR3
QQDYSSPRT

SEQ ID NO: 14869 - protein, 249 aa, Artificial Sequence
  Description of Artificial Sequence: Synthetic polypeptide
  XENP019085 1G6_H1.260_L1_scFv(GKPGS)4
EVQLVESGGGLVKPGESLRLSCAASGFTFSNYWMNWVRQAPGKGLEWVGEIRLKSNNYATHYAEPVKGRFTISRDDSKSTVYLQMNSRKTEDTAVYYCTRYYGNYGGYFDVWGAGTLVTVSSGKPGSGKPGSGKPGSGKPGSSIVMTQSPATLSVSPGERATLSCRASQSVSNDVAWYQQKPGQSPRLLINYASHRYTGVPDRFTGSGYGTEFTLTISSLQSEDFAVYFCQQDYSSPRTFGGGTKVEIK

SEQ ID NO: 14870 - protein, 122 aa, Artificial Sequence
  Description of Artificial Sequence: Synthetic polypeptide
  VH of XENP019085
EVQLVESGGGLVKPGESLRLSCAASGFTFSNYWMNWVRQAPGKGLEWVGEIRLKSNNYATHYAEPVKGRFTISRDDSKSTVYLQMNSRKTEDTAVYYCTRYYGNYGGYFDVWGAGTLVTVSS

SEQ ID NO: 14871 - protein, 107 aa, Artificial Sequence; identical to SEQ ID NO: 10923
  Description of Artificial Sequence: Synthetic polypeptide
  VL of XENP019085

SEQ ID NO: 14872 - protein, 5 aa, Artificial Sequence
  Description of Artificial Sequence: Synthetic peptide
  XENP019085 vhCDR1
NYWMN

SEQ ID NO: 14873 - protein, 19 aa, Artificial Sequence
  Description of Artificial Sequence: Synthetic peptide
  XENP019085 vhCDR2
EIRLKSNNYATHYAEPVKG

SEQ ID NO: 14874 - protein, 11 aa, Artificial Sequence
  Description of Artificial Sequence: Synthetic peptide
  XENP019085 vhCDR3
YYGNYGGYFDV

SEQ ID NO: 14875 - protein, 11 aa, Artificial Sequence
  Description of Artificial Sequence: Synthetic peptide
  XENP019085 vlCDR1
RASQSVSNDVA

SEQ ID NO: 14876 - protein, 7 aa, Artificial Sequence
  Description of Artificial Sequence: Synthetic peptide
  XENP019085 vlCDR2
YASHRYT

SEQ ID NO: 14877 - protein, 9 aa, Artificial Sequence
  Description of Artificial Sequence: Synthetic peptide
  XENP019085 vlCDR3
QQDYSSPRT

SEQ ID NO: 14878 - protein, 249 aa, Artificial Sequence
  Description of Artificial Sequence: Synthetic polypeptide
  XENP019086 1G6_H1.261_L1_scFv(GKPGS)4
EVQLVESGGGLVKPGGSLRLSCKASGFTFSNYWMNWVRQAPGKGLEWVGEIRLKSNNYATHYAEPVKGRFTISRDDSKDTVYLQMNSLKTEDTAVYYCTRYYGNYGGYFDVWGAGTLVTVSSGKPGSGKPGSGKPGSGKPGSSIVMTQSPATLSVSPGERATLSCRASQSVSNDVAWYQQKPGQSPRLLINYASHRYTGVPDRFTGSGYGTEFTLTISSLQSEDFAVYFCQQDYSSPRTFGGGTKVEIK

SEQ ID NO: 14879 - protein, 122 aa, Artificial Sequence
  Description of Artificial Sequence: Synthetic polypeptide
  VH of XENP019086
EVQLVESGGGLVKPGGSLRLSCKASGFTFSNYWMNWVRQAPGKGLEWVGEIRLKSNNYATHYAEPVKGRFTISRDDSKDTVYLQMNSLKTEDTAVYYCTRYYGNYGGYFDVWGAGTLVTVSS

SEQ ID NO: 14880 - protein, 107 aa, Artificial Sequence; identical to SEQ ID NO: 10923
  Description of Artificial Sequence: Synthetic polypeptide
  VL of XENP019086

SEQ ID NO: 14881 - protein, 5 aa, Artificial Sequence
  Description of Artificial Sequence: Synthetic peptide
  XENP019086 vhCDR1
NYWMN

SEQ ID NO: 14882 - protein, 19 aa, Artificial Sequence
  Description of Artificial Sequence: Synthetic peptide
  XENP019086 vhCDR2
EIRLKSNNYATHYAEPVKG

SEQ ID NO: 14883 - protein, 11 aa, Artificial Sequence
  Description of Artificial Sequence: Synthetic peptide
  XENP019086 vhCDR3
YYGNYGGYFDV

SEQ ID NO: 14884 - protein, 11 aa, Artificial Sequence
  Description of Artificial Sequence: Synthetic peptide
  XENP019086 vlCDR1
RASQSVSNDVA

SEQ ID NO: 14885 - protein, 7 aa, Artificial Sequence
  Description of Artificial Sequence: Synthetic peptide
  XENP019086 vlCDR2
YASHRYT

SEQ ID NO: 14886 - protein, 9 aa, Artificial Sequence
  Description of Artificial Sequence: Synthetic peptide
  XENP019086 vlCDR3
QQDYSSPRT

SEQ ID NO: 14887 - protein, 249 aa, Artificial Sequence
  Description of Artificial Sequence: Synthetic polypeptide
  XENP019087 1G6_H1.262_L1_scFv(GKPGS)4
EVQLVESGGGLVKPGESLRLSCAASGFTFSNYWMNWVRQAPGKGLEWVGEIRLKSNNYATHYAEPVKGRFTISRDDSKSTVYLQMNRLKTEDTAVYYCTRYYGNYGGYFDVWGAGTLVTVSSGKPGSGKPGSGKPGSGKPGSSIVMTQSPATLSVSPGERATLSCRASQSVSNDVAWYQQKPGQSPRLLINYASHRYTGVPDRFTGSGYGTEFTLTISSLQSEDFAVYFCQQDYSSPRTFGGGTKVEIK

SEQ ID NO: 14888 - protein, 122 aa, Artificial Sequence
  Description of Artificial Sequence: Synthetic polypeptide
  VH of XENP019087
EVQLVESGGGLVKPGESLRLSCAASGFTFSNYWMNWVRQAPGKGLEWVGEIRLKSNNYATHYAEPVKGRFTISRDDSKSTVYLQMNRLKTEDTAVYYCTRYYGNYGGYFDVWGAGTLVTVSS

SEQ ID NO: 14889 - protein, 107 aa, Artificial Sequence; identical to SEQ ID NO: 10923
  Description of Artificial Sequence: Synthetic polypeptide
  VL of XENP019087

SEQ ID NO: 14890 - protein, 5 aa, Artificial Sequence
  Description of Artificial Sequence: Synthetic peptide
  XENP019087 vhCDR1
NYWMN

SEQ ID NO: 14891 - protein, 19 aa, Artificial Sequence
  Description of Artificial Sequence: Synthetic peptide
  XENP019087 vhCDR2
EIRLKSNNYATHYAEPVKG

SEQ ID NO: 14892 - protein, 11 aa, Artificial Sequence
  Description of Artificial Sequence: Synthetic peptide
  XENP019087 vhCDR3
YYGNYGGYFDV

SEQ ID NO: 14893 - protein, 11 aa, Artificial Sequence
  Description of Artificial Sequence: Synthetic peptide
  XENP019087 vlCDR1
RASQSVSNDVA

SEQ ID NO: 14894 - protein, 7 aa, Artificial Sequence
  Description of Artificial Sequence: Synthetic peptide
  XENP019087 vlCDR2
YASHRYT

SEQ ID NO: 14895 - protein, 9 aa, Artificial Sequence
  Description of Artificial Sequence: Synthetic peptide
  XENP019087 vlCDR3
QQDYSSPRT

SEQ ID NO: 14896 - protein, 249 aa, Artificial Sequence
  Description of Artificial Sequence: Synthetic polypeptide
  XENP019088 1G6_H1.263_L1_scFv(GKPGS)4
EVQLVESGGGLVKPGGSLRLSCAASGFTFSNYWMNWVRQAPGKGLEWVGEIRLKSNNYATHYAEKVKGLFTISRDDSKSTVYLQMNSLKTEDTAVYYCTRYYGNYGGYFDVWGAGTLVTVSSGKPGSGKPGSGKPGSGKPGSSIVMTQSPATLSVSPGERATLSCRASQSVSNDVAWYQQKPGQSPRLLINYASHRYTGVPDRFTGSGYGTEFTLTISSLQSEDFAVYFCQQDYSSPRTFGGGTKVEIK

SEQ ID NO: 14897 - protein, 122 aa, Artificial Sequence
  Description of Artificial Sequence: Synthetic polypeptide
  VH of XENP019088
EVQLVESGGGLVKPGGSLRLSCAASGFTFSNYWMNWVRQAPGKGLEWVGEIRLKSNNYATHYAEKVKGLFTISRDDSKSTVYLQMNSLKTEDTAVYYCTRYYGNYGGYFDVWGAGTLVTVSS

SEQ ID NO: 14898 - protein, 107 aa, Artificial Sequence; identical to SEQ ID NO: 10923
  Description of Artificial Sequence: Synthetic polypeptide
  VL of XENP019088

SEQ ID NO: 14899 - protein, 5 aa, Artificial Sequence
  Description of Artificial Sequence: Synthetic peptide
  XENP019088 vhCDR1
NYWMN

SEQ ID NO: 14900 - protein, 19 aa, Artificial Sequence
  Description of Artificial Sequence: Synthetic peptide
  XENP019088 vhCDR2
EIRLKSNNYATHYAEKVKG

SEQ ID NO: 14901 - protein, 11 aa, Artificial Sequence
  Description of Artificial Sequence: Synthetic peptide
  XENP019088 vhCDR3
YYGNYGGYFDV

SEQ ID NO: 14902 - protein, 11 aa, Artificial Sequence
  Description of Artificial Sequence: Synthetic peptide
  XENP019088 vlCDR1
RASQSVSNDVA

SEQ ID NO: 14903 - protein, 7 aa, Artificial Sequence
  Description of Artificial Sequence: Synthetic peptide
  XENP019088 vlCDR2
YASHRYT

SEQ ID NO: 14904 - protein, 9 aa, Artificial Sequence
  Description of Artificial Sequence: Synthetic peptide
  XENP019088 vlCDR3
QQDYSSPRT

SEQ ID NO: 14905 - protein, 249 aa, Artificial Sequence
  Description of Artificial Sequence: Synthetic polypeptide
  XENP019089 1G6_H1.264_L1_scFv(GKPGS)4
EVQLVESGGGLVKPGGSLRLSCKASGDTFSNYWMNWVRQAPGKGLEWVGEIRLKSNNYATHYAEPVKGRFTISRDDSKSTVYLQMNSLKTEDTAVYYCTRYYGNYGGYFDVWGAGTLVTVSSGKPGSGKPGSGKPGSGKPGSSIVMTQSPATLSVSPGERATLSCRASQSVSNDVAWYQQKPGQSPRLLINYASHRYTGVPDRFTGSGYGTEFTLTISSLQSEDFAVYFCQQDYSSPRTFGGGTKVEIK

SEQ ID NO: 14906 - protein, 122 aa, Artificial Sequence
  Description of Artificial Sequence: Synthetic polypeptide
  VH of XENP019089
EVQLVESGGGLVKPGGSLRLSCKASGDTFSNYWMNWVRQAPGKGLEWVGEIRLKSNNYATHYAEPVKGRFTISRDDSKSTVYLQMNSLKTEDTAVYYCTRYYGNYGGYFDVWGAGTLVTVSS

SEQ ID NO: 14907 - protein, 107 aa, Artificial Sequence; identical to SEQ ID NO: 10923
  Description of Artificial Sequence: Synthetic polypeptide
  VL of XENP019089

SEQ ID NO: 14908 - protein, 5 aa, Artificial Sequence
  Description of Artificial Sequence: Synthetic peptide
  XENP019089 vhCDR1
NYWMN

SEQ ID NO: 14909 - protein, 19 aa, Artificial Sequence
  Description of Artificial Sequence: Synthetic peptide
  XENP019089 vhCDR2
EIRLKSNNYATHYAEPVKG

SEQ ID NO: 14910 - protein, 11 aa, Artificial Sequence
  Description of Artificial Sequence: Synthetic peptide
  XENP019089 vhCDR3
YYGNYGGYFDV

SEQ ID NO: 14911 - protein, 11 aa, Artificial Sequence
  Description of Artificial Sequence: Synthetic peptide
  XENP019089 vlCDR1
RASQSVSNDVA

SEQ ID NO: 14912 - protein, 7 aa, Artificial Sequence
  Description of Artificial Sequence: Synthetic peptide
  XENP019089 vlCDR2
YASHRYT

SEQ ID NO: 14913 - protein, 9 aa, Artificial Sequence
  Description of Artificial Sequence: Synthetic peptide
  XENP019089 vlCDR3
QQDYSSPRT

SEQ ID NO: 14914 - protein, 249 aa, Artificial Sequence
  Description of Artificial Sequence: Synthetic polypeptide
  XENP019090 1G6_H1.265_L1_scFv(GKPGS)4
EVQLVESGGGLVKPGESLRLSCAASGFTFSNYWMNWVRQAPGKGLEWVGEIRLKSNNYATHYAEPVKGRFTISRDDSKSTVYLKMNSLKTEDTAVYYCTRYYGNYGGYFDVWGAGTLVTVSSGKPGSGKPGSGKPGSGKPGSSIVMTQSPATLSVSPGERATLSCRASQSVSNDVAWYQQKPGQSPRLLINYASHRYTGVPDRFTGSGYGTEFTLTISSLQSEDFAVYFCQQDYSSPRTFGGGTKVEIK

SEQ ID NO: 14915 - protein, 122 aa, Artificial Sequence
  Description of Artificial Sequence: Synthetic polypeptide
  VH of XENP019090
EVQLVESGGGLVKPGESLRLSCAASGFTFSNYWMNWVRQAPGKGLEWVGEIRLKSNNYATHYAEPVKGRFTISRDDSKSTVYLKMNSLKTEDTAVYYCTRYYGNYGGYFDVWGAGTLVTVSS

SEQ ID NO: 14916 - protein, 107 aa, Artificial Sequence; identical to SEQ ID NO: 10923
  Description of Artificial Sequence: Synthetic polypeptide
  VL of XENP019090

SEQ ID NO: 14917 - protein, 5 aa, Artificial Sequence
  Description of Artificial Sequence: Synthetic peptide
  XENP019090 vhCDR1
NYWMN

SEQ ID NO: 14918 - protein, 19 aa, Artificial Sequence
  Description of Artificial Sequence: Synthetic peptide
  XENP019090 vhCDR2
EIRLKSNNYATHYAEPVKG

SEQ ID NO: 14919 - protein, 11 aa, Artificial Sequence
  Description of Artificial Sequence: Synthetic peptide
  XENP019090 vhCDR3
YYGNYGGYFDV

SEQ ID NO: 14920 - protein, 11 aa, Artificial Sequence
  Description of Artificial Sequence: Synthetic peptide
  XENP019090 vlCDR1
RASQSVSNDVA

SEQ ID NO: 14921 - protein, 7 aa, Artificial Sequence
  Description of Artificial Sequence: Synthetic peptide
  XENP019090 vlCDR2
YASHRYT

SEQ ID NO: 14922 - protein, 9 aa, Artificial Sequence
  Description of Artificial Sequence: Synthetic peptide
  XENP019090 vlCDR3
QQDYSSPRT

SEQ ID NO: 14923 - protein, 249 aa, Artificial Sequence
  Description of Artificial Sequence: Synthetic polypeptide
  XENP019091 1G6_H1.266_L1_scFv(GKPGS)4
EVQLVESGGGLVKPGGSLRLSCAASGFTFSNYWMNWVRQAPGKGLEWVGEIRLKSNNYATHYAQPVKDRFTISRDDSKSTVYLQMNSLKTEDTAVYYCTRYYGNYGGYFDVWGAGTLVTVSSGKPGSGKPGSGKPGSGKPGSSIVMTQSPATLSVSPGERATLSCRASQSVSNDVAWYQQKPGQSPRLLINYASHRYTGVPDRFTGSGYGTEFTLTISSLQSEDFAVYFCQQDYSSPRTFGGGTKVEIK

SEQ ID NO: 14924 - protein, 122 aa, Artificial Sequence
  Description of Artificial Sequence: Synthetic polypeptide
  VH of XENP019091
EVQLVESGGGLVKPGGSLRLSCAASGFTFSNYWMNWVRQAPGKGLEWVGEIRLKSNNYATHYAQPVKDRFTISRDDSKSTVYLQMNSLKTEDTAVYYCTRYYGNYGGYFDVWGAGTLVTVSS

SEQ ID NO: 14925 - protein, 107 aa, Artificial Sequence; identical to SEQ ID NO: 10923
  Description of Artificial Sequence: Synthetic polypeptide
  VL of XENP019091

SEQ ID NO: 14926 - protein, 5 aa, Artificial Sequence
  Description of Artificial Sequence: Synthetic peptide
  XENP019091 vhCDR1
NYWMN

SEQ ID NO: 14927 - protein, 19 aa, Artificial Sequence
  Description of Artificial Sequence: Synthetic peptide
  XENP019091 vhCDR2
EIRLKSNNYATHYAQPVKD

SEQ ID NO: 14928 - protein, 11 aa, Artificial Sequence
  Description of Artificial Sequence: Synthetic peptide
  XENP019091 vhCDR3
YYGNYGGYFDV

SEQ ID NO: 14929 - protein, 11 aa, Artificial Sequence
  Description of Artificial Sequence: Synthetic peptide
  XENP019091 vlCDR1
RASQSVSNDVA

SEQ ID NO: 14930 - protein, 7 aa, Artificial Sequence
  Description of Artificial Sequence: Synthetic peptide
  XENP019091 vlCDR2
YASHRYT

SEQ ID NO: 14931 - protein, 9 aa, Artificial Sequence
  Description of Artificial Sequence: Synthetic peptide
  XENP019091 vlCDR3
QQDYSSPRT

SEQ ID NO: 14932 - protein, 249 aa, Artificial Sequence
  Description of Artificial Sequence: Synthetic polypeptide
  XENP019092 1G6_H1.267_L1_scFv(GKPGS)4
EVQLVESGGGLVKPGGSLRLSCAASGFTFSNYWMNWVRQAPGKGLEWVGEIRLKSNNYATHYAEPVKGRFTISRDDSKSTVYLEMNSRKTEDTAVYYCTRYYGNYGGYFDVWGAGTLVTVSSGKPGSGKPGSGKPGSGKPGSSIVMTQSPATLSVSPGERATLSCRASQSVSNDVAWYQQKPGQSPRLLINYASHRYTGVPDRFTGSGYGTEFTLTISSLQSEDFAVYFCQQDYSSPRTFGGGTKVEIK

SEQ ID NO: 14933 - protein, 122 aa, Artificial Sequence
  Description of Artificial Sequence: Synthetic polypeptide
  VH of XENP019092
EVQLVESGGGLVKPGGSLRLSCAASGFTFSNYWMNWVRQAPGKGLEWVGEIRLKSNNYATHYAEPVKGRFTISRDDSKSTVYLEMNSRKTEDTAVYYCTRYYGNYGGYFDVWGAGTLVTVSS

SEQ ID NO: 14934 - protein, 107 aa, Artificial Sequence; identical to SEQ ID NO: 10923
  Description of Artificial Sequence: Synthetic polypeptide
  VL of XENP019092

SEQ ID NO: 14935 - protein, 5 aa, Artificial Sequence
  Description of Artificial Sequence: Synthetic peptide
  XENP019092 vhCDR1
NYWMN

SEQ ID NO: 14936 - protein, 19 aa, Artificial Sequence
  Description of Artificial Sequence: Synthetic peptide
  XENP019092 vhCDR2
EIRLKSNNYATHYAEPVKG

SEQ ID NO: 14937 - protein, 11 aa, Artificial Sequence
  Description of Artificial Sequence: Synthetic peptide
  XENP019092 vhCDR3
YYGNYGGYFDV

SEQ ID NO: 14938 - protein, 11 aa, Artificial Sequence
  Description of Artificial Sequence: Synthetic peptide
  XENP019092 vlCDR1
RASQSVSNDVA

SEQ ID NO: 14939 - protein, 7 aa, Artificial Sequence
  Description of Artificial Sequence: Synthetic peptide
  XENP019092 vlCDR2
YASHRYT

SEQ ID NO: 14940 - protein, 9 aa, Artificial Sequence
  Description of Artificial Sequence: Synthetic peptide
  XENP019092 vlCDR3
QQDYSSPRT

SEQ ID NO: 14941 - protein, 249 aa, Artificial Sequence
  Description of Artificial Sequence: Synthetic polypeptide
  XENP019093 1G6_H1.268_L1_scFv(GKPGS)4
EVQLVESGGGLVKPGESLRLSCAASGFTFSNYWMNWVRQAPGKGLEWVGEIRLKSNNYATHYAEPVKGRFTISRDDSKSTVYLQMRSLKTEDTAVYYCTRYYGNYGGYFDVWGAGTLVTVSSGKPGSGKPGSGKPGSGKPGSSIVMTQSPATLSVSPGERATLSCRASQSVSNDVAWYQQKPGQSPRLLINYASHRYTGVPDRFTGSGYGTEFTLTISSLQSEDFAVYFCQQDYSSPRTFGGGTKVEIK

SEQ ID NO: 14942 - protein, 122 aa, Artificial Sequence
  Description of Artificial Sequence: Synthetic polypeptide
  VH of XENP019093
EVQLVESGGGLVKPGESLRLSCAASGFTFSNYWMNWVRQAPGKGLEWVGEIRLKSNNYATHYAEPVKGRFTISRDDSKSTVYLQMRSLKTEDTAVYYCTRYYGNYGGYFDVWGAGTLVTVSS

SEQ ID NO: 14943 - protein, 107 aa, Artificial Sequence; identical to SEQ ID NO: 10923
  Description of Artificial Sequence: Synthetic polypeptide
  VL of XENP019093

SEQ ID NO: 14944 - protein, 5 aa, Artificial Sequence
  Description of Artificial Sequence: Synthetic peptide
  XENP019093 vhCDR1
NYWMN

SEQ ID NO: 14945 - protein, 19 aa, Artificial Sequence
  Description of Artificial Sequence: Synthetic peptide
  XENP019093 vhCDR2
EIRLKSNNYATHYAEPVKG

SEQ ID NO: 14946 - protein, 11 aa, Artificial Sequence
  Description of Artificial Sequence: Synthetic peptide
  XENP019093 vhCDR3
YYGNYGGYFDV

SEQ ID NO: 14947 - protein, 11 aa, Artificial Sequence
  Description of Artificial Sequence: Synthetic peptide
  XENP019093 vlCDR1
RASQSVSNDVA

SEQ ID NO: 14948 - protein, 7 aa, Artificial Sequence
  Description of Artificial Sequence: Synthetic peptide
  XENP019093 vlCDR2
YASHRYT

SEQ ID NO: 14949 - protein, 9 aa, Artificial Sequence
  Description of Artificial Sequence: Synthetic peptide
  XENP019093 vlCDR3
QQDYSSPRT

SEQ ID NO: 14950 - protein, 249 aa, Artificial Sequence
  Description of Artificial Sequence: Synthetic polypeptide
  XENP019094 1G6_H1.269_L1_scFv(GKPGS)4
EVQLVESGGGLVKPGGSLRLSCAASGFTFSNFWMNWVRQAPGKGLEWVGEIRLYSNNYATHYAEPVKGRFTISRDDSKSTVYLQMNSLKTEDTAVYYCTRYYGNYGGYFDVWGAGTLVTVSSGKPGSGKPGSGKPGSGKPGSSIVMTQSPATLSVSPGERATLSCRASQSVSNDVAWYQQKPGQSPRLLINYASHRYTGVPDRFTGSGYGTEFTLTISSLQSEDFAVYFCQQDYSSPRTFGGGTKVEIK

SEQ ID NO: 14951 - protein, 122 aa, Artificial Sequence
  Description of Artificial Sequence: Synthetic polypeptide
  VH of XENP019094
EVQLVESGGGLVKPGGSLRLSCAASGFTFSNFWMNWVRQAPGKGLEWVGEIRLYSNNYATHYAEPVKGRFTISRDDSKSTVYLQMNSLKTEDTAVYYCTRYYGNYGGYFDVWGAGTLVTVSS

SEQ ID NO: 14952 - protein, 107 aa, Artificial Sequence; identical to SEQ ID NO: 10923
  Description of Artificial Sequence: Synthetic polypeptide
  VL of XENP019094

SEQ ID NO: 14953 - protein, 5 aa, Artificial Sequence
  Description of Artificial Sequence: Synthetic peptide
  XENP019094 vhCDR1
NFWMN

SEQ ID NO: 14954 - protein, 19 aa, Artificial Sequence
  Description of Artificial Sequence: Synthetic peptide
  XENP019094 vhCDR2
EIRLYSNNYATHYAEPVKG

SEQ ID NO: 14955 - protein, 11 aa, Artificial Sequence
  Description of Artificial Sequence: Synthetic peptide
  XENP019094 vhCDR3
YYGNYGGYFDV

SEQ ID NO: 14956 - protein, 11 aa, Artificial Sequence
  Description of Artificial Sequence: Synthetic peptide
  XENP019094 vlCDR1
RASQSVSNDVA

SEQ ID NO: 14957 - protein, 7 aa, Artificial Sequence
  Description of Artificial Sequence: Synthetic peptide
  XENP019094 vlCDR2
YASHRYT

SEQ ID NO: 14958 - protein, 9 aa, Artificial Sequence
  Description of Artificial Sequence: Synthetic peptide
  XENP019094 vlCDR3
QQDYSSPRT

SEQ ID NO: 14959 - protein, 249 aa, Artificial Sequence
  Description of Artificial Sequence: Synthetic polypeptide
  XENP019095 1G6_H1.270_L1_scFv(GKPGS)4
EVQLVESGGGLVKPGGSLRLSCAASGFTFSNYWMNWVRQAPGKGLEWVGEIRWYSNNYATHYAEPVKGRFTISRDDSKSTVYLQMNSLKTEDTAVYYCTRYYGNYGGYFDVWGAGTLVTVSSGKPGSGKPGSGKPGSGKPGSSIVMTQSPATLSVSPGERATLSCRASQSVSNDVAWYQQKPGQSPRLLINYASHRYTGVPDRFTGSGYGTEFTLTISSLQSEDFAVYFCQQDYSSPRTFGGGTKVEIK

SEQ ID NO: 14960 - protein, 122 aa, Artificial Sequence
  Description of Artificial Sequence: Synthetic polypeptide
  VH of XENP019095
EVQLVESGGGLVKPGGSLRLSCAASGFTFSNYWMNWVRQAPGKGLEWVGEIRWYSNNYATHYAEPVKGRFTISRDDSKSTVYLQMNSLKTEDTAVYYCTRYYGNYGGYFDVWGAGTLVTVSS

SEQ ID NO: 14961 - protein, 107 aa, Artificial Sequence; identical to SEQ ID NO: 10923
  Description of Artificial Sequence: Synthetic polypeptide
  VL of XENP019095

SEQ ID NO: 14962 - protein, 5 aa, Artificial Sequence
  Description of Artificial Sequence: Synthetic peptide
  XENP019095 vhCDR1
NYWMN

SEQ ID NO: 14963 - protein, 19 aa, Artificial Sequence
  Description of Artificial Sequence: Synthetic peptide
  XENP019095 vhCDR2
EIRWYSNNYATHYAEPVKG

SEQ ID NO: 14964 - protein, 11 aa, Artificial Sequence
  Description of Artificial Sequence: Synthetic peptide
  XENP019095 vhCDR3
YYGNYGGYFDV

SEQ ID NO: 14965 - protein, 11 aa, Artificial Sequence
  Description of Artificial Sequence: Synthetic peptide
  XENP019095 vlCDR1
RASQSVSNDVA

SEQ ID NO: 14966 - protein, 7 aa, Artificial Sequence
  Description of Artificial Sequence: Synthetic peptide
  XENP019095 vlCDR2
YASHRYT

SEQ ID NO: 14967 - protein, 9 aa, Artificial Sequence
  Description of Artificial Sequence: Synthetic peptide
  XENP019095 vlCDR3
QQDYSSPRT

SEQ ID NO: 14968 - protein, 249 aa, Artificial Sequence
  Description of Artificial Sequence: Synthetic polypeptide
  XENP019096 1G6_H1.271_L1_scFv(GKPGS)4
EVQLVESGGGLVKPGGSLRLSCAASGFTFSNYWMNWVRQAPGKGLEWVGEIRLYSNNYATHYAEPVKGRFTISRDDSKSTLYLQMNSLKTEDTAVYYCTRYYGNYGGYFDVWGAGTLVTVSSGKPGSGKPGSGKPGSGKPGSSIVMTQSPATLSVSPGERATLSCRASQSVSNDVAWYQQKPGQSPRLLINYASHRYTGVPDRFTGSGYGTEFTLTISSLQSEDFAVYFCQQDYSSPRTFGGGTKVEIK

SEQ ID NO: 14969 - protein, 122 aa, Artificial Sequence
  Description of Artificial Sequence: Synthetic polypeptide
  VH of XENP019096
EVQLVESGGGLVKPGGSLRLSCAASGFTFSNYWMNWVRQAPGKGLEWVGEIRLYSNNYATHYAEPVKGRFTISRDDSKSTLYLQMNSLKTEDTAVYYCTRYYGNYGGYFDVWGAGTLVTVSS

SEQ ID NO: 14970 - protein, 107 aa, Artificial Sequence; identical to SEQ ID NO: 10923
  Description of Artificial Sequence: Synthetic polypeptide
  VL of XENP019096

SEQ ID NO: 14971 - protein, 5 aa, Artificial Sequence
  Description of Artificial Sequence: Synthetic peptide
  XENP019096 vhCDR1
NYWMN

SEQ ID NO: 14972 - protein, 19 aa, Artificial Sequence
  Description of Artificial Sequence: Synthetic peptide
  XENP019096 vhCDR2
EIRLYSNNYATHYAEPVKG

SEQ ID NO: 14973 - protein, 11 aa, Artificial Sequence
  Description of Artificial Sequence: Synthetic peptide
  XENP019096 vhCDR3
YYGNYGGYFDV

SEQ ID NO: 14974 - protein, 11 aa, Artificial Sequence
  Description of Artificial Sequence: Synthetic peptide
  XENP019096 vlCDR1
RASQSVSNDVA

SEQ ID NO: 14975 - protein, 7 aa, Artificial Sequence
  Description of Artificial Sequence: Synthetic peptide
  XENP019096 vlCDR2
YASHRYT

SEQ ID NO: 14976 - protein, 9 aa, Artificial Sequence
  Description of Artificial Sequence: Synthetic peptide
  XENP019096 vlCDR3
QQDYSSPRT

SEQ ID NO: 14977 - protein, 249 aa, Artificial Sequence
  Description of Artificial Sequence: Synthetic polypeptide
  XENP019101 1G6_H1.272_L1_scFv(GKPGS)4
EVQLVESGGGLVKPGGSLRLSCAASGFTFSNFWMNWVRQAPGKGLEWVGEIRLYSNNYATHYAEPVKGRFTISRDDSKSTLYLQMNSLKTEDTAVYYCTRYYGNYGGYFDVWGAGTLVTVSSGKPGSGKPGSGKPGSGKPGSSIVMTQSPATLSVSPGERATLSCRASQSVSNDVAWYQQKPGQSPRLLINYASHRYTGVPDRFTGSGYGTEFTLTISSLQSEDFAVYFCQQDYSSPRTFGGGTKVEIK

SEQ ID NO: 14978 - protein, 122 aa, Artificial Sequence
  Description of Artificial Sequence: Synthetic polypeptide
  VH of XENP019101
EVQLVESGGGLVKPGGSLRLSCAASGFTFSNFWMNWVRQAPGKGLEWVGEIRLYSNNYATHYAEPVKGRFTISRDDSKSTLYLQMNSLKTEDTAVYYCTRYYGNYGGYFDVWGAGTLVTVSS

SEQ ID NO: 14979 - protein, 107 aa, Artificial Sequence; identical to SEQ ID NO: 10923
  Description of Artificial Sequence: Synthetic polypeptide
  VL of XENP019101

SEQ ID NO: 14980 - protein, 5 aa, Artificial Sequence
  Description of Artificial Sequence: Synthetic peptide
  XENP019101 vhCDR1
NFWMN

SEQ ID NO: 14981 - protein, 19 aa, Artificial Sequence
  Description of Artificial Sequence: Synthetic peptide
  XENP019101 vhCDR2
EIRLYSNNYATHYAEPVKG

SEQ ID NO: 14982 - protein, 11 aa, Artificial Sequence
  Description of Artificial Sequence: Synthetic peptide
  XENP019101 vhCDR3
YYGNYGGYFDV

SEQ ID NO: 14983 - protein, 11 aa, Artificial Sequence
  Description of Artificial Sequence: Synthetic peptide
  XENP019101 vlCDR1
RASQSVSNDVA

SEQ ID NO: 14984 - protein, 7 aa, Artificial Sequence
  Description of Artificial Sequence: Synthetic peptide
  XENP019101 vlCDR2
YASHRYT

SEQ ID NO: 14985 - protein, 9 aa, Artificial Sequence
  Description of Artificial Sequence: Synthetic peptide
  XENP019101 vlCDR3
QQDYSSPRT

SEQ ID NO: 14986 - protein, 249 aa, Artificial Sequence
  Description of Artificial Sequence: Synthetic polypeptide
  XENP019102 1G6_H1.273_L1_scFv(GKPGS)4
EVQLVESGGGLVKPGGSLRLSCAASGFTFSNFWMNWVRQAPGKGLEWVGEIRWKSNNYATHYAEPVKGRFTISRDDSKSTLYLQMNSLKTEDTAVYYCTRYYGNYGGYFDVWGAGTLVTVSSGKPGSGKPGSGKPGSGKPGSSIVMTQSPATLSVSPGERATLSCRASQSVSNDVAWYQQKPGQSPRLLINYASHRYTGVPDRFTGSGYGTEFTLTISSLQSEDFAVYFCQQDYSSPRTFGGGTKVEIK

SEQ ID NO: 14987 - protein, 122 aa, Artificial Sequence
  Description of Artificial Sequence: Synthetic polypeptide
  VH of XENP019102
EVQLVESGGGLVKPGGSLRLSCAASGFTFSNFWMNWVRQAPGKGLEWVGEIRWKSNNYATHYAEPVKGRFTISRDDSKSTLYLQMNSLKTEDTAVYYCTRYYGNYGGYFDVWGAGTLVTVSS

SEQ ID NO: 14988 - protein, 107 aa, Artificial Sequence; identical to SEQ ID NO: 10923
  Description of Artificial Sequence: Synthetic polypeptide
  VL of XENP019102

SEQ ID NO: 14989 - protein, 5 aa, Artificial Sequence
  Description of Artificial Sequence: Synthetic peptide
  XENP019102 vhCDR1
NFWMN

SEQ ID NO: 14990 - protein, 19 aa, Artificial Sequence
  Description of Artificial Sequence: Synthetic peptide
  XENP019102 vhCDR2
EIRWKSNNYATHYAEPVKG

SEQ ID NO: 14991 - protein, 11 aa, Artificial Sequence
  Description of Artificial Sequence: Synthetic peptide
  XENP019102 vhCDR3
YYGNYGGYFDV

SEQ ID NO: 14992 - protein, 11 aa, Artificial Sequence
  Description of Artificial Sequence: Synthetic peptide
  XENP019102 vlCDR1
RASQSVSNDVA

SEQ ID NO: 14993 - protein, 7 aa, Artificial Sequence
  Description of Artificial Sequence: Synthetic peptide
  XENP019102 vlCDR2
YASHRYT

SEQ ID NO: 14994 - protein, 9 aa, Artificial Sequence
  Description of Artificial Sequence: Synthetic peptide
  XENP019102 vlCDR3
QQDYSSPRT

SEQ ID NO: 14995 - protein, 249 aa, Artificial Sequence
  Description of Artificial Sequence: Synthetic polypeptide
  XENP019103 1G6_H1.274_L1_scFv(GKPGS)4
EVQLVESGGGLVKPGGSLRLSCAASGFTFSNFWMNWVRQAPGKGLEWVGEIRLKKNNYATHYAEPVKGRFTISRDDSKSTLYLQMNSLKTEDTAVYYCTRYYGNYGGYFDVWGAGTLVTVSSGKPGSGKPGSGKPGSGKPGSSIVMTQSPATLSVSPGERATLSCRASQSVSNDVAWYQQKPGQSPRLLINYASHRYTGVPDRFTGSGYGTEFTLTISSLQSEDFAVYFCQQDYSSPRTFGGGTKVEIK

SEQ ID NO: 14996 - protein, 122 aa, Artificial Sequence
  Description of Artificial Sequence: Synthetic polypeptide
  VH of XENP019103
EVQLVESGGGLVKPGGSLRLSCAASGFTFSNFWMNWVRQAPGKGLEWVGEIRLKKNNYATHYAEPVKGRFTISRDDSKSTLYLQMNSLKTEDTAVYYCTRYYGNYGGYFDVWGAGTLVTVSS

SEQ ID NO: 14997 - protein, 107 aa, Artificial Sequence; identical to SEQ ID NO: 10923
  Description of Artificial Sequence: Synthetic polypeptide
  VL of XENP019103

SEQ ID NO: 14998 - protein, 5 aa, Artificial Sequence
  Description of Artificial Sequence: Synthetic peptide
  XENP019103 vhCDR1
NFWMN

SEQ ID NO: 14999 - protein, 19 aa, Artificial Sequence
  Description of Artificial Sequence: Synthetic peptide
  XENP019103 vhCDR2
EIRLKKNNYATHYAEPVKG

SEQ ID NO: 15000 - protein, 11 aa, Artificial Sequence
  Description of Artificial Sequence: Synthetic peptide
  XENP019103 vhCDR3
YYGNYGGYFDV

SEQ ID NO: 15001 - protein, 11 aa, Artificial Sequence
  Description of Artificial Sequence: Synthetic peptide
  XENP019103 vlCDR1
RASQSVSNDVA

SEQ ID NO: 15002 - protein, 7 aa, Artificial Sequence
  Description of Artificial Sequence: Synthetic peptide
  XENP019103 vlCDR2
YASHRYT

SEQ ID NO: 15003 - protein, 9 aa, Artificial Sequence
  Description of Artificial Sequence: Synthetic peptide
  XENP019103 vlCDR3
QQDYSSPRT

SEQ ID NO: 15004 - protein, 249 aa, Artificial Sequence
  Description of Artificial Sequence: Synthetic polypeptide
  XENP019104 1G6_H1.275_L1_scFv(GKPGS)4
EVQLVESGGGLVKPGGSLRLSCAASGFTFSNFWMNWVRQAPGKGLEWVGEIRWYSNNYATHYAEPVKGRFTISRDDSKSTLYLQMNSLKTEDTAVYYCTRYYGNYGGYFDVWGAGTLVTVSSGKPGSGKPGSGKPGSGKPGSSIVMTQSPATLSVSPGERATLSCRASQSVSNDVAWYQQKPGQSPRLLINYASHRYTGVPDRFTGSGYGTEFTLTISSLQSEDFAVYFCQQDYSSPRTFGGGTKVEIK

SEQ ID NO: 15005 - protein, 122 aa, Artificial Sequence
  Description of Artificial Sequence: Synthetic polypeptide
  VH of XENP019104
EVQLVESGGGLVKPGGSLRLSCAASGFTFSNFWMNWVRQAPGKGLEWVGEIRWYSNNYATHYAEPVKGRFTISRDDSKSTLYLQMNSLKTEDTAVYYCTRYYGNYGGYFDVWGAGTLVTVSS

SEQ ID NO: 15006 - protein, 107 aa, Artificial Sequence; identical to SEQ ID NO: 10923
  Description of Artificial Sequence: Synthetic polypeptide
  VL of XENP019104

SEQ ID NO: 15007 - protein, 5 aa, Artificial Sequence
  Description of Artificial Sequence: Synthetic peptide
  XENP019104 vhCDR1
NFWMN

SEQ ID NO: 15008 - protein, 19 aa, Artificial Sequence
  Description of Artificial Sequence: Synthetic peptide
  XENP019104 vhCDR2
EIRWYSNNYATHYAEPVKG

SEQ ID NO: 15009 - protein, 11 aa, Artificial Sequence
  Description of Artificial Sequence: Synthetic peptide
  XENP019104 vhCDR3
YYGNYGGYFDV

SEQ ID NO: 15010 - protein, 11 aa, Artificial Sequence
  Description of Artificial Sequence: Synthetic peptide
  XENP019104 vlCDR1
RASQSVSNDVA

SEQ ID NO: 15011 - protein, 7 aa, Artificial Sequence
  Description of Artificial Sequence: Synthetic peptide
  XENP019104 vlCDR2
YASHRYT

SEQ ID NO: 15012 - protein, 9 aa, Artificial Sequence
  Description of Artificial Sequence: Synthetic peptide
  XENP019104 vlCDR3
QQDYSSPRT

SEQ ID NO: 15013 - protein, 249 aa, Artificial Sequence
  Description of Artificial Sequence: Synthetic polypeptide
  XENP019105 1G6_H1.276_L1_scFv(GKPGS)4
EVQLVESGGGLVQPGGSLKLSCAASGFTFSNYWMNWVRQAPGKGLEWVGEIRLKSNNYATHYAASVKGRFTISRDDSKSTLYLQMNSLKTEDTAVYYCTRYYGNYGGYFDVWGQGTLVTVSSGKPGSGKPGSGKPGSGKPGSSIVMTQSPATLSVSPGERATLSCRASQSVSNDVAWYQQKPGQSPRLLINYASHRYTGVPDRFTGSGYGTEFTLTISSLQSEDFAVYFCQQDYSSPRTFGGGTKVEIK

SEQ ID NO: 15014 - protein, 122 aa, Artificial Sequence
  Description of Artificial Sequence: Synthetic polypeptide
  VH of XENP019105
EVQLVESGGGLVQPGGSLKLSCAASGFTFSNYWMNWVRQAPGKGLEWVGEIRLKSNNYATHYAASVKGRFTISRDDSKSTLYLQMNSLKTEDTAVYYCTRYYGNYGGYFDVWGQGTLVTVSS

SEQ ID NO: 15015 - protein, 107 aa, Artificial Sequence; identical to SEQ ID NO: 10923
  Description of Artificial Sequence: Synthetic polypeptide
  VL of XENP019105

SEQ ID NO: 15016 - protein, 5 aa, Artificial Sequence
  Description of Artificial Sequence: Synthetic peptide
  XENP019105 vhCDR1
NYWMN

SEQ ID NO: 15017 - protein, 19 aa, Artificial Sequence
  Description of Artificial Sequence: Synthetic peptide
  XENP019105 vhCDR2
EIRLKSNNYATHYAASVKG

SEQ ID NO: 15018 - protein, 11 aa, Artificial Sequence
  Description of Artificial Sequence: Synthetic peptide
  XENP019105 vhCDR3
YYGNYGGYFDV

SEQ ID NO: 15019 - protein, 11 aa, Artificial Sequence
  Description of Artificial Sequence: Synthetic peptide
  XENP019105 vlCDR1
RASQSVSNDVA

SEQ ID NO: 15020 - protein, 7 aa, Artificial Sequence
  Description of Artificial Sequence: Synthetic peptide
  XENP019105 vlCDR2
YASHRYT

SEQ ID NO: 15021 - protein, 9 aa, Artificial Sequence
  Description of Artificial Sequence: Synthetic peptide
  XENP019105 vlCDR3
QQDYSSPRT

SEQ ID NO: 15022 - protein, 249 aa, Artificial Sequence
  Description of Artificial Sequence: Synthetic polypeptide
  XENP019106 1G6_H1.277_L1_scFv(GKPGS)4
EVQLVESGGGLVKPGGSLKLSCAASGFTFSNYWMNWVRQAPGKGLEWVGEIRLKSNNYATHYADSVKGRFTISRDDSKSTLYLQMNSLKTEDTAVYYCTRYYGNYGGYFDVWGQGTLVTVSSGKPGSGKPGSGKPGSGKPGSSIVMTQSPATLSVSPGERATLSCRASQSVSNDVAWYQQKPGQSPRLLINYASHRYTGVPDRFTGSGYGTEFTLTISSLQSEDFAVYFCQQDYSSPRTFGGGTKVEIK

SEQ ID NO: 15023 - protein, 122 aa, Artificial Sequence
  Description of Artificial Sequence: Synthetic polypeptide
  VH of XENP019106
EVQLVESGGGLVKPGGSLKLSCAASGFTFSNYWMNWVRQAPGKGLEWVGEIRLKSNNYATHYADSVKGRFTISRDDSKSTLYLQMNSLKTEDTAVYYCTRYYGNYGGYFDVWGQGTLVTVSS

SEQ ID NO: 15024 - protein, 107 aa, Artificial Sequence; identical to SEQ ID NO: 10923
  Description of Artificial Sequence: Synthetic polypeptide
  VL of XENP019106

SEQ ID NO: 15025 - protein, 5 aa, Artificial Sequence
  Description of Artificial Sequence: Synthetic peptide
  XENP019106 vhCDR1
NYWMN

SEQ ID NO: 15026 - protein, 19 aa, Artificial Sequence
  Description of Artificial Sequence: Synthetic peptide
  XENP019106 vhCDR2
EIRLKSNNYATHYADSVKG

SEQ ID NO: 15027 - protein, 11 aa, Artificial Sequence
  Description of Artificial Sequence: Synthetic peptide
  XENP019106 vhCDR3
YYGNYGGYFDV

SEQ ID NO: 15028 - protein, 11 aa, Artificial Sequence
  Description of Artificial Sequence: Synthetic peptide
  XENP019106 vlCDR1
RASQSVSNDVA

SEQ ID NO: 15029 - protein, 7 aa, Artificial Sequence
  Description of Artificial Sequence: Synthetic peptide
  XENP019106 vlCDR2
YASHRYT

SEQ ID NO: 15030 - protein, 9 aa, Artificial Sequence
  Description of Artificial Sequence: Synthetic peptide
  XENP019106 vlCDR3
QQDYSSPRT

SEQ ID NO: 15031 - protein, 249 aa, Artificial Sequence
  Description of Artificial Sequence: Synthetic polypeptide
  XENP019107 1G6_H1_L1.146_scFv(GKPGS)4
EVQLVESGGGLVKPGGSLRLSCAASGFTFSNYWMNWVRQAPGKGLEWVGEIRLKSNNYATHYAEPVKGRFTISRDDSKSTVYLQMNSLKTEDTAVYYCTRYYGNYGGYFDVWGAGTLVTVSSGKPGSGKPGSGKPGSGKPGSSIVMTQSPATLAVSPGERATLSCRASQSVSNDVAWYQQKPGQSPRLLINYASHRYTGVPDRFTGSGYGTEFTLTISSLQSEDFAVYFCQQDYSSPRTFGGGTKVEIK

SEQ ID NO: 15032 - protein, 122 aa, Artificial Sequence; identical to SEQ ID NO: 10922
  Description of Artificial Sequence: Synthetic polypeptide
  VH of XENP019107

SEQ ID NO: 15033 - protein, 107 aa, Artificial Sequence
  Description of Artificial Sequence: Synthetic polypeptide
  VL of XENP019107
SIVMTQSPATLAVSPGERATLSCRASQSVSNDVAWYQQKPGQSPRLLINYASHRYTGVPDRFTGSGYGTEFTLTISSLQSEDFAVYFCQQDYSSPRTFGGGTKVEIK

SEQ ID NO: 15034 - protein, 5 aa, Artificial Sequence
  Description of Artificial Sequence: Synthetic peptide
  XENP019107 vhCDR1
NYWMN

SEQ ID NO: 15035 - protein, 19 aa, Artificial Sequence
  Description of Artificial Sequence: Synthetic peptide
  XENP019107 vhCDR2
EIRLKSNNYATHYAEPVKG

SEQ ID NO: 15036 - protein, 11 aa, Artificial Sequence
  Description of Artificial Sequence: Synthetic peptide
  XENP019107 vhCDR3
YYGNYGGYFDV

SEQ ID NO: 15037 - protein, 11 aa, Artificial Sequence
  Description of Artificial Sequence: Synthetic peptide
  XENP019107 vlCDR1
RASQSVSNDVA

SEQ ID NO: 15038 - protein, 7 aa, Artificial Sequence
  Description of Artificial Sequence: Synthetic peptide
  XENP019107 vlCDR2
YASHRYT

SEQ ID NO: 15039 - protein, 9 aa, Artificial Sequence
  Description of Artificial Sequence: Synthetic peptide
  XENP019107 vlCDR3
QQDYSSPRT

SEQ ID NO: 15040 - protein, 249 aa, Artificial Sequence
  Description of Artificial Sequence: Synthetic polypeptide
  XENP019108 1G6_H1_L1.147_scFv(GKPGS)4
EVQLVESGGGLVKPGGSLRLSCAASGFTFSNYWMNWVRQAPGKGLEWVGEIRLKSNNYATHYAEPVKGRFTISRDDSKSTVYLQMNSLKTEDTAVYYCTRYYGNYGGYFDVWGAGTLVTVSSGKPGSGKPGSGKPGSGKPGSSIVMTQSPATLPVSPGERATLSCRASQSVSNDVAWYQQKPGQSPRLLINYASHRYTGVPDRFTGSGYGTEFTLTISSLQSEDFAVYFCQQDYSSPRTFGGGTKVEIK

SEQ ID NO: 15041 - protein, 122 aa, Artificial Sequence; identical to SEQ ID NO: 10922
  Description of Artificial Sequence: Synthetic polypeptide
  VH of XENP019108

SEQ ID NO: 15042 - protein, 107 aa, Artificial Sequence
  Description of Artificial Sequence: Synthetic polypeptide
  VL of XENP019108
SIVMTQSPATLPVSPGERATLSCRASQSVSNDVAWYQQKPGQSPRLLINYASHRYTGVPDRFTGSGYGTEFTLTISSLQSEDFAVYFCQQDYSSPRTFGGGTKVEIK

SEQ ID NO: 15043 - protein, 5 aa, Artificial Sequence
  Description of Artificial Sequence: Synthetic peptide
  XENP019108 vhCDR1
NYWMN

SEQ ID NO: 15044 - protein, 19 aa, Artificial Sequence
  Description of Artificial Sequence: Synthetic peptide
  XENP019108 vhCDR2
EIRLKSNNYATHYAEPVKG

SEQ ID NO: 15045 - protein, 11 aa, Artificial Sequence
  Description of Artificial Sequence: Synthetic peptide
  XENP019108 vhCDR3
YYGNYGGYFDV

SEQ ID NO: 15046 - protein, 11 aa, Artificial Sequence
  Description of Artificial Sequence: Synthetic peptide
  XENP019108 vlCDR1
RASQSVSNDVA

SEQ ID NO: 15047 - protein, 7 aa, Artificial Sequence
  Description of Artificial Sequence: Synthetic peptide
  XENP019108 vlCDR2
YASHRYT

SEQ ID NO: 15048 - protein, 9 aa, Artificial Sequence
  Description of Artificial Sequence: Synthetic peptide
  XENP019108 vlCDR3
QQDYSSPRT

SEQ ID NO: 15049 - protein, 249 aa, Artificial Sequence
  Description of Artificial Sequence: Synthetic polypeptide
  XENP019109 1G6_H1_L1.148_scFv(GKPGS)4
EVQLVESGGGLVKPGGSLRLSCAASGFTFSNYWMNWVRQAPGKGLEWVGEIRLKSNNYATHYAEPVKGRFTISRDDSKSTVYLQMNSLKTEDTAVYYCTRYYGNYGGYFDVWGAGTLVTVSSGKPGSGKPGSGKPGSGKPGSSIVMTQSPATLSASPGERATLSCRASQSVSNDVAWYQQKPGQSPRLLINYASHRYTGVPDRFTGSGYGTEFTLTISSLQSEDFAVYFCQQDYSSPRTFGGGTKVEIK

SEQ ID NO: 15050 - protein, 122 aa, Artificial Sequence; identical to SEQ ID NO: 10922
  Description of Artificial Sequence: Synthetic polypeptide
  VH of XENP019109

SEQ ID NO: 15051 - protein, 107 aa, Artificial Sequence
  Description of Artificial Sequence: Synthetic polypeptide
  VL of XENP019109
SIVMTQSPATLSASPGERATLSCRASQSVSNDVAWYQQKPGQSPRLLINYASHRYTGVPDRFTGSGYGTEFTLTISSLQSEDFAVYFCQQDYSSPRTFGGGTKVEIK

SEQ ID NO: 15052 - protein, 5 aa, Artificial Sequence
  Description of Artificial Sequence: Synthetic peptide
  XENP019109 vhCDR1
NYWMN

SEQ ID NO: 15053 - protein, 19 aa, Artificial Sequence
  Description of Artificial Sequence: Synthetic peptide
  XENP019109 vhCDR2
EIRLKSNNYATHYAEPVKG

SEQ ID NO: 15054 - protein, 11 aa, Artificial Sequence
  Description of Artificial Sequence: Synthetic peptide
  XENP019109 vhCDR3
YYGNYGGYFDV

SEQ ID NO: 15055 - protein, 11 aa, Artificial Sequence
  Description of Artificial Sequence: Synthetic peptide
  XENP019109 vlCDR1
RASQSVSNDVA

SEQ ID NO: 15056 - protein, 7 aa, Artificial Sequence
  Description of Artificial Sequence: Synthetic peptide
  XENP019109 vlCDR2
YASHRYT

SEQ ID NO: 15057 - protein, 9 aa, Artificial Sequence
  Description of Artificial Sequence: Synthetic peptide
  XENP019109 vlCDR3
QQDYSSPRT

SEQ ID NO: 15058 - protein, 249 aa, Artificial Sequence
  Description of Artificial Sequence: Synthetic polypeptide
  XENP019110 1G6_H1_L1.149_scFv(GKPGS)4
EVQLVESGGGLVKPGGSLRLSCAASGFTFSNYWMNWVRQAPGKGLEWVGEIRLKSNNYATHYAEPVKGRFTISRDDSKSTVYLQMNSLKTEDTAVYYCTRYYGNYGGYFDVWGAGTLVTVSSGKPGSGKPGSGKPGSGKPGSSIVMTQSPATLSVSPGERASLSCRASQSVSNDVAWYQQKPGQSPRLLINYASHRYTGVPDRFTGSGYGTEFTLTISSLQSEDFAVYFCQQDYSSPRTFGGGTKVEIK

SEQ ID NO: 15059 - protein, 122 aa, Artificial Sequence; identical to SEQ ID NO: 10922
  Description of Artificial Sequence: Synthetic polypeptide
  VH of XENP019110

SEQ ID NO: 15060 - protein, 107 aa, Artificial Sequence
  Description of Artificial Sequence: Synthetic polypeptide
  VL of XENP019110
SIVMTQSPATLSVSPGERASLSCRASQSVSNDVAWYQQKPGQSPRLLINYASHRYTGVPDRFTGSGYGTEFTLTISSLQSEDFAVYFCQQDYSSPRTFGGGTKVEIK

SEQ ID NO: 15061 - protein, 5 aa, Artificial Sequence
  Description of Artificial Sequence: Synthetic peptide
  XENP019110 vhCDR1
NYWMN

SEQ ID NO: 15062 - protein, 19 aa, Artificial Sequence
  Description of Artificial Sequence: Synthetic peptide
  XENP019110 vhCDR2
EIRLKSNNYATHYAEPVKG

SEQ ID NO: 15063 - protein, 11 aa, Artificial Sequence
  Description of Artificial Sequence: Synthetic peptide
  XENP019110 vhCDR3
YYGNYGGYFDV

SEQ ID NO: 15064 - protein, 11 aa, Artificial Sequence
  Description of Artificial Sequence: Synthetic peptide
  XENP019110 vlCDR1
RASQSVSNDVA

SEQ ID NO: 15065 - protein, 7 aa, Artificial Sequence
  Description of Artificial Sequence: Synthetic peptide
  XENP019110 vlCDR2
YASHRYT

SEQ ID NO: 15066 - protein, 9 aa, Artificial Sequence
  Description of Artificial Sequence: Synthetic peptide
  XENP019110 vlCDR3
QQDYSSPRT

SEQ ID NO: 15067 - protein, 249 aa, Artificial Sequence
  Description of Artificial Sequence: Synthetic polypeptide
  XENP019111 1G6_H1_L1.150_scFv(GKPGS)4
EVQLVESGGGLVKPGGSLRLSCAASGFTFSNYWMNWVRQAPGKGLEWVGEIRLKSNNYATHYAEPVKGRFTISRDDSKSTVYLQMNSLKTEDTAVYYCTRYYGNYGGYFDVWGAGTLVTVSSGKPGSGKPGSGKPGSGKPGSSIVMTQSPATLSVSPGERATLKCRASQSVSNDVAWYQQKPGQSPRLLINYASHRYTGVPDRFTGSGYGTEFTLTISSLQSEDFAVYFCQQDYSSPRTFGGGTKVEIK

SEQ ID NO: 15068 - protein, 122 aa, Artificial Sequence; identical to SEQ ID NO: 10922
  Description of Artificial Sequence: Synthetic polypeptide
  VH of XENP019111

SEQ ID NO: 15069 - protein, 107 aa, Artificial Sequence
  Description of Artificial Sequence: Synthetic polypeptide
  VL of XENP019111
SIVMTQSPATLSVSPGERATLKCRASQSVSNDVAWYQQKPGQSPRLLINYASHRYTGVPDRFTGSGYGTEFTLTISSLQSEDFAVYFCQQDYSSPRTFGGGTKVEIK

SEQ ID NO: 15070 - protein, 5 aa, Artificial Sequence
  Description of Artificial Sequence: Synthetic peptide
  XENP019111 vhCDR1
NYWMN

SEQ ID NO: 15071 - protein, 19 aa, Artificial Sequence
  Description of Artificial Sequence: Synthetic peptide
  XENP019111 vhCDR2
EIRLKSNNYATHYAEPVKG

SEQ ID NO: 15072 - protein, 11 aa, Artificial Sequence
  Description of Artificial Sequence: Synthetic peptide
  XENP019111 vhCDR3
YYGNYGGYFDV

SEQ ID NO: 15073 - protein, 11 aa, Artificial Sequence
  Description of Artificial Sequence: Synthetic peptide
  XENP019111 vlCDR1
RASQSVSNDVA

SEQ ID NO: 15074 - protein, 7 aa, Artificial Sequence
  Description of Artificial Sequence: Synthetic peptide
  XENP019111 vlCDR2
YASHRYT

SEQ ID NO: 15075 - protein, 9 aa, Artificial Sequence
  Description of Artificial Sequence: Synthetic peptide
  XENP019111 vlCDR3
QQDYSSPRT

SEQ ID NO: 15076 - protein, 249 aa, Artificial Sequence
  Description of Artificial Sequence: Synthetic polypeptide
  XENP019112 1G6_H1_L1.151_scFv(GKPGS)4
EVQLVESGGGLVKPGGSLRLSCAASGFTFSNYWMNWVRQAPGKGLEWVGEIRLKSNNYATHYAEPVKGRFTISRDDSKSTVYLQMNSLKTEDTAVYYCTRYYGNYGGYFDVWGAGTLVTVSSGKPGSGKPGSGKPGSGKPGSSIVMTQSPATLSVSPGERATLSCRASQSVSNDVAWYQQKPEQSPRLLINYASHRYTGVPDRFTGSGYGTEFTLTISSLQSEDFAVYFCQQDYSSPRTFGGGTKVEIK

SEQ ID NO: 15077 - protein, 122 aa, Artificial Sequence; identical to SEQ ID NO: 10922
  Description of Artificial Sequence: Synthetic polypeptide
  VH of XENP019112

SEQ ID NO: 15078 - protein, 107 aa, Artificial Sequence
  Description of Artificial Sequence: Synthetic polypeptide
  VL of XENP019112
SIVMTQSPATLSVSPGERATLSCRASQSVSNDVAWYQQKPEQSPRLLINYASHRYTGVPDRFTGSGYGTEFTLTISSLQSEDFAVYFCQQDYSSPRTFGGGTKVEIK

SEQ ID NO: 15079 - protein, 5 aa, Artificial Sequence
  Description of Artificial Sequence: Synthetic peptide
  XENP019112 vhCDR1
NYWMN

SEQ ID NO: 15080 - protein, 19 aa, Artificial Sequence
  Description of Artificial Sequence: Synthetic peptide
  XENP019112 vhCDR2
EIRLKSNNYATHYAEPVKG

SEQ ID NO: 15081 - protein, 11 aa, Artificial Sequence
  Description of Artificial Sequence: Synthetic peptide
  XENP019112 vhCDR3
YYGNYGGYFDV

SEQ ID NO: 15082 - protein, 11 aa, Artificial Sequence
  Description of Artificial Sequence: Synthetic peptide
  XENP019112 vlCDR1
RASQSVSNDVA

SEQ ID NO: 15083 - protein, 7 aa, Artificial Sequence
  Description of Artificial Sequence: Synthetic peptide
  XENP019112 vlCDR2
YASHRYT

SEQ ID NO: 15084 - protein, 9 aa, Artificial Sequence
  Description of Artificial Sequence: Synthetic peptide
  XENP019112 vlCDR3
QQDYSSPRT

SEQ ID NO: 15085 - protein, 249 aa, Artificial Sequence
  Description of Artificial Sequence: Synthetic polypeptide
  XENP019113 1G6_H1_L1.152_scFv(GKPGS)4
EVQLVESGGGLVKPGGSLRLSCAASGFTFSNYWMNWVRQAPGKGLEWVGEIRLKSNNYATHYAEPVKGRFTISRDDSKSTVYLQMNSLKTEDTAVYYCTRYYGNYGGYFDVWGAGTLVTVSSGKPGSGKPGSGKPGSGKPGSSIVMTQSPATLSVSPGERATLSCRASQSVSNDVAWYQQKPGESPRLLINYASHRYTGVPDRFTGSGYGTEFTLTISSLQSEDFAVYFCQQDYSSPRTFGGGTKVEIK

SEQ ID NO: 15086 - protein, 122 aa, Artificial Sequence; identical to SEQ ID NO: 10922
  Description of Artificial Sequence: Synthetic polypeptide
  VH of XENP019113

SEQ ID NO: 15087 - protein, 107 aa, Artificial Sequence
  Description of Artificial Sequence: Synthetic polypeptide
  VL of XENP019113
SIVMTQSPATLSVSPGERATLSCRASQSVSNDVAWYQQKPGESPRLLINYASHRYTGVPDRFTGSGYGTEFTLTISSLQSEDFAVYFCQQDYSSPRTFGGGTKVEIK

SEQ ID NO: 15088 - protein, 5 aa, Artificial Sequence
  Description of Artificial Sequence: Synthetic peptide
  XENP019113 vhCDR1
NYWMN

SEQ ID NO: 15089 - protein, 19 aa, Artificial Sequence
  Description of Artificial Sequence: Synthetic peptide
  XENP019113 vhCDR2
EIRLKSNNYATHYAEPVKG

SEQ ID NO: 15090 - protein, 11 aa, Artificial Sequence
  Description of Artificial Sequence: Synthetic peptide
  XENP019113 vhCDR3
YYGNYGGYFDV

SEQ ID NO: 15091 - protein, 11 aa, Artificial Sequence
  Description of Artificial Sequence: Synthetic peptide
  XENP019113 vlCDR1
RASQSVSNDVA

SEQ ID NO: 15092 - protein, 7 aa, Artificial Sequence
  Description of Artificial Sequence: Synthetic peptide
  XENP019113 vlCDR2
YASHRYT

SEQ ID NO: 15093 - protein, 9 aa, Artificial Sequence
  Description of Artificial Sequence: Synthetic peptide
  XENP019113 vlCDR3
QQDYSSPRT

SEQ ID NO: 15094 - protein, 249 aa, Artificial Sequence
  Description of Artificial Sequence: Synthetic polypeptide
  XENP019114 1G6_H1_L1.153_scFv(GKPGS)4
EVQLVESGGGLVKPGGSLRLSCAASGFTFSNYWMNWVRQAPGKGLEWVGEIRLKSNNYATHYAEPVKGRFTISRDDSKSTVYLQMNSLKTEDTAVYYCTRYYGNYGGYFDVWGAGTLVTVSSGKPGSGKPGSGKPGSGKPGSSIVMTQSPATLSVSPGERATLSCRASQSVSNDVAWYQQKPGQSPRVLINYASHRYTGVPDRFTGSGYGTEFTLTISSLQSEDFAVYFCQQDYSSPRTFGGGTKVEIK

SEQ ID NO: 15095 - protein, 122 aa, Artificial Sequence; identical to SEQ ID NO: 10922
  Description of Artificial Sequence: Synthetic polypeptide
  VH of XENP019114

SEQ ID NO: 15096 - protein, 107 aa, Artificial Sequence
  Description of Artificial Sequence: Synthetic polypeptide
  VL of XENP019114
SIVMTQSPATLSVSPGERATLSCRASQSVSNDVAWYQQKPGQSPRVLINYASHRYTGVPDRFTGSGYGTEFTLTISSLQSEDFAVYFCQQDYSSPRTFGGGTKVEIK

SEQ ID NO: 15097 - protein, 5 aa, Artificial Sequence
  Description of Artificial Sequence: Synthetic peptide
  XENP019114 vhCDR1
NYWMN

SEQ ID NO: 15098 - protein, 19 aa, Artificial Sequence
  Description of Artificial Sequence: Synthetic peptide
  XENP019114 vhCDR2
EIRLKSNNYATHYAEPVKG

SEQ ID NO: 15099 - protein, 11 aa, Artificial Sequence
  Description of Artificial Sequence: Synthetic peptide
  XENP019114 vhCDR3
YYGNYGGYFDV

SEQ ID NO: 15100 - protein, 11 aa, Artificial Sequence
  Description of Artificial Sequence: Synthetic peptide
  XENP019114 vlCDR1
RASQSVSNDVA

SEQ ID NO: 15101 - protein, 7 aa, Artificial Sequence
  Description of Artificial Sequence: Synthetic peptide
  XENP019114 vlCDR2
YASHRYT

SEQ ID NO: 15102 - protein, 9 aa, Artificial Sequence
  Description of Artificial Sequence: Synthetic peptide
  XENP019114 vlCDR3
QQDYSSPRT

SEQ ID NO: 15103 - protein, 249 aa, Artificial Sequence
  Description of Artificial Sequence: Synthetic polypeptide
  XENP019115 1G6_H1_L1.154_scFv(GKPGS)4
EVQLVESGGGLVKPGGSLRLSCAASGFTFSNYWMNWVRQAPGKGLEWVGEIRLKSNNYATHYAEPVKGRFTISRDDSKSTVYLQMNSLKTEDTAVYYCTRYYGNYGGYFDVWGAGTLVTVSSGKPGSGKPGSGKPGSGKPGSSIVMTQSPATLSVSPGERATLSCRASQSVSNDVAWYQQKPGQSPRLLVNYASHRYTGVPDRFTGSGYGTEFTLTISSLQSEDFAVYFCQQDYSSPRTFGGGTKVEIK

SEQ ID NO: 15104 - protein, 122 aa, Artificial Sequence; identical to SEQ ID NO: 10922
  Description of Artificial Sequence: Synthetic polypeptide
  VH of XENP019115

SEQ ID NO: 15105 - protein, 107 aa, Artificial Sequence
  Description of Artificial Sequence: Synthetic polypeptide
  VL of XENP019115
SIVMTQSPATLSVSPGERATLSCRASQSVSNDVAWYQQKPGQSPRLLVNYASHRYTGVPDRFTGSGYGTEFTLTISSLQSEDFAVYFCQQDYSSPRTFGGGTKVEIK

SEQ ID NO: 15106 - protein, 5 aa, Artificial Sequence
  Description of Artificial Sequence: Synthetic peptide
  XENP019115 vhCDR1
NYWMN

SEQ ID NO: 15107 - protein, 19 aa, Artificial Sequence
  Description of Artificial Sequence: Synthetic peptide
  XENP019115 vhCDR2
EIRLKSNNYATHYAEPVKG

SEQ ID NO: 15108 - protein, 11 aa, Artificial Sequence
  Description of Artificial Sequence: Synthetic peptide
  XENP019115 vhCDR3
YYGNYGGYFDV

SEQ ID NO: 15109 - protein, 11 aa, Artificial Sequence
  Description of Artificial Sequence: Synthetic peptide
  XENP019115 vlCDR1
RASQSVSNDVA

SEQ ID NO: 15110 - protein, 9 aa, Artificial Sequence
  Description of Artificial Sequence: Synthetic peptide
  XENP019115 vlCDR2
VNYASHRYT

SEQ ID NO: 15111 - protein, 9 aa, Artificial Sequence
  Description of Artificial Sequence: Synthetic peptide
  XENP019115 vlCDR3
QQDYSSPRT

SEQ ID NO: 15112 - protein, 249 aa, Artificial Sequence
  Description of Artificial Sequence: Synthetic polypeptide
  XENP019116 1G6_H1_L1.155_scFv(GKPGS)4
EVQLVESGGGLVKPGGSLRLSCAASGFTFSNYWMNWVRQAPGKGLEWVGEIRLKSNNYATHYAEPVKGRFTISRDDSKSTVYLQMNSLKTEDTAVYYCTRYYGNYGGYFDVWGAGTLVTVSSGKPGSGKPGSGKPGSGKPGSSIVMTQSPATLSVSPGERATLSCRASQSVSNDVAWYQQKPGQSPRLLINYANHRYTGVPDRFTGSGYGTEFTLTISSLQSEDFAVYFCQQDYSSPRTFGGGTKVEIK

SEQ ID NO: 15113 - protein, 122 aa, Artificial Sequence; identical to SEQ ID NO: 10922
  Description of Artificial Sequence: Synthetic polypeptide
  VH of XENP019116

SEQ ID NO: 15114 - protein, 107 aa, Artificial Sequence
  Description of Artificial Sequence: Synthetic polypeptide
  VL of XENP019116
SIVMTQSPATLSVSPGERATLSCRASQSVSNDVAWYQQKPGQSPRLLINYANHRYTGVPDRFTGSGYGTEFTLTISSLQSEDFAVYFCQQDYSSPRTFGGGTKVEIK

SEQ ID NO: 15115 - protein, 5 aa, Artificial Sequence
  Description of Artificial Sequence: Synthetic peptide
  XENP019116 vhCDR1
NYWMN

SEQ ID NO: 15116 - protein, 19 aa, Artificial Sequence
  Description of Artificial Sequence: Synthetic peptide
  XENP019116 vhCDR2
EIRLKSNNYATHYAEPVKG

SEQ ID NO: 15117 - protein, 11 aa, Artificial Sequence
  Description of Artificial Sequence: Synthetic peptide
  XENP019116 vhCDR3
YYGNYGGYFDV

SEQ ID NO: 15118 - protein, 11 aa, Artificial Sequence
  Description of Artificial Sequence: Synthetic peptide
  XENP019116 vlCDR1
RASQSVSNDVA

SEQ ID NO: 15119 - protein, 7 aa, Artificial Sequence
  Description of Artificial Sequence: Synthetic peptide
  XENP019116 vlCDR2
YANHRYT

SEQ ID NO: 15120 - protein, 9 aa, Artificial Sequence
  Description of Artificial Sequence: Synthetic peptide
  XENP019116 vlCDR3
QQDYSSPRT

SEQ ID NO: 15121 - protein, 249 aa, Artificial Sequence
  Description of Artificial Sequence: Synthetic polypeptide
  XENP019117 1G6_H1_L1.156_scFv(GKPGS)4
EVQLVESGGGLVKPGGSLRLSCAASGFTFSNYWMNWVRQAPGKGLEWVGEIRLKSNNYATHYAEPVKGRFTISRDDSKSTVYLQMNSLKTEDTAVYYCTRYYGNYGGYFDVWGAGTLVTVSSGKPGSGKPGSGKPGSGKPGSSIVMTQSPATLSVSPGERATLSCRASQSVSNDVAWYQQKPGQSPRLLINYASHRYTGVPDRFTGSGYGTEFTLTISSLESEDFAVYFCQQDYSSPRTFGGGTKVEIK

SEQ ID NO: 15122 - protein, 122 aa, Artificial Sequence; identical to SEQ ID NO: 10922
  Description of Artificial Sequence: Synthetic polypeptide
  VH of XENP019117

SEQ ID NO: 15123 - protein, 107 aa, Artificial Sequence
  Description of Artificial Sequence: Synthetic polypeptide
  VL of XENP019117
SIVMTQSPATLSVSPGERATLSCRASQSVSNDVAWYQQKPGQSPRLLINYASHRYTGVPDRFTGSGYGTEFTLTISSLESEDFAVYFCQQDYSSPRTFGGGTKVEIK

SEQ ID NO: 15124 - protein, 5 aa, Artificial Sequence
  Description of Artificial Sequence: Synthetic peptide
  XENP019117 vhCDR1
NYWMN

SEQ ID NO: 15125 - protein, 19 aa, Artificial Sequence
  Description of Artificial Sequence: Synthetic peptide
  XENP019117 vhCDR2
EIRLKSNNYATHYAEPVKG

SEQ ID NO: 15126 - protein, 11 aa, Artificial Sequence
  Description of Artificial Sequence: Synthetic peptide
  XENP019117 vhCDR3
YYGNYGGYFDV

SEQ ID NO: 15127 - protein, 11 aa, Artificial Sequence
  Description of Artificial Sequence: Synthetic peptide
  XENP019117 vlCDR1
RASQSVSNDVA

SEQ ID NO: 15128 - protein, 7 aa, Artificial Sequence
  Description of Artificial Sequence: Synthetic peptide
  XENP019117 vlCDR2
YASHRYT

SEQ ID NO: 15129 - protein, 9 aa, Artificial Sequence
  Description of Artificial Sequence: Synthetic peptide
  XENP019117 vlCDR3
QQDYSSPRT

SEQ ID NO: 15130 - protein, 249 aa, Artificial Sequence
  Description of Artificial Sequence: Synthetic polypeptide
  XENP019118 1G6_H1_L1.157_scFv(GKPGS)4
EVQLVESGGGLVKPGGSLRLSCAASGFTFSNYWMNWVRQAPGKGLEWVGEIRLKSNNYATHYAEPVKGRFTISRDDSKSTVYLQMNSLKTEDTAVYYCTRYYGNYGGYFDVWGAGTLVTVSSGKPGSGKPGSGKPGSGKPGSSIVMTQSPATLSVSPGERATLSCRASQSVSNDVAWYQQKPGQSPRLLINYASHRYTGVPDRFTGSGYGTEFTLTISSLKSEDFAVYFCQQDYSSPRTFGGGTKVEIK

SEQ ID NO: 15131 - protein, 122 aa, Artificial Sequence; identical to SEQ ID NO: 10922
  Description of Artificial Sequence: Synthetic polypeptide
  VH of XENP019118

SEQ ID NO: 15132 - protein, 107 aa, Artificial Sequence
  Description of Artificial Sequence: Synthetic polypeptide
  VL of XENP019118
SIVMTQSPATLSVSPGERATLSCRASQSVSNDVAWYQQKPGQSPRLLINYASHRYTGVPDRFTGSGYGTEFTLTISSLKSEDFAVYFCQQDYSSPRTFGGGTKVEIK

SEQ ID NO: 15133 - protein, 5 aa, Artificial Sequence
  Description of Artificial Sequence: Synthetic peptide
  XENP019118 vhCDR1
NYWMN

SEQ ID NO: 15134 - protein, 19 aa, Artificial Sequence
  Description of Artificial Sequence: Synthetic peptide
  XENP019118 vhCDR2
EIRLKSNNYATHYAEPVKG

SEQ ID NO: 15135 - protein, 11 aa, Artificial Sequence
  Description of Artificial Sequence: Synthetic peptide
  XENP019118 vhCDR3
YYGNYGGYFDV

SEQ ID NO: 15136 - protein, 11 aa, Artificial Sequence
  Description of Artificial Sequence: Synthetic peptide
  XENP019118 vlCDR1
RASQSVSNDVA

SEQ ID NO: 15137 - protein, 7 aa, Artificial Sequence
  Description of Artificial Sequence: Synthetic peptide
  XENP019118 vlCDR2
YASHRYT

SEQ ID NO: 15138 - protein, 9 aa, Artificial Sequence
  Description of Artificial Sequence: Synthetic peptide
  XENP019118 vlCDR3
QQDYSSPRT

SEQ ID NO: 15139 - protein, 249 aa, Artificial Sequence
  Description of Artificial Sequence: Synthetic polypeptide
  XENP019119 1G6_H1_L1.158_scFv(GKPGS)4
EVQLVESGGGLVKPGGSLRLSCAASGFTFSNYWMNWVRQAPGKGLEWVGEIRLKSNNYATHYAEPVKGRFTISRDDSKSTVYLQMNSLKTEDTAVYYCTRYYGNYGGYFDVWGAGTLVTVSSGKPGSGKPGSGKPGSGKPGSSIVMTQSPATLSVSPGERATLSCRASQSVSNDVAWYQQKPGQSPRLLINYASHRYTGVPDRFTGSGYGTEFTLTISSLQSEDFGVYFCQQDYSSPRTFGGGTKVEIK

SEQ ID NO: 15140 - protein, 122 aa, Artificial Sequence; identical to SEQ ID NO: 10922
  Description of Artificial Sequence: Synthetic polypeptide
  VH of XENP019119

SEQ ID NO: 15141 - protein, 107 aa, Artificial Sequence
  Description of Artificial Sequence: Synthetic polypeptide
  VL of XENP019119
SIVMTQSPATLSVSPGERATLSCRASQSVSNDVAWYQQKPGQSPRLLINYASHRYTGVPDRFTGSGYGTEFTLTISSLQSEDFGVYFCQQDYSSPRTFGGGTKVEIK

SEQ ID NO: 15142 - protein, 5 aa, Artificial Sequence
  Description of Artificial Sequence: Synthetic peptide
  XENP019119 vhCDR1
NYWMN

SEQ ID NO: 15143 - protein, 19 aa, Artificial Sequence
  Description of Artificial Sequence: Synthetic peptide
  XENP019119 vhCDR2
EIRLKSNNYATHYAEPVKG

SEQ ID NO: 15144 - protein, 11 aa, Artificial Sequence
  Description of Artificial Sequence: Synthetic peptide
  XENP019119 vhCDR3
YYGNYGGYFDV

SEQ ID NO: 15145 - protein, 11 aa, Artificial Sequence
  Description of Artificial Sequence: Synthetic peptide
  XENP019119 vlCDR1
RASQSVSNDVA

SEQ ID NO: 15146 - protein, 7 aa, Artificial Sequence
  Description of Artificial Sequence: Synthetic peptide
  XENP019119 vlCDR2
YASHRYT

SEQ ID NO: 15147 - protein, 9 aa, Artificial Sequence
  Description of Artificial Sequence: Synthetic peptide
  XENP019119 vlCDR3
QQDYSSPRT

SEQ ID NO: 15148 - protein, 249 aa, Artificial Sequence
  Description of Artificial Sequence: Synthetic polypeptide
  XENP019120 1G6_H1_L1.159_scFv(GKPGS)4
EVQLVESGGGLVKPGGSLRLSCAASGFTFSNYWMNWVRQAPGKGLEWVGEIRLKSNNYATHYAEPVKGRFTISRDDSKSTVYLQMNSLKTEDTAVYYCTRYYGNYGGYFDVWGAGTLVTVSSGKPGSGKPGSGKPGSGKPGSSIVMTQSPATLSVSPGERATLSCRASQSVSNDVAWYQQKPGQSPRLLINYASHRYTGVPDRFTGSGYGTEFTLTISSLQSEDFAVYFCKQDYSSPRTFGGGTKVEIK

SEQ ID NO: 15149 - protein, 122 aa, Artificial Sequence; identical to SEQ ID NO: 10922
  Description of Artificial Sequence: Synthetic polypeptide
  VH of XENP019120

SEQ ID NO: 15150 - protein, 107 aa, Artificial Sequence
  Description of Artificial Sequence: Synthetic polypeptide
  VL of XENP019120
SIVMTQSPATLSVSPGERATLSCRASQSVSNDVAWYQQKPGQSPRLLINYASHRYTGVPDRFTGSGYGTEFTLTISSLQSEDFAVYFCKQDYSSPRTFGGGTKVEIK

SEQ ID NO: 15151 - protein, 5 aa, Artificial Sequence
  Description of Artificial Sequence: Synthetic peptide
  XENP019120 vhCDR1
NYWMN

SEQ ID NO: 15152 - protein, 19 aa, Artificial Sequence
  Description of Artificial Sequence: Synthetic peptide
  XENP019120 vhCDR2
EIRLKSNNYATHYAEPVKG

SEQ ID NO: 15153 - protein, 11 aa, Artificial Sequence
  Description of Artificial Sequence: Synthetic peptide
  XENP019120 vhCDR3
YYGNYGGYFDV

SEQ ID NO: 15154 - protein, 11 aa, Artificial Sequence
  Description of Artificial Sequence: Synthetic peptide
  XENP019120 vlCDR1
RASQSVSNDVA

SEQ ID NO: 15155 - protein, 7 aa, Artificial Sequence
  Description of Artificial Sequence: Synthetic peptide
  XENP019120 vlCDR2
YASHRYT

SEQ ID NO: 15156 - protein, 9 aa, Artificial Sequence
  Description of Artificial Sequence: Synthetic peptide
  XENP019120 vlCDR3
KQDYSSPRT

SEQ ID NO: 15157 - protein, 249 aa, Artificial Sequence
  Description of Artificial Sequence: Synthetic polypeptide
  XENP019121 1G6_H1_L1.160_scFv(GKPGS)4
EVQLVESGGGLVKPGGSLRLSCAASGFTFSNYWMNWVRQAPGKGLEWVGEIRLKSNNYATHYAEPVKGRFTISRDDSKSTVYLQMNSLKTEDTAVYYCTRYYGNYGGYFDVWGAGTLVTVSSGKPGSGKPGSGKPGSGKPGSSIVMTQSPATLSVSPGERATLSCRASQSVSNDVAWYQQKPGQSPRLLINYASHRYTGVPDRFTGSGYGTEFTLTISSLQSEDFAVYFCQKDYSSPRTFGGGTKVEIK

SEQ ID NO: 15158 - protein, 122 aa, Artificial Sequence; identical to SEQ ID NO: 10922
  Description of Artificial Sequence: Synthetic polypeptide
  VH of XENP019121

SEQ ID NO: 15159 - protein, 107 aa, Artificial Sequence
  Description of Artificial Sequence: Synthetic polypeptide
  VL of XENP019121
SIVMTQSPATLSVSPGERATLSCRASQSVSNDVAWYQQKPGQSPRLLINYASHRYTGVPDRFTGSGYGTEFTLTISSLQSEDFAVYFCQKDYSSPRTFGGGTKVEIK

SEQ ID NO: 15160 - protein, 5 aa, Artificial Sequence
  Description of Artificial Sequence: Synthetic peptide
  XENP019121 vhCDR1
NYWMN

SEQ ID NO: 15161 - protein, 19 aa, Artificial Sequence
  Description of Artificial Sequence: Synthetic peptide
  XENP019121 vhCDR2
EIRLKSNNYATHYAEPVKG

SEQ ID NO: 15162 - protein, 11 aa, Artificial Sequence
  Description of Artificial Sequence: Synthetic peptide
  XENP019121 vhCDR3
YYGNYGGYFDV

SEQ ID NO: 15163 - protein, 11 aa, Artificial Sequence
  Description of Artificial Sequence: Synthetic peptide
  XENP019121 vlCDR1
RASQSVSNDVA

SEQ ID NO: 15164 - protein, 7 aa, Artificial Sequence
  Description of Artificial Sequence: Synthetic peptide
  XENP019121 vlCDR2
YASHRYT

SEQ ID NO: 15165 - protein, 9 aa, Artificial Sequence
  Description of Artificial Sequence: Synthetic peptide
  XENP019121 vlCDR3
QKDYSSPRT

SEQ ID NO: 15166 - protein, 249 aa, Artificial Sequence
  Description of Artificial Sequence: Synthetic polypeptide
  XENP019122 1G6_H1_L1.161_scFv(GKPGS)4
EVQLVESGGGLVKPGGSLRLSCAASGFTFSNYWMNWVRQAPGKGLEWVGEIRLKSNNYATHYAEPVKGRFTISRDDSKSTVYLQMNSLKTEDTAVYYCTRYYGNYGGYFDVWGAGTLVTVSSGKPGSGKPGSGKPGSGKPGSSIVMTQSPATLSVSPGERATLSCRASQSVSNDVAWYQQKPGQSPRLLINYASHRYTGVPDRFTGSGYGTEFTLTISSLQSEDFAVYFCQNDYSSPRTFGGGTKVEIK

SEQ ID NO: 15167 - protein, 122 aa, Artificial Sequence; identical to SEQ ID NO: 10922
  Description of Artificial Sequence: Synthetic polypeptide
  VH of XENP019122

SEQ ID NO: 15168 - protein, 107 aa, Artificial Sequence
  Description of Artificial Sequence: Synthetic polypeptide
  VL of XENP019122
SIVMTQSPATLSVSPGERATLSCRASQSVSNDVAWYQQKPGQSPRLLINYASHRYTGVPDRFTGSGYGTEFTLTISSLQSEDFAVYFCQNDYSSPRTFGGGTKVEIK

SEQ ID NO: 15169 - protein, 5 aa, Artificial Sequence
  Description of Artificial Sequence: Synthetic peptide
  XENP019122 vhCDR1
NYWMN

SEQ ID NO: 15170 - protein, 19 aa, Artificial Sequence
  Description of Artificial Sequence: Synthetic peptide
  XENP019122 vhCDR2
EIRLKSNNYATHYAEPVKG

SEQ ID NO: 15171 - protein, 11 aa, Artificial Sequence
  Description of Artificial Sequence: Synthetic peptide
  XENP019122 vhCDR3
YYGNYGGYFDV

SEQ ID NO: 15172 - protein, 11 aa, Artificial Sequence
  Description of Artificial Sequence: Synthetic peptide
  XENP019122 vlCDR1
RASQSVSNDVA

SEQ ID NO: 15173 - protein, 7 aa, Artificial Sequence
  Description of Artificial Sequence: Synthetic peptide
  XENP019122 vlCDR2
YASHRYT

SEQ ID NO: 15174 - protein, 9 aa, Artificial Sequence
  Description of Artificial Sequence: Synthetic peptide
  XENP019122 vlCDR3
QNDYSSPRT

SEQ ID NO: 15175 - protein, 249 aa, Artificial Sequence
  Description of Artificial Sequence: Synthetic polypeptide
  XENP019123 1G6_H1_L1.162_scFv(GKPGS)4
EVQLVESGGGLVKPGGSLRLSCAASGFTFSNYWMNWVRQAPGKGLEWVGEIRLKSNNYATHYAEPVKGRFTISRDDSKSTVYLQMNSLKTEDTAVYYCTRYYGNYGGYFDVWGAGTLVTVSSGKPGSGKPGSGKPGSGKPGSSIVMTQSPATLSVSPGERATLSCRASQSVSNDVAWYQQKPGQSPRLLINYASHRYTGVPDRFTGSGYGTEFTLTISSLQSEDFAVYFCQRDYSSPRTFGGGTKVEIK

SEQ ID NO: 15176 - protein, 122 aa, Artificial Sequence; identical to SEQ ID NO: 10922
  Description of Artificial Sequence: Synthetic polypeptide
  VH of XENP019123

SEQ ID NO: 15177 - protein, 107 aa, Artificial Sequence
  Description of Artificial Sequence: Synthetic polypeptide
  VL of XENP019123
SIVMTQSPATLSVSPGERATLSCRASQSVSNDVAWYQQKPGQSPRLLINYASHRYTGVPDRFTGSGYGTEFTLTISSLQSEDFAVYFCQRDYSSPRTFGGGTKVEIK

SEQ ID NO: 15178 - protein, 5 aa, Artificial Sequence
  Description of Artificial Sequence: Synthetic peptide
  XENP019123 vhCDR1
NYWMN

SEQ ID NO: 15179 - protein, 19 aa, Artificial Sequence
  Description of Artificial Sequence: Synthetic peptide
  XENP019123 vhCDR2
EIRLKSNNYATHYAEPVKG

SEQ ID NO: 15180 - protein, 11 aa, Artificial Sequence
  Description of Artificial Sequence: Synthetic peptide
  XENP019123 vhCDR3
YYGNYGGYFDV

SEQ ID NO: 15181 - protein, 11 aa, Artificial Sequence
  Description of Artificial Sequence: Synthetic peptide
  XENP019123 vlCDR1
RASQSVSNDVA

SEQ ID NO: 15182 - protein, 7 aa, Artificial Sequence
  Description of Artificial Sequence: Synthetic peptide
  XENP019123 vlCDR2
YASHRYT

SEQ ID NO: 15183 - protein, 9 aa, Artificial Sequence
  Description of Artificial Sequence: Synthetic peptide
  XENP019123 vlCDR3
QRDYSSPRT

SEQ ID NO: 15184 - protein, 249 aa, Artificial Sequence
  Description of Artificial Sequence: Synthetic polypeptide
  XENP019124 1G6_H1_L1.163_scFv(GKPGS)4
EVQLVESGGGLVKPGGSLRLSCAASGFTFSNYWMNWVRQAPGKGLEWVGEIRLKSNNYATHYAEPVKGRFTISRDDSKSTVYLQMNSLKTEDTAVYYCTRYYGNYGGYFDVWGAGTLVTVSSGKPGSGKPGSGKPGSGKPGSSIVMTQSPATLSVSPGEPATLSCRASQSVSNDVAWYQQKPGQSPRLLINYASHRYTGVPDRFTGSGYGTEFTLTISRLQSEDFAVYFCQQDYSSPRTFGGGTKVEIK

SEQ ID NO: 15185 - protein, 122 aa, Artificial Sequence; identical to SEQ ID NO: 10922
  Description of Artificial Sequence: Synthetic polypeptide
  VH of XENP019124

SEQ ID NO: 15186 - protein, 107 aa, Artificial Sequence
  Description of Artificial Sequence: Synthetic polypeptide
  VL of XENP019124
SIVMTQSPATLSVSPGEPATLSCRASQSVSNDVAWYQQKPGQSPRLLINYASHRYTGVPDRFTGSGYGTEFTLTISRLQSEDFAVYFCQQDYSSPRTFGGGTKVEIK

SEQ ID NO: 15187 - protein, 5 aa, Artificial Sequence
  Description of Artificial Sequence: Synthetic peptide
  XENP019124 vhCDR1
NYWMN

SEQ ID NO: 15188 - protein, 19 aa, Artificial Sequence
  Description of Artificial Sequence: Synthetic peptide
  XENP019124 vhCDR2
EIRLKSNNYATHYAEPVKG

SEQ ID NO: 15189 - protein, 11 aa, Artificial Sequence
  Description of Artificial Sequence: Synthetic peptide
  XENP019124 vhCDR3
YYGNYGGYFDV

SEQ ID NO: 15190 - protein, 11 aa, Artificial Sequence
  Description of Artificial Sequence: Synthetic peptide
  XENP019124 vlCDR1
RASQSVSNDVA

SEQ ID NO: 15191 - protein, 7 aa, Artificial Sequence
  Description of Artificial Sequence: Synthetic peptide
  XENP019124 vlCDR2
YASHRYT

SEQ ID NO: 15192 - protein, 9 aa, Artificial Sequence
  Description of Artificial Sequence: Synthetic peptide
  XENP019124 vlCDR3
QQDYSSPRT

SEQ ID NO: 15193 - protein, 249 aa, Artificial Sequence
  Description of Artificial Sequence: Synthetic polypeptide
  XENP019125 1G6_H1_L1.164_scFv(GKPGS)4
EVQLVESGGGLVKPGGSLRLSCAASGFTFSNYWMNWVRQAPGKGLEWVGEIRLKSNNYATHYAEPVKGRFTISRDDSKSTVYLQMNSLKTEDTAVYYCTRYYGNYGGYFDVWGAGTLVTVSSGKPGSGKPGSGKPGSGKPGSSIVMTQSPATLSVSPGERATLSCRASESVSNDVAWYQQKPGQSPRLLINYASHRYTGVPDRFTGSGYGTEFTLTISSLQSEDFAVYFCQKDYSSPRTFGGGTKVEIK

SEQ ID NO: 15194 - protein, 122 aa, Artificial Sequence; identical to SEQ ID NO: 10922
  Description of Artificial Sequence: Synthetic polypeptide
  VH of XENP019125

SEQ ID NO: 15195 - protein, 107 aa, Artificial Sequence
  Description of Artificial Sequence: Synthetic polypeptide
  VL of XENP019125
SIVMTQSPATLSVSPGERATLSCRASESVSNDVAWYQQKPGQSPRLLINYASHRYTGVPDRFTGSGYGTEFTLTISSLQSEDFAVYFCQKDYSSPRTFGGGTKVEIK

SEQ ID NO: 15196 - protein, 5 aa, Artificial Sequence
  Description of Artificial Sequence: Synthetic peptide
  XENP019125 vhCDR1
NYWMN

SEQ ID NO: 15197 - protein, 19 aa, Artificial Sequence
  Description of Artificial Sequence: Synthetic peptide
  XENP019125 vhCDR2
EIRLKSNNYATHYAEPVKG

SEQ ID NO: 15198 - protein, 11 aa, Artificial Sequence
  Description of Artificial Sequence: Synthetic peptide
  XENP019125 vhCDR3
YYGNYGGYFDV

SEQ ID NO: 15199 - protein, 11 aa, Artificial Sequence
  Description of Artificial Sequence: Synthetic peptide
  XENP019125 vlCDR1
RASESVSNDVA

SEQ ID NO: 15200 - protein, 7 aa, Artificial Sequence
  Description of Artificial Sequence: Synthetic peptide
  XENP019125 vlCDR2
YASHRYT

SEQ ID NO: 15201 - protein, 9 aa, Artificial Sequence
  Description of Artificial Sequence: Synthetic peptide
  XENP019125 vlCDR3
QKDYSSPRT

SEQ ID NO: 15202 - protein, 249 aa, Artificial Sequence
  Description of Artificial Sequence: Synthetic polypeptide
  XENP019126 1G6_H1_L1.165_scFv(GKPGS)4
EVQLVESGGGLVKPGGSLRLSCAASGFTFSNYWMNWVRQAPGKGLEWVGEIRLKSNNYATHYAEPVKGRFTISRDDSKSTVYLQMNSLKTEDTAVYYCTRYYGNYGGYFDVWGAGTLVTVSSGKPGSGKPGSGKPGSGKPGSSIVMTQSPATLSVSPGERATLSCRASESVSNDVAWYQQKPGQSPRLLINYASHRYTGVPDRFTGSGYGTEFTLTISSLQSEDFAVYFCQQDYKSPRTFGGGTKVEIK

SEQ ID NO: 15203 - protein, 122 aa, Artificial Sequence; identical to SEQ ID NO: 10922
  Description of Artificial Sequence: Synthetic polypeptide
  VH of XENP019126

SEQ ID NO: 15204 - protein, 107 aa, Artificial Sequence
  Description of Artificial Sequence: Synthetic polypeptide
  VL of XENP019126
SIVMTQSPATLSVSPGERATLSCRASESVSNDVAWYQQKPGQSPRLLINYASHRYTGVPDRFTGSGYGTEFTLTISSLQSEDFAVYFCQQDYKSPRTFGGGTKVEIK

SEQ ID NO: 15205 - protein, 5 aa, Artificial Sequence
  Description of Artificial Sequence: Synthetic peptide
  XENP019126 vhCDR1
NYWMN

SEQ ID NO: 15206 - protein, 19 aa, Artificial Sequence
  Description of Artificial Sequence: Synthetic peptide
  XENP019126 vhCDR2
EIRLKSNNYATHYAEPVKG

SEQ ID NO: 15207 - protein, 11 aa, Artificial Sequence
  Description of Artificial Sequence: Synthetic peptide
  XENP019126 vhCDR3
YYGNYGGYFDV

SEQ ID NO: 15208 - protein, 11 aa, Artificial Sequence
  Description of Artificial Sequence: Synthetic peptide
  XENP019126 vlCDR1
RASESVSNDVA

SEQ ID NO: 15209 - protein, 7 aa, Artificial Sequence
  Description of Artificial Sequence: Synthetic peptide
  XENP019126 vlCDR2
YASHRYT

SEQ ID NO: 15210 - protein, 9 aa, Artificial Sequence
  Description of Artificial Sequence: Synthetic peptide
  XENP019126 vlCDR3
QQDYKSPRT

SEQ ID NO: 15211 - protein, 249 aa, Artificial Sequence
  Description of Artificial Sequence: Synthetic polypeptide
  XENP019127 1G6_H1_L1.166_scFv(GKPGS)4
EVQLVESGGGLVKPGGSLRLSCAASGFTFSNYWMNWVRQAPGKGLEWVGEIRLKSNNYATHYAEPVKGRFTISRDDSKSTVYLQMNSLKTEDTAVYYCTRYYGNYGGYFDVWGAGTLVTVSSGKPGSGKPGSGKPGSGKPGSSIVMTQSPATLSVSPGERATLSCRASQSVSNDVAWYRQKPEQSPRLLINYASHRYTGVPDRFTGSGYGTEFTLTISSLQSEDFAVYFCQQDYSSPRTFGGGTKVEIK

SEQ ID NO: 15212 - protein, 122 aa, Artificial Sequence; identical to SEQ ID NO: 10922
  Description of Artificial Sequence: Synthetic polypeptide
  VH of XENP019127

SEQ ID NO: 15213 - protein, 107 aa, Artificial Sequence
  Description of Artificial Sequence: Synthetic polypeptide
  VL of XENP019127
SIVMTQSPATLSVSPGERATLSCRASQSVSNDVAWYRQKPEQSPRLLINYASHRYTGVPDRFTGSGYGTEFTLTISSLQSEDFAVYFCQQDYSSPRTFGGGTKVEIK

SEQ ID NO: 15214 - protein, 5 aa, Artificial Sequence
  Description of Artificial Sequence: Synthetic peptide
  XENP019127 vhCDR1
NYWMN

SEQ ID NO: 15215 - protein, 19 aa, Artificial Sequence
  Description of Artificial Sequence: Synthetic peptide
  XENP019127 vhCDR2
EIRLKSNNYATHYAEPVKG

SEQ ID NO: 15216 - protein, 11 aa, Artificial Sequence
  Description of Artificial Sequence: Synthetic peptide
  XENP019127 vhCDR3
YYGNYGGYFDV

SEQ ID NO: 15217 - protein, 11 aa, Artificial Sequence
  Description of Artificial Sequence: Synthetic peptide
  XENP019127 vlCDR1
RASQSVSNDVA

SEQ ID NO: 15218 - protein, 7 aa, Artificial Sequence
  Description of Artificial Sequence: Synthetic peptide
  XENP019127 vlCDR2
YASHRYT

SEQ ID NO: 15219 - protein, 9 aa, Artificial Sequence
  Description of Artificial Sequence: Synthetic peptide
  XENP019127 vlCDR3
QQDYSSPRT

SEQ ID NO: 15220 - protein, 249 aa, Artificial Sequence
  Description of Artificial Sequence: Synthetic polypeptide
  XENP019128 1G6_H1_L1.167_scFv(GKPGS)4
EVQLVESGGGLVKPGGSLRLSCAASGFTFSNYWMNWVRQAPGKGLEWVGEIRLKSNNYATHYAEPVKGRFTISRDDSKSTVYLQMNSLKTEDTAVYYCTRYYGNYGGYFDVWGAGTLVTVSSGKPGSGKPGSGKPGSGKPGSSIVMTQSPATLSVSPGERATLSCRASQSVSNDVAWYRQKPGESPRLLINYASHRYTGVPDRFTGSGYGTEFTLTISSLQSEDFAVYFCQQDYSSPRTFGGGTKVEIK

SEQ ID NO: 15221 - protein, 122 aa, Artificial Sequence; identical to SEQ ID NO: 10922
  Description of Artificial Sequence: Synthetic polypeptide
  VH of XENP019128

SEQ ID NO: 15222 - protein, 107 aa, Artificial Sequence
  Description of Artificial Sequence: Synthetic polypeptide
  VL of XENP019128
SIVMTQSPATLSVSPGERATLSCRASQSVSNDVAWYRQKPGESPRLLINYASHRYTGVPDRFTGSGYGTEFTLTISSLQSEDFAVYFCQQDYSSPRTFGGGTKVEIK

SEQ ID NO: 15223 - protein, 5 aa, Artificial Sequence
  Description of Artificial Sequence: Synthetic peptide
  XENP019128 vhCDR1
NYWMN

SEQ ID NO: 15224 - protein, 19 aa, Artificial Sequence
  Description of Artificial Sequence: Synthetic peptide
  XENP019128 vhCDR2
EIRLKSNNYATHYAEPVKG

SEQ ID NO: 15225 - protein, 11 aa, Artificial Sequence
  Description of Artificial Sequence: Synthetic peptide
  XENP019128 vhCDR3
YYGNYGGYFDV

SEQ ID NO: 15226 - protein, 11 aa, Artificial Sequence
  Description of Artificial Sequence: Synthetic peptide
  XENP019128 vlCDR1
RASQSVSNDVA

SEQ ID NO: 15227 - protein, 7 aa, Artificial Sequence
  Description of Artificial Sequence: Synthetic peptide
  XENP019128 vlCDR2
YASHRYT

SEQ ID NO: 15228 - protein, 9 aa, Artificial Sequence
  Description of Artificial Sequence: Synthetic peptide
  XENP019128 vlCDR3
QQDYSSPRT

SEQ ID NO: 15229 - protein, 249 aa, Artificial Sequence
  Description of Artificial Sequence: Synthetic polypeptide
  XENP019129 1G6_H1_L1.168_scFv(GKPGS)4
EVQLVESGGGLVKPGGSLRLSCAASGFTFSNYWMNWVRQAPGKGLEWVGEIRLKSNNYATHYAEPVKGRFTISRDDSKSTVYLQMNSLKTEDTAVYYCTRYYGNYGGYFDVWGAGTLVTVSSGKPGSGKPGSGKPGSGKPGSSIVMTQSPATLSVSPGERATLSCRASQSVSNDVAWYQQKPGQSPRLLINYASWRYTGVPDRFTGSGYGTEFTLTISSLQSEDFAVYFCQQDFSSPRTFGGGTKVEIK

SEQ ID NO: 15230 - protein, 122 aa, Artificial Sequence; identical to SEQ ID NO: 10922
  Description of Artificial Sequence: Synthetic polypeptide
  VH of XENP019129

SEQ ID NO: 15231 - protein, 107 aa, Artificial Sequence
  Description of Artificial Sequence: Synthetic polypeptide
  VL of XENP019129
SIVMTQSPATLSVSPGERATLSCRASQSVSNDVAWYQQKPGQSPRLLINYASWRYTGVPDRFTGSGYGTEFTLTISSLQSEDFAVYFCQQDFSSPRTFGGGTKVEIK

SEQ ID NO: 15232 - protein, 5 aa, Artificial Sequence
  Description of Artificial Sequence: Synthetic peptide
  XENP019129 vhCDR1
NYWMN

SEQ ID NO: 15233 - protein, 19 aa, Artificial Sequence
  Description of Artificial Sequence: Synthetic peptide
  XENP019129 vhCDR2
EIRLKSNNYATHYAEPVKG

SEQ ID NO: 15234 - protein, 11 aa, Artificial Sequence
  Description of Artificial Sequence: Synthetic peptide
  XENP019129 vhCDR3
YYGNYGGYFDV

SEQ ID NO: 15235 - protein, 11 aa, Artificial Sequence
  Description of Artificial Sequence: Synthetic peptide
  XENP019129 vlCDR1
RASQSVSNDVA

SEQ ID NO: 15236 - protein, 7 aa, Artificial Sequence
  Description of Artificial Sequence: Synthetic peptide
  XENP019129 vlCDR2
YASWRYT

SEQ ID NO: 15237 - protein, 9 aa, Artificial Sequence
  Description of Artificial Sequence: Synthetic peptide
  XENP019129 vlCDR3
QQDFSSPRT

SEQ ID NO: 15238 - protein, 249 aa, Artificial Sequence
  Description of Artificial Sequence: Synthetic polypeptide
  XENP019130 1G6_H1_L1.169_scFv(GKPGS)4
EVQLVESGGGLVKPGGSLRLSCAASGFTFSNYWMNWVRQAPGKGLEWVGEIRLKSNNYATHYAEPVKGRFTISRDDSKSTVYLQMNSLKTEDTAVYYCTRYYGNYGGYFDVWGAGTLVTVSSGKPGSGKPGSGKPGSGKPGSSIVMTQSPATLSVSPGERATLSCRASQSVSNDVAWYQQKPGQSPRLLINYASWRYTGVPDRFTGSGYGTEFTLTISSLQSEDFAVYFCQQDWSSPRTFGGGTKVEIK

SEQ ID NO: 15239 - protein, 122 aa, Artificial Sequence; identical to SEQ ID NO: 10922
  Description of Artificial Sequence: Synthetic polypeptide
  VH of XENP019130

SEQ ID NO: 15240 - protein, 107 aa, Artificial Sequence
  Description of Artificial Sequence: Synthetic polypeptide
  VL of XENP019130
SIVMTQSPATLSVSPGERATLSCRASQSVSNDVAWYQQKPGQSPRLLINYASWRYTGVPDRFTGSGYGTEFTLTISSLQSEDFAVYFCQQDWSSPRTFGGGTKVEIK

SEQ ID NO: 15241 - protein, 5 aa, Artificial Sequence
  Description of Artificial Sequence: Synthetic peptide
  XENP019130 vhCDR1
NYWMN

SEQ ID NO: 15242 - protein, 19 aa, Artificial Sequence
  Description of Artificial Sequence: Synthetic peptide
  XENP019130 vhCDR2
EIRLKSNNYATHYAEPVKG

SEQ ID NO: 15243 - protein, 11 aa, Artificial Sequence
  Description of Artificial Sequence: Synthetic peptide
  XENP019130 vhCDR3
YYGNYGGYFDV

SEQ ID NO: 15244 - protein, 11 aa, Artificial Sequence
  Description of Artificial Sequence: Synthetic peptide
  XENP019130 vlCDR1
RASQSVSNDVA

SEQ ID NO: 15245 - protein, 7 aa, Artificial Sequence
  Description of Artificial Sequence: Synthetic peptide
  XENP019130 vlCDR2
YASWRYT

SEQ ID NO: 15246 - protein, 9 aa, Artificial Sequence
  Description of Artificial Sequence: Synthetic peptide
  XENP019130 vlCDR3
QQDWSSPRT

SEQ ID NO: 15247 - protein, 249 aa, Artificial Sequence
  Description of Artificial Sequence: Synthetic polypeptide
  XENP019131 1G6_H1_L1.170_scFv(GKPGS)4
EVQLVESGGGLVKPGGSLRLSCAASGFTFSNYWMNWVRQAPGKGLEWVGEIRLKSNNYATHYAEPVKGRFTISRDDSKSTVYLQMNSLKTEDTAVYYCTRYYGNYGGYFDVWGAGTLVTVSSGKPGSGKPGSGKPGSGKPGSSIVMTQSPATLSVSPGERATLSCRASQSVSNDVAWYQQKPGQSPRLLINYASWRYTGVPDRFTGSGYGTEFTLTISSLQSEDFAVYFCQQDGSSPRTFGGGTKVEIK

SEQ ID NO: 15248 - protein, 122 aa, Artificial Sequence; identical to SEQ ID NO: 10922
  Description of Artificial Sequence: Synthetic polypeptide
  VH of XENP019131

SEQ ID NO: 15249 - protein, 107 aa, Artificial Sequence
  Description of Artificial Sequence: Synthetic polypeptide
  VL of XENP019131
SIVMTQSPATLSVSPGERATLSCRASQSVSNDVAWYQQKPGQSPRLLINYASWRYTGVPDRFTGSGYGTEFTLTISSLQSEDFAVYFCQQDGSSPRTFGGGTKVEIK

SEQ ID NO: 15250 - protein, 5 aa, Artificial Sequence
  Description of Artificial Sequence: Synthetic peptide
  XENP019131 vhCDR1
NYWMN

SEQ ID NO: 15251 - protein, 19 aa, Artificial Sequence
  Description of Artificial Sequence: Synthetic peptide
  XENP019131 vhCDR2
EIRLKSNNYATHYAEPVKG

SEQ ID NO: 15252 - protein, 11 aa, Artificial Sequence
  Description of Artificial Sequence: Synthetic peptide
  XENP019131 vhCDR3
YYGNYGGYFDV

SEQ ID NO: 15253 - protein, 11 aa, Artificial Sequence
  Description of Artificial Sequence: Synthetic peptide
  XENP019131 vlCDR1
RASQSVSNDVA

SEQ ID NO: 15254 - protein, 7 aa, Artificial Sequence
  Description of Artificial Sequence: Synthetic peptide
  XENP019131 vlCDR2
YASWRYT

SEQ ID NO: 15255 - protein, 9 aa, Artificial Sequence
  Description of Artificial Sequence: Synthetic peptide
  XENP019131 vlCDR3
QQDGSSPRT

SEQ ID NO: 15256 - protein, 249 aa, Artificial Sequence
  Description of Artificial Sequence: Synthetic polypeptide
  XENP019132 1G6_H1_L1.171_scFv(GKPGS)4
EVQLVESGGGLVKPGGSLRLSCAASGFTFSNYWMNWVRQAPGKGLEWVGEIRLKSNNYATHYAEPVKGRFTISRDDSKSTVYLQMNSLKTEDTAVYYCTRYYGNYGGYFDVWGAGTLVTVSSGKPGSGKPGSGKPGSGKPGSSIVMTQSPATLSVSPGERATLSCRASQSVSNDVAWYQQKPGQSPRLLINYASHRYTSVPDRFTGSGYGTEFTLTISSLQSEDFAVYFCQQDWSSPRTFGGGTKVEIK

SEQ ID NO: 15257 - protein, 122 aa, Artificial Sequence; identical to SEQ ID NO: 10922
  Description of Artificial Sequence: Synthetic polypeptide
  VH of XENP019132

SEQ ID NO: 15258 - protein, 107 aa, Artificial Sequence
  Description of Artificial Sequence: Synthetic polypeptide
  VL of XENP019132
SIVMTQSPATLSVSPGERATLSCRASQSVSNDVAWYQQKPGQSPRLLINYASHRYTSVPDRFTGSGYGTEFTLTISSLQSEDFAVYFCQQDWSSPRTFGGGTKVEIK

SEQ ID NO: 15259 - protein, 5 aa, Artificial Sequence
  Description of Artificial Sequence: Synthetic peptide
  XENP019132 vhCDR1
NYWMN

SEQ ID NO: 15260 - protein, 19 aa, Artificial Sequence
  Description of Artificial Sequence: Synthetic peptide
  XENP019132 vhCDR2
EIRLKSNNYATHYAEPVKG

SEQ ID NO: 15261 - protein, 11 aa, Artificial Sequence
  Description of Artificial Sequence: Synthetic peptide
  XENP019132 vhCDR3
YYGNYGGYFDV

SEQ ID NO: 15262 - protein, 11 aa, Artificial Sequence
  Description of Artificial Sequence: Synthetic peptide
  XENP019132 vlCDR1
RASQSVSNDVA

SEQ ID NO: 15263 - protein, 7 aa, Artificial Sequence
  Description of Artificial Sequence: Synthetic peptide
  XENP019132 vlCDR2
YASHRYT

SEQ ID NO: 15264 - protein, 9 aa, Artificial Sequence
  Description of Artificial Sequence: Synthetic peptide
  XENP019132 vlCDR3
QQDWSSPRT

SEQ ID NO: 15265 - protein, 249 aa, Artificial Sequence
  Description of Artificial Sequence: Synthetic polypeptide
  XENP019133 1G6_H1_L1.172_scFv(GKPGS)4
EVQLVESGGGLVKPGGSLRLSCAASGFTFSNYWMNWVRQAPGKGLEWVGEIRLKSNNYATHYAEPVKGRFTISRDDSKSTVYLQMNSLKTEDTAVYYCTRYYGNYGGYFDVWGAGTLVTVSSGKPGSGKPGSGKPGSGKPGSSIVMTQSPATLSVSPGERATLSCRASQSVSNDVAWYQQKPGQSPRLLINYASHRYTSVPDRFTGSGYGTEFTLTISSLQSEDFAVYFCQQDFSSPRTFGGGTKVEIK

SEQ ID NO: 15266 - protein, 122 aa, Artificial Sequence; identical to SEQ ID NO: 10922
  Description of Artificial Sequence: Synthetic polypeptide
  VH of XENP019133

SEQ ID NO: 15267 - protein, 107 aa, Artificial Sequence
  Description of Artificial Sequence: Synthetic polypeptide
  VL of XENP019133
SIVMTQSPATLSVSPGERATLSCRASQSVSNDVAWYQQKPGQSPRLLINYASHRYTSVPDRFTGSGYGTEFTLTISSLQSEDFAVYFCQQDFSSPRTFGGGTKVEIK

SEQ ID NO: 15268 - protein, 5 aa, Artificial Sequence
  Description of Artificial Sequence: Synthetic peptide
  XENP019133 vhCDR1
NYWMN

SEQ ID NO: 15269 - protein, 19 aa, Artificial Sequence
  Description of Artificial Sequence: Synthetic peptide
  XENP019133 vhCDR2
EIRLKSNNYATHYAEPVKG

SEQ ID NO: 15270 - protein, 11 aa, Artificial Sequence
  Description of Artificial Sequence: Synthetic peptide
  XENP019133 vhCDR3
YYGNYGGYFDV

SEQ ID NO: 15271 - protein, 11 aa, Artificial Sequence
  Description of Artificial Sequence: Synthetic peptide
  XENP019133 vlCDR1
RASQSVSNDVA

SEQ ID NO: 15272 - protein, 7 aa, Artificial Sequence
  Description of Artificial Sequence: Synthetic peptide
  XENP019133 vlCDR2
YASHRYT

SEQ ID NO: 15273 - protein, 9 aa, Artificial Sequence
  Description of Artificial Sequence: Synthetic peptide
  XENP019133 vlCDR3
QQDFSSPRT

SEQ ID NO: 15274 - protein, 249 aa, Artificial Sequence
  Description of Artificial Sequence: Synthetic polypeptide
  XENP019134 1G6_H1_L1.173_scFv(GKPGS)4
EVQLVESGGGLVKPGGSLRLSCAASGFTFSNYWMNWVRQAPGKGLEWVGEIRLKSNNYATHYAEPVKGRFTISRDDSKSTVYLQMNSLKTEDTAVYYCTRYYGNYGGYFDVWGAGTLVTVSSGKPGSGKPGSGKPGSGKPGSSIVMTQSPATLSVSPGERATLSCRASQSVSNDVAWYQQKPGQSPRLLINYASHRYTGVPDRFTGSGYGTEFTLTISSLQSEDFAVYFCQQDFGSPRTFGGGTKVEIK

SEQ ID NO: 15275 - protein, 122 aa, Artificial Sequence; identical to SEQ ID NO: 10922
  Description of Artificial Sequence: Synthetic polypeptide
  VH of XENP019134

SEQ ID NO: 15276 - protein, 107 aa, Artificial Sequence
  Description of Artificial Sequence: Synthetic polypeptide
  VL of XENP019134
SIVMTQSPATLSVSPGERATLSCRASQSVSNDVAWYQQKPGQSPRLLINYASHRYTGVPDRFTGSGYGTEFTLTISSLQSEDFAVYFCQQDFGSPRTFGGGTKVEIK

SEQ ID NO: 15277 - protein, 5 aa, Artificial Sequence
  Description of Artificial Sequence: Synthetic peptide
  XENP019134 vhCDR1
NYWMN

SEQ ID NO: 15278 - protein, 19 aa, Artificial Sequence
  Description of Artificial Sequence: Synthetic peptide
  XENP019134 vhCDR2
EIRLKSNNYATHYAEPVKG

SEQ ID NO: 15279 - protein, 11 aa, Artificial Sequence
  Description of Artificial Sequence: Synthetic peptide
  XENP019134 vhCDR3
YYGNYGGYFDV

SEQ ID NO: 15280 - protein, 11 aa, Artificial Sequence
  Description of Artificial Sequence: Synthetic peptide
  XENP019134 vlCDR1
RASQSVSNDVA

SEQ ID NO: 15281 - protein, 7 aa, Artificial Sequence
  Description of Artificial Sequence: Synthetic peptide
  XENP019134 vlCDR2
YASHRYT

SEQ ID NO: 15282 - protein, 9 aa, Artificial Sequence
  Description of Artificial Sequence: Synthetic peptide
  XENP019134 vlCDR3
QQDFGSPRT

SEQ ID NO: 15283 - protein, 249 aa, Artificial Sequence
  Description of Artificial Sequence: Synthetic polypeptide
  XENP019135 1G6_H1_L1.174_scFv(GKPGS)4
EVQLVESGGGLVKPGGSLRLSCAASGFTFSNYWMNWVRQAPGKGLEWVGEIRLKSNNYATHYAEPVKGRFTISRDDSKSTVYLQMNSLKTEDTAVYYCTRYYGNYGGYFDVWGAGTLVTVSSGKPGSGKPGSGKPGSGKPGSSIVMTQSPATLSVSPGERATLSCRASQSVSNDVAWYQQKPGQSPRLLINYASHRYTGVPDRFTGSGYGTEFTLTISSLQSEDFAVYFCQQDWGSPRTFGGGTKVEIK

SEQ ID NO: 15284 - protein, 122 aa, Artificial Sequence; identical to SEQ ID NO: 10922
  Description of Artificial Sequence: Synthetic polypeptide
  VH of XENP019135

SEQ ID NO: 15285 - protein, 107 aa, Artificial Sequence
  Description of Artificial Sequence: Synthetic polypeptide
  VL of XENP019135
SIVMTQSPATLSVSPGERATLSCRASQSVSNDVAWYQQKPGQSPRLLINYASHRYTGVPDRFTGSGYGTEFTLTISSLQSEDFAVYFCQQDWGSPRTFGGGTKVEIK

SEQ ID NO: 15286 - protein, 5 aa, Artificial Sequence
  Description of Artificial Sequence: Synthetic peptide
  XENP019135 vhCDR1
NYWMN

SEQ ID NO: 15287 - protein, 19 aa, Artificial Sequence
  Description of Artificial Sequence: Synthetic peptide
  XENP019135 vhCDR2
EIRLKSNNYATHYAEPVKG

SEQ ID NO: 15288 - protein, 11 aa, Artificial Sequence
  Description of Artificial Sequence: Synthetic peptide
  XENP019135 vhCDR3
YYGNYGGYFDV

SEQ ID NO: 15289 - protein, 11 aa, Artificial Sequence
  Description of Artificial Sequence: Synthetic peptide
  XENP019135 vlCDR1
RASQSVSNDVA

SEQ ID NO: 15290 - protein, 7 aa, Artificial Sequence
  Description of Artificial Sequence: Synthetic peptide
  XENP019135 vlCDR2
YASHRYT

SEQ ID NO: 15291 - protein, 9 aa, Artificial Sequence
  Description of Artificial Sequence: Synthetic peptide
  XENP019135 vlCDR3
QQDWGSPRT

SEQ ID NO: 15292 - protein, 249 aa, Artificial Sequence
  Description of Artificial Sequence: Synthetic polypeptide
  XENP019136 1G6_H1_L1.175_scFv(GKPGS)4
EVQLVESGGGLVKPGGSLRLSCAASGFTFSNYWMNWVRQAPGKGLEWVGEIRLKSNNYATHYAEPVKGRFTISRDDSKSTVYLQMNSLKTEDTAVYYCTRYYGNYGGYFDVWGAGTLVTVSSGKPGSGKPGSGKPGSGKPGSSIVMTQSPATLSVSPGERATLSCRASQSVGNDVAWYQQKPGQSPRLLINYASHRYTSVPDRFTGSGYGTEFTLTISSLQSEDFAVYFCQQDWSSPRTFGGGTKVEIK

SEQ ID NO: 15293 - protein, 122 aa, Artificial Sequence; identical to SEQ ID NO: 10922
  Description of Artificial Sequence: Synthetic polypeptide
  VH of XENP019136

SEQ ID NO: 15294 - protein, 107 aa, Artificial Sequence
  Description of Artificial Sequence: Synthetic polypeptide
  VL of XENP019136
SIVMTQSPATLSVSPGERATLSCRASQSVGNDVAWYQQKPGQSPRLLINYASHRYTSVPDRFTGSGYGTEFTLTISSLQSEDFAVYFCQQDWSSPRTFGGGTKVEIK

SEQ ID NO: 15295 - protein, 5 aa, Artificial Sequence
  Description of Artificial Sequence: Synthetic peptide
  XENP019136 vhCDR1
NYWMN

SEQ ID NO: 15296 - protein, 19 aa, Artificial Sequence
  Description of Artificial Sequence: Synthetic peptide
  XENP019136 vhCDR2
EIRLKSNNYATHYAEPVKG

SEQ ID NO: 15297 - protein, 11 aa, Artificial Sequence
  Description of Artificial Sequence: Synthetic peptide
  XENP019136 vhCDR3
YYGNYGGYFDV

SEQ ID NO: 15298 - protein, 11 aa, Artificial Sequence
  Description of Artificial Sequence: Synthetic peptide
  XENP019136 vlCDR1
RASQSVGNDVA

SEQ ID NO: 15299 - protein, 7 aa, Artificial Sequence
  Description of Artificial Sequence: Synthetic peptide
  XENP019136 vlCDR2
YASHRYT

SEQ ID NO: 15300 - protein, 9 aa, Artificial Sequence
  Description of Artificial Sequence: Synthetic peptide
  XENP019136 vlCDR3
QQDWSSPRT

SEQ ID NO: 15301 - protein, 249 aa, Artificial Sequence
  Description of Artificial Sequence: Synthetic polypeptide
  XENP019137 1G6_H1_L1.176_scFv(GKPGS)4
EVQLVESGGGLVKPGGSLRLSCAASGFTFSNYWMNWVRQAPGKGLEWVGEIRLKSNNYATHYAEPVKGRFTISRDDSKSTVYLQMNSLKTEDTAVYYCTRYYGNYGGYFDVWGAGTLVTVSSGKPGSGKPGSGKPGSGKPGSSIVMTQSPATLSVSPGERATLSCRASQSVGNDVAWYQQKPGQSPRLLINYASWRYTSVPDRFTGSGYGTEFTLTISSLQSEDFAVYFCQQDYSSPRTFGGGTKVEIK

SEQ ID NO: 15302 - protein, 122 aa, Artificial Sequence; identical to SEQ ID NO: 10922
  Description of Artificial Sequence: Synthetic polypeptide
  VH of XENP019137

SEQ ID NO: 15303 - protein, 107 aa, Artificial Sequence
  Description of Artificial Sequence: Synthetic polypeptide
  VL of XENP019137
SIVMTQSPATLSVSPGERATLSCRASQSVGNDVAWYQQKPGQSPRLLINYASWRYTSVPDRFTGSGYGTEFTLTISSLQSEDFAVYFCQQDYSSPRTFGGGTKVEIK

SEQ ID NO: 15304 - protein, 5 aa, Artificial Sequence
  Description of Artificial Sequence: Synthetic peptide
  XENP019137 vhCDR1
NYWMN

SEQ ID NO: 15305 - protein, 19 aa, Artificial Sequence
  Description of Artificial Sequence: Synthetic peptide
  XENP019137 vhCDR2
EIRLKSNNYATHYAEPVKG

SEQ ID NO: 15306 - protein, 11 aa, Artificial Sequence
  Description of Artificial Sequence: Synthetic peptide
  XENP019137 vhCDR3
YYGNYGGYFDV

SEQ ID NO: 15307 - protein, 11 aa, Artificial Sequence
  Description of Artificial Sequence: Synthetic peptide
  XENP019137 vlCDR1
RASQSVGNDVA

SEQ ID NO: 15308 - protein, 7 aa, Artificial Sequence
  Description of Artificial Sequence: Synthetic peptide
  XENP019137 vlCDR2
YASWRYT

SEQ ID NO: 15309 - protein, 9 aa, Artificial Sequence
  Description of Artificial Sequence: Synthetic peptide
  XENP019137 vlCDR3
QQDYSSPRT

SEQ ID NO: 15310 - protein, 249 aa, Artificial Sequence
  Description of Artificial Sequence: Synthetic polypeptide
  XENP019138 1G6_H1_L1.177_scFv(GKPGS)4
EVQLVESGGGLVKPGGSLRLSCAASGFTFSNYWMNWVRQAPGKGLEWVGEIRLKSNNYATHYAEPVKGRFTISRDDSKSTVYLQMNSLKTEDTAVYYCTRYYGNYGGYFDVWGAGTLVTVSSGKPGSGKPGSGKPGSGKPGSSIVMTQSPATLSVSPGERATLSCRASQSVGNDVAWYQQKPGQSPRLLINYASHRYTSVPDRFTGSGYGTEFTLTISSLQSEDFAVYFCQQDFSSPRTFGGGTKVEIK

SEQ ID NO: 15311 - protein, 122 aa, Artificial Sequence; identical to SEQ ID NO: 10922
  Description of Artificial Sequence: Synthetic polypeptide
  VH of XENP019138

SEQ ID NO: 15312 - protein, 107 aa, Artificial Sequence
  Description of Artificial Sequence: Synthetic polypeptide
  VL of XENP019138
SIVMTQSPATLSVSPGERATLSCRASQSVGNDVAWYQQKPGQSPRLLINYASHRYTSVPDRFTGSGYGTEFTLTISSLQSEDFAVYFCQQDFSSPRTFGGGTKVEIK

SEQ ID NO: 15313 - protein, 5 aa, Artificial Sequence
  Description of Artificial Sequence: Synthetic peptide
  XENP019138 vhCDR1
NYWMN

SEQ ID NO: 15314 - protein, 19 aa, Artificial Sequence
  Description of Artificial Sequence: Synthetic peptide
  XENP019138 vhCDR2
EIRLKSNNYATHYAEPVKG

SEQ ID NO: 15315 - protein, 11 aa, Artificial Sequence
  Description of Artificial Sequence: Synthetic peptide
  XENP019138 vhCDR3
YYGNYGGYFDV

SEQ ID NO: 15316 - protein, 11 aa, Artificial Sequence
  Description of Artificial Sequence: Synthetic peptide
  XENP019138 vlCDR1
RASQSVGNDVA

SEQ ID NO: 15317 - protein, 7 aa, Artificial Sequence
  Description of Artificial Sequence: Synthetic peptide
  XENP019138 vlCDR2
YASHRYT

SEQ ID NO: 15318 - protein, 9 aa, Artificial Sequence
  Description of Artificial Sequence: Synthetic peptide
  XENP019138 vlCDR3
QQDFSSPRT

SEQ ID NO: 15319 - protein, 249 aa, Artificial Sequence
  Description of Artificial Sequence: Synthetic polypeptide
  XENP019139 1G6_H1_L1.178_scFv(GKPGS)4
EVQLVESGGGLVKPGGSLRLSCAASGFTFSNYWMNWVRQAPGKGLEWVGEIRLKSNNYATHYAEPVKGRFTISRDDSKSTVYLQMNSLKTEDTAVYYCTRYYGNYGGYFDVWGAGTLVTVSSGKPGSGKPGSGKPGSGKPGSSIVMTQSPATLSVSPGERATLSCRASQSVGNDVAWYQQKPGQSPRLLINYASHRYTSVPDRFTGSGYGTEFTLTISSLQSEDFAVYFCQQDGSSPRTFGGGTKVEIK

SEQ ID NO: 15320 - protein, 122 aa, Artificial Sequence; identical to SEQ ID NO: 10922
  Description of Artificial Sequence: Synthetic polypeptide
  VH of XENP019139

SEQ ID NO: 15321 - protein, 107 aa, Artificial Sequence
  Description of Artificial Sequence: Synthetic polypeptide
  VL of XENP019139
SIVMTQSPATLSVSPGERATLSCRASQSVGNDVAWYQQKPGQSPRLLINYASHRYTSVPDRFTGSGYGTEFTLTISSLQSEDFAVYFCQQDGSSPRTFGGGTKVEIK

SEQ ID NO: 15322 - protein, 5 aa, Artificial Sequence
  Description of Artificial Sequence: Synthetic peptide
  XENP019139 vhCDR1
NYWMN

SEQ ID NO: 15323 - protein, 19 aa, Artificial Sequence
  Description of Artificial Sequence: Synthetic peptide
  XENP019139 vhCDR2
EIRLKSNNYATHYAEPVKG

SEQ ID NO: 15324 - protein, 11 aa, Artificial Sequence
  Description of Artificial Sequence: Synthetic peptide
  XENP019139 vhCDR3
YYGNYGGYFDV

SEQ ID NO: 15325 - protein, 11 aa, Artificial Sequence
  Description of Artificial Sequence: Synthetic peptide
  XENP019139 vlCDR1
RASQSVGNDVA

SEQ ID NO: 15326 - protein, 7 aa, Artificial Sequence
  Description of Artificial Sequence: Synthetic peptide
  XENP019139 vlCDR2
YASHRYT

SEQ ID NO: 15327 - protein, 9 aa, Artificial Sequence
  Description of Artificial Sequence: Synthetic peptide
  XENP019139 vlCDR3
QQDGSSPRT

SEQ ID NO: 15328 - protein, 249 aa, Artificial Sequence
  Description of Artificial Sequence: Synthetic polypeptide
  XENP019140 1G6_H1_L1.179_scFv(GKPGS)4
EVQLVESGGGLVKPGGSLRLSCAASGFTFSNYWMNWVRQAPGKGLEWVGEIRLKSNNYATHYAEPVKGRFTISRDDSKSTVYLQMNSLKTEDTAVYYCTRYYGNYGGYFDVWGAGTLVTVSSGKPGSGKPGSGKPGSGKPGSSIVMTQSPATLSVSPGERATLSCRASQSVSNDVAWYQQKPGQSPRLLINYASWRYTSVPDRFTGSGYGTEFTLTISSLQSEDFAVYFCQQDFSSPRTFGGGTKVEIK

SEQ ID NO: 15329 - protein, 122 aa, Artificial Sequence; identical to SEQ ID NO: 10922
  Description of Artificial Sequence: Synthetic polypeptide
  VH of XENP019140

SEQ ID NO: 15330 - protein, 107 aa, Artificial Sequence
  Description of Artificial Sequence: Synthetic polypeptide
  VL of XENP019140
SIVMTQSPATLSVSPGERATLSCRASQSVSNDVAWYQQKPGQSPRLLINYASWRYTSVPDRFTGSGYGTEFTLTISSLQSEDFAVYFCQQDFSSPRTFGGGTKVEIK

SEQ ID NO: 15331 - protein, 5 aa, Artificial Sequence
  Description of Artificial Sequence: Synthetic peptide
  XENP019140 vhCDR1
NYWMN

SEQ ID NO: 15332 - protein, 19 aa, Artificial Sequence
  Description of Artificial Sequence: Synthetic peptide
  XENP019140 vhCDR2
EIRLKSNNYATHYAEPVKG

SEQ ID NO: 15333 - protein, 11 aa, Artificial Sequence
  Description of Artificial Sequence: Synthetic peptide
  XENP019140 vhCDR3
YYGNYGGYFDV

SEQ ID NO: 15334 - protein, 11 aa, Artificial Sequence
  Description of Artificial Sequence: Synthetic peptide
  XENP019140 vlCDR1
RASQSVSNDVA

SEQ ID NO: 15335 - protein, 7 aa, Artificial Sequence
  Description of Artificial Sequence: Synthetic peptide
  XENP019140 vlCDR2
YASWRYT

SEQ ID NO: 15336 - protein, 9 aa, Artificial Sequence
  Description of Artificial Sequence: Synthetic peptide
  XENP019140 vlCDR3
QQDFSSPRT

SEQ ID NO: 15337 - protein, 249 aa, Artificial Sequence
  Description of Artificial Sequence: Synthetic polypeptide
  XENP019141 1G6_H1_L1.180_scFv(GKPGS)4
EVQLVESGGGLVKPGGSLRLSCAASGFTFSNYWMNWVRQAPGKGLEWVGEIRLKSNNYATHYAEPVKGRFTISRDDSKSTVYLQMNSLKTEDTAVYYCTRYYGNYGGYFDVWGAGTLVTVSSGKPGSGKPGSGKPGSGKPGSSIVMTQSPATLSVSPGERATLSCRASQSVSNDVAWYQQKPGQSPRLLINYASWRYTSVPDRFTGSGYGTEFTLTISSLQSEDFAVYFCQQDWSSPRTFGGGTKVEIK

SEQ ID NO: 15338 - protein, 122 aa, Artificial Sequence; identical to SEQ ID NO: 10922
  Description of Artificial Sequence: Synthetic polypeptide
  VH of XENP019141

SEQ ID NO: 15339 - protein, 107 aa, Artificial Sequence
  Description of Artificial Sequence: Synthetic polypeptide
  VL of XENP019141
SIVMTQSPATLSVSPGERATLSCRASQSVSNDVAWYQQKPGQSPRLLINYASWRYTSVPDRFTGSGYGTEFTLTISSLQSEDFAVYFCQQDWSSPRTFGGGTKVEIK

SEQ ID NO: 15340 - protein, 5 aa, Artificial Sequence
  Description of Artificial Sequence: Synthetic peptide
  XENP019141 vhCDR1
NYWMN

SEQ ID NO: 15341 - protein, 19 aa, Artificial Sequence
  Description of Artificial Sequence: Synthetic peptide
  XENP019141 vhCDR2
EIRLKSNNYATHYAEPVKG

SEQ ID NO: 15342 - protein, 11 aa, Artificial Sequence
  Description of Artificial Sequence: Synthetic peptide
  XENP019141 vhCDR3
YYGNYGGYFDV

SEQ ID NO: 15343 - protein, 11 aa, Artificial Sequence
  Description of Artificial Sequence: Synthetic peptide
  XENP019141 vlCDR1
RASQSVSNDVA

SEQ ID NO: 15344 - protein, 7 aa, Artificial Sequence
  Description of Artificial Sequence: Synthetic peptide
  XENP019141 vlCDR2
YASWRYT

SEQ ID NO: 15345 - protein, 9 aa, Artificial Sequence
  Description of Artificial Sequence: Synthetic peptide
  XENP019141 vlCDR3
QQDWSSPRT

SEQ ID NO: 15346 - protein, 249 aa, Artificial Sequence
  Description of Artificial Sequence: Synthetic polypeptide
  XENP019142 1G6_H1_L1.181_scFv(GKPGS)4
EVQLVESGGGLVKPGGSLRLSCAASGFTFSNYWMNWVRQAPGKGLEWVGEIRLKSNNYATHYAEPVKGRFTISRDDSKSTVYLQMNSLKTEDTAVYYCTRYYGNYGGYFDVWGAGTLVTVSSGKPGSGKPGSGKPGSGKPGSSIVMTQSPATLSVSPGERATLSCRASQSVSNDVAWYQQKPGQSPRLLINYASWRYTSVPDRFTGSGYGTEFTLTISSLQSEDFAVYFCQQDGSSPRTFGGGTKVEIK

SEQ ID NO: 15347 - protein, 122 aa, Artificial Sequence; identical to SEQ ID NO: 10922
  Description of Artificial Sequence: Synthetic polypeptide
  VH of XENP019142

SEQ ID NO: 15348 - protein, 107 aa, Artificial Sequence
  Description of Artificial Sequence: Synthetic polypeptide
  VL of XENP019142
SIVMTQSPATLSVSPGERATLSCRASQSVSNDVAWYQQKPGQSPRLLINYASWRYTSVPDRFTGSGYGTEFTLTISSLQSEDFAVYFCQQDGSSPRTFGGGTKVEIK

SEQ ID NO: 15349 - protein, 5 aa, Artificial Sequence
  Description of Artificial Sequence: Synthetic peptide
  XENP019142 vhCDR1
NYWMN

SEQ ID NO: 15350 - protein, 19 aa, Artificial Sequence
  Description of Artificial Sequence: Synthetic peptide
  XENP019142 vhCDR2
EIRLKSNNYATHYAEPVKG

SEQ ID NO: 15351 - protein, 11 aa, Artificial Sequence
  Description of Artificial Sequence: Synthetic peptide
  XENP019142 vhCDR3
YYGNYGGYFDV

SEQ ID NO: 15352 - protein, 11 aa, Artificial Sequence
  Description of Artificial Sequence: Synthetic peptide
  XENP019142 vlCDR1
RASQSVSNDVA

SEQ ID NO: 15353 - protein, 7 aa, Artificial Sequence
  Description of Artificial Sequence: Synthetic peptide
  XENP019142 vlCDR2
YASWRYT

SEQ ID NO: 15354 - protein, 9 aa, Artificial Sequence
  Description of Artificial Sequence: Synthetic peptide
  XENP019142 vlCDR3
QQDGSSPRT

SEQ ID NO: 15355 - protein, 249 aa, Artificial Sequence
  Description of Artificial Sequence: Synthetic polypeptide
  XENP019143 1G6_H1_L1.182_scFv(GKPGS)4
EVQLVESGGGLVKPGGSLRLSCAASGFTFSNYWMNWVRQAPGKGLEWVGEIRLKSNNYATHYAEPVKGRFTISRDDSKSTVYLQMNSLKTEDTAVYYCTRYYGNYGGYFDVWGAGTLVTVSSGKPGSGKPGSGKPGSGKPGSSIVMTQSPATLSVSPGERATLSCRASQSVGNDVAWYQQKPGQSPRLLINYASWRYTSVPDRFTGSGYGTEFTLTISSLQSEDFAVYFCQQDWSSPRTFGGGTKVEIK

SEQ ID NO: 15356 - protein, 122 aa, Artificial Sequence; identical to SEQ ID NO: 10922
  Description of Artificial Sequence: Synthetic polypeptide
  VH of XENP019143

SEQ ID NO: 15357 - protein, 107 aa, Artificial Sequence
  Description of Artificial Sequence: Synthetic polypeptide
  VL of XENP019143
SIVMTQSPATLSVSPGERATLSCRASQSVGNDVAWYQQKPGQSPRLLINYASWRYTSVPDRFTGSGYGTEFTLTISSLQSEDFAVYFCQQDWSSPRTFGGGTKVEIK

SEQ ID NO: 15358 - protein, 5 aa, Artificial Sequence
  Description of Artificial Sequence: Synthetic peptide
  XENP019143 vhCDR1
NYWMN

SEQ ID NO: 15359 - protein, 19 aa, Artificial Sequence
  Description of Artificial Sequence: Synthetic peptide
  XENP019143 vhCDR2
EIRLKSNNYATHYAEPVKG

SEQ ID NO: 15360 - protein, 11 aa, Artificial Sequence
  Description of Artificial Sequence: Synthetic peptide
  XENP019143 vhCDR3
YYGNYGGYFDV

SEQ ID NO: 15361 - protein, 11 aa, Artificial Sequence
  Description of Artificial Sequence: Synthetic peptide
  XENP019143 vlCDR1
RASQSVGNDVA

SEQ ID NO: 15362 - protein, 7 aa, Artificial Sequence
  Description of Artificial Sequence: Synthetic peptide
  XENP019143 vlCDR2
YASWRYT

SEQ ID NO: 15363 - protein, 9 aa, Artificial Sequence
  Description of Artificial Sequence: Synthetic peptide
  XENP019143 vlCDR3
QQDWSSPRT

SEQ ID NO: 15364 - protein, 249 aa, Artificial Sequence
  Description of Artificial Sequence: Synthetic polypeptide
  XENP019144 1G6_H1_L1.183_scFv(GKPGS)4
EVQLVESGGGLVKPGGSLRLSCAASGFTFSNYWMNWVRQAPGKGLEWVGEIRLKSNNYATHYAEPVKGRFTISRDDSKSTVYLQMNSLKTEDTAVYYCTRYYGNYGGYFDVWGAGTLVTVSSGKPGSGKPGSGKPGSGKPGSSIVMTQSPATLSVSPGERATLSCRASQSVGNDVAWYQQKPGQSPRLLINYASWRYTSVPDRFTGSGYGTEFTLTISSLQSEDFAVYFCQQDFSSPRTFGGGTKVEIK

SEQ ID NO: 15365 - protein, 122 aa, Artificial Sequence; identical to SEQ ID NO: 10922
  Description of Artificial Sequence: Synthetic polypeptide
  VH of XENP019144

SEQ ID NO: 15366 - protein, 107 aa, Artificial Sequence
  Description of Artificial Sequence: Synthetic polypeptide
  VL of XENP019144
SIVMTQSPATLSVSPGERATLSCRASQSVGNDVAWYQQKPGQSPRLLINYASWRYTSVPDRFTGSGYGTEFTLTISSLQSEDFAVYFCQQDFSSPRTFGGGTKVEIK

SEQ ID NO: 15367 - protein, 5 aa, Artificial Sequence
  Description of Artificial Sequence: Synthetic peptide
  XENP019144 vhCDR1
NYWMN

SEQ ID NO: 15368 - protein, 19 aa, Artificial Sequence
  Description of Artificial Sequence: Synthetic peptide
  XENP019144 vhCDR2
EIRLKSNNYATHYAEPVKG

SEQ ID NO: 15369 - protein, 11 aa, Artificial Sequence
  Description of Artificial Sequence: Synthetic peptide
  XENP019144 vhCDR3
YYGNYGGYFDV

SEQ ID NO: 15370 - protein, 11 aa, Artificial Sequence
  Description of Artificial Sequence: Synthetic peptide
  XENP019144 vlCDR1
RASQSVGNDVA

SEQ ID NO: 15371 - protein, 7 aa, Artificial Sequence
  Description of Artificial Sequence: Synthetic peptide
  XENP019144 vlCDR2
YASWRYT

SEQ ID NO: 15372 - protein, 9 aa, Artificial Sequence
  Description of Artificial Sequence: Synthetic peptide
  XENP019144 vlCDR3
QQDFSSPRT

SEQ ID NO: 15373 - protein, 249 aa, Artificial Sequence
  Description of Artificial Sequence: Synthetic polypeptide
  XENP019145 1G6_H1_L1.184_scFv(GKPGS)4
EVQLVESGGGLVKPGGSLRLSCAASGFTFSNYWMNWVRQAPGKGLEWVGEIRLKSNNYATHYAEPVKGRFTISRDDSKSTVYLQMNSLKTEDTAVYYCTRYYGNYGGYFDVWGAGTLVTVSSGKPGSGKPGSGKPGSGKPGSSIVMTQSPATLSVSPGERATLSCRASQSVGNDVAWYQQKPGQSPRLLINYASWRYTSVPDRFTGSGYGTEFTLTISSLQSEDFAVYFCQQDGSSPRTFGGGTKVEIK

SEQ ID NO: 15374 - protein, 122 aa, Artificial Sequence; identical to SEQ ID NO: 10922
  Description of Artificial Sequence: Synthetic polypeptide
  VH of XENP019145

SEQ ID NO: 15375 - protein, 107 aa, Artificial Sequence
  Description of Artificial Sequence: Synthetic polypeptide
  VL of XENP019145
SIVMTQSPATLSVSPGERATLSCRASQSVGNDVAWYQQKPGQSPRLLINYASWRYTSVPDRFTGSGYGTEFTLTISSLQSEDFAVYFCQQDGSSPRTFGGGTKVEIK

SEQ ID NO: 15376 - protein, 5 aa, Artificial Sequence
  Description of Artificial Sequence: Synthetic peptide
  XENP019145 vhCDR1
NYWMN

SEQ ID NO: 15377 - protein, 19 aa, Artificial Sequence
  Description of Artificial Sequence: Synthetic peptide
  XENP019145 vhCDR2
EIRLKSNNYATHYAEPVKG

SEQ ID NO: 15378 - protein, 11 aa, Artificial Sequence
  Description of Artificial Sequence: Synthetic peptide
  XENP019145 vhCDR3
YYGNYGGYFDV

SEQ ID NO: 15379 - protein, 11 aa, Artificial Sequence
  Description of Artificial Sequence: Synthetic peptide
  XENP019145 vlCDR1
RASQSVGNDVA

SEQ ID NO: 15380 - protein, 7 aa, Artificial Sequence
  Description of Artificial Sequence: Synthetic peptide
  XENP019145 vlCDR2
YASWRYT

SEQ ID NO: 15381 - protein, 9 aa, Artificial Sequence
  Description of Artificial Sequence: Synthetic peptide
  XENP019145 vlCDR3
QQDGSSPRT

SEQ ID NO: 15382 - protein, 249 aa, Artificial Sequence
  Description of Artificial Sequence: Synthetic polypeptide
  XENP019146 1G6_H1_L1.185_scFv(GKPGS)4
EVQLVESGGGLVKPGGSLRLSCAASGFTFSNYWMNWVRQAPGKGLEWVGEIRLKSNNYATHYAEPVKGRFTISRDDSKSTVYLQMNSLKTEDTAVYYCTRYYGNYGGYFDVWGAGTLVTVSSGKPGSGKPGSGKPGSGKPGSEIVMTQSPATLSVSPGERATLSCRASQSVSNDLAWYQQKPGQSPRLLINYASHRYTGVPARFSGSGYGTEFTLTISSLQSEDFAVYYCQQDYSSPRTFGGGTKVEIK

SEQ ID NO: 15383 - protein, 122 aa, Artificial Sequence; identical to SEQ ID NO: 10922
  Description of Artificial Sequence: Synthetic polypeptide
  VH of XENP019146

SEQ ID NO: 15384 - protein, 107 aa, Artificial Sequence
  Description of Artificial Sequence: Synthetic polypeptide
  VL of XENP019146
EIVMTQSPATLSVSPGERATLSCRASQSVSNDLAWYQQKPGQSPRLLINYASHRYTGVPARFSGSGYGTEFTLTISSLQSEDFAVYYCQQDYSSPRTFGGGTKVEIK

SEQ ID NO: 15385 - protein, 5 aa, Artificial Sequence
  Description of Artificial Sequence: Synthetic peptide
  XENP019146 vhCDR1
NYWMN

SEQ ID NO: 15386 - protein, 19 aa, Artificial Sequence
  Description of Artificial Sequence: Synthetic peptide
  XENP019146 vhCDR2
EIRLKSNNYATHYAEPVKG

SEQ ID NO: 15387 - protein, 11 aa, Artificial Sequence
  Description of Artificial Sequence: Synthetic peptide
  XENP019146 vhCDR3
YYGNYGGYFDV

SEQ ID NO: 15388 - protein, 11 aa, Artificial Sequence
  Description of Artificial Sequence: Synthetic peptide
  XENP019146 vlCDR1
RASQSVSNDLA

SEQ ID NO: 15389 - protein, 7 aa, Artificial Sequence
  Description of Artificial Sequence: Synthetic peptide
  XENP019146 vlCDR2
YASHRYT

SEQ ID NO: 15390 - protein, 9 aa, Artificial Sequence
  Description of Artificial Sequence: Synthetic peptide
  XENP019146 vlCDR3
QQDYSSPRT

SEQ ID NO: 15391 - protein, 249 aa, Artificial Sequence
  Description of Artificial Sequence: Synthetic polypeptide
  XENP019147 1G6_H1_L1.186_scFv(GKPGS)4
EVQLVESGGGLVKPGGSLRLSCAASGFTFSNYWMNWVRQAPGKGLEWVGEIRLKSNNYATHYAEPVKGRFTISRDDSKSTVYLQMNSLKTEDTAVYYCTRYYGNYGGYFDVWGAGTLVTVSSGKPGSGKPGSGKPGSGKPGSDIVMTQSPATLSVSPGERATLSCRASQSVSNDLAWYQQKPGQSPRLLINYASHRYTGVPDRFSGSGYGTEFTLTISSLQSEDFAVYYCQQDYSSPRTFGGGTKVEIK

SEQ ID NO: 15392 - protein, 122 aa, Artificial Sequence; identical to SEQ ID NO: 10922
  Description of Artificial Sequence: Synthetic polypeptide
  VH of XENP019147

SEQ ID NO: 15393 - protein, 107 aa, Artificial Sequence
  Description of Artificial Sequence: Synthetic polypeptide
  VL of XENP019147
DIVMTQSPATLSVSPGERATLSCRASQSVSNDLAWYQQKPGQSPRLLINYASHRYTGVPDRFSGSGYGTEFTLTISSLQSEDFAVYYCQQDYSSPRTFGGGTKVEIK

SEQ ID NO: 15394 - protein, 5 aa, Artificial Sequence
  Description of Artificial Sequence: Synthetic peptide
  XENP019147 vhCDR1
NYWMN

SEQ ID NO: 15395 - protein, 19 aa, Artificial Sequence
  Description of Artificial Sequence: Synthetic peptide
  XENP019147 vhCDR2
EIRLKSNNYATHYAEPVKG

SEQ ID NO: 15396 - protein, 11 aa, Artificial Sequence
  Description of Artificial Sequence: Synthetic peptide
  XENP019147 vhCDR3
YYGNYGGYFDV

SEQ ID NO: 15397 - protein, 11 aa, Artificial Sequence
  Description of Artificial Sequence: Synthetic peptide
  XENP019147 vlCDR1
RASQSVSNDLA

SEQ ID NO: 15398 - protein, 7 aa, Artificial Sequence
  Description of Artificial Sequence: Synthetic peptide
  XENP019147 vlCDR2
YASHRYT

SEQ ID NO: 15399 - protein, 9 aa, Artificial Sequence
  Description of Artificial Sequence: Synthetic peptide
  XENP019147 vlCDR3
QQDYSSPRT

SEQ ID NO: 15400 - protein, 249 aa, Artificial Sequence
  Description of Artificial Sequence: Synthetic polypeptide
  XENP019148 1G6_H1.257_L1.152_scFv(GKPGS)4
EVQLVESGGGLVKPGGSLRLSCAASGFTFSNYWMNWVRQAPGKGLEWVGEIRLKSNNYATHYAEPVKGRFTISRDDSKSTVYLQMNSLKTEDTAVYYCTRYYGNYGGYFDVWGRGTLVTVSSGKPGSGKPGSGKPGSGKPGSSIVMTQSPATLSVSPGERATLSCRASQSVSNDVAWYQQKPGESPRLLINYASHRYTGVPDRFTGSGYGTEFTLTISSLQSEDFAVYFCQQDYSSPRTFGGGTKVEIK

SEQ ID NO: 15401 - protein, 122 aa, Artificial Sequence; identical to SEQ ID NO: 14843
  Description of Artificial Sequence: Synthetic polypeptide
  VH of XENP019148

SEQ ID NO: 15402 - protein, 107 aa, Artificial Sequence; identical to SEQ ID NO: 15087
  Description of Artificial Sequence: Synthetic polypeptide
  VL of XENP019148

SEQ ID NO: 15403 - protein, 5 aa, Artificial Sequence
  Description of Artificial Sequence: Synthetic peptide
  XENP019148 vhCDR1
NYWMN

SEQ ID NO: 15404 - protein, 19 aa, Artificial Sequence
  Description of Artificial Sequence: Synthetic peptide
  XENP019148 vhCDR2
EIRLKSNNYATHYAEPVKG

SEQ ID NO: 15405 - protein, 11 aa, Artificial Sequence
  Description of Artificial Sequence: Synthetic peptide
  XENP019148 vhCDR3
YYGNYGGYFDV

SEQ ID NO: 15406 - protein, 11 aa, Artificial Sequence
  Description of Artificial Sequence: Synthetic peptide
  XENP019148 vlCDR1
RASQSVSNDVA

SEQ ID NO: 15407 - protein, 7 aa, Artificial Sequence
  Description of Artificial Sequence: Synthetic peptide
  XENP019148 vlCDR2
YASHRYT

SEQ ID NO: 15408 - protein, 9 aa, Artificial Sequence
  Description of Artificial Sequence: Synthetic peptide
  XENP019148 vlCDR3
QQDYSSPRT

SEQ ID NO: 15409 - protein, 249 aa, Artificial Sequence
  Description of Artificial Sequence: Synthetic polypeptide
  XENP019149 1G6_H1.257_L1.151_scFv(GKPGS)4
EVQLVESGGGLVKPGGSLRLSCAASGFTFSNYWMNWVRQAPGKGLEWVGEIRLKSNNYATHYAEPVKGRFTISRDDSKSTVYLQMNSLKTEDTAVYYCTRYYGNYGGYFDVWGRGTLVTVSSGKPGSGKPGSGKPGSGKPGSSIVMTQSPATLSVSPGERATLSCRASQSVSNDVAWYQQKPEQSPRLLINYASHRYTGVPDRFTGSGYGTEFTLTISSLQSEDFAVYFCQQDYSSPRTFGGGTKVEIK

SEQ ID NO: 15410 - protein, 122 aa, Artificial Sequence; identical to SEQ ID NO: 14843
  Description of Artificial Sequence: Synthetic polypeptide
  VH of XENP019149

SEQ ID NO: 15411 - protein, 107 aa, Artificial Sequence; identical to SEQ ID NO: 15078
  Description of Artificial Sequence: Synthetic polypeptide
  VL of XENP019149

SEQ ID NO: 15412 - protein, 5 aa, Artificial Sequence
  Description of Artificial Sequence: Synthetic peptide
  XENP019149 vhCDR1
NYWMN

SEQ ID NO: 15413 - protein, 19 aa, Artificial Sequence
  Description of Artificial Sequence: Synthetic peptide
  XENP019149 vhCDR2
EIRLKSNNYATHYAEPVKG

SEQ ID NO: 15414 - protein, 11 aa, Artificial Sequence
  Description of Artificial Sequence: Synthetic peptide
  XENP019149 vhCDR3
YYGNYGGYFDV

SEQ ID NO: 15415 - protein, 11 aa, Artificial Sequence
  Description of Artificial Sequence: Synthetic peptide
  XENP019149 vlCDR1
RASQSVSNDVA

SEQ ID NO: 15416 - protein, 7 aa, Artificial Sequence
  Description of Artificial Sequence: Synthetic peptide
  XENP019149 vlCDR2
YASHRYT

SEQ ID NO: 15417 - protein, 9 aa, Artificial Sequence
  Description of Artificial Sequence: Synthetic peptide
  XENP019149 vlCDR3
QQDYSSPRT

SEQ ID NO: 15418 - protein, 249 aa, Artificial Sequence
  Description of Artificial Sequence: Synthetic polypeptide
  XENP019150 1G6_H1.139_L1.134_scFv(GKPGS)4
EVQLVESGGGLVKPGGSLRLSCAASGFTFSNYWMNWVRQAPGKGLEWVGEIRLKSNNYATDYAEPVKGRFTISRDDSKSTVYLQMNSLKTEDTAVYYCTRYYGNYGGYFDVWGAGTLVTVSSGKPGSGKPGSGKPGSGKPGSSIVMTQSPATLSVSPGERATLSCRASQSVSNDVAWYQQKPGQSPRLLINYASHRYTGVPDRFTGSGYGTEFTLTISSLQSEDFAVYFCQQDYKSPRTFGGGTKVEIK

SEQ ID NO: 15419 - protein, 122 aa, Artificial Sequence; identical to SEQ ID NO: 12278
  Description of Artificial Sequence: Synthetic polypeptide
  VH of XENP019150

SEQ ID NO: 15420 - protein, 107 aa, Artificial Sequence; identical to SEQ ID NO: 14376
  Description of Artificial Sequence: Synthetic polypeptide
  VL of XENP019150

SEQ ID NO: 15421 - protein, 5 aa, Artificial Sequence
  Description of Artificial Sequence: Synthetic peptide
  XENP019150 vhCDR1
NYWMN

SEQ ID NO: 15422 - protein, 19 aa, Artificial Sequence
  Description of Artificial Sequence: Synthetic peptide
  XENP019150 vhCDR2
EIRLKSNNYATDYAEPVKG

SEQ ID NO: 15423 - protein, 11 aa, Artificial Sequence
  Description of Artificial Sequence: Synthetic peptide
  XENP019150 vhCDR3
YYGNYGGYFDV

SEQ ID NO: 15424 - protein, 11 aa, Artificial Sequence
  Description of Artificial Sequence: Synthetic peptide
  XENP019150 vlCDR1
RASQSVSNDVA

SEQ ID NO: 15425 - protein, 7 aa, Artificial Sequence
  Description of Artificial Sequence: Synthetic peptide
  XENP019150 vlCDR2
YASHRYT

SEQ ID NO: 15426 - protein, 9 aa, Artificial Sequence
  Description of Artificial Sequence: Synthetic peptide
  XENP019150 vlCDR3
QQDYKSPRT

SEQ ID NO: 15427 - protein, 249 aa, Artificial Sequence
  Description of Artificial Sequence: Synthetic polypeptide
  XENP019151 1G6_H1.48_L1.187_scFv(GKPGS)4
EVQLVESGGGLVKPGGSLRLSCAASGFTFSNYWMNWVRKAPGKGLEWVGEIRLKSNNYATHYAEPVKGRFTISRDDSKSTVYLQMNSLKTEDTAVYYCTRYYGNYGGYFDVWGAGTLVTVSSGKPGSGKPGSGKPGSGKPGSSIVMTQSPATLSVSPGERATLSCRASQSVSNDVAWYQQKPGESPRLLINYASHRYTGVPDRFTGSGYGTEFTLTISSLQSEDFAVYFCQQDYSSPRTFGGGTKVEIK

SEQ ID NO: 15428 - protein, 122 aa, Artificial Sequence; identical to SEQ ID NO: 11462
  Description of Artificial Sequence: Synthetic polypeptide
  VH of XENP019151

SEQ ID NO: 15429 - protein, 107 aa, Artificial Sequence; identical to SEQ ID NO: 15087
  Description of Artificial Sequence: Synthetic polypeptide
  VL of XENP019151

SEQ ID NO: 15430 - protein, 11 aa, Artificial Sequence
  Description of Artificial Sequence: Synthetic peptide
  XENP019151 vlCDR1
RASQSVSNDVA

SEQ ID NO: 15431 - protein, 7 aa, Artificial Sequence
  Description of Artificial Sequence: Synthetic peptide
  XENP019151 vlCDR2
YASHRYT

SEQ ID NO: 15432 - protein, 9 aa, Artificial Sequence
  Description of Artificial Sequence: Synthetic peptide
  XENP019151 vlCDR3
QQDYSSPRT

SEQ ID NO: 15433 - protein, 249 aa, Artificial Sequence
  Description of Artificial Sequence: Synthetic polypeptide
  XENP019152 1G6_H1.48_L1.151_scFv(GKPGS)4
EVQLVESGGGLVKPGGSLRLSCAASGFTFSNYWMNWVRKAPGKGLEWVGEIRLKSNNYATHYAEPVKGRFTISRDDSKSTVYLQMNSLKTEDTAVYYCTRYYGNYGGYFDVWGAGTLVTVSSGKPGSGKPGSGKPGSGKPGSSIVMTQSPATLSVSPGERATLSCRASQSVSNDVAWYQQKPEQSPRLLINYASHRYTGVPDRFTGSGYGTEFTLTISSLQSEDFAVYFCQQDYSSPRTFGGGTKVEIK

SEQ ID NO: 15434 - protein, 122 aa, Artificial Sequence; identical to SEQ ID NO: 11462
  Description of Artificial Sequence: Synthetic polypeptide
  VH of XENP019152

SEQ ID NO: 15435 - protein, 107 aa, Artificial Sequence; identical to SEQ ID NO: 15078
  Description of Artificial Sequence: Synthetic polypeptide
  VL of XENP019152

SEQ ID NO: 15436 - protein, 11 aa, Artificial Sequence
  Description of Artificial Sequence: Synthetic peptide
  XENP019152 vlCDR1
RASQSVSNDVA

SEQ ID NO: 15437 - protein, 7 aa, Artificial Sequence
  Description of Artificial Sequence: Synthetic peptide
  XENP019152 vlCDR2
YASHRYT

SEQ ID NO: 15438 - protein, 9 aa, Artificial Sequence
  Description of Artificial Sequence: Synthetic peptide
  XENP019152 vlCDR3
QQDYSSPRT

SEQ ID NO: 15439 - protein, 249 aa, Artificial Sequence
  Description of Artificial Sequence: Synthetic polypeptide
  XENP019153 1G6_H1.43_L1.159_scFv(GKPGS)4
EVQLVESGGGLVKPGGSLRLSCAASGFTFSNYWMDWVRQAPGKGLEWVGEIRLKSNNYATHYAEPVKGRFTISRDDSKSTVYLQMNSLKTEDTAVYYCTRYYGNYGGYFDVWGAGTLVTVSSGKPGSGKPGSGKPGSGKPGSSIVMTQSPATLSVSPGERATLSCRASQSVSNDVAWYQQKPGQSPRLLINYASHRYTGVPDRFTGSGYGTEFTLTISSLQSEDFAVYFCKQDYSSPRTFGGGTKVEIK

SEQ ID NO: 15440 - protein, 122 aa, Artificial Sequence; identical to SEQ ID NO: 11417
  Description of Artificial Sequence: Synthetic polypeptide
  VH of XENP019153

SEQ ID NO: 15441 - protein, 107 aa, Artificial Sequence; identical to SEQ ID NO: 15150
  Description of Artificial Sequence: Synthetic polypeptide
  VL of XENP019153

SEQ ID NO: 15442 - protein, 5 aa, Artificial Sequence
  Description of Artificial Sequence: Synthetic peptide
  XENP019153 vhCDR1
NYWMD

SEQ ID NO: 15443 - protein, 19 aa, Artificial Sequence
  Description of Artificial Sequence: Synthetic peptide
  XENP019153 vhCDR2
EIRLKSNNYATHYAEPVKG

SEQ ID NO: 15444 - protein, 11 aa, Artificial Sequence
  Description of Artificial Sequence: Synthetic peptide
  XENP019153 vhCDR3
YYGNYGGYFDV

SEQ ID NO: 15445 - protein, 11 aa, Artificial Sequence
  Description of Artificial Sequence: Synthetic peptide
  XENP019153 vlCDR1
RASQSVSNDVA

SEQ ID NO: 15446 - protein, 7 aa, Artificial Sequence
  Description of Artificial Sequence: Synthetic peptide
  XENP019153 vlCDR2
YASHRYT

SEQ ID NO: 15447 - protein, 9 aa, Artificial Sequence
  Description of Artificial Sequence: Synthetic peptide
  XENP019153 vlCDR3
KQDYSSPRT

SEQ ID NO: 15448 - protein, 249 aa, Artificial Sequence
  Description of Artificial Sequence: Synthetic polypeptide
  XENP019154 1G6_H1.90_L1.119_scFv(GKPGS)4
EVQLVESGGGLVKPGGSLRLSCAASGFTFSNYWMNWVRQAPGKGLEWVGEIRLYSNNYATHYAEPVKGRFTISRDDSKSTVYLQMNSLKTEDTAVYYCTRYYGNYGGYFDVWGAGTLVTVSSGKPGSGKPGSGKPGSGKPGSSIVMTQSPATLSVSPGERATLSCRASQSVSNDVAWYQQKPGQSPRLLINYASHRYTGVPDRFTGSGYGTEFTLTISSLQSEDFAVYFCQQDWSSPRTFGGGTKVEIK

SEQ ID NO: 15449 - protein, 122 aa, Artificial Sequence; identical to SEQ ID NO: 11837
  Description of Artificial Sequence: Synthetic polypeptide
  VH of XENP019154

SEQ ID NO: 15450 - protein, 107 aa, Artificial Sequence; identical to SEQ ID NO: 14241
  Description of Artificial Sequence: Synthetic polypeptide
  VL of XENP019154

SEQ ID NO: 15451 - protein, 5 aa, Artificial Sequence
  Description of Artificial Sequence: Synthetic peptide
  XENP019154 vhCDR1
NYWMN

SEQ ID NO: 15452 - protein, 19 aa, Artificial Sequence
  Description of Artificial Sequence: Synthetic peptide
  XENP019154 vhCDR2
EIRLYSNNYATHYAEPVKG

SEQ ID NO: 15453 - protein, 11 aa, Artificial Sequence
  Description of Artificial Sequence: Synthetic peptide
  XENP019154 vhCDR3
YYGNYGGYFDV

SEQ ID NO: 15454 - protein, 11 aa, Artificial Sequence
  Description of Artificial Sequence: Synthetic peptide
  XENP019154 vlCDR1
RASQSVSNDVA

SEQ ID NO: 15455 - protein, 7 aa, Artificial Sequence
  Description of Artificial Sequence: Synthetic peptide
  XENP019154 vlCDR2
YASHRYT

SEQ ID NO: 15456 - protein, 9 aa, Artificial Sequence
  Description of Artificial Sequence: Synthetic peptide
  XENP019154 vlCDR3
QQDWSSPRT

SEQ ID NO: 15457 - protein, 249 aa, Artificial Sequence
  Description of Artificial Sequence: Synthetic polypeptide
  XENP019155 1G6_H1.90_L1.23_scFv(GKPGS)4
EVQLVESGGGLVKPGGSLRLSCAASGFTFSNYWMNWVRQAPGKGLEWVGEIRLYSNNYATHYAEPVKGRFTISRDDSKSTVYLQMNSLKTEDTAVYYCTRYYGNYGGYFDVWGAGTLVTVSSGKPGSGKPGSGKPGSGKPGSSIVMTQSPATLSVSPGERATLSCRASQSVGNDVAWYQQKPGQSPRLLINYASHRYTGVPDRFTGSGYGTEFTLTISSLQSEDFAVYFCQQDYSSPRTFGGGTKVEIK

SEQ ID NO: 15458 - protein, 122 aa, Artificial Sequence; identical to SEQ ID NO: 11837
  Description of Artificial Sequence: Synthetic polypeptide
  VH of XENP019155

SEQ ID NO: 15459 - protein, 107 aa, Artificial Sequence; identical to SEQ ID NO: 13377
  Description of Artificial Sequence: Synthetic polypeptide
  VL of XENP019155

SEQ ID NO: 15460 - protein, 5 aa, Artificial Sequence
  Description of Artificial Sequence: Synthetic peptide
  XENP019155 vhCDR1
NYWMN

SEQ ID NO: 15461 - protein, 19 aa, Artificial Sequence
  Description of Artificial Sequence: Synthetic peptide
  XENP019155 vhCDR2
EIRLYSNNYATHYAEPVKG

SEQ ID NO: 15462 - protein, 11 aa, Artificial Sequence
  Description of Artificial Sequence: Synthetic peptide
  XENP019155 vhCDR3
YYGNYGGYFDV

SEQ ID NO: 15463 - protein, 11 aa, Artificial Sequence
  Description of Artificial Sequence: Synthetic peptide
  XENP019155 vlCDR1
RASQSVGNDVA

SEQ ID NO: 15464 - protein, 7 aa, Artificial Sequence
  Description of Artificial Sequence: Synthetic peptide
  XENP019155 vlCDR2
YASHRYT

SEQ ID NO: 15465 - protein, 9 aa, Artificial Sequence
  Description of Artificial Sequence: Synthetic peptide
  XENP019155 vlCDR3
QQDYSSPRT

SEQ ID NO: 15466 - protein, 249 aa, Artificial Sequence
  Description of Artificial Sequence: Synthetic polypeptide
  XENP019156 1G6_H1.90_L1.67_scFv(GKPGS)4
EVQLVESGGGLVKPGGSLRLSCAASGFTFSNYWMNWVRQAPGKGLEWVGEIRLYSNNYATHYAEPVKGRFTISRDDSKSTVYLQMNSLKTEDTAVYYCTRYYGNYGGYFDVWGAGTLVTVSSGKPGSGKPGSGKPGSGKPGSSIVMTQSPATLSVSPGERATLSCRASQSVSNDVAWYQQKPGQSPRLLINYASWRYTGVPDRFTGSGYGTEFTLTISSLQSEDFAVYFCQQDYSSPRTFGGGTKVEIK

SEQ ID NO: 15467 - protein, 122 aa, Artificial Sequence; identical to SEQ ID NO: 11837
  Description of Artificial Sequence: Synthetic polypeptide
  VH of XENP019156

SEQ ID NO: 15468 - protein, 107 aa, Artificial Sequence; identical to SEQ ID NO: 13773
  Description of Artificial Sequence: Synthetic polypeptide
  VL of XENP019156

SEQ ID NO: 15469 - protein, 5 aa, Artificial Sequence
  Description of Artificial Sequence: Synthetic peptide
  XENP019156 vhCDR1
NYWMN

SEQ ID NO: 15470 - protein, 19 aa, Artificial Sequence
  Description of Artificial Sequence: Synthetic peptide
  XENP019156 vhCDR2
EIRLYSNNYATHYAEPVKG

SEQ ID NO: 15471 - protein, 11 aa, Artificial Sequence
  Description of Artificial Sequence: Synthetic peptide
  XENP019156 vhCDR3
YYGNYGGYFDV

SEQ ID NO: 15472 - protein, 11 aa, Artificial Sequence
  Description of Artificial Sequence: Synthetic peptide
  XENP019156 vlCDR1
RASQSVSNDVA

SEQ ID NO: 15473 - protein, 7 aa, Artificial Sequence
  Description of Artificial Sequence: Synthetic peptide
  XENP019156 vlCDR2
YASWRYT

SEQ ID NO: 15474 - protein, 9 aa, Artificial Sequence
  Description of Artificial Sequence: Synthetic peptide
  XENP019156 vlCDR3
QQDYSSPRT

SEQ ID NO: 15475 - protein, 249 aa, Artificial Sequence
  Description of Artificial Sequence: Synthetic polypeptide
  XENP019157 1G6_H1.90_L1.94_scFv(GKPGS)4
EVQLVESGGGLVKPGGSLRLSCAASGFTFSNYWMNWVRQAPGKGLEWVGEIRLYSNNYATHYAEPVKGRFTISRDDSKSTVYLQMNSLKTEDTAVYYCTRYYGNYGGYFDVWGAGTLVTVSSGKPGSGKPGSGKPGSGKPGSSIVMTQSPATLSVSPGERATLSCRASQSVSNDVAWYQQKPGQSPRLLINYASHRYTSVPDRFTGSGYGTEFTLTISSLQSEDFAVYFCQQDYSSPRTFGGGTKVEIK

SEQ ID NO: 15476 - protein, 122 aa, Artificial Sequence; identical to SEQ ID NO: 11837
  Description of Artificial Sequence: Synthetic polypeptide
  VH of XENP019157

SEQ ID NO: 15477 - protein, 107 aa, Artificial Sequence; identical to SEQ ID NO: 14016
  Description of Artificial Sequence: Synthetic polypeptide
  VL of XENP019157

SEQ ID NO: 15478 - protein, 5 aa, Artificial Sequence
  Description of Artificial Sequence: Synthetic peptide
  XENP019157 vhCDR1
NYWMN

SEQ ID NO: 15479 - protein, 19 aa, Artificial Sequence
  Description of Artificial Sequence: Synthetic peptide
  XENP019157 vhCDR2
EIRLYSNNYATHYAEPVKG

SEQ ID NO: 15480 - protein, 11 aa, Artificial Sequence
  Description of Artificial Sequence: Synthetic peptide
  XENP019157 vhCDR3
YYGNYGGYFDV

SEQ ID NO: 15481 - protein, 11 aa, Artificial Sequence
  Description of Artificial Sequence: Synthetic peptide
  XENP019157 vlCDR1
RASQSVSNDVA

SEQ ID NO: 15482 - protein, 7 aa, Artificial Sequence
  Description of Artificial Sequence: Synthetic peptide
  XENP019157 vlCDR2
YASHRYT

SEQ ID NO: 15483 - protein, 9 aa, Artificial Sequence
  Description of Artificial Sequence: Synthetic peptide
  XENP019157 vlCDR3
QQDYSSPRT

SEQ ID NO: 15484 - protein, 249 aa, Artificial Sequence
  Description of Artificial Sequence: Synthetic polypeptide
  XENP019158 1G6_H1.90_L1.116_scFv(GKPGS)4
EVQLVESGGGLVKPGGSLRLSCAASGFTFSNYWMNWVRQAPGKGLEWVGEIRLYSNNYATHYAEPVKGRFTISRDDSKSTVYLQMNSLKTEDTAVYYCTRYYGNYGGYFDVWGAGTLVTVSSGKPGSGKPGSGKPGSGKPGSSIVMTQSPATLSVSPGERATLSCRASQSVSNDVAWYQQKPGQSPRLLINYASHRYTGVPDRFTGSGYGTEFTLTISSLQSEDFAVYFCQQDFSSPRTFGGGTKVEIK

SEQ ID NO: 15485 - protein, 122 aa, Artificial Sequence; identical to SEQ ID NO: 11837
  Description of Artificial Sequence: Synthetic polypeptide
  VH of XENP019158

SEQ ID NO: 15486 - protein, 107 aa, Artificial Sequence; identical to SEQ ID NO: 14214
  Description of Artificial Sequence: Synthetic polypeptide
  VL of XENP019158

SEQ ID NO: 15487 - protein, 5 aa, Artificial Sequence
  Description of Artificial Sequence: Synthetic peptide
  XENP019158 vhCDR1
NYWMN

SEQ ID NO: 15488 - protein, 19 aa, Artificial Sequence
  Description of Artificial Sequence: Synthetic peptide
  XENP019158 vhCDR2
EIRLYSNNYATHYAEPVKG

SEQ ID NO: 15489 - protein, 11 aa, Artificial Sequence
  Description of Artificial Sequence: Synthetic peptide
  XENP019158 vhCDR3
YYGNYGGYFDV

SEQ ID NO: 15490 - protein, 11 aa, Artificial Sequence
  Description of Artificial Sequence: Synthetic peptide
  XENP019158 vlCDR1
RASQSVSNDVA

SEQ ID NO: 15491 - protein, 7 aa, Artificial Sequence
  Description of Artificial Sequence: Synthetic peptide
  XENP019158 vlCDR2
YASHRYT

SEQ ID NO: 15492 - protein, 9 aa, Artificial Sequence
  Description of Artificial Sequence: Synthetic peptide
  XENP019158 vlCDR3
QQDFSSPRT

SEQ ID NO: 15493 - protein, 249 aa, Artificial Sequence; identical to SEQ ID NO: 15448
  Description of Artificial Sequence: Synthetic polypeptide
  XENP019159 1G6_H1.155_L1.119_scFv(GKPGS)4

SEQ ID NO: 15494 - protein, 122 aa, Artificial Sequence; identical to SEQ ID NO: 11837
  Description of Artificial Sequence: Synthetic polypeptide
  VH of XENP019159

SEQ ID NO: 15495 - protein, 107 aa, Artificial Sequence; identical to SEQ ID NO: 14241
  Description of Artificial Sequence: Synthetic polypeptide
  VL of XENP019159

SEQ ID NO: 15496 - protein, 5 aa, Artificial Sequence
  Description of Artificial Sequence: Synthetic peptide
  XENP019159 vhCDR1
NYWMN

SEQ ID NO: 15497 - protein, 19 aa, Artificial Sequence
  Description of Artificial Sequence: Synthetic peptide
  XENP019159 vhCDR2
EIRLYSNNYATHYAEPVKG

SEQ ID NO: 15498 - protein, 11 aa, Artificial Sequence
  Description of Artificial Sequence: Synthetic peptide
  XENP019159 vhCDR3
YYGNYGGYFDV

SEQ ID NO: 15499 - protein, 11 aa, Artificial Sequence
  Description of Artificial Sequence: Synthetic peptide
  XENP019159 vlCDR1
RASQSVSNDVA

SEQ ID NO: 15500 - protein, 7 aa, Artificial Sequence
  Description of Artificial Sequence: Synthetic peptide
  XENP019159 vlCDR2
YASHRYT

SEQ ID NO: 15501 - protein, 9 aa, Artificial Sequence
  Description of Artificial Sequence: Synthetic peptide
  XENP019159 vlCDR3
QQDWSSPRT

SEQ ID NO: 15502 - protein, 249 aa, Artificial Sequence
  Description of Artificial Sequence: Synthetic polypeptide
  XENP019182 1G6_H1_L1.190_scFv(GKPGS)4
EVQLVESGGGLVKPGGSLRLSCAASGFTFSNYWMNWVRQAPGKGLEWVGEIRLKSNNYATHYAEPVKGRFTISRDDSKSTVYLQMNSLKTEDTAVYYCTRYYGNYGGYFDVWGAGTLVTVSSGKPGSGKPGSGKPGSGKPGSSIVMTQSPATLSVSPGERATLSCRASQSVGNDVAWYQQKPGQSPRLLINYASHRYTGVPDRFTGSGYGTEFTLTISSLQSEDFAVYFCQQDFSSPRTFGGGTKVEIK

SEQ ID NO: 15503 - protein, 122 aa, Artificial Sequence; identical to SEQ ID NO: 10922
  Description of Artificial Sequence: Synthetic polypeptide
  VH of XENP019182

SEQ ID NO: 15504 - protein, 107 aa, Artificial Sequence
  Description of Artificial Sequence: Synthetic polypeptide
  VL of XENP019182
SIVMTQSPATLSVSPGERATLSCRASQSVGNDVAWYQQKPGQSPRLLINYASHRYTGVPDRFTGSGYGTEFTLTISSLQSEDFAVYFCQQDFSSPRTFGGGTKVEIK

SEQ ID NO: 15505 - protein, 5 aa, Artificial Sequence
  Description of Artificial Sequence: Synthetic peptide
  XENP019182 vhCDR1
NYWMN

SEQ ID NO: 15506 - protein, 19 aa, Artificial Sequence
  Description of Artificial Sequence: Synthetic peptide
  XENP019182 vhCDR2
EIRLKSNNYATHYAEPVKG

SEQ ID NO: 15507 - protein, 11 aa, Artificial Sequence
  Description of Artificial Sequence: Synthetic peptide
  XENP019182 vhCDR3
YYGNYGGYFDV

SEQ ID NO: 15508 - protein, 11 aa, Artificial Sequence
  Description of Artificial Sequence: Synthetic peptide
  XENP019182 vlCDR1
RASQSVGNDVA

SEQ ID NO: 15509 - protein, 7 aa, Artificial Sequence
  Description of Artificial Sequence: Synthetic peptide
  XENP019182 vlCDR2
YASHRYT

SEQ ID NO: 15510 - protein, 9 aa, Artificial Sequence
  Description of Artificial Sequence: Synthetic peptide
  XENP019182 vlCDR3
QQDFSSPRT

SEQ ID NO: 15511 - protein, 249 aa, Artificial Sequence
  Description of Artificial Sequence: Synthetic polypeptide
  XENP019183 1G6_H1_L1.191_scFv(GKPGS)4
EVQLVESGGGLVKPGGSLRLSCAASGFTFSNYWMNWVRQAPGKGLEWVGEIRLKSNNYATHYAEPVKGRFTISRDDSKSTVYLQMNSLKTEDTAVYYCTRYYGNYGGYFDVWGAGTLVTVSSGKPGSGKPGSGKPGSGKPGSSIVMTQSPATLSVSPGERATLSCRASQSVGNDVAWYQQKPGQSPRLLINYASHRYTGVPDRFTGSGYGTEFTLTISSLQSEDFAVYFCQQDWSSPRTFGGGTKVEIK

SEQ ID NO: 15512 - protein, 122 aa, Artificial Sequence; identical to SEQ ID NO: 10922
  Description of Artificial Sequence: Synthetic polypeptide
  VH of XENP019183

SEQ ID NO: 15513 - protein, 107 aa, Artificial Sequence
  Description of Artificial Sequence: Synthetic polypeptide
  VL of XENP019183
SIVMTQSPATLSVSPGERATLSCRASQSVGNDVAWYQQKPGQSPRLLINYASHRYTGVPDRFTGSGYGTEFTLTISSLQSEDFAVYFCQQDWSSPRTFGGGTKVEIK

SEQ ID NO: 15514 - protein, 5 aa, Artificial Sequence
  Description of Artificial Sequence: Synthetic peptide
  XENP019183 vhCDR1
NYWMN

SEQ ID NO: 15515 - protein, 19 aa, Artificial Sequence
  Description of Artificial Sequence: Synthetic peptide
  XENP019183 vhCDR2
EIRLKSNNYATHYAEPVKG

SEQ ID NO: 15516 - protein, 11 aa, Artificial Sequence
  Description of Artificial Sequence: Synthetic peptide
  XENP019183 vhCDR3
YYGNYGGYFDV

SEQ ID NO: 15517 - protein, 11 aa, Artificial Sequence
  Description of Artificial Sequence: Synthetic peptide
  XENP019183 vlCDR1
RASQSVGNDVA

SEQ ID NO: 15518 - protein, 7 aa, Artificial Sequence
  Description of Artificial Sequence: Synthetic peptide
  XENP019183 vlCDR2
YASHRYT

SEQ ID NO: 15519 - protein, 9 aa, Artificial Sequence
  Description of Artificial Sequence: Synthetic peptide
  XENP019183 vlCDR3
QQDWSSPRT

SEQ ID NO: 15520 - protein, 480 aa, Artificial Sequence
  Description of Artificial Sequence: Synthetic polypeptide
  XENP019202 1G6_H1.278_L1_scFv(GKPGS)4
EVQLVESGGGLVKPGGSLRLSCVASGFTFSNYWMNWVRQAPGKGLEWVAEIRLYSNNYATHYAESVKGRFTISRDDSKSTLYLQMNNLKTEDTGVYYCTRYYGNYGGYFDVWGQGTLVTVSSGKPGSGKPGSGKPGSGKPGSSIVMTQSPATLSVSPGERATLSCRASQSVSNDVAWYQQKPGQSPRLLINYASHRYTGVPDRFTGSGYGTEFTLTISSLQSEDFAVYFCQQDYSSPRTFGGGTKVEIKEPKSSDKTHTCPPCPAPPVAGPSVFLFPPKPKDTLMISRTPEVTCVVVDVKHEDPEVKFNWYVDGVEVHNAKTKPREEQYNSTYRVVSVLTVLHQDWLNGKEYKCKVSNKALPAPIEKTISKAKGQPREPQVYTLPPSREQMTKNQVKLTCLVKGFYPSDIAVEWESNGQPENNYKTTPPVLDSDGSFFLYSKLTVDKSRWQQGNVFSCSVMHEALHNHYTQKSLSLSPGK

SEQ ID NO: 15521 - protein, 122 aa, Artificial Sequence
  Description of Artificial Sequence: Synthetic polypeptide
  VH of XENP019202
EVQLVESGGGLVKPGGSLRLSCVASGFTFSNYWMNWVRQAPGKGLEWVAEIRLYSNNYATHYAESVKGRFTISRDDSKSTLYLQMNNLKTEDTGVYYCTRYYGNYGGYFDVWGQGTLVTVSS

SEQ ID NO: 15522 - protein, 338 aa, Artificial Sequence
  Description of Artificial Sequence: Synthetic polypeptide
  VL of XENP019202
SIVMTQSPATLSVSPGERATLSCRASQSVSNDVAWYQQKPGQSPRLLINYASHRYTGVPDRFTGSGYGTEFTLTISSLQSEDFAVYFCQQDYSSPRTFGGGTKVEIKEPKSSDKTHTCPPCPAPPVAGPSVFLFPPKPKDTLMISRTPEVTCVVVDVKHEDPEVKFNWYVDGVEVHNAKTKPREEQYNSTYRVVSVLTVLHQDWLNGKEYKCKVSNKALPAPIEKTISKAKGQPREPQVYTLPPSREQMTKNQVKLTCLVKGFYPSDIAVEWESNGQPENNYKTTPPVLDSDGSFFLYSKLTVDKSRWQQGNVFSCSVMHEALHNHYTQKSLSLSPGK

SEQ ID NO: 15523 - protein, 5 aa, Artificial Sequence
  Description of Artificial Sequence: Synthetic peptide
  XENP019202 vhCDR1
NYWMN

SEQ ID NO: 15524 - protein, 19 aa, Artificial Sequence
  Description of Artificial Sequence: Synthetic peptide
  XENP019202 vhCDR2
EIRLYSNNYATHYAESVKG

SEQ ID NO: 15525 - protein, 11 aa, Artificial Sequence
  Description of Artificial Sequence: Synthetic peptide
  XENP019202 vhCDR3
YYGNYGGYFDV

SEQ ID NO: 15526 - protein, 11 aa, Artificial Sequence
  Description of Artificial Sequence: Synthetic peptide
  XENP019202 vlCDR1
RASQSVSNDVA

SEQ ID NO: 15527 - protein, 7 aa, Artificial Sequence
  Description of Artificial Sequence: Synthetic peptide
  XENP019202 vlCDR2
YASHRYT

SEQ ID NO: 15528 - protein, 9 aa, Artificial Sequence
  Description of Artificial Sequence: Synthetic peptide
  XENP019202 vlCDR3
QQDYSSPRT

SEQ ID NO: 15529 - protein, 249 aa, Artificial Sequence
  Description of Artificial Sequence: Synthetic polypeptide
  XENP019203 1G6_H1_L1.188_scFv(GKPGS)4
EVQLVESGGGLVKPGGSLRLSCAASGFTFSNYWMNWVRQAPGKGLEWVGEIRLKSNNYATHYAEPVKGRFTISRDDSKSTVYLQMNSLKTEDTAVYYCTRYYGNYGGYFDVWGAGTLVTVSSGKPGSGKPGSGKPGSGKPGSEIVMTQSPATLSVSPGERVTLTCRASQSVGNDVAWYQQKPGQSPRLLINYASHRYTGVPDRFTGSGYGTEFTLTISSVQSEDFAVYFCQQDFSSPRTFGGGTKVEIK

SEQ ID NO: 15530 - protein, 122 aa, Artificial Sequence; identical to SEQ ID NO: 10922
  Description of Artificial Sequence: Synthetic polypeptide
  VH of XENP019203

SEQ ID NO: 15531 - protein, 107 aa, Artificial Sequence
  Description of Artificial Sequence: Synthetic polypeptide
  VL of XENP019203
EIVMTQSPATLSVSPGERVTLTCRASQSVGNDVAWYQQKPGQSPRLLINYASHRYTGVPDRFTGSGYGTEFTLTISSVQSEDFAVYFCQQDFSSPRTFGGGTKVEIK

SEQ ID NO: 15532 - protein, 5 aa, Artificial Sequence
  Description of Artificial Sequence: Synthetic peptide
  XENP019203 vhCDR1
NYWMN

SEQ ID NO: 15533 - protein, 19 aa, Artificial Sequence
  Description of Artificial Sequence: Synthetic peptide
  XENP019203 vhCDR2
EIRLKSNNYATHYAEPVKG

SEQ ID NO: 15534 - protein, 11 aa, Artificial Sequence
  Description of Artificial Sequence: Synthetic peptide
  XENP019203 vhCDR3
YYGNYGGYFDV

SEQ ID NO: 15535 - protein, 11 aa, Artificial Sequence
  Description of Artificial Sequence: Synthetic peptide
  XENP019203 vlCDR1
RASQSVGNDVA

SEQ ID NO: 15536 - protein, 7 aa, Artificial Sequence
  Description of Artificial Sequence: Synthetic peptide
  XENP019203 vlCDR2
YASHRYT

SEQ ID NO: 15537 - protein, 9 aa, Artificial Sequence
  Description of Artificial Sequence: Synthetic peptide
  XENP019203 vlCDR3
QQDFSSPRT

SEQ ID NO: 15538 - protein, 249 aa, Artificial Sequence
  Description of Artificial Sequence: Synthetic polypeptide
  XENP019204 1G6_H1_L1.189_scFv(GKPGS)4
EVQLVESGGGLVKPGGSLRLSCAASGFTFSNYWMNWVRQAPGKGLEWVGEIRLKSNNYATHYAEPVKGRFTISRDDSKSTVYLQMNSLKTEDTAVYYCTRYYGNYGGYFDVWGAGTLVTVSSGKPGSGKPGSGKPGSGKPGSEIVLTQSPATLSVSPGERVTLTCRASQSVGNDVAWYQQKPGQAPRLLINYASHRYTGVPDRFTGSGYGTEFTLTISSVQSEDFAVYYCQQDFSSPRTFGGGTKVEIK

SEQ ID NO: 15539 - protein, 122 aa, Artificial Sequence; identical to SEQ ID NO: 10922
  Description of Artificial Sequence: Synthetic polypeptide
  VH of XENP019204

SEQ ID NO: 15540 - protein, 107 aa, Artificial Sequence
  Description of Artificial Sequence: Synthetic polypeptide
  VL of XENP019204
EIVLTQSPATLSVSPGERVTLTCRASQSVGNDVAWYQQKPGQAPRLLINYASHRYTGVPDRFTGSGYGTEFTLTISSVQSEDFAVYYCQQDFSSPRTFGGGTKVEIK

SEQ ID NO: 15541 - protein, 5 aa, Artificial Sequence
  Description of Artificial Sequence: Synthetic peptide
  XENP019204 vhCDR1
NYWMN

SEQ ID NO: 15542 - protein, 19 aa, Artificial Sequence
  Description of Artificial Sequence: Synthetic peptide
  XENP019204 vhCDR2
EIRLKSNNYATHYAEPVKG

SEQ ID NO: 15543 - protein, 11 aa, Artificial Sequence
  Description of Artificial Sequence: Synthetic peptide
  XENP019204 vhCDR3
YYGNYGGYFDV

SEQ ID NO: 15544 - protein, 11 aa, Artificial Sequence
  Description of Artificial Sequence: Synthetic peptide
  XENP019204 vlCDR1
RASQSVGNDVA

SEQ ID NO: 15545 - protein, 7 aa, Artificial Sequence
  Description of Artificial Sequence: Synthetic peptide
  XENP019204 vlCDR2
YASHRYT

SEQ ID NO: 15546 - protein, 9 aa, Artificial Sequence
  Description of Artificial Sequence: Synthetic peptide
  XENP019204 vlCDR3
QQDFSSPRT

SEQ ID NO: 15547 - protein, 249 aa, Artificial Sequence
  Description of Artificial Sequence: Synthetic polypeptide
  XENP019205 1G6_H1.278_L1.188_scFv(GKPGS)4
EVQLVESGGGLVKPGGSLRLSCVASGFTFSNYWMNWVRQAPGKGLEWVAEIRLYSNNYATHYAESVKGRFTISRDDSKSTLYLQMNNLKTEDTGVYYCTRYYGNYGGYFDVWGQGTLVTVSSGKPGSGKPGSGKPGSGKPGSEIVMTQSPATLSVSPGERVTLTCRASQSVGNDVAWYQQKPGQSPRLLINYASHRYTGVPDRFTGSGYGTEFTLTISSVQSEDFAVYFCQQDFSSPRTFGGGTKVEIK

SEQ ID NO: 15548 - protein, 122 aa, Artificial Sequence; identical to SEQ ID NO: 15521
  Description of Artificial Sequence: Synthetic polypeptide
  VH of XENP019205

SEQ ID NO: 15549 - protein, 107 aa, Artificial Sequence; identical to SEQ ID NO: 15531
  Description of Artificial Sequence: Synthetic polypeptide
  VL of XENP019205

SEQ ID NO: 15550 - protein, 5 aa, Artificial Sequence
  Description of Artificial Sequence: Synthetic peptide
  XENP019205 vhCDR1
NYWMN

SEQ ID NO: 15551 - protein, 19 aa, Artificial Sequence
  Description of Artificial Sequence: Synthetic peptide
  XENP019205 vhCDR2
EIRLYSNNYATHYAESVKG

SEQ ID NO: 15552 - protein, 11 aa, Artificial Sequence
  Description of Artificial Sequence: Synthetic peptide
  XENP019205 vhCDR3
YYGNYGGYFDV

SEQ ID NO: 15553 - protein, 11 aa, Artificial Sequence
  Description of Artificial Sequence: Synthetic peptide
  XENP019205 vlCDR1
RASQSVGNDVA

SEQ ID NO: 15554 - protein, 7 aa, Artificial Sequence
  Description of Artificial Sequence: Synthetic peptide
  XENP019205 vlCDR2
YASHRYT

SEQ ID NO: 15555 - protein, 9 aa, Artificial Sequence
  Description of Artificial Sequence: Synthetic peptide
  XENP019205 vlCDR3
QQDFSSPRT

SEQ ID NO: 15556 - protein, 249 aa, Artificial Sequence
  Description of Artificial Sequence: Synthetic polypeptide
  XENP019206 1G6_H1.278_L1.189_scFv(GKPGS)4
EVQLVESGGGLVKPGGSLRLSCVASGFTFSNYWMNWVRQAPGKGLEWVAEIRLYSNNYATHYAESVKGRFTISRDDSKSTLYLQMNNLKTEDTGVYYCTRYYGNYGGYFDVWGQGTLVTVSSGKPGSGKPGSGKPGSGKPGSEIVLTQSPATLSVSPGERVTLTCRASQSVGNDVAWYQQKPGQAPRLLINYASHRYTGVPDRFTGSGYGTEFTLTISSVQSEDFAVYYCQQDFSSPRTFGGGTKVEIK

SEQ ID NO: 15557 - protein, 122 aa, Artificial Sequence; identical to SEQ ID NO: 15521
  Description of Artificial Sequence: Synthetic polypeptide
  VH of XENP019206

SEQ ID NO: 15558 - protein, 107 aa, Artificial Sequence; identical to SEQ ID NO: 15540
  Description of Artificial Sequence: Synthetic polypeptide
  VL of XENP019206

SEQ ID NO: 15559 - protein, 5 aa, Artificial Sequence
  Description of Artificial Sequence: Synthetic peptide
  XENP019206 vhCDR1
NYWMN

SEQ ID NO: 15560 - protein, 19 aa, Artificial Sequence
  Description of Artificial Sequence: Synthetic peptide
  XENP019206 vhCDR2
EIRLYSNNYATHYAESVKG

SEQ ID NO: 15561 - protein, 11 aa, Artificial Sequence
  Description of Artificial Sequence: Synthetic peptide
  XENP019206 vhCDR3
YYGNYGGYFDV

SEQ ID NO: 15562 - protein, 11 aa, Artificial Sequence
  Description of Artificial Sequence: Synthetic peptide
  XENP019206 vlCDR1
RASQSVGNDVA

SEQ ID NO: 15563 - protein, 7 aa, Artificial Sequence
  Description of Artificial Sequence: Synthetic peptide
  XENP019206 vlCDR2
YASHRYT

SEQ ID NO: 15564 - protein, 9 aa, Artificial Sequence
  Description of Artificial Sequence: Synthetic peptide
  XENP019206 vlCDR3
QQDFSSPRT

SEQ ID NO: 15565 - protein, 249 aa, Artificial Sequence
  Description of Artificial Sequence: Synthetic polypeptide
  XENP019207 1G6_L1.188_H1.278_scFv(GKPGS)4
EIVMTQSPATLSVSPGERVTLTCRASQSVGNDVAWYQQKPGQSPRLLINYASHRYTGVPDRFTGSGYGTEFTLTISSVQSEDFAVYFCQQDFSSPRTFGGGTKVEIKGKPGSGKPGSGKPGSGKPGSEVQLVESGGGLVKPGGSLRLSCVASGFTFSNYWMNWVRQAPGKGLEWVAEIRLYSNNYATHYAESVKGRFTISRDDSKSTLYLQMNNLKTEDTGVYYCTRYYGNYGGYFDVWGQGTLVTVSS

SEQ ID NO: 15566 - protein, 107 aa, Artificial Sequence; identical to SEQ ID NO: 15531
  Description of Artificial Sequence: Synthetic polypeptide
  VH of XENP019207

SEQ ID NO: 15567 - protein, 122 aa, Artificial Sequence; identical to SEQ ID NO: 15521
  Description of Artificial Sequence: Synthetic polypeptide
  VL of XENP019207

SEQ ID NO: 15568 - protein, 11 aa, Artificial Sequence
  Description of Artificial Sequence: Synthetic peptide
  XENP019207 vhCDR1
RASQSVGNDVA

SEQ ID NO: 15569 - protein, 7 aa, Artificial Sequence
  Description of Artificial Sequence: Synthetic peptide
  XENP019207 vhCDR2
YASHRYT

SEQ ID NO: 15570 - protein, 9 aa, Artificial Sequence
  Description of Artificial Sequence: Synthetic peptide
  XENP019207 vhCDR3
QQDFSSPRT

SEQ ID NO: 15571 - protein, 5 aa, Artificial Sequence
  Description of Artificial Sequence: Synthetic peptide
  XENP019207 vlCDR1
NYWMN

SEQ ID NO: 15572 - protein, 19 aa, Artificial Sequence
  Description of Artificial Sequence: Synthetic peptide
  XENP019207 vlCDR2
EIRLYSNNYATHYAESVKG

SEQ ID NO: 15573 - protein, 11 aa, Artificial Sequence
  Description of Artificial Sequence: Synthetic peptide
  XENP019207 vlCDR3
YYGNYGGYFDV

SEQ ID NO: 15574 - protein, 249 aa, Artificial Sequence
  Description of Artificial Sequence: Synthetic polypeptide
  XENP019208 1G6_L1.189_H1.278_scFv(GKPGS)4
EIVLTQSPATLSVSPGERVTLTCRASQSVGNDVAWYQQKPGQAPRLLINYASHRYTGVPDRFTGSGYGTEFTLTISSVQSEDFAVYYCQQDFSSPRTFGGGTKVEIKGKPGSGKPGSGKPGSGKPGSEVQLVESGGGLVKPGGSLRLSCVASGFTFSNYWMNWVRQAPGKGLEWVAEIRLYSNNYATHYAESVKGRFTISRDDSKSTLYLQMNNLKTEDTGVYYCTRYYGNYGGYFDVWGQGTLVTVSS

SEQ ID NO: 15575 - protein, 107 aa, Artificial Sequence; identical to SEQ ID NO: 15540
  Description of Artificial Sequence: Synthetic polypeptide
  VH of XENP019208

SEQ ID NO: 15576 - protein, 122 aa, Artificial Sequence; identical to SEQ ID NO: 15521
  Description of Artificial Sequence: Synthetic polypeptide
  VL of XENP019208

SEQ ID NO: 15577 - protein, 11 aa, Artificial Sequence
  Description of Artificial Sequence: Synthetic peptide
  XENP019208 vhCDR1
RASQSVGNDVA

SEQ ID NO: 15578 - protein, 7 aa, Artificial Sequence
  Description of Artificial Sequence: Synthetic peptide
  XENP019208 vhCDR2
YASHRYT

SEQ ID NO: 15579 - protein, 9 aa, Artificial Sequence
  Description of Artificial Sequence: Synthetic peptide
  XENP019208 vhCDR3
QQDFSSPRT

SEQ ID NO: 15580 - protein, 5 aa, Artificial Sequence
  Description of Artificial Sequence: Synthetic peptide
  XENP019208 vlCDR1
NYWMN

SEQ ID NO: 15581 - protein, 19 aa, Artificial Sequence
  Description of Artificial Sequence: Synthetic peptide
  XENP019208 vlCDR2
EIRLYSNNYATHYAESVKG

SEQ ID NO: 15582 - protein, 11 aa, Artificial Sequence
  Description of Artificial Sequence: Synthetic peptide
  XENP019208 vlCDR3
YYGNYGGYFDV

SEQ ID NO: 15583 - protein, 249 aa, Artificial Sequence
  Description of Artificial Sequence: Synthetic polypeptide
  XENP019618 1G6_H1.279_L1.189_scFv(GKPGS)4
EVQLVESGGGLVKPGGSLRLSCVASGFTFSNYWMNWVRQAPGKGLEWVAEIRLYSNNYATHYAESVKGRFTISRDDSKSTLYLQMNNLKTEDTGVYYCTRYYGNYGGYFDVWGRGTLVTVSSGKPGSGKPGSGKPGSGKPGSEIVLTQSPATLSVSPGERVTLTCRASQSVGNDVAWYQQKPGQAPRLLINYASHRYTGVPDRFTGSGYGTEFTLTISSVQSEDFAVYYCQQDFSSPRTFGGGTKVEIK

SEQ ID NO: 15584 - protein, 122 aa, Artificial Sequence; identical to SEQ ID NO: 2872
  Description of Artificial Sequence: Synthetic polypeptide
  VH of XENP019618

SEQ ID NO: 15585 - protein, 107 aa, Artificial Sequence; identical to SEQ ID NO: 15540
  Description of Artificial Sequence: Synthetic polypeptide
  VL of XENP019618

SEQ ID NO: 15586 - protein, 5 aa, Artificial Sequence
  Description of Artificial Sequence: Synthetic peptide
  XENP019618 vhCDR1
NYWMN

SEQ ID NO: 15587 - protein, 19 aa, Artificial Sequence
  Description of Artificial Sequence: Synthetic peptide
  XENP019618 vhCDR2
EIRLYSNNYATHYAESVKG

SEQ ID NO: 15588 - protein, 11 aa, Artificial Sequence
  Description of Artificial Sequence: Synthetic peptide
  XENP019618 vhCDR3
YYGNYGGYFDV

SEQ ID NO: 15589 - protein, 11 aa, Artificial Sequence
  Description of Artificial Sequence: Synthetic peptide
  XENP019618 vlCDR1
RASQSVGNDVA

SEQ ID NO: 15590 - protein, 7 aa, Artificial Sequence
  Description of Artificial Sequence: Synthetic peptide
  XENP019618 vlCDR2
YASHRYT

SEQ ID NO: 15591 - protein, 9 aa, Artificial Sequence
  Description of Artificial Sequence: Synthetic peptide
  XENP019618 vlCDR3
QQDFSSPRT

SEQ ID NO: 15592 - protein, 249 aa, Artificial Sequence
  Description of Artificial Sequence: Synthetic polypeptide
  XENP019619 1G6_H1.280_L1.189_scFv(GKPGS)4
EVQLVESGGGLVKPGGSLRLTCVASGFTFSNYWMNWVRQAPGKGLEWVAEIRLYSNNYATHYAESVKGRFTISRDDSKSTLYLQMNNLKTEDTGVYYCTRYYGNYGGYFDVWGRGTLVTVSSGKPGSGKPGSGKPGSGKPGSEIVLTQSPATLSVSPGERVTLTCRASQSVGNDVAWYQQKPGQAPRLLINYASHRYTGVPDRFTGSGYGTEFTLTISSVQSEDFAVYYCQQDFSSPRTFGGGTKVEIK

SEQ ID NO: 15593 - protein, 122 aa, Artificial Sequence
  Description of Artificial Sequence: Synthetic polypeptide
  VH of XENP019619
EVQLVESGGGLVKPGGSLRLTCVASGFTFSNYWMNWVRQAPGKGLEWVAEIRLYSNNYATHYAESVKGRFTISRDDSKSTLYLQMNNLKTEDTGVYYCTRYYGNYGGYFDVWGRGTLVTVSS

SEQ ID NO: 15594 - protein, 107 aa, Artificial Sequence; identical to SEQ ID NO: 15540
  Description of Artificial Sequence: Synthetic polypeptide
  VL of XENP019619

SEQ ID NO: 15595 - protein, 5 aa, Artificial Sequence
  Description of Artificial Sequence: Synthetic peptide
  XENP019619 vhCDR1
NYWMN

SEQ ID NO: 15596 - protein, 19 aa, Artificial Sequence
  Description of Artificial Sequence: Synthetic peptide
  XENP019619 vhCDR2
EIRLYSNNYATHYAESVKG

SEQ ID NO: 15597 - protein, 11 aa, Artificial Sequence
  Description of Artificial Sequence: Synthetic peptide
  XENP019619 vhCDR3
YYGNYGGYFDV

SEQ ID NO: 15598 - protein, 11 aa, Artificial Sequence
  Description of Artificial Sequence: Synthetic peptide
  XENP019619 vlCDR1
RASQSVGNDVA

SEQ ID NO: 15599 - protein, 7 aa, Artificial Sequence
  Description of Artificial Sequence: Synthetic peptide
  XENP019619 vlCDR2
YASHRYT

SEQ ID NO: 15600 - protein, 9 aa, Artificial Sequence
  Description of Artificial Sequence: Synthetic peptide
  XENP019619 vlCDR3
QQDFSSPRT

SEQ ID NO: 15601 - protein, 249 aa, Artificial Sequence
  Description of Artificial Sequence: Synthetic polypeptide
  XENP019620 1G6_H1.281_L1.189_scFv(GKPGS)4
EVQLVESGGGLVKPGGSLRLSCVASGFTFSNYWMNWVRQAPGKGLEWVAEIRLYSNNYATHYAESVKGRFTISRDDSKSMLYLQMNNLKTEDTGVYYCTRYYGNYGGYFDVWGRGTLVTVSSGKPGSGKPGSGKPGSGKPGSEIVLTQSPATLSVSPGERVTLTCRASQSVGNDVAWYQQKPGQAPRLLINYASHRYTGVPDRFTGSGYGTEFTLTISSVQSEDFAVYYCQQDFSSPRTFGGGTKVEIK

SEQ ID NO: 15602 - protein, 122 aa, Artificial Sequence
  Description of Artificial Sequence: Synthetic polypeptide
  VH of XENP019620
EVQLVESGGGLVKPGGSLRLSCVASGFTFSNYWMNWVRQAPGKGLEWVAEIRLYSNNYATHYAESVKGRFTISRDDSKSMLYLQMNNLKTEDTGVYYCTRYYGNYGGYFDVWGRGTLVTVSS

SEQ ID NO: 15603 - protein, 107 aa, Artificial Sequence; identical to SEQ ID NO: 15540
  Description of Artificial Sequence: Synthetic polypeptide
  VL of XENP019620

SEQ ID NO: 15604 - protein, 5 aa, Artificial Sequence
  Description of Artificial Sequence: Synthetic peptide
  XENP019620 vhCDR1
NYWMN

SEQ ID NO: 15605 - protein, 19 aa, Artificial Sequence
  Description of Artificial Sequence: Synthetic peptide
  XENP019620 vhCDR2
EIRLYSNNYATHYAESVKG

SEQ ID NO: 15606 - protein, 11 aa, Artificial Sequence
  Description of Artificial Sequence: Synthetic peptide
  XENP019620 vhCDR3
YYGNYGGYFDV

SEQ ID NO: 15607 - protein, 11 aa, Artificial Sequence
  Description of Artificial Sequence: Synthetic peptide
  XENP019620 vlCDR1
RASQSVGNDVA

SEQ ID NO: 15608 - protein, 7 aa, Artificial Sequence
  Description of Artificial Sequence: Synthetic peptide
  XENP019620 vlCDR2
YASHRYT

SEQ ID NO: 15609 - protein, 9 aa, Artificial Sequence
  Description of Artificial Sequence: Synthetic peptide
  XENP019620 vlCDR3
QQDFSSPRT

SEQ ID NO: 15610 - protein, 249 aa, Artificial Sequence
  Description of Artificial Sequence: Synthetic polypeptide
  XENP019621 1G6_H1.282_L1.189_scFv(GKPGS)4
EVQLVESGGGLVKPGGSLRLTCVASGFTFSNYWMNWVRQAPGKGLEWVAEIRLYSNNYATHYAESVKGRFTISRDDSKSMLYLQMNNLKTEDTGVYYCTRYYGNYGGYFDVWGRGTLVTVSSGKPGSGKPGSGKPGSGKPGSEIVLTQSPATLSVSPGERVTLTCRASQSVGNDVAWYQQKPGQAPRLLINYASHRYTGVPDRFTGSGYGTEFTLTISSVQSEDFAVYYCQQDFSSPRTFGGGTKVEIK

SEQ ID NO: 15611 - protein, 122 aa, Artificial Sequence
  Description of Artificial Sequence: Synthetic polypeptide
  VH of XENP019621
EVQLVESGGGLVKPGGSLRLTCVASGFTFSNYWMNWVRQAPGKGLEWVAEIRLYSNNYATHYAESVKGRFTISRDDSKSMLYLQMNNLKTEDTGVYYCTRYYGNYGGYFDVWGRGTLVTVSS

SEQ ID NO: 15612 - protein, 107 aa, Artificial Sequence; identical to SEQ ID NO: 15540
  Description of Artificial Sequence: Synthetic polypeptide
  VL of XENP019621

SEQ ID NO: 15613 - protein, 5 aa, Artificial Sequence
  Description of Artificial Sequence: Synthetic peptide
  XENP019621 vhCDR1
NYWMN

SEQ ID NO: 15614 - protein, 19 aa, Artificial Sequence
  Description of Artificial Sequence: Synthetic peptide
  XENP019621 vhCDR2
EIRLYSNNYATHYAESVKG

SEQ ID NO: 15615 - protein, 11 aa, Artificial Sequence
  Description of Artificial Sequence: Synthetic peptide
  XENP019621 vhCDR3
YYGNYGGYFDV

SEQ ID NO: 15616 - protein, 11 aa, Artificial Sequence
  Description of Artificial Sequence: Synthetic peptide
  XENP019621 vlCDR1
RASQSVGNDVA

SEQ ID NO: 15617 - protein, 7 aa, Artificial Sequence
  Description of Artificial Sequence: Synthetic peptide
  XENP019621 vlCDR2
YASHRYT

SEQ ID NO: 15618 - protein, 9 aa, Artificial Sequence
  Description of Artificial Sequence: Synthetic peptide
  XENP019621 vlCDR3
QQDFSSPRT

SEQ ID NO: 15619 - protein, 249 aa, Artificial Sequence
  Description of Artificial Sequence: Synthetic polypeptide
  XENP019622 1G6_H1.283_L1.189_scFv(GKPGS)4
EVQLVESGGGLVKPGGSLRLSCVASGFTFSNYWMNWVRQAPGKGLEWVCEIRLYSNNYATHYAESVKGRFTCSRDDSKSTLYLQMNNLKTEDTGVYYCTRYYGNYGGYFDVWGQGTLVTVSSGKPGSGKPGSGKPGSGKPGSEIVLTQSPATLSVSPGERVTLTCRASQSVGNDVAWYQQKPGQAPRLLINYASHRYTGVPDRFTGSGYGTEFTLTISSVQSEDFAVYYCQQDFSSPRTFGGGTKVEIK

SEQ ID NO: 15620 - protein, 122 aa, Artificial Sequence
  Description of Artificial Sequence: Synthetic polypeptide
  VH of XENP019622
EVQLVESGGGLVKPGGSLRLSCVASGFTFSNYWMNWVRQAPGKGLEWVCEIRLYSNNYATHYAESVKGRFTCSRDDSKSTLYLQMNNLKTEDTGVYYCTRYYGNYGGYFDVWGQGTLVTVSS

SEQ ID NO: 15621 - protein, 107 aa, Artificial Sequence; identical to SEQ ID NO: 15540
  Description of Artificial Sequence: Synthetic polypeptide
  VL of XENP019622

SEQ ID NO: 15622 - protein, 5 aa, Artificial Sequence
  Description of Artificial Sequence: Synthetic peptide
  XENP019622 vhCDR1
NYWMN

SEQ ID NO: 15623 - protein, 19 aa, Artificial Sequence
  Description of Artificial Sequence: Synthetic peptide
  XENP019622 vhCDR2
EIRLYSNNYATHYAESVKG

SEQ ID NO: 15624 - protein, 11 aa, Artificial Sequence
  Description of Artificial Sequence: Synthetic peptide
  XENP019622 vhCDR3
YYGNYGGYFDV

SEQ ID NO: 15625 - protein, 11 aa, Artificial Sequence
  Description of Artificial Sequence: Synthetic peptide
  XENP019622 vlCDR1
RASQSVGNDVA

SEQ ID NO: 15626 - protein, 7 aa, Artificial Sequence
  Description of Artificial Sequence: Synthetic peptide
  XENP019622 vlCDR2
YASHRYT

SEQ ID NO: 15627 - protein, 9 aa, Artificial Sequence
  Description of Artificial Sequence: Synthetic peptide
  XENP019622 vlCDR3
QQDFSSPRT

SEQ ID NO: 15628 - protein, 249 aa, Artificial Sequence
  Description of Artificial Sequence: Synthetic polypeptide
  XENP019623 1G6_H1.284_L1.189_scFv(GKPGS)4
EVQLVESGGGLVKPGGSLRLSCVASGFTFSNYWMNWVRQAPGKGLEWVCEIRLYSNNYATHYAESVKGRFTCSRDDSKSTLYLQMNNLKTEDTGVYYCTRYYGNYGGYFDVWGRGTLVTVSSGKPGSGKPGSGKPGSGKPGSEIVLTQSPATLSVSPGERVTLTCRASQSVGNDVAWYQQKPGQAPRLLINYASHRYTGVPDRFTGSGYGTEFTLTISSVQSEDFAVYYCQQDFSSPRTFGGGTKVEIK

SEQ ID NO: 15629 - protein, 122 aa, Artificial Sequence
  Description of Artificial Sequence: Synthetic polypeptide
  VH of XENP019623
EVQLVESGGGLVKPGGSLRLSCVASGFTFSNYWMNWVRQAPGKGLEWVCEIRLYSNNYATHYAESVKGRFTCSRDDSKSTLYLQMNNLKTEDTGVYYCTRYYGNYGGYFDVWGRGTLVTVSS

SEQ ID NO: 15630 - protein, 107 aa, Artificial Sequence; identical to SEQ ID NO: 15540
  Description of Artificial Sequence: Synthetic polypeptide
  VL of XENP019623

SEQ ID NO: 15631 - protein, 5 aa, Artificial Sequence
  Description of Artificial Sequence: Synthetic peptide
  XENP019623 vhCDR1
NYWMN

SEQ ID NO: 15632 - protein, 19 aa, Artificial Sequence
  Description of Artificial Sequence: Synthetic peptide
  XENP019623 vhCDR2
EIRLYSNNYATHYAESVKG

SEQ ID NO: 15633 - protein, 11 aa, Artificial Sequence
  Description of Artificial Sequence: Synthetic peptide
  XENP019623 vhCDR3
YYGNYGGYFDV

SEQ ID NO: 15634 - protein, 11 aa, Artificial Sequence
  Description of Artificial Sequence: Synthetic peptide
  XENP019623 vlCDR1
RASQSVGNDVA

SEQ ID NO: 15635 - protein, 7 aa, Artificial Sequence
  Description of Artificial Sequence: Synthetic peptide
  XENP019623 vlCDR2
YASHRYT

SEQ ID NO: 15636 - protein, 9 aa, Artificial Sequence
  Description of Artificial Sequence: Synthetic peptide
  XENP019623 vlCDR3
QQDFSSPRT

SEQ ID NO: 15637 - protein, 249 aa, Artificial Sequence
  Description of Artificial Sequence: Synthetic polypeptide
  XENP019624 1G6_H1.285_L1.189_scFv(GKPGS)4
EVQLVESGGGLVKPGGSLRLTCVASGFTFSNYWMNWVRQAPGKGLEWVCEIRLYSNNYATHYAESVKGRFTCSRDDSKSMLYLQMNNLKTEDTGVYYCTRYYGNYGGYFDVWGRGTLVTVSSGKPGSGKPGSGKPGSGKPGSEIVLTQSPATLSVSPGERVTLTCRASQSVGNDVAWYQQKPGQAPRLLINYASHRYTGVPDRFTGSGYGTEFTLTISSVQSEDFAVYYCQQDFSSPRTFGGGTKVEIK

SEQ ID NO: 15638 - protein, 122 aa, Artificial Sequence
  Description of Artificial Sequence: Synthetic polypeptide
  VH of XENP019624
EVQLVESGGGLVKPGGSLRLTCVASGFTFSNYWMNWVRQAPGKGLEWVCEIRLYSNNYATHYAESVKGRFTCSRDDSKSMLYLQMNNLKTEDTGVYYCTRYYGNYGGYFDVWGRGTLVTVSS

SEQ ID NO: 15639 - protein, 107 aa, Artificial Sequence; identical to SEQ ID NO: 15540
  Description of Artificial Sequence: Synthetic polypeptide
  VL of XENP019624

SEQ ID NO: 15640 - protein, 5 aa, Artificial Sequence
  Description of Artificial Sequence: Synthetic peptide
  XENP019624 vhCDR1
NYWMN

SEQ ID NO: 15641 - protein, 19 aa, Artificial Sequence
  Description of Artificial Sequence: Synthetic peptide
  XENP019624 vhCDR2
EIRLYSNNYATHYAESVKG

SEQ ID NO: 15642 - protein, 11 aa, Artificial Sequence
  Description of Artificial Sequence: Synthetic peptide
  XENP019624 vhCDR3
YYGNYGGYFDV

SEQ ID NO: 15643 - protein, 11 aa, Artificial Sequence
  Description of Artificial Sequence: Synthetic peptide
  XENP019624 vlCDR1
RASQSVGNDVA

SEQ ID NO: 15644 - protein, 7 aa, Artificial Sequence
  Description of Artificial Sequence: Synthetic peptide
  XENP019624 vlCDR2
YASHRYT

SEQ ID NO: 15645 - protein, 9 aa, Artificial Sequence
  Description of Artificial Sequence: Synthetic peptide
  XENP019624 vlCDR3
QQDFSSPRT

SEQ ID NO: 15646 - protein, 249 aa, Artificial Sequence
  Description of Artificial Sequence: Synthetic polypeptide
  XENP019625 1G6_H1.286_L1.189_scFv(GKPGS)4
EVQLVESGGGLVKPGGSLRLSCVASGFTFSNYWMNWVRQAPGKGLEWVAEIRLYSDNYATHYAESVKGRFTISRDDSKSTLYLQMNNLKTEDTGVYYCTRYYGNYGGYFDVWGQGTLVTVSSGKPGSGKPGSGKPGSGKPGSEIVLTQSPATLSVSPGERVTLTCRASQSVGNDVAWYQQKPGQAPRLLINYASHRYTGVPDRFTGSGYGTEFTLTISSVQSEDFAVYYCQQDFSSPRTFGGGTKVEIK

SEQ ID NO: 15647 - protein, 122 aa, Artificial Sequence
  Description of Artificial Sequence: Synthetic polypeptide
  VH of XENP019625
EVQLVESGGGLVKPGGSLRLSCVASGFTFSNYWMNWVRQAPGKGLEWVAEIRLYSDNYATHYAESVKGRFTISRDDSKSTLYLQMNNLKTEDTGVYYCTRYYGNYGGYFDVWGQGTLVTVSS

SEQ ID NO: 15648 - protein, 107 aa, Artificial Sequence; identical to SEQ ID NO: 15540
  Description of Artificial Sequence: Synthetic polypeptide
  VL of XENP019625

SEQ ID NO: 15649 - protein, 5 aa, Artificial Sequence
  Description of Artificial Sequence: Synthetic peptide
  XENP019625 vhCDR1
NYWMN

SEQ ID NO: 15650 - protein, 19 aa, Artificial Sequence
  Description of Artificial Sequence: Synthetic peptide
  XENP019625 vhCDR2
EIRLYSDNYATHYAESVKG

SEQ ID NO: 15651 - protein, 11 aa, Artificial Sequence
  Description of Artificial Sequence: Synthetic peptide
  XENP019625 vhCDR3
YYGNYGGYFDV

SEQ ID NO: 15652 - protein, 11 aa, Artificial Sequence
  Description of Artificial Sequence: Synthetic peptide
  XENP019625 vlCDR1
RASQSVGNDVA

SEQ ID NO: 15653 - protein, 7 aa, Artificial Sequence
  Description of Artificial Sequence: Synthetic peptide
  XENP019625 vlCDR2
YASHRYT

SEQ ID NO: 15654 - protein, 9 aa, Artificial Sequence
  Description of Artificial Sequence: Synthetic peptide
  XENP019625 vlCDR3
QQDFSSPRT

SEQ ID NO: 15655 - protein, 249 aa, Artificial Sequence
  Description of Artificial Sequence: Synthetic polypeptide
  XENP019626 1G6_H1.278_L1.192_scFv(GKPGS)4
EVQLVESGGGLVKPGGSLRLSCVASGFTFSNYWMNWVRQAPGKGLEWVAEIRLYSNNYATHYAESVKGRFTISRDDSKSTLYLQMNNLKTEDTGVYYCTRYYGNYGGYFDVWGQGTLVTVSSGKPGSGKPGSGKPGSGKPGSEIVLTQSPATLSASPGERVTLTCRASQSVGNDVAWYQQKPGQAPRLLINYASHRYTGVPDRFTGSGYGTEFTLTISSVQSEDFAVYYCQQDFSSPRTFGGGTKVEIK

SEQ ID NO: 15656 - protein, 122 aa, Artificial Sequence; identical to SEQ ID NO: 15521
  Description of Artificial Sequence: Synthetic polypeptide
  VH of XENP019626

SEQ ID NO: 15657 - protein, 107 aa, Artificial Sequence
  Description of Artificial Sequence: Synthetic polypeptide
  VL of XENP019626
EIVLTQSPATLSASPGERVTLTCRASQSVGNDVAWYQQKPGQAPRLLINYASHRYTGVPDRFTGSGYGTEFTLTISSVQSEDFAVYYCQQDFSSPRTFGGGTKVEIK

SEQ ID NO: 15658 - protein, 5 aa, Artificial Sequence
  Description of Artificial Sequence: Synthetic peptide
  XENP019626 vhCDR1
NYWMN

SEQ ID NO: 15659 - protein, 19 aa, Artificial Sequence
  Description of Artificial Sequence: Synthetic peptide
  XENP019626 vhCDR2
EIRLYSNNYATHYAESVKG

SEQ ID NO: 15660 - protein, 11 aa, Artificial Sequence
  Description of Artificial Sequence: Synthetic peptide
  XENP019626 vhCDR3
YYGNYGGYFDV

SEQ ID NO: 15661 - protein, 11 aa, Artificial Sequence
  Description of Artificial Sequence: Synthetic peptide
  XENP019626 vlCDR1
RASQSVGNDVA

SEQ ID NO: 15662 - protein, 7 aa, Artificial Sequence
  Description of Artificial Sequence: Synthetic peptide
  XENP019626 vlCDR2
YASHRYT

SEQ ID NO: 15663 - protein, 9 aa, Artificial Sequence
  Description of Artificial Sequence: Synthetic peptide
  XENP019626 vlCDR3
QQDFSSPRT

SEQ ID NO: 15664 - protein, 249 aa, Artificial Sequence
  Description of Artificial Sequence: Synthetic polypeptide
  XENP019627 1G6_H1.278_L1.193_scFv(GKPGS)4
EVQLVESGGGLVKPGGSLRLSCVASGFTFSNYWMNWVRQAPGKGLEWVAEIRLYSNNYATHYAESVKGRFTISRDDSKSTLYLQMNNLKTEDTGVYYCTRYYGNYGGYFDVWGQGTLVTVSSGKPGSGKPGSGKPGSGKPGSEIVLTQSPATLSVSPGERVTLTCRASQSVGNDVAWYQQKPGQAPRLLINYASHRYTGVPDRFTGSGYGTEFTLTISSVQSEDFGVYYCQQDFSSPRTFGGGTKVEIK

SEQ ID NO: 15665 - protein, 122 aa, Artificial Sequence; identical to SEQ ID NO: 15521
  Description of Artificial Sequence: Synthetic polypeptide
  VH of XENP019627

SEQ ID NO: 15666 - protein, 107 aa, Artificial Sequence
  Description of Artificial Sequence: Synthetic polypeptide
  VL of XENP019627
EIVLTQSPATLSVSPGERVTLTCRASQSVGNDVAWYQQKPGQAPRLLINYASHRYTGVPDRFTGSGYGTEFTLTISSVQSEDFGVYYCQQDFSSPRTFGGGTKVEIK

SEQ ID NO: 15667 - protein, 5 aa, Artificial Sequence
  Description of Artificial Sequence: Synthetic peptide
  XENP019627 vhCDR1
NYWMN

SEQ ID NO: 15668 - protein, 19 aa, Artificial Sequence
  Description of Artificial Sequence: Synthetic peptide
  XENP019627 vhCDR2
EIRLYSNNYATHYAESVKG

SEQ ID NO: 15669 - protein, 11 aa, Artificial Sequence
  Description of Artificial Sequence: Synthetic peptide
  XENP019627 vhCDR3
YYGNYGGYFDV

SEQ ID NO: 15670 - protein, 11 aa, Artificial Sequence
  Description of Artificial Sequence: Synthetic peptide
  XENP019627 vlCDR1
RASQSVGNDVA

SEQ ID NO: 15671 - protein, 7 aa, Artificial Sequence
  Description of Artificial Sequence: Synthetic peptide
  XENP019627 vlCDR2
YASHRYT

SEQ ID NO: 15672 - protein, 9 aa, Artificial Sequence
  Description of Artificial Sequence: Synthetic peptide
  XENP019627 vlCDR3
QQDFSSPRT

SEQ ID NO: 15673 - protein, 249 aa, Artificial Sequence
  Description of Artificial Sequence: Synthetic polypeptide
  XENP019628 1G6_H1.278_L1.194_scFv(GKPGS)4
EVQLVESGGGLVKPGGSLRLSCVASGFTFSNYWMNWVRQAPGKGLEWVAEIRLYSNNYATHYAESVKGRFTISRDDSKSTLYLQMNNLKTEDTGVYYCTRYYGNYGGYFDVWGQGTLVTVSSGKPGSGKPGSGKPGSGKPGSEIVLTQSPATLSASPGERVTLTCRASQSVGNDVAWYQQKPGQAPRLLINYASHRYTGVPDRFTGSGYGTEFTLTISSVQSEDFGVYYCQQDFSSPRTFGGGTKVEIK

SEQ ID NO: 15674 - protein, 122 aa, Artificial Sequence; identical to SEQ ID NO: 15521
  Description of Artificial Sequence: Synthetic polypeptide
  VH of XENP019628

SEQ ID NO: 15675 - protein, 107 aa, Artificial Sequence; identical to SEQ ID NO: 2871
  Description of Artificial Sequence: Synthetic polypeptide
  VL of XENP019628

SEQ ID NO: 15676 - protein, 5 aa, Artificial Sequence
  Description of Artificial Sequence: Synthetic peptide
  XENP019628 vhCDR1
NYWMN

SEQ ID NO: 15677 - protein, 19 aa, Artificial Sequence
  Description of Artificial Sequence: Synthetic peptide
  XENP019628 vhCDR2
EIRLYSNNYATHYAESVKG

SEQ ID NO: 15678 - protein, 11 aa, Artificial Sequence
  Description of Artificial Sequence: Synthetic peptide
  XENP019628 vhCDR3
YYGNYGGYFDV

SEQ ID NO: 15679 - protein, 11 aa, Artificial Sequence
  Description of Artificial Sequence: Synthetic peptide
  XENP019628 vlCDR1
RASQSVGNDVA

SEQ ID NO: 15680 - protein, 7 aa, Artificial Sequence
  Description of Artificial Sequence: Synthetic peptide
  XENP019628 vlCDR2
YASHRYT

SEQ ID NO: 15681 - protein, 9 aa, Artificial Sequence
  Description of Artificial Sequence: Synthetic peptide
  XENP019628 vlCDR3
QQDFSSPRT

SEQ ID NO: 15682 - protein, 249 aa, Artificial Sequence
  Description of Artificial Sequence: Synthetic polypeptide
  XENP019629 1G6_H1.278_L1.195_scFv(GKPGS)4
EVQLVESGGGLVKPGGSLRLSCVASGFTFSNYWMNWVRQAPGKGLEWVAEIRLYSNNYATHYAESVKGRFTISRDDSKSTLYLQMNNLKTEDTGVYYCTRYYGNYGGYFDVWGQGTLVTVSSGKPGSGKPGSGKPGSGKPGSEIVLTQSPATLSVSPGERVTLTCRASQSVGNDVAWYQQKPGQAPRLLCNYASHRYTGVPDRFTCSGYGTEFTLTISSVQSEDFAVYYCQQDFSSPRTFGGGTKVEIK

SEQ ID NO: 15683 - protein, 122 aa, Artificial Sequence; identical to SEQ ID NO: 15521
  Description of Artificial Sequence: Synthetic polypeptide
  VH of XENP019629

SEQ ID NO: 15684 - protein, 107 aa, Artificial Sequence
  Description of Artificial Sequence: Synthetic polypeptide
  VL of XENP019629
EIVLTQSPATLSVSPGERVTLTCRASQSVGNDVAWYQQKPGQAPRLLCNYASHRYTGVPDRFTCSGYGTEFTLTISSVQSEDFAVYYCQQDFSSPRTFGGGTKVEIK

SEQ ID NO: 15685 - protein, 5 aa, Artificial Sequence
  Description of Artificial Sequence: Synthetic peptide
  XENP019629 vhCDR1
NYWMN

SEQ ID NO: 15686 - protein, 19 aa, Artificial Sequence
  Description of Artificial Sequence: Synthetic peptide
  XENP019629 vhCDR2
EIRLYSNNYATHYAESVKG

SEQ ID NO: 15687 - protein, 11 aa, Artificial Sequence
  Description of Artificial Sequence: Synthetic peptide
  XENP019629 vhCDR3
YYGNYGGYFDV

SEQ ID NO: 15688 - protein, 11 aa, Artificial Sequence
  Description of Artificial Sequence: Synthetic peptide
  XENP019629 vlCDR1
RASQSVGNDVA

SEQ ID NO: 15689 - protein, 9 aa, Artificial Sequence
  Description of Artificial Sequence: Synthetic peptide
  XENP019629 vlCDR2
CNYASHRYT

SEQ ID NO: 15690 - protein, 9 aa, Artificial Sequence
  Description of Artificial Sequence: Synthetic peptide
  XENP019629 vlCDR3
QQDFSSPRT

SEQ ID NO: 15691 - protein, 249 aa, Artificial Sequence
  Description of Artificial Sequence: Synthetic polypeptide
  XENP019630 1G6_H1.278_L1.196_scFv(GKPGS)4
EVQLVESGGGLVKPGGSLRLSCVASGFTFSNYWMNWVRQAPGKGLEWVAEIRLYSNNYATHYAESVKGRFTISRDDSKSTLYLQMNNLKTEDTGVYYCTRYYGNYGGYFDVWGQGTLVTVSSGKPGSGKPGSGKPGSGKPGSEIVLTQSPATLSASPGERVTLTCRASQSVGNDVAWYQQKPGQAPRLLCNYASHRYTGVPDRFTCSGYGTEFTLTISSVQSEDFGVYYCQQDFSSPRTFGGGTKVEIK

SEQ ID NO: 15692 - protein, 122 aa, Artificial Sequence; identical to SEQ ID NO: 15521
  Description of Artificial Sequence: Synthetic polypeptide
  VH of XENP019630

SEQ ID NO: 15693 - protein, 107 aa, Artificial Sequence
  Description of Artificial Sequence: Synthetic polypeptide
  VL of XENP019630
EIVLTQSPATLSASPGERVTLTCRASQSVGNDVAWYQQKPGQAPRLLCNYASHRYTGVPDRFTCSGYGTEFTLTISSVQSEDFGVYYCQQDFSSPRTFGGGTKVEIK

SEQ ID NO: 15694 - protein, 5 aa, Artificial Sequence
  Description of Artificial Sequence: Synthetic peptide
  XENP019630 vhCDR1
NYWMN

SEQ ID NO: 15695 - protein, 19 aa, Artificial Sequence
  Description of Artificial Sequence: Synthetic peptide
  XENP019630 vhCDR2
EIRLYSNNYATHYAESVKG

SEQ ID NO: 15696 - protein, 11 aa, Artificial Sequence
  Description of Artificial Sequence: Synthetic peptide
  XENP019630 vhCDR3
YYGNYGGYFDV

SEQ ID NO: 15697 - protein, 11 aa, Artificial Sequence
  Description of Artificial Sequence: Synthetic peptide
  XENP019630 vlCDR1
RASQSVGNDVA

SEQ ID NO: 15698 - protein, 9 aa, Artificial Sequence
  Description of Artificial Sequence: Synthetic peptide
  XENP019630 vlCDR2
CNYASHRYT

SEQ ID NO: 15699 - protein, 9 aa, Artificial Sequence
  Description of Artificial Sequence: Synthetic peptide
  XENP019630 vlCDR3
QQDFSSPRT

SEQ ID NO: 15700 - protein, 249 aa, Artificial Sequence
  Description of Artificial Sequence: Synthetic polypeptide
  XENP019631 1G6_H1.278_L1.197_scFv(GKPGS)4
EVQLVESGGGLVKPGGSLRLSCVASGFTFSNYWMNWVRQAPGKGLEWVAEIRLYSNNYATHYAESVKGRFTISRDDSKSTLYLQMNNLKTEDTGVYYCTRYYGNYGGYFDVWGQGTLVTVSSGKPGSGKPGSGKPGSGKPGSEIVLTQSPATLSASPGERVTLTCRASQSVGNDVAWYQQKPGQAPRLLCNYASHRYTSVPDRFTCSGYGTEFTLTISSVQSEDFGVYYCQQDFSSPRTFGGGTKVEIK

SEQ ID NO: 15701 - protein, 122 aa, Artificial Sequence; identical to SEQ ID NO: 15521
  Description of Artificial Sequence: Synthetic polypeptide
  VH of XENP019631

SEQ ID NO: 15702 - protein, 107 aa, Artificial Sequence
  Description of Artificial Sequence: Synthetic polypeptide
  VL of XENP019631
EIVLTQSPATLSASPGERVTLTCRASQSVGNDVAWYQQKPGQAPRLLCNYASHRYTSVPDRFTCSGYGTEFTLTISSVQSEDFGVYYCQQDFSSPRTFGGGTKVEIK

SEQ ID NO: 15703 - protein, 5 aa, Artificial Sequence
  Description of Artificial Sequence: Synthetic peptide
  XENP019631 vhCDR1
NYWMN

SEQ ID NO: 15704 - protein, 19 aa, Artificial Sequence
  Description of Artificial Sequence: Synthetic peptide
  XENP019631 vhCDR2
EIRLYSNNYATHYAESVKG

SEQ ID NO: 15705 - protein, 11 aa, Artificial Sequence
  Description of Artificial Sequence: Synthetic peptide
  XENP019631 vhCDR3
YYGNYGGYFDV

SEQ ID NO: 15706 - protein, 11 aa, Artificial Sequence
  Description of Artificial Sequence: Synthetic peptide
  XENP019631 vlCDR1
RASQSVGNDVA

SEQ ID NO: 15707 - protein, 9 aa, Artificial Sequence
  Description of Artificial Sequence: Synthetic peptide
  XENP019631 vlCDR2
CNYASHRYT

SEQ ID NO: 15708 - protein, 9 aa, Artificial Sequence
  Description of Artificial Sequence: Synthetic peptide
  XENP019631 vlCDR3
QQDFSSPRT

SEQ ID NO: 15709 - protein, 249 aa, Artificial Sequence
  Description of Artificial Sequence: Synthetic polypeptide
  XENP019632 1G6_H1.278_L1.198_scFv(GKPGS)4
EVQLVESGGGLVKPGGSLRLSCVASGFTFSNYWMNWVRQAPGKGLEWVAEIRLYSNNYATHYAESVKGRFTISRDDSKSTLYLQMNNLKTEDTGVYYCTRYYGNYGGYFDVWGQGTLVTVSSGKPGSGKPGSGKPGSGKPGSEIVLTQSPSTLSVSPGERVTLTCRASQSVGNDVAWYQQKPGQAPRLLINYASHRYTGVPDRFTGSGYGTEFTLTISSVQSEDFAVYYCQQDFSSPRTFGGGTKVEIK

SEQ ID NO: 15710 - protein, 122 aa, Artificial Sequence; identical to SEQ ID NO: 15521
  Description of Artificial Sequence: Synthetic polypeptide
  VH of XENP019632

SEQ ID NO: 15711 - protein, 107 aa, Artificial Sequence
  Description of Artificial Sequence: Synthetic polypeptide
  VL of XENP019632
EIVLTQSPSTLSVSPGERVTLTCRASQSVGNDVAWYQQKPGQAPRLLINYASHRYTGVPDRFTGSGYGTEFTLTISSVQSEDFAVYYCQQDFSSPRTFGGGTKVEIK

SEQ ID NO: 15712 - protein, 5 aa, Artificial Sequence
  Description of Artificial Sequence: Synthetic peptide
  XENP019632 vhCDR1
NYWMN

SEQ ID NO: 15713 - protein, 19 aa, Artificial Sequence
  Description of Artificial Sequence: Synthetic peptide
  XENP019632 vhCDR2
EIRLYSNNYATHYAESVKG

SEQ ID NO: 15714 - protein, 11 aa, Artificial Sequence
  Description of Artificial Sequence: Synthetic peptide
  XENP019632 vhCDR3
YYGNYGGYFDV

SEQ ID NO: 15715 - protein, 11 aa, Artificial Sequence
  Description of Artificial Sequence: Synthetic peptide
  XENP019632 vlCDR1
RASQSVGNDVA

SEQ ID NO: 15716 - protein, 7 aa, Artificial Sequence
  Description of Artificial Sequence: Synthetic peptide
  XENP019632 vlCDR2
YASHRYT

SEQ ID NO: 15717 - protein, 9 aa, Artificial Sequence
  Description of Artificial Sequence: Synthetic peptide
  XENP019632 vlCDR3
QQDFSSPRT

SEQ ID NO: 15718 - protein, 249 aa, Artificial Sequence
  Description of Artificial Sequence: Synthetic polypeptide
  XENP019633 1G6_H1.278_L1.199_scFv(GKPGS)4
EVQLVESGGGLVKPGGSLRLSCVASGFTFSNYWMNWVRQAPGKGLEWVAEIRLYSNNYATHYAESVKGRFTISRDDSKSTLYLQMNNLKTEDTGVYYCTRYYGNYGGYFDVWGQGTLVTVSSGKPGSGKPGSGKPGSGKPGSEIVLTQSPDTLSVSPGERVTLTCRASQSVGNDVAWYQQKPGQAPRLLINYASHRYTGVPDRFTGSGYGTEFTLTISSVQSEDFAVYYCQQDFSSPRTFGGGTKVEIK

SEQ ID NO: 15719 - protein, 122 aa, Artificial Sequence; identical to SEQ ID NO: 15521
  Description of Artificial Sequence: Synthetic polypeptide
  VH of XENP019633

SEQ ID NO: 15720 - protein, 107 aa, Artificial Sequence
  Description of Artificial Sequence: Synthetic polypeptide
  VL of XENP019633
EIVLTQSPDTLSVSPGERVTLTCRASQSVGNDVAWYQQKPGQAPRLLINYASHRYTGVPDRFTGSGYGTEFTLTISSVQSEDFAVYYCQQDFSSPRTFGGGTKVEIK

SEQ ID NO: 15721 - protein, 5 aa, Artificial Sequence
  Description of Artificial Sequence: Synthetic peptide
  XENP019633 vhCDR1
NYWMN

SEQ ID NO: 15722 - protein, 19 aa, Artificial Sequence
  Description of Artificial Sequence: Synthetic peptide
  XENP019633 vhCDR2
EIRLYSNNYATHYAESVKG

SEQ ID NO: 15723 - protein, 11 aa, Artificial Sequence
  Description of Artificial Sequence: Synthetic peptide
  XENP019633 vhCDR3
YYGNYGGYFDV

SEQ ID NO: 15724 - protein, 11 aa, Artificial Sequence
  Description of Artificial Sequence: Synthetic peptide
  XENP019633 vlCDR1
RASQSVGNDVA

SEQ ID NO: 15725 - protein, 7 aa, Artificial Sequence
  Description of Artificial Sequence: Synthetic peptide
  XENP019633 vlCDR2
YASHRYT

SEQ ID NO: 15726 - protein, 9 aa, Artificial Sequence
  Description of Artificial Sequence: Synthetic peptide
  XENP019633 vlCDR3
QQDFSSPRT

SEQ ID NO: 15727 - protein, 249 aa, Artificial Sequence
  Description of Artificial Sequence: Synthetic polypeptide
  XENP019634 1G6_H1.278_L1.200_scFv(GKPGS)4
EVQLVESGGGLVKPGGSLRLSCVASGFTFSNYWMNWVRQAPGKGLEWVAEIRLYSNNYATHYAESVKGRFTISRDDSKSTLYLQMNNLKTEDTGVYYCTRYYGNYGGYFDVWGQGTLVTVSSGKPGSGKPGSGKPGSGKPGSEIVLTQSPATLAVSPGERVTLTCRASQSVGNDVAWYQQKPGQAPRLLINYASHRYTGVPDRFTGSGYGTEFTLTISSVQSEDFAVYYCQQDFSSPRTFGGGTKVEIK

SEQ ID NO: 15728 - protein, 122 aa, Artificial Sequence; identical to SEQ ID NO: 15521
  Description of Artificial Sequence: Synthetic polypeptide
  VH of XENP019634

SEQ ID NO: 15729 - protein, 107 aa, Artificial Sequence
  Description of Artificial Sequence: Synthetic polypeptide
  VL of XENP019634
EIVLTQSPATLAVSPGERVTLTCRASQSVGNDVAWYQQKPGQAPRLLINYASHRYTGVPDRFTGSGYGTEFTLTISSVQSEDFAVYYCQQDFSSPRTFGGGTKVEIK

SEQ ID NO: 15730 - protein, 5 aa, Artificial Sequence
  Description of Artificial Sequence: Synthetic peptide
  XENP019634 vhCDR1
NYWMN

SEQ ID NO: 15731 - protein, 19 aa, Artificial Sequence
  Description of Artificial Sequence: Synthetic peptide
  XENP019634 vhCDR2
EIRLYSNNYATHYAESVKG

SEQ ID NO: 15732 - protein, 11 aa, Artificial Sequence
  Description of Artificial Sequence: Synthetic peptide
  XENP019634 vhCDR3
YYGNYGGYFDV

SEQ ID NO: 15733 - protein, 11 aa, Artificial Sequence
  Description of Artificial Sequence: Synthetic peptide
  XENP019634 vlCDR1
RASQSVGNDVA

SEQ ID NO: 15734 - protein, 7 aa, Artificial Sequence
  Description of Artificial Sequence: Synthetic peptide
  XENP019634 vlCDR2
YASHRYT

SEQ ID NO: 15735 - protein, 9 aa, Artificial Sequence
  Description of Artificial Sequence: Synthetic peptide
  XENP019634 vlCDR3
QQDFSSPRT

SEQ ID NO: 15736 - protein, 249 aa, Artificial Sequence; identical to SEQ ID NO: 15655
  Description of Artificial Sequence: Synthetic polypeptide
  XENP019635 1G6_H1.278_L1.201_scFv(GKPGS)4

SEQ ID NO: 15737 - protein, 122 aa, Artificial Sequence; identical to SEQ ID NO: 15521
  Description of Artificial Sequence: Synthetic polypeptide
  VH of XENP019635

SEQ ID NO: 15738 - protein, 107 aa, Artificial Sequence; identical to SEQ ID NO: 15657
  Description of Artificial Sequence: Synthetic polypeptide
  VL of XENP019635

SEQ ID NO: 15739 - protein, 5 aa, Artificial Sequence
  Description of Artificial Sequence: Synthetic peptide
  XENP019635 vhCDR1
NYWMN

SEQ ID NO: 15740 - protein, 19 aa, Artificial Sequence
  Description of Artificial Sequence: Synthetic peptide
  XENP019635 vhCDR2
EIRLYSNNYATHYAESVKG

SEQ ID NO: 15741 - protein, 11 aa, Artificial Sequence
  Description of Artificial Sequence: Synthetic peptide
  XENP019635 vhCDR3
YYGNYGGYFDV

SEQ ID NO: 15742 - protein, 11 aa, Artificial Sequence
  Description of Artificial Sequence: Synthetic peptide
  XENP019635 vlCDR1
RASQSVGNDVA

SEQ ID NO: 15743 - protein, 7 aa, Artificial Sequence
  Description of Artificial Sequence: Synthetic peptide
  XENP019635 vlCDR2
YASHRYT

SEQ ID NO: 15744 - protein, 9 aa, Artificial Sequence
  Description of Artificial Sequence: Synthetic peptide
  XENP019635 vlCDR3
QQDFSSPRT

SEQ ID NO: 15745 - protein, 249 aa, Artificial Sequence
  Description of Artificial Sequence: Synthetic polypeptide
  XENP019636 1G6_H1.278_L1.202_scFv(GKPGS)4
EVQLVESGGGLVKPGGSLRLSCVASGFTFSNYWMNWVRQAPGKGLEWVAEIRLYSNNYATHYAESVKGRFTISRDDSKSTLYLQMNNLKTEDTGVYYCTRYYGNYGGYFDVWGQGTLVTVSSGKPGSGKPGSGKPGSGKPGSEIVLTQSPATLSVSVGERVTLTCRASQSVGNDVAWYQQKPGQAPRLLINYASHRYTGVPDRFTGSGYGTEFTLTISSVQSEDFAVYYCQQDFSSPRTFGGGTKVEIK

SEQ ID NO: 15746 - protein, 122 aa, Artificial Sequence; identical to SEQ ID NO: 15521
  Description of Artificial Sequence: Synthetic polypeptide
  VH of XENP019636

SEQ ID NO: 15747 - protein, 107 aa, Artificial Sequence
  Description of Artificial Sequence: Synthetic polypeptide
  VL of XENP019636
EIVLTQSPATLSVSVGERVTLTCRASQSVGNDVAWYQQKPGQAPRLLINYASHRYTGVPDRFTGSGYGTEFTLTISSVQSEDFAVYYCQQDFSSPRTFGGGTKVEIK

SEQ ID NO: 15748 - protein, 5 aa, Artificial Sequence
  Description of Artificial Sequence: Synthetic peptide
  XENP019636 vhCDR1
NYWMN

SEQ ID NO: 15749 - protein, 19 aa, Artificial Sequence
  Description of Artificial Sequence: Synthetic peptide
  XENP019636 vhCDR2
EIRLYSNNYATHYAESVKG

SEQ ID NO: 15750 - protein, 11 aa, Artificial Sequence
  Description of Artificial Sequence: Synthetic peptide
  XENP019636 vhCDR3
YYGNYGGYFDV

SEQ ID NO: 15751 - protein, 11 aa, Artificial Sequence
  Description of Artificial Sequence: Synthetic peptide
  XENP019636 vlCDR1
RASQSVGNDVA

SEQ ID NO: 15752 - protein, 7 aa, Artificial Sequence
  Description of Artificial Sequence: Synthetic peptide
  XENP019636 vlCDR2
YASHRYT

SEQ ID NO: 15753 - protein, 9 aa, Artificial Sequence
  Description of Artificial Sequence: Synthetic peptide
  XENP019636 vlCDR3
QQDFSSPRT

SEQ ID NO: 15754 - protein, 249 aa, Artificial Sequence
  Description of Artificial Sequence: Synthetic polypeptide
  XENP019637 1G6_H1.278_L1.203_scFv(GKPGS)4
EVQLVESGGGLVKPGGSLRLSCVASGFTFSNYWMNWVRQAPGKGLEWVAEIRLYSNNYATHYAESVKGRFTISRDDSKSTLYLQMNNLKTEDTGVYYCTRYYGNYGGYFDVWGQGTLVTVSSGKPGSGKPGSGKPGSGKPGSEIVLTQSPATLSVSLGERVTLTCRASQSVGNDVAWYQQKPGQAPRLLINYASHRYTGVPDRFTGSGYGTEFTLTISSVQSEDFAVYYCQQDFSSPRTFGGGTKVEIK

SEQ ID NO: 15755 - protein, 122 aa, Artificial Sequence; identical to SEQ ID NO: 15521
  Description of Artificial Sequence: Synthetic polypeptide
  VH of XENP019637

SEQ ID NO: 15756 - protein, 107 aa, Artificial Sequence
  Description of Artificial Sequence: Synthetic polypeptide
  VL of XENP019637
EIVLTQSPATLSVSLGERVTLTCRASQSVGNDVAWYQQKPGQAPRLLINYASHRYTGVPDRFTGSGYGTEFTLTISSVQSEDFAVYYCQQDFSSPRTFGGGTKVEIK

SEQ ID NO: 15757 - protein, 5 aa, Artificial Sequence
  Description of Artificial Sequence: Synthetic peptide
  XENP019637 vhCDR1
NYWMN

SEQ ID NO: 15758 - protein, 19 aa, Artificial Sequence
  Description of Artificial Sequence: Synthetic peptide
  XENP019637 vhCDR2
EIRLYSNNYATHYAESVKG

SEQ ID NO: 15759 - protein, 11 aa, Artificial Sequence
  Description of Artificial Sequence: Synthetic peptide
  XENP019637 vhCDR3
YYGNYGGYFDV

SEQ ID NO: 15760 - protein, 11 aa, Artificial Sequence
  Description of Artificial Sequence: Synthetic peptide
  XENP019637 vlCDR1
RASQSVGNDVA

SEQ ID NO: 15761 - protein, 7 aa, Artificial Sequence
  Description of Artificial Sequence: Synthetic peptide
  XENP019637 vlCDR2
YASHRYT

SEQ ID NO: 15762 - protein, 9 aa, Artificial Sequence
  Description of Artificial Sequence: Synthetic peptide
  XENP019637 vlCDR3
QQDFSSPRT

SEQ ID NO: 15763 - protein, 249 aa, Artificial Sequence
  Description of Artificial Sequence: Synthetic polypeptide
  XENP019638 1G6_H1.278_L1.204_scFv(GKPGS)4
EVQLVESGGGLVKPGGSLRLSCVASGFTFSNYWMNWVRQAPGKGLEWVAEIRLYSNNYATHYAESVKGRFTISRDDSKSTLYLQMNNLKTEDTGVYYCTRYYGNYGGYFDVWGQGTLVTVSSGKPGSGKPGSGKPGSGKPGSEIVLTQSPATLSVSPGERVTLNCRASQSVGNDVAWYQQKPGQAPRLLINYASHRYTGVPDRFTGSGYGTEFTLTISSVQSEDFAVYYCQQDFSSPRTFGGGTKVEIK

SEQ ID NO: 15764 - protein, 122 aa, Artificial Sequence; identical to SEQ ID NO: 15521
  Description of Artificial Sequence: Synthetic polypeptide
  VH of XENP019638

SEQ ID NO: 15765 - protein, 107 aa, Artificial Sequence
  Description of Artificial Sequence: Synthetic polypeptide
  VL of XENP019638
EIVLTQSPATLSVSPGERVTLNCRASQSVGNDVAWYQQKPGQAPRLLINYASHRYTGVPDRFTGSGYGTEFTLTISSVQSEDFAVYYCQQDFSSPRTFGGGTKVEIK

SEQ ID NO: 15766 - protein, 5 aa, Artificial Sequence
  Description of Artificial Sequence: Synthetic peptide
  XENP019638 vhCDR1
NYWMN

SEQ ID NO: 15767 - protein, 19 aa, Artificial Sequence
  Description of Artificial Sequence: Synthetic peptide
  XENP019638 vhCDR2
EIRLYSNNYATHYAESVKG

SEQ ID NO: 15768 - protein, 11 aa, Artificial Sequence
  Description of Artificial Sequence: Synthetic peptide
  XENP019638 vhCDR3
YYGNYGGYFDV

SEQ ID NO: 15769 - protein, 11 aa, Artificial Sequence
  Description of Artificial Sequence: Synthetic peptide
  XENP019638 vlCDR1
RASQSVGNDVA

SEQ ID NO: 15770 - protein, 7 aa, Artificial Sequence
  Description of Artificial Sequence: Synthetic peptide
  XENP019638 vlCDR2
YASHRYT

SEQ ID NO: 15771 - protein, 9 aa, Artificial Sequence
  Description of Artificial Sequence: Synthetic peptide
  XENP019638 vlCDR3
QQDFSSPRT

SEQ ID NO: 15772 - protein, 249 aa, Artificial Sequence
  Description of Artificial Sequence: Synthetic polypeptide
  XENP019639 1G6_H1.278_L1.205_scFv(GKPGS)4
EVQLVESGGGLVKPGGSLRLSCVASGFTFSNYWMNWVRQAPGKGLEWVAEIRLYSNNYATHYAESVKGRFTISRDDSKSTLYLQMNNLKTEDTGVYYCTRYYGNYGGYFDVWGQGTLVTVSSGKPGSGKPGSGKPGSGKPGSEIVLTQSPATLSVSPGERVTLTCRASQSVGNDVAWYQQKPGKAPRLLINYASHRYTGVPDRFTGSGYGTEFTLTISSVQSEDFAVYYCQQDFSSPRTFGGGTKVEIK

SEQ ID NO: 15773 - protein, 122 aa, Artificial Sequence; identical to SEQ ID NO: 15521
  Description of Artificial Sequence: Synthetic polypeptide
  VH of XENP019639

SEQ ID NO: 15774 - protein, 107 aa, Artificial Sequence
  Description of Artificial Sequence: Synthetic polypeptide
  VL of XENP019639
EIVLTQSPATLSVSPGERVTLTCRASQSVGNDVAWYQQKPGKAPRLLINYASHRYTGVPDRFTGSGYGTEFTLTISSVQSEDFAVYYCQQDFSSPRTFGGGTKVEIK

SEQ ID NO: 15775 - protein, 5 aa, Artificial Sequence
  Description of Artificial Sequence: Synthetic peptide
  XENP019639 vhCDR1
NYWMN

SEQ ID NO: 15776 - protein, 19 aa, Artificial Sequence
  Description of Artificial Sequence: Synthetic peptide
  XENP019639 vhCDR2
EIRLYSNNYATHYAESVKG

SEQ ID NO: 15777 - protein, 11 aa, Artificial Sequence
  Description of Artificial Sequence: Synthetic peptide
  XENP019639 vhCDR3
YYGNYGGYFDV

SEQ ID NO: 15778 - protein, 11 aa, Artificial Sequence
  Description of Artificial Sequence: Synthetic peptide
  XENP019639 vlCDR1
RASQSVGNDVA

SEQ ID NO: 15779 - protein, 7 aa, Artificial Sequence
  Description of Artificial Sequence: Synthetic peptide
  XENP019639 vlCDR2
YASHRYT

SEQ ID NO: 15780 - protein, 9 aa, Artificial Sequence
  Description of Artificial Sequence: Synthetic peptide
  XENP019639 vlCDR3
QQDFSSPRT

SEQ ID NO: 15781 - protein, 249 aa, Artificial Sequence
  Description of Artificial Sequence: Synthetic polypeptide
  XENP019640 1G6_H1.278_L1.206_scFv(GKPGS)4
EVQLVESGGGLVKPGGSLRLSCVASGFTFSNYWMNWVRQAPGKGLEWVAEIRLYSNNYATHYAESVKGRFTISRDDSKSTLYLQMNNLKTEDTGVYYCTRYYGNYGGYFDVWGQGTLVTVSSGKPGSGKPGSGKPGSGKPGSEIVLTQSPATLSVSPGERVTLTCRASQSVGNDVAWYQQKPGQAPRLLINYASHRYTGVPDRFTGSGYGTEFTLTISSVQPEDFAVYYCQQDFSSPRTFGGGTKVEIK

SEQ ID NO: 15782 - protein, 122 aa, Artificial Sequence; identical to SEQ ID NO: 15521
  Description of Artificial Sequence: Synthetic polypeptide
  VH of XENP019640

(The sequence listing continues in the following parts.)

1. A bispecific antibody that monovalently binds a human costimulatory receptor and monovalently binds a human checkpoint receptor for use in activating T cells for the treatment of cancer.

2. A bispecific antibody according to claim 1 wherein said costimulatory receptor is selected from the group consisting of ICOS, GITR, OX40 and 4-1BB.

3. A bispecific antibody according to claim 1 wherein said checkpoint receptor is selected from the group consisting of PD-1, PD-L1, CTLA-4, LAG-3 and TIM-3.

4. A bispecific antibody according to claim 1, wherein said costimulatory receptor is human ICOS.

5. A bispecific antibody according to claim 4 wherein said antibody binds ICOS and PD-1.

6. A bispecific antibody according to claim 4 wherein said antibody binds ICOS and PD-L1.

7. A bispecific antibody according to claim 4 wherein said antibody binds ICOS and CTLA-4.

8. A bispecific antibody according to claim 4 wherein said antibody binds ICOS and LAG-3.

9. A bispecific antibody according to claim 4 wherein said antibody binds ICOS and TIM-3.

10. A bispecific antibody according to claim 4 wherein said antibody has the format of FIG. 2A.

11. A bispecific antibody according to claim 4 wherein said antibody has the format of FIG. 2E.

12. A bispecific antibody according to claim 4 wherein said antibody has the format of FIG. 2F.

13. A bispecific antibody according to claim 4 wherein said antibody has the format of FIG. 2G.

14. A bispecific antibody according to claim 5 wherein said antibody comprises:
a) a first sequence having SEQ ID NO:26642;
b) a second sequence having SEQ ID NO:26657; and
c) a third sequence having SEQ ID NO:26647.

15. A heterodimeric antibody comprising:
a) a first heavy chain comprising a first Fc domain, an optional domain linker and a first antigen binding domain comprising an scFv that binds a first antigen;
b) a second heavy chain comprising a heavy chain comprising a heavy chain constant domain comprising a second Fc domain, a hinge domain, a CH1 domain and a variable heavy domain; and
c) a light chain comprising a variable light domain and a light chain constant domain;
wherein said variable heavy domain and said variable light domain form a second antigen binding domain that binds a second antigen, wherein one of said first and second antigen binding domains binds human ICOS and the other binds human PD-1.

16. A heterodimeric antibody comprising:
a) a first heavy chain comprising:
i) a first variant Fc domain; and
ii) a single chain Fv region (scFv) that binds a first antigen, wherein said scFv region comprises a first variable heavy chain, a variable light chain and a charged scFv linker, wherein said charged scFv linker covalently attaches said first variable heavy chain and said variable light chain; and
b) a second heavy chain comprising a VH-CH1-hinge-CH2-CH3 monomer, wherein VH is a second variable heavy chain and CH2-CH3 is a second variant Fc domain; and
c) a light chain;
wherein said second variant Fe domain comprises amino acid substitutions N208D/Q295E/N384D/Q418E/N241D,
wherein said first and second variant Fc domains each comprise amino acid substitutions E233P/L234V/L235A/G236del/S267K; and
wherein said first variant Fc domain comprises amino acid substitutions S364K/E357Q and second variant Fc domain comprises amino acid substitutions L368D/K370S, wherein one of said first and second antigen binding domains binds human ICOS and the other binds human PD-1, and wherein numbering is according to the EU index as in Kabat.

17. A heterodimeric antibody according to any previous claim wherein said first and second variant Fc domains each comprise M428L/N434S.

18. A heterodimeric antibody comprising:
a) a first heavy chain comprising:
i) a first variant Fc domain; and
ii) a single chain Fv region (scFv) that binds a first antigen, wherein said scFv region comprises a first variable heavy chain, a variable light chain and a charged scFv linker, wherein said charged scFv linker covalently attaches said first variable heavy chain and said variable light chain; and
b) a second heavy chain comprising a VH-CH1-hinge-CH2-CH3 monomer, wherein VH is a second variable heavy chain and CH2-CH3 is a second variant Fc domain; and
c) a light chain;
wherein said first and second variant Fc domains comprises a set of heterodimerization variants selected from the group consisting of L368D/K370S S364K/E357Q; L368D/K370S:S364K; L368E/K370S:S364K; T411E/K360E/Q362E:D401K; and T366S/L368A/Y407V:T366W, and wherein one of said first and second antigen binding domains binds human ICOS and the other binds human PD-1, and wherein numbering is according to the EU index as in Kabat.

19. A nucleic acid composition comprising:
a) a first nucleic acid encoding a first heavy chain according to claim 15;
b) a second nucleic acid encoding a second heavy chain according to claim 15, respectively; and
c) a third nucleic acid encoding a light chain according to claim 15, respectively.

20. An expression vector composition comprising:
a) a first expression vector comprising said first nucleic acid of claim 19;
b) a second expression vector comprising said second nucleic acid of claim 19; and
c) a third expression vector comprising said third nucleic acid of claim 19.

21. A host cell comprising the expression vector composition of claim 20.

22. A method of making a heterodimeric antibody comprising culturing a host cell of claim 21 under conditions wherein said heterodimeric antibody is expressed, and recovering said antibody.

23. A method of activating cytotoxic T cells (CTLs) in a patient comprising administering a heterodimeric antibody according to claim 15 to said patient.

24. A method of increasing IFNγ levels in a patient comprising administering a heterodimeric antibody according to claim 15 to said patient.

25. A method of increasing IL-2 levels in a patient comprising administering a heterodimeric antibody according to claim 15 to said patient.
